United States Patent Application Publication US 2007/0042381 A1 - sequence listing, part 64

SEQ ID NO: 2911791 - RNA, 22 nt, Human
guccuggccagauggcccggau

SEQ ID NO: 2911792 - RNA, 16 nt, Human
guccugggagugagcu

SEQ ID NO: 2911793 - RNA, 15 nt, Human
guccugggagugagc

SEQ ID NO: 2911794 - RNA, 11 nt, Human
guccuggcucc

SEQ ID NO: 2911795 - RNA, 17 nt, Human
guccuggcuccugaggg

SEQ ID NO: 2911796 - RNA, 14 nt, Human
guccuggcuccuga

SEQ ID NO: 2911797 - RNA, 21 nt, Human
guccugggagaaccucaggcu

SEQ ID NO: 2911798 - RNA, 17 nt, Human
guccugggagacccaug

SEQ ID NO: 2911799 - RNA, 20 nt, Human
guccugggagaaccucaggc

SEQ ID NO: 2911800 - RNA, 19 nt, Human
guccugggagaaccucagg

SEQ ID NO: 2911801 - RNA, 19 nt, Human
guccuggcuccugaggggc

SEQ ID NO: 2911802 - RNA, 15 nt, Human
guccuggcuucaggc

SEQ ID NO: 2911803 - RNA, 23 nt, Human
guccuacucugugucaggugggg

SEQ ID NO: 2911804 - RNA, 15 nt, Human
guccuacucuguguc

SEQ ID NO: 2911805 - RNA, 13 nt, Human
guccuacucugug

SEQ ID NO: 2911806 - RNA, 21 nt, Human
gucccaggcugagccucaguc

SEQ ID NO: 2911807 - RNA, 17 nt, Human
gucccagguuaucuggg

SEQ ID NO: 2911808 - RNA, 17 nt, Human
gucccagucucuggcag

SEQ ID NO: 2911809 - RNA, 14 nt, Human
gucccugggccagg

SEQ ID NO: 2911810 - RNA, 17 nt, Human
gucccugggccaggguc

SEQ ID NO: 2911811 - RNA, 18 nt, Human
gucccugggccagggucu

SEQ ID NO: 2911812 - RNA, 19 nt, Human
gucccugggccagggucug

SEQ ID NO: 2911813 - RNA, 16 nt, Human
gucccauaggcccagu

SEQ ID NO: 2911814 - RNA, 18 nt, Human
gucccauaggcccaguga

SEQ ID NO: 2911815 - RNA, 13 nt, Human
guccuauguguga

SEQ ID NO: 2911816 - RNA, 17 nt, Human
guccucacucccagucc

SEQ ID NO: 2911817 - RNA, 16 nt, Human
guccucacucccaguc

SEQ ID NO: 2911818 - RNA, 14 nt, Human
guccucacucccag

SEQ ID NO: 2911819 - RNA, 23 nt, Human
guccucaccccuguccucacugc

SEQ ID NO: 2911820 - RNA, 13 nt, Human
guccucaccacau

SEQ ID NO: 2911821 - RNA, 14 nt, Human
guccucaccccugu

SEQ ID NO: 2911822 - RNA, 15 nt, Human
guccucaccccuguc

SEQ ID NO: 2911823 - RNA, 17 nt, Human
guccucaccccuguccu

SEQ ID NO: 2911824 - RNA, 20 nt, Human
guccucaccccuguccucac

SEQ ID NO: 2911825 - RNA, 21 nt, Human
guccucaccccuguccucacu

SEQ ID NO: 2911826 - RNA, 22 nt, Human
guccucaccccuguccucacug

SEQ ID NO: 2911827 - RNA, 18 nt, Human
guccuaucuaucuuccaa

SEQ ID NO: 2911828 - RNA, 16 nt, Human
guccuaugaaugcuuu

SEQ ID NO: 2911829 - RNA, 19 nt, Human
guccuaugaaugcuuugca

SEQ ID NO: 2911830 - RNA, 20 nt, Human
guccuaugaaugcuuugcau

SEQ ID NO: 2911831 - RNA, 13 nt, Human
guccuaugcaaua

SEQ ID NO: 2911832 - RNA, 14 nt, Human
guccuaugcaauaa

SEQ ID NO: 2911833 - RNA, 15 nt, Human
guccuaugcaauaaa

SEQ ID NO: 2911834 - RNA, 16 nt, Human
guccuaugcaauaaaa

SEQ ID NO: 2911835 - RNA, 20 nt, Human
guccuaugcaauaaaauuau

SEQ ID NO: 2911836 - RNA, 21 nt, Human
guccuaugcaauaaaauuauu

SEQ ID NO: 2911837 - RNA, 13 nt, Human
guccuauggaaac

SEQ ID NO: 2911838 - RNA, 23 nt, Human
guccuagcuugggaggcuucccc

SEQ ID NO: 2911839 - RNA, 22 nt, Human
guccuaggccacaccaucuccu

SEQ ID NO: 2911840 - RNA, 18 nt, Human
guccuagccacucaggag

SEQ ID NO: 2911841 - RNA, 19 nt, Human
guccuagccacucaggagg

SEQ ID NO: 2911842 - RNA, 15 nt, Human
guccucaguccauuu

SEQ ID NO: 2911843 - RNA, 16 nt, Human
guccucaguccauuua

SEQ ID NO: 2911844 - RNA, 18 nt, Human
guccucaguccauuuaua

SEQ ID NO: 2911845 - RNA, 17 nt, Human
guccucauucaaaggga

SEQ ID NO: 2911846 - RNA, 15 nt, Human
guccucauuucucca

SEQ ID NO: 2911847 - RNA, 17 nt, Human
guccucauuucuccaga

SEQ ID NO: 2911848 - RNA, 14 nt, Human
guccuccaagccag

SEQ ID NO: 2911849 - RNA, 18 nt, Human
guccuccacacaagggaa

SEQ ID NO: 2911850 - RNA, 22 nt, Human
guccucagggagcagggaaggc

SEQ ID NO: 2911851 - RNA, 22 nt, Human
guccuccagaagccucuggcua

SEQ ID NO: 2911852 - RNA, 21 nt, Human
guccuccagaagccucuggcu

SEQ ID NO: 2911853 - RNA, 20 nt, Human
guccuccagaagccucuggc

SEQ ID NO: 2911854 - RNA, 19 nt, Human
guccuccagaagccucugg

SEQ ID NO: 2911855 - RNA, 18 nt, Human
guccuccagaagccucug

SEQ ID NO: 2911856 - RNA, 14 nt, Human
guccuccagaagcc

SEQ ID NO: 2911857 - RNA, 13 nt, Human
guccuccagaagc

SEQ ID NO: 2911858 - RNA, 16 nt, Human
guccucagggagcagg

SEQ ID NO: 2911859 - RNA, 13 nt, Human
guccucagggagc

SEQ ID NO: 2911860 - RNA, 18 nt, Human
guccucacucccagucca

SEQ ID NO: 2911861 - RNA, 18 nt, Human
guccucacugcucccuga

SEQ ID NO: 2911862 - RNA, 19 nt, Human
guccucacugcucccugaa

SEQ ID NO: 2911863 - RNA, 20 nt, Human
guccucagagaauuucuacc

SEQ ID NO: 2911864 - RNA, 20 nt, Human
guccucacugcucccugaag

SEQ ID NO: 2911865 - RNA, 21 nt, Human
guccucacugcucccugaagc

SEQ ID NO: 2911866 - RNA, 17 nt, Human
gugcaaauggaagacaa

SEQ ID NO: 2911867 - RNA, 19 nt, Human
gugcaaaugucagauacaa

SEQ ID NO: 2911868 - RNA, 23 nt, Human
gugcaaaugucagauacaaugua

SEQ ID NO: 2911869 - RNA, 22 nt, Human
gugcaaaguucccuacuuccug

SEQ ID NO: 2911870 - RNA, 23 nt, Human
gugcagggaggagguggcagccc

SEQ ID NO: 2911871 - RNA, 20 nt, Human
gugcagggagggcaguuuuc

SEQ ID NO: 2911872 - RNA, 16 nt, Human
gugcaggcuggccagc

SEQ ID NO: 2911873 - RNA, 17 nt, Human
gugcaggcuggccagcc

SEQ ID NO: 2911874 - RNA, 18 nt, Human
gugcaggcuggccagccg

SEQ ID NO: 2911875 - RNA, 20 nt, Human
gugcaggcuggccagccgcu

SEQ ID NO: 2911876 - RNA, 15 nt, Human
gugcaacagacaagu

SEQ ID NO: 2911877 - RNA, 14 nt, Human
gugcaacagacaag

SEQ ID NO: 2911878 - RNA, 13 nt, Human
gugcaacagacaa

SEQ ID NO: 2911879 - RNA, 18 nt, Human
gugcaggugcuauuguua

SEQ ID NO: 2911880 - RNA, 15 nt, Human
gugcaucucagccca

SEQ ID NO: 2911881 - RNA, 22 nt, Human
gugccagguuuuuggucugacc

SEQ ID NO: 2911882 - RNA, 20 nt, Human
gugccagguuuuuggucuga

SEQ ID NO: 2911883 - RNA, 14 nt, Human
gugcaucucagccc

SEQ ID NO: 2911884 - RNA, 18 nt, Human
gugcaucucagcccacau

SEQ ID NO: 2911885 - RNA, 15 nt, Human
gugcaguaauagcac

SEQ ID NO: 2911886 - RNA, 19 nt, Human
gugcaugcgccuacucgcu

SEQ ID NO: 2911887 - RNA, 18 nt, Human
gugcaugcagcaucuaag

SEQ ID NO: 2911888 - RNA, 20 nt, Human
gugcccacaggaucagucug

SEQ ID NO: 2911889 - RNA, 17 nt, Human
gugcccagaacuucccu

SEQ ID NO: 2911890 - RNA, 19 nt, Human
gugcccagaacuucccuga

SEQ ID NO: 2911891 - RNA, 20 nt, Human
gugcccagaacuucccugau

SEQ ID NO: 2911892 - RNA, 23 nt, Human
gugcccacccugggagacagacc

SEQ ID NO: 2911893 - RNA, 22 nt, Human
gugcccagcuauaccugugccu

SEQ ID NO: 2911894 - RNA, 21 nt, Human
gugcccagcuauaccugugcc

SEQ ID NO: 2911895 - RNA, 20 nt, Human
gugcccagcuauaccugugc

SEQ ID NO: 2911896 - RNA, 18 nt, Human
gugcccagcccggaccuu

SEQ ID NO: 2911897 - RNA, 23 nt, Human
gugccauagaguuuaacacaagu

SEQ ID NO: 2911898 - RNA, 21 nt, Human
gugcccacaccggggacaggc

SEQ ID NO: 2911899 - RNA, 17 nt, Human
gugccauagucacaugg

SEQ ID NO: 2911900 - RNA, 23 nt, Human
gugcccaagaauagaugcugacu

SEQ ID NO: 2911901 - RNA, 18 nt, Human
gugccagucuugugucug

SEQ ID NO: 2911902 - RNA, 17 nt, Human
gugccagucaagaagaa

SEQ ID NO: 2911903 - RNA, 21 nt, Human
gugccccaugccuguccagcc

SEQ ID NO: 2911904 - RNA, 14 nt, Human
gugcccucgcugcu

SEQ ID NO: 2911905 - RNA, 15 nt, Human
gugcccucgcugcuu

SEQ ID NO: 2911906 - RNA, 18 nt, Human
gugccccaugccugucca

SEQ ID NO: 2911907 - RNA, 16 nt, Human
gugccccaugccuguc

SEQ ID NO: 2911908 - RNA, 23 nt, Human
gugcccagcuauaccugugccuc

SEQ ID NO: 2911909 - RNA, 20 nt, Human
gugauccacccaccucagcc

SEQ ID NO: 2911910 - RNA, 18 nt, Human
gugauccacccaccucag

SEQ ID NO: 2911911 - RNA, 15 nt, Human
gugauccacccaccu

SEQ ID NO: 2911912 - RNA, 11 nt, Human
gugaggagcug

SEQ ID NO: 2911913 - RNA, 23 nt, Human
gugaggauuaaauaauguaaaua

SEQ ID NO: 2911914 - RNA, 14 nt, Human
gugaggagcugcug

SEQ ID NO: 2911915 - RNA, 21 nt, Human
gugaggacaaauugagacagu

SEQ ID NO: 2911916 - RNA, 17 nt, Human
gugaggagccccaucug

SEQ ID NO: 2911917 - RNA, 21 nt, Human
gugaggagccccaucugucua

SEQ ID NO: 2911918 - RNA, 18 nt, Human
gugauccucccaccucag

SEQ ID NO: 2911919 - RNA, 15 nt, Human
gugauccucccaccu

SEQ ID NO: 2911920 - RNA, 14 nt, Human
gugauccucccacc

SEQ ID NO: 2911921 - RNA, 14 nt, Human
gugauccacucgcc

SEQ ID NO: 2911922 - RNA, 22 nt, Human
gugauccucccaccucagccuc

SEQ ID NO: 2911923 - RNA, 20 nt, Human
gugauccucccaccucagcc

SEQ ID NO: 2911924 - RNA, 12 nt, Human
gugagcugggca

SEQ ID NO: 2911925 - RNA, 23 nt, Human
gugauccacccaacccuaucucc

SEQ ID NO: 2911926 - RNA, 20 nt, Human
gugauucacagugugaaucu

SEQ ID NO: 2911927 - RNA, 20 nt, Human
gugauccgcccgccucggcc

SEQ ID NO: 2911928 - RNA, 22 nt, Human
gugauucuccugccucagccuc

SEQ ID NO: 2911929 - RNA, 20 nt, Human
gugauucuccugccucagcc

SEQ ID NO: 2911930 - RNA, 19 nt, Human
gugauucuccugccucagc

SEQ ID NO: 2911931 - RNA, 18 nt, Human
gugauucuccugccucag

SEQ ID NO: 2911932 - RNA, 17 nt, Human
gugauucuccugccuca

SEQ ID NO: 2911933 - RNA, 16 nt, Human
gugauucuccugccuc

SEQ ID NO: 2911934 - RNA, 14 nt, Human
gugauucuccugcc

SEQ ID NO: 2911935 - RNA, 16 nt, Human
gugauucuaaugucuu

SEQ ID NO: 2911936 - RNA, 21 nt, Human
gugauuccuaagccacuugaa

SEQ ID NO: 2911937 - RNA, 20 nt, Human
gugauucucaugccucagcc

SEQ ID NO: 2911938 - RNA, 23 nt, Human
gugauucuccugccucagccucc

SEQ ID NO: 2911939 - RNA, 13 nt, Human
gugauucuccugc

SEQ ID NO: 2911940 - RNA, 23 nt, Human
gugauuguggaauggagauucag

SEQ ID NO: 2911941 - RNA, 19 nt, Human
gugauuguggaauggagau

SEQ ID NO: 2911942 - RNA, 14 nt, Human
gugauuguggaaug

SEQ ID NO: 2911943 - RNA, 16 nt, Human
gugauugggacagagg

SEQ ID NO: 2911944 - RNA, 12 nt, Human
gugauugcagcu

SEQ ID NO: 2911945 - RNA, 13 nt, Human
gugauugcagcuu

SEQ ID NO: 2911946 - RNA, 18 nt, Human
gugauugcagcuuuaugu

SEQ ID NO: 2911947 - RNA, 19 nt, Human
gugauugcagcuuuauguu

SEQ ID NO: 2911948 - RNA, 22 nt, Human
gugauugcagcuuuauguucau

SEQ ID NO: 2911949 - RNA, 13 nt, Human
gugaaaccuuuuu

SEQ ID NO: 2911950 - RNA, 14 nt, Human
gugaaaccuuuuuu

SEQ ID NO: 2911951 - RNA, 17 nt, Human
gugaaaccuuuuuuaag

SEQ ID NO: 2911952 - RNA, 18 nt, Human
gugaaaccuuuuuuaaga

SEQ ID NO: 2911953 - RNA, 19 nt, Human
gugaaaccuuuuuuaagau

SEQ ID NO: 2911954 - RNA, 21 nt, Human
gugaaaccuuuuuuaagauuu

SEQ ID NO: 2911955 - RNA, 22 nt, Human
gugaaaccuuuuuuaagauuuu

SEQ ID NO: 2911956 - RNA, 17 nt, Human
gugaaagcauauggguu

SEQ ID NO: 2911957 - RNA, 17 nt, Human
gugaaagcugagaacuc

SEQ ID NO: 2911958 - RNA, 20 nt, Human
gugaaagcugagaacuccug

SEQ ID NO: 2911959 - RNA, 21 nt, Human
gugaaagcugagaacuccuga

SEQ ID NO: 2911960 - RNA, 15 nt, Human
gugaaaacggagcug

SEQ ID NO: 2911961 - RNA, 12 nt, Human
gugaaaaucuug

SEQ ID NO: 2911962 - RNA, 16 nt, Human
gugaaaaugugugugu

SEQ ID NO: 2911963 - RNA, 17 nt, Human
gugaaaccugugaagcu

SEQ ID NO: 2911964 - RNA, 13 nt, Human
gugaaacacagcu

SEQ ID NO: 2911965 - RNA, 14 nt, Human
gugaaacacagcug

SEQ ID NO: 2911966 - RNA, 15 nt, Human
gugaaacacagcugu

SEQ ID NO: 2911967 - RNA, 16 nt, Human
gugaaacacagcuguu

SEQ ID NO: 2911968 - RNA, 14 nt, Human
gugaaaauguacug

SEQ ID NO: 2911969 - RNA, 14 nt, Human
gugaaugugggcac

SEQ ID NO: 2911970 - RNA, 23 nt, Human
gugaaugugggcacuggcccagg

SEQ ID NO: 2911971 - RNA, 21 nt, Human
gugaauuaauuaaacauugug

SEQ ID NO: 2911972 - RNA, 14 nt, Human
gugaaucagagcac

SEQ ID NO: 2911973 - RNA, 18 nt, Human
gugaauaugccuguaauu

SEQ ID NO: 2911974 - RNA, 22 nt, Human
gugaauaugccuguaauucagu

SEQ ID NO: 2911975 - RNA, 17 nt, Human
gugaaaguacauuugga

SEQ ID NO: 2911976 - RNA, 21 nt, Human
gugaaagucagaugcccagag

SEQ ID NO: 2911977 - RNA, 15 nt, Human
gugaaagugaggaaa

SEQ ID NO: 2911978 - RNA, 21 nt, Human
gugaaagggagcuaucaggaa

SEQ ID NO: 2911979 - RNA, 17 nt, Human
gugaaauaacaaaaugg

SEQ ID NO: 2911980 - RNA, 19 nt, Human
gugaaauaacaaaauggac

SEQ ID NO: 2911981 - RNA, 16 nt, Human
gucucucacagaugug

SEQ ID NO: 2911982 - RNA, 17 nt, Human
gugaaaucaaaggugcu

SEQ ID NO: 2911983 - RNA, 15 nt, Human
gugaaauggauacua

SEQ ID NO: 2911984 - RNA, 19 nt, Human
gugaaauggauacuacauc

SEQ ID NO: 2911985 - RNA, 16 nt, Human
gugaaauggccaggau

SEQ ID NO: 2911986 - RNA, 21 nt, Human
gugaaauuuauuaguuaauau

SEQ ID NO: 2911987 - RNA, 18 nt, Human
gugaaauuucuagccugc

SEQ ID NO: 2911988 - RNA, 22 nt, Human
gugaaauuucuagccugcacuu

SEQ ID NO: 2911989 - RNA, 22 nt, Human
gugaaauuuucuugauuugagu

SEQ ID NO: 2911990 - RNA, 20 nt, Human
gugacugguuaucacaccau

SEQ ID NO: 2911991 - RNA, 17 nt, Human
gugagcaggcugugagu

SEQ ID NO: 2911992 - RNA, 16 nt, Human
gugacucuuuuuaggg

SEQ ID NO: 2911993 - RNA, 18 nt, Human
gugacucuuuuuagggcc

SEQ ID NO: 2911994 - RNA, 20 nt, Human
gugacucuuuuuagggccag

SEQ ID NO: 2911995 - RNA, 22 nt, Human
gugacucuuuuuagggccaggc

SEQ ID NO: 2911996 - RNA, 13 nt, Human
gugagccacugca

SEQ ID NO: 2911997 - RNA, 21 nt, Human
gugagccaccgugccuggcca

SEQ ID NO: 2911998 - RNA, 17 nt, Human
gugagccaccgugccug

SEQ ID NO: 2911999 - RNA, 15 nt, Human
gugagccaccacgcc

SEQ ID NO: 2912000 - RNA, 15 nt, Human
gugagccaccgugcc

SEQ ID NO: 2912001 - RNA, 16 nt, Human
gugagccaccacgccc

SEQ ID NO: 2912002 - RNA, 22 nt, Human
gugagccaccgugccuggccac

SEQ ID NO: 2912003 - RNA, 15 nt, Human
gugagcuacagagcc

SEQ ID NO: 2912004 - RNA, 18 nt, Human
gugaggaaagcacacagu

SEQ ID NO: 2912005 - RNA, 13 nt, Human
gugaccuguuuau

SEQ ID NO: 2912006 - RNA, 23 nt, Human
gugaccugccccgcccagcugca

SEQ ID NO: 2912007 - RNA, 20 nt, Human
gugacucgagucacacucaa

SEQ ID NO: 2912008 - RNA, 16 nt, Human
gugacaacacuugugu

SEQ ID NO: 2912009 - RNA, 18 nt, Human
gugacaaaauuuuauaag

SEQ ID NO: 2912010 - RNA, 20 nt, Human
gugacaaaauuuuauaagca

SEQ ID NO: 2912011 - RNA, 12 nt, Human
gugacaaaccau

SEQ ID NO: 2912012 - RNA, 16 nt, Human
gugacaaaccauccag

SEQ ID NO: 2912013 - RNA, 23 nt, Human
gugacaaaccauccaguggaggu

SEQ ID NO: 2912014 - RNA, 19 nt, Human
gugacaaagauggcucaga

SEQ ID NO: 2912015 - RNA, 17 nt, Human
gugaauuuuuuuuuccu

SEQ ID NO: 2912016 - RNA, 14 nt, Human
gugacaagagccug

SEQ ID NO: 2912017 - RNA, 21 nt, Human
gugacaagcagauacugcugu

SEQ ID NO: 2912018 - RNA, 21 nt, Human
gugacccucugcugaagacuu

SEQ ID NO: 2912019 - RNA, 12 nt, Human
gugacccuuccc

SEQ ID NO: 2912020 - RNA, 23 nt, Human
gugacccuucccaaucagcacug

SEQ ID NO: 2912021 - RNA, 12 nt, Human
gugaccucaggc

SEQ ID NO: 2912022 - RNA, 16 nt, Human
gugaccucagcuuuga

SEQ ID NO: 2912023 - RNA, 13 nt, Human
gugaccugagggc

SEQ ID NO: 2912024 - RNA, 18 nt, Human
gugaccuccacagcuacc

SEQ ID NO: 2912025 - RNA, 19 nt, Human
gugaccucaggcacuagcc

SEQ ID NO: 2912026 - RNA, 13 nt, Human
gugcuuguuuuau

SEQ ID NO: 2912027 - RNA, 20 nt, Human
gugcuuguuuuauaaaauuu

SEQ ID NO: 2912028 - RNA, 14 nt, Human
gugcuuuaaagaua

SEQ ID NO: 2912029 - RNA, 20 nt, Human
gugcuuguucccucucccug

SEQ ID NO: 2912030 - RNA, 13 nt, Human
gugcuuguguaau

SEQ ID NO: 2912031 - RNA, 14 nt, Human
gugcuuguguaauu

SEQ ID NO: 2912032 - RNA, 17 nt, Human
gugcuuguguaauuuau

SEQ ID NO: 2912033 - RNA, 18 nt, Human
gugcuuguguaauuuaug

SEQ ID NO: 2912034 - RNA, 16 nt, Human
gugcuugccacagagc

SEQ ID NO: 2912035 - RNA, 17 nt, Human
gugcuuuuccuauuugu

SEQ ID NO: 2912036 - RNA, 19 nt, Human
gugcuuuuccuauuuguuu

SEQ ID NO: 2912037 - RNA, 12 nt, Human
guggaaaaacac

SEQ ID NO: 2912038 - RNA, 15 nt, Human
gugcuuuuaaaugca

SEQ ID NO: 2912039 - RNA, 23 nt, Human
guggaaagccucugcugccaugg

SEQ ID NO: 2912040 - RNA, 15 nt, Human
guggaaagccucugc

SEQ ID NO: 2912041 - RNA, 14 nt, Human
guggaaagccucug

SEQ ID NO: 2912042 - RNA, 13 nt, Human
gugcuuaaguucc

SEQ ID NO: 2912043 - RNA, 14 nt, Human
gugcuuaaguucca

SEQ ID NO: 2912044 - RNA, 21 nt, Human
gugcugccauuugauuuuucu

SEQ ID NO: 2912045 - RNA, 12 nt, Human
gugcugugugcc

SEQ ID NO: 2912046 - RNA, 19 nt, Human
gugcuguggccugggcaag

SEQ ID NO: 2912047 - RNA, 16 nt, Human
gugcugcccugaagaa

SEQ ID NO: 2912048 - RNA, 11 nt, Human
gugcugcccug

SEQ ID NO: 2912049 - RNA, 21 nt, Human
gugcugccacacuucaggcuc

SEQ ID NO: 2912050 - RNA, 22 nt, Human
gugcugccauccagguucagcu

SEQ ID NO: 2912051 - RNA, 16 nt, Human
gugcuucuccccagaa

SEQ ID NO: 2912052 - RNA, 17 nt, Human
gugcuucuccccagaau

SEQ ID NO: 2912053 - RNA, 21 nt, Human
gugcuucuccccagaauucac

SEQ ID NO: 2912054 - RNA, 22 nt, Human
gugcuucacaguagagccagcu

SEQ ID NO: 2912055 - RNA, 13 nt, Human
gugcuucagccug

SEQ ID NO: 2912056 - RNA, 18 nt, Human
gugcuucagccugaggcu

SEQ ID NO: 2912057 - RNA, 15 nt, Human
gugcuucagccugag

SEQ ID NO: 2912058 - RNA, 15 nt, Human
gugcuucaauuaaua

SEQ ID NO: 2912059 - RNA, 18 nt, Human
gugcuuauguaugaggua

SEQ ID NO: 2912060 - RNA, 22 nt, Human
gugcugaacaaaaaauaaaaau

SEQ ID NO: 2912061 - RNA, 18 nt, Human
gugcucuggacaggcaug

SEQ ID NO: 2912062 - RNA, 17 nt, Human
gugcucuggacaggcau

SEQ ID NO: 2912063 - RNA, 14 nt, Human
gugccgacagaagg

SEQ ID NO: 2912064 - RNA, 15 nt, Human
gugccgacagaagga

SEQ ID NO: 2912065 - RNA, 16 nt, Human
gugcucuggacaggca

SEQ ID NO: 2912066 - RNA, 15 nt, Human
gugcucuggacaggc

SEQ ID NO: 2912067 - RNA, 14 nt, Human
gugccuuuuauagc

SEQ ID NO: 2912068 - RNA, 18 nt, Human
gugccuuuuauagcuauu

SEQ ID NO: 2912069 - RNA, 17 nt, Human
gugccuuugcaaaucag

SEQ ID NO: 2912070 - RNA, 18 nt, Human
gugccuuuauguauuugc

SEQ ID NO: 2912071 - RNA, 12 nt, Human
gugccuuucaaa

SEQ ID NO: 2912072 - RNA, 13 nt, Human
gugccuuucaaau

SEQ ID NO: 2912073 - RNA, 18 nt, Human
gugccuuucaaauuuaga

SEQ ID NO: 2912074 - RNA, 21 nt, Human
gugcugacauggcucuggacu

SEQ ID NO: 2912075 - RNA, 19 nt, Human
gugcugccauccagguuca

SEQ ID NO: 2912076 - RNA, 18 nt, Human
gugcugccauccagguuc

SEQ ID NO: 2912077 - RNA, 15 nt, Human
gugcugccauccagg

SEQ ID NO: 2912078 - RNA, 12 nt, Human
gugcugccacac

SEQ ID NO: 2912079 - RNA, 15 nt, Human
gugcugauccuugca

SEQ ID NO: 2912080 - RNA, 14 nt, Human
gugcugaguagaug

SEQ ID NO: 2912081 - RNA, 20 nt, Human
gugcugaguagaugcgcagc

SEQ ID NO: 2912082 - RNA, 14 nt, Human
gugcugagauuaca

SEQ ID NO: 2912083 - RNA, 15 nt, Human
guggagaagcacacu

SEQ ID NO: 2912084 - RNA, 24 nt, Human
guggagaagcacacucuggucuug

SEQ ID NO: 2912085 - RNA, 22 nt, Human
guggagaaauuccuugauucac

SEQ ID NO: 2912086 - RNA, 15 nt, Human
guggacuugaacuuu

SEQ ID NO: 2912087 - RNA, 16 nt, Human
guggacuugaacuuuc

SEQ ID NO: 2912088 - RNA, 19 nt, Human
guggacuugaacuuuccug

SEQ ID NO: 2912089 - RNA, 13 nt, Human
guggacuuuuauu

SEQ ID NO: 2912090 - RNA, 21 nt, Human
guggacuguggcacuugccug

SEQ ID NO: 2912091 - RNA, 14 nt, Human
guggacuguggcac

SEQ ID NO: 2912092 - RNA, 22 nt, Human
guggacuguggcacuugccugg

SEQ ID NO: 2912093 - RNA, 16 nt, Human
guggacuuagaaagca

SEQ ID NO: 2912094 - RNA, 18 nt, Human
guggacuuagaaagcagg

SEQ ID NO: 2912095 - RNA, 19 nt, Human
guggacuuagaaagcaggg

SEQ ID NO: 2912096 - RNA, 20 nt, Human
guggacuuagaaagcagggg

SEQ ID NO: 2912097 - RNA, 22 nt, Human
guggacuuagaaagcaggggcu

SEQ ID NO: 2912098 - RNA, 17 nt, Human
guggacuggccccuggg

SEQ ID NO: 2912099 - RNA, 16 nt, Human
guggacuggccccugg

SEQ ID NO: 2912100 - RNA, 21 nt, Human
guggaaccacugacuacuggc

SEQ ID NO: 2912101 - RNA, 16 nt, Human
guggaacuaauaaaua

SEQ ID NO: 2912102 - RNA, 13 nt, Human
guggaacccagca

SEQ ID NO: 2912103 - RNA, 14 nt, Human
guggaaccucuguc

SEQ ID NO: 2912104 - RNA, 15 nt, Human
guggaaccucugucu

SEQ ID NO: 2912105 - RNA, 17 nt, Human
guggaaccucugucuca

SEQ ID NO: 2912106 - RNA, 20 nt, Human
guggaaccucugucucaucc

SEQ ID NO: 2912107 - RNA, 24 nt, Human
guggaaccucugucucauccuccu

SEQ ID NO: 2912108 - RNA, 19 nt, Human
guggaacauaaaaaggaca

SEQ ID NO: 2912109 - RNA, 21 nt, Human
guggaacauaaaaaggacauc

SEQ ID NO: 2912110 - RNA, 20 nt, Human
guggaacauaaaaaggacau

SEQ ID NO: 2912111 - RNA, 16 nt, Human
guggagagcuggugcc

SEQ ID NO: 2912112 - RNA, 14 nt, Human
guggagagcuggug

SEQ ID NO: 2912113 - RNA, 18 nt, Human
guggagaggcccggccuc

SEQ ID NO: 2912114 - RNA, 12 nt, Human
guggagagcugg

SEQ ID NO: 2912115 - RNA, 19 nt, Human
guggagacuggggggcuug

SEQ ID NO: 2912116 - RNA, 20 nt, Human
guggagacuggggggcuuga

SEQ ID NO: 2912117 - RNA, 18 nt, Human
guggagacaaugucugca

SEQ ID NO: 2912118 - RNA, 19 nt, Human
guggagacaaugucugcag

SEQ ID NO: 2912119 - RNA, 22 nt, Human
guggagacaaugucugcagccc

SEQ ID NO: 2912120 - RNA, 16 nt, Human
guggagcaugggccug

SEQ ID NO: 2912121 - RNA, 17 nt, Human
guggagagcuggugccc

SEQ ID NO: 2912122 - RNA, 14 nt, Human
guggagagcccggc

SEQ ID NO: 2912123 - RNA, 17 nt, Human
guggagcaugggccugg

SEQ ID NO: 2912124 - RNA, 11 nt, Human
guggagccagg

SEQ ID NO: 2912125 - RNA, 12 nt, Human
guggagccaggc

SEQ ID NO: 2912126 - RNA, 13 nt, Human
guggagccaggcg

SEQ ID NO: 2912127 - RNA, 14 nt, Human
guggagcucagccc

SEQ ID NO: 2912128 - RNA, 15 nt, Human
guggagcucagcccc

SEQ ID NO: 2912129 - RNA, 16 nt, Human
guggagcucagccccg

SEQ ID NO: 2912130 - RNA, 21 nt, Human
guggagccuuuuaacugugca

SEQ ID NO: 2912131 - RNA, 19 nt, Human
guggagcgggguaugaaga

SEQ ID NO: 2912132 - RNA, 18 nt, Human
guggaugccugguggcag

SEQ ID NO: 2912133 - RNA, 16 nt, Human
guggaugccugguggc

SEQ ID NO: 2912134 - RNA, 19 nt, Human
guggauccaauguuagaga

SEQ ID NO: 2912135 - RNA, 12 nt, Human
guggaugaucaa

SEQ ID NO: 2912136 - RNA, 21 nt, Human
guggaugccacagcccagcuu

SEQ ID NO: 2912137 - RNA, 14 nt, Human
guggagugcagugg

SEQ ID NO: 2912138 - RNA, 17 nt, Human
guggagugcaguggugc

SEQ ID NO: 2912139 - RNA, 19 nt, Human
guggagugcaguggugcga

SEQ ID NO: 2912140 - RNA, 16 nt, Human
guggauauaaaaugug

SEQ ID NO: 2912141 - RNA, 17 nt, Human
guggauauaaaaugugc

SEQ ID NO: 2912142 - RNA, 20 nt, Human
guggaguuugacauuguaug

SEQ ID NO: 2912143 - RNA, 14 nt, Human
guggauaacaaaga

SEQ ID NO: 2912144 - RNA, 16 nt, Human
guggauaacaaagaua

SEQ ID NO: 2912145 - RNA, 18 nt, Human
guggauaacaaagauauc

SEQ ID NO: 2912146 - RNA, 15 nt, Human
guggaucaccugagg

SEQ ID NO: 2912147 - RNA, 13 nt, Human
guggaucaccuga

SEQ ID NO: 2912148 - RNA, 16 nt, Human
guggaggcugcaguga

SEQ ID NO: 2912149 - RNA, 13 nt, Human
guggaggcagcca

SEQ ID NO: 2912150 - RNA, 15 nt, Human
guggaggcagccagg

SEQ ID NO: 2912151 - RNA, 11 nt, Human
guggaggcagu

SEQ ID NO: 2912152 - RNA, 17 nt, Human
guggaggagcagugcag

SEQ ID NO: 2912153 - RNA, 15 nt, Human
guggaggagcagugc

SEQ ID NO: 2912154 - RNA, 12 nt, Human
guggaggagcag

SEQ ID NO: 2912155 - RNA, 13 nt, Human
guggagcugccug

SEQ ID NO: 2912156 - RNA, 13 nt, Human
guggaggaaggau

SEQ ID NO: 2912157 - RNA, 14 nt, Human
guggaggaaggauu

SEQ ID NO: 2912158 - RNA, 15 nt, Human
guggaggaaggauug

SEQ ID NO: 2912159 - RNA, 16 nt, Human
guggaggaaggauugu

SEQ ID NO: 2912160 - RNA, 19 nt, Human
guggaggaaggauuguaaa

SEQ ID NO: 2912161 - RNA, 20 nt, Human
guggaggaaggauuguaaaa

SEQ ID NO: 2912162 - RNA, 23 nt, Human
guggagggcacauuccuugccug

SEQ ID NO: 2912163 - RNA, 21 nt, Human
guggcagugggagcugccugu

SEQ ID NO: 2912164 - RNA, 19 nt, Human
guggcagugggagcugccu

SEQ ID NO: 2912165 - RNA, 18 nt, Human
guggcaguggaggugggg

SEQ ID NO: 2912166 - RNA, 19 nt, Human
guggccaaauuauuugugu

SEQ ID NO: 2912167 - RNA, 19 nt, Human
guggccaaaagcuagacag

SEQ ID NO: 2912168 - RNA, 14 nt, Human
guggcauugaaaug

SEQ ID NO: 2912169 - RNA, 15 nt, Human
guggcauugaaauga

SEQ ID NO: 2912170 - RNA, 21 nt, Human
guggcaucuuugccuugggcu

SEQ ID NO: 2912171 - RNA, 16 nt, Human
guggcaugcaccugca

SEQ ID NO: 2912172 - RNA, 20 nt, Human
guggcaucuuugccuugggc

SEQ ID NO: 2912173 - RNA, 18 nt, Human
guggcaucuuugccuugg

SEQ ID NO: 2912174 - RNA, 15 nt, Human
guggccaucccugug

SEQ ID NO: 2912175 - RNA, 17 nt, Human
guggccaucccugugag

SEQ ID NO: 2912176 - RNA, 18 nt, Human
guggccaucccugugagg

SEQ ID NO: 2912177 - RNA, 23 nt, Human
guggccauucuuuuuuucuuggc

SEQ ID NO: 2912178 - RNA, 14 nt, Human
guggccacucagcu

SEQ ID NO: 2912179 - RNA, 13 nt, Human
guggccacucagc

SEQ ID NO: 2912180 - RNA, 23 nt, Human
guggccagagcugggaggcaugg

SEQ ID NO: 2912181 - RNA, 16 nt, Human
guggccacuuuaagag

SEQ ID NO: 2912182 - RNA, 17 nt, Human
guggccagagcugggag

SEQ ID NO: 2912183 - RNA, 21 nt, Human
guggccacuccagaccccugg

SEQ ID NO: 2912184 - RNA, 19 nt, Human
guggcagcugcuuuugucu

SEQ ID NO: 2912185 - RNA, 13 nt, Human
guggcagcugcuu

SEQ ID NO: 2912186 - RNA, 12 nt, Human
guggcagcugcu

SEQ ID NO: 2912187 - RNA, 23 nt, Human
guggcagcugcgguccacccagg

SEQ ID NO: 2912188 - RNA, 22 nt, Human
guggcagcugcgguccacccag

SEQ ID NO: 2912189 - RNA, 21 nt, Human
guggcagcugcgguccaccca

SEQ ID NO: 2912190 - RNA, 20 nt, Human
guggaugccugguggcagcu

SEQ ID NO: 2912191 - RNA, 19 nt, Human
guggcagcugcgguccacc

SEQ ID NO: 2912192 - RNA, 17 nt, Human
guggcagugggagcugc

SEQ ID NO: 2912193 - RNA, 16 nt, Human
guggcagugggagcug

SEQ ID NO: 2912194 - RNA, 15 nt, Human
guggcagugggagcu

SEQ ID NO: 2912195 - RNA, 16 nt, Human
uauuugcacuguagcc

SEQ ID NO: 2912196 - RNA, 22 nt, Human
uauuugcaggucuuuaaaucau

SEQ ID NO: 2912197 - RNA, 18 nt, Human
uauuugcaguucaccugc

SEQ ID NO: 2912198 - RNA, 23 nt, Human
uauuugcaguucaccugcacuua

SEQ ID NO: 2912199 - RNA, 14 nt, Human
uauuugcaacauuu

SEQ ID NO: 2912200 - RNA, 16 nt, Human
uauuugcaacauuuac

SEQ ID NO: 2912201 - RNA, 17 nt, Human
uauuugcaacauuuaca

SEQ ID NO: 2912202 - RNA, 17 nt, Human
uauuugacuugcaugaa

SEQ ID NO: 2912203 - RNA, 19 nt, Human
uauuugacuugcaugaaga

SEQ ID NO: 2912204 - RNA, 22 nt, Human
uauuugacuugcaugaagagaa

SEQ ID NO: 2912205 - RNA, 20 nt, Human
uauuugacuuuaauuuaugu

SEQ ID NO: 2912206 - RNA, 19 nt, Human
uauuugaauuuuaaaucua

SEQ ID NO: 2912207 - RNA, 21 nt, Human
uauuugaauuuuaaaucuaaa

SEQ ID NO: 2912208 - RNA, 17 nt, Human
uauuugauucaaaauau

SEQ ID NO: 2912209 - RNA, 21 nt, Human
uauuugauucaaaauauuuaa

SEQ ID NO: 2912210 - RNA, 12 nt, Human
uauuugaauuuu

SEQ ID NO: 2912211 - RNA, 18 nt, Human
uauuugaauuuuaaaucu

SEQ ID NO: 2912212 - RNA, 14 nt, Human
uauuugaauuaaaa

SEQ ID NO: 2912213 - RNA, 15 nt, Human
uauuugaauuaaaac

SEQ ID NO: 2912214 - RNA, 16 nt, Human
uauuugaauuaaaacu

SEQ ID NO: 2912215 - RNA, 17 nt, Human
uauuugaauuaaaacuu

SEQ ID NO: 2912216 - RNA, 18 nt, Human
uauuugaauuaaaacuuc

SEQ ID NO: 2912217 - RNA, 21 nt, Human
uauuugaauuaaaacuucuua

SEQ ID NO: 2912218 - RNA, 23 nt, Human
uauuugaauuaaaacuucuuaaa

SEQ ID NO: 2912219 - RNA, 17 nt, Human
ucaaacaugagaugugu

SEQ ID NO: 2912220 - RNA, 22 nt, Human
ucaaacaugaaguguguuuccu

SEQ ID NO: 2912221 - RNA, 16 nt, Human
uauuugccaugggcuu

SEQ ID NO: 2912222 - RNA, 17 nt, Human
uauuugccaugggcuuc

SEQ ID NO: 2912223 - RNA, 21 nt, Human
uauuugcuaaucaaagccagg

SEQ ID NO: 2912224 - RNA, 15 nt, Human
uauuugcuaauuaaa

SEQ ID NO: 2912225 - RNA, 23 nt, Human
uauuugcuaauuaaaaaguuaau

SEQ ID NO: 2912226 - RNA, 19 nt, Human
ucaaaccccgaccaccugc

SEQ ID NO: 2912227 - RNA, 20 nt, Human
ucaaaccccgaccaccugcc

SEQ ID NO: 2912228 - RNA, 19 nt, Human
ucaaacuggggccuccaga

SEQ ID NO: 2912229 - RNA, 20 nt, Human
ucaaacuggggccuccagaa

SEQ ID NO: 2912230 - RNA, 22 nt, Human
ucaaacuggggccuccagaacu

SEQ ID NO: 2912231 - RNA, 23 nt, Human
ucaaacuggggccuccagaacuc

SEQ ID NO: 2912232 - RNA, 14 nt, Human
ucaaacuggggccu

SEQ ID NO: 2912233 - RNA, 16 nt, Human
ucaaacuggggccucc

SEQ ID NO: 2912234 - RNA, 23 nt, Human
ucaaaccccgaccaccugcccaa

SEQ ID NO: 2912235 - RNA, 22 nt, Human
ucaaacccacgauuuucuccag

SEQ ID NO: 2912236 - RNA, 16 nt, Human
ucaaaucuccaguauu

SEQ ID NO: 2912237 - RNA, 23 nt, Human
ucaaaucuuggcaauauuccuua

SEQ ID NO: 2912238 - RNA, 21 nt, Human
ucaaaugguaggcauuuccua

SEQ ID NO: 2912239 - RNA, 20 nt, Human
ucaaaugguaggcauuuccu

SEQ ID NO: 2912240 - RNA, 15 nt, Human
ucaaaugggugauau

SEQ ID NO: 2912241 - RNA, 15 nt, Human
ucaaagagagaaaau

SEQ ID NO: 2912242 - RNA, 20 nt, Human
ucaaagagagaaaauaaaga

SEQ ID NO: 2912243 - RNA, 16 nt, Human
ucaaagagaguuuuua

SEQ ID NO: 2912244 - RNA, 12 nt, Human
ucaaacuguaaa

SEQ ID NO: 2912245 - RNA, 18 nt, Human
ucaaacugugaagcauuu

SEQ ID NO: 2912246 - RNA, 15 nt, Human
ucaaacuuacuauuu

SEQ ID NO: 2912247 - RNA, 16 nt, Human
ucaaacuuacuauuuu

SEQ ID NO: 2912248 - RNA, 17 nt, Human
ucaaacuuacuauuuug

SEQ ID NO: 2912249 - RNA, 19 nt, Human
ucaaacuucuggcucccuc

SEQ ID NO: 2912250 - RNA, 20 nt, Human
ucaaacuucuggcucccucu

SEQ ID NO: 2912251 - RNA, 19 nt, Human
ucaaccucuucuggcucaa

SEQ ID NO: 2912252 - RNA, 22 nt, Human
ucaacucccugccccccagccc

SEQ ID NO: 2912253 - RNA, 21 nt, Human
ucaacucccugccccccagcc

SEQ ID NO: 2912254 - RNA, 15 nt, Human
ucaacucccugcccc

SEQ ID NO: 2912255 - RNA, 14 nt, Human
ucaacucccugccc

SEQ ID NO: 2912256 - RNA, 22 nt, Human
uauuucuucaaauccuuccaaa

SEQ ID NO: 2912257 - RNA, 18 nt, Human
ucaacucccuccuuuagu

SEQ ID NO: 2912258 - RNA, 19 nt, Human
ucaacuccucgacaucacu

SEQ ID NO: 2912259 - RNA, 16 nt, Human
ucaacucuucgaagcc

SEQ ID NO: 2912260 - RNA, 18 nt, Human
ucaacugaccagccucca

SEQ ID NO: 2912261 - RNA, 19 nt, Human
ucaaccccuucgcuccugu

SEQ ID NO: 2912262 - RNA, 18 nt, Human
ucaaccccuucgcuccug

SEQ ID NO: 2912263 - RNA, 13 nt, Human
ucaaauguucuaa

SEQ ID NO: 2912264 - RNA, 14 nt, Human
ucaaauguucuaag

SEQ ID NO: 2912265 - RNA, 15 nt, Human
ucaaauguucuaagu

SEQ ID NO: 2912266 - RNA, 19 nt, Human
ucaaauguucuaaguuucu

SEQ ID NO: 2912267 - RNA, 20 nt, Human
ucaaauguucuaaguuucua

SEQ ID NO: 2912268 - RNA, 21 nt, Human
ucaaauguucuaaguuucuaa

SEQ ID NO: 2912269 - RNA, 22 nt, Human
ucaaauguucuaaguuucuaag

SEQ ID NO: 2912270 - RNA, 23 nt, Human
ucaaauguucuaaguuucuaaga

SEQ ID NO: 2912271 - RNA, 15 nt, Human
ucaaccuccugggcu

SEQ ID NO: 2912272 - RNA, 20 nt, Human
ucaaccccuucgcuccugug

SEQ ID NO: 2912273 - RNA, 16 nt, Human
ucaaccuccugggcua

SEQ ID NO: 2912274 - RNA, 17 nt, Human
ucaaccucuucuggcuc

SEQ ID NO: 2912275 - RNA, 18 nt, Human
ucaaccucuucuggcuca

SEQ ID NO: 2912276 - RNA, 15 nt, Human
ucaaccuccugugga

SEQ ID NO: 2912277 - RNA, 18 nt, Human
ucaaccuccuguggaacc

SEQ ID NO: 2912278 - RNA, 22 nt, Human
ucaaggacucugguuucucauu

SEQ ID NO: 2912279 - RNA, 19 nt, Human
ucaagcgauucuucugcuu

SEQ ID NO: 2912280 - RNA, 18 nt, Human
ucaagcgauucuucugcu

SEQ ID NO: 2912281 - RNA, 21 nt, Human
ucaagcgauucuucugcuuca

SEQ ID NO: 2912282 - RNA, 18 nt, Human
ucaaggaauaaugggcuu

SEQ ID NO: 2912283 - RNA, 17 nt, Human
ucaaggaacuugaaaaa

SEQ ID NO: 2912284 - RNA, 18 nt, Human
ucaaggaacuugaaaaau

SEQ ID NO: 2912285 - RNA, 20 nt, Human
ucaaggaacuugaaaaauac

SEQ ID NO: 2912286 - RNA, 22 nt, Human
ucaaggaacuugaaaaauacuu

SEQ ID NO: 2912287 - RNA, 18 nt, Human
ucaaggaagguucaugua

SEQ ID NO: 2912288 - RNA, 17 nt, Human
ucaagcgauucuucugc

SEQ ID NO: 2912289 - RNA, 19 nt, Human
ucaagccagcaacacagag

SEQ ID NO: 2912290 - RNA, 21 nt, Human
ucaagccagcaacacagagca

SEQ ID NO: 2912291 - RNA, 16 nt, Human
ucaagccauguauaaa

SEQ ID NO: 2912292 - RNA, 20 nt, Human
ucaagccauguauaaaugug

SEQ ID NO: 2912293 - RNA, 22 nt, Human
ucaagccauguauaaaugugau

SEQ ID NO: 2912294 - RNA, 14 nt, Human
ucacauuuauucug

SEQ ID NO: 2912295 - RNA, 13 nt, Human
ucaccaagcccag

SEQ ID NO: 2912296 - RNA, 16 nt, Human
ucaccacaugugcaca

SEQ ID NO: 2912297 - RNA, 11 nt, Human
ucacauuguuu

SEQ ID NO: 2912298 - RNA, 18 nt, Human
ucacauuguuugcugcua

SEQ ID NO: 2912299 - RNA, 19 nt, Human
ucacauuguuugcugcuau

SEQ ID NO: 2912300 - RNA, 23 nt, Human
ucacauuguaacugaacuucagg

SEQ ID NO: 2912301 - RNA, 15 nt, Human
ucaccacuccauucc

SEQ ID NO: 2912302 - RNA, 16 nt, Human
ucaccacuccauuccc

SEQ ID NO: 2912303 - RNA, 14 nt, Human
ucaccccuguccuc

SEQ ID NO: 2912304 - RNA, 16 nt, Human
ucaccccuguccucac

SEQ ID NO: 2912305 - RNA, 17 nt, Human
ucaccccuguccucacu

SEQ ID NO: 2912306 - RNA, 20 nt, Human
ucaccccuguccucacugcu

SEQ ID NO: 2912307 - RNA, 18 nt, Human
ucaccagaauugugcaaa

SEQ ID NO: 2912308 - RNA, 13 nt, Human
ucaccccuguccu

SEQ ID NO: 2912309 - RNA, 20 nt, Human
ucacccguacaggcaauucc

SEQ ID NO: 2912310 - RNA, 17 nt, Human
ucacccuuggacaagac

SEQ ID NO: 2912311 - RNA, 17 nt, Human
ucacccuuaacccaagg

SEQ ID NO: 2912312 - RNA, 18 nt, Human
ucacccuuaacccaagga

SEQ ID NO: 2912313 - RNA, 19 nt, Human
ucacccuuaacccaaggag

SEQ ID NO: 2912314 - RNA, 22 nt, Human
ucacccuuaacccaaggagcac

SEQ ID NO: 2912315 - RNA, 23 nt, Human
ucacccuuaacccaaggagcaca

SEQ ID NO: 2912316 - RNA, 20 nt, Human
ucacccuggggcuaggaaau

SEQ ID NO: 2912317 - RNA, 15 nt, Human
ucacccuaccugugc

SEQ ID NO: 2912318 - RNA, 17 nt, Human
ucacccuaccugugccu

SEQ ID NO: 2912319 - RNA, 15 nt, Human
ucacccuagcccucu

SEQ ID NO: 2912320 - RNA, 17 nt, Human
ucacccuagcccucucc

SEQ ID NO: 2912321 - RNA, 21 nt, Human
ucacccuagcccucucccucu

SEQ ID NO: 2912322 - RNA, 18 nt, Human
ucacccucuuccugugau

SEQ ID NO: 2912323 - RNA, 20 nt, Human
ucacccuccaccucuucacc

SEQ ID NO: 2912324 - RNA, 13 nt, Human
ucacccuccaccu

SEQ ID NO: 2912325 - RNA, 14 nt, Human
ucacccuccaccuc

SEQ ID NO: 2912326 - RNA, 15 nt, Human
ucacccuccaccucu

SEQ ID NO: 2912327 - RNA, 16 nt, Human
ucaccgagugggggca

SEQ ID NO: 2912328 - RNA, 17 nt, Human
ucaccgacgcgucuccu

SEQ ID NO: 2912329 - RNA, 16 nt, Human
ucaauucccauugcau

SEQ ID NO: 2912330 - RNA, 13 nt, Human
ucaauucaacacu

SEQ ID NO: 2912331 - RNA, 17 nt, Human
ucaauucaacacucccu

SEQ ID NO: 2912332 - RNA, 15 nt, Human
ucaauucaauuugga

SEQ ID NO: 2912333 - RNA, 18 nt, Human
ucaauuauaguuucugag

SEQ ID NO: 2912334 - RNA, 14 nt, Human
ucacacacauagau

SEQ ID NO: 2912335 - RNA, 12 nt, Human
ucacacacaugg

SEQ ID NO: 2912336 - RNA, 15 nt, Human
ucacacacccugagg

SEQ ID NO: 2912337 - RNA, 16 nt, Human
ucacacacccugaggu

SEQ ID NO: 2912338 - RNA, 14 nt, Human
ucaaggagaggagg

SEQ ID NO: 2912339 - RNA, 21 nt, Human
ucaauguuuaugcaaggaagg

SEQ ID NO: 2912340 - RNA, 23 nt, Human
ucaauguuuaugcaaggaaggaa

SEQ ID NO: 2912341 - RNA, 22 nt, Human
ucaauguuuaugcaaggaagga

SEQ ID NO: 2912342 - RNA, 11 nt, Human
ucaauguuuga

SEQ ID NO: 2912343 - RNA, 22 nt, Human
ucaauguuugaggagcauguuu

SEQ ID NO: 2912344 - RNA, 23 nt, Human
ucaauguuugaggagcauguuuu

SEQ ID NO: 2912345 - RNA, 14 nt, Human
ucaauuauaguuuc

SEQ ID NO: 2912346 - RNA, 15 nt, Human
ucaauuauaguuucu

SEQ ID NO: 2912347 - RNA, 16 nt, Human
ucaauuauaguuucug

SEQ ID NO: 2912348 - RNA, 17 nt, Human
ucaauuauaguuucuga

SEQ ID NO: 2912349 - RNA, 19 nt, Human
ucaauuauaguuucugagg

SEQ ID NO: 2912350 - RNA, 15 nt, Human
ucacacacuuuggcu

SEQ ID NO: 2912351 - RNA, 12 nt, Human
ucacacacugau

SEQ ID NO: 2912352 - RNA, 11 nt, Human
ucacaccagcc

SEQ ID NO: 2912353 - RNA, 21 nt, Human
ucacaccaggcuugccugcag

SEQ ID NO: 2912354 - RNA, 22 nt, Human
ucacaccaggcuugccugcagg

SEQ ID NO: 2912355 - RNA, 12 nt, Human
ucacaccagcca

SEQ ID NO: 2912356 - RNA, 16 nt, Human
ucacaggacucugccu

SEQ ID NO: 2912357 - RNA, 17 nt, Human
ucacaggacucugccuc

SEQ ID NO: 2912358 - RNA, 18 nt, Human
ucacaggacucugccucc

SEQ ID NO: 2912359 - RNA, 20 nt, Human
ucacauugagcugauauaaa

SEQ ID NO: 2912360 - RNA, 21 nt, Human
ucacauugagcugauauaaau

SEQ ID NO: 2912361 - RNA, 23 nt, Human
ucacauugagcugauauaaauuc

SEQ ID NO: 2912362 - RNA, 12 nt, Human
ucacauugcauu

SEQ ID NO: 2912363 - RNA, 15 nt, Human
ucacauugcauucua

SEQ ID NO: 2912364 - RNA, 16 nt, Human
ucacauugcauucuau

SEQ ID NO: 2912365 - RNA, 17 nt, Human
ucacauugcauucuauu

SEQ ID NO: 2912366 - RNA, 20 nt, Human
ucacauugcauucuauugcc

SEQ ID NO: 2912367 - RNA, 21 nt, Human
ucacauugcauucuauugccu

SEQ ID NO: 2912368 - RNA, 22 nt, Human
ucacauugcauucuauugccuu

SEQ ID NO: 2912369 - RNA, 18 nt, Human
ucacaguagagccagcuu

SEQ ID NO: 2912370 - RNA, 17 nt, Human
ucacaguagagccagcu

SEQ ID NO: 2912371 - RNA, 16 nt, Human
ucacaguagagccagc

SEQ ID NO: 2912372 - RNA, 15 nt, Human
ucacaguagagccag

SEQ ID NO: 2912373 - RNA, 20 nt, Human
ucacaguagagccagcuugg

SEQ ID NO: 2912374 - RNA, 19 nt, Human
ucacaguagagccagcuug

SEQ ID NO: 2912375 - RNA, 21 nt, Human
ucacaguagagccagcuuggg

SEQ ID NO: 2912376 - RNA, 14 nt, Human
ucacaguagagcca

SEQ ID NO: 2912377 - RNA, 17 nt, Human
ucacaguacagcaugug

SEQ ID NO: 2912378 - RNA, 18 nt, Human
ucacaguacagcaugugc

SEQ ID NO: 2912379 - RNA, 19 nt, Human
ucacaguacagcaugugcc

SEQ ID NO: 2912380 - RNA, 20 nt, Human
ucacaguacagcaugugccu

SEQ ID NO: 2912381 - RNA, 20 nt, Human
ucacaggugucagccauugc

SEQ ID NO: 2912382 - RNA, 18 nt, Human
ucacaggugugguguaau

SEQ ID NO: 2912383 - RNA, 19 nt, Human
ucacaggugugguguaauu

SEQ ID NO: 2912384 - RNA, 21 nt, Human
ucacaggugugguguaauuua

SEQ ID NO: 2912385 - RNA, 18 nt, Human
ucacagguuggaagagaa

SEQ ID NO: 2912386 - RNA, 20 nt, Human
ucacagguuggaagagaauc

SEQ ID NO: 2912387 - RNA, 21 nt, Human
ucacagguuggaagagaauca

SEQ ID NO: 2912388 - RNA, 22 nt, Human
ucacagguuggaagagaaucac

SEQ ID NO: 2912389 - RNA, 19 nt, Human
ucacaggagggagggggaa

SEQ ID NO: 2912390 - RNA, 19 nt, Human
ucacaggacucugccuccu

SEQ ID NO: 2912391 - RNA, 23 nt, Human
ucacaggacucugccuccucuuc

SEQ ID NO: 2912392 - RNA, 17 nt, Human
ucacaggguugggccca

SEQ ID NO: 2912393 - RNA, 16 nt, Human
ucacaggguugggccc

SEQ ID NO: 2912394 - RNA, 14 nt, Human
ucacaggguugggc

SEQ ID NO: 2912395 - RNA, 13 nt, Human
ucacaccagccau

SEQ ID NO: 2912396 - RNA, 23 nt, Human
ucacaggguugggcccagaucug

SEQ ID NO: 2912397 - RNA, 19 nt, Human
ucacaggguugggcccaga

SEQ ID NO: 2912398 - RNA, 24 nt, Human
ucacaggguugggcccagaucugg

SEQ ID NO: 2912399 - RNA, 20 nt, Human
uauuguugacaacugugacu

SEQ ID NO: 2912400 - RNA, 23 nt, Human
uauuguugacaacugugacugua

SEQ ID NO: 2912401 - RNA, 14 nt, Human
uauuguuguauaau

SEQ ID NO: 2912402 - RNA, 19 nt, Human
uauuguugacaacugugac

SEQ ID NO: 2912403 - RNA, 18 nt, Human
uauuguggauaacaaaga

SEQ ID NO: 2912404 - RNA, 20 nt, Human
uauugugggacuuauuacaa

SEQ ID NO: 2912405 - RNA, 22 nt, Human
uauugugggacuuauuacaauu

SEQ ID NO: 2912406 - RNA, 22 nt, Human
uauugugguaggccuuuuaaca

SEQ ID NO: 2912407 - RNA, 23 nt, Human
uauugugguaggccuuuuaacau

SEQ ID NO: 2912408 - RNA, 13 nt, Human
uauugugguauug

SEQ ID NO: 2912409 - RNA, 23 nt, Human
uauugugguauugaauauugugu

SEQ ID NO: 2912410 - RNA, 14 nt, Human
uauuguguuccuuu

SEQ ID NO: 2912411 - RNA, 15 nt, Human
uauugcccacgcugg

SEQ ID NO: 2912412 - RNA, 13 nt, Human
uauugcccagguu

SEQ ID NO: 2912413 - RNA, 15 nt, Human
uauugcccaggcugg

SEQ ID NO: 2912414 - RNA, 20 nt, Human
uauugcccaggcuggucuug

SEQ ID NO: 2912415 - RNA, 14 nt, Human
uauugcccacgcug

SEQ ID NO: 2912416 - RNA, 13 nt, Human
uauugcccacgcu

SEQ ID NO: 2912417 - RNA, 11 nt, Human
uauugcugggg

SEQ ID NO: 2912418 - RNA, 12 nt, Human
uauugcuggggu

SEQ ID NO: 2912419 - RNA, 19 nt, Human
uauugcuguccuugaaugc

SEQ ID NO: 2912420 - RNA, 15 nt, Human
uauugcuguugcuug

SEQ ID NO: 2912421 - RNA, 16 nt, Human
uauugcuguugcuuga

SEQ ID NO: 2912422 - RNA, 17 nt, Human
uauugcuguugcuugaa

SEQ ID NO: 2912423 - RNA, 18 nt, Human
uauugcuguugcuugaau

SEQ ID NO: 2912424 - RNA, 16 nt, Human
uauugcuuaguaaaau

SEQ ID NO: 2912425 - RNA, 17 nt, Human
uauugcuuaguaaaauu

SEQ ID NO: 2912426 - RNA, 18 nt, Human
uauugcuuaguaaaauuu

SEQ ID NO: 2912427 - RNA, 19 nt, Human
uauugcuuaguaaaauuua

SEQ ID NO: 2912428 - RNA, 21 nt, Human
uauugcuuauugcuuaguaaa

SEQ ID NO: 2912429 - RNA, 16 nt, Human
uauugcugauuuuaau

SEQ ID NO: 2912430 - RNA, 22 nt, Human
uauugaguuuguagguaaaaug

SEQ ID NO: 2912431 - RNA, 14 nt, Human
uauugauaguacuc

SEQ ID NO: 2912432 - RNA, 15 nt, Human
uauugauaguacucu

SEQ ID NO: 2912433 - RNA, 13 nt, Human
uauugauauauau

SEQ ID NO: 2912434 - RNA, 14 nt, Human
uauugauauauauu

SEQ ID NO: 2912435 - RNA, 18 nt, Human
uauugauauauauuauaa

SEQ ID NO: 2912436 - RNA, 14 nt, Human
uauucaugcuucuu

SEQ ID NO: 2912437 - RNA, 15 nt, Human
uauucaucucaagga

SEQ ID NO: 2912438 - RNA, 20 nt, Human
uauucaugaagcggucacag

SEQ ID NO: 2912439 - RNA, 17 nt, Human
uauuauguuguuagaga

SEQ ID NO: 2912440 - RNA, 13 nt, Human
uauuauuuugggg

SEQ ID NO: 2912441 - RNA, 18 nt, Human
uauuauuuuggggucucu

SEQ ID NO: 2912442 - RNA, 21 nt, Human
uauuauuuuggggucucuuuu

SEQ ID NO: 2912443 - RNA, 23 nt, Human
uauucauucauggaccacuguuu

SEQ ID NO: 2912444 - RNA, 19 nt, Human
uauucauucugcauugcua

SEQ ID NO: 2912445 - RNA, 20 nt, Human
uauucauucugugaucauuu

SEQ ID NO: 2912446 - RNA, 22 nt, Human
uauucauucugugaucauuuau

SEQ ID NO: 2912447 - RNA, 12 nt, Human
uauucauuuagu

SEQ ID NO: 2912448 - RNA, 21 nt, Human
uauuccaaaaagguugcuguu

SEQ ID NO: 2912449 - RNA, 18 nt, Human
uauucauuaaauguuuga

SEQ ID NO: 2912450 - RNA, 17 nt, Human
uauugcauuuauaugua

SEQ ID NO: 2912451 - RNA, 13 nt, Human
uauugcauuuaua

SEQ ID NO: 2912452 - RNA, 14 nt, Human
uauugcacauuguu

SEQ ID NO: 2912453 - RNA, 15 nt, Human
uauugcacauuguuc

SEQ ID NO: 2912454 - RNA, 20 nt, Human
uauugcagcaauuaaaaauu

SEQ ID NO: 2912455 - RNA, 14 nt, Human
uauuccaaaugucu

SEQ ID NO: 2912456 - RNA, 15 nt, Human
uauuuauguacuuuu

SEQ ID NO: 2912457 - RNA, 18 nt, Human
uauuuauguaaugaagua

SEQ ID NO: 2912458 - RNA, 12 nt, Human
uauuuaugaagu

SEQ ID NO: 2912459 - RNA, 14 nt, Human
uauuuaugaaguuu

SEQ ID NO: 2912460 - RNA, 15 nt, Human
uauuuaugaaguuua

SEQ ID NO: 2912461 - RNA, 16 nt, Human
uauuuaugaaguuuaa

SEQ ID NO: 2912462 - RNA, 19 nt, Human
uauuuaugaaguuuaaaac

SEQ ID NO: 2912463 - RNA, 22 nt, Human
uauuuaugaaguuuaaaacagu

SEQ ID NO: 2912464 - RNA, 13 nt, Human
uauuuauguuugc

SEQ ID NO: 2912465 - RNA, 13 nt, Human
uauuuauuaaaua

SEQ ID NO: 2912466 - RNA, 15 nt, Human
uauuuauuaaauaaa

SEQ ID NO: 2912467 - RNA, 17 nt, Human
uauuuauuaaauaaaau

SEQ ID NO: 2912468 - RNA, 14 nt, Human
uauuuaugugugag

SEQ ID NO: 2912469 - RNA, 15 nt, Human
uauuuauguuaaaag

SEQ ID NO: 2912470 - RNA, 21 nt, Human
uauuuaugucuauuuaagccu

SEQ ID NO: 2912471 - RNA, 19 nt, Human
uauuuauuaugcuuuauug

SEQ ID NO: 2912472 - RNA, 20 nt, Human
uauuuauuaugcuuuauugg

SEQ ID NO: 2912473 - RNA, 14 nt, Human
uauuuauuauuuau

SEQ ID NO: 2912474 - RNA, 19 nt, Human
uauuucuucguucuuuuua

SEQ ID NO: 2912475 - RNA, 13 nt, Human
uauuucuuuguua

SEQ ID NO: 2912476 - RNA, 22 nt, Human
uauuucuuuauauuuauccacu

SEQ ID NO: 2912477 - RNA, 14 nt, Human
uauuucuuuguuau

SEQ ID NO: 2912478 - RNA, 16 nt, Human
uauuugaaaaaaacuu

SEQ ID NO: 2912479 - RNA, 23 nt, Human
uauuugaaaaaaacuucauucuc

SEQ ID NO: 2912480 - RNA, 19 nt, Human
uauuugaagguuuuaagug

SEQ ID NO: 2912481 - RNA, 19 nt, Human
uauuugaaacugaauguuu

SEQ ID NO: 2912482 - RNA, 12 nt, Human
uauuugaaacuu

SEQ ID NO: 2912483 - RNA, 13 nt, Human
uauuguuuaugua

SEQ ID NO: 2912484 - RNA, 14 nt, Human
uauuguuuauguaa

SEQ ID NO: 2912485 - RNA, 16 nt, Human
uauuuaaaugggaaua

SEQ ID NO: 2912486 - RNA, 14 nt, Human
uauuuaaagacagg

SEQ ID NO: 2912487 - RNA, 22 nt, Human
uauuuaaagacagggaagagca

SEQ ID NO: 2912488 - RNA, 13 nt, Human
uauuuaaagcauu

SEQ ID NO: 2912489 - RNA, 15 nt, Human
uauuuaacaagaucu

SEQ ID NO: 2912490 - RNA, 17 nt, Human
uauuuauauauuuauaa

SEQ ID NO: 2912491 - RNA, 19 nt, Human
uauuuauauauuuauaacu

SEQ ID NO: 2912492 - RNA, 18 nt, Human
uauuuauauauuuauaac

SEQ ID NO: 2912493 - RNA, 13 nt, Human
uauuuaugccuug

SEQ ID NO: 2912494 - RNA, 19 nt, Human
uauuuaugccuugaugauu

SEQ ID NO: 2912495 - RNA, 21 nt, Human
uauuuaugccuugaugauuua

SEQ ID NO: 2912496 - RNA, 22 nt, Human
uauuuaugccuugaugauuuaa

SEQ ID NO: 2912497 - RNA, 19 nt, Human
uauuuauggaugcaacacg

SEQ ID NO: 2912498 - RNA, 16 nt, Human
uauuuaucugauuaag

SEQ ID NO: 2912499 - RNA, 21 nt, Human
uauuuaucugauuaaguuguc

SEQ ID NO: 2912500 - RNA, 15 nt, Human
uauuuaucugauuaa

SEQ ID NO: 2912501 - RNA, 16 nt, Human
uauuuaucucuauuua

SEQ ID NO: 2912502 - RNA, 20 nt, Human
uauuuaucugugcaaauccu

SEQ ID NO: 2912503 - RNA, 17 nt, Human
uauuuaucucuauuuaa

SEQ ID NO: 2912504 - RNA, 12 nt, Human
uauuuaucuuua

SEQ ID NO: 2912505 - RNA, 17 nt, Human
uauuuauauguacuguu

SEQ ID NO: 2912506 - RNA, 16 nt, Human
uauuuauauguacugu

SEQ ID NO: 2912507 - RNA, 15 nt, Human
uauuuauauguacug

SEQ ID NO: 2912508 - RNA, 17 nt, Human
uauuuauauguacauga

SEQ ID NO: 2912509 - RNA, 13 nt, Human
uauuuauauauuu

SEQ ID NO: 2912510 - RNA, 15 nt, Human
uauuuauauguacau

SEQ ID NO: 2912511 - RNA, 15 nt, Human
uauuuauccauuugu

SEQ ID NO: 2912512 - RNA, 20 nt, Human
uauuuauccaaaauguguau

SEQ ID NO: 2912513 - RNA, 15 nt, Human
uauuauguaguuguu

SEQ ID NO: 2912514 - RNA, 15 nt, Human
uauuauuuauaauuc

SEQ ID NO: 2912515 - RNA, 15 nt, Human
uauuauuuauuucug

SEQ ID NO: 2912516 - RNA, 12 nt, Human
uauuauguguuu

SEQ ID NO: 2912517 - RNA, 16 nt, Human
uauuauugaaauugua

SEQ ID NO: 2912518 - RNA, 16 nt, Human
uauuauugcuguugcu

SEQ ID NO: 2912519 - RNA, 18 nt, Human
uauuauugcuguugcuug

SEQ ID NO: 2912520 - RNA, 19 nt, Human
uauuauugcuguugcuuga

SEQ ID NO: 2912521 - RNA, 20 nt, Human
uauuauugugguaggccuuu

SEQ ID NO: 2912522 - RNA, 21 nt, Human
uauuauugugguaggccuuuu

SEQ ID NO: 2912523 - RNA, 22 nt, Human
uauuauugugguaggccuuuua

SEQ ID NO: 2912524 - RNA, 12 nt, Human
uauuauuucuau

SEQ ID NO: 2912525 - RNA, 14 nt, Human
uauuauuucuauua

SEQ ID NO: 2912526 - RNA, 12 nt, Human
uauuauuuggca

SEQ ID NO: 2912527 - RNA, 14 nt, Human
uauuauuuggcagu

SEQ ID NO: 2912528 - RNA, 23 nt, Human
uauuauuuggcaguuugguauuu

SEQ ID NO: 2912529 - RNA, 14 nt, Human
uauuauuuguguuu

SEQ ID NO: 2912530 - RNA, 12 nt, Human
uauuaucuuuaa

SEQ ID NO: 2912531 - RNA, 20 nt, Human
uauuauagguaaucaaugaa

SEQ ID NO: 2912532 - RNA, 21 nt, Human
uauuauccuagauuauaucaa

SEQ ID NO: 2912533 - RNA, 23 nt, Human
uauuauccuagauuauaucaaag

SEQ ID NO: 2912534 - RNA, 19 nt, Human
uauuaugcuuuauuggaaa

SEQ ID NO: 2912535 - RNA, 13 nt, Human
uauuaugcggaaa

SEQ ID NO: 2912536 - RNA, 13 nt, Human
uauuauauauaua

SEQ ID NO: 2912537 - RNA, 16 nt, Human
uauuauauauauaaua

SEQ ID NO: 2912538 - RNA, 16 nt, Human
uauuaaggauguagcu

SEQ ID NO: 2912539 - RNA, 18 nt, Human
uauuaaggauguagcuuu

SEQ ID NO: 2912540 - RNA, 20 nt, Human
uauuaaggauguagcuuuuc

SEQ ID NO: 2912541 - RNA, 17 nt, Human
uauuaagggauuuagua

SEQ ID NO: 2912542 - RNA, 15 nt, Human
uauuauaauuuaaug

SEQ ID NO: 2912543 - RNA, 12 nt, Human
uauuauaauuua

SEQ ID NO: 2912544 - RNA, 13 nt, Human
uauuauaagcauu

SEQ ID NO: 2912545 - RNA, 17 nt, Human
uauuauaagcauugaaa

SEQ ID NO: 2912546 - RNA, 20 nt, Human
uauuauaagcauugaaauua

SEQ ID NO: 2912547 - RNA, 21 nt, Human
uauuauaagcauugaaauuau

SEQ ID NO: 2912548 - RNA, 14 nt, Human
uauuaauaaauaga

SEQ ID NO: 2912549 - RNA, 17 nt, Human
uauuaauaaauagagca

SEQ ID NO: 2912550 - RNA, 21 nt, Human
uauuaauaaauagagcaauua

SEQ ID NO: 2912551 - RNA, 20 nt, Human
uauuauaacaagugugucuu

SEQ ID NO: 2912552 - RNA, 14 nt, Human
uauguuauaucaac

SEQ ID NO: 2912553 - RNA, 12 nt, Human
uauguuacuauu

SEQ ID NO: 2912554 - RNA, 15 nt, Human
uauguuacuauuuuc

SEQ ID NO: 2912555 - RNA, 16 nt, Human
uauguuacuauuuucu

SEQ ID NO: 2912556 - RNA, 13 nt, Human
uauguguuuacuu

SEQ ID NO: 2912557 - RNA, 16 nt, Human
uauguguuuacuuuaa

SEQ ID NO: 2912558 - RNA, 16 nt, Human
uauguguugaaaacca

SEQ ID NO: 2912559 - RNA, 17 nt, Human
uauguguugaaaaccaa

SEQ ID NO: 2912560 - RNA, 18 nt, Human
uauguguugaaaaccaaa

SEQ ID NO: 2912561 - RNA, 19 nt, Human
uauguguugaaaaccaaaa

SEQ ID NO: 2912562 - RNA, 23 nt, Human
uauguguugaaaaccaaaaugac

SEQ ID NO: 2912563 - RNA, 22 nt, Human
uauguuaagcagcuaaauuuuc

SEQ ID NO: 2912564 - RNA, 18 nt, Human
uauggacagggcugucuc

SEQ ID NO: 2912565 - RNA, 15 nt, Human
uauguuaaaagauuu

SEQ ID NO: 2912566 - RNA, 17 nt, Human
uauggagcucagagagg

SEQ ID NO: 2912567 - RNA, 18 nt, Human
uauggagcucagagaggg

SEQ ID NO: 2912568 - RNA, 18 nt, Human
uauggaggaacaacucuc

SEQ ID NO: 2912569 - RNA, 12 nt, Human
uauggacucugc

SEQ ID NO: 2912570 - RNA, 16 nt, Human
uauggacucugcacau

SEQ ID NO: 2912571 - RNA, 16 nt, Human
uauggagaauugcuga

SEQ ID NO: 2912572 - RNA, 17 nt, Human
uauggagaauugcugaa

SEQ ID NO: 2912573 - RNA, 18 nt, Human
uauggagaauugcugaag

SEQ ID NO: 2912574 - RNA, 16 nt, Human
uauggacggugcucca

SEQ ID NO: 2912575 - RNA, 21 nt, Human
uauggacggugcuccaggcag

SEQ ID NO: 2912576 - RNA, 15 nt, Human
uauggacucugcaca

SEQ ID NO: 2912577 - RNA, 13 nt, Human
uauggagccuggc

SEQ ID NO: 2912578 - RNA, 21 nt, Human
uauggagcagccuggagaccc

SEQ ID NO: 2912579 - RNA, 13 nt, Human
uauguucauuugu

SEQ ID NO: 2912580 - RNA, 14 nt, Human
uauguucauuuguu

SEQ ID NO: 2912581 - RNA, 17 nt, Human
uauguucauuuguuugu

SEQ ID NO: 2912582 - RNA, 21 nt, Human
uauguugcccaggcaggucuu

SEQ ID NO: 2912583 - RNA, 17 nt, Human
uauguugaagccuuugu

SEQ ID NO: 2912584 - RNA, 15 nt, Human
uauguugaauacuuu

SEQ ID NO: 2912585 - RNA, 12 nt, Human
uauguugaauac

SEQ ID NO: 2912586 - RNA, 14 nt, Human
uauguugccuuuau

SEQ ID NO: 2912587 - RNA, 18 nt, Human
uauguugccuuuaugguu

SEQ ID NO: 2912588 - RNA, 20 nt, Human
uauguugccuuuaugguuuc

SEQ ID NO: 2912589 - RNA, 16 nt, Human
uauguuguccaauugu

SEQ ID NO: 2912590 - RNA, 21 nt, Human
uauguuguccaauuguugaca

SEQ ID NO: 2912591 - RNA, 12 nt, Human
uauuaacuacau

SEQ ID NO: 2912592 - RNA, 15 nt, Human
uauuaacuacauuua

SEQ ID NO: 2912593 - RNA, 16 nt, Human
uauuaacuacauuuau

SEQ ID NO: 2912594 - RNA, 18 nt, Human
uauuaacuacauuuauga

SEQ ID NO: 2912595 - RNA, 23 nt, Human
uauuaacaacaauaacacugucu

SEQ ID NO: 2912596 - RNA, 12 nt, Human
uauuaaauaguu

SEQ ID NO: 2912597 - RNA, 23 nt, Human
uauuaacaaacaucacucugcug

SEQ ID NO: 2912598 - RNA, 13 nt, Human
uauuaacaaaagu

SEQ ID NO: 2912599 - RNA, 14 nt, Human
uauuaacaaaaguu

SEQ ID NO: 2912600 - RNA, 18 nt, Human
uauuaacaaaaguucccu

SEQ ID NO: 2912601 - RNA, 17 nt, Human
uauguuguuagagaaaa

SEQ ID NO: 2912602 - RNA, 19 nt, Human
uauguuguuagagaaaaau

SEQ ID NO: 2912603 - RNA, 17 nt, Human
uauccuuucuaacaaaa

SEQ ID NO: 2912604 - RNA, 15 nt, Human
uauccugcauuguua

SEQ ID NO: 2912605 - RNA, 23 nt, Human
uauccugacuucuaauaucauuc

SEQ ID NO: 2912606 - RNA, 13 nt, Human
uauccuucaucuu

SEQ ID NO: 2912607 - RNA, 16 nt, Human
uauccuucaucuuuua

SEQ ID NO: 2912608 - RNA, 20 nt, Human
uauccuucaucuuuuaaaga

SEQ ID NO: 2912609 - RNA, 22 nt, Human
uauccuucaucuuuuaaagaaa

SEQ ID NO: 2912610 - RNA, 16 nt, Human
uauccuuccucuccuu

SEQ ID NO: 2912611 - RNA, 17 nt, Human
uauccuuccucuccuuc

SEQ ID NO: 2912612 - RNA, 17 nt, Human
uaucggggaagccagac

SEQ ID NO: 2912613 - RNA, 18 nt, Human
uaucggggaagccagacg

SEQ ID NO: 2912614 - RNA, 21 nt, Human
uaucguaaccagccagauccu

SEQ ID NO: 2912615 - RNA, 19 nt, Human
uauauguuuuaagaggcag

SEQ ID NO: 2912616 - RNA, 15 nt, Human
uauauguguugaaaa

SEQ ID NO: 2912617 - RNA, 16 nt, Human
uauauguguugaaaac

SEQ ID NO: 2912618 - RNA, 14 nt, Human
uauccugaaauuuc

SEQ ID NO: 2912619 - RNA, 17 nt, Human
uauccugaaauuucaga

SEQ ID NO: 2912620 - RNA, 16 nt, Human
uauccugaaauuucag

SEQ ID NO: 2912621 - RNA, 21 nt, Human
uaucuacccaagggcagaaag

SEQ ID NO: 2912622 - RNA, 22 nt, Human
uaucuacccaagggcagaaagu

SEQ ID NO: 2912623 - RNA, 21 nt, Human
uaucuaauauauaugaauaaa

SEQ ID NO: 2912624 - RNA, 21 nt, Human
uaucuacaucuuuuuucacaa

SEQ ID NO: 2912625 - RNA, 16 nt, Human
uaucuacaucuuuuuu

SEQ ID NO: 2912626 - RNA, 17 nt, Human
uaucuaauauauaugaa

SEQ ID NO: 2912627 - RNA, 20 nt, Human
uaucuaauaccucugugugc

SEQ ID NO: 2912628 - RNA, 18 nt, Human
uaucuaauauauaugaau

SEQ ID NO: 2912629 - RNA, 20 nt, Human
uaucuaauauauaugaauaa

SEQ ID NO: 2912630 - RNA, 13 nt, Human
uaucuaaugacau

SEQ ID NO: 2912631 - RNA, 14 nt, Human
uaucuaaugacaug

SEQ ID NO: 2912632 - RNA, 21 nt, Human
uaucuaauauguaacaagcca

SEQ ID NO: 2912633 - RNA, 16 nt, Human
uaucuaauaccucugu

SEQ ID NO: 2912634 - RNA, 15 nt, Human
uaucuaauaccucug

SEQ ID NO: 2912635 - RNA, 13 nt, Human
uaucuaagaauac

SEQ ID NO: 2912636 - RNA, 18 nt, Human
uaucuaagaauacagcuu

SEQ ID NO: 2912637 - RNA, 19 nt, Human
uaucuaagaauacagcuuu

SEQ ID NO: 2912638 - RNA, 20 nt, Human
uaucuaagaauacagcuuuc

SEQ ID NO: 2912639 - RNA, 23 nt, Human
uaucuaagaauacagcuuucuga

SEQ ID NO: 2912640 - RNA, 14 nt, Human
uaucugaguugcca

SEQ ID NO: 2912641 - RNA, 17 nt, Human
uaucugaguugccaaga

SEQ ID NO: 2912642 - RNA, 18 nt, Human
uaucugaguugccaagac

SEQ ID NO: 2912643 - RNA, 19 nt, Human
uaucugaguugccaagaca

SEQ ID NO: 2912644 - RNA, 21 nt, Human
uaucugaguugccaagacaaa

SEQ ID NO: 2912645 - RNA, 23 nt, Human
uaucugaguugccaagacaaauc

SEQ ID NO: 2912646 - RNA, 16 nt, Human
uaucugauuuugugca

SEQ ID NO: 2912647 - RNA, 22 nt, Human
uaucugauuuugugcaaaagcu

SEQ ID NO: 2912648 - RNA, 22 nt, Human
uaucuggccccagguagaaacu

SEQ ID NO: 2912649 - RNA, 23 nt, Human
uaucuggcccucgacacucacca

SEQ ID NO: 2912650 - RNA, 18 nt, Human
uaucuggccuaaaaucuu

SEQ ID NO: 2912651 - RNA, 19 nt, Human
uaucuggccuaaaaucuug

SEQ ID NO: 2912652 - RNA, 20 nt, Human
uaucuggaggccuuccagcu

SEQ ID NO: 2912653 - RNA, 23 nt, Human
uaucuggaggccuuccagcugcu

SEQ ID NO: 2912654 - RNA, 12 nt, Human
uaucuaaauuaa

SEQ ID NO: 2912655 - RNA, 19 nt, Human
uaucuggccauauuuacua

SEQ ID NO: 2912656 - RNA, 19 nt, Human
uaucuggaaguaaccauuu

SEQ ID NO: 2912657 - RNA, 16 nt, Human
uaucuggaaugagccu

SEQ ID NO: 2912658 - RNA, 20 nt, Human
uaucugcuucaguggagaau

SEQ ID NO: 2912659 - RNA, 15 nt, Human
uaugaauuuaaauau

SEQ ID NO: 2912660 - RNA, 20 nt, Human
uaugaauguacugcauguua

SEQ ID NO: 2912661 - RNA, 23 nt, Human
uaugaauguacugcauguuacca

SEQ ID NO: 2912662 - RNA, 19 nt, Human
uaucuuagauguuucacac

SEQ ID NO: 2912663 - RNA, 23 nt, Human
uaugaaucugcucacuuuaaacc

SEQ ID NO: 2912664 - RNA, 21 nt, Human
uaugaauauauggcauuugca

SEQ ID NO: 2912665 - RNA, 23 nt, Human
uaugaaucagugggcaggauaaa

SEQ ID NO: 2912666 - RNA, 12 nt, Human
uaugaauaaagu

SEQ ID NO: 2912667 - RNA, 22 nt, Human
uaucuucucaaguucuaagauu

SEQ ID NO: 2912668 - RNA, 15 nt, Human
uaugaauacagcagc

SEQ ID NO: 2912669 - RNA, 16 nt, Human
uaugaauacagcagca

SEQ ID NO: 2912670 - RNA, 17 nt, Human
uaugaauacagcagcaa

SEQ ID NO: 2912671 - RNA, 20 nt, Human
uaugaauacagcagcaagaa

SEQ ID NO: 2912672 - RNA, 22 nt, Human
uaugaauacagcagcaagaaaa

SEQ ID NO: 2912673 - RNA, 19 nt, Human
uaugacaucacuuguacaa

SEQ ID NO: 2912674 - RNA, 19 nt, Human
uaugaccacacuccagcug

SEQ ID NO: 2912675 - RNA, 14 nt, Human
uaugaccacacucc

SEQ ID NO: 2912676 - RNA, 24 nt, Human
uaugacaucacuuguacaaaauaa

SEQ ID NO: 2912677 - RNA, 14 nt, Human
uaugacauucaugc

SEQ ID NO: 2912678 - RNA, 19 nt, Human
uaugacauucaugccuggc

SEQ ID NO: 2912679 - RNA, 23 nt, Human
uaugacaucacuuguacaaaaua

SEQ ID NO: 2912680 - RNA, 20 nt, Human
uaugacaucacuuguacaaa

SEQ ID NO: 2912681 - RNA, 23 nt, Human
uaugaauuuaaauauaauucugu

SEQ ID NO: 2912682 - RNA, 17 nt, Human
uaugaauuuaaauauaa

SEQ ID NO: 2912683 - RNA, 19 nt, Human
uaugaauuuaaauauaauu

SEQ ID NO: 2912684 - RNA, 20 nt, Human
uaugaauuuaaauauaauuc

SEQ ID NO: 2912685 - RNA, 21 nt, Human
uaugaauuuaaauauaauucu

SEQ ID NO: 2912686 - RNA, 19 nt, Human
uaucugugaaaugcuggca

SEQ ID NO: 2912687 - RNA, 14 nt, Human
uaucugugcucagg

SEQ ID NO: 2912688 - RNA, 22 nt, Human
uaucugugcucaggacucagaa

SEQ ID NO: 2912689 - RNA, 13 nt, Human
uaucuguggucuu

SEQ ID NO: 2912690 - RNA, 23 nt, Human
uaucugucauuugagcagggcuc

SEQ ID NO: 2912691 - RNA, 21 nt, Human
uaucugucauuugagcagggc

SEQ ID NO: 2912692 - RNA, 20 nt, Human
uaucugucauuugagcaggg

SEQ ID NO: 2912693 - RNA, 14 nt, Human
uaucugggccuggg

SEQ ID NO: 2912694 - RNA, 16 nt, Human
uaucugggccugggcu

SEQ ID NO: 2912695 - RNA, 18 nt, Human
uaucuguuuaaagcauau

SEQ ID NO: 2912696 - RNA, 12 nt, Human
uaucuguucuug

SEQ ID NO: 2912697 - RNA, 18 nt, Human
uaucuuauacuguacaau

SEQ ID NO: 2912698 - RNA, 14 nt, Human
uaucuuaaauuuga

SEQ ID NO: 2912699 - RNA, 15 nt, Human
uaucuuaaagaaaca

SEQ ID NO: 2912700 - RNA, 18 nt, Human
uaucuuaaagaaacagcu

SEQ ID NO: 2912701 - RNA, 20 nt, Human
uaucuuaaagaaacagcuuu

SEQ ID NO: 2912702 - RNA, 23 nt, Human
uaucuuaaagaaacagcuuucaa

SEQ ID NO: 2912703 - RNA, 18 nt, Human
uaugaauaaagacaccua

SEQ ID NO: 2912704 - RNA, 18 nt, Human
uaugaaguuuaaaacagu

SEQ ID NO: 2912705 - RNA, 21 nt, Human
uaugaaguuuaaaacaguauu

SEQ ID NO: 2912706 - RNA, 22 nt, Human
uaugaaguuuaaaacaguauuu

SEQ ID NO: 2912707 - RNA, 15 nt, Human
uaucuucucaaguuc

SEQ ID NO: 2912708 - RNA, 13 nt, Human
uaucuuccaaaug

SEQ ID NO: 2912709 - RNA, 14 nt, Human
uaucuuccauauuu

SEQ ID NO: 2912710 - RNA, 17 nt, Human
uaucuuccauauuugga

SEQ ID NO: 2912711 - RNA, 17 nt, Human
uaucuucucaaguucua

SEQ ID NO: 2912712 - RNA, 18 nt, Human
uaucuucucaaguucuaa

SEQ ID NO: 2912713 - RNA, 20 nt, Human
uaucuucucaaguucuaaga

SEQ ID NO: 2912714 - RNA, 21 nt, Human
uaucuucucaaguucuaagau

SEQ ID NO: 2912715 - RNA, 12 nt, Human
uaucuucacaua

SEQ ID NO: 2912716 - RNA, 14 nt, Human
uaucuucacauagu

SEQ ID NO: 2912717 - RNA, 15 nt, Human
uaucuucacauaguu

SEQ ID NO: 2912718 - RNA, 18 nt, Human
uaucuucagcucuuuuug

SEQ ID NO: 2912719 - RNA, 14 nt, Human
uaugauuuucauaa

SEQ ID NO: 2912720 - RNA, 16 nt, Human
uaugauuuucauaacu

SEQ ID NO: 2912721 - RNA, 19 nt, Human
uaugauuuucauaacuuau

SEQ ID NO: 2912722 - RNA, 16 nt, Human
uaugauuuuuuaaaag

SEQ ID NO: 2912723 - RNA, 17 nt, Human
uaugauuuuuuaaaaga

SEQ ID NO: 2912724 - RNA, 18 nt, Human
uaugauuuuuuaaaagaa

SEQ ID NO: 2912725 - RNA, 20 nt, Human
uaugauuuuuuaaaagaaau

SEQ ID NO: 2912726 - RNA, 21 nt, Human
uaugauuuuuuaaaagaaauu

SEQ ID NO: 2912727 - RNA, 18 nt, Human
uaugauuuggaaaauaaa

SEQ ID NO: 2912728 - RNA, 15 nt, Human
uaugauuuggaaaau

SEQ ID NO: 2912729 - RNA, 17 nt, Human
uaugauuuggaaaauaa

SEQ ID NO: 2912730 - RNA, 14 nt, Human
uaugauuuauaguu

SEQ ID NO: 2912731 - RNA, 15 nt, Human
uaugauuuauaguuu

SEQ ID NO: 2912732 - RNA, 18 nt, Human
uaugauuuauaguuugua

SEQ ID NO: 2912733 - RNA, 21 nt, Human
uaugauuucacuagaaaagcu

SEQ ID NO: 2912734 - RNA, 22 nt, Human
uaugauuucacuagaaaagcug

SEQ ID NO: 2912735 - RNA, 17 nt, Human
uaugauuuauaaacaga

SEQ ID NO: 2912736 - RNA, 19 nt, Human
uaugauuuauaaacagaca

SEQ ID NO: 2912737 - RNA, 20 nt, Human
uaugauuuauaaacagacaa

SEQ ID NO: 2912738 - RNA, 17 nt, Human
uaugauuuaauaaaaua

SEQ ID NO: 2912739 - RNA, 18 nt, Human
uaugauuuaauaaaauaa

SEQ ID NO: 2912740 - RNA, 14 nt, Human
uaugauuuaaaaca

SEQ ID NO: 2912741 - RNA, 17 nt, Human
uaugauuuaaaacaugu

SEQ ID NO: 2912742 - RNA, 18 nt, Human
uaugauuuaaaacaugua

SEQ ID NO: 2912743 - RNA, 14 nt, Human
uaugauuuaauaaa

SEQ ID NO: 2912744 - RNA, 13 nt, Human
uaugcaaaaugga

SEQ ID NO: 2912745 - RNA, 14 nt, Human
uaugcaaaauggaa

SEQ ID NO: 2912746 - RNA, 20 nt, Human
uaugcaaggaaggaaagaaa

SEQ ID NO: 2912747 - RNA, 12 nt, Human
uaugcaauaaaa

SEQ ID NO: 2912748 - RNA, 21 nt, Human
uaugcaauaaaauuauuugca

SEQ ID NO: 2912749 - RNA, 17 nt, Human
uaugcaaggaaggaaag

SEQ ID NO: 2912750 - RNA, 16 nt, Human
uaugcaauuuccuuuu

SEQ ID NO: 2912751 - RNA, 17 nt, Human
uaugcaauggauuuuca

SEQ ID NO: 2912752 - RNA, 22 nt, Human
uaugcaauggauuuucaaccag

SEQ ID NO: 2912753 - RNA, 13 nt, Human
uaugcacauaugg

SEQ ID NO: 2912754 - RNA, 21 nt, Human
uaugauucagauuguuaucua

SEQ ID NO: 2912755 - RNA, 13 nt, Human
uaugagcagaagg

SEQ ID NO: 2912756 - RNA, 15 nt, Human
uaugagcagaaggaa

SEQ ID NO: 2912757 - RNA, 13 nt, Human
uaugagcauccug

SEQ ID NO: 2912758 - RNA, 17 nt, Human
uaugagcauccugagcc

SEQ ID NO: 2912759 - RNA, 18 nt, Human
uaugagcauccugagccc

SEQ ID NO: 2912760 - RNA, 20 nt, Human
uaugagcauccugagccccg

SEQ ID NO: 2912761 - RNA, 22 nt, Human
uaugagcauccugagccccgcc

SEQ ID NO: 2912762 - RNA, 12 nt, Human
uaugagaaaugu

SEQ ID NO: 2912763 - RNA, 13 nt, Human
uaugagaaaugua

SEQ ID NO: 2912764 - RNA, 14 nt, Human
uaugagaaauguaa

SEQ ID NO: 2912765 - RNA, 16 nt, Human
uaugagaaauguaaug

SEQ ID NO: 2912766 - RNA, 14 nt, Human
uaugagaagaauag

SEQ ID NO: 2912767 - RNA, 20 nt, Human
uaugagccgugaacugugca

SEQ ID NO: 2912768 - RNA, 21 nt, Human
uaugagccgugaacugugcau

SEQ ID NO: 2912769 - RNA, 17 nt, Human
uaugacuauguaaacua

SEQ ID NO: 2912770 - RNA, 16 nt, Human
uaugacuauguaaacu

SEQ ID NO: 2912771 - RNA, 15 nt, Human
uaugacgcugauaca

SEQ ID NO: 2912772 - RNA, 16 nt, Human
uaugacgcugauacau

SEQ ID NO: 2912773 - RNA, 17 nt, Human
uaugacgcugauacaua

SEQ ID NO: 2912774 - RNA, 18 nt, Human
uaugacgcugauacauaa

SEQ ID NO: 2912775 - RNA, 22 nt, Human
uaugacgcugauacauaacuaa

SEQ ID NO: 2912776 - RNA, 23 nt, Human
uaugacgcugauacauaacuaaa

SEQ ID NO: 2912777 - RNA, 20 nt, Human
uaugacauucaugccuggcu

SEQ ID NO: 2912778 - RNA, 17 nt, Human
uaugacugcuccccagc

SEQ ID NO: 2912779 - RNA, 18 nt, Human
uaugacuauguaaacuac

SEQ ID NO: 2912780 - RNA, 18 nt, Human
uaugacugcuccccagcc

SEQ ID NO: 2912781 - RNA, 22 nt, Human
uaugacugcuccccagcccugg

SEQ ID NO: 2912782 - RNA, 15 nt, Human
uaugcacuaaauaug

SEQ ID NO: 2912783 - RNA, 16 nt, Human
uaugcacuaaauauga

SEQ ID NO: 2912784 - RNA, 14 nt, Human
uaugcaccuugugu

SEQ ID NO: 2912785 - RNA, 21 nt, Human
uaugauuguuucucaaaucuu

SEQ ID NO: 2912786 - RNA, 19 nt, Human
uaugcacauauggacucug

SEQ ID NO: 2912787 - RNA, 20 nt, Human
uaugcacauauggacucugc

SEQ ID NO: 2912788 - RNA, 18 nt, Human
uaugcaccuugugucugu

SEQ ID NO: 2912789 - RNA, 19 nt, Human
uaugcaccuugugucugua

SEQ ID NO: 2912790 - RNA, 20 nt, Human
uaugcaccuugugucuguac

SEQ ID NO: 2912791 - RNA, 22 nt, Human
uaugcaccuugugucuguacac

SEQ ID NO: 2912792 - RNA, 19 nt, Human
uaugcagugauauggcaga

SEQ ID NO: 2912793 - RNA, 22 nt, Human
uaugcagugauauggcagaaga

SEQ ID NO: 2912794 - RNA, 14 nt, Human
uaugcagaauguuu

SEQ ID NO: 2912795 - RNA, 18 nt, Human
uaugcagagguccacaac

SEQ ID NO: 2912796 - RNA, 16 nt, Human
uauggaaaaucagcug

SEQ ID NO: 2912797 - RNA, 14 nt, Human
uauggaaacccgag

SEQ ID NO: 2912798 - RNA, 17 nt, Human
uauggaaacccgagggu

SEQ ID NO: 2912799 - RNA, 16 nt, Human
uauggaaauaaaugua

SEQ ID NO: 2912800 - RNA, 21 nt, Human
uauggaaaaaccauuugaagu

SEQ ID NO: 2912801 - RNA, 17 nt, Human
uaugcagauagaaucaa

SEQ ID NO: 2912802 - RNA, 13 nt, Human
uaugcuugcucua

SEQ ID NO: 2912803 - RNA, 17 nt, Human
uauggaaauaaauguau

SEQ ID NO: 2912804 - RNA, 13 nt, Human
uauggaacucucu

SEQ ID NO: 2912805 - RNA, 17 nt, Human
uauggaacucucuccac

SEQ ID NO: 2912806 - RNA, 13 nt, Human
uauggaacuucua

SEQ ID NO: 2912807 - RNA, 15 nt, Human
uauggaacuucuaau

SEQ ID NO: 2912808 - RNA, 17 nt, Human
uauggaacuucuaauau

SEQ ID NO: 2912809 - RNA, 20 nt, Human
uauggaacuucuaauauauu

SEQ ID NO: 2912810 - RNA, 19 nt, Human
uauggaaggguuuguggcu

SEQ ID NO: 2912811 - RNA, 22 nt, Human
uauggaaggguuuguggcuggg

SEQ ID NO: 2912812 - RNA, 18 nt, Human
uauggaauugauuugcau

SEQ ID NO: 2912813 - RNA, 18 nt, Human
uauggaaguugcauaauu

SEQ ID NO: 2912814 - RNA, 14 nt, Human
uauggacacagggu

SEQ ID NO: 2912815 - RNA, 13 nt, Human
uauggaaucaauu

SEQ ID NO: 2912816 - RNA, 15 nt, Human
uauggaaucaauuca

SEQ ID NO: 2912817 - RNA, 14 nt, Human
uauggaauuacaug

SEQ ID NO: 2912818 - RNA, 18 nt, Human
uauggaauuacauguaaa

SEQ ID NO: 2912819 - RNA, 22 nt, Human
uauggaauuacauguaaaacau

SEQ ID NO: 2912820 - RNA, 11 nt, Human
uauggaauuga

SEQ ID NO: 2912821 - RNA, 19 nt, Human
uauggaauugauuugcauu

SEQ ID NO: 2912822 - RNA, 19 nt, Human
uauggaauuuauaauucag

SEQ ID NO: 2912823 - RNA, 20 nt, Human
uauggaauuuauaauucagu

SEQ ID NO: 2912824 - RNA, 22 nt, Human
uauggaauuuauaauucaguau

SEQ ID NO: 2912825 - RNA, 12 nt, Human
uauaucugaaaa

SEQ ID NO: 2912826 - RNA, 16 nt, Human
uauaucugaaaacugg

SEQ ID NO: 2912827 - RNA, 17 nt, Human
uauaucugaaaacugga

SEQ ID NO: 2912828 - RNA, 18 nt, Human
uauaucugaaaacuggaa

SEQ ID NO: 2912829 - RNA, 14 nt, Human
uauauguguaugua

SEQ ID NO: 2912830 - RNA, 14 nt, Human
uauauguguauaua

SEQ ID NO: 2912831 - RNA, 17 nt, Human
uauauguguauauauac

SEQ ID NO: 2912832 - RNA, 18 nt, Human
uauauguguauauauaca

SEQ ID NO: 2912833 - RNA, 19 nt, Human
uauauguguauauauacau

SEQ ID NO: 2912834 - RNA, 20 nt, Human
uauauguguauauauacaua

SEQ ID NO: 2912835 - RNA, 16 nt, Human
uauauguauuauuuau

SEQ ID NO: 2912836 - RNA, 12 nt, Human
uauauguauuuu

SEQ ID NO: 2912837 - RNA, 17 nt, Human
uauauguauuuuuauau

SEQ ID NO: 2912838 - RNA, 22 nt, Human
uauaugugaauccucuucuuua

SEQ ID NO: 2912839 - RNA, 12 nt, Human
uauaugugagga

SEQ ID NO: 2912840 - RNA, 19 nt, Human
uauauguauuauuuauaau

SEQ ID NO: 2912841 - RNA, 11 nt, Human
uauauguauuu

SEQ ID NO: 2912842 - RNA, 18 nt, Human
uauauaaauguaaaaaua

SEQ ID NO: 2912843 - RNA, 22 nt, Human
uauauaaauguaaaaauaauaa

SEQ ID NO: 2912844 - RNA, 14 nt, Human
uauauaaaugggaa

SEQ ID NO: 2912845 - RNA, 17 nt, Human
uauauaaaugggaacau

SEQ ID NO: 2912846 - RNA, 14 nt, Human
uauauaaaguauag

SEQ ID NO: 2912847 - RNA, 17 nt, Human
uauaguuaggauagcau

SEQ ID NO: 2912848 - RNA, 21 nt, Human
uauaguguaaaauaagaauga

SEQ ID NO: 2912849 - RNA, 13 nt, Human
uauaguguaaaau

SEQ ID NO: 2912850 - RNA, 18 nt, Human
uauaguguaaaauaagaa

SEQ ID NO: 2912851 - RNA, 16 nt, Human
uauagugcacaaaaug

SEQ ID NO: 2912852 - RNA, 17 nt, Human
uauagugcacaaaauga

SEQ ID NO: 2912853 - RNA, 18 nt, Human
uauagugcacaaaaugaa

SEQ ID NO: 2912854 - RNA, 20 nt, Human
uauagugcuauauauauaaa

SEQ ID NO: 2912855 - RNA, 15 nt, Human
uauaguggaaaaaca

SEQ ID NO: 2912856 - RNA, 18 nt, Human
uauaguggaaaaacacau

SEQ ID NO: 2912857 - RNA, 17 nt, Human
uauaguuccuaagaagc

SEQ ID NO: 2912858 - RNA, 22 nt, Human
uauaguuccuaagaagcuucua

SEQ ID NO: 2912859 - RNA, 23 nt, Human
uauaguuccuaagaagcuucuaa

SEQ ID NO: 2912860 - RNA, 18 nt, Human
uauaguuaggauagcauu

SEQ ID NO: 2912861 - RNA, 19 nt, Human
uauaguuaggauagcauuu

SEQ ID NO: 2912862 - RNA, 13 nt, Human
uauaguucuaggc

SEQ ID NO: 2912863 - RNA, 13 nt, Human
uauaguugcuuuu

SEQ ID NO: 2912864 - RNA, 14 nt, Human
uauaguugucagua

SEQ ID NO: 2912865 - RNA, 21 nt, Human
uauaguugucaguauuauucu

SEQ ID NO: 2912866 - RNA, 12 nt, Human
uauaguucuaga

SEQ ID NO: 2912867 - RNA, 13 nt, Human
uauaguucuagac

SEQ ID NO: 2912868 - RNA, 15 nt, Human
uauaguucuagacau

SEQ ID NO: 2912869 - RNA, 12 nt, Human
uauaguucuagg

SEQ ID NO: 2912870 - RNA, 13 nt, Human
uauaguuucagau

SEQ ID NO: 2912871 - RNA, 19 nt, Human
uauaguuuauugacaauaa

SEQ ID NO: 2912872 - RNA, 14 nt, Human
uauaguuuaaaaca

SEQ ID NO: 2912873 - RNA, 18 nt, Human
uauaguuuaaaacacauu

SEQ ID NO: 2912874 - RNA, 19 nt, Human
uauaguuuaaaacacauug

SEQ ID NO: 2912875 - RNA, 15 nt, Human
uauaguuuguacaug

SEQ ID NO: 2912876 - RNA, 18 nt, Human
uauaguuuguacaugcau

SEQ ID NO: 2912877 - RNA, 22 nt, Human
uauaguuucagauauauaucau

SEQ ID NO: 2912878 - RNA, 14 nt, Human
uauaguuucugagg

SEQ ID NO: 2912879 - RNA, 22 nt, Human
uauaguuucugaggcuuuauga

SEQ ID NO: 2912880 - RNA, 15 nt, Human
uauaguuugggcuuc

SEQ ID NO: 2912881 - RNA, 17 nt, Human
uauaguuugggcuucag

SEQ ID NO: 2912882 - RNA, 15 nt, Human
uauacgcuuuucuuu

SEQ ID NO: 2912883 - RNA, 17 nt, Human
uauacgaacaaaacaca

SEQ ID NO: 2912884 - RNA, 15 nt, Human
uauacgaacaaaaca

SEQ ID NO: 2912885 - RNA, 16 nt, Human
uauaccuuugccuugg

SEQ ID NO: 2912886 - RNA, 17 nt, Human
uauacugauuaugucuu

SEQ ID NO: 2912887 - RNA, 20 nt, Human
uauacugauuaugucuuuua

SEQ ID NO: 2912888 - RNA, 14 nt, Human
uauaauucuguaaa

SEQ ID NO: 2912889 - RNA, 15 nt, Human
uauaauucuguaaau

SEQ ID NO: 2912890 - RNA, 13 nt, Human
uauaauucuguaa

SEQ ID NO: 2912891 - RNA, 16 nt, Human
uauaauucuguaaaug

SEQ ID NO: 2912892 - RNA, 19 nt, Human
uauaccugugccucggcuu

SEQ ID NO: 2912893 - RNA, 15 nt, Human
uauaccugugccucg

SEQ ID NO: 2912894 - RNA, 13 nt, Human
uauaaucugucaa

SEQ ID NO: 2912895 - RNA, 14 nt, Human
uauaaucugucaaa

SEQ ID NO: 2912896 - RNA, 19 nt, Human
uauaaucugucaaaacacu

SEQ ID NO: 2912897 - RNA, 20 nt, Human
uauaaucugucaaaacacug

SEQ ID NO: 2912898 - RNA, 21 nt, Human
uauaaucugucaaaacacugu

SEQ ID NO: 2912899 - RNA, 22 nt, Human
uauaaucugucaaaacacugug

SEQ ID NO: 2912900 - RNA, 23 nt, Human
uauaaucugucaaaacacugugg

SEQ ID NO: 2912901 - RNA, 18 nt, Human
uauaaucccagcacuuug

SEQ ID NO: 2912902 - RNA, 15 nt, Human
uauaaagaauauaua

SEQ ID NO: 2912903 - RNA, 14 nt, Human
uauaaugaaaacau

SEQ ID NO: 2912904 - RNA, 12 nt, Human
uauaaugugugu

SEQ ID NO: 2912905 - RNA, 13 nt, Human
uauaaugugugua

SEQ ID NO: 2912906 - RNA, 14 nt, Human
uauaauguguguau

SEQ ID NO: 2912907 - RNA, 15 nt, Human
uauaauguguguaug

SEQ ID NO: 2912908 - RNA, 17 nt, Human
uauaauguguguaugug

SEQ ID NO: 2912909 - RNA, 19 nt, Human
uauaauguguguaugugua

SEQ ID NO: 2912910 - RNA, 20 nt, Human
uauaauguguguauguguau

SEQ ID NO: 2912911 - RNA, 22 nt, Human
uauaauguguguauguguauuu

SEQ ID NO: 2912912 - RNA, 22 nt, Human
uaguugcguggacucugcacau

SEQ ID NO: 2912913 - RNA, 18 nt, Human
uauaaagaagaacuugca

SEQ ID NO: 2912914 - RNA, 17 nt, Human
uaguugcaauagaacag

SEQ ID NO: 2912915 - RNA, 13 nt, Human
uaguugauauguu

SEQ ID NO: 2912916 - RNA, 21 nt, Human
uaguugccaaaucuggcuccu

SEQ ID NO: 2912917 - RNA, 12 nt, Human
uauaaaugagca

SEQ ID NO: 2912918 - RNA, 13 nt, Human
uauaaaugagcaa

SEQ ID NO: 2912919 - RNA, 17 nt, Human
uauaaagauggcugacu

SEQ ID NO: 2912920 - RNA, 21 nt, Human
uauaaagcgauauacagauga

SEQ ID NO: 2912921 - RNA, 22 nt, Human
uauaaagcgauauacagaugaa

SEQ ID NO: 2912922 - RNA, 23 nt, Human
uauaaagcgauauacagaugaaa

SEQ ID NO: 2912923 - RNA, 16 nt, Human
uauaaagcuagaugcu

SEQ ID NO: 2912924 - RNA, 19 nt, Human
uauaaagaagaacuugcau

SEQ ID NO: 2912925 - RNA, 17 nt, Human
uauaaagagaagacgaa

SEQ ID NO: 2912926 - RNA, 16 nt, Human
uauaaauguauauaca

SEQ ID NO: 2912927 - RNA, 18 nt, Human
uauaaauguauauacaca

SEQ ID NO: 2912928 - RNA, 19 nt, Human
uauaaauguauauacacau

SEQ ID NO: 2912929 - RNA, 20 nt, Human
uauaaauguauauacacaua

SEQ ID NO: 2912930 - RNA, 23 nt, Human
uauaaauguauauacacauauac

SEQ ID NO: 2912931 - RNA, 15 nt, Human
uauaaaugggaacau

SEQ ID NO: 2912932 - RNA, 17 nt, Human
uauaaaugggaacauuu

SEQ ID NO: 2912933 - RNA, 15 nt, Human
uauaaaugugauaug

SEQ ID NO: 2912934 - RNA, 14 nt, Human
uauaauaaaaugug

SEQ ID NO: 2912935 - RNA, 20 nt, Human
uauaauaaaauguguugaaa

SEQ ID NO: 2912936 - RNA, 12 nt, Human
uauaauaaacau

SEQ ID NO: 2912937 - RNA, 14 nt, Human
uauaauaaacauaa

SEQ ID NO: 2912938 - RNA, 14 nt, Human
uauaauaaaggacu

SEQ ID NO: 2912939 - RNA, 22 nt, Human
uauaauaaaggacuguaaucuu

SEQ ID NO: 2912940 - RNA, 19 nt, Human
uauaauaaaggacuguaau

SEQ ID NO: 2912941 - RNA, 15 nt, Human
uauaauauauuugug

SEQ ID NO: 2912942 - RNA, 14 nt, Human
uauaauauauauau

SEQ ID NO: 2912943 - RNA, 20 nt, Human
uauaauauauauauauauca

SEQ ID NO: 2912944 - RNA, 16 nt, Human
uauaauauauuugugu

SEQ ID NO: 2912945 - RNA, 22 nt, Human
uauaauauauuuguguauuuaa

SEQ ID NO: 2912946 - RNA, 15 nt, Human
uauaauauccuuugu

SEQ ID NO: 2912947 - RNA, 14 nt, Human
uauaauaucuaaag

SEQ ID NO: 2912948 - RNA, 20 nt, Human
uauaauaucuaaaguuauau

SEQ ID NO: 2912949 - RNA, 17 nt, Human
uauaauagcaacuuuug

SEQ ID NO: 2912950 - RNA, 14 nt, Human
uauaauacucuguu

SEQ ID NO: 2912951 - RNA, 17 nt, Human
uauaauacucuguugua

SEQ ID NO: 2912952 - RNA, 18 nt, Human
uaguauaccggaauuacu

SEQ ID NO: 2912953 - RNA, 16 nt, Human
uaguauaaagaaaagu

SEQ ID NO: 2912954 - RNA, 14 nt, Human
uaguauaaagaaaa

SEQ ID NO: 2912955 - RNA, 14 nt, Human
uaguaguucucuug

SEQ ID NO: 2912956 - RNA, 14 nt, Human
uaguaguuuuuaca

SEQ ID NO: 2912957 - RNA, 13 nt, Human
uaguaucaguguu

SEQ ID NO: 2912958 - RNA, 16 nt, Human
uaguaucaguguuuua

SEQ ID NO: 2912959 - RNA, 17 nt, Human
uaguaucaguguuuuaa

SEQ ID NO: 2912960 - RNA, 19 nt, Human
uaguaucaguguuuuaaau

SEQ ID NO: 2912961 - RNA, 21 nt, Human
uaguaucaguguuuuaaauuc

SEQ ID NO: 2912962 - RNA, 22 nt, Human
uaguaucaguguuuuaaauucu

SEQ ID NO: 2912963 - RNA, 23 nt, Human
uaggugacagagugagacucugu

SEQ ID NO: 2912964 - RNA, 21 nt, Human
uaggugauccacucgccuuca

SEQ ID NO: 2912965 - RNA, 15 nt, Human
uaggugagaaaaaaa

SEQ ID NO: 2912966 - RNA, 22 nt, Human
uaggugauguuugcucuuguuu

SEQ ID NO: 2912967 - RNA, 18 nt, Human
uaguaguaugaugauaca

SEQ ID NO: 2912968 - RNA, 22 nt, Human
uaggugcaauuucaagguucua

SEQ ID NO: 2912969 - RNA, 13 nt, Human
uaguauuuuuauc

SEQ ID NO: 2912970 - RNA, 15 nt, Human
uaguauuuuuaucca

SEQ ID NO: 2912971 - RNA, 12 nt, Human
uaguauuugaau

SEQ ID NO: 2912972 - RNA, 13 nt, Human
uaguauuugaauu

SEQ ID NO: 2912973 - RNA, 14 nt, Human
uaguauuugaauua

SEQ ID NO: 2912974 - RNA, 18 nt, Human
uaguauuugaauuaaaac

SEQ ID NO: 2912975 - RNA, 21 nt, Human
uaguauuugaauuaaaacuuc

SEQ ID NO: 2912976 - RNA, 12 nt, Human
uaguauuugauu

SEQ ID NO: 2912977 - RNA, 17 nt, Human
uaguauuugauucaaaa

SEQ ID NO: 2912978 - RNA, 20 nt, Human
uaguauuugauucaaaauau

SEQ ID NO: 2912979 - RNA, 23 nt, Human
uaguauuugauucaaaauauuua

SEQ ID NO: 2912980 - RNA, 19 nt, Human
uaguaugacgcugauacau

SEQ ID NO: 2912981 - RNA, 20 nt, Human
uaguaugacgcugauacaua

SEQ ID NO: 2912982 - RNA, 16 nt, Human
uagucaaauuauguau

SEQ ID NO: 2912983 - RNA, 15 nt, Human
uagugcacaaaauga

SEQ ID NO: 2912984 - RNA, 17 nt, Human
uagugcccuccacagcc

SEQ ID NO: 2912985 - RNA, 22 nt, Human
uagugcauccaguuaaccaagu

SEQ ID NO: 2912986 - RNA, 16 nt, Human
uagugcaucuuugccu

SEQ ID NO: 2912987 - RNA, 19 nt, Human
uagugcaucuuugccucuc

SEQ ID NO: 2912988 - RNA, 20 nt, Human
uagugcauuguuucuguggg

SEQ ID NO: 2912989 - RNA, 21 nt, Human
uagugcauuguuucugugggc

SEQ ID NO: 2912990 - RNA, 20 nt, Human
uagugccagaauuuuaggaa

SEQ ID NO: 2912991 - RNA, 21 nt, Human
uagugccagaauuuuaggaac

SEQ ID NO: 2912992 - RNA, 23 nt, Human
uagugcccuccacagccgcagcc

SEQ ID NO: 2912993 - RNA, 19 nt, Human
uaguguccauuuugugaag

SEQ ID NO: 2912994 - RNA, 23 nt, Human
uaguguccauuuugugaagcccu

SEQ ID NO: 2912995 - RNA, 14 nt, Human
uaguguccuaugca

SEQ ID NO: 2912996 - RNA, 16 nt, Human
uaguguccuaugcaau

SEQ ID NO: 2912997 - RNA, 17 nt, Human
uaguguccuaugcaaua

SEQ ID NO: 2912998 - RNA, 17 nt, Human
uagugugggaggcuccu

SEQ ID NO: 2912999 - RNA, 22 nt, Human
uagugugggaggcuccuguuag

SEQ ID NO: 2913000 - RNA, 18 nt, Human
uaggaauuaaguuaucuu

SEQ ID NO: 2913001 - RNA, 17 nt, Human
uaggaauucaucuuuug

SEQ ID NO: 2913002 - RNA, 18 nt, Human
uaggaauucaucuuuuga

SEQ ID NO: 2913003 - RNA, 17 nt, Human
uaggaaugugaaagcac

SEQ ID NO: 2913004 - RNA, 14 nt, Human
uaggaaucagcaag

SEQ ID NO: 2913005 - RNA, 15 nt, Human
uaggaaucagcaaga

SEQ ID NO: 2913006 - RNA, 18 nt, Human
guggcugaggaggccucc

SEQ ID NO: 2913007 - RNA, 17 nt, Human
guggcugaggaggccuc

SEQ ID NO: 2913008 - RNA, 21 nt, Human
guggcucugaggugccugucc

SEQ ID NO: 2913009 - RNA, 12 nt, Human
uaggaaucagca

SEQ ID NO: 2913010 - RNA, 19 nt, Human
uaggaccaugguuaagagu

SEQ ID NO: 2913011 - RNA, 23 nt, Human
uaggaccaugguuaagaguccaa

SEQ ID NO: 2913012 - RNA, 15 nt, Human
uaggaccacucagcc

SEQ ID NO: 2913013 - RNA, 16 nt, Human
uaggaccacucagccc

SEQ ID NO: 2913014 - RNA, 17 nt, Human
uaggaccacucagcccc

SEQ ID NO: 2913015 - RNA, 18 nt, Human
uaggaccacucagccccu

SEQ ID NO: 2913016 - RNA, 19 nt, Human
uaggaccacucagccccua

SEQ ID NO: 2913017 - RNA, 21 nt, Human
uaggaccacucagccccuagg

SEQ ID NO: 2913018 - RNA, 16 nt, Human
uaggaccaggauccag

SEQ ID NO: 2913019 - RNA, 20 nt, Human
uaggaccaggauccagccuc

SEQ ID NO: 2913020 - RNA, 13 nt, Human
uaggaccuugggc

SEQ ID NO: 2913021 - RNA, 14 nt, Human
uaggaccuugggcc

SEQ ID NO: 2913022 - RNA, 13 nt, Human
uaggcccacacac

SEQ ID NO: 2913023 - RNA, 14 nt, Human
uaggcccacacaca

SEQ ID NO: 2913024 - RNA, 15 nt, Human
uaggcccacacacag

SEQ ID NO: 2913025 - RNA, 16 nt, Human
uaggcccacacacagg

SEQ ID NO: 2913026 - RNA, 17 nt, Human
uaggcccacacacaggu

SEQ ID NO: 2913027 - RNA, 15 nt, Human
uaggccuggccagau

SEQ ID NO: 2913028 - RNA, 19 nt, Human
uaggcccggagcugccccu

SEQ ID NO: 2913029 - RNA, 18 nt, Human
uaggccuggccagaugca

SEQ ID NO: 2913030 - RNA, 21 nt, Human
uaggccuuccucucuccagau

SEQ ID NO: 2913031 - RNA, 18 nt, Human
uaggacaaaguauuugaa

SEQ ID NO: 2913032 - RNA, 19 nt, Human
uaggccggugugccugacu

SEQ ID NO: 2913033 - RNA, 18 nt, Human
uagguacuuuuugugaag

SEQ ID NO: 2913034 - RNA, 14 nt, Human
uagguagaaaaagg

SEQ ID NO: 2913035 - RNA, 16 nt, Human
uagguagaaaaagggu

SEQ ID NO: 2913036 - RNA, 18 nt, Human
uagguagaaaaaggguca

SEQ ID NO: 2913037 - RNA, 20 nt, Human
uagguaaucaaugaauauug

SEQ ID NO: 2913038 - RNA, 14 nt, Human
uagguacacagcuc

SEQ ID NO: 2913039 - RNA, 14 nt, Human
uagguauuucaaaa

SEQ ID NO: 2913040 - RNA, 20 nt, Human
uagguauaaguggugugugu

SEQ ID NO: 2913041 - RNA, 12 nt, Human
uaggcucugccu

SEQ ID NO: 2913042 - RNA, 23 nt, Human
uaggccuuccucucuccagaugu

SEQ ID NO: 2913043 - RNA, 19 nt, Human
uaggcucagagaugugcac

SEQ ID NO: 2913044 - RNA, 22 nt, Human
uaggcuccugccaguguggaac

SEQ ID NO: 2913045 - RNA, 21 nt, Human
ucauuguacuaccuguguaua

SEQ ID NO: 2913046 - RNA, 13 nt, Human
ucauuagcuguga

SEQ ID NO: 2913047 - RNA, 17 nt, Human
ucauuagcugugauuuu

SEQ ID NO: 2913048 - RNA, 18 nt, Human
ucauuagcugugauuuuu

SEQ ID NO: 2913049 - RNA, 23 nt, Human
ucaugguggguucaggggacuca

SEQ ID NO: 2913050 - RNA, 13 nt, Human
ucaugguguaaua

SEQ ID NO: 2913051 - RNA, 14 nt, Human
ucaugguguaauaa

SEQ ID NO: 2913052 - RNA, 19 nt, Human
ucauggugaaaauguacug

SEQ ID NO: 2913053 - RNA, 14 nt, Human
ucauggugaaaaug

SEQ ID NO: 2913054 - RNA, 19 nt, Human
ucaugguguaauaagacau

SEQ ID NO: 2913055 - RNA, 10 nt, Human
ucauuagaac

SEQ ID NO: 2913056 - RNA, 15 nt, Human
ucaugguguaauaag

SEQ ID NO: 2913057 - RNA, 16 nt, Human
ucaugguguaauaaga

SEQ ID NO: 2913058 - RNA, 17 nt, Human
ucaugguguaauaagac

SEQ ID NO: 2913059 - RNA, 18 nt, Human
ucaugguguaauaagaca

SEQ ID NO: 2913060 - RNA, 13 nt, Human
ucauuagagcagg

SEQ ID NO: 2913061 - RNA, 15 nt, Human
ucauuagagcaggcg

SEQ ID NO: 2913062 - RNA, 12 nt, Human
ucauuagagcag

SEQ ID NO: 2913063 - RNA, 13 nt, Human
ucauuagacuccu

SEQ ID NO: 2913064 - RNA, 18 nt, Human
ucauuagacuccuccucc

SEQ ID NO: 2913065 - RNA, 23 nt, Human
ucauuuaaguuucaaacuuacua

SEQ ID NO: 2913066 - RNA, 22 nt, Human
ucauuuaacugaagauguugag

SEQ ID NO: 2913067 - RNA, 12 nt, Human
ucauuguuuuga

SEQ ID NO: 2913068 - RNA, 13 nt, Human
ucauuguuuugaa

SEQ ID NO: 2913069 - RNA, 17 nt, Human
ucauuguuuugaauauu

SEQ ID NO: 2913070 - RNA, 23 nt, Human
ucauuguaugauguguugugaua

SEQ ID NO: 2913071 - RNA, 15 nt, Human
ucauuguauguuauu

SEQ ID NO: 2913072 - RNA, 13 nt, Human
ucauugucccucu

SEQ ID NO: 2913073 - RNA, 16 nt, Human
ucauugucccucuuca

SEQ ID NO: 2913074 - RNA, 20 nt, Human
ucauugucccucuucacucc

SEQ ID NO: 2913075 - RNA, 21 nt, Human
ucauugucccucuucacuccc

SEQ ID NO: 2913076 - RNA, 22 nt, Human
ucauugucucucacagauguga

SEQ ID NO: 2913077 - RNA, 14 nt, Human
ucauuguaugaugu

SEQ ID NO: 2913078 - RNA, 15 nt, Human
ucauuguaugaugug

SEQ ID NO: 2913079 - RNA, 17 nt, Human
ucauuguaugauguguu

SEQ ID NO: 2913080 - RNA, 18 nt, Human
ucauuguaugauguguug

SEQ ID NO: 2913081 - RNA, 12 nt, Human
ucauuuagaacu

SEQ ID NO: 2913082 - RNA, 16 nt, Human
ucauuuagaacuugca

SEQ ID NO: 2913083 - RNA, 22 nt, Human
ucauuuagaacuugcagcugau

SEQ ID NO: 2913084 - RNA, 19 nt, Human
ucauuuagauugaaaacuu

SEQ ID NO: 2913085 - RNA, 17 nt, Human
ucauuuagugaguuauu

SEQ ID NO: 2913086 - RNA, 23 nt, Human
ucauuuagugaguuauuccuuga

SEQ ID NO: 2913087 - RNA, 15 nt, Human
ucauuuacuaaacau

SEQ ID NO: 2913088 - RNA, 16 nt, Human
ucauuuacuaaacaua

SEQ ID NO: 2913089 - RNA, 22 nt, Human
ucauuuacuaaacauaugauuu

SEQ ID NO: 2913090 - RNA, 15 nt, Human
uccaaacauguauuu

SEQ ID NO: 2913091 - RNA, 19 nt, Human
uccaaacauguauuuaugu

SEQ ID NO: 2913092 - RNA, 20 nt, Human
uccaaacauguauuuaugua

SEQ ID NO: 2913093 - RNA, 19 nt, Human
uccaaagaggcugccccuc

SEQ ID NO: 2913094 - RNA, 20 nt, Human
uccaaagaguagaauugcau

SEQ ID NO: 2913095 - RNA, 21 nt, Human
uccaaaggccauggagagcug

SEQ ID NO: 2913096 - RNA, 22 nt, Human
uccaaaggccauggagagcugg

SEQ ID NO: 2913097 - RNA, 23 nt, Human
uccaaaggccauggagagcugga

SEQ ID NO: 2913098 - RNA, 14 nt, Human
uccaaaggcccccu

SEQ ID NO: 2913099 - RNA, 18 nt, Human
uccaaagaggcugccccu

SEQ ID NO: 2913100 - RNA, 16 nt, Human
uccaaagaggcugccc

SEQ ID NO: 2913101 - RNA, 15 nt, Human
uccaaagaggcugcc

SEQ ID NO: 2913102 - RNA, 14 nt, Human
uccaaagaggcugc

SEQ ID NO: 2913103 - RNA, 13 nt, Human
uccaaagaggcug

SEQ ID NO: 2913104 - RNA, 12 nt, Human
uccaaagaaugu

SEQ ID NO: 2913105 - RNA, 13 nt, Human
uccaaagaauguu

SEQ ID NO: 2913106 - RNA, 20 nt, Human
uccaaagaauguuagagcac

SEQ ID NO: 2913107 - RNA, 23 nt, Human
uccaaagaauguuagagcacagu

SEQ ID NO: 2913108 - RNA, 15 nt, Human
ucauuuaucccucaa

SEQ ID NO: 2913109 - RNA, 19 nt, Human
ucauuuauaucgcuggcca

SEQ ID NO: 2913110 - RNA, 18 nt, Human
ucauuuauuguuuaugua

SEQ ID NO: 2913111 - RNA, 22 nt, Human
ucauuuauuguuuauguaaaug

SEQ ID NO: 2913112 - RNA, 20 nt, Human
ucauuuauuuuaaaaaauga

SEQ ID NO: 2913113 - RNA, 16 nt, Human
ucauuuauuuuaagca

SEQ ID NO: 2913114 - RNA, 18 nt, Human
ucauuucaaaaugcuuca

SEQ ID NO: 2913115 - RNA, 22 nt, Human
uccaaaaagauuuucagaaaau

SEQ ID NO: 2913116 - RNA, 19 nt, Human
uccaaaaagcuccuggggc

SEQ ID NO: 2913117 - RNA, 14 nt, Human
ucauuucacauuaa

SEQ ID NO: 2913118 - RNA, 19 nt, Human
ucauuucacauuaaugguc

SEQ ID NO: 2913119 - RNA, 13 nt, Human
uccaaaaauuauu

SEQ ID NO: 2913120 - RNA, 14 nt, Human
uccaaaaauuauua

SEQ ID NO: 2913121 - RNA, 22 nt, Human
uccaaaaauuauuauaagcauu

SEQ ID NO: 2913122 - RNA, 16 nt, Human
uccaaaccaaauaaaa

SEQ ID NO: 2913123 - RNA, 14 nt, Human
uccaaaauuuuuca

SEQ ID NO: 2913124 - RNA, 15 nt, Human
uccaaaauuuuucaa

SEQ ID NO: 2913125 - RNA, 19 nt, Human
uccaaaauuuuucaacccc

SEQ ID NO: 2913126 - RNA, 21 nt, Human
uccaaaauuuuucaaccccac

SEQ ID NO: 2913127 - RNA, 12 nt, Human
uccaaaauucuu

SEQ ID NO: 2913128 - RNA, 23 nt, Human
ucauagaaauguaacuuuuguaa

SEQ ID NO: 2913129 - RNA, 17 nt, Human
ucaucaaggcacugccu

SEQ ID NO: 2913130 - RNA, 14 nt, Human
ucauagagauuugu

SEQ ID NO: 2913131 - RNA, 20 nt, Human
ucauagagauuugucuaauu

SEQ ID NO: 2913132 - RNA, 19 nt, Human
ucaguguaccauuugccuc

SEQ ID NO: 2913133 - RNA, 18 nt, Human
ucaguguaccauuugccu

SEQ ID NO: 2913134 - RNA, 14 nt, Human
ucaguguaguuaau

SEQ ID NO: 2913135 - RNA, 15 nt, Human
ucaguguaguuaauu

SEQ ID NO: 2913136 - RNA, 17 nt, Human
ucaguguaguuaauuua

SEQ ID NO: 2913137 - RNA, 18 nt, Human
ucaguguaguuaauuuau

SEQ ID NO: 2913138 - RNA, 22 nt, Human
ucaguguauggaaauaaaugua

SEQ ID NO: 2913139 - RNA, 15 nt, Human
ucaguguauuucagu

SEQ ID NO: 2913140 - RNA, 16 nt, Human
ucaguguauuucaguu

SEQ ID NO: 2913141 - RNA, 17 nt, Human
ucaguguauuucaguuc

SEQ ID NO: 2913142 - RNA, 21 nt, Human
ucaguguauggaaauaaaugu

SEQ ID NO: 2913143 - RNA, 13 nt, Human
ucaucaaucaaau

SEQ ID NO: 2913144 - RNA, 21 nt, Human
ucaguccuccccucacagccu

SEQ ID NO: 2913145 - RNA, 21 nt, Human
ucaucaauaguguccuaugca

SEQ ID NO: 2913146 - RNA, 21 nt, Human
ucaucaaucaaauaaguauuu

SEQ ID NO: 2913147 - RNA, 23 nt, Human
ucaucaaucaaauaaguauuuau

SEQ ID NO: 2913148 - RNA, 18 nt, Human
ucaucaaggcacugccug

SEQ ID NO: 2913149 - RNA, 19 nt, Human
ucaucaaggcacugccuga

SEQ ID NO: 2913150 - RNA, 21 nt, Human
ucaucaaggcacugccugaug

SEQ ID NO: 2913151 - RNA, 21 nt, Human
ucaucaagggugcgucuggga

SEQ ID NO: 2913152 - RNA, 12 nt, Human
ucaucacacaca

SEQ ID NO: 2913153 - RNA, 13 nt, Human
ucaucacacacau

SEQ ID NO: 2913154 - RNA, 14 nt, Human
ucaucacacacaug

SEQ ID NO: 2913155 - RNA, 15 nt, Human
ucaucacacacaugg

SEQ ID NO: 2913156 - RNA, 12 nt, Human
ucaucaauuccc

SEQ ID NO: 2913157 - RNA, 15 nt, Human
ucaucaauucccauu

SEQ ID NO: 2913158 - RNA, 17 nt, Human
ucaucauuccuugagaa

SEQ ID NO: 2913159 - RNA, 14 nt, Human
ucaucauuccuuga

SEQ ID NO: 2913160 - RNA, 16 nt, Human
ucauccaccccauccc

SEQ ID NO: 2913161 - RNA, 20 nt, Human
ucauccaccccaucccuccc

SEQ ID NO: 2913162 - RNA, 12 nt, Human
ucaucaugcagc

SEQ ID NO: 2913163 - RNA, 13 nt, Human
ucaucaugcagcu

SEQ ID NO: 2913164 - RNA, 19 nt, Human
ucaucaugcagcucaacuu

SEQ ID NO: 2913165 - RNA, 20 nt, Human
ucaucauggaggucauacau

SEQ ID NO: 2913166 - RNA, 14 nt, Human
ucaucauucccucu

SEQ ID NO: 2913167 - RNA, 15 nt, Human
ucaucauucccucuc

SEQ ID NO: 2913168 - RNA, 13 nt, Human
ucaugcuuuaaag

SEQ ID NO: 2913169 - RNA, 19 nt, Human
ucaugcuuuaaaguguaau

SEQ ID NO: 2913170 - RNA, 20 nt, Human
ucaugcuuuaaaguguaaua

SEQ ID NO: 2913171 - RNA, 22 nt, Human
ucaugcuuuaaaguguaauaau

SEQ ID NO: 2913172 - RNA, 23 nt, Human
ucaugcuuuaaaguguaauaaua

SEQ ID NO: 2913173 - RNA, 17 nt, Human
ucauggaacacaaacac

SEQ ID NO: 2913174 - RNA, 18 nt, Human
ucauggaacacaaacaca

SEQ ID NO: 2913175 - RNA, 19 nt, Human
ucauggaacacaaacacau

SEQ ID NO: 2913176 - RNA, 23 nt, Human
ucauggaacacaaacacauuguu

SEQ ID NO: 2913177 - RNA, 17 nt, Human
ucaugcuucuuccuuac

SEQ ID NO: 2913178 - RNA, 17 nt, Human
ucauggaauggacaucc

SEQ ID NO: 2913179 - RNA, 18 nt, Human
ucauggaauggacauccu

SEQ ID NO: 2913180 - RNA, 20 nt, Human
ucauggaauggacauccugu

SEQ ID NO: 2913181 - RNA, 17 nt, Human
ucauggguuauguguau

SEQ ID NO: 2913182 - RNA, 14 nt, Human
ucaugggguccaag

SEQ ID NO: 2913183 - RNA, 22 nt, Human
ucauggguuauguguaugugcc

SEQ ID NO: 2913184 - RNA, 15 nt, Human
ucaucuuguguuuua

SEQ ID NO: 2913185 - RNA, 13 nt, Human
ucaucuugugaaa

SEQ ID NO: 2913186 - RNA, 14 nt, Human
ucaucuugugaaau

SEQ ID NO: 2913187 - RNA, 15 nt, Human
ucaucuugugaaaug

SEQ ID NO: 2913188 - RNA, 22 nt, Human
ucaucuugugaaauggccagga

SEQ ID NO: 2913189 - RNA, 17 nt, Human
ucauccacugugccaug

SEQ ID NO: 2913190 - RNA, 14 nt, Human
ucauccacugugcc

SEQ ID NO: 2913191 - RNA, 18 nt, Human
ucauccacugugccaugu

SEQ ID NO: 2913192 - RNA, 20 nt, Human
ucaucucaggccucccucaa

SEQ ID NO: 2913193 - RNA, 16 nt, Human
ucaucucagguagaag

SEQ ID NO: 2913194 - RNA, 16 nt, Human
ucaucucauucaaacc

SEQ ID NO: 2913195 - RNA, 13 nt, Human
ucagcuuaucucu

SEQ ID NO: 2913196 - RNA, 19 nt, Human
ucagcuuaucucuuuuaua

SEQ ID NO: 2913197 - RNA, 20 nt, Human
ucagcuuaucucuuuuauau

SEQ ID NO: 2913198 - RNA, 23 nt, Human
ucagcuucagaauggcauuguac

SEQ ID NO: 2913199 - RNA, 16 nt, Human
ucagcuucauuugugu

SEQ ID NO: 2913200 - RNA, 18 nt, Human
ucagcuucauuuguguca

SEQ ID NO: 2913201 - RNA, 21 nt, Human
ucagcuucauuugugucaaug

SEQ ID NO: 2913202 - RNA, 17 nt, Human
ucagcugucuguggcuu

SEQ ID NO: 2913203 - RNA, 17 nt, Human
ucagcuguacuucgucu

SEQ ID NO: 2913204 - RNA, 13 nt, Human
ucagcuguccucc

SEQ ID NO: 2913205 - RNA, 14 nt, Human
ucagcuguccuccc

SEQ ID NO: 2913206 - RNA, 17 nt, Human
ucagcuguccucccucc

SEQ ID NO: 2913207 - RNA, 18 nt, Human
ucagcuguccucccucca

SEQ ID NO: 2913208 - RNA, 19 nt, Human
ucagcuguccucccuccac

SEQ ID NO: 2913209 - RNA, 17 nt, Human
ucagcuuaaaauaaaca

SEQ ID NO: 2913210 - RNA, 18 nt, Human
ucagcuuaaaauaaacag

SEQ ID NO: 2913211 - RNA, 21 nt, Human
ucagcuuaaaauaaacaguug

SEQ ID NO: 2913212 - RNA, 22 nt, Human
ucagcuuacaucccugagcagg

SEQ ID NO: 2913213 - RNA, 14 nt, Human
ucagcucucuguau

SEQ ID NO: 2913214 - RNA, 15 nt, Human
ucagcucucuguaua

SEQ ID NO: 2913215 - RNA, 20 nt, Human
ucagcucucuguauaaacau

SEQ ID NO: 2913216 - RNA, 12 nt, Human
ucagcuguacuu

SEQ ID NO: 2913217 - RNA, 19 nt, Human
ucagcucuucaucugccca

SEQ ID NO: 2913218 - RNA, 20 nt, Human
ucagcucuucaucugcccaa

SEQ ID NO: 2913219 - RNA, 24 nt, Human
ucagcuccagcucaccagccccag

SEQ ID NO: 2913220 - RNA, 23 nt, Human
ucagcuccagcucaccagcccca

SEQ ID NO: 2913221 - RNA, 23 nt, Human
ucagcuccagggaauccaagccu

SEQ ID NO: 2913222 - RNA, 14 nt, Human
ucagcuccaggugg

SEQ ID NO: 2913223 - RNA, 19 nt, Human
ucagcuccagguggcucug

SEQ ID NO: 2913224 - RNA, 22 nt, Human
ucagcuccagggaauccaagcc

SEQ ID NO: 2913225 - RNA, 19 nt, Human
ucaccuaagucucugugaa

SEQ ID NO: 2913226 - RNA, 19 nt, Human
ucaccgcuucccuccugcc

SEQ ID NO: 2913227 - RNA, 19 nt, Human
ucaccggccgauggagaca

SEQ ID NO: 2913228 - RNA, 21 nt, Human
ucaccguggauucgcuugagu

SEQ ID NO: 2913229 - RNA, 17 nt, Human
ucaccuaagucucugug

SEQ ID NO: 2913230 - RNA, 17 nt, Human
ucaccuaagagauucug

SEQ ID NO: 2913231 - RNA, 22 nt, Human
ucaccuaagagauucugauuug

SEQ ID NO: 2913232 - RNA, 22 nt, Human
ucaggccuauaaccccagcucc

SEQ ID NO: 2913233 - RNA, 18 nt, Human
ucaggccuauaaccccag

SEQ ID NO: 2913234 - RNA, 13 nt, Human
ucaggccugugug

SEQ ID NO: 2913235 - RNA, 20 nt, Human
ucaggcgauccaccugucuc

SEQ ID NO: 2913236 - RNA, 18 nt, Human
ucaggccucccucucucu

SEQ ID NO: 2913237 - RNA, 17 nt, Human
ucaggccucccucucuc

SEQ ID NO: 2913238 - RNA, 21 nt, Human
ucaggcgauccaccugucuca

SEQ ID NO: 2913239 - RNA, 15 nt, Human
ucaggcuacuagaau

SEQ ID NO: 2913240 - RNA, 15 nt, Human
ucaggcucuucuccu

SEQ ID NO: 2913241 - RNA, 20 nt, Human
ucaggaucaaaccccgacca

SEQ ID NO: 2913242 - RNA, 22 nt, Human
ucaggauauccuuaucagagcu

SEQ ID NO: 2913243 - RNA, 23 nt, Human
ucaggauauccuuaucagagcua

SEQ ID NO: 2913244 - RNA, 20 nt, Human
ucaggauccaagcuaagcac

SEQ ID NO: 2913245 - RNA, 22 nt, Human
ucaggauccaagcuaagcacug

SEQ ID NO: 2913246 - RNA, 15 nt, Human
ucagcuuccuaccca

SEQ ID NO: 2913247 - RNA, 19 nt, Human
ucagcuuccuacccacacc

SEQ ID NO: 2913248 - RNA, 10 nt, Human
ucaggagcag

SEQ ID NO: 2913249 - RNA, 21 nt, Human
ucaggagcagccucagaacaa

SEQ ID NO: 2913250 - RNA, 22 nt, Human
ucaggagcagccucagaacaaa

SEQ ID NO: 2913251 - RNA, 19 nt, Human
ucagguggggcagcuugag

SEQ ID NO: 2913252 - RNA, 18 nt, Human
ucagguggggcagcuuga

SEQ ID NO: 2913253 - RNA, 23 nt, Human
ucaggugauccacccaccucagc

SEQ ID NO: 2913254 - RNA, 15 nt, Human
ucaggugacauguga

SEQ ID NO: 2913255 - RNA, 19 nt, Human
ucaggucucccacguggga

SEQ ID NO: 2913256 - RNA, 16 nt, Human
ucaggugacaugugaa

SEQ ID NO: 2913257 - RNA, 16 nt, Human
ucaggugauccaccca

SEQ ID NO: 2913258 - RNA, 23 nt, Human
ucaggucacauaaaacuuuguau

SEQ ID NO: 2913259 - RNA, 16 nt, Human
ucagguccucagagaa

SEQ ID NO: 2913260 - RNA, 12 nt, Human
ucaggucccugc

SEQ ID NO: 2913261 - RNA, 21 nt, Human
ucaggucucccacgugggaga

SEQ ID NO: 2913262 - RNA, 13 nt, Human
ucaggugaaaaug

SEQ ID NO: 2913263 - RNA, 14 nt, Human
ucaggugaaaaugu

SEQ ID NO: 2913264 - RNA, 17 nt, Human
ucaggugaaaauguuca

SEQ ID NO: 2913265 - RNA, 18 nt, Human
ucaggugaaaauguucau

SEQ ID NO: 2913266 - RNA, 12 nt, Human
ucaggcugcagc

SEQ ID NO: 2913267 - RNA, 19 nt, Human
ucaggcugcagcuggacag

SEQ ID NO: 2913268 - RNA, 20 nt, Human
ucaggcugcagcuggacaga

SEQ ID NO: 2913269 - RNA, 22 nt, Human
ucaggcugcagcuggacagagg

SEQ ID NO: 2913270 - RNA, 20 nt, Human
ucaggcugccuaagacaugu

SEQ ID NO: 2913271 - RNA, 16 nt, Human
ucaggcucuucuccuu

SEQ ID NO: 2913272 - RNA, 21 nt, Human
ucaggcucuucuccuuucaca

SEQ ID NO: 2913273 - RNA, 16 nt, Human
ucaggucaggaguucg

SEQ ID NO: 2913274 - RNA, 18 nt, Human
ucaggucacauaaaacuu

SEQ ID NO: 2913275 - RNA, 21 nt, Human
ucagguauguugccuuuaugg

SEQ ID NO: 2913276 - RNA, 15 nt, Human
ucagggacaggauga

SEQ ID NO: 2913277 - RNA, 14 nt, Human
ucagggacagagcc

SEQ ID NO: 2913278 - RNA, 15 nt, Human
ucagggacagagcca

SEQ ID NO: 2913279 - RNA, 22 nt, Human
ucagggaauuucaggaacuaga

SEQ ID NO: 2913280 - RNA, 23 nt, Human
ucagucugauucccaagcucugc

SEQ ID NO: 2913281 - RNA, 22 nt, Human
ucagucugauucccaagcucug

SEQ ID NO: 2913282 - RNA, 21 nt, Human
ucagucugauucccaagcucu

SEQ ID NO: 2913283 - RNA, 17 nt, Human
ucagugcaaccucugcu

SEQ ID NO: 2913284 - RNA, 19 nt, Human
ucagugauguaccaugaaa

SEQ ID NO: 2913285 - RNA, 22 nt, Human
ucagucuuucuuagugccugug

SEQ ID NO: 2913286 - RNA, 12 nt, Human
ucagucuuuuuc

SEQ ID NO: 2913287 - RNA, 15 nt, Human
ucagucuuuuucugu

SEQ ID NO: 2913288 - RNA, 20 nt, Human
ucagucuuuuucuguuguaa

SEQ ID NO: 2913289 - RNA, 21 nt, Human
ucagucuuuuucuguuguaac

SEQ ID NO: 2913290 - RNA, 21 nt, Human
ucagugaauaugccuguaauu

SEQ ID NO: 2913291 - RNA, 20 nt, Human
ucagguggggcagcuugagg

SEQ ID NO: 2913292 - RNA, 14 nt, Human
ucaggugcagagga

SEQ ID NO: 2913293 - RNA, 15 nt, Human
ucaggugcagaggaa

SEQ ID NO: 2913294 - RNA, 16 nt, Human
ucaggugcagaggaag

SEQ ID NO: 2913295 - RNA, 14 nt, Human
ucaguauuucagug

SEQ ID NO: 2913296 - RNA, 15 nt, Human
ucaguauuucagugu

SEQ ID NO: 2913297 - RNA, 19 nt, Human
ucaguauuuuggagaaauu

SEQ ID NO: 2913298 - RNA, 20 nt, Human
ucaguauuuuggagaaauua

SEQ ID NO: 2913299 - RNA, 22 nt, Human
ucaguauuuuggagaaauuauu

SEQ ID NO: 2913300 - RNA, 23 nt, Human
ucaguauuuuggagaaauuauuu

SEQ ID NO: 2913301 - RNA, 22 nt, Human
ucaguccuccccucacagccuc

SEQ ID NO: 2913302 - RNA, 23 nt, Human
ucaguccuccccucacagccucu

SEQ ID NO: 2913303 - RNA, 16 nt, Human
ucaguccugcuccaga

SEQ ID NO: 2913304 - RNA, 18 nt, Human
ucaguccuguaguuuuau

SEQ ID NO: 2913305 - RNA, 22 nt, Human
ucaguccuguaguuuuauuuua

SEQ ID NO: 2913306 - RNA, 16 nt, Human
ucagucaauauuuuua

SEQ ID NO: 2913307 - RNA, 16 nt, Human
ucagucacacacacau

SEQ ID NO: 2913308 - RNA, 14 nt, Human
ucagucucaggagc

SEQ ID NO: 2913309 - RNA, 16 nt, Human
ucagucucccucccuu

SEQ ID NO: 2913310 - RNA, 15 nt, Human
uccaaaguaaaauug

SEQ ID NO: 2913311 - RNA, 18 nt, Human
uccagaaaaccccagcau

SEQ ID NO: 2913312 - RNA, 20 nt, Human
uccacuuuuuuuuguauguu

SEQ ID NO: 2913313 - RNA, 15 nt, Human
uccagaucacugcca

SEQ ID NO: 2913314 - RNA, 17 nt, Human
uccagcagaagacaaaa

SEQ ID NO: 2913315 - RNA, 23 nt, Human
uccagcagaagacaaaaagacaa

SEQ ID NO: 2913316 - RNA, 17 nt, Human
uccagaucacugccaca

SEQ ID NO: 2913317 - RNA, 16 nt, Human
uccagaucacugccac

SEQ ID NO: 2913318 - RNA, 22 nt, Human
uccagcaauucuccugccucag

SEQ ID NO: 2913319 - RNA, 21 nt, Human
uccagcaauucuccugccuca

SEQ ID NO: 2913320 - RNA, 14 nt, Human
uccagcacaaacac

SEQ ID NO: 2913321 - RNA, 15 nt, Human
uccagcacaaacaca

SEQ ID NO: 2913322 - RNA, 17 nt, Human
uccagcacaaacacaag

SEQ ID NO: 2913323 - RNA, 19 nt, Human
uccagcacaaacacaaggu

SEQ ID NO: 2913324 - RNA, 14 nt, Human
uccagcugcaccag

SEQ ID NO: 2913325 - RNA, 16 nt, Human
uccagcugcaccagag

SEQ ID NO: 2913326 - RNA, 17 nt, Human
uccagcugcaccagagc

SEQ ID NO: 2913327 - RNA, 18 nt, Human
uccagcucuaauaaaaca

SEQ ID NO: 2913328 - RNA, 22 nt, Human
uccagcucuaauaaaacagcug

SEQ ID NO: 2913329 - RNA, 23 nt, Human
uccagcuccucauccagggcucu

SEQ ID NO: 2913330 - RNA, 13 nt, Human
uccagcuccugua

SEQ ID NO: 2913331 - RNA, 14 nt, Human
uccacuuguucagg

SEQ ID NO: 2913332 - RNA, 18 nt, Human
uccagggggaaggccaag

SEQ ID NO: 2913333 - RNA, 19 nt, Human
uccagggggaaggccaagg

SEQ ID NO: 2913334 - RNA, 17 nt, Human
uccaugggauacaaccu

SEQ ID NO: 2913335 - RNA, 13 nt, Human
uccaugcuccuca

SEQ ID NO: 2913336 - RNA, 20 nt, Human
uccaugcuccucacugcccg

SEQ ID NO: 2913337 - RNA, 21 nt, Human
uccaugcuccucacugcccgc

SEQ ID NO: 2913338 - RNA, 22 nt, Human
uccaugcuccucacugcccgca

SEQ ID NO: 2913339 - RNA, 14 nt, Human
uccaugcugccucc

SEQ ID NO: 2913340 - RNA, 15 nt, Human
uccaugcugccucca

SEQ ID NO: 2913341 - RNA, 23 nt, Human
uccaugcuucucaucuugugaaa

SEQ ID NO: 2913342 - RNA, 12 nt, Human
uccauaccagcu

SEQ ID NO: 2913343 - RNA, 15 nt, Human
uccauaccagcucgc

SEQ ID NO: 2913344 - RNA, 22 nt, Human
uccauaccagcucgcacccccc

SEQ ID NO: 2913345 - RNA, 21 nt, Human
uccauaaucuggacuccucug

SEQ ID NO: 2913346 - RNA, 23 nt, Human
uccaucacccucuuccugugauc

SEQ ID NO: 2913347 - RNA, 13 nt, Human
uccaucagccagg

SEQ ID NO: 2913348 - RNA, 14 nt, Human
uccaucaggccacu

SEQ ID NO: 2913349 - RNA, 17 nt, Human
uccaucaguuagagcug

SEQ ID NO: 2913350 - RNA, 18 nt, Human
uccaucaguuagagcuga

SEQ ID NO: 2913351 - RNA, 12 nt, Human
uccauauuuuca

SEQ ID NO: 2913352 - RNA, 13 nt, Human
uccauauuuucac

SEQ ID NO: 2913353 - RNA, 18 nt, Human
uccauauuuucacaggug

SEQ ID NO: 2913354 - RNA, 14 nt, Human
uccauauuuauuca

SEQ ID NO: 2913355 - RNA, 13 nt, Human
uccauauuuggaa

SEQ ID NO: 2913356 - RNA, 14 nt, Human
uccauauuuggaag

SEQ ID NO: 2913357 - RNA, 15 nt, Human
uccauauuuggaaga

SEQ ID NO: 2913358 - RNA, 17 nt, Human
uccauauuuggaagaaa

SEQ ID NO: 2913359 - RNA, 17 nt, Human
uccaucacccucuuccu

SEQ ID NO: 2913360 - RNA, 17 nt, Human
uccagguaccuugaccu

SEQ ID NO: 2913361 - RNA, 18 nt, Human
uccagguaccuugaccuu

SEQ ID NO: 2913362 - RNA, 23 nt, Human
uccagguaccuugaccuuuguac

SEQ ID NO: 2913363 - RNA, 15 nt, Human
uccagguacgcacag

SEQ ID NO: 2913364 - RNA, 16 nt, Human
uccagguacgcacaga

SEQ ID NO: 2913365 - RNA, 17 nt, Human
uccagguacgcacagac

SEQ ID NO: 2913366 - RNA, 18 nt, Human
uccagguacgcacagaca

SEQ ID NO: 2913367 - RNA, 19 nt, Human
uccagguacgcacagacag

SEQ ID NO: 2913368 - RNA, 20 nt, Human
uccagguacgcacagacagg

SEQ ID NO: 2913369 - RNA, 16 nt, Human
uccaggucucacgggc

SEQ ID NO: 2913370 - RNA, 15 nt, Human
uccaggucaacagaa

SEQ ID NO: 2913371 - RNA, 16 nt, Human
uccaggucaacagaau

SEQ ID NO: 2913372 - RNA, 17 nt, Human
uccaggucaacagaaug

SEQ ID NO: 2913373 - RNA, 18 nt, Human
uccaggucaacagaauga

SEQ ID NO: 2913374 - RNA, 19 nt, Human
uccaggucaacagaaugaa

SEQ ID NO: 2913375 - RNA, 21 nt, Human
uccaggucaacagaaugaaaa

SEQ ID NO: 2913376 - RNA, 22 nt, Human
uccaggucaacagaaugaaaaa

SEQ ID NO: 2913377 - RNA, 15 nt, Human
uccauaaaaaaaaau

SEQ ID NO: 2913378 - RNA, 19 nt, Human
uccauaaaaaaaaauagau

SEQ ID NO: 2913379 - RNA, 23 nt, Human
uccauaaacagacuguuaauuau

SEQ ID NO: 2913380 - RNA, 14 nt, Human
uccaguuaaccaag

SEQ ID NO: 2913381 - RNA, 17 nt, Human
uccaguuaaccaaguca

SEQ ID NO: 2913382 - RNA, 22 nt, Human
uccaguuaaggaccguggcccu

SEQ ID NO: 2913383 - RNA, 16 nt, Human
uccaguucaugagaau

SEQ ID NO: 2913384 - RNA, 19 nt, Human
uccaguucaugagaaucua

SEQ ID NO: 2913385 - RNA, 18 nt, Human
uccccagauugcaacagg

SEQ ID NO: 2913386 - RNA, 13 nt, Human
uccccagauugca

SEQ ID NO: 2913387 - RNA, 13 nt, Human
ucccaugugcaua

SEQ ID NO: 2913388 - RNA, 10 nt, Human
ucccaugugg

SEQ ID NO: 2913389 - RNA, 20 nt, Human
ucccauuaaucauuucccca

SEQ ID NO: 2913390 - RNA, 21 nt, Human
ucccauuaaucauuuccccau

SEQ ID NO: 2913391 - RNA, 20 nt, Human
ucccaugagccucagcaucc

SEQ ID NO: 2913392 - RNA, 22 nt, Human
ucccauguagcccccuggccuc

SEQ ID NO: 2913393 - RNA, 13 nt, Human
ucccauguaugga

SEQ ID NO: 2913394 - RNA, 22 nt, Human
ucccauguauuuaucucuauuu

SEQ ID NO: 2913395 - RNA, 22 nt, Human
uccccagcaagugagagcuggg

SEQ ID NO: 2913396 - RNA, 18 nt, Human
uccccagaguuccccaug

SEQ ID NO: 2913397 - RNA, 20 nt, Human
uccccagaguuccccaugca

SEQ ID NO: 2913398 - RNA, 19 nt, Human
uccccagaguccucuauga

SEQ ID NO: 2913399 - RNA, 17 nt, Human
uccccagaguuccccau

SEQ ID NO: 2913400 - RNA, 21 nt, Human
uccccagcaagugagagcugg

SEQ ID NO: 2913401 - RNA, 20 nt, Human
uccccagcaagugagagcug

SEQ ID NO: 2913402 - RNA, 23 nt, Human
uccccagauugcaacaggcuggg

SEQ ID NO: 2913403 - RNA, 22 nt, Human
uccccagauugcaacaggcugg

SEQ ID NO: 2913404 - RNA, 20 nt, Human
uccccagauugcaacaggcu

SEQ ID NO: 2913405 - RNA, 19 nt, Human
uccccagauugcaacaggc

SEQ ID NO: 2913406 - RNA, 21 nt, Human
uccccccacucuccccacacu

SEQ ID NO: 2913407 - RNA, 12 nt, Human
uccccccacucu

SEQ ID NO: 2913408 - RNA, 21 nt, Human
uccccagccccuagcccagga

SEQ ID NO: 2913409 - RNA, 15 nt, Human
uccccagcccuggcu

SEQ ID NO: 2913410 - RNA, 18 nt, Human
uccccagcccuggcucug

SEQ ID NO: 2913411 - RNA, 16 nt, Human
uccccagcccuucaca

SEQ ID NO: 2913412 - RNA, 13 nt, Human
uccccagcccugg

SEQ ID NO: 2913413 - RNA, 19 nt, Human
uccccagccccuagcccag

SEQ ID NO: 2913414 - RNA, 20 nt, Human
uccccagccccuagcccagg

SEQ ID NO: 2913415 - RNA, 11 nt, Human
uccccagcccc

SEQ ID NO: 2913416 - RNA, 13 nt, Human
uccccagccccua

SEQ ID NO: 2913417 - RNA, 15 nt, Human
uccccagccccuagc

SEQ ID NO: 2913418 - RNA, 16 nt, Human
uccccagccccuagcc

SEQ ID NO: 2913419 - RNA, 15 nt, Human
uccccagcccagggu

SEQ ID NO: 2913420 - RNA, 14 nt, Human
uccccagcccaggg

SEQ ID NO: 2913421 - RNA, 13 nt, Human
uccccagcccagg

SEQ ID NO: 2913422 - RNA, 18 nt, Human
uccccagcaucacucccc

SEQ ID NO: 2913423 - RNA, 19 nt, Human
uccccagcaucacucccca

SEQ ID NO: 2913424 - RNA, 12 nt, Human
uccccagcccag

SEQ ID NO: 2913425 - RNA, 10 nt, Human
uccccagccc

SEQ ID NO: 2913426 - RNA, 18 nt, Human
ucccaccucugugaccuc

SEQ ID NO: 2913427 - RNA, 20 nt, Human
ucccaccucugugaccucag

SEQ ID NO: 2913428 - RNA, 21 nt, Human
ucccaccucugugaccucagg

SEQ ID NO: 2913429 - RNA, 22 nt, Human
ucccaccucugugaccucaggc

SEQ ID NO: 2913430 - RNA, 10 nt, Human
uccauuccca

SEQ ID NO: 2913431 - RNA, 20 nt, Human
uccauucccaacuagacauu

SEQ ID NO: 2913432 - RNA, 11 nt, Human
ucccaccucug

SEQ ID NO: 2913433 - RNA, 13 nt, Human
ucccaccucugug

SEQ ID NO: 2913434 - RNA, 13 nt, Human
ucccaccuuggcu

SEQ ID NO: 2913435 - RNA, 18 nt, Human
ucccaccuuggcugcagg

SEQ ID NO: 2913436 - RNA, 20 nt, Human
ucccagcugugcucuggaca

SEQ ID NO: 2913437 - RNA, 17 nt, Human
ucccaccuuggcugcag

SEQ ID NO: 2913438 - RNA, 16 nt, Human
ucccaccuuggcugca

SEQ ID NO: 2913439 - RNA, 20 nt, Human
uccaugugggcuaguugggc

SEQ ID NO: 2913440 - RNA, 19 nt, Human
uccauguuggucaggcugg

SEQ ID NO: 2913441 - RNA, 24 nt, Human
uccauguuggucaggcuggucuca

SEQ ID NO: 2913442 - RNA, 18 nt, Human
uccaugugguucuucaaa

SEQ ID NO: 2913443 - RNA, 19 nt, Human
uccauguuuguaaaacuac

SEQ ID NO: 2913444 - RNA, 19 nt, Human
uccauuaaagucugaauca

SEQ ID NO: 2913445 - RNA, 13 nt, Human
uccauguuuguaa

SEQ ID NO: 2913446 - RNA, 16 nt, Human
uccauguuuguaaaac

SEQ ID NO: 2913447 - RNA, 19 nt, Human
ucccaugagccucagcauc

SEQ ID NO: 2913448 - RNA, 18 nt, Human
ucccaugagccucagcau

SEQ ID NO: 2913449 - RNA, 11 nt, Human
ucccaugaagc

SEQ ID NO: 2913450 - RNA, 12 nt, Human
ucccaugaagcc

SEQ ID NO: 2913451 - RNA, 13 nt, Human
ucccaugaagccu

SEQ ID NO: 2913452 - RNA, 14 nt, Human
ucccaugaagccuu

SEQ ID NO: 2913453 - RNA, 15 nt, Human
ucccaugaagccuuu

SEQ ID NO: 2913454 - RNA, 16 nt, Human
ucccaugaagccuuuu

SEQ ID NO: 2913455 - RNA, 17 nt, Human
ucccaugaagccuuuug

SEQ ID NO: 2913456 - RNA, 19 nt, Human
ucccaugaagccuuuugaa

SEQ ID NO: 2913457 - RNA, 21 nt, Human
ucccaugaagccuuuugaaag

SEQ ID NO: 2913458 - RNA, 16 nt, Human
ucccaggcgccccuuc

SEQ ID NO: 2913459 - RNA, 22 nt, Human
ucccagcugugcucuggacagg

SEQ ID NO: 2913460 - RNA, 21 nt, Human
ucccagcugugcucuggacag

SEQ ID NO: 2913461 - RNA, 23 nt, Human
ucccagcugugcucuggacaggc

SEQ ID NO: 2913462 - RNA, 16 nt, Human
ucccaggaacugggcc

SEQ ID NO: 2913463 - RNA, 11 nt, Human
ucccaggaacu

SEQ ID NO: 2913464 - RNA, 18 nt, Human
ucccagcuuguaggagcu

SEQ ID NO: 2913465 - RNA, 19 nt, Human
ucccagcuuguaggagcug

SEQ ID NO: 2913466 - RNA, 15 nt, Human
ucccaggacaccaca

SEQ ID NO: 2913467 - RNA, 18 nt, Human
ucccaggacaccacaccc

SEQ ID NO: 2913468 - RNA, 19 nt, Human
ucccaggacaccacaccca

SEQ ID NO: 2913469 - RNA, 21 nt, Human
ucccaggacaccacacccagc

SEQ ID NO: 2913470 - RNA, 22 nt, Human
ucccaggacaccacacccagcc

SEQ ID NO: 2913471 - RNA, 23 nt, Human
ucccaggacaccacacccagccu

SEQ ID NO: 2913472 - RNA, 19 nt, Human
uccuaucaccuauuuccau

SEQ ID NO: 2913473 - RNA, 13 nt, Human
uccuagugaaccu

SEQ ID NO: 2913474 - RNA, 20 nt, Human
uccuagugaaccucaccccg

SEQ ID NO: 2913475 - RNA, 16 nt, Human
uccuacaggcagucuc

SEQ ID NO: 2913476 - RNA, 17 nt, Human
uccuacaggcagucucu

SEQ ID NO: 2913477 - RNA, 19 nt, Human
uccuacaggcagucucucu

SEQ ID NO: 2913478 - RNA, 22 nt, Human
uccuacaggcagucucucucuu

SEQ ID NO: 2913479 - RNA, 13 nt, Human
uccuacagcacua

SEQ ID NO: 2913480 - RNA, 15 nt, Human
uccuacagcacuacu

SEQ ID NO: 2913481 - RNA, 20 nt, Human
uccuacagcacuacugggug

SEQ ID NO: 2913482 - RNA, 21 nt, Human
uccuacagcacuacugggugu

SEQ ID NO: 2913483 - RNA, 13 nt, Human
uccuaaggaaccu

SEQ ID NO: 2913484 - RNA, 19 nt, Human
uccuacaagagcagccugu

SEQ ID NO: 2913485 - RNA, 23 nt, Human
uccuaagggucgaaagcucuaga

SEQ ID NO: 2913486 - RNA, 18 nt, Human
uccuacaagagcagccug

SEQ ID NO: 2913487 - RNA, 16 nt, Human
uccuaagggucgaaag

SEQ ID NO: 2913488 - RNA, 18 nt, Human
uccuaagggucgaaagcu

SEQ ID NO: 2913489 - RNA, 20 nt, Human
uccuaagggucgaaagcucu

SEQ ID NO: 2913490 - RNA, 21 nt, Human
uccuaagggucgaaagcucua

SEQ ID NO: 2913491 - RNA, 23 nt, Human
uccuacaagagcagccuguggca

SEQ ID NO: 2913492 - RNA, 17 nt, Human
uccuacaagauuuagaa

SEQ ID NO: 2913493 - RNA, 18 nt, Human
uccuacaagauuuagaaa

SEQ ID NO: 2913494 - RNA, 19 nt, Human
uccuacaagauuuagaaaa

SEQ ID NO: 2913495 - RNA, 20 nt, Human
uccuacaagauuuagaaaaa

SEQ ID NO: 2913496 - RNA, 21 nt, Human
uccuacaagauuuagaaaaaa

SEQ ID NO: 2913497 - RNA, 22 nt, Human
uccuacaagagcagccuguggc

SEQ ID NO: 2913498 - RNA, 20 nt, Human
uccuacaagagcagccugug

SEQ ID NO: 2913499 - RNA, 17 nt, Human
uccuccaaaggcccccu

SEQ ID NO: 2913500 - RNA, 15 nt, Human
uccucauuucuccag

SEQ ID NO: 2913501 - RNA, 16 nt, Human
uccucauuucuccaga

SEQ ID NO: 2913502 - RNA, 15 nt, Human
uccucauucaaaggg

SEQ ID NO: 2913503 - RNA, 17 nt, Human
uccuaucagaaguuucu

SEQ ID NO: 2913504 - RNA, 13 nt, Human
uccuccaacagcu

SEQ ID NO: 2913505 - RNA, 18 nt, Human
uccuccaaaggcccccua

SEQ ID NO: 2913506 - RNA, 23 nt, Human
uccuccaaaggcccccuacgcca

SEQ ID NO: 2913507 - RNA, 14 nt, Human
uccuccaagccagc

SEQ ID NO: 2913508 - RNA, 12 nt, Human
uccuccaagcca

SEQ ID NO: 2913509 - RNA, 15 nt, Human
uccuccaccaccgcc

SEQ ID NO: 2913510 - RNA, 20 nt, Human
uccuccaccaccgcccgucu

SEQ ID NO: 2913511 - RNA, 21 nt, Human
uccuccaccaccgcccgucug

SEQ ID NO: 2913512 - RNA, 22 nt, Human
uccuccaccaccgcccgucugu

SEQ ID NO: 2913513 - RNA, 12 nt, Human
uccucccaccuc

SEQ ID NO: 2913514 - RNA, 21 nt, Human
uccuccuccaaaggcccccua

SEQ ID NO: 2913515 - RNA, 13 nt, Human
uccuccuccacca

SEQ ID NO: 2913516 - RNA, 14 nt, Human
uccuccuccaccac

SEQ ID NO: 2913517 - RNA, 15 nt, Human
uccuccuccaccacc

SEQ ID NO: 2913518 - RNA, 18 nt, Human
uccuccuccaccaccgcc

SEQ ID NO: 2913519 - RNA, 17 nt, Human
uccuccagggugauuuu

SEQ ID NO: 2913520 - RNA, 22 nt, Human
uccuccagggugauuuuaugau

SEQ ID NO: 2913521 - RNA, 21 nt, Human
uccuccagggaugaucaacag

SEQ ID NO: 2913522 - RNA, 13 nt, Human
uccuccagcugca

SEQ ID NO: 2913523 - RNA, 14 nt, Human
uccuccagcugcac

SEQ ID NO: 2913524 - RNA, 15 nt, Human
uccuccagcugcacc

SEQ ID NO: 2913525 - RNA, 21 nt, Human
uccuccagcugcaccagagca

SEQ ID NO: 2913526 - RNA, 14 nt, Human
ucccuucaccuccu

SEQ ID NO: 2913527 - RNA, 12 nt, Human
ucccuucagccc

SEQ ID NO: 2913528 - RNA, 13 nt, Human
ucccuucagcccc

SEQ ID NO: 2913529 - RNA, 14 nt, Human
ucccuucagccccc

SEQ ID NO: 2913530 - RNA, 17 nt, Human
ucccuucagcccccagc

SEQ ID NO: 2913531 - RNA, 18 nt, Human
ucccuucagcccccagcc

SEQ ID NO: 2913532 - RNA, 19 nt, Human
ucccuucagcccccagccc

SEQ ID NO: 2913533 - RNA, 21 nt, Human
ucccuucagcccccagccccu

SEQ ID NO: 2913534 - RNA, 22 nt, Human
ucccuucaaccauuccccaugg

SEQ ID NO: 2913535 - RNA, 23 nt, Human
ucccccugggcucugccccagcu

SEQ ID NO: 2913536 - RNA, 10 nt, Human
ucccccuggg

SEQ ID NO: 2913537 - RNA, 16 nt, Human
ucccccugguugggug

SEQ ID NO: 2913538 - RNA, 22 nt, Human
ucccccugggcucugccccagc

SEQ ID NO: 2913539 - RNA, 20 nt, Human
ucccccugggcucugcccca

SEQ ID NO: 2913540 - RNA, 15 nt, Human
ucccccugggcucug

SEQ ID NO: 2913541 - RNA, 14 nt, Human
ucccccugggcucu

SEQ ID NO: 2913542 - RNA, 12 nt, Human
ucccccugggcu

SEQ ID NO: 2913543 - RNA, 16 nt, Human
uccccccccuguauag

SEQ ID NO: 2913544 - RNA, 17 nt, Human
uccccccccuguauagu

SEQ ID NO: 2913545 - RNA, 15 nt, Human
ucccuugcuuuuccc

SEQ ID NO: 2913546 - RNA, 18 nt, Human
ucccuugcuuuucccucu

SEQ ID NO: 2913547 - RNA, 19 nt, Human
ucccuugcuuuucccucuu

SEQ ID NO: 2913548 - RNA, 21 nt, Human
ucccuugcuuuucccucuuuu

SEQ ID NO: 2913549 - RNA, 22 nt, Human
ucccuugcuuuucccucuuuuc

SEQ ID NO: 2913550 - RNA, 23 nt, Human
ucccuugcuuuucccucuuuucu

SEQ ID NO: 2913551 - RNA, 12 nt, Human
ucccuuccucuu

SEQ ID NO: 2913552 - RNA, 13 nt, Human
ucccuuccucuuc

SEQ ID NO: 2913553 - RNA, 14 nt, Human
ucccuuccucuucg

SEQ ID NO: 2913554 - RNA, 17 nt, Human
ucccuuccucuucggcc

SEQ ID NO: 2913555 - RNA, 20 nt, Human
ucccuuccccucccuggcuc

SEQ ID NO: 2913556 - RNA, 17 nt, Human
ucccuucccuuccacug

SEQ ID NO: 2913557 - RNA, 16 nt, Human
ucccuuccgacccucu

SEQ ID NO: 2913558 - RNA, 20 nt, Human
ucccuuccgacccucuggga

SEQ ID NO: 2913559 - RNA, 21 nt, Human
ucccuuccgacccucugggaa

SEQ ID NO: 2913560 - RNA, 22 nt, Human
ucccuuccgacccucugggaac

SEQ ID NO: 2913561 - RNA, 21 nt, Human
ucccuuccccucccuggcucc

SEQ ID NO: 2913562 - RNA, 20 nt, Human
ucccuucccuaaagugaugg

SEQ ID NO: 2913563 - RNA, 12 nt, Human
ucccuuccccuc

SEQ ID NO: 2913564 - RNA, 22 nt, Human
ucccuucccaugacccaggcug

SEQ ID NO: 2913565 - RNA, 20 nt, Human
ucccccuuccaaauaauaaa

SEQ ID NO: 2913566 - RNA, 16 nt, Human
ucccuucaguacccuc

SEQ ID NO: 2913567 - RNA, 18 nt, Human
ucccuucaguacccucuc

SEQ ID NO: 2913568 - RNA, 19 nt, Human
ucccuucaguacccucuca

SEQ ID NO: 2913569 - RNA, 20 nt, Human
ucccuucaguacccucucag

SEQ ID NO: 2913570 - RNA, 21 nt, Human
ucccuucaguacccucucagc

SEQ ID NO: 2913571 - RNA, 23 nt, Human
ucccuucaguacccucucagcuc

SEQ ID NO: 2913572 - RNA, 14 nt, Human
uccgccucuugggu

SEQ ID NO: 2913573 - RNA, 13 nt, Human
uccgccucugucc

SEQ ID NO: 2913574 - RNA, 19 nt, Human
uccgcccuuagucccccaa

SEQ ID NO: 2913575 - RNA, 21 nt, Human
uccgcccuuagucccccaacu

SEQ ID NO: 2913576 - RNA, 18 nt, Human
uccgccaaugcacggccu

SEQ ID NO: 2913577 - RNA, 15 nt, Human
uccgcagaagcccug

SEQ ID NO: 2913578 - RNA, 15 nt, Human
uccgaugaauucuua

SEQ ID NO: 2913579 - RNA, 20 nt, Human
uccgauggaugaaucuccca

SEQ ID NO: 2913580 - RNA, 15 nt, Human
uccgcacuuuccacu

SEQ ID NO: 2913581 - RNA, 16 nt, Human
uccgcacuuuccacuu

SEQ ID NO: 2913582 - RNA, 22 nt, Human
uccgcacuuuccacuucuuccu

SEQ ID NO: 2913583 - RNA, 23 nt, Human
uccgcacuuuccacuucuuccuu

SEQ ID NO: 2913584 - RNA, 20 nt, Human
uccgcuuucuacccagcgag

SEQ ID NO: 2913585 - RNA, 18 nt, Human
uccgcuuucuacccagcg

SEQ ID NO: 2913586 - RNA, 16 nt, Human
uccgcuuucuacccag

SEQ ID NO: 2913587 - RNA, 12 nt, Human
uccgcucucuuc

SEQ ID NO: 2913588 - RNA, 13 nt, Human
uccgcucucuucc

SEQ ID NO: 2913589 - RNA, 15 nt, Human
uccgcucucuuccug

SEQ ID NO: 2913590 - RNA, 17 nt, Human
uccgcucucuuccugcc

SEQ ID NO: 2913591 - RNA, 18 nt, Human
uccgcucucuuccugccc

SEQ ID NO: 2913592 - RNA, 14 nt, Human
uccgcugccgugcc

SEQ ID NO: 2913593 - RNA, 12 nt, Human
uccgcugcuccu

SEQ ID NO: 2913594 - RNA, 13 nt, Human
uccgcugcuccuu

SEQ ID NO: 2913595 - RNA, 16 nt, Human
uccgcugcuccuuggc

SEQ ID NO: 2913596 - RNA, 17 nt, Human
uccgccuucacuccggu

SEQ ID NO: 2913597 - RNA, 13 nt, Human
uccgccuuuugua

SEQ ID NO: 2913598 - RNA, 14 nt, Human
uccgccuuuuguau

SEQ ID NO: 2913599 - RNA, 18 nt, Human
uccgccuuuuguauacau

SEQ ID NO: 2913600 - RNA, 12 nt, Human
uccgcgaaaaua

SEQ ID NO: 2913601 - RNA, 19 nt, Human
uccgcgaaaauaguuuguu

SEQ ID NO: 2913602 - RNA, 11 nt, Human
uccgccuucac

SEQ ID NO: 2913603 - RNA, 17 nt, Human
uccgccuucacauuccc

SEQ ID NO: 2913604 - RNA, 12 nt, Human
uccugccccucu

SEQ ID NO: 2913605 - RNA, 15 nt, Human
uccugccccucuuuc

SEQ ID NO: 2913606 - RNA, 16 nt, Human
uccugccccucuuucu

SEQ ID NO: 2913607 - RNA, 17 nt, Human
uccugccccucuuucuc

SEQ ID NO: 2913608 - RNA, 18 nt, Human
uccugccccucuuucucu

SEQ ID NO: 2913609 - RNA, 19 nt, Human
uccugccccucuuucucuu

SEQ ID NO: 2913610 - RNA, 10 nt, Human
uccugcccug

SEQ ID NO: 2913611 - RNA, 20 nt, Human
uccugcccgcagaccucugg

SEQ ID NO: 2913612 - RNA, 21 nt, Human
uccugcccgcagaccucugga

SEQ ID NO: 2913613 - RNA, 22 nt, Human
uccugcccgccacacagaccac

SEQ ID NO: 2913614 - RNA, 20 nt, Human
uccugcccacugcugcagua

SEQ ID NO: 2913615 - RNA, 17 nt, Human
uccugccaguguggaac

SEQ ID NO: 2913616 - RNA, 13 nt, Human
uccugccagcccc

SEQ ID NO: 2913617 - RNA, 14 nt, Human
uccugccagcccca

SEQ ID NO: 2913618 - RNA, 15 nt, Human
uccugccagccccac

SEQ ID NO: 2913619 - RNA, 21 nt, Human
uccugccagccccacacagcu

SEQ ID NO: 2913620 - RNA, 22 nt, Human
uccugccagccccacacagcua

SEQ ID NO: 2913621 - RNA, 11 nt, Human
uccugccaaaa

SEQ ID NO: 2913622 - RNA, 18 nt, Human
uccugccacauuagaacu

SEQ ID NO: 2913623 - RNA, 19 nt, Human
uccugccacauuagaacuu

SEQ ID NO: 2913624 - RNA, 20 nt, Human
uccugccacauuagaacuuc

SEQ ID NO: 2913625 - RNA, 16 nt, Human
uccugcauuugugaaa

SEQ ID NO: 2913626 - RNA, 16 nt, Human
uccugccacccuguag

SEQ ID NO: 2913627 - RNA, 16 nt, Human
uccugccaccacgccc

SEQ ID NO: 2913628 - RNA, 11 nt, Human
uccugccacca

SEQ ID NO: 2913629 - RNA, 17 nt, Human
uccucuguccugcuucu

SEQ ID NO: 2913630 - RNA, 19 nt, Human
uccucuguccugcuucuga

SEQ ID NO: 2913631 - RNA, 12 nt, Human
uccucugucugc

SEQ ID NO: 2913632 - RNA, 14 nt, Human
uccucugucugccc

SEQ ID NO: 2913633 - RNA, 22 nt, Human
uccucuguccaggcacugcugc

SEQ ID NO: 2913634 - RNA, 22 nt, Human
uccucuguuucuccuucugaaa

SEQ ID NO: 2913635 - RNA, 13 nt, Human
uccucuguggugu

SEQ ID NO: 2913636 - RNA, 18 nt, Human
uccucuguggugucugcc

SEQ ID NO: 2913637 - RNA, 21 nt, Human
uccucuguggugucugccugu

SEQ ID NO: 2913638 - RNA, 22 nt, Human
uccucuguggugucugccuguu

SEQ ID NO: 2913639 - RNA, 15 nt, Human
uccucugucugcccu

SEQ ID NO: 2913640 - RNA, 18 nt, Human
uccucugucugcccuuca

SEQ ID NO: 2913641 - RNA, 14 nt, Human
uccuccuccagggu

SEQ ID NO: 2913642 - RNA, 15 nt, Human
uccuccuccagggug

SEQ ID NO: 2913643 - RNA, 12 nt, Human
uccuccuccagg

SEQ ID NO: 2913644 - RNA, 13 nt, Human
uccuccuccaggg

SEQ ID NO: 2913645 - RNA, 15 nt, Human
uccuccucccccaga

SEQ ID NO: 2913646 - RNA, 12 nt, Human
uccuccucuuuc

SEQ ID NO: 2913647 - RNA, 13 nt, Human
uccuccucuuucu

SEQ ID NO: 2913648 - RNA, 14 nt, Human
uccuccucuuucuc

SEQ ID NO: 2913649 - RNA, 15 nt, Human
uccuccucuuucucu

SEQ ID NO: 2913650 - RNA, 16 nt, Human
uccuccucuuucucuc

SEQ ID NO: 2913651 - RNA, 17 nt, Human
uccuccucuuucucucc

SEQ ID NO: 2913652 - RNA, 19 nt, Human
uccuccucuuucucucccc

SEQ ID NO: 2913653 - RNA, 20 nt, Human
uccuccaucccaacagccau

SEQ ID NO: 2913654 - RNA, 22 nt, Human
uccuccucggaaccgcucaccu

SEQ ID NO: 2913655 - RNA, 23 nt, Human
uccuccucggaaccgcucaccua

SEQ ID NO: 2913656 - RNA, 13 nt, Human
uccugagaagcau

SEQ ID NO: 2913657 - RNA, 13 nt, Human
uccugacuucuaa

SEQ ID NO: 2913658 - RNA, 13 nt, Human
uccugacuuuuaa

SEQ ID NO: 2913659 - RNA, 13 nt, Human
uccugacuguaac

SEQ ID NO: 2913660 - RNA, 22 nt, Human
uccugacuguaacauauucugu

SEQ ID NO: 2913661 - RNA, 23 nt, Human
uccugacugucucccgggacuac

SEQ ID NO: 2913662 - RNA, 16 nt, Human
uccugacucugccccc

SEQ ID NO: 2913663 - RNA, 17 nt, Human
uccugacucugcccccu

SEQ ID NO: 2913664 - RNA, 22 nt, Human
uccugacucugcccccugcugg

SEQ ID NO: 2913665 - RNA, 23 nt, Human
uccugacucugcccccugcuggc

SEQ ID NO: 2913666 - RNA, 22 nt, Human
uccugacuccuaccugcccugg

SEQ ID NO: 2913667 - RNA, 23 nt, Human
uccugacuccuaccugcccugga

SEQ ID NO: 2913668 - RNA, 14 nt, Human
uccugacucugccc

SEQ ID NO: 2913669 - RNA, 15 nt, Human
uccugacucugcccc

SEQ ID NO: 2913670 - RNA, 20 nt, Human
uccucuucaccccggcaggc

SEQ ID NO: 2913671 - RNA, 18 nt, Human
uccugacgucugaagcuu

SEQ ID NO: 2913672 - RNA, 20 nt, Human
uccugacgucugaagcuuga

SEQ ID NO: 2913673 - RNA, 17 nt, Human
uccugacuauuauguug

SEQ ID NO: 2913674 - RNA, 18 nt, Human
uccugacuauuauguugu

SEQ ID NO: 2913675 - RNA, 22 nt, Human
uccugacuauuauguuguuaga

SEQ ID NO: 2913676 - RNA, 23 nt, Human
uccugagccagugucaggaggaa

SEQ ID NO: 2913677 - RNA, 23 nt, Human
uccugagaauaagaaaguuucac

SEQ ID NO: 2913678 - RNA, 16 nt, Human
uccugagaccacagag

SEQ ID NO: 2913679 - RNA, 13 nt, Human
uccugagcuuuau

SEQ ID NO: 2913680 - RNA, 15 nt, Human
uccugagcuuuaugg

SEQ ID NO: 2913681 - RNA, 12 nt, Human
uccugagccccg

SEQ ID NO: 2913682 - RNA, 13 nt, Human
uccugagccccgc

SEQ ID NO: 2913683 - RNA, 14 nt, Human
uccugagccccgcc

SEQ ID NO: 2913684 - RNA, 18 nt, Human
uccugagccccgcccucu

SEQ ID NO: 2913685 - RNA, 22 nt, Human
uccugagccccgcccucuuccu

SEQ ID NO: 2913686 - RNA, 23 nt, Human
uccugagccccgcccucuuccug

SEQ ID NO: 2913687 - RNA, 15 nt, Human
uccugucucuggccu

SEQ ID NO: 2913688 - RNA, 13 nt, Human
uccuggccucaga

SEQ ID NO: 2913689 - RNA, 14 nt, Human
uccuggccucagac

SEQ ID NO: 2913690 - RNA, 15 nt, Human
uccuggccucagacu

SEQ ID NO: 2913691 - RNA, 17 nt, Human
uccuggccucagacugc

SEQ ID NO: 2913692 - RNA, 22 nt, Human
uccuggccucagacugcaccca

SEQ ID NO: 2913693 - RNA, 21 nt, Human
uccuguagagguuuuguuguu

SEQ ID NO: 2913694 - RNA, 15 nt, Human
uccuggccuugcuga

SEQ ID NO: 2913695 - RNA, 12 nt, Human
uccuggccucaa

SEQ ID NO: 2913696 - RNA, 14 nt, Human
uccuggccccucaa

SEQ ID NO: 2913697 - RNA, 18 nt, Human
uccuggccccucaaccuc

SEQ ID NO: 2913698 - RNA, 14 nt, Human
uccuggaguugcau

SEQ ID NO: 2913699 - RNA, 16 nt, Human
uccuggaguugcauug

SEQ ID NO: 2913700 - RNA, 14 nt, Human
uccuggaugucuga

SEQ ID NO: 2913701 - RNA, 18 nt, Human
uccuggauguugugugua

SEQ ID NO: 2913702 - RNA, 17 nt, Human
uccuggauguuuggaaa

SEQ ID NO: 2913703 - RNA, 23 nt, Human
uccuggcacccggccccugcugg

SEQ ID NO: 2913704 - RNA, 21 nt, Human
uccuggagggaagcacugccu

SEQ ID NO: 2913705 - RNA, 18 nt, Human
uccuggagcagaccaccc

SEQ ID NO: 2913706 - RNA, 19 nt, Human
uccuggagcagaccacccc

SEQ ID NO: 2913707 - RNA, 18 nt, Human
uccuggagcaaucacaga

SEQ ID NO: 2913708 - RNA, 20 nt, Human
uccuggagcaaucacagaug

SEQ ID NO: 2913709 - RNA, 19 nt, Human
uccugccuaaggcugaacu

SEQ ID NO: 2913710 - RNA, 16 nt, Human
uccugccuaaggcuga

SEQ ID NO: 2913711 - RNA, 21 nt, Human
uccugcccugggaggcaguga

SEQ ID NO: 2913712 - RNA, 15 nt, Human
uccugcccugggagg

SEQ ID NO: 2913713 - RNA, 14 nt, Human
uccugcccugggag

SEQ ID NO: 2913714 - RNA, 12 nt, Human
uccugcccuggg

SEQ ID NO: 2913715 - RNA, 11 nt, Human
uccugcccugg

SEQ ID NO: 2913716 - RNA, 16 nt, Human
uccugccggagaggaa

SEQ ID NO: 2913717 - RNA, 17 nt, Human
uccugccggagaggaag

SEQ ID NO: 2913718 - RNA, 19 nt, Human
uccugccggagaggaagag

SEQ ID NO: 2913719 - RNA, 22 nt, Human
uccugccggagaggaagagaca

SEQ ID NO: 2913720 - RNA, 23 nt, Human
uccugccggagaggaagagacac

SEQ ID NO: 2913721 - RNA, 14 nt, Human
ucuaucagagaaaa

SEQ ID NO: 2913722 - RNA, 17 nt, Human
ucuaucaagucaaucau

SEQ ID NO: 2913723 - RNA, 18 nt, Human
ucuaucaagucaaucauu

SEQ ID NO: 2913724 - RNA, 22 nt, Human
ucuaucaagucaaucauuucuc

SEQ ID NO: 2913725 - RNA, 23 nt, Human
ucuaucaagucaaucauuucuca

SEQ ID NO: 2913726 - RNA, 14 nt, Human
ucuaucaccaagga

SEQ ID NO: 2913727 - RNA, 15 nt, Human
ucuaguggucuuugu

SEQ ID NO: 2913728 - RNA, 16 nt, Human
ucuaguggucuuugua

SEQ ID NO: 2913729 - RNA, 17 nt, Human
ucuaguggucuuuguaa

SEQ ID NO: 2913730 - RNA, 18 nt, Human
ucuaguggucuuuguaag

SEQ ID NO: 2913731 - RNA, 19 nt, Human
ucuaguggucuuuguaaga

SEQ ID NO: 2913732 - RNA, 14 nt, Human
ucuagugcccucca

SEQ ID NO: 2913733 - RNA, 20 nt, Human
ucuagugcccuccacagccg

SEQ ID NO: 2913734 - RNA, 19 nt, Human
ucuacgguguaugguucug

SEQ ID NO: 2913735 - RNA, 17 nt, Human
ucuacgcucuccuuucu

SEQ ID NO: 2913736 - RNA, 18 nt, Human
ucuacggaucaucaacaa

SEQ ID NO: 2913737 - RNA, 21 nt, Human
ucuacggaucaucaacaagau

SEQ ID NO: 2913738 - RNA, 16 nt, Human
ucuacgcucuccuuuc

SEQ ID NO: 2913739 - RNA, 15 nt, Human
ucuacgcucuccuuu

SEQ ID NO: 2913740 - RNA, 23 nt, Human
ucuacuguguaauauaaaagauc

SEQ ID NO: 2913741 - RNA, 16 nt, Human
ucuacuggucuugugg

SEQ ID NO: 2913742 - RNA, 23 nt, Human
ucuacuggucuuguggaauuggg

SEQ ID NO: 2913743 - RNA, 20 nt, Human
ucuacuggucuuguggaauu

SEQ ID NO: 2913744 - RNA, 16 nt, Human
ucuacagaggccaugg

SEQ ID NO: 2913745 - RNA, 15 nt, Human
ucuacagaggccaug

SEQ ID NO: 2913746 - RNA, 18 nt, Human
ucuacacagugggaacuc

SEQ ID NO: 2913747 - RNA, 23 nt, Human
ucuacacagugggaacucugaca

SEQ ID NO: 2913748 - RNA, 13 nt, Human
ucuacaaagcacu

SEQ ID NO: 2913749 - RNA, 23 nt, Human
ucuacaaagcacuagagaaugca

SEQ ID NO: 2913750 - RNA, 13 nt, Human
ucuacaaauaauu

SEQ ID NO: 2913751 - RNA, 19 nt, Human
ucuacaaauaauuuuagug

SEQ ID NO: 2913752 - RNA, 18 nt, Human
ucuacaaauauaagauuu

SEQ ID NO: 2913753 - RNA, 19 nt, Human
ucuacaaauauaagauuuu

SEQ ID NO: 2913754 - RNA, 16 nt, Human
ucuaauuuuuaagcaa

SEQ ID NO: 2913755 - RNA, 18 nt, Human
ucggacuuagcugggaga

SEQ ID NO: 2913756 - RNA, 20 nt, Human
uccuuagagguccucuggag

SEQ ID NO: 2913757 - RNA, 17 nt, Human
uccuuagaccuuccaua

SEQ ID NO: 2913758 - RNA, 13 nt, Human
ucgugacaacacu

SEQ ID NO: 2913759 - RNA, 14 nt, Human
ucgugaacaucccc

SEQ ID NO: 2913760 - RNA, 19 nt, Human
ucgugaacauccccuccca

SEQ ID NO: 2913761 - RNA, 19 nt, Human
ucggauaugauuguuucuc

SEQ ID NO: 2913762 - RNA, 16 nt, Human
ucggcauuucaaaugu

SEQ ID NO: 2913763 - RNA, 18 nt, Human
ucggcaacuaagcagucc

SEQ ID NO: 2913764 - RNA, 14 nt, Human
ucuaaagguccaca

SEQ ID NO: 2913765 - RNA, 16 nt, Human
ucguguccccuauccu

SEQ ID NO: 2913766 - RNA, 15 nt, Human
ucuaaagguccacag

SEQ ID NO: 2913767 - RNA, 17 nt, Human
ucuaaagguccacaggu

SEQ ID NO: 2913768 - RNA, 22 nt, Human
ucuaaagguccacaggucuaga

SEQ ID NO: 2913769 - RNA, 23 nt, Human
ucuaaagguccacaggucuagac

SEQ ID NO: 2913770 - RNA, 12 nt, Human
ucuaaaguuaua

SEQ ID NO: 2913771 - RNA, 14 nt, Human
ucuaaaguuauauu

SEQ ID NO: 2913772 - RNA, 17 nt, Human
ucuaaaguuauauuuca

SEQ ID NO: 2913773 - RNA, 11 nt, Human
ucuaaaguucu

SEQ ID NO: 2913774 - RNA, 12 nt, Human
ucuaaaguucua

SEQ ID NO: 2913775 - RNA, 13 nt, Human
ucuaaaguucuaa

SEQ ID NO: 2913776 - RNA, 14 nt, Human
ucuaaaguucuaag

SEQ ID NO: 2913777 - RNA, 15 nt, Human
ucuaaaguucuaaga

SEQ ID NO: 2913778 - RNA, 16 nt, Human
ucuaaaguucuaagau

SEQ ID NO: 2913779 - RNA, 21 nt, Human
ucuaaaguucuaagauucuga

SEQ ID NO: 2913780 - RNA, 17 nt, Human
ucuaaaguucuaagauu

SEQ ID NO: 2913781 - RNA, 18 nt, Human
ucuaaaguucuaagauuc

SEQ ID NO: 2913782 - RNA, 19 nt, Human
ucuaaaguucuaagauucu

SEQ ID NO: 2913783 - RNA, 20 nt, Human
ucuaaaguucuaagauucug

SEQ ID NO: 2913784 - RNA, 22 nt, Human
ucguggguguguguagccaagg

SEQ ID NO: 2913785 - RNA, 15 nt, Human
ucgugggugugugua

SEQ ID NO: 2913786 - RNA, 21 nt, Human
ucguggcagauaaucagccuc

SEQ ID NO: 2913787 - RNA, 20 nt, Human
ucguggcagauaaucagccu

SEQ ID NO: 2913788 - RNA, 15 nt, Human
ucguguaaauuaugu

SEQ ID NO: 2913789 - RNA, 20 nt, Human
ucguguaauuacuuaucccu

SEQ ID NO: 2913790 - RNA, 22 nt, Human
ucgugguccccaacagcgacau

SEQ ID NO: 2913791 - RNA, 23 nt, Human
ucucagucaugcauaaauaugca

SEQ ID NO: 2913792 - RNA, 20 nt, Human
ucucagucaugcauaaauau

SEQ ID NO: 2913793 - RNA, 21 nt, Human
ucucagucaugcauaaauaug

SEQ ID NO: 2913794 - RNA, 15 nt, Human
ucucauaccucugac

SEQ ID NO: 2913795 - RNA, 16 nt, Human
ucucauaccucugacc

SEQ ID NO: 2913796 - RNA, 19 nt, Human
ucucauaccucugaccaac

SEQ ID NO: 2913797 - RNA, 13 nt, Human
ucuaugggacuca

SEQ ID NO: 2913798 - RNA, 12 nt, Human
ucuaugggacuc

SEQ ID NO: 2913799 - RNA, 19 nt, Human
ucuaugggacucaaugcac

SEQ ID NO: 2913800 - RNA, 15 nt, Human
ucuaugagucuagau

SEQ ID NO: 2913801 - RNA, 14 nt, Human
ucuaugagucuaga

SEQ ID NO: 2913802 - RNA, 21 nt, Human
ucuauggacagggcugucucu

SEQ ID NO: 2913803 - RNA, 19 nt, Human
ucucagucaugcauaaaua

SEQ ID NO: 2913804 - RNA, 16 nt, Human
ucucagucaugcauaa

SEQ ID NO: 2913805 - RNA, 13 nt, Human
ucucauccugcag

SEQ ID NO: 2913806 - RNA, 15 nt, Human
ucucauccugcaggc

SEQ ID NO: 2913807 - RNA, 16 nt, Human
uccuggagaagccucg

SEQ ID NO: 2913808 - RNA, 21 nt, Human
ucucauacucccccacaguuu

SEQ ID NO: 2913809 - RNA, 13 nt, Human
ucucaucugaggc

SEQ ID NO: 2913810 - RNA, 13 nt, Human
ucucaucugcacc

SEQ ID NO: 2913811 - RNA, 15 nt, Human
ucucaucugcacccu

SEQ ID NO: 2913812 - RNA, 16 nt, Human
ucucaucugcacccuu

SEQ ID NO: 2913813 - RNA, 19 nt, Human
ucucaucugcacccuucuu

SEQ ID NO: 2913814 - RNA, 22 nt, Human
ucucaucugcacccuucuuuuc

SEQ ID NO: 2913815 - RNA, 23 nt, Human
ucucaucugcacccuucuuuucu

SEQ ID NO: 2913816 - RNA, 14 nt, Human
ucucaucuugugaa

SEQ ID NO: 2913817 - RNA, 15 nt, Human
ucucaucuugugaaa

SEQ ID NO: 2913818 - RNA, 13 nt, Human
ucuccacuccaga

SEQ ID NO: 2913819 - RNA, 16 nt, Human
ucuccacccugcucuc

SEQ ID NO: 2913820 - RNA, 14 nt, Human
ucuccacccugcuc

SEQ ID NO: 2913821 - RNA, 17 nt, Human
ucuccacccugcucucc

SEQ ID NO: 2913822 - RNA, 13 nt, Human
ucuccacccugcu

SEQ ID NO: 2913823 - RNA, 19 nt, Human
ucucaugccucagccuccu

SEQ ID NO: 2913824 - RNA, 16 nt, Human
ucucaugccucagccu

SEQ ID NO: 2913825 - RNA, 14 nt, Human
ucucaugaaucugc

SEQ ID NO: 2913826 - RNA, 18 nt, Human
ucucaugaaucugcaaug

SEQ ID NO: 2913827 - RNA, 13 nt, Human
ucucaugccucag

SEQ ID NO: 2913828 - RNA, 11 nt, Human
ucuccagcugg

SEQ ID NO: 2913829 - RNA, 17 nt, Human
ucuccagcugggcucug

SEQ ID NO: 2913830 - RNA, 19 nt, Human
ucuccagcugggcucugca

SEQ ID NO: 2913831 - RNA, 21 nt, Human
ucuccagccugggaggcacag

SEQ ID NO: 2913832 - RNA, 23 nt, Human
ucuccagccugggaggcacagca

SEQ ID NO: 2913833 - RNA, 16 nt, Human
ucuccagcucagaacc

SEQ ID NO: 2913834 - RNA, 17 nt, Human
ucuccagcucagaaccc

SEQ ID NO: 2913835 - RNA, 20 nt, Human
ucuccagcucagaacccagg

SEQ ID NO: 2913836 - RNA, 21 nt, Human
ucuccagcucagaacccaggg

SEQ ID NO: 2913837 - RNA, 22 nt, Human
ucuccagcucagaacccagggc

SEQ ID NO: 2913838 - RNA, 23 nt, Human
ucuccagcucagaacccagggcu

SEQ ID NO: 2913839 - RNA, 19 nt, Human
ucuccacugugccuuugca

SEQ ID NO: 2913840 - RNA, 12 nt, Human
ucuccacugugc

SEQ ID NO: 2913841 - RNA, 14 nt, Human
ucuccacugccuuc

SEQ ID NO: 2913842 - RNA, 19 nt, Human
ucuccagauguuuccagac

SEQ ID NO: 2913843 - RNA, 14 nt, Human
ucuccagauuuuua

SEQ ID NO: 2913844 - RNA, 16 nt, Human
ucuccagauuuuuaau

SEQ ID NO: 2913845 - RNA, 21 nt, Human
ucuccagauuuuucggaggcc

SEQ ID NO: 2913846 - RNA, 15 nt, Human
ucuccagauguuucc

SEQ ID NO: 2913847 - RNA, 18 nt, Human
ucuccagauguuuccaga

SEQ ID NO: 2913848 - RNA, 14 nt, Human
ucuccagauguuuc

SEQ ID NO: 2913849 - RNA, 12 nt, Human
ucuccccuccag

SEQ ID NO: 2913850 - RNA, 14 nt, Human
ucuccccuccagcc

SEQ ID NO: 2913851 - RNA, 15 nt, Human
ucuccccuccagccu

SEQ ID NO: 2913852 - RNA, 16 nt, Human
ucuccccuccagccuu

SEQ ID NO: 2913853 - RNA, 18 nt, Human
ucuccccucagagugcaa

SEQ ID NO: 2913854 - RNA, 13 nt, Human
ucuccccucagag

SEQ ID NO: 2913855 - RNA, 20 nt, Human
ucucccccugggcucugccc

SEQ ID NO: 2913856 - RNA, 18 nt, Human
ucucccccuuaccccaca

SEQ ID NO: 2913857 - RNA, 19 nt, Human
ucuccccgcuaaggaagau

SEQ ID NO: 2913858 - RNA, 22 nt, Human
ucuccccgcuaaggaagauauc

SEQ ID NO: 2913859 - RNA, 13 nt, Human
ucuccaggaccaa

SEQ ID NO: 2913860 - RNA, 14 nt, Human
ucuccaggaccaau

SEQ ID NO: 2913861 - RNA, 21 nt, Human
ucuccagcugggcucugcaau

SEQ ID NO: 2913862 - RNA, 17 nt, Human
ucuccaggcaccaucuc

SEQ ID NO: 2913863 - RNA, 19 nt, Human
ucuccaggcaccaucuccc

SEQ ID NO: 2913864 - RNA, 12 nt, Human
ucuccccagugu

SEQ ID NO: 2913865 - RNA, 14 nt, Human
ucucccugccagag

SEQ ID NO: 2913866 - RNA, 15 nt, Human
ucucccugccagagg

SEQ ID NO: 2913867 - RNA, 18 nt, Human
ucucccuccccugccauu

SEQ ID NO: 2913868 - RNA, 12 nt, Human
ucucccuccccu

SEQ ID NO: 2913869 - RNA, 14 nt, Human
ucucccucccuugg

SEQ ID NO: 2913870 - RNA, 13 nt, Human
ugacaagcagaua

SEQ ID NO: 2913871 - RNA, 20 nt, Human
ugacaagcagauacugcugu

SEQ ID NO: 2913872 - RNA, 22 nt, Human
ugacaagcagauacugcugugu

SEQ ID NO: 2913873 - RNA, 11 nt, Human
ugacaagagcc

SEQ ID NO: 2913874 - RNA, 14 nt, Human
ugacaagagccuga

SEQ ID NO: 2913875 - RNA, 22 nt, Human
ugacaagagccugaucucuucc

SEQ ID NO: 2913876 - RNA, 23 nt, Human
ugacaagagccugaucucuuccu

SEQ ID NO: 2913877 - RNA, 16 nt, Human
ugaauugcguuggucu

SEQ ID NO: 2913878 - RNA, 22 nt, Human
ugaauugcguuggucucugcau

SEQ ID NO: 2913879 - RNA, 18 nt, Human
ugacaaggauugcuacug

SEQ ID NO: 2913880 - RNA, 20 nt, Human
ugacagaaggugccacuuua

SEQ ID NO: 2913881 - RNA, 17 nt, Human
ugacagaaggugccacu

SEQ ID NO: 2913882 - RNA, 15 nt, Human
ugacagaaggugcca

SEQ ID NO: 2913883 - RNA, 13 nt, Human
ugacagaaagcag

SEQ ID NO: 2913884 - RNA, 16 nt, Human
ugacagaaggaccagc

SEQ ID NO: 2913885 - RNA, 20 nt, Human
ugacagaaggaccagcccuu

SEQ ID NO: 2913886 - RNA, 14 nt, Human
ugacaauaauuuca

SEQ ID NO: 2913887 - RNA, 18 nt, Human
ugacaauaauauuguugu

SEQ ID NO: 2913888 - RNA, 19 nt, Human
ugacaauaauauuguugua

SEQ ID NO: 2913889 - RNA, 20 nt, Human
ugacaauaauauuguuguau

SEQ ID NO: 2913890 - RNA, 22 nt, Human
ugacaauaauauuguuguauaa

SEQ ID NO: 2913891 - RNA, 17 nt, Human
ugacaauaauuucaggu

SEQ ID NO: 2913892 - RNA, 16 nt, Human
ugacacaaaccugccu

SEQ ID NO: 2913893 - RNA, 13 nt, Human
ugacaauugucac

SEQ ID NO: 2913894 - RNA, 17 nt, Human
ugacagaggcagcccca

SEQ ID NO: 2913895 - RNA, 16 nt, Human
ugacagaggcagcccc

SEQ ID NO: 2913896 - RNA, 15 nt, Human
ugacagaggcagccc

SEQ ID NO: 2913897 - RNA, 14 nt, Human
ugacagaggcagcc

SEQ ID NO: 2913898 - RNA, 23 nt, Human
ugacagacacaggcccggcucca

SEQ ID NO: 2913899 - RNA, 20 nt, Human
ugacagacacaggcccggcu

SEQ ID NO: 2913900 - RNA, 13 nt, Human
ugacagaggcagc

SEQ ID NO: 2913901 - RNA, 16 nt, Human
ugacagacagcccucc

SEQ ID NO: 2913902 - RNA, 17 nt, Human
ugacagagugagacucu

SEQ ID NO: 2913903 - RNA, 14 nt, Human
ugacagagugagac

SEQ ID NO: 2913904 - RNA, 23 nt, Human
ugacagaggcagccccauucugc

SEQ ID NO: 2913905 - RNA, 18 nt, Human
ugacagaggcagccccau

SEQ ID NO: 2913906 - RNA, 19 nt, Human
ugacagagugagacucugu

SEQ ID NO: 2913907 - RNA, 18 nt, Human
ugacagaccacaucuuua

SEQ ID NO: 2913908 - RNA, 17 nt, Human
ugacagaccacaucuuu

SEQ ID NO: 2913909 - RNA, 17 nt, Human
ugacauaacagugcagg

SEQ ID NO: 2913910 - RNA, 12 nt, Human
ugacaugugaaa

SEQ ID NO: 2913911 - RNA, 23 nt, Human
ugaccaccaccccaacaaaccau

SEQ ID NO: 2913912 - RNA, 15 nt, Human
ugacauaccuuuuau

SEQ ID NO: 2913913 - RNA, 16 nt, Human
ugacauaccuuuuauu

SEQ ID NO: 2913914 - RNA, 16 nt, Human
ugacauaauauauucu

SEQ ID NO: 2913915 - RNA, 14 nt, Human
ugacccuggggcug

SEQ ID NO: 2913916 - RNA, 15 nt, Human
ugacccuggggcugg

SEQ ID NO: 2913917 - RNA, 17 nt, Human
ugacccuggggcuggcu

SEQ ID NO: 2913918 - RNA, 18 nt, Human
ugacccuggggcuggcuu

SEQ ID NO: 2913919 - RNA, 23 nt, Human
ugacccugcgaaggggcccuggu

SEQ ID NO: 2913920 - RNA, 22 nt, Human
ugacccugcgaaggggcccugg

SEQ ID NO: 2913921 - RNA, 21 nt, Human
ugacccugcgaaggggcccug

SEQ ID NO: 2913922 - RNA, 20 nt, Human
ugacccuuccagacauacga

SEQ ID NO: 2913923 - RNA, 21 nt, Human
ugacccuuccagacauacgaa

SEQ ID NO: 2913924 - RNA, 19 nt, Human
ugacccuucccaaucagca

SEQ ID NO: 2913925 - RNA, 21 nt, Human
ugacccuucccaaucagcacu

SEQ ID NO: 2913926 - RNA, 22 nt, Human
ugacccuucccaaucagcacug

SEQ ID NO: 2913927 - RNA, 23 nt, Human
ugacccuucccaaucagcacuga

SEQ ID NO: 2913928 - RNA, 16 nt, Human
ugaccauacugaggga

SEQ ID NO: 2913929 - RNA, 21 nt, Human
ugaccaguuuaaccugaugca

SEQ ID NO: 2913930 - RNA, 23 nt, Human
ugaccaguuuaaccugaugcagu

SEQ ID NO: 2913931 - RNA, 20 nt, Human
ugaccaguuuaaccugaugc

SEQ ID NO: 2913932 - RNA, 12 nt, Human
ugaccaggccug

SEQ ID NO: 2913933 - RNA, 20 nt, Human
ugaccaggccugggccagag

SEQ ID NO: 2913934 - RNA, 13 nt, Human
ugaccaggccugg

SEQ ID NO: 2913935 - RNA, 15 nt, Human
ugaccaggccugggc

SEQ ID NO: 2913936 - RNA, 23 nt, Human
ugaccagccuccaugcugccucc

SEQ ID NO: 2913937 - RNA, 21 nt, Human
ugaagucacugcacagugcau

SEQ ID NO: 2913938 - RNA, 16 nt, Human
ugaaggaauacaauau

SEQ ID NO: 2913939 - RNA, 18 nt, Human
ugaaggcagagaaaggga

SEQ ID NO: 2913940 - RNA, 17 nt, Human
ugaagugagcacagccu

SEQ ID NO: 2913941 - RNA, 13 nt, Human
ugaagugcgugaa

SEQ ID NO: 2913942 - RNA, 16 nt, Human
ugaagugcgugaaugu

SEQ ID NO: 2913943 - RNA, 17 nt, Human
ugaagugcgugaaugua

SEQ ID NO: 2913944 - RNA, 21 nt, Human
ugaagugcgugaauguaugua

SEQ ID NO: 2913945 - RNA, 16 nt, Human
ugaaguguaccugugu

SEQ ID NO: 2913946 - RNA, 17 nt, Human
ugaaguguaccugugua

SEQ ID NO: 2913947 - RNA, 22 nt, Human
ugaaguguaccuguguacauaa

SEQ ID NO: 2913948 - RNA, 18 nt, Human
ugaagugagcacagccua

SEQ ID NO: 2913949 - RNA, 16 nt, Human
ugaaguguguuuccuu

SEQ ID NO: 2913950 - RNA, 22 nt, Human
ugaaguguguuuccuucagugc

SEQ ID NO: 2913951 - RNA, 18 nt, Human
ugaaguguguuuccuuca

SEQ ID NO: 2913952 - RNA, 20 nt, Human
ugaaguguuuuguucuuucu

SEQ ID NO: 2913953 - RNA, 16 nt, Human
ugaaguuacuuuaugu

SEQ ID NO: 2913954 - RNA, 15 nt, Human
ugaaguuacuuucuu

SEQ ID NO: 2913955 - RNA, 19 nt, Human
ugaaguuacuuucuuaaug

SEQ ID NO: 2913956 - RNA, 19 nt, Human
ugaaguuagguucuuaaaa

SEQ ID NO: 2913957 - RNA, 21 nt, Human
ugaaguuagguucuuaaaagu

SEQ ID NO: 2913958 - RNA, 22 nt, Human
ugaaguuagguucuuaaaagug

SEQ ID NO: 2913959 - RNA, 14 nt, Human
ugaaguucuccuga

SEQ ID NO: 2913960 - RNA, 14 nt, Human
ugaaguuuaaaaca

SEQ ID NO: 2913961 - RNA, 14 nt, Human
ugaauaaaagugca

SEQ ID NO: 2913962 - RNA, 15 nt, Human
ugaauaaaagugcac

SEQ ID NO: 2913963 - RNA, 16 nt, Human
ugaauaaaagugcaca

SEQ ID NO: 2913964 - RNA, 19 nt, Human
ugaauaaaaauauguacaa

SEQ ID NO: 2913965 - RNA, 20 nt, Human
ugaaggacauugcggacagc

SEQ ID NO: 2913966 - RNA, 19 nt, Human
ugaaggacauugcggacag

SEQ ID NO: 2913967 - RNA, 22 nt, Human
ugaaggacauugcggacagcca

SEQ ID NO: 2913968 - RNA, 14 nt, Human
ugaaggcaaugcca

SEQ ID NO: 2913969 - RNA, 18 nt, Human
ugaaggcaaaauugcaaa

SEQ ID NO: 2913970 - RNA, 16 nt, Human
ugaaggagagcccuuc

SEQ ID NO: 2913971 - RNA, 16 nt, Human
ugaacucugaacuuug

SEQ ID NO: 2913972 - RNA, 18 nt, Human
ugaacucugaacuuugga

SEQ ID NO: 2913973 - RNA, 16 nt, Human
ugaacucugggcucaa

SEQ ID NO: 2913974 - RNA, 17 nt, Human
ugaacuccuggccucaa

SEQ ID NO: 2913975 - RNA, 16 nt, Human
ugaacucugacaacag

SEQ ID NO: 2913976 - RNA, 18 nt, Human
ugaaccaagaucuauaaa

SEQ ID NO: 2913977 - RNA, 14 nt, Human
ugaacauuugugau

SEQ ID NO: 2913978 - RNA, 16 nt, Human
ugaacauuugugauau

SEQ ID NO: 2913979 - RNA, 20 nt, Human
ugaaggaagccaaauuuauc

SEQ ID NO: 2913980 - RNA, 22 nt, Human
ugaaggaagccaaauuuaucaa

SEQ ID NO: 2913981 - RNA, 23 nt, Human
ugaaggaagccaaauuuaucaaa

SEQ ID NO: 2913982 - RNA, 20 nt, Human
ugaaggaauaaauugcuccu

SEQ ID NO: 2913983 - RNA, 14 nt, Human
ugaaugaaagauua

SEQ ID NO: 2913984 - RNA, 16 nt, Human
ugaaugaaagauuaaa

SEQ ID NO: 2913985 - RNA, 19 nt, Human
ugaaugaaagauuaaacag

SEQ ID NO: 2913986 - RNA, 22 nt, Human
ugaaugaaagauuaaacagaug

SEQ ID NO: 2913987 - RNA, 15 nt, Human
ugaaugacaacagaa

SEQ ID NO: 2913988 - RNA, 17 nt, Human
ugaaugacaacagaagc

SEQ ID NO: 2913989 - RNA, 14 nt, Human
ugaaugagaaucua

SEQ ID NO: 2913990 - RNA, 19 nt, Human
ugaaugaggauuauuauaa

SEQ ID NO: 2913991 - RNA, 19 nt, Human
ugaaugaggucccaggcag

SEQ ID NO: 2913992 - RNA, 18 nt, Human
ugaaugaggucccaggca

SEQ ID NO: 2913993 - RNA, 17 nt, Human
ugaaugaggucccaggc

SEQ ID NO: 2913994 - RNA, 21 nt, Human
ugaaugagucuguuguguguc

SEQ ID NO: 2913995 - RNA, 18 nt, Human
ugaaugagucuguugugu

SEQ ID NO: 2913996 - RNA, 22 nt, Human
ugaaugaggucccaggcagaga

SEQ ID NO: 2913997 - RNA, 23 nt, Human
ugaaugagucuguugugugucau

SEQ ID NO: 2913998 - RNA, 14 nt, Human
ugaaugaugagccu

SEQ ID NO: 2913999 - RNA, 23 nt, Human
ugaauguuauuuguuauuuucag

SEQ ID NO: 2914000 - RNA, 14 nt, Human
ugaauguuauuugu

SEQ ID NO: 2914001 - RNA, 15 nt, Human
ugaauguuauuuguu

SEQ ID NO: 2914002 - RNA, 14 nt, Human
ugaauguuaagaau

SEQ ID NO: 2914003 - RNA, 17 nt, Human
ugaauguuaagaauuga

SEQ ID NO: 2914004 - RNA, 16 nt, Human
ugaauguuaauuuuuu

SEQ ID NO: 2914005 - RNA, 20 nt, Human
ugaaucccacccacauguga

SEQ ID NO: 2914006 - RNA, 14 nt, Human
ugaauaaagacacc

SEQ ID NO: 2914007 - RNA, 15 nt, Human
ugaauaaagacaccu

SEQ ID NO: 2914008 - RNA, 13 nt, Human
ugaauaaacuuca

SEQ ID NO: 2914009 - RNA, 14 nt, Human
ugaauaaacuucag

SEQ ID NO: 2914010 - RNA, 15 nt, Human
ugaauaaacuucagc

SEQ ID NO: 2914011 - RNA, 16 nt, Human
ugaauaaacuucagca

SEQ ID NO: 2914012 - RNA, 17 nt, Human
ugaauaaacuucagcac

SEQ ID NO: 2914013 - RNA, 18 nt, Human
ugaauaaacuucagcacc

SEQ ID NO: 2914014 - RNA, 19 nt, Human
ugaauaaacuucagcacca

SEQ ID NO: 2914015 - RNA, 21 nt, Human
ugaauuaggggacacugucuu

SEQ ID NO: 2914016 - RNA, 17 nt, Human
ugaauucuuaugcuuau

SEQ ID NO: 2914017 - RNA, 13 nt, Human
ugaauugacuacc

SEQ ID NO: 2914018 - RNA, 15 nt, Human
ugaauucuuuugcca

SEQ ID NO: 2914019 - RNA, 16 nt, Human
ugaauuccuagaauua

SEQ ID NO: 2914020 - RNA, 18 nt, Human
ugaauuccuagaauuaaa

SEQ ID NO: 2914021 - RNA, 22 nt, Human
ugaaagggagcuaucaggaaca

SEQ ID NO: 2914022 - RNA, 20 nt, Human
ugaaagggagcuaucaggaa

SEQ ID NO: 2914023 - RNA, 19 nt, Human
ugaaagguuacccuguaac

SEQ ID NO: 2914024 - RNA, 16 nt, Human
ugaaagggaucaucau

SEQ ID NO: 2914025 - RNA, 17 nt, Human
ugaaagggaucaucaug

SEQ ID NO: 2914026 - RNA, 23 nt, Human
ugaaagggcaauaugaaguuacu

SEQ ID NO: 2914027 - RNA, 13 nt, Human
ugaaagguacuau

SEQ ID NO: 2914028 - RNA, 14 nt, Human
ugaaagguacuaua

SEQ ID NO: 2914029 - RNA, 15 nt, Human
ugaaagguacuauau

SEQ ID NO: 2914030 - RNA, 18 nt, Human
ugaaagguacuauauuug

SEQ ID NO: 2914031 - RNA, 19 nt, Human
ugaaagguacuauauuugc

SEQ ID NO: 2914032 - RNA, 13 nt, Human
ugaaagggcccag

SEQ ID NO: 2914033 - RNA, 22 nt, Human
ugaaagccuuagggaagcuggc

SEQ ID NO: 2914034 - RNA, 17 nt, Human
ugaaagcucuguugcaa

SEQ ID NO: 2914035 - RNA, 14 nt, Human
ugaaagcugagaac

SEQ ID NO: 2914036 - RNA, 19 nt, Human
ugaaagcugagaacuccug

SEQ ID NO: 2914037 - RNA, 20 nt, Human
ugaaagcugagaacuccuga

SEQ ID NO: 2914038 - RNA, 21 nt, Human
ugaaagcugagaacuccugac

SEQ ID NO: 2914039 - RNA, 22 nt, Human
ugaaagcugagaacuccugacu

SEQ ID NO: 2914040 - RNA, 15 nt, Human
ugaaacccuggacca

SEQ ID NO: 2914041 - RNA, 17 nt, Human
ugaaagaugauuugcaa

SEQ ID NO: 2914042 - RNA, 18 nt, Human
ugaaagaugauuugcaau

SEQ ID NO: 2914043 - RNA, 22 nt, Human
ugaaagaugauuugcaauggga

SEQ ID NO: 2914044 - RNA, 11 nt, Human
ugaaagaugau

SEQ ID NO: 2914045 - RNA, 21 nt, Human
ugaaacccuggaccagugguc

SEQ ID NO: 2914046 - RNA, 17 nt, Human
ugaaagccuuagggaag

SEQ ID NO: 2914047 - RNA, 18 nt, Human
ugaaagauggcugugccu

SEQ ID NO: 2914048 - RNA, 14 nt, Human
ugaaacaaagcugc

SEQ ID NO: 2914049 - RNA, 18 nt, Human
ugaaacaaauaaucacau

SEQ ID NO: 2914050 - RNA, 19 nt, Human
ugaaacaaauaaucacauu

SEQ ID NO: 2914051 - RNA, 22 nt, Human
ugaaacaaauaaucacauugac

SEQ ID NO: 2914052 - RNA, 17 nt, Human
ugaaaagcuauuagcca

SEQ ID NO: 2914053 - RNA, 19 nt, Human
ugaaaagcuauuagccagg

SEQ ID NO: 2914054 - RNA, 20 nt, Human
ugaaaagcuauuagccagga

SEQ ID NO: 2914055 - RNA, 23 nt, Human
ugaaaagcuauuagccaggauca

SEQ ID NO: 2914056 - RNA, 20 nt, Human
ugaaacacaaacaauaguaa

SEQ ID NO: 2914057 - RNA, 13 nt, Human
ugaaacacaaaca

SEQ ID NO: 2914058 - RNA, 13 nt, Human
ugaaacacagcug

SEQ ID NO: 2914059 - RNA, 14 nt, Human
ugaaacacagcugu

SEQ ID NO: 2914060 - RNA, 15 nt, Human
ugaaacacagcuguu

SEQ ID NO: 2914061 - RNA, 17 nt, Human
ugaaacacagcuguucu

SEQ ID NO: 2914062 - RNA, 18 nt, Human
ugaaacacagcuguucuu

SEQ ID NO: 2914063 - RNA, 19 nt, Human
ugaaacacagcuguucuuc

SEQ ID NO: 2914064 - RNA, 21 nt, Human
ugaaacacagcuguucuucug

SEQ ID NO: 2914065 - RNA, 21 nt, Human
ugaaacaccaagaugucuguc

SEQ ID NO: 2914066 - RNA, 22 nt, Human
ugaaacaccaagaugucugucu

SEQ ID NO: 2914067 - RNA, 14 nt, Human
ugaaaagauucuuc

SEQ ID NO: 2914068 - RNA, 17 nt, Human
ugaaaagauuuaagcac

SEQ ID NO: 2914069 - RNA, 13 nt, Human
ugaaaagcuauua

SEQ ID NO: 2914070 - RNA, 22 nt, Human
ucuuuucacauagcugucuaga

SEQ ID NO: 2914071 - RNA, 13 nt, Human
ugaaaagauguac

SEQ ID NO: 2914072 - RNA, 16 nt, Human
ugaaaagauguaccug

SEQ ID NO: 2914073 - RNA, 22 nt, Human
ugaaaagauguaccugguggau

SEQ ID NO: 2914074 - RNA, 17 nt, Human
ugaaaucaguuacucuu

SEQ ID NO: 2914075 - RNA, 16 nt, Human
ugaaaucaguuacucu

SEQ ID NO: 2914076 - RNA, 21 nt, Human
ugaaauauuuuuuaauuuaaa

SEQ ID NO: 2914077 - RNA, 19 nt, Human
ugaaaucaaugcaagagug

SEQ ID NO: 2914078 - RNA, 22 nt, Human
ugaaaucaaugcaagagugauu

SEQ ID NO: 2914079 - RNA, 13 nt, Human
ugaaauauugcug

SEQ ID NO: 2914080 - RNA, 17 nt, Human
ugaaauauugcuguaua

SEQ ID NO: 2914081 - RNA, 11 nt, Human
ugaaauauuuu

SEQ ID NO: 2914082 - RNA, 17 nt, Human
ugaaaugugguuuuccu

SEQ ID NO: 2914083 - RNA, 19 nt, Human
ugaaaugugguuuuccuga

SEQ ID NO: 2914084 - RNA, 17 nt, Human
ugaaauggauacuacau

SEQ ID NO: 2914085 - RNA, 19 nt, Human
ugaaauggauacuacaucu

SEQ ID NO: 2914086 - RNA, 22 nt, Human
ugaaaugucacguacugucuga

SEQ ID NO: 2914087 - RNA, 13 nt, Human
ugaaauucuaaag

SEQ ID NO: 2914088 - RNA, 23 nt, Human
ugaaauucuaaagagcacuuacu

SEQ ID NO: 2914089 - RNA, 12 nt, Human
ugaaauuccaaa

SEQ ID NO: 2914090 - RNA, 14 nt, Human
ugaaauuccaaagu

SEQ ID NO: 2914091 - RNA, 15 nt, Human
ugaaauuccaaaguc

SEQ ID NO: 2914092 - RNA, 19 nt, Human
ugaaauuccaaagucucua

SEQ ID NO: 2914093 - RNA, 16 nt, Human
ugaaauuccaaagucu

SEQ ID NO: 2914094 - RNA, 17 nt, Human
ugaaauuccaaagucuc

SEQ ID NO: 2914095 - RNA, 22 nt, Human
ugaaauuaugugacauuuuaca

SEQ ID NO: 2914096 - RNA, 20 nt, Human
ugaaauuaugugacauuuua

SEQ ID NO: 2914097 - RNA, 23 nt, Human
ugaaauuaagaaggcaaaaaugu

SEQ ID NO: 2914098 - RNA, 19 nt, Human
ugaaauuacuuaucaucca

SEQ ID NO: 2914099 - RNA, 22 nt, Human
ugaaauuacuuaucauccacau

SEQ ID NO: 2914100 - RNA, 13 nt, Human
ugaaauuauaguu

SEQ ID NO: 2914101 - RNA, 18 nt, Human
ugaaauuauaguuucaag

SEQ ID NO: 2914102 - RNA, 21 nt, Human
ugaaauuauaguuucaagcca

SEQ ID NO: 2914103 - RNA, 14 nt, Human
ugaaauuauaucug

SEQ ID NO: 2914104 - RNA, 15 nt, Human
ugaaauuauaucugu

SEQ ID NO: 2914105 - RNA, 21 nt, Human
ugaaauguuagucauuguuau

SEQ ID NO: 2914106 - RNA, 21 nt, Human
ugaaauuaagaaggcaaaaau

SEQ ID NO: 2914107 - RNA, 19 nt, Human
ugaaauuaagaaggcaaaa

SEQ ID NO: 2914108 - RNA, 18 nt, Human
ugaacaaguuuuaaugua

SEQ ID NO: 2914109 - RNA, 19 nt, Human
ugaacaaguuuuaauguau

SEQ ID NO: 2914110 - RNA, 18 nt, Human
ugaacacaaacuguaaau

SEQ ID NO: 2914111 - RNA, 15 nt, Human
ugaaaggcuuuuaaa

SEQ ID NO: 2914112 - RNA, 18 nt, Human
ugaacaagaauuggaagc

SEQ ID NO: 2914113 - RNA, 11 nt, Human
ugaacaagaau

SEQ ID NO: 2914114 - RNA, 14 nt, Human
ugaacaagaauugg

SEQ ID NO: 2914115 - RNA, 12 nt, Human
ugaacaagaauu

SEQ ID NO: 2914116 - RNA, 21 nt, Human
ugaacaauugucgaaaagagu

SEQ ID NO: 2914117 - RNA, 20 nt, Human
ugaacagcauggcacucccu

SEQ ID NO: 2914118 - RNA, 23 nt, Human
ugaacagcauggcacucccucca

SEQ ID NO: 2914119 - RNA, 16 nt, Human
ugaacuccuggccuca

SEQ ID NO: 2914120 - RNA, 20 nt, Human
ugaaccaccacacccagccc

SEQ ID NO: 2914121 - RNA, 17 nt, Human
ugaaccaccacacccag

SEQ ID NO: 2914122 - RNA, 23 nt, Human
ugaaccacaucuugcucugcuga

SEQ ID NO: 2914123 - RNA, 15 nt, Human
ugaacauuuacuaca

SEQ ID NO: 2914124 - RNA, 20 nt, Human
ugaacauuuacuacaguuuu

SEQ ID NO: 2914125 - RNA, 22 nt, Human
ugaacauuuacuacaguuuuua

SEQ ID NO: 2914126 - RNA, 18 nt, Human
ucuuucaacuugcaucca

SEQ ID NO: 2914127 - RNA, 14 nt, Human
ucuuucaagaauga

SEQ ID NO: 2914128 - RNA, 15 nt, Human
ucuuucaacuugcau

SEQ ID NO: 2914129 - RNA, 15 nt, Human
ucuuguuuuuauuaa

SEQ ID NO: 2914130 - RNA, 17 nt, Human
ucuuguuuuuauuaauu

SEQ ID NO: 2914131 - RNA, 20 nt, Human
ucuuguuuuuauuaauuuau

SEQ ID NO: 2914132 - RNA, 21 nt, Human
ucuuguuuuuauuaauuuaua

SEQ ID NO: 2914133 - RNA, 14 nt, Human
ucuuguuuuguuug

SEQ ID NO: 2914134 - RNA, 15 nt, Human
ucuuguuuuguuugu

SEQ ID NO: 2914135 - RNA, 16 nt, Human
ucuuguuuuguuuguc

SEQ ID NO: 2914136 - RNA, 17 nt, Human
ucuuguuuuguuugucu

SEQ ID NO: 2914137 - RNA, 22 nt, Human
ucuuguuuuguuugucucuccu

SEQ ID NO: 2914138 - RNA, 23 nt, Human
ucuuguuuuguuugucucuccuu

SEQ ID NO: 2914139 - RNA, 12 nt, Human
ucuuucaaacuc

SEQ ID NO: 2914140 - RNA, 12 nt, Human
ucuugcuuguac

SEQ ID NO: 2914141 - RNA, 13 nt, Human
ucuugcuuguacc

SEQ ID NO: 2914142 - RNA, 15 nt, Human
ucuuguguuguccuu

SEQ ID NO: 2914143 - RNA, 15 nt, Human
ucuuguuccaaggcc

SEQ ID NO: 2914144 - RNA, 13 nt, Human
ucuuguuucucca

SEQ ID NO: 2914145 - RNA, 21 nt, Human
ucuuguuucuccagauuuuua

SEQ ID NO: 2914146 - RNA, 14 nt, Human
ucuuguuuucaguu

SEQ ID NO: 2914147 - RNA, 22 nt, Human
ucuuguuucuuuucacauagcu

SEQ ID NO: 2914148 - RNA, 20 nt, Human
ucuuguuuauaccuuugccu

SEQ ID NO: 2914149 - RNA, 13 nt, Human
ucuuguuuauuga

SEQ ID NO: 2914150 - RNA, 11 nt, Human
ucuuguugcuu

SEQ ID NO: 2914151 - RNA, 13 nt, Human
ucuuguugcuuug

SEQ ID NO: 2914152 - RNA, 14 nt, Human
ucuuguugcuuugu

SEQ ID NO: 2914153 - RNA, 19 nt, Human
ucuuguugcuuuguugcac

SEQ ID NO: 2914154 - RNA, 13 nt, Human
ucuuguucuguca

SEQ ID NO: 2914155 - RNA, 15 nt, Human
ucuuguucugucacu

SEQ ID NO: 2914156 - RNA, 15 nt, Human
ucuuguuagaaaaca

SEQ ID NO: 2914157 - RNA, 17 nt, Human
ucuuguuagaaaacaaa

SEQ ID NO: 2914158 - RNA, 17 nt, Human
ucuugcgaauccaagcu

SEQ ID NO: 2914159 - RNA, 19 nt, Human
ucuugcgaauccaagcucc

SEQ ID NO: 2914160 - RNA, 20 nt, Human
ucuugcgaauccaagcuccc

SEQ ID NO: 2914161 - RNA, 21 nt, Human
ucuugcgaauccaagcucccu

SEQ ID NO: 2914162 - RNA, 23 nt, Human
ucuugcgaauccaagcucccugc

SEQ ID NO: 2914163 - RNA, 16 nt, Human
ucuugcauccuuccua

SEQ ID NO: 2914164 - RNA, 18 nt, Human
ucuugcauccuuccuaua

SEQ ID NO: 2914165 - RNA, 21 nt, Human
ucuugcauccuuccuauaacu

SEQ ID NO: 2914166 - RNA, 22 nt, Human
ucuugcauccuuccuauaacuu

SEQ ID NO: 2914167 - RNA, 23 nt, Human
ucuugcauccuuccuauaacuug

SEQ ID NO: 2914168 - RNA, 18 nt, Human
ucuugcuauauugcccag

SEQ ID NO: 2914169 - RNA, 19 nt, Human
ucuugcuauauugcccagg

SEQ ID NO: 2914170 - RNA, 20 nt, Human
ucuugcuaucggggaagcca

SEQ ID NO: 2914171 - RNA, 21 nt, Human
ucuugcuaucggggaagccag

SEQ ID NO: 2914172 - RNA, 10 nt, Human
ucuugcugcu

SEQ ID NO: 2914173 - RNA, 13 nt, Human
ucuugcugcuaga

SEQ ID NO: 2914174 - RNA, 14 nt, Human
ucuugcugcuagaa

SEQ ID NO: 2914175 - RNA, 15 nt, Human
ucuugcugcuagaac

SEQ ID NO: 2914176 - RNA, 16 nt, Human
ucuugcugcuagaacu

SEQ ID NO: 2914177 - RNA, 17 nt, Human
ucuugcugcuagaacuu

SEQ ID NO: 2914178 - RNA, 18 nt, Human
ucuugcugcuagaacuuu

SEQ ID NO: 2914179 - RNA, 19 nt, Human
ucuugcugcuagaacuuuu

SEQ ID NO: 2914180 - RNA, 20 nt, Human
ucuugcugcuagaacuuuuu

SEQ ID NO: 2914181 - RNA, 22 nt, Human
ucuugcugcuagaacuuuuuua

SEQ ID NO: 2914182 - RNA, 13 nt, Human
ucuugcugucucu

SEQ ID NO: 2914183 - RNA, 14 nt, Human
ucuugcugucucug

SEQ ID NO: 2914184 - RNA, 16 nt, Human
ucuugcugucucugcu

SEQ ID NO: 2914185 - RNA, 17 nt, Human
ucuugcugucucugcuc

SEQ ID NO: 2914186 - RNA, 19 nt, Human
ucuugcugucucugcucgc

SEQ ID NO: 2914187 - RNA, 14 nt, Human
ucuugcuguugaca

SEQ ID NO: 2914188 - RNA, 15 nt, Human
ucuugcuguugacau

SEQ ID NO: 2914189 - RNA, 18 nt, Human
ucuugcuguugacauauu

SEQ ID NO: 2914190 - RNA, 19 nt, Human
ucuugcuguugacauauuu

SEQ ID NO: 2914191 - RNA, 21 nt, Human
ucuugcuguugacauauuuaa

SEQ ID NO: 2914192 - RNA, 19 nt, Human
ucuugcuuaccuugacugu

SEQ ID NO: 2914193 - RNA, 21 nt, Human
ucuugcuuaccuugacuguug

SEQ ID NO: 2914194 - RNA, 12 nt, Human
ucucccuuaccc

SEQ ID NO: 2914195 - RNA, 13 nt, Human
ucuccucuugcca

SEQ ID NO: 2914196 - RNA, 16 nt, Human
ucuccucuugccacug

SEQ ID NO: 2914197 - RNA, 23 nt, Human
ucuugcaauggcagccuuggcaa

SEQ ID NO: 2914198 - RNA, 17 nt, Human
ucuccucuugccacugc

SEQ ID NO: 2914199 - RNA, 12 nt, Human
ucuuucuuccuu

SEQ ID NO: 2914200 - RNA, 13 nt, Human
ucuuucuuccuuu

SEQ ID NO: 2914201 - RNA, 15 nt, Human
ucuuucuuccuuuac

SEQ ID NO: 2914202 - RNA, 22 nt, Human
ucuuucuuuugauucuuccuaa

SEQ ID NO: 2914203 - RNA, 12 nt, Human
ucuuucuuuaaa

SEQ ID NO: 2914204 - RNA, 13 nt, Human
ucuuucuuuaaau

SEQ ID NO: 2914205 - RNA, 16 nt, Human
ucuuucuuuaaauguu

SEQ ID NO: 2914206 - RNA, 18 nt, Human
ucuuucuuuaaauguuuu

SEQ ID NO: 2914207 - RNA, 17 nt, Human
ucuuucagcuaucagua

SEQ ID NO: 2914208 - RNA, 18 nt, Human
ucuuucagcuaucaguag

SEQ ID NO: 2914209 - RNA, 18 nt, Human
ucuuucagacuugccaug

SEQ ID NO: 2914210 - RNA, 21 nt, Human
ucuuucagacuugccauguga

SEQ ID NO: 2914211 - RNA, 23 nt, Human
ucuuucagacuugccaugugacu

SEQ ID NO: 2914212 - RNA, 22 nt, Human
ucuuucagauuuuuugaaccau

SEQ ID NO: 2914213 - RNA, 20 nt, Human
ucuuugauucuccuuuuaug

SEQ ID NO: 2914214 - RNA, 21 nt, Human
ucuuugauucuccuuuuaugu

SEQ ID NO: 2914215 - RNA, 22 nt, Human
ucuuugauucuccuuuuaugug

SEQ ID NO: 2914216 - RNA, 13 nt, Human
ucuuugauaaugu

SEQ ID NO: 2914217 - RNA, 14 nt, Human
ucuuugauaauguu

SEQ ID NO: 2914218 - RNA, 21 nt, Human
ucuuugauaauguuaaauuug

SEQ ID NO: 2914219 - RNA, 16 nt, Human
ucuuugauaauguuaa

SEQ ID NO: 2914220 - RNA, 17 nt, Human
ucuuugauaauguuaaa

SEQ ID NO: 2914221 - RNA, 21 nt, Human
ucuuugaaauagucuguguga

SEQ ID NO: 2914222 - RNA, 21 nt, Human
ucuuugaaagacuuccaaaga

SEQ ID NO: 2914223 - RNA, 22 nt, Human
ucuuugaaagacuuccaaagaa

SEQ ID NO: 2914224 - RNA, 23 nt, Human
ucuuugaaagacuuccaaagaau

SEQ ID NO: 2914225 - RNA, 22 nt, Human
ucuuugaaauagucugugugaa

SEQ ID NO: 2914226 - RNA, 22 nt, Human
ucuuugaagaagguggaccuuu

SEQ ID NO: 2914227 - RNA, 23 nt, Human
ucuuugaagaagguggaccuuuu

SEQ ID NO: 2914228 - RNA, 18 nt, Human
ucuuuggaaaaauguuug

SEQ ID NO: 2914229 - RNA, 19 nt, Human
ucuuuggaaaaauguuugu

SEQ ID NO: 2914230 - RNA, 17 nt, Human
ucuuugcuuugcccagc

SEQ ID NO: 2914231 - RNA, 13 nt, Human
ucuuugcuuugcc

SEQ ID NO: 2914232 - RNA, 19 nt, Human
ucuuuuauaacuaguccuu

SEQ ID NO: 2914233 - RNA, 22 nt, Human
ucuuuuauaacuaguccuuuac

SEQ ID NO: 2914234 - RNA, 20 nt, Human
ucuuuuauaguggaaaaaca

SEQ ID NO: 2914235 - RNA, 21 nt, Human
ucuuuuauaguggaaaaacac

SEQ ID NO: 2914236 - RNA, 13 nt, Human
ucuuuuauauuug

SEQ ID NO: 2914237 - RNA, 14 nt, Human
ucuuuuauauuugu

SEQ ID NO: 2914238 - RNA, 16 nt, Human
ucuuuuauauuuguau

SEQ ID NO: 2914239 - RNA, 17 nt, Human
ucuuuuauauuuguauc

SEQ ID NO: 2914240 - RNA, 18 nt, Human
ucuuuuauauuuguaucg

SEQ ID NO: 2914241 - RNA, 22 nt, Human
ucuuuuauauuuguaucgaugu

SEQ ID NO: 2914242 - RNA, 12 nt, Human
ucuuuuaucugu

SEQ ID NO: 2914243 - RNA, 14 nt, Human
ucuuuuaucuguuu

SEQ ID NO: 2914244 - RNA, 15 nt, Human
ucuuuuaucuguuua

SEQ ID NO: 2914245 - RNA, 21 nt, Human
ucuuuuaucuguuuaaagcau

SEQ ID NO: 2914246 - RNA, 13 nt, Human
ucuuuuauguuug

SEQ ID NO: 2914247 - RNA, 15 nt, Human
ucuuuuauguuugaa

SEQ ID NO: 2914248 - RNA, 16 nt, Human
ucuuuuauguuugaau

SEQ ID NO: 2914249 - RNA, 21 nt, Human
ucuuuuauguuugaauaugga

SEQ ID NO: 2914250 - RNA, 17 nt, Human
ucuuuuagcugaugaac

SEQ ID NO: 2914251 - RNA, 15 nt, Human
ugauguuggcuggga

SEQ ID NO: 2914252 - RNA, 16 nt, Human
ugauguuggcugggaa

SEQ ID NO: 2914253 - RNA, 13 nt, Human
ugauguuggaaga

SEQ ID NO: 2914254 - RNA, 14 nt, Human
ugauguuggcuggg

SEQ ID NO: 2914255 - RNA, 22 nt, Human
ugauguucuaaggcucugagag

SEQ ID NO: 2914256 - RNA, 18 nt, Human
ugauguucuaaggcucug

SEQ ID NO: 2914257 - RNA, 19 nt, Human
ugauguucuaaggcucuga

SEQ ID NO: 2914258 - RNA, 20 nt, Human
ugauguucuaaggcucugag

SEQ ID NO: 2914259 - RNA, 21 nt, Human
ugauguucuaaggcucugaga

SEQ ID NO: 2914260 - RNA, 12 nt, Human
ugauguucuaag

SEQ ID NO: 2914261 - RNA, 14 nt, Human
ugauguucuaaggc

SEQ ID NO: 2914262 - RNA, 15 nt, Human
ugauguucuaaggcu

SEQ ID NO: 2914263 - RNA, 17 nt, Human
ugauguucuaaggcucu

SEQ ID NO: 2914264 - RNA, 15 nt, Human
ugauuagcagaagaa

SEQ ID NO: 2914265 - RNA, 19 nt, Human
ugauuaguuuucuuguugc

SEQ ID NO: 2914266 - RNA, 11 nt, Human
ugauuagauga

SEQ ID NO: 2914267 - RNA, 14 nt, Human
ugauuagcuuugug

SEQ ID NO: 2914268 - RNA, 15 nt, Human
ugauuagcuuugugu

SEQ ID NO: 2914269 - RNA, 16 nt, Human
ugauuagcuuuguguu

SEQ ID NO: 2914270 - RNA, 18 nt, Human
ugauuagcuuuguguuug

SEQ ID NO: 2914271 - RNA, 19 nt, Human
ugauuagcuuuguguuugg

SEQ ID NO: 2914272 - RNA, 16 nt, Human
ugauuauuuauuauuu

SEQ ID NO: 2914273 - RNA, 14 nt, Human
ugauuauugcagaa

SEQ ID NO: 2914274 - RNA, 22 nt, Human
ugauuaugucuuuuauauuugu

SEQ ID NO: 2914275 - RNA, 13 nt, Human
ugauucaaaauau

SEQ ID NO: 2914276 - RNA, 14 nt, Human
ugauucaaaauauu

SEQ ID NO: 2914277 - RNA, 17 nt, Human
ugauucaaaauauuuaa

SEQ ID NO: 2914278 - RNA, 19 nt, Human
ugauucaaaauauuuaaaa

SEQ ID NO: 2914279 - RNA, 23 nt, Human
ugauucaaaauauuuaaaaaugu

SEQ ID NO: 2914280 - RNA, 11 nt, Human
ugauucaaaug

SEQ ID NO: 2914281 - RNA, 13 nt, Human
ugauucaaauggg

SEQ ID NO: 2914282 - RNA, 20 nt, Human
ugauuauuuucauuacaaug

SEQ ID NO: 2914283 - RNA, 21 nt, Human
ugauuauuuucauuacaaugg

SEQ ID NO: 2914284 - RNA, 13 nt, Human
ugauuauuuucuu

SEQ ID NO: 2914285 - RNA, 19 nt, Human
ugauuauuuucuucaucca

SEQ ID NO: 2914286 - RNA, 12 nt, Human
ugauucaauuca

SEQ ID NO: 2914287 - RNA, 17 nt, Human
ugauucacugcauggcu

SEQ ID NO: 2914288 - RNA, 14 nt, Human
ugauucagaaauug

SEQ ID NO: 2914289 - RNA, 22 nt, Human
ugauucacccccaaacagugac

SEQ ID NO: 2914290 - RNA, 12 nt, Human
ugauucacugca

SEQ ID NO: 2914291 - RNA, 13 nt, Human
ugauucacugcau

SEQ ID NO: 2914292 - RNA, 16 nt, Human
ugauguugccuuaaua

SEQ ID NO: 2914293 - RNA, 24 nt, Human
ugauucaccaaaauagucuucuca

SEQ ID NO: 2914294 - RNA, 12 nt, Human
ugauucacagug

SEQ ID NO: 2914295 - RNA, 21 nt, Human
ugauucaauucaacacucccu

SEQ ID NO: 2914296 - RNA, 18 nt, Human
ugauucuuuuuaaagugu

SEQ ID NO: 2914297 - RNA, 23 nt, Human
ugauucuuuuuaaaguguuucug

SEQ ID NO: 2914298 - RNA, 17 nt, Human
ugauucugcuugagaau

SEQ ID NO: 2914299 - RNA, 18 nt, Human
ugauucugcuugagaaua

SEQ ID NO: 2914300 - RNA, 16 nt, Human
ugauucagaaauugga

SEQ ID NO: 2914301 - RNA, 19 nt, Human
ugauucuccuuuuaugugu

SEQ ID NO: 2914302 - RNA, 22 nt, Human
ugauucugcaguaaaucuuuua

SEQ ID NO: 2914303 - RNA, 16 nt, Human
ugauucugcaguaaau

SEQ ID NO: 2914304 - RNA, 18 nt, Human
ugauugccaagcucagga

SEQ ID NO: 2914305 - RNA, 12 nt, Human
ugauugcagcuu

SEQ ID NO: 2914306 - RNA, 14 nt, Human
ugauugcagcuuua

SEQ ID NO: 2914307 - RNA, 15 nt, Human
ugauugaccugcucc

SEQ ID NO: 2914308 - RNA, 16 nt, Human
ugauugaccugcuccg

SEQ ID NO: 2914309 - RNA, 13 nt, Human
ugauugagaaguu

SEQ ID NO: 2914310 - RNA, 20 nt, Human
ugauugagaaguucauuguc

SEQ ID NO: 2914311 - RNA, 14 nt, Human
ugauugauuugaag

SEQ ID NO: 2914312 - RNA, 15 nt, Human
ugauugcacauuguu

SEQ ID NO: 2914313 - RNA, 12 nt, Human
ugauugauuuga

SEQ ID NO: 2914314 - RNA, 21 nt, Human
ugauucuccugccucagccuc

SEQ ID NO: 2914315 - RNA, 17 nt, Human
ugauuggaccaggccau

SEQ ID NO: 2914316 - RNA, 19 nt, Human
ugauuggaauagcuucugg

SEQ ID NO: 2914317 - RNA, 22 nt, Human
ugauuggacaggcaugggugca

SEQ ID NO: 2914318 - RNA, 16 nt, Human
ugauuggaccaggcca

SEQ ID NO: 2914319 - RNA, 16 nt, Human
ugauuggcuuguagaa

SEQ ID NO: 2914320 - RNA, 21 nt, Human
ugauuggcuuguagaauuguu

SEQ ID NO: 2914321 - RNA, 23 nt, Human
ugauuggcuuguagaauuguuau

SEQ ID NO: 2914322 - RNA, 20 nt, Human
ugauuggcaggaguuggaag

SEQ ID NO: 2914323 - RNA, 15 nt, Human
ugauugggacagagg

SEQ ID NO: 2914324 - RNA, 17 nt, Human
ugauugggacagagguu

SEQ ID NO: 2914325 - RNA, 21 nt, Human
ugauuguggaauggagauuca

SEQ ID NO: 2914326 - RNA, 16 nt, Human
ugauuguuugcucuga

SEQ ID NO: 2914327 - RNA, 14 nt, Human
ugauuuaaaacaug

SEQ ID NO: 2914328 - RNA, 15 nt, Human
ugauuuaaaacaugu

SEQ ID NO: 2914329 - RNA, 16 nt, Human
ugauuuaaaacaugua

SEQ ID NO: 2914330 - RNA, 15 nt, Human
ugauuuaaacacaca

SEQ ID NO: 2914331 - RNA, 16 nt, Human
ugauuuaaacacacag

SEQ ID NO: 2914332 - RNA, 19 nt, Human
ugauuggggaauuaaaagu

SEQ ID NO: 2914333 - RNA, 12 nt, Human
ugauuguaaaau

SEQ ID NO: 2914334 - RNA, 14 nt, Human
ugauuguaaaauag

SEQ ID NO: 2914335 - RNA, 17 nt, Human
ugauuguaaaauagcuu

SEQ ID NO: 2914336 - RNA, 23 nt, Human
ugauuguaaaauagcuuguauag

SEQ ID NO: 2914337 - RNA, 21 nt, Human
ugauuggugcaacccuuaccc

SEQ ID NO: 2914338 - RNA, 19 nt, Human
ugauuggugcaacccuuac

SEQ ID NO: 2914339 - RNA, 17 nt, Human
ugauuggugcaacccuu

SEQ ID NO: 2914340 - RNA, 21 nt, Human
ugauuguccuuuaaaaaagaa

SEQ ID NO: 2914341 - RNA, 18 nt, Human
ugauuguggaauggagau

SEQ ID NO: 2914342 - RNA, 14 nt, Human
ugauuguggaaugg

SEQ ID NO: 2914343 - RNA, 18 nt, Human
ugaugcuguucucuucuu

SEQ ID NO: 2914344 - RNA, 14 nt, Human
ugaugguuccccug

SEQ ID NO: 2914345 - RNA, 18 nt, Human
ugauguguuuauuuauag

SEQ ID NO: 2914346 - RNA, 14 nt, Human
ugauguguuuauuu

SEQ ID NO: 2914347 - RNA, 23 nt, Human
ugauguguugugauagcuaacau

SEQ ID NO: 2914348 - RNA, 19 nt, Human
ugaugucccaacuuguaaa

SEQ ID NO: 2914349 - RNA, 13 nt, Human
ugaugucaugugu

SEQ ID NO: 2914350 - RNA, 14 nt, Human
ugaugucauguguu

SEQ ID NO: 2914351 - RNA, 15 nt, Human
ugaugucauguguuc

SEQ ID NO: 2914352 - RNA, 17 nt, Human
ugaugucauuaaugugu

SEQ ID NO: 2914353 - RNA, 20 nt, Human
ugaugccugugaacugaacu

SEQ ID NO: 2914354 - RNA, 15 nt, Human
ugaugccugugaacu

SEQ ID NO: 2914355 - RNA, 20 nt, Human
ugaugcugggaguucuaaca

SEQ ID NO: 2914356 - RNA, 12 nt, Human
ugaugcugggau

SEQ ID NO: 2914357 - RNA, 21 nt, Human
ugaugccugugaacugaacuc

SEQ ID NO: 2914358 - RNA, 16 nt, Human
ugaucuuugcagacag

SEQ ID NO: 2914359 - RNA, 16 nt, Human
ugaugaugugccuggg

SEQ ID NO: 2914360 - RNA, 11 nt, Human
ugaugcaugug

SEQ ID NO: 2914361 - RNA, 21 nt, Human
ugaugcaugugguuugguucc

SEQ ID NO: 2914362 - RNA, 18 nt, Human
ugaugcccugcuccaggg

SEQ ID NO: 2914363 - RNA, 19 nt, Human
ugaugcccugcuccaggga

SEQ ID NO: 2914364 - RNA, 20 nt, Human
ugaugcccugcuccagggag

SEQ ID NO: 2914365 - RNA, 15 nt, Human
ugaugccgugauccu

SEQ ID NO: 2914366 - RNA, 13 nt, Human
ugaugcacagaga

SEQ ID NO: 2914367 - RNA, 16 nt, Human
ugaugcacagagaagc

SEQ ID NO: 2914368 - RNA, 17 nt, Human
ugaugcacagagaagcu

SEQ ID NO: 2914369 - RNA, 18 nt, Human
ugaugcacagagaagcug

SEQ ID NO: 2914370 - RNA, 20 nt, Human
ugaugcacagagaagcuggg

SEQ ID NO: 2914371 - RNA, 12 nt, Human
ugaugcagcauu

SEQ ID NO: 2914372 - RNA, 13 nt, Human
ugaugcagcauuu

SEQ ID NO: 2914373 - RNA, 14 nt, Human
ugaugcagcauuug

SEQ ID NO: 2914374 - RNA, 15 nt, Human
ugaugcagcauuuga

SEQ ID NO: 2914375 - RNA, 18 nt, Human
ugaugcagcauuugauaa

SEQ ID NO: 2914376 - RNA, 19 nt, Human
ugaugcagcauuugauaau

SEQ ID NO: 2914377 - RNA, 23 nt, Human
ugaugcagcauuugauaaugaua

SEQ ID NO: 2914378 - RNA, 19 nt, Human
ugaugcaggauuuguucuc

SEQ ID NO: 2914379 - RNA, 22 nt, Human
ugaugcaggauuuguucucugu

SEQ ID NO: 2914380 - RNA, 13 nt, Human
ugaugcaggcacu

SEQ ID NO: 2914381 - RNA, 21 nt, Human
ugaugcaggcacuuauuguaa

SEQ ID NO: 2914382 - RNA, 14 nt, Human
ugaugcagucuccu

SEQ ID NO: 2914383 - RNA, 15 nt, Human
ugaugcagucuccuc

SEQ ID NO: 2914384 - RNA, 21 nt, Human
ugaugcagucuccucuuuaaa

SEQ ID NO: 2914385 - RNA, 21 nt, Human
ugaucuuggcuuacugcagcc

SEQ ID NO: 2914386 - RNA, 19 nt, Human
ugaucuucugggagcagga

SEQ ID NO: 2914387 - RNA, 20 nt, Human
ugaucuucugggagcaggaa

SEQ ID NO: 2914388 - RNA, 22 nt, Human
ugaucuguauauacaauaacau

SEQ ID NO: 2914389 - RNA, 19 nt, Human
ugaucuguauauacaauaa

SEQ ID NO: 2914390 - RNA, 15 nt, Human
ugaucuguauauaca

SEQ ID NO: 2914391 - RNA, 13 nt, Human
ugaucuguauaua

SEQ ID NO: 2914392 - RNA, 20 nt, Human
ugaucugugauaguucaccc

SEQ ID NO: 2914393 - RNA, 21 nt, Human
ugaucugugauaguucacccc

SEQ ID NO: 2914394 - RNA, 13 nt, Human
ugaucugucuugu

SEQ ID NO: 2914395 - RNA, 14 nt, Human
ugaucugucuugua

SEQ ID NO: 2914396 - RNA, 15 nt, Human
ugaucugucuuguaa

SEQ ID NO: 2914397 - RNA, 16 nt, Human
ugaucugucuuguaau

SEQ ID NO: 2914398 - RNA, 17 nt, Human
ugaucugucuuguaaua

SEQ ID NO: 2914399 - RNA, 19 nt, Human
ugaucugucuuguaauauu

SEQ ID NO: 2914400 - RNA, 15 nt, Human
ugaucugugggcaca

SEQ ID NO: 2914401 - RNA, 15 nt, Human
ugaucuguuuuucac

SEQ ID NO: 2914402 - RNA, 16 nt, Human
ugaucuuaagaggcug

SEQ ID NO: 2914403 - RNA, 18 nt, Human
ugaucuuaauauauuuga

SEQ ID NO: 2914404 - RNA, 15 nt, Human
ugaucuuauuuuucu

SEQ ID NO: 2914405 - RNA, 16 nt, Human
ugaucuuauuuuucua

SEQ ID NO: 2914406 - RNA, 17 nt, Human
ugaucuuauuuuucuaa

SEQ ID NO: 2914407 - RNA, 19 nt, Human
ugaucuuauuuuucuaaac

SEQ ID NO: 2914408 - RNA, 20 nt, Human
ugaucuuauuuuucuaaacg

SEQ ID NO: 2914409 - RNA, 19 nt, Human
ugauccacccaccucagcc

SEQ ID NO: 2914410 - RNA, 18 nt, Human
ugauccacccaccucagc

SEQ ID NO: 2914411 - RNA, 17 nt, Human
ugauccacccaccucag

SEQ ID NO: 2914412 - RNA, 18 nt, Human
ugaucucgaacuccuaac

SEQ ID NO: 2914413 - RNA, 19 nt, Human
ugaucagcuuucaaagcau

SEQ ID NO: 2914414 - RNA, 20 nt, Human
ugaucagcuuucaaagcauu

SEQ ID NO: 2914415 - RNA, 21 nt, Human
ugaucagcuuucaaagcauuu

SEQ ID NO: 2914416 - RNA, 12 nt, Human
ugauagauuuga

SEQ ID NO: 2914417 - RNA, 17 nt, Human
ugauagauuugaccucc

SEQ ID NO: 2914418 - RNA, 18 nt, Human
ugauagauuugaccuccu

SEQ ID NO: 2914419 - RNA, 19 nt, Human
ugauagauuugaccuccuc

SEQ ID NO: 2914420 - RNA, 16 nt, Human
ugauccacccaccuca

SEQ ID NO: 2914421 - RNA, 15 nt, Human
ugauccaagcugguc

SEQ ID NO: 2914422 - RNA, 14 nt, Human
ugauccaagcuggu

SEQ ID NO: 2914423 - RNA, 13 nt, Human
ugauccaagcugg

SEQ ID NO: 2914424 - RNA, 16 nt, Human
ugaucaucgccagagg

SEQ ID NO: 2914425 - RNA, 18 nt, Human
ugaucaucgccagaggug

SEQ ID NO: 2914426 - RNA, 20 nt, Human
ugaucaucgccagaggugcu

SEQ ID NO: 2914427 - RNA, 17 nt, Human
ugaucauuuucccccca

SEQ ID NO: 2914428 - RNA, 16 nt, Human
ugaucauuuucccccc

SEQ ID NO: 2914429 - RNA, 16 nt, Human
ugaucauguuguuaaa

SEQ ID NO: 2914430 - RNA, 14 nt, Human
ugaucauucuggag

SEQ ID NO: 2914431 - RNA, 13 nt, Human
ugaucauuuauuu

SEQ ID NO: 2914432 - RNA, 20 nt, Human
ugaucauuuauuuuaagcac

SEQ ID NO: 2914433 - RNA, 23 nt, Human
ugaucauuuauuuuaagcacucu

SEQ ID NO: 2914434 - RNA, 22 nt, Human
ugaucauuuuccccccacucuc

SEQ ID NO: 2914435 - RNA, 21 nt, Human
ugaucauuuuccccccacucu

SEQ ID NO: 2914436 - RNA, 20 nt, Human
ugaucauuuuccccccacuc

SEQ ID NO: 2914437 - RNA, 19 nt, Human
ugaucauuuuccccccacu

SEQ ID NO: 2914438 - RNA, 18 nt, Human
ugaucauuuuccccccac

SEQ ID NO: 2914439 - RNA, 13 nt, Human
ugagagucuagau

SEQ ID NO: 2914440 - RNA, 14 nt, Human
ugagagucuagauu

SEQ ID NO: 2914441 - RNA, 15 nt, Human
ugagagucuagauuc

SEQ ID NO: 2914442 - RNA, 16 nt, Human
ugagagugucucugau

SEQ ID NO: 2914443 - RNA, 21 nt, Human
ugagagugucucugauaaaag

SEQ ID NO: 2914444 - RNA, 16 nt, Human
ugagagucuagauucu

SEQ ID NO: 2914445 - RNA, 17 nt, Human
ugagagucuagauucuc

SEQ ID NO: 2914446 - RNA, 19 nt, Human
ugagagucuagcacucauu

SEQ ID NO: 2914447 - RNA, 21 nt, Human
ugagagucuagcacucauuuu

SEQ ID NO: 2914448 - RNA, 15 nt, Human
ugagcagggcucagc

SEQ ID NO: 2914449 - RNA, 14 nt, Human
ugagcagggcucag

SEQ ID NO: 2914450 - RNA, 13 nt, Human
ugagcagggcuca

SEQ ID NO: 2914451 - RNA, 12 nt, Human
ugagcagggcuc

SEQ ID NO: 2914452 - RNA, 21 nt, Human
ugaccucaggugauccaccca

SEQ ID NO: 2914453 - RNA, 20 nt, Human
ugaccucaggugauccaccc

SEQ ID NO: 2914454 - RNA, 19 nt, Human
ugaccgcgacuaauuucaa

SEQ ID NO: 2914455 - RNA, 16 nt, Human
ugaccucagcuuugau

SEQ ID NO: 2914456 - RNA, 18 nt, Human
ugaccucaggcacuagcc

SEQ ID NO: 2914457 - RNA, 22 nt, Human
ugaccucagcuuugauauuuca

SEQ ID NO: 2914458 - RNA, 16 nt, Human
ugagaacacugugaaa

SEQ ID NO: 2914459 - RNA, 12 nt, Human
ugagaacacugu

SEQ ID NO: 2914460 - RNA, 14 nt, Human
ugagaacacuguga

SEQ ID NO: 2914461 - RNA, 19 nt, Human
ugaccucaggcacuagccu

SEQ ID NO: 2914462 - RNA, 16 nt, Human
ugagaaauuucuguga

SEQ ID NO: 2914463 - RNA, 19 nt, Human
ugagaaauuucugugaaac

SEQ ID NO: 2914464 - RNA, 12 nt, Human
ugagaacaaagc

SEQ ID NO: 2914465 - RNA, 15 nt, Human
ugagaacaaagcugu

SEQ ID NO: 2914466 - RNA, 16 nt, Human
ugagaacaaagcuguu

SEQ ID NO: 2914467 - RNA, 19 nt, Human
ugagaacaaagcuguuaaa

SEQ ID NO: 2914468 - RNA, 20 nt, Human
ugagaacaaagcuguuaaac

SEQ ID NO: 2914469 - RNA, 22 nt, Human
ugagaacaaagcuguuaaacug

SEQ ID NO: 2914470 - RNA, 23 nt, Human
ugagaacaaagcuguuaaacugu

SEQ ID NO: 2914471 - RNA, 23 nt, Human
ugagacguuuuuggaagaguagu

SEQ ID NO: 2914472 - RNA, 14 nt, Human
ugagacuauuuaaa

SEQ ID NO: 2914473 - RNA, 17 nt, Human
ugagacucacaggaagg

SEQ ID NO: 2914474 - RNA, 18 nt, Human
ugagacucacaggaagga

SEQ ID NO: 2914475 - RNA, 16 nt, Human
ugagacccccacaccu

SEQ ID NO: 2914476 - RNA, 15 nt, Human
ugagacccccacacc

SEQ ID NO: 2914477 - RNA, 14 nt, Human
ugagacccccacac

SEQ ID NO: 2914478 - RNA, 17 nt, Human
ugagaccagccugggca

SEQ ID NO: 2914479 - RNA, 21 nt, Human
ugagaccaguugaauaaaagu

SEQ ID NO: 2914480 - RNA, 13 nt, Human
ugagacccccaca

SEQ ID NO: 2914481 - RNA, 21 nt, Human
ugagacccauuccuauuucuu

SEQ ID NO: 2914482 - RNA, 12 nt, Human
ugagacccagga

SEQ ID NO: 2914483 - RNA, 13 nt, Human
ugagacccaggac

SEQ ID NO: 2914484 - RNA, 14 nt, Human
ugagacccaggacu

SEQ ID NO: 2914485 - RNA, 16 nt, Human
ugagacccaggacucc

SEQ ID NO: 2914486 - RNA, 13 nt, Human
ugagaccagccug

SEQ ID NO: 2914487 - RNA, 14 nt, Human
ugagaccagccugg

SEQ ID NO: 2914488 - RNA, 21 nt, Human
ugagaccacagagagagggga

SEQ ID NO: 2914489 - RNA, 13 nt, Human
ugagaccacagag

SEQ ID NO: 2914490 - RNA, 21 nt, Human
ugagaacguaaagaacuuuuu

SEQ ID NO: 2914491 - RNA, 16 nt, Human
ugagccccgcagaccu

SEQ ID NO: 2914492 - RNA, 17 nt, Human
ugagccccgcagaccuc

SEQ ID NO: 2914493 - RNA, 23 nt, Human
ugagccccgcagaccuccccagc

SEQ ID NO: 2914494 - RNA, 14 nt, Human
ugagccccgcccuc

SEQ ID NO: 2914495 - RNA, 19 nt, Human
ugagccccgcccucuuccu

SEQ ID NO: 2914496 - RNA, 20 nt, Human
ugagccccgcccucuuccug

SEQ ID NO: 2914497 - RNA, 21 nt, Human
ugagccccgcccucuuccuga

SEQ ID NO: 2914498 - RNA, 22 nt, Human
ugagccccgcccucuuccugac

SEQ ID NO: 2914499 - RNA, 22 nt, Human
ugagccccgcagaccuccccag

SEQ ID NO: 2914500 - RNA, 18 nt, Human
ugagccccagggugccca

SEQ ID NO: 2914501 - RNA, 19 nt, Human
ugagccccagggugcccag

SEQ ID NO: 2914502 - RNA, 20 nt, Human
ugagccccagggugcccaga

SEQ ID NO: 2914503 - RNA, 21 nt, Human
ugagccccagggugcccagaa

SEQ ID NO: 2914504 - RNA, 23 nt, Human
ugagccccagggugcccagaacu

SEQ ID NO: 2914505 - RNA, 12 nt, Human
ugagccccaucu

SEQ ID NO: 2914506 - RNA, 14 nt, Human
ugagccccaucuuc

SEQ ID NO: 2914507 - RNA, 16 nt, Human
ugagccccaucuucac

SEQ ID NO: 2914508 - RNA, 21 nt, Human
ugagccccaucuucacccagg

SEQ ID NO: 2914509 - RNA, 22 nt, Human
ugagcauacaucuuaaaucuuu

SEQ ID NO: 2914510 - RNA, 17 nt, Human
ugagcagggcucagcgg

SEQ ID NO: 2914511 - RNA, 16 nt, Human
ugagcagggcucagcg

SEQ ID NO: 2914512 - RNA, 19 nt, Human
ugagcagggcucagcgggg

SEQ ID NO: 2914513 - RNA, 15 nt, Human
ugagcagugagcaga

SEQ ID NO: 2914514 - RNA, 22 nt, Human
ugagcucuacccagggccugca

SEQ ID NO: 2914515 - RNA, 19 nt, Human
ugagcucuacccagggccu

SEQ ID NO: 2914516 - RNA, 18 nt, Human
ugagcucuacccagggcc

SEQ ID NO: 2914517 - RNA, 17 nt, Human
ugagcucuacccagggc

SEQ ID NO: 2914518 - RNA, 19 nt, Human
ugagcugcugacugccaau

SEQ ID NO: 2914519 - RNA, 10 nt, Human
ugagcuggcc

SEQ ID NO: 2914520 - RNA, 18 nt, Human
ugagcuggccucucuagc

SEQ ID NO: 2914521 - RNA, 12 nt, Human
ugagccucugcu

SEQ ID NO: 2914522 - RNA, 14 nt, Human
ugagccucugcucc

SEQ ID NO: 2914523 - RNA, 16 nt, Human
ugagccucugcucccc

SEQ ID NO: 2914524 - RNA, 17 nt, Human
ugagccucugcucccca

SEQ ID NO: 2914525 - RNA, 18 nt, Human
ugagccucugcuccccag

SEQ ID NO: 2914526 - RNA, 17 nt, Human
ugagccucagcauccug

SEQ ID NO: 2914527 - RNA, 21 nt, Human
ugagccgagaucacgccacug

SEQ ID NO: 2914528 - RNA, 19 nt, Human
ugagccgagaucacgccac

SEQ ID NO: 2914529 - RNA, 18 nt, Human
ugagcccuguccugccua

SEQ ID NO: 2914530 - RNA, 22 nt, Human
ugagcccucagaacccuuggcu

SEQ ID NO: 2914531 - RNA, 13 nt, Human
ugagcccucccca

SEQ ID NO: 2914532 - RNA, 14 nt, Human
ugagcccuccccag

SEQ ID NO: 2914533 - RNA, 16 nt, Human
ugagcccuccccagga

SEQ ID NO: 2914534 - RNA, 20 nt, Human
ugagcccucagaacccuugg

SEQ ID NO: 2914535 - RNA, 21 nt, Human
ugagccucagcauccuggcac

SEQ ID NO: 2914536 - RNA, 18 nt, Human
ugagccucagcauccugg

SEQ ID NO: 2914537 - RNA, 22 nt, Human
ugagccucagcauccuggcacc

SEQ ID NO: 2914538 - RNA, 14 nt, Human
ugagccucagucuc

SEQ ID NO: 2914539 - RNA, 21 nt, Human
ugauaacuguuuauauguguu

SEQ ID NO: 2914540 - RNA, 22 nt, Human
ugauaacuguuuauauguguug

SEQ ID NO: 2914541 - RNA, 16 nt, Human
ugauaacagaacuuuu

SEQ ID NO: 2914542 - RNA, 17 nt, Human
ugaguuuucuucuguga

SEQ ID NO: 2914543 - RNA, 23 nt, Human
ugaguuuucucuuuguggggcuu

SEQ ID NO: 2914544 - RNA, 19 nt, Human
ugaguuuuugauagcuuua

SEQ ID NO: 2914545 - RNA, 18 nt, Human
ugaguuuuugauagcuuu

SEQ ID NO: 2914546 - RNA, 13 nt, Human
ugaguuuuugaua

SEQ ID NO: 2914547 - RNA, 18 nt, Human
ugaguuuucuucugugau

SEQ ID NO: 2914548 - RNA, 22 nt, Human
ugaguucuacauaaguaauuca

SEQ ID NO: 2914549 - RNA, 22 nt, Human
ugaguuugcccugguuucacug

SEQ ID NO: 2914550 - RNA, 14 nt, Human
ugaguuugcccugg

SEQ ID NO: 2914551 - RNA, 22 nt, Human
ugaguuugggccccagaggcug

SEQ ID NO: 2914552 - RNA, 23 nt, Human
ugaguuugggccccagaggcugg

SEQ ID NO: 2914553 - RNA, 13 nt, Human
ugaguuugcuuau

SEQ ID NO: 2914554 - RNA, 22 nt, Human
ugaguuugcuuauguaaucuca

SEQ ID NO: 2914555 - RNA, 18 nt, Human
ugaguuuggucuggacug

SEQ ID NO: 2914556 - RNA, 16 nt, Human
ugaguuuguagguaaa

SEQ ID NO: 2914557 - RNA, 18 nt, Human
ugaguuuguagguaaaau

SEQ ID NO: 2914558 - RNA, 21 nt, Human
ugaguuuguagguaaaaugua

SEQ ID NO: 2914559 - RNA, 15 nt, Human
ugagucuguugugug

SEQ ID NO: 2914560 - RNA, 16 nt, Human
ugagucuuugguucua

SEQ ID NO: 2914561 - RNA, 17 nt, Human
ugagucuuugguucuaa

SEQ ID NO: 2914562 - RNA, 18 nt, Human
ugagucuuugguucuaag

SEQ ID NO: 2914563 - RNA, 20 nt, Human
ugagucuuugguucuaagga

SEQ ID NO: 2914564 - RNA, 21 nt, Human
ugagucuuugguucuaaggac

SEQ ID NO: 2914565 - RNA, 21 nt, Human
ugagguggccuccuugcuugu

SEQ ID NO: 2914566 - RNA, 23 nt, Human
ugagugagaggcgacaggaguau

SEQ ID NO: 2914567 - RNA, 19 nt, Human
ugagucgaggacagggagg

SEQ ID NO: 2914568 - RNA, 18 nt, Human
ugagucgaggacagggag

SEQ ID NO: 2914569 - RNA, 18 nt, Human
ugagucgucaucacuuuu

SEQ ID NO: 2914570 - RNA, 14 nt, Human
ugagucucuggggc

SEQ ID NO: 2914571 - RNA, 22 nt, Human
ugagucucuggggcaggcugcu

SEQ ID NO: 2914572 - RNA, 15 nt, Human
ugagucuagauguuu

SEQ ID NO: 2914573 - RNA, 15 nt, Human
ugagucccaggcuga

SEQ ID NO: 2914574 - RNA, 21 nt, Human
ugaggcucugacccagugaga

SEQ ID NO: 2914575 - RNA, 22 nt, Human
ugagggacgucagacuuggcuc

SEQ ID NO: 2914576 - RNA, 13 nt, Human
ugagggacucuga

SEQ ID NO: 2914577 - RNA, 16 nt, Human
ugagggacugccucug

SEQ ID NO: 2914578 - RNA, 19 nt, Human
ugagggacugccucugcca

SEQ ID NO: 2914579 - RNA, 14 nt, Human
ugagggagauccca

SEQ ID NO: 2914580 - RNA, 15 nt, Human
ugaggucccaggcag

SEQ ID NO: 2914581 - RNA, 13 nt, Human
ugaggucccaggc

SEQ ID NO: 2914582 - RNA, 23 nt, Human
ugagggaggacaggcgggaggag

SEQ ID NO: 2914583 - RNA, 15 nt, Human
ugagggaggaccugg

SEQ ID NO: 2914584 - RNA, 19 nt, Human
ugagggaggaccuggggca

SEQ ID NO: 2914585 - RNA, 20 nt, Human
ugagggaggaccuggggcac

SEQ ID NO: 2914586 - RNA, 22 nt, Human
ugagggaggaccuggggcacag

SEQ ID NO: 2914587 - RNA, 23 nt, Human
ugagggaggaccuggggcacagu

SEQ ID NO: 2914588 - RNA, 19 nt, Human
ugaggucccaggcagagaa

SEQ ID NO: 2914589 - RNA, 17 nt, Human
ugaggucccaggcagag

SEQ ID NO: 2914590 - RNA, 15 nt, Human
ugaggcauccagcag

SEQ ID NO: 2914591 - RNA, 17 nt, Human
ugaggcaugaguuacug

SEQ ID NO: 2914592 - RNA, 22 nt, Human
ugaggcaugaguuacugugcau

SEQ ID NO: 2914593 - RNA, 23 nt, Human
ugaggcaucgcaauguaagacuc

SEQ ID NO: 2914594 - RNA, 21 nt, Human
ugagcuggccucucuagcaca

SEQ ID NO: 2914595 - RNA, 14 nt, Human
ugagcugggcaugg

SEQ ID NO: 2914596 - RNA, 14 nt, Human
ugagcugggccgga

SEQ ID NO: 2914597 - RNA, 18 nt, Human
ugagcugggccggagggu

SEQ ID NO: 2914598 - RNA, 22 nt, Human
ugagcuggggaccugguacccu

SEQ ID NO: 2914599 - RNA, 16 nt, Human
ugaggagcugcuggcu

SEQ ID NO: 2914600 - RNA, 15 nt, Human
ugaggagcugcuggc

SEQ ID NO: 2914601 - RNA, 14 nt, Human
ugaggagcugcugg

SEQ ID NO: 2914602 - RNA, 13 nt, Human
ugaggagcugcug

SEQ ID NO: 2914603 - RNA, 17 nt, Human
ugaggagcugcuggcuu

SEQ ID NO: 2914604 - RNA, 16 nt, Human
ugaggaggccuccauc

SEQ ID NO: 2914605 - RNA, 14 nt, Human
ugaggaggccucca

SEQ ID NO: 2914606 - RNA, 13 nt, Human
ugaggaggaggcu

SEQ ID NO: 2914607 - RNA, 20 nt, Human
ugaggaggaugucccugggc

SEQ ID NO: 2914608 - RNA, 22 nt, Human
ugaggaggaugucccugggcca

SEQ ID NO: 2914609 - RNA, 23 nt, Human
ugaggaggaugucccugggccag

SEQ ID NO: 2914610 - RNA, 20 nt, Human
ugcuaggaugcggaaauccc

SEQ ID NO: 2914611 - RNA, 17 nt, Human
ugcucacauaucuguca

SEQ ID NO: 2914612 - RNA, 13 nt, Human
ugcucagacagaa

SEQ ID NO: 2914613 - RNA, 15 nt, Human
ugcucacuuuaaacc

SEQ ID NO: 2914614 - RNA, 14 nt, Human
ugcucagaccagcu

SEQ ID NO: 2914615 - RNA, 12 nt, Human
ugcucaggcugc

SEQ ID NO: 2914616 - RNA, 18 nt, Human
ugcucaggcugcagcugg

SEQ ID NO: 2914617 - RNA, 19 nt, Human
ugcucaggcugcagcugga

SEQ ID NO: 2914618 - RNA, 20 nt, Human
ugcucaggcugcagcuggac

SEQ ID NO: 2914619 - RNA, 21 nt, Human
ugcucaggcugcagcuggaca

SEQ ID NO: 2914620 - RNA, 22 nt, Human
ugcucaggcugcagcuggacag

SEQ ID NO: 2914621 - RNA, 23 nt, Human
ugcucaggcugcagcuggacaga

SEQ ID NO: 2914622 - RNA, 16 nt, Human
ugcucuagaugagcug

SEQ ID NO: 2914623 - RNA, 18 nt, Human
ugcucuagaugagcuggg

SEQ ID NO: 2914624 - RNA, 19 nt, Human
ugcucuagaugagcugggc

SEQ ID NO: 2914625 - RNA, 20 nt, Human
ugcucuagaugagcugggcc

SEQ ID NO: 2914626 - RNA, 21 nt, Human
ugcucuagaugagcugggccg

SEQ ID NO: 2914627 - RNA, 13 nt, Human
ugcucuaggaaga

SEQ ID NO: 2914628 - RNA, 15 nt, Human
ugcucuaggaagaca

SEQ ID NO: 2914629 - RNA, 19 nt, Human
ugcucuaggaagacauuuu

SEQ ID NO: 2914630 - RNA, 17 nt, Human
ugcucaccaugcuucca

SEQ ID NO: 2914631 - RNA, 23 nt, Human
ugcucaguucagaaucacuucug

SEQ ID NO: 2914632 - RNA, 12 nt, Human
ugcucaguugcu

SEQ ID NO: 2914633 - RNA, 13 nt, Human
ugcucaguugcua

SEQ ID NO: 2914634 - RNA, 14 nt, Human
ugcucaguugcuaa

SEQ ID NO: 2914635 - RNA, 19 nt, Human
ugcucaguugcuaaacacu

SEQ ID NO: 2914636 - RNA, 20 nt, Human
ugcucaguugcuaaacacug

SEQ ID NO: 2914637 - RNA, 17 nt, Human
ugcucaguucagaauca

SEQ ID NO: 2914638 - RNA, 18 nt, Human
ugcucaguucagaaucac

SEQ ID NO: 2914639 - RNA, 19 nt, Human
ugcucauacuacauugagu

SEQ ID NO: 2914640 - RNA, 23 nt, Human
ugcucuccgaccagacaccuuga

SEQ ID NO: 2914641 - RNA, 15 nt, Human
ugcucuccccugccc

SEQ ID NO: 2914642 - RNA, 17 nt, Human
ugcucuccccugcccug

SEQ ID NO: 2914643 - RNA, 16 nt, Human
ugcucuccccugcccu

SEQ ID NO: 2914644 - RNA, 20 nt, Human
ugcucuccccugcccugcug

SEQ ID NO: 2914645 - RNA, 12 nt, Human
ugcucuccucuu

SEQ ID NO: 2914646 - RNA, 18 nt, Human
ugcucuuguccuagcuug

SEQ ID NO: 2914647 - RNA, 18 nt, Human
ugcucuuucaucucugcu

SEQ ID NO: 2914648 - RNA, 19 nt, Human
ugcucuuguccuagcuugg

SEQ ID NO: 2914649 - RNA, 15 nt, Human
ugcucuuguuuuuau

SEQ ID NO: 2914650 - RNA, 18 nt, Human
ugcucuuguuuuuauuaa

SEQ ID NO: 2914651 - RNA, 23 nt, Human
ugcucuuguuuuuauuaauuuau

SEQ ID NO: 2914652 - RNA, 14 nt, Human
ugcucuuguagccc

SEQ ID NO: 2914653 - RNA, 19 nt, Human
ugcucuuguagcccaggcu

SEQ ID NO: 2914654 - RNA, 14 nt, Human
ugcucuugucccac

SEQ ID NO: 2914655 - RNA, 16 nt, Human
ugcucuugucccacgu

SEQ ID NO: 2914656 - RNA, 21 nt, Human
ugcucuugucccacgugucuu

SEQ ID NO: 2914657 - RNA, 22 nt, Human
ugcucuugucccacgugucuuc

SEQ ID NO: 2914658 - RNA, 23 nt, Human
ugcucuugucccacgugucuucc

SEQ ID NO: 2914659 - RNA, 14 nt, Human
ugcgccugugacca

SEQ ID NO: 2914660 - RNA, 18 nt, Human
ugcgccugugaugcuggg

SEQ ID NO: 2914661 - RNA, 19 nt, Human
ugcgccugugaugcugggc

SEQ ID NO: 2914662 - RNA, 23 nt, Human
ugcgcgugcacguggagagcugg

SEQ ID NO: 2914663 - RNA, 19 nt, Human
ugcgcaggcuggcccugcc

SEQ ID NO: 2914664 - RNA, 17 nt, Human
ugcgcgcacaauaguaa

SEQ ID NO: 2914665 - RNA, 16 nt, Human
ugcgcugggcacuucc

SEQ ID NO: 2914666 - RNA, 17 nt, Human
ugcgcugggcacuuccc

SEQ ID NO: 2914667 - RNA, 18 nt, Human
ugcgcugggcacuucccu

SEQ ID NO: 2914668 - RNA, 20 nt, Human
ugcgcugggcacuucccugc

SEQ ID NO: 2914669 - RNA, 13 nt, Human
ugccuuggcucag

SEQ ID NO: 2914670 - RNA, 16 nt, Human
ugccuuggcucagaca

SEQ ID NO: 2914671 - RNA, 17 nt, Human
ugccuuggcucagacau

SEQ ID NO: 2914672 - RNA, 19 nt, Human
ugccuuggcucagacaugu

SEQ ID NO: 2914673 - RNA, 18 nt, Human
ugccuuggaaguugcaug

SEQ ID NO: 2914674 - RNA, 12 nt, Human
ugccuugccuuu

SEQ ID NO: 2914675 - RNA, 13 nt, Human
ugccuugccuuua

SEQ ID NO: 2914676 - RNA, 22 nt, Human
ugccuugcuguuggucaugugg

SEQ ID NO: 2914677 - RNA, 17 nt, Human
ugccuuggccucccaag

SEQ ID NO: 2914678 - RNA, 15 nt, Human
ugccuugggcugcuc

SEQ ID NO: 2914679 - RNA, 11 nt, Human
ugccuugggcu

SEQ ID NO: 2914680 - RNA, 21 nt, Human
ugcgcaggcuggcccugcccu

SEQ ID NO: 2914681 - RNA, 23 nt, Human
ugcgcaggcuggcccugcccugg

SEQ ID NO: 2914682 - RNA, 22 nt, Human
ugcgcaggcuggcccugcccug

SEQ ID NO: 2914683 - RNA, 15 nt, Human
ugccuugaugauuua

SEQ ID NO: 2914684 - RNA, 14 nt, Human
ugccuugcagaacu

SEQ ID NO: 2914685 - RNA, 15 nt, Human
ugccuugcagaacug

SEQ ID NO: 2914686 - RNA, 16 nt, Human
ugccuugcagaacugc

SEQ ID NO: 2914687 - RNA, 19 nt, Human
ugccuugcagaacugccau

SEQ ID NO: 2914688 - RNA, 20 nt, Human
ugccuugcagaacugccauu

SEQ ID NO: 2914689 - RNA, 21 nt, Human
ugccucggcuuuucucagcug

SEQ ID NO: 2914690 - RNA, 20 nt, Human
ugccucggcuuuucucagcu

SEQ ID NO: 2914691 - RNA, 24 nt, Human
ugccucggcuuuucucagcuggau

SEQ ID NO: 2914692 - RNA, 22 nt, Human
ugcuacuguccuacccacccuc

SEQ ID NO: 2914693 - RNA, 21 nt, Human
ugcuacuguccuacccacccu

SEQ ID NO: 2914694 - RNA, 22 nt, Human
ugcuacugucucacugaaacau

SEQ ID NO: 2914695 - RNA, 18 nt, Human
ugcuacugucuuuggaaa

SEQ ID NO: 2914696 - RNA, 13 nt, Human
ugcuacuguacau

SEQ ID NO: 2914697 - RNA, 22 nt, Human
ugcuacuguacauaaacaauga

SEQ ID NO: 2914698 - RNA, 10 nt, Human
ugcuagaacu

SEQ ID NO: 2914699 - RNA, 18 nt, Human
ugcuacuaaguucacauu

SEQ ID NO: 2914700 - RNA, 16 nt, Human
ugcgcuuuauuuucuu

SEQ ID NO: 2914701 - RNA, 14 nt, Human
ugcggaaucagcuu

SEQ ID NO: 2914702 - RNA, 14 nt, Human
ugcggaaagguauu

SEQ ID NO: 2914703 - RNA, 15 nt, Human
ugcggaaagguauuu

SEQ ID NO: 2914704 - RNA, 22 nt, Human
ugcggaaagguauuugggaaac

SEQ ID NO: 2914705 - RNA, 23 nt, Human
ugcggaaagguauuugggaaacu

SEQ ID NO: 2914706 - RNA, 12 nt, Human
ugcguguguaga

SEQ ID NO: 2914707 - RNA, 15 nt, Human
ugcggaaucagcuuc

SEQ ID NO: 2914708 - RNA, 14 nt, Human
ugcguguguagagu

SEQ ID NO: 2914709 - RNA, 19 nt, Human
ugcguguguagaguuaaga

SEQ ID NO: 2914710 - RNA, 20 nt, Human
ugcguguguagaguuaagaa

SEQ ID NO: 2914711 - RNA, 21 nt, Human
ugcguguguagaguuaagaag

SEQ ID NO: 2914712 - RNA, 13 nt, Human
ugcguuacuaauu

SEQ ID NO: 2914713 - RNA, 24 nt, Human
ugcguguguagaguuaagaagcug

SEQ ID NO: 2914714 - RNA, 13 nt, Human
ugcguuuuggaag

SEQ ID NO: 2914715 - RNA, 17 nt, Human
ugcguuccaugaugcug

SEQ ID NO: 2914716 - RNA, 16 nt, Human
ugcguucugcaagcau

SEQ ID NO: 2914717 - RNA, 13 nt, Human
ugcguuggucucu

SEQ ID NO: 2914718 - RNA, 17 nt, Human
ugcguuggucucugcau

SEQ ID NO: 2914719 - RNA, 12 nt, Human
ugcuaaacacug

SEQ ID NO: 2914720 - RNA, 13 nt, Human
ugcuaaacacugc

SEQ ID NO: 2914721 - RNA, 22 nt, Human
ugcuaaacacugcgcuuuauuu

SEQ ID NO: 2914722 - RNA, 12 nt, Human
ugcuaacugaac

SEQ ID NO: 2914723 - RNA, 15 nt, Human
ugcuaacugaacuuu

SEQ ID NO: 2914724 - RNA, 23 nt, Human
ugcuaaccacgucugucuucaca

SEQ ID NO: 2914725 - RNA, 20 nt, Human
ugcugggggcaacuggccau

SEQ ID NO: 2914726 - RNA, 19 nt, Human
ugcugggggcaacuggcca

SEQ ID NO: 2914727 - RNA, 15 nt, Human
ugcugggggcaacug

SEQ ID NO: 2914728 - RNA, 14 nt, Human
ugcugggggaauga

SEQ ID NO: 2914729 - RNA, 15 nt, Human
ugcugggggaaugag

SEQ ID NO: 2914730 - RNA, 20 nt, Human
ugcugggggaaugagcccag

SEQ ID NO: 2914731 - RNA, 21 nt, Human
ugcugggggaaugagcccaga

SEQ ID NO: 2914732 - RNA, 22 nt, Human
ugcugggggaaugagcccagag

SEQ ID NO: 2914733 - RNA, 23 nt, Human
ugcugggggaaugagcccagaga

SEQ ID NO: 2914734 - RNA, 18 nt, Human
ugcuggggcaagucccug

SEQ ID NO: 2914735 - RNA, 23 nt, Human
ugcuggggcaagucccugacucu

SEQ ID NO: 2914736 - RNA, 15 nt, Human
ugcuggggccucaga

SEQ ID NO: 2914737 - RNA, 17 nt, Human
ugcuggggccucagacg

SEQ ID NO: 2914738 - RNA, 18 nt, Human
ugcuggggccucagacga

SEQ ID NO: 2914739 - RNA, 16 nt, Human
ugcuggguaaacugug

SEQ ID NO: 2914740 - RNA, 16 nt, Human
ugcuggucacagccuc

SEQ ID NO: 2914741 - RNA, 17 nt, Human
ugcuggucacagccucc

SEQ ID NO: 2914742 - RNA, 19 nt, Human
ugcuggucacagccuccuc

SEQ ID NO: 2914743 - RNA, 20 nt, Human
ugcuggucacagccuccucu

SEQ ID NO: 2914744 - RNA, 18 nt, Human
ugcuguguuaaauaaacc

SEQ ID NO: 2914745 - RNA, 11 nt, Human
ugcuguguuaa

SEQ ID NO: 2914746 - RNA, 11 nt, Human
ugcugugugcc

SEQ ID NO: 2914747 - RNA, 19 nt, Human
ugcuguguaaugguuacac

SEQ ID NO: 2914748 - RNA, 19 nt, Human
ugcuguuaugucuguuuaa

SEQ ID NO: 2914749 - RNA, 20 nt, Human
ugcuguuaugucuguuuaag

SEQ ID NO: 2914750 - RNA, 22 nt, Human
ugcuguucucuugggaacugaa

SEQ ID NO: 2914751 - RNA, 13 nt, Human
ugcuguugaaagc

SEQ ID NO: 2914752 - RNA, 14 nt, Human
ugcuguugaaagca

SEQ ID NO: 2914753 - RNA, 16 nt, Human
ugcuguugaaagcaaa

SEQ ID NO: 2914754 - RNA, 17 nt, Human
ugcuguugaaagcaaaa

SEQ ID NO: 2914755 - RNA, 21 nt, Human
ugcuguugaaagcaaaaaugc

SEQ ID NO: 2914756 - RNA, 22 nt, Human
ugcuguugaaagcaaaaaugcu

SEQ ID NO: 2914757 - RNA, 15 nt, Human
ugcuguugacauauu

SEQ ID NO: 2914758 - RNA, 18 nt, Human
ugcuguugacauauuuaa

SEQ ID NO: 2914759 - RNA, 21 nt, Human
ugcuguugacauauuuaaugu

SEQ ID NO: 2914760 - RNA, 16 nt, Human
ugcuguguuuaauuug

SEQ ID NO: 2914761 - RNA, 14 nt, Human
ugcuguuacuguua

SEQ ID NO: 2914762 - RNA, 20 nt, Human
ugcuguuacuguuaaccauu

SEQ ID NO: 2914763 - RNA, 13 nt, Human
ugcugguuuucua

SEQ ID NO: 2914764 - RNA, 17 nt, Human
ugcuguaacuuaaaaua

SEQ ID NO: 2914765 - RNA, 14 nt, Human
ugcugccugaaucc

SEQ ID NO: 2914766 - RNA, 14 nt, Human
ugcugccugaguca

SEQ ID NO: 2914767 - RNA, 21 nt, Human
ugcugccugcccgcacagcag

SEQ ID NO: 2914768 - RNA, 23 nt, Human
ugcugccugcccgcacagcagcc

SEQ ID NO: 2914769 - RNA, 19 nt, Human
ugcugcauuugugucaucu

SEQ ID NO: 2914770 - RNA, 19 nt, Human
ugcugcuauccugccaaaa

SEQ ID NO: 2914771 - RNA, 20 nt, Human
ugcugccuucugacggcccu

SEQ ID NO: 2914772 - RNA, 21 nt, Human
ugcugccuucugacggcccug

SEQ ID NO: 2914773 - RNA, 22 nt, Human
ugcugccuucugacggcccugc

SEQ ID NO: 2914774 - RNA, 23 nt, Human
ugcugccuucugacggcccugca

SEQ ID NO: 2914775 - RNA, 13 nt, Human
ugcugccuggcca

SEQ ID NO: 2914776 - RNA, 14 nt, Human
ugcugccuggccac

SEQ ID NO: 2914777 - RNA, 18 nt, Human
ugcugccuggccacugcu

SEQ ID NO: 2914778 - RNA, 23 nt, Human
ugcucuuucccccuuccaucucu

SEQ ID NO: 2914779 - RNA, 20 nt, Human
ugcugggauuacagguguga

SEQ ID NO: 2914780 - RNA, 20 nt, Human
ugcugcuuccgguagggagg

SEQ ID NO: 2914781 - RNA, 15 nt, Human
ugcugcugcgcccuu

SEQ ID NO: 2914782 - RNA, 16 nt, Human
ugcugcugcugcgccc

SEQ ID NO: 2914783 - RNA, 13 nt, Human
ugcugcugccugg

SEQ ID NO: 2914784 - RNA, 16 nt, Human
ugcugcugccuggcca

SEQ ID NO: 2914785 - RNA, 19 nt, Human
ugcugcugccuggccacug

SEQ ID NO: 2914786 - RNA, 13 nt, Human
ugcaucaaggggu

SEQ ID NO: 2914787 - RNA, 13 nt, Human
ugcauagugcugg

SEQ ID NO: 2914788 - RNA, 14 nt, Human
ugcauagugcuggg

SEQ ID NO: 2914789 - RNA, 16 nt, Human
ugcauagugcugggau

SEQ ID NO: 2914790 - RNA, 19 nt, Human
ugcauauguugaauacuuu

SEQ ID NO: 2914791 - RNA, 20 nt, Human
ugcaguucuaguuugcauuc

SEQ ID NO: 2914792 - RNA, 18 nt, Human
ugcaguucuaguuugcau

SEQ ID NO: 2914793 - RNA, 19 nt, Human
ugcaguucuaguuugcauu

SEQ ID NO: 2914794 - RNA, 18 nt, Human
ugcaguuuaagagcagaa

SEQ ID NO: 2914795 - RNA, 19 nt, Human
ugcaguuuaagagcagaac

SEQ ID NO: 2914796 - RNA, 13 nt, Human
ugcagggaguccg

SEQ ID NO: 2914797 - RNA, 19 nt, Human
ugauuguuucucaaaucuu

SEQ ID NO: 2914798 - RNA, 14 nt, Human
ugcagggagccgag

SEQ ID NO: 2914799 - RNA, 19 nt, Human
ugcaggcugagccacucuc

SEQ ID NO: 2914800 - RNA, 13 nt, Human
ugcaggcuggcca

SEQ ID NO: 2914801 - RNA, 14 nt, Human
ugcaggcuggccag

SEQ ID NO: 2914802 - RNA, 15 nt, Human
ugcaggcuggccagc

SEQ ID NO: 2914803 - RNA, 16 nt, Human
ugcaggcuggccagcc

SEQ ID NO: 2914804 - RNA, 17 nt, Human
ugcaggcuggccagccg

SEQ ID NO: 2914805 - RNA, 18 nt, Human
ugcaggcuggccagccgc

SEQ ID NO: 2914806 - RNA, 19 nt, Human
ugcaggcuggccagccgcu

SEQ ID NO: 2914807 - RNA, 22 nt, Human
ugcaggcuggccagccgcucuc

SEQ ID NO: 2914808 - RNA, 16 nt, Human
ugcaggcuuaauaaaa

SEQ ID NO: 2914809 - RNA, 13 nt, Human
ugauuuaauaaaa

SEQ ID NO: 2914810 - RNA, 14 nt, Human
ugauuuaauaaaau

SEQ ID NO: 2914811 - RNA, 15 nt, Human
ugauuuaauaaaaua

SEQ ID NO: 2914812 - RNA, 17 nt, Human
ugauuuaauaaaauaau

SEQ ID NO: 2914813 - RNA, 19 nt, Human
ugauuuaauaaaauaauuc

SEQ ID NO: 2914814 - RNA, 20 nt, Human
ugauuuaauaaaauaauucu

SEQ ID NO: 2914815 - RNA, 21 nt, Human
ugauuuaauaaaauaauucua

SEQ ID NO: 2914816 - RNA, 22 nt, Human
ugauuuaauaaaauaauucuaa

SEQ ID NO: 2914817 - RNA, 23 nt, Human
ugauuuaauaaaauaauucuaaa

SEQ ID NO: 2914818 - RNA, 11 nt, Human
ugcaggcccuu

SEQ ID NO: 2914819 - RNA, 22 nt, Human
ugcaggcccuuugaagccucag

SEQ ID NO: 2914820 - RNA, 14 nt, Human
ugauuuaauaugga

SEQ ID NO: 2914821 - RNA, 15 nt, Human
ugauuuaauauggau

SEQ ID NO: 2914822 - RNA, 16 nt, Human
ugcaguguucgcuugg

SEQ ID NO: 2914823 - RNA, 17 nt, Human
ugcaguguucgcuuggc

SEQ ID NO: 2914824 - RNA, 18 nt, Human
ugcaguguucgcuuggcu

SEQ ID NO: 2914825 - RNA, 13 nt, Human
ugcagggccagga

SEQ ID NO: 2914826 - RNA, 15 nt, Human
ugcagggccaggacu

SEQ ID NO: 2914827 - RNA, 23 nt, Human
ugcagggccaggacugagccccg

SEQ ID NO: 2914828 - RNA, 17 nt, Human
ugcaguucuaguuugca

SEQ ID NO: 2914829 - RNA, 19 nt, Human
ugcaguucagcaccacccu

SEQ ID NO: 2914830 - RNA, 18 nt, Human
ugcaguucagcaccaccc

SEQ ID NO: 2914831 - RNA, 15 nt, Human
ugcaguucagcacca

SEQ ID NO: 2914832 - RNA, 21 nt, Human
ugcaguggugcgaucuggguu

SEQ ID NO: 2914833 - RNA, 20 nt, Human
ugcaguggugcgaucugggu

SEQ ID NO: 2914834 - RNA, 12 nt, Human
ugcagggccagg

SEQ ID NO: 2914835 - RNA, 24 nt, Human
ugcagggaggagguggcagcccug

SEQ ID NO: 2914836 - RNA, 20 nt, Human
ugcagggagggcaguuuucu

SEQ ID NO: 2914837 - RNA, 19 nt, Human
ugcagggauugcugccacu

SEQ ID NO: 2914838 - RNA, 22 nt, Human
ugcagggcaaaauauucacugg

SEQ ID NO: 2914839 - RNA, 12 nt, Human
ugcagggcagcc

SEQ ID NO: 2914840 - RNA, 13 nt, Human
ugcagggcagccc

SEQ ID NO: 2914841 - RNA, 14 nt, Human
ugcagggcagcccc

SEQ ID NO: 2914842 - RNA, 20 nt, Human
ugcagggcagccccacaacu

SEQ ID NO: 2914843 - RNA, 20 nt, Human
ugcauggcuccagaaauguc

SEQ ID NO: 2914844 - RNA, 22 nt, Human
ugcauggcuccagaaaugucua

SEQ ID NO: 2914845 - RNA, 16 nt, Human
ugcaugggccagcccc

SEQ ID NO: 2914846 - RNA, 17 nt, Human
ugcaugggccagccccu

SEQ ID NO: 2914847 - RNA, 21 nt, Human
ugcaugggccagccccuccau

SEQ ID NO: 2914848 - RNA, 17 nt, Human
ugcauggggaaagagau

SEQ ID NO: 2914849 - RNA, 23 nt, Human
ugcauggggugggguagggcuga

SEQ ID NO: 2914850 - RNA, 16 nt, Human
ugcaucaccucuguaa

SEQ ID NO: 2914851 - RNA, 21 nt, Human
ugcauuuggaauuuuugcuug

SEQ ID NO: 2914852 - RNA, 16 nt, Human
ugcauuuguaaaugcu

SEQ ID NO: 2914853 - RNA, 18 nt, Human
ugcauuuguaaaugcugu

SEQ ID NO: 2914854 - RNA, 19 nt, Human
ugccaaaaucauuuuaaug

SEQ ID NO: 2914855 - RNA, 22 nt, Human
ugccaaagcuaggguggcccuu

SEQ ID NO: 2914856 - RNA, 21 nt, Human
ugccaaagcuaggguggcccu

SEQ ID NO: 2914857 - RNA, 20 nt, Human
ugccaaagcuaggguggccc

SEQ ID NO: 2914858 - RNA, 18 nt, Human
ugccaaagggaaauauca

SEQ ID NO: 2914859 - RNA, 14 nt, Human
ugccaaagggaaau

SEQ ID NO: 2914860 - RNA, 17 nt, Human
ugccaaagucucccuuc

SEQ ID NO: 2914861 - RNA, 14 nt, Human
ugccaaaucuggcu

SEQ ID NO: 2914862 - RNA, 12 nt, Human
ugccaaaugcuc

SEQ ID NO: 2914863 - RNA, 13 nt, Human
ugccaggacacgc

SEQ ID NO: 2914864 - RNA, 14 nt, Human
ugccacguuccaca

SEQ ID NO: 2914865 - RNA, 15 nt, Human
ugccacguuccacag

SEQ ID NO: 2914866 - RNA, 16 nt, Human
ugccacguuccacagu

SEQ ID NO: 2914867 - RNA, 19 nt, Human
ugccacguuccacaguugc

SEQ ID NO: 2914868 - RNA, 20 nt, Human
ugccacguuccacaguugcc

SEQ ID NO: 2914869 - RNA, 20 nt, Human
ugccacccuggggagaaagu

SEQ ID NO: 2914870 - RNA, 15 nt, Human
ugccaacaagaaugc

SEQ ID NO: 2914871 - RNA, 16 nt, Human
ugccaacaagaaugca

SEQ ID NO: 2914872 - RNA, 18 nt, Human
ugccaacaagaaugcauu

SEQ ID NO: 2914873 - RNA, 19 nt, Human
ugccaacaagaaugcauug

SEQ ID NO: 2914874 - RNA, 20 nt, Human
ugccaacaagaaugcauuga

SEQ ID NO: 2914875 - RNA, 23 nt, Human
ugccaacaagaaugcauugauau

SEQ ID NO: 2914876 - RNA, 20 nt, Human
ugccaacacucaagaagcag

SEQ ID NO: 2914877 - RNA, 18 nt, Human
ugccaacaccacagaaau

SEQ ID NO: 2914878 - RNA, 21 nt, Human
ugccaacaccacagaaauggg

SEQ ID NO: 2914879 - RNA, 21 nt, Human
ugccaacacucaagaagcagg

SEQ ID NO: 2914880 - RNA, 22 nt, Human
ugccaacacucaagaagcaggc

SEQ ID NO: 2914881 - RNA, 23 nt, Human
ugccaacacucaagaagcaggcu

SEQ ID NO: 2914882 - RNA, 14 nt, Human
ugccaccucccuga

SEQ ID NO: 2914883 - RNA, 20 nt, Human
ugccuaaauuuaaugcugcc

SEQ ID NO: 2914884 - RNA, 21 nt, Human
ugccuaaauuuaaugcugccu

SEQ ID NO: 2914885 - RNA, 20 nt, Human
ugccuauaugagaagaauag

SEQ ID NO: 2914886 - RNA, 21 nt, Human
ugccuauaugagaagaauagc

SEQ ID NO: 2914887 - RNA, 13 nt, Human
ugccuaguuuuua

SEQ ID NO: 2914888 - RNA, 16 nt, Human
ugccuaguuuuuagua

SEQ ID NO: 2914889 - RNA, 15 nt, Human
ugccuauccugcugu

SEQ ID NO: 2914890 - RNA, 17 nt, Human
ugccuauccugcuguuc

SEQ ID NO: 2914891 - RNA, 23 nt, Human
ugccuauccugcuguucuagcac

SEQ ID NO: 2914892 - RNA, 14 nt, Human
ugccuccuguguac

SEQ ID NO: 2914893 - RNA, 20 nt, Human
ugccucggccucccaaagug

SEQ ID NO: 2914894 - RNA, 14 nt, Human
ugccuccucuucaa

SEQ ID NO: 2914895 - RNA, 16 nt, Human
ugccuccucuucaacu

SEQ ID NO: 2914896 - RNA, 14 nt, Human
ugccuccugccugc

SEQ ID NO: 2914897 - RNA, 18 nt, Human
ugccuccugccugccccu

SEQ ID NO: 2914898 - RNA, 13 nt, Human
ugccuccuguggg

SEQ ID NO: 2914899 - RNA, 14 nt, Human
ugccuccugugggg

SEQ ID NO: 2914900 - RNA, 18 nt, Human
ugccuccuguggggaaag

SEQ ID NO: 2914901 - RNA, 16 nt, Human
ugccuccucguuccuu

SEQ ID NO: 2914902 - RNA, 20 nt, Human
ugccuccucguuccuuucuc

SEQ ID NO: 2914903 - RNA, 13 nt, Human
ugcccugggccac

SEQ ID NO: 2914904 - RNA, 23 nt, Human
ugcccugguuuccugcccuggga

SEQ ID NO: 2914905 - RNA, 20 nt, Human
ugcccugguuuccugcccug

SEQ ID NO: 2914906 - RNA, 19 nt, Human
ugcccugguuuccugcccu

SEQ ID NO: 2914907 - RNA, 18 nt, Human
ugcccugguccagggaag

SEQ ID NO: 2914908 - RNA, 12 nt, Human
ugcccuggugcu

SEQ ID NO: 2914909 - RNA, 14 nt, Human
ugcccuggugcugc

SEQ ID NO: 2914910 - RNA, 16 nt, Human
ugcccuggugcugcca

SEQ ID NO: 2914911 - RNA, 21 nt, Human
ugcccugguccagggaagcug

SEQ ID NO: 2914912 - RNA, 15 nt, Human
ugcccugguuuccug

SEQ ID NO: 2914913 - RNA, 17 nt, Human
ugcccuggugcugccac

SEQ ID NO: 2914914 - RNA, 18 nt, Human
ugcccugguuuccugccc

SEQ ID NO: 2914915 - RNA, 17 nt, Human
ugcccugguuuccugcc

SEQ ID NO: 2914916 - RNA, 20 nt, Human
ugcccggcuaauuuuuguaa

SEQ ID NO: 2914917 - RNA, 21 nt, Human
ugcccgggaaggucaccagca

SEQ ID NO: 2914918 - RNA, 13 nt, Human
ugcccugggaggc

SEQ ID NO: 2914919 - RNA, 13 nt, Human
ugcccugggaaac

SEQ ID NO: 2914920 - RNA, 18 nt, Human
ugcccugggaggcaguga

SEQ ID NO: 2914921 - RNA, 17 nt, Human
ugcccugggaggcagug

SEQ ID NO: 2914922 - RNA, 15 nt, Human
ugcccugggaggcag

SEQ ID NO: 2914923 - RNA, 20 nt, Human
ugcccaggcuggcgugcagu

SEQ ID NO: 2914924 - RNA, 23 nt, Human
ugccaggaaggggugagcacaga

SEQ ID NO: 2914925 - RNA, 20 nt, Human
ugccccaaacaaauaugcaa

SEQ ID NO: 2914926 - RNA, 20 nt, Human
ugccccaaauaacuucaguc

SEQ ID NO: 2914927 - RNA, 21 nt, Human
ugccccaaauaacuucagucc

SEQ ID NO: 2914928 - RNA, 22 nt, Human
ugccccaaauaacuucaguccu

SEQ ID NO: 2914929 - RNA, 23 nt, Human
ugccccaaauaacuucaguccug

SEQ ID NO: 2914930 - RNA, 12 nt, Human
ugcccauuucau

SEQ ID NO: 2914931 - RNA, 21 nt, Human
ugcccauuucauauucuuuca

SEQ ID NO: 2914932 - RNA, 22 nt, Human
ugcccauuucauauucuuucaa

SEQ ID NO: 2914933 - RNA, 18 nt, Human
ugcccauucaccaaaauu

SEQ ID NO: 2914934 - RNA, 19 nt, Human
ugcccauucaccaaaauua

SEQ ID NO: 2914935 - RNA, 14 nt, Human
ugccccaaacaaau

SEQ ID NO: 2914936 - RNA, 21 nt, Human
ugcccauucugcccuguggga

SEQ ID NO: 2914937 - RNA, 23 nt, Human
ugccccagagcuguuuauggccu

SEQ ID NO: 2914938 - RNA, 17 nt, Human
ugccccagagcuguuua

SEQ ID NO: 2914939 - RNA, 15 nt, Human
ugccccagagcuguu

SEQ ID NO: 2914940 - RNA, 14 nt, Human
ugccccagagcugu

SEQ ID NO: 2914941 - RNA, 13 nt, Human
ugccccagagcug

SEQ ID NO: 2914942 - RNA, 16 nt, Human
ugccccaaccugcuga

SEQ ID NO: 2914943 - RNA, 19 nt, Human
ugcccaggcuggcgugcag

SEQ ID NO: 2914944 - RNA, 18 nt, Human
ugcccaggcuggcgugca

SEQ ID NO: 2914945 - RNA, 18 nt, Human
ugcccagagggcccaggc

SEQ ID NO: 2914946 - RNA, 11 nt, Human
ugccaggcccc

SEQ ID NO: 2914947 - RNA, 17 nt, Human
ugccaggcccccaccac

SEQ ID NO: 2914948 - RNA, 19 nt, Human
ugccaggcccccaccacac

SEQ ID NO: 2914949 - RNA, 20 nt, Human
ugccaggcccccaccacaca

SEQ ID NO: 2914950 - RNA, 21 nt, Human
ugccaggcccccaccacacau

SEQ ID NO: 2914951 - RNA, 22 nt, Human
ugccaggcccccaccacacauc

SEQ ID NO: 2914952 - RNA, 14 nt, Human
ugcccggcugcgga

SEQ ID NO: 2914953 - RNA, 12 nt, Human
ugcccggcugcg

SEQ ID NO: 2914954 - RNA, 17 nt, Human
ugcccggauucugggag

SEQ ID NO: 2914955 - RNA, 16 nt, Human
ugcccggauucuggga

SEQ ID NO: 2914956 - RNA, 15 nt, Human
ugcccggauucuggg

SEQ ID NO: 2914957 - RNA, 23 nt, Human
ugcccggagauuggacggccuga

SEQ ID NO: 2914958 - RNA, 22 nt, Human
ugcccggauucugggaggaagc

SEQ ID NO: 2914959 - RNA, 18 nt, Human
ugcccggauucugggagg

SEQ ID NO: 2914960 - RNA, 19 nt, Human
ugccccugcugcugucacc

SEQ ID NO: 2914961 - RNA, 21 nt, Human
ugcccggagauuggacggccu

SEQ ID NO: 2914962 - RNA, 12 nt, Human
ugcccgccugcc

SEQ ID NO: 2914963 - RNA, 14 nt, Human
ugcccgccugccca

SEQ ID NO: 2914964 - RNA, 15 nt, Human
ugcccgccugcccac

SEQ ID NO: 2914965 - RNA, 17 nt, Human
ugcccgccugcccaccu

SEQ ID NO: 2914966 - RNA, 18 nt, Human
ugcccgccugcccaccug

SEQ ID NO: 2914967 - RNA, 19 nt, Human
ugcccgccugcccaccugc

SEQ ID NO: 2914968 - RNA, 16 nt, Human
ugcccgcacacccuca

SEQ ID NO: 2914969 - RNA, 22 nt, Human
ugcccgcacacccucacucugc

SEQ ID NO: 2914970 - RNA, 13 nt, Human
ugcccgcacagca

SEQ ID NO: 2914971 - RNA, 14 nt, Human
ugcccgcacagcag

SEQ ID NO: 2914972 - RNA, 15 nt, Human
ugcccgcacagcagc

SEQ ID NO: 2914973 - RNA, 17 nt, Human
ugcccgcacagcagccu

SEQ ID NO: 2914974 - RNA, 19 nt, Human
ugcccgcacagcagccugc

SEQ ID NO: 2914975 - RNA, 20 nt, Human
ugcccgcacagcagccugcu

SEQ ID NO: 2914976 - RNA, 17 nt, Human
ugcccgcagaccucugg

SEQ ID NO: 2914977 - RNA, 18 nt, Human
ugcccgcagaccucugga

SEQ ID NO: 2914978 - RNA, 11 nt, Human
ugccccugcug

SEQ ID NO: 2914979 - RNA, 12 nt, Human
ugccccugcugc

SEQ ID NO: 2914980 - RNA, 15 nt, Human
ugccccucuccuucu

SEQ ID NO: 2914981 - RNA, 20 nt, Human
ugccccucuccuucuuagcu

SEQ ID NO: 2914982 - RNA, 12 nt, Human
ugccccucucug

SEQ ID NO: 2914983 - RNA, 13 nt, Human
ugccccucucugg

SEQ ID NO: 2914984 - RNA, 14 nt, Human
ugccccucucuggg

SEQ ID NO: 2914985 - RNA, 16 nt, Human
ugccccucucugggcc

SEQ ID NO: 2914986 - RNA, 21 nt, Human
ugccccucucugggccucaga

SEQ ID NO: 2914987 - RNA, 13 nt, Human
ugccccucuuucu

SEQ ID NO: 2914988 - RNA, 14 nt, Human
ugccccucuuucuc

SEQ ID NO: 2914989 - RNA, 15 nt, Human
ugccccucuuucucu

SEQ ID NO: 2914990 - RNA, 16 nt, Human
ugccccucuuucucuu

SEQ ID NO: 2914991 - RNA, 17 nt, Human
ugccccucuuucucuuu

SEQ ID NO: 2914992 - RNA, 21 nt, Human
ugccccucuuucucuuucuuc

SEQ ID NO: 2914993 - RNA, 22 nt, Human
ugccccucuuucucuuucuucc

SEQ ID NO: 2914994 - RNA, 14 nt, Human
ugccccucucacca

SEQ ID NO: 2914995 - RNA, 12 nt, Human
ugccccucucac

SEQ ID NO: 2914996 - RNA, 15 nt, Human
ugccccucucaccaa

SEQ ID NO: 2914997 - RNA, 20 nt, Human
ugccccuccucucugcccua

SEQ ID NO: 2914998 - RNA, 19 nt, Human
ugccccuccucucugcccu

SEQ ID NO: 2914999 - RNA, 13 nt, Human
ugccccucccuuc

SEQ ID NO: 2915000 - RNA, 18 nt, Human
ugccccagcucuggcuuc

SEQ ID NO: 2915001 - RNA, 16 nt, Human
ugccccagcucuggcu

SEQ ID NO: 2915002 - RNA, 14 nt, Human
ugccccagcucugg

SEQ ID NO: 2915003 - RNA, 13 nt, Human
ugccccagcucug

SEQ ID NO: 2915004 - RNA, 15 nt, Human
ugccccucccuucaa

SEQ ID NO: 2915005 - RNA, 16 nt, Human
ugccccucccuucaac

SEQ ID NO: 2915006 - RNA, 18 nt, Human
ugccccuccucucugccc

SEQ ID NO: 2915007 - RNA, 17 nt, Human
ugccccuccucucugcc

SEQ ID NO: 2915008 - RNA, 23 nt, Human
uggcaaggcugugcucccugguu

SEQ ID NO: 2915009 - RNA, 22 nt, Human
uggcaaguuuugauaugaguau

SEQ ID NO: 2915010 - RNA, 23 nt, Human
uggcaaguuuugauaugaguaua

SEQ ID NO: 2915011 - RNA, 17 nt, Human
uggcaaggguucaccug

SEQ ID NO: 2915012 - RNA, 15 nt, Human
uggcaagucacaugc

SEQ ID NO: 2915013 - RNA, 16 nt, Human
uggcaagucacaugcg

SEQ ID NO: 2915014 - RNA, 22 nt, Human
uggcagaagacaccagagcaga

SEQ ID NO: 2915015 - RNA, 20 nt, Human
uggcagaauaaucuuugggu

SEQ ID NO: 2915016 - RNA, 19 nt, Human
uggcagaauaaucuuuggg

SEQ ID NO: 2915017 - RNA, 22 nt, Human
uggcacuaacguugagccccug

SEQ ID NO: 2915018 - RNA, 23 nt, Human
uggcagaagacaccagagcagau

SEQ ID NO: 2915019 - RNA, 18 nt, Human
uggcagaagggagcagca

SEQ ID NO: 2915020 - RNA, 21 nt, Human
uggcagaagggagcagcacac

SEQ ID NO: 2915021 - RNA, 15 nt, Human
uggcaaaagccuugu

SEQ ID NO: 2915022 - RNA, 16 nt, Human
uggcaaaagccuugug

SEQ ID NO: 2915023 - RNA, 17 nt, Human
uggcaaaagccuugugu

SEQ ID NO: 2915024 - RNA, 19 nt, Human
uggcaaaagccuuguguau

SEQ ID NO: 2915025 - RNA, 21 nt, Human
uggcaaaagccuuguguauau

SEQ ID NO: 2915026 - RNA, 17 nt, Human
uggcaaaaauggcuaga

SEQ ID NO: 2915027 - RNA, 20 nt, Human
uggcaaggcugugcucccug

SEQ ID NO: 2915028 - RNA, 21 nt, Human
uggauaacuuagguggcaagc

SEQ ID NO: 2915029 - RNA, 16 nt, Human
uggaguuucuaagguc

SEQ ID NO: 2915030 - RNA, 17 nt, Human
uggaguuucuaaggucc

SEQ ID NO: 2915031 - RNA, 21 nt, Human
uggaguuuuuguuuggagagc

SEQ ID NO: 2915032 - RNA, 22 nt, Human
uggaguuuuuguuuggagagca

SEQ ID NO: 2915033 - RNA, 23 nt, Human
uggaguuuuuguuuggagagcac

SEQ ID NO: 2915034 - RNA, 17 nt, Human
uggauaaaauaaugcug

SEQ ID NO: 2915035 - RNA, 19 nt, Human
uggauaaaauaaugcugca

SEQ ID NO: 2915036 - RNA, 14 nt, Human
uggauaacaaagau

SEQ ID NO: 2915037 - RNA, 16 nt, Human
uggauaacaaagauau

SEQ ID NO: 2915038 - RNA, 17 nt, Human
uggauaacaaagauauc

SEQ ID NO: 2915039 - RNA, 18 nt, Human
uggauaacaaagauaucu

SEQ ID NO: 2915040 - RNA, 20 nt, Human
uggauaacaaagauaucuuu

SEQ ID NO: 2915041 - RNA, 13 nt, Human
uggaggauugcua

SEQ ID NO: 2915042 - RNA, 17 nt, Human
uggaggaucaguuuuuu

SEQ ID NO: 2915043 - RNA, 21 nt, Human
uggaguuucauguacaagaug

SEQ ID NO: 2915044 - RNA, 13 nt, Human
uggaguuucuaag

SEQ ID NO: 2915045 - RNA, 14 nt, Human
uggaguuucuaagg

SEQ ID NO: 2915046 - RNA, 14 nt, Human
uggagacugucuca

SEQ ID NO: 2915047 - RNA, 20 nt, Human
uggagacuggggggcuugaa

SEQ ID NO: 2915048 - RNA, 19 nt, Human
uggagacugguccugugug

SEQ ID NO: 2915049 - RNA, 20 nt, Human
uggagacugguccugugugc

SEQ ID NO: 2915050 - RNA, 13 nt, Human
uggaggaaggauu

SEQ ID NO: 2915051 - RNA, 18 nt, Human
uggaggaaggauuguaaa

SEQ ID NO: 2915052 - RNA, 19 nt, Human
uggaggaaggauuguaaaa

SEQ ID NO: 2915053 - RNA, 20 nt, Human
uggaggaaggauuguaaaaa

SEQ ID NO: 2915054 - RNA, 19 nt, Human
uggaccaauuauugauaua

SEQ ID NO: 2915055 - RNA, 20 nt, Human
uggaccaauuauugauauau

SEQ ID NO: 2915056 - RNA, 21 nt, Human
uggaccaauuauugauauaua

SEQ ID NO: 2915057 - RNA, 22 nt, Human
uggaccaauuauugauauauau

SEQ ID NO: 2915058 - RNA, 19 nt, Human
uggacauagauauuuucac

SEQ ID NO: 2915059 - RNA, 22 nt, Human
uggacauagauauuuucacaau

SEQ ID NO: 2915060 - RNA, 17 nt, Human
uggacaguccugggaga

SEQ ID NO: 2915061 - RNA, 17 nt, Human
uggacagucugcucuag

SEQ ID NO: 2915062 - RNA, 18 nt, Human
uggacaguucacacccug

SEQ ID NO: 2915063 - RNA, 19 nt, Human
uggacaguucacacccugc

SEQ ID NO: 2915064 - RNA, 20 nt, Human
uggacaguucacacccugca

SEQ ID NO: 2915065 - RNA, 21 nt, Human
uggacaguucacacccugcaa

SEQ ID NO: 2915066 - RNA, 22 nt, Human
uggacaguucacacccugcaag

SEQ ID NO: 2915067 - RNA, 16 nt, Human
uggacaguccugggag

SEQ ID NO: 2915068 - RNA, 15 nt, Human
uggacaguccuggga

SEQ ID NO: 2915069 - RNA, 16 nt, Human
uggacacucagaccug

SEQ ID NO: 2915070 - RNA, 17 nt, Human
uggacacuccagugcca

SEQ ID NO: 2915071 - RNA, 19 nt, Human
uggacacuccagugccagc

SEQ ID NO: 2915072 - RNA, 23 nt, Human
uggacacuuaauacuaccuugaa

SEQ ID NO: 2915073 - RNA, 14 nt, Human
uggacacuguacaa

SEQ ID NO: 2915074 - RNA, 21 nt, Human
uggacacuccagugccagcaa

SEQ ID NO: 2915075 - RNA, 23 nt, Human
uggacaggcauguucucugagga

SEQ ID NO: 2915076 - RNA, 14 nt, Human
uggacaguccuggg

SEQ ID NO: 2915077 - RNA, 13 nt, Human
uggacaguccugg

SEQ ID NO: 2915078 - RNA, 12 nt, Human
uggacaguccug

SEQ ID NO: 2915079 - RNA, 13 nt, Human
uggacagucacug

SEQ ID NO: 2915080 - RNA, 20 nt, Human
uggacagucacugccacuuu

SEQ ID NO: 2915081 - RNA, 13 nt, Human
ugcuguuucacaa

SEQ ID NO: 2915082 - RNA, 18 nt, Human
ugcuguuucacaauaccu

SEQ ID NO: 2915083 - RNA, 12 nt, Human
ugcuguuuccuu

SEQ ID NO: 2915084 - RNA, 11 nt, Human
ugcuguuuccu

SEQ ID NO: 2915085 - RNA, 14 nt, Human
ugcuguuuccuuuu

SEQ ID NO: 2915086 - RNA, 13 nt, Human
ugcuguuugacaa

SEQ ID NO: 2915087 - RNA, 16 nt, Human
ugcuguuuguagugaa

SEQ ID NO: 2915088 - RNA, 15 nt, Human
uggacacucagaccu

SEQ ID NO: 2915089 - RNA, 18 nt, Human
uggacaccuuuagguucu

SEQ ID NO: 2915090 - RNA, 22 nt, Human
ugcuguucuagcacuucaucug

SEQ ID NO: 2915091 - RNA, 13 nt, Human
ugcuguugcuuga

SEQ ID NO: 2915092 - RNA, 14 nt, Human
ugcuguugcuugaa

SEQ ID NO: 2915093 - RNA, 15 nt, Human
ugcuguugcuugaau

SEQ ID NO: 2915094 - RNA, 18 nt, Human
ugcuguugcuugaauagc

SEQ ID NO: 2915095 - RNA, 14 nt, Human
ugcuguuggucaug

SEQ ID NO: 2915096 - RNA, 16 nt, Human
ugcuguuggucaugug

SEQ ID NO: 2915097 - RNA, 15 nt, Human
uggagaauguggaga

SEQ ID NO: 2915098 - RNA, 18 nt, Human
uggagacuccuaggcagg

SEQ ID NO: 2915099 - RNA, 19 nt, Human
uggagacuccuaggcagga

SEQ ID NO: 2915100 - RNA, 22 nt, Human
uggagacuccuaggcaggacau

SEQ ID NO: 2915101 - RNA, 19 nt, Human
uggagacucuguggggccu

SEQ ID NO: 2915102 - RNA, 14 nt, Human
uggagacucugugg

SEQ ID NO: 2915103 - RNA, 14 nt, Human
uggagaauuauaua

SEQ ID NO: 2915104 - RNA, 17 nt, Human
uggagaauugcugaagg

SEQ ID NO: 2915105 - RNA, 18 nt, Human
uggagaauugcugaaggg

SEQ ID NO: 2915106 - RNA, 19 nt, Human
uggagaauugcugaagggc

SEQ ID NO: 2915107 - RNA, 22 nt, Human
uggagaauugcugaagggcauu

SEQ ID NO: 2915108 - RNA, 16 nt, Human
uggagacaaugucugc

SEQ ID NO: 2915109 - RNA, 22 nt, Human
uggagacguggaaccucugucu

SEQ ID NO: 2915110 - RNA, 23 nt, Human
uggagacguggaaccucugucuc

SEQ ID NO: 2915111 - RNA, 24 nt, Human
uggagacguggaaccucugucuca

SEQ ID NO: 2915112 - RNA, 13 nt, Human
uggacugcagaag

SEQ ID NO: 2915113 - RNA, 14 nt, Human
uggacugcagaagc

SEQ ID NO: 2915114 - RNA, 19 nt, Human
uggacugcagaagcaaggg

SEQ ID NO: 2915115 - RNA, 14 nt, Human
uggacuggaagggg

SEQ ID NO: 2915116 - RNA, 21 nt, Human
uggagaagcucccugaaguaa

SEQ ID NO: 2915117 - RNA, 14 nt, Human
uggacuccggcccu

SEQ ID NO: 2915118 - RNA, 13 nt, Human
uggacuccucugu

SEQ ID NO: 2915119 - RNA, 22 nt, Human
uggacugaaugggaucaugaaa

SEQ ID NO: 2915120 - RNA, 14 nt, Human
uggacugacagcau

SEQ ID NO: 2915121 - RNA, 21 nt, Human
uggacugacagcaugugcccu

SEQ ID NO: 2915122 - RNA, 22 nt, Human
uggacugacagcaugugcccuc

SEQ ID NO: 2915123 - RNA, 23 nt, Human
uggacugacagcaugugcccucc

SEQ ID NO: 2915124 - RNA, 17 nt, Human
uggacuccggcccuccu

SEQ ID NO: 2915125 - RNA, 14 nt, Human
uggacaggcucugc

SEQ ID NO: 2915126 - RNA, 12 nt, Human
uggacucagaga

SEQ ID NO: 2915127 - RNA, 19 nt, Human
uggaccacugggcaaugau

SEQ ID NO: 2915128 - RNA, 14 nt, Human
uggaccacuguuuc

SEQ ID NO: 2915129 - RNA, 15 nt, Human
uggaccacuguuucu

SEQ ID NO: 2915130 - RNA, 18 nt, Human
uggaccacuguuucuugc

SEQ ID NO: 2915131 - RNA, 19 nt, Human
uggaccacuguuucuugcu

SEQ ID NO: 2915132 - RNA, 20 nt, Human
uggaccacuguuucuugcuu

SEQ ID NO: 2915133 - RNA, 21 nt, Human
uggaccacuguuucuugcuug

SEQ ID NO: 2915134 - RNA, 22 nt, Human
uggaccacuguuucuugcuugu

SEQ ID NO: 2915135 - RNA, 23 nt, Human
uggaccacuguuucuugcuugua

SEQ ID NO: 2915136 - RNA, 15 nt, Human
uggaccacugggcaa

SEQ ID NO: 2915137 - RNA, 12 nt, Human
uggaccacugca

SEQ ID NO: 2915138 - RNA, 20 nt, Human
uggaccacugcaugagcuuu

SEQ ID NO: 2915139 - RNA, 19 nt, Human
uggccagaugcaccagccc

SEQ ID NO: 2915140 - RNA, 12 nt, Human
uggccagccgcu

SEQ ID NO: 2915141 - RNA, 14 nt, Human
uggccagccgcucu

SEQ ID NO: 2915142 - RNA, 17 nt, Human
uggccagccgcucuccu

SEQ ID NO: 2915143 - RNA, 18 nt, Human
uggccagccgcucuccug

SEQ ID NO: 2915144 - RNA, 20 nt, Human
uggccagccgcucuccugcc

SEQ ID NO: 2915145 - RNA, 21 nt, Human
uggccagccgcucuccugcca

SEQ ID NO: 2915146 - RNA, 23 nt, Human
uggccagccgcucuccugccaca

SEQ ID NO: 2915147 - RNA, 24 nt, Human
uggccagccgcucuccugccacau

SEQ ID NO: 2915148 - RNA, 20 nt, Human
uggccaggcugaucucgaac

SEQ ID NO: 2915149 - RNA, 17 nt, Human
uggccaggcugcucuug

SEQ ID NO: 2915150 - RNA, 16 nt, Human
uggccaggcugcucuu

SEQ ID NO: 2915151 - RNA, 13 nt, Human
uggccagccuaca

SEQ ID NO: 2915152 - RNA, 15 nt, Human
uggccagccuggggc

SEQ ID NO: 2915153 - RNA, 18 nt, Human
uggccagccuggggccug

SEQ ID NO: 2915154 - RNA, 19 nt, Human
uggccagccuggggccugg

SEQ ID NO: 2915155 - RNA, 20 nt, Human
uggccagccuggggccuggc

SEQ ID NO: 2915156 - RNA, 21 nt, Human
uggccagccuggggccuggca

SEQ ID NO: 2915157 - RNA, 22 nt, Human
uggccagccuggggccuggcag

SEQ ID NO: 2915158 - RNA, 23 nt, Human
uggccagccuggggccuggcagg

SEQ ID NO: 2915159 - RNA, 12 nt, Human
uggcagaggagg

SEQ ID NO: 2915160 - RNA, 13 nt, Human
uggcagagcuucu

SEQ ID NO: 2915161 - RNA, 22 nt, Human
uggcagagcuuggacuggaugc

SEQ ID NO: 2915162 - RNA, 15 nt, Human
uggcagacuguguaa

SEQ ID NO: 2915163 - RNA, 17 nt, Human
uggcagacuguguaaaa

SEQ ID NO: 2915164 - RNA, 12 nt, Human
uggcagagagag

SEQ ID NO: 2915165 - RNA, 13 nt, Human
uggcagagagaga

SEQ ID NO: 2915166 - RNA, 18 nt, Human
uggcagagagagagaaag

SEQ ID NO: 2915167 - RNA, 18 nt, Human
uggccagaugcaccagcc

SEQ ID NO: 2915168 - RNA, 17 nt, Human
uggccagaugcaccagc

SEQ ID NO: 2915169 - RNA, 13 nt, Human
uggccaggcuggu

SEQ ID NO: 2915170 - RNA, 20 nt, Human
uggccaggcugcucuugaac

SEQ ID NO: 2915171 - RNA, 13 nt, Human
uggccccgccgcc

SEQ ID NO: 2915172 - RNA, 15 nt, Human
uggccccgccgccug

SEQ ID NO: 2915173 - RNA, 20 nt, Human
uggccccgccgccugguacu

SEQ ID NO: 2915174 - RNA, 20 nt, Human
uggcccauagaaacaugaca

SEQ ID NO: 2915175 - RNA, 22 nt, Human
uggcccauagaaacaugacacu

SEQ ID NO: 2915176 - RNA, 23 nt, Human
uggcccauagaaacaugacacug

SEQ ID NO: 2915177 - RNA, 24 nt, Human
uggcccauagaaacaugacacuga

SEQ ID NO: 2915178 - RNA, 15 nt, Human
uggcccaguccucuc

SEQ ID NO: 2915179 - RNA, 19 nt, Human
uggcccaguccucucccaa

SEQ ID NO: 2915180 - RNA, 16 nt, Human
uggccccugcccggcu

SEQ ID NO: 2915181 - RNA, 15 nt, Human
uggccccugcccggc

SEQ ID NO: 2915182 - RNA, 14 nt, Human
uggccccugcccgg

SEQ ID NO: 2915183 - RNA, 21 nt, Human
uggccccgccgccugguacuc

SEQ ID NO: 2915184 - RNA, 20 nt, Human
uggccccugcccggcugcgg

SEQ ID NO: 2915185 - RNA, 13 nt, Human
uggccuaucuccu

SEQ ID NO: 2915186 - RNA, 15 nt, Human
uggccuaucuccuag

SEQ ID NO: 2915187 - RNA, 16 nt, Human
uggccuaucuccuagg

SEQ ID NO: 2915188 - RNA, 17 nt, Human
uggccuaucuccuaggg

SEQ ID NO: 2915189 - RNA, 21 nt, Human
uggccccucaaaucguccagc

SEQ ID NO: 2915190 - RNA, 12 nt, Human
uggccccucaac

SEQ ID NO: 2915191 - RNA, 20 nt, Human
uggccuaugcacauauggac

SEQ ID NO: 2915192 - RNA, 13 nt, Human
uggccuaugcaca

SEQ ID NO: 2915193 - RNA, 14 nt, Human
uggccuaugcacau

SEQ ID NO: 2915194 - RNA, 15 nt, Human
uggccuaugcacaua

SEQ ID NO: 2915195 - RNA, 17 nt, Human
uggccuaugcacauaug

SEQ ID NO: 2915196 - RNA, 18 nt, Human
uggccucccacagacuca

SEQ ID NO: 2915197 - RNA, 19 nt, Human
uggccucagcugccucacu

SEQ ID NO: 2915198 - RNA, 18 nt, Human
uggccucagcugccucac

SEQ ID NO: 2915199 - RNA, 17 nt, Human
uggccucagcugccuca

SEQ ID NO: 2915200 - RNA, 16 nt, Human
uggccucagcugccuc

SEQ ID NO: 2915201 - RNA, 14 nt, Human
uggccucagcugcc

SEQ ID NO: 2915202 - RNA, 17 nt, Human
uggccucagaauucaca

SEQ ID NO: 2915203 - RNA, 12 nt, Human
uggccucagacu

SEQ ID NO: 2915204 - RNA, 14 nt, Human
uggccucagacugc

SEQ ID NO: 2915205 - RNA, 17 nt, Human
uggccucagacugcacc

SEQ ID NO: 2915206 - RNA, 19 nt, Human
uggccucagacugcaccca

SEQ ID NO: 2915207 - RNA, 20 nt, Human
uggccucagacugcacccag

SEQ ID NO: 2915208 - RNA, 21 nt, Human
uggccucagacugcacccagg

SEQ ID NO: 2915209 - RNA, 22 nt, Human
uggccucagacugcacccagga

SEQ ID NO: 2915210 - RNA, 23 nt, Human
uggccucagacugcacccaggag

SEQ ID NO: 2915211 - RNA, 24 nt, Human
uggccucagacugcacccaggagg

SEQ ID NO: 2915212 - RNA, 13 nt, Human
uggccucagcugc

SEQ ID NO: 2915213 - RNA, 18 nt, Human
uggccucagcugaaugcc

SEQ ID NO: 2915214 - RNA, 22 nt, Human
uggccucagcugaaugccuccu

SEQ ID NO: 2915215 - RNA, 15 nt, Human
uggcugggggccuca

SEQ ID NO: 2915216 - RNA, 12 nt, Human
uggcugcugccc

SEQ ID NO: 2915217 - RNA, 11 nt, Human
uggcugcugcc

SEQ ID NO: 2915218 - RNA, 19 nt, Human
uggcgagugaaugccagug

SEQ ID NO: 2915219 - RNA, 14 nt, Human
uggcuccugagggg

SEQ ID NO: 2915220 - RNA, 15 nt, Human
uggcuccucuguggu

SEQ ID NO: 2915221 - RNA, 21 nt, Human
uggcuccucuguggugucugc

SEQ ID NO: 2915222 - RNA, 22 nt, Human
uggcuccucuguggugucugcc

SEQ ID NO: 2915223 - RNA, 23 nt, Human
uggcuccucuguggugucugccu

SEQ ID NO: 2915224 - RNA, 18 nt, Human
uggcuccucccggugccc

SEQ ID NO: 2915225 - RNA, 19 nt, Human
uggcuccucccggugccca

SEQ ID NO: 2915226 - RNA, 14 nt, Human
uggcucccaugacc

SEQ ID NO: 2915227 - RNA, 14 nt, Human
uggcuccucccggu

SEQ ID NO: 2915228 - RNA, 16 nt, Human
uggcuccucccggugc

SEQ ID NO: 2915229 - RNA, 14 nt, Human
uggcggccccagca

SEQ ID NO: 2915230 - RNA, 14 nt, Human
uggcucccacaggc

SEQ ID NO: 2915231 - RNA, 16 nt, Human
uggcucccacaggagu

SEQ ID NO: 2915232 - RNA, 17 nt, Human
uggcucccacaggcccu

SEQ ID NO: 2915233 - RNA, 20 nt, Human
uggcucccacaggcccuucc

SEQ ID NO: 2915234 - RNA, 21 nt, Human
uggucaaacaaacucucugaa

SEQ ID NO: 2915235 - RNA, 16 nt, Human
uggucaaacaaacucu

SEQ ID NO: 2915236 - RNA, 19 nt, Human
ugggucacacacggaggca

SEQ ID NO: 2915237 - RNA, 14 nt, Human
uggguaucaagaca

SEQ ID NO: 2915238 - RNA, 18 nt, Human
uggguaucaagacauagc

SEQ ID NO: 2915239 - RNA, 20 nt, Human
uggguaucaagacauagcau

SEQ ID NO: 2915240 - RNA, 14 nt, Human
uggguauguguagg

SEQ ID NO: 2915241 - RNA, 17 nt, Human
uggguauguguaggcag

SEQ ID NO: 2915242 - RNA, 21 nt, Human
uggguauuugcaauauuccuu

SEQ ID NO: 2915243 - RNA, 19 nt, Human
ugguaugugacaccaaagc

SEQ ID NO: 2915244 - RNA, 19 nt, Human
ugguauggaacucucucca

SEQ ID NO: 2915245 - RNA, 16 nt, Human
ugguauggcugcaguc

SEQ ID NO: 2915246 - RNA, 18 nt, Human
uggucacaggacucugcc

SEQ ID NO: 2915247 - RNA, 22 nt, Human
uggucaaacaaacucucugaac

SEQ ID NO: 2915248 - RNA, 17 nt, Human
uggucaaaagcuggauu

SEQ ID NO: 2915249 - RNA, 19 nt, Human
uggucacaggacucugccu

SEQ ID NO: 2915250 - RNA, 13 nt, Human
uggucccacucag

SEQ ID NO: 2915251 - RNA, 22 nt, Human
uggucccuccagaaccaccccg

SEQ ID NO: 2915252 - RNA, 17 nt, Human
ugggggaguuuuccucu

SEQ ID NO: 2915253 - RNA, 13 nt, Human
uggucccugccuu

SEQ ID NO: 2915254 - RNA, 16 nt, Human
ugguccggacacuccu

SEQ ID NO: 2915255 - RNA, 19 nt, Human
ugguccggacacuccuaga

SEQ ID NO: 2915256 - RNA, 16 nt, Human
ugguccuaaaagcaaa

SEQ ID NO: 2915257 - RNA, 17 nt, Human
ugguccuaaaagcaaaa

SEQ ID NO: 2915258 - RNA, 21 nt, Human
ugguccuaaaagcaaaauaaa

SEQ ID NO: 2915259 - RNA, 22 nt, Human
ugguccuaaaagcaaaauaaaa

SEQ ID NO: 2915260 - RNA, 23 nt, Human
ugguccuaaaagcaaaauaaaaa

SEQ ID NO: 2915261 - RNA, 12 nt, Human
uggugacuuccu

SEQ ID NO: 2915262 - RNA, 23 nt, Human
uggugacuuccucgccucuccca

SEQ ID NO: 2915263 - RNA, 22 nt, Human
uggugaccucugccugaaguca

SEQ ID NO: 2915264 - RNA, 17 nt, Human
uggugaccucugccuga

SEQ ID NO: 2915265 - RNA, 16 nt, Human
uggugaccucugccug

SEQ ID NO: 2915266 - RNA, 15 nt, Human
uggugaccucugccu

SEQ ID NO: 2915267 - RNA, 21 nt, Human
uggugaucucccaagcuaucu

SEQ ID NO: 2915268 - RNA, 15 nt, Human
uggugauaaggacau

SEQ ID NO: 2915269 - RNA, 15 nt, Human
uggugauauagaauu

SEQ ID NO: 2915270 - RNA, 13 nt, Human
uggugaggagcac

SEQ ID NO: 2915271 - RNA, 19 nt, Human
ugguccucauucaaaggga

SEQ ID NO: 2915272 - RNA, 15 nt, Human
uggugcauagaacug

SEQ ID NO: 2915273 - RNA, 18 nt, Human
uggugcauagaacugggu

SEQ ID NO: 2915274 - RNA, 17 nt, Human
uggugcauagcagaugg

SEQ ID NO: 2915275 - RNA, 15 nt, Human
uggugcacuuuguaa

SEQ ID NO: 2915276 - RNA, 17 nt, Human
uggugcacuuuguaaau

SEQ ID NO: 2915277 - RNA, 19 nt, Human
uggugcacuuuguaaauuc

SEQ ID NO: 2915278 - RNA, 13 nt, Human
uggugcagacaga

SEQ ID NO: 2915279 - RNA, 15 nt, Human
uggugcagacagaag

SEQ ID NO: 2915280 - RNA, 22 nt, Human
uggugcagacagaagucuccuc

SEQ ID NO: 2915281 - RNA, 14 nt, Human
uggugaccucugcc

SEQ ID NO: 2915282 - RNA, 13 nt, Human
uggugaccucugc

SEQ ID NO: 2915283 - RNA, 12 nt, Human
uggucuaaaacu

SEQ ID NO: 2915284 - RNA, 17 nt, Human
uggucuaacacuggcau

SEQ ID NO: 2915285 - RNA, 23 nt, Human
uggucuaacacuggcauguucaa

SEQ ID NO: 2915286 - RNA, 18 nt, Human
uggucuaaaaauaaacca

SEQ ID NO: 2915287 - RNA, 15 nt, Human
uggucgcccaggaga

SEQ ID NO: 2915288 - RNA, 16 nt, Human
ugguccuguccccgca

SEQ ID NO: 2915289 - RNA, 19 nt, Human
ugguccuggggcucugugc

SEQ ID NO: 2915290 - RNA, 16 nt, Human
ugguccuggggcucug

SEQ ID NO: 2915291 - RNA, 14 nt, Human
ugguccuggggcuc

SEQ ID NO: 2915292 - RNA, 11 nt, Human
ugguccugggg

SEQ ID NO: 2915293 - RNA, 12 nt, Human
ugguccugacuu

SEQ ID NO: 2915294 - RNA, 20 nt, Human
ugguccugaggguccccacc

SEQ ID NO: 2915295 - RNA, 14 nt, Human
uggucgcccaggag

SEQ ID NO: 2915296 - RNA, 13 nt, Human
uggucgcccagga

SEQ ID NO: 2915297 - RNA, 23 nt, Human
ugguccuuccaggcccccaccac

SEQ ID NO: 2915298 - RNA, 20 nt, Human
ugguccugugugcagugaag

SEQ ID NO: 2915299 - RNA, 23 nt, Human
ugggcaggacucagcuccccaga

SEQ ID NO: 2915300 - RNA, 21 nt, Human
ugggauuacaggcaugugcca

SEQ ID NO: 2915301 - RNA, 21 nt, Human
ugggauuacaggcgugagcca

SEQ ID NO: 2915302 - RNA, 21 nt, Human
ugggcagggucuguuuggacu

SEQ ID NO: 2915303 - RNA, 18 nt, Human
ugggcagagcccccagga

SEQ ID NO: 2915304 - RNA, 11 nt, Human
ugggcccugca

SEQ ID NO: 2915305 - RNA, 12 nt, Human
ugggcccugcau

SEQ ID NO: 2915306 - RNA, 13 nt, Human
ugggcccugcaug

SEQ ID NO: 2915307 - RNA, 14 nt, Human
ugggcccugcaugu

SEQ ID NO: 2915308 - RNA, 11 nt, Human
ugggccuucag

SEQ ID NO: 2915309 - RNA, 16 nt, Human
ugggccugggcuaggg

SEQ ID NO: 2915310 - RNA, 18 nt, Human
ugggccugggcuagggga

SEQ ID NO: 2915311 - RNA, 17 nt, Human
ugggauuacaggcguga

SEQ ID NO: 2915312 - RNA, 22 nt, Human
ugggauuacaagcgugagccac

SEQ ID NO: 2915313 - RNA, 14 nt, Human
ugggaucaugaaag

SEQ ID NO: 2915314 - RNA, 18 nt, Human
ugggaucaugaaaguaga

SEQ ID NO: 2915315 - RNA, 20 nt, Human
ugggaugugguuuucuuaag

SEQ ID NO: 2915316 - RNA, 19 nt, Human
ugggaucccugucuuuccu

SEQ ID NO: 2915317 - RNA, 22 nt, Human
ugggaucccugucuuuccuaag

SEQ ID NO: 2915318 - RNA, 23 nt, Human
ugggaucccugucuuuccuaaga

SEQ ID NO: 2915319 - RNA, 16 nt, Human
ugggauggugggcuuc

SEQ ID NO: 2915320 - RNA, 20 nt, Human
ugggauggugggcuucaggg

SEQ ID NO: 2915321 - RNA, 21 nt, Human
ugggauguaugaauacagcag

SEQ ID NO: 2915322 - RNA, 23 nt, Human
ugggauguaugaauacagcagca

SEQ ID NO: 2915323 - RNA, 17 nt, Human
uggcugggggccucagu

SEQ ID NO: 2915324 - RNA, 16 nt, Human
uggcugggggccucag

SEQ ID NO: 2915325 - RNA, 20 nt, Human
uggcugggggccucagugcc

SEQ ID NO: 2915326 - RNA, 14 nt, Human
uggcugcugcccag

SEQ ID NO: 2915327 - RNA, 19 nt, Human
ugggaucacauguggacuu

SEQ ID NO: 2915328 - RNA, 23 nt, Human
uggggaugagaaagguugaagca

SEQ ID NO: 2915329 - RNA, 15 nt, Human
uggggaugagaaagg

SEQ ID NO: 2915330 - RNA, 18 nt, Human
uggggaucaaaguucugc

SEQ ID NO: 2915331 - RNA, 17 nt, Human
uggggauaaaggagaag

SEQ ID NO: 2915332 - RNA, 13 nt, Human
ugggcuugauucu

SEQ ID NO: 2915333 - RNA, 14 nt, Human
ugggcuugauucug

SEQ ID NO: 2915334 - RNA, 16 nt, Human
uggggauaaaaugacu

SEQ ID NO: 2915335 - RNA, 20 nt, Human
uggggauaaaaugacuacuu

SEQ ID NO: 2915336 - RNA, 21 nt, Human
uggggauaaaaugacuacuua

SEQ ID NO: 2915337 - RNA, 23 nt, Human
ugggcuucccaguggcugcugcc

SEQ ID NO: 2915338 - RNA, 12 nt, Human
ugggcuucccag

SEQ ID NO: 2915339 - RNA, 19 nt, Human
ugggcuucccaguggcugc

SEQ ID NO: 2915340 - RNA, 21 nt, Human
ugggcuucccaguggcugcug

SEQ ID NO: 2915341 - RNA, 22 nt, Human
ugggcuucccaguggcugcugc

SEQ ID NO: 2915342 - RNA, 12 nt, Human
ugggccuucagg

SEQ ID NO: 2915343 - RNA, 16 nt, Human
ugggccuuagugggcc

SEQ ID NO: 2915344 - RNA, 18 nt, Human
ugggccuuagugggccag

SEQ ID NO: 2915345 - RNA, 19 nt, Human
ugggccuuagugggccagg

SEQ ID NO: 2915346 - RNA, 23 nt, Human
ugggccuuagugggccagggcug

SEQ ID NO: 2915347 - RNA, 21 nt, Human
ugggggaguagaucuuucuag

SEQ ID NO: 2915348 - RNA, 23 nt, Human
ugggggaaugagcccagagaaca

SEQ ID NO: 2915349 - RNA, 17 nt, Human
ugggggacguuucucau

SEQ ID NO: 2915350 - RNA, 18 nt, Human
ugggggucaggcagccag

SEQ ID NO: 2915351 - RNA, 19 nt, Human
ugggggucaggcagccagu

SEQ ID NO: 2915352 - RNA, 19 nt, Human
uggggggguguuaauuuau

SEQ ID NO: 2915353 - RNA, 20 nt, Human
uggggguaaaaaauauagcc

SEQ ID NO: 2915354 - RNA, 18 nt, Human
uggguacuuguggacaca

SEQ ID NO: 2915355 - RNA, 17 nt, Human
uggguacuuguggacac

SEQ ID NO: 2915356 - RNA, 15 nt, Human
uggggguucuuucuu

SEQ ID NO: 2915357 - RNA, 19 nt, Human
uggggguucuuucuuccuc

SEQ ID NO: 2915358 - RNA, 20 nt, Human
uggguaauuuagauuguaaa

SEQ ID NO: 2915359 - RNA, 22 nt, Human
uggguaauccaggcacagcuga

SEQ ID NO: 2915360 - RNA, 23 nt, Human
uggguaauccaggcacagcugag

SEQ ID NO: 2915361 - RNA, 20 nt, Human
uggggguucuuucuuccucu

SEQ ID NO: 2915362 - RNA, 22 nt, Human
uggggguucuuucuuccucugc

SEQ ID NO: 2915363 - RNA, 17 nt, Human
uuaaaagccacauagag

SEQ ID NO: 2915364 - RNA, 15 nt, Human
uuaaaaggauaguau

SEQ ID NO: 2915365 - RNA, 17 nt, Human
uuaaaaggauuuuuauc

SEQ ID NO: 2915366 - RNA, 20 nt, Human
uuaaaaggauuuuuaucuuu

SEQ ID NO: 2915367 - RNA, 22 nt, Human
uuaaaaggauuuuuaucuuucg

SEQ ID NO: 2915368 - RNA, 16 nt, Human
uuaaaagauucauuuu

SEQ ID NO: 2915369 - RNA, 17 nt, Human
uuaaaagauucauuuuu

SEQ ID NO: 2915370 - RNA, 21 nt, Human
uuaaaagauucauuuuuaauc

SEQ ID NO: 2915371 - RNA, 11 nt, Human
uuaaagaaagu

SEQ ID NO: 2915372 - RNA, 15 nt, Human
uuaaaauagaaauaa

SEQ ID NO: 2915373 - RNA, 22 nt, Human
uuaaaauagcaacacucuauau

SEQ ID NO: 2915374 - RNA, 20 nt, Human
uuaaaagucacaauguucuu

SEQ ID NO: 2915375 - RNA, 16 nt, Human
uuaaacucagggacag

SEQ ID NO: 2915376 - RNA, 20 nt, Human
uuaaacucagggacagagcc

SEQ ID NO: 2915377 - RNA, 22 nt, Human
uuaaacucagggacagagccau

SEQ ID NO: 2915378 - RNA, 22 nt, Human
uuaaacucgagauacagcuuuu

SEQ ID NO: 2915379 - RNA, 22 nt, Human
uguuuuuuucuuuuuuuauaaa

SEQ ID NO: 2915380 - RNA, 18 nt, Human
uguuuuuuuuuuccacuu

SEQ ID NO: 2915381 - RNA, 19 nt, Human
uguuuuuuuuuuccacuua

SEQ ID NO: 2915382 - RNA, 19 nt, Human
uuaaaaaaaaaaaaaagcu

SEQ ID NO: 2915383 - RNA, 12 nt, Human
uuaaaagaaauu

SEQ ID NO: 2915384 - RNA, 16 nt, Human
uuaaaagaaauuuauu

SEQ ID NO: 2915385 - RNA, 22 nt, Human
uguuuuaagaggcagggucuca

SEQ ID NO: 2915386 - RNA, 13 nt, Human
uguuuugugcauu

SEQ ID NO: 2915387 - RNA, 15 nt, Human
uguuuugugcauuug

SEQ ID NO: 2915388 - RNA, 13 nt, Human
uguuuuguauaca

SEQ ID NO: 2915389 - RNA, 14 nt, Human
uguuuuguauacaa

SEQ ID NO: 2915390 - RNA, 16 nt, Human
uguuuuguauacaaau

SEQ ID NO: 2915391 - RNA, 17 nt, Human
uguuuuguauacaaaua

SEQ ID NO: 2915392 - RNA, 22 nt, Human
uguuuuguauacaaauauauug

SEQ ID NO: 2915393 - RNA, 18 nt, Human
uguuuuguacauagauuu

SEQ ID NO: 2915394 - RNA, 13 nt, Human
uguuuuguuuguc

SEQ ID NO: 2915395 - RNA, 14 nt, Human
uguuuuguuugucu

SEQ ID NO: 2915396 - RNA, 16 nt, Human
uguuuuguuugucucu

SEQ ID NO: 2915397 - RNA, 23 nt, Human
uguuuuguuugucucuccuuuuc

SEQ ID NO: 2915398 - RNA, 12 nt, Human
uguuuuguuaau

SEQ ID NO: 2915399 - RNA, 17 nt, Human
uguuuuguuuggagaca

SEQ ID NO: 2915400 - RNA, 21 nt, Human
uggugccauccccagggggca

SEQ ID NO: 2915401 - RNA, 16 nt, Human
uggugccauccccagg

SEQ ID NO: 2915402 - RNA, 14 nt, Human
uggugccaucccca

SEQ ID NO: 2915403 - RNA, 18 nt, Human
uggugccaucauugcugu

SEQ ID NO: 2915404 - RNA, 22 nt, Human
uggugccaucauugcugucugc

SEQ ID NO: 2915405 - RNA, 17 nt, Human
uggugccacaaauaaaa

SEQ ID NO: 2915406 - RNA, 18 nt, Human
uggugccacaaauaaaau

SEQ ID NO: 2915407 - RNA, 20 nt, Human
uggugccacaaauaaaaugg

SEQ ID NO: 2915408 - RNA, 15 nt, Human
uguuucaaacuguaa

SEQ ID NO: 2915409 - RNA, 10 nt, Human
uguuucaaga

SEQ ID NO: 2915410 - RNA, 16 nt, Human
uguuucaagaaccugg

SEQ ID NO: 2915411 - RNA, 19 nt, Human
uguuucaagaaccuggaaa

SEQ ID NO: 2915412 - RNA, 22 nt, Human
uguuucagguucaguauuaugu

SEQ ID NO: 2915413 - RNA, 10 nt, Human
uguuucagug

SEQ ID NO: 2915414 - RNA, 21 nt, Human
uguuucagugaauaugccugu

SEQ ID NO: 2915415 - RNA, 18 nt, Human
uguuucacgaaguuuguu

SEQ ID NO: 2915416 - RNA, 15 nt, Human
uguuucagauuuuuu

SEQ ID NO: 2915417 - RNA, 17 nt, Human
uguuucagcuaagggaa

SEQ ID NO: 2915418 - RNA, 19 nt, Human
uguuucagcuaagggaaga

SEQ ID NO: 2915419 - RNA, 21 nt, Human
uguuucagcuaagggaagaca

SEQ ID NO: 2915420 - RNA, 22 nt, Human
uguuucagcuaagggaagacau

SEQ ID NO: 2915421 - RNA, 23 nt, Human
uguuucagcuaagggaagacauu

SEQ ID NO: 2915422 - RNA, 24 nt, Human
uguuucagcuaagggaagacauuu

SEQ ID NO: 2915423 - RNA, 14 nt, Human
uguuucaaucacug

SEQ ID NO: 2915424 - RNA, 15 nt, Human
uguuucaaucacugu

SEQ ID NO: 2915425 - RNA, 16 nt, Human
uguuucaaucacuguc

SEQ ID NO: 2915426 - RNA, 23 nt, Human
uguuucacaccggaagguuuuua

SEQ ID NO: 2915427 - RNA, 20 nt, Human
uguuucaaggcacucuagau

SEQ ID NO: 2915428 - RNA, 21 nt, Human
uguuucaaggcacucuagauu

SEQ ID NO: 2915429 - RNA, 15 nt, Human
uguuucaaggcacuc

SEQ ID NO: 2915430 - RNA, 19 nt, Human
uguuucaaggcacucuaga

SEQ ID NO: 2915431 - RNA, 20 nt, Human
uguuuuaagaggcagggucu

SEQ ID NO: 2915432 - RNA, 19 nt, Human
uguuugucuuuuaaugcuu

SEQ ID NO: 2915433 - RNA, 19 nt, Human
uguuugucuguuuguuuca

SEQ ID NO: 2915434 - RNA, 20 nt, Human
uguuugucuguuuguuucaa

SEQ ID NO: 2915435 - RNA, 15 nt, Human
uguuugucucuccuu

SEQ ID NO: 2915436 - RNA, 16 nt, Human
uguuugucucuccuuu

SEQ ID NO: 2915437 - RNA, 17 nt, Human
uguuugucucuccuuuu

SEQ ID NO: 2915438 - RNA, 18 nt, Human
uguuugucucuccuuuuc

SEQ ID NO: 2915439 - RNA, 19 nt, Human
uguuugucucuccuuuucu

SEQ ID NO: 2915440 - RNA, 16 nt, Human
uguuuguagugaaaua

SEQ ID NO: 2915441 - RNA, 19 nt, Human
uguuuggugcauagaacug

SEQ ID NO: 2915442 - RNA, 22 nt, Human
uguuuggugcauagaacugggu

SEQ ID NO: 2915443 - RNA, 18 nt, Human
uguuuggugcucauuuaa

SEQ ID NO: 2915444 - RNA, 14 nt, Human
uguuugguuuacau

SEQ ID NO: 2915445 - RNA, 15 nt, Human
uguuugguuuacauu

SEQ ID NO: 2915446 - RNA, 16 nt, Human
uguuugguuuacauuu

SEQ ID NO: 2915447 - RNA, 20 nt, Human
uguuuccagacuuccuugag

SEQ ID NO: 2915448 - RNA, 15 nt, Human
uguuuccuucagugc

SEQ ID NO: 2915449 - RNA, 12 nt, Human
uguuuccuucag

SEQ ID NO: 2915450 - RNA, 23 nt, Human
uguuuccuuguuuaucagauaca

SEQ ID NO: 2915451 - RNA, 23 nt, Human
uguuuccagacuuccuugagaca

SEQ ID NO: 2915452 - RNA, 18 nt, Human
uguuuccagcagaagaca

SEQ ID NO: 2915453 - RNA, 20 nt, Human
uguuuccagcagaagacaaa

SEQ ID NO: 2915454 - RNA, 21 nt, Human
uguuuccagcagaagacaaaa

SEQ ID NO: 2915455 - RNA, 18 nt, Human
uguuuccaaccuggagua

SEQ ID NO: 2915456 - RNA, 22 nt, Human
uguuucauguuuugugacuaua

SEQ ID NO: 2915457 - RNA, 19 nt, Human
uguuucauguuuugugacu

SEQ ID NO: 2915458 - RNA, 21 nt, Human
uguuucauguuuugugacuau

SEQ ID NO: 2915459 - RNA, 13 nt, Human
uguuucauguuuu

SEQ ID NO: 2915460 - RNA, 14 nt, Human
uguuucauguuuug

SEQ ID NO: 2915461 - RNA, 18 nt, Human
uguuugggggacguuucu

SEQ ID NO: 2915462 - RNA, 19 nt, Human
uguuugggggacguuucuc

SEQ ID NO: 2915463 - RNA, 20 nt, Human
uguuugggggacguuucuca

SEQ ID NO: 2915464 - RNA, 21 nt, Human
uguuugggggacguuucucau

SEQ ID NO: 2915465 - RNA, 24 nt, Human
uguuugggggacguuucucauuug

SEQ ID NO: 2915466 - RNA, 19 nt, Human
uguuuggggaugagaaagg

SEQ ID NO: 2915467 - RNA, 11 nt, Human
uguuuccuuuu

SEQ ID NO: 2915468 - RNA, 19 nt, Human
uuaauauauguauuauuua

SEQ ID NO: 2915469 - RNA, 18 nt, Human
uuaauauauuugaaaaaa

SEQ ID NO: 2915470 - RNA, 20 nt, Human
uuaauauaucccagaaauua

SEQ ID NO: 2915471 - RNA, 19 nt, Human
uuaauauaucccagaaauu

SEQ ID NO: 2915472 - RNA, 21 nt, Human
uuaaugauaaguaaaugcuag

SEQ ID NO: 2915473 - RNA, 17 nt, Human
uuaaugauaaguaaaug

SEQ ID NO: 2915474 - RNA, 15 nt, Human
uuaauauauguauua

SEQ ID NO: 2915475 - RNA, 21 nt, Human
uuaauauuaccuaaugaaagu

SEQ ID NO: 2915476 - RNA, 16 nt, Human
uuaauauuauuacugu

SEQ ID NO: 2915477 - RNA, 15 nt, Human
uuaauauucuauuaa

SEQ ID NO: 2915478 - RNA, 21 nt, Human
uuaagccucauauuuaaagac

SEQ ID NO: 2915479 - RNA, 16 nt, Human
uuaagccuuuggaaac

SEQ ID NO: 2915480 - RNA, 15 nt, Human
uuaagccuuuggaaa

SEQ ID NO: 2915481 - RNA, 22 nt, Human
uuaagcagcuaaauuuucugaa

SEQ ID NO: 2915482 - RNA, 22 nt, Human
uuaagccucauauuuaaagaca

SEQ ID NO: 2915483 - RNA, 17 nt, Human
uuaauguauuuguucau

SEQ ID NO: 2915484 - RNA, 21 nt, Human
uuaauguauuuguucauguuu

SEQ ID NO: 2915485 - RNA, 23 nt, Human
uuaauguauuuguucauguuugg

SEQ ID NO: 2915486 - RNA, 22 nt, Human
uuaauguguugggaaaaaggcc

SEQ ID NO: 2915487 - RNA, 19 nt, Human
uuaaugugaacuuguagcu

SEQ ID NO: 2915488 - RNA, 23 nt, Human
uuaaugugaccuagcaauaggca

SEQ ID NO: 2915489 - RNA, 11 nt, Human
uuaaugugagu

SEQ ID NO: 2915490 - RNA, 13 nt, Human
uuaaugugaguuu

SEQ ID NO: 2915491 - RNA, 13 nt, Human
uuaaugugaugau

SEQ ID NO: 2915492 - RNA, 20 nt, Human
uuaaugugaugauguaauug

SEQ ID NO: 2915493 - RNA, 22 nt, Human
uuaaugcaguugcuuacuaaag

SEQ ID NO: 2915494 - RNA, 19 nt, Human
uuaaugccauuaucccuga

SEQ ID NO: 2915495 - RNA, 20 nt, Human
uuaaugcauguuaggaaaau

SEQ ID NO: 2915496 - RNA, 18 nt, Human
uuaaugcauuaaaccugu

SEQ ID NO: 2915497 - RNA, 19 nt, Human
uuaaugcauuaaaccuguc

SEQ ID NO: 2915498 - RNA, 20 nt, Human
uuaaugcauuaaaccugucu

SEQ ID NO: 2915499 - RNA, 22 nt, Human
uuaaugcauuaaaccugucucc

SEQ ID NO: 2915500 - RNA, 23 nt, Human
uuaaugcauuaaaccugucucca

SEQ ID NO: 2915501 - RNA, 15 nt, Human
uuaauggucuaaaaa

SEQ ID NO: 2915502 - RNA, 22 nt, Human
uuaauggucuaaaaauaaacca

SEQ ID NO: 2915503 - RNA, 18 nt, Human
uuaauguaaucugauggc

SEQ ID NO: 2915504 - RNA, 20 nt, Human
uuacaagcgugagccacugc

SEQ ID NO: 2915505 - RNA, 17 nt, Human
uuacaagcccccccuuc

SEQ ID NO: 2915506 - RNA, 14 nt, Human
uuaauuaaaaacua

SEQ ID NO: 2915507 - RNA, 19 nt, Human
uuaauuaaaaacuaguagu

SEQ ID NO: 2915508 - RNA, 20 nt, Human
uuaauuaaaaacuaguaguu

SEQ ID NO: 2915509 - RNA, 19 nt, Human
uuacaagcccccccuucca

SEQ ID NO: 2915510 - RNA, 20 nt, Human
uuacaagcccccccuuccac

SEQ ID NO: 2915511 - RNA, 10 nt, Human
uuaauguuuu

SEQ ID NO: 2915512 - RNA, 16 nt, Human
uuaauguuuuaaaugu

SEQ ID NO: 2915513 - RNA, 18 nt, Human
uuaauguuuuaaauguac

SEQ ID NO: 2915514 - RNA, 23 nt, Human
uuaauguuuuaaauguacagaca

SEQ ID NO: 2915515 - RNA, 16 nt, Human
uuaaugugguugaaga

SEQ ID NO: 2915516 - RNA, 14 nt, Human
uuaauguguaaaga

SEQ ID NO: 2915517 - RNA, 13 nt, Human
uuaauguucugug

SEQ ID NO: 2915518 - RNA, 14 nt, Human
uuaauguucuguga

SEQ ID NO: 2915519 - RNA, 21 nt, Human
uuacaagcgugagccacugca

SEQ ID NO: 2915520 - RNA, 21 nt, Human
uuacaagaaguuuauucucau

SEQ ID NO: 2915521 - RNA, 17 nt, Human
uuacaaguauacuuaua

SEQ ID NO: 2915522 - RNA, 19 nt, Human
uuacaauuuguucauccua

SEQ ID NO: 2915523 - RNA, 20 nt, Human
uuaacgugggauucagagaa

SEQ ID NO: 2915524 - RNA, 13 nt, Human
uuaacuacauuua

SEQ ID NO: 2915525 - RNA, 14 nt, Human
uuaacuacauuuau

SEQ ID NO: 2915526 - RNA, 16 nt, Human
uuaacuacauuuauga

SEQ ID NO: 2915527 - RNA, 16 nt, Human
uuaacuacccuuaauu

SEQ ID NO: 2915528 - RNA, 20 nt, Human
uuaacuacccuuaauuacuu

SEQ ID NO: 2915529 - RNA, 21 nt, Human
uuaacuacccuuaauuacuua

SEQ ID NO: 2915530 - RNA, 18 nt, Human
uuaacuacuauauugauu

SEQ ID NO: 2915531 - RNA, 19 nt, Human
uuaacuacuauauugauug

SEQ ID NO: 2915532 - RNA, 20 nt, Human
uuaacuacuauauugauugu

SEQ ID NO: 2915533 - RNA, 13 nt, Human
uuaaccugaugca

SEQ ID NO: 2915534 - RNA, 17 nt, Human
uuaaccccauguccuca

SEQ ID NO: 2915535 - RNA, 20 nt, Human
uuaaccgaugcuuuaccaaa

SEQ ID NO: 2915536 - RNA, 17 nt, Human
uuaaccaaacaauuauu

SEQ ID NO: 2915537 - RNA, 21 nt, Human
uuaaccaaacaauuauuuaaa

SEQ ID NO: 2915538 - RNA, 14 nt, Human
uuaaccauuuaagu

SEQ ID NO: 2915539 - RNA, 13 nt, Human
uuaacccaaggag

SEQ ID NO: 2915540 - RNA, 18 nt, Human
uuaacccaaggagcacag

SEQ ID NO: 2915541 - RNA, 16 nt, Human
uuaaccaguuguggug

SEQ ID NO: 2915542 - RNA, 12 nt, Human
uuaacauuugcc

SEQ ID NO: 2915543 - RNA, 13 nt, Human
uuaacauuugccu

SEQ ID NO: 2915544 - RNA, 23 nt, Human
uuaacauuugccuugcagaacug

SEQ ID NO: 2915545 - RNA, 14 nt, Human
uuaacauuuuguuc

SEQ ID NO: 2915546 - RNA, 16 nt, Human
uuaacauuuuguucuu

SEQ ID NO: 2915547 - RNA, 17 nt, Human
uuaacauuuuguucuua

SEQ ID NO: 2915548 - RNA, 22 nt, Human
uuaacauuuuguucuuacacau

SEQ ID NO: 2915549 - RNA, 11 nt, Human
uuaaauguuug

SEQ ID NO: 2915550 - RNA, 12 nt, Human
uuaaauguuuga

SEQ ID NO: 2915551 - RNA, 17 nt, Human
uuaaauguuuuauaagu

SEQ ID NO: 2915552 - RNA, 22 nt, Human
uuaaauguuuuauaaguucaca

SEQ ID NO: 2915553 - RNA, 12 nt, Human
uuaaagacagag

SEQ ID NO: 2915554 - RNA, 11 nt, Human
uuaaagacaga

SEQ ID NO: 2915555 - RNA, 17 nt, Human
uuaacuuauuuagagau

SEQ ID NO: 2915556 - RNA, 21 nt, Human
uuaagcagauggaaugcugug

SEQ ID NO: 2915557 - RNA, 20 nt, Human
uuaacuggugcacuuuguaa

SEQ ID NO: 2915558 - RNA, 21 nt, Human
uuaacuggugcacuuuguaaa

SEQ ID NO: 2915559 - RNA, 22 nt, Human
uuaacuggugcacuuuguaaau

SEQ ID NO: 2915560 - RNA, 23 nt, Human
uuaacuggugcacuuuguaaauu

SEQ ID NO: 2915561 - RNA, 22 nt, Human
uuaacuuaaauuuuaauuuauu

SEQ ID NO: 2915562 - RNA, 13 nt, Human
uuaacucuacugu

SEQ ID NO: 2915563 - RNA, 17 nt, Human
uuaacucuacuguguaa

SEQ ID NO: 2915564 - RNA, 16 nt, Human
uuaacugaacaauggc

SEQ ID NO: 2915565 - RNA, 21 nt, Human
uuaacugaacaauggcccugu

SEQ ID NO: 2915566 - RNA, 19 nt, Human
uuaacugaagauguugaga

SEQ ID NO: 2915567 - RNA, 21 nt, Human
uuaacugaagauguugagaaa

SEQ ID NO: 2915568 - RNA, 22 nt, Human
uuaacuauugcauuuauaugua

SEQ ID NO: 2915569 - RNA, 21 nt, Human
uuaacuauugcauuuauaugu

SEQ ID NO: 2915570 - RNA, 14 nt, Human
uuaacuauugcauu

SEQ ID NO: 2915571 - RNA, 17 nt, Human
uuaacuagacacagaua

SEQ ID NO: 2915572 - RNA, 15 nt, Human
uuaacuauaaauaug

SEQ ID NO: 2915573 - RNA, 21 nt, Human
uuaggaguucgagaccagccu

SEQ ID NO: 2915574 - RNA, 22 nt, Human
uuaggagugggugacaagagcc

SEQ ID NO: 2915575 - RNA, 15 nt, Human
uuaggagcuaaggcu

SEQ ID NO: 2915576 - RNA, 17 nt, Human
uuaggagcuaaggcucu

SEQ ID NO: 2915577 - RNA, 17 nt, Human
uuaggaggcucaacaau

SEQ ID NO: 2915578 - RNA, 18 nt, Human
uuaggaggcucaacaaua

SEQ ID NO: 2915579 - RNA, 19 nt, Human
uuaggaugcucaguugcua

SEQ ID NO: 2915580 - RNA, 17 nt, Human
uuaggaugguaaaguua

SEQ ID NO: 2915581 - RNA, 16 nt, Human
uuaggagcuaaggcuc

SEQ ID NO: 2915582 - RNA, 20 nt, Human
uuaggcaaggcuaugugauu

SEQ ID NO: 2915583 - RNA, 22 nt, Human
uuaggaaguugacuuauaguac

SEQ ID NO: 2915584 - RNA, 23 nt, Human
uuaggaaguugacuuauaguaca

SEQ ID NO: 2915585 - RNA, 17 nt, Human
uuaggaaguuuucugua

SEQ ID NO: 2915586 - RNA, 14 nt, Human
uuaggaaugagaag

SEQ ID NO: 2915587 - RNA, 15 nt, Human
uuaggaaugagaagu

SEQ ID NO: 2915588 - RNA, 19 nt, Human
uuaggaauuaaguuaucuu

SEQ ID NO: 2915589 - RNA, 23 nt, Human
uuaggaauuaaguuaucuuuaaa

SEQ ID NO: 2915590 - RNA, 17 nt, Human
uuaggcugcugggaugg

SEQ ID NO: 2915591 - RNA, 14 nt, Human
uuaggcuuucagcu

SEQ ID NO: 2915592 - RNA, 17 nt, Human
uuaguagagacaggguu

SEQ ID NO: 2915593 - RNA, 16 nt, Human
uuaggccuuccucucu

SEQ ID NO: 2915594 - RNA, 14 nt, Human
uuaggccuaccuga

SEQ ID NO: 2915595 - RNA, 16 nt, Human
uuaggccacaugggag

SEQ ID NO: 2915596 - RNA, 22 nt, Human
uuaggccaaaaaaauguaagau

SEQ ID NO: 2915597 - RNA, 13 nt, Human
uuaguuaauauau

SEQ ID NO: 2915598 - RNA, 13 nt, Human
uuaguuaauggau

SEQ ID NO: 2915599 - RNA, 14 nt, Human
uuaguuaauggauu

SEQ ID NO: 2915600 - RNA, 17 nt, Human
uuaguguuuuaagaaau

SEQ ID NO: 2915601 - RNA, 14 nt, Human
uuaguuaaguuuua

SEQ ID NO: 2915602 - RNA, 16 nt, Human
uuaguuauagaugucu

SEQ ID NO: 2915603 - RNA, 13 nt, Human
uuaguuauaguuu

SEQ ID NO: 2915604 - RNA, 15 nt, Human
uuaguuauaguuuca

SEQ ID NO: 2915605 - RNA, 18 nt, Human
uuaguuauaguuucagau

SEQ ID NO: 2915606 - RNA, 22 nt, Human
uuaguuauaguuucagauauau

SEQ ID NO: 2915607 - RNA, 18 nt, Human
uuagucucuaaagaguuu

SEQ ID NO: 2915608 - RNA, 14 nt, Human
uuagucucuuuauu

SEQ ID NO: 2915609 - RNA, 22 nt, Human
uuagucucaguuugugugucuu

SEQ ID NO: 2915610 - RNA, 23 nt, Human
uuagucucaguuugugugucuua

SEQ ID NO: 2915611 - RNA, 12 nt, Human
uuagucucaguu

SEQ ID NO: 2915612 - RNA, 21 nt, Human
uuagucucaguuugugugucu

SEQ ID NO: 2915613 - RNA, 19 nt, Human
uuaguaugacgcugauaca

SEQ ID NO: 2915614 - RNA, 22 nt, Human
uuaguaugacgcugauacauaa

SEQ ID NO: 2915615 - RNA, 15 nt, Human
uuaguaucaguguuu

SEQ ID NO: 2915616 - RNA, 19 nt, Human
uuaguaucaguguuuuaaa

SEQ ID NO: 2915617 - RNA, 14 nt, Human
uuaguauucauucu

SEQ ID NO: 2915618 - RNA, 15 nt, Human
uuaguauucauucug

SEQ ID NO: 2915619 - RNA, 17 nt, Human
uuaguauucauucugca

SEQ ID NO: 2915620 - RNA, 19 nt, Human
uuaguauuuauuuauguac

SEQ ID NO: 2915621 - RNA, 20 nt, Human
uuaguauuuauuuauguacu

SEQ ID NO: 2915622 - RNA, 22 nt, Human
uuagucccccaacucugagccc

SEQ ID NO: 2915623 - RNA, 21 nt, Human
uuagcuaaacggauuccaaag

SEQ ID NO: 2915624 - RNA, 12 nt, Human
uuagcuaaagga

SEQ ID NO: 2915625 - RNA, 14 nt, Human
uuagcuaggauuug

SEQ ID NO: 2915626 - RNA, 18 nt, Human
uuagcuaggauuugaaca

SEQ ID NO: 2915627 - RNA, 14 nt, Human
uuagauauaacacu

SEQ ID NO: 2915628 - RNA, 17 nt, Human
uuagauauaacacuaug

SEQ ID NO: 2915629 - RNA, 24 nt, Human
uuagauaacgcuuaaaggaaguca

SEQ ID NO: 2915630 - RNA, 17 nt, Human
uuagauagcugcaugug

SEQ ID NO: 2915631 - RNA, 20 nt, Human
uuagagcaguuucuguccug

SEQ ID NO: 2915632 - RNA, 18 nt, Human
uuagagggaggagaauga

SEQ ID NO: 2915633 - RNA, 21 nt, Human
uuagagcugacacaaaccugc

SEQ ID NO: 2915634 - RNA, 21 nt, Human
uuagagcuuccgagaauagcu

SEQ ID NO: 2915635 - RNA, 13 nt, Human
uuagaguuucugu

SEQ ID NO: 2915636 - RNA, 15 nt, Human
uuagaguuucuguuu

SEQ ID NO: 2915637 - RNA, 16 nt, Human
uuagaguuucuguuug

SEQ ID NO: 2915638 - RNA, 17 nt, Human
uuagaguuucuguuuga

SEQ ID NO: 2915639 - RNA, 18 nt, Human
uuagaguuucuguuugau

SEQ ID NO: 2915640 - RNA, 14 nt, Human
uuagagucagccuu

SEQ ID NO: 2915641 - RNA, 15 nt, Human
uuagaguaagaaauu

SEQ ID NO: 2915642 - RNA, 19 nt, Human
uuagaguaagaaauuucag

SEQ ID NO: 2915643 - RNA, 16 nt, Human
uuagcuggcauuacag

SEQ ID NO: 2915644 - RNA, 12 nt, Human
uuagcugggaga

SEQ ID NO: 2915645 - RNA, 15 nt, Human
uuagcugucugcuca

SEQ ID NO: 2915646 - RNA, 17 nt, Human
uuagcugucugcucaga

SEQ ID NO: 2915647 - RNA, 16 nt, Human
uuagcucccucccgca

SEQ ID NO: 2915648 - RNA, 15 nt, Human
uuagcucuauugaua

SEQ ID NO: 2915649 - RNA, 23 nt, Human
uuagcugaugaacuuauucugua

SEQ ID NO: 2915650 - RNA, 17 nt, Human
uuagcuugcaccuuguc

SEQ ID NO: 2915651 - RNA, 15 nt, Human
uuagcuuggggccag

SEQ ID NO: 2915652 - RNA, 20 nt, Human
uuagcuuggggccagggaag

SEQ ID NO: 2915653 - RNA, 12 nt, Human
uuagcuuccuua

SEQ ID NO: 2915654 - RNA, 13 nt, Human
uuagcuuccuuaa

SEQ ID NO: 2915655 - RNA, 15 nt, Human
uuagcuuugcucugc

SEQ ID NO: 2915656 - RNA, 19 nt, Human
uuaggaaauaaaaccuuuc

SEQ ID NO: 2915657 - RNA, 18 nt, Human
uuaggaaauaaaaccuuu

SEQ ID NO: 2915658 - RNA, 17 nt, Human
uuaggaaauaaaaccuu

SEQ ID NO: 2915659 - RNA, 15 nt, Human
uuaggaaauaaaacc

SEQ ID NO: 2915660 - RNA, 21 nt, Human
uuaggaaauaaaaccuuucaa

SEQ ID NO: 2915661 - RNA, 20 nt, Human
uuaggaaauaaaaccuuuca

SEQ ID NO: 2915662 - RNA, 17 nt, Human
uuaggaacuucagagau

SEQ ID NO: 2915663 - RNA, 12 nt, Human
uuaggaaauaaa

SEQ ID NO: 2915664 - RNA, 11 nt, Human
uuaggaaauaa

SEQ ID NO: 2915665 - RNA, 18 nt, Human
uuagcuuuuuaauuguug

SEQ ID NO: 2915666 - RNA, 17 nt, Human
uuagcuuuuucaucccc

SEQ ID NO: 2915667 - RNA, 18 nt, Human
uuagcuuuuucauccccu

SEQ ID NO: 2915668 - RNA, 18 nt, Human
uuaggaaaaucacuuugu

SEQ ID NO: 2915669 - RNA, 21 nt, Human
uuaggaaaaucacuuugucua

SEQ ID NO: 2915670 - RNA, 18 nt, Human
uuaggaaaggaugaucaa

SEQ ID NO: 2915671 - RNA, 19 nt, Human
uuagcuuugcucugccaac

SEQ ID NO: 2915672 - RNA, 16 nt, Human
uuagcuuuuuaauugu

SEQ ID NO: 2915673 - RNA, 17 nt, Human
uuagcuuuuuaauuguu

SEQ ID NO: 2915674 - RNA, 12 nt, Human
uuagcuuugugu

SEQ ID NO: 2915675 - RNA, 13 nt, Human
uuagcuuuguguu

SEQ ID NO: 2915676 - RNA, 20 nt, Human
uuagcuuuguguuugguuua

SEQ ID NO: 2915677 - RNA, 22 nt, Human
uuagcuuuguguuugguuuaca

SEQ ID NO: 2915678 - RNA, 18 nt, Human
uuagcuuuuuaaaacauu

SEQ ID NO: 2915679 - RNA, 20 nt, Human
uuagcuuuuuaaaacauuag

SEQ ID NO: 2915680 - RNA, 17 nt, Human
uuagaaaaauuccuaag

SEQ ID NO: 2915681 - RNA, 15 nt, Human
uuagaaaacaaaauu

SEQ ID NO: 2915682 - RNA, 14 nt, Human
uuacuuuguguuca

SEQ ID NO: 2915683 - RNA, 17 nt, Human
uuacuuuuaaacaguga

SEQ ID NO: 2915684 - RNA, 21 nt, Human
uuacuuuuauuugcaacauuu

SEQ ID NO: 2915685 - RNA, 23 nt, Human
uuacuuuuauuugcaacauuuac

SEQ ID NO: 2915686 - RNA, 22 nt, Human
uuacuuuuuuuuuuuuuuggua

SEQ ID NO: 2915687 - RNA, 23 nt, Human
uuacuuuuuuuuuuuuuugguag

SEQ ID NO: 2915688 - RNA, 15 nt, Human
uuagaaaaaaauuac

SEQ ID NO: 2915689 - RNA, 16 nt, Human
uuagaaaaaaauuacu

SEQ ID NO: 2915690 - RNA, 23 nt, Human
uuagaaaaaaguuuacaacauaa

SEQ ID NO: 2915691 - RNA, 18 nt, Human
uuacuuuaaaaggagcca

SEQ ID NO: 2915692 - RNA, 17 nt, Human
uuacuuuaaaaggagcc

SEQ ID NO: 2915693 - RNA, 14 nt, Human
uuacuucuugcccu

SEQ ID NO: 2915694 - RNA, 13 nt, Human
uuacuuucuuaau

SEQ ID NO: 2915695 - RNA, 15 nt, Human
uuacuuucuuaaugu

SEQ ID NO: 2915696 - RNA, 21 nt, Human
uuacuuuccuuuccccagccc

SEQ ID NO: 2915697 - RNA, 23 nt, Human
uuacuguuuugaaaucaaugcaa

SEQ ID NO: 2915698 - RNA, 16 nt, Human
uuacuuuaaacuuguc

SEQ ID NO: 2915699 - RNA, 15 nt, Human
uuacuuuaucacuuu

SEQ ID NO: 2915700 - RNA, 16 nt, Human
uuacuuuaucacuuuu

SEQ ID NO: 2915701 - RNA, 15 nt, Human
uuacuuuauguuugu

SEQ ID NO: 2915702 - RNA, 11 nt, Human
uuacuuucccu

SEQ ID NO: 2915703 - RNA, 17 nt, Human
uuacuuucccuugcuuu

SEQ ID NO: 2915704 - RNA, 23 nt, Human
uuacuuucccuugcuuuucccuc

SEQ ID NO: 2915705 - RNA, 14 nt, Human
uuagagaacugaaa

SEQ ID NO: 2915706 - RNA, 19 nt, Human
uuagagaacugaaaagaga

SEQ ID NO: 2915707 - RNA, 21 nt, Human
uuagagaacugaaaagagagc

SEQ ID NO: 2915708 - RNA, 19 nt, Human
uuagagagggaccaugugu

SEQ ID NO: 2915709 - RNA, 12 nt, Human
uuagagaaaaua

SEQ ID NO: 2915710 - RNA, 21 nt, Human
uuagacucaucaaucaaauaa

SEQ ID NO: 2915711 - RNA, 18 nt, Human
uuagacuacauuuagaga

SEQ ID NO: 2915712 - RNA, 14 nt, Human
uuagacuacauuua

SEQ ID NO: 2915713 - RNA, 19 nt, Human
uuagacucaucuuacugua

SEQ ID NO: 2915714 - RNA, 21 nt, Human
uuagacucaugguguguuaca

SEQ ID NO: 2915715 - RNA, 22 nt, Human
uuagacucaugguguguuacac

SEQ ID NO: 2915716 - RNA, 13 nt, Human
uuagacuccuccu

SEQ ID NO: 2915717 - RNA, 15 nt, Human
uuagacuuacuauua

SEQ ID NO: 2915718 - RNA, 14 nt, Human
uuagacuguagccu

SEQ ID NO: 2915719 - RNA, 20 nt, Human
uuagacuguagccuggauau

SEQ ID NO: 2915720 - RNA, 17 nt, Human
uuagaccccauacaagu

SEQ ID NO: 2915721 - RNA, 12 nt, Human
uuagaccaagga

SEQ ID NO: 2915722 - RNA, 13 nt, Human
uuagaccaaggaa

SEQ ID NO: 2915723 - RNA, 15 nt, Human
uuagaccgcucucuu

SEQ ID NO: 2915724 - RNA, 16 nt, Human
uuagaccgcucucuuu

SEQ ID NO: 2915725 - RNA, 18 nt, Human
uuagaccgcucucuuuuc

SEQ ID NO: 2915726 - RNA, 22 nt, Human
uuagaccgcucucuuuucugua

SEQ ID NO: 2915727 - RNA, 13 nt, Human
uuagacauaacaa

SEQ ID NO: 2915728 - RNA, 12 nt, Human
uuagaaaaugug

SEQ ID NO: 2915729 - RNA, 13 nt, Human
uuagaaaaugugu

SEQ ID NO: 2915730 - RNA, 13 nt, Human
uuacuaugccugu

SEQ ID NO: 2915731 - RNA, 21 nt, Human
uuacuaucaugucaaacguga

SEQ ID NO: 2915732 - RNA, 19 nt, Human
uuacuaucaugucaaacgu

SEQ ID NO: 2915733 - RNA, 13 nt, Human
uuacuaccuuauc

SEQ ID NO: 2915734 - RNA, 21 nt, Human
uuacuacuucucucuguauuu

SEQ ID NO: 2915735 - RNA, 20 nt, Human
uuacuagcaccugccaggga

SEQ ID NO: 2915736 - RNA, 15 nt, Human
uuacuagcuuuucaa

SEQ ID NO: 2915737 - RNA, 14 nt, Human
uuacuacaguuuuu

SEQ ID NO: 2915738 - RNA, 15 nt, Human
uuacuacaguuuuua

SEQ ID NO: 2915739 - RNA, 22 nt, Human
uuacuacaguuuuuaacucuac

SEQ ID NO: 2915740 - RNA, 16 nt, Human
uuacuaauguaaaaug

SEQ ID NO: 2915741 - RNA, 21 nt, Human
uuacuaagccacaagaaauuu

SEQ ID NO: 2915742 - RNA, 22 nt, Human
uuacuaagccacaagaaauuug

SEQ ID NO: 2915743 - RNA, 21 nt, Human
uuacuaagcauagcaaacaga

SEQ ID NO: 2915744 - RNA, 17 nt, Human
uuacuaagccacaagaa

SEQ ID NO: 2915745 - RNA, 18 nt, Human
uuacuaagccacaagaaa

SEQ ID NO: 2915746 - RNA, 20 nt, Human
uuacuaagccacaagaaauu

SEQ ID NO: 2915747 - RNA, 18 nt, Human
uuacacaaugguuuuuaa

SEQ ID NO: 2915748 - RNA, 20 nt, Human
uuacacaaugguuuuuaaau

SEQ ID NO: 2915749 - RNA, 22 nt, Human
uuacacaaugguuuuuaaauuu

SEQ ID NO: 2915750 - RNA, 22 nt, Human
uuacuaaagaaaauaucugaaa

SEQ ID NO: 2915751 - RNA, 20 nt, Human
uuacacaaaggggaucauaa

SEQ ID NO: 2915752 - RNA, 23 nt, Human
uuacuaaagaaaauaucugaaau

SEQ ID NO: 2915753 - RNA, 16 nt, Human
uuacuguggaggaagg

SEQ ID NO: 2915754 - RNA, 17 nt, Human
uuacuguggaggaagga

SEQ ID NO: 2915755 - RNA, 18 nt, Human
uuacuguggaggaaggau

SEQ ID NO: 2915756 - RNA, 20 nt, Human
uuacuguggaggaaggauug

SEQ ID NO: 2915757 - RNA, 14 nt, Human
uuacugugaaacug

SEQ ID NO: 2915758 - RNA, 21 nt, Human
uuacugugcauugggauuuua

SEQ ID NO: 2915759 - RNA, 14 nt, Human
uuacuguggaggaa

SEQ ID NO: 2915760 - RNA, 14 nt, Human
uuacuauauauaua

SEQ ID NO: 2915761 - RNA, 22 nt, Human
uuacuauauauauaugccuuuu

SEQ ID NO: 2915762 - RNA, 18 nt, Human
uuacuaugccugugucuu

SEQ ID NO: 2915763 - RNA, 14 nt, Human
uuacuaugccugug

SEQ ID NO: 2915764 - RNA, 14 nt, Human
uuacuguguuuuau

SEQ ID NO: 2915765 - RNA, 23 nt, Human
uuacuguggaggaaggauuguaa

SEQ ID NO: 2915766 - RNA, 20 nt, Human
uuacuguguuuuauaaaaua

SEQ ID NO: 2915767 - RNA, 15 nt, Human
uuacuguuaaccauu

SEQ ID NO: 2915768 - RNA, 11 nt, Human
uuacuguucuu

SEQ ID NO: 2915769 - RNA, 12 nt, Human
uuacuguucuug

SEQ ID NO: 2915770 - RNA, 13 nt, Human
uuacuguucuugc

SEQ ID NO: 2915771 - RNA, 14 nt, Human
uuacuguucuugcu

SEQ ID NO: 2915772 - RNA, 15 nt, Human
uuacuguucuugcug

SEQ ID NO: 2915773 - RNA, 16 nt, Human
uuacuguucuugcugc

SEQ ID NO: 2915774 - RNA, 17 nt, Human
uuacuguucuugcugcu

SEQ ID NO: 2915775 - RNA, 18 nt, Human
uuacuguucuugcugcua

SEQ ID NO: 2915776 - RNA, 19 nt, Human
uuacuguucuugcugcuag

SEQ ID NO: 2915777 - RNA, 20 nt, Human
uuacuguucuugcugcuaga

SEQ ID NO: 2915778 - RNA, 21 nt, Human
uuacuguucuugcugcuagaa

SEQ ID NO: 2915779 - RNA, 22 nt, Human
uuacuguucuugcugcuagaac

SEQ ID NO: 2915780 - RNA, 14 nt, Human
uuacuguugauaau

SEQ ID NO: 2915781 - RNA, 21 nt, Human
uuacuguugauaauucuuauu

SEQ ID NO: 2915782 - RNA, 15 nt, Human
uuacuguuuauuucu

SEQ ID NO: 2915783 - RNA, 16 nt, Human
uuacuguuuauuucug

SEQ ID NO: 2915784 - RNA, 18 nt, Human
uuacuguuuauuucuguu

SEQ ID NO: 2915785 - RNA, 12 nt, Human
uuacuucugcua

SEQ ID NO: 2915786 - RNA, 11 nt, Human
uuacuucugcu

SEQ ID NO: 2915787 - RNA, 23 nt, Human
uuacuuaucauccacauuguuuu

SEQ ID NO: 2915788 - RNA, 17 nt, Human
uuacuuaucccugccca

SEQ ID NO: 2915789 - RNA, 21 nt, Human
uuacuucacuauacaaacaaa

SEQ ID NO: 2915790 - RNA, 17 nt, Human
uuacuuaucauccacau

SEQ ID NO: 2915791 - RNA, 13 nt, Human
uuacuuaaagauu

SEQ ID NO: 2915792 - RNA, 14 nt, Human
uuacuuaaagauuu

SEQ ID NO: 2915793 - RNA, 19 nt, Human
uuacuuaaagauuuaucaa

SEQ ID NO: 2915794 - RNA, 20 nt, Human
uuacuuaaagauuuaucaaa

SEQ ID NO: 2915795 - RNA, 22 nt, Human
uuacuuaaagauuuaucaaauc

SEQ ID NO: 2915796 - RNA, 13 nt, Human
uucccuucucuca

SEQ ID NO: 2915797 - RNA, 20 nt, Human
uucccuggggaaaacuugca

SEQ ID NO: 2915798 - RNA, 15 nt, Human
uucccuucccuucca

SEQ ID NO: 2915799 - RNA, 17 nt, Human
uucccuuccuccauccu

SEQ ID NO: 2915800 - RNA, 12 nt, Human
uucccuuccucu

SEQ ID NO: 2915801 - RNA, 13 nt, Human
uucccuuccucuu

SEQ ID NO: 2915802 - RNA, 17 nt, Human
uucccuuccucuucggc

SEQ ID NO: 2915803 - RNA, 19 nt, Human
uucccugcauuucugaguu

SEQ ID NO: 2915804 - RNA, 19 nt, Human
uucccugcgccugugaugc

SEQ ID NO: 2915805 - RNA, 12 nt, Human
uucccugcacua

SEQ ID NO: 2915806 - RNA, 22 nt, Human
uucccugcacuaaagccagccu

SEQ ID NO: 2915807 - RNA, 19 nt, Human
uucccugauugaccugcuc

SEQ ID NO: 2915808 - RNA, 21 nt, Human
uucccugaaacacgaaacuug

SEQ ID NO: 2915809 - RNA, 22 nt, Human
uucccugaaacacgaaacuugu

SEQ ID NO: 2915810 - RNA, 23 nt, Human
uucccugaaacacgaaacuuguu

SEQ ID NO: 2915811 - RNA, 20 nt, Human
uucccucuuuggcuccccug

SEQ ID NO: 2915812 - RNA, 13 nt, Human
uucccucuuuucu

SEQ ID NO: 2915813 - RNA, 14 nt, Human
uucccucuuuucuu

SEQ ID NO: 2915814 - RNA, 15 nt, Human
uucccucuuuucuua

SEQ ID NO: 2915815 - RNA, 17 nt, Human
uucccucuuuucuuacu

SEQ ID NO: 2915816 - RNA, 19 nt, Human
uucccucuuuucuuacucc

SEQ ID NO: 2915817 - RNA, 23 nt, Human
uucccucuuuucuuacuccuccu

SEQ ID NO: 2915818 - RNA, 13 nt, Human
uucccucugcuca

SEQ ID NO: 2915819 - RNA, 14 nt, Human
uucccucugcucag

SEQ ID NO: 2915820 - RNA, 15 nt, Human
uucccucugcucagc

SEQ ID NO: 2915821 - RNA, 17 nt, Human
uucccucugcucagcca

SEQ ID NO: 2915822 - RNA, 20 nt, Human
uucccucuuucuuauaauac

SEQ ID NO: 2915823 - RNA, 14 nt, Human
uucccucuuuggcu

SEQ ID NO: 2915824 - RNA, 16 nt, Human
uucccucuuuggcucc

SEQ ID NO: 2915825 - RNA, 15 nt, Human
uucccugaauguauu

SEQ ID NO: 2915826 - RNA, 14 nt, Human
uucccucucccugu

SEQ ID NO: 2915827 - RNA, 14 nt, Human
uucccucucaucuc

SEQ ID NO: 2915828 - RNA, 14 nt, Human
uuccuauauccugu

SEQ ID NO: 2915829 - RNA, 22 nt, Human
uuccuauauaguuuauugacaa

SEQ ID NO: 2915830 - RNA, 21 nt, Human
uuccuauauaguuuauugaca

SEQ ID NO: 2915831 - RNA, 20 nt, Human
uuccuauaacuugaugcaug

SEQ ID NO: 2915832 - RNA, 21 nt, Human
uuccuauaacuugaugcaugu

SEQ ID NO: 2915833 - RNA, 23 nt, Human
uucccuugaaauuuuaaacuaua

SEQ ID NO: 2915834 - RNA, 17 nt, Human
uucccuuuggagaugcu

SEQ ID NO: 2915835 - RNA, 14 nt, Human
uucccuuugucuuu

SEQ ID NO: 2915836 - RNA, 17 nt, Human
uucccuuugucuuucaa

SEQ ID NO: 2915837 - RNA, 19 nt, Human
uuccuauauaguuuauuga

SEQ ID NO: 2915838 - RNA, 21 nt, Human
uuccucacaccaggcuugccu

SEQ ID NO: 2915839 - RNA, 14 nt, Human
uuccucacaguccc

SEQ ID NO: 2915840 - RNA, 16 nt, Human
uuccuccagcugcacc

SEQ ID NO: 2915841 - RNA, 17 nt, Human
uuccuccagcugcacca

SEQ ID NO: 2915842 - RNA, 22 nt, Human
uuccuccagcugcaccagagca

SEQ ID NO: 2915843 - RNA, 13 nt, Human
uuccuccauccua

SEQ ID NO: 2915844 - RNA, 15 nt, Human
uuccucaaauguuga

SEQ ID NO: 2915845 - RNA, 17 nt, Human
uuccucaaauguugaca

SEQ ID NO: 2915846 - RNA, 19 nt, Human
uuccuauuuguuuucaugg

SEQ ID NO: 2915847 - RNA, 21 nt, Human
uuccuauuuguuuucauggug

SEQ ID NO: 2915848 - RNA, 15 nt, Human
uuccuauuucuuaua

SEQ ID NO: 2915849 - RNA, 18 nt, Human
uuccuauuugccaugggc

SEQ ID NO: 2915850 - RNA, 20 nt, Human
uuccuauuugccaugggcuu

SEQ ID NO: 2915851 - RNA, 22 nt, Human
uuccuauuugccaugggcuuca

SEQ ID NO: 2915852 - RNA, 23 nt, Human
uuccuauuugccaugggcuucac

SEQ ID NO: 2915853 - RNA, 24 nt, Human
uuccuugagacacggagcccagcc

SEQ ID NO: 2915854 - RNA, 15 nt, Human
uuccuuggcuggugc

SEQ ID NO: 2915855 - RNA, 13 nt, Human
uuccuuggcuggu

SEQ ID NO: 2915856 - RNA, 16 nt, Human
uucggcucuggguggg

SEQ ID NO: 2915857 - RNA, 18 nt, Human
uucggcucugggugggca

SEQ ID NO: 2915858 - RNA, 18 nt, Human
uucgggcgucugugugcg

SEQ ID NO: 2915859 - RNA, 15 nt, Human
uucuaaagauggaaa

SEQ ID NO: 2915860 - RNA, 13 nt, Human
uucuaaaagaaua

SEQ ID NO: 2915861 - RNA, 14 nt, Human
uucuaaaagaauau

SEQ ID NO: 2915862 - RNA, 13 nt, Human
uucuaaagaugga

SEQ ID NO: 2915863 - RNA, 12 nt, Human
uucuaaagauuc

SEQ ID NO: 2915864 - RNA, 13 nt, Human
uucuaaagauucu

SEQ ID NO: 2915865 - RNA, 14 nt, Human
uucuaaagauucua

SEQ ID NO: 2915866 - RNA, 23 nt, Human
uucuaaagauucuauaguucuag

SEQ ID NO: 2915867 - RNA, 16 nt, Human
uucuaaagauucuaua

SEQ ID NO: 2915868 - RNA, 22 nt, Human
uucuaaagauucuauaguucua

SEQ ID NO: 2915869 - RNA, 14 nt, Human
uucuaaaaagauua

SEQ ID NO: 2915870 - RNA, 17 nt, Human
uucuaaaaagauuagca

SEQ ID NO: 2915871 - RNA, 13 nt, Human
uucuaaaaaacag

SEQ ID NO: 2915872 - RNA, 14 nt, Human
uucguucuuuuuaa

SEQ ID NO: 2915873 - RNA, 14 nt, Human
uucguuucuguaua

SEQ ID NO: 2915874 - RNA, 16 nt, Human
uucguuucuguauaca

SEQ ID NO: 2915875 - RNA, 20 nt, Human
uuccugauaugauuuaaaac

SEQ ID NO: 2915876 - RNA, 21 nt, Human
uuccuccccauuagagucagc

SEQ ID NO: 2915877 - RNA, 15 nt, Human
uuccugcauuuguga

SEQ ID NO: 2915878 - RNA, 16 nt, Human
uuccugcauuugugaa

SEQ ID NO: 2915879 - RNA, 18 nt, Human
uuccugcauuugugaaau

SEQ ID NO: 2915880 - RNA, 13 nt, Human
uuccuggaugucu

SEQ ID NO: 2915881 - RNA, 15 nt, Human
uuccuggaugucuga

SEQ ID NO: 2915882 - RNA, 19 nt, Human
uuccuggacacucagaccu

SEQ ID NO: 2915883 - RNA, 22 nt, Human
uuccuugagacacggagcccag

SEQ ID NO: 2915884 - RNA, 17 nt, Human
uuccuugagaaaaacaa

SEQ ID NO: 2915885 - RNA, 15 nt, Human
uuccuugaccuuccu

SEQ ID NO: 2915886 - RNA, 18 nt, Human
uuccuugaccuuccucug

SEQ ID NO: 2915887 - RNA, 19 nt, Human
uuccuugaccuuccucugg

SEQ ID NO: 2915888 - RNA, 12 nt, Human
uuccuucuuuga

SEQ ID NO: 2915889 - RNA, 13 nt, Human
uuccuucuuugau

SEQ ID NO: 2915890 - RNA, 14 nt, Human
uuccuucuuugaua

SEQ ID NO: 2915891 - RNA, 19 nt, Human
uuccuucuuugauaauguu

SEQ ID NO: 2915892 - RNA, 22 nt, Human
uuccuucuuugauaauguuaaa

SEQ ID NO: 2915893 - RNA, 21 nt, Human
uuccagagaguggcuccuccc

SEQ ID NO: 2915894 - RNA, 17 nt, Human
uuccagagaguggcucc

SEQ ID NO: 2915895 - RNA, 18 nt, Human
uuccagagaguggcuccu

SEQ ID NO: 2915896 - RNA, 19 nt, Human
uuccagagaguggcuccuc

SEQ ID NO: 2915897 - RNA, 20 nt, Human
uuccagagaguggcuccucc

SEQ ID NO: 2915898 - RNA, 16 nt, Human
uuccacucugauagaa

SEQ ID NO: 2915899 - RNA, 18 nt, Human
uuccacucugauagaauu

SEQ ID NO: 2915900 - RNA, 16 nt, Human
uuccacugaaguagug

SEQ ID NO: 2915901 - RNA, 17 nt, Human
uuccaaaugcaauuuga

SEQ ID NO: 2915902 - RNA, 21 nt, Human
uuccaaaauaauuuuaagaaa

SEQ ID NO: 2915903 - RNA, 13 nt, Human
uuccaaaauaauu

SEQ ID NO: 2915904 - RNA, 13 nt, Human
uuccaaaauucuu

SEQ ID NO: 2915905 - RNA, 14 nt, Human
uuccaaaauucuua

SEQ ID NO: 2915906 - RNA, 16 nt, Human
uuccaaaauucuuauu

SEQ ID NO: 2915907 - RNA, 20 nt, Human
uuccaaaauucuuauuuuuc

SEQ ID NO: 2915908 - RNA, 21 nt, Human
uuccaaacaacagaaagucau

SEQ ID NO: 2915909 - RNA, 19 nt, Human
uuccaaauaauaaagucua

SEQ ID NO: 2915910 - RNA, 21 nt, Human
uuccaaagaguagaauugcau

SEQ ID NO: 2915911 - RNA, 13 nt, Human
uuccaaagaaugu

SEQ ID NO: 2915912 - RNA, 20 nt, Human
uuccaaagaauguuagagca

SEQ ID NO: 2915913 - RNA, 21 nt, Human
uuccaaagaauguuagagcac

SEQ ID NO: 2915914 - RNA, 15 nt, Human
uuccaaagaauucuu

SEQ ID NO: 2915915 - RNA, 16 nt, Human
uuccaaagaauucuua

SEQ ID NO: 2915916 - RNA, 16 nt, Human
uucauuuccugugucu

SEQ ID NO: 2915917 - RNA, 15 nt, Human
uucauuuccuguguc

SEQ ID NO: 2915918 - RNA, 12 nt, Human
uuccaaaauaau

SEQ ID NO: 2915919 - RNA, 16 nt, Human
uucaggaacaccccca

SEQ ID NO: 2915920 - RNA, 18 nt, Human
uucauuugagaaguaaac

SEQ ID NO: 2915921 - RNA, 16 nt, Human
uucaucuuuuaaagaa

SEQ ID NO: 2915922 - RNA, 21 nt, Human
uucaucuuuugaggcuucugu

SEQ ID NO: 2915923 - RNA, 22 nt, Human
uucaucuuuugaggcuucuguu

SEQ ID NO: 2915924 - RNA, 23 nt, Human
uuccccauaacucaauggccuaa

SEQ ID NO: 2915925 - RNA, 15 nt, Human
uuccccagcccaggg

SEQ ID NO: 2915926 - RNA, 15 nt, Human
uuccccaucuggguc

SEQ ID NO: 2915927 - RNA, 19 nt, Human
uuccccaugucucgacuca

SEQ ID NO: 2915928 - RNA, 11 nt, Human
uuccccauggg

SEQ ID NO: 2915929 - RNA, 18 nt, Human
uuccccaucuucuaaacc

SEQ ID NO: 2915930 - RNA, 17 nt, Human
uuccccaucuucuaaac

SEQ ID NO: 2915931 - RNA, 21 nt, Human
uuccccccacucuccccacac

SEQ ID NO: 2915932 - RNA, 21 nt, Human
uuccccccauguuguaaugcu

SEQ ID NO: 2915933 - RNA, 19 nt, Human
uuccccccacucuccccac

SEQ ID NO: 2915934 - RNA, 18 nt, Human
uuccccccacucucccca

SEQ ID NO: 2915935 - RNA, 18 nt, Human
uucccccaccgguccagc

SEQ ID NO: 2915936 - RNA, 22 nt, Human
uucccccaccgguccagcuggc

SEQ ID NO: 2915937 - RNA, 23 nt, Human
uucccccaccgguccagcuggcc

SEQ ID NO: 2915938 - RNA, 14 nt, Human
uucccccacuaccg

SEQ ID NO: 2915939 - RNA, 18 nt, Human
uuccccauuccuacccac

SEQ ID NO: 2915940 - RNA, 14 nt, Human
uucccccauagcca

SEQ ID NO: 2915941 - RNA, 17 nt, Human
uucccccauagccaccc

SEQ ID NO: 2915942 - RNA, 15 nt, Human
uucccccauagccac

SEQ ID NO: 2915943 - RNA, 18 nt, Human
uucccccauagccacccc

SEQ ID NO: 2915944 - RNA, 12 nt, Human
uuccccccacuc

SEQ ID NO: 2915945 - RNA, 17 nt, Human
uucccauguagcccccu

SEQ ID NO: 2915946 - RNA, 14 nt, Human
uucccauucuugca

SEQ ID NO: 2915947 - RNA, 20 nt, Human
uucccauugcaucaccucug

SEQ ID NO: 2915948 - RNA, 23 nt, Human
uucccauugcaucaccucuguaa

SEQ ID NO: 2915949 - RNA, 16 nt, Human
uucccaucuuuacucc

SEQ ID NO: 2915950 - RNA, 15 nt, Human
uucccaucgcuguca

SEQ ID NO: 2915951 - RNA, 20 nt, Human
uucccaugacccaggcuggg

SEQ ID NO: 2915952 - RNA, 18 nt, Human
uucccaugacccaggcug

SEQ ID NO: 2915953 - RNA, 19 nt, Human
uucccaugacccaggcugg

SEQ ID NO: 2915954 - RNA, 16 nt, Human
uuccauuccauuguuu

SEQ ID NO: 2915955 - RNA, 21 nt, Human
uuccauugcuuugaaaaaguu

SEQ ID NO: 2915956 - RNA, 16 nt, Human
uuccauugguccaaga

SEQ ID NO: 2915957 - RNA, 20 nt, Human
uuccauucuggauuuuguca

SEQ ID NO: 2915958 - RNA, 21 nt, Human
uucccauaccacccaaugcug

SEQ ID NO: 2915959 - RNA, 17 nt, Human
uuccauugguccaagau

SEQ ID NO: 2915960 - RNA, 19 nt, Human
uuccauugguccaagauuc

SEQ ID NO: 2915961 - RNA, 14 nt, Human
uucccaucgcuguc

SEQ ID NO: 2915962 - RNA, 14 nt, Human
uuccagaugugaug

SEQ ID NO: 2915963 - RNA, 22 nt, Human
uuccagcaauucuccugccuca

SEQ ID NO: 2915964 - RNA, 21 nt, Human
uuccagcaauucuccugccuc

SEQ ID NO: 2915965 - RNA, 20 nt, Human
uuccagcaauucuccugccu

SEQ ID NO: 2915966 - RNA, 16 nt, Human
uucaacgcagcccugc

SEQ ID NO: 2915967 - RNA, 19 nt, Human
uucaacgcagcccugcuuu

SEQ ID NO: 2915968 - RNA, 15 nt, Human
uucaacguuucuuca

SEQ ID NO: 2915969 - RNA, 18 nt, Human
uucaacguuucuucacuu

SEQ ID NO: 2915970 - RNA, 11 nt, Human
uucaacuauuu

SEQ ID NO: 2915971 - RNA, 12 nt, Human
uucaacuauuuu

SEQ ID NO: 2915972 - RNA, 17 nt, Human
uucaacuauuuuauuau

SEQ ID NO: 2915973 - RNA, 18 nt, Human
uucaacuauuuuauuauc

SEQ ID NO: 2915974 - RNA, 20 nt, Human
uucaacgcagcccugcuuug

SEQ ID NO: 2915975 - RNA, 17 nt, Human
uucaacugaccagccuc

SEQ ID NO: 2915976 - RNA, 15 nt, Human
uucaacgcagcccug

SEQ ID NO: 2915977 - RNA, 15 nt, Human
uucaaauccuuccaa

SEQ ID NO: 2915978 - RNA, 16 nt, Human
uucaaauccuuccaaa

SEQ ID NO: 2915979 - RNA, 17 nt, Human
uucaaauccuuccaaaa

SEQ ID NO: 2915980 - RNA, 23 nt, Human
uucaaauccuuccaaaaauuauu

SEQ ID NO: 2915981 - RNA, 12 nt, Human
uuauuuuaugag

SEQ ID NO: 2915982 - RNA, 14 nt, Human
uuauuuuaugagaa

SEQ ID NO: 2915983 - RNA, 16 nt, Human
uuauuuuaugagaaau

SEQ ID NO: 2915984 - RNA, 18 nt, Human
uuauuuuaugagaaaugu

SEQ ID NO: 2915985 - RNA, 19 nt, Human
uuauuuuaugagaaaugua

SEQ ID NO: 2915986 - RNA, 20 nt, Human
uuauuuuaugagaaauguaa

SEQ ID NO: 2915987 - RNA, 23 nt, Human
uuauuuuaugagaaauguaaugc

SEQ ID NO: 2915988 - RNA, 19 nt, Human
uuauuuuacacagaaacac

SEQ ID NO: 2915989 - RNA, 14 nt, Human
uuauuuuauguuua

SEQ ID NO: 2915990 - RNA, 18 nt, Human
uuauuuuauguuuagaua

SEQ ID NO: 2915991 - RNA, 22 nt, Human
uucaaagcuuuuuccagaggcu

SEQ ID NO: 2915992 - RNA, 22 nt, Human
uuauugugaaugauucauguua

SEQ ID NO: 2915993 - RNA, 21 nt, Human
uucaaagguucuagguuucaa

SEQ ID NO: 2915994 - RNA, 12 nt, Human
uucaaagguucu

SEQ ID NO: 2915995 - RNA, 16 nt, Human
uucaaagguucuaggu

SEQ ID NO: 2915996 - RNA, 12 nt, Human
uuauuuuaagac

SEQ ID NO: 2915997 - RNA, 20 nt, Human
uuauuuuaagcauugugagu

SEQ ID NO: 2915998 - RNA, 17 nt, Human
uuauuuuacacagaaac

SEQ ID NO: 2915999 - RNA, 16 nt, Human
uuauuuuacacagaaa

SEQ ID NO: 2916000 - RNA, 14 nt, Human
uuauuguauaaacu

SEQ ID NO: 2916001 - RNA, 21 nt, Human
uuauuguauaaacuaucaguu

SEQ ID NO: 2916002 - RNA, 22 nt, Human
uuauuguauaaacuaucaguuu

SEQ ID NO: 2916003 - RNA, 14 nt, Human
uuauuguggauaac

SEQ ID NO: 2916004 - RNA, 19 nt, Human
uuauuguggauaacaaaga

SEQ ID NO: 2916005 - RNA, 20 nt, Human
uuauuguggauaacaaagau

SEQ ID NO: 2916006 - RNA, 21 nt, Human
uuauuguggauaacaaagaua

SEQ ID NO: 2916007 - RNA, 23 nt, Human
uuauuguggauaacaaagauauc

SEQ ID NO: 2916008 - RNA, 20 nt, Human
uuauugugguaggccuuuua

SEQ ID NO: 2916009 - RNA, 13 nt, Human
uuauugcuuuuau

SEQ ID NO: 2916010 - RNA, 14 nt, Human
uuauugaguuugua

SEQ ID NO: 2916011 - RNA, 19 nt, Human
uuauuggccugaaaugauc

SEQ ID NO: 2916012 - RNA, 15 nt, Human
uuauugcuguugcuu

SEQ ID NO: 2916013 - RNA, 15 nt, Human
uuauugcuuaguaaa

SEQ ID NO: 2916014 - RNA, 17 nt, Human
uuauugcuuaguaaaau

SEQ ID NO: 2916015 - RNA, 17 nt, Human
uuauugcuuauugcuua

SEQ ID NO: 2916016 - RNA, 20 nt, Human
uuauugcuuauugcuuagua

SEQ ID NO: 2916017 - RNA, 15 nt, Human
uuauugcgcugcuac

SEQ ID NO: 2916018 - RNA, 14 nt, Human
uuauugcuaguauu

SEQ ID NO: 2916019 - RNA, 16 nt, Human
uuauugcuaguauuug

SEQ ID NO: 2916020 - RNA, 17 nt, Human
uuauugcuaguauuuga

SEQ ID NO: 2916021 - RNA, 18 nt, Human
uuauugcuaguauuugaa

SEQ ID NO: 2916022 - RNA, 19 nt, Human
uuauugcuaguauuugaau

SEQ ID NO: 2916023 - RNA, 20 nt, Human
uuauugcuaguauuugaauu

SEQ ID NO: 2916024 - RNA, 13 nt, Human
uuauugcugauuu

SEQ ID NO: 2916025 - RNA, 17 nt, Human
uuauugcugauuuuaau

SEQ ID NO: 2916026 - RNA, 18 nt, Human
uuauugcugauuuuaaug

SEQ ID NO: 2916027 - RNA, 19 nt, Human
uuauuguacagcuguuuaa

SEQ ID NO: 2916028 - RNA, 12 nt, Human
uuauuguaaauu

SEQ ID NO: 2916029 - RNA, 23 nt, Human
uucagagcugacacaggaugaag

SEQ ID NO: 2916030 - RNA, 15 nt, Human
uucagagaggccuuu

SEQ ID NO: 2916031 - RNA, 23 nt, Human
uucagagauuuauauaaauguaa

SEQ ID NO: 2916032 - RNA, 19 nt, Human
uucacucuccuaugccuuu

SEQ ID NO: 2916033 - RNA, 14 nt, Human
uucagaguuuucug

SEQ ID NO: 2916034 - RNA, 16 nt, Human
uucagaguuuucuggg

SEQ ID NO: 2916035 - RNA, 18 nt, Human
uucagaguuuucugggua

SEQ ID NO: 2916036 - RNA, 24 nt, Human
uucacuccggugugccugcagccc

SEQ ID NO: 2916037 - RNA, 23 nt, Human
uucacuccggugugccugcagcc

SEQ ID NO: 2916038 - RNA, 14 nt, Human
uucacucacuguca

SEQ ID NO: 2916039 - RNA, 19 nt, Human
uucacucacugucaaugau

SEQ ID NO: 2916040 - RNA, 13 nt, Human
uucacuccagccu

SEQ ID NO: 2916041 - RNA, 17 nt, Human
uucacucccccuaaacc

SEQ ID NO: 2916042 - RNA, 22 nt, Human
uucacuccggugugccugcagc

SEQ ID NO: 2916043 - RNA, 21 nt, Human
uucacuccggugugccugcag

SEQ ID NO: 2916044 - RNA, 14 nt, Human
uucacucaagcacu

SEQ ID NO: 2916045 - RNA, 15 nt, Human
uucacucaagcacug

SEQ ID NO: 2916046 - RNA, 17 nt, Human
uucacuacuuuaauaaa

SEQ ID NO: 2916047 - RNA, 13 nt, Human
uucacuagcuuug

SEQ ID NO: 2916048 - RNA, 23 nt, Human
uucacuagugaccccuucccugu

SEQ ID NO: 2916049 - RNA, 14 nt, Human
uucacuaaagcagu

SEQ ID NO: 2916050 - RNA, 13 nt, Human
uucacuaaagcag

SEQ ID NO: 2916051 - RNA, 14 nt, Human
uucacgugcagcuc

SEQ ID NO: 2916052 - RNA, 13 nt, Human
uucaccuuuguag

SEQ ID NO: 2916053 - RNA, 23 nt, Human
uucaccuucguuuacuaugccug

SEQ ID NO: 2916054 - RNA, 15 nt, Human
uucacaaacuuuuau

SEQ ID NO: 2916055 - RNA, 16 nt, Human
uucaccuccuucaauu

SEQ ID NO: 2916056 - RNA, 12 nt, Human
uucaccugagca

SEQ ID NO: 2916057 - RNA, 22 nt, Human
uucaaagggacggucaguuugg

SEQ ID NO: 2916058 - RNA, 21 nt, Human
uucaacuccucgacaucacug

SEQ ID NO: 2916059 - RNA, 15 nt, Human
uucacaaaauuucca

SEQ ID NO: 2916060 - RNA, 14 nt, Human
uucaauuuuaaaga

SEQ ID NO: 2916061 - RNA, 15 nt, Human
uucaauuuuaaagac

SEQ ID NO: 2916062 - RNA, 14 nt, Human
uuauucuacuauac

SEQ ID NO: 2916063 - RNA, 19 nt, Human
uuauucucuuuuaucuguu

SEQ ID NO: 2916064 - RNA, 17 nt, Human
uuauuccuguauguugu

SEQ ID NO: 2916065 - RNA, 19 nt, Human
uuauucuaaacagacucau

SEQ ID NO: 2916066 - RNA, 22 nt, Human
uuauuaauuguuuugcacuuuu

SEQ ID NO: 2916067 - RNA, 23 nt, Human
uuauuacagggcauucaaauggg

SEQ ID NO: 2916068 - RNA, 13 nt, Human
uuauuccuguaug

SEQ ID NO: 2916069 - RNA, 15 nt, Human
uuauuccuguauguu

SEQ ID NO: 2916070 - RNA, 19 nt, Human
uuauuccuguauguugucc

SEQ ID NO: 2916071 - RNA, 16 nt, Human
uuauuccuugaucauu

SEQ ID NO: 2916072 - RNA, 12 nt, Human
uuauuacaauuu

SEQ ID NO: 2916073 - RNA, 14 nt, Human
uuauuaaaaugauu

SEQ ID NO: 2916074 - RNA, 19 nt, Human
uuauuaaaaugauuguaaa

SEQ ID NO: 2916075 - RNA, 20 nt, Human
uuauuaaaaugauuguaaaa

SEQ ID NO: 2916076 - RNA, 21 nt, Human
uuauuaaaaugauuguaaaau

SEQ ID NO: 2916077 - RNA, 17 nt, Human
uuauggccacagcccau

SEQ ID NO: 2916078 - RNA, 11 nt, Human
uuauggccuca

SEQ ID NO: 2916079 - RNA, 18 nt, Human
uuauggccucagcugccu

SEQ ID NO: 2916080 - RNA, 15 nt, Human
uuauggccucagcug

SEQ ID NO: 2916081 - RNA, 13 nt, Human
uuauggccucagc

SEQ ID NO: 2916082 - RNA, 12 nt, Human
uuauggccucag

SEQ ID NO: 2916083 - RNA, 17 nt, Human
uuauuaaaguucuguaa

SEQ ID NO: 2916084 - RNA, 12 nt, Human
uuauuaaauaaa

SEQ ID NO: 2916085 - RNA, 15 nt, Human
uuauuaaauaaaauc

SEQ ID NO: 2916086 - RNA, 16 nt, Human
uuauuaaauaaaauca

SEQ ID NO: 2916087 - RNA, 19 nt, Human
uuauuaaauaaaaucaauu

SEQ ID NO: 2916088 - RNA, 20 nt, Human
uuauuaaauaaaaucaauuu

SEQ ID NO: 2916089 - RNA, 21 nt, Human
uuauuaaauaaaaucaauuuu

SEQ ID NO: 2916090 - RNA, 11 nt, Human
uuauucugcuc

SEQ ID NO: 2916091 - RNA, 13 nt, Human
uuauucuggaguu

SEQ ID NO: 2916092 - RNA, 20 nt, Human
uuauucuguagauucugugg

SEQ ID NO: 2916093 - RNA, 13 nt, Human
uuauucuucuaga

SEQ ID NO: 2916094 - RNA, 14 nt, Human
uuauucuucuagag

SEQ ID NO: 2916095 - RNA, 18 nt, Human
uuauucuugaaagaagaa

SEQ ID NO: 2916096 - RNA, 13 nt, Human
uuauugaagaaac

SEQ ID NO: 2916097 - RNA, 22 nt, Human
uuauugaagaaacagauaccau

SEQ ID NO: 2916098 - RNA, 22 nt, Human
uuauugaaggaagccaaauuua

SEQ ID NO: 2916099 - RNA, 23 nt, Human
uuauugaaggaagccaaauuuau

SEQ ID NO: 2916100 - RNA, 22 nt, Human
uuauugacaauaauuucagguu

SEQ ID NO: 2916101 - RNA, 14 nt, Human
uuauugacacagaa

SEQ ID NO: 2916102 - RNA, 23 nt, Human
uuauugacacagaaaauguugag

SEQ ID NO: 2916103 - RNA, 19 nt, Human
uuauugacacagaaaaugu

SEQ ID NO: 2916104 - RNA, 18 nt, Human
uuauugaaucuauuuaag

SEQ ID NO: 2916105 - RNA, 20 nt, Human
uuauugaaucuauuuaagua

SEQ ID NO: 2916106 - RNA, 18 nt, Human
uuauugacaauaauuuca

SEQ ID NO: 2916107 - RNA, 14 nt, Human
uuauugacaauaau

SEQ ID NO: 2916108 - RNA, 15 nt, Human
uuauugcccacgcug

SEQ ID NO: 2916109 - RNA, 13 nt, Human
uuauugcauuaua

SEQ ID NO: 2916110 - RNA, 15 nt, Human
uuauugcacauuguu

SEQ ID NO: 2916111 - RNA, 17 nt, Human
uuauugcacauuguuca

SEQ ID NO: 2916112 - RNA, 21 nt, Human
uuauugcaaaauagcauuugu

SEQ ID NO: 2916113 - RNA, 14 nt, Human
uuauugauauauau

SEQ ID NO: 2916114 - RNA, 23 nt, Human
uuauugagauuguccucauuucu

SEQ ID NO: 2916115 - RNA, 16 nt, Human
uuaugcuaacuguaga

SEQ ID NO: 2916116 - RNA, 15 nt, Human
uuaugcuauuaaagu

SEQ ID NO: 2916117 - RNA, 14 nt, Human
uuaugcucaggguc

SEQ ID NO: 2916118 - RNA, 20 nt, Human
uuaugcucuuuuuuacucau

SEQ ID NO: 2916119 - RNA, 21 nt, Human
uuaugcucuuuuuuacucauu

SEQ ID NO: 2916120 - RNA, 22 nt, Human
uuaugcaugaagauaauguaaa

SEQ ID NO: 2916121 - RNA, 20 nt, Human
uuaugcaauuagguuuuucc

SEQ ID NO: 2916122 - RNA, 23 nt, Human
uuaugcaauuagguuuuuccuua

SEQ ID NO: 2916123 - RNA, 19 nt, Human
uuaugcacuaaauaugaac

SEQ ID NO: 2916124 - RNA, 22 nt, Human
uuaugcacuaaauaugaacccu

SEQ ID NO: 2916125 - RNA, 16 nt, Human
uuaugcacuuauaagg

SEQ ID NO: 2916126 - RNA, 19 nt, Human
uuaugcacuuauaaggugu

SEQ ID NO: 2916127 - RNA, 18 nt, Human
uuaugcagauagaaucaa

SEQ ID NO: 2916128 - RNA, 22 nt, Human
uuaguugccuaagcauugccug

SEQ ID NO: 2916129 - RNA, 17 nt, Human
uuaucuuucgugauaaa

SEQ ID NO: 2916130 - RNA, 24 nt, Human
uuaucuuucgugauaaacuuugcu

SEQ ID NO: 2916131 - RNA, 22 nt, Human
uuaugcaaggaaggaaagaaag

SEQ ID NO: 2916132 - RNA, 18 nt, Human
uuaugcaaggaaggaaag

SEQ ID NO: 2916133 - RNA, 17 nt, Human
uuaugcaaggaaggaaa

SEQ ID NO: 2916134 - RNA, 15 nt, Human
uuaugcaaaauggaa

SEQ ID NO: 2916135 - RNA, 16 nt, Human
uuaucuuuacuuuuaa

SEQ ID NO: 2916136 - RNA, 14 nt, Human
uuaucucucugugc

SEQ ID NO: 2916137 - RNA, 12 nt, Human
uuaucucugugu

SEQ ID NO: 2916138 - RNA, 19 nt, Human
uuaucucuuuuauauuugu

SEQ ID NO: 2916139 - RNA, 20 nt, Human
uuaucucuuuuauauuugua

SEQ ID NO: 2916140 - RNA, 19 nt, Human
uuaucucuauuuaauauuu

SEQ ID NO: 2916141 - RNA, 12 nt, Human
uuaucuguccca

SEQ ID NO: 2916142 - RNA, 20 nt, Human
uuaucugggcauagaugcag

SEQ ID NO: 2916143 - RNA, 18 nt, Human
uuaucugagcugagccag

SEQ ID NO: 2916144 - RNA, 17 nt, Human
uuaguuuacaaucagcc

SEQ ID NO: 2916145 - RNA, 20 nt, Human
uuaguuuacccgguuucuuu

SEQ ID NO: 2916146 - RNA, 13 nt, Human
uuaguucccuguc

SEQ ID NO: 2916147 - RNA, 19 nt, Human
uuaguucccugucucuuga

SEQ ID NO: 2916148 - RNA, 14 nt, Human
uuuaauaaacuacu

SEQ ID NO: 2916149 - RNA, 15 nt, Human
uuuaauauaaagccu

SEQ ID NO: 2916150 - RNA, 15 nt, Human
uuuaaccaucugaua

SEQ ID NO: 2916151 - RNA, 20 nt, Human
uuuaaccauggcagggugcu

SEQ ID NO: 2916152 - RNA, 13 nt, Human
uuuaacauuugcc

SEQ ID NO: 2916153 - RNA, 21 nt, Human
uuuaacauuugccuugcagaa

SEQ ID NO: 2916154 - RNA, 22 nt, Human
uuuaacauuugccuugcagaac

SEQ ID NO: 2916155 - RNA, 11 nt, Human
uuuaacauuuu

SEQ ID NO: 2916156 - RNA, 16 nt, Human
uuuaacauuuuguucu

SEQ ID NO: 2916157 - RNA, 17 nt, Human
uuuaacauuuuguucuu

SEQ ID NO: 2916158 - RNA, 22 nt, Human
uuuaacauuuuguucuuacaca

SEQ ID NO: 2916159 - RNA, 23 nt, Human
uuuaacauuuuguucuuacacau

SEQ ID NO: 2916160 - RNA, 17 nt, Human
uuuaaccaaacaauuau

SEQ ID NO: 2916161 - RNA, 19 nt, Human
uuuaaccaaacaauuauuu

SEQ ID NO: 2916162 - RNA, 15 nt, Human
uuuaauauuaccuaa

SEQ ID NO: 2916163 - RNA, 24 nt, Human
uuuaauauuaccuaaugaaaguga

SEQ ID NO: 2916164 - RNA, 17 nt, Human
uuuaauauuauuacugu

SEQ ID NO: 2916165 - RNA, 12 nt, Human
uuuaauauuuaa

SEQ ID NO: 2916166 - RNA, 18 nt, Human
uuuaauauuuaaacagca

SEQ ID NO: 2916167 - RNA, 19 nt, Human
uuuaaucaaguuguaacuu

SEQ ID NO: 2916168 - RNA, 12 nt, Human
uuuaaucacuua

SEQ ID NO: 2916169 - RNA, 21 nt, Human
uuuaaucacuuaacauuccua

SEQ ID NO: 2916170 - RNA, 14 nt, Human
uuuaauauuuugca

SEQ ID NO: 2916171 - RNA, 13 nt, Human
uuuaauauuuaaa

SEQ ID NO: 2916172 - RNA, 15 nt, Human
uuuaauauuuaaaca

SEQ ID NO: 2916173 - RNA, 13 nt, Human
uuuaauaucuuca

SEQ ID NO: 2916174 - RNA, 15 nt, Human
uuuaauaucuucagc

SEQ ID NO: 2916175 - RNA, 14 nt, Human
uuuaccagcuuuua

SEQ ID NO: 2916176 - RNA, 19 nt, Human
uuuaccagcuuuuaaccau

SEQ ID NO: 2916177 - RNA, 18 nt, Human
uuuaccagggauguagau

SEQ ID NO: 2916178 - RNA, 19 nt, Human
uuuaccaguuaauuacuca

SEQ ID NO: 2916179 - RNA, 20 nt, Human
uuuaccaguuaauuacucag

SEQ ID NO: 2916180 - RNA, 20 nt, Human
uuuacaugcaauuuauuaaa

SEQ ID NO: 2916181 - RNA, 15 nt, Human
uuuaccauacauuua

SEQ ID NO: 2916182 - RNA, 19 nt, Human
uuuacccacacacagauaa

SEQ ID NO: 2916183 - RNA, 18 nt, Human
uuuacccaaaaacuaaau

SEQ ID NO: 2916184 - RNA, 17 nt, Human
uuuacagaugaauguau

SEQ ID NO: 2916185 - RNA, 20 nt, Human
uuuacagcucugacuuuaca

SEQ ID NO: 2916186 - RNA, 22 nt, Human
uuuacagcucugacuuuacacu

SEQ ID NO: 2916187 - RNA, 22 nt, Human
uuuacagccagugggagauguu

SEQ ID NO: 2916188 - RNA, 23 nt, Human
uuuacagccagugggagauguua

SEQ ID NO: 2916189 - RNA, 13 nt, Human
uuuacagcugccu

SEQ ID NO: 2916190 - RNA, 14 nt, Human
uuuacauaacugcc

SEQ ID NO: 2916191 - RNA, 15 nt, Human
uuuacauaacugccu

SEQ ID NO: 2916192 - RNA, 16 nt, Human
uuuacauaacugccuu

SEQ ID NO: 2916193 - RNA, 19 nt, Human
uuuacauaacugccuugaa

SEQ ID NO: 2916194 - RNA, 23 nt, Human
uuuacauaacugccuugaaccug

SEQ ID NO: 2916195 - RNA, 16 nt, Human
uuuauacaauaucauc

SEQ ID NO: 2916196 - RNA, 22 nt, Human
uuuauaaauauaagccuuuuau

SEQ ID NO: 2916197 - RNA, 24 nt, Human
uuuauaaaguacccaucuaguacu

SEQ ID NO: 2916198 - RNA, 20 nt, Human
uuuauaaagugcuuguguaa

SEQ ID NO: 2916199 - RNA, 20 nt, Human
uuuauaaauaaacuguugcu

SEQ ID NO: 2916200 - RNA, 12 nt, Human
uuuauaaaugag

SEQ ID NO: 2916201 - RNA, 15 nt, Human
uuuauaaaugagcaa

SEQ ID NO: 2916202 - RNA, 14 nt, Human
uuuaguuauaguuu

SEQ ID NO: 2916203 - RNA, 15 nt, Human
uuuaguuauaguuuc

SEQ ID NO: 2916204 - RNA, 22 nt, Human
uuuagacucaucaaucaaauaa

SEQ ID NO: 2916205 - RNA, 13 nt, Human
uuuaguuauaguu

SEQ ID NO: 2916206 - RNA, 15 nt, Human
uuuagacuguagccu

SEQ ID NO: 2916207 - RNA, 11 nt, Human
uuuagaccaag

SEQ ID NO: 2916208 - RNA, 13 nt, Human
uuuagaccaagga

SEQ ID NO: 2916209 - RNA, 14 nt, Human
uuuagaccaaggaa

SEQ ID NO: 2916210 - RNA, 15 nt, Human
uuuagaccaaggaac

SEQ ID NO: 2916211 - RNA, 18 nt, Human
uuuagaccaaggaacaaa

SEQ ID NO: 2916212 - RNA, 20 nt, Human
uuuagacagucucacuuugu

SEQ ID NO: 2916213 - RNA, 16 nt, Human
uuuagacagucucacu

SEQ ID NO: 2916214 - RNA, 16 nt, Human
uuuacccaccuagaac

SEQ ID NO: 2916215 - RNA, 15 nt, Human
uuuacccaugaagau

SEQ ID NO: 2916216 - RNA, 16 nt, Human
uuuaccccaucccugu

SEQ ID NO: 2916217 - RNA, 16 nt, Human
uuuacccuaaugucuu

SEQ ID NO: 2916218 - RNA, 19 nt, Human
uuuacccuaaugucuucau

SEQ ID NO: 2916219 - RNA, 22 nt, Human
uuuacccuaaugucuucauaaa

SEQ ID NO: 2916220 - RNA, 13 nt, Human
uuuauacauuagu

SEQ ID NO: 2916221 - RNA, 16 nt, Human
uuuauacauuaguaaa

SEQ ID NO: 2916222 - RNA, 17 nt, Human
uuuauacauuaguaaau

SEQ ID NO: 2916223 - RNA, 21 nt, Human
uuuauacauuaguaaaugucu

SEQ ID NO: 2916224 - RNA, 16 nt, Human
uuuauaccauucagau

SEQ ID NO: 2916225 - RNA, 10 nt, Human
uuuauaccuc

SEQ ID NO: 2916226 - RNA, 21 nt, Human
uuuauaccucaaacuaucugg

SEQ ID NO: 2916227 - RNA, 16 nt, Human
uuuauacucuuucugu

SEQ ID NO: 2916228 - RNA, 14 nt, Human
uuuauccacaggaa

SEQ ID NO: 2916229 - RNA, 20 nt, Human
uuuauccacaggaaaguguu

SEQ ID NO: 2916230 - RNA, 15 nt, Human
uuuauccauuuguaa

SEQ ID NO: 2916231 - RNA, 16 nt, Human
uuuauccauuuguaau

SEQ ID NO: 2916232 - RNA, 16 nt, Human
uuuauccaaaaugugu

SEQ ID NO: 2916233 - RNA, 17 nt, Human
uuuauccaaaaugugua

SEQ ID NO: 2916234 - RNA, 18 nt, Human
uuuauccaaaauguguau

SEQ ID NO: 2916235 - RNA, 20 nt, Human
uuuauccaaaauguguauuu

SEQ ID NO: 2916236 - RNA, 22 nt, Human
uuuauccaaaauguguauuucu

SEQ ID NO: 2916237 - RNA, 20 nt, Human
uuuauacugauuaugucuuu

SEQ ID NO: 2916238 - RNA, 19 nt, Human
uuuauacuccaguguacau

SEQ ID NO: 2916239 - RNA, 20 nt, Human
uuuauacucuuucuguauau

SEQ ID NO: 2916240 - RNA, 18 nt, Human
uuuauacucuuucuguau

SEQ ID NO: 2916241 - RNA, 20 nt, Human
uuuaugaaugaaaaaacagu

SEQ ID NO: 2916242 - RNA, 13 nt, Human
uuuaucuguucuu

SEQ ID NO: 2916243 - RNA, 13 nt, Human
uuuaucuguuuaa

SEQ ID NO: 2916244 - RNA, 13 nt, Human
uuuaucugauuaa

SEQ ID NO: 2916245 - RNA, 13 nt, Human
uuuaucucuauuu

SEQ ID NO: 2916246 - RNA, 17 nt, Human
uuuaucuggccccaggu

SEQ ID NO: 2916247 - RNA, 14 nt, Human
uuuaucucuauuua

SEQ ID NO: 2916248 - RNA, 17 nt, Human
uuuaucucuauuuaaua

SEQ ID NO: 2916249 - RNA, 18 nt, Human
uuuauccugaaauuucag

SEQ ID NO: 2916250 - RNA, 19 nt, Human
uuuauccugaaauuucaga

SEQ ID NO: 2916251 - RNA, 20 nt, Human
uuuaaaaguuucaaugugau

SEQ ID NO: 2916252 - RNA, 20 nt, Human
uuuaaaaggauuuuuaucuu

SEQ ID NO: 2916253 - RNA, 19 nt, Human
uuuaaaagguauuuugaau

SEQ ID NO: 2916254 - RNA, 20 nt, Human
uuuaaaagguauuuugaaua

SEQ ID NO: 2916255 - RNA, 21 nt, Human
uuuaaaagguauuuugaauac

SEQ ID NO: 2916256 - RNA, 22 nt, Human
uuuaaaagguauuuugaauacc

SEQ ID NO: 2916257 - RNA, 17 nt, Human
uuuaaaaguuucaaugu

SEQ ID NO: 2916258 - RNA, 16 nt, Human
uuuaaaauauuuaucu

SEQ ID NO: 2916259 - RNA, 15 nt, Human
uuuaaaaucaacuua

SEQ ID NO: 2916260 - RNA, 12 nt, Human
uuuaaaagaaau

SEQ ID NO: 2916261 - RNA, 16 nt, Human
uuuaaaagaaauuuau

SEQ ID NO: 2916262 - RNA, 14 nt, Human
uuuaaaagagacaa

SEQ ID NO: 2916263 - RNA, 16 nt, Human
uuuaaaagagacaaac

SEQ ID NO: 2916264 - RNA, 21 nt, Human
uuuaaaagagagagagagaaa

SEQ ID NO: 2916265 - RNA, 22 nt, Human
uuuaaaagagagagagagaaaa

SEQ ID NO: 2916266 - RNA, 23 nt, Human
uuuaaaagagagagagagaaaaa

SEQ ID NO: 2916267 - RNA, 14 nt, Human
uuuaaaagauucau

SEQ ID NO: 2916268 - RNA, 13 nt, Human
uuuaaaagaucuu

SEQ ID NO: 2916269 - RNA, 16 nt, Human
uuuaaaagaucuucaa

SEQ ID NO: 2916270 - RNA, 16 nt, Human
uuuaaaagauucauuu

SEQ ID NO: 2916271 - RNA, 20 nt, Human
uuuaaaaugguuuguccuga

SEQ ID NO: 2916272 - RNA, 20 nt, Human
uuuaaacaaaauagaagcug

SEQ ID NO: 2916273 - RNA, 15 nt, Human
uuuaaacaaacauug

SEQ ID NO: 2916274 - RNA, 17 nt, Human
uuuaaacaaacauugug

SEQ ID NO: 2916275 - RNA, 18 nt, Human
uuuaaacaaacauugugu

SEQ ID NO: 2916276 - RNA, 23 nt, Human
uuuaaacaaacauuguguugaca

SEQ ID NO: 2916277 - RNA, 12 nt, Human
uuuaaacaaauu

SEQ ID NO: 2916278 - RNA, 18 nt, Human
uuuaaaauugcuauguua

SEQ ID NO: 2916279 - RNA, 23 nt, Human
uuuaaaauugcuauguuacuauu

SEQ ID NO: 2916280 - RNA, 19 nt, Human
uuuaaaauuuaaguaucuu

SEQ ID NO: 2916281 - RNA, 19 nt, Human
uuuaacacaaguccuguga

SEQ ID NO: 2916282 - RNA, 23 nt, Human
uuuaacaauuuccuuuauauuua

SEQ ID NO: 2916283 - RNA, 16 nt, Human
uuuaaacuacagguag

SEQ ID NO: 2916284 - RNA, 12 nt, Human
uuuaaacuagau

SEQ ID NO: 2916285 - RNA, 16 nt, Human
uuuaaacuagaugacc

SEQ ID NO: 2916286 - RNA, 19 nt, Human
uuuaaacuagaugaccuca

SEQ ID NO: 2916287 - RNA, 21 nt, Human
uuuaaacuagaugaccucauu

SEQ ID NO: 2916288 - RNA, 13 nt, Human
uuuaaacagcagu

SEQ ID NO: 2916289 - RNA, 14 nt, Human
uuuaaacaccuccu

SEQ ID NO: 2916290 - RNA, 14 nt, Human
uuuaaacaaauuca

SEQ ID NO: 2916291 - RNA, 23 nt, Human
uuuaaacaaauucauauucuguc

SEQ ID NO: 2916292 - RNA, 13 nt, Human
uuuaaacacacag

SEQ ID NO: 2916293 - RNA, 23 nt, Human
uuuaaacacacagauacacacac

SEQ ID NO: 2916294 - RNA, 17 nt, Human
uuuaaacaguauuucau

SEQ ID NO: 2916295 - RNA, 13 nt, Human
uuuaaacauuaaa

SEQ ID NO: 2916296 - RNA, 14 nt, Human
uuuaaacauuaaaa

SEQ ID NO: 2916297 - RNA, 16 nt, Human
uuuaaacauuaaaaau

SEQ ID NO: 2916298 - RNA, 19 nt, Human
uuuaaacauuaaaaaugga

SEQ ID NO: 2916299 - RNA, 23 nt, Human
uuuaaacauuaaaaauggaacug

SEQ ID NO: 2916300 - RNA, 14 nt, Human
uuguucaaacaaua

SEQ ID NO: 2916301 - RNA, 16 nt, Human
uuguucaaacaauauc

SEQ ID NO: 2916302 - RNA, 17 nt, Human
uuguucaaacaauauca

SEQ ID NO: 2916303 - RNA, 13 nt, Human
uuguucaacuauu

SEQ ID NO: 2916304 - RNA, 13 nt, Human
uuguucaaguuuu

SEQ ID NO: 2916305 - RNA, 15 nt, Human
uuguuauuuuggaaa

SEQ ID NO: 2916306 - RNA, 19 nt, Human
uuguucaauaauaaauauu

SEQ ID NO: 2916307 - RNA, 13 nt, Human
uuguuauuuucag

SEQ ID NO: 2916308 - RNA, 16 nt, Human
uuguuuaaugugaacu

SEQ ID NO: 2916309 - RNA, 17 nt, Human
uuguuuaaugugaacuu

SEQ ID NO: 2916310 - RNA, 20 nt, Human
uuguuuaaugugaacuugua

SEQ ID NO: 2916311 - RNA, 23 nt, Human
uuguuuaaugugaacuuguagcu

SEQ ID NO: 2916312 - RNA, 16 nt, Human
uuguuuacuuaaagau

SEQ ID NO: 2916313 - RNA, 18 nt, Human
uuguuuacuuaaagauuu

SEQ ID NO: 2916314 - RNA, 13 nt, Human
uugucuuucagga

SEQ ID NO: 2916315 - RNA, 13 nt, Human
uugucuugaaaga

SEQ ID NO: 2916316 - RNA, 14 nt, Human
uugucuugaaagau

SEQ ID NO: 2916317 - RNA, 15 nt, Human
uugucuugaaugucu

SEQ ID NO: 2916318 - RNA, 22 nt, Human
uugucuugaaugucuuuugaau

SEQ ID NO: 2916319 - RNA, 18 nt, Human
uugucuugccuuauuaaa

SEQ ID NO: 2916320 - RNA, 15 nt, Human
uugucuuauauauau

SEQ ID NO: 2916321 - RNA, 15 nt, Human
uugucuuaucuggcc

SEQ ID NO: 2916322 - RNA, 13 nt, Human
uugucuuauauau

SEQ ID NO: 2916323 - RNA, 17 nt, Human
uugucuucaaacuguga

SEQ ID NO: 2916324 - RNA, 11 nt, Human
uuguuauugug

SEQ ID NO: 2916325 - RNA, 12 nt, Human
uuguuauuguga

SEQ ID NO: 2916326 - RNA, 13 nt, Human
uuguuauugugaa

SEQ ID NO: 2916327 - RNA, 16 nt, Human
uuguuugucucuccuu

SEQ ID NO: 2916328 - RNA, 18 nt, Human
uuguuugucucuccuuuu

SEQ ID NO: 2916329 - RNA, 19 nt, Human
uuguuugucucuccuuuuc

SEQ ID NO: 2916330 - RNA, 20 nt, Human
uuguuugucucuccuuuucu

SEQ ID NO: 2916331 - RNA, 12 nt, Human
uuguuugucugu

SEQ ID NO: 2916332 - RNA, 15 nt, Human
uuguuugucuguuug

SEQ ID NO: 2916333 - RNA, 15 nt, Human
uuguuucuuucuagu

SEQ ID NO: 2916334 - RNA, 12 nt, Human
uuguuuuacaau

SEQ ID NO: 2916335 - RNA, 13 nt, Human
uuuaaaacacaug

SEQ ID NO: 2916336 - RNA, 23 nt, Human
uuuaaaacacauguuuuuauaca

SEQ ID NO: 2916337 - RNA, 16 nt, Human
uuuaaaacacauguuu

SEQ ID NO: 2916338 - RNA, 15 nt, Human
uuuaaaacaguauuu

SEQ ID NO: 2916339 - RNA, 14 nt, Human
uuuaaaacauguaa

SEQ ID NO: 2916340 - RNA, 15 nt, Human
uuuaaaacauguaau

SEQ ID NO: 2916341 - RNA, 16 nt, Human
uuuaaaacauguaaua

SEQ ID NO: 2916342 - RNA, 13 nt, Human
uuguuuuaaucug

SEQ ID NO: 2916343 - RNA, 14 nt, Human
uuguuuuaaucuga

SEQ ID NO: 2916344 - RNA, 15 nt, Human
uuguuuguuuuugcu

SEQ ID NO: 2916345 - RNA, 21 nt, Human
uuguuuguuucucccccuggg

SEQ ID NO: 2916346 - RNA, 13 nt, Human
uuguuuguuucuu

SEQ ID NO: 2916347 - RNA, 14 nt, Human
uuguuuguuucuuu

SEQ ID NO: 2916348 - RNA, 12 nt, Human
uuguuuguuucu

SEQ ID NO: 2916349 - RNA, 18 nt, Human
uuguuucugagaaaagaa

SEQ ID NO: 2916350 - RNA, 14 nt, Human
uuguuucugugggc

SEQ ID NO: 2916351 - RNA, 13 nt, Human
uuguuuauugagu

SEQ ID NO: 2916352 - RNA, 15 nt, Human
uuguuuauugaguuu

SEQ ID NO: 2916353 - RNA, 17 nt, Human
uuguuucucccccuggg

SEQ ID NO: 2916354 - RNA, 17 nt, Human
uuguuucucuguuguaa

SEQ ID NO: 2916355 - RNA, 12 nt, Human
uuguuuauguaa

SEQ ID NO: 2916356 - RNA, 20 nt, Human
uuguuuauguaaauguuugu

SEQ ID NO: 2916357 - RNA, 15 nt, Human
uuguuuauuagauga

SEQ ID NO: 2916358 - RNA, 24 nt, Human
uuguuuauuagaugaauuauccua

SEQ ID NO: 2916359 - RNA, 18 nt, Human
uuguuuauaccuuugccu

SEQ ID NO: 2916360 - RNA, 19 nt, Human
uuguuuaucagauacauca

SEQ ID NO: 2916361 - RNA, 21 nt, Human
uuguuuaucagauacaucacu

SEQ ID NO: 2916362 - RNA, 22 nt, Human
uuguuuaucagauacaucacug

SEQ ID NO: 2916363 - RNA, 23 nt, Human
uuguuuacuuaaagauuuaucaa

SEQ ID NO: 2916364 - RNA, 20 nt, Human
uuguuuggggaugagaaagg

SEQ ID NO: 2916365 - RNA, 16 nt, Human
uuguuuggauguaauu

SEQ ID NO: 2916366 - RNA, 18 nt, Human
uuguuuggauguaauuua

SEQ ID NO: 2916367 - RNA, 11 nt, Human
uuguuuggauu

SEQ ID NO: 2916368 - RNA, 16 nt, Human
uuguuuggcaaggaaa

SEQ ID NO: 2916369 - RNA, 17 nt, Human
uuguuuggcaaggaaag

SEQ ID NO: 2916370 - RNA, 18 nt, Human
uuguuuggcaaggaaagg

SEQ ID NO: 2916371 - RNA, 14 nt, Human
uuguuuggcuuccu

SEQ ID NO: 2916372 - RNA, 13 nt, Human
uuguuucuuguuu

SEQ ID NO: 2916373 - RNA, 17 nt, Human
uuguuucuuguuuauug

SEQ ID NO: 2916374 - RNA, 18 nt, Human
uuguuucuuguuuauuga

SEQ ID NO: 2916375 - RNA, 19 nt, Human
uuugaacacgaaagaaaug

SEQ ID NO: 2916376 - RNA, 20 nt, Human
uuugaacacgaaagaaaugu

SEQ ID NO: 2916377 - RNA, 21 nt, Human
uuugaacacgaaagaaaugua

SEQ ID NO: 2916378 - RNA, 12 nt, Human
uuugaacacugg

SEQ ID NO: 2916379 - RNA, 14 nt, Human
uuugaacacuggcu

SEQ ID NO: 2916380 - RNA, 23 nt, Human
uuugaacacuggcuaaagauaau

SEQ ID NO: 2916381 - RNA, 16 nt, Human
uuucuuguugcuuugu

SEQ ID NO: 2916382 - RNA, 21 nt, Human
uuucuuguugcuuuguugcac

SEQ ID NO: 2916383 - RNA, 12 nt, Human
uuucuuguuuau

SEQ ID NO: 2916384 - RNA, 15 nt, Human
uuugaacucagaucu

SEQ ID NO: 2916385 - RNA, 16 nt, Human
uuugaagcaguugugu

SEQ ID NO: 2916386 - RNA, 18 nt, Human
uuugaagcaguuguguca

SEQ ID NO: 2916387 - RNA, 15 nt, Human
uuugaacuaagaaac

SEQ ID NO: 2916388 - RNA, 17 nt, Human
uuugaacuaagaaacuu

SEQ ID NO: 2916389 - RNA, 19 nt, Human
uuugaacuaagaaacuuuu

SEQ ID NO: 2916390 - RNA, 21 nt, Human
uuugaacuaagaaacuuuugu

SEQ ID NO: 2916391 - RNA, 22 nt, Human
uuugaacuaagaaacuuuugua

SEQ ID NO: 2916392 - RNA, 16 nt, Human
uuugaagcuacugugu

SEQ ID NO: 2916393 - RNA, 18 nt, Human
uuugaagcuacugugugu

SEQ ID NO: 2916394 - RNA, 11 nt, Human
uuugaagcuga

SEQ ID NO: 2916395 - RNA, 18 nt, Human
uuugaagcugaaaauaua

SEQ ID NO: 2916396 - RNA, 13 nt, Human
uuugaaggcaaaa

SEQ ID NO: 2916397 - RNA, 12 nt, Human
uuugaaggcaaa

SEQ ID NO: 2916398 - RNA, 13 nt, Human
uuugaaggaaaca

SEQ ID NO: 2916399 - RNA, 20 nt, Human
uuugaaggaaacaguuaaua

SEQ ID NO: 2916400 - RNA, 21 nt, Human
uuugaaggaauacaauauaua

SEQ ID NO: 2916401 - RNA, 17 nt, Human
uuucuuaaccaguugug

SEQ ID NO: 2916402 - RNA, 21 nt, Human
uuucuuaaccaguuguggugu

SEQ ID NO: 2916403 - RNA, 16 nt, Human
uuucuugcucccuuca

SEQ ID NO: 2916404 - RNA, 19 nt, Human
uuucuugcucccuucagcc

SEQ ID NO: 2916405 - RNA, 13 nt, Human
uuucuugcucccu

SEQ ID NO: 2916406 - RNA, 12 nt, Human
uuucuugcuugu

SEQ ID NO: 2916407 - RNA, 14 nt, Human
uuucuugcuuguac

SEQ ID NO: 2916408 - RNA, 15 nt, Human
uuucuugcuuguacc

SEQ ID NO: 2916409 - RNA, 16 nt, Human
uuucuugcuuguaccu

SEQ ID NO: 2916410 - RNA, 22 nt, Human
uuucuugcuuguaccucuggcu

SEQ ID NO: 2916411 - RNA, 19 nt, Human
uuucuuggcaaaagccuug

SEQ ID NO: 2916412 - RNA, 22 nt, Human
uuucuuggcaaaagccuugugu

SEQ ID NO: 2916413 - RNA, 19 nt, Human
uuucuuggcccccuuccca

SEQ ID NO: 2916414 - RNA, 23 nt, Human
uuucugaucugaugcaagcaaga

SEQ ID NO: 2916415 - RNA, 12 nt, Human
uuucuuaaauaa

SEQ ID NO: 2916416 - RNA, 21 nt, Human
uuucuuaaauaaugcuucaga

SEQ ID NO: 2916417 - RNA, 22 nt, Human
uuucuuaaauaaugcuucagau

SEQ ID NO: 2916418 - RNA, 23 nt, Human
uuucuuaaauaaugcuucagaua

SEQ ID NO: 2916419 - RNA, 13 nt, Human
uuugaagucuugu

SEQ ID NO: 2916420 - RNA, 14 nt, Human
uuugaagucuugua

SEQ ID NO: 2916421 - RNA, 15 nt, Human
uuugaagucuuguau

SEQ ID NO: 2916422 - RNA, 16 nt, Human
uuugaagucuuguaua

SEQ ID NO: 2916423 - RNA, 17 nt, Human
uuugaagguuuuaagug

SEQ ID NO: 2916424 - RNA, 23 nt, Human
uuugaaguaguuuguauaacuuc

SEQ ID NO: 2916425 - RNA, 20 nt, Human
uuugaaguguaccuguguac

SEQ ID NO: 2916426 - RNA, 13 nt, Human
uuugaaguuuaca

SEQ ID NO: 2916427 - RNA, 15 nt, Human
uuugaaguuuacauu

SEQ ID NO: 2916428 - RNA, 16 nt, Human
uuugaaguuuacauuu

SEQ ID NO: 2916429 - RNA, 17 nt, Human
uuugaaguuuacauuuu

SEQ ID NO: 2916430 - RNA, 19 nt, Human
uuugaaguuuacauuuuua

SEQ ID NO: 2916431 - RNA, 16 nt, Human
uuugagaguucuaaau

SEQ ID NO: 2916432 - RNA, 14 nt, Human
uuugagaguucuaa

SEQ ID NO: 2916433 - RNA, 16 nt, Human
uuugaauaccauuaaa

SEQ ID NO: 2916434 - RNA, 22 nt, Human
uuugaauaccauuaaaacugcu

SEQ ID NO: 2916435 - RNA, 23 nt, Human
uuugaauaccauuaaaacugcuu

SEQ ID NO: 2916436 - RNA, 13 nt, Human
uuugaguucuaca

SEQ ID NO: 2916437 - RNA, 19 nt, Human
uuugaguugauugagaaga

SEQ ID NO: 2916438 - RNA, 15 nt, Human
uuugagguaaagaua

SEQ ID NO: 2916439 - RNA, 18 nt, Human
uuugauaaaguuucucag

SEQ ID NO: 2916440 - RNA, 19 nt, Human
uuugauaaaguuucucaga

SEQ ID NO: 2916441 - RNA, 13 nt, Human
uuugauaaaguuu

SEQ ID NO: 2916442 - RNA, 15 nt, Human
uuugauaaaguuucu

SEQ ID NO: 2916443 - RNA, 14 nt, Human
uuugauaaugauaa

SEQ ID NO: 2916444 - RNA, 15 nt, Human
uuugauaaugauaaa

SEQ ID NO: 2916445 - RNA, 14 nt, Human
uuugauaacuguuu

SEQ ID NO: 2916446 - RNA, 15 nt, Human
uuugauaacuguuua

SEQ ID NO: 2916447 - RNA, 20 nt, Human
uuugauaacuguuuauaugu

SEQ ID NO: 2916448 - RNA, 22 nt, Human
uuugauaacuguuuauaugugu

SEQ ID NO: 2916449 - RNA, 18 nt, Human
uuugagauuaagaaugcc

SEQ ID NO: 2916450 - RNA, 16 nt, Human
uuugaggagcauguuu

SEQ ID NO: 2916451 - RNA, 17 nt, Human
uuugaggagcauguuuu

SEQ ID NO: 2916452 - RNA, 15 nt, Human
uuugaggcugcagcg

SEQ ID NO: 2916453 - RNA, 18 nt, Human
uuugagggacugccucug

SEQ ID NO: 2916454 - RNA, 20 nt, Human
uuugagggacugccucugcc

SEQ ID NO: 2916455 - RNA, 21 nt, Human
uuugagggacugccucugcca

SEQ ID NO: 2916456 - RNA, 16 nt, Human
uuugaggggaaaacac

SEQ ID NO: 2916457 - RNA, 23 nt, Human
uuugaggggaggaguuccacaga

SEQ ID NO: 2916458 - RNA, 23 nt, Human
uuugguacuuuugagugugugug

SEQ ID NO: 2916459 - RNA, 14 nt, Human
uuugguagauuaaa

SEQ ID NO: 2916460 - RNA, 13 nt, Human
uuugguacaaaaa

SEQ ID NO: 2916461 - RNA, 16 nt, Human
uuugguacaaaaauaa

SEQ ID NO: 2916462 - RNA, 15 nt, Human
uuuggguuacaguau

SEQ ID NO: 2916463 - RNA, 22 nt, Human
uuuggagaaauuauuuaauaaa

SEQ ID NO: 2916464 - RNA, 11 nt, Human
uuugguucuaa

SEQ ID NO: 2916465 - RNA, 13 nt, Human
uuugguucuaagg

SEQ ID NO: 2916466 - RNA, 20 nt, Human
uuugguucauuaauucuaua

SEQ ID NO: 2916467 - RNA, 13 nt, Human
uuugguuccucuc

SEQ ID NO: 2916468 - RNA, 15 nt, Human
uuugguuccucucug

SEQ ID NO: 2916469 - RNA, 16 nt, Human
uuugguuccucucugg

SEQ ID NO: 2916470 - RNA, 17 nt, Human
uuugguuccucucuggu

SEQ ID NO: 2916471 - RNA, 12 nt, Human
uuugguuuacau

SEQ ID NO: 2916472 - RNA, 14 nt, Human
uuugguuuacauuu

SEQ ID NO: 2916473 - RNA, 15 nt, Human
uuugguuuacauuua

SEQ ID NO: 2916474 - RNA, 21 nt, Human
uuugguuuauauuuuuucagu

SEQ ID NO: 2916475 - RNA, 20 nt, Human
uuugguucuucucaaaagaa

SEQ ID NO: 2916476 - RNA, 16 nt, Human
uuuguaaacucaaaau

SEQ ID NO: 2916477 - RNA, 22 nt, Human
uuuguaaacucaaaauauuugu

SEQ ID NO: 2916478 - RNA, 16 nt, Human
uuuguaaacuggaauu

SEQ ID NO: 2916479 - RNA, 17 nt, Human
uuuguaaacucaaaaua

SEQ ID NO: 2916480 - RNA, 15 nt, Human
uuuguaaaucacauc

SEQ ID NO: 2916481 - RNA, 12 nt, Human
uuuguaaauguu

SEQ ID NO: 2916482 - RNA, 14 nt, Human
uuuguaaauguuau

SEQ ID NO: 2916483 - RNA, 18 nt, Human
uuuguaaauguuauuucu

SEQ ID NO: 2916484 - RNA, 19 nt, Human
uuuguaaauguuauuucug

SEQ ID NO: 2916485 - RNA, 20 nt, Human
uuuguaaauguuauuucugc

SEQ ID NO: 2916486 - RNA, 22 nt, Human
uuuguaaauuaaacauaaaaca

SEQ ID NO: 2916487 - RNA, 17 nt, Human
uuugcuuguuauauuaa

SEQ ID NO: 2916488 - RNA, 13 nt, Human
uuuguaaagaaau

SEQ ID NO: 2916489 - RNA, 18 nt, Human
uuuguaaagaaauuuacu

SEQ ID NO: 2916490 - RNA, 21 nt, Human
uuuguaaagaaauuuacuaua

SEQ ID NO: 2916491 - RNA, 22 nt, Human
uuuguaaagaaauuuacuauau

SEQ ID NO: 2916492 - RNA, 23 nt, Human
uuuguaaagaaauuuacuauaua

SEQ ID NO: 2916493 - RNA, 16 nt, Human
uuuguaaagugaagaa

SEQ ID NO: 2916494 - RNA, 13 nt, Human
uuuguaugugugu

SEQ ID NO: 2916495 - RNA, 16 nt, Human
uuuguaugcacuuugu

SEQ ID NO: 2916496 - RNA, 13 nt, Human
uuuguauucaaaa

SEQ ID NO: 2916497 - RNA, 15 nt, Human
uuuguggccucagaa

SEQ ID NO: 2916498 - RNA, 18 nt, Human
uuuguauguuuuuuuucu

SEQ ID NO: 2916499 - RNA, 14 nt, Human
uuuguauuauugcu

SEQ ID NO: 2916500 - RNA, 15 nt, Human
uuuguauuauugcug

SEQ ID NO: 2916501 - RNA, 20 nt, Human
uuuguauuauugcuguugcu

SEQ ID NO: 2916502 - RNA, 23 nt, Human
uuuguauuauugcuguugcuuga

SEQ ID NO: 2916503 - RNA, 10 nt, Human
uuuguauguu

SEQ ID NO: 2916504 - RNA, 12 nt, Human
uuuguauguuuu

SEQ ID NO: 2916505 - RNA, 18 nt, Human
uuuggacuccaucucuca

SEQ ID NO: 2916506 - RNA, 19 nt, Human
uuuggagacucuguggggc

SEQ ID NO: 2916507 - RNA, 14 nt, Human
uuuggagacuuucu

SEQ ID NO: 2916508 - RNA, 15 nt, Human
uuuggagacuuucuu

SEQ ID NO: 2916509 - RNA, 15 nt, Human
uuuggacuuuguaua

SEQ ID NO: 2916510 - RNA, 21 nt, Human
uuuggacuuuguauacuuuaa

SEQ ID NO: 2916511 - RNA, 20 nt, Human
uuugcuucauaaaugaagca

SEQ ID NO: 2916512 - RNA, 14 nt, Human
uuugcauuuggaau

SEQ ID NO: 2916513 - RNA, 20 nt, Human
uuugcuucauuguacuaccu

SEQ ID NO: 2916514 - RNA, 19 nt, Human
uuugcuugcucauaugcau

SEQ ID NO: 2916515 - RNA, 21 nt, Human
uuugcuugcucauaugcaugu

SEQ ID NO: 2916516 - RNA, 15 nt, Human
uuugauaauguuaaa

SEQ ID NO: 2916517 - RNA, 15 nt, Human
uuugauaugaguaua

SEQ ID NO: 2916518 - RNA, 18 nt, Human
uuugauaugaguauacaa

SEQ ID NO: 2916519 - RNA, 19 nt, Human
uuugauaugaguauacaau

SEQ ID NO: 2916520 - RNA, 12 nt, Human
uuugauaauguu

SEQ ID NO: 2916521 - RNA, 14 nt, Human
uuugauaauguuaa

SEQ ID NO: 2916522 - RNA, 18 nt, Human
uuugccacuaauuuuagu

SEQ ID NO: 2916523 - RNA, 20 nt, Human
uuugccacuaauuuuaguau

SEQ ID NO: 2916524 - RNA, 21 nt, Human
uuugccacuaauuuuaguauu

SEQ ID NO: 2916525 - RNA, 22 nt, Human
uuugccacuaauuuuaguauuc

SEQ ID NO: 2916526 - RNA, 19 nt, Human
uuugccacugauauucaga

SEQ ID NO: 2916527 - RNA, 20 nt, Human
uuucucuccagccugacuug

SEQ ID NO: 2916528 - RNA, 19 nt, Human
uuucucucagccuuacauu

SEQ ID NO: 2916529 - RNA, 21 nt, Human
uuucucucagccuuacauuug

SEQ ID NO: 2916530 - RNA, 22 nt, Human
uuucucuaacuucaaggcccau

SEQ ID NO: 2916531 - RNA, 18 nt, Human
uuucuacccagcgagccc

SEQ ID NO: 2916532 - RNA, 15 nt, Human
uuucuacccagcgag

SEQ ID NO: 2916533 - RNA, 22 nt, Human
uuucuacccagcgagcccuggu

SEQ ID NO: 2916534 - RNA, 15 nt, Human
uuucuacauuauugc

SEQ ID NO: 2916535 - RNA, 17 nt, Human
uuucuacauuauugcuu

SEQ ID NO: 2916536 - RNA, 20 nt, Human
uuucuacauuauugcuuauu

SEQ ID NO: 2916537 - RNA, 16 nt, Human
uuucuaccauuucaga

SEQ ID NO: 2916538 - RNA, 21 nt, Human
uuucuacccaacggcccugca

SEQ ID NO: 2916539 - RNA, 23 nt, Human
uuucucuuuguggggcuuggcgu

SEQ ID NO: 2916540 - RNA, 15 nt, Human
uuucucuuuucuaaa

SEQ ID NO: 2916541 - RNA, 15 nt, Human
uuucucuuuucuagu

SEQ ID NO: 2916542 - RNA, 17 nt, Human
uuucucuuuucuaguuu

SEQ ID NO: 2916543 - RNA, 15 nt, Human
uuucucuuuuuaguu

SEQ ID NO: 2916544 - RNA, 14 nt, Human
uuucugaaaagaaa

SEQ ID NO: 2916545 - RNA, 16 nt, Human
uuucugaaaagaaaua

SEQ ID NO: 2916546 - RNA, 13 nt, Human
uuucucucuuccc

SEQ ID NO: 2916547 - RNA, 14 nt, Human
uuucucucuucccu

SEQ ID NO: 2916548 - RNA, 16 nt, Human
uuucucucuucccuca

SEQ ID NO: 2916549 - RNA, 17 nt, Human
uuucucucuucccucag

SEQ ID NO: 2916550 - RNA, 16 nt, Human
uuucucucuacagugc

SEQ ID NO: 2916551 - RNA, 18 nt, Human
uuucucucuacagugcca

SEQ ID NO: 2916552 - RNA, 20 nt, Human
uuucugaaaguuacccacug

SEQ ID NO: 2916553 - RNA, 15 nt, Human
uuuccuaauaucaaa

SEQ ID NO: 2916554 - RNA, 22 nt, Human
uuuccuaaucagaaauuuuuau

SEQ ID NO: 2916555 - RNA, 21 nt, Human
uuuccuacaggcagucucucu

SEQ ID NO: 2916556 - RNA, 18 nt, Human
uuuccucuauacaucucu

SEQ ID NO: 2916557 - RNA, 22 nt, Human
uuuccucuauacaucucucccc

SEQ ID NO: 2916558 - RNA, 15 nt, Human
uuuccuccuuuauca

SEQ ID NO: 2916559 - RNA, 16 nt, Human
uuuccuccuuuaucac

SEQ ID NO: 2916560 - RNA, 17 nt, Human
uuuccuccuuuaucaca

SEQ ID NO: 2916561 - RNA, 22 nt, Human
uuuccuccugaggcuuuggauu

SEQ ID NO: 2916562 - RNA, 21 nt, Human
uuuccuccugaggcuuuggau

SEQ ID NO: 2916563 - RNA, 22 nt, Human
uuuccucuuagucgagccaagu

SEQ ID NO: 2916564 - RNA, 21 nt, Human
uuucuaacaaaaaaauauauu

SEQ ID NO: 2916565 - RNA, 15 nt, Human
uuucuaaugugugaa

SEQ ID NO: 2916566 - RNA, 14 nt, Human
uuucuaauguuucu

SEQ ID NO: 2916567 - RNA, 13 nt, Human
uuucuaaauguuu

SEQ ID NO: 2916568 - RNA, 21 nt, Human
uuucuacaauuaauaguuugu

SEQ ID NO: 2916569 - RNA, 23 nt, Human
uuucuacaaagcacuagagaaug

SEQ ID NO: 2916570 - RNA, 20 nt, Human
uuucuacaaauaauuuuagu

SEQ ID NO: 2916571 - RNA, 17 nt, Human
uuucaguccuguaguuu

SEQ ID NO: 2916572 - RNA, 21 nt, Human
uuucaguauuuuggagaaauu

SEQ ID NO: 2916573 - RNA, 21 nt, Human
uuucaguacuucagcaagaga

SEQ ID NO: 2916574 - RNA, 22 nt, Human
uuucaguacuucagcaagagag

SEQ ID NO: 2916575 - RNA, 23 nt, Human
uuucaguacuucagcaagagaga

SEQ ID NO: 2916576 - RNA, 19 nt, Human
uuucauuugguucauuaau

SEQ ID NO: 2916577 - RNA, 17 nt, Human
uuucauuuuauuuuaau

SEQ ID NO: 2916578 - RNA, 14 nt, Human
uuucauuuuccaau

SEQ ID NO: 2916579 - RNA, 16 nt, Human
uuucauuucaaaaugc

SEQ ID NO: 2916580 - RNA, 21 nt, Human
uuucagguucaguauuaugua

SEQ ID NO: 2916581 - RNA, 14 nt, Human
uuucagguuuguca

SEQ ID NO: 2916582 - RNA, 19 nt, Human
uuucagguuuuguaaagau

SEQ ID NO: 2916583 - RNA, 18 nt, Human
uuucagguuuuguaaaga

SEQ ID NO: 2916584 - RNA, 16 nt, Human
uuucaggugacaugug

SEQ ID NO: 2916585 - RNA, 19 nt, Human
uuucaggugacaugugaaa

SEQ ID NO: 2916586 - RNA, 20 nt, Human
uuucaggugacaugugaaac

SEQ ID NO: 2916587 - RNA, 22 nt, Human
uuucaggugacaugugaaaccu

SEQ ID NO: 2916588 - RNA, 15 nt, Human
uuucagcuaucagua

SEQ ID NO: 2916589 - RNA, 16 nt, Human
uuucagcuaucaguag

SEQ ID NO: 2916590 - RNA, 13 nt, Human
uuucaggugacau

SEQ ID NO: 2916591 - RNA, 15 nt, Human
uuucaggugacaugu

SEQ ID NO: 2916592 - RNA, 11 nt, Human
uuucagcucuc

SEQ ID NO: 2916593 - RNA, 12 nt, Human
uuucagcucucu

SEQ ID NO: 2916594 - RNA, 16 nt, Human
uuucagcucucuguau

SEQ ID NO: 2916595 - RNA, 21 nt, Human
uuucagcucucuguauaaaca

SEQ ID NO: 2916596 - RNA, 12 nt, Human
uuuccacugaag

SEQ ID NO: 2916597 - RNA, 13 nt, Human
uuuccuaacaaaa

SEQ ID NO: 2916598 - RNA, 16 nt, Human
uuuccuaacaaaagau

SEQ ID NO: 2916599 - RNA, 23 nt, Human
uuuccuaacaaaagaugaaagca

SEQ ID NO: 2916600 - RNA, 15 nt, Human
uuuccacuucuuccu

SEQ ID NO: 2916601 - RNA, 16 nt, Human
uuuccacuucuuccuu

SEQ ID NO: 2916602 - RNA, 16 nt, Human
uuuccacuuguucuca

SEQ ID NO: 2916603 - RNA, 18 nt, Human
uuuccacuuguucucagg

SEQ ID NO: 2916604 - RNA, 20 nt, Human
uuucauuuuuugcaucagua

SEQ ID NO: 2916605 - RNA, 16 nt, Human
uuucacauagcugucu

SEQ ID NO: 2916606 - RNA, 18 nt, Human
uuucacauagcugucuag

SEQ ID NO: 2916607 - RNA, 20 nt, Human
uuucagcuaagggaagacau

SEQ ID NO: 2916608 - RNA, 21 nt, Human
uuucagcuaagggaagacauu

SEQ ID NO: 2916609 - RNA, 22 nt, Human
uuucagcuaagggaagacauuu

SEQ ID NO: 2916610 - RNA, 23 nt, Human
uuucagcuaagggaagacauuuc

SEQ ID NO: 2916611 - RNA, 20 nt, Human
uuucacaccggaagguuuuu

SEQ ID NO: 2916612 - RNA, 23 nt, Human
uuucaauuaauauuaauuuucua

SEQ ID NO: 2916613 - RNA, 14 nt, Human
uuucaauucucaaa

SEQ ID NO: 2916614 - RNA, 15 nt, Human
uuucaauucucaaaa

SEQ ID NO: 2916615 - RNA, 16 nt, Human
uuucaauucuguaggu

SEQ ID NO: 2916616 - RNA, 19 nt, Human
uuucacaguguguuuguga

SEQ ID NO: 2916617 - RNA, 13 nt, Human
uuucacagcuccu

SEQ ID NO: 2916618 - RNA, 20 nt, Human
uuucacaggugugguguaau

SEQ ID NO: 2916619 - RNA, 13 nt, Human
uuucacauaaaug

SEQ ID NO: 2916620 - RNA, 15 nt, Human
uuucacauaaaugca

SEQ ID NO: 2916621 - RNA, 21 nt, Human
uuucacauaaaugcagcccau

SEQ ID NO: 2916622 - RNA, 10 nt, Human
uuucaaugug

SEQ ID NO: 2916623 - RNA, 13 nt, Human
uuucaaugugauu

SEQ ID NO: 2916624 - RNA, 14 nt, Human
uuucaaugugauuc

SEQ ID NO: 2916625 - RNA, 20 nt, Human
uuucaaugugauucuaaugu

SEQ ID NO: 2916626 - RNA, 22 nt, Human
uuucaaugugauucuaaugucu

SEQ ID NO: 2916627 - RNA, 14 nt, Human
uuuaugcucuuuuu

SEQ ID NO: 2916628 - RNA, 20 nt, Human
uuuaugcucuuuuuuacuca

SEQ ID NO: 2916629 - RNA, 20 nt, Human
uuuaugcauuugcauuugcu

SEQ ID NO: 2916630 - RNA, 19 nt, Human
uuuaugccuucuuauugcu

SEQ ID NO: 2916631 - RNA, 18 nt, Human
uuuaugaguaacuauuau

SEQ ID NO: 2916632 - RNA, 20 nt, Human
uuuaugaguaacuauuauua

SEQ ID NO: 2916633 - RNA, 21 nt, Human
uuuaugaguaacuauuauuau

SEQ ID NO: 2916634 - RNA, 22 nt, Human
uuuaugaguaacuauuauuaua

SEQ ID NO: 2916635 - RNA, 12 nt, Human
uuuaugagaaau

SEQ ID NO: 2916636 - RNA, 13 nt, Human
uuuaugagaaaug

SEQ ID NO: 2916637 - RNA, 14 nt, Human
uuuaugagaaaugu

SEQ ID NO: 2916638 - RNA, 20 nt, Human
uuuaugagaaauguaaugcg

SEQ ID NO: 2916639 - RNA, 20 nt, Human
uuuaugagaugcugguuuuc

SEQ ID NO: 2916640 - RNA, 14 nt, Human
uuuaugagauggau

SEQ ID NO: 2916641 - RNA, 17 nt, Human
uuuaugauaauagauuc

SEQ ID NO: 2916642 - RNA, 18 nt, Human
uuuaugauaauagauucu

SEQ ID NO: 2916643 - RNA, 19 nt, Human
uuuaugauaauagauucuc

SEQ ID NO: 2916644 - RNA, 13 nt, Human
uucuuucccagug

SEQ ID NO: 2916645 - RNA, 16 nt, Human
uucuuucccagugagu

SEQ ID NO: 2916646 - RNA, 14 nt, Human
uucuuuagagaacu

SEQ ID NO: 2916647 - RNA, 17 nt, Human
uucuuuagagaacugaa

SEQ ID NO: 2916648 - RNA, 18 nt, Human
uucuuuagagaacugaaa

SEQ ID NO: 2916649 - RNA, 19 nt, Human
uucuuuagagaacugaaaa

SEQ ID NO: 2916650 - RNA, 20 nt, Human
uucuuuagagaacugaaaag

SEQ ID NO: 2916651 - RNA, 21 nt, Human
uucuuuagagaacugaaaaga

SEQ ID NO: 2916652 - RNA, 23 nt, Human
uucuuuagagaacugaaaagaga

SEQ ID NO: 2916653 - RNA, 19 nt, Human
uugaaaccaccuuuuauua

SEQ ID NO: 2916654 - RNA, 14 nt, Human
uugaaaccugcucu

SEQ ID NO: 2916655 - RNA, 16 nt, Human
uugaaaccugcucugu

SEQ ID NO: 2916656 - RNA, 14 nt, Human
uugaaaccuguaua

SEQ ID NO: 2916657 - RNA, 19 nt, Human
uugaaacacuuuuuugggg

SEQ ID NO: 2916658 - RNA, 15 nt, Human
uugaaaaucuugugu

SEQ ID NO: 2916659 - RNA, 21 nt, Human
uugaaaauaagaauagaaaua

SEQ ID NO: 2916660 - RNA, 15 nt, Human
uugaaaauuauuuua

SEQ ID NO: 2916661 - RNA, 19 nt, Human
uugaaaauuauuuuaaaca

SEQ ID NO: 2916662 - RNA, 20 nt, Human
uugaaaauuauuuuaaacaa

SEQ ID NO: 2916663 - RNA, 22 nt, Human
uugaaaauuauuuuaaacaaaa

SEQ ID NO: 2916664 - RNA, 18 nt, Human
uugaaaauucaaaaagug

SEQ ID NO: 2916665 - RNA, 20 nt, Human
uugaaaauucaaaaaguguu

SEQ ID NO: 2916666 - RNA, 21 nt, Human
uugaaaauucaaaaaguguuu

SEQ ID NO: 2916667 - RNA, 17 nt, Human
uugaaugacaacagaag

SEQ ID NO: 2916668 - RNA, 18 nt, Human
uugaaugacaacagaagc

SEQ ID NO: 2916669 - RNA, 17 nt, Human
uugaauguuaagcagau

SEQ ID NO: 2916670 - RNA, 14 nt, Human
uugaauguuaagca

SEQ ID NO: 2916671 - RNA, 13 nt, Human
uugaaugugucag

SEQ ID NO: 2916672 - RNA, 17 nt, Human
uugaaugucuuuugaau

SEQ ID NO: 2916673 - RNA, 22 nt, Human
uugaauguggcuugagaaauau

SEQ ID NO: 2916674 - RNA, 21 nt, Human
uugaauguggcuugagaaaua

SEQ ID NO: 2916675 - RNA, 19 nt, Human
uugaauguggcuugagaaa

SEQ ID NO: 2916676 - RNA, 20 nt, Human
uugaaugacaacagaagcuu

SEQ ID NO: 2916677 - RNA, 21 nt, Human
uugaaugacaacagaagcuuc

SEQ ID NO: 2916678 - RNA, 15 nt, Human
uugaagcaguugugu

SEQ ID NO: 2916679 - RNA, 16 nt, Human
uucuuaugcaaaaugg

SEQ ID NO: 2916680 - RNA, 17 nt, Human
uucuuaugcaaaaugga

SEQ ID NO: 2916681 - RNA, 18 nt, Human
uucuuaugcaaaauggaa

SEQ ID NO: 2916682 - RNA, 17 nt, Human
uucuuauacgcuuuucu

SEQ ID NO: 2916683 - RNA, 20 nt, Human
uucuuauacgcuuuucuuug

SEQ ID NO: 2916684 - RNA, 22 nt, Human
uucuuaguguugguuuaauauu

SEQ ID NO: 2916685 - RNA, 15 nt, Human
uucuuagcuuuuuaa

SEQ ID NO: 2916686 - RNA, 13 nt, Human
uucuuagugacuu

SEQ ID NO: 2916687 - RNA, 19 nt, Human
uucuuagcuuuuuaauugu

SEQ ID NO: 2916688 - RNA, 20 nt, Human
uucuuagcuuuuuaauuguu

SEQ ID NO: 2916689 - RNA, 17 nt, Human
uucuuauguugcccagu

SEQ ID NO: 2916690 - RNA, 19 nt, Human
uucuuauugcgcugcuacc

SEQ ID NO: 2916691 - RNA, 22 nt, Human
uucuuauggaauugauuugcau

SEQ ID NO: 2916692 - RNA, 18 nt, Human
uucuuauggaauugauuu

SEQ ID NO: 2916693 - RNA, 17 nt, Human
uucuuauggaauugauu

SEQ ID NO: 2916694 - RNA, 15 nt, Human
uucuuauggaauuga

SEQ ID NO: 2916695 - RNA, 23 nt, Human
uucuuaugccauguuaauuucau

SEQ ID NO: 2916696 - RNA, 14 nt, Human
uucuucagagauca

SEQ ID NO: 2916697 - RNA, 11 nt, Human
uucuucagaga

SEQ ID NO: 2916698 - RNA, 23 nt, Human
uucuucagccaccucucuuuuuc

SEQ ID NO: 2916699 - RNA, 18 nt, Human
uucuucagcguaaaaugg

SEQ ID NO: 2916700 - RNA, 19 nt, Human
uucuucagcguaaaauggu

SEQ ID NO: 2916701 - RNA, 20 nt, Human
uucuucagcguaaaauggug

SEQ ID NO: 2916702 - RNA, 22 nt, Human
uucuucagcguaaaauggugaa

SEQ ID NO: 2916703 - RNA, 23 nt, Human
uucuucaggcugccuaagacaug

SEQ ID NO: 2916704 - RNA, 24 nt, Human
uucuucaggcugccuaagacaugu

SEQ ID NO: 2916705 - RNA, 14 nt, Human
uucuucagccaccu

SEQ ID NO: 2916706 - RNA, 15 nt, Human
uucuucauauucuaa

SEQ ID NO: 2916707 - RNA, 20 nt, Human
uucuucauauucuaaaacca

SEQ ID NO: 2916708 - RNA, 18 nt, Human
uucuucaucugugacucc

SEQ ID NO: 2916709 - RNA, 22 nt, Human
uucuugugccauagucacaugg

SEQ ID NO: 2916710 - RNA, 14 nt, Human
uucuugugcuuuuc

SEQ ID NO: 2916711 - RNA, 22 nt, Human
uucuuuaaagaaguugaaguuu

SEQ ID NO: 2916712 - RNA, 13 nt, Human
uucuuuaaagaug

SEQ ID NO: 2916713 - RNA, 13 nt, Human
uucuuuaaauguu

SEQ ID NO: 2916714 - RNA, 14 nt, Human
uucuuuaaauguuu

SEQ ID NO: 2916715 - RNA, 12 nt, Human
uucuuuaaauua

SEQ ID NO: 2916716 - RNA, 13 nt, Human
uucuuuaaauuau

SEQ ID NO: 2916717 - RNA, 15 nt, Human
uucuuuaaauuaugu

SEQ ID NO: 2916718 - RNA, 13 nt, Human
uucuugucaaaaa

SEQ ID NO: 2916719 - RNA, 14 nt, Human
uucuugucaaaaaa

SEQ ID NO: 2916720 - RNA, 15 nt, Human
uucuugucagacaua

SEQ ID NO: 2916721 - RNA, 16 nt, Human
uucuugucagacauaa

SEQ ID NO: 2916722 - RNA, 17 nt, Human
uucuugucagacauaaa

SEQ ID NO: 2916723 - RNA, 19 nt, Human
uucuugucagacauaaagc

SEQ ID NO: 2916724 - RNA, 20 nt, Human
uucuugucagacauaaagcc

SEQ ID NO: 2916725 - RNA, 21 nt, Human
uucuugucagacauaaagcca

SEQ ID NO: 2916726 - RNA, 11 nt, Human
uucuugugaag

SEQ ID NO: 2916727 - RNA, 17 nt, Human
uucuugugaaggccaug

SEQ ID NO: 2916728 - RNA, 14 nt, Human
uucuugucuauagu

SEQ ID NO: 2916729 - RNA, 15 nt, Human
uucuugucuauaguu

SEQ ID NO: 2916730 - RNA, 23 nt, Human
uucuugucuauaguugucaguau

SEQ ID NO: 2916731 - RNA, 15 nt, Human
uucuaaagcucugac

SEQ ID NO: 2916732 - RNA, 16 nt, Human
uucuaaagcucugaca

SEQ ID NO: 2916733 - RNA, 17 nt, Human
uucuaaagcucugacau

SEQ ID NO: 2916734 - RNA, 20 nt, Human
uucuaagugaaauuucuagc

SEQ ID NO: 2916735 - RNA, 22 nt, Human
uucuaagugaaauuucuagccu

SEQ ID NO: 2916736 - RNA, 12 nt, Human
uucuaaguuucu

SEQ ID NO: 2916737 - RNA, 13 nt, Human
uucuaaguuucua

SEQ ID NO: 2916738 - RNA, 14 nt, Human
uucuaaguuucuaa

SEQ ID NO: 2916739 - RNA, 16 nt, Human
uucuaaguuucuaaga

SEQ ID NO: 2916740 - RNA, 15 nt, Human
uucuggcagaggagg

SEQ ID NO: 2916741 - RNA, 23 nt, Human
uucuggcaguuuugacaucagcc

SEQ ID NO: 2916742 - RNA, 17 nt, Human
uucuaaguuucuaagau

SEQ ID NO: 2916743 - RNA, 18 nt, Human
uucuaaguuucuaagauu

SEQ ID NO: 2916744 - RNA, 15 nt, Human
uucuggccucccaca

SEQ ID NO: 2916745 - RNA, 14 nt, Human
uucuggccucccac

SEQ ID NO: 2916746 - RNA, 13 nt, Human
uucuguauacaac

SEQ ID NO: 2916747 - RNA, 21 nt, Human
uucuguauacaacccuggcau

SEQ ID NO: 2916748 - RNA, 17 nt, Human
uucuggccuuuccucuc

SEQ ID NO: 2916749 - RNA, 20 nt, Human
uucuggccuuuccucucucc

SEQ ID NO: 2916750 - RNA, 21 nt, Human
uucuggccuuuccucucuccu

SEQ ID NO: 2916751 - RNA, 23 nt, Human
uucuguauacaacccuggcauua

SEQ ID NO: 2916752 - RNA, 24 nt, Human
uucuguauacaacccuggcauuau

SEQ ID NO: 2916753 - RNA, 15 nt, Human
uucuguauauacuuu

SEQ ID NO: 2916754 - RNA, 16 nt, Human
uucuguauauaaaugg

SEQ ID NO: 2916755 - RNA, 17 nt, Human
uucuguauauaaauggg

SEQ ID NO: 2916756 - RNA, 18 nt, Human
uucuguauauaaauggga

SEQ ID NO: 2916757 - RNA, 19 nt, Human
uucuguauauaaaugggaa

SEQ ID NO: 2916758 - RNA, 21 nt, Human
uucuguauauaaaugggaaca

SEQ ID NO: 2916759 - RNA, 17 nt, Human
uucuguauauacuuuuu

SEQ ID NO: 2916760 - RNA, 16 nt, Human
uucuguauauacuuuu

SEQ ID NO: 2916761 - RNA, 18 nt, Human
uucugugaugagcugauc

SEQ ID NO: 2916762 - RNA, 16 nt, Human
uucugugcccuacuca

SEQ ID NO: 2916763 - RNA, 17 nt, Human
uucugugaugagcugau

SEQ ID NO: 2916764 - RNA, 19 nt, Human
uucugugagacccccacac

SEQ ID NO: 2916765 - RNA, 17 nt, Human
uucugugaucauuuauu

SEQ ID NO: 2916766 - RNA, 20 nt, Human
uugccauggaguugugauca

SEQ ID NO: 2916767 - RNA, 21 nt, Human
uugccauccuaaaagccaccc

SEQ ID NO: 2916768 - RNA, 19 nt, Human
uugccauguuggccaggcu

SEQ ID NO: 2916769 - RNA, 18 nt, Human
uugccauguuggccaggc

SEQ ID NO: 2916770 - RNA, 17 nt, Human
uugccauguuggccagg

SEQ ID NO: 2916771 - RNA, 16 nt, Human
uugccauguuggccag

SEQ ID NO: 2916772 - RNA, 23 nt, Human
uugcagcuaaggaggggaaaaaa

SEQ ID NO: 2916773 - RNA, 15 nt, Human
uugccagaaguugug

SEQ ID NO: 2916774 - RNA, 18 nt, Human
uugccagaugcugcagag

SEQ ID NO: 2916775 - RNA, 14 nt, Human
uugcauaaagcaua

SEQ ID NO: 2916776 - RNA, 17 nt, Human
uugcagcucccauucua

SEQ ID NO: 2916777 - RNA, 22 nt, Human
uugcagcucccauucuaugugu

SEQ ID NO: 2916778 - RNA, 23 nt, Human
uugcagcucccauucuauguguc

SEQ ID NO: 2916779 - RNA, 16 nt, Human
uugcaguucagcacca

SEQ ID NO: 2916780 - RNA, 13 nt, Human
uugcaguucaccu

SEQ ID NO: 2916781 - RNA, 13 nt, Human
uugcaguucuuga

SEQ ID NO: 2916782 - RNA, 15 nt, Human
uugcagcccuuguga

SEQ ID NO: 2916783 - RNA, 21 nt, Human
uugcagcccuugugaugugau

SEQ ID NO: 2916784 - RNA, 17 nt, Human
uugcagcaauuaaaaau

SEQ ID NO: 2916785 - RNA, 23 nt, Human
uugcagacaggcaagcaccuccu

SEQ ID NO: 2916786 - RNA, 19 nt, Human
uugauucauaguaacuucu

SEQ ID NO: 2916787 - RNA, 20 nt, Human
uugcacuugugauuauuuau

SEQ ID NO: 2916788 - RNA, 17 nt, Human
uugcacuggaguucuau

SEQ ID NO: 2916789 - RNA, 12 nt, Human
uugcacuuugua

SEQ ID NO: 2916790 - RNA, 13 nt, Human
uugcacuuuguag

SEQ ID NO: 2916791 - RNA, 14 nt, Human
uugcacuuuguagu

SEQ ID NO: 2916792 - RNA, 17 nt, Human
uugcacuugugauuauu

SEQ ID NO: 2916793 - RNA, 14 nt, Human
uugauucagccugu

SEQ ID NO: 2916794 - RNA, 16 nt, Human
uugcacuccagccugg

SEQ ID NO: 2916795 - RNA, 19 nt, Human
uugcacugaaauggaauuc

SEQ ID NO: 2916796 - RNA, 14 nt, Human
uugaggcugcagcg

SEQ ID NO: 2916797 - RNA, 13 nt, Human
uugauaugaguau

SEQ ID NO: 2916798 - RNA, 16 nt, Human
uugauaugaguauaca

SEQ ID NO: 2916799 - RNA, 18 nt, Human
uugauaugaguauacaau

SEQ ID NO: 2916800 - RNA, 22 nt, Human
uugauauuuucaacgcagcccu

SEQ ID NO: 2916801 - RNA, 21 nt, Human
uugauauguuuuauuucauug

SEQ ID NO: 2916802 - RNA, 12 nt, Human
uugauauuguga

SEQ ID NO: 2916803 - RNA, 14 nt, Human
uugauauugugaac

SEQ ID NO: 2916804 - RNA, 17 nt, Human
uugauauugugaacauu

SEQ ID NO: 2916805 - RNA, 20 nt, Human
uugauauugugaacauuugu

SEQ ID NO: 2916806 - RNA, 23 nt, Human
uugaucauaaacugacuaucaua

SEQ ID NO: 2916807 - RNA, 14 nt, Human
uugaucacacuauu

SEQ ID NO: 2916808 - RNA, 17 nt, Human
uugaucacacuauuuua

SEQ ID NO: 2916809 - RNA, 18 nt, Human
uugaggauuuagaagugu

SEQ ID NO: 2916810 - RNA, 15 nt, Human
uugauauuuucuaua

SEQ ID NO: 2916811 - RNA, 14 nt, Human
uugaucauuucuug

SEQ ID NO: 2916812 - RNA, 17 nt, Human
uugaucauuucuuguga

SEQ ID NO: 2916813 - RNA, 18 nt, Human
uugaucauuuucccccca

SEQ ID NO: 2916814 - RNA, 22 nt, Human
uugaucauuuuccccccacucu

SEQ ID NO: 2916815 - RNA, 19 nt, Human
uugaucauuuuccccccac

SEQ ID NO: 2916816 - RNA, 18 nt, Human
uugauccauccagcuugc

SEQ ID NO: 2916817 - RNA, 21 nt, Human
uugauccauccagcuugccag

SEQ ID NO: 2916818 - RNA, 18 nt, Human
uugaagauaguaacugua

SEQ ID NO: 2916819 - RNA, 16 nt, Human
uugaauguuaagaauu

SEQ ID NO: 2916820 - RNA, 17 nt, Human
uugaauguuaagaauug

SEQ ID NO: 2916821 - RNA, 23 nt, Human
uugaauguuauuuguuauuuuca

SEQ ID NO: 2916822 - RNA, 12 nt, Human
uugaauuaaaac

SEQ ID NO: 2916823 - RNA, 14 nt, Human
uugaauuaaaacuu

SEQ ID NO: 2916824 - RNA, 16 nt, Human
uugaauuaaaacuucu

SEQ ID NO: 2916825 - RNA, 17 nt, Human
uugaauuaaaacuucuu

SEQ ID NO: 2916826 - RNA, 20 nt, Human
uugagcgugaaucuguaucu

SEQ ID NO: 2916827 - RNA, 15 nt, Human
uugagcuauugcugu

SEQ ID NO: 2916828 - RNA, 13 nt, Human
uugagcucagccc

SEQ ID NO: 2916829 - RNA, 13 nt, Human
uugaggccaggag

SEQ ID NO: 2916830 - RNA, 13 nt, Human
uugaggcaagugu

SEQ ID NO: 2916831 - RNA, 18 nt, Human
uugaggcaagugugggcc

SEQ ID NO: 2916832 - RNA, 16 nt, Human
uugagcugauauaaau

SEQ ID NO: 2916833 - RNA, 12 nt, Human
uugaggagcccc

SEQ ID NO: 2916834 - RNA, 15 nt, Human
uugaggagcauguuu

SEQ ID NO: 2916835 - RNA, 16 nt, Human
uugaggagcauguuuu

SEQ ID NO: 2916836 - RNA, 18 nt, Human
uugaggagcauguuuugu

SEQ ID NO: 2916837 - RNA, 21 nt, Human
uugaggagcauguuuuguaua

SEQ ID NO: 2916838 - RNA, 23 nt, Human
uugaggagcauguuuuguauaca

SEQ ID NO: 2916839 - RNA, 16 nt, Human
uugaggagccccagcu

SEQ ID NO: 2916840 - RNA, 20 nt, Human
uuggucugacccacugcuuu

SEQ ID NO: 2916841 - RNA, 13 nt, Human
uuggucuggacug

SEQ ID NO: 2916842 - RNA, 17 nt, Human
uuggucuggacugacag

SEQ ID NO: 2916843 - RNA, 14 nt, Human
uuggucucuauuuc

SEQ ID NO: 2916844 - RNA, 18 nt, Human
uuggucucuauuucauuu

SEQ ID NO: 2916845 - RNA, 17 nt, Human
uuggucuaauuuauuca

SEQ ID NO: 2916846 - RNA, 14 nt, Human
uugguccugucccc

SEQ ID NO: 2916847 - RNA, 17 nt, Human
uugguccuguccccgca

SEQ ID NO: 2916848 - RNA, 12 nt, Human
uugguaaugugu

SEQ ID NO: 2916849 - RNA, 14 nt, Human
uugguaagagacag

SEQ ID NO: 2916850 - RNA, 18 nt, Human
uugguaagagacagaaug

SEQ ID NO: 2916851 - RNA, 13 nt, Human
uugguacaaaaau

SEQ ID NO: 2916852 - RNA, 14 nt, Human
uugguacaaaaaua

SEQ ID NO: 2916853 - RNA, 15 nt, Human
uugguacaaaaauaa

SEQ ID NO: 2916854 - RNA, 14 nt, Human
uugguacacaacua

SEQ ID NO: 2916855 - RNA, 20 nt, Human
uugguacauggccaguguga

SEQ ID NO: 2916856 - RNA, 22 nt, Human
uugggaucgcauugcauaccuu

SEQ ID NO: 2916857 - RNA, 16 nt, Human
uugggauuuuagaaca

SEQ ID NO: 2916858 - RNA, 19 nt, Human
uugguaacacaaauuuuca

SEQ ID NO: 2916859 - RNA, 16 nt, Human
uugggauacugcaggg

SEQ ID NO: 2916860 - RNA, 15 nt, Human
uugggaggcugaggc

SEQ ID NO: 2916861 - RNA, 19 nt, Human
uugggagggaaaagggaag

SEQ ID NO: 2916862 - RNA, 12 nt, Human
uugggaguccag

SEQ ID NO: 2916863 - RNA, 14 nt, Human
uugggaguccaggc

SEQ ID NO: 2916864 - RNA, 15 nt, Human
uugggaguccaggca

SEQ ID NO: 2916865 - RNA, 17 nt, Human
uugggaguccaggcaca

SEQ ID NO: 2916866 - RNA, 18 nt, Human
uugggaguccaggcacag

SEQ ID NO: 2916867 - RNA, 20 nt, Human
uugggaguccaggcacagga

SEQ ID NO: 2916868 - RNA, 18 nt, Human
uugggaguuuugaauguu

SEQ ID NO: 2916869 - RNA, 17 nt, Human
uugggagcuugggaaug

SEQ ID NO: 2916870 - RNA, 11 nt, Human
uugggagcagg

SEQ ID NO: 2916871 - RNA, 14 nt, Human
uugggagccucugg

SEQ ID NO: 2916872 - RNA, 20 nt, Human
uuggcagugagugagccugg

SEQ ID NO: 2916873 - RNA, 16 nt, Human
uuggcagguccuggcc

SEQ ID NO: 2916874 - RNA, 20 nt, Human
uuggcagguccuggccagau

SEQ ID NO: 2916875 - RNA, 19 nt, Human
uuggcaguguuuugagaac

SEQ ID NO: 2916876 - RNA, 14 nt, Human
uuggcaguuuggua

SEQ ID NO: 2916877 - RNA, 15 nt, Human
uuggcaguuugguau

SEQ ID NO: 2916878 - RNA, 17 nt, Human
uuggcuuacugcagccu

SEQ ID NO: 2916879 - RNA, 23 nt, Human
uuggcagugagugagccuggcuc

SEQ ID NO: 2916880 - RNA, 11 nt, Human
uuggcuucugu

SEQ ID NO: 2916881 - RNA, 21 nt, Human
uuggcuuccaugaugguuauu

SEQ ID NO: 2916882 - RNA, 22 nt, Human
uuggcuucugugaugagcugau

SEQ ID NO: 2916883 - RNA, 14 nt, Human
uuggcuugacucag

SEQ ID NO: 2916884 - RNA, 18 nt, Human
uuggcuuguagaauuguu

SEQ ID NO: 2916885 - RNA, 21 nt, Human
uuggcuuguagaauuguuaua

SEQ ID NO: 2916886 - RNA, 20 nt, Human
uugggacccugcuuuagagc

SEQ ID NO: 2916887 - RNA, 22 nt, Human
uugggacccugcuuuagagcua

SEQ ID NO: 2916888 - RNA, 15 nt, Human
uugggagagccccug

SEQ ID NO: 2916889 - RNA, 16 nt, Human
uugggagagccccugg

SEQ ID NO: 2916890 - RNA, 18 nt, Human
uugggaauggauccugga

SEQ ID NO: 2916891 - RNA, 21 nt, Human
uugggaaggggacccccgccc

SEQ ID NO: 2916892 - RNA, 19 nt, Human
uugggaauauccauguacu

SEQ ID NO: 2916893 - RNA, 14 nt, Human
uuguaaacaaacuc

SEQ ID NO: 2916894 - RNA, 15 nt, Human
uuguaaacaaacucu

SEQ ID NO: 2916895 - RNA, 16 nt, Human
uuguaaacaaacucuu

SEQ ID NO: 2916896 - RNA, 19 nt, Human
uuguaaaauguucucuuau

SEQ ID NO: 2916897 - RNA, 14 nt, Human
uuguaaacaugugu

SEQ ID NO: 2916898 - RNA, 15 nt, Human
uuguaaacauguguu

SEQ ID NO: 2916899 - RNA, 16 nt, Human
uuguaaacucaaaaua

SEQ ID NO: 2916900 - RNA, 22 nt, Human
uuguaaacucaaaauauuugua

SEQ ID NO: 2916901 - RNA, 20 nt, Human
uuguacauuuaugauuuaau

SEQ ID NO: 2916902 - RNA, 14 nt, Human
uuguaccucuggcu

SEQ ID NO: 2916903 - RNA, 21 nt, Human
uuguaccuguaggacucucau

SEQ ID NO: 2916904 - RNA, 23 nt, Human
uuguaccuuuuuuguuuuuucaa

SEQ ID NO: 2916905 - RNA, 23 nt, Human
uuguacauuuaugauuuaauaaa

SEQ ID NO: 2916906 - RNA, 17 nt, Human
uuguacuguuuaauguu

SEQ ID NO: 2916907 - RNA, 24 nt, Human
uuguacuguuuaauguucugugau

SEQ ID NO: 2916908 - RNA, 14 nt, Human
uuguaucuuaaauu

SEQ ID NO: 2916909 - RNA, 19 nt, Human
uuguagcagauuguuuccu

SEQ ID NO: 2916910 - RNA, 22 nt, Human
uuguagcagauuguuuccucuu

SEQ ID NO: 2916911 - RNA, 23 nt, Human
uuguagcauauaggugauguuug

SEQ ID NO: 2916912 - RNA, 20 nt, Human
uugucuaugggacucaaugc

SEQ ID NO: 2916913 - RNA, 13 nt, Human
uugucaacauugu

SEQ ID NO: 2916914 - RNA, 14 nt, Human
uugucaacauugug

SEQ ID NO: 2916915 - RNA, 15 nt, Human
uugucaacauuguga

SEQ ID NO: 2916916 - RNA, 19 nt, Human
uugucucuaugccagcuca

SEQ ID NO: 2916917 - RNA, 12 nt, Human
uugucucuccuu

SEQ ID NO: 2916918 - RNA, 13 nt, Human
uugucucuccuuu

SEQ ID NO: 2916919 - RNA, 14 nt, Human
uugucucuccuuuu

SEQ ID NO: 2916920 - RNA, 16 nt, Human
uugucucuccuuuucu

SEQ ID NO: 2916921 - RNA, 21 nt, Human
uugucucuccuuuucuuuugu

SEQ ID NO: 2916922 - RNA, 22 nt, Human
uugucucuccuuuucuuuuguu

SEQ ID NO: 2916923 - RNA, 14 nt, Human
uugucucucuucag

SEQ ID NO: 2916924 - RNA, 15 nt, Human
uugucucucuucaga

SEQ ID NO: 2916925 - RNA, 19 nt, Human
uugucucucuucagacucu

SEQ ID NO: 2916926 - RNA, 17 nt, Human
uugucuccuacuccuga

SEQ ID NO: 2916927 - RNA, 18 nt, Human
uugucuccuacuccugac

SEQ ID NO: 2916928 - RNA, 17 nt, Human
uugucucguuugugauu

SEQ ID NO: 2916929 - RNA, 14 nt, Human
uugucucuacuuuu

SEQ ID NO: 2916930 - RNA, 12 nt, Human
uugucuauuuau

SEQ ID NO: 2916931 - RNA, 11 nt, Human
uugucuauuuu

SEQ ID NO: 2916932 - RNA, 12 nt, Human
uugucuauuuua

SEQ ID NO: 2916933 - RNA, 13 nt, Human
uugucuauuuuaa

SEQ ID NO: 2916934 - RNA, 16 nt, Human
uugucuauuuuaaaau

SEQ ID NO: 2916935 - RNA, 20 nt, Human
uugucuauaguugucaguau

SEQ ID NO: 2916936 - RNA, 16 nt, Human
uugucuauuuuugucu

SEQ ID NO: 2916937 - RNA, 17 nt, Human
uugucuauuuuugucuu

SEQ ID NO: 2916938 - RNA, 15 nt, Human
uuguaugcaauggau

SEQ ID NO: 2916939 - RNA, 18 nt, Human
uugucuauuuuugucuua

SEQ ID NO: 2916940 - RNA, 18 nt, Human
uugucugaagucacugca

SEQ ID NO: 2916941 - RNA, 17 nt, Human
uugucugaagucacugc

SEQ ID NO: 2916942 - RNA, 14 nt, Human
uugucuaugggacu

SEQ ID NO: 2916943 - RNA, 23 nt, Human
uuguauuuugugugaccaacugu

SEQ ID NO: 2916944 - RNA, 20 nt, Human
uuguaugauguguugugaua

SEQ ID NO: 2916945 - RNA, 21 nt, Human
uuguaugauguguugugauag

SEQ ID NO: 2916946 - RNA, 13 nt, Human
uuguaugaugugu

SEQ ID NO: 2916947 - RNA, 14 nt, Human
uuguaugauguguu

SEQ ID NO: 2916948 - RNA, 16 nt, Human
uuguaugauguguugu

SEQ ID NO: 2916949 - RNA, 18 nt, Human
uuguaugauguguuguga

SEQ ID NO: 2916950 - RNA, 20 nt, Human
uuguaugauccuaaugaaug

SEQ ID NO: 2916951 - RNA, 22 nt, Human
uuguaugaaagauggcugugcc

SEQ ID NO: 2916952 - RNA, 21 nt, Human
uugcugccugaagaacaguaa

SEQ ID NO: 2916953 - RNA, 21 nt, Human
uugcggccaguauuagacugg

SEQ ID NO: 2916954 - RNA, 12 nt, Human
uugcuaacugaa

SEQ ID NO: 2916955 - RNA, 13 nt, Human
uugcuaacugaac

SEQ ID NO: 2916956 - RNA, 15 nt, Human
uugcuaacugaacuu

SEQ ID NO: 2916957 - RNA, 16 nt, Human
uugcuaacugaacuuu

SEQ ID NO: 2916958 - RNA, 19 nt, Human
uugcuaacugaacuuugaa

SEQ ID NO: 2916959 - RNA, 21 nt, Human
uugcuaacugaacuuugaaga

SEQ ID NO: 2916960 - RNA, 13 nt, Human
uugcugcuagaac

SEQ ID NO: 2916961 - RNA, 14 nt, Human
uugcugcuagaacu

SEQ ID NO: 2916962 - RNA, 15 nt, Human
uugcugcuagaacuu

SEQ ID NO: 2916963 - RNA, 16 nt, Human
uugcugcuagaacuuu

SEQ ID NO: 2916964 - RNA, 17 nt, Human
uugcugcuagaacuuuu

SEQ ID NO: 2916965 - RNA, 18 nt, Human
uugcugcuagaacuuuuu

SEQ ID NO: 2916966 - RNA, 23 nt, Human
uugcugcuagaacuuuuuuaaau

SEQ ID NO: 2916967 - RNA, 15 nt, Human
uugcuguccuaggcc

SEQ ID NO: 2916968 - RNA, 16 nt, Human
uugcuguccugaucug

SEQ ID NO: 2916969 - RNA, 20 nt, Human
uugcuguccugaucugugau

SEQ ID NO: 2916970 - RNA, 11 nt, Human
uugcugucucu

SEQ ID NO: 2916971 - RNA, 12 nt, Human
uugcugucucug

SEQ ID NO: 2916972 - RNA, 14 nt, Human
uugcugucucugcu

SEQ ID NO: 2916973 - RNA, 15 nt, Human
uugcugucucugcuc

SEQ ID NO: 2916974 - RNA, 16 nt, Human
uugcugucucugcucg

SEQ ID NO: 2916975 - RNA, 14 nt, Human
uugcugucugcagc

SEQ ID NO: 2916976 - RNA, 18 nt, Human
uugcugucugcagccuug

SEQ ID NO: 2916977 - RNA, 18 nt, Human
uugcugugaacaauuguc

SEQ ID NO: 2916978 - RNA, 14 nt, Human
uugcugugaacuga

SEQ ID NO: 2916979 - RNA, 11 nt, Human
uugcuguccua

SEQ ID NO: 2916980 - RNA, 20 nt, Human
uugcugugagcaagaaguca

SEQ ID NO: 2916981 - RNA, 11 nt, Human
uugcuggcuug

SEQ ID NO: 2916982 - RNA, 23 nt, Human
uugcuggacugucauagaaauua

SEQ ID NO: 2916983 - RNA, 21 nt, Human
uugcuggacggggacugggga

SEQ ID NO: 2916984 - RNA, 23 nt, Human
uugcuggacggggacuggggaug

SEQ ID NO: 2916985 - RNA, 17 nt, Human
uugccuuuuucauuuuc

SEQ ID NO: 2916986 - RNA, 20 nt, Human
uugccuuuuucauuuuccaa

SEQ ID NO: 2916987 - RNA, 22 nt, Human
uugccuuuuucauuuuccaaua

SEQ ID NO: 2916988 - RNA, 19 nt, Human
uugcgaauccaagcucccu

SEQ ID NO: 2916989 - RNA, 20 nt, Human
uugcgaauccaagcucccug

SEQ ID NO: 2916990 - RNA, 19 nt, Human
uugcgauagagucucacug

SEQ ID NO: 2916991 - RNA, 16 nt, Human
uugccuuugaauguua

SEQ ID NO: 2916992 - RNA, 17 nt, Human
uugccuuugaauguuaa

SEQ ID NO: 2916993 - RNA, 20 nt, Human
uugccuugggcugcuccuca

SEQ ID NO: 2916994 - RNA, 22 nt, Human
uugccuuuagugaucacagcag

SEQ ID NO: 2916995 - RNA, 23 nt, Human
uugccuuuagugaucacagcagc

SEQ ID NO: 2916996 - RNA, 17 nt, Human
uugccuuuguuuugaug

SEQ ID NO: 2916997 - RNA, 21 nt, Human
uugccauguuggccaggcugg

SEQ ID NO: 2916998 - RNA, 20 nt, Human
uugccauguuggccaggcug

SEQ ID NO: 2916999 - RNA, 17 nt, Human
uugccauuggacaguug

SEQ ID NO: 2917000 - RNA, 18 nt, Human
uugccauuggacaguugu

SEQ ID NO: 2917001 - RNA, 13 nt, Human
uugccauuuagcg

SEQ ID NO: 2917002 - RNA, 13 nt, Human
uugccauuugaua

SEQ ID NO: 2917003 - RNA, 18 nt, Human
uugccauuugauaccccu

SEQ ID NO: 2917004 - RNA, 21 nt, Human
uugccauuugauaccccuggg

SEQ ID NO: 2917005 - RNA, 20 nt, Human
uugccaugggcuucacugua

SEQ ID NO: 2917006 - RNA, 21 nt, Human
uugccaugggcuucacuguau

SEQ ID NO: 2917007 - RNA, 22 nt, Human
uugccaugggcuucacuguaua

SEQ ID NO: 2917008 - RNA, 14 nt, Human
uugccauguguuuu

SEQ ID NO: 2917009 - RNA, 14 nt, Human
uugccauguugcca

SEQ ID NO: 2917010 - RNA, 15 nt, Human
uugccuuccuaagcc

SEQ ID NO: 2917011 - RNA, 22 nt, Human
uugccuuccuaagccuguggcu

SEQ ID NO: 2917012 - RNA, 20 nt, Human
uugccuuccuuucuccagga

SEQ ID NO: 2917013 - RNA, 22 nt, Human
uugccuuccuuucuccaggacc

SEQ ID NO: 2917014 - RNA, 23 nt, Human
uugccuuccuuucuccaggacca

SEQ ID NO: 2917015 - RNA, 14 nt, Human
uugccuucuuugaa

SEQ ID NO: 2917016 - RNA, 16 nt, Human
uugccuucuuugaaga

SEQ ID NO: 2917017 - RNA, 17 nt, Human
uugccuucuuugaagaa

SEQ ID NO: 2917018 - RNA, 18 nt, Human
uugccuucuuugaagaag

SEQ ID NO: 2917019 - RNA, 15 nt, Human
uugccuugcagaacu

SEQ ID NO: 2917020 - RNA, 17 nt, Human
uugccuugcagaacugc

SEQ ID NO: 2917021 - RNA, 19 nt, Human
uugccuugcagaacugcca

SEQ ID NO: 2917022 - RNA, 20 nt, Human
uugccuugcagaacugccau

SEQ ID NO: 2917023 - RNA, 16 nt, Human
uugccuuaaagaaagu

SEQ ID NO: 2917024 - RNA, 17 nt, Human
uugccuuauuaaaguuc

SEQ ID NO: 2917025 - RNA, 14 nt, Human
uuggaagaggaaaa

SEQ ID NO: 2917026 - RNA, 19 nt, Human
uuggaagauccugugagga

SEQ ID NO: 2917027 - RNA, 21 nt, Human
uuggaagauccugugaggagc

SEQ ID NO: 2917028 - RNA, 15 nt, Human
uuggaagauucagcu

SEQ ID NO: 2917029 - RNA, 19 nt, Human
uuggaagauuuucagucua

SEQ ID NO: 2917030 - RNA, 13 nt, Human
uuggaagagaaag

SEQ ID NO: 2917031 - RNA, 13 nt, Human
uuggaagagaauc

SEQ ID NO: 2917032 - RNA, 15 nt, Human
uuggaagagaaucac

SEQ ID NO: 2917033 - RNA, 19 nt, Human
uuggaagcuccgcuuucua

SEQ ID NO: 2917034 - RNA, 17 nt, Human
uuggaagcucugaaguc

SEQ ID NO: 2917035 - RNA, 15 nt, Human
uugcuguguuuaauu

SEQ ID NO: 2917036 - RNA, 17 nt, Human
uugcuguguuuaauuug

SEQ ID NO: 2917037 - RNA, 18 nt, Human
uugcuguguuuaauuuga

SEQ ID NO: 2917038 - RNA, 21 nt, Human
uugcuguguuuaauuugacuu

SEQ ID NO: 2917039 - RNA, 22 nt, Human
uugcuguuaugucuguuuaaga

SEQ ID NO: 2917040 - RNA, 15 nt, Human
uugcuguugaaagca

SEQ ID NO: 2917041 - RNA, 16 nt, Human
uugcuguugaaagcaa

SEQ ID NO: 2917042 - RNA, 17 nt, Human
uugcuguugaaagcaaa

SEQ ID NO: 2917043 - RNA, 21 nt, Human
uugcuguugaaagcaaaaaug

SEQ ID NO: 2917044 - RNA, 22 nt, Human
uugcuguugaaagcaaaaaugc

SEQ ID NO: 2917045 - RNA, 23 nt, Human
uugcuguugaaagcaaaaaugcu

SEQ ID NO: 2917046 - RNA, 12 nt, Human
uugcuguugaca

SEQ ID NO: 2917047 - RNA, 20 nt, Human
uugcuguugacauauuuaau

SEQ ID NO: 2917048 - RNA, 14 nt, Human
uugcuguugcuuga

SEQ ID NO: 2917049 - RNA, 15 nt, Human
uugcuguugcuugaa

SEQ ID NO: 2917050 - RNA, 13 nt, Human
uugcuguuuccuu

SEQ ID NO: 2917051 - RNA, 15 nt, Human
uugcuguuuccuuuu

SEQ ID NO: 2917052 - RNA, 18 nt, Human
uuggaaugggcagcucau

SEQ ID NO: 2917053 - RNA, 17 nt, Human
uuggaaugggcagcuca

SEQ ID NO: 2917054 - RNA, 15 nt, Human
uuggaauugucuuua

SEQ ID NO: 2917055 - RNA, 13 nt, Human
uuggaauuuacca

SEQ ID NO: 2917056 - RNA, 13 nt, Human
uuggaauacuuuu

SEQ ID NO: 2917057 - RNA, 15 nt, Human
uuggaauaggaauaa

SEQ ID NO: 2917058 - RNA, 16 nt, Human
uuggacauagauauuu

SEQ ID NO: 2917059 - RNA, 17 nt, Human
uuggacauagauauuuu

SEQ ID NO: 2917060 - RNA, 23 nt, Human
uuggacauagauauuuucacaau

SEQ ID NO: 2917061 - RNA, 23 nt, Human
uuggacaaucaugaaauaugcau

SEQ ID NO: 2917062 - RNA, 19 nt, Human
uuggacaccuuuagguucu

SEQ ID NO: 2917063 - RNA, 15 nt, Human
uuggacacuguacaa

SEQ ID NO: 2917064 - RNA, 15 nt, Human
uuggacaaaugugaa

SEQ ID NO: 2917065 - RNA, 17 nt, Human
uuggacaaaugugaaga

SEQ ID NO: 2917066 - RNA, 19 nt, Human
uuggacaaaugugaagaug

SEQ ID NO: 2917067 - RNA, 21 nt, Human
uuggacaaaugugaagaugca

SEQ ID NO: 2917068 - RNA, 22 nt, Human
uuggacaaaugugaagaugcau

SEQ ID NO: 2917069 - RNA, 22 nt, Human
uuggauuugacauugcguuuga

SEQ ID NO: 2917070 - RNA, 14 nt, Human
uuggauuugacauu

SEQ ID NO: 2917071 - RNA, 14 nt, Human
uuggauuuguuuaa

SEQ ID NO: 2917072 - RNA, 18 nt, Human
uuggauuuguuuaaaagg

SEQ ID NO: 2917073 - RNA, 21 nt, Human
uuggauuuuuaauuaaaaacu

SEQ ID NO: 2917074 - RNA, 20 nt, Human
uuggcaauaguuugcauaga

SEQ ID NO: 2917075 - RNA, 16 nt, Human
uuggcaauauuccuua

SEQ ID NO: 2917076 - RNA, 16 nt, Human
uuggcaauaguuugca

SEQ ID NO: 2917077 - RNA, 11 nt, Human
uuggcaccaaa

SEQ ID NO: 2917078 - RNA, 12 nt, Human
uuggcaccaaag

SEQ ID NO: 2917079 - RNA, 18 nt, Human
uuggcaccaaagaugcag

SEQ ID NO: 2917080 - RNA, 23 nt, Human
uuggcaccaaagaugcagccgcc

SEQ ID NO: 2917081 - RNA, 15 nt, Human
uuggcagcaccuguc

SEQ ID NO: 2917082 - RNA, 19 nt, Human
uuuguguaauagaaaacug

SEQ ID NO: 2917083 - RNA, 12 nt, Human
uuuguggcuggg

SEQ ID NO: 2917084 - RNA, 14 nt, Human
uuugugggaauuua

SEQ ID NO: 2917085 - RNA, 17 nt, Human
uuugugggaauuuaaga

SEQ ID NO: 2917086 - RNA, 22 nt, Human
uuugugguacgaccuuuagauu

SEQ ID NO: 2917087 - RNA, 16 nt, Human
uuuguggugauauaga

SEQ ID NO: 2917088 - RNA, 20 nt, Human
uuuguggggcuuggcgugga

SEQ ID NO: 2917089 - RNA, 16 nt, Human
uuugugguuuuaugga

SEQ ID NO: 2917090 - RNA, 16 nt, Human
uuuguguaaugaaaau

SEQ ID NO: 2917091 - RNA, 13 nt, Human
caagcgccuggag

SEQ ID NO: 2917092 - RNA, 21 nt, Human
cuguccucccauccccuggac

SEQ ID NO: 2917093 - RNA, 15 nt, Human
caguccagccuggag

SEQ ID NO: 2917094 - RNA, 21 nt, Human
guguccuguaguugcguggac

SEQ ID NO: 2917095 - RNA, 20 nt, Human
guuugcacuguaugcuggac

SEQ ID NO: 2917096 - RNA, 15 nt, Human
gccuggcagccuggc

SEQ ID NO: 2917097 - RNA, 18 nt, Human
uuguaaaaagaaaaacca

SEQ ID NO: 2917098 - RNA, 21 nt, Human
gcuuuaaagggccugccuggc

SEQ ID NO: 2917099 - RNA, 15 nt, Human
gcucgugugccuggc

SEQ ID NO: 2917100 - RNA, 17 nt, Human
gccuguccagccugggc

SEQ ID NO: 2917101 - RNA, 18 nt, Human
cuguccaucagccaggac

SEQ ID NO: 2917102 - RNA, 13 nt, Human
guugcagcuggac

SEQ ID NO: 2917103 - RNA, 15 nt, Human
guuugaagccuggaa

SEQ ID NO: 2917104 - RNA, 23 nt, Human
uagaccaaggaacaaaaaaacca

SEQ ID NO: 2917105 - RNA, 23 nt, Human
gcugaguauggagcagccuggag

SEQ ID NO: 2917106 - RNA, 20 nt, Human
gcugcaucggaggccaggac

SEQ ID NO: 2917107 - RNA, 20 nt, Human
gcugcccugagcgccuggau

SEQ ID NO: 2917108 - RNA, 13 nt, Human
gcugcugccuggc

SEQ ID NO: 2917109 - RNA, 20 nt, Human
gcuccuccuuggugccuggc

SEQ ID NO: 2917110 - RNA, 12 nt, Human
gcuugccuggag

SEQ ID NO: 2917111 - RNA, 18 nt, Human
gcugugaggccccuggac

SEQ ID NO: 2917112 - RNA, 20 nt, Human
gcugugcagcgcagcuggac

SEQ ID NO: 2917113 - RNA, 14 nt, Human
gcuguggccugggc

SEQ ID NO: 2917114 - RNA, 13 nt, Human
gcugcagcuggac

SEQ ID NO: 2917115 - RNA, 15 nt, Human
gcucagugccuggac

SEQ ID NO: 2917116 - RNA, 11 nt, Human
ggcgccuggag

SEQ ID NO: 2917117 - RNA, 19 nt, Human
gcaugugaucacgccuggc

SEQ ID NO: 2917118 - RNA, 14 nt, Human
gcaggugccuggac

SEQ ID NO: 2917119 - RNA, 16 nt, Human
gccaguccugccuggc

SEQ ID NO: 2917120 - RNA, 19 nt, Human
gccuggccagggccuggaa

SEQ ID NO: 2917121 - RNA, 16 nt, Human
gccggcaggccuggac

SEQ ID NO: 2917122 - RNA, 20 nt, Human
gcugcaccugccagccuggc

SEQ ID NO: 2917123 - RNA, 17 nt, Human
gcugccaggccugggac

SEQ ID NO: 2917124 - RNA, 14 nt, Human
gcuauagccuggac

SEQ ID NO: 2917125 - RNA, 17 nt, Human
gcuggcugggcauggac

SEQ ID NO: 2917126 - RNA, 18 nt, Human
cuuucucuccagccugac

SEQ ID NO: 2917127 - RNA, 16 nt, Human
cuucucagccugguac

SEQ ID NO: 2917128 - RNA, 21 nt, Human
uugccuguguauggaaaaacc

SEQ ID NO: 2917129 - RNA, 17 nt, Human
uguacaauuaaaaaccu

SEQ ID NO: 2917130 - RNA, 23 nt, Human
uguacauaacucuguaaaaacac

SEQ ID NO: 2917131 - RNA, 16 nt, Human T-lymphotropic virus 1
cugcagcucucuccug

SEQ ID NO: 2917132 - RNA, 17 nt, Human T-lymphotropic virus 1
ucagcccacuucccagg

SEQ ID NO: 2917133 - RNA, 23 nt, Human T-lymphotropic virus 1
cuccaggauaugaccccaucugg

SEQ ID NO: 2917134 - RNA, 14 nt, Human T-lymphotropic virus 1
acuuggcacguccu

SEQ ID NO: 2917135 - RNA, 13 nt, Human T-lymphotropic virus 1
cagcaaccuccuc

SEQ ID NO: 2917136 - RNA, 21 nt, Human T-lymphotropic virus 1
uggcccugccuauauuuccca

SEQ ID NO: 2917137 - RNA, 13 nt, Human T-lymphotropic virus 1
ucauucccccuuc

SEQ ID NO: 2917138 - RNA, 16 nt, Human T-lymphotropic virus 1
cagcucagcaccagcu

SEQ ID NO: 2917139 - RNA, 21 nt, Human T-lymphotropic virus 1
caggagccgucuccagccccu

SEQ ID NO: 2917140 - RNA, 21 nt, Human T-lymphotropic virus 1
ucacgcccuacuggccaccug

SEQ ID NO: 2917141 - RNA, 22 nt, Human T-lymphotropic virus 1
acccuguucgaaaugcagcugg

SEQ ID NO: 2917142 - RNA, 14 nt, Human T-lymphotropic virus 1
ccugcagcccauuc

SEQ ID NO: 2917143 - RNA, 23 nt, Human T-lymphotropic virus 1
cgcguucugccgccucccgccug

SEQ ID NO: 2917144 - RNA, 13 nt, Human T-lymphotropic virus 1
ccucuccagcgcc

SEQ ID NO: 2917145 - RNA, 19 nt, Human T-lymphotropic virus 1
auacaguacucuuccuuuc

SEQ ID NO: 2917146 - RNA, 14 nt, Human T-lymphotropic virus 1
ucucuacugugccu

SEQ ID NO: 2917147 - RNA, 23 nt, Human T-lymphotropic virus 1
aguauucccaguuaaaaaagcca

SEQ ID NO: 2917148 - RNA, 19 nt, Human T-lymphotropic virus 1
cagacggauccaccuccca

SEQ ID NO: 2917149 - RNA, 13 nt, Human T-lymphotropic virus 1
uucuccuggcaag

SEQ ID NO: 2917150 - RNA, 17 nt, Human T-lymphotropic virus 1
uacuacaguccuccucc

SEQ ID NO: 2917151 - RNA, 18 nt, Human T-lymphotropic virus 1
ccuaccuuacgccagccc

SEQ ID NO: 2917152 - RNA, 22 nt, Human T-lymphotropic virus 1
ggagccuaccuagacucagccg

SEQ ID NO: 2917153 - RNA, 14 nt, Human T-lymphotropic virus 1
ccuccuuccuccag

SEQ ID NO: 2917154 - RNA, 13 nt, Human T-lymphotropic virus 1
ucgagcccucuau

SEQ ID NO: 2917155 - RNA, 11 nt, Human T-lymphotropic virus 1
acagcucagca

SEQ ID NO: 2917156 - RNA, 19 nt, Human T-lymphotropic virus 1
cuccugugaaagcccuuau

SEQ ID NO: 2917157 - RNA, 18 nt, Human T-lymphotropic virus 1
ccccaacauuccacccuc

SEQ ID NO: 2917158 - RNA, 20 nt, Human T-lymphotropic virus 1
cuagaacaccucccaaggcc

SEQ ID NO: 2917159 - RNA, 16 nt, Human T-lymphotropic virus 1
cagcaccagcucaggc

SEQ ID NO: 2917160 - RNA, 13 nt, Human T-lymphotropic virus 1
uuuaacucuuccu

SEQ ID NO: 2917161 - RNA, 19 nt, Human T-lymphotropic virus 1
cugccaacuacacuagccc

SEQ ID NO: 2917162 - RNA, 14 nt, Human T-lymphotropic virus 1
cagcaaaccccugg

SEQ ID NO: 2917163 - RNA, 23 nt, Human T-lymphotropic virus 1
uguauuaaccaacugccacaaaa

SEQ ID NO: 2917164 - RNA, 23 nt, Human T-lymphotropic virus 1
cgggcccccugacuuguccagcc

SEQ ID NO: 2917165 - RNA, 16 nt, Human T-lymphotropic virus 1
cuacuggccaccuguc

SEQ ID NO: 2917166 - RNA, 20 nt, Human T-lymphotropic virus 1
uguucauggacccucgaccu

SEQ ID NO: 2917167 - RNA, 20 nt, Human T-lymphotropic virus 1
ccgcaguagacuaguccaaa

SEQ ID NO: 2917168 - RNA, 21 nt, Human T-lymphotropic virus 1
cucaccucaaaaaacuuuuca

SEQ ID NO: 2917169 - RNA, 21 nt, Human T-lymphotropic virus 1
cccacugcuuugacccccaga

SEQ ID NO: 2917170 - RNA, 22 nt, Human T-lymphotropic virus 1
ccgucacgcugacagccuggca

SEQ ID NO: 2917171 - RNA, 22 nt, Human T-lymphotropic virus 1
auacuacccauguccccuacaa

SEQ ID NO: 2917172 - RNA, 17 nt, Human T-lymphotropic virus 1
ggaggcuauuauucagc

SEQ ID NO: 2917173 - RNA, 18 nt, Human T-lymphotropic virus 1
uaauggcauucuuaaaac

SEQ ID NO: 2917174 - RNA, 19 nt, Human T-lymphotropic virus 1
gcucaccucccuuccugug

SEQ ID NO: 2917175 - RNA, 13 nt, Human T-lymphotropic virus 1
cuagacucagccg

SEQ ID NO: 2917176 - RNA, 21 nt, Human T-lymphotropic virus 1
aaaagcguggggacaguucag

SEQ ID NO: 2917177 - RNA, 12 nt, Human T-lymphotropic virus 1
uggccucuccag

SEQ ID NO: 2917178 - RNA, 19 nt, Human T-lymphotropic virus 1
cuucuaccccccuccuuua

SEQ ID NO: 2917179 - RNA, 21 nt, Human T-lymphotropic virus 1
aagacaaaucauaagcucaga

SEQ ID NO: 2917180 - RNA, 16 nt, Human T-lymphotropic virus 1
ggcagguccucucagg

SEQ ID NO: 2917181 - RNA, 20 nt, Human T-lymphotropic virus 1
cacggcgcuccugcucuucc

SEQ ID NO: 2917182 - RNA, 15 nt, Human T-lymphotropic virus 1
uccugcagcaaccuc

SEQ ID NO: 2917183 - RNA, 12 nt, Human T-lymphotropic virus 1
cgaacccagcca

SEQ ID NO: 2917184 - RNA, 19 nt, Human T-lymphotropic virus 1
auuauuucaagcuuccugg

SEQ ID NO: 2917185 - RNA, 16 nt, Human T-lymphotropic virus 1
accugaucccaucucc

SEQ ID NO: 2917186 - RNA, 18 nt, Human T-lymphotropic virus 1
cgaacccagccaacugcc

SEQ ID NO: 2917187 - RNA, 18 nt, Human T-lymphotropic virus 1
aggagccgucuccagccc

SEQ ID NO: 2917188 - RNA, 14 nt, Human T-lymphotropic virus 1
cguggaggcuccuc

SEQ ID NO: 2917189 - RNA, 16 nt, Human T-lymphotropic virus 1
accacucuaaacccug

SEQ ID NO: 2917190 - RNA, 13 nt, Human T-lymphotropic virus 1
ucagaccuccggg

SEQ ID NO: 2917191 - RNA, 18 nt, Human T-lymphotropic virus 1
cuuuaacucuuccuccaa

SEQ ID NO: 2917192 - RNA, 17 nt, Human T-lymphotropic virus 1
cacuuuaagcucaccuc

SEQ ID NO: 2917193 - RNA, 19 nt, Human T-lymphotropic virus 1
uuaagguccuuaccccgcc

SEQ ID NO: 2917194 - RNA, 20 nt, Human T-lymphotropic virus 1
ucagccucuuauucagaccc

SEQ ID NO: 2917195 - RNA, 22 nt, Human T-lymphotropic virus 1
cgcuuccucuucuccucagccc

SEQ ID NO: 2917196 - RNA, 14 nt, Human T-lymphotropic virus 1
gcuucaccacuccc

SEQ ID NO: 2917197 - RNA, 16 nt, Human T-lymphotropic virus 1
cuaccuuacgccagcc

SEQ ID NO: 2917198 - RNA, 19 nt, Human T-lymphotropic virus 1
gcgagcugcaugcccaaga

SEQ ID NO: 2917199 - RNA, 13 nt, Human T-lymphotropic virus 1
ucuccagccccua

SEQ ID NO: 2917200 - RNA, 13 nt, Human T-lymphotropic virus 1
aaaacaacugccc

SEQ ID NO: 2917201 - RNA, 15 nt, Human T-lymphotropic virus 1
cgccuccagccuccc

SEQ ID NO: 2917202 - RNA, 19 nt, Human T-lymphotropic virus 1
gacauucuccuggcaagcc

SEQ ID NO: 2917203 - RNA, 14 nt, Human T-lymphotropic virus 1
ucaaauccuccuuc

SEQ ID NO: 2917204 - RNA, 15 nt, Human T-lymphotropic virus 1
cugacgucucccccc

SEQ ID NO: 2917205 - RNA, 16 nt, Human T-lymphotropic virus 1
aaucauggaccugccc

SEQ ID NO: 2917206 - RNA, 15 nt, Human T-lymphotropic virus 1
cucuuugcuccaggc

SEQ ID NO: 2917207 - RNA, 14 nt, Human T-lymphotropic virus 1
ucaagccguccuca

SEQ ID NO: 2917208 - RNA, 19 nt, Human T-lymphotropic virus 1
gcagccuauauucucuggg

SEQ ID NO: 2917209 - RNA, 12 nt, Human T-lymphotropic virus 1
ccaguucugccc

SEQ ID NO: 2917210 - RNA, 14 nt, Human T-lymphotropic virus 1
ccuucaaccaauuc

SEQ ID NO: 2917211 - RNA, 19 nt, Human T-lymphotropic virus 1
cuaaacccugcaauccugc

SEQ ID NO: 2917212 - RNA, 21 nt, Human T-lymphotropic virus 1
ugcccaccacccuuuuccagc

SEQ ID NO: 2917213 - RNA, 13 nt, Human T-lymphotropic virus 1
cuccuucuccugc

SEQ ID NO: 2917214 - RNA, 18 nt, Human T-lymphotropic virus 1
gaacgccuccaggccuug

SEQ ID NO: 2917215 - RNA, 22 nt, Human T-lymphotropic virus 1
gacccaacaucuauucugccag

SEQ ID NO: 2917216 - RNA, 11 nt, Human T-lymphotropic virus 1
auccugcccag

SEQ ID NO: 2917217 - RNA, 16 nt, Human T-lymphotropic virus 1
cccucaaaaacacauc

SEQ ID NO: 2917218 - RNA, 13 nt, Human T-lymphotropic virus 1
cgccuucucagcc

SEQ ID NO: 2917219 - RNA, 20 nt, Human T-lymphotropic virus 1
gccgccuuaccugaggccgc

SEQ ID NO: 2917220 - RNA, 13 nt, Human T-lymphotropic virus 1
ugccccuccuagg

SEQ ID NO: 2917221 - RNA, 21 nt, Human T-lymphotropic virus 1
ccuuaauaccgaacccagcca

SEQ ID NO: 2917222 - RNA, 19 nt, Human T-lymphotropic virus 1
ccuacucccuaaccacauc

SEQ ID NO: 2917223 - RNA, 18 nt, Human T-lymphotropic virus 1
accuaaacaguuccagcc

SEQ ID NO: 2917224 - RNA, 15 nt, Human T-lymphotropic virus 1
cucagcaccagcuca

SEQ ID NO: 2917225 - RNA, 16 nt, Human T-lymphotropic virus 1
ugcauggccucuccag

SEQ ID NO: 2917226 - RNA, 18 nt, Human T-lymphotropic virus 1
gucugcauguaccucuac

SEQ ID NO: 2917227 - RNA, 22 nt, Human T-lymphotropic virus 1
ggcacguccuauacucucccaa

SEQ ID NO: 2917228 - RNA, 19 nt, Human T-lymphotropic virus 1
caucccuguaaaccaagca

SEQ ID NO: 2917229 - RNA, 17 nt, Human T-lymphotropic virus 1
uccacccuccuuccucc

SEQ ID NO: 2917230 - RNA, 15 nt, Human T-lymphotropic virus 1
aaagauggccagcca

SEQ ID NO: 2917231 - RNA, 18 nt, Human T-lymphotropic virus 1
cacaauggcuucccuaau

SEQ ID NO: 2917232 - RNA, 13 nt, Human T-lymphotropic virus 1
caguaugcugccc

SEQ ID NO: 2917233 - RNA, 19 nt, Human T-lymphotropic virus 1
cucagccggcucuccacgc

SEQ ID NO: 2917234 - RNA, 20 nt, Human T-lymphotropic virus 1
ucagcaaucugcuuuuccuc

SEQ ID NO: 2917235 - RNA, 15 nt, Human T-lymphotropic virus 1
ccuuccuccaggcca

SEQ ID NO: 2917236 - RNA, 17 nt, Human T-lymphotropic virus 1
cagcucuacaguuccuu

SEQ ID NO: 2917237 - RNA, 14 nt, Human T-lymphotropic virus 1
gcauucuuaaaacc

SEQ ID NO: 2917238 - RNA, 23 nt, Human T-lymphotropic virus 1
ccaggcagccuauauucucuggg

SEQ ID NO: 2917239 - RNA, 21 nt, Human T-lymphotropic virus 1
ugccaauaauuaaccucuccc

SEQ ID NO: 2917240 - RNA, 13 nt, Human T-lymphotropic virus 1
ucuguuccauccc

SEQ ID NO: 2917241 - RNA, 14 nt, Human T-lymphotropic virus 1
caggcuaggcccug

SEQ ID NO: 2917242 - RNA, 15 nt, Human T-lymphotropic virus 1
acuggugccccaucu

SEQ ID NO: 2917243 - RNA, 18 nt, Human T-lymphotropic virus 1
uuuguccggcgcucccuu

SEQ ID NO: 2917244 - RNA, 16 nt, Human T-lymphotropic virus 1
cugaacuucaagcccu

SEQ ID NO: 2917245 - RNA, 16 nt, Human T-lymphotropic virus 1
ucuccugcagcaaccu

SEQ ID NO: 2917246 - RNA, 16 nt, Human T-lymphotropic virus 1
uuuuuccuucucccuu

SEQ ID NO: 2917247 - RNA, 17 nt, Human T-lymphotropic virus 1
cucacggcgcuccugcu

SEQ ID NO: 2917248 - RNA, 16 nt, Human T-lymphotropic virus 1
cucuuugcuccaggcc

SEQ ID NO: 2917249 - RNA, 20 nt, Human T-lymphotropic virus 1
auggcagcuucaccacuccc

SEQ ID NO: 2917250 - RNA, 21 nt, Human T-lymphotropic virus 1
acucagccggcucuccacgcu

SEQ ID NO: 2917251 - RNA, 17 nt, Human T-lymphotropic virus 1
cucagaagcuauuuccu

SEQ ID NO: 2917252 - RNA, 23 nt, Human T-lymphotropic virus 1
caacacuugguccggaaggcccu

SEQ ID NO: 2917253 - RNA, 17 nt, Human T-lymphotropic virus 1
acucagcaaucugcuuu

SEQ ID NO: 2917254 - RNA, 22 nt, Human T-lymphotropic virus 1
acaagcucagaagcuauuuccu

SEQ ID NO: 2917255 - RNA, 18 nt, Human T-lymphotropic virus 1
cccaucaccuggccccuc

SEQ ID NO: 2917256 - RNA, 20 nt, Human T-lymphotropic virus 1
cccacugcuuugacccccag

SEQ ID NO: 2917257 - RNA, 19 nt, Human T-lymphotropic virus 1
ggacaaagauauuucccaa

SEQ ID NO: 2917258 - RNA, 21 nt, Human T-lymphotropic virus 1
uaaacccugcaauccugccca

SEQ ID NO: 2917259 - RNA, 20 nt, Human T-lymphotropic virus 1
ccaggcucaacgcucucaca

SEQ ID NO: 2917260 - RNA, 16 nt, Human T-lymphotropic virus 1
gccucucacagugggc

SEQ ID NO: 2917261 - RNA, 21 nt, Human T-lymphotropic virus 1
accacaucgccuccagccucc

SEQ ID NO: 2917262 - RNA, 13 nt, Human T-lymphotropic virus 1
agcugcaugccca

SEQ ID NO: 2917263 - RNA, 22 nt, Human T-lymphotropic virus 1
acccccaacauuccacccuccu

SEQ ID NO: 2917264 - RNA, 23 nt, Human T-lymphotropic virus 1
ggcacgccuaugauuuccgggcc

SEQ ID NO: 2917265 - RNA, 16 nt, Human T-lymphotropic virus 1
ccacucaacccucacc

SEQ ID NO: 2917266 - RNA, 17 nt, Human T-lymphotropic virus 1
uggccuacucccuaacc

SEQ ID NO: 2917267 - RNA, 18 nt, Human T-lymphotropic virus 1
gccuucuccucuuccuuc

SEQ ID NO: 2917268 - RNA, 22 nt, Human T-lymphotropic virus 1
cauuuaacuggacccacugcuu

SEQ ID NO: 2917269 - RNA, 17 nt, Human T-lymphotropic virus 1
aggacagcucagcacca

SEQ ID NO: 2917270 - RNA, 15 nt, Human T-lymphotropic virus 1
cuccuucuccugcag

SEQ ID NO: 2917271 - RNA, 21 nt, Human T-lymphotropic virus 1
gaagccaccgggaaccaccca

SEQ ID NO: 2917272 - RNA, 16 nt, Human T-lymphotropic virus 1
cuauggacuacucugc

SEQ ID NO: 2917273 - RNA, 21 nt, Human T-lymphotropic virus 1
ccgccuguggugccuccugaa

SEQ ID NO: 2917274 - RNA, 14 nt, Human T-lymphotropic virus 1
auucauucaaacau

SEQ ID NO: 2917275 - RNA, 20 nt, Human T-lymphotropic virus 1
ccaggauaugaccccaucug

SEQ ID NO: 2917276 - RNA, 18 nt, Human T-lymphotropic virus 1
ucuaccugaucccaucuc

SEQ ID NO: 2917277 - RNA, 20 nt, Human T-lymphotropic virus 1
acccucaccacuccaggccu

SEQ ID NO: 2917278 - RNA, 17 nt, Human T-lymphotropic virus 1
ccguggaggcuccucaa

SEQ ID NO: 2917279 - RNA, 16 nt, Human T-lymphotropic virus 1
cuacucugccaaacca

SEQ ID NO: 2917280 - RNA, 13 nt, Human T-lymphotropic virus 1
cgcugacagccug

SEQ ID NO: 2917281 - RNA, 14 nt, Human T-lymphotropic virus 1
ccuucuccucuucc

SEQ ID NO: 2917282 - RNA, 14 nt, Human T-lymphotropic virus 1
cagccuccccugcc

SEQ ID NO: 2917283 - RNA, 14 nt, Human T-lymphotropic virus 1
ucccaccgccccuc

SEQ ID NO: 2917284 - RNA, 13 nt, Human T-lymphotropic virus 1
cuacagccacccu

SEQ ID NO: 2917285 - RNA, 12 nt, Human T-lymphotropic virus 1
gcuccaggccau

SEQ ID NO: 2917286 - RNA, 16 nt, Human T-lymphotropic virus 1
acccuugcccuaggca

SEQ ID NO: 2917287 - RNA, 18 nt, Human T-lymphotropic virus 1
uccccccgacuccagccg

SEQ ID NO: 2917288 - RNA, 22 nt, Human T-lymphotropic virus 1
uguccuuuaacucuuccuccaa

SEQ ID NO: 2917289 - RNA, 15 nt, Human T-lymphotropic virus 1
uccuuccuccaggcc

SEQ ID NO: 2917290 - RNA, 20 nt, Human T-lymphotropic virus 1
gacccucacuggcaccacca

SEQ ID NO: 2917291 - RNA, 13 nt, Human T-lymphotropic virus 1
acccugccccucc

SEQ ID NO: 2917292 - RNA, 17 nt, Human T-lymphotropic virus 1
gacuccagccgauccca

SEQ ID NO: 2917293 - RNA, 23 nt, Human T-lymphotropic virus 1
gccaugcgcaaauacucccccuu

SEQ ID NO: 2917294 - RNA, 15 nt, Human T-lymphotropic virus 1
uggcccauauccugc

SEQ ID NO: 2917295 - RNA, 16 nt, Human T-lymphotropic virus 1
uacagccccagcugcu

SEQ ID NO: 2917296 - RNA, 20 nt, Human T-lymphotropic virus 1
cuccucuauaaaauuucccu

SEQ ID NO: 2917297 - RNA, 20 nt, Human T-lymphotropic virus 1
acagcucagcaccagcucag

SEQ ID NO: 2917298 - RNA, 16 nt, Human T-lymphotropic virus 1
ccuggccccuccugcc

SEQ ID NO: 2917299 - RNA, 20 nt, Human T-lymphotropic virus 1
cgcaaauacucccccuuccg

SEQ ID NO: 2917300 - RNA, 14 nt, Human T-lymphotropic virus 1
ucuccgcccuggcc

SEQ ID NO: 2917301 - RNA, 15 nt, Human T-lymphotropic virus 1
cauguaccucuacca

SEQ ID NO: 2917302 - RNA, 15 nt, Human T-lymphotropic virus 1
aacaauuaaguuccu

SEQ ID NO: 2917303 - RNA, 17 nt, Human T-lymphotropic virus 1
uccuccguucagccucc

SEQ ID NO: 2917304 - RNA, 13 nt, Human T-lymphotropic virus 1
ucagccuccaagg

SEQ ID NO: 2917305 - RNA, 17 nt, Human T-lymphotropic virus 1
ccugaucccaucuccag

SEQ ID NO: 2917306 - RNA, 17 nt, Human T-lymphotropic virus 1
guuugcccaccacccuu

SEQ ID NO: 2917307 - RNA, 19 nt, Human T-lymphotropic virus 1
uacaggagccgucuccagc

SEQ ID NO: 2917308 - RNA, 14 nt, Human T-lymphotropic virus 1
caccgccccuccuc

SEQ ID NO: 2917309 - RNA, 22 nt, Human T-lymphotropic virus 1
cugcauguaccucuaccagcuu

SEQ ID NO: 2917310 - RNA, 16 nt, Human T-lymphotropic virus 1
ccuucggacccuugcc

SEQ ID NO: 2917311 - RNA, 16 nt, Human T-lymphotropic virus 1
cccccaacuccugcau

SEQ ID NO: 2917312 - RNA, 20 nt, Human T-lymphotropic virus 1
cauccgccguggccuacucc

SEQ ID NO: 2917313 - RNA, 16 nt, Human T-lymphotropic virus 1
ccacccauuuccuccc

SEQ ID NO: 2917314 - RNA, 22 nt, Human T-lymphotropic virus 1
cucuauaaaauuucccuuacca

SEQ ID NO: 2917315 - RNA, 14 nt, Human T-lymphotropic virus 1
ccuucucagccccu

SEQ ID NO: 2917316 - RNA, 21 nt, Human T-lymphotropic virus 1
ccugggggcagcuacuugccu

SEQ ID NO: 2917317 - RNA, 11 nt, Human T-lymphotropic virus 1
uuuccuccucc

SEQ ID NO: 2917318 - RNA, 14 nt, Human T-lymphotropic virus 1
cgccguggccuacu

SEQ ID NO: 2917319 - RNA, 19 nt, Human T-lymphotropic virus 1
ccaaggauaauagcccguc

SEQ ID NO: 2917320 - RNA, 14 nt, Human T-lymphotropic virus 1
cuccaaggacucca

SEQ ID NO: 2917321 - RNA, 13 nt, Human T-lymphotropic virus 1
acagccccagcug

SEQ ID NO: 2917322 - RNA, 18 nt, Human T-lymphotropic virus 1
guuccuuaaaaugcccau

SEQ ID NO: 2917323 - RNA, 16 nt, Human T-lymphotropic virus 1
ccgugccuucuccucu

SEQ ID NO: 2917324 - RNA, 15 nt, Human T-lymphotropic virus 1
caagccguccucagg

SEQ ID NO: 2917325 - RNA, 21 nt, Human T-lymphotropic virus 1
ugucacagaacugccgcagua

SEQ ID NO: 2917326 - RNA, 22 nt, Human T-lymphotropic virus 1
agccuggcaaaacggccuccuu

SEQ ID NO: 2917327 - RNA, 19 nt, Human T-lymphotropic virus 1
gccccauuggcuccuguga

SEQ ID NO: 2917328 - RNA, 22 nt, Human T-lymphotropic virus 1
gccuggcaaaacggccuccuuc

SEQ ID NO: 2917329 - RNA, 17 nt, Human T-lymphotropic virus 1
ccaacgucucuguucca

SEQ ID NO: 2917330 - RNA, 19 nt, Human T-lymphotropic virus 1
aauccuccuucuccugcag

SEQ ID NO: 2917331 - RNA, 18 nt, Human T-lymphotropic virus 1
cagcuacgacaccucccc

SEQ ID NO: 2917332 - RNA, 18 nt, Human T-lymphotropic virus 1
augacauucuccuggcaa

SEQ ID NO: 2917333 - RNA, 15 nt, Human T-lymphotropic virus 1
ccauuuccuccccau

SEQ ID NO: 2917334 - RNA, 12 nt, Human T-lymphotropic virus 1
cagcaaccuccu

SEQ ID NO: 2917335 - RNA, 16 nt, Human T-lymphotropic virus 1
cccugccccuccuagg

SEQ ID NO: 2917336 - RNA, 13 nt, Human T-lymphotropic virus 1
cccgacuccagcc

SEQ ID NO: 2917337 - RNA, 16 nt, Human T-lymphotropic virus 1
aacaccucccaaggcc

SEQ ID NO: 2917338 - RNA, 11 nt, Human T-lymphotropic virus 1
ucccccuuccg

SEQ ID NO: 2917339 - RNA, 15 nt, Human T-lymphotropic virus 1
ggcgcuuuccccccu

SEQ ID NO: 2917340 - RNA, 17 nt, Human T-lymphotropic virus 1
ggcccuggaggcaggcc

SEQ ID NO: 2917341 - RNA, 15 nt, Human T-lymphotropic virus 1
ccggcucuccacgcu

SEQ ID NO: 2917342 - RNA, 23 nt, Human T-lymphotropic virus 1
cuuccuuuucaaauacucagcaa

SEQ ID NO: 2917343 - RNA, 22 nt, Human T-lymphotropic virus 1
ccugccuauauuucccaagacu

SEQ ID NO: 2917344 - RNA, 15 nt, Human T-lymphotropic virus 1
agcuacuugccucag

SEQ ID NO: 2917345 - RNA, 18 nt, Human T-lymphotropic virus 1
cagcccauucggcaagcc

SEQ ID NO: 2917346 - RNA, 13 nt, Human T-lymphotropic virus 1
cccgcuuccugcg

SEQ ID NO: 2917347 - RNA, 18 nt, Human T-lymphotropic virus 1
cuacacaguuucacccau

SEQ ID NO: 2917348 - RNA, 16 nt, Human T-lymphotropic virus 1
cugccuauauuuccca

SEQ ID NO: 2917349 - RNA, 20 nt, Human T-lymphotropic virus 1
cuccagcuaccaugccaccu

SEQ ID NO: 2917350 - RNA, 13 nt, Human T-lymphotropic virus 1
auucggcaagccu

SEQ ID NO: 2917351 - RNA, 11 nt, Human T-lymphotropic virus 1
uucauucaaac

SEQ ID NO: 2917352 - RNA, 21 nt, Human T-lymphotropic virus 1
ucccgccuguggugccuccug

SEQ ID NO: 2917353 - RNA, 16 nt, Human T-lymphotropic virus 1
uauucccaguuaaaaa

SEQ ID NO: 2917354 - RNA, 15 nt, Human T-lymphotropic virus 1
ccaccucccaggcag

SEQ ID NO: 2917355 - RNA, 14 nt, Human T-lymphotropic virus 1
cucucacacggccu

SEQ ID NO: 2917356 - RNA, 15 nt, Human T-lymphotropic virus 1
cuccguugucugcau

SEQ ID NO: 2917357 - RNA, 17 nt, Human T-lymphotropic virus 1
gcucgcaucucuccuuc

SEQ ID NO: 2917358 - RNA, 12 nt, Human T-lymphotropic virus 1
cucgagaagccu

SEQ ID NO: 2917359 - RNA, 20 nt, Human T-lymphotropic virus 1
ucuuaaaacaacugccccau

SEQ ID NO: 2917360 - RNA, 17 nt, Human T-lymphotropic virus 1
uccauccccuucuucua

SEQ ID NO: 2917361 - RNA, 22 nt, Human T-lymphotropic virus 1
cuacaucgucacgcccuacugg

SEQ ID NO: 2917362 - RNA, 13 nt, Human T-lymphotropic virus 1
ccucuuccuuccu

SEQ ID NO: 2917363 - RNA, 13 nt, Human T-lymphotropic virus 1
cgaccugcuggcc

SEQ ID NO: 2917364 - RNA, 17 nt, Human T-lymphotropic virus 1
acuccaccucgccuucc

SEQ ID NO: 2917365 - RNA, 16 nt, Human T-lymphotropic virus 1
cagcuacuugccucag

SEQ ID NO: 2917366 - RNA, 15 nt, Human T-lymphotropic virus 1
ccugacuuguccagc

SEQ ID NO: 2917367 - RNA, 21 nt, Human T-lymphotropic virus 1
ccuuguccuuuaacucuuccu

SEQ ID NO: 2917368 - RNA, 23 nt, Human T-lymphotropic virus 1
cauccccuucuucuaccccccuc

SEQ ID NO: 2917369 - RNA, 20 nt, Human T-lymphotropic virus 1
ccaaggcagguccucucagg

SEQ ID NO: 2917370 - RNA, 22 nt, Human T-lymphotropic virus 1
uggcacguccuauacucuccca

SEQ ID NO: 2917371 - RNA, 13 nt, Human T-lymphotropic virus 1
accuuggccucuc

SEQ ID NO: 2917372 - RNA, 18 nt, Human T-lymphotropic virus 1
cgcucuaauggcauucuu

SEQ ID NO: 2917373 - RNA, 19 nt, Human T-lymphotropic virus 1
guucauggacccucgaccu

SEQ ID NO: 2917374 - RNA, 17 nt, Human T-lymphotropic virus 1
ccccuuccgccaccgca

SEQ ID NO: 2917375 - RNA, 19 nt, Human T-lymphotropic virus 1
ugguguuccaguccaagca

SEQ ID NO: 2917376 - RNA, 12 nt, Human T-lymphotropic virus 1
ccuugccuguuu

SEQ ID NO: 2917377 - RNA, 21 nt, Human T-lymphotropic virus 1
ucuccuucacgcgcccgccgc

SEQ ID NO: 2917378 - RNA, 23 nt, Human T-lymphotropic virus 1
cccgguaagcgcuaguucugccc

SEQ ID NO: 2917379 - RNA, 16 nt, Human T-lymphotropic virus 1
gcaagccccucccaug

SEQ ID NO: 2917380 - RNA, 16 nt, Human T-lymphotropic virus 1
augacaguccuuccga

SEQ ID NO: 2917381 - RNA, 16 nt, Human T-lymphotropic virus 1
ccucuucuccucagcc

SEQ ID NO: 2917382 - RNA, 22 nt, Human T-lymphotropic virus 1
uguuuucagacggauccaccuc

SEQ ID NO: 2917383 - RNA, 17 nt, Human T-lymphotropic virus 1
agacccuuguuccuuaa

SEQ ID NO: 2917384 - RNA, 17 nt, Human T-lymphotropic virus 1
aacaucagaugccucaa

SEQ ID NO: 2917385 - RNA, 22 nt, Human T-lymphotropic virus 1
cccuacaauccaaccagcuccg

SEQ ID NO: 2917386 - RNA, 19 nt, Human T-lymphotropic virus 1
cccucaccacuccaggccu

SEQ ID NO: 2917387 - RNA, 13 nt, Human T-lymphotropic virus 1
caacuacacuagc

SEQ ID NO: 2917388 - RNA, 20 nt, Human T-lymphotropic virus 1
acacccagaccagccaccca

SEQ ID NO: 2917389 - RNA, 15 nt, Human T-lymphotropic virus 1
ccaauuccuccacca

SEQ ID NO: 2917390 - RNA, 18 nt, Human T-lymphotropic virus 1
agaccgggccuuuguccg

SEQ ID NO: 2917391 - RNA, 11 nt, Human T-lymphotropic virus 1
cuccucagccc

SEQ ID NO: 2917392 - RNA, 18 nt, Human T-lymphotropic virus 1
ucaggaaagagccuccua

SEQ ID NO: 2917393 - RNA, 14 nt, Human T-lymphotropic virus 1
gacacccagaccag

SEQ ID NO: 2917394 - RNA, 19 nt, Human T-lymphotropic virus 1
cgguuuuuccuucucccuu

SEQ ID NO: 2917395 - RNA, 16 nt, Human T-lymphotropic virus 1
cuuaaaacaacugccc

SEQ ID NO: 2917396 - RNA, 23 nt, Human T-lymphotropic virus 1
accugcgggccacuaacucucua

SEQ ID NO: 2917397 - RNA, 13 nt, Human T-lymphotropic virus 1
ccgacuccagccg

SEQ ID NO: 2917398 - RNA, 16 nt, Human T-lymphotropic virus 1
caggagccaucucagc

SEQ ID NO: 2917399 - RNA, 20 nt, Human T-lymphotropic virus 1
cugcaaggggcaaccacaac

SEQ ID NO: 2917400 - RNA, 15 nt, Human T-lymphotropic virus 1
ccuuggccucucaca

SEQ ID NO: 2917401 - RNA, 17 nt, Human T-lymphotropic virus 1
caggagccgucuccagc

SEQ ID NO: 2917402 - RNA, 20 nt, Human T-lymphotropic virus 1
auguauuaaccaacugccac

SEQ ID NO: 2917403 - RNA, 19 nt, Human T-lymphotropic virus 1
cuuuuccuugucaccuguu

SEQ ID NO: 2917404 - RNA, 22 nt, Human T-lymphotropic virus 1
uccuugggcuagaacaccuccc

SEQ ID NO: 2917405 - RNA, 18 nt, Human T-lymphotropic virus 1
uaguccaaacccugcccc

SEQ ID NO: 2917406 - RNA, 14 nt, Human T-lymphotropic virus 1
cccggaggacagcu

SEQ ID NO: 2917407 - RNA, 24 nt, Human T-lymphotropic virus 1
cucaacgcucucacagaugcccua

SEQ ID NO: 2917408 - RNA, 14 nt, Human T-lymphotropic virus 1
gccuccagccuccc

SEQ ID NO: 2917409 - RNA, 22 nt, Human T-lymphotropic virus 1
aggggcaaccacaacugaggcc

SEQ ID NO: 2917410 - RNA, 22 nt, Human T-lymphotropic virus 1
ggugccaaucauggaccugccc

SEQ ID NO: 2917411 - RNA, 13 nt, Human T-lymphotropic virus 1
agccguccucagg

SEQ ID NO: 2917412 - RNA, 18 nt, Human T-lymphotropic virus 1
cagccuauccacuuggca

SEQ ID NO: 2917413 - RNA, 18 nt, Human T-lymphotropic virus 1
guccugacuggcuggggc

SEQ ID NO: 2917414 - RNA, 15 nt, Human T-lymphotropic virus 1
gugauuacagcccca

SEQ ID NO: 2917415 - RNA, 16 nt, Human T-lymphotropic virus 1
cgaucgugccagccua

SEQ ID NO: 2917416 - RNA, 14 nt, Human T-lymphotropic virus 1
ccaaggacuccacc

SEQ ID NO: 2917417 - RNA, 14 nt, Human T-lymphotropic virus 1
gcccuacagccacc

SEQ ID NO: 2917418 - RNA, 19 nt, Human T-lymphotropic virus 1
gccucaggaaagagccucc

SEQ ID NO: 2917419 - RNA, 18 nt, Human T-lymphotropic virus 1
cccugucauaacucccuc

SEQ ID NO: 2917420 - RNA, 20 nt, Human T-lymphotropic virus 1
cccagcugcuguacucucac

SEQ ID NO: 2917421 - RNA, 19 nt, Human T-lymphotropic virus 1
cucgacuccccuccuuccc

SEQ ID NO: 2917422 - RNA, 18 nt, Human T-lymphotropic virus 1
cccuaaucucccaugggu

SEQ ID NO: 2917423 - RNA, 14 nt, Human T-lymphotropic virus 1
ucuuaaaacaacug

SEQ ID NO: 2917424 - RNA, 14 nt, Human T-lymphotropic virus 1
agccacccugcccu

SEQ ID NO: 2917425 - RNA, 20 nt, Human T-lymphotropic virus 1
cucuugccacgccugccgca

SEQ ID NO: 2917426 - RNA, 15 nt, Human T-lymphotropic virus 1
gccaccccggccagc

SEQ ID NO: 2917427 - RNA, 19 nt, Human T-lymphotropic virus 1
gacccugcuugcucaacuc

SEQ ID NO: 2917428 - RNA, 14 nt, Human T-lymphotropic virus 1
caucuccaggcuca

SEQ ID NO: 2917429 - RNA, 21 nt, Human T-lymphotropic virus 1
cuccaccagcagguccuccgg

SEQ ID NO: 2917430 - RNA, 13 nt, Human T-lymphotropic virus 1
cucuucuccucag

SEQ ID NO: 2917431 - RNA, 22 nt, Human T-lymphotropic virus 1
uccacccuccuuccuccaggcc

SEQ ID NO: 2917432 - RNA, 18 nt, Human T-lymphotropic virus 1
caguuggagucuccucau

SEQ ID NO: 2917433 - RNA, 14 nt, Human T-lymphotropic virus 1
cucuucuccucagc

SEQ ID NO: 2917434 - RNA, 16 nt, Human T-lymphotropic virus 1
gccccuugucuccacu

SEQ ID NO: 2917435 - RNA, 17 nt, Human T-lymphotropic virus 1
ugacauucuccuggcaa

SEQ ID NO: 2917436 - RNA, 16 nt, Human T-lymphotropic virus 1
ccugacgugucccccu

SEQ ID NO: 2917437 - RNA, 18 nt, Human T-lymphotropic virus 1
gcuacuugccucagcugu

SEQ ID NO: 2917438 - RNA, 14 nt, Human T-lymphotropic virus 1
cgggaaccacccau

SEQ ID NO: 2917439 - RNA, 16 nt, Human T-lymphotropic virus 1
cacccagaccagccac

SEQ ID NO: 2917440 - RNA, 16 nt, Human T-lymphotropic virus 1
gcgccgugccuucucc

SEQ ID NO: 2917441 - RNA, 13 nt, Human T-lymphotropic virus 1
cugccccuccuag

SEQ ID NO: 2917442 - RNA, 20 nt, Human T-lymphotropic virus 1
accuuccaaggcagguccuc

SEQ ID NO: 2917443 - RNA, 16 nt, Human T-lymphotropic virus 1
cucuaccagcuuuccc

SEQ ID NO: 2917444 - RNA, 18 nt, Human T-lymphotropic virus 1
uccugcgccgugccuucu

SEQ ID NO: 2917445 - RNA, 19 nt, Human T-lymphotropic virus 1
agacaaaucauaagcucag

SEQ ID NO: 2917446 - RNA, 17 nt, Human T-lymphotropic virus 1
uggacaaucaaccaccu

SEQ ID NO: 2917447 - RNA, 14 nt, Human T-lymphotropic virus 1
uccucgagcccucu

SEQ ID NO: 2917448 - RNA, 15 nt, Human T-lymphotropic virus 1
cugucauaacucccu

SEQ ID NO: 2917449 - RNA, 18 nt, Human T-lymphotropic virus 1
acccccauuacucucuua

SEQ ID NO: 2917450 - RNA, 18 nt, Human T-lymphotropic virus 1
gaucucucaucaucuucc

SEQ ID NO: 2917451 - RNA, 22 nt, Human T-lymphotropic virus 1
ggccuacucccuaaccacaucu

SEQ ID NO: 2917452 - RNA, 15 nt, Human T-lymphotropic virus 1
gcaucucuccuucac

SEQ ID NO: 2917453 - RNA, 17 nt, Human T-lymphotropic virus 1
gaagucagcggccuucu

SEQ ID NO: 2917454 - RNA, 15 nt, Human T-lymphotropic virus 1
cagaacgccuccagg

SEQ ID NO: 2917455 - RNA, 15 nt, Human T-lymphotropic virus 1
ccccaacauuccacc

SEQ ID NO: 2917456 - RNA, 18 nt, Human T-lymphotropic virus 1
ccauaccaaucuaccuga

SEQ ID NO: 2917457 - RNA, 13 nt, Human T-lymphotropic virus 1
acaaaacccagca

SEQ ID NO: 2917458 - RNA, 16 nt, Human T-lymphotropic virus 1
ccacguucgcagccau

SEQ ID NO: 2917459 - RNA, 15 nt, Human T-lymphotropic virus 1
ccuacuggccaccug

SEQ ID NO: 2917460 - RNA, 13 nt, Human T-lymphotropic virus 1
cccaacuccugca

SEQ ID NO: 2917461 - RNA, 21 nt, Human T-lymphotropic virus 1
uguccuugggcuagaacaccu

SEQ ID NO: 2917462 - RNA, 22 nt, Human T-lymphotropic virus 1
caucgccuccagccuccccugc

SEQ ID NO: 2917463 - RNA, 19 nt, Human T-lymphotropic virus 1
cucacggcgcuccugcucu

SEQ ID NO: 2917464 - RNA, 19 nt, Human T-lymphotropic virus 1
cuuacuccaccacagucac

SEQ ID NO: 2917465 - RNA, 19 nt, Human T-lymphotropic virus 1
cucaggcuaggcccugacg

SEQ ID NO: 2917466 - RNA, 20 nt, Human T-lymphotropic virus 1
acccuccuuccuccaggcca

SEQ ID NO: 2917467 - RNA, 18 nt, Human T-lymphotropic virus 1
uguauuaaccaacugcca

SEQ ID NO: 2917468 - RNA, 19 nt, Human T-lymphotropic virus 1
auaaguacuuuacugacaa

SEQ ID NO: 2917469 - RNA, 15 nt, Human T-lymphotropic virus 1
cgcgcuacuccuucu

SEQ ID NO: 2917470 - RNA, 21 nt, Human T-lymphotropic virus 1
cugcccuaaagauggccagcc

SEQ ID NO: 2917471 - RNA, 14 nt, Human T-lymphotropic virus 1
aucuaggcaagccu

SEQ ID NO: 2917472 - RNA, 14 nt, Human T-lymphotropic virus 1
cacaucgccuccag

SEQ ID NO: 2917473 - RNA, 16 nt, Human T-lymphotropic virus 1
cugcaauccugcccag

SEQ ID NO: 2917474 - RNA, 14 nt, Human T-lymphotropic virus 1
aucaaaacuccuga

SEQ ID NO: 2917475 - RNA, 17 nt, Human T-lymphotropic virus 1
cugcagcucucuccugc

SEQ ID NO: 2917476 - RNA, 23 nt, Human T-lymphotropic virus 1
ggaugacauucuccuggcaagcc

SEQ ID NO: 2917477 - RNA, 14 nt, Human T-lymphotropic virus 1
aggcccuccugccc

SEQ ID NO: 2917478 - RNA, 22 nt, Human T-lymphotropic virus 1
augcucuauccauagcccuaug

SEQ ID NO: 2917479 - RNA, 13 nt, Human T-lymphotropic virus 1
aagccccucccau

SEQ ID NO: 2917480 - RNA, 23 nt, Human T-lymphotropic virus 1
cccaugugauuuuuugccacccc

SEQ ID NO: 2917481 - RNA, 16 nt, Human T-lymphotropic virus 1
ccgaacccagccaacu

SEQ ID NO: 2917482 - RNA, 13 nt, Human T-lymphotropic virus 1
cucuccagcgccc

SEQ ID NO: 2917483 - RNA, 17 nt, Human T-lymphotropic virus 1
cacccuuuuccagccug

SEQ ID NO: 2917484 - RNA, 17 nt, Human T-lymphotropic virus 1
cugaacuucaagcccua

SEQ ID NO: 2917485 - RNA, 19 nt, Human T-lymphotropic virus 1
ccuuacgccagccccuuca

SEQ ID NO: 2917486 - RNA, 17 nt, Human T-lymphotropic virus 1
gcacgcauacggcucaa

SEQ ID NO: 2917487 - RNA, 22 nt, Human T-lymphotropic virus 1
uuguccuuuaacucuuccucca

SEQ ID NO: 2917488 - RNA, 13 nt, Human T-lymphotropic virus 1
uuccaguccaagc

SEQ ID NO: 2917489 - RNA, 17 nt, Human T-lymphotropic virus 1
uccaaggauaauagccc

SEQ ID NO: 2917490 - RNA, 13 nt, Human T-lymphotropic virus 1
uacacaguuucac

SEQ ID NO: 2917491 - RNA, 23 nt, Human T-lymphotropic virus 1
ugcccuaggcaccuuccaaggca

SEQ ID NO: 2917492 - RNA, 15 nt, Human T-lymphotropic virus 1
accgccccuccucua

SEQ ID NO: 2917493 - RNA, 22 nt, Human T-lymphotropic virus 1
gcacgcauacggcucaauaaaa

SEQ ID NO: 2917494 - RNA, 21 nt, Human T-lymphotropic virus 1
accuucggacccuugcccuag

SEQ ID NO: 2917495 - RNA, 18 nt, Human T-lymphotropic virus 1
uuuaagcucaccucccuu

SEQ ID NO: 2917496 - RNA, 16 nt, Human T-lymphotropic virus 1
ucacgcgcccgccgcc

SEQ ID NO: 2917497 - RNA, 15 nt, Human T-lymphotropic virus 1
cucagccccuugucu

SEQ ID NO: 2917498 - RNA, 15 nt, Human T-lymphotropic virus 1
cggaguggcuggcag

SEQ ID NO: 2917499 - RNA, 20 nt, Human T-lymphotropic virus 1
cuuccucuucuccucagccc

SEQ ID NO: 2917500 - RNA, 15 nt, Human T-lymphotropic virus 1
cacaggaggcucuuc

SEQ ID NO: 2917501 - RNA, 23 nt, Human T-lymphotropic virus 1
cucagcaaucugcuuuuccuccu

SEQ ID NO: 2917502 - RNA, 13 nt, Human T-lymphotropic virus 1
uccaccucccagg

SEQ ID NO: 2917503 - RNA, 20 nt, Human T-lymphotropic virus 1
ucauucccccuuccgccacc

SEQ ID NO: 2917504 - RNA, 20 nt, Human T-lymphotropic virus 1
uccucggugauuacagcccc

SEQ ID NO: 2917505 - RNA, 18 nt, Human T-lymphotropic virus 1
gucacaaagaucauuccc

SEQ ID NO: 2917506 - RNA, 13 nt, Human T-lymphotropic virus 1
aguuacuccagcu

SEQ ID NO: 2917507 - RNA, 15 nt, Human T-lymphotropic virus 1
cucuaccagcuuucc

SEQ ID NO: 2917508 - RNA, 14 nt, Human T-lymphotropic virus 1
ccaccgggaaccac

SEQ ID NO: 2917509 - RNA, 15 nt, Human T-lymphotropic virus 1
aucauaagcucagac

SEQ ID NO: 2917510 - RNA, 22 nt, Human T-lymphotropic virus 1
cuccuuguccuuuaacucuucc

SEQ ID NO: 2917511 - RNA, 22 nt, Human T-lymphotropic virus 1
cccauguuugucaagccguccu

SEQ ID NO: 2917512 - RNA, 21 nt, Human T-lymphotropic virus 1
aggccccccgaaaucagccag

SEQ ID NO: 2917513 - RNA, 15 nt, Human T-lymphotropic virus 1
auuaaccucucccau

SEQ ID NO: 2917514 - RNA, 16 nt, Human T-lymphotropic virus 1
acgcuuugccugaccc

SEQ ID NO: 2917515 - RNA, 18 nt, Human T-lymphotropic virus 1
cuccccuccuuccccacc

SEQ ID NO: 2917516 - RNA, 20 nt, Human T-lymphotropic virus 1
aaucugcuuuuccuccucuu

SEQ ID NO: 2917517 - RNA, 20 nt, Human T-lymphotropic virus 1
accuuggccucucacagugg

SEQ ID NO: 2917518 - RNA, 19 nt, Human T-lymphotropic virus 1
uaguacuacaguccuccuc

SEQ ID NO: 2917519 - RNA, 23 nt, Human T-lymphotropic virus 1
cacccuugggcagcaccucccaa

SEQ ID NO: 2917520 - RNA, 13 nt, Human T-lymphotropic virus 1
cauucccucagca

SEQ ID NO: 2917521 - RNA, 14 nt, Human T-lymphotropic virus 1
cuucuccucagccc

SEQ ID NO: 2917522 - RNA, 20 nt, Human T-lymphotropic virus 1
cucacaguuggagucuccuc

SEQ ID NO: 2917523 - RNA, 16 nt, Human T-lymphotropic virus 1
acccucgaccugcugg

SEQ ID NO: 2917524 - RNA, 18 nt, Human T-lymphotropic virus 1
acuggcaccaccacugug

SEQ ID NO: 2917525 - RNA, 21 nt, Human T-lymphotropic virus 1
ucguuagcgcuuccagccccc

SEQ ID NO: 2917526 - RNA, 18 nt, Human T-lymphotropic virus 1
accccaucugguuccuua

SEQ ID NO: 2917527 - RNA, 22 nt, Human T-lymphotropic virus 1
ccugaacuacguccgccgucua

SEQ ID NO: 2917528 - RNA, 18 nt, Human T-lymphotropic virus 1
ccucccaugcggaccugc

SEQ ID NO: 2917529 - RNA, 20 nt, Human T-lymphotropic virus 1
accagcuuuccccccccauc

SEQ ID NO: 2917530 - RNA, 16 nt, Human T-lymphotropic virus 1
cucaggcuaggcccug

SEQ ID NO: 2917531 - RNA, 14 nt, Human T-lymphotropic virus 1
gaucaccugggacc

SEQ ID NO: 2917532 - RNA, 16 nt, Human T-lymphotropic virus 1
auccaccucccaggca

SEQ ID NO: 2917533 - RNA, 18 nt, Human T-lymphotropic virus 1
agcugcuguacucucaca

SEQ ID NO: 2917534 - RNA, 19 nt, Human T-lymphotropic virus 1
cauauccucgagcccucua

SEQ ID NO: 2917535 - RNA, 16 nt, Human T-lymphotropic virus 1
uaaagauggccagcca

SEQ ID NO: 2917536 - RNA, 13 nt, Human T-lymphotropic virus 1
cuucucagccccu

SEQ ID NO: 2917537 - RNA, 17 nt, Human T-lymphotropic virus 1
ugcaauccugcccagcc

SEQ ID NO: 2917538 - RNA, 13 nt, Human T-lymphotropic virus 1
agguccucucagg

SEQ ID NO: 2917539 - RNA, 22 nt, Human T-lymphotropic virus 1
cccauugcggacagacggcccu

SEQ ID NO: 2917540 - RNA, 14 nt, Human T-lymphotropic virus 1
cugggcgcuaccug

SEQ ID NO: 2917541 - RNA, 21 nt, Human T-lymphotropic virus 1
cucaacccucaccacuccagg

SEQ ID NO: 2917542 - RNA, 23 nt, Human T-lymphotropic virus 1
auugacacccagaccagccaccc

SEQ ID NO: 2917543 - RNA, 23 nt, Human T-lymphotropic virus 1
cccaucaccuggccccuccugcc

SEQ ID NO: 2917544 - RNA, 15 nt, Human T-lymphotropic virus 1
uucaaauacucagca

SEQ ID NO: 2917545 - RNA, 15 nt, Human T-lymphotropic virus 1
cucuaaacccugcaa

SEQ ID NO: 2917546 - RNA, 14 nt, Human T-lymphotropic virus 1
ucaggcuaggcccu

SEQ ID NO: 2917547 - RNA, 22 nt, Human T-lymphotropic virus 1
uugcggacagacggcccucaca

SEQ ID NO: 2917548 - RNA, 15 nt, Human T-lymphotropic virus 1
gcacccgucacgcug

SEQ ID NO: 2917549 - RNA, 22 nt, Human T-lymphotropic virus 1
gcccaccacccuuuuccagccu

SEQ ID NO: 2917550 - RNA, 16 nt, Human T-lymphotropic virus 1
aggcccuccugccccg

SEQ ID NO: 2917551 - RNA, 15 nt, Human T-lymphotropic virus 1
cuacagccacccugc

SEQ ID NO: 2917552 - RNA, 20 nt, Human T-lymphotropic virus 1
uucagacggauccaccuccc

SEQ ID NO: 2917553 - RNA, 16 nt, Human T-lymphotropic virus 1
acagccccagcugcug

SEQ ID NO: 2917554 - RNA, 15 nt, Human T-lymphotropic virus 1
ucauggacccucgac

SEQ ID NO: 2917555 - RNA, 15 nt, Human T-lymphotropic virus 1
caccaauuccuccac

SEQ ID NO: 2917556 - RNA, 16 nt, Human T-lymphotropic virus 1
auagaaaaacuccucu

SEQ ID NO: 2917557 - RNA, 16 nt, Human T-lymphotropic virus 1
ggcucugacgucuccc

SEQ ID NO: 2917558 - RNA, 21 nt, Human T-lymphotropic virus 1
uauugcaaccacaucgccucc

SEQ ID NO: 2917559 - RNA, 17 nt, Human T-lymphotropic virus 1
gcucucuccugcagacc

SEQ ID NO: 2917560 - RNA, 12 nt, Human T-lymphotropic virus 1
cuacucucacac

SEQ ID NO: 2917561 - RNA, 21 nt, Human T-lymphotropic virus 1
auaccaaaaacaacugggcca

SEQ ID NO: 2917562 - RNA, 22 nt, Human T-lymphotropic virus 1
ucacaaauuucaaaccaaggcc

SEQ ID NO: 2917563 - RNA, 12 nt, Human T-lymphotropic virus 1
uuuuccagccug

SEQ ID NO: 2917564 - RNA, 13 nt, Human T-lymphotropic virus 1
ucaaauccuccuu

SEQ ID NO: 2917565 - RNA, 21 nt, Human T-lymphotropic virus 1
cucagccggcucuccacgcuu

SEQ ID NO: 2917566 - RNA, 18 nt, Human T-lymphotropic virus 1
guuucgccuucucagccc

SEQ ID NO: 2917567 - RNA, 16 nt, Human T-lymphotropic virus 1
ccguccaccaauuccu

SEQ ID NO: 2917568 - RNA, 14 nt, Human T-lymphotropic virus 1
ucgccuccagccuc

SEQ ID NO: 2917569 - RNA, 20 nt, Human T-lymphotropic virus 1
cacccuugggcagcaccucc

SEQ ID NO: 2917570 - RNA, 15 nt, Human T-lymphotropic virus 1
ugccuauauuuccca

SEQ ID NO: 2917571 - RNA, 18 nt, Human T-lymphotropic virus 1
aacucccucauccugccc

SEQ ID NO: 2917572 - RNA, 21 nt, Human T-lymphotropic virus 1
cugccggcgcugcucucaucc

SEQ ID NO: 2917573 - RNA, 13 nt, Human T-lymphotropic virus 1
accaugccaccua

SEQ ID NO: 2917574 - RNA, 16 nt, Human T-lymphotropic virus 1
cuccagccccuacugg

SEQ ID NO: 2917575 - RNA, 17 nt, Human T-lymphotropic virus 1
cuuucaggcccuccugc

SEQ ID NO: 2917576 - RNA, 22 nt, Human T-lymphotropic virus 1
accucuaccagcuuuccccccc

SEQ ID NO: 2917577 - RNA, 22 nt, Human T-lymphotropic virus 1
ucuguaucgaucgugccagccu

SEQ ID NO: 2917578 - RNA, 16 nt, Human T-lymphotropic virus 1
uccccauuucucuacu

SEQ ID NO: 2917579 - RNA, 16 nt, Human T-lymphotropic virus 1
cuuccuaaccaagacc

SEQ ID NO: 2917580 - RNA, 12 nt, Human T-lymphotropic virus 1
gucuccagcccc

SEQ ID NO: 2917581 - RNA, 16 nt, Human T-lymphotropic virus 1
auauccucgagcccuc

SEQ ID NO: 2917582 - RNA, 13 nt, Human T-lymphotropic virus 1
auuuaaauccuuc

SEQ ID NO: 2917583 - RNA, 18 nt, Human T-lymphotropic virus 1
cuaaucuaguaaguuacu

SEQ ID NO: 2917584 - RNA, 21 nt, Human T-lymphotropic virus 1
caccacuccccccgacuccag

SEQ ID NO: 2917585 - RNA, 20 nt, Human T-lymphotropic virus 1
acaucugaccaccccagugu

SEQ ID NO: 2917586 - RNA, 21 nt, Human T-lymphotropic virus 1
gguaagcgcuaguucugccca

SEQ ID NO: 2917587 - RNA, 21 nt, Human T-lymphotropic virus 1
ggaggcuauuauucagccucu

SEQ ID NO: 2917588 - RNA, 12 nt, Human T-lymphotropic virus 1
gggcccugcccu

SEQ ID NO: 2917589 - RNA, 19 nt, Human T-lymphotropic virus 1
ugguccggaaggcccugga

SEQ ID NO: 2917590 - RNA, 21 nt, Human T-lymphotropic virus 1
ggcgcucccuuggagccuacc

SEQ ID NO: 2917591 - RNA, 15 nt, Human T-lymphotropic virus 1
cucuucuccucagcc

SEQ ID NO: 2917592 - RNA, 19 nt, Human T-lymphotropic virus 1
agccacccugcccuaaucu

SEQ ID NO: 2917593 - RNA, 19 nt, Human T-lymphotropic virus 1
ccagcuuuccccccccauc

SEQ ID NO: 2917594 - RNA, 15 nt, Human T-lymphotropic virus 1
cuguacacccucugg

SEQ ID NO: 2917595 - RNA, 19 nt, Human T-lymphotropic virus 1
uuccucuuugcuccaggcc

SEQ ID NO: 2917596 - RNA, 17 nt, Human T-lymphotropic virus 1
agcccuacuuugcuuuc

SEQ ID NO: 2917597 - RNA, 17 nt, Human T-lymphotropic virus 1
uagccagugccccuggg

SEQ ID NO: 2917598 - RNA, 21 nt, Human T-lymphotropic virus 1
acuaauucccaugucucaaua

SEQ ID NO: 2917599 - RNA, 18 nt, Human T-lymphotropic virus 1
ucgacaaauacaccuugc

SEQ ID NO: 2917600 - RNA, 14 nt, Human T-lymphotropic virus 1
ucuuauaaacccug

SEQ ID NO: 2917601 - RNA, 13 nt, Human T-lymphotropic virus 1
gcccucacacugc

SEQ ID NO: 2917602 - RNA, 19 nt, Human T-lymphotropic virus 1
cacguccuauacucuccca

SEQ ID NO: 2917603 - RNA, 18 nt, Human T-lymphotropic virus 1
cuccuggcaagccccucc

SEQ ID NO: 2917604 - RNA, 15 nt, Human T-lymphotropic virus 1
uguggugccuccuga

SEQ ID NO: 2917605 - RNA, 14 nt, Human T-lymphotropic virus 1
ccuuaugccagugu

SEQ ID NO: 2917606 - RNA, 13 nt, Human T-lymphotropic virus 1
agcucaccucccu

SEQ ID NO: 2917607 - RNA, 14 nt, Human T-lymphotropic virus 1
ucgacgcuccagga

SEQ ID NO: 2917608 - RNA, 17 nt, Human T-lymphotropic virus 1
ggaugacauucuccugg

SEQ ID NO: 2917609 - RNA, 13 nt, Human T-lymphotropic virus 1
acaguccuccucc

SEQ ID NO: 2917610 - RNA, 22 nt, Human T-lymphotropic virus 1
ugcccaagacccgucggaggcc

SEQ ID NO: 2917611 - RNA, 21 nt, Human T-lymphotropic virus 1
cuccuucacgcgcccgccgcc

SEQ ID NO: 2917612 - RNA, 13 nt, Human T-lymphotropic virus 1
accagcuuucccc

SEQ ID NO: 2917613 - RNA, 20 nt, Human T-lymphotropic virus 1
ccccauuggcuccugugaaa

SEQ ID NO: 2917614 - RNA, 15 nt, Human T-lymphotropic virus 1
cgucuccagccccua

SEQ ID NO: 2917615 - RNA, 22 nt, Human T-lymphotropic virus 1
acagacgaggccuugaucuccu

SEQ ID NO: 2917616 - RNA, 13 nt, Human T-lymphotropic virus 1
cagaccagccacc

SEQ ID NO: 2917617 - RNA, 17 nt, Human T-lymphotropic virus 1
aaggcagguccucucag

SEQ ID NO: 2917618 - RNA, 14 nt, Human T-lymphotropic virus 1
ccucuacucuccca

SEQ ID NO: 2917619 - RNA, 20 nt, Human T-lymphotropic virus 1
cccugacuuguccagccugc

SEQ ID NO: 2917620 - RNA, 15 nt, Human T-lymphotropic virus 1
cucucuuauaaaccc

SEQ ID NO: 2917621 - RNA, 19 nt, Human T-lymphotropic virus 1
uacgccagccccuucacag

SEQ ID NO: 2917622 - RNA, 13 nt, Human T-lymphotropic virus 1
ccauagaucucuc

SEQ ID NO: 2917623 - RNA, 20 nt, Human T-lymphotropic virus 1
ccucuauaaaauuucccuua

SEQ ID NO: 2917624 - RNA, 13 nt, Human T-lymphotropic virus 1
gugccagccuauc

SEQ ID NO: 2917625 - RNA, 17 nt, Human T-lymphotropic virus 1
aucauggaccugccccu

SEQ ID NO: 2917626 - RNA, 19 nt, Human T-lymphotropic virus 1
gaaaggaccacaggaggcu

SEQ ID NO: 2917627 - RNA, 16 nt, Human T-lymphotropic virus 1
ccugucuuuuccagac

SEQ ID NO: 2917628 - RNA, 15 nt, Human T-lymphotropic virus 1
ucuucuccucagccc

SEQ ID NO: 2917629 - RNA, 13 nt, Human T-lymphotropic virus 1
uagucccacccug

SEQ ID NO: 2917630 - RNA, 19 nt, Human T-lymphotropic virus 1
ccccaacauuccacccucc

SEQ ID NO: 2917631 - RNA, 15 nt, Human T-lymphotropic virus 1
ugacuuguccagccu

SEQ ID NO: 2917632 - RNA, 19 nt, Human T-lymphotropic virus 1
uucagacggauccaccucc

SEQ ID NO: 2917633 - RNA, 12 nt, Human T-lymphotropic virus 1
acagaacugccg

SEQ ID NO: 2917634 - RNA, 16 nt, Human T-lymphotropic virus 1
cuaccuagacucagcc

SEQ ID NO: 2917635 - RNA, 12 nt, Human T-lymphotropic virus 1
aaugccaaggcg

SEQ ID NO: 2917636 - RNA, 14 nt, Human T-lymphotropic virus 1
ccagccugccaacu

SEQ ID NO: 2917637 - RNA, 15 nt, Human T-lymphotropic virus 1
cucaccucccuuccu

SEQ ID NO: 2917638 - RNA, 20 nt, Human T-lymphotropic virus 1
ucaggcccuacagccacccu

SEQ ID NO: 2917639 - RNA, 14 nt, Human T-lymphotropic virus 1
gcaucagaucaccu

SEQ ID NO: 2917640 - RNA, 18 nt, Human T-lymphotropic virus 1
ggggccuuaacugggacc

SEQ ID NO: 2917641 - RNA, 20 nt, Human T-lymphotropic virus 1
cuguuucgccuucucagccc

SEQ ID NO: 2917642 - RNA, 22 nt, Human T-lymphotropic virus 1
ccuuuucaggagccaucucagc

SEQ ID NO: 2917643 - RNA, 20 nt, Human T-lymphotropic virus 1
cuuccagccccccaccugac

SEQ ID NO: 2917644 - RNA, 23 nt, Human T-lymphotropic virus 1
gcggcaggcccugucacagaacu

SEQ ID NO: 2917645 - RNA, 15 nt, Human T-lymphotropic virus 1
uaccucccugaggca

SEQ ID NO: 2917646 - RNA, 19 nt, Human T-lymphotropic virus 1
gcagcccauucggcaagcc

SEQ ID NO: 2917647 - RNA, 20 nt, Human T-lymphotropic virus 1
cuacaugccccccuacccca

SEQ ID NO: 2917648 - RNA, 16 nt, Human T-lymphotropic virus 1
gcaauccugcccagcc

SEQ ID NO: 2917649 - RNA, 21 nt, Human T-lymphotropic virus 1
guugacgacaaccccucaccu

SEQ ID NO: 2917650 - RNA, 16 nt, Human T-lymphotropic virus 1
cccucgacuccccucc

SEQ ID NO: 2917651 - RNA, 13 nt, Human T-lymphotropic virus 1
acuccaccucgcc

SEQ ID NO: 2917652 - RNA, 17 nt, Human T-lymphotropic virus 1
ccuugaucuccuguucu

SEQ ID NO: 2917653 - RNA, 22 nt, Human T-lymphotropic virus 1
uaaccaugcuuauuaucagccc

SEQ ID NO: 2917654 - RNA, 19 nt, Human T-lymphotropic virus 1
gccccgccgaucccaaaga

SEQ ID NO: 2917655 - RNA, 16 nt, Human T-lymphotropic virus 1
ccacccuccuuccucc

SEQ ID NO: 2917656 - RNA, 13 nt, Human T-lymphotropic virus 1
cgccgccuuaccu

SEQ ID NO: 2917657 - RNA, 21 nt, Human T-lymphotropic virus 1
cccggcacuagauacgccugg

SEQ ID NO: 2917658 - RNA, 12 nt, Human T-lymphotropic virus 1
gagucuccucau

SEQ ID NO: 2917659 - RNA, 12 nt, Human T-lymphotropic virus 1
aucaaaaagcca

SEQ ID NO: 2917660 - RNA, 22 nt, Human T-lymphotropic virus 1
agcggccuucuccuccgcccgc

SEQ ID NO: 2917661 - RNA, 18 nt, Human T-lymphotropic virus 1
cuagucgacgcuccagga

SEQ ID NO: 2917662 - RNA, 15 nt, Human T-lymphotropic virus 1
ccuaccaccccucau

SEQ ID NO: 2917663 - RNA, 13 nt, Human T-lymphotropic virus 1
ucuuuuccagacc

SEQ ID NO: 2917664 - RNA, 15 nt, Human T-lymphotropic virus 1
gucaccgauucaaaa

SEQ ID NO: 2917665 - RNA, 15 nt, Human T-lymphotropic virus 1
cgacauuacccauuu

SEQ ID NO: 2917666 - RNA, 14 nt, Human T-lymphotropic virus 1
cuaggcaccuucca

SEQ ID NO: 2917667 - RNA, 23 nt, Human T-lymphotropic virus 1
agccuggcaaaacggccuccuuc

SEQ ID NO: 2917668 - RNA, 19 nt, Human T-lymphotropic virus 1
ccuggccccuccugcccca

SEQ ID NO: 2917669 - RNA, 15 nt, Human T-lymphotropic virus 1
cuacuggccaccugu

SEQ ID NO: 2917670 - RNA, 19 nt, Human T-lymphotropic virus 1
ugcccuaggcaccuuccaa

SEQ ID NO: 2917671 - RNA, 18 nt, Human T-lymphotropic virus 1
gugauuacagccccagcu

SEQ ID NO: 2917672 - RNA, 18 nt, Human T-lymphotropic virus 1
gucauaacucccucaucc

SEQ ID NO: 2917673 - RNA, 13 nt, Human T-lymphotropic virus 1
ucuacucucccac

SEQ ID NO: 2917674 - RNA, 16 nt, Human T-lymphotropic virus 1
ccacccuugggcagca

SEQ ID NO: 2917675 - RNA, 20 nt, Human T-lymphotropic virus 1
cuccucuuccuuccuuuuca

SEQ ID NO: 2917676 - RNA, 15 nt, Human T-lymphotropic virus 1
ggaggacagcucagc

SEQ ID NO: 2917677 - RNA, 19 nt, Human T-lymphotropic virus 1
acuggcuggggccuuaacu

SEQ ID NO: 2917678 - RNA, 14 nt, Human T-lymphotropic virus 1
agaccuacacaguu

SEQ ID NO: 2917679 - RNA, 22 nt, Human T-lymphotropic virus 1
agcagaucaggcccuacagcca

SEQ ID NO: 2917680 - RNA, 17 nt, Human T-lymphotropic virus 1
uacucaagaaguuucac

SEQ ID NO: 2917681 - RNA, 13 nt, Human T-lymphotropic virus 1
cauaacucccuca

SEQ ID NO: 2917682 - RNA, 16 nt, Human T-lymphotropic virus 1
uccuccguucagccuc

SEQ ID NO: 2917683 - RNA, 23 nt, Human T-lymphotropic virus 1
ccugggggcagcuacuugccuca

SEQ ID NO: 2917684 - RNA, 20 nt, Human T-lymphotropic virus 1
ucaaacaucugaccacccca

SEQ ID NO: 2917685 - RNA, 16 nt, Human T-lymphotropic virus 1
ccaguucugcccccuc

SEQ ID NO: 2917686 - RNA, 21 nt, Human T-lymphotropic virus 1
ccuguucgaaaugcagcuggc

SEQ ID NO: 2917687 - RNA, 19 nt, Human T-lymphotropic virus 1
ucacuuaugaugcaguccc

SEQ ID NO: 2917688 - RNA, 13 nt, Human T-lymphotropic virus 1
ucauaagcucaga

SEQ ID NO: 2917689 - RNA, 22 nt, Human T-lymphotropic virus 1
ccccuuucaggcccuccugccc

SEQ ID NO: 2917690 - RNA, 15 nt, Human T-lymphotropic virus 1
uuucacaaauuucaa

SEQ ID NO: 2917691 - RNA, 14 nt, Human T-lymphotropic virus 1
cccugcuugcucaa

SEQ ID NO: 2917692 - RNA, 11 nt, Human T-lymphotropic virus 1
cucauuucuac

SEQ ID NO: 2917693 - RNA, 20 nt, Human T-lymphotropic virus 1
cgucacgcccuacuggccac

SEQ ID NO: 2917694 - RNA, 18 nt, Human T-lymphotropic virus 1
cgccgccuuaccugaggc

SEQ ID NO: 2917695 - RNA, 13 nt, Human T-lymphotropic virus 1
augcugcccagaa

SEQ ID NO: 2917696 - RNA, 18 nt, Human T-lymphotropic virus 1
caugcuuauuaucagccc

SEQ ID NO: 2917697 - RNA, 16 nt, Human T-lymphotropic virus 1
cuccuucuccugcagc

SEQ ID NO: 2917698 - RNA, 16 nt, Human T-lymphotropic virus 1
cuaccaugccaccuau

SEQ ID NO: 2917699 - RNA, 19 nt, Human T-lymphotropic virus 1
cccaacccugucuuuucca

SEQ ID NO: 2917700 - RNA, 20 nt, Human T-lymphotropic virus 1
cccgggggcuuagagccucu

SEQ ID NO: 2917701 - RNA, 13 nt, Human T-lymphotropic virus 1
cucauaccacucu

SEQ ID NO: 2917702 - RNA, 18 nt, Human T-lymphotropic virus 1
caagaaguuucacaccuc

SEQ ID NO: 2917703 - RNA, 22 nt, Human T-lymphotropic virus 1
ccguuccacucaacccucacca

SEQ ID NO: 2917704 - RNA, 22 nt, Human T-lymphotropic virus 1
gccgucuccagccccuacugga

SEQ ID NO: 2917705 - RNA, 12 nt, Human T-lymphotropic virus 1
gcuucccuaauc

SEQ ID NO: 2917706 - RNA, 23 nt, Human T-lymphotropic virus 1
gauucaaaaauuuaggugcccag

SEQ ID NO: 2917707 - RNA, 16 nt, Human T-lymphotropic virus 1
uccgcccgcuuccugc

SEQ ID NO: 2917708 - RNA, 19 nt, Human T-lymphotropic virus 1
uuaauaccgaacccagcca

SEQ ID NO: 2917709 - RNA, 16 nt, Human T-lymphotropic virus 1
cauauccucgagcccu

SEQ ID NO: 2917710 - RNA, 15 nt, Human T-lymphotropic virus 1
uccuccuccuugucc

SEQ ID NO: 2917711 - RNA, 20 nt, Human T-lymphotropic virus 1
caaccuccuccguucagccu

SEQ ID NO: 2917712 - RNA, 21 nt, Human T-lymphotropic virus 1
ggacuguuugcccaccacccu

SEQ ID NO: 2917713 - RNA, 21 nt, Human T-lymphotropic virus 1
gauccaccucccaggcagccu

SEQ ID NO: 2917714 - RNA, 23 nt, Human T-lymphotropic virus 1
ggccacaauggcuucccuaaucu

SEQ ID NO: 2917715 - RNA, 15 nt, Human T-lymphotropic virus 1
ccucaccacuccagg

SEQ ID NO: 2917716 - RNA, 14 nt, Human T-lymphotropic virus 1
gcaauccugcccag

SEQ ID NO: 2917717 - RNA, 22 nt, Human T-lymphotropic virus 1
aaccacaucgccuccagccucc

SEQ ID NO: 2917718 - RNA, 22 nt, Human T-lymphotropic virus 1
cuccugcagaccuacacaguuu

SEQ ID NO: 2917719 - RNA, 23 nt, Human T-lymphotropic virus 1
gccguggccuacucccuaaccac

SEQ ID NO: 2917720 - RNA, 13 nt, Human T-lymphotropic virus 1
uacacccucuggg

SEQ ID NO: 2917721 - RNA, 23 nt, Human T-lymphotropic virus 1
ggcuucccuaaucucccaugggu

SEQ ID NO: 2917722 - RNA, 18 nt, Human T-lymphotropic virus 1
uacaauccaaccagcucc

SEQ ID NO: 2917723 - RNA, 22 nt, Human T-lymphotropic virus 1
ccauuggcuccugugaaagccc

SEQ ID NO: 2917724 - RNA, 13 nt, Human T-lymphotropic virus 1
auggaccugcccc

SEQ ID NO: 2917725 - RNA, 20 nt, Human T-lymphotropic virus 1
gauacauggaacccacccuu

SEQ ID NO: 2917726 - RNA, 17 nt, Human T-lymphotropic virus 1
cucucaggcccccuuuc

SEQ ID NO: 2917727 - RNA, 14 nt, Human T-lymphotropic virus 1
gaggccgccaucca

SEQ ID NO: 2917728 - RNA, 15 nt, Human T-lymphotropic virus 1
cggaaggcccuggag

SEQ ID NO: 2917729 - RNA, 15 nt, Human T-lymphotropic virus 1
ccaagcagcaguggc

SEQ ID NO: 2917730 - RNA, 14 nt, Human T-lymphotropic virus 1
acuccccuccuucc

SEQ ID NO: 2917731 - RNA, 15 nt, Human T-lymphotropic virus 1
gagccgucuccagcc

SEQ ID NO: 2917732 - RNA, 19 nt, Human T-lymphotropic virus 1
cacgcuaggaucccgcucc

SEQ ID NO: 2917733 - RNA, 19 nt, Human T-lymphotropic virus 1
aaaccuguacacccucugg

SEQ ID NO: 2917734 - RNA, 14 nt, Human T-lymphotropic virus 1
ccuccaggccaugc

SEQ ID NO: 2917735 - RNA, 15 nt, Human T-lymphotropic virus 1
ccuuuuccagccugc

SEQ ID NO: 2917736 - RNA, 16 nt, Human T-lymphotropic virus 1
ccggaggacagcucag

SEQ ID NO: 2917737 - RNA, 14 nt, Human T-lymphotropic virus 1
ggagccaucucagc

SEQ ID NO: 2917738 - RNA, 17 nt, Human T-lymphotropic virus 1
cagaacgccuccaggcc

SEQ ID NO: 2917739 - RNA, 19 nt, Human T-lymphotropic virus 1
cuucuuuucggauacccag

SEQ ID NO: 2917740 - RNA, 18 nt, Human T-lymphotropic virus 1
accugcaacuacucucag

SEQ ID NO: 2917741 - RNA, 20 nt, Human T-lymphotropic virus 1
caaacaucugaccaccccag

SEQ ID NO: 2917742 - RNA, 17 nt, Human T-lymphotropic virus 1
acgacaccuccccucgc

SEQ ID NO: 2917743 - RNA, 22 nt, Human T-lymphotropic virus 1
uccgucagcuacgacaccuccc

SEQ ID NO: 2917744 - RNA, 12 nt, Human T-lymphotropic virus 1
cgucuccagccc

SEQ ID NO: 2917745 - RNA, 15 nt, Human T-lymphotropic virus 1
cuacaguccuccucc

SEQ ID NO: 2917746 - RNA, 15 nt, Human T-lymphotropic virus 1
gucuccagccccuac

SEQ ID NO: 2917747 - RNA, 16 nt, Human T-lymphotropic virus 1
aucauuagugcagcug

SEQ ID NO: 2917748 - RNA, 19 nt, Human T-lymphotropic virus 1
cccguggaggcuccucaag

SEQ ID NO: 2917749 - RNA, 13 nt, Human T-lymphotropic virus 1
auccugcccagcc

SEQ ID NO: 2917750 - RNA, 18 nt, Human T-lymphotropic virus 1
ccugucauaacucccuca

SEQ ID NO: 2917751 - RNA, 20 nt, Human T-lymphotropic virus 1
gagguggcgcuuuccccccu

SEQ ID NO: 2917752 - RNA, 15 nt, Human T-lymphotropic virus 1
caaucugcuuuuccu

SEQ ID NO: 2917753 - RNA, 18 nt, Human T-lymphotropic virus 1
aggcccuacagccacccu

SEQ ID NO: 2917754 - RNA, 20 nt, Human T-lymphotropic virus 1
ggcccugacgugucccccua

SEQ ID NO: 2917755 - RNA, 23 nt, Human T-lymphotropic virus 1
ugacacccagaccagccacccaa

SEQ ID NO: 2917756 - RNA, 21 nt, Human T-lymphotropic virus 1
gccagcucggggccuuccuca

SEQ ID NO: 2917757 - RNA, 19 nt, Human T-lymphotropic virus 1
gugccagccuauccacuug

SEQ ID NO: 2917758 - RNA, 18 nt, Human T-lymphotropic virus 1
acccagccaacugccucc

SEQ ID NO: 2917759 - RNA, 15 nt, Human T-lymphotropic virus 1
cucaccucaaaaaac

SEQ ID NO: 2917760 - RNA, 16 nt, Human T-lymphotropic virus 1
uucuccucagcccguc

SEQ ID NO: 2917761 - RNA, 18 nt, Human T-lymphotropic virus 1
ggcgcucccuuggagccu

SEQ ID NO: 2917762 - RNA, 17 nt, Human T-lymphotropic virus 1
uccaccaauuccuccac

SEQ ID NO: 2917763 - RNA, 15 nt, Human T-lymphotropic virus 1
uaacuggacccacug

SEQ ID NO: 2917764 - RNA, 19 nt, Human T-lymphotropic virus 1
accacaaaaaucugcucaa

SEQ ID NO: 2917765 - RNA, 20 nt, Human T-lymphotropic virus 1
ccuacaauccaaccagcucc

SEQ ID NO: 2917766 - RNA, 19 nt, Human T-lymphotropic virus 1
uggggccuuaacugggacc

SEQ ID NO: 2917767 - RNA, 18 nt, Human T-lymphotropic virus 1
agacuaguccaaacccug

SEQ ID NO: 2917768 - RNA, 18 nt, Human T-lymphotropic virus 1
ugacauucuccuggcaag

SEQ ID NO: 2917769 - RNA, 19 nt, Human T-lymphotropic virus 1
uaccaaaaacaacugggcc

SEQ ID NO: 2917770 - RNA, 23 nt, Human T-lymphotropic virus 1
ggugccaaucauggaccugcccc

SEQ ID NO: 2917771 - RNA, 20 nt, Human T-lymphotropic virus 1
cgucagcuacgacaccuccc

SEQ ID NO: 2917772 - RNA, 11 nt, Human T-lymphotropic virus 1
aucucuccuuc

SEQ ID NO: 2917773 - RNA, 14 nt, Human T-lymphotropic virus 1
ccacuugcgcucac

SEQ ID NO: 2917774 - RNA, 13 nt, Human T-lymphotropic virus 1
acaaucaaccacc

SEQ ID NO: 2917775 - RNA, 22 nt, Human T-lymphotropic virus 1
cuccugaacuacguccgccguc

SEQ ID NO: 2917776 - RNA, 16 nt, Human T-lymphotropic virus 1
uacugauccccgagac

SEQ ID NO: 2917777 - RNA, 24 nt, Human T-lymphotropic virus 1
ccuuaauaccgaacccagccaacu

SEQ ID NO: 2917778 - RNA, 18 nt, Human T-lymphotropic virus 1
cgcguuaucggcucagcu

SEQ ID NO: 2917779 - RNA, 17 nt, Human T-lymphotropic virus 1
caucaacccccaacucc

SEQ ID NO: 2917780 - RNA, 16 nt, Human T-lymphotropic virus 1
uggccccuccugcccc

SEQ ID NO: 2917781 - RNA, 13 nt, Human T-lymphotropic virus 1
uccaguccaagca

SEQ ID NO: 2917782 - RNA, 16 nt, Human T-lymphotropic virus 1
ucaggcccccuuucag

SEQ ID NO: 2917783 - RNA, 17 nt, Human T-lymphotropic virus 1
cacccuugucgcgcuac

SEQ ID NO: 2917784 - RNA, 19 nt, Human T-lymphotropic virus 1
caauaauuaaccucuccca

SEQ ID NO: 2917785 - RNA, 14 nt, Human T-lymphotropic virus 1
cauacggcucaaua

SEQ ID NO: 2917786 - RNA, 14 nt, Human T-lymphotropic virus 1
ccugcuuucuccgg

SEQ ID NO: 2917787 - RNA, 15 nt, Human T-lymphotropic virus 1
cuccccuccuucccc

SEQ ID NO: 2917788 - RNA, 20 nt, Human T-lymphotropic virus 1
cugacuuguccagccugcca

SEQ ID NO: 2917789 - RNA, 23 nt, Human T-lymphotropic virus 1
ucuccacgcuuugccugacccug

SEQ ID NO: 2917790 - RNA, 22 nt, Human T-lymphotropic virus 1
uaaaagcguggggacaguucag

SEQ ID NO: 2917791 - RNA, 22 nt, Human T-lymphotropic virus 1
caacauauuucuagacuccaag

SEQ ID NO: 2917792 - RNA, 19 nt, Human T-lymphotropic virus 1
gauuuccgggcccugcccu

SEQ ID NO: 2917793 - RNA, 22 nt, Human T-lymphotropic virus 1
ucaucuucccccgggcccccug

SEQ ID NO: 2917794 - RNA, 17 nt, Human T-lymphotropic virus 1
cuggcaagccccuccca

SEQ ID NO: 2917795 - RNA, 20 nt, Human T-lymphotropic virus 1
gacguuaccauuuaacugga

SEQ ID NO: 2917796 - RNA, 14 nt, Human T-lymphotropic virus 1
cuuuccccugugau

SEQ ID NO: 2917797 - RNA, 13 nt, Human T-lymphotropic virus 1
ccgucuccagccc

SEQ ID NO: 2917798 - RNA, 20 nt, Human T-lymphotropic virus 1
caugcuuauuaucagcccac

SEQ ID NO: 2917799 - RNA, 20 nt, Human T-lymphotropic virus 1
cuucccccgggcccccugac

SEQ ID NO: 2917800 - RNA, 18 nt, Human T-lymphotropic virus 1
cuuuucaaauacucagca

SEQ ID NO: 2917801 - RNA, 21 nt, Human T-lymphotropic virus 1
cuaugauuuccgggcccugcc

SEQ ID NO: 2917802 - RNA, 17 nt, Human T-lymphotropic virus 1
cugucacagaacugccg

SEQ ID NO: 2917803 - RNA, 15 nt, Human T-lymphotropic virus 1
ccuugcaacacuugg

SEQ ID NO: 2917804 - RNA, 18 nt, Human T-lymphotropic virus 1
caucaucuucccccgggc

SEQ ID NO: 2917805 - RNA, 15 nt, Human T-lymphotropic virus 1
gcauguaccucuacc

SEQ ID NO: 2917806 - RNA, 18 nt, Human T-lymphotropic virus 1
cuccagccuccccugcca

SEQ ID NO: 2917807 - RNA, 14 nt, Human T-lymphotropic virus 1
ugcuguacucucac

SEQ ID NO: 2917808 - RNA, 23 nt, Human T-lymphotropic virus 1
aacacagacaauggcccugccua

SEQ ID NO: 2917809 - RNA, 20 nt, Human T-lymphotropic virus 1
cucccaucaaauccuccuuc

SEQ ID NO: 2917810 - RNA, 16 nt, Human T-lymphotropic virus 1
accggcuccauguccc

SEQ ID NO: 2917811 - RNA, 21 nt, Human T-lymphotropic virus 1
cccagccaacugccucccacc

SEQ ID NO: 2917812 - RNA, 14 nt, Human T-lymphotropic virus 1
gcaccagcucaggc

SEQ ID NO: 2917813 - RNA, 17 nt, Human T-lymphotropic virus 1
uuggacagagucuucuu

SEQ ID NO: 2917814 - RNA, 18 nt, Human T-lymphotropic virus 1
gcucuuccugcuuucucc

SEQ ID NO: 2917815 - RNA, 15 nt, Human T-lymphotropic virus 1
ggagccgucuccagc

SEQ ID NO: 2917816 - RNA, 18 nt, Human T-lymphotropic virus 1
aauagaaaaacuccucua

SEQ ID NO: 2917817 - RNA, 12 nt, Human T-lymphotropic virus 1
ucugccgccucc

SEQ ID NO: 2917818 - RNA, 18 nt, Human T-lymphotropic virus 1
gacaaaucauaagcucag

SEQ ID NO: 2917819 - RNA, 15 nt, Human T-lymphotropic virus 1
cugacagccuggcaa

SEQ ID NO: 2917820 - RNA, 14 nt, Human T-lymphotropic virus 1
aaauugcacaguau

SEQ ID NO: 2917821 - RNA, 14 nt, Human T-lymphotropic virus 1
ccgccauccacgcc

SEQ ID NO: 2917822 - RNA, 13 nt, Human T-lymphotropic virus 1
acuacccaugucc

SEQ ID NO: 2917823 - RNA, 15 nt, Human T-lymphotropic virus 1
ugccaccuauucccu

SEQ ID NO: 2917824 - RNA, 13 nt, Human T-lymphotropic virus 1
ccgccccuccucu

SEQ ID NO: 2917825 - RNA, 14 nt, Human T-lymphotropic virus 1
ucauggaccugccc

SEQ ID NO: 2917826 - RNA, 23 nt, Human T-lymphotropic virus 1
ccucuggggaggcuccguugucu

SEQ ID NO: 2917827 - RNA, 22 nt, Human T-lymphotropic virus 1
cuggcaaaacggccuccuuccg

SEQ ID NO: 2917828 - RNA, 15 nt, Human T-lymphotropic virus 1
cagcagaucaggccc

SEQ ID NO: 2917829 - RNA, 22 nt, Human T-lymphotropic virus 1
ccacgccgguugagucgcguuc

SEQ ID NO: 2917830 - RNA, 17 nt, Human T-lymphotropic virus 1
caaacuggaaucacccu

SEQ ID NO: 2917831 - RNA, 13 nt, Human T-lymphotropic virus 1
cagcaccucccaa

SEQ ID NO: 2917832 - RNA, 16 nt, Human T-lymphotropic virus 1
ucauuucuacucucac

SEQ ID NO: 2917833 - RNA, 15 nt, Human T-lymphotropic virus 1
acagacggcccucac

SEQ ID NO: 2917834 - RNA, 22 nt, Human T-lymphotropic virus 1
cacgcccuacuggccaccuguc

SEQ ID NO: 2917835 - RNA, 13 nt, Human T-lymphotropic virus 1
cagcucucuccug

SEQ ID NO: 2917836 - RNA, 22 nt, Human T-lymphotropic virus 1
cccugacuuguccagccugcca

SEQ ID NO: 2917837 - RNA, 17 nt, Human T-lymphotropic virus 1
cauggacccucgaccug

SEQ ID NO: 2917838 - RNA, 17 nt, Human T-lymphotropic virus 1
ccugacuuguccagccu

SEQ ID NO: 2917839 - RNA, 12 nt, Human T-lymphotropic virus 1
ucaaaacuccug

SEQ ID NO: 2917840 - RNA, 13 nt, Human T-lymphotropic virus 1
cuucaccacuccc

SEQ ID NO: 2917841 - RNA, 15 nt, Human T-lymphotropic virus 1
ccagcuaccaugcca

SEQ ID NO: 2917842 - RNA, 13 nt, Human T-lymphotropic virus 1
accgccccuccuc

SEQ ID NO: 2917843 - RNA, 16 nt, Human T-lymphotropic virus 1
cagcucaggcuaggcc

SEQ ID NO: 2917844 - RNA, 16 nt, Human T-lymphotropic virus 1
cacuccccccgacucc

SEQ ID NO: 2917845 - RNA, 21 nt, Human T-lymphotropic virus 1
agcuggcccauauccugcagc

SEQ ID NO: 2917846 - RNA, 19 nt, Human T-lymphotropic virus 1
caccuggccccuccugccc

SEQ ID NO: 2917847 - RNA, 22 nt, Human T-lymphotropic virus 1
uguucucaaguaauacuccccu

SEQ ID NO: 2917848 - RNA, 13 nt, Human T-lymphotropic virus 1
uggcccuuucagc

SEQ ID NO: 2917849 - RNA, 23 nt, Human T-lymphotropic virus 1
uagaccuuaaagacgccuuuuuc

SEQ ID NO: 2917850 - RNA, 19 nt, Human T-lymphotropic virus 1
aucccucgacuccccuccu

SEQ ID NO: 2917851 - RNA, 12 nt, Human T-lymphotropic virus 1
ucugcccagugg

SEQ ID NO: 2917852 - RNA, 17 nt, Human T-lymphotropic virus 1
gcuacgacaccuccccu

SEQ ID NO: 2917853 - RNA, 13 nt, Human T-lymphotropic virus 1
gccccuccugccc

SEQ ID NO: 2917854 - RNA, 14 nt, Human T-lymphotropic virus 1
aguccaaacccugc

SEQ ID NO: 2917855 - RNA, 16 nt, Human T-lymphotropic virus 1
agcgcuaguucugccc

SEQ ID NO: 2917856 - RNA, 12 nt, Human T-lymphotropic virus 1
aguucugccccc

SEQ ID NO: 2917857 - RNA, 17 nt, Human T-lymphotropic virus 1
caccucccaacccuguc

SEQ ID NO: 2917858 - RNA, 17 nt, Human T-lymphotropic virus 1
cagcucggggccuuccu

SEQ ID NO: 2917859 - RNA, 22 nt, Human T-lymphotropic virus 1
cucauccugccccccuuuuccu

SEQ ID NO: 2917860 - RNA, 15 nt, Human T-lymphotropic virus 1
guccccaagguaccu

SEQ ID NO: 2917861 - RNA, 14 nt, Human T-lymphotropic virus 1
gcucucacagaugc

SEQ ID NO: 2917862 - RNA, 14 nt, Human T-lymphotropic virus 1
gaacaccucccaag

SEQ ID NO: 2917863 - RNA, 22 nt, Human T-lymphotropic virus 1
ccuguccagagcaucagaucac

SEQ ID NO: 2917864 - RNA, 21 nt, Human T-lymphotropic virus 1
ucacgcgcccgccgccuuacc

SEQ ID NO: 2917865 - RNA, 19 nt, Human T-lymphotropic virus 1
ccuaccuaaacaguuccag

SEQ ID NO: 2917866 - RNA, 15 nt, Human T-lymphotropic virus 1
cuucuccucagcccg

SEQ ID NO: 2917867 - RNA, 19 nt, Human T-lymphotropic virus 1
ccguucagccuccaaggac

SEQ ID NO: 2917868 - RNA, 20 nt, Human T-lymphotropic virus 1
auccuauggacuacucugcc

SEQ ID NO: 2917869 - RNA, 19 nt, Human T-lymphotropic virus 1
ccuuucaggcccuccugcc

SEQ ID NO: 2917870 - RNA, 20 nt, Human T-lymphotropic virus 1
caaaaauuuaggugcccaga

SEQ ID NO: 2917871 - RNA, 17 nt, Human T-lymphotropic virus 1
caucaccuggccccucc

SEQ ID NO: 2917872 - RNA, 19 nt, Human T-lymphotropic virus 1
caugcuuauuaucagccca

SEQ ID NO: 2917873 - RNA, 22 nt, Human T-lymphotropic virus 1
ccccauguuugucaagccgucc

SEQ ID NO: 2917874 - RNA, 15 nt, Human T-lymphotropic virus 1
aggcccuccugcccc

SEQ ID NO: 2917875 - RNA, 23 nt, Human T-lymphotropic virus 1
cgggaaccacccauuuccucccc

SEQ ID NO: 2917876 - RNA, 22 nt, Human T-lymphotropic virus 1
cuugcaggaccaugcauccucc

SEQ ID NO: 2917877 - RNA, 14 nt, Human T-lymphotropic virus 1
acacaguuucaccc

SEQ ID NO: 2917878 - RNA, 17 nt, Human T-lymphotropic virus 1
caaggacuccaccucgc

SEQ ID NO: 2917879 - RNA, 22 nt, Human T-lymphotropic virus 1
agacuaguccaaacccugcccc

SEQ ID NO: 2917880 - RNA, 22 nt, Human T-lymphotropic virus 1
agauucaagcuauagucuccuc

SEQ ID NO: 2917881 - RNA, 14 nt, Human T-lymphotropic virus 1
ggauccaccuccca

SEQ ID NO: 2917882 - RNA, 21 nt, Human T-lymphotropic virus 1
cuugaaaaucgaguccugacu

SEQ ID NO: 2917883 - RNA, 16 nt, Human T-lymphotropic virus 1
ugcucuauccauagcc

SEQ ID NO: 2917884 - RNA, 19 nt, Human T-lymphotropic virus 1
cguggccuacucccuaacc

SEQ ID NO: 2917885 - RNA, 15 nt, Human T-lymphotropic virus 1
agcucggggccuucc

SEQ ID NO: 2917886 - RNA, 19 nt, Human T-lymphotropic virus 1
ggccaggaaauaacccagu

SEQ ID NO: 2917887 - RNA, 12 nt, Human T-lymphotropic virus 1
cuagacucagcc

SEQ ID NO: 2917888 - RNA, 20 nt, Human T-lymphotropic virus 1
ccuucuagucgacgcuccag

SEQ ID NO: 2917889 - RNA, 23 nt, Human T-lymphotropic virus 1
agaucacuuuaagcucaccuccc

SEQ ID NO: 2917890 - RNA, 23 nt, Human T-lymphotropic virus 1
ucccaacccugucuuuuccagac

SEQ ID NO: 2917891 - RNA, 19 nt, Human T-lymphotropic virus 1
aucgccuccagccuccccu

SEQ ID NO: 2917892 - RNA, 19 nt, Human T-lymphotropic virus 1
caguccaagcagcaguggc

SEQ ID NO: 2917893 - RNA, 21 nt, Human T-lymphotropic virus 1
ucagcagaucaggcccuacag

SEQ ID NO: 2917894 - RNA, 20 nt, Human T-lymphotropic virus 1
ccuugggcuagaacaccucc

SEQ ID NO: 2917895 - RNA, 16 nt, Human T-lymphotropic virus 1
ccuaguugauaccaaa

SEQ ID NO: 2917896 - RNA, 15 nt, Human T-lymphotropic virus 1
agcacaguuuccucc

SEQ ID NO: 2917897 - RNA, 18 nt, Human T-lymphotropic virus 1
cacaguuggagucuccuc

SEQ ID NO: 2917898 - RNA, 13 nt, Human T-lymphotropic virus 1
cacagaacugccg

SEQ ID NO: 2917899 - RNA, 15 nt, Human T-lymphotropic virus 1
auccugcgcucuugc

SEQ ID NO: 2917900 - RNA, 13 nt, Human T-lymphotropic virus 1
caccagcucaggc

SEQ ID NO: 2917901 - RNA, 21 nt, Human T-lymphotropic virus 1
cccccuaccuaaacaguucca

SEQ ID NO: 2917902 - RNA, 18 nt, Human T-lymphotropic virus 1
caaaucccccuaccuaaa

SEQ ID NO: 2917903 - RNA, 23 nt, Human T-lymphotropic virus 1
auucaaacaucugaccaccccag

SEQ ID NO: 2917904 - RNA, 19 nt, Human T-lymphotropic virus 1
ccuacuggccaccugucca

SEQ ID NO: 2917905 - RNA, 15 nt, Human T-lymphotropic virus 1
uuacgccagccccuu

SEQ ID NO: 2917906 - RNA, 20 nt, Human T-lymphotropic virus 1
cucaagaaguuucacaccuc

SEQ ID NO: 2917907 - RNA, 19 nt, Human T-lymphotropic virus 1
aacucccucauccugcccc

SEQ ID NO: 2917908 - RNA, 15 nt, Human T-lymphotropic virus 1
uauuacucgacaaau

SEQ ID NO: 2917909 - RNA, 14 nt, Human T-lymphotropic virus 1
ugggucuccaaagg

SEQ ID NO: 2917910 - RNA, 18 nt, Human T-lymphotropic virus 1
cagccaacugccucccac

SEQ ID NO: 2917911 - RNA, 15 nt, Human T-lymphotropic virus 1
gccuuaccugaggcc

SEQ ID NO: 2917912 - RNA, 21 nt, Human T-lymphotropic virus 1
ccuacacaguuucacccauug

SEQ ID NO: 2917913 - RNA, 18 nt, Human T-lymphotropic virus 1
aucgccuccagccucccc

SEQ ID NO: 2917914 - RNA, 18 nt, Human T-lymphotropic virus 1
cacgcuaggaucccgcuc

SEQ ID NO: 2917915 - RNA, 18 nt, Human T-lymphotropic virus 1
aucauaagcucagaccuc

SEQ ID NO: 2917916 - RNA, 18 nt, Human T-lymphotropic virus 1
ugguguuccaguccaagc

SEQ ID NO: 2917917 - RNA, 12 nt, Human T-lymphotropic virus 1
acaucuccaccc

SEQ ID NO: 2917918 - RNA, 19 nt, Human T-lymphotropic virus 1
gcucucacagaugcccuac

SEQ ID NO: 2917919 - RNA, 18 nt, Human T-lymphotropic virus 1
cuccaggauaugacccca

SEQ ID NO: 2917920 - RNA, 16 nt, Human T-lymphotropic virus 1
uuccagccccccaccu

SEQ ID NO: 2917921 - RNA, 13 nt, Human T-lymphotropic virus 1
aaucugcucaaaa

SEQ ID NO: 2917922 - RNA, 14 nt, Human T-lymphotropic virus 1
caaggacuccaccu

SEQ ID NO: 2917923 - RNA, 20 nt, Human T-lymphotropic virus 1
ggccgcggcuuuccucuucu

SEQ ID NO: 2917924 - RNA, 18 nt, Human T-lymphotropic virus 1
ugcgcaaauacucccccu

SEQ ID NO: 2917925 - RNA, 22 nt, Human T-lymphotropic virus 1
cuucauguauggguagacaccu

SEQ ID NO: 2917926 - RNA, 16 nt, Human T-lymphotropic virus 1
aucaccugggacccca

SEQ ID NO: 2917927 - RNA, 12 nt, Human T-lymphotropic virus 1
agccuccaagga

SEQ ID NO: 2917928 - RNA, 16 nt, Human T-lymphotropic virus 1
ucgaccugcuggcccu

SEQ ID NO: 2917929 - RNA, 14 nt, Human T-lymphotropic virus 1
uguggugccuccug

SEQ ID NO: 2917930 - RNA, 22 nt, Human T-lymphotropic virus 1
uucaaaaauuuaggugcccaga

SEQ ID NO: 2917931 - RNA, 17 nt, Human T-lymphotropic virus 1
cagcuaccaugccaccu

SEQ ID NO: 2917932 - RNA, 18 nt, Human T-lymphotropic virus 1
acuuguccagccugccaa

SEQ ID NO: 2917933 - RNA, 21 nt, Human T-lymphotropic virus 1
ccacugugguguuccagucca

SEQ ID NO: 2917934 - RNA, 22 nt, Human T-lymphotropic virus 1
ccugcaauccugcccagccagu

SEQ ID NO: 2917935 - RNA, 13 nt, Human T-lymphotropic virus 1
ccguucagccucc

SEQ ID NO: 2917936 - RNA, 17 nt, Human T-lymphotropic virus 1
agaccccggacuccggc

SEQ ID NO: 2917937 - RNA, 18 nt, Human T-lymphotropic virus 1
uaccuucggacccuugcc

SEQ ID NO: 2917938 - RNA, 23 nt, Human T-lymphotropic virus 1
gccaucuuuaguacuacaguccu

SEQ ID NO: 2917939 - RNA, 11 nt, Human T-lymphotropic virus 1
ccgaacccagc

SEQ ID NO: 2917940 - RNA, 18 nt, Human T-lymphotropic virus 1
caccuggccccuccugcc

SEQ ID NO: 2917941 - RNA, 17 nt, Human T-lymphotropic virus 1
accugaacuucaagccc

SEQ ID NO: 2917942 - RNA, 18 nt, Human T-lymphotropic virus 1
cucccuuggagccuaccu

SEQ ID NO: 2917943 - RNA, 15 nt, Human T-lymphotropic virus 1
cugcuuuuccuccuc

SEQ ID NO: 2917944 - RNA, 12 nt, Human T-lymphotropic virus 1
ccgcccuggcca

SEQ ID NO: 2917945 - RNA, 15 nt, Human T-lymphotropic virus 1
accuauggauaaugc

SEQ ID NO: 2917946 - RNA, 17 nt, Human T-lymphotropic virus 1
cucuuugcuccaggcca

SEQ ID NO: 2917947 - RNA, 14 nt, Human T-lymphotropic virus 1
cagccacccaaaga

SEQ ID NO: 2917948 - RNA, 21 nt, Human T-lymphotropic virus 1
cuggcuugucuccgcccuggc

SEQ ID NO: 2917949 - RNA, 17 nt, Human T-lymphotropic virus 1
ugccaacuacacuagcc

SEQ ID NO: 2917950 - RNA, 19 nt, Human T-lymphotropic virus 1
ccugccaacuacacuagcc

SEQ ID NO: 2917951 - RNA, 17 nt, Human T-lymphotropic virus 1
uaccugaacuucaagcc

SEQ ID NO: 2917952 - RNA, 19 nt, Human T-lymphotropic virus 1
gcuccaugucccucgccuc

SEQ ID NO: 2917953 - RNA, 14 nt, Human T-lymphotropic virus 1
aucgugccagccua

SEQ ID NO: 2917954 - RNA, 21 nt, Human T-lymphotropic virus 1
aggagccaucucagcuaccca

SEQ ID NO: 2917955 - RNA, 17 nt, Human T-lymphotropic virus 1
ucacaaauuucaaacca

SEQ ID NO: 2917956 - RNA, 21 nt, Human T-lymphotropic virus 1
cggaggcuauuauucagccuc

SEQ ID NO: 2917957 - RNA, 16 nt, Human T-lymphotropic virus 1
ugcccccucauccucg

SEQ ID NO: 2917958 - RNA, 16 nt, Human T-lymphotropic virus 1
caaaacuccugacucu

SEQ ID NO: 2917959 - RNA, 18 nt, Human T-lymphotropic virus 1
uccuaucuuacuccacca

SEQ ID NO: 2917960 - RNA, 18 nt, Human T-lymphotropic virus 1
agcucggggccuuccuca

SEQ ID NO: 2917961 - RNA, 15 nt, Human T-lymphotropic virus 1
agccccuugucucca

SEQ ID NO: 2917962 - RNA, 17 nt, Human T-lymphotropic virus 1
gugaaaaacauuuccgu

SEQ ID NO: 2917963 - RNA, 21 nt, Human T-lymphotropic virus 1
gccuggcaaaacggccuccuu

SEQ ID NO: 2917964 - RNA, 18 nt, Human T-lymphotropic virus 1
uccaaggacuccaccucg

SEQ ID NO: 2917965 - RNA, 19 nt, Human T-lymphotropic virus 1
aguccaaacccugccccuc

SEQ ID NO: 2917966 - RNA, 18 nt, Human T-lymphotropic virus 1
uaggcaccuuccaaggca

SEQ ID NO: 2917967 - RNA, 21 nt, Human T-lymphotropic virus 1
guaagcgcuaguucugcccag

SEQ ID NO: 2917968 - RNA, 15 nt, Human T-lymphotropic virus 1
ucccaucuccaggcu

SEQ ID NO: 2917969 - RNA, 19 nt, Human T-lymphotropic virus 1
ucguuagcgcuuccagccc

SEQ ID NO: 2917970 - RNA, 16 nt, Human T-lymphotropic virus 1
accacccauuuccucc

SEQ ID NO: 2917971 - RNA, 16 nt, Human T-lymphotropic virus 1
aaacaucgaaacagcc

SEQ ID NO: 2917972 - RNA, 22 nt, Human T-lymphotropic virus 1
cuuaauaccgaacccagccaac

SEQ ID NO: 2917973 - RNA, 23 nt, Human T-lymphotropic virus 1
guaagcgcuaguucugcccagug

SEQ ID NO: 2917974 - RNA, 13 nt, Human T-lymphotropic virus 1
ccgugccuucucc

SEQ ID NO: 2917975 - RNA, 15 nt, Human T-lymphotropic virus 1
aucgccuccagccuc

SEQ ID NO: 2917976 - RNA, 23 nt, Human T-lymphotropic virus 1
ccccaguguuccuaucuuacucc

SEQ ID NO: 2917977 - RNA, 17 nt, Human T-lymphotropic virus 1
uccguuccacucaaccc

SEQ ID NO: 2917978 - RNA, 17 nt, Human T-lymphotropic virus 1
uccgccguggccuacuc

SEQ ID NO: 2917979 - RNA, 17 nt, Human T-lymphotropic virus 1
ccagcagguccuccggg

SEQ ID NO: 2917980 - RNA, 22 nt, Human T-lymphotropic virus 1
cuuuucuuaaaacaacugcccc

SEQ ID NO: 2917981 - RNA, 20 nt, Human T-lymphotropic virus 1
aggcccccuuucaggcccuc

SEQ ID NO: 2917982 - RNA, 21 nt, Human T-lymphotropic virus 1
gucggcccaacgggccgaacu

SEQ ID NO: 2917983 - RNA, 17 nt, Human T-lymphotropic virus 1
cgcaucucuccuucacg

SEQ ID NO: 2917984 - RNA, 11 nt, Human T-lymphotropic virus 1
aaagagccucc

SEQ ID NO: 2917985 - RNA, 16 nt, Human T-lymphotropic virus 1
acccagccaacugccu

SEQ ID NO: 2917986 - RNA, 15 nt, Human T-lymphotropic virus 1
uuccagccccccacc

SEQ ID NO: 2917987 - RNA, 19 nt, Human T-lymphotropic virus 1
caaggcgacuggugcccca

SEQ ID NO: 2917988 - RNA, 13 nt, Human T-lymphotropic virus 1
uagacaccuuuuc

SEQ ID NO: 2917989 - RNA, 15 nt, Human T-lymphotropic virus 1
cccgucggaggcccc

SEQ ID NO: 2917990 - RNA, 15 nt, Human T-lymphotropic virus 1
ucugagaaggucagg

SEQ ID NO: 2917991 - RNA, 23 nt, Human T-lymphotropic virus 1
gacccacugcuuugacccccaga

SEQ ID NO: 2917992 - RNA, 16 nt, Human T-lymphotropic virus 1
cguuaucggcucagcu

SEQ ID NO: 2917993 - RNA, 19 nt, Human T-lymphotropic virus 1
ccugucuuuuccagacccc

SEQ ID NO: 2917994 - RNA, 17 nt, Human T-lymphotropic virus 1
ugcagcaaccuccuccg

SEQ ID NO: 2917995 - RNA, 12 nt, Human T-lymphotropic virus 1
aagcucaccucc

SEQ ID NO: 2917996 - RNA, 19 nt, Human T-lymphotropic virus 1
caaaacccagcaaaccccu

SEQ ID NO: 2917997 - RNA, 15 nt, Human T-lymphotropic virus 1
gcagaucaggcccua

SEQ ID NO: 2917998 - RNA, 21 nt, Human T-lymphotropic virus 1
cagcuggcccauauccugcag

SEQ ID NO: 2917999 - RNA, 20 nt, Human T-lymphotropic virus 1
gacaguucaggagggggcuc

SEQ ID NO: 2918000 - RNA, 21 nt, Human T-lymphotropic virus 1
gcccaccacccuuuuccagcc

SEQ ID NO: 2918001 - RNA, 14 nt, Human T-lymphotropic virus 1
guccuuaccccgcc

SEQ ID NO: 2918002 - RNA, 16 nt, Human T-lymphotropic virus 1
gaccacaggaggcucu

SEQ ID NO: 2918003 - RNA, 16 nt, Human T-lymphotropic virus 1
ccucuacucucccacu

SEQ ID NO: 2918004 - RNA, 21 nt, Human T-lymphotropic virus 1
gccucaggaaagagccuccua

SEQ ID NO: 2918005 - RNA, 17 nt, Human T-lymphotropic virus 1
uuccuuuucaaauacuc

SEQ ID NO: 2918006 - RNA, 18 nt, Human T-lymphotropic virus 1
ccccccuuuuccuuguca

SEQ ID NO: 2918007 - RNA, 13 nt, Human T-lymphotropic virus 1
ccuccugccccgc

SEQ ID NO: 2918008 - RNA, 15 nt, Human T-lymphotropic virus 1
ugucaccuguuccca

SEQ ID NO: 2918009 - RNA, 19 nt, Human T-lymphotropic virus 1
aguccuuccgauagccuug

SEQ ID NO: 2918010 - RNA, 22 nt, Human T-lymphotropic virus 1
uccaccagcagguccuccgggc

SEQ ID NO: 2918011 - RNA, 21 nt, Human T-lymphotropic virus 1
cucacuggcaccaccacugug

SEQ ID NO: 2918012 - RNA, 17 nt, Human T-lymphotropic virus 1
cuacaguccuccuccuu

SEQ ID NO: 2918013 - RNA, 15 nt, Human T-lymphotropic virus 1
acccccaacuccugc

SEQ ID NO: 2918014 - RNA, 18 nt, Human T-lymphotropic virus 1
ugucuccgcccuggccau

SEQ ID NO: 2918015 - RNA, 22 nt, Human T-lymphotropic virus 1
cggcacuagauacgccuggaga

SEQ ID NO: 2918016 - RNA, 14 nt, Human T-lymphotropic virus 1
gcaaauacuccccc

SEQ ID NO: 2918017 - RNA, 15 nt, Human T-lymphotropic virus 1
uaguacuacaguccu

SEQ ID NO: 2918018 - RNA, 14 nt, Human T-lymphotropic virus 1
cuccuuccuccagg

SEQ ID NO: 2918019 - RNA, 23 nt, Human T-lymphotropic virus 1
accggcuccaugucccucgccuc

SEQ ID NO: 2918020 - RNA, 15 nt, Human T-lymphotropic virus 1
uccguucagccucca

SEQ ID NO: 2918021 - RNA, 15 nt, Human T-lymphotropic virus 1
ccccuguccugcagc

SEQ ID NO: 2918022 - RNA, 12 nt, Human T-lymphotropic virus 1
agccccuucaca

SEQ ID NO: 2918023 - RNA, 14 nt, Human T-lymphotropic virus 1
cugccucccaccgc

SEQ ID NO: 2918024 - RNA, 21 nt, Human T-lymphotropic virus 1
agcgcuaguucugcccagugg

SEQ ID NO: 2918025 - RNA, 17 nt, Human T-lymphotropic virus 1
agacgccuuuuuccaaa

SEQ ID NO: 2918026 - RNA, 20 nt, Human T-lymphotropic virus 1
uacaccaacauccccauuuc

SEQ ID NO: 2918027 - RNA, 19 nt, Human T-lymphotropic virus 1
cuuuaacucuuccuccaag

SEQ ID NO: 2918028 - RNA, 16 nt, Human T-lymphotropic virus 1
gauggccagccaucuu

SEQ ID NO: 2918029 - RNA, 19 nt, Human T-lymphotropic virus 1
cccucgacuccccuccuuc

SEQ ID NO: 2918030 - RNA, 13 nt, Human T-lymphotropic virus 1
cugcuagggcacc

SEQ ID NO: 2918031 - RNA, 15 nt, Human T-lymphotropic virus 1
cagccacccaaagac

SEQ ID NO: 2918032 - RNA, 14 nt, Human T-lymphotropic virus 1
cagccccuacugga

SEQ ID NO: 2918033 - RNA, 16 nt, Human T-lymphotropic virus 1
aguuucucgccacuuu

SEQ ID NO: 2918034 - RNA, 16 nt, Human T-lymphotropic virus 1
accugaggccgccauc

SEQ ID NO: 2918035 - RNA, 18 nt, Human T-lymphotropic virus 1
gauccaccucccaggcag

SEQ ID NO: 2918036 - RNA, 15 nt, Human T-lymphotropic virus 1
ucccucgacuccccu

SEQ ID NO: 2918037 - RNA, 16 nt, Human T-lymphotropic virus 1
ccugacuuguccagcc

SEQ ID NO: 2918038 - RNA, 19 nt, Human T-lymphotropic virus 1
ccuccagccuccccugcca

SEQ ID NO: 2918039 - RNA, 21 nt, Human T-lymphotropic virus 1
caccuuuucaggagccaucuc

SEQ ID NO: 2918040 - RNA, 20 nt, Human T-lymphotropic virus 1
ccagaccccggacuccggcc

SEQ ID NO: 2918041 - RNA, 12 nt, Human T-lymphotropic virus 1
auuauucagccu

SEQ ID NO: 2918042 - RNA, 15 nt, Human T-lymphotropic virus 1
cugacccucacuggc

SEQ ID NO: 2918043 - RNA, 18 nt, Human T-lymphotropic virus 1
acccucgaccugcuggcc

SEQ ID NO: 2918044 - RNA, 22 nt, Human T-lymphotropic virus 1
ccuucuagucgacgcuccagga

SEQ ID NO: 2918045 - RNA, 15 nt, Human T-lymphotropic virus 1
cagacaauggcccug

SEQ ID NO: 2918046 - RNA, 23 nt, Human T-lymphotropic virus 1
ucuccgggcgaagucagcggccu

SEQ ID NO: 2918047 - RNA, 15 nt, Human T-lymphotropic virus 1
cuaguucugcccagu

SEQ ID NO: 2918048 - RNA, 15 nt, Human T-lymphotropic virus 1
gaccugccccuauac

SEQ ID NO: 2918049 - RNA, 23 nt, Human T-lymphotropic virus 1
ccuucuccuccgcccgcuuccug

SEQ ID NO: 2918050 - RNA, 19 nt, Human T-lymphotropic virus 1
ccuaaccacaucuggcaag

SEQ ID NO: 2918051 - RNA, 21 nt, Human T-lymphotropic virus 1
cccuacuuugcuuucacuguc

SEQ ID NO: 2918052 - RNA, 15 nt, Human T-lymphotropic virus 1
cuucuccugcagcaa

SEQ ID NO: 2918053 - RNA, 15 nt, Human T-lymphotropic virus 1
ucccuaaucucccau

SEQ ID NO: 2918054 - RNA, 14 nt, Human T-lymphotropic virus 1
cgaucgugccagcc

SEQ ID NO: 2918055 - RNA, 20 nt, Human T-lymphotropic virus 1
gugcagcugcggcaggcccu

SEQ ID NO: 2918056 - RNA, 21 nt, Human T-lymphotropic virus 1
aauauccugcgcucuugccac

SEQ ID NO: 2918057 - RNA, 22 nt, Human T-lymphotropic virus 1
accggcuccaugucccucgccu

SEQ ID NO: 2918058 - RNA, 19 nt, Human T-lymphotropic virus 1
cugcagcccauucggcaag

SEQ ID NO: 2918059 - RNA, 23 nt, Human T-lymphotropic virus 1
gcgagguggcgcuuuccccccug

SEQ ID NO: 2918060 - RNA, 17 nt, Human T-lymphotropic virus 1
uuuccgggcccugcccu

SEQ ID NO: 2918061 - RNA, 14 nt, Human T-lymphotropic virus 1
gacuccccuccuuc

SEQ ID NO: 2918062 - RNA, 18 nt, Human T-lymphotropic virus 1
gcuggggccuuaacuggg

SEQ ID NO: 2918063 - RNA, 15 nt, Human T-lymphotropic virus 1
ucaccacuccaggcc

SEQ ID NO: 2918064 - RNA, 23 nt, Human T-lymphotropic virus 1
cucacggcgcuccugcucuuccu

SEQ ID NO: 2918065 - RNA, 19 nt, Human T-lymphotropic virus 1
ccucggugauuacagcccc

SEQ ID NO: 2918066 - RNA, 17 nt, Human T-lymphotropic virus 1
uccagccuccccugcca

SEQ ID NO: 2918067 - RNA, 22 nt, Human T-lymphotropic virus 1
ccagcucggggccuuccucacc

SEQ ID NO: 2918068 - RNA, 23 nt, Human T-lymphotropic virus 1
ugccccaugugauuuuuugccac

SEQ ID NO: 2918069 - RNA, 13 nt, Human T-lymphotropic virus 1
ccccuacuggaaa

SEQ ID NO: 2918070 - RNA, 19 nt, Human T-lymphotropic virus 1
cuccccccgacuccagccg

SEQ ID NO: 2918071 - RNA, 17 nt, Human T-lymphotropic virus 1
caaggcagguccucuca

SEQ ID NO: 2918072 - RNA, 14 nt, Human T-lymphotropic virus 1
acccugcccuaauc

SEQ ID NO: 2918073 - RNA, 21 nt, Human T-lymphotropic virus 1
aguucccuuuaaaccagaacg

SEQ ID NO: 2918074 - RNA, 18 nt, Human T-lymphotropic virus 1
uccuccuucuccugcagc

SEQ ID NO: 2918075 - RNA, 13 nt, Human T-lymphotropic virus 1
ccuucucagcccc

SEQ ID NO: 2918076 - RNA, 15 nt, Human T-lymphotropic virus 1
gccacccugcccuaa

SEQ ID NO: 2918077 - RNA, 16 nt, Human T-lymphotropic virus 1
cuuuuccuugucaccu

SEQ ID NO: 2918078 - RNA, 14 nt, Human T-lymphotropic virus 1
ggaggacagcucag

SEQ ID NO: 2918079 - RNA, 15 nt, Human T-lymphotropic virus 1
gccgccauccacgcc

SEQ ID NO: 2918080 - RNA, 22 nt, Human T-lymphotropic virus 1
caacuacacuagcccacuuaca

SEQ ID NO: 2918081 - RNA, 22 nt, Human T-lymphotropic virus 1
cauccgccguggccuacucccu

SEQ ID NO: 2918082 - RNA, 16 nt, Human T-lymphotropic virus 1
uaacuggacccacugc

SEQ ID NO: 2918083 - RNA, 19 nt, Human T-lymphotropic virus 1
uccagccgaucccagagac

SEQ ID NO: 2918084 - RNA, 22 nt, Human T-lymphotropic virus 1
uucaggagccaucucagcuacc

SEQ ID NO: 2918085 - RNA, 15 nt, Human T-lymphotropic virus 1
uccagccugccaacu

SEQ ID NO: 2918086 - RNA, 16 nt, Human T-lymphotropic virus 1
ucguggcgcugucuca

SEQ ID NO: 2918087 - RNA, 19 nt, Human T-lymphotropic virus 1
cccagaacagacgaggccu

SEQ ID NO: 2918088 - RNA, 19 nt, Human T-lymphotropic virus 1
cucccuuggagccuaccua

SEQ ID NO: 2918089 - RNA, 20 nt, Human T-lymphotropic virus 1
ugcaaccacaucgccuccag

SEQ ID NO: 2918090 - RNA, 22 nt, Human T-lymphotropic virus 1
aacacuuuucuuaaaacaacug

SEQ ID NO: 2918091 - RNA, 14 nt, Human T-lymphotropic virus 1
ucaucaucuucccc

SEQ ID NO: 2918092 - RNA, 22 nt, Human T-lymphotropic virus 1
aucauaaacaccgccccuugcc

SEQ ID NO: 2918093 - RNA, 16 nt, Human T-lymphotropic virus 1
ggugauuacagcccca

SEQ ID NO: 2918094 - RNA, 14 nt, Human T-lymphotropic virus 1
uccucuucuccuca

SEQ ID NO: 2918095 - RNA, 16 nt, Human T-lymphotropic virus 1
ccacagucaccgauuc

SEQ ID NO: 2918096 - RNA, 18 nt, Human T-lymphotropic virus 1
ggcccauauccugcagcc

SEQ ID NO: 2918097 - RNA, 21 nt, Human T-lymphotropic virus 1
ccauuacucucuuauaaaccc

SEQ ID NO: 2918098 - RNA, 20 nt, Human T-lymphotropic virus 1
aggcgacauuacccauuuca

SEQ ID NO: 2918099 - RNA, 22 nt, Human T-lymphotropic virus 1
aucaccccuguccugcagcucu

SEQ ID NO: 2918100 - RNA, 20 nt, Human T-lymphotropic virus 1
ccuccgcccgcuuccugcgc

SEQ ID NO: 2918101 - RNA, 22 nt, Human T-lymphotropic virus 1
cuggcccauauccugcagccca

SEQ ID NO: 2918102 - RNA, 18 nt, Human T-lymphotropic virus 1
gcucuccacgcuuugccu

SEQ ID NO: 2918103 - RNA, 17 nt, Human T-lymphotropic virus 1
cuggcccauauccugca

SEQ ID NO: 2918104 - RNA, 21 nt, Human T-lymphotropic virus 1
cgucagcuacgacaccucccc

SEQ ID NO: 2918105 - RNA, 14 nt, Human T-lymphotropic virus 1
gagcugcaugccca

SEQ ID NO: 2918106 - RNA, 15 nt, Human T-lymphotropic virus 1
ucauucaaacaucug

SEQ ID NO: 2918107 - RNA, 12 nt, Human T-lymphotropic virus 1
ggacccacugcu

SEQ ID NO: 2918108 - RNA, 21 nt, Human T-lymphotropic virus 1
ccauaccaaucuaccugaucc

SEQ ID NO: 2918109 - RNA, 15 nt, Human T-lymphotropic virus 1
uccucuucuccucag

SEQ ID NO: 2918110 - RNA, 18 nt, Human T-lymphotropic virus 1
auccccgagaccaaauau

SEQ ID NO: 2918111 - RNA, 17 nt, Human T-lymphotropic virus 1
cuccagcuaccaugcca

SEQ ID NO: 2918112 - RNA, 18 nt, Human T-lymphotropic virus 1
uccaguucugcccccuca

SEQ ID NO: 2918113 - RNA, 12 nt, Human T-lymphotropic virus 1
gucuuuuccaga

SEQ ID NO: 2918114 - RNA, 22 nt, Human T-lymphotropic virus 1
uccuaggggcuauuaugcugac

SEQ ID NO: 2918115 - RNA, 12 nt, Human T-lymphotropic virus 1
cuucucagcccc

SEQ ID NO: 2918116 - RNA, 22 nt, Human T-lymphotropic virus 1
ccaauaauuaaccucucccauc

SEQ ID NO: 2918117 - RNA, 21 nt, Human T-lymphotropic virus 1
cuggcuacaugccccccuacc

SEQ ID NO: 2918118 - RNA, 17 nt, Human T-lymphotropic virus 1
ugaucccaucuccaggc

SEQ ID NO: 2918119 - RNA, 22 nt, Human T-lymphotropic virus 1
ccaacauuccacccuccuuccu

SEQ ID NO: 2918120 - RNA, 13 nt, Human T-lymphotropic virus 1
ccuuaccugaggc

SEQ ID NO: 2918121 - RNA, 14 nt, Human T-lymphotropic virus 1
ccugcccagccagu

SEQ ID NO: 2918122 - RNA, 15 nt, Human T-lymphotropic virus 1
caauccugcccagcc

SEQ ID NO: 2918123 - RNA, 14 nt, Human T-lymphotropic virus 1
ccuaaccacaucug

SEQ ID NO: 2918124 - RNA, 14 nt, Human T-lymphotropic virus 1
ccuaaucaccucac

SEQ ID NO: 2918125 - RNA, 20 nt, Human T-lymphotropic virus 1
ccagcugcuguacucucaca

SEQ ID NO: 2918126 - RNA, 17 nt, Human T-lymphotropic virus 1
ucgaccugcuggcccuu

SEQ ID NO: 2918127 - RNA, 12 nt, Human T-lymphotropic virus 1
gcuuccucuucu

SEQ ID NO: 2918128 - RNA, 16 nt, Human T-lymphotropic virus 1
gcuuccucuucuccuc

SEQ ID NO: 2918129 - RNA, 16 nt, Human T-lymphotropic virus 1
cacaucgccuccagcc

SEQ ID NO: 2918130 - RNA, 22 nt, Human T-lymphotropic virus 1
cgauggcagcuucaccacuccc

SEQ ID NO: 2918131 - RNA, 14 nt, Human T-lymphotropic virus 1
accgccccuccucu

SEQ ID NO: 2918132 - RNA, 22 nt, Human T-lymphotropic virus 1
cagcaaucugcuuuuccuccuc

SEQ ID NO: 2918133 - RNA, 13 nt, Human T-lymphotropic virus 1
gcuaccaugccac

SEQ ID NO: 2918134 - RNA, 18 nt, Human T-lymphotropic virus 1
ucaagcacaguuuccucc

SEQ ID NO: 2918135 - RNA, 19 nt, Human T-lymphotropic virus 1
uguccccuacaauccaacc

SEQ ID NO: 2918136 - RNA, 14 nt, Human T-lymphotropic virus 1
ucugccgccucccg

SEQ ID NO: 2918137 - RNA, 19 nt, Human T-lymphotropic virus 1
aagcgcuaguucugcccag

SEQ ID NO: 2918138 - RNA, 22 nt, Human T-lymphotropic virus 1
acauucuccuggcaagccccuc

SEQ ID NO: 2918139 - RNA, 16 nt, Human T-lymphotropic virus 1
ccaaggacuccaccuc

SEQ ID NO: 2918140 - RNA, 18 nt, Human T-lymphotropic virus 1
gccgccuuaccugaggcc

SEQ ID NO: 2918141 - RNA, 20 nt, Human T-lymphotropic virus 1
ucaagaaguuucacaccuca

SEQ ID NO: 2918142 - RNA, 14 nt, Human T-lymphotropic virus 1
cuuauaaacccuga

SEQ ID NO: 2918143 - RNA, 21 nt, Human T-lymphotropic virus 1
uaaaccagaacgccuccaggc

SEQ ID NO: 2918144 - RNA, 13 nt, Human T-lymphotropic virus 1
agcaaccuccucc

SEQ ID NO: 2918145 - RNA, 16 nt, Human T-lymphotropic virus 1
cuauuauucagccucu

SEQ ID NO: 2918146 - RNA, 21 nt, Human T-lymphotropic virus 1
cucccccugucauaacucccu

SEQ ID NO: 2918147 - RNA, 24 nt, Human T-lymphotropic virus 1
uggaucccguggaggcuccucaag

SEQ ID NO: 2918148 - RNA, 17 nt, Human T-lymphotropic virus 1
accugaucccaucucca

SEQ ID NO: 2918149 - RNA, 22 nt, Human T-lymphotropic virus 1
ugcauuuuuucuuuccuagcac

SEQ ID NO: 2918150 - RNA, 20 nt, Human T-lymphotropic virus 1
cuaguccaaacccugccccu

SEQ ID NO: 2918151 - RNA, 20 nt, Human T-lymphotropic virus 1
cuccgucagcuacgacaccu

SEQ ID NO: 2918152 - RNA, 14 nt, Human T-lymphotropic virus 1
cuccgcccuggcca

SEQ ID NO: 2918153 - RNA, 13 nt, Human T-lymphotropic virus 1
uuucacaccucaa

SEQ ID NO: 2918154 - RNA, 18 nt, Human T-lymphotropic virus 1
caucgccuccagccuccc

SEQ ID NO: 2918155 - RNA, 23 nt, Human T-lymphotropic virus 1
caccacuccccccgacuccagcc

SEQ ID NO: 2918156 - RNA, 21 nt, Human T-lymphotropic virus 1
cagcuguguuauuacucgaca

SEQ ID NO: 2918157 - RNA, 12 nt, Human T-lymphotropic virus 1
ccacccugcccu

SEQ ID NO: 2918158 - RNA, 14 nt, Human T-lymphotropic virus 1
uggacccacugcuu

SEQ ID NO: 2918159 - RNA, 15 nt, Human T-lymphotropic virus 1
uaaggcucugacguc

SEQ ID NO: 2918160 - RNA, 22 nt, Human T-lymphotropic virus 1
gcaaguccuuccuaaccaagac

SEQ ID NO: 2918161 - RNA, 14 nt, Human T-lymphotropic virus 1
cucagaccuccggg

SEQ ID NO: 2918162 - RNA, 12 nt, Human T-lymphotropic virus 1
cagccccagcug

SEQ ID NO: 2918163 - RNA, 18 nt, Human T-lymphotropic virus 1
cacaucgccuccagccuc

SEQ ID NO: 2918164 - RNA, 22 nt, Human T-lymphotropic virus 1
ucggugauuacagccccagcug

SEQ ID NO: 2918165 - RNA, 19 nt, Human T-lymphotropic virus 1
caaacaucgaaacagcccu

SEQ ID NO: 2918166 - RNA, 17 nt, Human T-lymphotropic virus 1
cuaguccaaacccugcc

SEQ ID NO: 2918167 - RNA, 13 nt, Human T-lymphotropic virus 1
uuggccucucaca

SEQ ID NO: 2918168 - RNA, 23 nt, Human T-lymphotropic virus 1
ccaagcagcaguggccacuuguc

SEQ ID NO: 2918169 - RNA, 15 nt, Human T-lymphotropic virus 1
cuaccccacacuagc

SEQ ID NO: 2918170 - RNA, 14 nt, Human T-lymphotropic virus 1
uccugccccccuuu

SEQ ID NO: 2918171 - RNA, 20 nt, Human T-lymphotropic virus 1
ucauggaccugccccuauac

SEQ ID NO: 2918172 - RNA, 17 nt, Human T-lymphotropic virus 1
cccaucaccuggccccu

SEQ ID NO: 2918173 - RNA, 16 nt, Human T-lymphotropic virus 1
auacaggcgccagcug

SEQ ID NO: 2918174 - RNA, 20 nt, Human T-lymphotropic virus 1
cauccucggugauuacagcc

SEQ ID NO: 2918175 - RNA, 12 nt, Human T-lymphotropic virus 1
gcagcaccuccc

SEQ ID NO: 2918176 - RNA, 18 nt, Human T-lymphotropic virus 1
ucugccgccucccgccug

SEQ ID NO: 2918177 - RNA, 22 nt, Human T-lymphotropic virus 1
ugcaaccacaucgccuccagcc

SEQ ID NO: 2918178 - RNA, 15 nt, Human T-lymphotropic virus 1
ccacucuaaccuaga

SEQ ID NO: 2918179 - RNA, 13 nt, Human T-lymphotropic virus 1
acuccagcuacca

SEQ ID NO: 2918180 - RNA, 22 nt, Human T-lymphotropic virus 1
aauccuauggacuacucugcca

SEQ ID NO: 2918181 - RNA, 22 nt, Human T-lymphotropic virus 1
acgcguuaucggcucagcucua

SEQ ID NO: 2918182 - RNA, 16 nt, Human T-lymphotropic virus 1
gguccggaaggcccug

SEQ ID NO: 2918183 - RNA, 23 nt, Human T-lymphotropic virus 1
cagccaguuuguucauggacccu

SEQ ID NO: 2918184 - RNA, 22 nt, Human T-lymphotropic virus 1
cucuguuccauccccuucuucu

SEQ ID NO: 2918185 - RNA, 20 nt, Human T-lymphotropic virus 1
aggcccuggaggcaggccau

SEQ ID NO: 2918186 - RNA, 19 nt, Human T-lymphotropic virus 1
cagaacagacgaggccuug

SEQ ID NO: 2918187 - RNA, 16 nt, Human T-lymphotropic virus 1
acuccaaguaucuuua

SEQ ID NO: 2918188 - RNA, 20 nt, Human T-lymphotropic virus 1
ccaaucauggaccugccccu

SEQ ID NO: 2918189 - RNA, 17 nt, Human T-lymphotropic virus 1
gcccccuuucaggcccu

SEQ ID NO: 2918190 - RNA, 19 nt, Human T-lymphotropic virus 1
acuuugcuuucacuguccc

SEQ ID NO: 2918191 - RNA, 13 nt, Human T-lymphotropic virus 1
agaucaggcccua

SEQ ID NO: 2918192 - RNA, 22 nt, Human T-lymphotropic virus 1
ccauggaaaucaaaacuccuga

SEQ ID NO: 2918193 - RNA, 20 nt, Human T-lymphotropic virus 1
accaugccaccuauucccua

SEQ ID NO: 2918194 - RNA, 23 nt, Human T-lymphotropic virus 1
cccuugaaaaucgaguccugacu

SEQ ID NO: 2918195 - RNA, 14 nt, Human T-lymphotropic virus 1
cuucuccugcagca

SEQ ID NO: 2918196 - RNA, 15 nt, Human T-lymphotropic virus 1
agucagcggccuucu

SEQ ID NO: 2918197 - RNA, 19 nt, Human T-lymphotropic virus 1
cuuccagccccccaccuga

SEQ ID NO: 2918198 - RNA, 20 nt, Human T-lymphotropic virus 1
acccuguucgaaaugcagcu

SEQ ID NO: 2918199 - RNA, 15 nt, Human T-lymphotropic virus 1
accuggccccuccug

SEQ ID NO: 2918200 - RNA, 21 nt, Human T-lymphotropic virus 1
acaucgccuccagccuccccu

SEQ ID NO: 2918201 - RNA, 21 nt, Human T-lymphotropic virus 1
ucaacccucaccacuccaggc

SEQ ID NO: 2918202 - RNA, 18 nt, Human T-lymphotropic virus 1
uuugucaagccguccuca

SEQ ID NO: 2918203 - RNA, 22 nt, Human T-lymphotropic virus 1
cacuuacaaacuauagaccuua

SEQ ID NO: 2918204 - RNA, 23 nt, Human T-lymphotropic virus 1
aagcucuacuagauacaggagca

SEQ ID NO: 2918205 - RNA, 13 nt, Human T-lymphotropic virus 1
cuuuuccagccug

SEQ ID NO: 2918206 - RNA, 19 nt, Human T-lymphotropic virus 1
ugccccauuggcuccugug

SEQ ID NO: 2918207 - RNA, 22 nt, Human T-lymphotropic virus 1
auuugcaccacguucgcagcca

SEQ ID NO: 2918208 - RNA, 17 nt, Human T-lymphotropic virus 1
ccugcuuucuccgggcg

SEQ ID NO: 2918209 - RNA, 20 nt, Human T-lymphotropic virus 1
gucaagccguccucaggcgu

SEQ ID NO: 2918210 - RNA, 16 nt, Human T-lymphotropic virus 1
agccgucuccagcccc

SEQ ID NO: 2918211 - RNA, 17 nt, Human T-lymphotropic virus 1
uaaaaauagucccaccc

SEQ ID NO: 2918212 - RNA, 11 nt, Human T-lymphotropic virus 1
uaaucucccau

SEQ ID NO: 2918213 - RNA, 18 nt, Human T-lymphotropic virus 1
ugcaauccugcccagcca

SEQ ID NO: 2918214 - RNA, 14 nt, Human T-lymphotropic virus 1
ucaacccccaacuc

SEQ ID NO: 2918215 - RNA, 13 nt, Human T-lymphotropic virus 1
auuauucagccuc

SEQ ID NO: 2918216 - RNA, 16 nt, Human T-lymphotropic virus 1
gacccuugcccuaggc

SEQ ID NO: 2918217 - RNA, 23 nt, Human T-lymphotropic virus 1
ccgcaguagacuaguccaaaccc

SEQ ID NO: 2918218 - RNA, 13 nt, Human T-lymphotropic virus 1
aucaccuggcccc

SEQ ID NO: 2918219 - RNA, 20 nt, Human T-lymphotropic virus 1
auggaaaucaaaacuccuga

SEQ ID NO: 2918220 - RNA, 12 nt, Human T-lymphotropic virus 1
aagaagcugccg

SEQ ID NO: 2918221 - RNA, 15 nt, Human T-lymphotropic virus 1
ggccccuccugcccc

SEQ ID NO: 2918222 - RNA, 21 nt, Human T-lymphotropic virus 1
uguccugcagcucucuccugc

SEQ ID NO: 2918223 - RNA, 22 nt, Human T-lymphotropic virus 1
ccaugcuuauuaucagcccacu

SEQ ID NO: 2918224 - RNA, 16 nt, Human T-lymphotropic virus 1
cauaccaaucuaccug

SEQ ID NO: 2918225 - RNA, 15 nt, Human T-lymphotropic virus 1
caccacccuuuucca

SEQ ID NO: 2918226 - RNA, 19 nt, Human T-lymphotropic virus 1
cuaccugaacuucaagccc

SEQ ID NO: 2918227 - RNA, 13 nt, Human T-lymphotropic virus 1
agcgcuuccagcc

SEQ ID NO: 2918228 - RNA, 23 nt, Human T-lymphotropic virus 1
gccccuauacaggagccgucucc

SEQ ID NO: 2918229 - RNA, 15 nt, Human T-lymphotropic virus 1
ccagcaaaccccugg

SEQ ID NO: 2918230 - RNA, 19 nt, Human T-lymphotropic virus 1
uucuccuggcaagccccuc

SEQ ID NO: 2918231 - RNA, 14 nt, Human T-lymphotropic virus 1
cccguggaggcucc

SEQ ID NO: 2918232 - RNA, 14 nt, Human T-lymphotropic virus 1
cugcaauccugccc

SEQ ID NO: 2918233 - RNA, 17 nt, Human T-lymphotropic virus 1
cccucaccacuccaggc

SEQ ID NO: 2918234 - RNA, 22 nt, Human T-lymphotropic virus 1
cugccggcgcugcucucauccc

SEQ ID NO: 2918235 - RNA, 22 nt, Human T-lymphotropic virus 1
ugcagcucucuccugcagaccu

SEQ ID NO: 2918236 - RNA, 15 nt, Human T-lymphotropic virus 1
gccuucuccucuucc

SEQ ID NO: 2918237 - RNA, 20 nt, Human T-lymphotropic virus 1
caaccacaucgccuccagcc

SEQ ID NO: 2918238 - RNA, 23 nt, Human T-lymphotropic virus 1
uccacgcuuugccugacccugcu

SEQ ID NO: 2918239 - RNA, 22 nt, Human T-lymphotropic virus 1
uggcggaggcuauuauucagcc

SEQ ID NO: 2918240 - RNA, 23 nt, Human T-lymphotropic virus 1
cacgcccuacuggccaccugucc

SEQ ID NO: 2918241 - RNA, 12 nt, Human T-lymphotropic virus 1
uccuucuccugc

SEQ ID NO: 2918242 - RNA, 16 nt, Human T-lymphotropic virus 1
cuugggcagcaccucc

SEQ ID NO: 2918243 - RNA, 18 nt, Human T-lymphotropic virus 1
caauaaacaaacccauug

SEQ ID NO: 2918244 - RNA, 21 nt, Human T-lymphotropic virus 1
ccccaaaaccuguacacccuc

SEQ ID NO: 2918245 - RNA, 15 nt, Human T-lymphotropic virus 1
ucgccuucucagccc

SEQ ID NO: 2918246 - RNA, 21 nt, Human T-lymphotropic virus 1
ucagcaccagcucaggcuagg

SEQ ID NO: 2918247 - RNA, 14 nt, Human T-lymphotropic virus 1
aauccugcccagcc

SEQ ID NO: 2918248 - RNA, 21 nt, Human T-lymphotropic virus 1
auacaggagccgucuccagcc

SEQ ID NO: 2918249 - RNA, 19 nt, Human T-lymphotropic virus 1
uccugcagcaaccuccucc

SEQ ID NO: 2918250 - RNA, 21 nt, Human T-lymphotropic virus 1
ccugccaauaauuaaccucuc

SEQ ID NO: 2918251 - RNA, 23 nt, Human T-lymphotropic virus 1
accucucccaucaaauccuccuu

SEQ ID NO: 2918252 - RNA, 15 nt, Human T-lymphotropic virus 1
accuagacucagccg

SEQ ID NO: 2918253 - RNA, 18 nt, Human T-lymphotropic virus 1
ccauguccccuacaaucc

SEQ ID NO: 2918254 - RNA, 15 nt, Human T-lymphotropic virus 1
gcaccuuccaaggca

SEQ ID NO: 2918255 - RNA, 16 nt, Human T-lymphotropic virus 1
cgagcaguaccggugg

SEQ ID NO: 2918256 - RNA, 17 nt, Human T-lymphotropic virus 1
gcgcuccugcucuuccu

SEQ ID NO: 2918257 - RNA, 15 nt, Human T-lymphotropic virus 1
ggcagguccucucag

SEQ ID NO: 2918258 - RNA, 19 nt, Human T-lymphotropic virus 1
cuaccaccccucauuucua

SEQ ID NO: 2918259 - RNA, 13 nt, Human T-lymphotropic virus 1
ugcucuuccugcu

SEQ ID NO: 2918260 - RNA, 18 nt, Human T-lymphotropic virus 1
caaaacccgauggcagcu

SEQ ID NO: 2918261 - RNA, 13 nt, Human T-lymphotropic virus 1
caccccggccagc

SEQ ID NO: 2918262 - RNA, 12 nt, Human T-lymphotropic virus 1
ucagcaccagcu

SEQ ID NO: 2918263 - RNA, 23 nt, Human T-lymphotropic virus 1
gcucacggcgcuccugcucuucc

SEQ ID NO: 2918264 - RNA, 16 nt, Human T-lymphotropic virus 1
agcucagcaccagcuc

SEQ ID NO: 2918265 - RNA, 19 nt, Human T-lymphotropic virus 1
cagcuggcccauauccugc

SEQ ID NO: 2918266 - RNA, 16 nt, Human T-lymphotropic virus 1
ccaaucauggaccugc

SEQ ID NO: 2918267 - RNA, 19 nt, Human T-lymphotropic virus 1
cuuggagccuaccuagacu

SEQ ID NO: 2918268 - RNA, 14 nt, Human T-lymphotropic virus 1
caccgccccuugcc

SEQ ID NO: 2918269 - RNA, 16 nt, Human T-lymphotropic virus 1
auagccuuguucucaa

SEQ ID NO: 2918270 - RNA, 12 nt, Human T-lymphotropic virus 1
agccgccagugg

SEQ ID NO: 2918271 - RNA, 13 nt, Human T-lymphotropic virus 1
ccuauacucuccc

SEQ ID NO: 2918272 - RNA, 15 nt, Human T-lymphotropic virus 1
accccggccagcucg

SEQ ID NO: 2918273 - RNA, 21 nt, Human T-lymphotropic virus 1
gcccuuucagcagaucaggcc

SEQ ID NO: 2918274 - RNA, 15 nt, Human T-lymphotropic virus 1
aacccugccccuccu

SEQ ID NO: 2918275 - RNA, 23 nt, Human T-lymphotropic virus 1
ugcccaccacccuuuuccagccu

SEQ ID NO: 2918276 - RNA, 16 nt, Human T-lymphotropic virus 1
gccaccccggccagcu

SEQ ID NO: 2918277 - RNA, 15 nt, Human T-lymphotropic virus 1
ccggcuccauguccc

SEQ ID NO: 2918278 - RNA, 13 nt, Human T-lymphotropic virus 1
caggcccuccugc

SEQ ID NO: 2918279 - RNA, 20 nt, Human T-lymphotropic virus 1
ugcaaggggcaaccacaacu

SEQ ID NO: 2918280 - RNA, 13 nt, Human T-lymphotropic virus 1
ccuguaaucuugc

SEQ ID NO: 2918281 - RNA, 19 nt, Human T-lymphotropic virus 1
accucccaggcagccuaua

SEQ ID NO: 2918282 - RNA, 13 nt, Human T-lymphotropic virus 1
ugcccaccacccu

SEQ ID NO: 2918283 - RNA, 17 nt, Human T-lymphotropic virus 1
ccaauuccuccaccagc

SEQ ID NO: 2918284 - RNA, 21 nt, Human T-lymphotropic virus 1
agacaccuuuucaggagccau

SEQ ID NO: 2918285 - RNA, 20 nt, Human T-lymphotropic virus 1
cgcuuccagccccccaccug

SEQ ID NO: 2918286 - RNA, 19 nt, Human T-lymphotropic virus 1
ggcccuggaggcaggccau

SEQ ID NO: 2918287 - RNA, 12 nt, Human T-lymphotropic virus 1
cccauaccuagg

SEQ ID NO: 2918288 - RNA, 15 nt, Human T-lymphotropic virus 1
augccaaggcguccu

SEQ ID NO: 2918289 - RNA, 15 nt, Human T-lymphotropic virus 1
cagccacccugcccu

SEQ ID NO: 2918290 - RNA, 16 nt, Human T-lymphotropic virus 1
acugccucccaccgcc

SEQ ID NO: 2918291 - RNA, 12 nt, Human T-lymphotropic virus 1
guccugcagcuc

SEQ ID NO: 2918292 - RNA, 20 nt, Human T-lymphotropic virus 1
gcaaacaucgaaacagcccu

SEQ ID NO: 2918293 - RNA, 19 nt, Human T-lymphotropic virus 1
gccagcucggggccuuccu

SEQ ID NO: 2918294 - RNA, 15 nt, Human T-lymphotropic virus 1
ucccaaggccccccg

SEQ ID NO: 2918295 - RNA, 21 nt, Human T-lymphotropic virus 1
uacaguuccuuaucccucgac

SEQ ID NO: 2918296 - RNA, 21 nt, Human T-lymphotropic virus 1
caaggcguccuguaccucccu

SEQ ID NO: 2918297 - RNA, 16 nt, Human T-lymphotropic virus 1
uucagccuccaaggac

SEQ ID NO: 2918298 - RNA, 22 nt, Human T-lymphotropic virus 1
caaggcgacauuacccauuuca

SEQ ID NO: 2918299 - RNA, 20 nt, Human T-lymphotropic virus 1
ucggacuuuugcauggccuc

SEQ ID NO: 2918300 - RNA, 20 nt, Human T-lymphotropic virus 1
ucacuuuaagcucaccuccc

SEQ ID NO: 2918301 - RNA, 14 nt, Human T-lymphotropic virus 1
gcccuacuggccac

SEQ ID NO: 2918302 - RNA, 20 nt, Human T-lymphotropic virus 1
aguccuuccuaaccaagacc

SEQ ID NO: 2918303 - RNA, 20 nt, Human T-lymphotropic virus 1
auugcacaguaugcugccca

SEQ ID NO: 2918304 - RNA, 15 nt, Human T-lymphotropic virus 1
cagaagcuauuuccu

SEQ ID NO: 2918305 - RNA, 19 nt, Human T-lymphotropic virus 1
uaccugaucccaucuccag

SEQ ID NO: 2918306 - RNA, 21 nt, Human T-lymphotropic virus 1
gccuucuccuccgcccgcuuc

SEQ ID NO: 2918307 - RNA, 13 nt, Human T-lymphotropic virus 1
accagcucaggcu

SEQ ID NO: 2918308 - RNA, 19 nt, Human T-lymphotropic virus 1
ccuacaccgggccaggaaa

SEQ ID NO: 2918309 - RNA, 14 nt, Human T-lymphotropic virus 1
cagaccagccaccc

SEQ ID NO: 2918310 - RNA, 18 nt, Human T-lymphotropic virus 1
cuguaccucccugaggca

SEQ ID NO: 2918311 - RNA, 19 nt, Human T-lymphotropic virus 1
cuguccugcagcucucucc

SEQ ID NO: 2918312 - RNA, 16 nt, Human T-lymphotropic virus 1
cuaguccaaacccugc

SEQ ID NO: 2918313 - RNA, 17 nt, Human T-lymphotropic virus 1
ccucaggaaagagccuc

SEQ ID NO: 2918314 - RNA, 21 nt, Human T-lymphotropic virus 1
uccacccuccuuccuccaggc

SEQ ID NO: 2918315 - RNA, 15 nt, Human T-lymphotropic virus 1
cuccaggccuugcaa

SEQ ID NO: 2918316 - RNA, 18 nt, Human T-lymphotropic virus 1
gcaaaacggccuccuucc

SEQ ID NO: 2918317 - RNA, 16 nt, Human T-lymphotropic virus 1
agguggcgcuuucccc

SEQ ID NO: 2918318 - RNA, 23 nt, Human T-lymphotropic virus 1
ucgcuuccucuucuccucagccc

SEQ ID NO: 2918319 - RNA, 15 nt, Human T-lymphotropic virus 1
uccacgcuuugccug

SEQ ID NO: 2918320 - RNA, 12 nt, Human T-lymphotropic virus 1
ggugcccagacu

SEQ ID NO: 2918321 - RNA, 15 nt, Human T-lymphotropic virus 1
uaacaucuccaccca

SEQ ID NO: 2918322 - RNA, 15 nt, Human T-lymphotropic virus 1
acagccccagcugcu

SEQ ID NO: 2918323 - RNA, 19 nt, Human T-lymphotropic virus 1
aagucagcggccuucuccu

SEQ ID NO: 2918324 - RNA, 20 nt, Human T-lymphotropic virus 1
uccugugcuaauacgccucc

SEQ ID NO: 2918325 - RNA, 17 nt, Human T-lymphotropic virus 1
acaucauaacaucucca

SEQ ID NO: 2918326 - RNA, 15 nt, Human T-lymphotropic virus 1
ugccccaucucuggg

SEQ ID NO: 2918327 - RNA, 15 nt, Human T-lymphotropic virus 1
ucacagaacugccgc

SEQ ID NO: 2918328 - RNA, 18 nt, Human T-lymphotropic virus 1
acugccucccaccgcccc

SEQ ID NO: 2918329 - RNA, 13 nt, Human T-lymphotropic virus 1
uguuccuuaaaau

SEQ ID NO: 2918330 - RNA, 15 nt, Human T-lymphotropic virus 1
ccaacugccucccac

SEQ ID NO: 2918331 - RNA, 16 nt, Human T-lymphotropic virus 1
gcagcugcggcaggcc

SEQ ID NO: 2918332 - RNA, 14 nt, Human T-lymphotropic virus 1
uuucauaauuugca

SEQ ID NO: 2918333 - RNA, 18 nt, Human T-lymphotropic virus 1
gcgcaaauacucccccuu

SEQ ID NO: 2918334 - RNA, 22 nt, Human T-lymphotropic virus 1
gcccugucacagaacugccgca

SEQ ID NO: 2918335 - RNA, 19 nt, Human T-lymphotropic virus 1
gccaguucccuuuaaacca

SEQ ID NO: 2918336 - RNA, 13 nt, Human T-lymphotropic virus 1
aggcccugucaca

SEQ ID NO: 2918337 - RNA, 23 nt, Human T-lymphotropic virus 1
aggcagguccucucaggcccccu

SEQ ID NO: 2918338 - RNA, 17 nt, Human T-lymphotropic virus 1
ccuaccuagacucagcc

SEQ ID NO: 2918339 - RNA, 16 nt, Human T-lymphotropic virus 1
ccguuccacucaaccc

SEQ ID NO: 2918340 - RNA, 18 nt, Human T-lymphotropic virus 1
acccuccuuccuccaggc

SEQ ID NO: 2918341 - RNA, 23 nt, Human T-lymphotropic virus 1
cuccugugaaagcccuuaugcca

SEQ ID NO: 2918342 - RNA, 21 nt, Human T-lymphotropic virus 1
cccugcaauccugcccagcca

SEQ ID NO: 2918343 - RNA, 19 nt, Human T-lymphotropic virus 1
ccccuacuggaaauuucag

SEQ ID NO: 2918344 - RNA, 19 nt, Human T-lymphotropic virus 1
auccuccuucuccugcagc

SEQ ID NO: 2918345 - RNA, 15 nt, Human T-lymphotropic virus 1
caggcccuacagcca

SEQ ID NO: 2918346 - RNA, 19 nt, Human T-lymphotropic virus 1
uucuaccccccuccuuuac

SEQ ID NO: 2918347 - RNA, 23 nt, Human T-lymphotropic virus 1
ccaucaacccccaacuccugcau

SEQ ID NO: 2918348 - RNA, 13 nt, Human T-lymphotropic virus 1
agcagcaguggcc

SEQ ID NO: 2918349 - RNA, 18 nt, Human T-lymphotropic virus 1
ccagcuaccaugccaccu

SEQ ID NO: 2918350 - RNA, 14 nt, Human T-lymphotropic virus 1
auucuuccaguucu

SEQ ID NO: 2918351 - RNA, 13 nt, Human T-lymphotropic virus 1
ucauggaccugcc

SEQ ID NO: 2918352 - RNA, 19 nt, Human T-lymphotropic virus 1
caaaaauuuaggugcccag

SEQ ID NO: 2918353 - RNA, 23 nt, Human T-lymphotropic virus 1
ccccaugugauuuuuugccaccc

SEQ ID NO: 2918354 - RNA, 17 nt, Human T-lymphotropic virus 1
gacuccaccucgccuuc

SEQ ID NO: 2918355 - RNA, 14 nt, Human T-lymphotropic virus 1
caccuuccaaggca

SEQ ID NO: 2918356 - RNA, 15 nt, Human T-lymphotropic virus 1
agccgucuccagccc

SEQ ID NO: 2918357 - RNA, 16 nt, Human T-lymphotropic virus 1
gcggcuuuccucuucu

SEQ ID NO: 2918358 - RNA, 18 nt, Human T-lymphotropic virus 1
ucccccuuccgccaccgc

SEQ ID NO: 2918359 - RNA, 18 nt, Human T-lymphotropic virus 1
cucaagcgagcugcaugc

SEQ ID NO: 2918360 - RNA, 21 nt, Human T-lymphotropic virus 1
ucuaguauagccaucaacccc

SEQ ID NO: 2918361 - RNA, 21 nt, Human T-lymphotropic virus 1
acccacccuugggcagcaccu

SEQ ID NO: 2918362 - RNA, 20 nt, Human T-lymphotropic virus 1
guccugcagcucucuccugc

SEQ ID NO: 2918363 - RNA, 15 nt, Human T-lymphotropic virus 1
agccuccccugccaa

SEQ ID NO: 2918364 - RNA, 14 nt, Human T-lymphotropic virus 1
caauuccuccacca

SEQ ID NO: 2918365 - RNA, 19 nt, Human T-lymphotropic virus 1
guacuacaguccuccuccu

SEQ ID NO: 2918366 - RNA, 19 nt, Human T-lymphotropic virus 1
ccugucauaacucccucau

SEQ ID NO: 2918367 - RNA, 18 nt, Human T-lymphotropic virus 1
cguucugccgccucccgc

SEQ ID NO: 2918368 - RNA, 12 nt, Human T-lymphotropic virus 1
gcuuccagcccc

SEQ ID NO: 2918369 - RNA, 18 nt, Human T-lymphotropic virus 1
ccugcaauccugcccagc

SEQ ID NO: 2918370 - RNA, 16 nt, Human T-lymphotropic virus 1
cagcuggcccauaucc

SEQ ID NO: 2918371 - RNA, 19 nt, Human T-lymphotropic virus 1
ccaggcucaacgcucucac

SEQ ID NO: 2918372 - RNA, 15 nt, Human T-lymphotropic virus 1
cugcuggcccuuuca

SEQ ID NO: 2918373 - RNA, 21 nt, Human T-lymphotropic virus 1
cccugucauaacucccucauc

SEQ ID NO: 2918374 - RNA, 21 nt, Human T-lymphotropic virus 1
uccaggauaugaccccaucug

SEQ ID NO: 2918375 - RNA, 16 nt, Human T-lymphotropic virus 1
gucuggcuugucuccg

SEQ ID NO: 2918376 - RNA, 12 nt, Human T-lymphotropic virus 1
gacccuugcccu

SEQ ID NO: 2918377 - RNA, 22 nt, Human T-lymphotropic virus 1
uccuggcaagccccucccaugc

SEQ ID NO: 2918378 - RNA, 16 nt, Human T-lymphotropic virus 1
agcuaccaugccaccu

SEQ ID NO: 2918379 - RNA, 14 nt, Human T-lymphotropic virus 1
uacucccccuuccg

SEQ ID NO: 2918380 - RNA, 14 nt, Human T-lymphotropic virus 1
ccuucucccuucua

SEQ ID NO: 2918381 - RNA, 16 nt, Human T-lymphotropic virus 1
uccagccccccaccug

SEQ ID NO: 2918382 - RNA, 19 nt, Human T-lymphotropic virus 1
gcucagcaccagcucaggc

SEQ ID NO: 2918383 - RNA, 18 nt, Human T-lymphotropic virus 1
aucucucaucaucuuccc

SEQ ID NO: 2918384 - RNA, 23 nt, Human T-lymphotropic virus 1
gccuggcaaaacggccuccuucc

SEQ ID NO: 2918385 - RNA, 19 nt, Human T-lymphotropic virus 1
uccacccuccuuccuccag

SEQ ID NO: 2918386 - RNA, 14 nt, Human T-lymphotropic virus 1
cugcgcucuugcca

SEQ ID NO: 2918387 - RNA, 16 nt, Human T-lymphotropic virus 1
caucaaauccuccuuc

SEQ ID NO: 2918388 - RNA, 18 nt, Human T-lymphotropic virus 1
gagccaucucagcuaccc

SEQ ID NO: 2918389 - RNA, 19 nt, Human T-lymphotropic virus 1
ucuagucgacgcuccagga

SEQ ID NO: 2918390 - RNA, 16 nt, Human T-lymphotropic virus 1
gaguacuaccccaagg

SEQ ID NO: 2918391 - RNA, 16 nt, Human T-lymphotropic virus 1
uacaauccaaccagcu

SEQ ID NO: 2918392 - RNA, 12 nt, Human T-lymphotropic virus 1
ccugcucuuccu

SEQ ID NO: 2918393 - RNA, 20 nt, Human T-lymphotropic virus 1
ccacguucgcagccauacca

SEQ ID NO: 2918394 - RNA, 24 nt, Human T-lymphotropic virus 1
ucuaaacccugcaauccugcccag

SEQ ID NO: 2918395 - RNA, 14 nt, Human T-lymphotropic virus 1
uccugcccagccag

SEQ ID NO: 2918396 - RNA, 19 nt, Human T-lymphotropic virus 1
gcuuccucuucuccucagc

SEQ ID NO: 2918397 - RNA, 16 nt, Human T-lymphotropic virus 1
cggauccaccucccag

SEQ ID NO: 2918398 - RNA, 14 nt, Human T-lymphotropic virus 1
uaacucuuccucca

SEQ ID NO: 2918399 - RNA, 23 nt, Human T-lymphotropic virus 1
cccagauugacacccagaccagc

SEQ ID NO: 2918400 - RNA, 21 nt, Human T-lymphotropic virus 1
accuccuccguucagccucca

SEQ ID NO: 2918401 - RNA, 13 nt, Human T-lymphotropic virus 1
acuccccuccuuc

SEQ ID NO: 2918402 - RNA, 19 nt, Human T-lymphotropic virus 1
ugccagccuauccacuugg

SEQ ID NO: 2918403 - RNA, 12 nt, Human T-lymphotropic virus 1
acuccaggccuu

SEQ ID NO: 2918404 - RNA, 15 nt, Human T-lymphotropic virus 1
gccccgccgauccca

SEQ ID NO: 2918405 - RNA, 21 nt, Human T-lymphotropic virus 1
agccgucuccagccccuacug

SEQ ID NO: 2918406 - RNA, 15 nt, Human T-lymphotropic virus 1
uugcccuaggcaccu

SEQ ID NO: 2918407 - RNA, 14 nt, Human T-lymphotropic virus 1
ccuucuccuccgcc

SEQ ID NO: 2918408 - RNA, 15 nt, Human T-lymphotropic virus 1
ugggaccuuggccuc

SEQ ID NO: 2918409 - RNA, 18 nt, Human T-lymphotropic virus 1
cagccccuugucuccacu

SEQ ID NO: 2918410 - RNA, 15 nt, Human T-lymphotropic virus 1
agcuucaccacuccc

SEQ ID NO: 2918411 - RNA, 16 nt, Human T-lymphotropic virus 1
uccaccucgccuucca

SEQ ID NO: 2918412 - RNA, 21 nt, Human T-lymphotropic virus 1
gccaauacaggcgccagcugu

SEQ ID NO: 2918413 - RNA, 15 nt, Human T-lymphotropic virus 1
uucaccuaaucaccu

SEQ ID NO: 2918414 - RNA, 19 nt, Human T-lymphotropic virus 1
aggcuauuauucagccucu

SEQ ID NO: 2918415 - RNA, 20 nt, Human T-lymphotropic virus 1
cagacggauccaccucccag

SEQ ID NO: 2918416 - RNA, 16 nt, Human T-lymphotropic virus 1
guaaguuacuccagcu

SEQ ID NO: 2918417 - RNA, 16 nt, Human T-lymphotropic virus 1
acaguuggagucuccu

SEQ ID NO: 2918418 - RNA, 17 nt, Human T-lymphotropic virus 1
cggaggacagcucagca

SEQ ID NO: 2918419 - RNA, 18 nt, Human T-lymphotropic virus 1
cgacuggugccccaucuc

SEQ ID NO: 2918420 - RNA, 18 nt, Human T-lymphotropic virus 1
aguacucuuccuuucaua

SEQ ID NO: 2918421 - RNA, 13 nt, Human T-lymphotropic virus 1
ucaccuggccccu

SEQ ID NO: 2918422 - RNA, 16 nt, Human T-lymphotropic virus 1
cccguaauuaaagccc

SEQ ID NO: 2918423 - RNA, 13 nt, Human T-lymphotropic virus 1
cugcagaccuaca

SEQ ID NO: 2918424 - RNA, 23 nt, Human T-lymphotropic virus 1
guaccuauacggucccgcugggc

SEQ ID NO: 2918425 - RNA, 19 nt, Human T-lymphotropic virus 1
aagcuauagucuccucccc

SEQ ID NO: 2918426 - RNA, 21 nt, Human T-lymphotropic virus 1
ugcaggaccaugcauccuccg

SEQ ID NO: 2918427 - RNA, 16 nt, Human T-lymphotropic virus 1
cucccaccgccccucc

SEQ ID NO: 2918428 - RNA, 23 nt, Human T-lymphotropic virus 1
ccuuuaacucuuccuccaaggau

SEQ ID NO: 2918429 - RNA, 19 nt, Human T-lymphotropic virus 1
uggacaaagauauuuccca

SEQ ID NO: 2918430 - RNA, 15 nt, Human T-lymphotropic virus 1
cuccagcuaccaugc

SEQ ID NO: 2918431 - RNA, 15 nt, Human T-lymphotropic virus 1
cuuuggaacacuuuu

SEQ ID NO: 2918432 - RNA, 17 nt, Human T-lymphotropic virus 1
gccccuucacagucucu

SEQ ID NO: 2918433 - RNA, 17 nt, Human T-lymphotropic virus 1
ccccuggagggccccgu

SEQ ID NO: 2918434 - RNA, 14 nt, Human T-lymphotropic virus 1
caccugggacccca

SEQ ID NO: 2918435 - RNA, 16 nt, Human T-lymphotropic virus 1
cuccgggaagccaccg

SEQ ID NO: 2918436 - RNA, 20 nt, Human T-lymphotropic virus 1
uauggacaaucaaccaccua

SEQ ID NO: 2918437 - RNA, 17 nt, Human T-lymphotropic virus 1
cagcuacgacaccuccc

SEQ ID NO: 2918438 - RNA, 23 nt, Human T-lymphotropic virus 1
ccuauacaggagccgucuccagc

SEQ ID NO: 2918439 - RNA, 20 nt, Human T-lymphotropic virus 1
aagcccagauugacacccag

SEQ ID NO: 2918440 - RNA, 17 nt, Human T-lymphotropic virus 1
cugcaacuacucucaga

SEQ ID NO: 2918441 - RNA, 18 nt, Human T-lymphotropic virus 1
uauuuaaauccuucucaa

SEQ ID NO: 2918442 - RNA, 15 nt, Human T-lymphotropic virus 1
cucuugccacgccug

SEQ ID NO: 2918443 - RNA, 17 nt, Human T-lymphotropic virus 1
cucuacucucccacucu

SEQ ID NO: 2918444 - RNA, 14 nt, Human T-lymphotropic virus 1
auacaucauaacau

SEQ ID NO: 2918445 - RNA, 16 nt, Human T-lymphotropic virus 1
agagccuccuacauga

SEQ ID NO: 2918446 - RNA, 17 nt, Human T-lymphotropic virus 1
cuuuggaacacuuuucu

SEQ ID NO: 2918447 - RNA, 21 nt, Human T-lymphotropic virus 1
guucucaaguaauacuccccu

SEQ ID NO: 2918448 - RNA, 23 nt, Human T-lymphotropic virus 1
agaucauucccccuuccgccacc

SEQ ID NO: 2918449 - RNA, 22 nt, Human T-lymphotropic virus 1
cagacgaggccuugaucuccug

SEQ ID NO: 2918450 - RNA, 20 nt, Human T-lymphotropic virus 1
cucgacuccccuccuucccc

SEQ ID NO: 2918451 - RNA, 22 nt, Human T-lymphotropic virus 1
aguguuccuaucuuacuccacc

SEQ ID NO: 2918452 - RNA, 12 nt, Human T-lymphotropic virus 1
uccaccucccag

SEQ ID NO: 2918453 - RNA, 18 nt, Human T-lymphotropic virus 1
uccucucaggcccccuuu

SEQ ID NO: 2918454 - RNA, 18 nt, Human T-lymphotropic virus 1
uacaggcgccagcugucc

SEQ ID NO: 2918455 - RNA, 21 nt, Human T-lymphotropic virus 1
auugcacaguaugcugcccag

SEQ ID NO: 2918456 - RNA, 15 nt, Human T-lymphotropic virus 1
uccaccucccaggca

SEQ ID NO: 2918457 - RNA, 16 nt, Human T-lymphotropic virus 1
cuguuucgccuucuca

SEQ ID NO: 2918458 - RNA, 16 nt, Human T-lymphotropic virus 1
ugucuccgcccuggcc

SEQ ID NO: 2918459 - RNA, 18 nt, Human T-lymphotropic virus 1
ggccuaccaccccucauu

SEQ ID NO: 2918460 - RNA, 20 nt, Human T-lymphotropic virus 1
ccgccuguggugccuccuga

SEQ ID NO: 2918461 - RNA, 12 nt, Human T-lymphotropic virus 1
cucuuccuccaa

SEQ ID NO: 2918462 - RNA, 21 nt, Human T-lymphotropic virus 1
uccaauauccugcgcucuugc

SEQ ID NO: 2918463 - RNA, 22 nt, Human T-lymphotropic virus 1
cagcaaccuccuccguucagcc

SEQ ID NO: 2918464 - RNA, 17 nt, Human T-lymphotropic virus 1
ccauauccucgagcccu

SEQ ID NO: 2918465 - RNA, 19 nt, Human T-lymphotropic virus 1
guccuuuaacucuuccucc

SEQ ID NO: 2918466 - RNA, 17 nt, Human T-lymphotropic virus 1
gaaccacccauuuccuc

SEQ ID NO: 2918467 - RNA, 17 nt, Human T-lymphotropic virus 1
aggagccaucucagcua

SEQ ID NO: 2918468 - RNA, 20 nt, Human T-lymphotropic virus 1
ccugucacagaacugccgca

SEQ ID NO: 2918469 - RNA, 22 nt, Human T-lymphotropic virus 1
cagccuggcaaaacggccuccu

SEQ ID NO: 2918470 - RNA, 16 nt, Human T-lymphotropic virus 1
gcagcuacuugccuca

SEQ ID NO: 2918471 - RNA, 16 nt, Human T-lymphotropic virus 1
cccucgaccugcuggc

SEQ ID NO: 2918472 - RNA, 21 nt, Human T-lymphotropic virus 1
cccacccuugggcagcaccuc

SEQ ID NO: 2918473 - RNA, 13 nt, Human T-lymphotropic virus 1
caggagccaucuc

SEQ ID NO: 2918474 - RNA, 19 nt, Human T-lymphotropic virus 1
acaucgccuccagccuccc

SEQ ID NO: 2918475 - RNA, 19 nt, Human T-lymphotropic virus 1
cagcuucaccacucccccc

SEQ ID NO: 2918476 - RNA, 17 nt, Human T-lymphotropic virus 1
cacggcgcuccugcucu

SEQ ID NO: 2918477 - RNA, 12 nt, Human T-lymphotropic virus 1
aaaagaggcaga

SEQ ID NO: 2918478 - RNA, 14 nt, Human T-lymphotropic virus 1
ccuucuccugcagc

SEQ ID NO: 2918479 - RNA, 23 nt, Human T-lymphotropic virus 1
ggcacccgucacgcugacagccu

SEQ ID NO: 2918480 - RNA, 19 nt, Human T-lymphotropic virus 1
cgcucacggcgcuccugcu

SEQ ID NO: 2918481 - RNA, 19 nt, Human T-lymphotropic virus 1
acaccauggguaaguuucu

SEQ ID NO: 2918482 - RNA, 19 nt, Human T-lymphotropic virus 1
cuguuugcccaccacccuu

SEQ ID NO: 2918483 - RNA, 16 nt, Human T-lymphotropic virus 1
cucaacccucaccacu

SEQ ID NO: 2918484 - RNA, 17 nt, Human T-lymphotropic virus 1
accugcaacuacucuca

SEQ ID NO: 2918485 - RNA, 12 nt, Human T-lymphotropic virus 1
cccaccacccuu

SEQ ID NO: 2918486 - RNA, 16 nt, Human T-lymphotropic virus 1
ggcgcuuuccccccug

SEQ ID NO: 2918487 - RNA, 15 nt, Human T-lymphotropic virus 1
ccacccauuuccucc

SEQ ID NO: 2918488 - RNA, 17 nt, Human T-lymphotropic virus 1
gcuuccagccccccacc

SEQ ID NO: 2918489 - RNA, 13 nt, Human T-lymphotropic virus 1
uacaggcgccagc

SEQ ID NO: 2918490 - RNA, 19 nt, Human T-lymphotropic virus 1
uccuccgcccgcuuccugc

SEQ ID NO: 2918491 - RNA, 16 nt, Human T-lymphotropic virus 1
ucagcuacgacaccuc

SEQ ID NO: 2918492 - RNA, 22 nt, Human T-lymphotropic virus 1
ugucugcauguaccucuaccag

SEQ ID NO: 2918493 - RNA, 18 nt, Human T-lymphotropic virus 1
ccagaacgccuccaggcc

SEQ ID NO: 2918494 - RNA, 21 nt, Human T-lymphotropic virus 1
cugacaaacccgaccuaccua

SEQ ID NO: 2918495 - RNA, 24 nt, Human T-lymphotropic virus 1
cucggugauuacagccccagcugc

SEQ ID NO: 2918496 - RNA, 15 nt, Human T-lymphotropic virus 1
gccgucuccagcccc

SEQ ID NO: 2918497 - RNA, 15 nt, Human T-lymphotropic virus 1
ccuguggugccuccu

SEQ ID NO: 2918498 - RNA, 18 nt, Human T-lymphotropic virus 1
caaauaauuucaccuaau

SEQ ID NO: 2918499 - RNA, 17 nt, Human T-lymphotropic virus 1
gccccuauacaggagcc

SEQ ID NO: 2918500 - RNA, 23 nt, Human T-lymphotropic virus 1
cucucaggcccccuuucaggccc

SEQ ID NO: 2918501 - RNA, 16 nt, Human T-lymphotropic virus 1
ucaccucccuuccugu

SEQ ID NO: 2918502 - RNA, 14 nt, Human T-lymphotropic virus 1
cuucaagaagcugc

SEQ ID NO: 2918503 - RNA, 14 nt, Human T-lymphotropic virus 1
ccggcuccaugucc

SEQ ID NO: 2918504 - RNA, 20 nt, Human T-lymphotropic virus 1
agcuacgacaccuccccucg

SEQ ID NO: 2918505 - RNA, 12 nt, Human T-lymphotropic virus 1
gcgcuuccagcc

SEQ ID NO: 2918506 - RNA, 12 nt, Human T-lymphotropic virus 1
gccuccccugcc

SEQ ID NO: 2918507 - RNA, 16 nt, Human T-lymphotropic virus 1
cuggcaagccccuccc

SEQ ID NO: 2918508 - RNA, 17 nt, Human T-lymphotropic virus 1
cugcuuuuccuccucuu

SEQ ID NO: 2918509 - RNA, 23 nt, Human T-lymphotropic virus 1
uggcggaggcuauuauucagccu

SEQ ID NO: 2918510 - RNA, 23 nt, Human T-lymphotropic virus 1
ugcaaccacaucgccuccagccu

SEQ ID NO: 2918511 - RNA, 15 nt, Human T-lymphotropic virus 1
ucuuugcuccaggcc

SEQ ID NO: 2918512 - RNA, 22 nt, Human T-lymphotropic virus 1
ccugcccuaaagauggccagcc

SEQ ID NO: 2918513 - RNA, 14 nt, Human T-lymphotropic virus 1
uggaggcaggccau

SEQ ID NO: 2918514 - RNA, 21 nt, Human T-lymphotropic virus 1
gcagccggccgcggcuuuccu

SEQ ID NO: 2918515 - RNA, 14 nt, Human T-lymphotropic virus 1
guaugcugcccaga

SEQ ID NO: 2918516 - RNA, 19 nt, Human T-lymphotropic virus 1
ccugcaauccugcccagcc

SEQ ID NO: 2918517 - RNA, 20 nt, Human T-lymphotropic virus 1
acccuugggcagcaccuccc

SEQ ID NO: 2918518 - RNA, 18 nt, Human T-lymphotropic virus 1
acuuuaagcucaccuccc

SEQ ID NO: 2918519 - RNA, 15 nt, Human T-lymphotropic virus 1
cugccuauauuuccc

SEQ ID NO: 2918520 - RNA, 17 nt, Human T-lymphotropic virus 1
ccuccaauauccugcgc

SEQ ID NO: 2918521 - RNA, 19 nt, Human T-lymphotropic virus 1
cccaucaccuggccccucc

SEQ ID NO: 2918522 - RNA, 19 nt, Human T-lymphotropic virus 1
cuccugcagcaaccuccuc

SEQ ID NO: 2918523 - RNA, 17 nt, Human T-lymphotropic virus 1
uacagccccagcugcug

SEQ ID NO: 2918524 - RNA, 23 nt, Human T-lymphotropic virus 1
cccugcccuaaagauggccagcc

SEQ ID NO: 2918525 - RNA, 16 nt, Human T-lymphotropic virus 1
cucaccaauguucccu

SEQ ID NO: 2918526 - RNA, 14 nt, Human T-lymphotropic virus 1
ccaucaccuggccc

SEQ ID NO: 2918527 - RNA, 16 nt, Human T-lymphotropic virus 1
uucgccuucucagccc

SEQ ID NO: 2918528 - RNA, 17 nt, Human T-lymphotropic virus 1
augcgguuuuuccuucu

SEQ ID NO: 2918529 - RNA, 12 nt, Human T-lymphotropic virus 1
gccucucaguga

SEQ ID NO: 2918530 - RNA, 17 nt, Human T-lymphotropic virus 1
agcgcuaguucugccca

SEQ ID NO: 2918531 - RNA, 12 nt, Human T-lymphotropic virus 1
caggccauaucg

SEQ ID NO: 2918532 - RNA, 13 nt, Human T-lymphotropic virus 1
cagcucagcacca

SEQ ID NO: 2918533 - RNA, 16 nt, Human T-lymphotropic virus 1
cucagcaccagcucag

SEQ ID NO: 2918534 - RNA, 15 nt, Human T-lymphotropic virus 1
cgaucgugccagccu

SEQ ID NO: 2918535 - RNA, 13 nt, Human T-lymphotropic virus 1
cuccucuuccuuc

SEQ ID NO: 2918536 - RNA, 16 nt, Human T-lymphotropic virus 1
accugggaccccaucg

SEQ ID NO: 2918537 - RNA, 14 nt, Human T-lymphotropic virus 1
accugcgggccacu

SEQ ID NO: 2918538 - RNA, 14 nt, Human T-lymphotropic virus 1
cuuguccagccugc

SEQ ID NO: 2918539 - RNA, 23 nt, Human T-lymphotropic virus 1
agagacacauucccucagcaaua

SEQ ID NO: 2918540 - RNA, 18 nt, Human T-lymphotropic virus 1
gaggcuauuauucagccu

SEQ ID NO: 2918541 - RNA, 13 nt, Human T-lymphotropic virus 1
agaagucugagaa

SEQ ID NO: 2918542 - RNA, 13 nt, Human T-lymphotropic virus 1
gccuucucagccc

SEQ ID NO: 2918543 - RNA, 21 nt, Human T-lymphotropic virus 1
gggccaggaaauaacccagua

SEQ ID NO: 2918544 - RNA, 11 nt, Human T-lymphotropic virus 1
cucccccuucc

SEQ ID NO: 2918545 - RNA, 17 nt, Human T-lymphotropic virus 1
acuuaugaugcaguccc

SEQ ID NO: 2918546 - RNA, 18 nt, Human T-lymphotropic virus 1
cugacgucuccccccgga

SEQ ID NO: 2918547 - RNA, 18 nt, Human T-lymphotropic virus 1
ugcaggaccaugcauccu

SEQ ID NO: 2918548 - RNA, 12 nt, Human T-lymphotropic virus 1
gcccugcccuaa

SEQ ID NO: 2918549 - RNA, 14 nt, Human T-lymphotropic virus 1
agcgcuuccagccc

SEQ ID NO: 2918550 - RNA, 16 nt, Human T-lymphotropic virus 1
cccgaaaucagccagu

SEQ ID NO: 2918551 - RNA, 18 nt, Human T-lymphotropic virus 1
cguccuauacucucccaa

SEQ ID NO: 2918552 - RNA, 20 nt, Human T-lymphotropic virus 1
uccacccuccuuccuccagg

SEQ ID NO: 2918553 - RNA, 15 nt, Human T-lymphotropic virus 1
gccuugaucuccugu

SEQ ID NO: 2918554 - RNA, 11 nt, Human T-lymphotropic virus 1
gacccccccuu

SEQ ID NO: 2918555 - RNA, 20 nt, Human T-lymphotropic virus 1
gucuccccccggaggacagc

SEQ ID NO: 2918556 - RNA, 22 nt, Human T-lymphotropic virus 1
gcacguccuauacucucccaac

SEQ ID NO: 2918557 - RNA, 17 nt, Human T-lymphotropic virus 1
agcucuacaguuccuua

SEQ ID NO: 2918558 - RNA, 22 nt, Human T-lymphotropic virus 1
ucagaccuccgggaagccaccg

SEQ ID NO: 2918559 - RNA, 22 nt, Human T-lymphotropic virus 1
gggccuuaacugggaccuuggc

SEQ ID NO: 2918560 - RNA, 23 nt, Human T-lymphotropic virus 1
cucaauaaaauaacaggagucua

SEQ ID NO: 2918561 - RNA, 12 nt, Human T-lymphotropic virus 1
gcgcucuugcca

SEQ ID NO: 2918562 - RNA, 22 nt, Human T-lymphotropic virus 1
cggaaggcccuggaggcaggcc

SEQ ID NO: 2918563 - RNA, 21 nt, Human T-lymphotropic virus 1
ccucucccaucaaauccuccu

SEQ ID NO: 2918564 - RNA, 15 nt, Human T-lymphotropic virus 1
cccaagguaccuaua

SEQ ID NO: 2918565 - RNA, 18 nt, Human T-lymphotropic virus 1
ccuccagccuccccugcc

SEQ ID NO: 2918566 - RNA, 22 nt, Human T-lymphotropic virus 1
uuccaacugucuaguauagcca

SEQ ID NO: 2918567 - RNA, 22 nt, Human T-lymphotropic virus 1
cauucuccuggcaagccccucc

SEQ ID NO: 2918568 - RNA, 21 nt, Human T-lymphotropic virus 1
gucugagaaggucagggccca

SEQ ID NO: 2918569 - RNA, 17 nt, Human T-lymphotropic virus 1
cagccgaucccagagac

SEQ ID NO: 2918570 - RNA, 14 nt, Human T-lymphotropic virus 1
aguucugcccccuc

SEQ ID NO: 2918571 - RNA, 13 nt, Human T-lymphotropic virus 1
aacucccucaucc

SEQ ID NO: 2918572 - RNA, 15 nt, Human T-lymphotropic virus 1
ugcagcuggcccaua

SEQ ID NO: 2918573 - RNA, 14 nt, Human T-lymphotropic virus 1
aaacaguuccagcc

SEQ ID NO: 2918574 - RNA, 16 nt, Human T-lymphotropic virus 1
ccuuacgccagccccu

SEQ ID NO: 2918575 - RNA, 18 nt, Human T-lymphotropic virus 1
uucgccuucucagccccu

SEQ ID NO: 2918576 - RNA, 13 nt, Human T-lymphotropic virus 1
ucagcaccagcuc

SEQ ID NO: 2918577 - RNA, 23 nt, Human T-lymphotropic virus 1
ggacuccaccucgccuuccaacu

SEQ ID NO: 2918578 - RNA, 19 nt, Human T-lymphotropic virus 1
agccaucaacccccaacuc

SEQ ID NO: 2918579 - RNA, 16 nt, Human T-lymphotropic virus 1
ccagccaacugccucc

SEQ ID NO: 2918580 - RNA, 14 nt, Human T-lymphotropic virus 1
cacccuccuuccuc

SEQ ID NO: 2918581 - RNA, 15 nt, Human T-lymphotropic virus 1
acucaacccucacca

SEQ ID NO: 2918582 - RNA, 16 nt, Human T-lymphotropic virus 1
uaccgaacccagccaa

SEQ ID NO: 2918583 - RNA, 22 nt, Human T-lymphotropic virus 1
cucaggaaagagccuccuacau

SEQ ID NO: 2918584 - RNA, 13 nt, Human T-lymphotropic virus 1
ugcuccaggccau

SEQ ID NO: 2918585 - RNA, 21 nt, Human T-lymphotropic virus 1
cucaccucccuuccugugcua

SEQ ID NO: 2918586 - RNA, 21 nt, Human T-lymphotropic virus 1
caguucugcccccucauccuc

SEQ ID NO: 2918587 - RNA, 12 nt, Human T-lymphotropic virus 1
ugcucuuccugc

SEQ ID NO: 2918588 - RNA, 20 nt, Human T-lymphotropic virus 1
cuuccuuuucaaauacucag

SEQ ID NO: 2918589 - RNA, 20 nt, Human T-lymphotropic virus 1
ucaccccuguccugcagcuc

SEQ ID NO: 2918590 - RNA, 18 nt, Human T-lymphotropic virus 1
accuccuccguucagccu

SEQ ID NO: 2918591 - RNA, 13 nt, Human T-lymphotropic virus 1
ucugcuuuuccuc

SEQ ID NO: 2918592 - RNA, 15 nt, Human T-lymphotropic virus 1
cuccucccccuguca

SEQ ID NO: 2918593 - RNA, 22 nt, Human T-lymphotropic virus 1
cucacaguuggagucuccucau

SEQ ID NO: 2918594 - RNA, 23 nt, Human T-lymphotropic virus 1
acaccuuuucaggagccaucuca

SEQ ID NO: 2918595 - RNA, 18 nt, Human T-lymphotropic virus 1
cacagaugcccuacuaau

SEQ ID NO: 2918596 - RNA, 18 nt, Human T-lymphotropic virus 1
acgcccuacuggccaccu

SEQ ID NO: 2918597 - RNA, 13 nt, Human T-lymphotropic virus 1
gcaugcccaagac

SEQ ID NO: 2918598 - RNA, 17 nt, Human T-lymphotropic virus 1
cuacgacaccuccccuc

SEQ ID NO: 2918599 - RNA, 15 nt, Human T-lymphotropic virus 1
acagacgaggccuug

SEQ ID NO: 2918600 - RNA, 20 nt, Human T-lymphotropic virus 1
caaaucauaagcucagaccu

SEQ ID NO: 2918601 - RNA, 14 nt, Human T-lymphotropic virus 1
gcucugacgucucc

SEQ ID NO: 2918602 - RNA, 12 nt, Human T-lymphotropic virus 1
cggcaggcccug

SEQ ID NO: 2918603 - RNA, 14 nt, Human T-lymphotropic virus 1
acaaccccucaccu

SEQ ID NO: 2918604 - RNA, 13 nt, Human T-lymphotropic virus 1
ccaauuccuccac

SEQ ID NO: 2918605 - RNA, 23 nt, Human T-lymphotropic virus 1
cccgccaaucacucauacaaccc

SEQ ID NO: 2918606 - RNA, 21 nt, Human T-lymphotropic virus 1
uccgucagcuacgacaccucc

SEQ ID NO: 2918607 - RNA, 18 nt, Human T-lymphotropic virus 1
cuggcaagccccucccau

SEQ ID NO: 2918608 - RNA, 13 nt, Human T-lymphotropic virus 1
ccuccugaacuac

SEQ ID NO: 2918609 - RNA, 14 nt, Human T-lymphotropic virus 1
ccggaggacagcuc

SEQ ID NO: 2918610 - RNA, 15 nt, Human T-lymphotropic virus 1
aucugcuuuuccucc

SEQ ID NO: 2918611 - RNA, 15 nt, Human T-lymphotropic virus 1
uucugccgccucccg

SEQ ID NO: 2918612 - RNA, 14 nt, Human T-lymphotropic virus 1
gcccgcuuccugcg

SEQ ID NO: 2918613 - RNA, 20 nt, Human T-lymphotropic virus 1
cuccugcagcaaccuccucc

SEQ ID NO: 2918614 - RNA, 14 nt, Human T-lymphotropic virus 1
agccuccccugcca

SEQ ID NO: 2918615 - RNA, 22 nt, Human T-lymphotropic virus 1
ucagcucuacaguuccuuaucc

SEQ ID NO: 2918616 - RNA, 13 nt, Human T-lymphotropic virus 1
ccaccccggccag

SEQ ID NO: 2918617 - RNA, 15 nt, Human T-lymphotropic virus 1
cugcgcucuugccac

SEQ ID NO: 2918618 - RNA, 18 nt, Human T-lymphotropic virus 1
ggcuagaacaccucccaa

SEQ ID NO: 2918619 - RNA, 21 nt, Human T-lymphotropic virus 1
ccugccgcaaaaauaacccac

SEQ ID NO: 2918620 - RNA, 22 nt, Human T-lymphotropic virus 1
cgcuccaggauaugaccccauc

SEQ ID NO: 2918621 - RNA, 17 nt, Human T-lymphotropic virus 1
cguuaucggcucagcuc

SEQ ID NO: 2918622 - RNA, 18 nt, Human T-lymphotropic virus 1
auucuuaaaacccuauua

SEQ ID NO: 2918623 - RNA, 22 nt, Human T-lymphotropic virus 1
gcacuaugcuguuucgccuucu

SEQ ID NO: 2918624 - RNA, 22 nt, Human T-lymphotropic virus 1
uacauggaugacauucuccugg

SEQ ID NO: 2918625 - RNA, 24 nt, Human T-lymphotropic virus 1
gcuccucaagcgagcugcaugccc

SEQ ID NO: 2918626 - RNA, 20 nt, Human T-lymphotropic virus 1
caaauccuccuucuccugca

SEQ ID NO: 2918627 - RNA, 16 nt, Human T-lymphotropic virus 1
ucaagaagcugccggc

SEQ ID NO: 2918628 - RNA, 16 nt, Human T-lymphotropic virus 1
cccagaccagccaccc

SEQ ID NO: 2918629 - RNA, 18 nt, Human T-lymphotropic virus 1
aguuuccuccuccuccuu

SEQ ID NO: 2918630 - RNA, 18 nt, Human T-lymphotropic virus 1
cuauggacuacucugcca

SEQ ID NO: 2918631 - RNA, 23 nt, Human T-lymphotropic virus 1
auuuccucuuugcuccaggccau

SEQ ID NO: 2918632 - RNA, 21 nt, Human T-lymphotropic virus 1
cacgccugccgcaaaaauaac

SEQ ID NO: 2918633 - RNA, 18 nt, Human T-lymphotropic virus 1
gcacaguuuccuccuccu

SEQ ID NO: 2918634 - RNA, 22 nt, Human T-lymphotropic virus 1
accgccccuccucuacucuccc

SEQ ID NO: 2918635 - RNA, 21 nt, Human T-lymphotropic virus 1
cuccaaaggaacuccuaccuu

SEQ ID NO: 2918636 - RNA, 14 nt, Human T-lymphotropic virus 1
ucccacccuguucg

SEQ ID NO: 2918637 - RNA, 14 nt, Human T-lymphotropic virus 1
uaacaucuccaccc

SEQ ID NO: 2918638 - RNA, 18 nt, Human T-lymphotropic virus 1
gcaaccacaucgccucca

SEQ ID NO: 2918639 - RNA, 20 nt, Human T-lymphotropic virus 1
guuccuaucuuacuccacca

SEQ ID NO: 2918640 - RNA, 23 nt, Human T-lymphotropic virus 1
ucaggcguugacgacaaccccuc

SEQ ID NO: 2918641 - RNA, 19 nt, Human T-lymphotropic virus 1
cuucaccacuccccccgac

SEQ ID NO: 2918642 - RNA, 17 nt, Human T-lymphotropic virus 1
acacuuuucuuaaaaca

SEQ ID NO: 2918643 - RNA, 14 nt, Human T-lymphotropic virus 1
caaaacuccugacu

SEQ ID NO: 2918644 - RNA, 17 nt, Human T-lymphotropic virus 1
cuccgggaagccaccgg

SEQ ID NO: 2918645 - RNA, 13 nt, Human T-lymphotropic virus 1
aauaacccacaac

SEQ ID NO: 2918646 - RNA, 19 nt, Human T-lymphotropic virus 1
ccacccuccuuccuccagg

SEQ ID NO: 2918647 - RNA, 14 nt, Human T-lymphotropic virus 1
cccgacuccagccg

SEQ ID NO: 2918648 - RNA, 23 nt, Human T-lymphotropic virus 1
cagacgaggccuugaucuccugu

SEQ ID NO: 2918649 - RNA, 21 nt, Human T-lymphotropic virus 1
cccgcgagguggcgcuuuccc

SEQ ID NO: 2918650 - RNA, 18 nt, Human T-lymphotropic virus 1
ucccaguuaaaaaagcca

SEQ ID NO: 2918651 - RNA, 15 nt, Human T-lymphotropic virus 1
acucccucauccugc

SEQ ID NO: 2918652 - RNA, 16 nt, Human T-lymphotropic virus 1
cauggaacccacccuu

SEQ ID NO: 2918653 - RNA, 14 nt, Human T-lymphotropic virus 1
ggcccuccugcccc

SEQ ID NO: 2918654 - RNA, 14 nt, Human T-lymphotropic virus 1
aacaucuugccuag

SEQ ID NO: 2918655 - RNA, 13 nt, Human T-lymphotropic virus 1
caaugccaaggcg

SEQ ID NO: 2918656 - RNA, 14 nt, Human T-lymphotropic virus 1
cauucuuaaaaccc

SEQ ID NO: 2918657 - RNA, 13 nt, Human T-lymphotropic virus 1
cccucgccucagg

SEQ ID NO: 2918658 - RNA, 19 nt, Human T-lymphotropic virus 1
cgcaaaaauaacccacaac

SEQ ID NO: 2918659 - RNA, 20 nt, Human T-lymphotropic virus 1
ccuucuucuaccccccuccu

SEQ ID NO: 2918660 - RNA, 21 nt, Human T-lymphotropic virus 1
agugaaaaacauuuccgugaa

SEQ ID NO: 2918661 - RNA, 12 nt, Human T-lymphotropic virus 1
aaaacggccucc

SEQ ID NO: 2918662 - RNA, 14 nt, Human T-lymphotropic virus 1
cacagaugcccuac

SEQ ID NO: 2918663 - RNA, 20 nt, Human T-lymphotropic virus 1
ccaccacccuuuuccagccu

SEQ ID NO: 2918664 - RNA, 21 nt, Human T-lymphotropic virus 1
ggauacauggaacccacccuu

SEQ ID NO: 2918665 - RNA, 19 nt, Human T-lymphotropic virus 1
ccuuaacugggaccuuggc

SEQ ID NO: 2918666 - RNA, 20 nt, Human T-lymphotropic virus 1
ucaacccccaacuccugcau

SEQ ID NO: 2918667 - RNA, 18 nt, Human T-lymphotropic virus 1
gaccuccgggaagccacc

SEQ ID NO: 2918668 - RNA, 13 nt, Human T-lymphotropic virus 1
gccguccucaggc

SEQ ID NO: 2918669 - RNA, 16 nt, Human T-lymphotropic virus 1
cagccccccaccugac

SEQ ID NO: 2918670 - RNA, 18 nt, Human T-lymphotropic virus 1
cuguaaaccaagcacaca

SEQ ID NO: 2918671 - RNA, 20 nt, Human T-lymphotropic virus 1
acaaggcgacuggugcccca

SEQ ID NO: 2918672 - RNA, 18 nt, Human T-lymphotropic virus 1
aagcccuuaugccagugu

SEQ ID NO: 2918673 - RNA, 17 nt, Human T-lymphotropic virus 1
cucaacgcucucacaga

SEQ ID NO: 2918674 - RNA, 22 nt, Human T-lymphotropic virus 1
ccuaccuaaacaguuccagccc

SEQ ID NO: 2918675 - RNA, 19 nt, Human T-lymphotropic virus 1
uaccuaaacaguuccagcc

SEQ ID NO: 2918676 - RNA, 12 nt, Human T-lymphotropic virus 1
guccaaacccug

SEQ ID NO: 2918677 - RNA, 20 nt, Human T-lymphotropic virus 1
cacucaacccucaccacucc

SEQ ID NO: 2918678 - RNA, 17 nt, Human T-lymphotropic virus 1
aauccuccuucuccugc

SEQ ID NO: 2918679 - RNA, 19 nt, Human T-lymphotropic virus 1
uuccucaccaauguucccu

SEQ ID NO: 2918680 - RNA, 21 nt, Human T-lymphotropic virus 1
uccuaccuuacgccagccccu

SEQ ID NO: 2918681 - RNA, 12 nt, Human T-lymphotropic virus 1
ccaacugccaca

SEQ ID NO: 2918682 - RNA, 21 nt, Human T-lymphotropic virus 1
cuaccagcuuuccccccccau

SEQ ID NO: 2918683 - RNA, 22 nt, Human T-lymphotropic virus 1
ucaggcccccuuucaggcccuc

SEQ ID NO: 2918684 - RNA, 21 nt, Human T-lymphotropic virus 1
augauuuccgggcccugcccu

SEQ ID NO: 2918685 - RNA, 14 nt, Human T-lymphotropic virus 1
ugcccaccacccuu

SEQ ID NO: 2918686 - RNA, 23 nt, Human T-lymphotropic virus 1
aagacccaacaucuauucugcca

SEQ ID NO: 2918687 - RNA, 18 nt, Human T-lymphotropic virus 1
uucauucaaacaucugac

SEQ ID NO: 2918688 - RNA, 21 nt, Human T-lymphotropic virus 1
gcucuuuuuuucgcuuccucu

SEQ ID NO: 2918689 - RNA, 23 nt, Human T-lymphotropic virus 1
accaaucuaccugaucccaucuc

SEQ ID NO: 2918690 - RNA, 15 nt, Human T-lymphotropic virus 1
cccguggaggcuccu

SEQ ID NO: 2918691 - RNA, 11 nt, Human T-lymphotropic virus 1
agccccagcug

SEQ ID NO: 2918692 - RNA, 13 nt, Human T-lymphotropic virus 1
cacuaacucucua

SEQ ID NO: 2918693 - RNA, 18 nt, Human T-lymphotropic virus 1
gcagccuauauucucugg

SEQ ID NO: 2918694 - RNA, 18 nt, Human T-lymphotropic virus 1
auuauauaaguacuuuac

SEQ ID NO: 2918695 - RNA, 20 nt, Human T-lymphotropic virus 1
ccaacaucuauucugccagu

SEQ ID NO: 2918696 - RNA, 21 nt, Human T-lymphotropic virus 1
augacauucuccuggcaagcc

SEQ ID NO: 2918697 - RNA, 17 nt, Human T-lymphotropic virus 1
uuccagccccccaccug

SEQ ID NO: 2918698 - RNA, 13 nt, Human T-lymphotropic virus 1
gcugcaugcccaa

SEQ ID NO: 2918699 - RNA, 23 nt, Human T-lymphotropic virus 1
cuccaggccaugcgcaaauacuc

SEQ ID NO: 2918700 - RNA, 14 nt, Human T-lymphotropic virus 1
ccagaccagccacc

SEQ ID NO: 2918701 - RNA, 12 nt, Human T-lymphotropic virus 1
caguuccagccc

SEQ ID NO: 2918702 - RNA, 21 nt, Human T-lymphotropic virus 1
cccuugucgcgcuacuccuuc

SEQ ID NO: 2918703 - RNA, 22 nt, Human T-lymphotropic virus 1
cgcagccauaccaaucuaccug

SEQ ID NO: 2918704 - RNA, 23 nt, Human T-lymphotropic virus 1
ugugaucauaaacaccgccccuu

SEQ ID NO: 2918705 - RNA, 21 nt, Human T-lymphotropic virus 1
cggcuccaugucccucgccuc

SEQ ID NO: 2918706 - RNA, 19 nt, Human T-lymphotropic virus 1
ccugugcuaauacgccucc

SEQ ID NO: 2918707 - RNA, 18 nt, Human T-lymphotropic virus 1
acgacaaccccucaccuc

SEQ ID NO: 2918708 - RNA, 18 nt, Human T-lymphotropic virus 1
caauauguguaccucccu

SEQ ID NO: 2918709 - RNA, 22 nt, Human T-lymphotropic virus 1
uacaggagccgucuccagcccc

SEQ ID NO: 2918710 - RNA, 20 nt, Human T-lymphotropic virus 1
gguaaguuuagagcucaggu

SEQ ID NO: 2918711 - RNA, 18 nt, Human T-lymphotropic virus 1
ucagcccacuucccaggg

SEQ ID NO: 2918712 - RNA, 23 nt, Human T-lymphotropic virus 1
gcagguccucucaggcccccuuu

SEQ ID NO: 2918713 - RNA, 23 nt, Human T-lymphotropic virus 1
agcgcuuccagccccccaccuga

SEQ ID NO: 2918714 - RNA, 23 nt, Human T-lymphotropic virus 1
cagcagaucaggcccuacagcca

SEQ ID NO: 2918715 - RNA, 19 nt, Human T-lymphotropic virus 1
ccucacuggcaccaccacu

SEQ ID NO: 2918716 - RNA, 18 nt, Human T-lymphotropic virus 1
cacguccuauacucuccc

SEQ ID NO: 2918717 - RNA, 15 nt, Human T-lymphotropic virus 1
uucacagucucuacu

SEQ ID NO: 2918718 - RNA, 13 nt, Human T-lymphotropic virus 1
ccucauccugccc

SEQ ID NO: 2918719 - RNA, 22 nt, Human T-lymphotropic virus 1
ucauaacaucuccacccaaacc

SEQ ID NO: 2918720 - RNA, 14 nt, Human T-lymphotropic virus 1
ugccccccuuuucc

SEQ ID NO: 2918721 - RNA, 16 nt, Human T-lymphotropic virus 1
cguccuauacucuccc

SEQ ID NO: 2918722 - RNA, 14 nt, Human T-lymphotropic virus 1
uauuucccaagacu

SEQ ID NO: 2918723 - RNA, 19 nt, Human T-lymphotropic virus 1
uucaggagccaucucagcu

SEQ ID NO: 2918724 - RNA, 22 nt, Human T-lymphotropic virus 1
uucucagccccuugucuccacu

SEQ ID NO: 2918725 - RNA, 20 nt, Human T-lymphotropic virus 1
cucccuuggagccuaccuag

SEQ ID NO: 2918726 - RNA, 18 nt, Human T-lymphotropic virus 1
ugcagcucucuccugcag

SEQ ID NO: 2918727 - RNA, 17 nt, Human T-lymphotropic virus 1
ugcuuucacugucccac

SEQ ID NO: 2918728 - RNA, 19 nt, Human T-lymphotropic virus 1
ucagcggccuucuccuccg

SEQ ID NO: 2918729 - RNA, 21 nt, Human T-lymphotropic virus 1
cagccccuucacagucucuac

SEQ ID NO: 2918730 - RNA, 14 nt, Human T-lymphotropic virus 1
cuuugccugacccu

SEQ ID NO: 2918731 - RNA, 22 nt, Human T-lymphotropic virus 1
cagccuccaaggacuccaccuc

SEQ ID NO: 2918732 - RNA, 19 nt, Human T-lymphotropic virus 1
accugcaacuacucucaga

SEQ ID NO: 2918733 - RNA, 20 nt, Human T-lymphotropic virus 1
ugcaggaccaugcauccucc

SEQ ID NO: 2918734 - RNA, 19 nt, Human T-lymphotropic virus 1
cuucacagucucuacugug

SEQ ID NO: 2918735 - RNA, 19 nt, Human T-lymphotropic virus 1
aacagugcuguuuucuaaa

SEQ ID NO: 2918736 - RNA, 21 nt, Human T-lymphotropic virus 1
aguaaguuacuccagcuacca

SEQ ID NO: 2918737 - RNA, 22 nt, Human T-lymphotropic virus 1
cauguccccuacaauccaacca

SEQ ID NO: 2918738 - RNA, 20 nt, Human T-lymphotropic virus 1
acuacaagagagaccccccc

SEQ ID NO: 2918739 - RNA, 12 nt, Human T-lymphotropic virus 1
cccauauccugc

SEQ ID NO: 2918740 - RNA, 20 nt, Human T-lymphotropic virus 1
ccgccuuaccugaggccgcc

SEQ ID NO: 2918741 - RNA, 19 nt, Human T-lymphotropic virus 1
uguuucgccuucucagccc

SEQ ID NO: 2918742 - RNA, 20 nt, Human T-lymphotropic virus 1
auugucacaaagaucauucc

SEQ ID NO: 2918743 - RNA, 23 nt, Human T-lymphotropic virus 1
agccugccaacuacacuagccca

SEQ ID NO: 2918744 - RNA, 18 nt, Human T-lymphotropic virus 1
cuccugugaaagcccuua

SEQ ID NO: 2918745 - RNA, 15 nt, Human T-lymphotropic virus 1
ugcuguacucucaca

SEQ ID NO: 2918746 - RNA, 21 nt, Human T-lymphotropic virus 1
ggcccagaauaaggcucugac

SEQ ID NO: 2918747 - RNA, 17 nt, Human T-lymphotropic virus 1
gacccucgaccugcugg

SEQ ID NO: 2918748 - RNA, 14 nt, Human T-lymphotropic virus 1
accagcuuuccccc

SEQ ID NO: 2918749 - RNA, 22 nt, Human T-lymphotropic virus 1
gauagcaaaccgucaagcacag

SEQ ID NO: 2918750 - RNA, 13 nt, Human T-lymphotropic virus 1
aguccuccuccuu

SEQ ID NO: 2918751 - RNA, 17 nt, Human T-lymphotropic virus 1
augcuguuucgccuucu

SEQ ID NO: 2918752 - RNA, 16 nt, Human T-lymphotropic virus 1
cuggccaccuguccag

SEQ ID NO: 2918753 - RNA, 14 nt, Human T-lymphotropic virus 1
ucagaccuccggga

SEQ ID NO: 2918754 - RNA, 23 nt, Human T-lymphotropic virus 1
ggcccugccuauauuucccaaga

SEQ ID NO: 2918755 - RNA, 22 nt, Human T-lymphotropic virus 1
cuccaccagcagguccuccggg

SEQ ID NO: 2918756 - RNA, 18 nt, Human T-lymphotropic virus 1
cccccgaaaucagccagu

SEQ ID NO: 2918757 - RNA, 21 nt, Human T-lymphotropic virus 1
agccuggcaaaacggccuccu

SEQ ID NO: 2918758 - RNA, 22 nt, Human T-lymphotropic virus 1
ccuguccugcagcucucuccug

SEQ ID NO: 2918759 - RNA, 16 nt, Human T-lymphotropic virus 1
ucagcaccagcucagg

SEQ ID NO: 2918760 - RNA, 16 nt, Human T-lymphotropic virus 1
ccagcagguccuccgg

SEQ ID NO: 2918761 - RNA, 13 nt, Human T-lymphotropic virus 1
augcgcaaauacu

SEQ ID NO: 2918762 - RNA, 23 nt, Human T-lymphotropic virus 1
aucauuaccuucggacccuugcc

SEQ ID NO: 2918763 - RNA, 22 nt, Human T-lymphotropic virus 1
ggcccuacagccacccugcccu

SEQ ID NO: 2918764 - RNA, 16 nt, Human T-lymphotropic virus 1
uacgacaccuccccuc

SEQ ID NO: 2918765 - RNA, 15 nt, Human T-lymphotropic virus 1
gcaagccccucccau

SEQ ID NO: 2918766 - RNA, 14 nt, Human T-lymphotropic virus 1
uaccgaacccagcc

SEQ ID NO: 2918767 - RNA, 20 nt, Human T-lymphotropic virus 1
uccagcuaccaugccaccua

SEQ ID NO: 2918768 - RNA, 11 nt, Human T-lymphotropic virus 1
cgugccagccu

SEQ ID NO: 2918769 - RNA, 13 nt, Human T-lymphotropic virus 1
cccucauccucgg

SEQ ID NO: 2918770 - RNA, 22 nt, Human T-lymphotropic virus 1
ugcccuaggcaccuuccaaggc

SEQ ID NO: 2918771 - RNA, 21 nt, Human T-lymphotropic virus 1
ccuucuccuccgcccgcuucc

SEQ ID NO: 2918772 - RNA, 15 nt, Human T-lymphotropic virus 1
aaccacaacugaggc

SEQ ID NO: 2918773 - RNA, 18 nt, Human T-lymphotropic virus 1
uggacaaagauauuuccc

SEQ ID NO: 2918774 - RNA, 18 nt, Human T-lymphotropic virus 1
cggucuggcuugucuccg

SEQ ID NO: 2918775 - RNA, 19 nt, Human T-lymphotropic virus 1
gugauuacagccccagcug

SEQ ID NO: 2918776 - RNA, 18 nt, Human T-lymphotropic virus 1
ugucgcgcuacuccuucu

SEQ ID NO: 2918777 - RNA, 17 nt, Human T-lymphotropic virus 1
ucgcaucucuccuucac

SEQ ID NO: 2918778 - RNA, 15 nt, Human T-lymphotropic virus 1
cggaggacagcucag

SEQ ID NO: 2918779 - RNA, 19 nt, Human T-lymphotropic virus 1
agguaaguuuagagcucag

SEQ ID NO: 2918780 - RNA, 20 nt, Human T-lymphotropic virus 1
agcucggggccuuccucacc

SEQ ID NO: 2918781 - RNA, 18 nt, Human T-lymphotropic virus 1
aaaucgaguccugacugg

SEQ ID NO: 2918782 - RNA, 15 nt, Human T-lymphotropic virus 1
cuccuccuccuuguc

SEQ ID NO: 2918783 - RNA, 21 nt, Human T-lymphotropic virus 1
ccaugcuuauuaucagcccac

SEQ ID NO: 2918784 - RNA, 17 nt, Human T-lymphotropic virus 1
cugaucccaucuccagg

SEQ ID NO: 2918785 - RNA, 15 nt, Human T-lymphotropic virus 1
uccaaaucccccuac

SEQ ID NO: 2918786 - RNA, 13 nt, Human T-lymphotropic virus 1
acccuccuuccuc

SEQ ID NO: 2918787 - RNA, 21 nt, Human T-lymphotropic virus 1
ccccugacuuguccagccugc

SEQ ID NO: 2918788 - RNA, 21 nt, Human T-lymphotropic virus 1
gaaauaacccaguauucccag

SEQ ID NO: 2918789 - RNA, 10 nt, Human T-lymphotropic virus 1
gguuccuuaa

SEQ ID NO: 2918790 - RNA, 16 nt, Human T-lymphotropic virus 1
cacaaaaaucugcuca

SEQ ID NO: 2918791 - RNA, 14 nt, Human T-lymphotropic virus 1
ggagccgucuccag

SEQ ID NO: 2918792 - RNA, 23 nt, Human T-lymphotropic virus 1
acuuuucuuaaaacaacugcccc

SEQ ID NO: 2918793 - RNA, 16 nt, Human T-lymphotropic virus 1
uccaaggacuccaccu

SEQ ID NO: 2918794 - RNA, 17 nt, Human T-lymphotropic virus 1
ucucuacugugccuuac

SEQ ID NO: 2918795 - RNA, 12 nt, Human T-lymphotropic virus 1
ggccucuccagc

SEQ ID NO: 2918796 - RNA, 21 nt, Human T-lymphotropic virus 1
cgcuaguucugcccaguggau

SEQ ID NO: 2918797 - RNA, 18 nt, Human T-lymphotropic virus 1
uaaguuacuccagcuacc

SEQ ID NO: 2918798 - RNA, 13 nt, Human T-lymphotropic virus 1
ucaccacuccagg

SEQ ID NO: 2918799 - RNA, 13 nt, Human T-lymphotropic virus 1
uucucagccccuu

SEQ ID NO: 2918800 - RNA, 23 nt, Human T-lymphotropic virus 1
cccucccaugcggaccugcaacu

SEQ ID NO: 2918801 - RNA, 17 nt, Human T-lymphotropic virus 1
acguccuauacucuccc

SEQ ID NO: 2918802 - RNA, 23 nt, Human T-lymphotropic virus 1
gcccugccuauauuucccaagac

SEQ ID NO: 2918803 - RNA, 20 nt, Human T-lymphotropic virus 1
caugcgcaaauacucccccu

SEQ ID NO: 2918804 - RNA, 22 nt, Human T-lymphotropic virus 1
gacaaccccucaccucaaaaaa

SEQ ID NO: 2918805 - RNA, 14 nt, Human T-lymphotropic virus 1
ucaacgcucucaca

SEQ ID NO: 2918806 - RNA, 20 nt, Human T-lymphotropic virus 1
cauaccuagggugccaauca

SEQ ID NO: 2918807 - RNA, 22 nt, Human T-lymphotropic virus 1
cuccgucagcuacgacaccucc

SEQ ID NO: 2918808 - RNA, 13 nt, Human T-lymphotropic virus 1
uucuacucucaca

SEQ ID NO: 2918809 - RNA, 20 nt, Human T-lymphotropic virus 1
gcucaccucccuuccugugc

SEQ ID NO: 2918810 - RNA, 20 nt, Human T-lymphotropic virus 1
uaacucccucauccugcccc

SEQ ID NO: 2918811 - RNA, 12 nt, Human T-lymphotropic virus 1
ucggcccgccua

SEQ ID NO: 2918812 - RNA, 18 nt, Human T-lymphotropic virus 1
gccuaugauuuccgggcc

SEQ ID NO: 2918813 - RNA, 22 nt, Human T-lymphotropic virus 1
caauccuauggacuacucugcc

SEQ ID NO: 2918814 - RNA, 15 nt, Human T-lymphotropic virus 1
aaauccuccuucucc

SEQ ID NO: 2918815 - RNA, 22 nt, Human T-lymphotropic virus 1
gccccccuuuuccuugucaccu

SEQ ID NO: 2918816 - RNA, 10 nt, Human T-lymphotropic virus 1
aacugcccca

SEQ ID NO: 2918817 - RNA, 19 nt, Human T-lymphotropic virus 1
cuuguccagccugccaacu

SEQ ID NO: 2918818 - RNA, 15 nt, Human T-lymphotropic virus 1
cacaguuuccuccuc

SEQ ID NO: 2918819 - RNA, 15 nt, Human T-lymphotropic virus 1
ggauccaccucccag

SEQ ID NO: 2918820 - RNA, 22 nt, Human T-lymphotropic virus 1
cagacggcccucacacugcaag

SEQ ID NO: 2918821 - RNA, 22 nt, Human T-lymphotropic virus 1
ugcccaccacccuuuuccagcc

SEQ ID NO: 2918822 - RNA, 21 nt, Human T-lymphotropic virus 1
gcuuccucuucuccucagccc

SEQ ID NO: 2918823 - RNA, 22 nt, Human T-lymphotropic virus 1
augacaaugaccaugagcccca

SEQ ID NO: 2918824 - RNA, 19 nt, Human T-lymphotropic virus 1
ccucucaggcccccuuuca

SEQ ID NO: 2918825 - RNA, 17 nt, Human T-lymphotropic virus 1
cccuccuuccuccaggc

SEQ ID NO: 2918826 - RNA, 22 nt, Human T-lymphotropic virus 1
cgacuccccuccuuccccaccc

SEQ ID NO: 2918827 - RNA, 14 nt, Human T-lymphotropic virus 1
cucuuccugcuuuc

SEQ ID NO: 2918828 - RNA, 12 nt, Human T-lymphotropic virus 1
aguuuccuccuc

SEQ ID NO: 2918829 - RNA, 16 nt, Human T-lymphotropic virus 1
agaucaggcccuacag

SEQ ID NO: 2918830 - RNA, 18 nt, Human T-lymphotropic virus 1
acauggaugacauucucc

SEQ ID NO: 2918831 - RNA, 15 nt, Human T-lymphotropic virus 1
caucaccuggccccu

SEQ ID NO: 2918832 - RNA, 16 nt, Human T-lymphotropic virus 1
ucgccuccagccuccc

SEQ ID NO: 2918833 - RNA, 22 nt, Human T-lymphotropic virus 1
cacccgucacgcugacagccug

SEQ ID NO: 2918834 - RNA, 17 nt, Human T-lymphotropic virus 1
cccagccaacugccucc

SEQ ID NO: 2918835 - RNA, 21 nt, Human T-lymphotropic virus 1
cugcaauccugcccagccagu

SEQ ID NO: 2918836 - RNA, 16 nt, Human T-lymphotropic virus 1
ccaacaucuauucugc

SEQ ID NO: 2918837 - RNA, 16 nt, Human T-lymphotropic virus 1
uugggcagcaccuccc

SEQ ID NO: 2918838 - RNA, 12 nt, Human T-lymphotropic virus 1
ucgcuuccucuu

SEQ ID NO: 2918839 - RNA, 14 nt, Human T-lymphotropic virus 1
gcuugcucaacucu

SEQ ID NO: 2918840 - RNA, 16 nt, Human T-lymphotropic virus 1
cucggggccuuccuca

SEQ ID NO: 2918841 - RNA, 23 nt, Human T-lymphotropic virus 1
cuaccugaacuucaagcccuacu

SEQ ID NO: 2918842 - RNA, 20 nt, Human T-lymphotropic virus 1
uagaucucucaucaucuucc

SEQ ID NO: 2918843 - RNA, 20 nt, Human T-lymphotropic virus 1
ggccccccgaaaucagccag

SEQ ID NO: 2918844 - RNA, 20 nt, Human T-lymphotropic virus 1
cugacaaacccgaccuaccu

SEQ ID NO: 2918845 - RNA, 14 nt, Human T-lymphotropic virus 1
cacucauacaaccc

SEQ ID NO: 2918846 - RNA, 18 nt, Human T-lymphotropic virus 1
ccgggggcuuagagccuc

SEQ ID NO: 2918847 - RNA, 18 nt, Human T-lymphotropic virus 1
cucucaggcccccuuuca

SEQ ID NO: 2918848 - RNA, 17 nt, Human T-lymphotropic virus 1
ggcaagccuucccccaa

SEQ ID NO: 2918849 - RNA, 15 nt, Human T-lymphotropic virus 1
acacuagccagugcc

SEQ ID NO: 2918850 - RNA, 23 nt, Human T-lymphotropic virus 1
ggcagcaccucccaacccugucu

SEQ ID NO: 2918851 - RNA, 19 nt, Human T-lymphotropic virus 1
ucagcaauaaacaaaccca

SEQ ID NO: 2918852 - RNA, 16 nt, Human T-lymphotropic virus 1
accccuguccugcagc

SEQ ID NO: 2918853 - RNA, 16 nt, Human T-lymphotropic virus 1
uccuauacucucccaa

SEQ ID NO: 2918854 - RNA, 15 nt, Human T-lymphotropic virus 1
aucccaucuccaggc

SEQ ID NO: 2918855 - RNA, 12 nt, Human T-lymphotropic virus 1
ccacccaaaccu

SEQ ID NO: 2918856 - RNA, 20 nt, Human T-lymphotropic virus 1
gacaaaucauaagcucagac

SEQ ID NO: 2918857 - RNA, 22 nt, Human T-lymphotropic virus 1
aucccaaagaaaaagaccacca

SEQ ID NO: 2918858 - RNA, 14 nt, Human T-lymphotropic virus 1
aaacuccucuauaa

SEQ ID NO: 2918859 - RNA, 14 nt, Human T-lymphotropic virus 1
gcgccgugccuucu

SEQ ID NO: 2918860 - RNA, 11 nt, Human T-lymphotropic virus 1
ccgaaaacaaa

SEQ ID NO: 2918861 - RNA, 14 nt, Human T-lymphotropic virus 1
guccagagcaucag

SEQ ID NO: 2918862 - RNA, 16 nt, Human T-lymphotropic virus 1
acucagccggcucucc

SEQ ID NO: 2918863 - RNA, 23 nt, Human T-lymphotropic virus 1
ucccccuaccuaaacaguuccag

SEQ ID NO: 2918864 - RNA, 18 nt, Human T-lymphotropic virus 1
ccagccaacugccuccca

SEQ ID NO: 2918865 - RNA, 14 nt, Human T-lymphotropic virus 1
caagcucagaagcu

SEQ ID NO: 2918866 - RNA, 20 nt, Human T-lymphotropic virus 1
cugccccauuggcuccugug

SEQ ID NO: 2918867 - RNA, 16 nt, Human T-lymphotropic virus 1
cucuucaagaagcugc

SEQ ID NO: 2918868 - RNA, 14 nt, Human T-lymphotropic virus 1
agccgucuccagcc

SEQ ID NO: 2918869 - RNA, 16 nt, Human T-lymphotropic virus 1
gcagguccuccgggca

SEQ ID NO: 2918870 - RNA, 17 nt, Human T-lymphotropic virus 1
cagaggccacaauggcu

SEQ ID NO: 2918871 - RNA, 16 nt, Human T-lymphotropic virus 1
ccguggccuacucccu

SEQ ID NO: 2918872 - RNA, 13 nt, Human T-lymphotropic virus 1
cuccagccucccc

SEQ ID NO: 2918873 - RNA, 13 nt, Human T-lymphotropic virus 1
gcggcaggcccug

SEQ ID NO: 2918874 - RNA, 21 nt, Human T-lymphotropic virus 1
gugcagcugcggcaggcccug

SEQ ID NO: 2918875 - RNA, 16 nt, Human T-lymphotropic virus 1
uccuggcaagccccuc

SEQ ID NO: 2918876 - RNA, 19 nt, Human T-lymphotropic virus 1
cgcauacggcucaauaaaa

SEQ ID NO: 2918877 - RNA, 13 nt, Human T-lymphotropic virus 1
gcaccaccacugu

SEQ ID NO: 2918878 - RNA, 16 nt, Human T-lymphotropic virus 1
cuaucuuacuccacca

SEQ ID NO: 2918879 - RNA, 21 nt, Human T-lymphotropic virus 1
uggaucccguggaggcuccuc

SEQ ID NO: 2918880 - RNA, 22 nt, Human T-lymphotropic virus 1
uaauuaaccucucccaucaaau

SEQ ID NO: 2918881 - RNA, 21 nt, Human T-lymphotropic virus 1
cuuggccucucacagugggcu

SEQ ID NO: 2918882 - RNA, 19 nt, Human T-lymphotropic virus 1
ugcucaaaauugcacagua

SEQ ID NO: 2918883 - RNA, 15 nt, Human T-lymphotropic virus 1
gacuuguccagccug

SEQ ID NO: 2918884 - RNA, 16 nt, Human T-lymphotropic virus 1
cccuccuuccuccagg

SEQ ID NO: 2918885 - RNA, 23 nt, Human T-lymphotropic virus 1
gcuuccucuucuccucagcccgu

SEQ ID NO: 2918886 - RNA, 15 nt, Human T-lymphotropic virus 1
ucccucauccugccc

SEQ ID NO: 2918887 - RNA, 13 nt, Human T-lymphotropic virus 1
agacggcccucac

SEQ ID NO: 2918888 - RNA, 22 nt, Human T-lymphotropic virus 1
ccugcuggcccuuucagcagau

SEQ ID NO: 2918889 - RNA, 20 nt, Human T-lymphotropic virus 1
cccagccaacugccucccac

SEQ ID NO: 2918890 - RNA, 17 nt, Human T-lymphotropic virus 1
gcucuucaagaagcugc

SEQ ID NO: 2918891 - RNA, 23 nt, Human T-lymphotropic virus 1
cugccaauaauuaaccucuccca

SEQ ID NO: 2918892 - RNA, 16 nt, Human T-lymphotropic virus 1
cacaguuuccuccucc

SEQ ID NO: 2918893 - RNA, 15 nt, Human T-lymphotropic virus 1
cuggccaugggagcc

SEQ ID NO: 2918894 - RNA, 17 nt, Human T-lymphotropic virus 1
cacaucgccuccagccu

SEQ ID NO: 2918895 - RNA, 13 nt, Human T-lymphotropic virus 1
cccacuucccagg

SEQ ID NO: 2918896 - RNA, 17 nt, Human T-lymphotropic virus 1
uccuggcaagccccucc

SEQ ID NO: 2918897 - RNA, 20 nt, Human T-lymphotropic virus 1
ucauaaacaccgccccuugc

SEQ ID NO: 2918898 - RNA, 22 nt, Human T-lymphotropic virus 1
cgggccuuuguccggcgcuccc

SEQ ID NO: 2918899 - RNA, 22 nt, Human T-lymphotropic virus 1
gcuuuccccccuggagggcccc

SEQ ID NO: 2918900 - RNA, 22 nt, Human T-lymphotropic virus 1
aaaaugcgguuuuuccuucucc

SEQ ID NO: 2918901 - RNA, 16 nt, Human T-lymphotropic virus 1
uccacucaacccucac

SEQ ID NO: 2918902 - RNA, 19 nt, Human T-lymphotropic virus 1
ccaccaauuccuccaccag

SEQ ID NO: 2918903 - RNA, 12 nt, Human T-lymphotropic virus 1
cggaaggcccug

SEQ ID NO: 2918904 - RNA, 19 nt, Human T-lymphotropic virus 1
uagaacaccucccaaggcc

SEQ ID NO: 2918905 - RNA, 19 nt, Human T-lymphotropic virus 1
gcccuacuuugcuuucacu

SEQ ID NO: 2918906 - RNA, 20 nt, Human T-lymphotropic virus 1
ccucauacaguacucuuccu

SEQ ID NO: 2918907 - RNA, 20 nt, Human T-lymphotropic virus 1
aucaucuucccccgggcccc

SEQ ID NO: 2918908 - RNA, 16 nt, Human T-lymphotropic virus 1
ucaggcccuccugccc

SEQ ID NO: 2918909 - RNA, 15 nt, Human T-lymphotropic virus 1
aacccgaccuaccua

SEQ ID NO: 2918910 - RNA, 15 nt, Human T-lymphotropic virus 1
cagaucaccugggac

SEQ ID NO: 2918911 - RNA, 16 nt, Human T-lymphotropic virus 1
cccuacagccacccug

SEQ ID NO: 2918912 - RNA, 17 nt, Human T-lymphotropic virus 1
cggggccuuccucacca

SEQ ID NO: 2918913 - RNA, 13 nt, Human T-lymphotropic virus 1
agaguacuacccc

SEQ ID NO: 2918914 - RNA, 17 nt, Human T-lymphotropic virus 1
accaugcauccuccguc

SEQ ID NO: 2918915 - RNA, 20 nt, Human T-lymphotropic virus 1
cggaggacagcucagcacca

SEQ ID NO: 2918916 - RNA, 13 nt, Human T-lymphotropic virus 1
caacuacucucag

SEQ ID NO: 2918917 - RNA, 11 nt, Human T-lymphotropic virus 1
uccacccuccu

SEQ ID NO: 2918918 - RNA, 22 nt, Human T-lymphotropic virus 1
ccgcucuuuuuuucgcuuccuc

SEQ ID NO: 2918919 - RNA, 17 nt, Human T-lymphotropic virus 1
gggagccggaguggcug

SEQ ID NO: 2918920 - RNA, 22 nt, Human T-lymphotropic virus 1
cuugucuccgcccuggccaugg

SEQ ID NO: 2918921 - RNA, 15 nt, Human T-lymphotropic virus 1
ccucaagcgagcugc

SEQ ID NO: 2918922 - RNA, 12 nt, Human T-lymphotropic virus 1
ccuacagccacc

SEQ ID NO: 2918923 - RNA, 23 nt, Human T-lymphotropic virus 1
caugcuuauuaucagcccacuuc

SEQ ID NO: 2918924 - RNA, 23 nt, Human T-lymphotropic virus 1
cucauccucggugauuacagccc

SEQ ID NO: 2918925 - RNA, 20 nt, Human T-lymphotropic virus 1
aacucccucauccugccccc

SEQ ID NO: 2918926 - RNA, 13 nt, Human T-lymphotropic virus 1
uccuccuccuuua

SEQ ID NO: 2918927 - RNA, 18 nt, Human T-lymphotropic virus 1
uuccacucaacccucacc

SEQ ID NO: 2918928 - RNA, 14 nt, Human T-lymphotropic virus 1
cugcuuuuccuccu

SEQ ID NO: 2918929 - RNA, 13 nt, Human T-lymphotropic virus 1
ccucuucuccuca

SEQ ID NO: 2918930 - RNA, 12 nt, Human T-lymphotropic virus 1
gcccccucaucc

SEQ ID NO: 2918931 - RNA, 18 nt, Human T-lymphotropic virus 1
uuagcgcuuccagccccc

SEQ ID NO: 2918932 - RNA, 23 nt, Human T-lymphotropic virus 1
gucacaaagaucauucccccuuc

SEQ ID NO: 2918933 - RNA, 16 nt, Human T-lymphotropic virus 1
uuuccuccuccuccuu

SEQ ID NO: 2918934 - RNA, 18 nt, Human T-lymphotropic virus 1
aaacccugagucaucccu

SEQ ID NO: 2918935 - RNA, 16 nt, Human T-lymphotropic virus 1
gcagcuucaccacucc

SEQ ID NO: 2918936 - RNA, 22 nt, Human T-lymphotropic virus 1
agccggccgcggcuuuccucuu

SEQ ID NO: 2918937 - RNA, 13 nt, Human T-lymphotropic virus 1
cagccgaucccag

SEQ ID NO: 2918938 - RNA, 20 nt, Human T-lymphotropic virus 1
gcuaggaucccgcucccgcc

SEQ ID NO: 2918939 - RNA, 17 nt, Human T-lymphotropic virus 1
ucugcuuuuccuccucu

SEQ ID NO: 2918940 - RNA, 23 nt, Human T-lymphotropic virus 1
caagcuauagucuccucccccug

SEQ ID NO: 2918941 - RNA, 17 nt, Human T-lymphotropic virus 1
acggauccaccucccag

SEQ ID NO: 2918942 - RNA, 22 nt, Human T-lymphotropic virus 1
ggacccacugcuuugaccccca

SEQ ID NO: 2918943 - RNA, 15 nt, Human T-lymphotropic virus 1
uagacuaguccaaac

SEQ ID NO: 2918944 - RNA, 20 nt, Human T-lymphotropic virus 1
acauuacccauuucaaauau

SEQ ID NO: 2918945 - RNA, 13 nt, Human T-lymphotropic virus 1
gagagaccccccc

SEQ ID NO: 2918946 - RNA, 12 nt, Human T-lymphotropic virus 1
ucuccuccgccc

SEQ ID NO: 2918947 - RNA, 16 nt, Human T-lymphotropic virus 1
ugcucuuccugcuuuc

SEQ ID NO: 2918948 - RNA, 21 nt, Human T-lymphotropic virus 1
uagaucucucaucaucuuccc

SEQ ID NO: 2918949 - RNA, 19 nt, Human T-lymphotropic virus 1
cuuucagcagaucaggccc

SEQ ID NO: 2918950 - RNA, 17 nt, Human T-lymphotropic virus 1
aucugcuuuuccuccuc

SEQ ID NO: 2918951 - RNA, 18 nt, Human T-lymphotropic virus 1
cggcgcuccugcucuucc

SEQ ID NO: 2918952 - RNA, 18 nt, Human T-lymphotropic virus 1
auuacagcaaguccuucc

SEQ ID NO: 2918953 - RNA, 22 nt, Human T-lymphotropic virus 1
acaguuccuuaucccucgacuc

SEQ ID NO: 2918954 - RNA, 21 nt, Human T-lymphotropic virus 1
auccuucucaaguucaaucau

SEQ ID NO: 2918955 - RNA, 16 nt, Human T-lymphotropic virus 1
gcucaggcuaggcccu

SEQ ID NO: 2918956 - RNA, 18 nt, Human T-lymphotropic virus 1
cggacccuugcccuaggc

SEQ ID NO: 2918957 - RNA, 13 nt, Human T-lymphotropic virus 1
aguacucuuccuu

SEQ ID NO: 2918958 - RNA, 19 nt, Human T-lymphotropic virus 1
gagagacccccccuugaaa

SEQ ID NO: 2918959 - RNA, 19 nt, Human T-lymphotropic virus 1
cucuguuccauccccuucu

SEQ ID NO: 2918960 - RNA, 22 nt, Human T-lymphotropic virus 1
aaccaauucauucaaacaucug

SEQ ID NO: 2918961 - RNA, 21 nt, Human T-lymphotropic virus 1
cccuugcccuaggcaccuucc

SEQ ID NO: 2918962 - RNA, 20 nt, Human T-lymphotropic virus 1
ccuuuuuccaaaucccccua

SEQ ID NO: 2918963 - RNA, 12 nt, Human T-lymphotropic virus 1
uuuucuuaaaac

SEQ ID NO: 2918964 - RNA, 20 nt, Human T-lymphotropic virus 1
cggcucuccacgcuuugccu

SEQ ID NO: 2918965 - RNA, 19 nt, Human T-lymphotropic virus 1
cuccagccuccccugccaa

SEQ ID NO: 2918966 - RNA, 12 nt, Human T-lymphotropic virus 1
uccuuccuccag

SEQ ID NO: 2918967 - RNA, 16 nt, Human T-lymphotropic virus 1
cuguaaaccaagcaca

SEQ ID NO: 2918968 - RNA, 21 nt, Human T-lymphotropic virus 1
ccuuucauaauuugcaucucc

SEQ ID NO: 2918969 - RNA, 21 nt, Human T-lymphotropic virus 1
caacgucucuguuccaucccc

SEQ ID NO: 2918970 - RNA, 18 nt, Human T-lymphotropic virus 1
acaucgccuccagccucc

SEQ ID NO: 2918971 - RNA, 15 nt, Human T-lymphotropic virus 1
ccaccaacaccaugg

SEQ ID NO: 2918972 - RNA, 17 nt, Human T-lymphotropic virus 1
gccuaucuaggcaagcc

SEQ ID NO: 2918973 - RNA, 20 nt, Human T-lymphotropic virus 1
ucuggcuacaugccccccua

SEQ ID NO: 2918974 - RNA, 14 nt, Human T-lymphotropic virus 1
caccucccaaggcc

SEQ ID NO: 2918975 - RNA, 20 nt, Human T-lymphotropic virus 1
ucauccugccccccuuuucc

SEQ ID NO: 2918976 - RNA, 22 nt, Human T-lymphotropic virus 1
cccuucuagucgacgcuccagg

SEQ ID NO: 2918977 - RNA, 18 nt, Human T-lymphotropic virus 1
cccagcaaaccccuggaa

SEQ ID NO: 2918978 - RNA, 18 nt, Human T-lymphotropic virus 1
acuccccccgacuccagc

SEQ ID NO: 2918979 - RNA, 16 nt, Human T-lymphotropic virus 1
ccuccccucgcgcguc

SEQ ID NO: 2918980 - RNA, 15 nt, Human T-lymphotropic virus 1
cagggggccaaaccc

SEQ ID NO: 2918981 - RNA, 17 nt, Human T-lymphotropic virus 1
guaaguuuagagcucag

SEQ ID NO: 2918982 - RNA, 19 nt, Human T-lymphotropic virus 1
caaggacuccaccucgccu

SEQ ID NO: 2918983 - RNA, 19 nt, Human T-lymphotropic virus 1
ugccaacuacacuagccca

SEQ ID NO: 2918984 - RNA, 12 nt, Human T-lymphotropic virus 1
cucacagugggc

SEQ ID NO: 2918985 - RNA, 21 nt, Human T-lymphotropic virus 1
uccaccagcagguccuccggg

SEQ ID NO: 2918986 - RNA, 16 nt, Human T-lymphotropic virus 1
aaaaauuuaggugccc

SEQ ID NO: 2918987 - RNA, 18 nt, Human T-lymphotropic virus 1
cuuccaguucugcccccu

SEQ ID NO: 2918988 - RNA, 20 nt, Human T-lymphotropic virus 1
acacauucccucagcaauaa

SEQ ID NO: 2918989 - RNA, 19 nt, Human T-lymphotropic virus 1
cagacaauggcccugccua

SEQ ID NO: 2918990 - RNA, 14 nt, Human T-lymphotropic virus 1
cagccggcucucca

SEQ ID NO: 2918991 - RNA, 18 nt, Human T-lymphotropic virus 1
aagucagcggccuucucc

SEQ ID NO: 2918992 - RNA, 14 nt, Human T-lymphotropic virus 1
uccccccccaucac

SEQ ID NO: 2918993 - RNA, 20 nt, Human T-lymphotropic virus 1
agccuccaaggacuccaccu

SEQ ID NO: 2918994 - RNA, 20 nt, Human T-lymphotropic virus 1
auuuaacuggacccacugcu

SEQ ID NO: 2918995 - RNA, 12 nt, Human T-lymphotropic virus 1
gacccccccuug

SEQ ID NO: 2918996 - RNA, 20 nt, Human T-lymphotropic virus 1
caccgccccuccucuacucu

SEQ ID NO: 2918997 - RNA, 23 nt, Human T-lymphotropic virus 1
ccuugcuauucgccauacuaccc

SEQ ID NO: 2918998 - RNA, 17 nt, Human T-lymphotropic virus 1
aguguuuacucuuuccc

SEQ ID NO: 2918999 - RNA, 19 nt, Human T-lymphotropic virus 1
aaccacccauuuccucccc

SEQ ID NO: 2919000 - RNA, 19 nt, Human T-lymphotropic virus 1
uucaccuaaucaccucacu

SEQ ID NO: 2919001 - RNA, 21 nt, Human T-lymphotropic virus 1
cuaccuaaacaguuccagccc

SEQ ID NO: 2919002 - RNA, 22 nt, Human T-lymphotropic virus 1
cuccugcauuuuuucuuuccua

SEQ ID NO: 2919003 - RNA, 19 nt, Human T-lymphotropic virus 1
ugcaccacguucgcagcca

SEQ ID NO: 2919004 - RNA, 13 nt, Human T-lymphotropic virus 1
gauugacacccag

SEQ ID NO: 2919005 - RNA, 18 nt, Human T-lymphotropic virus 1
agguccucucaggccccc

SEQ ID NO: 2919006 - RNA, 17 nt, Human T-lymphotropic virus 1
ccgucggaggccccgcc

SEQ ID NO: 2919007 - RNA, 13 nt, Human T-lymphotropic virus 1
gccauacuaccca

SEQ ID NO: 2919008 - RNA, 13 nt, Human T-lymphotropic virus 1
uuuagagcucagg

SEQ ID NO: 2919009 - RNA, 16 nt, Human T-lymphotropic virus 1
ccgauggcagcuucac

SEQ ID NO: 2919010 - RNA, 17 nt, Human T-lymphotropic virus 1
uuaacuggacccacugc

SEQ ID NO: 2919011 - RNA, 22 nt, Human T-lymphotropic virus 1
cucauacaguacucuuccuuuc

SEQ ID NO: 2919012 - RNA, 15 nt, Human T-lymphotropic virus 1
aguacuuuacugaca

SEQ ID NO: 2919013 - RNA, 17 nt, Human T-lymphotropic virus 1
cuaccuagacucagccg

SEQ ID NO: 2919014 - RNA, 18 nt, Human T-lymphotropic virus 1
aucccucgacuccccucc

SEQ ID NO: 2919015 - RNA, 20 nt, Human T-lymphotropic virus 1
gcgcuccugcucuuccugcu

SEQ ID NO: 2919016 - RNA, 11 nt, Human T-lymphotropic virus 1
cgucaagcaca

SEQ ID NO: 2919017 - RNA, 19 nt, Human T-lymphotropic virus 1
cugcuuuuccuccucuuuc

SEQ ID NO: 2919018 - RNA, 16 nt, Human T-lymphotropic virus 1
uccuguaccucccuga

SEQ ID NO: 2919019 - RNA, 17 nt, Human T-lymphotropic virus 1
cgcggcuuuccucuucu

SEQ ID NO: 2919020 - RNA, 21 nt, Human T-lymphotropic virus 1
gugccccugggggcagcuacu

SEQ ID NO: 2919021 - RNA, 14 nt, Human T-lymphotropic virus 1
gagauucagugggu

SEQ ID NO: 2919022 - RNA, 19 nt, Human T-lymphotropic virus 1
gccaccgggaaccacccau

SEQ ID NO: 2919023 - RNA, 18 nt, Human T-lymphotropic virus 1
gucacagaacugccgcag

SEQ ID NO: 2919024 - RNA, 24 nt, Human T-lymphotropic virus 1
uuccuagggcaaauaauuucaccu

SEQ ID NO: 2919025 - RNA, 17 nt, Human T-lymphotropic virus 1
ccugcucuuccugcuuu

SEQ ID NO: 2919026 - RNA, 15 nt, Human T-lymphotropic virus 1
cacgcugacagccug

SEQ ID NO: 2919027 - RNA, 20 nt, Human T-lymphotropic virus 1
cgccccuccucuacucuccc

SEQ ID NO: 2919028 - RNA, 16 nt, Human T-lymphotropic virus 1
aucgccuccagccucc

SEQ ID NO: 2919029 - RNA, 15 nt, Human T-lymphotropic virus 1
ccaucaaauccuccu

SEQ ID NO: 2919030 - RNA, 13 nt, Human T-lymphotropic virus 1
uuaggugcccaga

SEQ ID NO: 2919031 - RNA, 19 nt, Human T-lymphotropic virus 1
gcccuaaagauggccagcc

SEQ ID NO: 2919032 - RNA, 16 nt, Human T-lymphotropic virus 1
acaucgccuccagccu

SEQ ID NO: 2919033 - RNA, 21 nt, Human T-lymphotropic virus 1
uguaucgaucgugccagccua

SEQ ID NO: 2919034 - RNA, 18 nt, Human T-lymphotropic virus 1
aaaaagaccaccaacacc

SEQ ID NO: 2919035 - RNA, 22 nt, Human T-lymphotropic virus 1
uuuucagacggauccaccuccc

SEQ ID NO: 2919036 - RNA, 20 nt, Human T-lymphotropic virus 1
uccccuccuuccccacccag

SEQ ID NO: 2919037 - RNA, 22 nt, Human T-lymphotropic virus 1
aguagacuaguccaaacccugc

SEQ ID NO: 2919038 - RNA, 15 nt, Human T-lymphotropic virus 1
ucauccugccccccu

SEQ ID NO: 2919039 - RNA, 21 nt, Human T-lymphotropic virus 1
gccgccuuaccugaggccgcc

SEQ ID NO: 2919040 - RNA, 18 nt, Human T-lymphotropic virus 1
ccacaucgccuccagccu

SEQ ID NO: 2919041 - RNA, 21 nt, Human T-lymphotropic virus 1
cccccugacuuguccagccug

SEQ ID NO: 2919042 - RNA, 13 nt, Human T-lymphotropic virus 1
cugcuggcccuuu

SEQ ID NO: 2919043 - RNA, 16 nt, Human T-lymphotropic virus 1
ucauccugccccccuu

SEQ ID NO: 2919044 - RNA, 21 nt, Human T-lymphotropic virus 1
ccacccuccuuccuccaggcc

SEQ ID NO: 2919045 - RNA, 11 nt, Human T-lymphotropic virus 1
auuccacccuc

SEQ ID NO: 2919046 - RNA, 23 nt, Human T-lymphotropic virus 1
aacgcucuaauggcauucuuaaa

SEQ ID NO: 2919047 - RNA, 15 nt, Human T-lymphotropic virus 1
caccccggccagcuc

SEQ ID NO: 2919048 - RNA, 15 nt, Human T-lymphotropic virus 1
cauauccugcagccc

SEQ ID NO: 2919049 - RNA, 21 nt, Human T-lymphotropic virus 1
uccaaacccugccccuccuag

SEQ ID NO: 2919050 - RNA, 16 nt, Human T-lymphotropic virus 1
ugcuguacucucacag

SEQ ID NO: 2919051 - RNA, 14 nt, Human T-lymphotropic virus 1
ccucuucuccucag

SEQ ID NO: 2919052 - RNA, 22 nt, Human T-lymphotropic virus 1
aucccccgggggcuuagagccu

SEQ ID NO: 2919053 - RNA, 12 nt, Human T-lymphotropic virus 1
ccaccucccagg

SEQ ID NO: 2919054 - RNA, 13 nt, Human T-lymphotropic virus 1
gcugcccagaaca

SEQ ID NO: 2919055 - RNA, 14 nt, Human T-lymphotropic virus 1
acccuuuuccagcc

SEQ ID NO: 2919056 - RNA, 18 nt, Human T-lymphotropic virus 1
cauguaccucuaccagcu

SEQ ID NO: 2919057 - RNA, 18 nt, Human T-lymphotropic virus 1
aacuccuaccuuacgcca

SEQ ID NO: 2919058 - RNA, 23 nt, Human T-lymphotropic virus 1
guuccuaucuuacuccaccacag

SEQ ID NO: 2919059 - RNA, 12 nt, Human T-lymphotropic virus 1
ccaccccagugu

SEQ ID NO: 2919060 - RNA, 22 nt, Human T-lymphotropic virus 1
auccgccguggccuacucccua

SEQ ID NO: 2919061 - RNA, 13 nt, Human T-lymphotropic virus 1
cgccuccaggccu

SEQ ID NO: 2919062 - RNA, 19 nt, Human T-lymphotropic virus 1
gaggacagcucagcaccag

SEQ ID NO: 2919063 - RNA, 18 nt, Human T-lymphotropic virus 1
uuaucccucgacuccccu

SEQ ID NO: 2919064 - RNA, 17 nt, Human T-lymphotropic virus 1
cuccucauaccacucua

SEQ ID NO: 2919065 - RNA, 19 nt, Human T-lymphotropic virus 1
uccagcuaccaugccaccu

SEQ ID NO: 2919066 - RNA, 23 nt, Human T-lymphotropic virus 1
cuagaccauauccucgagcccuc

SEQ ID NO: 2919067 - RNA, 22 nt, Human T-lymphotropic virus 1
cucagcaccagcucaggcuagg

SEQ ID NO: 2919068 - RNA, 13 nt, Human T-lymphotropic virus 1
ucaggagccaucu

SEQ ID NO: 2919069 - RNA, 12 nt, Human T-lymphotropic virus 1
uccaaacccugc

SEQ ID NO: 2919070 - RNA, 22 nt, Human T-lymphotropic virus 1
ccccuucuucuaccccccuccu

SEQ ID NO: 2919071 - RNA, 16 nt, Human T-lymphotropic virus 1
cggaggacagcucagc

SEQ ID NO: 2919072 - RNA, 18 nt, Human T-lymphotropic virus 1
gcacaguaugcugcccag

SEQ ID NO: 2919073 - RNA, 16 nt, Human T-lymphotropic virus 1
gcugggcgcuaccuga

SEQ ID NO: 2919074 - RNA, 11 nt, Human T-lymphotropic virus 1
aacucccucau

SEQ ID NO: 2919075 - RNA, 15 nt, Human T-lymphotropic virus 1
gcuaguucugcccag

SEQ ID NO: 2919076 - RNA, 18 nt, Human T-lymphotropic virus 1
cacccuugggcagcaccu

SEQ ID NO: 2919077 - RNA, 13 nt, Human T-lymphotropic virus 1
cccaucuccaggc

SEQ ID NO: 2919078 - RNA, 16 nt, Human T-lymphotropic virus 1
accuuggccucucaca

SEQ ID NO: 2919079 - RNA, 23 nt, Human T-lymphotropic virus 1
caccauggguaaguuucucgcca

SEQ ID NO: 2919080 - RNA, 20 nt, Human T-lymphotropic virus 1
ugcccuaggcaccuuccaag

SEQ ID NO: 2919081 - RNA, 22 nt, Human T-lymphotropic virus 1
ugcgcaaauacucccccuuccg

SEQ ID NO: 2919082 - RNA, 13 nt, Human T-lymphotropic virus 1
cgccuccagccuc

SEQ ID NO: 2919083 - RNA, 13 nt, Human T-lymphotropic virus 1
cgcuuccagcccc

SEQ ID NO: 2919084 - RNA, 18 nt, Human T-lymphotropic virus 1
ggaccuuggccucucaca

SEQ ID NO: 2919085 - RNA, 17 nt, Human T-lymphotropic virus 1
cucuguuccauccccuu

SEQ ID NO: 2919086 - RNA, 13 nt, Human T-lymphotropic virus 1
cuccugcucuucc

SEQ ID NO: 2919087 - RNA, 19 nt, Human T-lymphotropic virus 1
gaggcuauuauucagccuc

SEQ ID NO: 2919088 - RNA, 17 nt, Human T-lymphotropic virus 1
cgccgugccuucuccuc

SEQ ID NO: 2919089 - RNA, 17 nt, Human T-lymphotropic virus 1
caacaucuauucugcca

SEQ ID NO: 2919090 - RNA, 22 nt, Human T-lymphotropic virus 1
ucccaacgucucuguuccaucc

SEQ ID NO: 2919091 - RNA, 15 nt, Human T-lymphotropic virus 1
auuaaccaacugcca

SEQ ID NO: 2919092 - RNA, 13 nt, Human T-lymphotropic virus 1
uccagccugccaa

SEQ ID NO: 2919093 - RNA, 17 nt, Human T-lymphotropic virus 1
ugucgcgcuacuccuuc

SEQ ID NO: 2919094 - RNA, 23 nt, Human T-lymphotropic virus 1
ugcagcuggcccauauccugcag

SEQ ID NO: 2919095 - RNA, 14 nt, Human T-lymphotropic virus 1
gacucagccggcuc

SEQ ID NO: 2919096 - RNA, 16 nt, Human T-lymphotropic virus 1
acgaugcguuuccccg

SEQ ID NO: 2919097 - RNA, 11 nt, Human T-lymphotropic virus 1
ccaacugccac

SEQ ID NO: 2919098 - RNA, 16 nt, Human T-lymphotropic virus 1
aucugguuccuuaaua

SEQ ID NO: 2919099 - RNA, 15 nt, Human T-lymphotropic virus 1
aucccucgacucccc

SEQ ID NO: 2919100 - RNA, 17 nt, Human T-lymphotropic virus 1
cugacuuguccagccug

SEQ ID NO: 2919101 - RNA, 19 nt, Human T-lymphotropic virus 1
cgccuguggugccuccuga

SEQ ID NO: 2919102 - RNA, 20 nt, Human T-lymphotropic virus 1
cuugcccuaggcaccuucca

SEQ ID NO: 2919103 - RNA, 16 nt, Human T-lymphotropic virus 1
cuuguccuuuaacucu

SEQ ID NO: 2919104 - RNA, 18 nt, Human T-lymphotropic virus 1
acccugcaauccugccca

SEQ ID NO: 2919105 - RNA, 15 nt, Human T-lymphotropic virus 1
ccaccccggccagcu

SEQ ID NO: 2919106 - RNA, 12 nt, Human T-lymphotropic virus 1
ccugacuugucc

SEQ ID NO: 2919107 - RNA, 22 nt, Human T-lymphotropic virus 1
acugcaaggggcaaccacaacu

SEQ ID NO: 2919108 - RNA, 21 nt, Human T-lymphotropic virus 1
aucgucacgcccuacuggcca

SEQ ID NO: 2919109 - RNA, 21 nt, Human T-lymphotropic virus 1
cugcaacuacucucagaggcc

SEQ ID NO: 2919110 - RNA, 23 nt, Human T-lymphotropic virus 1
ugccaauaauuaaccucucccau

SEQ ID NO: 2919111 - RNA, 12 nt, Human T-lymphotropic virus 1
cuuuuccagccu

SEQ ID NO: 2919112 - RNA, 22 nt, Human T-lymphotropic virus 1
auccucggugauuacagcccca

SEQ ID NO: 2919113 - RNA, 20 nt, Human T-lymphotropic virus 1
agccauaccaaucuaccuga

SEQ ID NO: 2919114 - RNA, 12 nt, Human T-lymphotropic virus 1
aguaugcugccc

SEQ ID NO: 2919115 - RNA, 19 nt, Human T-lymphotropic virus 1
ccacccauuuccuccccau

SEQ ID NO: 2919116 - RNA, 16 nt, Human T-lymphotropic virus 1
cccuacuggccaccug

SEQ ID NO: 2919117 - RNA, 15 nt, Human T-lymphotropic virus 1
ucuacucucccacuc

SEQ ID NO: 2919118 - RNA, 15 nt, Human T-lymphotropic virus 1
caaaaagccaaaccg

SEQ ID NO: 2919119 - RNA, 13 nt, Human T-lymphotropic virus 1
accaugagcccca

SEQ ID NO: 2919120 - RNA, 23 nt, Human T-lymphotropic virus 1
accacuccccccgacuccagccg

SEQ ID NO: 2919121 - RNA, 15 nt, Human T-lymphotropic virus 1
ucagccuccaaggac

SEQ ID NO: 2919122 - RNA, 17 nt, Human T-lymphotropic virus 1
cuccaccucgccuucca

SEQ ID NO: 2919123 - RNA, 17 nt, Human T-lymphotropic virus 1
uccaaggacuccaccuc

SEQ ID NO: 2919124 - RNA, 19 nt, Human T-lymphotropic virus 1
gccgccuguaaucuugcca

SEQ ID NO: 2919125 - RNA, 19 nt, Human T-lymphotropic virus 1
acccuuaagguccuuaccc

SEQ ID NO: 2919126 - RNA, 17 nt, Human T-lymphotropic virus 1
acauuccacccuccuuc

SEQ ID NO: 2919127 - RNA, 13 nt, Human T-lymphotropic virus 1
uccaauauccugc

SEQ ID NO: 2919128 - RNA, 13 nt, Human T-lymphotropic virus 1
gcgcuccugcucu

SEQ ID NO: 2919129 - RNA, 13 nt, Human T-lymphotropic virus 1
cagccacccugcc

SEQ ID NO: 2919130 - RNA, 17 nt, Human T-lymphotropic virus 1
cgcccuacuggccaccu

SEQ ID NO: 2919131 - RNA, 23 nt, Human T-lymphotropic virus 1
ugaagaauacaccaacaucccca

SEQ ID NO: 2919132 - RNA, 21 nt, Human T-lymphotropic virus 1
aaaucauaagcucagaccucc

SEQ ID NO: 2919133 - RNA, 23 nt, Human T-lymphotropic virus 1
gaucaggcccuacagccacccug

SEQ ID NO: 2919134 - RNA, 22 nt, Human T-lymphotropic virus 1
ucagaagcuauuuccucuuugc

SEQ ID NO: 2919135 - RNA, 23 nt, Human T-lymphotropic virus 1
acccugcaauccugcccagccag

SEQ ID NO: 2919136 - RNA, 16 nt, Human T-lymphotropic virus 1
gcccauauccugcagc

SEQ ID NO: 2919137 - RNA, 22 nt, Human T-lymphotropic virus 1
agcaaccuccuccguucagccu

SEQ ID NO: 2919138 - RNA, 18 nt, Human T-lymphotropic virus 1
ucagcggccuucuccucc

SEQ ID NO: 2919139 - RNA, 16 nt, Human T-lymphotropic virus 1
gaacccacccuugggc

SEQ ID NO: 2919140 - RNA, 14 nt, Human T-lymphotropic virus 1
caccccggccagcu

SEQ ID NO: 2919141 - RNA, 19 nt, Human T-lymphotropic virus 1
cugucucaacauauuucua

SEQ ID NO: 2919142 - RNA, 19 nt, Human T-lymphotropic virus 1
uccugcagcucucuccugc

SEQ ID NO: 2919143 - RNA, 14 nt, Human T-lymphotropic virus 1
cuacaguccuccuc

SEQ ID NO: 2919144 - RNA, 21 nt, Human T-lymphotropic virus 1
cugccccccuuuuccuuguca

SEQ ID NO: 2919145 - RNA, 19 nt, Human T-lymphotropic virus 1
uuccucuucuccucagccc

SEQ ID NO: 2919146 - RNA, 14 nt, Human T-lymphotropic virus 1
auccaaccagcucc

SEQ ID NO: 2919147 - RNA, 12 nt, Human T-lymphotropic virus 1
uuuuugccaccc

SEQ ID NO: 2919148 - RNA, 19 nt, Human T-lymphotropic virus 1
cauacaguacucuuccuuu

SEQ ID NO: 2919149 - RNA, 22 nt, Human T-lymphotropic virus 1
cugcccuaaagauggccagcca

SEQ ID NO: 2919150 - RNA, 22 nt, Human T-lymphotropic virus 1
cuccuucuuguuauccuugcag

SEQ ID NO: 2919151 - RNA, 20 nt, Human T-lymphotropic virus 1
aucccguggaggcuccucaa

SEQ ID NO: 2919152 - RNA, 14 nt, Human T-lymphotropic virus 1
agccaucuuuagua

SEQ ID NO: 2919153 - RNA, 20 nt, Human T-lymphotropic virus 1
ucaagcacaguuuccuccuc

SEQ ID NO: 2919154 - RNA, 13 nt, Human T-lymphotropic virus 1
aucugaccacccc

SEQ ID NO: 2919155 - RNA, 19 nt, Human T-lymphotropic virus 1
agacccgucggaggccccg

SEQ ID NO: 2919156 - RNA, 13 nt, Human T-lymphotropic virus 1
caccgccccuccu

SEQ ID NO: 2919157 - RNA, 14 nt, Human T-lymphotropic virus 1
gauuuuauucuucc

SEQ ID NO: 2919158 - RNA, 12 nt, Human T-lymphotropic virus 1
caacauuccacc

SEQ ID NO: 2919159 - RNA, 22 nt, Human T-lymphotropic virus 1
cccgggggcuuagagccucuca

SEQ ID NO: 2919160 - RNA, 18 nt, Human T-lymphotropic virus 1
ccacucaacccucaccac

SEQ ID NO: 2919161 - RNA, 15 nt, Human T-lymphotropic virus 1
cugcaugcccaagac

SEQ ID NO: 2919162 - RNA, 18 nt, Human T-lymphotropic virus 1
ccugaucccaucuccagg

SEQ ID NO: 2919163 - RNA, 16 nt, Human T-lymphotropic virus 1
cacgcauacggcucaa

SEQ ID NO: 2919164 - RNA, 16 nt, Human T-lymphotropic virus 1
uaagcucaccucccuu

SEQ ID NO: 2919165 - RNA, 16 nt, Human T-lymphotropic virus 1
acuccugacucuuguc

SEQ ID NO: 2919166 - RNA, 19 nt, Human T-lymphotropic virus 1
cauaacucccucauccugc

SEQ ID NO: 2919167 - RNA, 19 nt, Human T-lymphotropic virus 1
ggagccuaccuagacucag

SEQ ID NO: 2919168 - RNA, 13 nt, Human T-lymphotropic virus 1
aucuauucccuca

SEQ ID NO: 2919169 - RNA, 19 nt, Human T-lymphotropic virus 1
cuaaacaguuccagcccua

SEQ ID NO: 2919170 - RNA, 20 nt, Human T-lymphotropic virus 1
ucuagucgacgcuccaggau

SEQ ID NO: 2919171 - RNA, 12 nt, Human T-lymphotropic virus 1
auuacagcccca

SEQ ID NO: 2919172 - RNA, 18 nt, Human T-lymphotropic virus 1
ccaccuguccagagcauc

SEQ ID NO: 2919173 - RNA, 20 nt, Human T-lymphotropic virus 1
cuagacucagccggcucucc

SEQ ID NO: 2919174 - RNA, 17 nt, Human T-lymphotropic virus 1
uuaugcugacccucacu

SEQ ID NO: 2919175 - RNA, 18 nt, Human T-lymphotropic virus 1
cuugucuccgcccuggcc

SEQ ID NO: 2919176 - RNA, 17 nt, Human T-lymphotropic virus 1
cccuaauaauucuaccc

SEQ ID NO: 2919177 - RNA, 21 nt, Human T-lymphotropic virus 1
cugccaacuacacuagcccac

SEQ ID NO: 2919178 - RNA, 24 nt, Human T-lymphotropic virus 1
cacccuccuuccuccaggccaugc

SEQ ID NO: 2919179 - RNA, 14 nt, Human T-lymphotropic virus 1
ugccccuccuaggg

SEQ ID NO: 2919180 - RNA, 19 nt, Human T-lymphotropic virus 1
aggcccuacagccacccug

SEQ ID NO: 2919181 - RNA, 14 nt, Human T-lymphotropic virus 1
ccuugaucuccugu

SEQ ID NO: 2919182 - RNA, 23 nt, Human T-lymphotropic virus 1
guuuucagacggauccaccuccc

SEQ ID NO: 2919183 - RNA, 22 nt, Human T-lymphotropic virus 1
caccagcucaggcuaggcccug

SEQ ID NO: 2919184 - RNA, 17 nt, Human T-lymphotropic virus 1
uucagacggauccaccu

SEQ ID NO: 2919185 - RNA, 17 nt, Human T-lymphotropic virus 1
cccguggaggcuccuca

SEQ ID NO: 2919186 - RNA, 16 nt, Human T-lymphotropic virus 1
ugaucccaucuccagg

SEQ ID NO: 2919187 - RNA, 23 nt, Human T-lymphotropic virus 1
cuauggacuacucugccaaacca

SEQ ID NO: 2919188 - RNA, 18 nt, Human T-lymphotropic virus 1
gauuacagccccagcugc

SEQ ID NO: 2919189 - RNA, 17 nt, Human T-lymphotropic virus 1
ugcauccuccgucagcu

SEQ ID NO: 2919190 - RNA, 11 nt, Human T-lymphotropic virus 1
cgccuccagcc

SEQ ID NO: 2919191 - RNA, 17 nt, Human T-lymphotropic virus 1
uccuugucaccuguucc

SEQ ID NO: 2919192 - RNA, 23 nt, Human T-lymphotropic virus 1
uccuucacgcgcccgccgccuua

SEQ ID NO: 2919193 - RNA, 13 nt, Human T-lymphotropic virus 1
aggcuaggcccug

SEQ ID NO: 2919194 - RNA, 21 nt, Human T-lymphotropic virus 1
cauugccuaucuaggcaagcc

SEQ ID NO: 2919195 - RNA, 18 nt, Human T-lymphotropic virus 1
ccaaaucccccuaccuaa

SEQ ID NO: 2919196 - RNA, 21 nt, Human T-lymphotropic virus 1
cagccuccaaggacuccaccu

SEQ ID NO: 2919197 - RNA, 14 nt, Human T-lymphotropic virus 1
uaagcucagaccuc

SEQ ID NO: 2919198 - RNA, 14 nt, Human T-lymphotropic virus 1
acccuccuuccucc

SEQ ID NO: 2919199 - RNA, 14 nt, Human T-lymphotropic virus 1
ucaccucccuuccu

SEQ ID NO: 2919200 - RNA, 19 nt, Human T-lymphotropic virus 1
gaacccuacaccgggccag

SEQ ID NO: 2919201 - RNA, 18 nt, Human T-lymphotropic virus 1
gccucccgccuguggugc

SEQ ID NO: 2919202 - RNA, 23 nt, Human T-lymphotropic virus 1
cagaucaggcccuacagccaccc

SEQ ID NO: 2919203 - RNA, 23 nt, Human T-lymphotropic virus 1
cuguccugcagcucucuccugca

SEQ ID NO: 2919204 - RNA, 13 nt, Human T-lymphotropic virus 1
caaggacacaucc

SEQ ID NO: 2919205 - RNA, 16 nt, Human T-lymphotropic virus 1
gccagugccccugggg

SEQ ID NO: 2919206 - RNA, 15 nt, Human T-lymphotropic virus 1
ucuccauuuuucaaa

SEQ ID NO: 2919207 - RNA, 20 nt, Human T-lymphotropic virus 1
cagaacgccuccaggccuug

SEQ ID NO: 2919208 - RNA, 19 nt, Human T-lymphotropic virus 1
cuaugcuguuucgccuucu

SEQ ID NO: 2919209 - RNA, 18 nt, Human T-lymphotropic virus 1
gggcuagaacaccuccca

SEQ ID NO: 2919210 - RNA, 12 nt, Human T-lymphotropic virus 1
acugccucccac

SEQ ID NO: 2919211 - RNA, 12 nt, Human T-lymphotropic virus 1
uaggugcccaga

SEQ ID NO: 2919212 - RNA, 19 nt, Human T-lymphotropic virus 1
accagaacgccuccaggcc

SEQ ID NO: 2919213 - RNA, 19 nt, Human T-lymphotropic virus 1
cuaucuaggcaagccuagc

SEQ ID NO: 2919214 - RNA, 19 nt, Human T-lymphotropic virus 1
acaaccccucaccucaaaa

SEQ ID NO: 2919215 - RNA, 16 nt, Human T-lymphotropic virus 1
cuccccucaaaaacac

SEQ ID NO: 2919216 - RNA, 23 nt, Human T-lymphotropic virus 1
aguguuccuaucuuacuccacca

SEQ ID NO: 2919217 - RNA, 15 nt, Human T-lymphotropic virus 1
gccuucucagccccu

SEQ ID NO: 2919218 - RNA, 15 nt, Human T-lymphotropic virus 1
caggcccuccugccc

SEQ ID NO: 2919219 - RNA, 17 nt, Human T-lymphotropic virus 1
aggcaccuuccaaggca

SEQ ID NO: 2919220 - RNA, 23 nt, Human T-lymphotropic virus 1
gacccuuguuccuuaaaaugccc

SEQ ID NO: 2919221 - RNA, 14 nt, Human T-lymphotropic virus 1
ccgcggcuuuccuc

SEQ ID NO: 2919222 - RNA, 14 nt, Human T-lymphotropic virus 1
aaguuacuccagcu

SEQ ID NO: 2919223 - RNA, 19 nt, Human T-lymphotropic virus 1
acacuuuucuuaaaacaac

SEQ ID NO: 2919224 - RNA, 14 nt, Human T-lymphotropic virus 1
cucucacagugggc

SEQ ID NO: 2919225 - RNA, 19 nt, Human T-lymphotropic virus 1
uacaugccccccuacccca

SEQ ID NO: 2919226 - RNA, 21 nt, Human T-lymphotropic virus 1
cucccuaaccacaucuggcaa

SEQ ID NO: 2919227 - RNA, 19 nt, Human T-lymphotropic virus 1
cuuccucuucuccucagcc

SEQ ID NO: 2919228 - RNA, 12 nt, Human T-lymphotropic virus 1
uagacucagccg

SEQ ID NO: 2919229 - RNA, 15 nt, Human T-lymphotropic virus 1
gcggcuuuccucuuc

SEQ ID NO: 2919230 - RNA, 22 nt, Human T-lymphotropic virus 1
uucuccugcagcaaccuccucc

SEQ ID NO: 2919231 - RNA, 22 nt, Human T-lymphotropic virus 1
agccgucuccagccccuacugg

SEQ ID NO: 2919232 - RNA, 15 nt, Human T-lymphotropic virus 1
ccuccuucuccugca

SEQ ID NO: 2919233 - RNA, 13 nt, Human T-lymphotropic virus 1
cgaaacagcccua

SEQ ID NO: 2919234 - RNA, 15 nt, Human T-lymphotropic virus 1
ucaggcccccuuuca

SEQ ID NO: 2919235 - RNA, 18 nt, Human T-lymphotropic virus 1
cgaggccuugaucuccug

SEQ ID NO: 2919236 - RNA, 18 nt, Human T-lymphotropic virus 1
acccucaccacuccaggc

SEQ ID NO: 2919237 - RNA, 20 nt, Human T-lymphotropic virus 1
uccaaggacuccaccucgcc

SEQ ID NO: 2919238 - RNA, 18 nt, Human T-lymphotropic virus 1
acgccuuuuuccaaaucc

SEQ ID NO: 2919239 - RNA, 15 nt, Human T-lymphotropic virus 1
cccagagacacauuc

SEQ ID NO: 2919240 - RNA, 13 nt, Human T-lymphotropic virus 1
ccucuacucuccc

SEQ ID NO: 2919241 - RNA, 23 nt, Human T-lymphotropic virus 1
cauccucggugauuacagcccca

SEQ ID NO: 2919242 - RNA, 11 nt, Human T-lymphotropic virus 1
gucuccucccc

SEQ ID NO: 2919243 - RNA, 14 nt, Human T-lymphotropic virus 1
aacgccuccaggcc

SEQ ID NO: 2919244 - RNA, 22 nt, Human T-lymphotropic virus 1
caacauuccacccuccuuccuc

SEQ ID NO: 2919245 - RNA, 17 nt, Human T-lymphotropic virus 1
aacucuuccuccaagga

SEQ ID NO: 2919246 - RNA, 21 nt, Human T-lymphotropic virus 1
ccagaacagacgaggccuuga

SEQ ID NO: 2919247 - RNA, 22 nt, Human T-lymphotropic virus 1
caaggcguccuguaccucccug

SEQ ID NO: 2919248 - RNA, 16 nt, Human T-lymphotropic virus 1
cauggccucuccagcg

SEQ ID NO: 2919249 - RNA, 23 nt, Human T-lymphotropic virus 1
agcaaccuccuccguucagccuc

SEQ ID NO: 2919250 - RNA, 19 nt, Human T-lymphotropic virus 1
ggcccagaauaaggcucug

SEQ ID NO: 2919251 - RNA, 21 nt, Human T-lymphotropic virus 1
cugccccauuggcuccuguga

SEQ ID NO: 2919252 - RNA, 17 nt, Human T-lymphotropic virus 1
uaauaccgaacccagcc

SEQ ID NO: 2919253 - RNA, 16 nt, Human T-lymphotropic virus 1
ugacuuguccagccug

SEQ ID NO: 2919254 - RNA, 13 nt, Human T-lymphotropic virus 1
cugccgccucccg

SEQ ID NO: 2919255 - RNA, 18 nt, Human T-lymphotropic virus 1
cacaguaugcugcccaga

SEQ ID NO: 2919256 - RNA, 15 nt, Human T-lymphotropic virus 1
aggcgacauuaccca

SEQ ID NO: 2919257 - RNA, 14 nt, Human T-lymphotropic virus 1
cuccuucuccugca

SEQ ID NO: 2919258 - RNA, 13 nt, Human T-lymphotropic virus 1
cuauacucuccca

SEQ ID NO: 2919259 - RNA, 23 nt, Human T-lymphotropic virus 1
cccaacccugucuuuuccagacc

SEQ ID NO: 2919260 - RNA, 20 nt, Human T-lymphotropic virus 1
guccaccaauuccuccacca

SEQ ID NO: 2919261 - RNA, 13 nt, Human T-lymphotropic virus 1
agccccccaccug

SEQ ID NO: 2919262 - RNA, 19 nt, Human T-lymphotropic virus 1
ucaagcacaguuuccuccu

SEQ ID NO: 2919263 - RNA, 14 nt, Human T-lymphotropic virus 1
aucagccaguuccc

SEQ ID NO: 2919264 - RNA, 14 nt, Human T-lymphotropic virus 1
uggccucuccagcg

SEQ ID NO: 2919265 - RNA, 17 nt, Human T-lymphotropic virus 1
ccuaucuuacuccacca

SEQ ID NO: 2919266 - RNA, 19 nt, Human T-lymphotropic virus 1
cuuuucuuaaaacaacugc

SEQ ID NO: 2919267 - RNA, 13 nt, Human T-lymphotropic virus 1
ccccaacauucca

SEQ ID NO: 2919268 - RNA, 15 nt, Human T-lymphotropic virus 1
uagaacaccucccaa

SEQ ID NO: 2919269 - RNA, 18 nt, Human T-lymphotropic virus 1
gcccauauccugcagccc

SEQ ID NO: 2919270 - RNA, 19 nt, Human T-lymphotropic virus 1
cacugugguguuccagucc

SEQ ID NO: 2919271 - RNA, 16 nt, Human T-lymphotropic virus 1
aagucagcggccuucu

SEQ ID NO: 2919272 - RNA, 19 nt, Human T-lymphotropic virus 1
agcucagcaccagcucagg

SEQ ID NO: 2919273 - RNA, 19 nt, Human T-lymphotropic virus 1
cagagacacauucccucag

SEQ ID NO: 2919274 - RNA, 19 nt, Human T-lymphotropic virus 1
aucaggcccuacagccacc

SEQ ID NO: 2919275 - RNA, 23 nt, Human T-lymphotropic virus 1
uacaggagccgucuccagccccu

SEQ ID NO: 2919276 - RNA, 21 nt, Human T-lymphotropic virus 1
ggggacuauguucggcccgcc

SEQ ID NO: 2919277 - RNA, 18 nt, Human T-lymphotropic virus 1
gcucagaagcuauuuccu

SEQ ID NO: 2919278 - RNA, 16 nt, Human T-lymphotropic virus 1
gcccgccgccuuaccu

SEQ ID NO: 2919279 - RNA, 19 nt, Human T-lymphotropic virus 1
accucaauauuaaucucca

SEQ ID NO: 2919280 - RNA, 18 nt, Human T-lymphotropic virus 1
cccuccucuacucuccca

SEQ ID NO: 2919281 - RNA, 21 nt, Human T-lymphotropic virus 1
ccugcccuaaagauggccagc

SEQ ID NO: 2919282 - RNA, 13 nt, Human T-lymphotropic virus 1
cucagccggcucu

SEQ ID NO: 2919283 - RNA, 14 nt, Human T-lymphotropic virus 1
ccuuccgccaccgc

SEQ ID NO: 2919284 - RNA, 15 nt, Human T-lymphotropic virus 1
uggaggcuccucaag

SEQ ID NO: 2919285 - RNA, 21 nt, Human T-lymphotropic virus 1
accugaucccaucuccaggcu

SEQ ID NO: 2919286 - RNA, 16 nt, Human T-lymphotropic virus 1
uccucuacucucccac

SEQ ID NO: 2919287 - RNA, 11 nt, Human T-lymphotropic virus 1
caucucuccuu

SEQ ID NO: 2919288 - RNA, 14 nt, Human T-lymphotropic virus 1
cgccuucucagccc

SEQ ID NO: 2919289 - RNA, 16 nt, Human T-lymphotropic virus 1
uacgccagccccuuca

SEQ ID NO: 2919290 - RNA, 21 nt, Human T-lymphotropic virus 1
gccucccaccgccccuccucu

SEQ ID NO: 2919291 - RNA, 19 nt, Human T-lymphotropic virus 1
uuauugcaaccacaucgcc

SEQ ID NO: 2919292 - RNA, 13 nt, Human T-lymphotropic virus 1
caugcccaagacc

SEQ ID NO: 2919293 - RNA, 15 nt, Human T-lymphotropic virus 1
gacaccuccccucgc

SEQ ID NO: 2919294 - RNA, 21 nt, Human T-lymphotropic virus 1
ucgccucaggaaagagccucc

SEQ ID NO: 2919295 - RNA, 18 nt, Human T-lymphotropic virus 1
aggcucaacgcucucaca

SEQ ID NO: 2919296 - RNA, 21 nt, Human T-lymphotropic virus 1
uuccaguucugcccccucauc

SEQ ID NO: 2919297 - RNA, 19 nt, Human T-lymphotropic virus 1
caugggagccggaguggcu

SEQ ID NO: 2919298 - RNA, 16 nt, Human T-lymphotropic virus 1
cagcuucaccacuccc

SEQ ID NO: 2919299 - RNA, 14 nt, Human T-lymphotropic virus 1
aucaaauccuccuu

SEQ ID NO: 2919300 - RNA, 16 nt, Human T-lymphotropic virus 1
ccucuuugcuccaggc

SEQ ID NO: 2919301 - RNA, 16 nt, Human T-lymphotropic virus 1
acaacugaggccucca

SEQ ID NO: 2919302 - RNA, 22 nt, Human T-lymphotropic virus 1
gcaauagucaaaaaccacaaaa

SEQ ID NO: 2919303 - RNA, 12 nt, Human T-lymphotropic virus 1
cucuacaguucc

SEQ ID NO: 2919304 - RNA, 20 nt, Human T-lymphotropic virus 1
uugucacaaagaucauuccc

SEQ ID NO: 2919305 - RNA, 23 nt, Human T-lymphotropic virus 1
cuaaacccugcaauccugcccag

SEQ ID NO: 2919306 - RNA, 22 nt, Human T-lymphotropic virus 1
gucuccaaaggaacuccuaccu

SEQ ID NO: 2919307 - RNA, 17 nt, Human T-lymphotropic virus 1
aucaccuggccccuccu

SEQ ID NO: 2919308 - RNA, 22 nt, Human T-lymphotropic virus 1
gaucaggcccuacagccacccu

SEQ ID NO: 2919309 - RNA, 19 nt, Human T-lymphotropic virus 1
ccacaucgccuccagccuc

SEQ ID NO: 2919310 - RNA, 16 nt, Human T-lymphotropic virus 1
auuacagccccagcug

SEQ ID NO: 2919311 - RNA, 14 nt, Human T-lymphotropic virus 1
acucucccacucua

SEQ ID NO: 2919312 - RNA, 17 nt, Human T-lymphotropic virus 1
gacucagccggcucucc

SEQ ID NO: 2919313 - RNA, 17 nt, Human T-lymphotropic virus 1
ccuauggacuacucugc

SEQ ID NO: 2919314 - RNA, 12 nt, Human T-lymphotropic virus 1
cagcggccuucu

SEQ ID NO: 2919315 - RNA, 21 nt, Human T-lymphotropic virus 1
caggcccccuuucaggcccuc

SEQ ID NO: 2919316 - RNA, 19 nt, Human T-lymphotropic virus 1
aggcagguccucucaggcc

SEQ ID NO: 2919317 - RNA, 13 nt, Human T-lymphotropic virus 1
ucgcaucucuccu

SEQ ID NO: 2919318 - RNA, 17 nt, Human T-lymphotropic virus 1
ccuguccugcagcucuc

SEQ ID NO: 2919319 - RNA, 14 nt, Human T-lymphotropic virus 1
cuggccccuccugc

SEQ ID NO: 2919320 - RNA, 19 nt, Human T-lymphotropic virus 1
gcucaggcuaggcccugac

SEQ ID NO: 2919321 - RNA, 18 nt, Human T-lymphotropic virus 1
ucagcuacgacaccuccc

SEQ ID NO: 2919322 - RNA, 13 nt, Human T-lymphotropic virus 1
ccuuccuccaggc

SEQ ID NO: 2919323 - RNA, 22 nt, Human T-lymphotropic virus 1
cuucacagucucuacugugccu

SEQ ID NO: 2919324 - RNA, 21 nt, Human T-lymphotropic virus 1
ucgaccugcuggcccuuucag

SEQ ID NO: 2919325 - RNA, 19 nt, Human T-lymphotropic virus 1
caauccaaccagcuccgga

SEQ ID NO: 2919326 - RNA, 19 nt, Human T-lymphotropic virus 1
aacccugcaauccugccca

SEQ ID NO: 2919327 - RNA, 17 nt, Human T-lymphotropic virus 1
uccaaacccugccccuc

SEQ ID NO: 2919328 - RNA, 14 nt, Human T-lymphotropic virus 1
cagacggcccucac

SEQ ID NO: 2919329 - RNA, 18 nt, Human T-lymphotropic virus 1
cgcucuugccacgccugc

SEQ ID NO: 2919330 - RNA, 16 nt, Human T-lymphotropic virus 1
caguaugcugcccaga

SEQ ID NO: 2919331 - RNA, 16 nt, Human T-lymphotropic virus 1
cuagacucagccggcu

SEQ ID NO: 2919332 - RNA, 20 nt, Human T-lymphotropic virus 1
ccuaccuuacgccagccccu

SEQ ID NO: 2919333 - RNA, 14 nt, Human T-lymphotropic virus 1
cagaacgccuccag

SEQ ID NO: 2919334 - RNA, 18 nt, Human T-lymphotropic virus 1
acuccaccucgccuucca

SEQ ID NO: 2919335 - RNA, 13 nt, Human T-lymphotropic virus 1
ccccuccuucccc

SEQ ID NO: 2919336 - RNA, 13 nt, Human T-lymphotropic virus 1
cuccuuccuccag

SEQ ID NO: 2919337 - RNA, 20 nt, Human T-lymphotropic virus 1
cacuccccccgacuccagcc

SEQ ID NO: 2919338 - RNA, 12 nt, Human T-lymphotropic virus 1
cuggcaccacca

SEQ ID NO: 2919339 - RNA, 18 nt, Human T-lymphotropic virus 1
uaaacccugcaauccugc

SEQ ID NO: 2919340 - RNA, 16 nt, Human T-lymphotropic virus 1
acaauccaaccagcuc

SEQ ID NO: 2919341 - RNA, 13 nt, Human T-lymphotropic virus 1
gcaguccccaagg

SEQ ID NO: 2919342 - RNA, 13 nt, Human T-lymphotropic virus 1
ggccucuccagcg

SEQ ID NO: 2919343 - RNA, 19 nt, Human T-lymphotropic virus 1
acccugucuuuuccagacc

SEQ ID NO: 2919344 - RNA, 12 nt, Human T-lymphotropic virus 1
accaaaaacaac

SEQ ID NO: 2919345 - RNA, 13 nt, Human T-lymphotropic virus 1
cccagaccagcca

SEQ ID NO: 2919346 - RNA, 16 nt, Human T-lymphotropic virus 1
ccauacuacccauguc

SEQ ID NO: 2919347 - RNA, 18 nt, Human T-lymphotropic virus 1
gcuccugcucuuccugcu

SEQ ID NO: 2919348 - RNA, 17 nt, Human T-lymphotropic virus 1
gccagcuguccuugggc

SEQ ID NO: 2919349 - RNA, 15 nt, Human T-lymphotropic virus 1
ccaccaauuccucca

SEQ ID NO: 2919350 - RNA, 15 nt, Human T-lymphotropic virus 1
gacgucuccccccgg

SEQ ID NO: 2919351 - RNA, 15 nt, Human T-lymphotropic virus 1
uccaccaauuccucc

SEQ ID NO: 2919352 - RNA, 14 nt, Human T-lymphotropic virus 1
caccucgccuucca

SEQ ID NO: 2919353 - RNA, 14 nt, Human T-lymphotropic virus 1
ccgucuccagcccc

SEQ ID NO: 2919354 - RNA, 16 nt, Human T-lymphotropic virus 1
gucuauuugcaccacg

SEQ ID NO: 2919355 - RNA, 23 nt, Human T-lymphotropic virus 1
ccucucccaucaaauccuccuuc

SEQ ID NO: 2919356 - RNA, 15 nt, Human T-lymphotropic virus 1
acaaagauauuuccc

SEQ ID NO: 2919357 - RNA, 21 nt, Human T-lymphotropic virus 1
cagccugcuagggcacccguc

SEQ ID NO: 2919358 - RNA, 17 nt, Human T-lymphotropic virus 1
ucauggaccugccccua

SEQ ID NO: 2919359 - RNA, 14 nt, Human T-lymphotropic virus 1
caaggcagguccuc

SEQ ID NO: 2919360 - RNA, 19 nt, Human T-lymphotropic virus 1
caucauaacaucuccaccc

SEQ ID NO: 2919361 - RNA, 12 nt, Human T-lymphotropic virus 1
ugccccccuacc

SEQ ID NO: 2919362 - RNA, 17 nt, Human T-lymphotropic virus 1
acucccucauccugccc

SEQ ID NO: 2919363 - RNA, 16 nt, Human T-lymphotropic virus 1
aucuccacccaaaccu

SEQ ID NO: 2919364 - RNA, 13 nt, Human T-lymphotropic virus 1
gaccaugcauccu

SEQ ID NO: 2919365 - RNA, 13 nt, Human T-lymphotropic virus 1
ccugccccccuuu

SEQ ID NO: 2919366 - RNA, 23 nt, Human T-lymphotropic virus 1
ugccuuacaacaaugccaaggcg

SEQ ID NO: 2919367 - RNA, 20 nt, Human T-lymphotropic virus 1
uggcccauauccugcagccc

SEQ ID NO: 2919368 - RNA, 16 nt, Human T-lymphotropic virus 1
gugaucauaaacaccg

SEQ ID NO: 2919369 - RNA, 19 nt, Human T-lymphotropic virus 1
acggcccucacacugcaag

SEQ ID NO: 2919370 - RNA, 21 nt, Human T-lymphotropic virus 1
agggggccaaacccaagauca

SEQ ID NO: 2919371 - RNA, 18 nt, Human T-lymphotropic virus 1
aucugcuuuuccuccucu

SEQ ID NO: 2919372 - RNA, 14 nt, Human T-lymphotropic virus 1
cccaacuccugcau

SEQ ID NO: 2919373 - RNA, 19 nt, Human T-lymphotropic virus 1
ggccuccuuccguuccacu

SEQ ID NO: 2919374 - RNA, 16 nt, Human T-lymphotropic virus 1
gagccuaccuagacuc

SEQ ID NO: 2919375 - RNA, 16 nt, Human T-lymphotropic virus 1
ccuaaccaagacccaa

SEQ ID NO: 2919376 - RNA, 18 nt, Human T-lymphotropic virus 1
acgcuuugccugacccug

SEQ ID NO: 2919377 - RNA, 20 nt, Human T-lymphotropic virus 1
aaucauggaccugccccuau

SEQ ID NO: 2919378 - RNA, 20 nt, Human T-lymphotropic virus 1
aauacaggcgccagcugucc

SEQ ID NO: 2919379 - RNA, 12 nt, Human T-lymphotropic virus 1
cauucuccuggc

SEQ ID NO: 2919380 - RNA, 12 nt, Human T-lymphotropic virus 1
uacucccccuuc

SEQ ID NO: 2919381 - RNA, 20 nt, Human T-lymphotropic virus 1
cgcucccuuggagccuaccu

SEQ ID NO: 2919382 - RNA, 15 nt, Human T-lymphotropic virus 1
augucaauuuuacuc

SEQ ID NO: 2919383 - RNA, 14 nt, Human T-lymphotropic virus 1
uccuucucccuucu

SEQ ID NO: 2919384 - RNA, 14 nt, Human T-lymphotropic virus 1
uccagccuccccug

SEQ ID NO: 2919385 - RNA, 23 nt, Human T-lymphotropic virus 1
uucuccuccgcccgcuuccugcg

SEQ ID NO: 2919386 - RNA, 14 nt, Human T-lymphotropic virus 1
gacccuugcccuag

SEQ ID NO: 2919387 - RNA, 14 nt, Human T-lymphotropic virus 1
gaacuccuaccuua

SEQ ID NO: 2919388 - RNA, 14 nt, Human T-lymphotropic virus 1
caggagccaucuca

SEQ ID NO: 2919389 - RNA, 20 nt, Human T-lymphotropic virus 1
agucuccucccccugucaua

SEQ ID NO: 2919390 - RNA, 17 nt, Human T-lymphotropic virus 1
caaaaacaacugggcca

SEQ ID NO: 2919391 - RNA, 13 nt, Human T-lymphotropic virus 1
gcugacagccugg

SEQ ID NO: 2919392 - RNA, 17 nt, Human T-lymphotropic virus 1
cugcagcaaccuccucc

SEQ ID NO: 2919393 - RNA, 20 nt, Human T-lymphotropic virus 1
ccggcuccaugucccucgcc

SEQ ID NO: 2919394 - RNA, 22 nt, Human T-lymphotropic virus 1
cugcgccgugccuucuccucuu

SEQ ID NO: 2919395 - RNA, 22 nt, Human T-lymphotropic virus 1
aucauaggucgugaugccuuac

SEQ ID NO: 2919396 - RNA, 18 nt, Human T-lymphotropic virus 1
acucccuaaccacaucug

SEQ ID NO: 2919397 - RNA, 14 nt, Human T-lymphotropic virus 1
caguuccagcccua

SEQ ID NO: 2919398 - RNA, 16 nt, Human T-lymphotropic virus 1
cuccucuacucuccca

SEQ ID NO: 2919399 - RNA, 14 nt, Human T-lymphotropic virus 1
caauccugcccagc

SEQ ID NO: 2919400 - RNA, 17 nt, Human T-lymphotropic virus 1
cuacacuagcccacuua

SEQ ID NO: 2919401 - RNA, 14 nt, Human T-lymphotropic virus 1
aucuauucccucau

SEQ ID NO: 2919402 - RNA, 16 nt, Human T-lymphotropic virus 1
caauccugcccagcca

SEQ ID NO: 2919403 - RNA, 17 nt, Human T-lymphotropic virus 1
cucccaacgucucuguu

SEQ ID NO: 2919404 - RNA, 15 nt, Human T-lymphotropic virus 1
gcagcaaccuccucc

SEQ ID NO: 2919405 - RNA, 16 nt, Human T-lymphotropic virus 1
cagcuacgacaccucc

SEQ ID NO: 2919406 - RNA, 14 nt, Human T-lymphotropic virus 1
cggauccaccuccc

SEQ ID NO: 2919407 - RNA, 12 nt, Human T-lymphotropic virus 1
acaccucaauau

SEQ ID NO: 2919408 - RNA, 20 nt, Human T-lymphotropic virus 1
gcccagaauaaggcucugac

SEQ ID NO: 2919409 - RNA, 12 nt, Human T-lymphotropic virus 1
ccgucuccagcc

SEQ ID NO: 2919410 - RNA, 16 nt, Human T-lymphotropic virus 1
aacccugccccuccua

SEQ ID NO: 2919411 - RNA, 23 nt, Human T-lymphotropic virus 1
ccccuacaauccaaccagcuccg

SEQ ID NO: 2919412 - RNA, 19 nt, Human T-lymphotropic virus 1
aaccacaacugaggccucc

SEQ ID NO: 2919413 - RNA, 15 nt, Human T-lymphotropic virus 1
gcaccagcucaggcu

SEQ ID NO: 2919414 - RNA, 15 nt, Human T-lymphotropic virus 1
gggcagcaccuccca

SEQ ID NO: 2919415 - RNA, 15 nt, Human T-lymphotropic virus 1
cauccugccccccuu

SEQ ID NO: 2919416 - RNA, 16 nt, Human T-lymphotropic virus 1
ucacucauacaacccc

SEQ ID NO: 2919417 - RNA, 19 nt, Human T-lymphotropic virus 1
gaucacuuuaagcucaccu

SEQ ID NO: 2919418 - RNA, 18 nt, Human T-lymphotropic virus 1
uccugcagcaaccuccuc

SEQ ID NO: 2919419 - RNA, 21 nt, Human T-lymphotropic virus 1
ccuugcccuaggcaccuucca

SEQ ID NO: 2919420 - RNA, 21 nt, Human T-lymphotropic virus 1
ucaaucauuagugcagcugcg

SEQ ID NO: 2919421 - RNA, 21 nt, Human T-lymphotropic virus 1
aaccuccuccguucagccucc

SEQ ID NO: 2919422 - RNA, 13 nt, Human T-lymphotropic virus 1
cccuguccugcag

SEQ ID NO: 2919423 - RNA, 13 nt, Human T-lymphotropic virus 1
cgacgcuccagga

SEQ ID NO: 2919424 - RNA, 23 nt, Human T-lymphotropic virus 1
agacuaguccaaacccugccccu

SEQ ID NO: 2919425 - RNA, 18 nt, Human T-lymphotropic virus 1
ucucagccccuugucucc

SEQ ID NO: 2919426 - RNA, 19 nt, Human T-lymphotropic virus 1
agcacuaauuauacuugca

SEQ ID NO: 2919427 - RNA, 20 nt, Human T-lymphotropic virus 1
uccuccuuguccuuuaacuc

SEQ ID NO: 2919428 - RNA, 19 nt, Human T-lymphotropic virus 1
cagauugacacccagacca

SEQ ID NO: 2919429 - RNA, 16 nt, Human T-lymphotropic virus 1
ccaugucccucgccuc

SEQ ID NO: 2919430 - RNA, 18 nt, Human T-lymphotropic virus 1
aucugaccaccccagugu

SEQ ID NO: 2919431 - RNA, 14 nt, Human T-lymphotropic virus 1
uccucuuucucccg

SEQ ID NO: 2919432 - RNA, 16 nt, Human T-lymphotropic virus 1
gcaccagcucaggcua

SEQ ID NO: 2919433 - RNA, 23 nt, Human T-lymphotropic virus 1
cgcccuacuggccaccuguccag

SEQ ID NO: 2919434 - RNA, 15 nt, Human T-lymphotropic virus 1
acacuagcccacuua

SEQ ID NO: 2919435 - RNA, 16 nt, Human T-lymphotropic virus 1
caacaaugccaaggcg

SEQ ID NO: 2919436 - RNA, 17 nt, Human T-lymphotropic virus 1
accggcuccaugucccu

SEQ ID NO: 2919437 - RNA, 22 nt, Human T-lymphotropic virus 1
cgucacgcccuacuggccaccu

SEQ ID NO: 2919438 - RNA, 23 nt, Human T-lymphotropic virus 1
ccggaggacagcucagcaccagc

SEQ ID NO: 2919439 - RNA, 19 nt, Human T-lymphotropic virus 1
agccccuugucuccacuug

SEQ ID NO: 2919440 - RNA, 14 nt, Human T-lymphotropic virus 1
aagcccuuaugcca

SEQ ID NO: 2919441 - RNA, 19 nt, Human T-lymphotropic virus 1
uccuggcaagccccuccca

SEQ ID NO: 2919442 - RNA, 19 nt, Human T-lymphotropic virus 1
ccuaaacaguuccagcccu

SEQ ID NO: 2919443 - RNA, 15 nt, Human T-lymphotropic virus 1
accugggaccccauc

SEQ ID NO: 2919444 - RNA, 16 nt, Human T-lymphotropic virus 1
ugcgccgugccuucuc

SEQ ID NO: 2919445 - RNA, 16 nt, Human T-lymphotropic virus 1
aaguacuuuacugaca

SEQ ID NO: 2919446 - RNA, 20 nt, Human T-lymphotropic virus 1
caucguuagcgcuuccagcc

SEQ ID NO: 2919447 - RNA, 21 nt, Human T-lymphotropic virus 1
cuacucccuaaccacaucugg

SEQ ID NO: 2919448 - RNA, 16 nt, Human T-lymphotropic virus 1
auugacacccagacca

SEQ ID NO: 2919449 - RNA, 18 nt, Human T-lymphotropic virus 1
uccgcccuggccauggga

SEQ ID NO: 2919450 - RNA, 17 nt, Human T-lymphotropic virus 1
ccaccucccaggcagcc

SEQ ID NO: 2919451 - RNA, 12 nt, Human T-lymphotropic virus 1
acccuccuuccu

SEQ ID NO: 2919452 - RNA, 18 nt, Human T-lymphotropic virus 1
agccauaccaaucuaccu

SEQ ID NO: 2919453 - RNA, 23 nt, Human T-lymphotropic virus 1
cccguccaccaauuccuccacca

SEQ ID NO: 2919454 - RNA, 17 nt, Human T-lymphotropic virus 1
acccugcaauccugccc

SEQ ID NO: 2919455 - RNA, 21 nt, Human T-lymphotropic virus 1
ccuauuguuuuaacaucuugc

SEQ ID NO: 2919456 - RNA, 22 nt, Human T-lymphotropic virus 1
cauaccacucuaaacccugcaa

SEQ ID NO: 2919457 - RNA, 22 nt, Human T-lymphotropic virus 1
ccaaacccugccccuccuaggg

SEQ ID NO: 2919458 - RNA, 14 nt, Human T-lymphotropic virus 1
uccagccugccaac

SEQ ID NO: 2919459 - RNA, 15 nt, Human T-lymphotropic virus 1
ccucccgccuguggu

SEQ ID NO: 2919460 - RNA, 23 nt, Human T-lymphotropic virus 1
acccagucuacguguuuggagac

SEQ ID NO: 2919461 - RNA, 22 nt, Human T-lymphotropic virus 1
augacauucuccuggcaagccc

SEQ ID NO: 2919462 - RNA, 22 nt, Human T-lymphotropic virus 1
gacuaguccaaacccugccccu

SEQ ID NO: 2919463 - RNA, 16 nt, Human T-lymphotropic virus 1
cagcaccucccaaccc

SEQ ID NO: 2919464 - RNA, 22 nt, Human T-lymphotropic virus 1
ccaugcgcaaauacucccccuu

SEQ ID NO: 2919465 - RNA, 14 nt, Human T-lymphotropic virus 1
cauggccucuccag

SEQ ID NO: 2919466 - RNA, 21 nt, Human T-lymphotropic virus 1
cuacacaguuucacccauugc

SEQ ID NO: 2919467 - RNA, 20 nt, Human T-lymphotropic virus 1
cacccuugucgcgcuacucc

SEQ ID NO: 2919468 - RNA, 19 nt, Human T-lymphotropic virus 1
cucagaccuccgggaagcc

SEQ ID NO: 2919469 - RNA, 12 nt, Human T-lymphotropic virus 1
uacgccagcccc

SEQ ID NO: 2919470 - RNA, 21 nt, Human T-lymphotropic virus 1
uccuccgcccgcuuccugcgc

SEQ ID NO: 2919471 - RNA, 21 nt, Human T-lymphotropic virus 1
cugccucccaccgccccuccu

SEQ ID NO: 2919472 - RNA, 20 nt, Human T-lymphotropic virus 1
cgggccacuaacucucuaac

SEQ ID NO: 2919473 - RNA, 20 nt, Human T-lymphotropic virus 1
cucaggaaagagccuccuac

SEQ ID NO: 2919474 - RNA, 12 nt, Human T-lymphotropic virus 1
cucuuccuuccu

SEQ ID NO: 2919475 - RNA, 19 nt, Human T-lymphotropic virus 1
ccaucguuagcgcuuccag

SEQ ID NO: 2919476 - RNA, 23 nt, Human T-lymphotropic virus 1
gcccaccacccuuuuccagccug

SEQ ID NO: 2919477 - RNA, 20 nt, Human T-lymphotropic virus 1
cuugggcuagaacaccuccc

SEQ ID NO: 2919478 - RNA, 17 nt, Human T-lymphotropic virus 1
cccugcaauccugccca

SEQ ID NO: 2919479 - RNA, 14 nt, Human T-lymphotropic virus 1
ugcaauccugccca

SEQ ID NO: 2919480 - RNA, 13 nt, Human T-lymphotropic virus 1
uggccucuccagc

SEQ ID NO: 2919481 - RNA, 16 nt, Human T-lymphotropic virus 1
uagccagugccccugg

SEQ ID NO: 2919482 - RNA, 18 nt, Human T-lymphotropic virus 1
caccucccaacccugucu

SEQ ID NO: 2919483 - RNA, 18 nt, Human T-lymphotropic virus 1
cucuguuccauccccuuc

SEQ ID NO: 2919484 - RNA, 23 nt, Human T-lymphotropic virus 1
ccgccuguaaucuugccaauaca

SEQ ID NO: 2919485 - RNA, 15 nt, Human T-lymphotropic virus 1
uacagccacccugcc

SEQ ID NO: 2919486 - RNA, 12 nt, Human T-lymphotropic virus 1
aaccccucaccu

SEQ ID NO: 2919487 - RNA, 21 nt, Human T-lymphotropic virus 1
cuccccuccuuccccacccag

SEQ ID NO: 2919488 - RNA, 21 nt, Human T-lymphotropic virus 1
uuaguacuacaguccuccucc

SEQ ID NO: 2919489 - RNA, 16 nt, Human T-lymphotropic virus 1
cccuccuuuacccauc

SEQ ID NO: 2919490 - RNA, 13 nt, Human T-lymphotropic virus 1
caugccccccuac

SEQ ID NO: 2919491 - RNA, 19 nt, Human T-lymphotropic virus 1
ccucauuucuacucucaca

SEQ ID NO: 2919492 - RNA, 17 nt, Human T-lymphotropic virus 1
ccaccaauuccuccacc

SEQ ID NO: 2919493 - RNA, 13 nt, Human T-lymphotropic virus 1
aaauauuacuaau

SEQ ID NO: 2919494 - RNA, 17 nt, Human T-lymphotropic virus 1
cucugccaaaccauaca

SEQ ID NO: 2919495 - RNA, 15 nt, Human T-lymphotropic virus 1
aaacaguuccagccc

SEQ ID NO: 2919496 - RNA, 14 nt, Human T-lymphotropic virus 1
ugcuuuuccuccuc

SEQ ID NO: 2919497 - RNA, 13 nt, Human T-lymphotropic virus 1
ccagccgauccca

SEQ ID NO: 2919498 - RNA, 17 nt, Human T-lymphotropic virus 1
uagcgcuuccagccccc

SEQ ID NO: 2919499 - RNA, 16 nt, Human T-lymphotropic virus 1
gucucuacugugccuu

SEQ ID NO: 2919500 - RNA, 16 nt, Human T-lymphotropic virus 1
uugcuuucacuguccc

SEQ ID NO: 2919501 - RNA, 17 nt, Human T-lymphotropic virus 1
uccaguucugcccccuc

SEQ ID NO: 2919502 - RNA, 11 nt, Human T-lymphotropic virus 1
cucgcaucucu

SEQ ID NO: 2919503 - RNA, 22 nt, Human T-lymphotropic virus 1
aucugcuuuuccuccucuuucu

SEQ ID NO: 2919504 - RNA, 15 nt, Human T-lymphotropic virus 1
cuauuauucagccuc

SEQ ID NO: 2919505 - RNA, 15 nt, Human T-lymphotropic virus 1
ucacgcgcccgccgc

SEQ ID NO: 2919506 - RNA, 23 nt, Human T-lymphotropic virus 1
ccccugugaucauaaacaccgcc

SEQ ID NO: 2919507 - RNA, 13 nt, Human T-lymphotropic virus 1
ggccuaccacccc

SEQ ID NO: 2919508 - RNA, 21 nt, Human T-lymphotropic virus 1
cagauacccccauuacucucu

SEQ ID NO: 2919509 - RNA, 21 nt, Human T-lymphotropic virus 1
uaccaccccucauuucuacuc

SEQ ID NO: 2919510 - RNA, 13 nt, Human T-lymphotropic virus 1
uccguucagccuc

SEQ ID NO: 2919511 - RNA, 17 nt, Human T-lymphotropic virus 1
ccaaaucccccuaccua

SEQ ID NO: 2919512 - RNA, 22 nt, Human T-lymphotropic virus 1
cacucuaaccuagaccauaucc

SEQ ID NO: 2919513 - RNA, 19 nt, Human T-lymphotropic virus 1
gaucccguggaggcuccuc

SEQ ID NO: 2919514 - RNA, 18 nt, Human T-lymphotropic virus 1
cgucacgcugacagccug

SEQ ID NO: 2919515 - RNA, 20 nt, Human T-lymphotropic virus 1
ccgucagcuacgacaccucc

SEQ ID NO: 2919516 - RNA, 15 nt, Human T-lymphotropic virus 1
auacucccccuuccg

SEQ ID NO: 2919517 - RNA, 15 nt, Human T-lymphotropic virus 1
aacacuuuucuuaaa

SEQ ID NO: 2919518 - RNA, 17 nt, Human T-lymphotropic virus 1
cuccagccgaucccaga

SEQ ID NO: 2919519 - RNA, 22 nt, Human T-lymphotropic virus 1
cugccaauaauuaaccucuccc

SEQ ID NO: 2919520 - RNA, 22 nt, Human T-lymphotropic virus 1
agcuaccaugccaccuauuccc

SEQ ID NO: 2919521 - RNA, 16 nt, Human T-lymphotropic virus 1
ccacaucgccuccagc

SEQ ID NO: 2919522 - RNA, 16 nt, Human T-lymphotropic virus 1
agacacauucccucag

SEQ ID NO: 2919523 - RNA, 17 nt, Human T-lymphotropic virus 1
caacugccccauuggcu

SEQ ID NO: 2919524 - RNA, 23 nt, Human T-lymphotropic virus 1
cugccucccaccgccccuccucu

SEQ ID NO: 2919525 - RNA, 13 nt, Human T-lymphotropic virus 1
uccuucucccuuc

SEQ ID NO: 2919526 - RNA, 13 nt, Human T-lymphotropic virus 1
uuuuccuccucuu

SEQ ID NO: 2919527 - RNA, 14 nt, Human T-lymphotropic virus 1
acgucuccccccgg

SEQ ID NO: 2919528 - RNA, 15 nt, Human T-lymphotropic virus 1
accccgccaaucacu

SEQ ID NO: 2919529 - RNA, 20 nt, Human T-lymphotropic virus 1
aucauggaccugccccuaua

SEQ ID NO: 2919530 - RNA, 13 nt, Human T-lymphotropic virus 1
gcaaucugcuuuu

SEQ ID NO: 2919531 - RNA, 22 nt, Human T-lymphotropic virus 1
caaccacaucgccuccagccuc

SEQ ID NO: 2919532 - RNA, 13 nt, Human T-lymphotropic virus 1
augaccccaucug

SEQ ID NO: 2919533 - RNA, 18 nt, Human T-lymphotropic virus 1
auaacucccucauccugc

SEQ ID NO: 2919534 - RNA, 14 nt, Human T-lymphotropic virus 1
cauggaacccaccc

SEQ ID NO: 2919535 - RNA, 19 nt, Human T-lymphotropic virus 1
cucucacagaugcccuacu

SEQ ID NO: 2919536 - RNA, 16 nt, Human T-lymphotropic virus 1
auugccuaucuaggca

SEQ ID NO: 2919537 - RNA, 19 nt, Human T-lymphotropic virus 1
cauggaugacauucuccug

SEQ ID NO: 2919538 - RNA, 16 nt, Human T-lymphotropic virus 1
aaccuagaccauaucc

SEQ ID NO: 2919539 - RNA, 21 nt, Human T-lymphotropic virus 1
cucagccccuugucuccacuu

SEQ ID NO: 2919540 - RNA, 12 nt, Human T-lymphotropic virus 1
cgccccuugccu

SEQ ID NO: 2919541 - RNA, 21 nt, Human T-lymphotropic virus 1
accccucauuucuacucucac

SEQ ID NO: 2919542 - RNA, 23 nt, Human T-lymphotropic virus 1
gccuccaggccuugcaacacuug

SEQ ID NO: 2919543 - RNA, 14 nt, Human T-lymphotropic virus 1
caccuggccccucc

SEQ ID NO: 2919544 - RNA, 13 nt, Human T-lymphotropic virus 1
accacccuuuucc

SEQ ID NO: 2919545 - RNA, 20 nt, Human T-lymphotropic virus 1
uacccaucguuagcgcuucc

SEQ ID NO: 2919546 - RNA, 13 nt, Human T-lymphotropic virus 1
acucucccacucu

SEQ ID NO: 2919547 - RNA, 14 nt, Human T-lymphotropic virus 1
uccaaccagcuccg

SEQ ID NO: 2919548 - RNA, 20 nt, Human T-lymphotropic virus 1
ucuuccaguucugcccccuc

SEQ ID NO: 2919549 - RNA, 17 nt, Human T-lymphotropic virus 1
cgccuguggugccuccu

SEQ ID NO: 2919550 - RNA, 16 nt, Human T-lymphotropic virus 1
ugcacuauucuucagu

SEQ ID NO: 2919551 - RNA, 23 nt, Human T-lymphotropic virus 1
uggagccuaccuagacucagccg

SEQ ID NO: 2919552 - RNA, 18 nt, Human T-lymphotropic virus 1
cccuacaauccaaccagc

SEQ ID NO: 2919553 - RNA, 12 nt, Human T-lymphotropic virus 1
ugauuacagccc

SEQ ID NO: 2919554 - RNA, 15 nt, Human T-lymphotropic virus 1
cuccucuuccuuccu

SEQ ID NO: 2919555 - RNA, 20 nt, Human T-lymphotropic virus 1
cagcagaucaggcccuacag

SEQ ID NO: 2919556 - RNA, 17 nt, Human T-lymphotropic virus 1
ugacgacaaccccucac

SEQ ID NO: 2919557 - RNA, 11 nt, Human T-lymphotropic virus 1
acaccuccccu

SEQ ID NO: 2919558 - RNA, 13 nt, Human T-lymphotropic virus 1
uaaccucucccau

SEQ ID NO: 2919559 - RNA, 16 nt, Human T-lymphotropic virus 1
caguggccacuugucu

SEQ ID NO: 2919560 - RNA, 20 nt, Human T-lymphotropic virus 1
cugucauaacucccucaucc

SEQ ID NO: 2919561 - RNA, 17 nt, Human T-lymphotropic virus 1
ucaacccccaacuccug

SEQ ID NO: 2919562 - RNA, 16 nt, Human T-lymphotropic virus 1
cccucaccacuccagg

SEQ ID NO: 2919563 - RNA, 12 nt, Human T-lymphotropic virus 1
aggacagcucag

SEQ ID NO: 2919564 - RNA, 12 nt, Human T-lymphotropic virus 1
cagggcccagaa

SEQ ID NO: 2919565 - RNA, 19 nt, Human T-lymphotropic virus 1
ccuccucuacucucccacu

SEQ ID NO: 2919566 - RNA, 23 nt, Human T-lymphotropic virus 1
gcccuuucagcagaucaggcccu

SEQ ID NO: 2919567 - RNA, 15 nt, Human T-lymphotropic virus 1
ucugcccccucaucc

SEQ ID NO: 2919568 - RNA, 18 nt, Human T-lymphotropic virus 1
caccacccuuuuccagcc

SEQ ID NO: 2919569 - RNA, 15 nt, Human T-lymphotropic virus 1
caccgccccuccucu

SEQ ID NO: 2919570 - RNA, 21 nt, Human T-lymphotropic virus 1
auccucggugauuacagcccc

SEQ ID NO: 2919571 - RNA, 19 nt, Human T-lymphotropic virus 1
gaccaccaacaccaugggu

SEQ ID NO: 2919572 - RNA, 20 nt, Human T-lymphotropic virus 1
aggcccuacagccacccugc

SEQ ID NO: 2919573 - RNA, 15 nt, Human T-lymphotropic virus 1
cagaauaaggcucug

SEQ ID NO: 2919574 - RNA, 13 nt, Human T-lymphotropic virus 1
cauccccuucuuc

SEQ ID NO: 2919575 - RNA, 15 nt, Human T-lymphotropic virus 1
ggacuacucugccaa

SEQ ID NO: 2919576 - RNA, 12 nt, Human T-lymphotropic virus 1
aguacuacccca

SEQ ID NO: 2919577 - RNA, 13 nt, Human T-lymphotropic virus 1
cacauucccucag

SEQ ID NO: 2919578 - RNA, 12 nt, Human T-lymphotropic virus 1
cccgacuccagc

SEQ ID NO: 2919579 - RNA, 17 nt, Human T-lymphotropic virus 1
ccugcagcaaccuccuc

SEQ ID NO: 2919580 - RNA, 13 nt, Human T-lymphotropic virus 1
ccagaccagccac

SEQ ID NO: 2919581 - RNA, 15 nt, Human T-lymphotropic virus 1
guaccucccugaggc

SEQ ID NO: 2919582 - RNA, 22 nt, Human T-lymphotropic virus 1
cacaaauuucaaaccaaggccu

SEQ ID NO: 2919583 - RNA, 14 nt, Human T-lymphotropic virus 1
caagccccucccau

SEQ ID NO: 2919584 - RNA, 13 nt, Human T-lymphotropic virus 1
uacuggccaccug

SEQ ID NO: 2919585 - RNA, 20 nt, Human T-lymphotropic virus 1
acacccucuggggaggcucc

SEQ ID NO: 2919586 - RNA, 15 nt, Human T-lymphotropic virus 1
acaguuuccuccucc

SEQ ID NO: 2919587 - RNA, 16 nt, Human T-lymphotropic virus 1
caccuuuucaggagcc

SEQ ID NO: 2919588 - RNA, 15 nt, Human T-lymphotropic virus 1
cacacuagccagugc

SEQ ID NO: 2919589 - RNA, 20 nt, Human T-lymphotropic virus 1
aggagccgucuccagccccu

SEQ ID NO: 2919590 - RNA, 15 nt, Human T-lymphotropic virus 1
ucgacaaauacaccu

SEQ ID NO: 2919591 - RNA, 14 nt, Human T-lymphotropic virus 1
ugacuuguccagcc

SEQ ID NO: 2919592 - RNA, 18 nt, Human T-lymphotropic virus 1
ccucuggggaggcuccgu

SEQ ID NO: 2919593 - RNA, 22 nt, Human T-lymphotropic virus 1
aagccuagcuacauaaacacag

SEQ ID NO: 2919594 - RNA, 19 nt, Human T-lymphotropic virus 1
uccaugucccucgccucag

SEQ ID NO: 2919595 - RNA, 20 nt, Human T-lymphotropic virus 1
acaggagccgucuccagccc

SEQ ID NO: 2919596 - RNA, 20 nt, Human T-lymphotropic virus 1
gccuaugauuuccgggcccu

SEQ ID NO: 2919597 - RNA, 16 nt, Human T-lymphotropic virus 1
cuggccccuccugccc

SEQ ID NO: 2919598 - RNA, 15 nt, Human T-lymphotropic virus 1
cgacaaccccucacc

SEQ ID NO: 2919599 - RNA, 19 nt, Human T-lymphotropic virus 1
cgcuccugcucuuccugcu

SEQ ID NO: 2919600 - RNA, 14 nt, Human T-lymphotropic virus 1
acugucccacagca

SEQ ID NO: 2919601 - RNA, 15 nt, Human T-lymphotropic virus 1
cccccaacuccugca

SEQ ID NO: 2919602 - RNA, 19 nt, Human T-lymphotropic virus 1
agcacaguuuccuccuccu

SEQ ID NO: 2919603 - RNA, 12 nt, Human T-lymphotropic virus 1
ugugaaagcccu

SEQ ID NO: 2919604 - RNA, 16 nt, Human T-lymphotropic virus 1
ccucgacuccccuccu

SEQ ID NO: 2919605 - RNA, 20 nt, Human T-lymphotropic virus 1
ccccugacuuguccagccug

SEQ ID NO: 2919606 - RNA, 14 nt, Human T-lymphotropic virus 1
acccuuguuccuua

SEQ ID NO: 2919607 - RNA, 15 nt, Human T-lymphotropic virus 1
ugcgccgugccuucu

SEQ ID NO: 2919608 - RNA, 16 nt, Human T-lymphotropic virus 1
uggcaccaccacugug

SEQ ID NO: 2919609 - RNA, 19 nt, Human T-lymphotropic virus 1
caccacuccccccgacucc

SEQ ID NO: 2919610 - RNA, 15 nt, Human T-lymphotropic virus 1
auccaaccagcuccg

SEQ ID NO: 2919611 - RNA, 19 nt, Human T-lymphotropic virus 1
aucaacccccaacuccugc

SEQ ID NO: 2919612 - RNA, 15 nt, Human T-lymphotropic virus 1
ccucauaccacucua

SEQ ID NO: 2919613 - RNA, 14 nt, Human T-lymphotropic virus 1
cuguggugccuccu

SEQ ID NO: 2919614 - RNA, 13 nt, Human T-lymphotropic virus 1
cauucccccuucc

SEQ ID NO: 2919615 - RNA, 20 nt, Human T-lymphotropic virus 1
uccuaccuuacgccagcccc

SEQ ID NO: 2919616 - RNA, 14 nt, Human T-lymphotropic virus 1
gccgcggcuuuccu

SEQ ID NO: 2919617 - RNA, 14 nt, Human T-lymphotropic virus 1
cagaucaggcccua

SEQ ID NO: 2919618 - RNA, 17 nt, Human T-lymphotropic virus 1
ccagaacgccuccaggc

SEQ ID NO: 2919619 - RNA, 14 nt, Human T-lymphotropic virus 1
gcucuuccugcuuu

SEQ ID NO: 2919620 - RNA, 19 nt, Human T-lymphotropic virus 1
uccaggccauugccuaucu

SEQ ID NO: 2919621 - RNA, 19 nt, Human T-lymphotropic virus 1
gccuaccuagacucagccg

SEQ ID NO: 2919622 - RNA, 23 nt, Human T-lymphotropic virus 1
uacaugccccccuaccccacacu

SEQ ID NO: 2919623 - RNA, 17 nt, Human T-lymphotropic virus 1
uccaccucgccuuccaa

SEQ ID NO: 2919624 - RNA, 19 nt, Human T-lymphotropic virus 1
acgcccuacuggccaccug

SEQ ID NO: 2919625 - RNA, 18 nt, Human T-lymphotropic virus 1
ccgucacgcugacagccu

SEQ ID NO: 2919626 - RNA, 18 nt, Human T-lymphotropic virus 1
cugauccccgagaccaaa

SEQ ID NO: 2919627 - RNA, 22 nt, Human T-lymphotropic virus 1
uggcaagccccucccaugcgga

SEQ ID NO: 2919628 - RNA, 16 nt, Human T-lymphotropic virus 1
ccugcagcucucuccu

SEQ ID NO: 2919629 - RNA, 21 nt, Human T-lymphotropic virus 1
agaucaggcccuacagccacc

SEQ ID NO: 2919630 - RNA, 14 nt, Human T-lymphotropic virus 1
ccccggacuccggc

SEQ ID NO: 2919631 - RNA, 14 nt, Human T-lymphotropic virus 1
ccgccccuccucua

SEQ ID NO: 2919632 - RNA, 15 nt, Human T-lymphotropic virus 1
cgccuucucagcccc

SEQ ID NO: 2919633 - RNA, 20 nt, Human T-lymphotropic virus 1
uccuucuccugcagcaaccu

SEQ ID NO: 2919634 - RNA, 23 nt, Human T-lymphotropic virus 1
caugcgcaaauacucccccuucc

SEQ ID NO: 2919635 - RNA, 11 nt, Human T-lymphotropic virus 1
cgcuuuccccc

SEQ ID NO: 2919636 - RNA, 14 nt, Human T-lymphotropic virus 1
gauccaccucccag

SEQ ID NO: 2919637 - RNA, 18 nt, Human T-lymphotropic virus 1
ccagccuccccugccaau

SEQ ID NO: 2919638 - RNA, 23 nt, Human T-lymphotropic virus 1
uccugcagcucucuccugcagac

SEQ ID NO: 2919639 - RNA, 13 nt, Human T-lymphotropic virus 1
cuggcaagccccu

SEQ ID NO: 2919640 - RNA, 13 nt, Human T-lymphotropic virus 1
aacaguuccagcc

SEQ ID NO: 2919641 - RNA, 11 nt, Human T-lymphotropic virus 1
aacuccugcau

SEQ ID NO: 2919642 - RNA, 14 nt, Human T-lymphotropic virus 1
gccccagcugcugu

SEQ ID NO: 2919643 - RNA, 12 nt, Human T-lymphotropic virus 1
ccaacccugucu

SEQ ID NO: 2919644 - RNA, 23 nt, Human T-lymphotropic virus 1
ucucacaguuggagucuccucau

SEQ ID NO: 2919645 - RNA, 14 nt, Human T-lymphotropic virus 1
cagcagaucaggcc

SEQ ID NO: 2919646 - RNA, 17 nt, Human T-lymphotropic virus 1
ugucaagccguccucag

SEQ ID NO: 2919647 - RNA, 22 nt, Human T-lymphotropic virus 1
cucauaccacucuaaacccugc

SEQ ID NO: 2919648 - RNA, 18 nt, Human T-lymphotropic virus 1
ugccaccccggccagcuc

SEQ ID NO: 2919649 - RNA, 22 nt, Human T-lymphotropic virus 1
acuccagccgaucccagagaca

SEQ ID NO: 2919650 - RNA, 22 nt, Human T-lymphotropic virus 1
uaaagacaaaucauaagcucag

SEQ ID NO: 2919651 - RNA, 21 nt, Human T-lymphotropic virus 1
cgcuuccucuucuccucagcc

SEQ ID NO: 2919652 - RNA, 23 nt, Human T-lymphotropic virus 1
aacagaagucugagaaggucagg

SEQ ID NO: 2919653 - RNA, 13 nt, Human T-lymphotropic virus 1
gaucaaaaagcca

SEQ ID NO: 2919654 - RNA, 15 nt, Human T-lymphotropic virus 1
ucauuagugcagcug

SEQ ID NO: 2919655 - RNA, 18 nt, Human T-lymphotropic virus 1
ucuccuggcaagccccuc

SEQ ID NO: 2919656 - RNA, 19 nt, Human T-lymphotropic virus 1
cucccaugcggaccugcaa

SEQ ID NO: 2919657 - RNA, 13 nt, Human T-lymphotropic virus 1
guaugcugcccag

SEQ ID NO: 2919658 - RNA, 13 nt, Human T-lymphotropic virus 1
uacaugccccccu

SEQ ID NO: 2919659 - RNA, 20 nt, Human T-lymphotropic virus 1
gaucucucaucaucuucccc

SEQ ID NO: 2919660 - RNA, 13 nt, Human T-lymphotropic virus 1
agccgccagugga

SEQ ID NO: 2919661 - RNA, 18 nt, Human T-lymphotropic virus 1
accacccuuuuccagccu

SEQ ID NO: 2919662 - RNA, 20 nt, Human T-lymphotropic virus 1
caggcccuacagccacccug

SEQ ID NO: 2919663 - RNA, 21 nt, Human T-lymphotropic virus 1
cuuaagguccuuaccccgcca

SEQ ID NO: 2919664 - RNA, 18 nt, Human T-lymphotropic virus 1
gccuaccuagacucagcc

SEQ ID NO: 2919665 - RNA, 17 nt, Human T-lymphotropic virus 1
ggcuacaugccccccua

SEQ ID NO: 2919666 - RNA, 18 nt, Human T-lymphotropic virus 1
ccagcagguccuccgggc

SEQ ID NO: 2919667 - RNA, 17 nt, Human T-lymphotropic virus 1
uccucucaggcccccuu

SEQ ID NO: 2919668 - RNA, 21 nt, Human T-lymphotropic virus 1
ccuccaaggacuccaccucgc

SEQ ID NO: 2919669 - RNA, 21 nt, Human T-lymphotropic virus 1
caucguuagcgcuuccagccc

SEQ ID NO: 2919670 - RNA, 22 nt, Human T-lymphotropic virus 1
ucucaaguaauacuccccucaa

SEQ ID NO: 2919671 - RNA, 18 nt, Human T-lymphotropic virus 1
cuacaugccccccuaccc

SEQ ID NO: 2919672 - RNA, 13 nt, Human T-lymphotropic virus 1
accugcuggcccu

SEQ ID NO: 2919673 - RNA, 18 nt, Human T-lymphotropic virus 1
ggcucuccacgcuuugcc

SEQ ID NO: 2919674 - RNA, 13 nt, Human T-lymphotropic virus 1
acuggcaccacca

SEQ ID NO: 2919675 - RNA, 22 nt, Human T-lymphotropic virus 1
ccuaccccacacuagccagugc

SEQ ID NO: 2919676 - RNA, 23 nt, Human T-lymphotropic virus 1
cgccuacaucgucacgcccuacu

SEQ ID NO: 2919677 - RNA, 18 nt, Human T-lymphotropic virus 1
cuaccccacacuagccag

SEQ ID NO: 2919678 - RNA, 16 nt, Human T-lymphotropic virus 1
cuagaacaccucccaa

SEQ ID NO: 2919679 - RNA, 20 nt, Human T-lymphotropic virus 1
guccgaaaacaaaacccagc

SEQ ID NO: 2919680 - RNA, 20 nt, Human T-lymphotropic virus 1
ucuuccugcuuucuccgggc

SEQ ID NO: 2919681 - RNA, 15 nt, Human T-lymphotropic virus 1
uaccacaggggcccu

SEQ ID NO: 2919682 - RNA, 13 nt, Human T-lymphotropic virus 1
caagccccuccca

SEQ ID NO: 2919683 - RNA, 22 nt, Human T-lymphotropic virus 1
cccccggaggacagcucagcac

SEQ ID NO: 2919684 - RNA, 13 nt, Human T-lymphotropic virus 1
ggacagcucagca

SEQ ID NO: 2919685 - RNA, 20 nt, Human T-lymphotropic virus 1
ucuaguaaguuacuccagcu

SEQ ID NO: 2919686 - RNA, 19 nt, Human T-lymphotropic virus 1
caguucugcccccucaucc

SEQ ID NO: 2919687 - RNA, 15 nt, Human T-lymphotropic virus 1
ugcaugcccaagacc

SEQ ID NO: 2919688 - RNA, 14 nt, Human T-lymphotropic virus 1
cuccguucagccuc

SEQ ID NO: 2919689 - RNA, 15 nt, Human T-lymphotropic virus 1
ccuugggcagcaccu

SEQ ID NO: 2919690 - RNA, 21 nt, Human T-lymphotropic virus 1
auucaagcuauagucuccucc

SEQ ID NO: 2919691 - RNA, 23 nt, Human T-lymphotropic virus 1
ccaugugauuuuuugccaccccg

SEQ ID NO: 2919692 - RNA, 17 nt, Human T-lymphotropic virus 1
augacauucuccuggca

SEQ ID NO: 2919693 - RNA, 21 nt, Human T-lymphotropic virus 1
gagccuaccuagacucagccg

SEQ ID NO: 2919694 - RNA, 19 nt, Human T-lymphotropic virus 1
caccccucauuucuacucu

SEQ ID NO: 2919695 - RNA, 21 nt, Human T-lymphotropic virus 1
acuccccuccuuccccaccca

SEQ ID NO: 2919696 - RNA, 17 nt, Human T-lymphotropic virus 1
cccugcuugcucaacuc

SEQ ID NO: 2919697 - RNA, 22 nt, Human T-lymphotropic virus 1
cucccuucuagucgacgcucca

SEQ ID NO: 2919698 - RNA, 16 nt, Human T-lymphotropic virus 1
aggcagguccucucag

SEQ ID NO: 2919699 - RNA, 19 nt, Human T-lymphotropic virus 1
cacucaacccucaccacuc

SEQ ID NO: 2919700 - RNA, 17 nt, Human T-lymphotropic virus 1
acuccagcuaccaugcc

SEQ ID NO: 2919701 - RNA, 12 nt, Human T-lymphotropic virus 1
uccagcccccca

SEQ ID NO: 2919702 - RNA, 21 nt, Human T-lymphotropic virus 1
cgccucaggaaagagccuccu

SEQ ID NO: 2919703 - RNA, 22 nt, Human T-lymphotropic virus 1
ccauugccuaucuaggcaagcc

SEQ ID NO: 2919704 - RNA, 14 nt, Human T-lymphotropic virus 1
uuggcuccugugaa

SEQ ID NO: 2919705 - RNA, 23 nt, Human T-lymphotropic virus 1
ccagauugacacccagaccagcc

SEQ ID NO: 2919706 - RNA, 13 nt, Human T-lymphotropic virus 1
ccuuuuccagccu

SEQ ID NO: 2919707 - RNA, 14 nt, Human T-lymphotropic virus 1
gccuccaggccuug

SEQ ID NO: 2919708 - RNA, 16 nt, Human T-lymphotropic virus 1
auuuccgggcccugcc

SEQ ID NO: 2919709 - RNA, 23 nt, Human T-lymphotropic virus 1
acccuuguuccuuaaaaugccca

SEQ ID NO: 2919710 - RNA, 15 nt, Human T-lymphotropic virus 1
cgccauacuacccau

SEQ ID NO: 2919711 - RNA, 14 nt, Human T-lymphotropic virus 1
cgauggcagcuuca

SEQ ID NO: 2919712 - RNA, 23 nt, Human T-lymphotropic virus 1
uagcgcuuccagccccccaccug

SEQ ID NO: 2919713 - RNA, 22 nt, Human T-lymphotropic virus 1
agcgcuaguucugcccagugga

SEQ ID NO: 2919714 - RNA, 14 nt, Human T-lymphotropic virus 1
cuucuccucuuccu

SEQ ID NO: 2919715 - RNA, 16 nt, Human T-lymphotropic virus 1
cccagcaaaccccugg

SEQ ID NO: 2919716 - RNA, 13 nt, Human T-lymphotropic virus 1
cuuccccacccag

SEQ ID NO: 2919717 - RNA, 20 nt, Human T-lymphotropic virus 1
ucgccacuuugauuuuauuc

SEQ ID NO: 2919718 - RNA, 17 nt, Human T-lymphotropic virus 1
uuucgccuucucagccc

SEQ ID NO: 2919719 - RNA, 18 nt, Human T-lymphotropic virus 1
cgccuuaccugaggccgc

SEQ ID NO: 2919720 - RNA, 15 nt, Human T-lymphotropic virus 1
uaaaaugcccauacc

SEQ ID NO: 2919721 - RNA, 14 nt, Human T-lymphotropic virus 1
cugaucccaucucc

SEQ ID NO: 2919722 - RNA, 20 nt, Human T-lymphotropic virus 1
accuccuccguucagccucc

SEQ ID NO: 2919723 - RNA, 21 nt, Human T-lymphotropic virus 1
acccuguucgaaaugcagcug

SEQ ID NO: 2919724 - RNA, 15 nt, Human T-lymphotropic virus 1
aucuuuaucauuacc

SEQ ID NO: 2919725 - RNA, 16 nt, Human T-lymphotropic virus 1
uagcgcuuccagcccc

SEQ ID NO: 2919726 - RNA, 15 nt, Human T-lymphotropic virus 1
ugcucuauccauagc

SEQ ID NO: 2919727 - RNA, 19 nt, Human T-lymphotropic virus 1
uacugacaaacccgaccua

SEQ ID NO: 2919728 - RNA, 14 nt, Human T-lymphotropic virus 1
cccauauccugcag

SEQ ID NO: 2919729 - RNA, 19 nt, Human T-lymphotropic virus 1
cuucccccgggcccccuga

SEQ ID NO: 2919730 - RNA, 16 nt, Human T-lymphotropic virus 1
ccggcgcugcucucau

SEQ ID NO: 2919731 - RNA, 19 nt, Human T-lymphotropic virus 1
ccccacacuagccagugcc

SEQ ID NO: 2919732 - RNA, 12 nt, Human T-lymphotropic virus 1
ccggccagcucg

SEQ ID NO: 2919733 - RNA, 13 nt, Human T-lymphotropic virus 1
ccuggccccuccu

SEQ ID NO: 2919734 - RNA, 19 nt, Human T-lymphotropic virus 1
gcccuacagccacccugcc

SEQ ID NO: 2919735 - RNA, 15 nt, Human T-lymphotropic virus 1
cauggccucuccagc

SEQ ID NO: 2919736 - RNA, 18 nt, Human T-lymphotropic virus 1
gcuuccucuucuccucag

SEQ ID NO: 2919737 - RNA, 13 nt, Human T-lymphotropic virus 1
cagaccuccggga

SEQ ID NO: 2919738 - RNA, 18 nt, Human T-lymphotropic virus 1
cagcuacuugccucagcu

SEQ ID NO: 2919739 - RNA, 14 nt, Human T-lymphotropic virus 1
cugacccucacugg

SEQ ID NO: 2919740 - RNA, 16 nt, Human T-lymphotropic virus 1
cagaacgccuccaggc

SEQ ID NO: 2919741 - RNA, 13 nt, Human T-lymphotropic virus 1
gcuagaacaccuc

SEQ ID NO: 2919742 - RNA, 23 nt, Human T-lymphotropic virus 1
gccauugccuaucuaggcaagcc

SEQ ID NO: 2919743 - RNA, 13 nt, Human T-lymphotropic virus 1
ccacucuaaaccc

SEQ ID NO: 2919744 - RNA, 15 nt, Human T-lymphotropic virus 1
ccugcucuuccugcu

SEQ ID NO: 2919745 - RNA, 21 nt, Human T-lymphotropic virus 1
cucaggcccccuuucaggccc

SEQ ID NO: 2919746 - RNA, 22 nt, Human T-lymphotropic virus 1
ucccgccuguggugccuccuga

SEQ ID NO: 2919747 - RNA, 23 nt, Human T-lymphotropic virus 1
ccucagcaauaaacaaacccauu

SEQ ID NO: 2919748 - RNA, 14 nt, Human T-lymphotropic virus 1
cauucccccuuccg

SEQ ID NO: 2919749 - RNA, 12 nt, Human T-lymphotropic virus 1
cauuccacccuc

SEQ ID NO: 2919750 - RNA, 14 nt, Human T-lymphotropic virus 1
caucgaaacagccc

SEQ ID NO: 2919751 - RNA, 21 nt, Human T-lymphotropic virus 1
cucgacaaauacaccuugcaa

SEQ ID NO: 2919752 - RNA, 15 nt, Human T-lymphotropic virus 1
cuuaugccaguguuu

SEQ ID NO: 2919753 - RNA, 18 nt, Human T-lymphotropic virus 1
ccccuacaauccaaccag

SEQ ID NO: 2919754 - RNA, 15 nt, Human T-lymphotropic virus 1
ugacauucuccuggc

SEQ ID NO: 2919755 - RNA, 18 nt, Human T-lymphotropic virus 1
cuaaccacaucuggcaag

SEQ ID NO: 2919756 - RNA, 23 nt, Human T-lymphotropic virus 1
caaggacuccaccucgccuucca

SEQ ID NO: 2919757 - RNA, 16 nt, Human T-lymphotropic virus 1
ucaaaacuccugacuc

SEQ ID NO: 2919758 - RNA, 20 nt, Human T-lymphotropic virus 1
cccuguccugcagcucucuc

SEQ ID NO: 2919759 - RNA, 12 nt, Human T-lymphotropic virus 1
uccagccccuac

SEQ ID NO: 2919760 - RNA, 17 nt, Human T-lymphotropic virus 1
gucacgcugacagccug

SEQ ID NO: 2919761 - RNA, 19 nt, Human T-lymphotropic virus 1
uaaccaagacccaacaucu

SEQ ID NO: 2919762 - RNA, 14 nt, Human T-lymphotropic virus 1
caguuuccuccucc

SEQ ID NO: 2919763 - RNA, 13 nt, Human T-lymphotropic virus 1
ccuguacacccuc

SEQ ID NO: 2919764 - RNA, 18 nt, Human T-lymphotropic virus 1
ugcccuaggcaccuucca

SEQ ID NO: 2919765 - RNA, 21 nt, Human T-lymphotropic virus 1
auccugcgcucuugccacgcc

SEQ ID NO: 2919766 - RNA, 17 nt, Human T-lymphotropic virus 1
uccaggauaugacccca

SEQ ID NO: 2919767 - RNA, 20 nt, Human T-lymphotropic virus 1
cucgccucaggaaagagccu

SEQ ID NO: 2919768 - RNA, 18 nt, Human T-lymphotropic virus 1
cucauacaguacucuucc

SEQ ID NO: 2919769 - RNA, 14 nt, Human T-lymphotropic virus 1
gcgccagcuguccu

SEQ ID NO: 2919770 - RNA, 18 nt, Human T-lymphotropic virus 1
cuauagucuccucccccu

SEQ ID NO: 2919771 - RNA, 21 nt, Human T-lymphotropic virus 1
acugacaaacccgaccuaccu

SEQ ID NO: 2919772 - RNA, 14 nt, Human T-lymphotropic virus 1
augcagcuggccca

SEQ ID NO: 2919773 - RNA, 17 nt, Human T-lymphotropic virus 1
uccugcagcucucuccu

SEQ ID NO: 2919774 - RNA, 16 nt, Human T-lymphotropic virus 1
cuccagccuccccugc

SEQ ID NO: 2919775 - RNA, 15 nt, Human T-lymphotropic virus 1
ccaugcauccuccgu

SEQ ID NO: 2919776 - RNA, 18 nt, Human T-lymphotropic virus 1
cccagaauaaggcucuga

SEQ ID NO: 2919777 - RNA, 20 nt, Human T-lymphotropic virus 1
cauuuaacuggacccacugc

SEQ ID NO: 2919778 - RNA, 13 nt, Human T-lymphotropic virus 1
cagccaacugccu

SEQ ID NO: 2919779 - RNA, 20 nt, Human T-lymphotropic virus 1
ucacaguuggagucuccuca

SEQ ID NO: 2919780 - RNA, 19 nt, Human T-lymphotropic virus 1
agcgcuuccagccccccac

SEQ ID NO: 2919781 - RNA, 16 nt, Human T-lymphotropic virus 1
cucuucuccucagccc

SEQ ID NO: 2919782 - RNA, 14 nt, Human T-lymphotropic virus 1
ccaauggaaccugg

SEQ ID NO: 2919783 - RNA, 17 nt, Human T-lymphotropic virus 1
ccccuuucaggcccucc

SEQ ID NO: 2919784 - RNA, 14 nt, Human T-lymphotropic virus 1
cauaagcucagacc

SEQ ID NO: 2919785 - RNA, 17 nt, Human T-lymphotropic virus 1
gcuucccuaaucuccca

SEQ ID NO: 2919786 - RNA, 13 nt, Human T-lymphotropic virus 1
cacccuccuuccu

SEQ ID NO: 2919787 - RNA, 17 nt, Human T-lymphotropic virus 1
uggcaagccccucccau

SEQ ID NO: 2919788 - RNA, 18 nt, Human T-lymphotropic virus 1
agcccagauugacaccca

SEQ ID NO: 2919789 - RNA, 18 nt, Human T-lymphotropic virus 1
uacaacaaugccaaggcg

SEQ ID NO: 2919790 - RNA, 17 nt, Human T-lymphotropic virus 1
gcaaauacucccccuuc

SEQ ID NO: 2919791 - RNA, 13 nt, Human T-lymphotropic virus 1
ccaccucgccuuc

SEQ ID NO: 2919792 - RNA, 23 nt, Human T-lymphotropic virus 1
auucccaguuaaaaaagccaaug

SEQ ID NO: 2919793 - RNA, 18 nt, Human T-lymphotropic virus 1
gcucagcaccagcucagg

SEQ ID NO: 2919794 - RNA, 14 nt, Human T-lymphotropic virus 1
ugacauucuccugg

SEQ ID NO: 2919795 - RNA, 21 nt, Human T-lymphotropic virus 1
agguaaguuuagagcucaggu

SEQ ID NO: 2919796 - RNA, 13 nt, Human T-lymphotropic virus 1
ucccucauccugc

SEQ ID NO: 2919797 - RNA, 18 nt, Human T-lymphotropic virus 1
gccuccaauauccugcgc

SEQ ID NO: 2919798 - RNA, 17 nt, Human T-lymphotropic virus 1
caucgccuccagccucc

SEQ ID NO: 2919799 - RNA, 20 nt, Human T-lymphotropic virus 1
cccuacuaaucaccccuguc

SEQ ID NO: 2919800 - RNA, 16 nt, Human T-lymphotropic virus 1
ggccccuccugcccca

SEQ ID NO: 2919801 - RNA, 16 nt, Human T-lymphotropic virus 1
uguaccucccuugcua

SEQ ID NO: 2919802 - RNA, 21 nt, Human T-lymphotropic virus 1
gaggacagcucagcaccagcu

SEQ ID NO: 2919803 - RNA, 12 nt, Human T-lymphotropic virus 1
ucaggcccccuu

SEQ ID NO: 2919804 - RNA, 16 nt, Human T-lymphotropic virus 1
uaacaucuccacccaa

SEQ ID NO: 2919805 - RNA, 12 nt, Human T-lymphotropic virus 1
auuuccucccca

SEQ ID NO: 2919806 - RNA, 21 nt, Human T-lymphotropic virus 1
cagcucagcaccagcucaggc

SEQ ID NO: 2919807 - RNA, 15 nt, Human T-lymphotropic virus 1
aggcaagccuagcua

SEQ ID NO: 2919808 - RNA, 18 nt, Human T-lymphotropic virus 1
ugccucccaccgccccuc

SEQ ID NO: 2919809 - RNA, 23 nt, Human T-lymphotropic virus 1
gguugagucgcguucugccgccu

SEQ ID NO: 2919810 - RNA, 16 nt, Human T-lymphotropic virus 1
gcgcuaguucugccca

SEQ ID NO: 2919811 - RNA, 14 nt, Human T-lymphotropic virus 1
auaugaccccaucu

SEQ ID NO: 2919812 - RNA, 22 nt, Human T-lymphotropic virus 1
uauuuccucuuugcuccaggcc

SEQ ID NO: 2919813 - RNA, 15 nt, Human T-lymphotropic virus 1
ucaagcacaguuucc

SEQ ID NO: 2919814 - RNA, 22 nt, Human T-lymphotropic virus 1
cagggcccagaauaaggcucug

SEQ ID NO: 2919815 - RNA, 21 nt, Human T-lymphotropic virus 1
cugucauaacucccucauccu

SEQ ID NO: 2919816 - RNA, 12 nt, Human T-lymphotropic virus 1
guucugcccagu

SEQ ID NO: 2919817 - RNA, 13 nt, Human T-lymphotropic virus 1
ucgccuccagccu

SEQ ID NO: 2919818 - RNA, 12 nt, Human T-lymphotropic virus 1
cgccuccaggcc

SEQ ID NO: 2919819 - RNA, 14 nt, Human T-lymphotropic virus 1
cuccacgcuuugcc

SEQ ID NO: 2919820 - RNA, 23 nt, Human T-lymphotropic virus 1
accccuguccugcagcucucucc

SEQ ID NO: 2919821 - RNA, 14 nt, Human T-lymphotropic virus 1
ggaaauaacccagu

SEQ ID NO: 2919822 - RNA, 14 nt, Human T-lymphotropic virus 1
acuccaccacaguc

SEQ ID NO: 2919823 - RNA, 18 nt, Human T-lymphotropic virus 1
cggauccaccucccaggc

SEQ ID NO: 2919824 - RNA, 18 nt, Human T-lymphotropic virus 1
aucgucacgcccuacugg

SEQ ID NO: 2919825 - RNA, 18 nt, Human T-lymphotropic virus 1
ccaccucgccuuccaacu

SEQ ID NO: 2919826 - RNA, 18 nt, Human T-lymphotropic virus 1
cugaucccaucuccaggc

SEQ ID NO: 2919827 - RNA, 12 nt, Human T-lymphotropic virus 1
ccuccagccucc

SEQ ID NO: 2919828 - RNA, 20 nt, Human T-lymphotropic virus 1
accuggccccuccugcccca

SEQ ID NO: 2919829 - RNA, 17 nt, Human T-lymphotropic virus 1
ccgccguggccuacucc

SEQ ID NO: 2919830 - RNA, 11 nt, Human T-lymphotropic virus 1
caucuccaccc

SEQ ID NO: 2919831 - RNA, 20 nt, Human T-lymphotropic virus 1
aucaggcccuacagccaccc

SEQ ID NO: 2919832 - RNA, 21 nt, Human T-lymphotropic virus 1
accagcuuuccccccccauca

SEQ ID NO: 2919833 - RNA, 20 nt, Human T-lymphotropic virus 1
uuaccauuuaacuggaccca

SEQ ID NO: 2919834 - RNA, 14 nt, Human T-lymphotropic virus 1
uuacgccagccccu

SEQ ID NO: 2919835 - RNA, 20 nt, Human T-lymphotropic virus 1
gcccaccacccuuuuccagc

SEQ ID NO: 2919836 - RNA, 16 nt, Human T-lymphotropic virus 1
gccgucuccagccccu

SEQ ID NO: 2919837 - RNA, 13 nt, Human T-lymphotropic virus 1
agaacugccgcag

SEQ ID NO: 2919838 - RNA, 18 nt, Human T-lymphotropic virus 1
gcugggcgcuaccugaac

SEQ ID NO: 2919839 - RNA, 21 nt, Human T-lymphotropic virus 1
ucuaguaaguuacuccagcua

SEQ ID NO: 2919840 - RNA, 15 nt, Human T-lymphotropic virus 1
cacggcgcuccugcu

SEQ ID NO: 2919841 - RNA, 23 nt, Human T-lymphotropic virus 1
uaggggcuauuaugcugacccuc

SEQ ID NO: 2919842 - RNA, 17 nt, Human T-lymphotropic virus 1
uucgcuuccucuucucc

SEQ ID NO: 2919843 - RNA, 12 nt, Human T-lymphotropic virus 1
ucuccucagccc

SEQ ID NO: 2919844 - RNA, 20 nt, Human T-lymphotropic virus 1
aaccaacugccacaaaaccc

SEQ ID NO: 2919845 - RNA, 17 nt, Human T-lymphotropic virus 1
gccugacccugcuugcu

SEQ ID NO: 2919846 - RNA, 13 nt, Human T-lymphotropic virus 1
ugcauggccucuc

SEQ ID NO: 2919847 - RNA, 19 nt, Human T-lymphotropic virus 1
ggucgagaccgggccuuug

SEQ ID NO: 2919848 - RNA, 17 nt, Human T-lymphotropic virus 1
ggcccauauccugcagc

SEQ ID NO: 2919849 - RNA, 19 nt, Human T-lymphotropic virus 1
cucagugaaaaacauuucc

SEQ ID NO: 2919850 - RNA, 21 nt, Human T-lymphotropic virus 1
aucaaauccuccuucuccugc

SEQ ID NO: 2919851 - RNA, 23 nt, Human T-lymphotropic virus 1
cugcccuaaagauggccagccau

SEQ ID NO: 2919852 - RNA, 14 nt, Human T-lymphotropic virus 1
cccucgacuccccu

SEQ ID NO: 2919853 - RNA, 16 nt, Human T-lymphotropic virus 1
gacaaagauauuuccc

SEQ ID NO: 2919854 - RNA, 13 nt, Human T-lymphotropic virus 1
gacagcucagcac

SEQ ID NO: 2919855 - RNA, 12 nt, Human T-lymphotropic virus 1
auccuucucaag

SEQ ID NO: 2919856 - RNA, 18 nt, Human T-lymphotropic virus 1
cuucuccugcagcaaccu

SEQ ID NO: 2919857 - RNA, 24 nt, Human T-lymphotropic virus 1
cucccaucaaauccuccuucuccu

SEQ ID NO: 2919858 - RNA, 15 nt, Human T-lymphotropic virus 1
cuagaacaccuccca

SEQ ID NO: 2919859 - RNA, 14 nt, Human T-lymphotropic virus 1
auagucccacccug

SEQ ID NO: 2919860 - RNA, 21 nt, Human T-lymphotropic virus 1
auaccacucuaaacccugcaa

SEQ ID NO: 2919861 - RNA, 18 nt, Human T-lymphotropic virus 1
cccucuauaccauggaaa

SEQ ID NO: 2919862 - RNA, 16 nt, Human T-lymphotropic virus 1
gacccucgaccugcug

SEQ ID NO: 2919863 - RNA, 21 nt, Human T-lymphotropic virus 1
caacugccccauuggcuccug

SEQ ID NO: 2919864 - RNA, 20 nt, Human T-lymphotropic virus 1
cagccucuuauucagacccu

SEQ ID NO: 2919865 - RNA, 17 nt, Human T-lymphotropic virus 1
uguucgaaaugcagcug

SEQ ID NO: 2919866 - RNA, 21 nt, Human T-lymphotropic virus 1
cgucuccccccggaggacagc

SEQ ID NO: 2919867 - RNA, 13 nt, Human T-lymphotropic virus 1
cggacccuugccc

SEQ ID NO: 2919868 - RNA, 16 nt, Human T-lymphotropic virus 1
cagccccuugucucca

SEQ ID NO: 2919869 - RNA, 17 nt, Human T-lymphotropic virus 1
ugcagcuggcccauauc

SEQ ID NO: 2919870 - RNA, 14 nt, Human T-lymphotropic virus 1
cccacuucccaggg

SEQ ID NO: 2919871 - RNA, 16 nt, Human T-lymphotropic virus 1
ccuccuccguucagcc

SEQ ID NO: 2919872 - RNA, 13 nt, Human T-lymphotropic virus 1
gcgcuuccagccc

SEQ ID NO: 2919873 - RNA, 13 nt, Human T-lymphotropic virus 1
cgcaucucuccuu

SEQ ID NO: 2919874 - RNA, 17 nt, Human T-lymphotropic virus 1
guuccuaucuuacucca

SEQ ID NO: 2919875 - RNA, 21 nt, Human T-lymphotropic virus 1
accacaggaggcucuucaaga

SEQ ID NO: 2919876 - RNA, 23 nt, Human T-lymphotropic virus 1
uucacaaauuucaaaccaaggcc

SEQ ID NO: 2919877 - RNA, 21 nt, Human T-lymphotropic virus 1
ccaccgggaaccacccauuuc

SEQ ID NO: 2919878 - RNA, 16 nt, Human T-lymphotropic virus 1
cacgcuuugccugacc

SEQ ID NO: 2919879 - RNA, 22 nt, Human T-lymphotropic virus 1
acuccagcuaccaugccaccua

SEQ ID NO: 2919880 - RNA, 23 nt, Human T-lymphotropic virus 1
caauggcccugccuauauuuccc

SEQ ID NO: 2919881 - RNA, 21 nt, Human T-lymphotropic virus 1
ugcgccgugccuucuccucuu

SEQ ID NO: 2919882 - RNA, 20 nt, Human T-lymphotropic virus 1
cugcccuaaagauggccagc

SEQ ID NO: 2919883 - RNA, 12 nt, Human T-lymphotropic virus 1
acuggccaccug

SEQ ID NO: 2919884 - RNA, 17 nt, Human T-lymphotropic virus 1
uccucuuugcuccaggc

SEQ ID NO: 2919885 - RNA, 19 nt, Human T-lymphotropic virus 1
accacaucgccuccagccu

SEQ ID NO: 2919886 - RNA, 15 nt, Human T-lymphotropic virus 1
ccaucucugggggac

SEQ ID NO: 2919887 - RNA, 16 nt, Human T-lymphotropic virus 1
ucuauaaaauuucccu

SEQ ID NO: 2919888 - RNA, 10 nt, Human T-lymphotropic virus 1
cccccccuug

SEQ ID NO: 2919889 - RNA, 12 nt, Human
cuucucuuaauu

SEQ ID NO: 2919890 - RNA, 16 nt, Human
cuucucuuaauuuaau

SEQ ID NO: 2919891 - RNA, 15 nt, Human
cuucucuuaauuuaa

SEQ ID NO: 2919892 - RNA, 14 nt, Human
cuucucuuaauuua

SEQ ID NO: 2919893 - RNA, 15 nt, Human
cuuggguggagaagc

SEQ ID NO: 2919894 - RNA, 17 nt, Human
cuuggguggagaagcca

SEQ ID NO: 2919895 - RNA, 18 nt, Human
cuuggguggagaagccau

SEQ ID NO: 2919896 - RNA, 23 nt, Human
cuuggguggagaagccauugucu

SEQ ID NO: 2919897 - RNA, 19 nt, Human
cuuggguggagaagccauu

SEQ ID NO: 2919898 - RNA, 20 nt, Human
cuuggguggagaagccauug

SEQ ID NO: 2919899 - RNA, 14 nt, Human
cuuggucacauaca

SEQ ID NO: 2919900 - RNA, 17 nt, Human
cuugguguaguugaacu

SEQ ID NO: 2919901 - RNA, 18 nt, Human
gaagacauguuuuagaca

SEQ ID NO: 2919902 - RNA, 12 nt, Human
gaagacauguuu

SEQ ID NO: 2919903 - RNA, 21 nt, Human
gaacugcauauguuucgcuga

SEQ ID NO: 2919904 - RNA, 15 nt, Human
gaacugcauauguuu

SEQ ID NO: 2919905 - RNA, 19 nt, Human
gaacugauaguuacuguug

SEQ ID NO: 2919906 - RNA, 13 nt, Human
gaacugauaguua

SEQ ID NO: 2919907 - RNA, 15 nt, Human
gaaacaaagcuuagc

SEQ ID NO: 2919908 - RNA, 19 nt, Human
gaaacaaagcuuagcagga

SEQ ID NO: 2919909 - RNA, 22 nt, Human
gaaacaaagcuuagcaggagag

SEQ ID NO: 2919910 - RNA, 13 nt, Human
gaaaugaaagaaa

SEQ ID NO: 2919911 - RNA, 22 nt, Human
gauucuguguguuuucauaaua

SEQ ID NO: 2919912 - RNA, 19 nt, Human
gauucuguguguuuucaua

SEQ ID NO: 2919913 - RNA, 20 nt, Human
gcaaaaaacucgaggacugu

SEQ ID NO: 2919914 - RNA, 22 nt, Human
gauguacauuuccaaauucaca

SEQ ID NO: 2919915 - RNA, 15 nt, Human
gauguacauuuccaa

SEQ ID NO: 2919916 - RNA, 12 nt, Human
gccaagcacagu

SEQ ID NO: 2919917 - RNA, 16 nt, Human
gccaagcacaguggug

SEQ ID NO: 2919918 - RNA, 21 nt, Human
gccaagcacagugguggcagg

SEQ ID NO: 2919919 - RNA, 13 nt, Human
gcauacaaucuga

SEQ ID NO: 2919920 - RNA, 17 nt, Human
gagcccggaugcuucuc

SEQ ID NO: 2919921 - RNA, 17 nt, Human
gacuguauuugugacua

SEQ ID NO: 2919922 - RNA, 19 nt, Human
gacuguauuugugacuaau

SEQ ID NO: 2919923 - RNA, 20 nt, Human
gacuguauuugugacuaauu

SEQ ID NO: 2919924 - RNA, 16 nt, Human
gacuguauuugugacu

SEQ ID NO: 2919925 - RNA, 22 nt, Human
gacuguauuugugacuaauugu

SEQ ID NO: 2919926 - RNA, 23 nt, Human
gacuguauuugugacuaauugua

SEQ ID NO: 2919927 - RNA, 13 nt, Human
gacgcugaauaaa

SEQ ID NO: 2919928 - RNA, 16 nt, Human
gacgcugaauaaaugu

SEQ ID NO: 2919929 - RNA, 17 nt, Human
gacgcugaauaaauguc

SEQ ID NO: 2919930 - RNA, 19 nt, Human
gacacuuuuuugaguggau

SEQ ID NO: 2919931 - RNA, 21 nt, Human
aaaacauccagauacacccaa

SEQ ID NO: 2919932 - RNA, 16 nt, Human
aaaacauccagauaca

SEQ ID NO: 2919933 - RNA, 15 nt, Human
aaacaaagcuuagca

SEQ ID NO: 2919934 - RNA, 17 nt, Human
aaacaaagcuuagcagg

SEQ ID NO: 2919935 - RNA, 22 nt, Human
aaacaaagcuuagcaggagagg

SEQ ID NO: 2919936 - RNA, 23 nt, Human
aaacaaagcuuagcaggagagga

SEQ ID NO: 2919937 - RNA, 15 nt, Human
aaacaauauuguuuc

SEQ ID NO: 2919938 - RNA, 14 nt, Human
aaacaauauuguuu

SEQ ID NO: 2919939 - RNA, 17 nt, Human
aaacaauauuguuucua

SEQ ID NO: 2919940 - RNA, 16 nt, Human
aaacaauauuguuucu

SEQ ID NO: 2919941 - RNA, 23 nt, Human
aaacucgaggacuguauuuguga

SEQ ID NO: 2919942 - RNA, 24 nt, Human
aaacucgaggacuguauuugugac

SEQ ID NO: 2919943 - RNA, 16 nt, Human
aaacucgaggacugua

SEQ ID NO: 2919944 - RNA, 15 nt, Human
aaacucauuuccuau

SEQ ID NO: 2919945 - RNA, 17 nt, Human
aaacucgaggacuguau

SEQ ID NO: 2919946 - RNA, 19 nt, Human
aaacucgaggacuguauuu

SEQ ID NO: 2919947 - RNA, 20 nt, Human
aaacucgaggacuguauuug

SEQ ID NO: 2919948 - RNA, 22 nt, Human
aaacucgaggacuguauuugug

SEQ ID NO: 2919949 - RNA, 13 nt, Human
gguggagaagcca

SEQ ID NO: 2919950 - RNA, 14 nt, Human
gguggagaagccau

SEQ ID NO: 2919951 - RNA, 15 nt, Human
gguggagaagccauu

SEQ ID NO: 2919952 - RNA, 21 nt, Human
gguccuuugggaaaggagaag

SEQ ID NO: 2919953 - RNA, 17 nt, Human
aaauaauaaagaugcuc

SEQ ID NO: 2919954 - RNA, 19 nt, Human
aaauaauaaagaugcucuu

SEQ ID NO: 2919955 - RNA, 14 nt, Human
aaaguuagucuacu

SEQ ID NO: 2919956 - RNA, 23 nt, Human
aaaguuagucuacucuuaagcca

SEQ ID NO: 2919957 - RNA, 12 nt, Human
aaaguugaaauu

SEQ ID NO: 2919958 - RNA, 16 nt, Human
aaaggguuuuaaugua

SEQ ID NO: 2919959 - RNA, 14 nt, Human
aaauacucaugugu

SEQ ID NO: 2919960 - RNA, 15 nt, Human
aaauacucaugugua

SEQ ID NO: 2919961 - RNA, 16 nt, Human
aaauacucauguguau

SEQ ID NO: 2919962 - RNA, 17 nt, Human
aaauacucauguguaug

SEQ ID NO: 2919963 - RNA, 21 nt, Human
aaauacucauguguaugggca

SEQ ID NO: 2919964 - RNA, 11 nt, Human
guaauuuauuu

SEQ ID NO: 2919965 - RNA, 13 nt, Human
guaacugacaacu

SEQ ID NO: 2919966 - RNA, 19 nt, Human
guaacugcauugagaacug

SEQ ID NO: 2919967 - RNA, 18 nt, Human
guaacugcauugagaacu

SEQ ID NO: 2919968 - RNA, 22 nt, Human
guaacugcauugagaacugcau

SEQ ID NO: 2919969 - RNA, 16 nt, Human
guaccagauaaaauua

SEQ ID NO: 2919970 - RNA, 13 nt, Human
ggaagcuacaggu

SEQ ID NO: 2919971 - RNA, 15 nt, Human
ggaagcuacagguua

SEQ ID NO: 2919972 - RNA, 23 nt, Human
ggaagcuacagguuacaacagau

SEQ ID NO: 2919973 - RNA, 21 nt, Human
ggaagcuacagguuacaacag

SEQ ID NO: 2919974 - RNA, 22 nt, Human
ggaagcuacagguuacaacaga

SEQ ID NO: 2919975 - RNA, 18 nt, Human
gcuacucuguuccuucac

SEQ ID NO: 2919976 - RNA, 17 nt, Human
gcuacucuguuccuuca

SEQ ID NO: 2919977 - RNA, 20 nt, Human
gcuaauaucaauagaaggau

SEQ ID NO: 2919978 - RNA, 15 nt, Human
gccuagcugcuacaa

SEQ ID NO: 2919979 - RNA, 16 nt, Human
gccuagcugcuacaaa

SEQ ID NO: 2919980 - RNA, 17 nt, Human
gccuagcugcuacaaag

SEQ ID NO: 2919981 - RNA, 19 nt, Human
gccuagcugcuacaaagaa

SEQ ID NO: 2919982 - RNA, 22 nt, Human
gccuagcugcuacaaagaagac

SEQ ID NO: 2919983 - RNA, 23 nt, Human
gccuagcugcuacaaagaagaca

SEQ ID NO: 2919984 - RNA, 24 nt, Human
gccuagcugcuacaaagaagacau

SEQ ID NO: 2919985 - RNA, 14 nt, Human
gccuagcugcuaca

SEQ ID NO: 2919986 - RNA, 18 nt, Human
cugacacaaaaaguagau

SEQ ID NO: 2919987 - RNA, 14 nt, Human
cuccauacucagga

SEQ ID NO: 2919988 - RNA, 17 nt, Human
cuauguggcuguaucuu

SEQ ID NO: 2919989 - RNA, 19 nt, Human
cuaacucagaaacaucagu

SEQ ID NO: 2919990 - RNA, 14 nt, Human
ccccaugcuguuga

SEQ ID NO: 2919991 - RNA, 19 nt, Human
cccaagcaaaaucauggaa

SEQ ID NO: 2919992 - RNA, 20 nt, Human
ccuaaguuucaguugauuuu

SEQ ID NO: 2919993 - RNA, 22 nt, Human
cacaucuccuccauacucagga

SEQ ID NO: 2919994 - RNA, 16 nt, Human
caaaggguuuuaaugu

SEQ ID NO: 2919995 - RNA, 19 nt, Human
caaaguaucaggacgagaa

SEQ ID NO: 2919996 - RNA, 18 nt, Human
caaaggguuuuaauguag

SEQ ID NO: 2919997 - RNA, 19 nt, Human
caaaggguuuuaauguaga

SEQ ID NO: 2919998 - RNA, 20 nt, Human
caacaaaggguuuuaaugua

SEQ ID NO: 2919999 - RNA, 19 nt, Human
caacaaaggguuuuaaugu

SEQ ID NO: 2920000 - RNA, 14 nt, Human
auuccuucagggug

SEQ ID NO: 2920001 - RNA, 15 nt, Human
auuccuucaggguga

SEQ ID NO: 2920002 - RNA, 22 nt, Human
auuccuucagggugaugccagg

SEQ ID NO: 2920003 - RNA, 16 nt, Human
auuucugugggagaau

SEQ ID NO: 2920004 - RNA, 13 nt, Human
auuucugugggag

SEQ ID NO: 2920005 - RNA, 22 nt, Human
cauccuguguuucuagggaaau

SEQ ID NO: 2920006 - RNA, 21 nt, Human
cauccuguguuucuagggaaa

SEQ ID NO: 2920007 - RNA, 15 nt, Human
cauccuguguuucua

SEQ ID NO: 2920008 - RNA, 22 nt, Human
cagucugaucgugacgcugaau

SEQ ID NO: 2920009 - RNA, 16 nt, Human
auugaaaugacuaaaa

SEQ ID NO: 2920010 - RNA, 23 nt, Human
auucuguguguuuucauaauaaa

SEQ ID NO: 2920011 - RNA, 17 nt, Human
auuugugaacucagcca

SEQ ID NO: 2920012 - RNA, 20 nt, Human
auuugugaacucagccaagc

SEQ ID NO: 2920013 - RNA, 21 nt, Human
auuugugaacucagccaagca

SEQ ID NO: 2920014 - RNA, 17 nt, Human
auuuccaaauucacaag

SEQ ID NO: 2920015 - RNA, 16 nt, Human
auuuaaagacaaagac

SEQ ID NO: 2920016 - RNA, 20 nt, Human
uuucaaaacucauuuccuau

SEQ ID NO: 2920017 - RNA, 19 nt, Human
auggcaccaaagccaccag

SEQ ID NO: 2920018 - RNA, 16 nt, Human
uugguggagauaaaga

SEQ ID NO: 2920019 - RNA, 15 nt, Human
uuuaaugugcugugu

SEQ ID NO: 2920020 - RNA, 22 nt, Human
uuuaaugugcuguguaaaguua

SEQ ID NO: 2920021 - RNA, 20 nt, Human
uuuaaugugcuguguaaagu

SEQ ID NO: 2920022 - RNA, 21 nt, Human
uuuaaugugcuguguaaaguu

SEQ ID NO: 2920023 - RNA, 16 nt, Human
uuuaaugugcugugua

SEQ ID NO: 2920024 - RNA, 17 nt, Human
uuuaaugugcuguguaa

SEQ ID NO: 2920025 - RNA, 18 nt, Human
uuuaaugugcuguguaaa

SEQ ID NO: 2920026 - RNA, 19 nt, Human
uuuaaugugcuguguaaag

SEQ ID NO: 2920027 - RNA, 19 nt, Human
uuucuguucuguggaaagu

SEQ ID NO: 2920028 - RNA, 15 nt, Human
uuucuguucugugga

SEQ ID NO: 2920029 - RNA, 16 nt, Human
uuucuguucuguggaa

SEQ ID NO: 2920030 - RNA, 17 nt, Human
uuucuguucuguggaaa

SEQ ID NO: 2920031 - RNA, 14 nt, Human
augguuauaaaagu

SEQ ID NO: 2920032 - RNA, 16 nt, Human
augguuauaaaaguga

SEQ ID NO: 2920033 - RNA, 20 nt, Human
auguacauuuccaaauucac

SEQ ID NO: 2920034 - RNA, 19 nt, Human
auguagauaaacucagaaa

SEQ ID NO: 2920035 - RNA, 18 nt, Human
auguagauaaacucagaa

SEQ ID NO: 2920036 - RNA, 18 nt, Human
uuugugacuaauuguaua

SEQ ID NO: 2920037 - RNA, 22 nt, Human
uuugugacuaauuguauaacag

SEQ ID NO: 2920038 - RNA, 20 nt, Human
uuugugaacucagccaagca

SEQ ID NO: 2920039 - RNA, 12 nt, Human
uucgcugcaacc

SEQ ID NO: 2920040 - RNA, 12 nt, Human
uucggaaaccuu

SEQ ID NO: 2920041 - RNA, 18 nt, Human
uucggaaaccuuggugua

SEQ ID NO: 2920042 - RNA, 22 nt, Human
uucuuugguggagauaaagauu

SEQ ID NO: 2920043 - RNA, 21 nt, Human
uugaaaggcauucucugaaga

SEQ ID NO: 2920044 - RNA, 20 nt, Human
uugaaaggcauucucugaag

SEQ ID NO: 2920045 - RNA, 19 nt, Human
uugaaaggcauucucugaa

SEQ ID NO: 2920046 - RNA, 12 nt, Human
uugaauaauggu

SEQ ID NO: 2920047 - RNA, 19 nt, Human
uugaauaaugguaccagau

SEQ ID NO: 2920048 - RNA, 22 nt, Human
uugaauaaugguaccagauaaa

SEQ ID NO: 2920049 - RNA, 23 nt, Human
aucuugguaaauuuccccaacag

SEQ ID NO: 2920050 - RNA, 18 nt, Human
uuagaauuccuucagggu

SEQ ID NO: 2920051 - RNA, 15 nt, Human
auaauaugagaauca

SEQ ID NO: 2920052 - RNA, 20 nt, Human
auaauaugcacacagugcuu

SEQ ID NO: 2920053 - RNA, 12 nt, Human
auaauaugcaca

SEQ ID NO: 2920054 - RNA, 12 nt, Human
auaauaugagaa

SEQ ID NO: 2920055 - RNA, 19 nt, Human
uuaguuuuuguaauuuauu

SEQ ID NO: 2920056 - RNA, 13 nt, Human
uuauaaaagugau

SEQ ID NO: 2920057 - RNA, 16 nt, Human
uuaaauuuuaauuuau

SEQ ID NO: 2920058 - RNA, 16 nt, Human
aguuuuuguaauuuau

SEQ ID NO: 2920059 - RNA, 18 nt, Human
aguuuuguuuuaaaauua

SEQ ID NO: 2920060 - RNA, 14 nt, Human
auacucauguguau

SEQ ID NO: 2920061 - RNA, 13 nt, Human
auacucaugugua

SEQ ID NO: 2920062 - RNA, 15 nt, Human
auacucauguguaug

SEQ ID NO: 2920063 - RNA, 12 nt, Human
auagaugggaau

SEQ ID NO: 2920064 - RNA, 13 nt, Human
auagaugggaaug

SEQ ID NO: 2920065 - RNA, 15 nt, Human
auagaugggaaugaa

SEQ ID NO: 2920066 - RNA, 22 nt, Human
auagauguagauaaacucagaa

SEQ ID NO: 2920067 - RNA, 19 nt, Human
auagaugggaaugaagcuu

SEQ ID NO: 2920068 - RNA, 19 nt, Human
auagaaggauguacauuuc

SEQ ID NO: 2920069 - RNA, 18 nt, Human
uuaugugccguguuauug

SEQ ID NO: 2920070 - RNA, 18 nt, Human
auacaaccugcuugggug

SEQ ID NO: 2920071 - RNA, 14 nt, Human
auacaaccugcuug

SEQ ID NO: 2920072 - RNA, 14 nt, Human
auacauggauaaca

SEQ ID NO: 2920073 - RNA, 12 nt, Human
ugugcuguguaa

SEQ ID NO: 2920074 - RNA, 13 nt, Human
ugugcuguguaaa

SEQ ID NO: 2920075 - RNA, 14 nt, Human
ugugcuguguaaag

SEQ ID NO: 2920076 - RNA, 15 nt, Human
ugugcuguguaaagu

SEQ ID NO: 2920077 - RNA, 16 nt, Human
ugugcuguguaaaguu

SEQ ID NO: 2920078 - RNA, 23 nt, Human
ugugcuguguaaaguuagucuac

SEQ ID NO: 2920079 - RNA, 14 nt, Human
agugcccaacuguu

SEQ ID NO: 2920080 - RNA, 14 nt, Human
uguguaaaguuagu

SEQ ID NO: 2920081 - RNA, 17 nt, Human
uguguaaaguuagucua

SEQ ID NO: 2920082 - RNA, 13 nt, Human
aguggaugauguu

SEQ ID NO: 2920083 - RNA, 20 nt, Human
aguggaugauguuucgugaa

SEQ ID NO: 2920084 - RNA, 15 nt, Human
aguggaugauguuuc

SEQ ID NO: 2920085 - RNA, 18 nt, Human
uguuccuucacauccugu

SEQ ID NO: 2920086 - RNA, 17 nt, Human
aggugucauuuccauua

SEQ ID NO: 2920087 - RNA, 15 nt, Human
aggugucauuuccau

SEQ ID NO: 2920088 - RNA, 19 nt, Human
agguucuucccuuuuacau

SEQ ID NO: 2920089 - RNA, 23 nt, Human
agguucuucccuuuuacauacug

SEQ ID NO: 2920090 - RNA, 14 nt, Human
agucuauuagccac

SEQ ID NO: 2920091 - RNA, 20 nt, Human
agucagugcccaacuguuau

SEQ ID NO: 2920092 - RNA, 15 nt, Human
ugggcaaaaaacucg

SEQ ID NO: 2920093 - RNA, 16 nt, Human
ugggcaaaaaacucga

SEQ ID NO: 2920094 - RNA, 14 nt, Human
agggaaaugaaaga

SEQ ID NO: 2920095 - RNA, 17 nt, Human
agggcaucaugcaucuu

SEQ ID NO: 2920096 - RNA, 11 nt, Human
uggagaagcca

SEQ ID NO: 2920097 - RNA, 16 nt, Human
agcuuagcaggagagg

SEQ ID NO: 2920098 - RNA, 22 nt, Human
agcuuagcaggagaggagagcc

SEQ ID NO: 2920099 - RNA, 14 nt, Human
agcuuagcaggaga

SEQ ID NO: 2920100 - RNA, 22 nt, Human
ugcgaaugguuccauucucucu

SEQ ID NO: 2920101 - RNA, 17 nt, Human
ugcauaaagucagugcc

SEQ ID NO: 2920102 - RNA, 15 nt, Human
ucuguuccuucacau

SEQ ID NO: 2920103 - RNA, 13 nt, Human
ucuguuccuucac

SEQ ID NO: 2920104 - RNA, 22 nt, Human
ucuucccuuuuacauacugcug

SEQ ID NO: 2920105 - RNA, 21 nt, Human
ucuucccuuuuacauacugcu

SEQ ID NO: 2920106 - RNA, 19 nt, Human
ucuucccuuuuacauacug

SEQ ID NO: 2920107 - RNA, 15 nt, Human
agacauguuuuagac

SEQ ID NO: 2920108 - RNA, 17 nt, Human
agacauguuuuagacaa

SEQ ID NO: 2920109 - RNA, 19 nt, Human
agacauguuuuagacaaau

SEQ ID NO: 2920110 - RNA, 23 nt, Human
agacauguuuuagacaaauacuc

SEQ ID NO: 2920111 - RNA, 22 nt, Human
agaaauuuaauucauguuucuu

SEQ ID NO: 2920112 - RNA, 21 nt, Human
agaaauuuaauucauguuucu

SEQ ID NO: 2920113 - RNA, 17 nt, Human
agaaauuuaauucaugu

SEQ ID NO: 2920114 - RNA, 22 nt, Human
acuuuuuugaguggaugauguu

SEQ ID NO: 2920115 - RNA, 11 nt, Human
acuuuuuccag

SEQ ID NO: 2920116 - RNA, 14 nt, Human
ucucuccuguacuu

SEQ ID NO: 2920117 - RNA, 21 nt, Human
agcaacaucuagcaaauguua

SEQ ID NO: 2920118 - RNA, 19 nt, Human
agauuugugaacucagcca

SEQ ID NO: 2920119 - RNA, 21 nt, Human
agauuugugaacucagccaag

SEQ ID NO: 2920120 - RNA, 11 nt, Human
agauuugugaa

SEQ ID NO: 2920121 - RNA, 13 nt, Human
agauuugugaacu

SEQ ID NO: 2920122 - RNA, 15 nt, Human
agauuugugaacuca

SEQ ID NO: 2920123 - RNA, 16 nt, Human
agauuugugaacucag

SEQ ID NO: 2920124 - RNA, 13 nt, Human
ugaccugaaguuc

SEQ ID NO: 2920125 - RNA, 14 nt, Human
ugaccugaaguuca

SEQ ID NO: 2920126 - RNA, 18 nt, Human
ugaccugaaguucaccau

SEQ ID NO: 2920127 - RNA, 17 nt, Human
agauaaagauuucuuga

SEQ ID NO: 2920128 - RNA, 14 nt, Human
agauaaagauuucu

SEQ ID NO: 2920129 - RNA, 13 nt, Human
agauaaacucaga

SEQ ID NO: 2920130 - RNA, 21 nt, Human
agauaaaauuauagaugggaa

SEQ ID NO: 2920131 - RNA, 22 nt, Human
agauaaaauuauagaugggaau

SEQ ID NO: 2920132 - RNA, 19 nt, Human
agauaaacucagaaauuua

SEQ ID NO: 2920133 - RNA, 13 nt, Human
ugaagcuugugua

SEQ ID NO: 2920134 - RNA, 14 nt, Human
ugaagcuuguguau

SEQ ID NO: 2920135 - RNA, 15 nt, Human
ugaagcuuguguauc

SEQ ID NO: 2920136 - RNA, 23 nt, Human
ugaagcuuguguauccauuauca

SEQ ID NO: 2920137 - RNA, 20 nt, Human
agcacagugguggcagggcc

SEQ ID NO: 2920138 - RNA, 23 nt, Human
agcacagugguggcagggccuag

SEQ ID NO: 2920139 - RNA, 16 nt, Human
agcacagugguggcag

SEQ ID NO: 2920140 - RNA, 17 nt, Human
agcacagugguggcagg

SEQ ID NO: 2920141 - RNA, 18 nt, Human
agcacagugguggcaggg

SEQ ID NO: 2920142 - RNA, 19 nt, Human
agcacagugguggcagggc

SEQ ID NO: 2920143 - RNA, 15 nt, Human
agcacagugguggca

SEQ ID NO: 2920144 - RNA, 21 nt, Human
ucaccugagcccggaugcuuc

SEQ ID NO: 2920145 - RNA, 23 nt, Human
ucaccugagcccggaugcuucuc

SEQ ID NO: 2920146 - RNA, 22 nt, Human
ucaccugagcccggaugcuucu

SEQ ID NO: 2920147 - RNA, 20 nt, Human
accagagauaauaugagaau

SEQ ID NO: 2920148 - RNA, 19 nt, Human
ucacugacacaaaaaguag

SEQ ID NO: 2920149 - RNA, 12 nt, Human
accccaugcugu

SEQ ID NO: 2920150 - RNA, 16 nt, Human
accccaugcuguugau

SEQ ID NO: 2920151 - RNA, 17 nt, Human
accccaugcuguugauu

SEQ ID NO: 2920152 - RNA, 20 nt, Human
accccaugcuguugauugcu

SEQ ID NO: 2920153 - RNA, 22 nt, Human
accccaugcuguugauugcuaa

SEQ ID NO: 2920154 - RNA, 23 nt, Human
accccaugcuguugauugcuaaa

SEQ ID NO: 2920155 - RNA, 20 nt, Human
accuaaguuucaguugauuu

SEQ ID NO: 2920156 - RNA, 22 nt, Human
accugcuuggguggagaagcca

SEQ ID NO: 2920157 - RNA, 23 nt, Human
accugcuuggguggagaagccau

SEQ ID NO: 2920158 - RNA, 21 nt, Human
accugcuuggguggagaagcc

SEQ ID NO: 2920159 - RNA, 15 nt, Human
accugaaguucacca

SEQ ID NO: 2920160 - RNA, 13 nt, Human
accugaaguucac

SEQ ID NO: 2920161 - RNA, 13 nt, Human
uccacuacugcua

SEQ ID NO: 2920162 - RNA, 18 nt, Human
uccugcuacucuguuccu

SEQ ID NO: 2920163 - RNA, 14 nt, Human
uccugcuacucugu

SEQ ID NO: 2920164 - RNA, 19 nt, Human
uccuguguuucuagggaaa

SEQ ID NO: 2920165 - RNA, 12 nt, Human
uccuguguuucu

SEQ ID NO: 2920166 - RNA, 18 nt, Human
ucgaggcccagcgaccuc

SEQ ID NO: 2920167 - RNA, 20 nt, Human
ucgaggacuguauuugugac

SEQ ID NO: 2920168 - RNA, 19 nt, Human
ucgaggacuguauuuguga

SEQ ID NO: 2920169 - RNA, 14 nt, Human
acugcauacaaucu

SEQ ID NO: 2920170 - RNA, 22 nt, Human
acuggcaguuuuccauugguuu

SEQ ID NO: 2920171 - RNA, 16 nt, Human
acuggcaguuuuccau

SEQ ID NO: 2920172 - RNA, 18 nt, Human
uccuucagggugaugcca

SEQ ID NO: 2920173 - RNA, 23 nt, Human
uccuucagggugaugccagguuc

SEQ ID NO: 2920174 - RNA, 14 nt, Human
uccccaacagugug

SEQ ID NO: 2920175 - RNA, 20 nt, Human
uccccaacagugugaaguua

SEQ ID NO: 2920176 - RNA, 21 nt, Human
uccccaacagugugaaguuag

SEQ ID NO: 2920177 - RNA, 15 nt, Human
uccccaacaguguga

SEQ ID NO: 2920178 - RNA, 16 nt, Human
uccccaacagugugaa

SEQ ID NO: 2920179 - RNA, 18 nt, Human
uccccaacagugugaagu

SEQ ID NO: 2920180 - RNA, 19 nt, Human
uccccaacagugugaaguu

SEQ ID NO: 2920181 - RNA, 23 nt, Human
uccccaacagugugaaguuagaa

SEQ ID NO: 2920182 - RNA, 18 nt, Human
acuauauuaucaugcaaa

SEQ ID NO: 2920183 - RNA, 16 nt, Human
acucauuuccuaugua

SEQ ID NO: 2920184 - RNA, 21 nt, Human
acucugaagggcaucaugcau

SEQ ID NO: 2920185 - RNA, 20 nt, Human
acucugaagggcaucaugca

SEQ ID NO: 2920186 - RNA, 12 nt, Human
acacaucuccuc

SEQ ID NO: 2920187 - RNA, 14 nt, Human
acacaucuccucca

SEQ ID NO: 2920188 - RNA, 21 nt, Human
uaguuacuguugugaccugaa

SEQ ID NO: 2920189 - RNA, 17 nt, Human
uaguuacuguugugacc

SEQ ID NO: 2920190 - RNA, 18 nt, Human
uaguuacuguugugaccu

SEQ ID NO: 2920191 - RNA, 12 nt, Human
uauaacagguua

SEQ ID NO: 2920192 - RNA, 13 nt, Human
uauaacagguuau

SEQ ID NO: 2920193 - RNA, 15 nt, Human
uauaacagguuauuu

SEQ ID NO: 2920194 - RNA, 20 nt, Human
uauaacagguuauuuuaguu

SEQ ID NO: 2920195 - RNA, 21 nt, Human
uauaacagguuauuuuaguuu

SEQ ID NO: 2920196 - RNA, 15 nt, Human
uaugggcaaaaaacu

SEQ ID NO: 2920197 - RNA, 14 nt, Human
uauccauuaucaug

SEQ ID NO: 2920198 - RNA, 19 nt, Human
uauccauuaucauguguaa

SEQ ID NO: 2920199 - RNA, 15 nt, Human
uauccauuaucaugu

SEQ ID NO: 2920200 - RNA, 16 nt, Human
uauccauuaucaugug

SEQ ID NO: 2920201 - RNA, 17 nt, Human
uauccauuaucaugugu

SEQ ID NO: 2920202 - RNA, 18 nt, Human
uauccauuaucaugugua

SEQ ID NO: 2920203 - RNA, 18 nt, Human
uaucacugacacaaaaag

SEQ ID NO: 2920204 - RNA, 12 nt, Human
acagugugaagu

SEQ ID NO: 2920205 - RNA, 13 nt, Human
acagugugaaguu

SEQ ID NO: 2920206 - RNA, 22 nt, Human
acagugugaaguuagaauuccu

SEQ ID NO: 2920207 - RNA, 15 nt, Human
acagugugaaguuag

SEQ ID NO: 2920208 - RNA, 16 nt, Human
acagugugaaguuaga

SEQ ID NO: 2920209 - RNA, 18 nt, Human
acagugugaaguuagaau

SEQ ID NO: 2920210 - RNA, 19 nt, Human
acagugugaaguuagaauu

SEQ ID NO: 2920211 - RNA, 19 nt, Human
acagucugaucgugacgcu

SEQ ID NO: 2920212 - RNA, 20 nt, Human
acagucugaucgugacgcug

SEQ ID NO: 2920213 - RNA, 22 nt, Human
acagucugaucgugacgcugaa

SEQ ID NO: 2920214 - RNA, 12 nt, Human
uauuacaucuuu

SEQ ID NO: 2920215 - RNA, 17 nt, Human
uauuacaucuuucacau

SEQ ID NO: 2920216 - RNA, 23 nt, Human
uauuagccacaaaauugggaaag

SEQ ID NO: 2920217 - RNA, 15 nt, Human
uauuagccacaaaau

SEQ ID NO: 2920218 - RNA, 18 nt, Human
uauuuagggaacugcuug

SEQ ID NO: 2920219 - RNA, 17 nt, Human
uauuuagggaacugcuu

SEQ ID NO: 2920220 - RNA, 22 nt, Human
acaaauguguaucggaugcuuu

SEQ ID NO: 2920221 - RNA, 21 nt, Human
uagacaaauacucauguguau

SEQ ID NO: 2920222 - RNA, 21 nt, Human
aauuuuuuucaucuucucugg

SEQ ID NO: 2920223 - RNA, 22 nt, Human
aauuuuucucuaacucagaaac

SEQ ID NO: 2920224 - RNA, 20 nt, Human
aauuuuucucuaacucagaa

SEQ ID NO: 2920225 - RNA, 18 nt, Human
aauuuaauucauguuucu

SEQ ID NO: 2920226 - RNA, 23 nt, Human
aauuuaauucauguuucuuaaau

SEQ ID NO: 2920227 - RNA, 19 nt, Human
aauuuaauucauguuucuu

SEQ ID NO: 2920228 - RNA, 17 nt, Human
uacugaagguaaaauug

SEQ ID NO: 2920229 - RNA, 20 nt, Human
uacucuuaagccaucuuggu

SEQ ID NO: 2920230 - RNA, 21 nt, Human
uacucuuaagccaucuuggua

SEQ ID NO: 2920231 - RNA, 22 nt, Human
uacucuuaagccaucuugguaa

SEQ ID NO: 2920232 - RNA, 23 nt, Human
uacucuuaagccaucuugguaaa

SEQ ID NO: 2920233 - RNA, 19 nt, Human
uacucuguuccuucacauc

SEQ ID NO: 2920234 - RNA, 14 nt, Human
uacucuguuccuuc

SEQ ID NO: 2920235 - RNA, 14 nt, Human
uacucuuaagccau

SEQ ID NO: 2920236 - RNA, 15 nt, Human
uacucuuaagccauc

SEQ ID NO: 2920237 - RNA, 16 nt, Human
uacucuuaagccaucu

SEQ ID NO: 2920238 - RNA, 17 nt, Human
uacucuuaagccaucuu

SEQ ID NO: 2920239 - RNA, 15 nt, Human
aauucuuacauguuu

SEQ ID NO: 2920240 - RNA, 13 nt, Human
aauucuuacaugu

SEQ ID NO: 2920241 - RNA, 21 nt, Human
aauugaaaggcauucucugaa

SEQ ID NO: 2920242 - RNA, 17 nt, Human
aauugaaaggcauucuc

SEQ ID NO: 2920243 - RNA, 22 nt, Human
aauugaaaggcauucucugaag

SEQ ID NO: 2920244 - RNA, 12 nt, Human
aauguagauuuu

SEQ ID NO: 2920245 - RNA, 12 nt, Human
uacauacugcug

SEQ ID NO: 2920246 - RNA, 13 nt, Human
uacauacugcugu

SEQ ID NO: 2920247 - RNA, 14 nt, Human
uaauucauguuucu

SEQ ID NO: 2920248 - RNA, 22 nt, Human
uaaugugcuguguaaaguuagu

SEQ ID NO: 2920249 - RNA, 20 nt, Human
uaaugugcuguguaaaguua

SEQ ID NO: 2920250 - RNA, 21 nt, Human
uaaugugcuguguaaaguuag

SEQ ID NO: 2920251 - RNA, 12 nt, Human
uaaugugcugug

SEQ ID NO: 2920252 - RNA, 13 nt, Human
uaaugugcugugu

SEQ ID NO: 2920253 - RNA, 14 nt, Human
uaaugugcugugua

SEQ ID NO: 2920254 - RNA, 15 nt, Human
uaaugugcuguguaa

SEQ ID NO: 2920255 - RNA, 16 nt, Human
uaaugugcuguguaaa

SEQ ID NO: 2920256 - RNA, 17 nt, Human
uaaugugcuguguaaag

SEQ ID NO: 2920257 - RNA, 18 nt, Human
uaaugugcuguguaaagu

SEQ ID NO: 2920258 - RNA, 19 nt, Human
uaaugugcuguguaaaguu

SEQ ID NO: 2920259 - RNA, 17 nt, Human
gugaaguuagaauuccu

SEQ ID NO: 2920260 - RNA, 18 nt, Human
gugaaguuagaauuccuu

SEQ ID NO: 2920261 - RNA, 14 nt, Human
gugaaguuagaauu

SEQ ID NO: 2920262 - RNA, 19 nt, Human
gugaaguauacuguauuuu

SEQ ID NO: 2920263 - RNA, 17 nt, Human
gugaaguauacuguauu

SEQ ID NO: 2920264 - RNA, 21 nt, Human
aaccuguugauagcaagugaa

SEQ ID NO: 2920265 - RNA, 21 nt, Human
aaccuugguguaguugaacug

SEQ ID NO: 2920266 - RNA, 22 nt, Human
aaccuugguguaguugaacuga

SEQ ID NO: 2920267 - RNA, 23 nt, Human
gucuacucuuaagccaucuuggu

SEQ ID NO: 2920268 - RNA, 17 nt, Human
gucuacucuuaagccau

SEQ ID NO: 2920269 - RNA, 18 nt, Human
gucuacucuuaagccauc

SEQ ID NO: 2920270 - RNA, 19 nt, Human
gucuacucuuaagccaucu

SEQ ID NO: 2920271 - RNA, 23 nt, Human
aacauuaaaacaauauuguuucu

SEQ ID NO: 2920272 - RNA, 21 nt, Human
aacauuaaaacaauauuguuu

SEQ ID NO: 2920273 - RNA, 23 nt, Human
aacagucugaucgugacgcugaa

SEQ ID NO: 2920274 - RNA, 22 nt, Human
aacagguuauuuuaguuucugu

SEQ ID NO: 2920275 - RNA, 12 nt, Human
aacagucugauc

SEQ ID NO: 2920276 - RNA, 16 nt, Human
aacagguuauuuuagu

SEQ ID NO: 2920277 - RNA, 20 nt, Human
aacagguuauuuuaguuucu

SEQ ID NO: 2920278 - RNA, 21 nt, Human
aacagguuauuuuaguuucug

SEQ ID NO: 2920279 - RNA, 23 nt, Human
gugguggcagggccuagcugcua

SEQ ID NO: 2920280 - RNA, 15 nt, Human
gugguggcagggccu

SEQ ID NO: 2920281 - RNA, 17 nt, Human
gugguggcagggccuag

SEQ ID NO: 2920282 - RNA, 21 nt, Human
gugguggcagggccuagcugc

SEQ ID NO: 2920283 - RNA, 18 nt, Human
guuucuagggaaaugaaa

SEQ ID NO: 2920284 - RNA, 15 nt, Human
guuucuagggaaaug

SEQ ID NO: 2920285 - RNA, 13 nt, Human
guuucucugcugu

SEQ ID NO: 2920286 - RNA, 12 nt, Human
guuucucugcug

SEQ ID NO: 2920287 - RNA, 16 nt, Human
aaggguuuuaauguag

SEQ ID NO: 2920288 - RNA, 21 nt, Human
aagucagugcccaacuguuau

SEQ ID NO: 2920289 - RNA, 20 nt, Human
aagucagugcccaacuguua

SEQ ID NO: 2920290 - RNA, 12 nt, Human
aagugacaggga

SEQ ID NO: 2920291 - RNA, 22 nt, Human
aagugacagggaagcuacaggu

SEQ ID NO: 2920292 - RNA, 23 nt, Human
aagugacagggaagcuacagguu

SEQ ID NO: 2920293 - RNA, 15 nt, Human
aagugacagggaagc

SEQ ID NO: 2920294 - RNA, 16 nt, Human
aagugacagggaagcu

SEQ ID NO: 2920295 - RNA, 19 nt, Human
aagugacagggaagcuaca

SEQ ID NO: 2920296 - RNA, 20 nt, Human
aagugacagggaagcuacag

SEQ ID NO: 2920297 - RNA, 19 nt, Human
aagugaauuuuucucuaac

SEQ ID NO: 2920298 - RNA, 17 nt, Human
aagugaauuuuucucua

SEQ ID NO: 2920299 - RNA, 14 nt, Human
aagugaauuuuucu

SEQ ID NO: 2920300 - RNA, 22 nt, Human
guucuguggaaaguguaaagca

SEQ ID NO: 2920301 - RNA, 20 nt, Human
guucuguggaaaguguaaag

SEQ ID NO: 2920302 - RNA, 21 nt, Human
guucuguggaaaguguaaagc

SEQ ID NO: 2920303 - RNA, 14 nt, Human
guucuguggaaagu

SEQ ID NO: 2920304 - RNA, 16 nt, Human
guucuguggaaagugu

SEQ ID NO: 2920305 - RNA, 17 nt, Human
guucuguggaaagugua

SEQ ID NO: 2920306 - RNA, 19 nt, Human
guucuguggaaaguguaaa

SEQ ID NO: 2920307 - RNA, 11 nt, Human
guucuguggaa

SEQ ID NO: 2920308 - RNA, 12 nt, Human
guucuguggaaa

SEQ ID NO: 2920309 - RNA, 18 nt, Human
guucuauuuggaauuuau

SEQ ID NO: 2920310 - RNA, 14 nt, Human
guucuauuuggaau

SEQ ID NO: 2920311 - RNA, 15 nt, Human
guucuauuuggaauu

SEQ ID NO: 2920312 - RNA, 13 nt, Human
guucuauuuggaa

SEQ ID NO: 2920313 - RNA, 14 nt, Human
uaaagauuucuuga

SEQ ID NO: 2920314 - RNA, 20 nt, Human
uaaagacaaagacaaauucu

SEQ ID NO: 2920315 - RNA, 19 nt, Human
uaaagacaaagacaaauuc

SEQ ID NO: 2920316 - RNA, 22 nt, Human
uaaagacaaagacaaauucugu

SEQ ID NO: 2920317 - RNA, 15 nt, Human
uaaagacaaagacaa

SEQ ID NO: 2920318 - RNA, 11 nt, Human
uaaagacaaag

SEQ ID NO: 2920319 - RNA, 22 nt, Human
uaaacgauuuaauucucuugaa

SEQ ID NO: 2920320 - RNA, 18 nt, Human
uaaacgauuuaauucucu

SEQ ID NO: 2920321 - RNA, 16 nt, Human
aaguuucaguugauuu

SEQ ID NO: 2920322 - RNA, 19 nt, Human
uaaaauuauagaugggaau

SEQ ID NO: 2920323 - RNA, 14 nt, Human
uaaaauuaaagcua

SEQ ID NO: 2920324 - RNA, 15 nt, Human
uaaauuuuaauuuau

SEQ ID NO: 2920325 - RNA, 21 nt, Human
aucauguguaaucaauaaacg

SEQ ID NO: 2920326 - RNA, 13 nt, Human
aucauguguaauc

SEQ ID NO: 2920327 - RNA, 15 nt, Human
aucauguguaaucaa

SEQ ID NO: 2920328 - RNA, 19 nt, Human
aucauguguaaucaauaaa

SEQ ID NO: 2920329 - RNA, 20 nt, Human
aucauguguaaucaauaaac

SEQ ID NO: 2920330 - RNA, 18 nt, Human
augcaucuuacugaaggu

SEQ ID NO: 2920331 - RNA, 16 nt, Human
augcaucuuacugaag

SEQ ID NO: 2920332 - RNA, 14 nt, Human
augcaucuuacuga

SEQ ID NO: 2920333 - RNA, 21 nt, Human
augauguuucgugaaguauac

SEQ ID NO: 2920334 - RNA, 22 nt, Human
auguggcuguaucuuguuuuuc

SEQ ID NO: 2920335 - RNA, 19 nt, Human
auguuuuagacaaauacuc

SEQ ID NO: 2920336 - RNA, 22 nt, Human
auguuuuagacaaauacucaug

SEQ ID NO: 2920337 - RNA, 23 nt, Human
auguuuuagacaaauacucaugu

SEQ ID NO: 2920338 - RNA, 15 nt, Human
auuaaauauaauaug

SEQ ID NO: 2920339 - RNA, 19 nt, Human
agugacagggaagcuacag

SEQ ID NO: 2920340 - RNA, 20 nt, Human
agugacagggaagcuacagg

SEQ ID NO: 2920341 - RNA, 22 nt, Human
agugacagggaagcuacagguu

SEQ ID NO: 2920342 - RNA, 23 nt, Human
agugacagggaagcuacagguua

SEQ ID NO: 2920343 - RNA, 22 nt, Human
agucugaucgugacgcugaaua

SEQ ID NO: 2920344 - RNA, 23 nt, Human
agucugaucgugacgcugaauaa

SEQ ID NO: 2920345 - RNA, 18 nt, Human
agucugaucgugacgcug

SEQ ID NO: 2920346 - RNA, 20 nt, Human
agucugaucgugacgcugaa

SEQ ID NO: 2920347 - RNA, 21 nt, Human
agucugaucgugacgcugaau

SEQ ID NO: 2920348 - RNA, 16 nt, Human
agugacagggaagcua

SEQ ID NO: 2920349 - RNA, 13 nt, Human
agugacagggaag

SEQ ID NO: 2920350 - RNA, 13 nt, Human
aguugaacugaua

SEQ ID NO: 2920351 - RNA, 23 nt, Human
aguugaacugauaguuacuguug

SEQ ID NO: 2920352 - RNA, 16 nt, Human
aguggcugucaucagc

SEQ ID NO: 2920353 - RNA, 17 nt, Human
aguggcugucaucagcc

SEQ ID NO: 2920354 - RNA, 21 nt, Human
auauuaucaugcaaaugcugu

SEQ ID NO: 2920355 - RNA, 19 nt, Human
auauuaucaugcaaaugcu

SEQ ID NO: 2920356 - RNA, 17 nt, Human
agguuauuuuaguuucu

SEQ ID NO: 2920357 - RNA, 19 nt, Human
agguuauuuuaguuucugu

SEQ ID NO: 2920358 - RNA, 20 nt, Human
agguuauuuuaguuucuguu

SEQ ID NO: 2920359 - RNA, 16 nt, Human
agguuacaacagauuu

SEQ ID NO: 2920360 - RNA, 19 nt, Human
agguuacaacagauuugug

SEQ ID NO: 2920361 - RNA, 15 nt, Human
agguuacaacagauu

SEQ ID NO: 2920362 - RNA, 21 nt, Human
agguuacaacagauuugugaa

SEQ ID NO: 2920363 - RNA, 22 nt, Human
agguuacaacagauuugugaac

SEQ ID NO: 2920364 - RNA, 23 nt, Human
agguuacaacagauuugugaacu

SEQ ID NO: 2920365 - RNA, 24 nt, Human
agguuacaacagauuugugaacuc

SEQ ID NO: 2920366 - RNA, 19 nt, Human
agguaaaauugaaaggcau

SEQ ID NO: 2920367 - RNA, 22 nt, Human
agcugcuacaaagaagacaugu

SEQ ID NO: 2920368 - RNA, 20 nt, Human
agcugcuacaaagaagacau

SEQ ID NO: 2920369 - RNA, 21 nt, Human
agcugcuacaaagaagacaug

SEQ ID NO: 2920370 - RNA, 16 nt, Human
agcugcuacaaagaag

SEQ ID NO: 2920371 - RNA, 17 nt, Human
agcugcuacaaagaaga

SEQ ID NO: 2920372 - RNA, 18 nt, Human
agcugcuacaaagaagac

SEQ ID NO: 2920373 - RNA, 19 nt, Human
agcugcuacaaagaagaca

SEQ ID NO: 2920374 - RNA, 11 nt, Human
agcugcuacaa

SEQ ID NO: 2920375 - RNA, 13 nt, Human
agcugcuacaaag

SEQ ID NO: 2920376 - RNA, 14 nt, Human
agcugcuacaaaga

SEQ ID NO: 2920377 - RNA, 15 nt, Human
agcugcuacaaagaa

SEQ ID NO: 2920378 - RNA, 21 nt, Human
agacaaauucuguuucuugag

SEQ ID NO: 2920379 - RNA, 19 nt, Human
agacaaauucuguuucuug

SEQ ID NO: 2920380 - RNA, 18 nt, Human
agacaaauucuguuucuu

SEQ ID NO: 2920381 - RNA, 17 nt, Human
agacaaauucuguuucu

SEQ ID NO: 2920382 - RNA, 20 nt, Human
agcaugaauuuuuuucaucu

SEQ ID NO: 2920383 - RNA, 15 nt, Human
aaugguuauaaaagu

SEQ ID NO: 2920384 - RNA, 16 nt, Human
aaugguuauaaaagug

SEQ ID NO: 2920385 - RNA, 17 nt, Human
aaugguuauaaaaguga

SEQ ID NO: 2920386 - RNA, 19 nt, Human
aaugguuauaaaagugauu

SEQ ID NO: 2920387 - RNA, 14 nt, Human
aaugguuauaaaag

SEQ ID NO: 2920388 - RNA, 21 nt, Human
aaugucuuuuuuuuaaugugc

SEQ ID NO: 2920389 - RNA, 22 nt, Human
aaugucuuuuuuuuaaugugcu

SEQ ID NO: 2920390 - RNA, 21 nt, Human
aauauuagcuuuacuguuugu

SEQ ID NO: 2920391 - RNA, 19 nt, Human
aauauuagcuuuacuguuu

SEQ ID NO: 2920392 - RNA, 18 nt, Human
aauauuagcuuuacuguu

SEQ ID NO: 2920393 - RNA, 15 nt, Human
aauauuagcuuuacu

SEQ ID NO: 2920394 - RNA, 17 nt, Human
aauauaucuaaauugaa

SEQ ID NO: 2920395 - RNA, 18 nt, Human
aauauaucuaaauugaau

SEQ ID NO: 2920396 - RNA, 20 nt, Human
aauauaucuaaauugaauaa

SEQ ID NO: 2920397 - RNA, 21 nt, Human
aauauaucuaaauugaauaau

SEQ ID NO: 2920398 - RNA, 22 nt, Human
aauagaaggauguacauuucca

SEQ ID NO: 2920399 - RNA, 20 nt, Human
aauagaaggauguacauuuc

SEQ ID NO: 2920400 - RNA, 19 nt, Human
aauagaaggauguacauuu

SEQ ID NO: 2920401 - RNA, 12 nt, Human
aauacucaugug

SEQ ID NO: 2920402 - RNA, 13 nt, Human
aauacucaugugu

SEQ ID NO: 2920403 - RNA, 14 nt, Human
aauacucaugugua

SEQ ID NO: 2920404 - RNA, 15 nt, Human
aauacucauguguau

SEQ ID NO: 2920405 - RNA, 16 nt, Human
aauacucauguguaug

SEQ ID NO: 2920406 - RNA, 13 nt, Human
aagcuacagguua

SEQ ID NO: 2920407 - RNA, 14 nt, Human
aagcuacagguuac

SEQ ID NO: 2920408 - RNA, 15 nt, Human
aagcuacagguuaca

SEQ ID NO: 2920409 - RNA, 18 nt, Human
aagcuacagguuacaaca

SEQ ID NO: 2920410 - RNA, 19 nt, Human
aagcuacagguuacaacag

SEQ ID NO: 2920411 - RNA, 20 nt, Human
aagcuacagguuacaacaga

SEQ ID NO: 2920412 - RNA, 21 nt, Human
aagcuacagguuacaacagau

SEQ ID NO: 2920413 - RNA, 22 nt, Human
aagcuacagguuacaacagauu

SEQ ID NO: 2920414 - RNA, 20 nt, Human
aaguguaaagcauuccaaca

SEQ ID NO: 2920415 - RNA, 21 nt, Human
aaguguaaagcauuccaacaa

SEQ ID NO: 2920416 - RNA, 22 nt, Human
aaguguaaagcauuccaacaaa

SEQ ID NO: 2920417 - RNA, 12 nt, Human
aaguguaacugg

SEQ ID NO: 2920418 - RNA, 11 nt, Human
aaguguaacug

SEQ ID NO: 2920419 - RNA, 20 nt, Human
aaauugaaaggcauucucug

SEQ ID NO: 2920420 - RNA, 23 nt, Human
aaauugaaaggcauucucugaag

SEQ ID NO: 2920421 - RNA, 22 nt, Human
aaauugaaaggcauucucugaa

SEQ ID NO: 2920422 - RNA, 13 nt, Human
aaauugaauaaug

SEQ ID NO: 2920423 - RNA, 23 nt, Human
aaauugaauaaugguaccagaua

SEQ ID NO: 2920424 - RNA, 18 nt, Human
aacacauuugauucugug

SEQ ID NO: 2920425 - RNA, 17 nt, Human
aacgauuuaauucucuu

SEQ ID NO: 2920426 - RNA, 18 nt, Human
aacgauuuaauucucuug

SEQ ID NO: 2920427 - RNA, 20 nt, Human
aacgauuuaauucucuugaa

SEQ ID NO: 2920428 - RNA, 21 nt, Human
aacucagaaacaucaguuacu

SEQ ID NO: 2920429 - RNA, 16 nt, Human
aacuuaaauuuuaauu

SEQ ID NO: 2920430 - RNA, 19 nt, Human
aacuuaaauuuuaauuuau

SEQ ID NO: 2920431 - RNA, 22 nt, Human
aacugauaguuacuguugugac

SEQ ID NO: 2920432 - RNA, 15 nt, Human
aacugauaguuacug

SEQ ID NO: 2920433 - RNA, 16 nt, Human
aacugauaguuacugu

SEQ ID NO: 2920434 - RNA, 17 nt, Human
aacugauaguuacuguu

SEQ ID NO: 2920435 - RNA, 19 nt, Human
aacugauaguuacuguugu

SEQ ID NO: 2920436 - RNA, 23 nt, Human
aacugauaguuacuguugugacc

SEQ ID NO: 2920437 - RNA, 17 nt, Human
aaaagugauuguuggca

SEQ ID NO: 2920438 - RNA, 21 nt, Human
aaaaacucgaggacuguauuu

SEQ ID NO: 2920439 - RNA, 17 nt, Human
aaaaacucgaggacugu

SEQ ID NO: 2920440 - RNA, 14 nt, Human
aaaaguugaaauua

SEQ ID NO: 2920441 - RNA, 12 nt, Human
aaaaguugaaau

SEQ ID NO: 2920442 - RNA, 13 nt, Human
aaaaucauggaau

SEQ ID NO: 2920443 - RNA, 22 nt, Human
aaaaucauggaaugguuauaaa

SEQ ID NO: 2920444 - RNA, 17 nt, Human
aaaaucauggaaugguu

SEQ ID NO: 2920445 - RNA, 19 nt, Human
aaaaucauggaaugguuau

SEQ ID NO: 2920446 - RNA, 21 nt, Human
aaagaagacauguuuuagaca

SEQ ID NO: 2920447 - RNA, 15 nt, Human
aaagaagacauguuu

SEQ ID NO: 2920448 - RNA, 18 nt, Human
aaagaagacauguuuuag

SEQ ID NO: 2920449 - RNA, 23 nt, Human
aaagccaaguuuauauacaauua

SEQ ID NO: 2920450 - RNA, 12 nt, Human
acaauugaaaug

SEQ ID NO: 2920451 - RNA, 20 nt, Human
accagauaaaauuauagaug

SEQ ID NO: 2920452 - RNA, 15 nt, Human
acuguuucucugcug

SEQ ID NO: 2920453 - RNA, 14 nt, Human
acuguuucucugcu

SEQ ID NO: 2920454 - RNA, 13 nt, Human
acuguuucucugc

SEQ ID NO: 2920455 - RNA, 20 nt, Human
acugguuguugccaaacagc

SEQ ID NO: 2920456 - RNA, 23 nt, Human
accuugguguaguugaacugaua

SEQ ID NO: 2920457 - RNA, 20 nt, Human
acuaauuguauaacagguua

SEQ ID NO: 2920458 - RNA, 22 nt, Human
acuaauuguauaacagguuauu

SEQ ID NO: 2920459 - RNA, 16 nt, Human
acuaauuguauaacag

SEQ ID NO: 2920460 - RNA, 17 nt, Human
acuaauuguauaacagg

SEQ ID NO: 2920461 - RNA, 18 nt, Human
acuaauuguauaacaggu

SEQ ID NO: 2920462 - RNA, 19 nt, Human
acuaauuguauaacagguu

SEQ ID NO: 2920463 - RNA, 14 nt, Human
acuaauuguauaac

SEQ ID NO: 2920464 - RNA, 15 nt, Human
acuaauuguauaaca

SEQ ID NO: 2920465 - RNA, 14 nt, Human
acucagccaagcac

SEQ ID NO: 2920466 - RNA, 15 nt, Human
acucagccaagcaca

SEQ ID NO: 2920467 - RNA, 16 nt, Human
acucagccaagcacag

SEQ ID NO: 2920468 - RNA, 17 nt, Human
acucagccaagcacagu

SEQ ID NO: 2920469 - RNA, 18 nt, Human
acucagccaagcacagug

SEQ ID NO: 2920470 - RNA, 22 nt, Human
acucagccaagcacaguggugg

SEQ ID NO: 2920471 - RNA, 23 nt, Human
acucagccaagcacagugguggc

SEQ ID NO: 2920472 - RNA, 20 nt, Human
acuauuuaguuuuuguaauu

SEQ ID NO: 2920473 - RNA, 21 nt, Human
acuauuuaguuuuuguaauuu

SEQ ID NO: 2920474 - RNA, 23 nt, Human
acuauuuaguuuuuguaauuuau

SEQ ID NO: 2920475 - RNA, 16 nt, Human
caccccaugcuguuga

SEQ ID NO: 2920476 - RNA, 12 nt, Human
caccccaugcug

SEQ ID NO: 2920477 - RNA, 22 nt, Human
caccccaugcuguugauugcua

SEQ ID NO: 2920478 - RNA, 13 nt, Human
caacaucuagcaa

SEQ ID NO: 2920479 - RNA, 20 nt, Human
caacauuaaaacaauauugu

SEQ ID NO: 2920480 - RNA, 22 nt, Human
caaagcuuagcaggagaggaga

SEQ ID NO: 2920481 - RNA, 17 nt, Human
caaagcuuagcaggaga

SEQ ID NO: 2920482 - RNA, 18 nt, Human
caaagcuuagcaggagag

SEQ ID NO: 2920483 - RNA, 14 nt, Human
caaagcuuagcagg

SEQ ID NO: 2920484 - RNA, 15 nt, Human
caaagcuuagcagga

SEQ ID NO: 2920485 - RNA, 16 nt, Human
caaagcuuagcaggag

SEQ ID NO: 2920486 - RNA, 15 nt, Human
caaaaaacucgagga

SEQ ID NO: 2920487 - RNA, 21 nt, Human
caaaaaacucgaggacuguau

SEQ ID NO: 2920488 - RNA, 20 nt, Human
caaauguguaucggaugcuu

SEQ ID NO: 2920489 - RNA, 17 nt, Human
uugcgaaugguuccauu

SEQ ID NO: 2920490 - RNA, 23 nt, Human
uugguaaauuuccccaacagugu

SEQ ID NO: 2920491 - RNA, 22 nt, Human
uugguaaauuuccccaacagug

SEQ ID NO: 2920492 - RNA, 20 nt, Human
uucuguggaaaguguaaagc

SEQ ID NO: 2920493 - RNA, 18 nt, Human
uucuguggaaaguguaaa

SEQ ID NO: 2920494 - RNA, 19 nt, Human
uucuguggaaaguguaaag

SEQ ID NO: 2920495 - RNA, 13 nt, Human
uucuguggaaagu

SEQ ID NO: 2920496 - RNA, 15 nt, Human
uucuguggaaagugu

SEQ ID NO: 2920497 - RNA, 16 nt, Human
uucuguggaaagugua

SEQ ID NO: 2920498 - RNA, 17 nt, Human
uucuguggaaaguguaa

SEQ ID NO: 2920499 - RNA, 19 nt, Human
uuucacaguguguuuguga

SEQ ID NO: 2920500 - RNA, 13 nt, Human
uuuccacuacugc

SEQ ID NO: 2920501 - RNA, 15 nt, Human
uuuccacuacugcua

SEQ ID NO: 2920502 - RNA, 14 nt, Human
uuuccacuacugcu

SEQ ID NO: 2920503 - RNA, 23 nt, Human
uuugauauccaaagcugaauaca

SEQ ID NO: 2920504 - RNA, 17 nt, Human
uuugauauccaaagcug

SEQ ID NO: 2920505 - RNA, 15 nt, Human
uuucuuaaaugggcu

SEQ ID NO: 2920506 - RNA, 18 nt, Human
uuguuuuaaaauuaaagc

SEQ ID NO: 2920507 - RNA, 20 nt, Human
uuguuuuaaaauuaaagcua

SEQ ID NO: 2920508 - RNA, 15 nt, Human
uuuacauacugcugu

SEQ ID NO: 2920509 - RNA, 16 nt, Human
uuauuuuaguuucugu

SEQ ID NO: 2920510 - RNA, 22 nt, Human
uucaucuuggucacauacaauu

SEQ ID NO: 2920511 - RNA, 15 nt, Human
uuccaaauucacaag

SEQ ID NO: 2920512 - RNA, 15 nt, Human
uuccaacaaaggguu

SEQ ID NO: 2920513 - RNA, 16 nt, Human
uuccaacaaaggguuu

SEQ ID NO: 2920514 - RNA, 21 nt, Human
uuccaacaaaggguuuuaaug

SEQ ID NO: 2920515 - RNA, 23 nt, Human
uuccaaauucacaaguuguguuu

SEQ ID NO: 2920516 - RNA, 14 nt, Human
uuccaacaaagggu

SEQ ID NO: 2920517 - RNA, 15 nt, Human
uuccacuacugcuac

SEQ ID NO: 2920518 - RNA, 14 nt, Human
uuccuauguaacug

SEQ ID NO: 2920519 - RNA, 15 nt, Human
uucccuccugcuacu

SEQ ID NO: 2920520 - RNA, 15 nt, Human
uuacuguuuguuaug

SEQ ID NO: 2920521 - RNA, 14 nt, Human
uuacuguugugacc

SEQ ID NO: 2920522 - RNA, 15 nt, Human
uuacuguugugaccu

SEQ ID NO: 2920523 - RNA, 17 nt, Human
uuagcuuuacuguuugu

SEQ ID NO: 2920524 - RNA, 16 nt, Human
uuagcuuuacuguuug

SEQ ID NO: 2920525 - RNA, 15 nt, Human
uuagcuuuacuguuu

SEQ ID NO: 2920526 - RNA, 19 nt, Human
uuagucuacucuuaagcca

SEQ ID NO: 2920527 - RNA, 20 nt, Human
uuagucuacucuuaagccau

SEQ ID NO: 2920528 - RNA, 21 nt, Human
uuagucuacucuuaagccauc

SEQ ID NO: 2920529 - RNA, 22 nt, Human
uuagucuacucuuaagccaucu

SEQ ID NO: 2920530 - RNA, 16 nt, Human
uuaggcuauucacaac

SEQ ID NO: 2920531 - RNA, 15 nt, Human
uuaggcuauucacaa

SEQ ID NO: 2920532 - RNA, 22 nt, Human
uuaacuuaaauuuuaauuuauu

SEQ ID NO: 2920533 - RNA, 21 nt, Human
uuaaagacaaagacaaauucu

SEQ ID NO: 2920534 - RNA, 17 nt, Human
uuacaauugaaaugacu

SEQ ID NO: 2920535 - RNA, 15 nt, Human
uuacaauugaaauga

SEQ ID NO: 2920536 - RNA, 14 nt, Human
uuacaauugaaaug

SEQ ID NO: 2920537 - RNA, 13 nt, Human
uuacaauugaaau

SEQ ID NO: 2920538 - RNA, 15 nt, Human
uuaauguagauuuuu

SEQ ID NO: 2920539 - RNA, 21 nt, Human
uuaaugugcuguguaaaguua

SEQ ID NO: 2920540 - RNA, 22 nt, Human
uuaaugugcuguguaaaguuag

SEQ ID NO: 2920541 - RNA, 16 nt, Human
uuaaugugcuguguaa

SEQ ID NO: 2920542 - RNA, 17 nt, Human
uuaaugugcuguguaaa

SEQ ID NO: 2920543 - RNA, 18 nt, Human
uuaaugugcuguguaaag

SEQ ID NO: 2920544 - RNA, 19 nt, Human
uuaaugugcuguguaaagu

SEQ ID NO: 2920545 - RNA, 14 nt, Human
uuaaugugcugugu

SEQ ID NO: 2920546 - RNA, 15 nt, Human
uuaaugugcugugua

SEQ ID NO: 2920547 - RNA, 21 nt, Human
uguuucgcugauauauguguu

SEQ ID NO: 2920548 - RNA, 20 nt, Human
uguuucgugaaguauacugu

SEQ ID NO: 2920549 - RNA, 19 nt, Human
uguuucgugaaguauacug

SEQ ID NO: 2920550 - RNA, 15 nt, Human
uguuucgugaaguau

SEQ ID NO: 2920551 - RNA, 21 nt, Human
uuaaaagggauuacccaagca

SEQ ID NO: 2920552 - RNA, 23 nt, Human
uuaaaagggauuacccaagcaaa

SEQ ID NO: 2920553 - RNA, 19 nt, Human
ugcuguugauugcuaaaug

SEQ ID NO: 2920554 - RNA, 20 nt, Human
ugcuguugauugcuaaaugu

SEQ ID NO: 2920555 - RNA, 22 nt, Human
ugcuguugauugcuaaauguaa

SEQ ID NO: 2920556 - RNA, 12 nt, Human
ugcuguugauug

SEQ ID NO: 2920557 - RNA, 15 nt, Human
ugcuguugauugcua

SEQ ID NO: 2920558 - RNA, 16 nt, Human
ugcuguugauugcuaa

SEQ ID NO: 2920559 - RNA, 17 nt, Human
ugcuguugauugcuaaa

SEQ ID NO: 2920560 - RNA, 18 nt, Human
ugcuguugauugcuaaau

SEQ ID NO: 2920561 - RNA, 13 nt, Human
ugcauauguuucg

SEQ ID NO: 2920562 - RNA, 13 nt, Human
ugcuguguaaagu

SEQ ID NO: 2920563 - RNA, 14 nt, Human
ugcuguguaaaguu

SEQ ID NO: 2920564 - RNA, 15 nt, Human
ugcuguguaaaguua

SEQ ID NO: 2920565 - RNA, 17 nt, Human
ugcuguguaaaguuagu

SEQ ID NO: 2920566 - RNA, 12 nt, Human
ugcuguguaaag

SEQ ID NO: 2920567 - RNA, 16 nt, Human
ugcuacucuguuccuu

SEQ ID NO: 2920568 - RNA, 15 nt, Human
ugcuacucuguuccu

SEQ ID NO: 2920569 - RNA, 20 nt, Human
ugaguuuuguuuuaaaauua

SEQ ID NO: 2920570 - RNA, 23 nt, Human
ugauagcaagugaauuuuucucu

SEQ ID NO: 2920571 - RNA, 16 nt, Human
ugauuguuugcucuga

SEQ ID NO: 2920572 - RNA, 14 nt, Human
ugauuguuggcaca

SEQ ID NO: 2920573 - RNA, 22 nt, Human
ugauugcuaaauguaacagucu

SEQ ID NO: 2920574 - RNA, 19 nt, Human
ugauugcuaaauguaacag

SEQ ID NO: 2920575 - RNA, 20 nt, Human
ugauugcuaaauguaacagu

SEQ ID NO: 2920576 - RNA, 13 nt, Human
ugauugcuaaaug

SEQ ID NO: 2920577 - RNA, 14 nt, Human
ugauugcuaaaugu

SEQ ID NO: 2920578 - RNA, 15 nt, Human
ugauugcuaaaugua

SEQ ID NO: 2920579 - RNA, 16 nt, Human
ugauugcuaaauguaa

SEQ ID NO: 2920580 - RNA, 13 nt, Human
ugauucugugugu

SEQ ID NO: 2920581 - RNA, 15 nt, Human
ugauucuguguguuu

SEQ ID NO: 2920582 - RNA, 22 nt, Human
ucuuucaaagguagccaucaug

SEQ ID NO: 2920583 - RNA, 20 nt, Human
ucuuucaaagguagccauca

SEQ ID NO: 2920584 - RNA, 21 nt, Human
ucuuguuuuuccacuacugcu

SEQ ID NO: 2920585 - RNA, 20 nt, Human
ucuuguuuuuccacuacugc

SEQ ID NO: 2920586 - RNA, 13 nt, Human
ucuuguuuuucca

SEQ ID NO: 2920587 - RNA, 18 nt, Human
ugaaauuaaccauagaug

SEQ ID NO: 2920588 - RNA, 22 nt, Human
ugaaauuaaccauagauguaga

SEQ ID NO: 2920589 - RNA, 19 nt, Human
ugaaaggcauucucugaag

SEQ ID NO: 2920590 - RNA, 17 nt, Human
ugaaaggcauucucuga

SEQ ID NO: 2920591 - RNA, 14 nt, Human
ugaaguuagaauuc

SEQ ID NO: 2920592 - RNA, 15 nt, Human
ugaaguuagaauucc

SEQ ID NO: 2920593 - RNA, 16 nt, Human
ugaaguucaccauuaa

SEQ ID NO: 2920594 - RNA, 19 nt, Human
ugaaguuagaauuccuuca

SEQ ID NO: 2920595 - RNA, 21 nt, Human
ugaaguuagaauuccuucagg

SEQ ID NO: 2920596 - RNA, 17 nt, Human
ucucaucugugauuccc

SEQ ID NO: 2920597 - RNA, 13 nt, Human
ucucaucugugau

SEQ ID NO: 2920598 - RNA, 17 nt, Human
ucgugacgcugaauaaa

SEQ ID NO: 2920599 - RNA, 18 nt, Human
ucgugacgcugaauaaau

SEQ ID NO: 2920600 - RNA, 17 nt, Human
ucgugaaguauacugua

SEQ ID NO: 2920601 - RNA, 19 nt, Human
ucgugaaguauacuguauu

SEQ ID NO: 2920602 - RNA, 16 nt, Human
uccuccauacucagga

SEQ ID NO: 2920603 - RNA, 13 nt, Human
uccauuaucaugu

SEQ ID NO: 2920604 - RNA, 14 nt, Human
uccauuaucaugug

SEQ ID NO: 2920605 - RNA, 15 nt, Human
uccauuaucaugugu

SEQ ID NO: 2920606 - RNA, 16 nt, Human
uccauuaucaugugua

SEQ ID NO: 2920607 - RNA, 17 nt, Human
uccauuaucauguguaa

SEQ ID NO: 2920608 - RNA, 14 nt, Human
uccauuauuuauau

SEQ ID NO: 2920609 - RNA, 12 nt, Human
uccauuauuuau

SEQ ID NO: 2920610 - RNA, 11 nt, Human
uccauuauuua

SEQ ID NO: 2920611 - RNA, 20 nt, Human
uccauuaucauguguaauca

SEQ ID NO: 2920612 - RNA, 15 nt, Human
uccauuauuuauauu

SEQ ID NO: 2920613 - RNA, 13 nt, Human
uccauacucagga

SEQ ID NO: 2920614 - RNA, 22 nt, Human
ucauggaaugguuauaaaagug

SEQ ID NO: 2920615 - RNA, 12 nt, Human
ucauggaauggu

SEQ ID NO: 2920616 - RNA, 21 nt, Human
ucauggaaugguuauaaaagu

SEQ ID NO: 2920617 - RNA, 15 nt, Human
uaggcuauucacaac

SEQ ID NO: 2920618 - RNA, 14 nt, Human
uaggcuauucacaa

SEQ ID NO: 2920619 - RNA, 15 nt, Human
uaugcauaaagucag

SEQ ID NO: 2920620 - RNA, 14 nt, Human
uaugcauaaaguca

SEQ ID NO: 2920621 - RNA, 15 nt, Human
uaugcaauauaucua

SEQ ID NO: 2920622 - RNA, 16 nt, Human
uaucuaaauugaauaa

SEQ ID NO: 2920623 - RNA, 17 nt, Human
uaucuaaauugaauaau

SEQ ID NO: 2920624 - RNA, 20 nt, Human
uaucuaaauugaauaauggu

SEQ ID NO: 2920625 - RNA, 21 nt, Human
uaucuaaauugaauaauggua

SEQ ID NO: 2920626 - RNA, 13 nt, Human
uaucuaaauugaa

SEQ ID NO: 2920627 - RNA, 14 nt, Human
uaucuaaauugaau

SEQ ID NO: 2920628 - RNA, 18 nt, Human
uauauguguuuuucacau

SEQ ID NO: 2920629 - RNA, 17 nt, Human
uauguguuuuucacauu

SEQ ID NO: 2920630 - RNA, 16 nt, Human
uauguguuuuucacau

SEQ ID NO: 2920631 - RNA, 15 nt, Human
uauguguuuuucaca

SEQ ID NO: 2920632 - RNA, 22 nt, Human
uauuaucaugcaaaugcuguau

SEQ ID NO: 2920633 - RNA, 18 nt, Human
uauuaucaugcaaaugcu

SEQ ID NO: 2920634 - RNA, 16 nt, Human
uauuaucaugcaaaug

SEQ ID NO: 2920635 - RNA, 18 nt, Human
uauuuaaagacaaagaca

SEQ ID NO: 2920636 - RNA, 17 nt, Human
uauuuaaagacaaagac

SEQ ID NO: 2920637 - RNA, 13 nt, Human
uauuuaaagacaa

SEQ ID NO: 2920638 - RNA, 12 nt, Human
uauuuaaagaca

SEQ ID NO: 2920639 - RNA, 22 nt, Human
ucacaagugaaaaacauccaga

SEQ ID NO: 2920640 - RNA, 16 nt, Human
ucacaagugaaaaaca

SEQ ID NO: 2920641 - RNA, 18 nt, Human
guggcagggccuagcugc

SEQ ID NO: 2920642 - RNA, 22 nt, Human
guggcagggccuagcugcuaca

SEQ ID NO: 2920643 - RNA, 23 nt, Human
guggcagggccuagcugcuacaa

SEQ ID NO: 2920644 - RNA, 15 nt, Human
guggaugauguuucg

SEQ ID NO: 2920645 - RNA, 20 nt, Human
guggagaagccauugucuuc

SEQ ID NO: 2920646 - RNA, 18 nt, Human
guggagaagccauugucu

SEQ ID NO: 2920647 - RNA, 19 nt, Human
guggagaagccauugucuu

SEQ ID NO: 2920648 - RNA, 12 nt, Human
guggagaagcca

SEQ ID NO: 2920649 - RNA, 13 nt, Human
guggagaagccau

SEQ ID NO: 2920650 - RNA, 14 nt, Human
guggagaagccauu

SEQ ID NO: 2920651 - RNA, 15 nt, Human
guggagaagccauug

SEQ ID NO: 2920652 - RNA, 12 nt, Human
gugcuguguaaa

SEQ ID NO: 2920653 - RNA, 13 nt, Human
gugcuguguaaag

SEQ ID NO: 2920654 - RNA, 14 nt, Human
gugcuguguaaagu

SEQ ID NO: 2920655 - RNA, 15 nt, Human
gugcuguguaaaguu

SEQ ID NO: 2920656 - RNA, 16 nt, Human
gugcuguguaaaguua

SEQ ID NO: 2920657 - RNA, 18 nt, Human
gugcuguguaaaguuagu

SEQ ID NO: 2920658 - RNA, 22 nt, Human
gugcuguguaaaguuagucuac

SEQ ID NO: 2920659 - RNA, 23 nt, Human
guggaaaguguaaagcauuccaa

SEQ ID NO: 2920660 - RNA, 20 nt, Human
guggaaaguguaaagcauuc

SEQ ID NO: 2920661 - RNA, 21 nt, Human
guggaaaguguaaagcauucc

SEQ ID NO: 2920662 - RNA, 13 nt, Human
guggaaaguguaa

SEQ ID NO: 2920663 - RNA, 15 nt, Human
guggaaaguguaaag

SEQ ID NO: 2920664 - RNA, 16 nt, Human
guggaaaguguaaagc

SEQ ID NO: 2920665 - RNA, 18 nt, Human
guggaaaguguaaagcau

SEQ ID NO: 2920666 - RNA, 22 nt, Human
gugcuuuccguggcacugcaua

SEQ ID NO: 2920667 - RNA, 18 nt, Human
gugaccuccacagcuacc

SEQ ID NO: 2920668 - RNA, 14 nt, Human
gugaccugaaguuc

SEQ ID NO: 2920669 - RNA, 19 nt, Human
gugaccugaaguucaccau

SEQ ID NO: 2920670 - RNA, 16 nt, Human
gugaauuuuucucuaa

SEQ ID NO: 2920671 - RNA, 21 nt, Human
gugaaauaguucaaagccaag

SEQ ID NO: 2920672 - RNA, 17 nt, Human
gugaaauaguucaaagc

SEQ ID NO: 2920673 - RNA, 15 nt, Human
gugaauuuuucucua

SEQ ID NO: 2920674 - RNA, 14 nt, Human
gugaauuuuucucu

SEQ ID NO: 2920675 - RNA, 19 nt, Human
gucugaucgugacgcugaa

SEQ ID NO: 2920676 - RNA, 20 nt, Human
gucugaucgugacgcugaau

SEQ ID NO: 2920677 - RNA, 21 nt, Human
gucugaucgugacgcugaaua

SEQ ID NO: 2920678 - RNA, 20 nt, Human
guccacugucacuguuucuc

SEQ ID NO: 2920679 - RNA, 11 nt, Human
guauuugugac

SEQ ID NO: 2920680 - RNA, 18 nt, Human
guauuugugacuaauugu

SEQ ID NO: 2920681 - RNA, 20 nt, Human
guauuugugacuaauuguau

SEQ ID NO: 2920682 - RNA, 21 nt, Human
guauuugugacuaauuguaua

SEQ ID NO: 2920683 - RNA, 12 nt, Human
gggcugugaucg

SEQ ID NO: 2920684 - RNA, 12 nt, Human
ggguggagaagc

SEQ ID NO: 2920685 - RNA, 13 nt, Human
ggguggagaagcc

SEQ ID NO: 2920686 - RNA, 14 nt, Human
ggguggagaagcca

SEQ ID NO: 2920687 - RNA, 15 nt, Human
ggguggagaagccau

SEQ ID NO: 2920688 - RNA, 16 nt, Human
ggguggagaagccauu

SEQ ID NO: 2920689 - RNA, 14 nt, Human
guaaaguuagucua

SEQ ID NO: 2920690 - RNA, 18 nt, Human
guaaaguuagucuacucu

SEQ ID NO: 2920691 - RNA, 14 nt, Human
gcuaaauguaacag

SEQ ID NO: 2920692 - RNA, 17 nt, Human
gcuaaauguaacagucu

SEQ ID NO: 2920693 - RNA, 14 nt, Human
gcccggaugcuucu

SEQ ID NO: 2920694 - RNA, 11 nt, Human
gcuuagcagga

SEQ ID NO: 2920695 - RNA, 16 nt, Human
gcuuagcaggagagga

SEQ ID NO: 2920696 - RNA, 18 nt, Human
gcuuagcaggagaggaga

SEQ ID NO: 2920697 - RNA, 21 nt, Human
gcuuagcaggagaggagagcc

SEQ ID NO: 2920698 - RNA, 22 nt, Human
gcuuagcaggagaggagagcca

SEQ ID NO: 2920699 - RNA, 23 nt, Human
gcuuagcaggagaggagagccag

SEQ ID NO: 2920700 - RNA, 15 nt, Human
gcuguugauugcuaa

SEQ ID NO: 2920701 - RNA, 16 nt, Human
gcuguugauugcuaaa

SEQ ID NO: 2920702 - RNA, 19 nt, Human
gcuguugauugcuaaaugu

SEQ ID NO: 2920703 - RNA, 20 nt, Human
gcuguugauugcuaaaugua

SEQ ID NO: 2920704 - RNA, 16 nt, Human
gcuuuacuguuuguua

SEQ ID NO: 2920705 - RNA, 20 nt, Human
ggaaauaauaaagaugcucu

SEQ ID NO: 2920706 - RNA, 18 nt, Human
ggaaaguguaaagcauuc

SEQ ID NO: 2920707 - RNA, 19 nt, Human
ggaaaguguaaagcauucc

SEQ ID NO: 2920708 - RNA, 17 nt, Human
ggagaagccauugucuu

SEQ ID NO: 2920709 - RNA, 12 nt, Human
ggagaggagagc

SEQ ID NO: 2920710 - RNA, 13 nt, Human
ggagaggagagcc

SEQ ID NO: 2920711 - RNA, 14 nt, Human
ggagaggagagcca

SEQ ID NO: 2920712 - RNA, 15 nt, Human
ggagaggagagccag

SEQ ID NO: 2920713 - RNA, 16 nt, Human
ggagaggagagccaga

SEQ ID NO: 2920714 - RNA, 20 nt, Human
ggagaggagagccagagaag

SEQ ID NO: 2920715 - RNA, 11 nt, Human
ggagaagccau

SEQ ID NO: 2920716 - RNA, 12 nt, Human
ggagaagccauu

SEQ ID NO: 2920717 - RNA, 16 nt, Human
ggagaagccauugucu

SEQ ID NO: 2920718 - RNA, 13 nt, Human
ggcuauucacaac

SEQ ID NO: 2920719 - RNA, 21 nt, Human
ggccuagcugcuacaaagaag

SEQ ID NO: 2920720 - RNA, 16 nt, Human
ggccuagcugcuacaa

SEQ ID NO: 2920721 - RNA, 19 nt, Human
ggccuagcugcuacaaaga

SEQ ID NO: 2920722 - RNA, 20 nt, Human
ggccuagcugcuacaaagaa

SEQ ID NO: 2920723 - RNA, 15 nt, Human
ggauuacccaagcaa

SEQ ID NO: 2920724 - RNA, 13 nt, Human
gauugcuaaaugu

SEQ ID NO: 2920725 - RNA, 14 nt, Human
gauugcuaaaugua

SEQ ID NO: 2920726 - RNA, 19 nt, Human
gauuuuacaauugaaauga

SEQ ID NO: 2920727 - RNA, 18 nt, Human
gauuuuacaauugaaaug

SEQ ID NO: 2920728 - RNA, 18 nt, Human
gauggguuugacaagguu

SEQ ID NO: 2920729 - RNA, 22 nt, Human
gaugccagguucuauuuggaau

SEQ ID NO: 2920730 - RNA, 14 nt, Human
gaugccagguucua

SEQ ID NO: 2920731 - RNA, 17 nt, Human
gcaccccaugcuguuga

SEQ ID NO: 2920732 - RNA, 15 nt, Human
gcaccccaugcuguu

SEQ ID NO: 2920733 - RNA, 20 nt, Human
gauagcaagugaauuuuucu

SEQ ID NO: 2920734 - RNA, 18 nt, Human
gauaaaucagugguuauu

SEQ ID NO: 2920735 - RNA, 18 nt, Human
gagaaccuaaguuucagu

SEQ ID NO: 2920736 - RNA, 23 nt, Human
gagaacugcauauguuucgcuga

SEQ ID NO: 2920737 - RNA, 19 nt, Human
gagaacugcauauguuucg

SEQ ID NO: 2920738 - RNA, 18 nt, Human
gagaacugcauauguuuc

SEQ ID NO: 2920739 - RNA, 14 nt, Human
gacagggaagcuac

SEQ ID NO: 2920740 - RNA, 17 nt, Human
gacagggaagcuacagg

SEQ ID NO: 2920741 - RNA, 16 nt, Human
gacacaaaaaguagau

SEQ ID NO: 2920742 - RNA, 20 nt, Human
gacaaauucuguuucuugag

SEQ ID NO: 2920743 - RNA, 17 nt, Human
gacaaauucuguuucuu

SEQ ID NO: 2920744 - RNA, 16 nt, Human
gacaaauucuguuucu

SEQ ID NO: 2920745 - RNA, 22 nt, Human
gacaaauguguaucggaugcuu

SEQ ID NO: 2920746 - RNA, 12 nt, Human
gacaaauucugu

SEQ ID NO: 2920747 - RNA, 15 nt, Human
gacaaauucuguuuc

SEQ ID NO: 2920748 - RNA, 14 nt, Human
gacaaauucuguuu

SEQ ID NO: 2920749 - RNA, 12 nt, Human
gacaacauuaaa

SEQ ID NO: 2920750 - RNA, 17 nt, Human
gaaaggcauucucugaa

SEQ ID NO: 2920751 - RNA, 18 nt, Human
gaauucuuacauguuuuc

SEQ ID NO: 2920752 - RNA, 22 nt, Human
gaauucuuacauguuuucuuug

SEQ ID NO: 2920753 - RNA, 19 nt, Human
gaauucuuacauguuuucu

SEQ ID NO: 2920754 - RNA, 21 nt, Human
cuguggaaaguguaaagcauu

SEQ ID NO: 2920755 - RNA, 18 nt, Human
cuguggaaaguguaaagc

SEQ ID NO: 2920756 - RNA, 20 nt, Human
cuguggaaaguguaaagcau

SEQ ID NO: 2920757 - RNA, 13 nt, Human
cuguggaaagugu

SEQ ID NO: 2920758 - RNA, 14 nt, Human
cuguggaaagugua

SEQ ID NO: 2920759 - RNA, 15 nt, Human
cuguggaaaguguaa

SEQ ID NO: 2920760 - RNA, 16 nt, Human
cuguggaaaguguaaa

SEQ ID NO: 2920761 - RNA, 17 nt, Human
cuguggaaaguguaaag

SEQ ID NO: 2920762 - RNA, 15 nt, Human
cuguuccuucacauc

SEQ ID NO: 2920763 - RNA, 21 nt, Human
cuguuccuucacauccugugu

SEQ ID NO: 2920764 - RNA, 18 nt, Human
cuguuccuucacauccug

SEQ ID NO: 2920765 - RNA, 18 nt, Human
cuguaucuuguuuuucca

SEQ ID NO: 2920766 - RNA, 15 nt, Human
cuggcaguuuuccau

SEQ ID NO: 2920767 - RNA, 18 nt, Human
cuuaucacugacacaaaa

SEQ ID NO: 2920768 - RNA, 11 nt, Human
cuguucugugg

SEQ ID NO: 2920769 - RNA, 21 nt, Human
cuucacauccuguguuucuag

SEQ ID NO: 2920770 - RNA, 15 nt, Human
cuuguguauccauua

SEQ ID NO: 2920771 - RNA, 16 nt, Human
cuuguguauccauuau

SEQ ID NO: 2920772 - RNA, 22 nt, Human
cuuguguauccauuaucaugug

SEQ ID NO: 2920773 - RNA, 23 nt, Human
cuuguguauccauuaucaugugu

SEQ ID NO: 2920774 - RNA, 14 nt, Human
cuuguguauccauu

SEQ ID NO: 2920775 - RNA, 22 nt, Human
cuuuuguucagggcugugaucg

SEQ ID NO: 2920776 - RNA, 22 nt, Human
gaaaaagcaguaacugacaacu

SEQ ID NO: 2920777 - RNA, 16 nt, Human
gaaaggcauucucuga

SEQ ID NO: 2920778 - RNA, 17 nt, Human
ccugaaguucaccauua

SEQ ID NO: 2920779 - RNA, 12 nt, Human
ccuguacuuuuu

SEQ ID NO: 2920780 - RNA, 13 nt, Human
ccugcuacucugu

SEQ ID NO: 2920781 - RNA, 16 nt, Human
ccugcuacucuguucc

SEQ ID NO: 2920782 - RNA, 21 nt, Human
cgaggacuguauuugugacua

SEQ ID NO: 2920783 - RNA, 19 nt, Human
cgaggacuguauuugugac

SEQ ID NO: 2920784 - RNA, 20 nt, Human
cgaggacuguauuugugacu

SEQ ID NO: 2920785 - RNA, 18 nt, Human
cgaggacuguauuuguga

SEQ ID NO: 2920786 - RNA, 18 nt, Human
ccuugguguaguugaacu

SEQ ID NO: 2920787 - RNA, 23 nt, Human
ccugucccuucucuuaauuuaau

SEQ ID NO: 2920788 - RNA, 20 nt, Human
cuacagguuacaacagauuu

SEQ ID NO: 2920789 - RNA, 11 nt, Human
cuacagguuac

SEQ ID NO: 2920790 - RNA, 14 nt, Human
cuacagguuacaac

SEQ ID NO: 2920791 - RNA, 17 nt, Human
cuacagguuacaacaga

SEQ ID NO: 2920792 - RNA, 18 nt, Human
cuacagguuacaacagau

SEQ ID NO: 2920793 - RNA, 14 nt, Human
cuaaauugaauaau

SEQ ID NO: 2920794 - RNA, 12 nt, Human
cuaaauugaaua

SEQ ID NO: 2920795 - RNA, 13 nt, Human
cuaaauugaauaa

SEQ ID NO: 2920796 - RNA, 14 nt, Human
cuagcugcuacaaa

SEQ ID NO: 2920797 - RNA, 15 nt, Human
cuagcugcuacaaag

SEQ ID NO: 2920798 - RNA, 16 nt, Human
cuagcugcuacaaaga

SEQ ID NO: 2920799 - RNA, 18 nt, Human
cuagcugcuacaaagaag

SEQ ID NO: 2920800 - RNA, 21 nt, Human
cuagcugcuacaaagaagaca

SEQ ID NO: 2920801 - RNA, 23 nt, Human
cuagcugcuacaaagaagacaug

SEQ ID NO: 2920802 - RNA, 21 nt, Human
cucacaccgcgucuggugaca

SEQ ID NO: 2920803 - RNA, 21 nt, Human
cuauguaacugcauugagaac

SEQ ID NO: 2920804 - RNA, 18 nt, Human
cuauggggaugguccacu

SEQ ID NO: 2920805 - RNA, 15 nt, Human
cuauggggauggucc

SEQ ID NO: 2920806 - RNA, 15 nt, Human
cuauguaacugcauu

SEQ ID NO: 2920807 - RNA, 20 nt, Human
cuaugcaauauaucuaaauu

SEQ ID NO: 2920808 - RNA, 22 nt, Human
cuaugcaauauaucuaaauuga

SEQ ID NO: 2920809 - RNA, 16 nt, Human
cucagccaagcacagu

SEQ ID NO: 2920810 - RNA, 13 nt, Human
cucagccaagcac

SEQ ID NO: 2920811 - RNA, 14 nt, Human
cucagccaagcaca

SEQ ID NO: 2920812 - RNA, 15 nt, Human
cucagccaagcacag

SEQ ID NO: 2920813 - RNA, 16 nt, Human
cucaggacuccucucc

SEQ ID NO: 2920814 - RNA, 15 nt, Human
cucaggacuccucuc

SEQ ID NO: 2920815 - RNA, 22 nt, Human
cccaugcuguugauugcuaaau

SEQ ID NO: 2920816 - RNA, 14 nt, Human
cccaugcuguugau

SEQ ID NO: 2920817 - RNA, 19 nt, Human
cccaugcuguugauugcua

SEQ ID NO: 2920818 - RNA, 21 nt, Human
cccaugcuguugauugcuaaa

SEQ ID NO: 2920819 - RNA, 19 nt, Human
cccaacagugugaaguuag

SEQ ID NO: 2920820 - RNA, 12 nt, Human
cccaacagugug

SEQ ID NO: 2920821 - RNA, 13 nt, Human
cccaacaguguga

SEQ ID NO: 2920822 - RNA, 14 nt, Human
cccaacagugugaa

SEQ ID NO: 2920823 - RNA, 15 nt, Human
cccaacagugugaag

SEQ ID NO: 2920824 - RNA, 16 nt, Human
cccaacagugugaagu

SEQ ID NO: 2920825 - RNA, 14 nt, Human
ccauuaucaugugu

SEQ ID NO: 2920826 - RNA, 15 nt, Human
ccauuaucaugugua

SEQ ID NO: 2920827 - RNA, 16 nt, Human
ccauuaucauguguaa

SEQ ID NO: 2920828 - RNA, 13 nt, Human
ccauuaucaugug

SEQ ID NO: 2920829 - RNA, 14 nt, Human
ccauucucucuccu

SEQ ID NO: 2920830 - RNA, 22 nt, Human
ccacugucacuguuucucugcu

SEQ ID NO: 2920831 - RNA, 19 nt, Human
ccacugucacuguuucucu

SEQ ID NO: 2920832 - RNA, 24 nt, Human
ccacugucacuguuucucugcugu

SEQ ID NO: 2920833 - RNA, 23 nt, Human
ccacugucacuguuucucugcug

SEQ ID NO: 2920834 - RNA, 19 nt, Human
aaaaaacucgaggacugua

SEQ ID NO: 2920835 - RNA, 18 nt, Human
ggcacauccuaugcaaua

SEQ ID NO: 2920836 - RNA, 21 nt, Human
ggcacauccuaugcaauauau

SEQ ID NO: 2920837 - RNA, 16 nt, Human
ggcaccaaagccacca

SEQ ID NO: 2920838 - RNA, 19 nt, Human
ggcagggccuagcugcuac

SEQ ID NO: 2920839 - RNA, 23 nt, Human
ggcaucaugcaucuuacugaagg

SEQ ID NO: 2920840 - RNA, 15 nt, Human
aaacgauuuaauucu

SEQ ID NO: 2920841 - RNA, 16 nt, Human
aaacgauuuaauucuc

SEQ ID NO: 2920842 - RNA, 17 nt, Human
aaacgauuuaauucucu

SEQ ID NO: 2920843 - RNA, 18 nt, Human
aaacgauuuaauucucuu

SEQ ID NO: 2920844 - RNA, 19 nt, Human
aaacgauuuaauucucuug

SEQ ID NO: 2920845 - RNA, 14 nt, Human
aaaccuugguguag

SEQ ID NO: 2920846 - RNA, 22 nt, Human
aaaccuugguguaguugaacug

SEQ ID NO: 2920847 - RNA, 21 nt, Human
aaacgauuuaauucucuugaa

SEQ ID NO: 2920848 - RNA, 18 nt, Human
gguaaauuuccccaacag

SEQ ID NO: 2920849 - RNA, 13 nt, Human
gguaaauuucugu

SEQ ID NO: 2920850 - RNA, 20 nt, Human
gguaaauuuccccaacagug

SEQ ID NO: 2920851 - RNA, 22 nt, Human
gguaaauuuccccaacagugug

SEQ ID NO: 2920852 - RNA, 20 nt, Human
guaaauuuccccaacagugu

SEQ ID NO: 2920853 - RNA, 21 nt, Human
guaaauuuccccaacagugug

SEQ ID NO: 2920854 - RNA, 23 nt, Human
guaaauuuccccaacagugugaa

SEQ ID NO: 2920855 - RNA, 16 nt, Human
guaaaauugaaaggca

SEQ ID NO: 2920856 - RNA, 13 nt, Human
guaaucaauaaac

SEQ ID NO: 2920857 - RNA, 17 nt, Human
guaaucaauaaacgauu

SEQ ID NO: 2920858 - RNA, 18 nt, Human
guaaucaauaaacgauuu

SEQ ID NO: 2920859 - RNA, 20 nt, Human
guaaucaauaaacgauuuaa

SEQ ID NO: 2920860 - RNA, 17 nt, Human
aaagcaguaacugacaa

SEQ ID NO: 2920861 - RNA, 11 nt, Human
gguggagaagc

SEQ ID NO: 2920862 - RNA, 12 nt, Human
gguggagaagcc

SEQ ID NO: 2920863 - RNA, 19 nt, Human
aaagggauuacccaagcaa

SEQ ID NO: 2920864 - RNA, 15 nt, Human
aaagcuuagcaggag

SEQ ID NO: 2920865 - RNA, 16 nt, Human
gguucuauuuggaauu

SEQ ID NO: 2920866 - RNA, 13 nt, Human
gguucuauuugga

SEQ ID NO: 2920867 - RNA, 14 nt, Human
aaaguagauuaaga

SEQ ID NO: 2920868 - RNA, 12 nt, Human
gguuuuaaugua

SEQ ID NO: 2920869 - RNA, 23 nt, Human
gccuccucucucaguuuuuauau

SEQ ID NO: 2920870 - RNA, 21 nt, Human
gccauugucuucggaaaccuu

SEQ ID NO: 2920871 - RNA, 21 nt, Human
ggaaaggaguagaaaaagcag

SEQ ID NO: 2920872 - RNA, 18 nt, Human
ggaaugaagcuuguguau

SEQ ID NO: 2920873 - RNA, 12 nt, Human
ggaaugaagcuu

SEQ ID NO: 2920874 - RNA, 15 nt, Human
ggaaugaagcuugug

SEQ ID NO: 2920875 - RNA, 16 nt, Human
ggaaugaagcuugugu

SEQ ID NO: 2920876 - RNA, 20 nt, Human
gcaaaaucauggaaugguua

SEQ ID NO: 2920877 - RNA, 13 nt, Human
gcaaaaucaugga

SEQ ID NO: 2920878 - RNA, 18 nt, Human
gcaacaucuagcaaaugu

SEQ ID NO: 2920879 - RNA, 15 nt, Human
gauuuaauucucuug

SEQ ID NO: 2920880 - RNA, 12 nt, Human
gauuuaauucuc

SEQ ID NO: 2920881 - RNA, 13 nt, Human
gauuuaauucucu

SEQ ID NO: 2920882 - RNA, 13 nt, Human
gaggacuguauuu

SEQ ID NO: 2920883 - RNA, 18 nt, Human
gaggacuguauuugugac

SEQ ID NO: 2920884 - RNA, 13 nt, Human
gaggagagccaga

SEQ ID NO: 2920885 - RNA, 23 nt, Human
gaggagagccagagaagugacag

SEQ ID NO: 2920886 - RNA, 17 nt, Human
gaggagagccagagaag

SEQ ID NO: 2920887 - RNA, 22 nt, Human
gaggagagccagagaagugaca

SEQ ID NO: 2920888 - RNA, 16 nt, Human
gagaggagagccagag

SEQ ID NO: 2920889 - RNA, 19 nt, Human
gagaggagagccagagaag

SEQ ID NO: 2920890 - RNA, 13 nt, Human
gagaggagagcca

SEQ ID NO: 2920891 - RNA, 15 nt, Human
gagaggagagccaga

SEQ ID NO: 2920892 - RNA, 23 nt, Human
gagaauauuagcuuuacuguuug

SEQ ID NO: 2920893 - RNA, 17 nt, Human
gacaaauacucaugugu

SEQ ID NO: 2920894 - RNA, 18 nt, Human
gacaaauacucaugugua

SEQ ID NO: 2920895 - RNA, 19 nt, Human
gacaaauacucauguguau

SEQ ID NO: 2920896 - RNA, 20 nt, Human
gacaaauacucauguguaug

SEQ ID NO: 2920897 - RNA, 21 nt, Human
gacaaagacaaauucuguuuc

SEQ ID NO: 2920898 - RNA, 14 nt, Human
gacaaagacaaauu

SEQ ID NO: 2920899 - RNA, 22 nt, Human
gaauuuuuuucaucuucucugg

SEQ ID NO: 2920900 - RNA, 20 nt, Human
gaauuuuuuucaucuucucu

SEQ ID NO: 2920901 - RNA, 16 nt, Human
gaauuuuuuucaucuu

SEQ ID NO: 2920902 - RNA, 23 nt, Human
gacauguuuuagacaaauacuca

SEQ ID NO: 2920903 - RNA, 20 nt, Human
cuguugugaccugaaguuca

SEQ ID NO: 2920904 - RNA, 19 nt, Human
cuguugugaccugaaguuc

SEQ ID NO: 2920905 - RNA, 22 nt, Human
cugcuacucuguuccuucacau

SEQ ID NO: 2920906 - RNA, 18 nt, Human
cugcuacucuguuccuuc

SEQ ID NO: 2920907 - RNA, 17 nt, Human
cugcuacucuguuccuu

SEQ ID NO: 2920908 - RNA, 21 nt, Human
cuuacauguuuucuuugcuuu

SEQ ID NO: 2920909 - RNA, 14 nt, Human
cuuacauguuuucu

SEQ ID NO: 2920910 - RNA, 23 nt, Human
cuucuauggacugguuguugcca

SEQ ID NO: 2920911 - RNA, 17 nt, Human
cuuuuuuuuaaugugcu

SEQ ID NO: 2920912 - RNA, 18 nt, Human
cuuuuuuuuaaugugcug

SEQ ID NO: 2920913 - RNA, 15 nt, Human
cacagcuaccucuuc

SEQ ID NO: 2920914 - RNA, 17 nt, Human
cacauuugauucugugu

SEQ ID NO: 2920915 - RNA, 19 nt, Human
cacauccuaugcaauauau

SEQ ID NO: 2920916 - RNA, 17 nt, Human
cacauccuguguuucua

SEQ ID NO: 2920917 - RNA, 19 nt, Human
caauaaacgauuuaauucu

SEQ ID NO: 2920918 - RNA, 21 nt, Human
caauaaacgauuuaauucucu

SEQ ID NO: 2920919 - RNA, 12 nt, Human
caauaaacgauu

SEQ ID NO: 2920920 - RNA, 16 nt, Human
caauaaacgauuuaau

SEQ ID NO: 2920921 - RNA, 17 nt, Human
caauaaacgauuuaauu

SEQ ID NO: 2920922 - RNA, 18 nt, Human
caauaaacgauuuaauuc

SEQ ID NO: 2920923 - RNA, 22 nt, Human
cagaaauuuaauucauguuucu

SEQ ID NO: 2920924 - RNA, 23 nt, Human
cagaaauuuaauucauguuucuu

SEQ ID NO: 2920925 - RNA, 18 nt, Human
cacuguuucucugcuguu

SEQ ID NO: 2920926 - RNA, 14 nt, Human
cacuguuucucugc

SEQ ID NO: 2920927 - RNA, 12 nt, Human
cacuguuucucu

SEQ ID NO: 2920928 - RNA, 20 nt, Human
auuuuuaccuuuuuccuucc

SEQ ID NO: 2920929 - RNA, 15 nt, Human
auucucucuccugua

SEQ ID NO: 2920930 - RNA, 22 nt, Human
auugagaacugcauauguuucg

SEQ ID NO: 2920931 - RNA, 18 nt, Human
auugagaacugcauaugu

SEQ ID NO: 2920932 - RNA, 14 nt, Human
auugagaacugcau

SEQ ID NO: 2920933 - RNA, 14 nt, Human
auuuauacuauuua

SEQ ID NO: 2920934 - RNA, 18 nt, Human
auuuaaucuuuuuuaugu

SEQ ID NO: 2920935 - RNA, 15 nt, Human
caucugugauucccu

SEQ ID NO: 2920936 - RNA, 12 nt, Human
cagugguggcag

SEQ ID NO: 2920937 - RNA, 14 nt, Human
cagugguggcaggg

SEQ ID NO: 2920938 - RNA, 16 nt, Human
cagugguggcagggcc

SEQ ID NO: 2920939 - RNA, 19 nt, Human
cagugguggcagggccuag

SEQ ID NO: 2920940 - RNA, 22 nt, Human
cauauguuucgcugauauaugu

SEQ ID NO: 2920941 - RNA, 18 nt, Human
cccuauggggauggucca

SEQ ID NO: 2920942 - RNA, 16 nt, Human
cccuauggggaugguc

SEQ ID NO: 2920943 - RNA, 17 nt, Human
ccgcaguuccugucccu

SEQ ID NO: 2920944 - RNA, 19 nt, Human
ccugugaaauaguucaaag

SEQ ID NO: 2920945 - RNA, 19 nt, Human
cgcugcaaccuguugauag

SEQ ID NO: 2920946 - RNA, 13 nt, Human
cgcugauauaugu

SEQ ID NO: 2920947 - RNA, 12 nt, Human
cucaucugugau

SEQ ID NO: 2920948 - RNA, 12 nt, Human
cucauguguaug

SEQ ID NO: 2920949 - RNA, 9 nt, Human
cucaugugu

SEQ ID NO: 2920950 - RNA, 13 nt, Human
cugacaacuugaa

SEQ ID NO: 2920951 - RNA, 15 nt, Human
auuccaacaaagggu

SEQ ID NO: 2920952 - RNA, 23 nt, Human
auuccaacaaaggguuuuaaugu

SEQ ID NO: 2920953 - RNA, 18 nt, Human
auuccaacaaaggguuuu

SEQ ID NO: 2920954 - RNA, 19 nt, Human
auuccaacaaaggguuuua

SEQ ID NO: 2920955 - RNA, 14 nt, Human
auucccuccugcua

SEQ ID NO: 2920956 - RNA, 21 nt, Human
auucccuccugcuacucuguu

SEQ ID NO: 2920957 - RNA, 13 nt, Human
uuuuuguaauuua

SEQ ID NO: 2920958 - RNA, 22 nt, Human
auuacaucuuucacauuggcua

SEQ ID NO: 2920959 - RNA, 18 nt, Human
auuacaucuuucacauug

SEQ ID NO: 2920960 - RNA, 16 nt, Human
auuacaucuuucacau

SEQ ID NO: 2920961 - RNA, 15 nt, Human
auuacaucuuucaca

SEQ ID NO: 2920962 - RNA, 13 nt, Human
auuacccaagcaa

SEQ ID NO: 2920963 - RNA, 15 nt, Human
auuacccaagcaaaa

SEQ ID NO: 2920964 - RNA, 17 nt, Human
uuuugcaccccaugcug

SEQ ID NO: 2920965 - RNA, 18 nt, Human
uuuugcaccccaugcugu

SEQ ID NO: 2920966 - RNA, 19 nt, Human
uuuugcaccccaugcuguu

SEQ ID NO: 2920967 - RNA, 21 nt, Human
uuuugcaccccaugcuguuga

SEQ ID NO: 2920968 - RNA, 18 nt, Human
uuuugaguggaugauguu

SEQ ID NO: 2920969 - RNA, 21 nt, Human
augugccguguuauuguauua

SEQ ID NO: 2920970 - RNA, 12 nt, Human
uuuucauaauaa

SEQ ID NO: 2920971 - RNA, 17 nt, Human
uuuucucuaacucagaa

SEQ ID NO: 2920972 - RNA, 21 nt, Human
uuuucaucuucucuggcgaca

SEQ ID NO: 2920973 - RNA, 11 nt, Human
auuugugacua

SEQ ID NO: 2920974 - RNA, 16 nt, Human
auuugugacuaauugu

SEQ ID NO: 2920975 - RNA, 18 nt, Human
auuugugacuaauuguau

SEQ ID NO: 2920976 - RNA, 19 nt, Human
auuugugacuaauuguaua

SEQ ID NO: 2920977 - RNA, 20 nt, Human
auuugugacuaauuguauaa

SEQ ID NO: 2920978 - RNA, 22 nt, Human
auuugugacuaauuguauaaca

SEQ ID NO: 2920979 - RNA, 23 nt, Human
auuguauuaggugucauuuccau

SEQ ID NO: 2920980 - RNA, 17 nt, Human
auucuuacauguuuucu

SEQ ID NO: 2920981 - RNA, 15 nt, Human
auucuuacauguuuu

SEQ ID NO: 2920982 - RNA, 12 nt, Human
auucuguuucuu

SEQ ID NO: 2920983 - RNA, 22 nt, Human
auucuguguguuuucauaauaa

SEQ ID NO: 2920984 - RNA, 21 nt, Human
auucuguguguuuucauaaua

SEQ ID NO: 2920985 - RNA, 17 nt, Human
auucuguguguuuucau

SEQ ID NO: 2920986 - RNA, 18 nt, Human
auugaaaggcauucucug

SEQ ID NO: 2920987 - RNA, 15 nt, Human
auuuccccaacagug

SEQ ID NO: 2920988 - RNA, 16 nt, Human
auuuccccaacagugu

SEQ ID NO: 2920989 - RNA, 17 nt, Human
auuuccccaacagugug

SEQ ID NO: 2920990 - RNA, 18 nt, Human
auuuccccaacaguguga

SEQ ID NO: 2920991 - RNA, 19 nt, Human
auuuccccaacagugugaa

SEQ ID NO: 2920992 - RNA, 14 nt, Human
auuucaaaacucau

SEQ ID NO: 2920993 - RNA, 19 nt, Human
auuuaguuuuuguaauuua

SEQ ID NO: 2920994 - RNA, 20 nt, Human
auuuaguuuuuguaauuuau

SEQ ID NO: 2920995 - RNA, 22 nt, Human
augaauuuuuuucaucuucucu

SEQ ID NO: 2920996 - RNA, 23 nt, Human
augaauuuuuuucaucuucucug

SEQ ID NO: 2920997 - RNA, 17 nt, Human
uuguauaacagguuauu

SEQ ID NO: 2920998 - RNA, 15 nt, Human
uuguauaacagguua

SEQ ID NO: 2920999 - RNA, 16 nt, Human
uuguauaacagguuau

SEQ ID NO: 2921000 - RNA, 13 nt, Human
uuguauaacaggu

SEQ ID NO: 2921001 - RNA, 14 nt, Human
uuguauaacagguu

SEQ ID NO: 2921002 - RNA, 22 nt, Human
uugugaacucagccaagcacag

SEQ ID NO: 2921003 - RNA, 23 nt, Human
uugugaacucagccaagcacagu

SEQ ID NO: 2921004 - RNA, 19 nt, Human
uugugaacucagccaagca

SEQ ID NO: 2921005 - RNA, 19 nt, Human
augcuguauucuucuuugg

SEQ ID NO: 2921006 - RNA, 16 nt, Human
uuuaccugugaaauag

SEQ ID NO: 2921007 - RNA, 15 nt, Human
uuuaccugugaaaua

SEQ ID NO: 2921008 - RNA, 18 nt, Human
uuucuagggaaaugaaag

SEQ ID NO: 2921009 - RNA, 15 nt, Human
uuucuagggaaauga

SEQ ID NO: 2921010 - RNA, 14 nt, Human
uuucuagggaaaug

SEQ ID NO: 2921011 - RNA, 15 nt, Human
uuuccuucucaucug

SEQ ID NO: 2921012 - RNA, 18 nt, Human
uuuccuucucaucuguga

SEQ ID NO: 2921013 - RNA, 23 nt, Human
auauauguguuuuucacauuugc

SEQ ID NO: 2921014 - RNA, 21 nt, Human
auauauguguuuuucacauuu

SEQ ID NO: 2921015 - RNA, 15 nt, Human
auauauguguuuuuc

SEQ ID NO: 2921016 - RNA, 13 nt, Human
auauauguguuuu

SEQ ID NO: 2921017 - RNA, 21 nt, Human
uuaucauguguaaucaauaaa

SEQ ID NO: 2921018 - RNA, 15 nt, Human
uuaucauguguaauc

SEQ ID NO: 2921019 - RNA, 18 nt, Human
uuaucauguguaaucaau

SEQ ID NO: 2921020 - RNA, 16 nt, Human
uucagggugaugccag

SEQ ID NO: 2921021 - RNA, 15 nt, Human
uucagggugaugcca

SEQ ID NO: 2921022 - RNA, 19 nt, Human
auauguguuuuucacauuu

SEQ ID NO: 2921023 - RNA, 17 nt, Human
auauguguuuuucacau

SEQ ID NO: 2921024 - RNA, 22 nt, Human
auauguguuuuucacauuugcg

SEQ ID NO: 2921025 - RNA, 12 nt, Human
auauuguuucua

SEQ ID NO: 2921026 - RNA, 18 nt, Human
aucaguuacucugaaggg

SEQ ID NO: 2921027 - RNA, 14 nt, Human
uucuuacauguuuu

SEQ ID NO: 2921028 - RNA, 13 nt, Human
uucuuacauguuu

SEQ ID NO: 2921029 - RNA, 21 nt, Human
uucuuaaaugggcuacuuugu

SEQ ID NO: 2921030 - RNA, 11 nt, Human
uucuguuucuu

SEQ ID NO: 2921031 - RNA, 12 nt, Human
uugaguuuuguu

SEQ ID NO: 2921032 - RNA, 21 nt, Human
uugaguuuuguuuuaaaauua

SEQ ID NO: 2921033 - RNA, 21 nt, Human
uugagaacugcauauguuucg

SEQ ID NO: 2921034 - RNA, 19 nt, Human
uugagaacugcauauguuu

SEQ ID NO: 2921035 - RNA, 17 nt, Human
aucgugacgcugaauaa

SEQ ID NO: 2921036 - RNA, 18 nt, Human
aucgugacgcugaauaaa

SEQ ID NO: 2921037 - RNA, 20 nt, Human
aucgugacgcugaauaaaug

SEQ ID NO: 2921038 - RNA, 21 nt, Human
aucgugacgcugaauaaaugu

SEQ ID NO: 2921039 - RNA, 22 nt, Human
aucgugacgcugaauaaauguc

SEQ ID NO: 2921040 - RNA, 15 nt, Human
aucuaaauugaauaa

SEQ ID NO: 2921041 - RNA, 16 nt, Human
aucuaaauugaauaau

SEQ ID NO: 2921042 - RNA, 21 nt, Human
aucuaaauugaauaaugguac

SEQ ID NO: 2921043 - RNA, 18 nt, Human
auccuguguuucuaggga

SEQ ID NO: 2921044 - RNA, 14 nt, Human
auccuguguuucua

SEQ ID NO: 2921045 - RNA, 16 nt, Human
uggcuauuuaaagaca

SEQ ID NO: 2921046 - RNA, 16 nt, Human
ugggaaaggaguagaa

SEQ ID NO: 2921047 - RNA, 17 nt, Human
ugggaaaggaguagaaa

SEQ ID NO: 2921048 - RNA, 14 nt, Human
ugcugucuaugugg

SEQ ID NO: 2921049 - RNA, 18 nt, Human
aggacuguauuugugacu

SEQ ID NO: 2921050 - RNA, 22 nt, Human
aggacuguauuugugacuaauu

SEQ ID NO: 2921051 - RNA, 19 nt, Human
aggagcaggagccugagcc

SEQ ID NO: 2921052 - RNA, 17 nt, Human
ugcuuggguggagaagc

SEQ ID NO: 2921053 - RNA, 18 nt, Human
ugcuuggguggagaagcc

SEQ ID NO: 2921054 - RNA, 15 nt, Human
ugcuuggguggagaa

SEQ ID NO: 2921055 - RNA, 16 nt, Human
ugcuuggguggagaag

SEQ ID NO: 2921056 - RNA, 17 nt, Human
uggaauuuauauacaac

SEQ ID NO: 2921057 - RNA, 21 nt, Human
agccagagaagugacagggaa

SEQ ID NO: 2921058 - RNA, 11 nt, Human
agccagagaag

SEQ ID NO: 2921059 - RNA, 14 nt, Human
agccagagaaguga

SEQ ID NO: 2921060 - RNA, 15 nt, Human
agccagagaagugac

SEQ ID NO: 2921061 - RNA, 16 nt, Human
agccagagaagugaca

SEQ ID NO: 2921062 - RNA, 17 nt, Human
agccagagaagugacag

SEQ ID NO: 2921063 - RNA, 18 nt, Human
agccagagaagugacagg

SEQ ID NO: 2921064 - RNA, 19 nt, Human
agccagagaagugacaggg

SEQ ID NO: 2921065 - RNA, 15 nt, Human
agccaucuugguaaa

SEQ ID NO: 2921066 - RNA, 17 nt, Human
agccaucuugguaaauu

SEQ ID NO: 2921067 - RNA, 19 nt, Human
agccaucuugguaaauuuc

SEQ ID NO: 2921068 - RNA, 13 nt, Human
agccaucauggau

SEQ ID NO: 2921069 - RNA, 17 nt, Human
ugauucccuccugcuac

SEQ ID NO: 2921070 - RNA, 18 nt, Human
ugauucccuccugcuacu

SEQ ID NO: 2921071 - RNA, 14 nt, Human
agcccggaugcuuc

SEQ ID NO: 2921072 - RNA, 20 nt, Human
ugcaauauaucuaaauugaa

SEQ ID NO: 2921073 - RNA, 18 nt, Human
ugcaauauaucuaaauug

SEQ ID NO: 2921074 - RNA, 19 nt, Human
ugcaauauaucuaaauuga

SEQ ID NO: 2921075 - RNA, 12 nt, Human
agcuacagguua

SEQ ID NO: 2921076 - RNA, 13 nt, Human
agcuacagguuac

SEQ ID NO: 2921077 - RNA, 14 nt, Human
agcuacagguuaca

SEQ ID NO: 2921078 - RNA, 18 nt, Human
agcuacagguuacaacag

SEQ ID NO: 2921079 - RNA, 19 nt, Human
agcuacagguuacaacaga

SEQ ID NO: 2921080 - RNA, 20 nt, Human
agcuacagguuacaacagau

SEQ ID NO: 2921081 - RNA, 22 nt, Human
agcuacagguuacaacagauuu

SEQ ID NO: 2921082 - RNA, 21 nt, Human
agcuacagguuacaacagauu

SEQ ID NO: 2921083 - RNA, 20 nt, Human
uguuuuagacaaauacucau

SEQ ID NO: 2921084 - RNA, 19 nt, Human
uguuuuagacaaauacuca

SEQ ID NO: 2921085 - RNA, 21 nt, Human
uguuuuagacaaauacucaug

SEQ ID NO: 2921086 - RNA, 22 nt, Human
uguuuuagacaaauacucaugu

SEQ ID NO: 2921087 - RNA, 23 nt, Human
uguuuuagacaaauacucaugug

SEQ ID NO: 2921088 - RNA, 24 nt, Human
uguuuuagacaaauacucaugugu

SEQ ID NO: 2921089 - RNA, 23 nt, Human
aguugauuuuacaauugaaauga

SEQ ID NO: 2921090 - RNA, 21 nt, Human
aguugauuuuacaauugaaau

SEQ ID NO: 2921091 - RNA, 18 nt, Human
uguuauggcuuaaugaca

SEQ ID NO: 2921092 - RNA, 15 nt, Human
aguggguuucacaag

SEQ ID NO: 2921093 - RNA, 21 nt, Human
aguggguuucacaagugaaaa

SEQ ID NO: 2921094 - RNA, 17 nt, Human
aguuagucuacucuuaa

SEQ ID NO: 2921095 - RNA, 22 nt, Human
aguuagucuacucuuaagccau

SEQ ID NO: 2921096 - RNA, 23 nt, Human
aguuagucuacucuuaagccauc

SEQ ID NO: 2921097 - RNA, 18 nt, Human
aguuaggcuauucacaac

SEQ ID NO: 2921098 - RNA, 20 nt, Human
aguuccugucccuucucuua

SEQ ID NO: 2921099 - RNA, 23 nt, Human
aguuccugucccuucucuuaauu

SEQ ID NO: 2921100 - RNA, 21 nt, Human
aguuccugucccuucucuuaa

SEQ ID NO: 2921101 - RNA, 11 nt, Human
uuaucaugcaa

SEQ ID NO: 2921102 - RNA, 16 nt, Human
uuaucaugcaaaugcu

SEQ ID NO: 2921103 - RNA, 12 nt, Human
uuaucaugugua

SEQ ID NO: 2921104 - RNA, 13 nt, Human
uuaucauguguaa

SEQ ID NO: 2921105 - RNA, 14 nt, Human
uuaucauguguaau

SEQ ID NO: 2921106 - RNA, 18 nt, Human
uuaucacugacacaaaaa

SEQ ID NO: 2921107 - RNA, 12 nt, Human
auacucaugugu

SEQ ID NO: 2921108 - RNA, 11 nt, Human
auacucaugug

SEQ ID NO: 2921109 - RNA, 23 nt, Human
auacuauuuaguuuuuguaauuu

SEQ ID NO: 2921110 - RNA, 20 nt, Human
auacuauuuaguuuuuguaa

SEQ ID NO: 2921111 - RNA, 21 nt, Human
uuauagaugggaaugaagcuu

SEQ ID NO: 2921112 - RNA, 22 nt, Human
uuagcaggagaggagagccaga

SEQ ID NO: 2921113 - RNA, 23 nt, Human
uuagcaggagaggagagccagag

SEQ ID NO: 2921114 - RNA, 15 nt, Human
auaaacgauuuaauu

SEQ ID NO: 2921115 - RNA, 18 nt, Human
auaaacgauuuaauucuc

SEQ ID NO: 2921116 - RNA, 19 nt, Human
auaaacgauuuaauucucu

SEQ ID NO: 2921117 - RNA, 20 nt, Human
auaaacgauuuaauucucuu

SEQ ID NO: 2921118 - RNA, 22 nt, Human
aguuuuccuucucaucugugau

SEQ ID NO: 2921119 - RNA, 18 nt, Human
aguuuuccuucucaucug

SEQ ID NO: 2921120 - RNA, 14 nt, Human
aguuuuccuucuca

SEQ ID NO: 2921121 - RNA, 12 nt, Human
aguuuuccuucu

SEQ ID NO: 2921122 - RNA, 23 nt, Human
aguuuuccuucucaucugugauu

SEQ ID NO: 2921123 - RNA, 15 nt, Human
uuacaucuuucacau

SEQ ID NO: 2921124 - RNA, 20 nt, Human
uuacccaagcaaaaucaugg

SEQ ID NO: 2921125 - RNA, 12 nt, Human
uuacccaagcaa

SEQ ID NO: 2921126 - RNA, 13 nt, Human
uuacccaagcaaa

SEQ ID NO: 2921127 - RNA, 12 nt, Human
auaaaugucuuu

SEQ ID NO: 2921128 - RNA, 20 nt, Human
auaaaugucuuuuuuuuaau

SEQ ID NO: 2921129 - RNA, 22 nt, Human
auaaaugucuuuuuuuuaaugu

SEQ ID NO: 2921130 - RNA, 23 nt, Human
auaaaugucuuuuuuuuaaugug

SEQ ID NO: 2921131 - RNA, 20 nt, Human
uuagcaggagaggagagcca

SEQ ID NO: 2921132 - RNA, 21 nt, Human
uguauuaggugucauuuccau

SEQ ID NO: 2921133 - RNA, 13 nt, Human
uguauccauuauc

SEQ ID NO: 2921134 - RNA, 14 nt, Human
uguauccauuauca

SEQ ID NO: 2921135 - RNA, 17 nt, Human
uguauccauuaucaugu

SEQ ID NO: 2921136 - RNA, 18 nt, Human
uguauccauuaucaugug

SEQ ID NO: 2921137 - RNA, 19 nt, Human
uguauccauuaucaugugu

SEQ ID NO: 2921138 - RNA, 20 nt, Human
uguauccauuaucaugugua

SEQ ID NO: 2921139 - RNA, 22 nt, Human
uguauccauuaucauguguaau

SEQ ID NO: 2921140 - RNA, 14 nt, Human
ugugaacucagcca

SEQ ID NO: 2921141 - RNA, 15 nt, Human
ugugaacucagccaa

SEQ ID NO: 2921142 - RNA, 16 nt, Human
ugugaacucagccaag

SEQ ID NO: 2921143 - RNA, 18 nt, Human
ugugaacucagccaagca

SEQ ID NO: 2921144 - RNA, 19 nt, Human
ugugaacucagccaagcac

SEQ ID NO: 2921145 - RNA, 20 nt, Human
ugugaacucagccaagcaca

SEQ ID NO: 2921146 - RNA, 16 nt, Human
ugucuucggaaaccuu

SEQ ID NO: 2921147 - RNA, 19 nt, Human
ugucuucggaaaccuuggu

SEQ ID NO: 2921148 - RNA, 20 nt, Human
ugucuucggaaaccuuggug

SEQ ID NO: 2921149 - RNA, 21 nt, Human
ugucuucggaaaccuuggugu

SEQ ID NO: 2921150 - RNA, 21 nt, Human
ugugaacucagccaagcacag

SEQ ID NO: 2921151 - RNA, 21 nt, Human
uggguggagaagccauugucu

SEQ ID NO: 2921152 - RNA, 22 nt, Human
uggguggagaagccauugucuu

SEQ ID NO: 2921153 - RNA, 23 nt, Human
uggguggagaagccauugucuuc

SEQ ID NO: 2921154 - RNA, 14 nt, Human
uggguggagaagcc

SEQ ID NO: 2921155 - RNA, 15 nt, Human
uggguggagaagcca

SEQ ID NO: 2921156 - RNA, 16 nt, Human
uggguggagaagccau

SEQ ID NO: 2921157 - RNA, 17 nt, Human
uggguggagaagccauu

SEQ ID NO: 2921158 - RNA, 19 nt, Human
agggugaugccagguucua

SEQ ID NO: 2921159 - RNA, 15 nt, Human
agggugaugccaggu

SEQ ID NO: 2921160 - RNA, 14 nt, Human
agggugaugccagg

SEQ ID NO: 2921161 - RNA, 22 nt, Human
ugguuauuuagggaacugcuug

SEQ ID NO: 2921162 - RNA, 12 nt, Human
uguaaagcauuc

SEQ ID NO: 2921163 - RNA, 17 nt, Human
uguaaagcauuccaaca

SEQ ID NO: 2921164 - RNA, 18 nt, Human
uguaaagcauuccaacaa

SEQ ID NO: 2921165 - RNA, 18 nt, Human
uguacauuuccaaauuca

SEQ ID NO: 2921166 - RNA, 22 nt, Human
uguacauuuccaaauucacaag

SEQ ID NO: 2921167 - RNA, 21 nt, Human
uguacauuuccaaauucacaa

SEQ ID NO: 2921168 - RNA, 13 nt, Human
ugaacucagccaa

SEQ ID NO: 2921169 - RNA, 14 nt, Human
ugaacucagccaag

SEQ ID NO: 2921170 - RNA, 15 nt, Human
ugaacucagccaagc

SEQ ID NO: 2921171 - RNA, 16 nt, Human
ugaacucagccaagca

SEQ ID NO: 2921172 - RNA, 17 nt, Human
ugaacucagccaagcac

SEQ ID NO: 2921173 - RNA, 18 nt, Human
ugaacucagccaagcaca

SEQ ID NO: 2921174 - RNA, 19 nt, Human
ugaacucagccaagcacag

SEQ ID NO: 2921175 - RNA, 20 nt, Human
ugaacucagccaagcacagu

SEQ ID NO: 2921176 - RNA, 21 nt, Human
ugaacucagccaagcacagug

SEQ ID NO: 2921177 - RNA, 22 nt, Human
ugaacucagccaagcacagugg

SEQ ID NO: 2921178 - RNA, 23 nt, Human
ugaacucagccaagcacaguggu

SEQ ID NO: 2921179 - RNA, 18 nt, Human
ugaauaaugguaccagau

SEQ ID NO: 2921180 - RNA, 20 nt, Human
ugaauaaugguaccagauaa

SEQ ID NO: 2921181 - RNA, 15 nt, Human
ugaaguauacuguau

SEQ ID NO: 2921182 - RNA, 22 nt, Human
ucuuuuuuuuaaugugcugugu

SEQ ID NO: 2921183 - RNA, 19 nt, Human
ucuuuuuuuuaaugugcug

SEQ ID NO: 2921184 - RNA, 20 nt, Human
ucuuuuuuuuaaugugcugu

SEQ ID NO: 2921185 - RNA, 20 nt, Human
ugagaaucagaucauuucaa

SEQ ID NO: 2921186 - RNA, 14 nt, Human
agcaagugaauuuu

SEQ ID NO: 2921187 - RNA, 22 nt, Human
agauuugugaacucagccaagc

SEQ ID NO: 2921188 - RNA, 21 nt, Human
ucugaucgugacgcugaauaa

SEQ ID NO: 2921189 - RNA, 22 nt, Human
ucugaucgugacgcugaauaaa

SEQ ID NO: 2921190 - RNA, 20 nt, Human
ucugaucgugacgcugaaua

SEQ ID NO: 2921191 - RNA, 23 nt, Human
agaauucuuacauguuuucuuug

SEQ ID NO: 2921192 - RNA, 20 nt, Human
agaauucuuacauguuuucu

SEQ ID NO: 2921193 - RNA, 19 nt, Human
agaauucuuacauguuuuc

SEQ ID NO: 2921194 - RNA, 17 nt, Human
agaauucuuacauguuu

SEQ ID NO: 2921195 - RNA, 16 nt, Human
agaauucuuacauguu

SEQ ID NO: 2921196 - RNA, 15 nt, Human
agaaguuaagcaaca

SEQ ID NO: 2921197 - RNA, 19 nt, Human
agaaguuaagcaacaucua

SEQ ID NO: 2921198 - RNA, 19 nt, Human
agaauauuagcuuuacugu

SEQ ID NO: 2921199 - RNA, 21 nt, Human
agaauauuagcuuuacuguuu

SEQ ID NO: 2921200 - RNA, 20 nt, Human
agaauauuagcuuuacuguu

SEQ ID NO: 2921201 - RNA, 17 nt, Human
agaaucagaucauuuca

SEQ ID NO: 2921202 - RNA, 23 nt, Human
agaauauuagcuuuacuguuugu

SEQ ID NO: 2921203 - RNA, 17 nt, Human
acuuaaauuuuaauuua

SEQ ID NO: 2921204 - RNA, 16 nt, Human
ucuauuuggaauuuau

SEQ ID NO: 2921205 - RNA, 12 nt, Human
ucuauuuggaau

SEQ ID NO: 2921206 - RNA, 13 nt, Human
ucuauuuggaauu

SEQ ID NO: 2921207 - RNA, 18 nt, Human
ucuccuccauacucagga

SEQ ID NO: 2921208 - RNA, 17 nt, Human
ucuccuccauacucagg

SEQ ID NO: 2921209 - RNA, 20 nt, Human
acuacugcuaccacaacuau

SEQ ID NO: 2921210 - RNA, 13 nt, Human
uccagacacuuuu

SEQ ID NO: 2921211 - RNA, 15 nt, Human
accuuuuuccuuccu

SEQ ID NO: 2921212 - RNA, 14 nt, Human
accuuuuuccuucc

SEQ ID NO: 2921213 - RNA, 22 nt, Human
uccacugucacuguuucucugc

SEQ ID NO: 2921214 - RNA, 19 nt, Human
uccacugucacuguuucuc

SEQ ID NO: 2921215 - RNA, 15 nt, Human
acugauaguuacugu

SEQ ID NO: 2921216 - RNA, 17 nt, Human
acugauaguuacuguug

SEQ ID NO: 2921217 - RNA, 23 nt, Human
acugauaguuacuguugugaccu

SEQ ID NO: 2921218 - RNA, 18 nt, Human
acugauaguuacuguugu

SEQ ID NO: 2921219 - RNA, 20 nt, Human
acugauaguuacuguuguga

SEQ ID NO: 2921220 - RNA, 14 nt, Human
acucuuaagccauc

SEQ ID NO: 2921221 - RNA, 22 nt, Human
acucuuaagccaucuugguaaa

SEQ ID NO: 2921222 - RNA, 13 nt, Human
acucuuaagccau

SEQ ID NO: 2921223 - RNA, 16 nt, Human
ucagggugaugccagg

SEQ ID NO: 2921224 - RNA, 16 nt, Human
ucauguuucuuaaaug

SEQ ID NO: 2921225 - RNA, 15 nt, Human
ucauguuucuuaaau

SEQ ID NO: 2921226 - RNA, 11 nt, Human
ucauguuucuu

SEQ ID NO: 2921227 - RNA, 19 nt, Human
ucauguguaugggcaaaaa

SEQ ID NO: 2921228 - RNA, 18 nt, Human
ucauguguaaucaauaaa

SEQ ID NO: 2921229 - RNA, 19 nt, Human
ucauguguaaucaauaaac

SEQ ID NO: 2921230 - RNA, 21 nt, Human
ucauguguaaucaauaaacga

SEQ ID NO: 2921231 - RNA, 22 nt, Human
ucauguguaaucaauaaacgau

SEQ ID NO: 2921232 - RNA, 23 nt, Human
ucauguguaaucaauaaacgauu

SEQ ID NO: 2921233 - RNA, 20 nt, Human
ucaugcaaaugcuguauucu

SEQ ID NO: 2921234 - RNA, 16 nt, Human
ucagugcccaacuguu

SEQ ID NO: 2921235 - RNA, 18 nt, Human
ucacauacaauuauuuuu

SEQ ID NO: 2921236 - RNA, 14 nt, Human
accaaagccaccag

SEQ ID NO: 2921237 - RNA, 17 nt, Human
ucacuguuucucugcug

SEQ ID NO: 2921238 - RNA, 14 nt, Human
ucacuguuucucug

SEQ ID NO: 2921239 - RNA, 23 nt, Human
uaagcaacaucuagcaaauguua

SEQ ID NO: 2921240 - RNA, 13 nt, Human
uacagguuacaac

SEQ ID NO: 2921241 - RNA, 15 nt, Human
uacagguuacaacag

SEQ ID NO: 2921242 - RNA, 17 nt, Human
uacagguuacaacagau

SEQ ID NO: 2921243 - RNA, 18 nt, Human
uacagguuacaacagauu

SEQ ID NO: 2921244 - RNA, 21 nt, Human
uacagguuacaacagauuugu

SEQ ID NO: 2921245 - RNA, 23 nt, Human
uacagguuacaacagauuuguga

SEQ ID NO: 2921246 - RNA, 17 nt, Human
aauguaacagucugauc

SEQ ID NO: 2921247 - RNA, 17 nt, Human
aauuauuuuuacaguuc

SEQ ID NO: 2921248 - RNA, 12 nt, Human
uacucugaaggg

SEQ ID NO: 2921249 - RNA, 19 nt, Human
uacucugaagggcaucaug

SEQ ID NO: 2921250 - RNA, 22 nt, Human
uacucugaagggcaucaugcau

SEQ ID NO: 2921251 - RNA, 17 nt, Human
acaggaagucuucaggg

SEQ ID NO: 2921252 - RNA, 16 nt, Human
uauuagcuuuacuguu

SEQ ID NO: 2921253 - RNA, 14 nt, Human
uauuagcuuuacug

SEQ ID NO: 2921254 - RNA, 23 nt, Human
acagggaagcuacagguuacaac

SEQ ID NO: 2921255 - RNA, 18 nt, Human
acagggaagcuacagguu

SEQ ID NO: 2921256 - RNA, 19 nt, Human
acagggaagcuacagguua

SEQ ID NO: 2921257 - RNA, 13 nt, Human
acagggaagcuac

SEQ ID NO: 2921258 - RNA, 14 nt, Human
acagggaagcuaca

SEQ ID NO: 2921259 - RNA, 15 nt, Human
acagggaagcuacag

SEQ ID NO: 2921260 - RNA, 16 nt, Human
acagggaagcuacagg

SEQ ID NO: 2921261 - RNA, 20 nt, Human
uauauuaucaugcaaaugcu

SEQ ID NO: 2921262 - RNA, 14 nt, Human
uauauuaucaugca

SEQ ID NO: 2921263 - RNA, 13 nt, Human
uauaaaagugauu

SEQ ID NO: 2921264 - RNA, 22 nt, Human
uauaaaagugauuguuggcaca

SEQ ID NO: 2921265 - RNA, 20 nt, Human
uagccacaaaauugggaaag

SEQ ID NO: 2921266 - RNA, 13 nt, Human
acaacagauuugu

SEQ ID NO: 2921267 - RNA, 14 nt, Human
acaacagauuugug

SEQ ID NO: 2921268 - RNA, 13 nt, Human
uagaugggaauga

SEQ ID NO: 2921269 - RNA, 17 nt, Human
acaaaggguuuuaaugu

SEQ ID NO: 2921270 - RNA, 18 nt, Human
acaaaggguuuuaaugua

SEQ ID NO: 2921271 - RNA, 15 nt, Human
acaaaggguuuuaau

SEQ ID NO: 2921272 - RNA, 14 nt, Human
aacugcauugagaa

SEQ ID NO: 2921273 - RNA, 20 nt, Human
aacugcauugagaacugcau

SEQ ID NO: 2921274 - RNA, 22 nt, Human
gugacagggaagcuacagguua

SEQ ID NO: 2921275 - RNA, 17 nt, Human
gugacagggaagcuaca

SEQ ID NO: 2921276 - RNA, 18 nt, Human
gugacagggaagcuacag

SEQ ID NO: 2921277 - RNA, 19 nt, Human
gugacagggaagcuacagg

SEQ ID NO: 2921278 - RNA, 20 nt, Human
gugacagggaagcuacaggu

SEQ ID NO: 2921279 - RNA, 13 nt, Human
gugacagggaagc

SEQ ID NO: 2921280 - RNA, 16 nt, Human
gugacagggaagcuac

SEQ ID NO: 2921281 - RNA, 15 nt, Human
guccucuuucaaagg

SEQ ID NO: 2921282 - RNA, 19 nt, Human
gucccuucucuuaauuuaa

SEQ ID NO: 2921283 - RNA, 14 nt, Human
gucacauacaauua

SEQ ID NO: 2921284 - RNA, 15 nt, Human
gucacuguuucucug

SEQ ID NO: 2921285 - RNA, 13 nt, Human
gucacuguuucuc

SEQ ID NO: 2921286 - RNA, 16 nt, Human
gucacuguuucucugc

SEQ ID NO: 2921287 - RNA, 17 nt, Human
aaaucauggaaugguua

SEQ ID NO: 2921288 - RNA, 21 nt, Human
aaauucgcugcaaccuguuga

SEQ ID NO: 2921289 - RNA, 19 nt, Human
aaauucacaaguuguguuu

SEQ ID NO: 2921290 - RNA, 18 nt, Human
aaauucacaaguuguguu

SEQ ID NO: 2921291 - RNA, 22 nt, Human
guugauagcaagugaauuuuuc

SEQ ID NO: 2921292 - RNA, 23 nt, Human
guugauagcaagugaauuuuucu

SEQ ID NO: 2921293 - RNA, 22 nt, Human
aagcuucgaggcccagcgaccu

SEQ ID NO: 2921294 - RNA, 13 nt, Human
aagcuuagcagga

SEQ ID NO: 2921295 - RNA, 15 nt, Human
aagcuuagcaggaga

SEQ ID NO: 2921296 - RNA, 16 nt, Human
aagcuuagcaggagag

SEQ ID NO: 2921297 - RNA, 20 nt, Human
aagcuuagcaggagaggaga

SEQ ID NO: 2921298 - RNA, 22 nt, Human
aagcuuagcaggagaggagagc

SEQ ID NO: 2921299 - RNA, 13 nt, Human
aagccauugucuu

SEQ ID NO: 2921300 - RNA, 14 nt, Human
aagccauugucuuc

SEQ ID NO: 2921301 - RNA, 12 nt, Human
aagccauugucu

SEQ ID NO: 2921302 - RNA, 19 nt, Human
guuauuuuaguuucuguuc

SEQ ID NO: 2921303 - RNA, 13 nt, Human
guuauuuuaguuu

SEQ ID NO: 2921304 - RNA, 15 nt, Human
guuauuuuaguuucu

SEQ ID NO: 2921305 - RNA, 20 nt, Human
guuagaauuccuucagggug

SEQ ID NO: 2921306 - RNA, 12 nt, Human
guuagaauuccu

SEQ ID NO: 2921307 - RNA, 14 nt, Human
guuacuguugugac

SEQ ID NO: 2921308 - RNA, 13 nt, Human
guuagaauuccuu

SEQ ID NO: 2921309 - RNA, 12 nt, Human
guguaaagcauu

SEQ ID NO: 2921310 - RNA, 21 nt, Human
guguaaagcauuccaacaaag

SEQ ID NO: 2921311 - RNA, 13 nt, Human
guguaaaguuagu

SEQ ID NO: 2921312 - RNA, 16 nt, Human
guguaaaguuagucua

SEQ ID NO: 2921313 - RNA, 19 nt, Human
guguaaaguuagucuacuc

SEQ ID NO: 2921314 - RNA, 18 nt, Human
guguaacuggcaguuuuc

SEQ ID NO: 2921315 - RNA, 17 nt, Human
aagcaaaaucauggaau

SEQ ID NO: 2921316 - RNA, 15 nt, Human
guguuucuagggaaa

SEQ ID NO: 2921317 - RNA, 11 nt, Human
gugugaaguua

SEQ ID NO: 2921318 - RNA, 12 nt, Human
gugugaaguuag

SEQ ID NO: 2921319 - RNA, 13 nt, Human
gugugaaguuaga

SEQ ID NO: 2921320 - RNA, 17 nt, Human
gugugaaguuagaauuc

SEQ ID NO: 2921321 - RNA, 21 nt, Human
gugugaaguuagaauuccuuc

SEQ ID NO: 2921322 - RNA, 24 nt, Human
aagcacagugguggcagggccuag

SEQ ID NO: 2921323 - RNA, 20 nt, Human
aagcacagugguggcagggc

SEQ ID NO: 2921324 - RNA, 23 nt, Human
aagcacagugguggcagggccua

SEQ ID NO: 2921325 - RNA, 12 nt, Human
aagcacaguggu

SEQ ID NO: 2921326 - RNA, 13 nt, Human
aagcacaguggug

SEQ ID NO: 2921327 - RNA, 14 nt, Human
aagcacaguggugg

SEQ ID NO: 2921328 - RNA, 18 nt, Human
aagcacagugguggcagg

SEQ ID NO: 2921329 - RNA, 19 nt, Human
aagcacagugguggcaggg

SEQ ID NO: 2921330 - RNA, 15 nt, Human
aagugauuguuggca

SEQ ID NO: 2921331 - RNA, 11 nt, Human
aaguuagucua

SEQ ID NO: 2921332 - RNA, 23 nt, Human
aaguuagucuacucuuaagccau

SEQ ID NO: 2921333 - RNA, 17 nt, Human
aaguuagaauuccuuca

SEQ ID NO: 2921334 - RNA, 21 nt, Human
aaguuagaauuccuucagggu

SEQ ID NO: 2921335 - RNA, 22 nt, Human
aaguuagaauuccuucagggug

SEQ ID NO: 2921336 - RNA, 15 nt, Human
aaguuagaauuccuu

SEQ ID NO: 2921337 - RNA, 14 nt, Human
aaguuagaauuccu

SEQ ID NO: 2921338 - RNA, 15 nt, Human
aaguucaccauuaaa

SEQ ID NO: 2921339 - RNA, 13 nt, Human
uaaaauugaaagg

SEQ ID NO: 2921340 - RNA, 14 nt, Human
guuuuaaaauuaaa

SEQ ID NO: 2921341 - RNA, 12 nt, Human
guuuuaaaauua

SEQ ID NO: 2921342 - RNA, 15 nt, Human
aaaacaauauuguuu

SEQ ID NO: 2921343 - RNA, 18 nt, Human
aaaacaauauuguuucua

SEQ ID NO: 2921344 - RNA, 17 nt, Human
aaaacaauauuguuucu

SEQ ID NO: 2921345 - RNA, 12 nt, Human
aaaacaaagaag

SEQ ID NO: 2921346 - RNA, 12 nt, Human
agccauugucuu

SEQ ID NO: 2921347 - RNA, 17 nt, Human
agccauugucuucggaa

SEQ ID NO: 2921348 - RNA, 21 nt, Human
agaggagagccagagaaguga

SEQ ID NO: 2921349 - RNA, 23 nt, Human
agaggagagccagagaagugaca

SEQ ID NO: 2921350 - RNA, 13 nt, Human
agaggagagccag

SEQ ID NO: 2921351 - RNA, 12 nt, Human
agaggagagcca

SEQ ID NO: 2921352 - RNA, 14 nt, Human
agaggagagccaga

SEQ ID NO: 2921353 - RNA, 15 nt, Human
agaggagagccagag

SEQ ID NO: 2921354 - RNA, 16 nt, Human
agaggagagccagaga

SEQ ID NO: 2921355 - RNA, 17 nt, Human
agaggagagccagagaa

SEQ ID NO: 2921356 - RNA, 18 nt, Human
agaugggaaugaagcuug

SEQ ID NO: 2921357 - RNA, 23 nt, Human
agaugggaaugaagcuuguguau

SEQ ID NO: 2921358 - RNA, 14 nt, Human
agaugggaaugaag

SEQ ID NO: 2921359 - RNA, 15 nt, Human
agaugggaaugaagc

SEQ ID NO: 2921360 - RNA, 16 nt, Human
agaugggaaugaagcu

SEQ ID NO: 2921361 - RNA, 17 nt, Human
agaugggaaugaagcuu

SEQ ID NO: 2921362 - RNA, 14 nt, Human
agguuacaacagau

SEQ ID NO: 2921363 - RNA, 20 nt, Human
aggaacgguaaauuucugug

SEQ ID NO: 2921364 - RNA, 13 nt, Human
aggagaggagagc

SEQ ID NO: 2921365 - RNA, 14 nt, Human
aggagaggagagcc

SEQ ID NO: 2921366 - RNA, 15 nt, Human
aggagaggagagcca

SEQ ID NO: 2921367 - RNA, 16 nt, Human
aggagaggagagccag

SEQ ID NO: 2921368 - RNA, 17 nt, Human
aggagaggagagccaga

SEQ ID NO: 2921369 - RNA, 19 nt, Human
aggagaggagagccagaga

SEQ ID NO: 2921370 - RNA, 16 nt, Human
aggaacgguaaauuuc

SEQ ID NO: 2921371 - RNA, 22 nt, Human
augcaauauaucuaaauugaau

SEQ ID NO: 2921372 - RNA, 20 nt, Human
augcaauauaucuaaauuga

SEQ ID NO: 2921373 - RNA, 21 nt, Human
augcaauauaucuaaauugaa

SEQ ID NO: 2921374 - RNA, 15 nt, Human
augcaauauaucuaa

SEQ ID NO: 2921375 - RNA, 19 nt, Human
augcaauauaucuaaauug

SEQ ID NO: 2921376 - RNA, 13 nt, Human
augggaaugaagc

SEQ ID NO: 2921377 - RNA, 14 nt, Human
augggaaugaagcu

SEQ ID NO: 2921378 - RNA, 15 nt, Human
augggaaugaagcuu

SEQ ID NO: 2921379 - RNA, 16 nt, Human
augggaaugaagcuug

SEQ ID NO: 2921380 - RNA, 21 nt, Human
augggaaugaagcuuguguau

SEQ ID NO: 2921381 - RNA, 22 nt, Human
auguguaaucaauaaacgauuu

SEQ ID NO: 2921382 - RNA, 17 nt, Human
auguguauuuuauuaca

SEQ ID NO: 2921383 - RNA, 20 nt, Human
auguguaugggcaaaaaacu

SEQ ID NO: 2921384 - RNA, 16 nt, Human
auguguaaucaauaaa

SEQ ID NO: 2921385 - RNA, 17 nt, Human
auguguaaucaauaaac

SEQ ID NO: 2921386 - RNA, 20 nt, Human
auguguaaucaauaaacgau

SEQ ID NO: 2921387 - RNA, 21 nt, Human
auguguaaucaauaaacgauu

SEQ ID NO: 2921388 - RNA, 19 nt, Human
augaagcuuguguauccau

SEQ ID NO: 2921389 - RNA, 18 nt, Human
augaagcuuguguaucca

SEQ ID NO: 2921390 - RNA, 15 nt, Human
augaagcuuguguau

SEQ ID NO: 2921391 - RNA, 14 nt, Human
aucuucucuggcga

SEQ ID NO: 2921392 - RNA, 23 nt, Human
agugaauuuuucucuaacucaga

SEQ ID NO: 2921393 - RNA, 12 nt, Human
agugugaaguua

SEQ ID NO: 2921394 - RNA, 13 nt, Human
agugugaaguuag

SEQ ID NO: 2921395 - RNA, 14 nt, Human
agugugaaguuaga

SEQ ID NO: 2921396 - RNA, 15 nt, Human
agugugaaguuagaa

SEQ ID NO: 2921397 - RNA, 18 nt, Human
agugugaaguuagaauuc

SEQ ID NO: 2921398 - RNA, 20 nt, Human
agugugaaguuagaauuccu

SEQ ID NO: 2921399 - RNA, 21 nt, Human
agugugaaguuagaauuccuu

SEQ ID NO: 2921400 - RNA, 22 nt, Human
agugugaaguuagaauuccuuc

SEQ ID NO: 2921401 - RNA, 21 nt, Human
auauuagcuuuacuguuuguu

SEQ ID NO: 2921402 - RNA, 20 nt, Human
auauuagcuuuacuguuugu

SEQ ID NO: 2921403 - RNA, 14 nt, Human
auaacagguuauuu

SEQ ID NO: 2921404 - RNA, 18 nt, Human
auaacagguuauuuuagu

SEQ ID NO: 2921405 - RNA, 22 nt, Human
auaacagguuauuuuaguuucu

SEQ ID NO: 2921406 - RNA, 23 nt, Human
auaacagguuauuuuaguuucug

SEQ ID NO: 2921407 - RNA, 13 nt, Human
auaacagguuauu

SEQ ID NO: 2921408 - RNA, 14 nt, Human
acgauuuaauucuc

SEQ ID NO: 2921409 - RNA, 15 nt, Human
acgauuuaauucucu

SEQ ID NO: 2921410 - RNA, 17 nt, Human
acgauuuaauucucuug

SEQ ID NO: 2921411 - RNA, 19 nt, Human
acgauuuaauucucuugaa

SEQ ID NO: 2921412 - RNA, 22 nt, Human
acucuguuccuucacauccugu

SEQ ID NO: 2921413 - RNA, 20 nt, Human
acucuguuccuucacauccu

SEQ ID NO: 2921414 - RNA, 14 nt, Human
acucuguuccuuca

SEQ ID NO: 2921415 - RNA, 17 nt, Human
acucuguuccuucacau

SEQ ID NO: 2921416 - RNA, 15 nt, Human
acugcauugagaacu

SEQ ID NO: 2921417 - RNA, 17 nt, Human
acugaagguaaaauuga

SEQ ID NO: 2921418 - RNA, 16 nt, Human
acuguugugaccugaa

SEQ ID NO: 2921419 - RNA, 19 nt, Human
acuguugugaccugaaguu

SEQ ID NO: 2921420 - RNA, 12 nt, Human
acuguuuguuau

SEQ ID NO: 2921421 - RNA, 23 nt, Human
acagguuauuuuaguuucuguuc

SEQ ID NO: 2921422 - RNA, 21 nt, Human
acagguuauuuuaguuucugu

SEQ ID NO: 2921423 - RNA, 22 nt, Human
acagguuauuuuaguuucuguu

SEQ ID NO: 2921424 - RNA, 14 nt, Human
acagguuauuuuag

SEQ ID NO: 2921425 - RNA, 23 nt, Human
acagguuacaacagauuugugaa

SEQ ID NO: 2921426 - RNA, 19 nt, Human
acagguuacaacagauuug

SEQ ID NO: 2921427 - RNA, 20 nt, Human
acagguuacaacagauuugu

SEQ ID NO: 2921428 - RNA, 21 nt, Human
acagguuacaacagauuugug

SEQ ID NO: 2921429 - RNA, 22 nt, Human
acagguuacaacagauuuguga

SEQ ID NO: 2921430 - RNA, 16 nt, Human
acauccuguguuucua

SEQ ID NO: 2921431 - RNA, 14 nt, Human
acauccuguguuuc

SEQ ID NO: 2921432 - RNA, 23 nt, Human
acauccuguguuucuagggaaau

SEQ ID NO: 2921433 - RNA, 22 nt, Human
acauuaaaacaauauuguuucu

SEQ ID NO: 2921434 - RNA, 15 nt, Human
acauuaaaacaauau

SEQ ID NO: 2921435 - RNA, 18 nt, Human
acagguuacaacagauuu

SEQ ID NO: 2921436 - RNA, 18 nt, Human
acaagugaaaaacaucca

SEQ ID NO: 2921437 - RNA, 22 nt, Human
acaagguucuucccuuuuacau

SEQ ID NO: 2921438 - RNA, 22 nt, Human
acaaagaagacauguuuuagac

SEQ ID NO: 2921439 - RNA, 18 nt, Human
acaaagacaaauucuguu

SEQ ID NO: 2921440 - RNA, 15 nt, Human
acaaagaagacaugu

SEQ ID NO: 2921441 - RNA, 16 nt, Human
acaaagaagacauguu

SEQ ID NO: 2921442 - RNA, 19 nt, Human
acaaagaagacauguuuua

SEQ ID NO: 2921443 - RNA, 21 nt, Human
acaaagaagacauguuuuaga

SEQ ID NO: 2921444 - RNA, 13 nt, Human
acaaagaagacau

SEQ ID NO: 2921445 - RNA, 18 nt, Human
acaaagaagacaacauua

SEQ ID NO: 2921446 - RNA, 22 nt, Human
acaaagacaaauucuguuucuu

SEQ ID NO: 2921447 - RNA, 19 nt, Human
acaaagacaaauucuguuu

SEQ ID NO: 2921448 - RNA, 21 nt, Human
aacaucaguuacucugaaggg

SEQ ID NO: 2921449 - RNA, 19 nt, Human
aacaucaguuacucugaag

SEQ ID NO: 2921450 - RNA, 18 nt, Human
aacaucaguuacucugaa

SEQ ID NO: 2921451 - RNA, 20 nt, Human
aaauugggaaaggaguagaa

SEQ ID NO: 2921452 - RNA, 15 nt, Human
aaauugggaaaggag

SEQ ID NO: 2921453 - RNA, 17 nt, Human
aacaaagcuuagcagga

SEQ ID NO: 2921454 - RNA, 19 nt, Human
aacaaagcuuagcaggaga

SEQ ID NO: 2921455 - RNA, 14 nt, Human
aacaaagcuuagca

SEQ ID NO: 2921456 - RNA, 16 nt, Human
aacaaagcuuagcagg

SEQ ID NO: 2921457 - RNA, 17 nt, Human
aacaaagaagacaacau

SEQ ID NO: 2921458 - RNA, 20 nt, Human
aacacauuugauucugugug

SEQ ID NO: 2921459 - RNA, 18 nt, Human
aacucagccaagcacagu

SEQ ID NO: 2921460 - RNA, 20 nt, Human
aacucagccaagcacagugg

SEQ ID NO: 2921461 - RNA, 14 nt, Human
aacucagccaagca

SEQ ID NO: 2921462 - RNA, 15 nt, Human
aacucagccaagcac

SEQ ID NO: 2921463 - RNA, 16 nt, Human
aacucagccaagcaca

SEQ ID NO: 2921464 - RNA, 17 nt, Human
aacucagccaagcacag

SEQ ID NO: 2921465 - RNA, 12 nt, Human
aacucagccaag

SEQ ID NO: 2921466 - RNA, 21 nt, Human
aacucagccaagcacaguggu

SEQ ID NO: 2921467 - RNA, 15 nt, Human
aaugguaccagauaa

SEQ ID NO: 2921468 - RNA, 16 nt, Human
aaugguaccagauaaa

SEQ ID NO: 2921469 - RNA, 21 nt, Human
aagguucuucccuuuuacaua

SEQ ID NO: 2921470 - RNA, 11 nt, Human
aaguguaaagc

SEQ ID NO: 2921471 - RNA, 13 nt, Human
aaguguaaagcau

SEQ ID NO: 2921472 - RNA, 14 nt, Human
aaguguaaagcauu

SEQ ID NO: 2921473 - RNA, 16 nt, Human
aaguguaaagcauucc

SEQ ID NO: 2921474 - RNA, 17 nt, Human
aaguguaaagcauucca

SEQ ID NO: 2921475 - RNA, 18 nt, Human
aaguguaaagcauuccaa

SEQ ID NO: 2921476 - RNA, 13 nt, Human
aauaaugguacca

SEQ ID NO: 2921477 - RNA, 17 nt, Human
aauaaugguaccagaua

SEQ ID NO: 2921478 - RNA, 20 nt, Human
aauaaugguaccagauaaaa

SEQ ID NO: 2921479 - RNA, 21 nt, Human
aauaaugguaccagauaaaau

SEQ ID NO: 2921480 - RNA, 23 nt, Human
aauaaugguaccagauaaaauua

SEQ ID NO: 2921481 - RNA, 16 nt, Human
aagccaucuugguaaa

SEQ ID NO: 2921482 - RNA, 15 nt, Human
aagccaucuugguaa

SEQ ID NO: 2921483 - RNA, 14 nt, Human
aagccaucuuggua

SEQ ID NO: 2921484 - RNA, 13 nt, Human
aagauuucuugag

SEQ ID NO: 2921485 - RNA, 15 nt, Human
cacagugguggcagg

SEQ ID NO: 2921486 - RNA, 23 nt, Human
cacagugguggcagggccuagcu

SEQ ID NO: 2921487 - RNA, 17 nt, Human
cacagugguggcagggc

SEQ ID NO: 2921488 - RNA, 19 nt, Human
cacagugguggcagggccu

SEQ ID NO: 2921489 - RNA, 23 nt, Human
caaaauugggaaaggaguagaaa

SEQ ID NO: 2921490 - RNA, 17 nt, Human
caaauacucauguguau

SEQ ID NO: 2921491 - RNA, 18 nt, Human
caaauacucauguguaug

SEQ ID NO: 2921492 - RNA, 14 nt, Human
caaauacucaugug

SEQ ID NO: 2921493 - RNA, 15 nt, Human
caaauacucaugugu

SEQ ID NO: 2921494 - RNA, 16 nt, Human
caaauacucaugugua

SEQ ID NO: 2921495 - RNA, 19 nt, Human
caauauaucuaaauugaau

SEQ ID NO: 2921496 - RNA, 22 nt, Human
caauauaucuaaauugaauaau

SEQ ID NO: 2921497 - RNA, 20 nt, Human
caauauaucuaaauugaaua

SEQ ID NO: 2921498 - RNA, 21 nt, Human
caauauaucuaaauugaauaa

SEQ ID NO: 2921499 - RNA, 22 nt, Human
uucuucccuuuuacauacugcu

SEQ ID NO: 2921500 - RNA, 21 nt, Human
uucuucccuuuuacauacugc

SEQ ID NO: 2921501 - RNA, 20 nt, Human
uucuucccuuuuacauacug

SEQ ID NO: 2921502 - RNA, 15 nt, Human
uucugcuuucaucuu

SEQ ID NO: 2921503 - RNA, 20 nt, Human
uucuguguguuuucauaaua

SEQ ID NO: 2921504 - RNA, 23 nt, Human
uugauuuuacaauugaaaugacu

SEQ ID NO: 2921505 - RNA, 13 nt, Human
uugauuuuacaau

SEQ ID NO: 2921506 - RNA, 12 nt, Human
uugauugcuaaa

SEQ ID NO: 2921507 - RNA, 13 nt, Human
uugauugcuaaau

SEQ ID NO: 2921508 - RNA, 15 nt, Human
uugauugcuaaaugu

SEQ ID NO: 2921509 - RNA, 20 nt, Human
uugauugcuaaauguaacag

SEQ ID NO: 2921510 - RNA, 23 nt, Human
uugauugcuaaauguaacagucu

SEQ ID NO: 2921511 - RNA, 20 nt, Human
uugaacugauaguuacuguu

SEQ ID NO: 2921512 - RNA, 21 nt, Human
uugaacugauaguuacuguug

SEQ ID NO: 2921513 - RNA, 22 nt, Human
uugaacugauaguuacuguugu

SEQ ID NO: 2921514 - RNA, 15 nt, Human
uugaacugauaguua

SEQ ID NO: 2921515 - RNA, 19 nt, Human
uugaacugauaguuacugu

SEQ ID NO: 2921516 - RNA, 21 nt, Human
uucgugaaguauacuguauuu

SEQ ID NO: 2921517 - RNA, 18 nt, Human
uucgugaaguauacugua

SEQ ID NO: 2921518 - RNA, 17 nt, Human
uucgugaaguauacugu

SEQ ID NO: 2921519 - RNA, 23 nt, Human
uuccaacaaaggguuuuaaugua

SEQ ID NO: 2921520 - RNA, 22 nt, Human
uuccaacaaaggguuuuaaugu

SEQ ID NO: 2921521 - RNA, 19 nt, Human
uuauaucaguccucuuuca

SEQ ID NO: 2921522 - RNA, 18 nt, Human
uuauuacaucuuucacau

SEQ ID NO: 2921523 - RNA, 12 nt, Human
uuauuacaucuu

SEQ ID NO: 2921524 - RNA, 19 nt, Human
uuguuauggcuuaaugaca

SEQ ID NO: 2921525 - RNA, 14 nt, Human
uuguuauggcuuaa

SEQ ID NO: 2921526 - RNA, 23 nt, Human
uuuccaaauucacaaguuguguu

SEQ ID NO: 2921527 - RNA, 22 nt, Human
uuuaguuucuguucuguggaaa

SEQ ID NO: 2921528 - RNA, 23 nt, Human
uuuagacaaauacucauguguau

SEQ ID NO: 2921529 - RNA, 16 nt, Human
uuuagacaaauacuca

SEQ ID NO: 2921530 - RNA, 18 nt, Human
uuuagacaaauacucaug

SEQ ID NO: 2921531 - RNA, 19 nt, Human
uuuagacaaauacucaugu

SEQ ID NO: 2921532 - RNA, 20 nt, Human
uuuagacaaauacucaugug

SEQ ID NO: 2921533 - RNA, 21 nt, Human
uuuagacaaauacucaugugu

SEQ ID NO: 2921534 - RNA, 22 nt, Human
uuuagacaaauacucaugugua

SEQ ID NO: 2921535 - RNA, 22 nt, Human
uuuaaguguaacuggcaguuuu

SEQ ID NO: 2921536 - RNA, 14 nt, Human
uuuaaguguaacug

SEQ ID NO: 2921537 - RNA, 13 nt, Human
uuuuuuuuaaugu

SEQ ID NO: 2921538 - RNA, 12 nt, Human
uuuuuucaucuu

SEQ ID NO: 2921539 - RNA, 16 nt, Human
uuuuuuaaugugcugu

SEQ ID NO: 2921540 - RNA, 15 nt, Human
uuuuuuaaugugcug

SEQ ID NO: 2921541 - RNA, 13 nt, Human
uuuuuuuaaugug

SEQ ID NO: 2921542 - RNA, 17 nt, Human
uuuuuaaugugcugugu

SEQ ID NO: 2921543 - RNA, 12 nt, Human
uuuuuaaugugc

SEQ ID NO: 2921544 - RNA, 19 nt, Human
uuuuuaaugugcuguguaa

SEQ ID NO: 2921545 - RNA, 17 nt, Human
uuugcaccccaugcugu

SEQ ID NO: 2921546 - RNA, 18 nt, Human
uuugcaccccaugcuguu

SEQ ID NO: 2921547 - RNA, 20 nt, Human
uuugcaccccaugcuguuga

SEQ ID NO: 2921548 - RNA, 21 nt, Human
uuugaguggaugauguuucgu

SEQ ID NO: 2921549 - RNA, 20 nt, Human
uuugaguggaugauguuucg

SEQ ID NO: 2921550 - RNA, 16 nt, Human
uuugaguggaugaugu

SEQ ID NO: 2921551 - RNA, 16 nt, Human
uuuccguggcacugca

SEQ ID NO: 2921552 - RNA, 15 nt, Human
uuuccaaauucacaa

SEQ ID NO: 2921553 - RNA, 16 nt, Human
uuuuacaauugaaaug

SEQ ID NO: 2921554 - RNA, 14 nt, Human
uuuuacaauugaaa

SEQ ID NO: 2921555 - RNA, 14 nt, Human
ugcaaccuguugau

SEQ ID NO: 2921556 - RNA, 19 nt, Human
ugauuuuacaauugaaaug

SEQ ID NO: 2921557 - RNA, 19 nt, Human
ugccagguucuauuuggaa

SEQ ID NO: 2921558 - RNA, 20 nt, Human
ugccagguucuauuuggaau

SEQ ID NO: 2921559 - RNA, 12 nt, Human
ugauaguuacug

SEQ ID NO: 2921560 - RNA, 13 nt, Human
ugauaguuacugu

SEQ ID NO: 2921561 - RNA, 14 nt, Human
ugauaguuacuguu

SEQ ID NO: 2921562 - RNA, 16 nt, Human
ugauaguuacuguugu

SEQ ID NO: 2921563 - RNA, 17 nt, Human
ugauaguuacuguugug

SEQ ID NO: 2921564 - RNA, 21 nt, Human
ugauaguuacuguugugaccu

SEQ ID NO: 2921565 - RNA, 19 nt, Human
ugaugccagguucuauuug

SEQ ID NO: 2921566 - RNA, 13 nt, Human
ugauauauguguu

SEQ ID NO: 2921567 - RNA, 21 nt, Human
ugauauauguguuuuucacau

SEQ ID NO: 2921568 - RNA, 20 nt, Human
ugauaguuacuguugugacc

SEQ ID NO: 2921569 - RNA, 17 nt, Human
ugagcccggaugcuucu

SEQ ID NO: 2921570 - RNA, 22 nt, Human
ugacgcugaauaaaugucuuuu

SEQ ID NO: 2921571 - RNA, 15 nt, Human
ugacgcugaauaaau

SEQ ID NO: 2921572 - RNA, 17 nt, Human
ugacgcugaauaaaugu

SEQ ID NO: 2921573 - RNA, 18 nt, Human
ugacgcugaauaaauguc

SEQ ID NO: 2921574 - RNA, 20 nt, Human
ugacgcugaauaaaugucuu

SEQ ID NO: 2921575 - RNA, 14 nt, Human
ugacgcugaauaaa

SEQ ID NO: 2921576 - RNA, 21 nt, Human
ugggaaugaagcuuguguauc

SEQ ID NO: 2921577 - RNA, 15 nt, Human
ugggaaugaagcuug

SEQ ID NO: 2921578 - RNA, 18 nt, Human
ugggaaugaagcuugugu

SEQ ID NO: 2921579 - RNA, 19 nt, Human
ugggaaugaagcuugugua

SEQ ID NO: 2921580 - RNA, 20 nt, Human
ugggaaugaagcuuguguau

SEQ ID NO: 2921581 - RNA, 12 nt, Human
ugggaaugaagc

SEQ ID NO: 2921582 - RNA, 13 nt, Human
ugggaaugaagcu

SEQ ID NO: 2921583 - RNA, 14 nt, Human
ugggaaugaagcuu

SEQ ID NO: 2921584 - RNA, 20 nt, Human
uggagauaaagauuucuuga

SEQ ID NO: 2921585 - RNA, 14 nt, Human
uggaugauguuucg

SEQ ID NO: 2921586 - RNA, 17 nt, Human
uggaugauguuucguga

SEQ ID NO: 2921587 - RNA, 21 nt, Human
ugcuuuccguggcacugcaua

SEQ ID NO: 2921588 - RNA, 20 nt, Human
ugcuuuccguggcacugcau

SEQ ID NO: 2921589 - RNA, 17 nt, Human
ugcuuuccguggcacug

SEQ ID NO: 2921590 - RNA, 17 nt, Human
ugcuucuccaugagaca

SEQ ID NO: 2921591 - RNA, 18 nt, Human
ugucacuguuucucugcu

SEQ ID NO: 2921592 - RNA, 17 nt, Human
ugucacuguuucucugc

SEQ ID NO: 2921593 - RNA, 13 nt, Human
ugucacuguuucu

SEQ ID NO: 2921594 - RNA, 14 nt, Human
uguaugggcaaaaa

SEQ ID NO: 2921595 - RNA, 15 nt, Human
uguaugggcaaaaaa

SEQ ID NO: 2921596 - RNA, 14 nt, Human
uguauaacagguua

SEQ ID NO: 2921597 - RNA, 15 nt, Human
uguauaacagguuau

SEQ ID NO: 2921598 - RNA, 17 nt, Human
uguauaacagguuauuu

SEQ ID NO: 2921599 - RNA, 21 nt, Human
uguauaacagguuauuuuagu

SEQ ID NO: 2921600 - RNA, 23 nt, Human
uguccccuauggggaugguccac

SEQ ID NO: 2921601 - RNA, 19 nt, Human
ugguguaguugaacugaua

SEQ ID NO: 2921602 - RNA, 14 nt, Human
uguaacagucugau

SEQ ID NO: 2921603 - RNA, 16 nt, Human
uguaacagucugaucg

SEQ ID NO: 2921604 - RNA, 23 nt, Human
ucuuaagccaucuugguaaauuu

SEQ ID NO: 2921605 - RNA, 20 nt, Human
ucuuaagccaucuugguaaa

SEQ ID NO: 2921606 - RNA, 22 nt, Human
ucuuaagccaucuugguaaauu

SEQ ID NO: 2921607 - RNA, 12 nt, Human
ucuuaagccauc

SEQ ID NO: 2921608 - RNA, 13 nt, Human
ucuuaagccaucu

SEQ ID NO: 2921609 - RNA, 16 nt, Human
ucuuaagccaucuugg

SEQ ID NO: 2921610 - RNA, 17 nt, Human
ucuuaagccaucuuggu

SEQ ID NO: 2921611 - RNA, 19 nt, Human
ucuuaagccaucuugguaa

SEQ ID NO: 2921612 - RNA, 18 nt, Human
ucucuuaauuuaaucuuu

SEQ ID NO: 2921613 - RNA, 23 nt, Human
ucugaggccuccucucucaguuu

SEQ ID NO: 2921614 - RNA, 21 nt, Human
ucucuaacucagaaacaucag

SEQ ID NO: 2921615 - RNA, 20 nt, Human
ucucuaacucagaaacauca

SEQ ID NO: 2921616 - RNA, 18 nt, Human
ucucuaacucagaaacau

SEQ ID NO: 2921617 - RNA, 22 nt, Human
ucucuaacucagaaacaucagu

SEQ ID NO: 2921618 - RNA, 22 nt, Human
ucucugaagaguggguuucaca

SEQ ID NO: 2921619 - RNA, 23 nt, Human
ucucugaagaguggguuucacaa

SEQ ID NO: 2921620 - RNA, 22 nt, Human
ucucucuccuguacuuuuucca

SEQ ID NO: 2921621 - RNA, 22 nt, Human
ucucuggcgacaguuuuccuuc

SEQ ID NO: 2921622 - RNA, 17 nt, Human
ucucuggcgacaguuuu

SEQ ID NO: 2921623 - RNA, 16 nt, Human
ucucuggcgacaguuu

SEQ ID NO: 2921624 - RNA, 14 nt, Human
ucccuccugcuacu

SEQ ID NO: 2921625 - RNA, 22 nt, Human
ucgugacgcugaauaaaugucu

SEQ ID NO: 2921626 - RNA, 21 nt, Human
ucgugacgcugaauaaauguc

SEQ ID NO: 2921627 - RNA, 20 nt, Human
ucgugacgcugaauaaaugu

SEQ ID NO: 2921628 - RNA, 21 nt, Human
uccugucccuucucuuaauuu

SEQ ID NO: 2921629 - RNA, 20 nt, Human
uccuucacauccuguguuuc

SEQ ID NO: 2921630 - RNA, 14 nt, Human
uccuucacauccug

SEQ ID NO: 2921631 - RNA, 17 nt, Human
ucaauaaacgauuuaau

SEQ ID NO: 2921632 - RNA, 18 nt, Human
ucaauaaacgauuuaauu

SEQ ID NO: 2921633 - RNA, 22 nt, Human
ucaauaaacgauuuaauucucu

SEQ ID NO: 2921634 - RNA, 23 nt, Human
ucaauaaacgauuuaauucucuu

SEQ ID NO: 2921635 - RNA, 15 nt, Human
ucaauaaacgauuua

SEQ ID NO: 2921636 - RNA, 13 nt, Human
ucaauaaacgauu

SEQ ID NO: 2921637 - RNA, 21 nt, Human
uauuuuauuacaucuuucaca

SEQ ID NO: 2921638 - RNA, 11 nt, Human
uauuguuucua

SEQ ID NO: 2921639 - RNA, 24 nt, Human
uauguaacugcauugagaacugca

SEQ ID NO: 2921640 - RNA, 14 nt, Human
uauguaacugcauu

SEQ ID NO: 2921641 - RNA, 22 nt, Human
ucauuuccuauguaacugcauu

SEQ ID NO: 2921642 - RNA, 22 nt, Human
ucauucaaaaguugaaauuaac

SEQ ID NO: 2921643 - RNA, 18 nt, Human
ucauucaaaaguugaaau

SEQ ID NO: 2921644 - RNA, 16 nt, Human
ucauucaaaaguugaa

SEQ ID NO: 2921645 - RNA, 13 nt, Human
ucaucuucucugg

SEQ ID NO: 2921646 - RNA, 23 nt, Human
ucagaaauuuaauucauguuucu

SEQ ID NO: 2921647 - RNA, 21 nt, Human
ucagaaauuuaauucauguuu

SEQ ID NO: 2921648 - RNA, 14 nt, Human
ucagaaauuuaauu

SEQ ID NO: 2921649 - RNA, 22 nt, Human
ucagaaacaucaguuacucuga

SEQ ID NO: 2921650 - RNA, 18 nt, Human
ucagaaacaucaguuacu

SEQ ID NO: 2921651 - RNA, 15 nt, Human
gcugcuacaaagaag

SEQ ID NO: 2921652 - RNA, 20 nt, Human
gcugcuacaaagaagacaug

SEQ ID NO: 2921653 - RNA, 21 nt, Human
gcugcuacaaagaagacaugu

SEQ ID NO: 2921654 - RNA, 16 nt, Human
gcugcuacaaagaaga

SEQ ID NO: 2921655 - RNA, 17 nt, Human
gcugcuacaaagaagac

SEQ ID NO: 2921656 - RNA, 18 nt, Human
gcugcuacaaagaagaca

SEQ ID NO: 2921657 - RNA, 19 nt, Human
gcugcuacaaagaagacau

SEQ ID NO: 2921658 - RNA, 23 nt, Human
gcugcuacaaagaagacauguuu

SEQ ID NO: 2921659 - RNA, 20 nt, Human
gcugauauauguguuuuuca

SEQ ID NO: 2921660 - RNA, 18 nt, Human
gcugauauauguguuuuu

SEQ ID NO: 2921661 - RNA, 17 nt, Human
gcugauauauguguuuu

SEQ ID NO: 2921662 - RNA, 11 nt, Human
gcuuguguauc

SEQ ID NO: 2921663 - RNA, 18 nt, Human
gcuuguguauccauuauc

SEQ ID NO: 2921664 - RNA, 19 nt, Human
gcuuguguauccauuauca

SEQ ID NO: 2921665 - RNA, 20 nt, Human
gcuuguguauccauuaucau

SEQ ID NO: 2921666 - RNA, 22 nt, Human
gcuuguguauccauuaucaugu

SEQ ID NO: 2921667 - RNA, 23 nt, Human
gcaggagaggagagccagagaag

SEQ ID NO: 2921668 - RNA, 13 nt, Human
gcaggagaggaga

SEQ ID NO: 2921669 - RNA, 16 nt, Human
gcaggagaggagagcc

SEQ ID NO: 2921670 - RNA, 17 nt, Human
gcaggagaggagagcca

SEQ ID NO: 2921671 - RNA, 18 nt, Human
gcaggagaggagagccag

SEQ ID NO: 2921672 - RNA, 19 nt, Human
gcaggagaggagagccaga

SEQ ID NO: 2921673 - RNA, 20 nt, Human
gcaggagaggagagccagag

SEQ ID NO: 2921674 - RNA, 22 nt, Human
gcaggagaggagagccagagaa

SEQ ID NO: 2921675 - RNA, 19 nt, Human
gcauuaaauauaauaugca

SEQ ID NO: 2921676 - RNA, 21 nt, Human
gcauugagaacugcauauguu

SEQ ID NO: 2921677 - RNA, 12 nt, Human
gcauugagaacu

SEQ ID NO: 2921678 - RNA, 22 nt, Human
gcauugagaacugcauauguuu

SEQ ID NO: 2921679 - RNA, 17 nt, Human
gccaaguuuauauacaa

SEQ ID NO: 2921680 - RNA, 15 nt, Human
gccaaguuuauauac

SEQ ID NO: 2921681 - RNA, 20 nt, Human
gccaaguuuauauacaauua

SEQ ID NO: 2921682 - RNA, 20 nt, Human
gccagguucuauuuggaauu

SEQ ID NO: 2921683 - RNA, 23 nt, Human
gccagguucuauuuggaauuuau

SEQ ID NO: 2921684 - RNA, 18 nt, Human
gccagguucuauuuggaa

SEQ ID NO: 2921685 - RNA, 19 nt, Human
gccagguucuauuuggaau

SEQ ID NO: 2921686 - RNA, 13 nt, Human
gaguuuuguuuua

SEQ ID NO: 2921687 - RNA, 19 nt, Human
gaguuuuguuuuaaaauua

SEQ ID NO: 2921688 - RNA, 19 nt, Human
gauacacccaaaguaucag

SEQ ID NO: 2921689 - RNA, 20 nt, Human
gauauauguguuuuucacau

SEQ ID NO: 2921690 - RNA, 22 nt, Human
gauauauguguuuuucacauuu

SEQ ID NO: 2921691 - RNA, 18 nt, Human
gaguuaggcuauucacaa

SEQ ID NO: 2921692 - RNA, 17 nt, Human
gaguuaggcuauucaca

SEQ ID NO: 2921693 - RNA, 22 nt, Human
gauuaagagauggguuugacaa

SEQ ID NO: 2921694 - RNA, 21 nt, Human
gauucccuccugcuacucugu

SEQ ID NO: 2921695 - RNA, 22 nt, Human
gaugggaaugaagcuuguguau

SEQ ID NO: 2921696 - RNA, 16 nt, Human
gaugggaaugaagcuu

SEQ ID NO: 2921697 - RNA, 18 nt, Human
gaugggaaugaagcuugu

SEQ ID NO: 2921698 - RNA, 13 nt, Human
gaugggaaugaag

SEQ ID NO: 2921699 - RNA, 14 nt, Human
gaugggaaugaagc

SEQ ID NO: 2921700 - RNA, 22 nt, Human
gagccagagaagugacagggaa

SEQ ID NO: 2921701 - RNA, 19 nt, Human
gagccagagaagugacagg

SEQ ID NO: 2921702 - RNA, 20 nt, Human
gagccagagaagugacaggg

SEQ ID NO: 2921703 - RNA, 12 nt, Human
gagccagagaag

SEQ ID NO: 2921704 - RNA, 13 nt, Human
gagccagagaagu

SEQ ID NO: 2921705 - RNA, 14 nt, Human
gagccagagaagug

SEQ ID NO: 2921706 - RNA, 15 nt, Human
gagccagagaaguga

SEQ ID NO: 2921707 - RNA, 16 nt, Human
gagccagagaagugac

SEQ ID NO: 2921708 - RNA, 17 nt, Human
gagccagagaagugaca

SEQ ID NO: 2921709 - RNA, 18 nt, Human
gagccagagaagugacag

SEQ ID NO: 2921710 - RNA, 23 nt, Human
cucugaagggcaucaugcaucuu

SEQ ID NO: 2921711 - RNA, 22 nt, Human
cucugaagggcaucaugcaucu

SEQ ID NO: 2921712 - RNA, 19 nt, Human
cucugaagggcaucaugca

SEQ ID NO: 2921713 - RNA, 17 nt, Human
cucugaagggcaucaug

SEQ ID NO: 2921714 - RNA, 22 nt, Human
cucuuaagccaucuugguaaau

SEQ ID NO: 2921715 - RNA, 12 nt, Human
cucuuaagccau

SEQ ID NO: 2921716 - RNA, 13 nt, Human
cucuuaagccauc

SEQ ID NO: 2921717 - RNA, 14 nt, Human
cucuuaagccaucu

SEQ ID NO: 2921718 - RNA, 20 nt, Human
cucuuaagccaucuugguaa

SEQ ID NO: 2921719 - RNA, 21 nt, Human
cucuuaagccaucuugguaaa

SEQ ID NO: 2921720 - RNA, 16 nt, Human
cucuggcgacaguuuu

SEQ ID NO: 2921721 - RNA, 14 nt, Human
cugaaguucaccau

SEQ ID NO: 2921722 - RNA, 22 nt, Human
cugauauauguguuuuucacau

SEQ ID NO: 2921723 - RNA, 21 nt, Human
cugauauauguguuuuucaca

SEQ ID NO: 2921724 - RNA, 15 nt, Human
cugauauauguguuu

SEQ ID NO: 2921725 - RNA, 17 nt, Human
cuauuuaguuuuuguaa

SEQ ID NO: 2921726 - RNA, 20 nt, Human
cuauuuaguuuuuguaauuu

SEQ ID NO: 2921727 - RNA, 22 nt, Human
cuauuuaguuuuuguaauuuau

SEQ ID NO: 2921728 - RNA, 23 nt, Human
cuauuuaguuuuuguaauuuauu

SEQ ID NO: 2921729 - RNA, 19 nt, Human
cucacaccgcgucugguga

SEQ ID NO: 2921730 - RNA, 16 nt, Human
cuauuagccacaaaau

SEQ ID NO: 2921731 - RNA, 11 nt, Human
cuauucacaac

SEQ ID NO: 2921732 - RNA, 18 nt, Human
cucagccaagcacagugg

SEQ ID NO: 2921733 - RNA, 20 nt, Human
cucagccaagcacaguggug

SEQ ID NO: 2921734 - RNA, 23 nt, Human
cucagccaagcacagugguggca

SEQ ID NO: 2921735 - RNA, 17 nt, Human
cucagccaagcacagug

SEQ ID NO: 2921736 - RNA, 18 nt, Human
cuccugcuacucuguucc

SEQ ID NO: 2921737 - RNA, 16 nt, Human
cucgaggacuguauuu

SEQ ID NO: 2921738 - RNA, 17 nt, Human
cucgaggacuguauuug

SEQ ID NO: 2921739 - RNA, 20 nt, Human
cucgaggacuguauuuguga

SEQ ID NO: 2921740 - RNA, 22 nt, Human
cucgaggacuguauuugugacu

SEQ ID NO: 2921741 - RNA, 23 nt, Human
cucgaggacuguauuugugacua

SEQ ID NO: 2921742 - RNA, 15 nt, Human
cuccgcaguuccugu

SEQ ID NO: 2921743 - RNA, 18 nt, Human
cuuguuuuuccacuacug

SEQ ID NO: 2921744 - RNA, 12 nt, Human
cuuuacuguuug

SEQ ID NO: 2921745 - RNA, 15 nt, Human
cuuuacuguuuguua

SEQ ID NO: 2921746 - RNA, 14 nt, Human
cuuuacuguuuguu

SEQ ID NO: 2921747 - RNA, 22 nt, Human
cuuugggaaaggagaaguuaag

SEQ ID NO: 2921748 - RNA, 15 nt, Human
cuuugggaaaggaga

SEQ ID NO: 2921749 - RNA, 17 nt, Human
cuuuguccuuuuuguua

SEQ ID NO: 2921750 - RNA, 17 nt, Human
cuuuuacauacugcugu

SEQ ID NO: 2921751 - RNA, 14 nt, Human
cuuuuacauacugc

SEQ ID NO: 2921752 - RNA, 13 nt, Human
cuuuuacauacug

SEQ ID NO: 2921753 - RNA, 19 nt, Human
gaaucagaucauuucaaaa

SEQ ID NO: 2921754 - RNA, 11 nt, Human
gaauaaauguc

SEQ ID NO: 2921755 - RNA, 14 nt, Human
gaauaaaugucuuu

SEQ ID NO: 2921756 - RNA, 20 nt, Human
gaauaaugguaccagauaaa

SEQ ID NO: 2921757 - RNA, 21 nt, Human
gaauaaugguaccagauaaaa

SEQ ID NO: 2921758 - RNA, 13 nt, Human
gaagguaaaauug

SEQ ID NO: 2921759 - RNA, 13 nt, Human
gaagccauugucu

SEQ ID NO: 2921760 - RNA, 14 nt, Human
gaagccauugucuu

SEQ ID NO: 2921761 - RNA, 16 nt, Human
gaagccauugucuucg

SEQ ID NO: 2921762 - RNA, 12 nt, Human
gaagccauuguc

SEQ ID NO: 2921763 - RNA, 22 nt, Human
gaagcuuguguauccauuauca

SEQ ID NO: 2921764 - RNA, 23 nt, Human
gaagcuuguguauccauuaucau

SEQ ID NO: 2921765 - RNA, 18 nt, Human
gaaauaguucaaagccaa

SEQ ID NO: 2921766 - RNA, 20 nt, Human
gaaacaucaguuacucugaa

SEQ ID NO: 2921767 - RNA, 19 nt, Human
gaaacaucaguuacucuga

SEQ ID NO: 2921768 - RNA, 23 nt, Human
gaaacaucaguuacucugaaggg

SEQ ID NO: 2921769 - RNA, 23 nt, Human
gaaauuuaauucauguuucuuaa

SEQ ID NO: 2921770 - RNA, 21 nt, Human
gaaauuuaauucauguuucuu

SEQ ID NO: 2921771 - RNA, 20 nt, Human
gaaauuuaauucauguuucu

SEQ ID NO: 2921772 - RNA, 16 nt, Human
gaaauuuaauucaugu

SEQ ID NO: 2921773 - RNA, 15 nt, Human
gaacgguaaauuucu

SEQ ID NO: 2921774 - RNA, 17 nt, Human
gaacgguaaauuucugu

SEQ ID NO: 2921775 - RNA, 21 nt, Human
cuguauuuuuaccuuuuuccu

SEQ ID NO: 2921776 - RNA, 12 nt, Human
cugugaaauagu

SEQ ID NO: 2921777 - RNA, 23 nt, Human
cuguggaaaguguaaagcauucc

SEQ ID NO: 2921778 - RNA, 15 nt, Human
cuguguaaaguuagu

SEQ ID NO: 2921779 - RNA, 18 nt, Human
cuguguaaaguuagucua

SEQ ID NO: 2921780 - RNA, 11 nt, Human
cuguguaaagu

SEQ ID NO: 2921781 - RNA, 12 nt, Human
cuguguaaaguu

SEQ ID NO: 2921782 - RNA, 13 nt, Human
cuguguaaaguua

SEQ ID NO: 2921783 - RNA, 14 nt, Human
cuguguaaaguuag

SEQ ID NO: 2921784 - RNA, 19 nt, Human
cuguguguuuucauaauaa

SEQ ID NO: 2921785 - RNA, 18 nt, Human
cuguguguuuucauaaua

SEQ ID NO: 2921786 - RNA, 16 nt, Human
cuguguguuuucauaa

SEQ ID NO: 2921787 - RNA, 12 nt, Human
cuuacugaaggu

SEQ ID NO: 2921788 - RNA, 17 nt, Human
cuuaaauuuuaauuuau

SEQ ID NO: 2921789 - RNA, 18 nt, Human
cuuaaauuuuaauuuauu

SEQ ID NO: 2921790 - RNA, 14 nt, Human
cuguugauugcuaa

SEQ ID NO: 2921791 - RNA, 15 nt, Human
cuguugauugcuaaa

SEQ ID NO: 2921792 - RNA, 17 nt, Human
cuguugauugcuaaaug

SEQ ID NO: 2921793 - RNA, 18 nt, Human
cuguugauugcuaaaugu

SEQ ID NO: 2921794 - RNA, 19 nt, Human
cuguugauugcuaaaugua

SEQ ID NO: 2921795 - RNA, 20 nt, Human
cuguugauugcuaaauguaa

SEQ ID NO: 2921796 - RNA, 22 nt, Human
cuguugauugcuaaauguaaca

SEQ ID NO: 2921797 - RNA, 23 nt, Human
cuguugauugcuaaauguaacag

SEQ ID NO: 2921798 - RNA, 23 nt, Human
cuguucuguggaaaguguaaagc

SEQ ID NO: 2921799 - RNA, 15 nt, Human
cuguucuguggaaag

SEQ ID NO: 2921800 - RNA, 20 nt, Human
cuguucuguggaaaguguaa

SEQ ID NO: 2921801 - RNA, 21 nt, Human
cuguucuguggaaaguguaaa

SEQ ID NO: 2921802 - RNA, 22 nt, Human
cuguucuguggaaaguguaaag

SEQ ID NO: 2921803 - RNA, 14 nt, Human
cuguucuguggaaa

SEQ ID NO: 2921804 - RNA, 12 nt, Human
cuguuuguuaug

SEQ ID NO: 2921805 - RNA, 20 nt, Human
cuucacauccuguguuucua

SEQ ID NO: 2921806 - RNA, 12 nt, Human
cuucucaucugu

SEQ ID NO: 2921807 - RNA, 19 nt, Human
cuucggaaaccuuggugua

SEQ ID NO: 2921808 - RNA, 15 nt, Human
ccuccugcuacucug

SEQ ID NO: 2921809 - RNA, 22 nt, Human
ccuaugcaauauaucuaaauug

SEQ ID NO: 2921810 - RNA, 14 nt, Human
ccuaugcaauauau

SEQ ID NO: 2921811 - RNA, 17 nt, Human
ccgcgucuggugacaac

SEQ ID NO: 2921812 - RNA, 18 nt, Human
ccuuuuacauacugcugu

SEQ ID NO: 2921813 - RNA, 17 nt, Human
ccuuuuacauacugcug

SEQ ID NO: 2921814 - RNA, 13 nt, Human
ccuguguuucuag

SEQ ID NO: 2921815 - RNA, 20 nt, Human
ccuucacauccuguguuucu

SEQ ID NO: 2921816 - RNA, 15 nt, Human
ccagguucuauuugg

SEQ ID NO: 2921817 - RNA, 16 nt, Human
ccagguucuauuugga

SEQ ID NO: 2921818 - RNA, 22 nt, Human
ccagguucuauuuggaauuuau

SEQ ID NO: 2921819 - RNA, 20 nt, Human
caucuccuccauacucagga

SEQ ID NO: 2921820 - RNA, 12 nt, Human
caucuuucacau

SEQ ID NO: 2921821 - RNA, 13 nt, Human
caucuuucacauu

SEQ ID NO: 2921822 - RNA, 19 nt, Human
caugagacacaucuccucc

SEQ ID NO: 2921823 - RNA, 14 nt, Human
caugagacacaucu

SEQ ID NO: 2921824 - RNA, 16 nt, Human
caucaugcaucuuacu

SEQ ID NO: 2921825 - RNA, 22 nt, Human
caucaguuacucugaagggcau

SEQ ID NO: 2921826 - RNA, 22 nt, Human
cauggaaugguuauaaaaguga

SEQ ID NO: 2921827 - RNA, 22 nt, Human
cauuaaaacaauauuguuucua

SEQ ID NO: 2921828 - RNA, 21 nt, Human
cauuaaaacaauauuguuucu

SEQ ID NO: 2921829 - RNA, 12 nt, Human
cauuaaaacaau

SEQ ID NO: 2921830 - RNA, 10 nt, Human
cauguuucuu

SEQ ID NO: 2921831 - RNA, 18 nt, Human
cauguguaugggcaaaaa

SEQ ID NO: 2921832 - RNA, 17 nt, Human
cauguguaaucaauaaa

SEQ ID NO: 2921833 - RNA, 18 nt, Human
cauguguaaucaauaaac

SEQ ID NO: 2921834 - RNA, 22 nt, Human
cauguguaaucaauaaacgauu

SEQ ID NO: 2921835 - RNA, 23 nt, Human
cauguguaaucaauaaacgauuu

SEQ ID NO: 2921836 - RNA, 15 nt, Human
cauuugauucugugu

SEQ ID NO: 2921837 - RNA, 20 nt, Human
cauucugcuuucaucuuggu

SEQ ID NO: 2921838 - RNA, 18 nt, Human
cauucaaaaguugaaauu

SEQ ID NO: 2921839 - RNA, 17 nt, Human
cauucaaaaguugaaau

SEQ ID NO: 2921840 - RNA, 16 nt, Human
cauucaaaaguugaaa

SEQ ID NO: 2921841 - RNA, 12 nt, Human
cauuccaacaaa

SEQ ID NO: 2921842 - RNA, 14 nt, Human
cauuccaacaaagg

SEQ ID NO: 2921843 - RNA, 18 nt, Human
cauuccaacaaaggguuu

SEQ ID NO: 2921844 - RNA, 11 nt, Human
cagguuacaac

SEQ ID NO: 2921845 - RNA, 12 nt, Human
cagguuacaaca

SEQ ID NO: 2921846 - RNA, 13 nt, Human
cagguuacaacag

SEQ ID NO: 2921847 - RNA, 14 nt, Human
cagguuacaacaga

SEQ ID NO: 2921848 - RNA, 15 nt, Human
cagguuacaacagau

SEQ ID NO: 2921849 - RNA, 16 nt, Human
cagguuacaacagauu

SEQ ID NO: 2921850 - RNA, 17 nt, Human
cagguuacaacagauuu

SEQ ID NO: 2921851 - RNA, 19 nt, Human
cagguuacaacagauuugu

SEQ ID NO: 2921852 - RNA, 21 nt, Human
cagguuacaacagauuuguga

SEQ ID NO: 2921853 - RNA, 16 nt, Human
cagguucuauuuggaa

SEQ ID NO: 2921854 - RNA, 17 nt, Human
cagguucuauuuggaau

SEQ ID NO: 2921855 - RNA, 19 nt, Human
cagguucuauuuggaauuu

SEQ ID NO: 2921856 - RNA, 21 nt, Human
cagguucuauuuggaauuuau

SEQ ID NO: 2921857 - RNA, 22 nt, Human
cagguuacaacagauuugugaa

SEQ ID NO: 2921858 - RNA, 23 nt, Human
cagguuacaacagauuugugaac

SEQ ID NO: 2921859 - RNA, 14 nt, Human
cagguuauuuuagu

SEQ ID NO: 2921860 - RNA, 16 nt, Human
cagguuauuuuaguuu

SEQ ID NO: 2921861 - RNA, 21 nt, Human
cagguuauuuuaguuucuguu

SEQ ID NO: 2921862 - RNA, 15 nt, Human
cagguucuauuugga

SEQ ID NO: 2921863 - RNA, 24 nt, Human
cagucauggcaccaaagccaccag

SEQ ID NO: 2921864 - RNA, 13 nt, Human
caguccucuuuca

SEQ ID NO: 2921865 - RNA, 14 nt, Human
caggagaggagagc

SEQ ID NO: 2921866 - RNA, 15 nt, Human
caggagaggagagcc

SEQ ID NO: 2921867 - RNA, 16 nt, Human
caggagaggagagcca

SEQ ID NO: 2921868 - RNA, 17 nt, Human
caggagaggagagccag

SEQ ID NO: 2921869 - RNA, 22 nt, Human
caggagaggagagccagagaag

SEQ ID NO: 2921870 - RNA, 18 nt, Human
caggagaggagagccaga

SEQ ID NO: 2921871 - RNA, 19 nt, Human
caggagaggagagccagag

SEQ ID NO: 2921872 - RNA, 20 nt, Human
caggagaggagagccagaga

SEQ ID NO: 2921873 - RNA, 21 nt, Human
caggagaggagagccagagaa

SEQ ID NO: 2921874 - RNA, 14 nt, Human
cagggaagcuacag

SEQ ID NO: 2921875 - RNA, 15 nt, Human
cagggaagcuacagg

SEQ ID NO: 2921876 - RNA, 17 nt, Human
cagggaagcuacagguu

SEQ ID NO: 2921877 - RNA, 22 nt, Human
cagggaagcuacagguuacaac

SEQ ID NO: 2921878 - RNA, 24 nt, Human
cagggaagcuacagguuacaacag

SEQ ID NO: 2921879 - RNA, 18 nt, Human
cagggaagcuacagguua

SEQ ID NO: 2921880 - RNA, 19 nt, Human
cagggaagcuacagguuac

SEQ ID NO: 2921881 - RNA, 20 nt, Human
cagggaagcuacagguuaca

SEQ ID NO: 2921882 - RNA, 21 nt, Human
cagggaagcuacagguuacaa

SEQ ID NO: 2921883 - RNA, 23 nt, Human
cagggccuagcugcuacaaagaa

SEQ ID NO: 2921884 - RNA, 21 nt, Human
cagggccuagcugcuacaaag

SEQ ID NO: 2921885 - RNA, 22 nt, Human
cagggccuagcugcuacaaaga

SEQ ID NO: 2921886 - RNA, 19 nt, Human
cagggccuagcugcuacaa

SEQ ID NO: 2921887 - RNA, 20 nt, Human
cagggccuagcugcuacaaa

SEQ ID NO: 2921888 - RNA, 19 nt, Human
cagccaagcacaguggugg

SEQ ID NO: 2921889 - RNA, 23 nt, Human
cagccaagcacagugguggcagg

SEQ ID NO: 2921890 - RNA, 13 nt, Human
cagccaagcacag

SEQ ID NO: 2921891 - RNA, 14 nt, Human
cagccaagcacagu

SEQ ID NO: 2921892 - RNA, 16 nt, Human
cagccaagcacagugg

SEQ ID NO: 2921893 - RNA, 17 nt, Human
cagccaagcacaguggu

SEQ ID NO: 2921894 - RNA, 12 nt, Human
cagccacacugu

SEQ ID NO: 2921895 - RNA, 11 nt, Human
cagccaagcac

SEQ ID NO: 2921896 - RNA, 24 nt, Human
cagauuugugaacucagccaagca

SEQ ID NO: 2921897 - RNA, 12 nt, Human
cagauuugugaa

SEQ ID NO: 2921898 - RNA, 14 nt, Human
cagauuugugaacu

SEQ ID NO: 2921899 - RNA, 15 nt, Human
cagauuugugaacuc

SEQ ID NO: 2921900 - RNA, 16 nt, Human
cagauuugugaacuca

SEQ ID NO: 2921901 - RNA, 17 nt, Human
cagauuugugaacucag

SEQ ID NO: 2921902 - RNA, 23 nt, Human
cagauuugugaacucagccaagc

SEQ ID NO: 2921903 - RNA, 16 nt, Human
caggaagucuucaggg

SEQ ID NO: 2921904 - RNA, 22 nt, Human
cagagacaggaagucuucaggg

SEQ ID NO: 2921905 - RNA, 13 nt, Human
cagagaagugaca

SEQ ID NO: 2921906 - RNA, 14 nt, Human
cagagaagugacag

SEQ ID NO: 2921907 - RNA, 15 nt, Human
cagagaagugacagg

SEQ ID NO: 2921908 - RNA, 16 nt, Human
cagagaagugacaggg

SEQ ID NO: 2921909 - RNA, 17 nt, Human
cagagaagugacaggga

SEQ ID NO: 2921910 - RNA, 18 nt, Human
cagagaagugacagggaa

SEQ ID NO: 2921911 - RNA, 19 nt, Human
cagagaagugacagggaag

SEQ ID NO: 2921912 - RNA, 20 nt, Human
cagagaagugacagggaagc

SEQ ID NO: 2921913 - RNA, 21 nt, Human
cagagaagugacagggaagcu

SEQ ID NO: 2921914 - RNA, 22 nt, Human
cagagaagugacagggaagcua

SEQ ID NO: 2921915 - RNA, 23 nt, Human
cagagaagugacagggaagcuac

SEQ ID NO: 2921916 - RNA, 24 nt, Human
cagagaagugacagggaagcuaca

SEQ ID NO: 2921917 - RNA, 16 nt, Human
cagauaaaauuauaga

SEQ ID NO: 2921918 - RNA, 21 nt, Human
cagauaaaauuauagauggga

SEQ ID NO: 2921919 - RNA, 21 nt, Human
cacuuuuuugaguggaugaug

SEQ ID NO: 2921920 - RNA, 22 nt, Human
cagaaacaucaguuacucugaa

SEQ ID NO: 2921921 - RNA, 19 nt, Human
cagaaacaucaguuacucu

SEQ ID NO: 2921922 - RNA, 17 nt, Human
cagaaacaucaguuacu

SEQ ID NO: 2921923 - RNA, 23 nt, Human
cagaaacaucaguuacucugaag

SEQ ID NO: 2921924 - RNA, 21 nt, Human
cagacacuuuuuugaguggau

SEQ ID NO: 2921925 - RNA, 23 nt, Human
caccugagcccggaugcuucucc

SEQ ID NO: 2921926 - RNA, 21 nt, Human
caccugagcccggaugcuucu

SEQ ID NO: 2921927 - RNA, 22 nt, Human
cacugucacuguuucucugcug

SEQ ID NO: 2921928 - RNA, 19 nt, Human
cacugucacuguuucucug

SEQ ID NO: 2921929 - RNA, 18 nt, Human
cacugucacuguuucucu

SEQ ID NO: 2921930 - RNA, 16 nt, Human
cacugucacuguuucu

SEQ ID NO: 2921931 - RNA, 16 nt, Human
cacugugggacucuuc

SEQ ID NO: 2921932 - RNA, 16 nt, Human
agaguggguuucacaa

SEQ ID NO: 2921933 - RNA, 17 nt, Human
agcaaauguuaugcaua

SEQ ID NO: 2921934 - RNA, 22 nt, Human
agaagagaauauuagcuuuacu

SEQ ID NO: 2921935 - RNA, 22 nt, Human
agagaauauuagcuuuacuguu

SEQ ID NO: 2921936 - RNA, 14 nt, Human
agagaagugacagg

SEQ ID NO: 2921937 - RNA, 15 nt, Human
agagaagugacaggg

SEQ ID NO: 2921938 - RNA, 17 nt, Human
agagaagugacagggaa

SEQ ID NO: 2921939 - RNA, 18 nt, Human
agagaagugacagggaag

SEQ ID NO: 2921940 - RNA, 20 nt, Human
agagaagugacagggaagcu

SEQ ID NO: 2921941 - RNA, 14 nt, Human
aggagagccagaga

SEQ ID NO: 2921942 - RNA, 15 nt, Human
aggagagccagagaa

SEQ ID NO: 2921943 - RNA, 21 nt, Human
aggagagccagagaagugaca

SEQ ID NO: 2921944 - RNA, 23 nt, Human
aggagagccagagaagugacagg

SEQ ID NO: 2921945 - RNA, 12 nt, Human
aggagagccaga

SEQ ID NO: 2921946 - RNA, 13 nt, Human
aggcauucucuga

SEQ ID NO: 2921947 - RNA, 13 nt, Human
augaagcuugugu

SEQ ID NO: 2921948 - RNA, 14 nt, Human
augaaagaaaggcc

SEQ ID NO: 2921949 - RNA, 22 nt, Human
auagcaagugaauuuuucucua

SEQ ID NO: 2921950 - RNA, 19 nt, Human
auagcaagugaauuuuucu

SEQ ID NO: 2921951 - RNA, 13 nt, Human
auagcaagugaau

SEQ ID NO: 2921952 - RNA, 20 nt, Human
auccagauacacccaaagua

SEQ ID NO: 2921953 - RNA, 19 nt, Human
aucaugcaaaugcuguauu

SEQ ID NO: 2921954 - RNA, 22 nt, Human
aucaugcaucuuacugaaggua

SEQ ID NO: 2921955 - RNA, 19 nt, Human
aucauggaaugguuauaaa

SEQ ID NO: 2921956 - RNA, 20 nt, Human
aucauggaaugguuauaaaa

SEQ ID NO: 2921957 - RNA, 14 nt, Human
aguaacugacaacu

SEQ ID NO: 2921958 - RNA, 19 nt, Human
auacaccagagauaauaug

SEQ ID NO: 2921959 - RNA, 23 nt, Human
aguuucuguucuguggaaagugu

SEQ ID NO: 2921960 - RNA, 18 nt, Human
aguuucuguucuguggaa

SEQ ID NO: 2921961 - RNA, 19 nt, Human
aguuucuguucuguggaaa

SEQ ID NO: 2921962 - RNA, 21 nt, Human
aguuucuguucuguggaaagu

SEQ ID NO: 2921963 - RNA, 22 nt, Human
aguuucuguucuguggaaagug

SEQ ID NO: 2921964 - RNA, 13 nt, Human
aguuucuguucug

SEQ ID NO: 2921965 - RNA, 15 nt, Human
aguuucuguucugug

SEQ ID NO: 2921966 - RNA, 16 nt, Human
aguuucuguucugugg

SEQ ID NO: 2921967 - RNA, 17 nt, Human
aguuucuguucugugga

SEQ ID NO: 2921968 - RNA, 23 nt, Human
acugacacaaaaaguagauuaag

SEQ ID NO: 2921969 - RNA, 12 nt, Human
acuguuucucug

SEQ ID NO: 2921970 - RNA, 22 nt, Human
acauacaauuauuuuuacaguu

SEQ ID NO: 2921971 - RNA, 20 nt, Human
acauguuuuagacaaauacu

SEQ ID NO: 2921972 - RNA, 17 nt, Human
acauguuuuagacaaau

SEQ ID NO: 2921973 - RNA, 23 nt, Human
acauguuuuagacaaauacucau

SEQ ID NO: 2921974 - RNA, 21 nt, Human
acauguuuuagacaaauacuc

SEQ ID NO: 2921975 - RNA, 22 nt, Human
acauguuuuagacaaauacuca

SEQ ID NO: 2921976 - RNA, 17 nt, Human
acaaccacucauucaaa

SEQ ID NO: 2921977 - RNA, 16 nt, Human
acaacauuaaaacaau

SEQ ID NO: 2921978 - RNA, 13 nt, Human
acaagguucuucc

SEQ ID NO: 2921979 - RNA, 14 nt, Human
aauuuccccaacag

SEQ ID NO: 2921980 - RNA, 15 nt, Human
aauuuccccaacagu

SEQ ID NO: 2921981 - RNA, 17 nt, Human
aauuuccccaacagugu

SEQ ID NO: 2921982 - RNA, 18 nt, Human
aauuuccccaacagugug

SEQ ID NO: 2921983 - RNA, 19 nt, Human
aauuuccccaacaguguga

SEQ ID NO: 2921984 - RNA, 20 nt, Human
aauuuccccaacagugugaa

SEQ ID NO: 2921985 - RNA, 21 nt, Human
aauuuccccaacagugugaag

SEQ ID NO: 2921986 - RNA, 22 nt, Human
aauuuccccaacagugugaagu

SEQ ID NO: 2921987 - RNA, 13 nt, Human
aauuguauaacag

SEQ ID NO: 2921988 - RNA, 14 nt, Human
aauuguauaacagg

SEQ ID NO: 2921989 - RNA, 15 nt, Human
aauuguauaacaggu

SEQ ID NO: 2921990 - RNA, 16 nt, Human
aauuguauaacagguu

SEQ ID NO: 2921991 - RNA, 17 nt, Human
aauuguauaacagguua

SEQ ID NO: 2921992 - RNA, 18 nt, Human
aauuguauaacagguuau

SEQ ID NO: 2921993 - RNA, 19 nt, Human
aauuguauaacagguuauu

SEQ ID NO: 2921994 - RNA, 18 nt, Human
aauucgcugcaaccuguu

SEQ ID NO: 2921995 - RNA, 23 nt, Human
aauuccuucagggugaugccagg

SEQ ID NO: 2921996 - RNA, 16 nt, Human
aauuccuucaggguga

SEQ ID NO: 2921997 - RNA, 15 nt, Human
aauuauagaugggaa

SEQ ID NO: 2921998 - RNA, 19 nt, Human
aauuauagaugggaaugaa

SEQ ID NO: 2921999 - RNA, 22 nt, Human
aauuauaucaguccucuuucaa

SEQ ID NO: 2922000 - RNA, 13 nt, Human
aauucuguuucuu

SEQ ID NO: 2922001 - RNA, 12 nt, Human
aauucuguuucu

SEQ ID NO: 2922002 - RNA, 16 nt, Human
aauucuguuucuugag

SEQ ID NO: 2922003 - RNA, 21 nt, Human
aagacaacauuaaaacaauau

SEQ ID NO: 2922004 - RNA, 15 nt, Human
aagacaacauuaaaa

SEQ ID NO: 2922005 - RNA, 13 nt, Human
aagaagacauguu

SEQ ID NO: 2922006 - RNA, 12 nt, Human
aagacaacauua

SEQ ID NO: 2922007 - RNA, 14 nt, Human
aagaagacauguuu

SEQ ID NO: 2922008 - RNA, 15 nt, Human
aagaagacauguuuu

SEQ ID NO: 2922009 - RNA, 17 nt, Human
aagaagacauguuuuag

SEQ ID NO: 2922010 - RNA, 17 nt, Human
aaguugaaauuaaccau

SEQ ID NO: 2922011 - RNA, 13 nt, Human
aaucaauaaacga

SEQ ID NO: 2922012 - RNA, 16 nt, Human
aaucaauaaacgauuu

SEQ ID NO: 2922013 - RNA, 17 nt, Human
aaucugaggccuccucu

SEQ ID NO: 2922014 - RNA, 12 nt, Human
aaugaagcuugu

SEQ ID NO: 2922015 - RNA, 14 nt, Human
aaugaagcuugugu

SEQ ID NO: 2922016 - RNA, 15 nt, Human
aaugaagcuugugua

SEQ ID NO: 2922017 - RNA, 16 nt, Human
aaugaagcuuguguau

SEQ ID NO: 2922018 - RNA, 22 nt, Human
aaugaagcuuguguauccauua

SEQ ID NO: 2922019 - RNA, 17 nt, Human
aaugaagcuuguguauc

SEQ ID NO: 2922020 - RNA, 19 nt, Human
aaugaagcuuguguaucca

SEQ ID NO: 2922021 - RNA, 13 nt, Human
aaauucuguuucu

SEQ ID NO: 2922022 - RNA, 15 nt, Human
aaauucuguuucuug

SEQ ID NO: 2922023 - RNA, 14 nt, Human
aaauucuguuucuu

SEQ ID NO: 2922024 - RNA, 18 nt, Human
aaagcauuccaacaaagg

SEQ ID NO: 2922025 - RNA, 21 nt, Human
gggcaaaaaacucgaggacug

SEQ ID NO: 2922026 - RNA, 18 nt, Human
aaagcuaaaguaucugua

SEQ ID NO: 2922027 - RNA, 13 nt, Human
ggugaugccaggu

SEQ ID NO: 2922028 - RNA, 22 nt, Human
aaacucauuuccuauguaacug

SEQ ID NO: 2922029 - RNA, 16 nt, Human
ggcccagcgaccucgg

SEQ ID NO: 2922030 - RNA, 12 nt, Human
ggcauucucuga

SEQ ID NO: 2922031 - RNA, 13 nt, Human
ggagagccagaga

SEQ ID NO: 2922032 - RNA, 14 nt, Human
ggagagccagagaa

SEQ ID NO: 2922033 - RNA, 15 nt, Human
ggagagccagagaag

SEQ ID NO: 2922034 - RNA, 16 nt, Human
ggagagccagagaagu

SEQ ID NO: 2922035 - RNA, 21 nt, Human
ggagagccagagaagugacag

SEQ ID NO: 2922036 - RNA, 13 nt, Human
gcuuggguggaga

SEQ ID NO: 2922037 - RNA, 14 nt, Human
gcuuggguggagaa

SEQ ID NO: 2922038 - RNA, 20 nt, Human
gcuuggguggagaagccauu

SEQ ID NO: 2922039 - RNA, 21 nt, Human
gcuuggguggagaagccauug

SEQ ID NO: 2922040 - RNA, 16 nt, Human
gcuuggguggagaagc

SEQ ID NO: 2922041 - RNA, 17 nt, Human
gcuuggguggagaagcc

SEQ ID NO: 2922042 - RNA, 18 nt, Human
gcuuggguggagaagcca

SEQ ID NO: 2922043 - RNA, 19 nt, Human
gcuuggguggagaagccau

SEQ ID NO: 2922044 - RNA, 19 nt, Human
gcuucgaggcccagcgacc

SEQ ID NO: 2922045 - RNA, 21 nt, Human
gcuucgaggcccagcgaccuc

SEQ ID NO: 2922046 - RNA, 18 nt, Human
gcuguaucuuguuuuucc

SEQ ID NO: 2922047 - RNA, 16 nt, Human
gcuguaucuuguuuuu

SEQ ID NO: 2922048 - RNA, 14 nt, Human
gcuguaucuuguuu

SEQ ID NO: 2922049 - RNA, 18 nt, Human
gaguggaugauguuucgu

SEQ ID NO: 2922050 - RNA, 17 nt, Human
gcaauauaucuaaauug

SEQ ID NO: 2922051 - RNA, 23 nt, Human
gcaauauaucuaaauugaauaau

SEQ ID NO: 2922052 - RNA, 16 nt, Human
gcacagugguggcagg

SEQ ID NO: 2922053 - RNA, 22 nt, Human
gcacagugguggcagggccuag

SEQ ID NO: 2922054 - RNA, 17 nt, Human
gcacagugguggcaggg

SEQ ID NO: 2922055 - RNA, 18 nt, Human
gcacagugguggcagggc

SEQ ID NO: 2922056 - RNA, 17 nt, Human
gcacauccuaugcaaua

SEQ ID NO: 2922057 - RNA, 20 nt, Human
gcacauccuaugcaauauau

SEQ ID NO: 2922058 - RNA, 20 nt, Human
gaaguucaccauuaaaaggg

SEQ ID NO: 2922059 - RNA, 22 nt, Human
gaaguucaccauuaaaagggau

SEQ ID NO: 2922060 - RNA, 15 nt, Human
gaaguucaccauuaa

SEQ ID NO: 2922061 - RNA, 19 nt, Human
gaaguucaccauuaaaagg

SEQ ID NO: 2922062 - RNA, 13 nt, Human
gaaguuagaauuc

SEQ ID NO: 2922063 - RNA, 14 nt, Human
gaaguuagaauucc

SEQ ID NO: 2922064 - RNA, 20 nt, Human
gaaguuagaauuccuucagg

SEQ ID NO: 2922065 - RNA, 21 nt, Human
gaaguuagaauuccuucaggg

SEQ ID NO: 2922066 - RNA, 21 nt, Human
gaauauuagcuuuacuguuug

SEQ ID NO: 2922067 - RNA, 12 nt, Human
gaauauuagcuu

SEQ ID NO: 2922068 - RNA, 22 nt, Human
gaccugaaguucaccauuaaaa

SEQ ID NO: 2922069 - RNA, 13 nt, Human
gaccugaaguuca

SEQ ID NO: 2922070 - RNA, 15 nt, Human
gacuguauuugugac

SEQ ID NO: 2922071 - RNA, 14 nt, Human
gacuguauuuguga

SEQ ID NO: 2922072 - RNA, 17 nt, Human
cuuugguggagauaaag

SEQ ID NO: 2922073 - RNA, 21 nt, Human
cuuagcaggagaggagagcca

SEQ ID NO: 2922074 - RNA, 22 nt, Human
cuuagcaggagaggagagccag

SEQ ID NO: 2922075 - RNA, 13 nt, Human
cuuagcaggagag

SEQ ID NO: 2922076 - RNA, 14 nt, Human
cuuagcaggagagg

SEQ ID NO: 2922077 - RNA, 15 nt, Human
cugcaaccuguugau

SEQ ID NO: 2922078 - RNA, 14 nt, Human
ccagagaagugaca

SEQ ID NO: 2922079 - RNA, 15 nt, Human
ccagagaagugacag

SEQ ID NO: 2922080 - RNA, 16 nt, Human
ccagagaagugacagg

SEQ ID NO: 2922081 - RNA, 22 nt, Human
ccagagaagugacagggaagcu

SEQ ID NO: 2922082 - RNA, 17 nt, Human
ccagagaagugacaggg

SEQ ID NO: 2922083 - RNA, 18 nt, Human
ccagagaagugacaggga

SEQ ID NO: 2922084 - RNA, 19 nt, Human
ccagagaagugacagggaa

SEQ ID NO: 2922085 - RNA, 20 nt, Human
ccagagaagugacagggaag

SEQ ID NO: 2922086 - RNA, 22 nt, Human
ccagauaaaauuauagauggga

SEQ ID NO: 2922087 - RNA, 19 nt, Human
ccagauaaaauuauagaug

SEQ ID NO: 2922088 - RNA, 21 nt, Human
ccagauacacccaaaguauca

SEQ ID NO: 2922089 - RNA, 12 nt, Human
cccaacuguuau

SEQ ID NO: 2922090 - RNA, 10 nt, Human
ccauugucuu

SEQ ID NO: 2922091 - RNA, 18 nt, Human
ccuagcugcuacaaagaa

SEQ ID NO: 2922092 - RNA, 14 nt, Human
ccuagcugcuacaa

SEQ ID NO: 2922093 - RNA, 15 nt, Human
ccuagcugcuacaaa

SEQ ID NO: 2922094 - RNA, 17 nt, Human
ccuagcugcuacaaaga

SEQ ID NO: 2922095 - RNA, 17 nt, Human
cuccuguacuuuuucca

SEQ ID NO: 2922096 - RNA, 14 nt, Human
ccuucucuuaauuu

SEQ ID NO: 2922097 - RNA, 13 nt, Human
cuaaguuucaguu

SEQ ID NO: 2922098 - RNA, 19 nt, Human
cuaaguuucaguugauuuu

SEQ ID NO: 2922099 - RNA, 13 nt, Human
cgcugaauaaaug

SEQ ID NO: 2922100 - RNA, 14 nt, Human
cgcugaauaaaugu

SEQ ID NO: 2922101 - RNA, 15 nt, Human
cgcugaauaaauguc

SEQ ID NO: 2922102 - RNA, 12 nt, Human
auucauguuucu

SEQ ID NO: 2922103 - RNA, 15 nt, Human
auucauguuucuuaa

SEQ ID NO: 2922104 - RNA, 13 nt, Human
auucauguuucuu

SEQ ID NO: 2922105 - RNA, 17 nt, Human
auuuaauucauguuucu

SEQ ID NO: 2922106 - RNA, 15 nt, Human
auuuaauucauguuu

SEQ ID NO: 2922107 - RNA, 13 nt, Human
auuuaauucucuu

SEQ ID NO: 2922108 - RNA, 16 nt, Human
auuuaauucucuugaa

SEQ ID NO: 2922109 - RNA, 19 nt, Human
auuuauauacaaccugcuu

SEQ ID NO: 2922110 - RNA, 15 nt, Human
auuuaauucucuuga

SEQ ID NO: 2922111 - RNA, 23 nt, Human
auuucacaguguguuugugauug

SEQ ID NO: 2922112 - RNA, 14 nt, Human
auuuuaguuucugu

SEQ ID NO: 2922113 - RNA, 15 nt, Human
auuuuaguuucuguu

SEQ ID NO: 2922114 - RNA, 16 nt, Human
auuuuaguuucuguuc

SEQ ID NO: 2922115 - RNA, 18 nt, Human
auuuuaguuucuguucug

SEQ ID NO: 2922116 - RNA, 19 nt, Human
auuuuaguuucuguucugu

SEQ ID NO: 2922117 - RNA, 21 nt, Human
auuuuaguuucuguucugugg

SEQ ID NO: 2922118 - RNA, 23 nt, Human
auuuuaguuucuguucuguggaa

SEQ ID NO: 2922119 - RNA, 21 nt, Human
cacuacugcuaccacaacuau

SEQ ID NO: 2922120 - RNA, 16 nt, Human
caagcacagugguggc

SEQ ID NO: 2922121 - RNA, 19 nt, Human
caagcacagugguggcagg

SEQ ID NO: 2922122 - RNA, 20 nt, Human
caagcacagugguggcaggg

SEQ ID NO: 2922123 - RNA, 21 nt, Human
caagcacagugguggcagggc

SEQ ID NO: 2922124 - RNA, 13 nt, Human
caagcacaguggu

SEQ ID NO: 2922125 - RNA, 15 nt, Human
caagcacaguggugg

SEQ ID NO: 2922126 - RNA, 14 nt, Human
caagcaaaaucaug

SEQ ID NO: 2922127 - RNA, 22 nt, Human
caagcaaaaucauggaaugguu

SEQ ID NO: 2922128 - RNA, 23 nt, Human
caagcaaaaucauggaaugguua

SEQ ID NO: 2922129 - RNA, 19 nt, Human
caacuauauuaucaugcaa

SEQ ID NO: 2922130 - RNA, 18 nt, Human
caacuauauuaucaugca

SEQ ID NO: 2922131 - RNA, 14 nt, Human
caauauuguuucua

SEQ ID NO: 2922132 - RNA, 20 nt, Human
cagacugacaaauguguauc

SEQ ID NO: 2922133 - RNA, 16 nt, Human
caguuacucugaaggg

SEQ ID NO: 2922134 - RNA, 15 nt, Human
caguuacucugaagg

SEQ ID NO: 2922135 - RNA, 13 nt, Human
caguuacucugaa

SEQ ID NO: 2922136 - RNA, 13 nt, Human
caguuuuccauug

SEQ ID NO: 2922137 - RNA, 21 nt, Human
caugaauuuuuuucaucuucu

SEQ ID NO: 2922138 - RNA, 22 nt, Human
caugcaaaugcuguauucuucu

SEQ ID NO: 2922139 - RNA, 16 nt, Human
caugcaaaugcuguau

SEQ ID NO: 2922140 - RNA, 14 nt, Human
caugcaaaugcugu

SEQ ID NO: 2922141 - RNA, 16 nt, Human
cauucucucuccugua

SEQ ID NO: 2922142 - RNA, 13 nt, Human
cauucucugaaga

SEQ ID NO: 2922143 - RNA, 12 nt, Human
cauucucugaag

SEQ ID NO: 2922144 - RNA, 22 nt, Human
cauuaucauguguaaucaauaa

SEQ ID NO: 2922145 - RNA, 16 nt, Human
cauuaucauguguaau

SEQ ID NO: 2922146 - RNA, 18 nt, Human
cauuaucauguguaauca

SEQ ID NO: 2922147 - RNA, 12 nt, Human
cauuaucaugug

SEQ ID NO: 2922148 - RNA, 13 nt, Human
cauuaucaugugu

SEQ ID NO: 2922149 - RNA, 14 nt, Human
cauuaucaugugua

SEQ ID NO: 2922150 - RNA, 15 nt, Human
cauuaucauguguaa

SEQ ID NO: 2922151 - RNA, 20 nt, Human
auuuccuauguaacugcauu

SEQ ID NO: 2922152 - RNA, 17 nt, Human
auuuccauuauuuauau

SEQ ID NO: 2922153 - RNA, 15 nt, Human
auuuccauuauuuau

SEQ ID NO: 2922154 - RNA, 21 nt, Human
auuucuugaguuuuguuuuaa

SEQ ID NO: 2922155 - RNA, 22 nt, Human
auugaauaaugguaccagauaa

SEQ ID NO: 2922156 - RNA, 14 nt, Human
auugaauaauggua

SEQ ID NO: 2922157 - RNA, 23 nt, Human
auugcauuaaauauaauaugcac

SEQ ID NO: 2922158 - RNA, 19 nt, Human
auuggcuauuuaaagacaa

SEQ ID NO: 2922159 - RNA, 21 nt, Human
auuaaaacaauauuguuucua

SEQ ID NO: 2922160 - RNA, 20 nt, Human
auuaaaacaauauuguuucu

SEQ ID NO: 2922161 - RNA, 18 nt, Human
auuaaaacaauauuguuu

SEQ ID NO: 2922162 - RNA, 14 nt, Human
auuaaaacaauauu

SEQ ID NO: 2922163 - RNA, 15 nt, Human
uuuuccacuacugcu

SEQ ID NO: 2922164 - RNA, 13 nt, Human
uuuuccacuacug

SEQ ID NO: 2922165 - RNA, 23 nt, Human
uuuuagacaaauacucaugugua

SEQ ID NO: 2922166 - RNA, 21 nt, Human
uuuuagacaaauacucaugug

SEQ ID NO: 2922167 - RNA, 22 nt, Human
uuuuagacaaauacucaugugu

SEQ ID NO: 2922168 - RNA, 18 nt, Human
auguuaugcauaaaguca

SEQ ID NO: 2922169 - RNA, 17 nt, Human
auguuaugcauaaaguc

SEQ ID NO: 2922170 - RNA, 18 nt, Human
uuuuagacaaauacucau

SEQ ID NO: 2922171 - RNA, 20 nt, Human
uuuuagacaaauacucaugu

SEQ ID NO: 2922172 - RNA, 20 nt, Human
augugcuguguaaaguuagu

SEQ ID NO: 2922173 - RNA, 11 nt, Human
augugcugugu

SEQ ID NO: 2922174 - RNA, 13 nt, Human
augugcuguguaa

SEQ ID NO: 2922175 - RNA, 14 nt, Human
augugcuguguaaa

SEQ ID NO: 2922176 - RNA, 15 nt, Human
augugcuguguaaag

SEQ ID NO: 2922177 - RNA, 16 nt, Human
augugcuguguaaagu

SEQ ID NO: 2922178 - RNA, 17 nt, Human
augugcuguguaaaguu

SEQ ID NO: 2922179 - RNA, 18 nt, Human
augugcuguguaaaguua

SEQ ID NO: 2922180 - RNA, 19 nt, Human
augugcuguguaaaguuag

SEQ ID NO: 2922181 - RNA, 15 nt, Human
uuuguuuuaaaauua

SEQ ID NO: 2922182 - RNA, 15 nt, Human
uuugauucugugugu

SEQ ID NO: 2922183 - RNA, 19 nt, Human
uuuuugcaccccaugcugu

SEQ ID NO: 2922184 - RNA, 20 nt, Human
uuuuugcaccccaugcuguu

SEQ ID NO: 2922185 - RNA, 22 nt, Human
uuuuugcaccccaugcuguuga

SEQ ID NO: 2922186 - RNA, 23 nt, Human
uuuuugcaccccaugcuguugau

SEQ ID NO: 2922187 - RNA, 21 nt, Human
uuuuuaaugugcuguguaaag

SEQ ID NO: 2922188 - RNA, 20 nt, Human
uuuuuaaugugcuguguaaa

SEQ ID NO: 2922189 - RNA, 16 nt, Human
uuuuguuuuaaaauua

SEQ ID NO: 2922190 - RNA, 23 nt, Human
uuguguauccauuaucaugugua

SEQ ID NO: 2922191 - RNA, 21 nt, Human
uuguguauccauuaucaugug

SEQ ID NO: 2922192 - RNA, 22 nt, Human
uuguguauccauuaucaugugu

SEQ ID NO: 2922193 - RNA, 20 nt, Human
uuguguauccauuaucaugu

SEQ ID NO: 2922194 - RNA, 16 nt, Human
uugugaccugaaguuc

SEQ ID NO: 2922195 - RNA, 13 nt, Human
uuuccauuauuua

SEQ ID NO: 2922196 - RNA, 21 nt, Human
uuuccauuauuuauauuaguu

SEQ ID NO: 2922197 - RNA, 21 nt, Human
uuuccauugguuuaccuguga

SEQ ID NO: 2922198 - RNA, 16 nt, Human
auggaaugguuauaaa

SEQ ID NO: 2922199 - RNA, 18 nt, Human
auggaaugguuauaaaag

SEQ ID NO: 2922200 - RNA, 20 nt, Human
auggaaugguuauaaaagug

SEQ ID NO: 2922201 - RNA, 19 nt, Human
auggaaugguuauaaaagu

SEQ ID NO: 2922202 - RNA, 23 nt, Human
augcuguugauugcuaaauguaa

SEQ ID NO: 2922203 - RNA, 21 nt, Human
augcuguugauugcuaaaugu

SEQ ID NO: 2922204 - RNA, 22 nt, Human
augcuguugauugcuaaaugua

SEQ ID NO: 2922205 - RNA, 16 nt, Human
augcuguugauugcua

SEQ ID NO: 2922206 - RNA, 17 nt, Human
augcuguugauugcuaa

SEQ ID NO: 2922207 - RNA, 18 nt, Human
augcuguugauugcuaaa

SEQ ID NO: 2922208 - RNA, 19 nt, Human
augcuguugauugcuaaau

SEQ ID NO: 2922209 - RNA, 11 nt, Human
augcuguugau

SEQ ID NO: 2922210 - RNA, 12 nt, Human
augcuguugauu

SEQ ID NO: 2922211 - RNA, 15 nt, Human
augcuguugauugcu

SEQ ID NO: 2922212 - RNA, 18 nt, Human
augccagguucuauuugg

SEQ ID NO: 2922213 - RNA, 19 nt, Human
augccagguucuauuugga

SEQ ID NO: 2922214 - RNA, 20 nt, Human
augccagguucuauuuggaa

SEQ ID NO: 2922215 - RNA, 21 nt, Human
augccagguucuauuuggaau

SEQ ID NO: 2922216 - RNA, 14 nt, Human
uuuacuguuuguua

SEQ ID NO: 2922217 - RNA, 19 nt, Human
uugcaccccaugcuguuga

SEQ ID NO: 2922218 - RNA, 19 nt, Human
uugaguggaugauguuucg

SEQ ID NO: 2922219 - RNA, 17 nt, Human
uugaguggaugauguuu

SEQ ID NO: 2922220 - RNA, 18 nt, Human
aucuagcaaauguuaugc

SEQ ID NO: 2922221 - RNA, 14 nt, Human
aucuagcaaauguu

SEQ ID NO: 2922222 - RNA, 23 nt, Human
aucuuguuuuuccacuacugcua

SEQ ID NO: 2922223 - RNA, 15 nt, Human
aucuuguuuuuccac

SEQ ID NO: 2922224 - RNA, 12 nt, Human
aucuugguaaau

SEQ ID NO: 2922225 - RNA, 14 nt, Human
uuggguggagaagc

SEQ ID NO: 2922226 - RNA, 15 nt, Human
uuggguggagaagcc

SEQ ID NO: 2922227 - RNA, 16 nt, Human
uuggguggagaagcca

SEQ ID NO: 2922228 - RNA, 17 nt, Human
uuggguggagaagccau

SEQ ID NO: 2922229 - RNA, 18 nt, Human
uuggguggagaagccauu

SEQ ID NO: 2922230 - RNA, 19 nt, Human
uuggguggagaagccauug

SEQ ID NO: 2922231 - RNA, 13 nt, Human
auaucuaaauuga

SEQ ID NO: 2922232 - RNA, 14 nt, Human
auaucuaaauugaa

SEQ ID NO: 2922233 - RNA, 22 nt, Human
auaucuaaauugaauaauggua

SEQ ID NO: 2922234 - RNA, 17 nt, Human
auaucuaaauugaauaa

SEQ ID NO: 2922235 - RNA, 18 nt, Human
auaucuaaauugaauaau

SEQ ID NO: 2922236 - RNA, 19 nt, Human
auaugcacacagugcuuuc

SEQ ID NO: 2922237 - RNA, 18 nt, Human
uucacauccuguguuucu

SEQ ID NO: 2922238 - RNA, 17 nt, Human
uuauuuagggaacugcu

SEQ ID NO: 2922239 - RNA, 21 nt, Human
uuauuuagggaacugcuugac

SEQ ID NO: 2922240 - RNA, 18 nt, Human
uuauuuagggaacugcuu

SEQ ID NO: 2922241 - RNA, 21 nt, Human
aucaguccucuuucaaaggua

SEQ ID NO: 2922242 - RNA, 19 nt, Human
aucagugguuauuuaggga

SEQ ID NO: 2922243 - RNA, 22 nt, Human
aucagaucauuucaaaacucau

SEQ ID NO: 2922244 - RNA, 18 nt, Human
aucagaucauuucaaaac

SEQ ID NO: 2922245 - RNA, 15 nt, Human
uucuagggaaaugaa

SEQ ID NO: 2922246 - RNA, 18 nt, Human
auccauuaucauguguaa

SEQ ID NO: 2922247 - RNA, 16 nt, Human
auccauuaucaugugu

SEQ ID NO: 2922248 - RNA, 17 nt, Human
auccauuaucaugugua

SEQ ID NO: 2922249 - RNA, 14 nt, Human
auccauuaucaugu

SEQ ID NO: 2922250 - RNA, 15 nt, Human
auccauuaucaugug

SEQ ID NO: 2922251 - RNA, 15 nt, Human
uucucuuaauuuaau

SEQ ID NO: 2922252 - RNA, 13 nt, Human
uucauguuucuua

SEQ ID NO: 2922253 - RNA, 12 nt, Human
uucauguuucuu

SEQ ID NO: 2922254 - RNA, 14 nt, Human
uuccuucaggguga

SEQ ID NO: 2922255 - RNA, 15 nt, Human
uuccuucagggugau

SEQ ID NO: 2922256 - RNA, 22 nt, Human
uuccuucagggugaugccaggu

SEQ ID NO: 2922257 - RNA, 13 nt, Human
aguguaaagcauu

SEQ ID NO: 2922258 - RNA, 14 nt, Human
aguguaaagcauuc

SEQ ID NO: 2922259 - RNA, 16 nt, Human
aguguaaagcauucca

SEQ ID NO: 2922260 - RNA, 17 nt, Human
aguguaaagcauuccaa

SEQ ID NO: 2922261 - RNA, 18 nt, Human
aguguaaagcauuccaac

SEQ ID NO: 2922262 - RNA, 20 nt, Human
aguguaaagcauuccaacaa

SEQ ID NO: 2922263 - RNA, 22 nt, Human
aguguaaagcauuccaacaaag

SEQ ID NO: 2922264 - RNA, 16 nt, Human
agugguggcagggccu

SEQ ID NO: 2922265 - RNA, 18 nt, Human
agugguggcagggccuag

SEQ ID NO: 2922266 - RNA, 11 nt, Human
agugguggcag

SEQ ID NO: 2922267 - RNA, 13 nt, Human
agugguggcaggg

SEQ ID NO: 2922268 - RNA, 14 nt, Human
agugguggcagggc

SEQ ID NO: 2922269 - RNA, 15 nt, Human
agugguggcagggcc

SEQ ID NO: 2922270 - RNA, 16 nt, Human
uguugauugcuaaaug

SEQ ID NO: 2922271 - RNA, 17 nt, Human
uguugauugcuaaaugu

SEQ ID NO: 2922272 - RNA, 15 nt, Human
uguugauugcuaaau

SEQ ID NO: 2922273 - RNA, 18 nt, Human
uguugauugcuaaaugua

SEQ ID NO: 2922274 - RNA, 19 nt, Human
uguugauugcuaaauguaa

SEQ ID NO: 2922275 - RNA, 13 nt, Human
uguucuguggaaa

SEQ ID NO: 2922276 - RNA, 17 nt, Human
uguucuguggaaagugu

SEQ ID NO: 2922277 - RNA, 18 nt, Human
uguucuguggaaagugua

SEQ ID NO: 2922278 - RNA, 19 nt, Human
uguucuguggaaaguguaa

SEQ ID NO: 2922279 - RNA, 20 nt, Human
uguucuguggaaaguguaaa

SEQ ID NO: 2922280 - RNA, 21 nt, Human
uguucuguggaaaguguaaag

SEQ ID NO: 2922281 - RNA, 22 nt, Human
uguucuguggaaaguguaaagc

SEQ ID NO: 2922282 - RNA, 18 nt, Human
uguuauagguuguuggau

SEQ ID NO: 2922283 - RNA, 21 nt, Human
ugugaaauaguucaaagccaa

SEQ ID NO: 2922284 - RNA, 15 nt, Human
ugugacuaauuguau

SEQ ID NO: 2922285 - RNA, 17 nt, Human
ugugacuaauuguauaa

SEQ ID NO: 2922286 - RNA, 18 nt, Human
ugugacuaauuguauaac

SEQ ID NO: 2922287 - RNA, 19 nt, Human
ugugacuaauuguauaaca

SEQ ID NO: 2922288 - RNA, 22 nt, Human
ugugacuaauuguauaacaggu

SEQ ID NO: 2922289 - RNA, 23 nt, Human
ugugacuaauuguauaacagguu

SEQ ID NO: 2922290 - RNA, 14 nt, Human
ugugaccugaaguu

SEQ ID NO: 2922291 - RNA, 15 nt, Human
ugugaccugaaguuc

SEQ ID NO: 2922292 - RNA, 16 nt, Human
ugugaccugaaguuca

SEQ ID NO: 2922293 - RNA, 14 nt, Human
uuaauucucuugaa

SEQ ID NO: 2922294 - RNA, 15 nt, Human
uuaauucauguuucu

SEQ ID NO: 2922295 - RNA, 14 nt, Human
uuaauucauguuuc

SEQ ID NO: 2922296 - RNA, 14 nt, Human
auaaaauuauagau

SEQ ID NO: 2922297 - RNA, 13 nt, Human
auaaaauuauaga

SEQ ID NO: 2922298 - RNA, 23 nt, Human
auaaaauuauagaugggaaugaa

SEQ ID NO: 2922299 - RNA, 20 nt, Human
auaaaauuauagaugggaau

SEQ ID NO: 2922300 - RNA, 21 nt, Human
auaaaauuauagaugggaaug

SEQ ID NO: 2922301 - RNA, 21 nt, Human
auaaaagugauuguuggcaca

SEQ ID NO: 2922302 - RNA, 14 nt, Human
auaaaagugauugu

SEQ ID NO: 2922303 - RNA, 18 nt, Human
auaaaagugauuguuggc

SEQ ID NO: 2922304 - RNA, 23 nt, Human
uuagacaaauacucauguguaug

SEQ ID NO: 2922305 - RNA, 15 nt, Human
uuagacaaauacuca

SEQ ID NO: 2922306 - RNA, 18 nt, Human
uuagacaaauacucaugu

SEQ ID NO: 2922307 - RNA, 19 nt, Human
uuagacaaauacucaugug

SEQ ID NO: 2922308 - RNA, 20 nt, Human
uuagacaaauacucaugugu

SEQ ID NO: 2922309 - RNA, 21 nt, Human
uuagacaaauacucaugugua

SEQ ID NO: 2922310 - RNA, 22 nt, Human
uuagacaaauacucauguguau

SEQ ID NO: 2922311 - RNA, 14 nt, Human
uuacauacugcugu

SEQ ID NO: 2922312 - RNA, 13 nt, Human
uuaccugugaaau

SEQ ID NO: 2922313 - RNA, 15 nt, Human
uuaaauuuuaauuua

SEQ ID NO: 2922314 - RNA, 15 nt, Human
uguuuucauaauaaa

SEQ ID NO: 2922315 - RNA, 14 nt, Human
ugguaccagauaaa

SEQ ID NO: 2922316 - RNA, 15 nt, Human
ugguaccagauaaaa

SEQ ID NO: 2922317 - RNA, 18 nt, Human
ugguaccagauaaaauua

SEQ ID NO: 2922318 - RNA, 23 nt, Human
ugguaaauuuccccaacagugug

SEQ ID NO: 2922319 - RNA, 20 nt, Human
ugguaaauuuccccaacagu

SEQ ID NO: 2922320 - RNA, 22 nt, Human
ugguaaauuuccccaacagugu

SEQ ID NO: 2922321 - RNA, 16 nt, Human
ugguaaauuuccccaa

SEQ ID NO: 2922322 - RNA, 19 nt, Human
ugguaaauuuccccaacag

SEQ ID NO: 2922323 - RNA, 22 nt, Human
ugggagaauucuuacauguuuu

SEQ ID NO: 2922324 - RNA, 21 nt, Human
ugggagaauucuuacauguuu

SEQ ID NO: 2922325 - RNA, 21 nt, Human
agggaagcuacagguuacaac

SEQ ID NO: 2922326 - RNA, 13 nt, Human
agggaagcuacag

SEQ ID NO: 2922327 - RNA, 16 nt, Human
agggaagcuacagguu

SEQ ID NO: 2922328 - RNA, 19 nt, Human
agggaagcuacagguuaca

SEQ ID NO: 2922329 - RNA, 15 nt, Human
agguucuauuuggaa

SEQ ID NO: 2922330 - RNA, 17 nt, Human
agguucuauuuggaauu

SEQ ID NO: 2922331 - RNA, 20 nt, Human
ugguuauaaaagugauuguu

SEQ ID NO: 2922332 - RNA, 16 nt, Human
ugguuauaaaagugau

SEQ ID NO: 2922333 - RNA, 15 nt, Human
ugguuauaaaaguga

SEQ ID NO: 2922334 - RNA, 12 nt, Human
uguaaaguuagu

SEQ ID NO: 2922335 - RNA, 14 nt, Human
uguaaaguuagucu

SEQ ID NO: 2922336 - RNA, 17 nt, Human
uguaaaguuagucuacu

SEQ ID NO: 2922337 - RNA, 20 nt, Human
agcuuguguauccauuauca

SEQ ID NO: 2922338 - RNA, 12 nt, Human
agcuuguguauc

SEQ ID NO: 2922339 - RNA, 21 nt, Human
aggaaacaaagcuuagcagga

SEQ ID NO: 2922340 - RNA, 23 nt, Human
uggcacauccuaugcaauauauc

SEQ ID NO: 2922341 - RNA, 18 nt, Human
uggcacauccuaugcaau

SEQ ID NO: 2922342 - RNA, 19 nt, Human
uggcacauccuaugcaaua

SEQ ID NO: 2922343 - RNA, 15 nt, Human
uggcacauccuaugc

SEQ ID NO: 2922344 - RNA, 21 nt, Human
uggaaaguguaaagcauucca

SEQ ID NO: 2922345 - RNA, 17 nt, Human
uggaaaguguaaagcau

SEQ ID NO: 2922346 - RNA, 18 nt, Human
uggaaaguguaaagcauu

SEQ ID NO: 2922347 - RNA, 13 nt, Human
uggaaaguguaaa

SEQ ID NO: 2922348 - RNA, 14 nt, Human
uggaaaguguaaag

SEQ ID NO: 2922349 - RNA, 15 nt, Human
uggaaaguguaaagc

SEQ ID NO: 2922350 - RNA, 16 nt, Human
uggaaaguguaaagca

SEQ ID NO: 2922351 - RNA, 17 nt, Human
aggacuguauuugugac

SEQ ID NO: 2922352 - RNA, 15 nt, Human
aggacuguauuugug

SEQ ID NO: 2922353 - RNA, 16 nt, Human
aggacuguauuuguga

SEQ ID NO: 2922354 - RNA, 16 nt, Human
ugcaccccaugcuguu

SEQ ID NO: 2922355 - RNA, 14 nt, Human
ugcaccccaugcug

SEQ ID NO: 2922356 - RNA, 15 nt, Human
ugcaaaugcuguauu

SEQ ID NO: 2922357 - RNA, 21 nt, Human
ugcaauauaucuaaauugaau

SEQ ID NO: 2922358 - RNA, 22 nt, Human
ugcaauauaucuaaauugaaua

SEQ ID NO: 2922359 - RNA, 23 nt, Human
ugcaauauaucuaaauugaauaa

SEQ ID NO: 2922360 - RNA, 22 nt, Human
ugcaucuuacugaagguaaaau

SEQ ID NO: 2922361 - RNA, 18 nt, Human
ugcaucuuacugaaggua

SEQ ID NO: 2922362 - RNA, 17 nt, Human
ugcaucuuacugaaggu

SEQ ID NO: 2922363 - RNA, 14 nt, Human
ugcaucuuacugaa

SEQ ID NO: 2922364 - RNA, 23 nt, Human
agccuugggaacaugcgugugac

SEQ ID NO: 2922365 - RNA, 18 nt, Human
ugaguggaugauguuucg

SEQ ID NO: 2922366 - RNA, 17 nt, Human
agcaguaacugacaacu

SEQ ID NO: 2922367 - RNA, 23 nt, Human
agcaggagaggagagccagagaa

SEQ ID NO: 2922368 - RNA, 19 nt, Human
agcaggagaggagagccag

SEQ ID NO: 2922369 - RNA, 20 nt, Human
agcaggagaggagagccaga

SEQ ID NO: 2922370 - RNA, 21 nt, Human
agcaggagaggagagccagag

SEQ ID NO: 2922371 - RNA, 22 nt, Human
agcaggagaggagagccagaga

SEQ ID NO: 2922372 - RNA, 14 nt, Human
agcaggagaggaga

SEQ ID NO: 2922373 - RNA, 16 nt, Human
agcaggagaggagagc

SEQ ID NO: 2922374 - RNA, 17 nt, Human
agcaggagaggagagcc

SEQ ID NO: 2922375 - RNA, 21 nt, Human
agccacacugugggacucuuc

SEQ ID NO: 2922376 - RNA, 13 nt, Human
agcauuccaacaa

SEQ ID NO: 2922377 - RNA, 14 nt, Human
agcauuccaacaaa

SEQ ID NO: 2922378 - RNA, 15 nt, Human
agcauuccaacaaag

SEQ ID NO: 2922379 - RNA, 17 nt, Human
agcauuccaacaaaggg

SEQ ID NO: 2922380 - RNA, 19 nt, Human
agcauuccaacaaaggguu

SEQ ID NO: 2922381 - RNA, 10 nt, Human
agagccagag

SEQ ID NO: 2922382 - RNA, 13 nt, Human
agagccagagaag

SEQ ID NO: 2922383 - RNA, 15 nt, Human
agagccagagaagug

SEQ ID NO: 2922384 - RNA, 16 nt, Human
agagccagagaaguga

SEQ ID NO: 2922385 - RNA, 17 nt, Human
agagccagagaagugac

SEQ ID NO: 2922386 - RNA, 19 nt, Human
ugaaauaguucaaagccaa

SEQ ID NO: 2922387 - RNA, 23 nt, Human
ugacagggaagcuacagguuaca

SEQ ID NO: 2922388 - RNA, 12 nt, Human
ugacagggaagc

SEQ ID NO: 2922389 - RNA, 13 nt, Human
ugacagggaagcu

SEQ ID NO: 2922390 - RNA, 14 nt, Human
ugacagggaagcua

SEQ ID NO: 2922391 - RNA, 16 nt, Human
ugacagggaagcuaca

SEQ ID NO: 2922392 - RNA, 17 nt, Human
ugacagggaagcuacag

SEQ ID NO: 2922393 - RNA, 19 nt, Human
ugacagggaagcuacaggu

SEQ ID NO: 2922394 - RNA, 20 nt, Human
ugacagggaagcuacagguu

SEQ ID NO: 2922395 - RNA, 21 nt, Human
ugacagggaagcuacagguua

SEQ ID NO: 2922396 - RNA, 18 nt, Human
agauaaagauuucuugag

SEQ ID NO: 2922397 - RNA, 23 nt, Human
ugaauuuuuuucaucuucucugg

SEQ ID NO: 2922398 - RNA, 21 nt, Human
ugaauuuuuuucaucuucucu

SEQ ID NO: 2922399 - RNA, 22 nt, Human
ugaauuuuucucuaacucagaa

SEQ ID NO: 2922400 - RNA, 21 nt, Human
ucuugaguuuuguuuuaaaau

SEQ ID NO: 2922401 - RNA, 12 nt, Human
agaauuccuuca

SEQ ID NO: 2922402 - RNA, 18 nt, Human
agaauuccuucaggguga

SEQ ID NO: 2922403 - RNA, 20 nt, Human
agaauuccuucagggugaug

SEQ ID NO: 2922404 - RNA, 14 nt, Human
ucuguggaaagugu

SEQ ID NO: 2922405 - RNA, 15 nt, Human
ucuguggaaagugua

SEQ ID NO: 2922406 - RNA, 16 nt, Human
ucuguggaaaguguaa

SEQ ID NO: 2922407 - RNA, 20 nt, Human
ucuguggaaaguguaaagca

SEQ ID NO: 2922408 - RNA, 22 nt, Human
ucuguggaaaguguaaagcauu

SEQ ID NO: 2922409 - RNA, 23 nt, Human
ucuguucuguggaaaguguaaag

SEQ ID NO: 2922410 - RNA, 15 nt, Human
ucuguucuguggaaa

SEQ ID NO: 2922411 - RNA, 16 nt, Human
ucuguucuguggaaag

SEQ ID NO: 2922412 - RNA, 19 nt, Human
ucuguucuguggaaagugu

SEQ ID NO: 2922413 - RNA, 22 nt, Human
ucuguucuguggaaaguguaaa

SEQ ID NO: 2922414 - RNA, 12 nt, Human
ucuguucugugg

SEQ ID NO: 2922415 - RNA, 14 nt, Human
ucuguucuguggaa

SEQ ID NO: 2922416 - RNA, 23 nt, Human
ucuuaauuuaaucuuuuuuaugu

SEQ ID NO: 2922417 - RNA, 13 nt, Human
ucuuacugaaggu

SEQ ID NO: 2922418 - RNA, 23 nt, Human
ucuuacugaagguaaaauugaaa

SEQ ID NO: 2922419 - RNA, 15 nt, Human
ucuuacauguuuucu

SEQ ID NO: 2922420 - RNA, 14 nt, Human
ucuuacauguuuuc

SEQ ID NO: 2922421 - RNA, 15 nt, Human
acuuuaaaauaaaau

SEQ ID NO: 2922422 - RNA, 22 nt, Human
ucugaagaguggguuucacaag

SEQ ID NO: 2922423 - RNA, 21 nt, Human
acugucacuguuucucugcug

SEQ ID NO: 2922424 - RNA, 20 nt, Human
acugucacuguuucucugcu

SEQ ID NO: 2922425 - RNA, 16 nt, Human
acugucacuguuucuc

SEQ ID NO: 2922426 - RNA, 15 nt, Human
acugucacuguuucu

SEQ ID NO: 2922427 - RNA, 15 nt, Human
accgcgucuggugac

SEQ ID NO: 2922428 - RNA, 19 nt, Human
ucccuuuuacauacugcug

SEQ ID NO: 2922429 - RNA, 17 nt, Human
ucccuuuuacauacugc

SEQ ID NO: 2922430 - RNA, 13 nt, Human
ucccuuuuacaua

SEQ ID NO: 2922431 - RNA, 20 nt, Human
ucccuuuuacauacugcugu

SEQ ID NO: 2922432 - RNA, 15 nt, Human
acucagaaacaucag

SEQ ID NO: 2922433 - RNA, 14 nt, Human
acucagaaacauca

SEQ ID NO: 2922434 - RNA, 13 nt, Human
acucauguguaug

SEQ ID NO: 2922435 - RNA, 21 nt, Human
acucauguguaugggcaaaaa

SEQ ID NO: 2922436 - RNA, 10 nt, Human
acucaugugu

SEQ ID NO: 2922437 - RNA, 11 nt, Human
acucaugugua

SEQ ID NO: 2922438 - RNA, 12 nt, Human
acucauguguau

SEQ ID NO: 2922439 - RNA, 21 nt, Human
acucauucaaaaguugaaauu

SEQ ID NO: 2922440 - RNA, 13 nt, Human
acucauucaaaag

SEQ ID NO: 2922441 - RNA, 19 nt, Human
uccccuauggggauggucc

SEQ ID NO: 2922442 - RNA, 20 nt, Human
ucagccaagcacaguggugg

SEQ ID NO: 2922443 - RNA, 12 nt, Human
ucagccaagcac

SEQ ID NO: 2922444 - RNA, 14 nt, Human
ucagccaagcacag

SEQ ID NO: 2922445 - RNA, 15 nt, Human
ucagccaagcacagu

SEQ ID NO: 2922446 - RNA, 13 nt, Human
ucacaguguguuu

SEQ ID NO: 2922447 - RNA, 17 nt, Human
ucacauccuguguuucu

SEQ ID NO: 2922448 - RNA, 19 nt, Human
ucacauccuguguuucuag

SEQ ID NO: 2922449 - RNA, 18 nt, Human
ucacauccuguguuucua

SEQ ID NO: 2922450 - RNA, 21 nt, Human
acaucuccuccauacucagga

SEQ ID NO: 2922451 - RNA, 12 nt, Human
acauacugcugu

SEQ ID NO: 2922452 - RNA, 22 nt, Human
acaguuuuccuucucaucugug

SEQ ID NO: 2922453 - RNA, 14 nt, Human
acaguuuuccuucu

SEQ ID NO: 2922454 - RNA, 12 nt, Human
acauucugcuuu

SEQ ID NO: 2922455 - RNA, 18 nt, Human
acauucugcuuucaucuu

SEQ ID NO: 2922456 - RNA, 14 nt, Human
ucaaaaguugaaau

SEQ ID NO: 2922457 - RNA, 16 nt, Human
ucaaaaguugaaauua

SEQ ID NO: 2922458 - RNA, 15 nt, Human
ucaaaaguugaaauu

SEQ ID NO: 2922459 - RNA, 21 nt, Human
uauuugugacuaauuguauaa

SEQ ID NO: 2922460 - RNA, 19 nt, Human
uauuugugacuaauuguau

SEQ ID NO: 2922461 - RNA, 20 nt, Human
uauuugugacuaauuguaua

SEQ ID NO: 2922462 - RNA, 12 nt, Human
uauuugugacua

SEQ ID NO: 2922463 - RNA, 14 nt, Human
uauuugugacuaau

SEQ ID NO: 2922464 - RNA, 17 nt, Human
uauuugugacuaauugu

SEQ ID NO: 2922465 - RNA, 22 nt, Human
uauuugugacuaauuguauaac

SEQ ID NO: 2922466 - RNA, 18 nt, Human
ucaaagccaaguuuauau

SEQ ID NO: 2922467 - RNA, 22 nt, Human
uaucuuguuuuuccacuacugc

SEQ ID NO: 2922468 - RNA, 18 nt, Human
uaucuuguuuuuccacua

SEQ ID NO: 2922469 - RNA, 14 nt, Human
uaucuuguuuuucc

SEQ ID NO: 2922470 - RNA, 22 nt, Human
uauauuaucaugcaaaugcugu

SEQ ID NO: 2922471 - RNA, 17 nt, Human
uaguuuuuguaauuuau

SEQ ID NO: 2922472 - RNA, 22 nt, Human
acacuagcuaauaucaauagaa

SEQ ID NO: 2922473 - RNA, 14 nt, Human
uagucuauuagcca

SEQ ID NO: 2922474 - RNA, 22 nt, Human
uagucuacucuuaagccaucuu

SEQ ID NO: 2922475 - RNA, 20 nt, Human
uagucuacucuuaagccauc

SEQ ID NO: 2922476 - RNA, 21 nt, Human
uagucuacucuuaagccaucu

SEQ ID NO: 2922477 - RNA, 19 nt, Human
aauguguaucggaugcuuu

SEQ ID NO: 2922478 - RNA, 23 nt, Human
aauugaauaaugguaccagauaa

SEQ ID NO: 2922479 - RNA, 14 nt, Human
aauugaauaauggu

SEQ ID NO: 2922480 - RNA, 21 nt, Human
aauugaauaaugguaccagau

SEQ ID NO: 2922481 - RNA, 22 nt, Human
aauugaauaaugguaccagaua

SEQ ID NO: 2922482 - RNA, 20 nt, Human
aauuuauauacaaccugcuu

SEQ ID NO: 2922483 - RNA, 20 nt, Human
uacuuuguccuuuuuguuau

SEQ ID NO: 2922484 - RNA, 16 nt, Human
acaaagcuuagcagga

SEQ ID NO: 2922485 - RNA, 19 nt, Human
acaaagcuuagcaggagag

SEQ ID NO: 2922486 - RNA, 21 nt, Human
acaaagcuuagcaggagagga

SEQ ID NO: 2922487 - RNA, 18 nt, Human
uagcaagugaauuuuucu

SEQ ID NO: 2922488 - RNA, 22 nt, Human
uagcaagugaauuuuucucuaa

SEQ ID NO: 2922489 - RNA, 18 nt, Human
acaacagauuugugaacu

SEQ ID NO: 2922490 - RNA, 16 nt, Human
acaaauucuguuucuu

SEQ ID NO: 2922491 - RNA, 15 nt, Human
acaaauucuguuucu

SEQ ID NO: 2922492 - RNA, 12 nt, Human
acaaauucuguu

SEQ ID NO: 2922493 - RNA, 15 nt, Human
acaacagauuuguga

SEQ ID NO: 2922494 - RNA, 16 nt, Human
acaacagauuugugaa

SEQ ID NO: 2922495 - RNA, 17 nt, Human
acaacagauuugugaac

SEQ ID NO: 2922496 - RNA, 15 nt, Human
acaaguuguguuuga

SEQ ID NO: 2922497 - RNA, 14 nt, Human
acaaguuguguuug

SEQ ID NO: 2922498 - RNA, 18 nt, Human
aauaugcacacagugcuu

SEQ ID NO: 2922499 - RNA, 13 nt, Human
aauauuguuucua

SEQ ID NO: 2922500 - RNA, 16 nt, Human
aauaugagaaucagau

SEQ ID NO: 2922501 - RNA, 13 nt, Human
aauaaaugucuuu

SEQ ID NO: 2922502 - RNA, 23 nt, Human
aauaaaugucuuuuuuuuaaugu

SEQ ID NO: 2922503 - RNA, 20 nt, Human
uacaccagagauaauaugag

SEQ ID NO: 2922504 - RNA, 19 nt, Human
uacaccagagauaauauga

SEQ ID NO: 2922505 - RNA, 15 nt, Human
uaauucauguuucuu

SEQ ID NO: 2922506 - RNA, 15 nt, Human
aaucagaucauuuca

SEQ ID NO: 2922507 - RNA, 14 nt, Human
aaucagaucauuuc

SEQ ID NO: 2922508 - RNA, 18 nt, Human
aaucauggaaugguuaua

SEQ ID NO: 2922509 - RNA, 21 nt, Human
aaucauggaaugguuauaaaa

SEQ ID NO: 2922510 - RNA, 16 nt, Human
uaaucaauaaacgauu

SEQ ID NO: 2922511 - RNA, 22 nt, Human
uaaucaauaaacgauuuaauuc

SEQ ID NO: 2922512 - RNA, 18 nt, Human
aagacaaauucuguuucu

SEQ ID NO: 2922513 - RNA, 16 nt, Human
aagacaaauucuguuu

SEQ ID NO: 2922514 - RNA, 15 nt, Human
aagaugcucuuuuaa

SEQ ID NO: 2922515 - RNA, 23 nt, Human
guuagucuacucuuaagccaucu

SEQ ID NO: 2922516 - RNA, 11 nt, Human
guguuucuagg

SEQ ID NO: 2922517 - RNA, 16 nt, Human
guuagucuacucuuaa

SEQ ID NO: 2922518 - RNA, 21 nt, Human
guuagucuacucuuaagccau

SEQ ID NO: 2922519 - RNA, 22 nt, Human
guuagucuacucuuaagccauc

SEQ ID NO: 2922520 - RNA, 22 nt, Human
guuacaacagauuugugaacuc

SEQ ID NO: 2922521 - RNA, 23 nt, Human
guuacaacagauuugugaacuca

SEQ ID NO: 2922522 - RNA, 13 nt, Human
guuacaacagauu

SEQ ID NO: 2922523 - RNA, 14 nt, Human
guuacaacagauuu

SEQ ID NO: 2922524 - RNA, 18 nt, Human
guuacaacagauuuguga

SEQ ID NO: 2922525 - RNA, 19 nt, Human
guuacaacagauuugugaa

SEQ ID NO: 2922526 - RNA, 20 nt, Human
guuacaacagauuugugaac

SEQ ID NO: 2922527 - RNA, 21 nt, Human
guuacaacagauuugugaacu

SEQ ID NO: 2922528 - RNA, 12 nt, Human
aagcuuguguau

SEQ ID NO: 2922529 - RNA, 13 nt, Human
aagcuuguguauc

SEQ ID NO: 2922530 - RNA, 16 nt, Human
aagcuuguguauccau

SEQ ID NO: 2922531 - RNA, 21 nt, Human
aagcuuguguauccauuauca

SEQ ID NO: 2922532 - RNA, 22 nt, Human
aagcuuguguauccauuaucau

SEQ ID NO: 2922533 - RNA, 23 nt, Human
aagcuuguguauccauuaucaug

SEQ ID NO: 2922534 - RNA, 23 nt, Human
aagcugaauacauucugcuuuca

SEQ ID NO: 2922535 - RNA, 13 nt, Human
aagcugaauacau

SEQ ID NO: 2922536 - RNA, 14 nt, Human
guuucuguucugug

SEQ ID NO: 2922537 - RNA, 15 nt, Human
guuucuguucugugg

SEQ ID NO: 2922538 - RNA, 20 nt, Human
guuucuguucuguggaaagu

SEQ ID NO: 2922539 - RNA, 17 nt, Human
guuucuguucuguggaa

SEQ ID NO: 2922540 - RNA, 18 nt, Human
guuucuguucuguggaaa

SEQ ID NO: 2922541 - RNA, 22 nt, Human
guuucuguucuguggaaagugu

SEQ ID NO: 2922542 - RNA, 22 nt, Human
guuuuagacaaauacucaugug

SEQ ID NO: 2922543 - RNA, 23 nt, Human
guuuuagacaaauacucaugugu

SEQ ID NO: 2922544 - RNA, 18 nt, Human
guuuuagacaaauacuca

SEQ ID NO: 2922545 - RNA, 17 nt, Human
guuuuagacaaauacuc

SEQ ID NO: 2922546 - RNA, 16 nt, Human
aagguaaaauugaaag

SEQ ID NO: 2922547 - RNA, 12 nt, Human
aagguaaaauug

SEQ ID NO: 2922548 - RNA, 16 nt, Human
aaggauguacauuucc

SEQ ID NO: 2922549 - RNA, 15 nt, Human
aaggauguacauuuc

SEQ ID NO: 2922550 - RNA, 22 nt, Human
aaccugcuuggguggagaagcc

SEQ ID NO: 2922551 - RNA, 23 nt, Human
aaccugcuuggguggagaagcca

SEQ ID NO: 2922552 - RNA, 16 nt, Human
aacaauauuguuucua

SEQ ID NO: 2922553 - RNA, 22 nt, Human
aacagugugaaguuagaauucc

SEQ ID NO: 2922554 - RNA, 13 nt, Human
aacagugugaagu

SEQ ID NO: 2922555 - RNA, 14 nt, Human
aacagugugaaguu

SEQ ID NO: 2922556 - RNA, 15 nt, Human
aacagugugaaguua

SEQ ID NO: 2922557 - RNA, 16 nt, Human
aacagugugaaguuag

SEQ ID NO: 2922558 - RNA, 17 nt, Human
aacagugugaaguuaga

SEQ ID NO: 2922559 - RNA, 18 nt, Human
aacagugugaaguuagaa

SEQ ID NO: 2922560 - RNA, 20 nt, Human
aacagugugaaguuagaauu

SEQ ID NO: 2922561 - RNA, 22 nt, Human
aaaugacuaaaaaacaaagaag

SEQ ID NO: 2922562 - RNA, 19 nt, Human
aaaugacuaaaaaacaaag

SEQ ID NO: 2922563 - RNA, 18 nt, Human
guaggaacgguaaauuuc

SEQ ID NO: 2922564 - RNA, 21 nt, Human
guaggaacgguaaauuucugu

SEQ ID NO: 2922565 - RNA, 12 nt, Human
aaaugaaagaaa

SEQ ID NO: 2922566 - RNA, 14 nt, Human
guaugggcaaaaaa

SEQ ID NO: 2922567 - RNA, 20 nt, Human
guauaacagguuauuuuagu

SEQ ID NO: 2922568 - RNA, 22 nt, Human
guauaacagguuauuuuaguuu

SEQ ID NO: 2922569 - RNA, 13 nt, Human
guauaacagguua

SEQ ID NO: 2922570 - RNA, 15 nt, Human
guauaacagguuauu

SEQ ID NO: 2922571 - RNA, 17 nt, Human
aaauuauagaugggaau

SEQ ID NO: 2922572 - RNA, 20 nt, Human
aaauuauagaugggaaugaa

SEQ ID NO: 2922573 - RNA, 22 nt, Human
aaauuuccccaacagugugaag

SEQ ID NO: 2922574 - RNA, 23 nt, Human
aaauuuccccaacagugugaagu

SEQ ID NO: 2922575 - RNA, 16 nt, Human
aaauuuccccaacagu

SEQ ID NO: 2922576 - RNA, 17 nt, Human
aaauuuccccaacagug

SEQ ID NO: 2922577 - RNA, 18 nt, Human
aaauuuccccaacagugu

SEQ ID NO: 2922578 - RNA, 19 nt, Human
aaauuuccccaacagugug

SEQ ID NO: 2922579 - RNA, 20 nt, Human
aaauuuccccaacaguguga

SEQ ID NO: 2922580 - RNA, 18 nt, Human
aaauuuaauucauguuuc

SEQ ID NO: 2922581 - RNA, 17 nt, Human
aaauuuaauucauguuu

SEQ ID NO: 2922582 - RNA, 14 nt, Human
caccauuaaaaggg

SEQ ID NO: 2922583 - RNA, 22 nt, Human
caccauuaaaagggauuaccca

SEQ ID NO: 2922584 - RNA, 23 nt, Human
caauuauaucaguccucuuucaa

SEQ ID NO: 2922585 - RNA, 13 nt, Human
caauuauuuuuac

SEQ ID NO: 2922586 - RNA, 16 nt, Human
cacaagugaaaaacau

SEQ ID NO: 2922587 - RNA, 12 nt, Human
cacaagugaaaa

SEQ ID NO: 2922588 - RNA, 12 nt, Human
caacagugugaa

SEQ ID NO: 2922589 - RNA, 13 nt, Human
caacagugugaag

SEQ ID NO: 2922590 - RNA, 14 nt, Human
caacagugugaagu

SEQ ID NO: 2922591 - RNA, 16 nt, Human
caacagugugaaguua

SEQ ID NO: 2922592 - RNA, 17 nt, Human
caacagugugaaguuag

SEQ ID NO: 2922593 - RNA, 18 nt, Human
caacagugugaaguuaga

SEQ ID NO: 2922594 - RNA, 19 nt, Human
caacagugugaaguuagaa

SEQ ID NO: 2922595 - RNA, 21 nt, Human
caacagugugaaguuagaauu

SEQ ID NO: 2922596 - RNA, 22 nt, Human
caacagugugaaguuagaauuc

SEQ ID NO: 2922597 - RNA, 23 nt, Human
caacagugugaaguuagaauucc

SEQ ID NO: 2922598 - RNA, 19 nt, Human
caagugaauuuuucucuaa

SEQ ID NO: 2922599 - RNA, 15 nt, Human
caaauucuguuucuu

SEQ ID NO: 2922600 - RNA, 14 nt, Human
caaauucuguuucu

SEQ ID NO: 2922601 - RNA, 21 nt, Human
caaagacaaauucuguuucuu

SEQ ID NO: 2922602 - RNA, 20 nt, Human
caaagacaaauucuguuucu

SEQ ID NO: 2922603 - RNA, 16 nt, Human
uuuuccauugguuuac

SEQ ID NO: 2922604 - RNA, 16 nt, Human
uuuuacauacugcugu

SEQ ID NO: 2922605 - RNA, 15 nt, Human
uuuuacauacugcug

SEQ ID NO: 2922606 - RNA, 21 nt, Human
uuuuaauuuauuuauacuauu

SEQ ID NO: 2922607 - RNA, 15 nt, Human
uuuauuuauacuauu

SEQ ID NO: 2922608 - RNA, 16 nt, Human
uuuacaauugaaauga

SEQ ID NO: 2922609 - RNA, 15 nt, Human
uuuacaauugaaaug

SEQ ID NO: 2922610 - RNA, 23 nt, Human
uucucugaagaguggguuucaca

SEQ ID NO: 2922611 - RNA, 23 nt, Human
uucuccaugagacacaucuccuc

SEQ ID NO: 2922612 - RNA, 12 nt, Human
uucuauuuggaa

SEQ ID NO: 2922613 - RNA, 16 nt, Human
uuccuucucaucugug

SEQ ID NO: 2922614 - RNA, 14 nt, Human
uuccuucucaucug

SEQ ID NO: 2922615 - RNA, 16 nt, Human
uucaguugauuuuaca

SEQ ID NO: 2922616 - RNA, 23 nt, Human
uuccccaacagugugaaguuaga

SEQ ID NO: 2922617 - RNA, 19 nt, Human
uuccccaacagugugaagu

SEQ ID NO: 2922618 - RNA, 20 nt, Human
uuccccaacagugugaaguu

SEQ ID NO: 2922619 - RNA, 13 nt, Human
uuccccaacagug

SEQ ID NO: 2922620 - RNA, 15 nt, Human
uuccccaacagugug

SEQ ID NO: 2922621 - RNA, 16 nt, Human
uuccccaacaguguga

SEQ ID NO: 2922622 - RNA, 23 nt, Human
uucaaagccaaguuuauauacaa

SEQ ID NO: 2922623 - RNA, 13 nt, Human
uucuguucugugg

SEQ ID NO: 2922624 - RNA, 16 nt, Human
uucuguucuguggaaa

SEQ ID NO: 2922625 - RNA, 20 nt, Human
uucuguucuguggaaagugu

SEQ ID NO: 2922626 - RNA, 21 nt, Human
uucuguucuguggaaagugua

SEQ ID NO: 2922627 - RNA, 22 nt, Human
uucugugggagaauucuuacau

SEQ ID NO: 2922628 - RNA, 22 nt, Human
uucuguggaaaguguaaagcau

SEQ ID NO: 2922629 - RNA, 23 nt, Human
uucuguggaaaguguaaagcauu

SEQ ID NO: 2922630 - RNA, 21 nt, Human
uucuguggaaaguguaaagca

SEQ ID NO: 2922631 - RNA, 15 nt, Human
uugcuaaauguaaca

SEQ ID NO: 2922632 - RNA, 12 nt, Human
uugcuaaaugua

SEQ ID NO: 2922633 - RNA, 16 nt, Human
uugguaaauuucccca

SEQ ID NO: 2922634 - RNA, 21 nt, Human
uugguaaauuuccccaacagu

SEQ ID NO: 2922635 - RNA, 18 nt, Human
ugucuuuuuuuuaaugug

SEQ ID NO: 2922636 - RNA, 21 nt, Human
ugucuuuuuuuuaaugugcug

SEQ ID NO: 2922637 - RNA, 21 nt, Human
uguggaaaguguaaagcauuc

SEQ ID NO: 2922638 - RNA, 19 nt, Human
uguggaaaguguaaagcau

SEQ ID NO: 2922639 - RNA, 20 nt, Human
uguggaaaguguaaagcauu

SEQ ID NO: 2922640 - RNA, 14 nt, Human
uguggaaaguguaa

SEQ ID NO: 2922641 - RNA, 15 nt, Human
uguggaaaguguaaa

SEQ ID NO: 2922642 - RNA, 16 nt, Human
uguggaaaguguaaag

SEQ ID NO: 2922643 - RNA, 17 nt, Human
uguggaaaguguaaagc

SEQ ID NO: 2922644 - RNA, 12 nt, Human
uguggaaagugu

SEQ ID NO: 2922645 - RNA, 19 nt, Human
ugguagggggaaaaugugu

SEQ ID NO: 2922646 - RNA, 23 nt, Human
uguaacugcauugagaacugcau

SEQ ID NO: 2922647 - RNA, 21 nt, Human
uguaacuggcaguuuuccauu

SEQ ID NO: 2922648 - RNA, 22 nt, Human
uguauuugugacuaauuguaua

SEQ ID NO: 2922649 - RNA, 18 nt, Human
uguauuugugacuaauug

SEQ ID NO: 2922650 - RNA, 20 nt, Human
uguauuugugacuaauugua

SEQ ID NO: 2922651 - RNA, 12 nt, Human
uguauuugugac

SEQ ID NO: 2922652 - RNA, 13 nt, Human
uguauuugugacu

SEQ ID NO: 2922653 - RNA, 14 nt, Human
uguauuugugacua

SEQ ID NO: 2922654 - RNA, 15 nt, Human
uguauuugugacuaa

SEQ ID NO: 2922655 - RNA, 16 nt, Human
uguauuugugacuaau

SEQ ID NO: 2922656 - RNA, 15 nt, Human
uguaucggaugcuuu

SEQ ID NO: 2922657 - RNA, 20 nt, Human
uguuggauaaaucagugguu

SEQ ID NO: 2922658 - RNA, 19 nt, Human
uguuggauaaaucaguggu

SEQ ID NO: 2922659 - RNA, 17 nt, Human
uguguuuucauaauaaa

SEQ ID NO: 2922660 - RNA, 16 nt, Human
uguguauccauuauca

SEQ ID NO: 2922661 - RNA, 18 nt, Human
uguguauccauuaucaug

SEQ ID NO: 2922662 - RNA, 19 nt, Human
uguguauccauuaucaugu

SEQ ID NO: 2922663 - RNA, 18 nt, Human
uuacauguuuucuuugcu

SEQ ID NO: 2922664 - RNA, 12 nt, Human
uuacauguuuuc

SEQ ID NO: 2922665 - RNA, 22 nt, Human
uuacauguuuucuuugcuuuaa

SEQ ID NO: 2922666 - RNA, 13 nt, Human
uuaauucauguuu

SEQ ID NO: 2922667 - RNA, 13 nt, Human
uguuuuucacauu

SEQ ID NO: 2922668 - RNA, 20 nt, Human
uuaaaacaauauuguuucua

SEQ ID NO: 2922669 - RNA, 15 nt, Human
uguuucuagggaaau

SEQ ID NO: 2922670 - RNA, 15 nt, Human
uguuucucugcuguu

SEQ ID NO: 2922671 - RNA, 14 nt, Human
uguuucucugcugu

SEQ ID NO: 2922672 - RNA, 13 nt, Human
uguuucucugcug

SEQ ID NO: 2922673 - RNA, 15 nt, Human
uuaaauauaauaugc

SEQ ID NO: 2922674 - RNA, 23 nt, Human
uuaaaugggcuacuuuguccuuu

SEQ ID NO: 2922675 - RNA, 19 nt, Human
uuaaagcuaaaguaucugu

SEQ ID NO: 2922676 - RNA, 17 nt, Human
uggcuguaucuuguuuu

SEQ ID NO: 2922677 - RNA, 22 nt, Human
uggguuucacaagugaaaaaca

SEQ ID NO: 2922678 - RNA, 19 nt, Human
uggcacugcauacaaucug

SEQ ID NO: 2922679 - RNA, 12 nt, Human
uggaugauguuu

SEQ ID NO: 2922680 - RNA, 19 nt, Human
ugcuuucaucuuggucaca

SEQ ID NO: 2922681 - RNA, 21 nt, Human
uggaaugguuauaaaagugau

SEQ ID NO: 2922682 - RNA, 18 nt, Human
uggaaugguuauaaaagu

SEQ ID NO: 2922683 - RNA, 22 nt, Human
ucuuguuuuuccacuacugcua

SEQ ID NO: 2922684 - RNA, 18 nt, Human
ucuggcgacaguuuuccu

SEQ ID NO: 2922685 - RNA, 22 nt, Human
ucuggcgacaguuuuccuucuc

SEQ ID NO: 2922686 - RNA, 10 nt, Human
ucuuucacau

SEQ ID NO: 2922687 - RNA, 13 nt, Human
ucuuuuuuaugug

SEQ ID NO: 2922688 - RNA, 18 nt, Human
ugaacugauaguuacugu

SEQ ID NO: 2922689 - RNA, 19 nt, Human
ugaacugauaguuacuguu

SEQ ID NO: 2922690 - RNA, 21 nt, Human
ugaacugauaguuacuguugu

SEQ ID NO: 2922691 - RNA, 23 nt, Human
ugaacugauaguuacuguuguga

SEQ ID NO: 2922692 - RNA, 13 nt, Human
ucuagggaaauga

SEQ ID NO: 2922693 - RNA, 17 nt, Human
ucuagggaaaugaaaga

SEQ ID NO: 2922694 - RNA, 13 nt, Human
ucuaaauugaaua

SEQ ID NO: 2922695 - RNA, 17 nt, Human
ucuaaauugaauaaugg

SEQ ID NO: 2922696 - RNA, 14 nt, Human
ucuaaauugaauaa

SEQ ID NO: 2922697 - RNA, 15 nt, Human
ucuaaauugaauaau

SEQ ID NO: 2922698 - RNA, 15 nt, Human
ucuaacucagaaaca

SEQ ID NO: 2922699 - RNA, 21 nt, Human
ucggaaaccuugguguaguug

SEQ ID NO: 2922700 - RNA, 14 nt, Human
uccuuuuuguuauu

SEQ ID NO: 2922701 - RNA, 13 nt, Human
uccuuuuuguuau

SEQ ID NO: 2922702 - RNA, 17 nt, Human
ucaguuacucugaaggg

SEQ ID NO: 2922703 - RNA, 16 nt, Human
ucaguuacucugaagg

SEQ ID NO: 2922704 - RNA, 20 nt, Human
ucagugguuauuuagggaac

SEQ ID NO: 2922705 - RNA, 20 nt, Human
ucacaaguuguguuugauau

SEQ ID NO: 2922706 - RNA, 18 nt, Human
ucaaaacucauuuccuau

SEQ ID NO: 2922707 - RNA, 20 nt, Human
uauuuuaguuucuguucugu

SEQ ID NO: 2922708 - RNA, 21 nt, Human
uauuuuaguuucuguucugug

SEQ ID NO: 2922709 - RNA, 14 nt, Human
uauuuuaguuucug

SEQ ID NO: 2922710 - RNA, 16 nt, Human
uauuuuaguuucuguu

SEQ ID NO: 2922711 - RNA, 18 nt, Human
uauuuuaguuucuguucu

SEQ ID NO: 2922712 - RNA, 20 nt, Human
uauuuggaauuuauauacaa

SEQ ID NO: 2922713 - RNA, 21 nt, Human
uauuuggaauuuauauacaac

SEQ ID NO: 2922714 - RNA, 11 nt, Human
uauuuggaauu

SEQ ID NO: 2922715 - RNA, 14 nt, Human
uauuuggaauuuau

SEQ ID NO: 2922716 - RNA, 11 nt, Human
uaaaucagugg

SEQ ID NO: 2922717 - RNA, 12 nt, Human
uaaagcauucca

SEQ ID NO: 2922718 - RNA, 13 nt, Human
uaaagcauuccaa

SEQ ID NO: 2922719 - RNA, 15 nt, Human
uaaagcauuccaaca

SEQ ID NO: 2922720 - RNA, 16 nt, Human
uaaagcauuccaacaa

SEQ ID NO: 2922721 - RNA, 17 nt, Human
guuuuguuuuaaaauua

SEQ ID NO: 2922722 - RNA, 22 nt, Human
guuuucauaauaaaacuuuaaa

SEQ ID NO: 2922723 - RNA, 14 nt, Human
guuuucauaauaaa

SEQ ID NO: 2922724 - RNA, 19 nt, Human
uaaaaaacaaagaagacaa

SEQ ID NO: 2922725 - RNA, 14 nt, Human
uaaaaaacaaagaa

SEQ ID NO: 2922726 - RNA, 20 nt, Human
guuucgugaaguauacugua

SEQ ID NO: 2922727 - RNA, 17 nt, Human
uaagccaucuugguaaa

SEQ ID NO: 2922728 - RNA, 22 nt, Human
uaacucagaaacaucaguuacu

SEQ ID NO: 2922729 - RNA, 23 nt, Human
uaacuggcaguuuuccauugguu

SEQ ID NO: 2922730 - RNA, 24 nt, Human
uaacuggcaguuuuccauugguuu

SEQ ID NO: 2922731 - RNA, 17 nt, Human
uaacugcauugagaacu

SEQ ID NO: 2922732 - RNA, 12 nt, Human
uaauucucuuga

SEQ ID NO: 2922733 - RNA, 13 nt, Human
uaauucucuugaa

SEQ ID NO: 2922734 - RNA, 16 nt, Human
uaauuguauaacaggu

SEQ ID NO: 2922735 - RNA, 17 nt, Human
uaauuguauaacagguu

SEQ ID NO: 2922736 - RNA, 18 nt, Human
uaauuguauaacagguua

SEQ ID NO: 2922737 - RNA, 14 nt, Human
uaauaaagaugcuc

SEQ ID NO: 2922738 - RNA, 16 nt, Human
uaauaaagaugcucuu

SEQ ID NO: 2922739 - RNA, 17 nt, Human
uaauaaagaugcucuuu

SEQ ID NO: 2922740 - RNA, 14 nt, Human
uacaucuuucacau

SEQ ID NO: 2922741 - RNA, 12 nt, Human
uacccaagcaaa

SEQ ID NO: 2922742 - RNA, 22 nt, Human
uacuguauuuuuaccuuuuucc

SEQ ID NO: 2922743 - RNA, 14 nt, Human
uacuguugugaccu

SEQ ID NO: 2922744 - RNA, 18 nt, Human
uagauuaagagauggguu

SEQ ID NO: 2922745 - RNA, 15 nt, Human
uagaugggaaugaag

SEQ ID NO: 2922746 - RNA, 17 nt, Human
uagaugggaaugaagcu

SEQ ID NO: 2922747 - RNA, 18 nt, Human
uagaugggaaugaagcuu

SEQ ID NO: 2922748 - RNA, 19 nt, Human
uagaugggaaugaagcuug

SEQ ID NO: 2922749 - RNA, 22 nt, Human
uagaugggaaugaagcuugugu

SEQ ID NO: 2922750 - RNA, 15 nt, Human
uagauaaacucagaa

SEQ ID NO: 2922751 - RNA, 23 nt, Human
uagaugggaaugaagcuugugua

SEQ ID NO: 2922752 - RNA, 20 nt, Human
uagauguagauaaacucaga

SEQ ID NO: 2922753 - RNA, 23 nt, Human
uagauguagauaaacucagaaau

SEQ ID NO: 2922754 - RNA, 12 nt, Human
uagauaaacuca

SEQ ID NO: 2922755 - RNA, 15 nt, Human
uagcugcuacaaaga

SEQ ID NO: 2922756 - RNA, 16 nt, Human
uagcugcuacaaagaa

SEQ ID NO: 2922757 - RNA, 19 nt, Human
uagcugcuacaaagaagac

SEQ ID NO: 2922758 - RNA, 20 nt, Human
uagcugcuacaaagaagaca

SEQ ID NO: 2922759 - RNA, 23 nt, Human
uagcugcuacaaagaagacaugu

SEQ ID NO: 2922760 - RNA, 21 nt, Human
uagcugcuacaaagaagacau

SEQ ID NO: 2922761 - RNA, 12 nt, Human
uagcugcuacaa

SEQ ID NO: 2922762 - RNA, 13 nt, Human
uagcugcuacaaa

SEQ ID NO: 2922763 - RNA, 20 nt, Human
uaggaacgguaaauuucugu

SEQ ID NO: 2922764 - RNA, 18 nt, Human
uaguuucuguucugugga

SEQ ID NO: 2922765 - RNA, 14 nt, Human
uaguuucuguucug

SEQ ID NO: 2922766 - RNA, 15 nt, Human
uaguuucuguucugu

SEQ ID NO: 2922767 - RNA, 16 nt, Human
uaguuucuguucugug

SEQ ID NO: 2922768 - RNA, 17 nt, Human
uaguuucuguucugugg

SEQ ID NO: 2922769 - RNA, 19 nt, Human
uauauacaaccugcuuggg

SEQ ID NO: 2922770 - RNA, 20 nt, Human
uauauacaaccugcuugggu

SEQ ID NO: 2922771 - RNA, 17 nt, Human
uaucauguguaaucaau

SEQ ID NO: 2922772 - RNA, 11 nt, Human
uaucaugugua

SEQ ID NO: 2922773 - RNA, 13 nt, Human
uaucauguguaau

SEQ ID NO: 2922774 - RNA, 14 nt, Human
uaucauguguaauc

SEQ ID NO: 2922775 - RNA, 16 nt, Human
gggugaugccagguuc

SEQ ID NO: 2922776 - RNA, 16 nt, Human
gguagccaucauggau

SEQ ID NO: 2922777 - RNA, 13 nt, Human
gguucuucccuuu

SEQ ID NO: 2922778 - RNA, 20 nt, Human
gguuauuuagggaacugcuu

SEQ ID NO: 2922779 - RNA, 17 nt, Human
gguuauuuuaguuucug

SEQ ID NO: 2922780 - RNA, 19 nt, Human
gguuauuuuaguuucuguu

SEQ ID NO: 2922781 - RNA, 23 nt, Human
gguuauuuuaguuucuguucugu

SEQ ID NO: 2922782 - RNA, 19 nt, Human
gguuacaacagauuuguga

SEQ ID NO: 2922783 - RNA, 21 nt, Human
gguuacaacagauuugugaac

SEQ ID NO: 2922784 - RNA, 14 nt, Human
gguuacaacagauu

SEQ ID NO: 2922785 - RNA, 13 nt, Human
gguuacaacagau

SEQ ID NO: 2922786 - RNA, 14 nt, Human
gguuauaaaaguga

SEQ ID NO: 2922787 - RNA, 13 nt, Human
gggcaucaugcau

SEQ ID NO: 2922788 - RNA, 14 nt, Human
gggaaugaagcuug

SEQ ID NO: 2922789 - RNA, 24 nt, Human
gggaaugaagcuuguguauccauu

SEQ ID NO: 2922790 - RNA, 12 nt, Human
gggaaggucacc

SEQ ID NO: 2922791 - RNA, 20 nt, Human
ggaacgguaaauuucugugg

SEQ ID NO: 2922792 - RNA, 17 nt, Human
ggaaaguguaaagcauu

SEQ ID NO: 2922793 - RNA, 13 nt, Human
ggaaaguguaaag

SEQ ID NO: 2922794 - RNA, 14 nt, Human
ggaaaguguaaagc

SEQ ID NO: 2922795 - RNA, 15 nt, Human
ggaaaguguaaagca

SEQ ID NO: 2922796 - RNA, 16 nt, Human
ggaaaguguaaagcau

SEQ ID NO: 2922797 - RNA, 12 nt, Human
gcuguguaaagu

SEQ ID NO: 2922798 - RNA, 11 nt, Human
gcuguguaaag

SEQ ID NO: 2922799 - RNA, 13 nt, Human
gcuguguaaaguu

SEQ ID NO: 2922800 - RNA, 14 nt, Human
gcuguguaaaguua

SEQ ID NO: 2922801 - RNA, 15 nt, Human
gcuguguaaaguuag

SEQ ID NO: 2922802 - RNA, 16 nt, Human
gcuguguaaaguuagu

SEQ ID NO: 2922803 - RNA, 19 nt, Human
gcuguguaaaguuagucua

SEQ ID NO: 2922804 - RNA, 17 nt, Human
gcuguguaaaguuaguc

SEQ ID NO: 2922805 - RNA, 18 nt, Human
gcuguguaaaguuagucu

SEQ ID NO: 2922806 - RNA, 15 nt, Human
ggacuguauuuguga

SEQ ID NO: 2922807 - RNA, 11 nt, Human
gccagagaagu

SEQ ID NO: 2922808 - RNA, 13 nt, Human
gccagagaaguga

SEQ ID NO: 2922809 - RNA, 10 nt, Human
gccagagaag

SEQ ID NO: 2922810 - RNA, 18 nt, Human
gccagagaagugacaggg

SEQ ID NO: 2922811 - RNA, 19 nt, Human
gccagagaagugacaggga

SEQ ID NO: 2922812 - RNA, 14 nt, Human
gccagagaagugac

SEQ ID NO: 2922813 - RNA, 15 nt, Human
gccagagaagugaca

SEQ ID NO: 2922814 - RNA, 16 nt, Human
gccagagaagugacag

SEQ ID NO: 2922815 - RNA, 17 nt, Human
gccagagaagugacagg

SEQ ID NO: 2922816 - RNA, 23 nt, Human
gccauugucuucggaaaccuugg

SEQ ID NO: 2922817 - RNA, 22 nt, Human
gccauugucuucggaaaccuug

SEQ ID NO: 2922818 - RNA, 17 nt, Human
gcauuccaacaaagggu

SEQ ID NO: 2922819 - RNA, 18 nt, Human
gcauuccaacaaaggguu

SEQ ID NO: 2922820 - RNA, 15 nt, Human
gccaaacagccacac

SEQ ID NO: 2922821 - RNA, 21 nt, Human
gcauauguuucgcugauauau

SEQ ID NO: 2922822 - RNA, 14 nt, Human
gcaggagccugagc

SEQ ID NO: 2922823 - RNA, 16 nt, Human
gauugcuaaauguaac

SEQ ID NO: 2922824 - RNA, 20 nt, Human
gauugcuaaauguaacaguc

SEQ ID NO: 2922825 - RNA, 17 nt, Human
gauuguuugcucugaga

SEQ ID NO: 2922826 - RNA, 20 nt, Human
gauaguuacuguugugaccu

SEQ ID NO: 2922827 - RNA, 12 nt, Human
gauaguuacugu

SEQ ID NO: 2922828 - RNA, 14 nt, Human
gauaguuacuguug

SEQ ID NO: 2922829 - RNA, 17 nt, Human
gauaguuacuguuguga

SEQ ID NO: 2922830 - RNA, 17 nt, Human
gauaauaugagaaucag

SEQ ID NO: 2922831 - RNA, 22 nt, Human
gauaaaauuauagaugggaaug

SEQ ID NO: 2922832 - RNA, 19 nt, Human
gauaaaauuauagauggga

SEQ ID NO: 2922833 - RNA, 14 nt, Human
gaacucagccaagc

SEQ ID NO: 2922834 - RNA, 15 nt, Human
gaacucagccaagca

SEQ ID NO: 2922835 - RNA, 16 nt, Human
gaacucagccaagcac

SEQ ID NO: 2922836 - RNA, 17 nt, Human
gaacucagccaagcaca

SEQ ID NO: 2922837 - RNA, 18 nt, Human
gaacucagccaagcacag

SEQ ID NO: 2922838 - RNA, 19 nt, Human
gaacucagccaagcacagu

SEQ ID NO: 2922839 - RNA, 20 nt, Human
gaacucagccaagcacagug

SEQ ID NO: 2922840 - RNA, 24 nt, Human
gaacucagccaagcacaguggugg

SEQ ID NO: 2922841 - RNA, 20 nt, Human
gaaugaagcuuguguaucca

SEQ ID NO: 2922842 - RNA, 16 nt, Human
gaaugaagcuugugua

SEQ ID NO: 2922843 - RNA, 18 nt, Human
gaaugaagcuuguguauc

SEQ ID NO: 2922844 - RNA, 16 nt, Human
gaaugguuauaaaagu

SEQ ID NO: 2922845 - RNA, 17 nt, Human
gaaugguuauaaaagug

SEQ ID NO: 2922846 - RNA, 13 nt, Human
gaaugguuauaaa

SEQ ID NO: 2922847 - RNA, 16 nt, Human
gaauuccuucagggug

SEQ ID NO: 2922848 - RNA, 17 nt, Human
gaauuccuucaggguga

SEQ ID NO: 2922849 - RNA, 22 nt, Human
gaauuuauauacaaccugcuug

SEQ ID NO: 2922850 - RNA, 22 nt, Human
gacaguuuuccuucucaucugu

SEQ ID NO: 2922851 - RNA, 16 nt, Human
cuuaaauuuuaauuua

SEQ ID NO: 2922852 - RNA, 22 nt, Human
cuuaacuuaaauuuuaauuuau

SEQ ID NO: 2922853 - RNA, 23 nt, Human
cuuaagccaucuugguaaauuuc

SEQ ID NO: 2922854 - RNA, 20 nt, Human
cuuaagccaucuugguaaau

SEQ ID NO: 2922855 - RNA, 22 nt, Human
cuuaagccaucuugguaaauuu

SEQ ID NO: 2922856 - RNA, 15 nt, Human
cuuaagccaucuugg

SEQ ID NO: 2922857 - RNA, 16 nt, Human
cuuaagccaucuuggu

SEQ ID NO: 2922858 - RNA, 17 nt, Human
cuuaagccaucuuggua

SEQ ID NO: 2922859 - RNA, 19 nt, Human
cuuaagccaucuugguaaa

SEQ ID NO: 2922860 - RNA, 14 nt, Human
cuguuucucugcug

SEQ ID NO: 2922861 - RNA, 13 nt, Human
cuguuucucugcu

SEQ ID NO: 2922862 - RNA, 14 nt, Human
cuucccuuuuacau

SEQ ID NO: 2922863 - RNA, 15 nt, Human
cuucccucacaccgc

SEQ ID NO: 2922864 - RNA, 18 nt, Human
cuucagggugaugccagg

SEQ ID NO: 2922865 - RNA, 15 nt, Human
cucauucaaaaguug

SEQ ID NO: 2922866 - RNA, 19 nt, Human
cucauucaaaaguugaaau

SEQ ID NO: 2922867 - RNA, 15 nt, Human
cuccacagcuaccuc

SEQ ID NO: 2922868 - RNA, 12 nt, Human
cucucaguuuuu

SEQ ID NO: 2922869 - RNA, 18 nt, Human
cucuccuguacuuuuucc

SEQ ID NO: 2922870 - RNA, 22 nt, Human
cucuguuccuucacauccugug

SEQ ID NO: 2922871 - RNA, 16 nt, Human
cucuguuccuucacau

SEQ ID NO: 2922872 - RNA, 12 nt, Human
cugaauaaaugu

SEQ ID NO: 2922873 - RNA, 13 nt, Human
cugaauaaauguc

SEQ ID NO: 2922874 - RNA, 15 nt, Human
cugaauaaaugucuu

SEQ ID NO: 2922875 - RNA, 18 nt, Human
cugaauacauucugcuuu

SEQ ID NO: 2922876 - RNA, 16 nt, Human
cugaauacauucugcu

SEQ ID NO: 2922877 - RNA, 19 nt, Human
cugaagguaaaauugaaag

SEQ ID NO: 2922878 - RNA, 22 nt, Human
cugaucgugacgcugaauaaau

SEQ ID NO: 2922879 - RNA, 14 nt, Human
cugaucgugacgcu

SEQ ID NO: 2922880 - RNA, 21 nt, Human
cugaucgugacgcugaauaaa

SEQ ID NO: 2922881 - RNA, 21 nt, Human
cugauaguuacuguugugacc

SEQ ID NO: 2922882 - RNA, 22 nt, Human
cugauaguuacuguugugaccu

SEQ ID NO: 2922883 - RNA, 16 nt, Human
cugauaguuacuguug

SEQ ID NO: 2922884 - RNA, 17 nt, Human
cugauaguuacuguugu

SEQ ID NO: 2922885 - RNA, 18 nt, Human
cugauaguuacuguugug

SEQ ID NO: 2922886 - RNA, 19 nt, Human
cugauaguuacuguuguga

SEQ ID NO: 2922887 - RNA, 15 nt, Human
cugauaguuacuguu

SEQ ID NO: 2922888 - RNA, 17 nt, Human
ccuauggggauggucca

SEQ ID NO: 2922889 - RNA, 20 nt, Human
cccuguccccucccccuucc

SEQ ID NO: 2922890 - RNA, 12 nt, Human
ccuucaggguga

SEQ ID NO: 2922891 - RNA, 18 nt, Human
ccuucagggugaugccag

SEQ ID NO: 2922892 - RNA, 19 nt, Human
ccuucagggugaugccagg

SEQ ID NO: 2922893 - RNA, 20 nt, Human
ccuucagggugaugccaggu

SEQ ID NO: 2922894 - RNA, 21 nt, Human
ccugcuuggguggagaagcca

SEQ ID NO: 2922895 - RNA, 22 nt, Human
ccugcuuggguggagaagccau

SEQ ID NO: 2922896 - RNA, 23 nt, Human
ccugcuuggguggagaagccauu

SEQ ID NO: 2922897 - RNA, 20 nt, Human
ccugcuuggguggagaagcc

SEQ ID NO: 2922898 - RNA, 17 nt, Human
cgugaaguauacuguau

SEQ ID NO: 2922899 - RNA, 14 nt, Human
cgauuuaauucucu

SEQ ID NO: 2922900 - RNA, 15 nt, Human
cgauuuaauucucuu

SEQ ID NO: 2922901 - RNA, 18 nt, Human
cgauuuaauucucuugaa

SEQ ID NO: 2922902 - RNA, 17 nt, Human
cggaaaccuugguguag

SEQ ID NO: 2922903 - RNA, 16 nt, Human
ccaaacagccacacug

SEQ ID NO: 2922904 - RNA, 21 nt, Human
cauuugcgaaugguuccauuc

SEQ ID NO: 2922905 - RNA, 13 nt, Human
cauugucuucgga

SEQ ID NO: 2922906 - RNA, 23 nt, Human
cauugucuucggaaaccuuggug

SEQ ID NO: 2922907 - RNA, 19 nt, Human
cauuuccuauguaacugca

SEQ ID NO: 2922908 - RNA, 17 nt, Human
cauuuccuauguaacug

SEQ ID NO: 2922909 - RNA, 14 nt, Human
ccaaguuuauauac

SEQ ID NO: 2922910 - RNA, 24 nt, Human
ccaagggaguuaggcuauucacaa

SEQ ID NO: 2922911 - RNA, 16 nt, Human
ccaagcacaguggugg

SEQ ID NO: 2922912 - RNA, 19 nt, Human
ccaagcacagugguggcag

SEQ ID NO: 2922913 - RNA, 20 nt, Human
ccaagcacagugguggcagg

SEQ ID NO: 2922914 - RNA, 21 nt, Human
ccaagcacagugguggcaggg

SEQ ID NO: 2922915 - RNA, 22 nt, Human
ccaagcacagugguggcagggc

SEQ ID NO: 2922916 - RNA, 23 nt, Human
ccaagcacagugguggcagggcc

SEQ ID NO: 2922917 - RNA, 17 nt, Human
ccaagcaaaaucaugga

SEQ ID NO: 2922918 - RNA, 22 nt, Human
ccaacaaaggguuuuaauguag

SEQ ID NO: 2922919 - RNA, 21 nt, Human
ccaacaaaggguuuuaaugua

SEQ ID NO: 2922920 - RNA, 13 nt, Human
ccaaagccaccag

SEQ ID NO: 2922921 - RNA, 22 nt, Human
ccaaagccaccagacugacaaa

SEQ ID NO: 2922922 - RNA, 24 nt, Human
ccaugcuguugauugcuaaaugua

SEQ ID NO: 2922923 - RNA, 21 nt, Human
ccaugcuguugauugcuaaau

SEQ ID NO: 2922924 - RNA, 22 nt, Human
ccaugcuguugauugcuaaaug

SEQ ID NO: 2922925 - RNA, 20 nt, Human
ccaugcuguugauugcuaaa

SEQ ID NO: 2922926 - RNA, 12 nt, Human
ccccaacagugu

SEQ ID NO: 2922927 - RNA, 18 nt, Human
ggcgacaguuuuccuucu

SEQ ID NO: 2922928 - RNA, 21 nt, Human
ggaucugguagggggaaaaug

SEQ ID NO: 2922929 - RNA, 16 nt, Human
ggauguacauuuccaa

SEQ ID NO: 2922930 - RNA, 17 nt, Human
gguaccagauaaaauua

SEQ ID NO: 2922931 - RNA, 13 nt, Human
ggguuuuaaugua

SEQ ID NO: 2922932 - RNA, 17 nt, Human
aaagacaaauucuguuu

SEQ ID NO: 2922933 - RNA, 16 nt, Human
aaagacaaauucuguu

SEQ ID NO: 2922934 - RNA, 22 nt, Human
aaagacaaauucuguuucuuga

SEQ ID NO: 2922935 - RNA, 19 nt, Human
aaagacaaauucuguuucu

SEQ ID NO: 2922936 - RNA, 14 nt, Human
aaagauuucuugag

SEQ ID NO: 2922937 - RNA, 11 nt, Human
aaaguguaaag

SEQ ID NO: 2922938 - RNA, 12 nt, Human
aaaguguaaagc

SEQ ID NO: 2922939 - RNA, 13 nt, Human
aaaguguaaagca

SEQ ID NO: 2922940 - RNA, 15 nt, Human
aaaguguaaagcauu

SEQ ID NO: 2922941 - RNA, 16 nt, Human
aaaguguaaagcauuc

SEQ ID NO: 2922942 - RNA, 17 nt, Human
aaaguguaaagcauucc

SEQ ID NO: 2922943 - RNA, 18 nt, Human
aaaguguaaagcauucca

SEQ ID NO: 2922944 - RNA, 22 nt, Human
aaaguguaaagcauuccaacaa

SEQ ID NO: 2922945 - RNA, 16 nt, Human
guaaagcauuccaaca

SEQ ID NO: 2922946 - RNA, 23 nt, Human
aaacaucaguuacucugaagggc

SEQ ID NO: 2922947 - RNA, 22 nt, Human
aaacaucaguuacucugaaggg

SEQ ID NO: 2922948 - RNA, 20 nt, Human
aaacaucaguuacucugaag

SEQ ID NO: 2922949 - RNA, 19 nt, Human
aaacaucaguuacucugaa

SEQ ID NO: 2922950 - RNA, 16 nt, Human
aaacaucaguuacucu

SEQ ID NO: 2922951 - RNA, 23 nt, Human
gggccuagcugcuacaaagaaga

SEQ ID NO: 2922952 - RNA, 18 nt, Human
aaaagggauuacccaagc

SEQ ID NO: 2922953 - RNA, 15 nt, Human
gggauuacccaagca

SEQ ID NO: 2922954 - RNA, 16 nt, Human
gggauuacccaagcaa

SEQ ID NO: 2922955 - RNA, 22 nt, Human
aaaacucgaggacuguauuugu

SEQ ID NO: 2922956 - RNA, 16 nt, Human
gggaagcuacagguua

SEQ ID NO: 2922957 - RNA, 14 nt, Human
gcuacaaagaagac

SEQ ID NO: 2922958 - RNA, 15 nt, Human
gcuacaaagaagaca

SEQ ID NO: 2922959 - RNA, 16 nt, Human
gcuacaaagaagacau

SEQ ID NO: 2922960 - RNA, 17 nt, Human
gcuacaaagaagacaug

SEQ ID NO: 2922961 - RNA, 18 nt, Human
gcuacaaagaagacaugu

SEQ ID NO: 2922962 - RNA, 19 nt, Human
gcuacaaagaagacauguu

SEQ ID NO: 2922963 - RNA, 20 nt, Human
gcuacaaagaagacauguuu

SEQ ID NO: 2922964 - RNA, 22 nt, Human
gcuacaaagaagacauguuuua

SEQ ID NO: 2922965 - RNA, 20 nt, Human
gcgagaaccuaaguuucagu

SEQ ID NO: 2922966 - RNA, 15 nt, Human
ggaaaugaaagaaag

SEQ ID NO: 2922967 - RNA, 15 nt, Human
ggaaaccuuggugua

SEQ ID NO: 2922968 - RNA, 22 nt, Human
ggaaacaaagcuuagcaggaga

SEQ ID NO: 2922969 - RNA, 23 nt, Human
ggaaacaaagcuuagcaggagag

SEQ ID NO: 2922970 - RNA, 14 nt, Human
ggaaacaaagcuua

SEQ ID NO: 2922971 - RNA, 13 nt, Human
gcuguauucuucu

SEQ ID NO: 2922972 - RNA, 18 nt, Human
gcuuaaugacacuagcua

SEQ ID NO: 2922973 - RNA, 12 nt, Human
gcugaauaaaug

SEQ ID NO: 2922974 - RNA, 18 nt, Human
gcugaauaaaugucuuuu

SEQ ID NO: 2922975 - RNA, 13 nt, Human
gcugaauaaaugu

SEQ ID NO: 2922976 - RNA, 14 nt, Human
gcugaauaaauguc

SEQ ID NO: 2922977 - RNA, 16 nt, Human
gcugaauaaaugucuu

SEQ ID NO: 2922978 - RNA, 17 nt, Human
gcugaauaaaugucuuu

SEQ ID NO: 2922979 - RNA, 14 nt, Human
gauuacccaagcaa

SEQ ID NO: 2922980 - RNA, 21 nt, Human
gauuacccaagcaaaaucaug

SEQ ID NO: 2922981 - RNA, 20 nt, Human
gcaagugaauuuuucucuaa

SEQ ID NO: 2922982 - RNA, 20 nt, Human
gagaaucagaucauuucaaa

SEQ ID NO: 2922983 - RNA, 24 nt, Human
gagaagugacagggaagcuacagg

SEQ ID NO: 2922984 - RNA, 21 nt, Human
gagaagugacagggaagcuac

SEQ ID NO: 2922985 - RNA, 23 nt, Human
gagaagugacagggaagcuacag

SEQ ID NO: 2922986 - RNA, 15 nt, Human
gagaagugacaggga

SEQ ID NO: 2922987 - RNA, 16 nt, Human
gagaagugacagggaa

SEQ ID NO: 2922988 - RNA, 17 nt, Human
gagaagugacagggaag

SEQ ID NO: 2922989 - RNA, 19 nt, Human
gagaagugacagggaagcu

SEQ ID NO: 2922990 - RNA, 14 nt, Human
gaauuuuucucuaa

SEQ ID NO: 2922991 - RNA, 14 nt, Human
gaagcuacagguua

SEQ ID NO: 2922992 - RNA, 15 nt, Human
gaagcuacagguuac

SEQ ID NO: 2922993 - RNA, 19 nt, Human
gaagcuacagguuacaaca

SEQ ID NO: 2922994 - RNA, 21 nt, Human
gaagcuacagguuacaacaga

SEQ ID NO: 2922995 - RNA, 22 nt, Human
gaagcuacagguuacaacagau

SEQ ID NO: 2922996 - RNA, 23 nt, Human
gaagcuacagguuacaacagauu

SEQ ID NO: 2922997 - RNA, 22 nt, Human
gaagugacagggaagcuacagg

SEQ ID NO: 2922998 - RNA, 20 nt, Human
gaagugacagggaagcuaca

SEQ ID NO: 2922999 - RNA, 21 nt, Human
gaagugacagggaagcuacag

SEQ ID NO: 2923000 - RNA, 13 nt, Human
gaagugacaggga

SEQ ID NO: 2923001 - RNA, 14 nt, Human
gaagugacagggaa

SEQ ID NO: 2923002 - RNA, 15 nt, Human
gaagugacagggaag

SEQ ID NO: 2923003 - RNA, 18 nt, Human
gaagugacagggaagcua

SEQ ID NO: 2923004 - RNA, 12 nt, Human
gaagugacaggg

SEQ ID NO: 2923005 - RNA, 18 nt, Human
gaagggcaucaugcaucu

SEQ ID NO: 2923006 - RNA, 20 nt, Human
cugucacuguuucucugcug

SEQ ID NO: 2923007 - RNA, 19 nt, Human
cugucacuguuucucugcu

SEQ ID NO: 2923008 - RNA, 14 nt, Human
cugucacuguuucu

SEQ ID NO: 2923009 - RNA, 20 nt, Human
cugcuacaaagaagacaugu

SEQ ID NO: 2923010 - RNA, 22 nt, Human
cugcuacaaagaagacauguuu

SEQ ID NO: 2923011 - RNA, 15 nt, Human
cugcuacaaagaaga

SEQ ID NO: 2923012 - RNA, 17 nt, Human
cugcuacaaagaagaca

SEQ ID NO: 2923013 - RNA, 18 nt, Human
cugcuacaaagaagacau

SEQ ID NO: 2923014 - RNA, 19 nt, Human
cugcuacaaagaagacaug

SEQ ID NO: 2923015 - RNA, 12 nt, Human
cugcuacaaaga

SEQ ID NO: 2923016 - RNA, 17 nt, Human
cugcauugagaacugca

SEQ ID NO: 2923017 - RNA, 19 nt, Human
cagaucauuucaaaacuca

SEQ ID NO: 2923018 - RNA, 18 nt, Human
cagggugaugccagguuc

SEQ ID NO: 2923019 - RNA, 15 nt, Human
cagggugaugccagg

SEQ ID NO: 2923020 - RNA, 16 nt, Human
cagggugaugccaggu

SEQ ID NO: 2923021 - RNA, 23 nt, Human
ccaccagacugacaaauguguau

SEQ ID NO: 2923022 - RNA, 17 nt, Human
cauuuccaaauucacaa

SEQ ID NO: 2923023 - RNA, 13 nt, Human
caucuuacugaag

SEQ ID NO: 2923024 - RNA, 15 nt, Human
caucuuacugaaggu

SEQ ID NO: 2923025 - RNA, 14 nt, Human
caucuuacugaagg

SEQ ID NO: 2923026 - RNA, 19 nt, Human
cacugacacaaaaaguaga

SEQ ID NO: 2923027 - RNA, 18 nt, Human
auuguuggcacauccuau

SEQ ID NO: 2923028 - RNA, 17 nt, Human
auuagccacaaaauugg

SEQ ID NO: 2923029 - RNA, 20 nt, Human
auuagcuuuacuguuuguua

SEQ ID NO: 2923030 - RNA, 15 nt, Human
auuagcuuuacuguu

SEQ ID NO: 2923031 - RNA, 23 nt, Human
auuugauucuguguguuuucaua

SEQ ID NO: 2923032 - RNA, 15 nt, Human
auuugcgaaugguuc

SEQ ID NO: 2923033 - RNA, 13 nt, Human
caaacagccacac

SEQ ID NO: 2923034 - RNA, 15 nt, Human
caaaugcuguauucu

SEQ ID NO: 2923035 - RNA, 20 nt, Human
cgugacgcugaauaaauguc

SEQ ID NO: 2923036 - RNA, 14 nt, Human
cgugacgcugaaua

SEQ ID NO: 2923037 - RNA, 16 nt, Human
cgugacgcugaauaaa

SEQ ID NO: 2923038 - RNA, 19 nt, Human
cgugacgcugaauaaaugu

SEQ ID NO: 2923039 - RNA, 19 nt, Human
cuacaaagaagacauguuu

SEQ ID NO: 2923040 - RNA, 20 nt, Human
cuacaaagaagacauguuuu

SEQ ID NO: 2923041 - RNA, 14 nt, Human
cuacaaagaagaca

SEQ ID NO: 2923042 - RNA, 15 nt, Human
cuacaaagaagacau

SEQ ID NO: 2923043 - RNA, 16 nt, Human
cuacaaagaagacaug

SEQ ID NO: 2923044 - RNA, 18 nt, Human
cuacaaagaagacauguu

SEQ ID NO: 2923045 - RNA, 22 nt, Human
cuaauuguauaacagguuauuu

SEQ ID NO: 2923046 - RNA, 19 nt, Human
cuaauuguauaacagguua

SEQ ID NO: 2923047 - RNA, 20 nt, Human
cuaauuguauaacagguuau

SEQ ID NO: 2923048 - RNA, 13 nt, Human
cuaauuguauaac

SEQ ID NO: 2923049 - RNA, 15 nt, Human
cuaauuguauaacag

SEQ ID NO: 2923050 - RNA, 16 nt, Human
cuaauuguauaacagg

SEQ ID NO: 2923051 - RNA, 17 nt, Human
cuaauuguauaacaggu

SEQ ID NO: 2923052 - RNA, 18 nt, Human
cuaauuguauaacagguu

SEQ ID NO: 2923053 - RNA, 12 nt, Human
cgaccucggugg

SEQ ID NO: 2923054 - RNA, 13 nt, Human
ccuuuuuccuucc

SEQ ID NO: 2923055 - RNA, 21 nt, Human
cucugaagaguggguuucaca

SEQ ID NO: 2923056 - RNA, 13 nt, Human
cucugaagagugg

SEQ ID NO: 2923057 - RNA, 23 nt, Human
cucugaagaguggguuucacaag

SEQ ID NO: 2923058 - RNA, 22 nt, Human
cucugaagaguggguuucacaa

SEQ ID NO: 2923059 - RNA, 15 nt, Human
cugaagguaaaauug

SEQ ID NO: 2923060 - RNA, 17 nt, Human
cugaagguaaaauugaa

SEQ ID NO: 2923061 - RNA, 21 nt, Human
augaauuuuuuucaucuucuc

SEQ ID NO: 2923062 - RNA, 13 nt, Human
auccuaugcaaua

SEQ ID NO: 2923063 - RNA, 15 nt, Human
aucuuacugaaggua

SEQ ID NO: 2923064 - RNA, 14 nt, Human
aucuuacugaaggu

SEQ ID NO: 2923065 - RNA, 20 nt, Human
aucugguagggggaaaaugu

SEQ ID NO: 2923066 - RNA, 16 nt, Human
uuuauuacaucuuuca

SEQ ID NO: 2923067 - RNA, 18 nt, Human
uuuccccaacagugugaa

SEQ ID NO: 2923068 - RNA, 19 nt, Human
uuuccccaacagugugaag

SEQ ID NO: 2923069 - RNA, 14 nt, Human
uuuccccaacagug

SEQ ID NO: 2923070 - RNA, 15 nt, Human
uuuccccaacagugu

SEQ ID NO: 2923071 - RNA, 15 nt, Human
augcauaaagucagu

SEQ ID NO: 2923072 - RNA, 13 nt, Human
uuuaauucucuug

SEQ ID NO: 2923073 - RNA, 11 nt, Human
uuuaauucucu

SEQ ID NO: 2923074 - RNA, 23 nt, Human
uuuaauucauguuucuuaaaugg

SEQ ID NO: 2923075 - RNA, 16 nt, Human
uuuaauucauguuucu

SEQ ID NO: 2923076 - RNA, 14 nt, Human
uuuaauucauguuu

SEQ ID NO: 2923077 - RNA, 14 nt, Human
uugugacuaauugu

SEQ ID NO: 2923078 - RNA, 16 nt, Human
uugugacuaauuguau

SEQ ID NO: 2923079 - RNA, 20 nt, Human
uugugacuaauuguauaaca

SEQ ID NO: 2923080 - RNA, 22 nt, Human
uugugacuaauuguauaacagg

SEQ ID NO: 2923081 - RNA, 23 nt, Human
uugugacuaauuguauaacaggu

SEQ ID NO: 2923082 - RNA, 20 nt, Human
uugugaccugaaguucacca

SEQ ID NO: 2923083 - RNA, 19 nt, Human
aucaauaaacgauuuaauu

SEQ ID NO: 2923084 - RNA, 14 nt, Human
aucaauaaacgauu

SEQ ID NO: 2923085 - RNA, 15 nt, Human
aucaauaaacgauuu

SEQ ID NO: 2923086 - RNA, 21 nt, Human
uucccuuuuacauacugcugu

SEQ ID NO: 2923087 - RNA, 19 nt, Human
uucccuuuuacauacugcu

SEQ ID NO: 2923088 - RNA, 18 nt, Human
uucccuuuuacauacugc

SEQ ID NO: 2923089 - RNA, 17 nt, Human
uucccuuuuacauacug

SEQ ID NO: 2923090 - RNA, 17 nt, Human
uuccuucacauccugug

SEQ ID NO: 2923091 - RNA, 17 nt, Human
uuaguuuuuguaauuua

SEQ ID NO: 2923092 - RNA, 18 nt, Human
uuaguuuuuguaauuuau

SEQ ID NO: 2923093 - RNA, 17 nt, Human
uucaaaaguugaaauua

SEQ ID NO: 2923094 - RNA, 16 nt, Human
uucaaaaguugaaauu

SEQ ID NO: 2923095 - RNA, 19 nt, Human
uucacauccuguguuucua

SEQ ID NO: 2923096 - RNA, 21 nt, Human
uucacauccuguguuucuagg

SEQ ID NO: 2923097 - RNA, 15 nt, Human
auaguucaaagccaa

SEQ ID NO: 2923098 - RNA, 16 nt, Human
auaguuacuguuguga

SEQ ID NO: 2923099 - RNA, 12 nt, Human
auaguuacuguu

SEQ ID NO: 2923100 - RNA, 18 nt, Human
auauaucuaaauugaaua

SEQ ID NO: 2923101 - RNA, 19 nt, Human
auauaucuaaauugaauaa

SEQ ID NO: 2923102 - RNA, 18 nt, Human
auuuggaauuuauauaca

SEQ ID NO: 2923103 - RNA, 16 nt, Human
auuuagggaacugcuu

SEQ ID NO: 2923104 - RNA, 18 nt, Human
auuuagggaacugcuuga

SEQ ID NO: 2923105 - RNA, 20 nt, Human
auuuuauuacaucuuucaca

SEQ ID NO: 2923106 - RNA, 21 nt, Human
auuuuacaauugaaaugacua

SEQ ID NO: 2923107 - RNA, 17 nt, Human
auuuuacaauugaaaug

SEQ ID NO: 2923108 - RNA, 13 nt, Human
auuuuacaauuga

SEQ ID NO: 2923109 - RNA, 12 nt, Human
auuuuaauuuau

SEQ ID NO: 2923110 - RNA, 13 nt, Human
auuguauaacagg

SEQ ID NO: 2923111 - RNA, 14 nt, Human
auuguauaacaggu

SEQ ID NO: 2923112 - RNA, 15 nt, Human
auuguauaacagguu

SEQ ID NO: 2923113 - RNA, 16 nt, Human
auuguauaacagguua

SEQ ID NO: 2923114 - RNA, 17 nt, Human
auuguauaacagguuau

SEQ ID NO: 2923115 - RNA, 18 nt, Human
auuguauaacagguuauu

SEQ ID NO: 2923116 - RNA, 13 nt, Human
auugcuaaaugua

SEQ ID NO: 2923117 - RNA, 14 nt, Human
auugcuaaauguaa

SEQ ID NO: 2923118 - RNA, 16 nt, Human
auugcuaaauguaaca

SEQ ID NO: 2923119 - RNA, 17 nt, Human
auugcuaaauguaacag

SEQ ID NO: 2923120 - RNA, 18 nt, Human
auugcuaaauguaacagu

SEQ ID NO: 2923121 - RNA, 23 nt, Human
auugucuucggaaaccuuggugu

SEQ ID NO: 2923122 - RNA, 18 nt, Human
auugucuucggaaaccuu

SEQ ID NO: 2923123 - RNA, 20 nt, Human
auugucuucggaaaccuugg

SEQ ID NO: 2923124 - RNA, 16 nt, Human
auucaaaaguugaaau

SEQ ID NO: 2923125 - RNA, 21 nt, Human
auuauagaugggaaugaagcu

SEQ ID NO: 2923126 - RNA, 21 nt, Human
auuaucauguguaaucaauaa

SEQ ID NO: 2923127 - RNA, 22 nt, Human
auuaucauguguaaucaauaaa

SEQ ID NO: 2923128 - RNA, 15 nt, Human
auuaucaugcaaaug

SEQ ID NO: 2923129 - RNA, 17 nt, Human
auuaucaugcaaaugcu

SEQ ID NO: 2923130 - RNA, 12 nt, Human
auuaucaugugu

SEQ ID NO: 2923131 - RNA, 13 nt, Human
auuaucaugugua

SEQ ID NO: 2923132 - RNA, 14 nt, Human
auuaucauguguaa

SEQ ID NO: 2923133 - RNA, 16 nt, Human
auuaucauguguaauc

SEQ ID NO: 2923134 - RNA, 17 nt, Human
auuaucauguguaauca

SEQ ID NO: 2923135 - RNA, 19 nt, Human
auuaucauguguaaucaau

SEQ ID NO: 2923136 - RNA, 22 nt, Human
uuuuaguuucuguucuguggaa

SEQ ID NO: 2923137 - RNA, 20 nt, Human
uuuuaguuucuguucugugg

SEQ ID NO: 2923138 - RNA, 21 nt, Human
uuuuaguuucuguucugugga

SEQ ID NO: 2923139 - RNA, 18 nt, Human
uuuuaguuucuguucugu

SEQ ID NO: 2923140 - RNA, 19 nt, Human
uuuuaguuucuguucugug

SEQ ID NO: 2923141 - RNA, 15 nt, Human
auuaaccauagaugu

SEQ ID NO: 2923142 - RNA, 18 nt, Human
auuaaagcuaaaguaucu

SEQ ID NO: 2923143 - RNA, 17 nt, Human
auuaaagcuaaaguauc

SEQ ID NO: 2923144 - RNA, 18 nt, Human
auguuuucuuugcuuuaa

SEQ ID NO: 2923145 - RNA, 22 nt, Human
auuaaaagggauuacccaagca

SEQ ID NO: 2923146 - RNA, 20 nt, Human
uuacugaagguaaaauugaa

SEQ ID NO: 2923147 - RNA, 19 nt, Human
uuacugaagguaaaauuga

SEQ ID NO: 2923148 - RNA, 18 nt, Human
uuacugaagguaaaauug

SEQ ID NO: 2923149 - RNA, 13 nt, Human
uuacucugaaggg

SEQ ID NO: 2923150 - RNA, 22 nt, Human
uuacucugaagggcaucaugca

SEQ ID NO: 2923151 - RNA, 20 nt, Human
uuaguuucuguucuguggaa

SEQ ID NO: 2923152 - RNA, 21 nt, Human
uuaguuucuguucuguggaaa

SEQ ID NO: 2923153 - RNA, 15 nt, Human
uuaguuucuguucug

SEQ ID NO: 2923154 - RNA, 19 nt, Human
uuaguuucuguucugugga

SEQ ID NO: 2923155 - RNA, 13 nt, Human
uuagccacaaaau

SEQ ID NO: 2923156 - RNA, 14 nt, Human
aguucaccauuaaa

SEQ ID NO: 2923157 - RNA, 21 nt, Human
aguuagaauuccuucagggug

SEQ ID NO: 2923158 - RNA, 14 nt, Human
aguuagaauuccuu

SEQ ID NO: 2923159 - RNA, 15 nt, Human
aguuagaauuccuuc

SEQ ID NO: 2923160 - RNA, 19 nt, Human
aguuagaauuccuucaggg

SEQ ID NO: 2923161 - RNA, 16 nt, Human
aguuacucugaagggc

SEQ ID NO: 2923162 - RNA, 13 nt, Human
aguuacuguugug

SEQ ID NO: 2923163 - RNA, 17 nt, Human
aguuacuguugugaccu

SEQ ID NO: 2923164 - RNA, 15 nt, Human
aguuacucugaaggg

SEQ ID NO: 2923165 - RNA, 17 nt, Human
agugcccaacuguuaua

SEQ ID NO: 2923166 - RNA, 15 nt, Human
agugcccaacuguua

SEQ ID NO: 2923167 - RNA, 15 nt, Human
agugauuguuggcac

SEQ ID NO: 2923168 - RNA, 20 nt, Human
agggccuagcugcuacaaag

SEQ ID NO: 2923169 - RNA, 21 nt, Human
agggccuagcugcuacaaaga

SEQ ID NO: 2923170 - RNA, 15 nt, Human
agggccuagcugcua

SEQ ID NO: 2923171 - RNA, 16 nt, Human
agggccuagcugcuac

SEQ ID NO: 2923172 - RNA, 18 nt, Human
agggccuagcugcuacaa

SEQ ID NO: 2923173 - RNA, 19 nt, Human
agggccuagcugcuacaaa

SEQ ID NO: 2923174 - RNA, 21 nt, Human
agucuacucuuaagccaucuu

SEQ ID NO: 2923175 - RNA, 19 nt, Human
agucuacucuuaagccauc

SEQ ID NO: 2923176 - RNA, 20 nt, Human
agucuacucuuaagccaucu

SEQ ID NO: 2923177 - RNA, 13 nt, Human
agucuacucuuaa

SEQ ID NO: 2923178 - RNA, 18 nt, Human
agucuacucuuaagccau

SEQ ID NO: 2923179 - RNA, 17 nt, Human
uguccuuuuuguuauua

SEQ ID NO: 2923180 - RNA, 16 nt, Human
uguccuuuuuguuauu

SEQ ID NO: 2923181 - RNA, 15 nt, Human
uguacuuuuuccaga

SEQ ID NO: 2923182 - RNA, 15 nt, Human
agcuuuacuguuugu

SEQ ID NO: 2923183 - RNA, 12 nt, Human
ugcuacaaagaa

SEQ ID NO: 2923184 - RNA, 16 nt, Human
ugcuacaaagaagaca

SEQ ID NO: 2923185 - RNA, 17 nt, Human
ugcuacaaagaagacau

SEQ ID NO: 2923186 - RNA, 18 nt, Human
ugcuacaaagaagacaug

SEQ ID NO: 2923187 - RNA, 20 nt, Human
ugcuacaaagaagacauguu

SEQ ID NO: 2923188 - RNA, 21 nt, Human
ugcuacaaagaagacauguuu

SEQ ID NO: 2923189 - RNA, 23 nt, Human
ugcuacaaagaagacauguuuua

SEQ ID NO: 2923190 - RNA, 20 nt, Human
ugcuuggguggagaagccau

SEQ ID NO: 2923191 - RNA, 21 nt, Human
ugcuuggguggagaagccauu

SEQ ID NO: 2923192 - RNA, 19 nt, Human
ugcuuggguggagaagcca

SEQ ID NO: 2923193 - RNA, 22 nt, Human
ugcuuggguggagaagccauug

SEQ ID NO: 2923194 - RNA, 14 nt, Human
uggagaagccauug

SEQ ID NO: 2923195 - RNA, 17 nt, Human
uggagaagccauugucu

SEQ ID NO: 2923196 - RNA, 18 nt, Human
uggagaagccauugucuu

SEQ ID NO: 2923197 - RNA, 19 nt, Human
uggagaagccauugucuuc

SEQ ID NO: 2923198 - RNA, 12 nt, Human
uggagaagccau

SEQ ID NO: 2923199 - RNA, 13 nt, Human
uggagaagccauu

SEQ ID NO: 2923200 - RNA, 17 nt, Human
ugcauugagaacugcau

SEQ ID NO: 2923201 - RNA, 15 nt, Human
ugcauugagaacugc

SEQ ID NO: 2923202 - RNA, 14 nt, Human
ugcccaacuguuau

SEQ ID NO: 2923203 - RNA, 14 nt, Human
ugcacacagugcuu

SEQ ID NO: 2923204 - RNA, 19 nt, Human
ugaucgugacgcugaauaa

SEQ ID NO: 2923205 - RNA, 20 nt, Human
ugaucgugacgcugaauaaa

SEQ ID NO: 2923206 - RNA, 21 nt, Human
ugaucgugacgcugaauaaau

SEQ ID NO: 2923207 - RNA, 23 nt, Human
ugaucgugacgcugaauaaaugu

SEQ ID NO: 2923208 - RNA, 15 nt, Human
ugaucgugacgcuga

SEQ ID NO: 2923209 - RNA, 16 nt, Human
ugaucgugacgcugaa

SEQ ID NO: 2923210 - RNA, 18 nt, Human
agagccagagaagugaca

SEQ ID NO: 2923211 - RNA, 20 nt, Human
agagccagagaagugacagg

SEQ ID NO: 2923212 - RNA, 21 nt, Human
agagccagagaagugacaggg

SEQ ID NO: 2923213 - RNA, 13 nt, Human
ucuucuuaacuua

SEQ ID NO: 2923214 - RNA, 21 nt, Human
ucuucucuggcgacaguuuuc

SEQ ID NO: 2923215 - RNA, 22 nt, Human
ucuugguaaauuuccccaacag

SEQ ID NO: 2923216 - RNA, 13 nt, Human
agaugcucuuuua

SEQ ID NO: 2923217 - RNA, 19 nt, Human
agauuucuugaguuuuguu

SEQ ID NO: 2923218 - RNA, 17 nt, Human
ugagaaucagaucauuu

SEQ ID NO: 2923219 - RNA, 17 nt, Human
ugagaacugcauauguu

SEQ ID NO: 2923220 - RNA, 20 nt, Human
ugagaacugcauauguuucg

SEQ ID NO: 2923221 - RNA, 15 nt, Human
agauaauaugagaau

SEQ ID NO: 2923222 - RNA, 17 nt, Human
agauaauaugagaauca

SEQ ID NO: 2923223 - RNA, 13 nt, Human
ugaauuuuucucu

SEQ ID NO: 2923224 - RNA, 15 nt, Human
ugaauuuuucucuaa

SEQ ID NO: 2923225 - RNA, 21 nt, Human
ugaagguaaaauugaaaggca

SEQ ID NO: 2923226 - RNA, 12 nt, Human
ugaauaaauguc

SEQ ID NO: 2923227 - RNA, 14 nt, Human
ugaauaaaugucuu

SEQ ID NO: 2923228 - RNA, 17 nt, Human
agaaggauguacauuuc

SEQ ID NO: 2923229 - RNA, 17 nt, Human
agaagugacagggaagc

SEQ ID NO: 2923230 - RNA, 18 nt, Human
agaagugacagggaagcu

SEQ ID NO: 2923231 - RNA, 19 nt, Human
agaagugacagggaagcua

SEQ ID NO: 2923232 - RNA, 22 nt, Human
agaagugacagggaagcuacag

SEQ ID NO: 2923233 - RNA, 23 nt, Human
agaagugacagggaagcuacagg

SEQ ID NO: 2923234 - RNA, 16 nt, Human
agaaggauguacauuu

SEQ ID NO: 2923235 - RNA, 21 nt, Human
agaacugcauauguuucgcug

SEQ ID NO: 2923236 - RNA, 20 nt, Human
agaacugcauauguuucgcu

SEQ ID NO: 2923237 - RNA, 19 nt, Human
agaacugcauauguuucgc

SEQ ID NO: 2923238 - RNA, 15 nt, Human
agaacugcauauguu

SEQ ID NO: 2923239 - RNA, 20 nt, Human
agaagccauugucuucggaa

SEQ ID NO: 2923240 - RNA, 14 nt, Human
agaagccauugucu

SEQ ID NO: 2923241 - RNA, 15 nt, Human
agaagccauugucuu

SEQ ID NO: 2923242 - RNA, 10 nt, Human
agaagccauu

SEQ ID NO: 2923243 - RNA, 11 nt, Human
agaagccauug

SEQ ID NO: 2923244 - RNA, 12 nt, Human
agaagccauugu

SEQ ID NO: 2923245 - RNA, 23 nt, Human
agaaacaucaguuacucugaagg

SEQ ID NO: 2923246 - RNA, 21 nt, Human
agaaacaucaguuacucugaa

SEQ ID NO: 2923247 - RNA, 16 nt, Human
agaaacaucaguuacu

SEQ ID NO: 2923248 - RNA, 14 nt, Human
agaaacaucaguua

SEQ ID NO: 2923249 - RNA, 15 nt, Human
ucuagcaaauguuau

SEQ ID NO: 2923250 - RNA, 16 nt, Human
ucuagcaaauguuaug

SEQ ID NO: 2923251 - RNA, 19 nt, Human
ucgcugauauauguguuuu

SEQ ID NO: 2923252 - RNA, 22 nt, Human
ucgcugauauauguguuuuuca

SEQ ID NO: 2923253 - RNA, 13 nt, Human
acuguauuuguga

SEQ ID NO: 2923254 - RNA, 14 nt, Human
acuguauuugugac

SEQ ID NO: 2923255 - RNA, 15 nt, Human
acuguauuugugacu

SEQ ID NO: 2923256 - RNA, 16 nt, Human
acuguauuugugacua

SEQ ID NO: 2923257 - RNA, 17 nt, Human
acuguauuugugacuaa

SEQ ID NO: 2923258 - RNA, 20 nt, Human
acuguauuugugacuaauug

SEQ ID NO: 2923259 - RNA, 20 nt, Human
acuguauuuuuaccuuuuuc

SEQ ID NO: 2923260 - RNA, 22 nt, Human
acuguauuugugacuaauugua

SEQ ID NO: 2923261 - RNA, 23 nt, Human
acuguauuugugacuaauuguau

SEQ ID NO: 2923262 - RNA, 18 nt, Human
ucacuguuucucugcugu

SEQ ID NO: 2923263 - RNA, 20 nt, Human
ucacuguuucucugcuguug

SEQ ID NO: 2923264 - RNA, 20 nt, Human
ucagagacaggaagucuuca

SEQ ID NO: 2923265 - RNA, 23 nt, Human
ucagagacaggaagucuucaggg

SEQ ID NO: 2923266 - RNA, 19 nt, Human
ucaaagguagccaucaugg

SEQ ID NO: 2923267 - RNA, 15 nt, Human
acaucuuucacauug

SEQ ID NO: 2923268 - RNA, 13 nt, Human
acaucuuucacau

SEQ ID NO: 2923269 - RNA, 12 nt, Human
acaucuuucaca

SEQ ID NO: 2923270 - RNA, 22 nt, Human
uccauugguuuaccugugaaau

SEQ ID NO: 2923271 - RNA, 18 nt, Human
acgcugaauaaaugucuu

SEQ ID NO: 2923272 - RNA, 19 nt, Human
acgcugaauaaaugucuuu

SEQ ID NO: 2923273 - RNA, 12 nt, Human
acgcugaauaaa

SEQ ID NO: 2923274 - RNA, 13 nt, Human
acgcugaauaaau

SEQ ID NO: 2923275 - RNA, 15 nt, Human
acgcugaauaaaugu

SEQ ID NO: 2923276 - RNA, 16 nt, Human
acgcugaauaaauguc

SEQ ID NO: 2923277 - RNA, 18 nt, Human
uccaacaaaggguuuuaa

SEQ ID NO: 2923278 - RNA, 22 nt, Human
uccaacaaaggguuuuaaugua

SEQ ID NO: 2923279 - RNA, 13 nt, Human
uccaaauucacaa

SEQ ID NO: 2923280 - RNA, 20 nt, Human
accugcuuggguggagaagc

SEQ ID NO: 2923281 - RNA, 18 nt, Human
accugcuuggguggagaa

SEQ ID NO: 2923282 - RNA, 23 nt, Human
accugagcccggaugcuucucca

SEQ ID NO: 2923283 - RNA, 21 nt, Human
accugagcccggaugcuucuc

SEQ ID NO: 2923284 - RNA, 20 nt, Human
uccucuccgcaguuccuguc

SEQ ID NO: 2923285 - RNA, 19 nt, Human
acucuucuuaacuuaaauu

SEQ ID NO: 2923286 - RNA, 20 nt, Human
acucuucuuaacuuaaauuu

SEQ ID NO: 2923287 - RNA, 21 nt, Human
acucgaggacuguauuuguga

SEQ ID NO: 2923288 - RNA, 19 nt, Human
acucgaggacuguauuugu

SEQ ID NO: 2923289 - RNA, 21 nt, Human
acucagaaauuuaauucaugu

SEQ ID NO: 2923290 - RNA, 19 nt, Human
uagcuuuacuguuuguuau

SEQ ID NO: 2923291 - RNA, 15 nt, Human
acaauauuguuucua

SEQ ID NO: 2923292 - RNA, 14 nt, Human
acaauauuguuucu

SEQ ID NO: 2923293 - RNA, 16 nt, Human
uagggaaaugaaagaa

SEQ ID NO: 2923294 - RNA, 13 nt, Human
uagggaaaugaaa

SEQ ID NO: 2923295 - RNA, 21 nt, Human
uaggaaacaaagcuuagcagg

SEQ ID NO: 2923296 - RNA, 18 nt, Human
acaaauacucauguguau

SEQ ID NO: 2923297 - RNA, 14 nt, Human
acaaauacucaugu

SEQ ID NO: 2923298 - RNA, 15 nt, Human
acaaauacucaugug

SEQ ID NO: 2923299 - RNA, 16 nt, Human
acaaauacucaugugu

SEQ ID NO: 2923300 - RNA, 17 nt, Human
acaaauacucaugugua

SEQ ID NO: 2923301 - RNA, 13 nt, Human
acaaauacucaug

SEQ ID NO: 2923302 - RNA, 13 nt, Human
aauuuuaauuuau

SEQ ID NO: 2923303 - RNA, 15 nt, Human
aauuuuaauuuauuu

SEQ ID NO: 2923304 - RNA, 21 nt, Human
uagaaggauguacauuuccaa

SEQ ID NO: 2923305 - RNA, 17 nt, Human
uagaaggauguacauuu

SEQ ID NO: 2923306 - RNA, 14 nt, Human
uagacaaauacuca

SEQ ID NO: 2923307 - RNA, 15 nt, Human
uagacaaauacucau

SEQ ID NO: 2923308 - RNA, 16 nt, Human
uagacaaauacucaug

SEQ ID NO: 2923309 - RNA, 17 nt, Human
uagacaaauacucaugu

SEQ ID NO: 2923310 - RNA, 18 nt, Human
uagacaaauacucaugug

SEQ ID NO: 2923311 - RNA, 19 nt, Human
uagacaaauacucaugugu

SEQ ID NO: 2923312 - RNA, 20 nt, Human
uagacaaauacucaugugua

SEQ ID NO: 2923313 - RNA, 13 nt, Human
uagaaaaagcagu

SEQ ID NO: 2923314 - RNA, 14 nt, Human
aauucauguuucuu

SEQ ID NO: 2923315 - RNA, 21 nt, Human
acagauuugugaacucagcca

SEQ ID NO: 2923316 - RNA, 22 nt, Human
acagauuugugaacucagccaa

SEQ ID NO: 2923317 - RNA, 13 nt, Human
acagauuugugaa

SEQ ID NO: 2923318 - RNA, 14 nt, Human
acagauuugugaac

SEQ ID NO: 2923319 - RNA, 15 nt, Human
acagauuugugaacu

SEQ ID NO: 2923320 - RNA, 12 nt, Human
acagauuuguga

SEQ ID NO: 2923321 - RNA, 13 nt, Human
uauaucuaaauug

SEQ ID NO: 2923322 - RNA, 17 nt, Human
uauaucuaaauugaaua

SEQ ID NO: 2923323 - RNA, 18 nt, Human
uauaucuaaauugaauaa

SEQ ID NO: 2923324 - RNA, 16 nt, Human
uauagaugggaaugaa

SEQ ID NO: 2923325 - RNA, 17 nt, Human
uauagaugggaaugaag

SEQ ID NO: 2923326 - RNA, 19 nt, Human
uauagaugggaaugaagcu

SEQ ID NO: 2923327 - RNA, 13 nt, Human
uaccugugaaaua

SEQ ID NO: 2923328 - RNA, 15 nt, Human
uaccagauaaaauua

SEQ ID NO: 2923329 - RNA, 21 nt, Human
uacauuuccaaauucacaagu

SEQ ID NO: 2923330 - RNA, 20 nt, Human
aaugugcuguguaaaguuag

SEQ ID NO: 2923331 - RNA, 21 nt, Human
aaugugcuguguaaaguuagu

SEQ ID NO: 2923332 - RNA, 12 nt, Human
aaugugcugugu

SEQ ID NO: 2923333 - RNA, 13 nt, Human
aaugugcugugua

SEQ ID NO: 2923334 - RNA, 14 nt, Human
aaugugcuguguaa

SEQ ID NO: 2923335 - RNA, 15 nt, Human
aaugugcuguguaaa

SEQ ID NO: 2923336 - RNA, 16 nt, Human
aaugugcuguguaaag

SEQ ID NO: 2923337 - RNA, 17 nt, Human
aaugugcuguguaaagu

SEQ ID NO: 2923338 - RNA, 18 nt, Human
aaugugcuguguaaaguu

SEQ ID NO: 2923339 - RNA, 19 nt, Human
aaugugcuguguaaaguua

SEQ ID NO: 2923340 - RNA, 17 nt, Human
aaugacuaaaaaacaaa

SEQ ID NO: 2923341 - RNA, 20 nt, Human
aaugacuaaaaaacaaagaa

SEQ ID NO: 2923342 - RNA, 19 nt, Human
uacaauuauaucaguccuc

SEQ ID NO: 2923343 - RNA, 15 nt, Human
uacaauuauaucagu

SEQ ID NO: 2923344 - RNA, 13 nt, Human
uacaauugaaaug

SEQ ID NO: 2923345 - RNA, 14 nt, Human
uacaauugaaauga

SEQ ID NO: 2923346 - RNA, 22 nt, Human
uacaauuauuuuuacaguucuc

SEQ ID NO: 2923347 - RNA, 18 nt, Human
uacaauuauuuuuacagu

SEQ ID NO: 2923348 - RNA, 17 nt, Human
uaaguuucaguugauuu

SEQ ID NO: 2923349 - RNA, 16 nt, Human
uaacagguuauuuuag

SEQ ID NO: 2923350 - RNA, 21 nt, Human
uaacagguuauuuuaguuucu

SEQ ID NO: 2923351 - RNA, 22 nt, Human
uaacagguuauuuuaguuucug

SEQ ID NO: 2923352 - RNA, 23 nt, Human
uaacagguuauuuuaguuucugu

SEQ ID NO: 2923353 - RNA, 22 nt, Human
aauaguucaaagccaaguuuau

SEQ ID NO: 2923354 - RNA, 15 nt, Human
aauacauucugcuuu

SEQ ID NO: 2923355 - RNA, 13 nt, Human
aagcaguaacuga

SEQ ID NO: 2923356 - RNA, 17 nt, Human
aagcauuccaacaaagg

SEQ ID NO: 2923357 - RNA, 13 nt, Human
aagcauuccaaca

SEQ ID NO: 2923358 - RNA, 14 nt, Human
aagcauuccaacaa

SEQ ID NO: 2923359 - RNA, 23 nt, Human
guuacuguugugaccugaaguuc

SEQ ID NO: 2923360 - RNA, 16 nt, Human
guuacuguugugaccu

SEQ ID NO: 2923361 - RNA, 18 nt, Human
guuuuuccacuacugcua

SEQ ID NO: 2923362 - RNA, 17 nt, Human
guuuuuccacuacugcu

SEQ ID NO: 2923363 - RNA, 16 nt, Human
guuuuuccacuacugc

SEQ ID NO: 2923364 - RNA, 15 nt, Human
guuuuuccacuacug

SEQ ID NO: 2923365 - RNA, 12 nt, Human
aagucuucaggg

SEQ ID NO: 2923366 - RNA, 13 nt, Human
aaggaguagaaaa

SEQ ID NO: 2923367 - RNA, 12 nt, Human
aaggcauucucu

SEQ ID NO: 2923368 - RNA, 17 nt, Human
aaggcauucucugaaga

SEQ ID NO: 2923369 - RNA, 14 nt, Human
aaggcauucucuga

SEQ ID NO: 2923370 - RNA, 15 nt, Human
guuucucugcuguug

SEQ ID NO: 2923371 - RNA, 17 nt, Human
guaucaggacgagaaug

SEQ ID NO: 2923372 - RNA, 21 nt, Human
guauccauuaucauguguaau

SEQ ID NO: 2923373 - RNA, 18 nt, Human
guauccauuaucaugugu

SEQ ID NO: 2923374 - RNA, 19 nt, Human
guauccauuaucaugugua

SEQ ID NO: 2923375 - RNA, 16 nt, Human
guauccauuaucaugu

SEQ ID NO: 2923376 - RNA, 17 nt, Human
guauccauuaucaugug

SEQ ID NO: 2923377 - RNA, 13 nt, Human
aaauguaacaguc

SEQ ID NO: 2923378 - RNA, 16 nt, Human
aaauguaacagucuga

SEQ ID NO: 2923379 - RNA, 17 nt, Human
aaauguaacagucugau

SEQ ID NO: 2923380 - RNA, 18 nt, Human
guaaauuuccccaacagu

SEQ ID NO: 2923381 - RNA, 19 nt, Human
guaaauuuccccaacagug

SEQ ID NO: 2923382 - RNA, 18 nt, Human
guaacagucugaucguga

SEQ ID NO: 2923383 - RNA, 20 nt, Human
aaauguguaucggaugcuuu

SEQ ID NO: 2923384 - RNA, 13 nt, Human
aaauguguauuuu

SEQ ID NO: 2923385 - RNA, 22 nt, Human
aaaugucuuuuuuuuaaugugc

SEQ ID NO: 2923386 - RNA, 20 nt, Human
aaaugucuuuuuuuuaaugu

SEQ ID NO: 2923387 - RNA, 14 nt, Human
aaauuuuaauuuau

SEQ ID NO: 2923388 - RNA, 15 nt, Human
gugaacucagccaag

SEQ ID NO: 2923389 - RNA, 16 nt, Human
gugaacucagccaagc

SEQ ID NO: 2923390 - RNA, 17 nt, Human
gugaacucagccaagca

SEQ ID NO: 2923391 - RNA, 18 nt, Human
gugaacucagccaagcac

SEQ ID NO: 2923392 - RNA, 19 nt, Human
gugaacucagccaagcaca

SEQ ID NO: 2923393 - RNA, 21 nt, Human
gugaacucagccaagcacagu

SEQ ID NO: 2923394 - RNA, 22 nt, Human
gugaacucagccaagcacagug

SEQ ID NO: 2923395 - RNA, 23 nt, Human
gugaacucagccaagcacagugg

SEQ ID NO: 2923396 - RNA, 17 nt, Human
aacuggcaguuuuccau

SEQ ID NO: 2923397 - RNA, 15 nt, Human
gugaugccagguucu

SEQ ID NO: 2923398 - RNA, 18 nt, Human
gugaugccagguucuauu

SEQ ID NO: 2923399 - RNA, 23 nt, Human
gugaugccagguucuauuuggaa

SEQ ID NO: 2923400 - RNA, 15 nt, Human
gucuucggaaaccuu

SEQ ID NO: 2923401 - RNA, 17 nt, Human
gucuucggaaaccuugg

SEQ ID NO: 2923402 - RNA, 14 nt, Human
gugaacucagccaa

SEQ ID NO: 2923403 - RNA, 14 nt, Human
aacucgaggacugu

SEQ ID NO: 2923404 - RNA, 19 nt, Human
aacucgaggacuguauuug

SEQ ID NO: 2923405 - RNA, 20 nt, Human
aacucgaggacuguauuugu

SEQ ID NO: 2923406 - RNA, 22 nt, Human
aacucgaggacuguauuuguga

SEQ ID NO: 2923407 - RNA, 22 nt, Human
aacucauuuccuauguaacugc

SEQ ID NO: 2923408 - RNA, 20 nt, Human
aaccuugguguaguugaacu

SEQ ID NO: 2923409 - RNA, 18 nt, Human
aaccuugguguaguugaa

SEQ ID NO: 2923410 - RNA, 16 nt, Human
acauacaauuauuuuu

SEQ ID NO: 2923411 - RNA, 20 nt, Human
acaucaguuacucugaaggg

SEQ ID NO: 2923412 - RNA, 18 nt, Human
acaucaguuacucugaag

SEQ ID NO: 2923413 - RNA, 15 nt, Human
acaucaguuacucug

SEQ ID NO: 2923414 - RNA, 16 nt, Human
acagguuacaacagau

SEQ ID NO: 2923415 - RNA, 17 nt, Human
acagguuacaacagauu

SEQ ID NO: 2923416 - RNA, 12 nt, Human
acagguuacaac

SEQ ID NO: 2923417 - RNA, 13 nt, Human
acagguuacaaca

SEQ ID NO: 2923418 - RNA, 14 nt, Human
acagguuacaacag

SEQ ID NO: 2923419 - RNA, 15 nt, Human
acagguuacaacaga

SEQ ID NO: 2923420 - RNA, 23 nt, Human
acagugguggcagggccuagcug

SEQ ID NO: 2923421 - RNA, 13 nt, Human
acagugguggcag

SEQ ID NO: 2923422 - RNA, 15 nt, Human
acagugguggcaggg

SEQ ID NO: 2923423 - RNA, 16 nt, Human
acagugguggcagggc

SEQ ID NO: 2923424 - RNA, 17 nt, Human
acagugguggcagggcc

SEQ ID NO: 2923425 - RNA, 17 nt, Human
aauuuauuuauacuauu

SEQ ID NO: 2923426 - RNA, 20 nt, Human
aauuuauuuauacuauuuag

SEQ ID NO: 2923427 - RNA, 22 nt, Human
acaaccugcuuggguggagaag

SEQ ID NO: 2923428 - RNA, 23 nt, Human
acaaccugcuuggguggagaagc

SEQ ID NO: 2923429 - RNA, 21 nt, Human
acaauuauuuuuacaguucuc

SEQ ID NO: 2923430 - RNA, 18 nt, Human
acaauuauuuuuacaguu

SEQ ID NO: 2923431 - RNA, 18 nt, Human
acaauuauaucaguccuc

SEQ ID NO: 2923432 - RNA, 18 nt, Human
aaaggcauucucugaaga

SEQ ID NO: 2923433 - RNA, 16 nt, Human
aaaggcauucucugaa

SEQ ID NO: 2923434 - RNA, 14 nt, Human
aaagaagacauguu

SEQ ID NO: 2923435 - RNA, 12 nt, Human
aaagaagacaug

SEQ ID NO: 2923436 - RNA, 19 nt, Human
aaagaagacaacauuaaaa

SEQ ID NO: 2923437 - RNA, 18 nt, Human
aaaauuauagaugggaau

SEQ ID NO: 2923438 - RNA, 22 nt, Human
aaaauuauagaugggaaugaag

SEQ ID NO: 2923439 - RNA, 11 nt, Human
aaaauuaaagc

SEQ ID NO: 2923440 - RNA, 18 nt, Human
aacaaaggguuuuaaugu

SEQ ID NO: 2923441 - RNA, 20 nt, Human
aaauuaaccauagauguaga

SEQ ID NO: 2923442 - RNA, 23 nt, Human
aacagauuugugaacucagccaa

SEQ ID NO: 2923443 - RNA, 21 nt, Human
aacagauuugugaacucagcc

SEQ ID NO: 2923444 - RNA, 22 nt, Human
aacagauuugugaacucagcca

SEQ ID NO: 2923445 - RNA, 13 nt, Human
aacagauuuguga

SEQ ID NO: 2923446 - RNA, 14 nt, Human
aacagauuugugaa

SEQ ID NO: 2923447 - RNA, 15 nt, Human
aacagauuugugaac

SEQ ID NO: 2923448 - RNA, 16 nt, Human
aacagauuugugaacu

SEQ ID NO: 2923449 - RNA, 18 nt, Human
aacagauuugugaacuca

SEQ ID NO: 2923450 - RNA, 17 nt, Human
aacaucuagcaaauguu

SEQ ID NO: 2923451 - RNA, 17 nt, Human
aacgguaaauuucugug

SEQ ID NO: 2923452 - RNA, 12 nt, Human
aauaaacgauuu

SEQ ID NO: 2923453 - RNA, 15 nt, Human
aauaaacgauuuaau

SEQ ID NO: 2923454 - RNA, 21 nt, Human
aauaaacgauuuaauucucuu

SEQ ID NO: 2923455 - RNA, 19 nt, Human
aauaauaaagaugcucuuu

SEQ ID NO: 2923456 - RNA, 18 nt, Human
aauaauaaagaugcucuu

SEQ ID NO: 2923457 - RNA, 18 nt, Human
aaguauacuguauuuuua

SEQ ID NO: 2923458 - RNA, 12 nt, Human
aaguauacugua

SEQ ID NO: 2923459 - RNA, 20 nt, Human
aagagaauauuagcuuuacu

SEQ ID NO: 2923460 - RNA, 13 nt, Human
aagacauguuuua

SEQ ID NO: 2923461 - RNA, 14 nt, Human
aagacauguuuuag

SEQ ID NO: 2923462 - RNA, 17 nt, Human
aagacauguuuuagaca

SEQ ID NO: 2923463 - RNA, 18 nt, Human
aagggauuacccaagcaa

SEQ ID NO: 2923464 - RNA, 17 nt, Human
aagggauuacccaagca

SEQ ID NO: 2923465 - RNA, 19 nt, Human
aagggauuacccaagcaaa

SEQ ID NO: 2923466 - RNA, 18 nt, Human
agccaagcacaguggugg

SEQ ID NO: 2923467 - RNA, 21 nt, Human
agccaagcacagugguggcag

SEQ ID NO: 2923468 - RNA, 13 nt, Human
agccaagcacagu

SEQ ID NO: 2923469 - RNA, 14 nt, Human
agccaagcacagug

SEQ ID NO: 2923470 - RNA, 16 nt, Human
agccaagcacaguggu

SEQ ID NO: 2923471 - RNA, 17 nt, Human
agccaagcacaguggug

SEQ ID NO: 2923472 - RNA, 20 nt, Human
agcaaaaucauggaaugguu

SEQ ID NO: 2923473 - RNA, 23 nt, Human
agcaaaaucauggaaugguuaua

SEQ ID NO: 2923474 - RNA, 19 nt, Human
agauguagauaaacucaga

SEQ ID NO: 2923475 - RNA, 17 nt, Human
agaagacauguuuuaga

SEQ ID NO: 2923476 - RNA, 19 nt, Human
agaagacauguuuuagaca

SEQ ID NO: 2923477 - RNA, 13 nt, Human
agaagacauguuu

SEQ ID NO: 2923478 - RNA, 14 nt, Human
agaagacauguuuu

SEQ ID NO: 2923479 - RNA, 15 nt, Human
agaagacauguuuua

SEQ ID NO: 2923480 - RNA, 16 nt, Human
agaagacauguuuuag

SEQ ID NO: 2923481 - RNA, 12 nt, Human
agaagugacagg

SEQ ID NO: 2923482 - RNA, 13 nt, Human
agaagugacaggg

SEQ ID NO: 2923483 - RNA, 14 nt, Human
agaagugacaggga

SEQ ID NO: 2923484 - RNA, 16 nt, Human
agaagugacagggaag

SEQ ID NO: 2923485 - RNA, 18 nt, Human
agacaaauacucaugugu

SEQ ID NO: 2923486 - RNA, 20 nt, Human
agacaaauacucauguguau

SEQ ID NO: 2923487 - RNA, 13 nt, Human
agacaaauacuca

SEQ ID NO: 2923488 - RNA, 14 nt, Human
agacaaauacucau

SEQ ID NO: 2923489 - RNA, 17 nt, Human
agacaaauacucaugug

SEQ ID NO: 2923490 - RNA, 16 nt, Human
aggguuuuaauguaga

SEQ ID NO: 2923491 - RNA, 17 nt, Human
aggguuuuaauguagau

SEQ ID NO: 2923492 - RNA, 19 nt, Human
agggauuacccaagcaaaa

SEQ ID NO: 2923493 - RNA, 17 nt, Human
agggauuacccaagcaa

SEQ ID NO: 2923494 - RNA, 18 nt, Human
agggauuacccaagcaaa

SEQ ID NO: 2923495 - RNA, 18 nt, Human
agcugaauacauucugcu

SEQ ID NO: 2923496 - RNA, 15 nt, Human
agcugaauacauucu

SEQ ID NO: 2923497 - RNA, 21 nt, Human
augcacacagugcuuuccgug

SEQ ID NO: 2923498 - RNA, 15 nt, Human
augguaccagauaaa

SEQ ID NO: 2923499 - RNA, 23 nt, Human
auguaacugcauugagaacugca

SEQ ID NO: 2923500 - RNA, 20 nt, Human
auguaacugcauugagaacu

SEQ ID NO: 2923501 - RNA, 13 nt, Human
auguaacagucug

SEQ ID NO: 2923502 - RNA, 16 nt, Human
auguaacagucugauc

SEQ ID NO: 2923503 - RNA, 19 nt, Human
augucuuuuuuuuaaugug

SEQ ID NO: 2923504 - RNA, 22 nt, Human
augucuuuuuuuuaaugugcug

SEQ ID NO: 2923505 - RNA, 18 nt, Human
augucuuuuuuuuaaugu

SEQ ID NO: 2923506 - RNA, 17 nt, Human
augucuuuuuuuuaaug

SEQ ID NO: 2923507 - RNA, 18 nt, Human
auguguaucggaugcuuu

SEQ ID NO: 2923508 - RNA, 23 nt, Human
auguuucgugaaguauacuguau

SEQ ID NO: 2923509 - RNA, 20 nt, Human
auguuucgugaaguauacug

SEQ ID NO: 2923510 - RNA, 22 nt, Human
auguuucgcugauauauguguu

SEQ ID NO: 2923511 - RNA, 18 nt, Human
auguuucuuaaaugggcu

SEQ ID NO: 2923512 - RNA, 20 nt, Human
agugaauuuuucucuaacuc

SEQ ID NO: 2923513 - RNA, 17 nt, Human
agugaauuuuucucuaa

SEQ ID NO: 2923514 - RNA, 16 nt, Human
agugaauuuuucucua

SEQ ID NO: 2923515 - RNA, 15 nt, Human
agugaauuuuucucu

SEQ ID NO: 2923516 - RNA, 23 nt, Human
auauaauaugcacacagugcuuu

SEQ ID NO: 2923517 - RNA, 14 nt, Human
auauacaauuauau

SEQ ID NO: 2923518 - RNA, 21 nt, Human
auauacaaccugcuugggugg

SEQ ID NO: 2923519 - RNA, 14 nt, Human
auaaagaugcucuu

SEQ ID NO: 2923520 - RNA, 15 nt, Human
auaaagaugcucuuu

SEQ ID NO: 2923521 - RNA, 20 nt, Human
auaaagauuucuugaguuuu

SEQ ID NO: 2923522 - RNA, 15 nt, Human
auaaugguaccagau

SEQ ID NO: 2923523 - RNA, 17 nt, Human
auaaugguaccagauaa

SEQ ID NO: 2923524 - RNA, 18 nt, Human
auaaugguaccagauaaa

SEQ ID NO: 2923525 - RNA, 19 nt, Human
auaaugguaccagauaaaa

SEQ ID NO: 2923526 - RNA, 13 nt, Human
cacaguguguuug

SEQ ID NO: 2923527 - RNA, 16 nt, Human
cacaguguguuuguga

SEQ ID NO: 2923528 - RNA, 22 nt, Human
cacagugcuuuccguggcacug

SEQ ID NO: 2923529 - RNA, 23 nt, Human
caaaaucauggaaugguuauaaa

SEQ ID NO: 2923530 - RNA, 21 nt, Human
caaaacucauuuccuauguaa

SEQ ID NO: 2923531 - RNA, 20 nt, Human
caacagauuugugaacucag

SEQ ID NO: 2923532 - RNA, 23 nt, Human
caacagauuugugaacucagcca

SEQ ID NO: 2923533 - RNA, 15 nt, Human
caacagauuugugaa

SEQ ID NO: 2923534 - RNA, 16 nt, Human
caacagauuugugaac

SEQ ID NO: 2923535 - RNA, 17 nt, Human
caacagauuugugaacu

SEQ ID NO: 2923536 - RNA, 19 nt, Human
caacagauuugugaacuca

SEQ ID NO: 2923537 - RNA, 14 nt, Human
caacagauuuguga

SEQ ID NO: 2923538 - RNA, 20 nt, Human
caaagaagacauguuuuaga

SEQ ID NO: 2923539 - RNA, 14 nt, Human
caaagaagacaugu

SEQ ID NO: 2923540 - RNA, 16 nt, Human
caaagaagacauguuu

SEQ ID NO: 2923541 - RNA, 14 nt, Human
caaagaagacaaca

SEQ ID NO: 2923542 - RNA, 13 nt, Human
caaagaagacaug

SEQ ID NO: 2923543 - RNA, 21 nt, Human
caaauguuaugcauaaaguca

SEQ ID NO: 2923544 - RNA, 13 nt, Human
caaauguuaugca

SEQ ID NO: 2923545 - RNA, 23 nt, Human
caauagaaggauguacauuucca

SEQ ID NO: 2923546 - RNA, 14 nt, Human
cacaaguuguguuu

SEQ ID NO: 2923547 - RNA, 16 nt, Human
cacaaaauugggaaag

SEQ ID NO: 2923548 - RNA, 14 nt, Human
uguguaugggcaaa

SEQ ID NO: 2923549 - RNA, 22 nt, Human
uguguauccauuaucaugugua

SEQ ID NO: 2923550 - RNA, 23 nt, Human
uguguauccauuaucauguguaa

SEQ ID NO: 2923551 - RNA, 24 nt, Human
uguguauccauuaucauguguaau

SEQ ID NO: 2923552 - RNA, 18 nt, Human
uguuggcacauccuaugc

SEQ ID NO: 2923553 - RNA, 19 nt, Human
uguuggcacauccuaugca

SEQ ID NO: 2923554 - RNA, 12 nt, Human
uguugauugcua

SEQ ID NO: 2923555 - RNA, 13 nt, Human
uguugauugcuaa

SEQ ID NO: 2923556 - RNA, 14 nt, Human
uguugauugcuaaa

SEQ ID NO: 2923557 - RNA, 16 nt, Human
uuaagccaucuuggua

SEQ ID NO: 2923558 - RNA, 18 nt, Human
uuaagccaucuugguaaa

SEQ ID NO: 2923559 - RNA, 21 nt, Human
uuacaacagauuugugaacuc

SEQ ID NO: 2923560 - RNA, 18 nt, Human
uuacaacagauuugugaa

SEQ ID NO: 2923561 - RNA, 19 nt, Human
uuacaacagauuugugaac

SEQ ID NO: 2923562 - RNA, 13 nt, Human
uuacaacagauuu

SEQ ID NO: 2923563 - RNA, 15 nt, Human
uuacaacagauuugu

SEQ ID NO: 2923564 - RNA, 16 nt, Human
uuacaacagauuugug

SEQ ID NO: 2923565 - RNA, 17 nt, Human
uuacaacagauuuguga

SEQ ID NO: 2923566 - RNA, 12 nt, Human
uguuuguuaugg

SEQ ID NO: 2923567 - RNA, 13 nt, Human
uguaaucaauaaa

SEQ ID NO: 2923568 - RNA, 14 nt, Human
uguaaucaauaaac

SEQ ID NO: 2923569 - RNA, 15 nt, Human
uguaaucaauaaacg

SEQ ID NO: 2923570 - RNA, 16 nt, Human
uguaaucaauaaacga

SEQ ID NO: 2923571 - RNA, 18 nt, Human
uguaaucaauaaacgauu

SEQ ID NO: 2923572 - RNA, 14 nt, Human
uguaguugaacuga

SEQ ID NO: 2923573 - RNA, 20 nt, Human
uguaguugaacugauaguua

SEQ ID NO: 2923574 - RNA, 20 nt, Human
ugugaaguuagaauuccuuc

SEQ ID NO: 2923575 - RNA, 13 nt, Human
ugugaaguuagaa

SEQ ID NO: 2923576 - RNA, 14 nt, Human
ugugaaguuagaau

SEQ ID NO: 2923577 - RNA, 15 nt, Human
ugugaaguuagaauu

SEQ ID NO: 2923578 - RNA, 15 nt, Human
uguguaaucaauaaa

SEQ ID NO: 2923579 - RNA, 19 nt, Human
uguguaaucaauaaacgau

SEQ ID NO: 2923580 - RNA, 20 nt, Human
uguguaaucaauaaacgauu

SEQ ID NO: 2923581 - RNA, 21 nt, Human
uguguauccauuaucaugugu

SEQ ID NO: 2923582 - RNA, 17 nt, Human
uggaaugguuauaaaag

SEQ ID NO: 2923583 - RNA, 14 nt, Human
uggcagggccuagc

SEQ ID NO: 2923584 - RNA, 15 nt, Human
uggcagggccuagcu

SEQ ID NO: 2923585 - RNA, 19 nt, Human
uggcagggccuagcugcua

SEQ ID NO: 2923586 - RNA, 16 nt, Human
ugggcuacuuuguccu

SEQ ID NO: 2923587 - RNA, 19 nt, Human
ugcuaaauguaacagucug

SEQ ID NO: 2923588 - RNA, 20 nt, Human
ugcuaaauguaacagucuga

SEQ ID NO: 2923589 - RNA, 15 nt, Human
ugcuaaauguaacag

SEQ ID NO: 2923590 - RNA, 16 nt, Human
ugcuaaauguaacagu

SEQ ID NO: 2923591 - RNA, 17 nt, Human
ugcuaaauguaacaguc

SEQ ID NO: 2923592 - RNA, 18 nt, Human
ugcuaaauguaacagucu

SEQ ID NO: 2923593 - RNA, 11 nt, Human
ugcuaaaugua

SEQ ID NO: 2923594 - RNA, 14 nt, Human
ugcuaaauguaaca

SEQ ID NO: 2923595 - RNA, 18 nt, Human
uccugucccuucucuuaa

SEQ ID NO: 2923596 - RNA, 21 nt, Human
uccuuaucacugacacaaaaa

SEQ ID NO: 2923597 - RNA, 13 nt, Human
uccuuugggaaag

SEQ ID NO: 2923598 - RNA, 18 nt, Human
ucuacucuuaagccaucu

SEQ ID NO: 2923599 - RNA, 16 nt, Human
ucuacucuuaagccau

SEQ ID NO: 2923600 - RNA, 17 nt, Human
ucuacucuuaagccauc

SEQ ID NO: 2923601 - RNA, 14 nt, Human
uccacagcuaccuc

SEQ ID NO: 2923602 - RNA, 21 nt, Human
ucagaucauuucaaaacucau

SEQ ID NO: 2923603 - RNA, 14 nt, Human
ucaggacuccucuc

SEQ ID NO: 2923604 - RNA, 19 nt, Human
ucaggacgagaaugagggu

SEQ ID NO: 2923605 - RNA, 14 nt, Human
ucuucggaaaccuu

SEQ ID NO: 2923606 - RNA, 15 nt, Human
ugacuaaaaaacaaa

SEQ ID NO: 2923607 - RNA, 22 nt, Human
ugacuaaaaaacaaagaagaca

SEQ ID NO: 2923608 - RNA, 23 nt, Human
ugacuaauuguauaacagguuau

SEQ ID NO: 2923609 - RNA, 21 nt, Human
ugacuaauuguauaacagguu

SEQ ID NO: 2923610 - RNA, 22 nt, Human
ugacuaauuguauaacagguua

SEQ ID NO: 2923611 - RNA, 17 nt, Human
ugacuaauuguauaaca

SEQ ID NO: 2923612 - RNA, 18 nt, Human
ugacuaauuguauaacag

SEQ ID NO: 2923613 - RNA, 19 nt, Human
ugacuaauuguauaacagg

SEQ ID NO: 2923614 - RNA, 20 nt, Human
ugacuaauuguauaacaggu

SEQ ID NO: 2923615 - RNA, 13 nt, Human
ugacuaauuguau

SEQ ID NO: 2923616 - RNA, 14 nt, Human
ugacuaauuguaua

SEQ ID NO: 2923617 - RNA, 15 nt, Human
ugacuaauuguauaa

SEQ ID NO: 2923618 - RNA, 19 nt, Human
ugaagaguggguuucacaa

SEQ ID NO: 2923619 - RNA, 23 nt, Human
ugacaaauguguaucggaugcuu

SEQ ID NO: 2923620 - RNA, 20 nt, Human
uacucauguguaugggcaaa

SEQ ID NO: 2923621 - RNA, 22 nt, Human
uacucauguguaugggcaaaaa

SEQ ID NO: 2923622 - RNA, 12 nt, Human
uacucaugugua

SEQ ID NO: 2923623 - RNA, 13 nt, Human
uacucauguguau

SEQ ID NO: 2923624 - RNA, 14 nt, Human
uacucauguguaug

SEQ ID NO: 2923625 - RNA, 11 nt, Human
uacucaugugu

SEQ ID NO: 2923626 - RNA, 20 nt, Human
uacaucuuucacauuggcua

SEQ ID NO: 2923627 - RNA, 15 nt, Human
uacaucuuucacauu

SEQ ID NO: 2923628 - RNA, 12 nt, Human
uacaacagauuu

SEQ ID NO: 2923629 - RNA, 13 nt, Human
uacaacagauuug

SEQ ID NO: 2923630 - RNA, 14 nt, Human
uacaacagauuugu

SEQ ID NO: 2923631 - RNA, 15 nt, Human
uacaacagauuugug

SEQ ID NO: 2923632 - RNA, 16 nt, Human
uacaacagauuuguga

SEQ ID NO: 2923633 - RNA, 17 nt, Human
uacaacagauuugugaa

SEQ ID NO: 2923634 - RNA, 18 nt, Human
uacaacagauuugugaac

SEQ ID NO: 2923635 - RNA, 19 nt, Human
uacaacagauuugugaacu

SEQ ID NO: 2923636 - RNA, 20 nt, Human
uacaacagauuugugaacuc

SEQ ID NO: 2923637 - RNA, 21 nt, Human
uacaacagauuugugaacuca

SEQ ID NO: 2923638 - RNA, 12 nt, Human
uacaaccugcuu

SEQ ID NO: 2923639 - RNA, 16 nt, Human
uacaauugaaaugacu

SEQ ID NO: 2923640 - RNA, 19 nt, Human
uacaaagaagacauguuuu

SEQ ID NO: 2923641 - RNA, 22 nt, Human
uacaaagaagacauguuuuaga

SEQ ID NO: 2923642 - RNA, 15 nt, Human
uacaaagaagacaug

SEQ ID NO: 2923643 - RNA, 16 nt, Human
uacaaagaagacaugu

SEQ ID NO: 2923644 - RNA, 17 nt, Human
uacaaagaagacauguu

SEQ ID NO: 2923645 - RNA, 18 nt, Human
uacaaagaagacauguuu

SEQ ID NO: 2923646 - RNA, 13 nt, Human
uacaaagaagaca

SEQ ID NO: 2923647 - RNA, 14 nt, Human
uacaaagaagacau

SEQ ID NO: 2923648 - RNA, 16 nt, Human
uagaauuccuucaggg

SEQ ID NO: 2923649 - RNA, 23 nt, Human
uagaauuccuucagggugaugcc

SEQ ID NO: 2923650 - RNA, 21 nt, Human
uagcaggagaggagagccaga

SEQ ID NO: 2923651 - RNA, 22 nt, Human
uagcaggagaggagagccagag

SEQ ID NO: 2923652 - RNA, 17 nt, Human
uagcaggagaggagagc

SEQ ID NO: 2923653 - RNA, 19 nt, Human
uagcaggagaggagagcca

SEQ ID NO: 2923654 - RNA, 16 nt, Human
uaggugucauuuccau

SEQ ID NO: 2923655 - RNA, 20 nt, Human
uaguuucuguucuguggaaa

SEQ ID NO: 2923656 - RNA, 14 nt, Human
uaguugaacugaua

SEQ ID NO: 2923657 - RNA, 18 nt, Human
uaguugaacugauaguua

SEQ ID NO: 2923658 - RNA, 20 nt, Human
uaguugaacugauaguuacu

SEQ ID NO: 2923659 - RNA, 22 nt, Human
uaguugaacugauaguuacugu

SEQ ID NO: 2923660 - RNA, 19 nt, Human
uaucauguguaaucaauaa

SEQ ID NO: 2923661 - RNA, 20 nt, Human
uaucauguguaaucaauaaa

SEQ ID NO: 2923662 - RNA, 22 nt, Human
uaucauguguaaucaauaaacg

SEQ ID NO: 2923663 - RNA, 15 nt, Human
uaucaugcaaaugcu

SEQ ID NO: 2923664 - RNA, 17 nt, Human
uaucaugcaaaugcugu

SEQ ID NO: 2923665 - RNA, 16 nt, Human
uaucaugcaaaugcug

SEQ ID NO: 2923666 - RNA, 13 nt, Human
uaacugacaacuu

SEQ ID NO: 2923667 - RNA, 19 nt, Human
uaaauguaacagucugauc

SEQ ID NO: 2923668 - RNA, 17 nt, Human
uaaauguaacagucuga

SEQ ID NO: 2923669 - RNA, 18 nt, Human
uaaauguaacagucugau

SEQ ID NO: 2923670 - RNA, 13 nt, Human
uaaauguaacagu

SEQ ID NO: 2923671 - RNA, 14 nt, Human
uaaauguaacaguc

SEQ ID NO: 2923672 - RNA, 17 nt, Human
uaacacauuugauucug

SEQ ID NO: 2923673 - RNA, 22 nt, Human
uaaauuuccccaacagugugaa

SEQ ID NO: 2923674 - RNA, 20 nt, Human
uaaauuuccccaacagugug

SEQ ID NO: 2923675 - RNA, 21 nt, Human
uaaauuuccccaacaguguga

SEQ ID NO: 2923676 - RNA, 23 nt, Human
uaaauuuccccaacagugugaag

SEQ ID NO: 2923677 - RNA, 17 nt, Human
uaaauuuccccaacagu

SEQ ID NO: 2923678 - RNA, 18 nt, Human
uaaauuuccccaacagug

SEQ ID NO: 2923679 - RNA, 19 nt, Human
uaaauuuccccaacagugu

SEQ ID NO: 2923680 - RNA, 12 nt, Human
uaaauugaauaa

SEQ ID NO: 2923681 - RNA, 13 nt, Human
uaaauugaauaau

SEQ ID NO: 2923682 - RNA, 16 nt, Human
uaaauugaauaauggu

SEQ ID NO: 2923683 - RNA, 17 nt, Human
uaaauugaauaauggua

SEQ ID NO: 2923684 - RNA, 21 nt, Human
uaaaugucuuuuuuuuaaugu

SEQ ID NO: 2923685 - RNA, 22 nt, Human
uaaaugucuuuuuuuuaaugug

SEQ ID NO: 2923686 - RNA, 23 nt, Human
uaaaugucuuuuuuuuaaugugc

SEQ ID NO: 2923687 - RNA, 12 nt, Human
uaauaugagaau

SEQ ID NO: 2923688 - RNA, 15 nt, Human
uaauaucaauagaag

SEQ ID NO: 2923689 - RNA, 14 nt, Human
uaaugguaccagau

SEQ ID NO: 2923690 - RNA, 16 nt, Human
uaaugguaccagauaa

SEQ ID NO: 2923691 - RNA, 19 nt, Human
uaaugguaccagauaaaau

SEQ ID NO: 2923692 - RNA, 17 nt, Human
uaaugguaccagauaaa

SEQ ID NO: 2923693 - RNA, 18 nt, Human
uaaugguaccagauaaaa

SEQ ID NO: 2923694 - RNA, 20 nt, Human
uaaaguuagucuacucuuaa

SEQ ID NO: 2923695 - RNA, 16 nt, Human
uaaaguuagucuacuc

SEQ ID NO: 2923696 - RNA, 15 nt, Human
uaaaguuagucuacu

SEQ ID NO: 2923697 - RNA, 18 nt, Human
uaaaacaauauuguuucu

SEQ ID NO: 2923698 - RNA, 14 nt, Human
uaaaacaauauugu

SEQ ID NO: 2923699 - RNA, 21 nt, Human
uaaaagggauuacccaagcaa

SEQ ID NO: 2923700 - RNA, 19 nt, Human
uaaaagggauuacccaagc

SEQ ID NO: 2923701 - RNA, 20 nt, Human
uaaaagggauuacccaagca

SEQ ID NO: 2923702 - RNA, 18 nt, Human
guugugaccugaaguuca

SEQ ID NO: 2923703 - RNA, 13 nt, Human
guugugaccugaa

SEQ ID NO: 2923704 - RNA, 17 nt, Human
guugugaccugaaguuc

SEQ ID NO: 2923705 - RNA, 16 nt, Human
guuuaccugugaaaua

SEQ ID NO: 2923706 - RNA, 17 nt, Human
guguaguugaacugaua

SEQ ID NO: 2923707 - RNA, 15 nt, Human
guguaguugaacuga

SEQ ID NO: 2923708 - RNA, 22 nt, Human
guguauccauuaucauguguaa

SEQ ID NO: 2923709 - RNA, 23 nt, Human
guguauccauuaucauguguaau

SEQ ID NO: 2923710 - RNA, 16 nt, Human
guguauccauuaucau

SEQ ID NO: 2923711 - RNA, 20 nt, Human
guguauccauuaucaugugu

SEQ ID NO: 2923712 - RNA, 14 nt, Human
guguaaucaauaaa

SEQ ID NO: 2923713 - RNA, 15 nt, Human
guguaaucaauaaac

SEQ ID NO: 2923714 - RNA, 16 nt, Human
guguaaucaauaaacg

SEQ ID NO: 2923715 - RNA, 17 nt, Human
guguaaucaauaaacga

SEQ ID NO: 2923716 - RNA, 19 nt, Human
guguaaucaauaaacgauu

SEQ ID NO: 2923717 - RNA, 14 nt, Human
guguguuugugauu

SEQ ID NO: 2923718 - RNA, 18 nt, Human
guguguuuucauaauaaa

SEQ ID NO: 2923719 - RNA, 17 nt, Human
guguguuuucauaauaa

SEQ ID NO: 2923720 - RNA, 16 nt, Human
guguuuucauaauaaa

SEQ ID NO: 2923721 - RNA, 15 nt, Human
guguuuucauaauaa

SEQ ID NO: 2923722 - RNA, 14 nt, Human
guguuuucauaaua

SEQ ID NO: 2923723 - RNA, 13 nt, Human
guguuuucauaau

SEQ ID NO: 2923724 - RNA, 21 nt, Human
guuauuagggugguauuuagu

SEQ ID NO: 2923725 - RNA, 16 nt, Human
guuauaaaagugauug

SEQ ID NO: 2923726 - RNA, 12 nt, Human
guuauaaaagug

SEQ ID NO: 2923727 - RNA, 14 nt, Human
guuauaaaagugau

SEQ ID NO: 2923728 - RNA, 22 nt, Human
guuauaaaagugauuguuggca

SEQ ID NO: 2923729 - RNA, 14 nt, Human
guuacucugaaggg

SEQ ID NO: 2923730 - RNA, 11 nt, Human
guuacucugaa

SEQ ID NO: 2923731 - RNA, 12 nt, Human
guugauugcuaa

SEQ ID NO: 2923732 - RNA, 13 nt, Human
guugauugcuaaa

SEQ ID NO: 2923733 - RNA, 14 nt, Human
guugauugcuaaau

SEQ ID NO: 2923734 - RNA, 15 nt, Human
guugauugcuaaaug

SEQ ID NO: 2923735 - RNA, 16 nt, Human
guugauugcuaaaugu

SEQ ID NO: 2923736 - RNA, 17 nt, Human
guugauugcuaaaugua

SEQ ID NO: 2923737 - RNA, 22 nt, Human
guugauugcuaaauguaacagu

SEQ ID NO: 2923738 - RNA, 18 nt, Human
guugauugcuaaauguaa

SEQ ID NO: 2923739 - RNA, 20 nt, Human
guugauugcuaaauguaaca

SEQ ID NO: 2923740 - RNA, 17 nt, Human
guugccaaacagccaca

SEQ ID NO: 2923741 - RNA, 18 nt, Human
guugccaaacagccacac

SEQ ID NO: 2923742 - RNA, 21 nt, Human
guugaacugauaguuacuguu

SEQ ID NO: 2923743 - RNA, 17 nt, Human
gugacuaauuguauaac

SEQ ID NO: 2923744 - RNA, 15 nt, Human
gugacuaauuguaua

SEQ ID NO: 2923745 - RNA, 22 nt, Human
gugacuaauuguauaacagguu

SEQ ID NO: 2923746 - RNA, 23 nt, Human
gugacuaauuguauaacagguua

SEQ ID NO: 2923747 - RNA, 18 nt, Human
gugacuaauuguauaaca

SEQ ID NO: 2923748 - RNA, 19 nt, Human
gugacuaauuguauaacag

SEQ ID NO: 2923749 - RNA, 20 nt, Human
gugacuaauuguauaacagg

SEQ ID NO: 2923750 - RNA, 21 nt, Human
gugacuaauuguauaacaggu

SEQ ID NO: 2923751 - RNA, 19 nt, Human
gugacgcugaauaaauguc

SEQ ID NO: 2923752 - RNA, 15 nt, Human
gugacgcugaauaaa

SEQ ID NO: 2923753 - RNA, 17 nt, Human
gugacgcugaauaaaug

SEQ ID NO: 2923754 - RNA, 18 nt, Human
gugacgcugaauaaaugu

SEQ ID NO: 2923755 - RNA, 16 nt, Human
gucuuuuuuuuaaugu

SEQ ID NO: 2923756 - RNA, 17 nt, Human
gucuuuuuuuuaaugug

SEQ ID NO: 2923757 - RNA, 18 nt, Human
gucuuuuuuuuaaugugc

SEQ ID NO: 2923758 - RNA, 19 nt, Human
gucuuuuuuuuaaugugcu

SEQ ID NO: 2923759 - RNA, 22 nt, Human
gucuuuuuuuuaaugugcugug

SEQ ID NO: 2923760 - RNA, 23 nt, Human
guaucuuguuuuuccacuacugc

SEQ ID NO: 2923761 - RNA, 12 nt, Human
guccacugucac

SEQ ID NO: 2923762 - RNA, 11 nt, Human
uuuuucucuaa

SEQ ID NO: 2923763 - RNA, 22 nt, Human
uuucuguucuguggaaagugua

SEQ ID NO: 2923764 - RNA, 15 nt, Human
uuugguggagauaaa

SEQ ID NO: 2923765 - RNA, 11 nt, Human
uuuuaaugugc

SEQ ID NO: 2923766 - RNA, 12 nt, Human
uuuuaaugugcu

SEQ ID NO: 2923767 - RNA, 19 nt, Human
uuuuaaugugcuguguaaa

SEQ ID NO: 2923768 - RNA, 21 nt, Human
uuuuaaugugcuguguaaagu

SEQ ID NO: 2923769 - RNA, 13 nt, Human
uuuuaaugugcug

SEQ ID NO: 2923770 - RNA, 15 nt, Human
uuuuaaugugcugug

SEQ ID NO: 2923771 - RNA, 17 nt, Human
uuuuaaugugcugugua

SEQ ID NO: 2923772 - RNA, 18 nt, Human
uuuuaaugugcuguguaa

SEQ ID NO: 2923773 - RNA, 14 nt, Human
gccaucuugguaaa

SEQ ID NO: 2923774 - RNA, 15 nt, Human
gccaucuugguaaau

SEQ ID NO: 2923775 - RNA, 16 nt, Human
gccaucuugguaaauu

SEQ ID NO: 2923776 - RNA, 22 nt, Human
gccaucuugguaaauuucccca

SEQ ID NO: 2923777 - RNA, 12 nt, Human
gcuacagguuac

SEQ ID NO: 2923778 - RNA, 14 nt, Human
gcuacagguuacaa

SEQ ID NO: 2923779 - RNA, 15 nt, Human
gcuacagguuacaac

SEQ ID NO: 2923780 - RNA, 16 nt, Human
gcuacagguuacaaca

SEQ ID NO: 2923781 - RNA, 18 nt, Human
gcuacagguuacaacaga

SEQ ID NO: 2923782 - RNA, 19 nt, Human
gcuacagguuacaacagau

SEQ ID NO: 2923783 - RNA, 20 nt, Human
gcuacagguuacaacagauu

SEQ ID NO: 2923784 - RNA, 14 nt, Human
gcauucucugaaga

SEQ ID NO: 2923785 - RNA, 23 nt, Human
gcaucuuacugaagguaaaauug

SEQ ID NO: 2923786 - RNA, 16 nt, Human
gcaucuuacugaaggu

SEQ ID NO: 2923787 - RNA, 15 nt, Human
gcaucuuacugaagg

SEQ ID NO: 2923788 - RNA, 21 nt, Human
gcagggccuagcugcuacaaa

SEQ ID NO: 2923789 - RNA, 17 nt, Human
gcagggccuagcugcua

SEQ ID NO: 2923790 - RNA, 20 nt, Human
gcagggccuagcugcuacaa

SEQ ID NO: 2923791 - RNA, 11 nt, Human
gauuugugaac

SEQ ID NO: 2923792 - RNA, 20 nt, Human
gauuugugaacucagccaag

SEQ ID NO: 2923793 - RNA, 16 nt, Human
gauaaagauuucuuga

SEQ ID NO: 2923794 - RNA, 13 nt, Human
gauaaagauuucu

SEQ ID NO: 2923795 - RNA, 21 nt, Human
gauacacccaaaguaucagga

SEQ ID NO: 2923796 - RNA, 16 nt, Human
gaucgugacgcugaau

SEQ ID NO: 2923797 - RNA, 22 nt, Human
gaucgugacgcugaauaaaugu

SEQ ID NO: 2923798 - RNA, 19 nt, Human
gaucgugacgcugaauaaa

SEQ ID NO: 2923799 - RNA, 20 nt, Human
gaucgugacgcugaauaaau

SEQ ID NO: 2923800 - RNA, 13 nt, Human
gagaaugaggguc

SEQ ID NO: 2923801 - RNA, 16 nt, Human
gagaauucuuacaugu

SEQ ID NO: 2923802 - RNA, 11 nt, Human
gagaagccauu

SEQ ID NO: 2923803 - RNA, 15 nt, Human
gagaagccauugucu

SEQ ID NO: 2923804 - RNA, 20 nt, Human
gagaagccauugucuucgga

SEQ ID NO: 2923805 - RNA, 22 nt, Human
gagaauucuuacauguuuucuu

SEQ ID NO: 2923806 - RNA, 18 nt, Human
gagaauucuuacauguuu

SEQ ID NO: 2923807 - RNA, 22 nt, Human
gagagccagagaagugacaggg

SEQ ID NO: 2923808 - RNA, 15 nt, Human
gagagccagagaagu

SEQ ID NO: 2923809 - RNA, 19 nt, Human
gagagccagagaagugaca

SEQ ID NO: 2923810 - RNA, 15 nt, Human
gagauaauaugagaa

SEQ ID NO: 2923811 - RNA, 22 nt, Human
gacaagguucuucccuuuuaca

SEQ ID NO: 2923812 - RNA, 20 nt, Human
gacguaggaacgguaaauuu

SEQ ID NO: 2923813 - RNA, 21 nt, Human
gacuaauuguauaacagguua

SEQ ID NO: 2923814 - RNA, 22 nt, Human
gacuaauuguauaacagguuau

SEQ ID NO: 2923815 - RNA, 15 nt, Human
gacuaauuguauaac

SEQ ID NO: 2923816 - RNA, 19 nt, Human
gacuaauuguauaacaggu

SEQ ID NO: 2923817 - RNA, 20 nt, Human
gacuaauuguauaacagguu

SEQ ID NO: 2923818 - RNA, 13 nt, Human
gacuaauuguaua

SEQ ID NO: 2923819 - RNA, 19 nt, Human
cuuuccguggcacugcaua

SEQ ID NO: 2923820 - RNA, 17 nt, Human
cuuuccguggcacugca

SEQ ID NO: 2923821 - RNA, 23 nt, Human
cuuuuuuaugugccguguuauug

SEQ ID NO: 2923822 - RNA, 18 nt, Human
cuuuuuuaugugccgugu

SEQ ID NO: 2923823 - RNA, 22 nt, Human
cuuuuuccagacacuuuuuuga

SEQ ID NO: 2923824 - RNA, 23 nt, Human
gaaaguguaaagcauuccaacaa

SEQ ID NO: 2923825 - RNA, 15 nt, Human
gaaaguguaaagcau

SEQ ID NO: 2923826 - RNA, 16 nt, Human
gaaaguguaaagcauu

SEQ ID NO: 2923827 - RNA, 12 nt, Human
gaaaguguaaag

SEQ ID NO: 2923828 - RNA, 13 nt, Human
gaaaguguaaagc

SEQ ID NO: 2923829 - RNA, 14 nt, Human
gaaaguguaaagca

SEQ ID NO: 2923830 - RNA, 16 nt, Human
gaaaggaguagaaaaa

SEQ ID NO: 2923831 - RNA, 15 nt, Human
gaaaggaguagaaaa

SEQ ID NO: 2923832 - RNA, 22 nt, Human
gaaaccuugguguaguugaacu

SEQ ID NO: 2923833 - RNA, 17 nt, Human
gaaaccuugguguaguu

SEQ ID NO: 2923834 - RNA, 19 nt, Human
gaaaugacuaaaaaacaaa

SEQ ID NO: 2923835 - RNA, 17 nt, Human
gaaggucaccugagccc

SEQ ID NO: 2923836 - RNA, 20 nt, Human
gaaggauguacauuuccaaa

SEQ ID NO: 2923837 - RNA, 17 nt, Human
gaaggauguacauuucc

SEQ ID NO: 2923838 - RNA, 16 nt, Human
gaaggauguacauuuc

SEQ ID NO: 2923839 - RNA, 15 nt, Human
gaaggauguacauuu

SEQ ID NO: 2923840 - RNA, 18 nt, Human
gaagaguggguuucacaa

SEQ ID NO: 2923841 - RNA, 17 nt, Human
gaagaguggguuucaca

SEQ ID NO: 2923842 - RNA, 12 nt, Human
cuguauuuguga

SEQ ID NO: 2923843 - RNA, 13 nt, Human
cuguauuugugac

SEQ ID NO: 2923844 - RNA, 14 nt, Human
cuguauuugugacu

SEQ ID NO: 2923845 - RNA, 15 nt, Human
cuguauuugugacua

SEQ ID NO: 2923846 - RNA, 16 nt, Human
cuguauuugugacuaa

SEQ ID NO: 2923847 - RNA, 17 nt, Human
cuguauuugugacuaau

SEQ ID NO: 2923848 - RNA, 19 nt, Human
cuguauuugugacuaauug

SEQ ID NO: 2923849 - RNA, 23 nt, Human
cuguauuugugacuaauuguaua

SEQ ID NO: 2923850 - RNA, 20 nt, Human
cuguauuugugacuaauugu

SEQ ID NO: 2923851 - RNA, 21 nt, Human
cuguauuugugacuaauugua

SEQ ID NO: 2923852 - RNA, 21 nt, Human
cugucccuucucuuaauuuaa

SEQ ID NO: 2923853 - RNA, 16 nt, Human
cugucccuucucuuaa

SEQ ID NO: 2923854 - RNA, 20 nt, Human
cuggcgacaguuuuccuucu

SEQ ID NO: 2923855 - RNA, 19 nt, Human
cuggcgacaguuuuccuuc

SEQ ID NO: 2923856 - RNA, 14 nt, Human
cugcauacaaucug

SEQ ID NO: 2923857 - RNA, 22 nt, Human
cugcuuggguggagaagccauu

SEQ ID NO: 2923858 - RNA, 20 nt, Human
cugcuuggguggagaagcca

SEQ ID NO: 2923859 - RNA, 21 nt, Human
cugcuuggguggagaagccau

SEQ ID NO: 2923860 - RNA, 14 nt, Human
cugcuuggguggag

SEQ ID NO: 2923861 - RNA, 18 nt, Human
cugcuuggguggagaagc

SEQ ID NO: 2923862 - RNA, 19 nt, Human
cucuucuuaacuuaaauuu

SEQ ID NO: 2923863 - RNA, 20 nt, Human
cucucuccuguacuuuuucc

SEQ ID NO: 2923864 - RNA, 15 nt, Human
cucucuccuguacuu

SEQ ID NO: 2923865 - RNA, 20 nt, Human
cugaagaguggguuucacaa

SEQ ID NO: 2923866 - RNA, 21 nt, Human
cuccaugagacacaucuccuc

SEQ ID NO: 2923867 - RNA, 15 nt, Human
cggaaaccuuggugu

SEQ ID NO: 2923868 - RNA, 14 nt, Human
cuaaauguaacagu

SEQ ID NO: 2923869 - RNA, 15 nt, Human
cuaaauguaacaguc

SEQ ID NO: 2923870 - RNA, 16 nt, Human
cuaaauguaacagucu

SEQ ID NO: 2923871 - RNA, 18 nt, Human
cuaaauguaacagucuga

SEQ ID NO: 2923872 - RNA, 19 nt, Human
cuaaauguaacagucugau

SEQ ID NO: 2923873 - RNA, 20 nt, Human
cuacuuuguccuuuuuguua

SEQ ID NO: 2923874 - RNA, 14 nt, Human
cuacuuuguccuuu

SEQ ID NO: 2923875 - RNA, 22 nt, Human
cuacuuuguccuuuuuguuauu

SEQ ID NO: 2923876 - RNA, 15 nt, Human
cuacucuuaagccau

SEQ ID NO: 2923877 - RNA, 22 nt, Human
cuacucuguuccuucacauccu

SEQ ID NO: 2923878 - RNA, 19 nt, Human
cuacucuguuccuucacau

SEQ ID NO: 2923879 - RNA, 16 nt, Human
cuacucuguuccuuca

SEQ ID NO: 2923880 - RNA, 15 nt, Human
cuacucuguuccuuc

SEQ ID NO: 2923881 - RNA, 16 nt, Human
cuacucuuaagccauc

SEQ ID NO: 2923882 - RNA, 17 nt, Human
cuacucuuaagccaucu

SEQ ID NO: 2923883 - RNA, 18 nt, Human
cuacucuuaagccaucuu

SEQ ID NO: 2923884 - RNA, 22 nt, Human
cuacucuuaagccaucuuggua

SEQ ID NO: 2923885 - RNA, 12 nt, Human
cuauuuggaauu

SEQ ID NO: 2923886 - RNA, 16 nt, Human
cuauuuggaauuuaua

SEQ ID NO: 2923887 - RNA, 15 nt, Human
ccguggcacugcaua

SEQ ID NO: 2923888 - RNA, 13 nt, Human
ccaucuugguaaa

SEQ ID NO: 2923889 - RNA, 17 nt, Human
ccaucuugguaaauuuc

SEQ ID NO: 2923890 - RNA, 14 nt, Human
ccaucuugguaaau

SEQ ID NO: 2923891 - RNA, 18 nt, Human
cauugagaacugcauaug

SEQ ID NO: 2923892 - RNA, 23 nt, Human
cauugagaacugcauauguuucg

SEQ ID NO: 2923893 - RNA, 19 nt, Human
cauugagaacugcauaugu

SEQ ID NO: 2923894 - RNA, 12 nt, Human
ccaacaguguga

SEQ ID NO: 2923895 - RNA, 13 nt, Human
ccaacagugugaa

SEQ ID NO: 2923896 - RNA, 14 nt, Human
ccaacagugugaag

SEQ ID NO: 2923897 - RNA, 15 nt, Human
ccaacagugugaagu

SEQ ID NO: 2923898 - RNA, 16 nt, Human
ccaacagugugaaguu

SEQ ID NO: 2923899 - RNA, 19 nt, Human
ccaacagugugaaguuaga

SEQ ID NO: 2923900 - RNA, 22 nt, Human
ccaacagugugaaguuagaauu

SEQ ID NO: 2923901 - RNA, 16 nt, Human
cauguguaaucaauaa

SEQ ID NO: 2923902 - RNA, 23 nt, Human
cauguuuuagacaaauacucaug

SEQ ID NO: 2923903 - RNA, 17 nt, Human
caugcaucuuacugaag

SEQ ID NO: 2923904 - RNA, 16 nt, Human
caugcaucuuacugaa

SEQ ID NO: 2923905 - RNA, 14 nt, Human
caugcaucuuacug

SEQ ID NO: 2923906 - RNA, 19 nt, Human
cauggcaccaaagccacca

SEQ ID NO: 2923907 - RNA, 20 nt, Human
cauggcaccaaagccaccag

SEQ ID NO: 2923908 - RNA, 14 nt, Human
cauggaaugguuau

SEQ ID NO: 2923909 - RNA, 15 nt, Human
cauggaaugguuaua

SEQ ID NO: 2923910 - RNA, 17 nt, Human
cauggaaugguuauaaa

SEQ ID NO: 2923911 - RNA, 21 nt, Human
cauggaaugguuauaaaagug

SEQ ID NO: 2923912 - RNA, 16 nt, Human
caugcuguugauugcu

SEQ ID NO: 2923913 - RNA, 17 nt, Human
caugcuguugauugcua

SEQ ID NO: 2923914 - RNA, 18 nt, Human
caugcuguugauugcuaa

SEQ ID NO: 2923915 - RNA, 19 nt, Human
caugcuguugauugcuaaa

SEQ ID NO: 2923916 - RNA, 20 nt, Human
caugcuguugauugcuaaau

SEQ ID NO: 2923917 - RNA, 21 nt, Human
caugcuguugauugcuaaaug

SEQ ID NO: 2923918 - RNA, 22 nt, Human
caugcuguugauugcuaaaugu

SEQ ID NO: 2923919 - RNA, 23 nt, Human
caugcuguugauugcuaaaugua

SEQ ID NO: 2923920 - RNA, 11 nt, Human
cauacugcugu

SEQ ID NO: 2923921 - RNA, 14 nt, Human
caucuugguaaauu

SEQ ID NO: 2923922 - RNA, 12 nt, Human
caucuugguaaa

SEQ ID NO: 2923923 - RNA, 13 nt, Human
caucuugguaaau

SEQ ID NO: 2923924 - RNA, 15 nt, Human
cauccuaugcaauau

SEQ ID NO: 2923925 - RNA, 18 nt, Human
caucuagcaaauguuaug

SEQ ID NO: 2923926 - RNA, 14 nt, Human
caucuagcaaaugu

SEQ ID NO: 2923927 - RNA, 22 nt, Human
caguuuuccuucucaucuguga

SEQ ID NO: 2923928 - RNA, 13 nt, Human
caguuuuccuucu

SEQ ID NO: 2923929 - RNA, 15 nt, Human
cauaaagucagugcc

SEQ ID NO: 2923930 - RNA, 17 nt, Human
caguguguuugugauug

SEQ ID NO: 2923931 - RNA, 14 nt, Human
cagugguuauuuag

SEQ ID NO: 2923932 - RNA, 21 nt, Human
cagugugaaguuagaauuccu

SEQ ID NO: 2923933 - RNA, 13 nt, Human
cagugugaaguua

SEQ ID NO: 2923934 - RNA, 14 nt, Human
cagugugaaguuag

SEQ ID NO: 2923935 - RNA, 15 nt, Human
cagugugaaguuaga

SEQ ID NO: 2923936 - RNA, 17 nt, Human
cagugugaaguuagaau

SEQ ID NO: 2923937 - RNA, 20 nt, Human
cagugugaaguuagaauucc

SEQ ID NO: 2923938 - RNA, 21 nt, Human
agggugaugccagguucuauu

SEQ ID NO: 2923939 - RNA, 18 nt, Human
auuguauaacagguuauu

SEQ ID NO: 2923940 - RNA, 15 nt, Human T-lymphotropic virus 2
ccugacgucccuccc

SEQ ID NO: 2923941 - RNA, 17 nt, Human T-lymphotropic virus 2
cccucggggaucagcuc

SEQ ID NO: 2923942 - RNA, 21 nt, Human T-lymphotropic virus 2
gcaagcccuuugcgacuuccu

SEQ ID NO: 2923943 - RNA, 20 nt, Human T-lymphotropic virus 2
acuuccugaggaacuccccu

SEQ ID NO: 2923944 - RNA, 20 nt, Human T-lymphotropic virus 2
cccucuugggcagcuauccu

SEQ ID NO: 2923945 - RNA, 22 nt, Human T-lymphotropic virus 2
gcugaaaaacaaggcucugacg

SEQ ID NO: 2923946 - RNA, 16 nt, Human T-lymphotropic virus 2
ucucgguuccucucca

SEQ ID NO: 2923947 - RNA, 12 nt, Human T-lymphotropic virus 2
cuucuuuucccc

SEQ ID NO: 2923948 - RNA, 16 nt, Human T-lymphotropic virus 2
ccaggagcccccucag

SEQ ID NO: 2923949 - RNA, 22 nt, Human T-lymphotropic virus 2
uagacucugccuuaaacuucac

SEQ ID NO: 2923950 - RNA, 14 nt, Human T-lymphotropic virus 2
cagccucucauccu

SEQ ID NO: 2923951 - RNA, 19 nt, Human T-lymphotropic virus 2
agccacaccaaccuccccg

SEQ ID NO: 2923952 - RNA, 15 nt, Human T-lymphotropic virus 2
ccagccacccagggc

SEQ ID NO: 2923953 - RNA, 22 nt, Human T-lymphotropic virus 2
caacaguuugaccccaccgcca

SEQ ID NO: 2923954 - RNA, 15 nt, Human T-lymphotropic virus 2
gguaagucuccucuc

SEQ ID NO: 2923955 - RNA, 14 nt, Human T-lymphotropic virus 2
ggcucgcucccuca

SEQ ID NO: 2923956 - RNA, 16 nt, Human T-lymphotropic virus 2
uguauccguccuccag

SEQ ID NO: 2923957 - RNA, 17 nt, Human T-lymphotropic virus 2
caccucagaacccacuc

SEQ ID NO: 2923958 - RNA, 13 nt, Human T-lymphotropic virus 2
cuauaccucccag

SEQ ID NO: 2923959 - RNA, 15 nt, Human T-lymphotropic virus 2
gauagauccagccuc

SEQ ID NO: 2923960 - RNA, 13 nt, Human T-lymphotropic virus 2
cucuccucuccaa

SEQ ID NO: 2923961 - RNA, 20 nt, Human T-lymphotropic virus 2
uacaucccccaggagccccc

SEQ ID NO: 2923962 - RNA, 16 nt, Human T-lymphotropic virus 2
guaucuccuccuacca

SEQ ID NO: 2923963 - RNA, 18 nt, Human T-lymphotropic virus 2
ugccaagcauggacaucc

SEQ ID NO: 2923964 - RNA, 15 nt, Human T-lymphotropic virus 2
cccuuccaccucagg

SEQ ID NO: 2923965 - RNA, 22 nt, Human T-lymphotropic virus 2
acuuccccuagcgcugaaaaac

SEQ ID NO: 2923966 - RNA, 23 nt, Human T-lymphotropic virus 2
ggcgguacaacaguuugacccca

SEQ ID NO: 2923967 - RNA, 15 nt, Human T-lymphotropic virus 2
ucaucccccugcggc

SEQ ID NO: 2923968 - RNA, 16 nt, Human T-lymphotropic virus 2
cuuuugcuguccuucu

SEQ ID NO: 2923969 - RNA, 16 nt, Human T-lymphotropic virus 2
gcagcaaauccccuag

SEQ ID NO: 2923970 - RNA, 20 nt, Human T-lymphotropic virus 2
cugguggaguaacaggcucc

SEQ ID NO: 2923971 - RNA, 14 nt, Human T-lymphotropic virus 2
ccuggccaccuguc

SEQ ID NO: 2923972 - RNA, 20 nt, Human T-lymphotropic virus 2
auguaaauuucacccaggaa

SEQ ID NO: 2923973 - RNA, 15 nt, Human T-lymphotropic virus 2
gacuacgugcugcca

SEQ ID NO: 2923974 - RNA, 23 nt, Human T-lymphotropic virus 2
ucaacgccgcccucuuggcaggc

SEQ ID NO: 2923975 - RNA, 14 nt, Human T-lymphotropic virus 2
aacagcucuccaga

SEQ ID NO: 2923976 - RNA, 12 nt, Human T-lymphotropic virus 2
aguccuauacac

SEQ ID NO: 2923977 - RNA, 16 nt, Human T-lymphotropic virus 2
aucagcuccccucccu

SEQ ID NO: 2923978 - RNA, 23 nt, Human T-lymphotropic virus 2
gaagacucucuuacaccucccaa

SEQ ID NO: 2923979 - RNA, 21 nt, Human T-lymphotropic virus 2
cuccaggcacugaccacgcau

SEQ ID NO: 2923980 - RNA, 11 nt, Human T-lymphotropic virus 2
cauaggccucg

SEQ ID NO: 2923981 - RNA, 20 nt, Human T-lymphotropic virus 2
uuccgcccaucaaacccucc

SEQ ID NO: 2923982 - RNA, 12 nt, Human T-lymphotropic virus 2
aacaccuucccc

SEQ ID NO: 2923983 - RNA, 22 nt, Human T-lymphotropic virus 2
accuucccccaccuccccaagu

SEQ ID NO: 2923984 - RNA, 13 nt, Human T-lymphotropic virus 2
guccucccggagg

SEQ ID NO: 2923985 - RNA, 22 nt, Human T-lymphotropic virus 2
cucgucauauuguuuggccccu

SEQ ID NO: 2923986 - RNA, 12 nt, Human T-lymphotropic virus 2
uacaccucccaa

SEQ ID NO: 2923987 - RNA, 23 nt, Human T-lymphotropic virus 2
ggcccuccgauuucgacuuccag

SEQ ID NO: 2923988 - RNA, 13 nt, Human T-lymphotropic virus 2
uuccuucccuugc

SEQ ID NO: 2923989 - RNA, 13 nt, Human T-lymphotropic virus 2
ccagcccccacca

SEQ ID NO: 2923990 - RNA, 20 nt, Human T-lymphotropic virus 2
uuggcaggcgucccggggcc

SEQ ID NO: 2923991 - RNA, 17 nt, Human T-lymphotropic virus 2
gacccaaaaggucagac

SEQ ID NO: 2923992 - RNA, 14 nt, Human T-lymphotropic virus 2
ccuuaccccuccca

SEQ ID NO: 2923993 - RNA, 21 nt, Human T-lymphotropic virus 2
ugucagacucgccucucccug

SEQ ID NO: 2923994 - RNA, 12 nt, Human T-lymphotropic virus 2
gcccuccuggcc

SEQ ID NO: 2923995 - RNA, 13 nt, Human T-lymphotropic virus 2
uagccagccccac

SEQ ID NO: 2923996 - RNA, 17 nt, Human T-lymphotropic virus 2
uuccauaaccuucaccu

SEQ ID NO: 2923997 - RNA, 19 nt, Human T-lymphotropic virus 2
ucccgcugcuccuccgcca

SEQ ID NO: 2923998 - RNA, 22 nt, Human T-lymphotropic virus 2
ccguggagcgcagcaagggcua

SEQ ID NO: 2923999 - RNA, 18 nt, Human T-lymphotropic virus 2
ccugaacugcuccuccca

SEQ ID NO: 2924000 - RNA, 15 nt, Human T-lymphotropic virus 2
cuuuccccaacucca

SEQ ID NO: 2924001 - RNA, 18 nt, Human T-lymphotropic virus 2
cggggaucagcuccccuc

SEQ ID NO: 2924002 - RNA, 17 nt, Human T-lymphotropic virus 2
caaagccuuccaucccu

SEQ ID NO: 2924003 - RNA, 19 nt, Human T-lymphotropic virus 2
aaaacccgauggcaaaucc

SEQ ID NO: 2924004 - RNA, 13 nt, Human T-lymphotropic virus 2
uccaugacccucc

SEQ ID NO: 2924005 - RNA, 22 nt, Human T-lymphotropic virus 2
gguguacaggacuucuccccua

SEQ ID NO: 2924006 - RNA, 15 nt, Human T-lymphotropic virus 2
ucccucgccuccccu

SEQ ID NO: 2924007 - RNA, 17 nt, Human T-lymphotropic virus 2
cuguccuaaccuucccc

SEQ ID NO: 2924008 - RNA, 17 nt, Human T-lymphotropic virus 2
ccccuagcgcccccgcc

SEQ ID NO: 2924009 - RNA, 16 nt, Human T-lymphotropic virus 2
cgaccuuaauucccua

SEQ ID NO: 2924010 - RNA, 19 nt, Human T-lymphotropic virus 2
cccucgccuccccuccuuc

SEQ ID NO: 2924011 - RNA, 22 nt, Human T-lymphotropic virus 2
cugcacguggaaccucgaccuu

SEQ ID NO: 2924012 - RNA, 15 nt, Human T-lymphotropic virus 2
ccaaagcccccaggg

SEQ ID NO: 2924013 - RNA, 22 nt, Human T-lymphotropic virus 2
cagacgaccccagcccccacca

SEQ ID NO: 2924014 - RNA, 13 nt, Human T-lymphotropic virus 2
cucgccucucccu

SEQ ID NO: 2924015 - RNA, 23 nt, Human T-lymphotropic virus 2
gcuagggcuuccugaaccucucc

SEQ ID NO: 2924016 - RNA, 17 nt, Human T-lymphotropic virus 2
ccaucuaccuccaccau

SEQ ID NO: 2924017 - RNA, 17 nt, Human T-lymphotropic virus 2
uccuacacacagggaca

SEQ ID NO: 2924018 - RNA, 19 nt, Human T-lymphotropic virus 2
ugaccccaccgccaaggac

SEQ ID NO: 2924019 - RNA, 17 nt, Human T-lymphotropic virus 2
ucacggagacucaccuu

SEQ ID NO: 2924020 - RNA, 17 nt, Human T-lymphotropic virus 2
gcaagggcuagggcuuc

SEQ ID NO: 2924021 - RNA, 15 nt, Human T-lymphotropic virus 2
caaguaaaggcucug

SEQ ID NO: 2924022 - RNA, 16 nt, Human T-lymphotropic virus 2
ucaaacccccucagga

SEQ ID NO: 2924023 - RNA, 22 nt, Human T-lymphotropic virus 2
caagaccaucuaccuccaccau

SEQ ID NO: 2924024 - RNA, 16 nt, Human T-lymphotropic virus 2
acaggacaucacuccc

SEQ ID NO: 2924025 - RNA, 23 nt, Human T-lymphotropic virus 2
cucccaagguaagucuccucuca

SEQ ID NO: 2924026 - RNA, 18 nt, Human T-lymphotropic virus 2
gagccagccacccagggc

SEQ ID NO: 2924027 - RNA, 18 nt, Human T-lymphotropic virus 2
ucccagacgaccccagcc

SEQ ID NO: 2924028 - RNA, 18 nt, Human T-lymphotropic virus 2
uguaacuauggccccggg

SEQ ID NO: 2924029 - RNA, 12 nt, Human T-lymphotropic virus 2
cugucuccucuc

SEQ ID NO: 2924030 - RNA, 19 nt, Human T-lymphotropic virus 2
ccaggcggccuugccaccc

SEQ ID NO: 2924031 - RNA, 17 nt, Human T-lymphotropic virus 2
ccaacccuucuccagga

SEQ ID NO: 2924032 - RNA, 14 nt, Human T-lymphotropic virus 2
caagcccgcggaca

SEQ ID NO: 2924033 - RNA, 20 nt, Human T-lymphotropic virus 2
ucagacucgccucucccugg

SEQ ID NO: 2924034 - RNA, 23 nt, Human T-lymphotropic virus 2
aucucacuagccuaccgacagcc

SEQ ID NO: 2924035 - RNA, 16 nt, Human T-lymphotropic virus 2
cagccccaccaaugag

SEQ ID NO: 2924036 - RNA, 16 nt, Human T-lymphotropic virus 2
ucuccuuggccucauc

SEQ ID NO: 2924037 - RNA, 19 nt, Human T-lymphotropic virus 2
gcuucuauaccucccagac

SEQ ID NO: 2924038 - RNA, 23 nt, Human T-lymphotropic virus 2
ugcaacaacuccauuauccuccc

SEQ ID NO: 2924039 - RNA, 18 nt, Human T-lymphotropic virus 2
uuguaucacccucacccc

SEQ ID NO: 2924040 - RNA, 14 nt, Human T-lymphotropic virus 2
auuccccagccaug

SEQ ID NO: 2924041 - RNA, 13 nt, Human T-lymphotropic virus 2
caagaccaucuac

SEQ ID NO: 2924042 - RNA, 14 nt, Human T-lymphotropic virus 2
cugaaccucuccgg

SEQ ID NO: 2924043 - RNA, 14 nt, Human T-lymphotropic virus 2
caaaccuccucccg

SEQ ID NO: 2924044 - RNA, 13 nt, Human T-lymphotropic virus 2
agccaccaaugcc

SEQ ID NO: 2924045 - RNA, 19 nt, Human T-lymphotropic virus 2
guguacaggacuucucccc

SEQ ID NO: 2924046 - RNA, 23 nt, Human T-lymphotropic virus 2
cgaacaccuucccccaccucccc

SEQ ID NO: 2924047 - RNA, 20 nt, Human T-lymphotropic virus 2
ccuacuugggcugccaagca

SEQ ID NO: 2924048 - RNA, 16 nt, Human T-lymphotropic virus 2
ucccccaggagccccc

SEQ ID NO: 2924049 - RNA, 12 nt, Human T-lymphotropic virus 2
ucgcaccugcuc

SEQ ID NO: 2924050 - RNA, 14 nt, Human T-lymphotropic virus 2
aaaacgaaaccuca

SEQ ID NO: 2924051 - RNA, 15 nt, Human T-lymphotropic virus 2
agaugagucgccccc

SEQ ID NO: 2924052 - RNA, 17 nt, Human T-lymphotropic virus 2
gcagcuauccuacaggg

SEQ ID NO: 2924053 - RNA, 19 nt, Human T-lymphotropic virus 2
cauguccuaacccccucca

SEQ ID NO: 2924054 - RNA, 22 nt, Human T-lymphotropic virus 2
gcagccguccucaaccccauga

SEQ ID NO: 2924055 - RNA, 15 nt, Human T-lymphotropic virus 2
acucaggaccaggca

SEQ ID NO: 2924056 - RNA, 15 nt, Human T-lymphotropic virus 2
cuccuggccaccugu

SEQ ID NO: 2924057 - RNA, 22 nt, Human T-lymphotropic virus 2
cauguaacuauggccccgggac

SEQ ID NO: 2924058 - RNA, 17 nt, Human T-lymphotropic virus 2
ccauguccgcagccaca

SEQ ID NO: 2924059 - RNA, 15 nt, Human T-lymphotropic virus 2
acgugcugccaagcc

SEQ ID NO: 2924060 - RNA, 18 nt, Human T-lymphotropic virus 2
ggcuuccugaaccucucc

SEQ ID NO: 2924061 - RNA, 11 nt, Human T-lymphotropic virus 2
uaccucccaga

SEQ ID NO: 2924062 - RNA, 21 nt, Human T-lymphotropic virus 2
caaggccuccacggccucacc

SEQ ID NO: 2924063 - RNA, 18 nt, Human T-lymphotropic virus 2
ccuccgccaaauccaggc

SEQ ID NO: 2924064 - RNA, 20 nt, Human T-lymphotropic virus 2
gucagaccgucucacacaaa

SEQ ID NO: 2924065 - RNA, 19 nt, Human T-lymphotropic virus 2
agcagccguccucaacccc

SEQ ID NO: 2924066 - RNA, 20 nt, Human T-lymphotropic virus 2
gggguuuaaaaacagcccca

SEQ ID NO: 2924067 - RNA, 13 nt, Human T-lymphotropic virus 2
ucuugcccuuccg

SEQ ID NO: 2924068 - RNA, 15 nt, Human T-lymphotropic virus 2
caacccuucccuugg

SEQ ID NO: 2924069 - RNA, 14 nt, Human T-lymphotropic virus 2
uaggaacugaaacc

SEQ ID NO: 2924070 - RNA, 23 nt, Human T-lymphotropic virus 2
accuacccaccacaauguuccaa

SEQ ID NO: 2924071 - RNA, 18 nt, Human T-lymphotropic virus 2
ggcccccccccacacagc

SEQ ID NO: 2924072 - RNA, 21 nt, Human T-lymphotropic virus 2
ccaccauguccgcagccacac

SEQ ID NO: 2924073 - RNA, 20 nt, Human T-lymphotropic virus 2
cagcgccguucuucaggcca

SEQ ID NO: 2924074 - RNA, 13 nt, Human T-lymphotropic virus 2
uuucuccacccug

SEQ ID NO: 2924075 - RNA, 16 nt, Human T-lymphotropic virus 2
gucaucuuucaaccca

SEQ ID NO: 2924076 - RNA, 21 nt, Human T-lymphotropic virus 2
gaacauguccuaacccccucc

SEQ ID NO: 2924077 - RNA, 12 nt, Human T-lymphotropic virus 2
ccacuagcccag

SEQ ID NO: 2924078 - RNA, 18 nt, Human T-lymphotropic virus 2
aauuacaacaacucuccc

SEQ ID NO: 2924079 - RNA, 15 nt, Human T-lymphotropic virus 2
gcucccucaccgacc

SEQ ID NO: 2924080 - RNA, 19 nt, Human T-lymphotropic virus 2
ccaauggacacucacugaa

SEQ ID NO: 2924081 - RNA, 13 nt, Human T-lymphotropic virus 2
cccugauccuagg

SEQ ID NO: 2924082 - RNA, 15 nt, Human T-lymphotropic virus 2
uucaaacuccuccaa

SEQ ID NO: 2924083 - RNA, 13 nt, Human T-lymphotropic virus 2
augccauucacaa

SEQ ID NO: 2924084 - RNA, 12 nt, Human T-lymphotropic virus 2
ccgcuccucacg

SEQ ID NO: 2924085 - RNA, 16 nt, Human T-lymphotropic virus 2
ccuauacacuccaacu

SEQ ID NO: 2924086 - RNA, 22 nt, Human T-lymphotropic virus 2
accucaacgccgcccucuuggc

SEQ ID NO: 2924087 - RNA, 15 nt, Human T-lymphotropic virus 2
ugcggcuccuccaug

SEQ ID NO: 2924088 - RNA, 16 nt, Human T-lymphotropic virus 2
cuccccccccuucccc

SEQ ID NO: 2924089 - RNA, 18 nt, Human T-lymphotropic virus 2
cauguacucuacaccccc

SEQ ID NO: 2924090 - RNA, 20 nt, Human T-lymphotropic virus 2
cuuccccacccagagaaccu

SEQ ID NO: 2924091 - RNA, 13 nt, Human T-lymphotropic virus 2
acaaaccuccucc

SEQ ID NO: 2924092 - RNA, 15 nt, Human T-lymphotropic virus 2
caauguugcuuccuc

SEQ ID NO: 2924093 - RNA, 15 nt, Human T-lymphotropic virus 2
cuccaguccauccug

SEQ ID NO: 2924094 - RNA, 22 nt, Human T-lymphotropic virus 2
uauaaacuccccggccuuacca

SEQ ID NO: 2924095 - RNA, 20 nt, Human T-lymphotropic virus 2
accccucccaaaccaccucc

SEQ ID NO: 2924096 - RNA, 13 nt, Human T-lymphotropic virus 2
auccuccccccuu

SEQ ID NO: 2924097 - RNA, 21 nt, Human T-lymphotropic virus 2
ccuccgauuucgacuuccagc

SEQ ID NO: 2924098 - RNA, 14 nt, Human T-lymphotropic virus 2
accacuccugucuc

SEQ ID NO: 2924099 - RNA, 13 nt, Human T-lymphotropic virus 2
uagggcuuccuga

SEQ ID NO: 2924100 - RNA, 20 nt, Human T-lymphotropic virus 2
cuccuccaucccaacccuuc

SEQ ID NO: 2924101 - RNA, 20 nt, Human T-lymphotropic virus 2
augucagacucgccucuccc

SEQ ID NO: 2924102 - RNA, 19 nt, Human T-lymphotropic virus 2
aaccugagcgccuccaggc

SEQ ID NO: 2924103 - RNA, 21 nt, Human T-lymphotropic virus 2
ccccaggucuaauauggaccu

SEQ ID NO: 2924104 - RNA, 12 nt, Human T-lymphotropic virus 2
cuccucucagcc

SEQ ID NO: 2924105 - RNA, 23 nt, Human T-lymphotropic virus 2
cuccccaagcaguaccagccaua

SEQ ID NO: 2924106 - RNA, 17 nt, Human T-lymphotropic virus 2
ccucccagacgacccca

SEQ ID NO: 2924107 - RNA, 17 nt, Human T-lymphotropic virus 2
agccacgccccccuccu

SEQ ID NO: 2924108 - RNA, 14 nt, Human T-lymphotropic virus 2
gcucuacuccuccu

SEQ ID NO: 2924109 - RNA, 16 nt, Human T-lymphotropic virus 2
ccuacaacaaugccag

SEQ ID NO: 2924110 - RNA, 18 nt, Human T-lymphotropic virus 2
cugccucuuagacaccca

SEQ ID NO: 2924111 - RNA, 15 nt, Human T-lymphotropic virus 2
cuccugucuccccca

SEQ ID NO: 2924112 - RNA, 19 nt, Human T-lymphotropic virus 2
gcccagcaaggucuuagac

SEQ ID NO: 2924113 - RNA, 17 nt, Human T-lymphotropic virus 2
cuuuuccccuucaggaa

SEQ ID NO: 2924114 - RNA, 23 nt, Human T-lymphotropic virus 2
cuccaggaaccacgacuccucag

SEQ ID NO: 2924115 - RNA, 23 nt, Human T-lymphotropic virus 2
ccaccuccccccccuuccccgga

SEQ ID NO: 2924116 - RNA, 23 nt, Human T-lymphotropic virus 2
gccauguaacuauggccccggga

SEQ ID NO: 2924117 - RNA, 12 nt, Human T-lymphotropic virus 2
cagccuccacca

SEQ ID NO: 2924118 - RNA, 21 nt, Human T-lymphotropic virus 2
ugccuuucuucccucucccgg

SEQ ID NO: 2924119 - RNA, 12 nt, Human T-lymphotropic virus 2
ccuucccuugcc

SEQ ID NO: 2924120 - RNA, 19 nt, Human T-lymphotropic virus 2
uccuccaugacccuccuag

SEQ ID NO: 2924121 - RNA, 21 nt, Human T-lymphotropic virus 2
ccccuggcuuggcuccacacc

SEQ ID NO: 2924122 - RNA, 18 nt, Human T-lymphotropic virus 2
ucugccuuaaacuucacu

SEQ ID NO: 2924123 - RNA, 19 nt, Human T-lymphotropic virus 2
auaacugcaacaacuccau

SEQ ID NO: 2924124 - RNA, 13 nt, Human T-lymphotropic virus 2
aaccaacacccag

SEQ ID NO: 2924125 - RNA, 19 nt, Human T-lymphotropic virus 2
cucagccuccaccaacuuc

SEQ ID NO: 2924126 - RNA, 23 nt, Human T-lymphotropic virus 2
gauuccauaaccuuggcagccaa

SEQ ID NO: 2924127 - RNA, 15 nt, Human T-lymphotropic virus 2
cacaauguuccaacc

SEQ ID NO: 2924128 - RNA, 19 nt, Human T-lymphotropic virus 2
cgacuagccucccgagcca

SEQ ID NO: 2924129 - RNA, 22 nt, Human T-lymphotropic virus 2
ccaauacccaaagcccccaggg

SEQ ID NO: 2924130 - RNA, 11 nt, Human T-lymphotropic virus 2
caaugaggaau

SEQ ID NO: 2924131 - RNA, 23 nt, Human T-lymphotropic virus 2
uccgcauacacgggccccgucuc

SEQ ID NO: 2924132 - RNA, 21 nt, Human T-lymphotropic virus 2
uggcaggcgucccggggccaa

SEQ ID NO: 2924133 - RNA, 16 nt, Human T-lymphotropic virus 2
ccucuccuuccccagg

SEQ ID NO: 2924134 - RNA, 20 nt, Human T-lymphotropic virus 2
acuugacacaggagccgacc

SEQ ID NO: 2924135 - RNA, 18 nt, Human T-lymphotropic virus 2
uaccacuccagccccugu

SEQ ID NO: 2924136 - RNA, 19 nt, Human T-lymphotropic virus 2
aggaguuuuguaccuccua

SEQ ID NO: 2924137 - RNA, 15 nt, Human T-lymphotropic virus 2
ugaagccucuacccc

SEQ ID NO: 2924138 - RNA, 24 nt, Human T-lymphotropic virus 2
ggcaccuccugaacugcuccuccc

SEQ ID NO: 2924139 - RNA, 17 nt, Human T-lymphotropic virus 2
caguaaaagccuucucc

SEQ ID NO: 2924140 - RNA, 19 nt, Human T-lymphotropic virus 2
caccccacaacaacuccau

SEQ ID NO: 2924141 - RNA, 15 nt, Human T-lymphotropic virus 2
cucuugcccaaccac

SEQ ID NO: 2924142 - RNA, 21 nt, Human T-lymphotropic virus 2
uucucgcucuacuccuccucg

SEQ ID NO: 2924143 - RNA, 17 nt, Human T-lymphotropic virus 2
agccaccaaugccauua

SEQ ID NO: 2924144 - RNA, 14 nt, Human T-lymphotropic virus 2
ucuccucucagccc

SEQ ID NO: 2924145 - RNA, 12 nt, Human T-lymphotropic virus 2
ccacaccaaggg

SEQ ID NO: 2924146 - RNA, 21 nt, Human T-lymphotropic virus 2
cuccaugcguuacaugccauu

SEQ ID NO: 2924147 - RNA, 20 nt, Human T-lymphotropic virus 2
ccaucuuacguucccuagcg

SEQ ID NO: 2924148 - RNA, 13 nt, Human T-lymphotropic virus 2
caggagcccccuc

SEQ ID NO: 2924149 - RNA, 16 nt, Human T-lymphotropic virus 2
cucccucgccuucccc

SEQ ID NO: 2924150 - RNA, 13 nt, Human T-lymphotropic virus 2
ccucggcaccucc

SEQ ID NO: 2924151 - RNA, 13 nt, Human T-lymphotropic virus 2
ccuggccccugcc

SEQ ID NO: 2924152 - RNA, 13 nt, Human T-lymphotropic virus 2
acaacaacuccau

SEQ ID NO: 2924153 - RNA, 21 nt, Human T-lymphotropic virus 2
uccccagggccccccgaucuc

SEQ ID NO: 2924154 - RNA, 13 nt, Human T-lymphotropic virus 2
uacuaccacccuc

SEQ ID NO: 2924155 - RNA, 16 nt, Human T-lymphotropic virus 2
gcggcuccuccaugac

SEQ ID NO: 2924156 - RNA, 17 nt, Human T-lymphotropic virus 2
gcugccaagccauggcc

SEQ ID NO: 2924157 - RNA, 15 nt, Human T-lymphotropic virus 2
accuucccccaccuc

SEQ ID NO: 2924158 - RNA, 18 nt, Human T-lymphotropic virus 2
ccauacuucgccuucacc

SEQ ID NO: 2924159 - RNA, 21 nt, Human T-lymphotropic virus 2
gauguaaauuucacccaggaa

SEQ ID NO: 2924160 - RNA, 17 nt, Human T-lymphotropic virus 2
acccacucagccuccac

SEQ ID NO: 2924161 - RNA, 20 nt, Human T-lymphotropic virus 2
auucagucucacacauuuuc

SEQ ID NO: 2924162 - RNA, 13 nt, Human T-lymphotropic virus 2
ucagaacccacuc

SEQ ID NO: 2924163 - RNA, 13 nt, Human T-lymphotropic virus 2
ccccauggcaggg

SEQ ID NO: 2924164 - RNA, 14 nt, Human T-lymphotropic virus 2
cucaaggacccuca

SEQ ID NO: 2924165 - RNA, 23 nt, Human T-lymphotropic virus 2
acacauaauuacaauccugucuc

SEQ ID NO: 2924166 - RNA, 22 nt, Human T-lymphotropic virus 2
ucucccagcuaacccuccaggc

SEQ ID NO: 2924167 - RNA, 13 nt, Human T-lymphotropic virus 2
cucaccuugggga

SEQ ID NO: 2924168 - RNA, 23 nt, Human T-lymphotropic virus 2
caggaaccacgacuccucaggcc

SEQ ID NO: 2924169 - RNA, 11 nt, Human T-lymphotropic virus 2
uagccagcccc

SEQ ID NO: 2924170 - RNA, 16 nt, Human T-lymphotropic virus 2
agacgaccccagcccc

SEQ ID NO: 2924171 - RNA, 21 nt, Human T-lymphotropic virus 2
accucccagacgaccccagcc

SEQ ID NO: 2924172 - RNA, 14 nt, Human T-lymphotropic virus 2
ccuacacacaggga

SEQ ID NO: 2924173 - RNA, 22 nt, Human T-lymphotropic virus 2
cugaagccucuaccccucccaa

SEQ ID NO: 2924174 - RNA, 14 nt, Human T-lymphotropic virus 2
caugcccuccuggc

SEQ ID NO: 2924175 - RNA, 17 nt, Human T-lymphotropic virus 2
agggucuuuagagacac

SEQ ID NO: 2924176 - RNA, 16 nt, Human T-lymphotropic virus 2
cucuuagacacccaca

SEQ ID NO: 2924177 - RNA, 16 nt, Human T-lymphotropic virus 2
acaccuucccccaccu

SEQ ID NO: 2924178 - RNA, 16 nt, Human T-lymphotropic virus 2
ccugcccgcuccucca

SEQ ID NO: 2924179 - RNA, 20 nt, Human T-lymphotropic virus 2
cguggagcgcagcaagggcu

SEQ ID NO: 2924180 - RNA, 15 nt, Human T-lymphotropic virus 2
uucgaaaccaaagcc

SEQ ID NO: 2924181 - RNA, 22 nt, Human T-lymphotropic virus 2
uuccccaacaaaccuccucccg

SEQ ID NO: 2924182 - RNA, 22 nt, Human T-lymphotropic virus 2
cuccuuccauaaccuucaccuu

SEQ ID NO: 2924183 - RNA, 18 nt, Human T-lymphotropic virus 2
acacccaguucaaacucc

SEQ ID NO: 2924184 - RNA, 14 nt, Human T-lymphotropic virus 2
cuacuccuccgcca

SEQ ID NO: 2924185 - RNA, 22 nt, Human T-lymphotropic virus 2
cagccuuaccccaccuacagac

SEQ ID NO: 2924186 - RNA, 16 nt, Human T-lymphotropic virus 2
ggcuaucaacccacca

SEQ ID NO: 2924187 - RNA, 13 nt, Human T-lymphotropic virus 2
cucacauuccucc

SEQ ID NO: 2924188 - RNA, 18 nt, Human T-lymphotropic virus 2
gauguaaauuucacccag

SEQ ID NO: 2924189 - RNA, 21 nt, Human T-lymphotropic virus 2
caggagguggcucgcucccuc

SEQ ID NO: 2924190 - RNA, 22 nt, Human T-lymphotropic virus 2
agucucuuuuggcgccacacca

SEQ ID NO: 2924191 - RNA, 16 nt, Human T-lymphotropic virus 2
uuaaacuucacuuccg

SEQ ID NO: 2924192 - RNA, 18 nt, Human T-lymphotropic virus 2
gccaacaaagaaugccaa

SEQ ID NO: 2924193 - RNA, 14 nt, Human T-lymphotropic virus 2
uccccggaggccca

SEQ ID NO: 2924194 - RNA, 19 nt, Human T-lymphotropic virus 2
cuugacacggcccccugcc

SEQ ID NO: 2924195 - RNA, 15 nt, Human T-lymphotropic virus 2
cugacgucucccccu

SEQ ID NO: 2924196 - RNA, 12 nt, Human T-lymphotropic virus 2
cuuuccuccugc

SEQ ID NO: 2924197 - RNA, 12 nt, Human T-lymphotropic virus 2
acucaccuggga

SEQ ID NO: 2924198 - RNA, 18 nt, Human T-lymphotropic virus 2
agggcuagggcuuccuga

SEQ ID NO: 2924199 - RNA, 17 nt, Human T-lymphotropic virus 2
ccauuggggccuuccuc

SEQ ID NO: 2924200 - RNA, 19 nt, Human T-lymphotropic virus 2
gcaggcgucccggggccaa

SEQ ID NO: 2924201 - RNA, 16 nt, Human T-lymphotropic virus 2
acggcccccugccuuu

SEQ ID NO: 2924202 - RNA, 14 nt, Human T-lymphotropic virus 2
caguccauccugga

SEQ ID NO: 2924203 - RNA, 13 nt, Human T-lymphotropic virus 2
gugcggcuccucc

SEQ ID NO: 2924204 - RNA, 14 nt, Human T-lymphotropic virus 2
gauccuaggcgcca

SEQ ID NO: 2924205 - RNA, 20 nt, Human T-lymphotropic virus 2
ucuccuuccccagggccccc

SEQ ID NO: 2924206 - RNA, 18 nt, Human T-lymphotropic virus 2
caagccauggccuucccu

SEQ ID NO: 2924207 - RNA, 19 nt, Human T-lymphotropic virus 2
aagggcuagggcuuccuga

SEQ ID NO: 2924208 - RNA, 18 nt, Human T-lymphotropic virus 2
cccacucagccuccacca

SEQ ID NO: 2924209 - RNA, 13 nt, Human T-lymphotropic virus 2
acgcccuacaaca

SEQ ID NO: 2924210 - RNA, 21 nt, Human T-lymphotropic virus 2
guccucaaccccaugaggaaa

SEQ ID NO: 2924211 - RNA, 22 nt, Human T-lymphotropic virus 2
ccagcagagccgaugcacacuc

SEQ ID NO: 2924212 - RNA, 21 nt, Human T-lymphotropic virus 2
uaccccucccaccacuccugu

SEQ ID NO: 2924213 - RNA, 20 nt, Human T-lymphotropic virus 2
caaggugauguaacccauua

SEQ ID NO: 2924214 - RNA, 12 nt, Human T-lymphotropic virus 2
uucacccaggaa

SEQ ID NO: 2924215 - RNA, 19 nt, Human T-lymphotropic virus 2
acuagccuaccgacagccu

SEQ ID NO: 2924216 - RNA, 18 nt, Human T-lymphotropic virus 2
gacacccugauccuaggc

SEQ ID NO: 2924217 - RNA, 12 nt, Human T-lymphotropic virus 2
aucucccuucca

SEQ ID NO: 2924218 - RNA, 16 nt, Human T-lymphotropic virus 2
uacaacaacucuccca

SEQ ID NO: 2924219 - RNA, 22 nt, Human T-lymphotropic virus 2
aggcaauaaccccgucuucccc

SEQ ID NO: 2924220 - RNA, 14 nt, Human T-lymphotropic virus 2
auucugcccuucac

SEQ ID NO: 2924221 - RNA, 22 nt, Human T-lymphotropic virus 2
guuuaaaaacagccccacccuc

SEQ ID NO: 2924222 - RNA, 18 nt, Human T-lymphotropic virus 2
ccccaacaucuccauucc

SEQ ID NO: 2924223 - RNA, 16 nt, Human T-lymphotropic virus 2
cugcugaugccuuucu

SEQ ID NO: 2924224 - RNA, 16 nt, Human T-lymphotropic virus 2
ggggaaccccuccugu

SEQ ID NO: 2924225 - RNA, 15 nt, Human T-lymphotropic virus 2
ccccacacagcccug

SEQ ID NO: 2924226 - RNA, 12 nt, Human T-lymphotropic virus 2
ucuccccuagcg

SEQ ID NO: 2924227 - RNA, 13 nt, Human T-lymphotropic virus 2
uaacagcccccuu

SEQ ID NO: 2924228 - RNA, 21 nt, Human T-lymphotropic virus 2
ccccuuagguagucgcucccc

SEQ ID NO: 2924229 - RNA, 15 nt, Human T-lymphotropic virus 2
acccucaccucuccu

SEQ ID NO: 2924230 - RNA, 18 nt, Human T-lymphotropic virus 2
caucucgauacucccacu

SEQ ID NO: 2924231 - RNA, 13 nt, Human T-lymphotropic virus 2
uuguguacaggcc

SEQ ID NO: 2924232 - RNA, 13 nt, Human T-lymphotropic virus 2
acucaccuugggg

SEQ ID NO: 2924233 - RNA, 22 nt, Human T-lymphotropic virus 2
cugguggaguaacaggcucccu

SEQ ID NO: 2924234 - RNA, 18 nt, Human T-lymphotropic virus 2
caccucagaacccacuca

SEQ ID NO: 2924235 - RNA, 19 nt, Human T-lymphotropic virus 2
acgccgcaacagaccacca

SEQ ID NO: 2924236 - RNA, 20 nt, Human T-lymphotropic virus 2
ucucccagcuaacccuccag

SEQ ID NO: 2924237 - RNA, 20 nt, Human T-lymphotropic virus 2
gcaggcccgcccuaggagca

SEQ ID NO: 2924238 - RNA, 19 nt, Human T-lymphotropic virus 2
uuacaacaacucucccagc

SEQ ID NO: 2924239 - RNA, 18 nt, Human T-lymphotropic virus 2
ccccaaagagcccaucuu

SEQ ID NO: 2924240 - RNA, 23 nt, Human T-lymphotropic virus 2
uaacugcaacaacuccauuaucc

SEQ ID NO: 2924241 - RNA, 21 nt, Human T-lymphotropic virus 2
caggcuacaaccccauggcag

SEQ ID NO: 2924242 - RNA, 19 nt, Human T-lymphotropic virus 2
acccgugagggcucccugu

SEQ ID NO: 2924243 - RNA, 14 nt, Human T-lymphotropic virus 2
auccaggcccuucc

SEQ ID NO: 2924244 - RNA, 13 nt, Human T-lymphotropic virus 2
auuggggccuucc

SEQ ID NO: 2924245 - RNA, 14 nt, Human T-lymphotropic virus 2
gucucccggccucg

SEQ ID NO: 2924246 - RNA, 17 nt, Human T-lymphotropic virus 2
cccuccuggccccugcc

SEQ ID NO: 2924247 - RNA, 19 nt, Human T-lymphotropic virus 2
gacaucucgauacucccac

SEQ ID NO: 2924248 - RNA, 15 nt, Human T-lymphotropic virus 2
aucccucgccucccc

SEQ ID NO: 2924249 - RNA, 15 nt, Human T-lymphotropic virus 2
ccucccucgccuucc

SEQ ID NO: 2924250 - RNA, 19 nt, Human T-lymphotropic virus 2
guugagacgccuuccgugg

SEQ ID NO: 2924251 - RNA, 16 nt, Human T-lymphotropic virus 2
cgccccccuccuggcc

SEQ ID NO: 2924252 - RNA, 16 nt, Human T-lymphotropic virus 2
uggacagagccuccua

SEQ ID NO: 2924253 - RNA, 16 nt, Human T-lymphotropic virus 2
gccaauuuucacccuc

SEQ ID NO: 2924254 - RNA, 19 nt, Human T-lymphotropic virus 2
augccaaaaaaucuuacaa

SEQ ID NO: 2924255 - RNA, 24 nt, Human T-lymphotropic virus 2
ucccucgccauuggggccuuccuc

SEQ ID NO: 2924256 - RNA, 12 nt, Human T-lymphotropic virus 2
ccugcccgcucc

SEQ ID NO: 2924257 - RNA, 16 nt, Human T-lymphotropic virus 2
guaguucaguccuccc

SEQ ID NO: 2924258 - RNA, 15 nt, Human T-lymphotropic virus 2
ucucuuacaccuccc

SEQ ID NO: 2924259 - RNA, 22 nt, Human T-lymphotropic virus 2
uccuccccccuuuuucccucgc

SEQ ID NO: 2924260 - RNA, 22 nt, Human T-lymphotropic virus 2
ucccucaccgacccucugguca

SEQ ID NO: 2924261 - RNA, 17 nt, Human T-lymphotropic virus 2
cucugacgucucccccu

SEQ ID NO: 2924262 - RNA, 19 nt, Human T-lymphotropic virus 2
cccagcuaacccuccaggc

SEQ ID NO: 2924263 - RNA, 13 nt, Human T-lymphotropic virus 2
uuaggagccuucc

SEQ ID NO: 2924264 - RNA, 18 nt, Human T-lymphotropic virus 2
ccuccaugacccuccuag

SEQ ID NO: 2924265 - RNA, 13 nt, Human T-lymphotropic virus 2
uuaguaguucagu

SEQ ID NO: 2924266 - RNA, 18 nt, Human T-lymphotropic virus 2
cagcuccucugcucuugg

SEQ ID NO: 2924267 - RNA, 16 nt, Human T-lymphotropic virus 2
uaaugggccagccuuc

SEQ ID NO: 2924268 - RNA, 23 nt, Human T-lymphotropic virus 2
uagaccucacccuuacccacuuc

SEQ ID NO: 2924269 - RNA, 21 nt, Human T-lymphotropic virus 2
ucucacauuaugggacaaauc

SEQ ID NO: 2924270 - RNA, 14 nt, Human T-lymphotropic virus 2
acaagcucuacaac

SEQ ID NO: 2924271 - RNA, 15 nt, Human T-lymphotropic virus 2
uccugaacugcuccu

SEQ ID NO: 2924272 - RNA, 14 nt, Human T-lymphotropic virus 2
gagcucggcugccc

SEQ ID NO: 2924273 - RNA, 22 nt, Human T-lymphotropic virus 2
gccuuaccccaccuacagacca

SEQ ID NO: 2924274 - RNA, 17 nt, Human T-lymphotropic virus 2
cagucauaguccucccg

SEQ ID NO: 2924275 - RNA, 14 nt, Human T-lymphotropic virus 2
agaagcccuccaga

SEQ ID NO: 2924276 - RNA, 22 nt, Human T-lymphotropic virus 2
ucaccuuggggauccauccucu

SEQ ID NO: 2924277 - RNA, 18 nt, Human T-lymphotropic virus 2
ucuccauagacggcuccc

SEQ ID NO: 2924278 - RNA, 12 nt, Human T-lymphotropic virus 2
agcucuccucuc

SEQ ID NO: 2924279 - RNA, 17 nt, Human T-lymphotropic virus 2
gccaaaaaaucuuacaa

SEQ ID NO: 2924280 - RNA, 19 nt, Human T-lymphotropic virus 2
caaccacggaggccccccc

SEQ ID NO: 2924281 - RNA, 13 nt, Human T-lymphotropic virus 2
cuccccccuagga

SEQ ID NO: 2924282 - RNA, 13 nt, Human T-lymphotropic virus 2
gccagcucugcca

SEQ ID NO: 2924283 - RNA, 21 nt, Human T-lymphotropic virus 2
ccuaaccuaauuacuuacucu

SEQ ID NO: 2924284 - RNA, 16 nt, Human T-lymphotropic virus 2
uauacuuauucccaca

SEQ ID NO: 2924285 - RNA, 15 nt, Human T-lymphotropic virus 2
uggaucucccuucca

SEQ ID NO: 2924286 - RNA, 17 nt, Human T-lymphotropic virus 2
cuccuccgccaccuccc

SEQ ID NO: 2924287 - RNA, 16 nt, Human T-lymphotropic virus 2
ucuucccggggaagac

SEQ ID NO: 2924288 - RNA, 16 nt, Human T-lymphotropic virus 2
aguccauccuggaagu

SEQ ID NO: 2924289 - RNA, 22 nt, Human T-lymphotropic virus 2
caggaaccacgacuccucaggc

SEQ ID NO: 2924290 - RNA, 17 nt, Human T-lymphotropic virus 2
cucaaggacccucaagg

SEQ ID NO: 2924291 - RNA, 23 nt, Human T-lymphotropic virus 2
acuagccucccgagccagccacc

SEQ ID NO: 2924292 - RNA, 14 nt, Human T-lymphotropic virus 2
agccuccaccaacu

SEQ ID NO: 2924293 - RNA, 16 nt, Human T-lymphotropic virus 2
uggacuguccuuccac

SEQ ID NO: 2924294 - RNA, 17 nt, Human T-lymphotropic virus 2
gaugucagacucgccuc

SEQ ID NO: 2924295 - RNA, 17 nt, Human T-lymphotropic virus 2
agguggucuauguucca

SEQ ID NO: 2924296 - RNA, 16 nt, Human T-lymphotropic virus 2
accccucuugggcagc

SEQ ID NO: 2924297 - RNA, 20 nt, Human T-lymphotropic virus 2
uccccuagcgcccccgccgc

SEQ ID NO: 2924298 - RNA, 17 nt, Human T-lymphotropic virus 2
agugcggcuccuccaug

SEQ ID NO: 2924299 - RNA, 15 nt, Human T-lymphotropic virus 2
acuagacuguccuaa

SEQ ID NO: 2924300 - RNA, 15 nt, Human T-lymphotropic virus 2
uucccucgcucccgu

SEQ ID NO: 2924301 - RNA, 22 nt, Human T-lymphotropic virus 2
gcagcaagggcuagggcuuccu

SEQ ID NO: 2924302 - RNA, 20 nt, Human T-lymphotropic virus 2
caagguccuuaccccuccca

SEQ ID NO: 2924303 - RNA, 21 nt, Human T-lymphotropic virus 2
cgccucaaccccgcccuaccu

SEQ ID NO: 2924304 - RNA, 18 nt, Human T-lymphotropic virus 2
cacauuaugggacaaauc

SEQ ID NO: 2924305 - RNA, 19 nt, Human T-lymphotropic virus 2
acgauuacccccugcccau

SEQ ID NO: 2924306 - RNA, 16 nt, Human T-lymphotropic virus 2
ccagcuaacccuccag

SEQ ID NO: 2924307 - RNA, 18 nt, Human T-lymphotropic virus 2
aaggacaaaaccaagguc

SEQ ID NO: 2924308 - RNA, 12 nt, Human T-lymphotropic virus 2
uccugucuccuc

SEQ ID NO: 2924309 - RNA, 20 nt, Human T-lymphotropic virus 2
cuuguuccccugacgcccca

SEQ ID NO: 2924310 - RNA, 13 nt, Human T-lymphotropic virus 2
cuccuccuaccac

SEQ ID NO: 2924311 - RNA, 15 nt, Human T-lymphotropic virus 2
gcccgcccuaggagc

SEQ ID NO: 2924312 - RNA, 20 nt, Human T-lymphotropic virus 2
cauugcuaccaaccucgccu

SEQ ID NO: 2924313 - RNA, 17 nt, Human T-lymphotropic virus 2
cuuucuccacccugcca

SEQ ID NO: 2924314 - RNA, 15 nt, Human T-lymphotropic virus 2
ugucauauucugcca

SEQ ID NO: 2924315 - RNA, 23 nt, Human T-lymphotropic virus 2
caccucccaacccuucuccagga

SEQ ID NO: 2924316 - RNA, 17 nt, Human T-lymphotropic virus 2
cucccgagccagccacc

SEQ ID NO: 2924317 - RNA, 20 nt, Human T-lymphotropic virus 2
accaagggaagccaaguccc

SEQ ID NO: 2924318 - RNA, 17 nt, Human T-lymphotropic virus 2
uugacaacggccucccc

SEQ ID NO: 2924319 - RNA, 19 nt, Human T-lymphotropic virus 2
accauacucaggaccaggc

SEQ ID NO: 2924320 - RNA, 14 nt, Human T-lymphotropic virus 2
aucccgaccccaga

SEQ ID NO: 2924321 - RNA, 17 nt, Human T-lymphotropic virus 2
uccuuuccuccugccuc

SEQ ID NO: 2924322 - RNA, 16 nt, Human T-lymphotropic virus 2
cagcucauaggcccug

SEQ ID NO: 2924323 - RNA, 23 nt, Human T-lymphotropic virus 2
ccaauaccuuaucccucgccucc

SEQ ID NO: 2924324 - RNA, 21 nt, Human T-lymphotropic virus 2
cgcaucaagcauucuacccau

SEQ ID NO: 2924325 - RNA, 15 nt, Human T-lymphotropic virus 2
aucgacaugcccucc

SEQ ID NO: 2924326 - RNA, 20 nt, Human T-lymphotropic virus 2
aaggccuccacggccucacc

SEQ ID NO: 2924327 - RNA, 20 nt, Human T-lymphotropic virus 2
ugaccacgcauggccuucca

SEQ ID NO: 2924328 - RNA, 19 nt, Human T-lymphotropic virus 2
ccuccuaccacuccagccc

SEQ ID NO: 2924329 - RNA, 14 nt, Human T-lymphotropic virus 2
ccauuccccagcca

SEQ ID NO: 2924330 - RNA, 23 nt, Human T-lymphotropic virus 2
cagacccuccggcuggcgguaca

SEQ ID NO: 2924331 - RNA, 12 nt, Human T-lymphotropic virus 2
aaucccccuccc

SEQ ID NO: 2924332 - RNA, 17 nt, Human T-lymphotropic virus 2
ccccgucuccaguccau

SEQ ID NO: 2924333 - RNA, 12 nt, Human T-lymphotropic virus 2
auccugucuccu

SEQ ID NO: 2924334 - RNA, 14 nt, Human T-lymphotropic virus 2
cagacgaccccagc

SEQ ID NO: 2924335 - RNA, 12 nt, Human T-lymphotropic virus 2
cccgucucaggu

SEQ ID NO: 2924336 - RNA, 21 nt, Human T-lymphotropic virus 2
cagaacccacucagccuccac

SEQ ID NO: 2924337 - RNA, 19 nt, Human T-lymphotropic virus 2
cccccuuuuucccucgcuc

SEQ ID NO: 2924338 - RNA, 13 nt, Human T-lymphotropic virus 2
caggcauaaccau

SEQ ID NO: 2924339 - RNA, 16 nt, Human T-lymphotropic virus 2
gucccggggccaacau

SEQ ID NO: 2924340 - RNA, 14 nt, Human T-lymphotropic virus 2
aauacacagacucc

SEQ ID NO: 2924341 - RNA, 21 nt, Human T-lymphotropic virus 2
uccgccaccuccccccccuuc

SEQ ID NO: 2924342 - RNA, 14 nt, Human T-lymphotropic virus 2
cucguucuuuccuc

SEQ ID NO: 2924343 - RNA, 16 nt, Human T-lymphotropic virus 2
ccgccgugccguucca

SEQ ID NO: 2924344 - RNA, 18 nt, Human T-lymphotropic virus 2
uuaucccucgccuccccu

SEQ ID NO: 2924345 - RNA, 19 nt, Human T-lymphotropic virus 2
gccacaccaagggaagcca

SEQ ID NO: 2924346 - RNA, 17 nt, Human T-lymphotropic virus 2
cacacuaacagcccccu

SEQ ID NO: 2924347 - RNA, 15 nt, Human T-lymphotropic virus 2
gucccggggccaaca

SEQ ID NO: 2924348 - RNA, 21 nt, Human T-lymphotropic virus 2
ucccuaucuuacaucccccag

SEQ ID NO: 2924349 - RNA, 17 nt, Human T-lymphotropic virus 2
acaguccuccacuacca

SEQ ID NO: 2924350 - RNA, 14 nt, Human T-lymphotropic virus 2
cccaaagcccccag

SEQ ID NO: 2924351 - RNA, 19 nt, Human T-lymphotropic virus 2
cagcucugccaaucuuucc

SEQ ID NO: 2924352 - RNA, 13 nt, Human T-lymphotropic virus 2
uuuccuucccuug

SEQ ID NO: 2924353 - RNA, 12 nt, Human T-lymphotropic virus 2
caucccccagga

SEQ ID NO: 2924354 - RNA, 12 nt, Human T-lymphotropic virus 2
ugcagacccucc

SEQ ID NO: 2924355 - RNA, 16 nt, Human T-lymphotropic virus 2
acacaacaaaccccag

SEQ ID NO: 2924356 - RNA, 21 nt, Human T-lymphotropic virus 2
acgccaacaaagaaugccaaa

SEQ ID NO: 2924357 - RNA, 18 nt, Human T-lymphotropic virus 2
gcuccacaccccccaccc

SEQ ID NO: 2924358 - RNA, 14 nt, Human T-lymphotropic virus 2
cuaacccuccaggc

SEQ ID NO: 2924359 - RNA, 18 nt, Human T-lymphotropic virus 2
uacugaggaaaaaaacuc

SEQ ID NO: 2924360 - RNA, 20 nt, Human T-lymphotropic virus 2
cccaacaaaccuccucccga

SEQ ID NO: 2924361 - RNA, 13 nt, Human T-lymphotropic virus 2
ugcagccuaggcc

SEQ ID NO: 2924362 - RNA, 21 nt, Human T-lymphotropic virus 2
agucuccccuagcgcccccgc

SEQ ID NO: 2924363 - RNA, 18 nt, Human T-lymphotropic virus 2
agcuccucugcucuuggc

SEQ ID NO: 2924364 - RNA, 13 nt, Human T-lymphotropic virus 2
ccucgccuccccu

SEQ ID NO: 2924365 - RNA, 16 nt, Human T-lymphotropic virus 2
gcugccaagccauggc

SEQ ID NO: 2924366 - RNA, 13 nt, Human T-lymphotropic virus 2
gaaaaacaaggcu

SEQ ID NO: 2924367 - RNA, 17 nt, Human T-lymphotropic virus 2
ccaccacaguccuccac

SEQ ID NO: 2924368 - RNA, 23 nt, Human T-lymphotropic virus 2
agcucaggccuggucgagagaac

SEQ ID NO: 2924369 - RNA, 21 nt, Human T-lymphotropic virus 2
cccucggggaucagcuccccu

SEQ ID NO: 2924370 - RNA, 23 nt, Human T-lymphotropic virus 2
uaccccucccaaaccaccuccca

SEQ ID NO: 2924371 - RNA, 22 nt, Human T-lymphotropic virus 2
gacucaccuuggggauccaucc

SEQ ID NO: 2924372 - RNA, 15 nt, Human T-lymphotropic virus 2
acccuucccuuggac

SEQ ID NO: 2924373 - RNA, 22 nt, Human T-lymphotropic virus 2
uacccaagcgcuacuugacaca

SEQ ID NO: 2924374 - RNA, 20 nt, Human T-lymphotropic virus 2
cagacaauuaggagccuucc

SEQ ID NO: 2924375 - RNA, 17 nt, Human T-lymphotropic virus 2
acgccccaaggccucca

SEQ ID NO: 2924376 - RNA, 20 nt, Human T-lymphotropic virus 2
cacaccccccacccuccgac

SEQ ID NO: 2924377 - RNA, 12 nt, Human T-lymphotropic virus 2
cucggcaccucc

SEQ ID NO: 2924378 - RNA, 14 nt, Human T-lymphotropic virus 2
ccugaaccucuccg

SEQ ID NO: 2924379 - RNA, 17 nt, Human T-lymphotropic virus 2
agacgccuuccguggga

SEQ ID NO: 2924380 - RNA, 19 nt, Human T-lymphotropic virus 2
cacuccaacugcugaugcc

SEQ ID NO: 2924381 - RNA, 21 nt, Human T-lymphotropic virus 2
acaacuccauuauccuccccc

SEQ ID NO: 2924382 - RNA, 12 nt, Human T-lymphotropic virus 2
cucaccugggac

SEQ ID NO: 2924383 - RNA, 19 nt, Human T-lymphotropic virus 2
gccuuccccgaaccuggcc

SEQ ID NO: 2924384 - RNA, 17 nt, Human T-lymphotropic virus 2
augccuuucuucccucu

SEQ ID NO: 2924385 - RNA, 15 nt, Human T-lymphotropic virus 2
gaauacaccaacauc

SEQ ID NO: 2924386 - RNA, 19 nt, Human T-lymphotropic virus 2
ccagcuuuccccacccaug

SEQ ID NO: 2924387 - RNA, 22 nt, Human T-lymphotropic virus 2
cucgagguugacaaagacaucu

SEQ ID NO: 2924388 - RNA, 17 nt, Human T-lymphotropic virus 2
cagcccauuucccagga

SEQ ID NO: 2924389 - RNA, 16 nt, Human T-lymphotropic virus 2
cuccccgacccaauuu

SEQ ID NO: 2924390 - RNA, 12 nt, Human T-lymphotropic virus 2
cuuccccuagcg

SEQ ID NO: 2924391 - RNA, 14 nt, Human T-lymphotropic virus 2
aggacuucuccccu

SEQ ID NO: 2924392 - RNA, 14 nt, Human T-lymphotropic virus 2
ccacgggcuuuccc

SEQ ID NO: 2924393 - RNA, 19 nt, Human T-lymphotropic virus 2
gucuccaaggcccuggagg

SEQ ID NO: 2924394 - RNA, 15 nt, Human T-lymphotropic virus 2
augcccuccuggcca

SEQ ID NO: 2924395 - RNA, 22 nt, Human T-lymphotropic virus 2
ugacgucccuccccccuaggaa

SEQ ID NO: 2924396 - RNA, 17 nt, Human T-lymphotropic virus 2
cuucaccauuccccagc

SEQ ID NO: 2924397 - RNA, 21 nt, Human T-lymphotropic virus 2
ucccagcuaacccuccaggca

SEQ ID NO: 2924398 - RNA, 14 nt, Human T-lymphotropic virus 2
ugguguacaggacu

SEQ ID NO: 2924399 - RNA, 16 nt, Human T-lymphotropic virus 2
caucaccucagaaccc

SEQ ID NO: 2924400 - RNA, 20 nt, Human T-lymphotropic virus 2
ccucucaggucgagcucggc

SEQ ID NO: 2924401 - RNA, 17 nt, Human T-lymphotropic virus 2
caggaacagcucuccag

SEQ ID NO: 2924402 - RNA, 12 nt, Human T-lymphotropic virus 2
aaacccaggagu

SEQ ID NO: 2924403 - RNA, 15 nt, Human T-lymphotropic virus 2
cccaggagcccccuc

SEQ ID NO: 2924404 - RNA, 21 nt, Human T-lymphotropic virus 2
gcaauguugcuuccucaacau

SEQ ID NO: 2924405 - RNA, 13 nt, Human T-lymphotropic virus 2
ccuccuggccccu

SEQ ID NO: 2924406 - RNA, 13 nt, Human T-lymphotropic virus 2
acccacucagccu

SEQ ID NO: 2924407 - RNA, 18 nt, Human T-lymphotropic virus 2
cgcucccgcuccucacgc

SEQ ID NO: 2924408 - RNA, 15 nt, Human T-lymphotropic virus 2
caucgaccauugucc

SEQ ID NO: 2924409 - RNA, 14 nt, Human T-lymphotropic virus 2
caacaaaccuccuc

SEQ ID NO: 2924410 - RNA, 14 nt, Human T-lymphotropic virus 2
ccacaacaacucca

SEQ ID NO: 2924411 - RNA, 20 nt, Human T-lymphotropic virus 2
uccugaacugcuccucccaa

SEQ ID NO: 2924412 - RNA, 13 nt, Human T-lymphotropic virus 2
acuguccuuccac

SEQ ID NO: 2924413 - RNA, 17 nt, Human T-lymphotropic virus 2
ccgcucccgcuccucac

SEQ ID NO: 2924414 - RNA, 17 nt, Human T-lymphotropic virus 2
cacccucaccucuccuu

SEQ ID NO: 2924415 - RNA, 14 nt, Human T-lymphotropic virus 2
guaaaggcucugac

SEQ ID NO: 2924416 - RNA, 15 nt, Human T-lymphotropic virus 2
ggucuuuagagacac

SEQ ID NO: 2924417 - RNA, 18 nt, Human T-lymphotropic virus 2
cgccauuggggccuuccu

SEQ ID NO: 2924418 - RNA, 17 nt, Human T-lymphotropic virus 2
gaccagacuauccuuca

SEQ ID NO: 2924419 - RNA, 23 nt, Human T-lymphotropic virus 2
cccaaugggcacgagaagcccuc

SEQ ID NO: 2924420 - RNA, 18 nt, Human T-lymphotropic virus 2
accuccugaacugcuccu

SEQ ID NO: 2924421 - RNA, 20 nt, Human T-lymphotropic virus 2
cugcuuucuccacccugcca

SEQ ID NO: 2924422 - RNA, 21 nt, Human T-lymphotropic virus 2
ucgauacucccacucaucccc

SEQ ID NO: 2924423 - RNA, 20 nt, Human T-lymphotropic virus 2
uccagccucucauccuggca

SEQ ID NO: 2924424 - RNA, 18 nt, Human T-lymphotropic virus 2
ugccaaaaaaucuuacaa

SEQ ID NO: 2924425 - RNA, 22 nt, Human T-lymphotropic virus 2
cagccauguaacuauggccccg

SEQ ID NO: 2924426 - RNA, 12 nt, Human T-lymphotropic virus 2
ccccccccuucc

SEQ ID NO: 2924427 - RNA, 17 nt, Human T-lymphotropic virus 2
auccucuuuccuucccu

SEQ ID NO: 2924428 - RNA, 18 nt, Human T-lymphotropic virus 2
cccagcuaacccuccagg

SEQ ID NO: 2924429 - RNA, 16 nt, Human T-lymphotropic virus 2
gauuacccccugccca

SEQ ID NO: 2924430 - RNA, 18 nt, Human T-lymphotropic virus 2
uacuuuuagccagcccca

SEQ ID NO: 2924431 - RNA, 23 nt, Human T-lymphotropic virus 2
aaccugagcgccuccaggccuua

SEQ ID NO: 2924432 - RNA, 21 nt, Human T-lymphotropic virus 2
cccgauguccagcccuaacuc

SEQ ID NO: 2924433 - RNA, 14 nt, Human T-lymphotropic virus 2
acggccucacccau

SEQ ID NO: 2924434 - RNA, 16 nt, Human T-lymphotropic virus 2
acuguacccagccacg

SEQ ID NO: 2924435 - RNA, 21 nt, Human T-lymphotropic virus 2
uccuccaggaacggcccccuc

SEQ ID NO: 2924436 - RNA, 22 nt, Human T-lymphotropic virus 2
aggagguggcucgcucccucac

SEQ ID NO: 2924437 - RNA, 14 nt, Human T-lymphotropic virus 2
aucaaaacauccuc

SEQ ID NO: 2924438 - RNA, 19 nt, Human T-lymphotropic virus 2
cuccguccccaaaacaucu

SEQ ID NO: 2924439 - RNA, 21 nt, Human T-lymphotropic virus 2
cuccuagggaaaccacuccac

SEQ ID NO: 2924440 - RNA, 16 nt, Human T-lymphotropic virus 2
cuuaucuuagcucccc

SEQ ID NO: 2924441 - RNA, 21 nt, Human T-lymphotropic virus 2
cucccagacgaccccagcccc

SEQ ID NO: 2924442 - RNA, 23 nt, Human T-lymphotropic virus 2
ucaccucagaacccacucagccu

SEQ ID NO: 2924443 - RNA, 14 nt, Human T-lymphotropic virus 2
agaugccccuggau

SEQ ID NO: 2924444 - RNA, 16 nt, Human T-lymphotropic virus 2
gugggaccgucucccg

SEQ ID NO: 2924445 - RNA, 21 nt, Human T-lymphotropic virus 2
uccaagugucggcauccucau

SEQ ID NO: 2924446 - RNA, 15 nt, Human T-lymphotropic virus 2
ucgccgucacugaaa

SEQ ID NO: 2924447 - RNA, 15 nt, Human T-lymphotropic virus 2
cuaacccccuccacg

SEQ ID NO: 2924448 - RNA, 15 nt, Human T-lymphotropic virus 2
aagccauggccuucc

SEQ ID NO: 2924449 - RNA, 16 nt, Human T-lymphotropic virus 2
uauccguccuccagga

SEQ ID NO: 2924450 - RNA, 20 nt, Human T-lymphotropic virus 2
agacucucuuacaccuccca

SEQ ID NO: 2924451 - RNA, 20 nt, Human T-lymphotropic virus 2
cagacgaccccagcccccac

SEQ ID NO: 2924452 - RNA, 20 nt, Human T-lymphotropic virus 2
augccuuucuucccucuccc

SEQ ID NO: 2924453 - RNA, 16 nt, Human T-lymphotropic virus 2
cagccacaccaaccuc

SEQ ID NO: 2924454 - RNA, 23 nt, Human T-lymphotropic virus 2
aacaaucccaaguaaaggcucug

SEQ ID NO: 2924455 - RNA, 18 nt, Human T-lymphotropic virus 2
agagcaccaacucaccug

SEQ ID NO: 2924456 - RNA, 20 nt, Human T-lymphotropic virus 2
uguuccuacacacagggaca

SEQ ID NO: 2924457 - RNA, 17 nt, Human T-lymphotropic virus 2
gguccuuaccccuccca

SEQ ID NO: 2924458 - RNA, 17 nt, Human T-lymphotropic virus 2
cgcucacauuccuccca

SEQ ID NO: 2924459 - RNA, 22 nt, Human T-lymphotropic virus 2
uccgcccaucaaacccuccagg

SEQ ID NO: 2924460 - RNA, 13 nt, Human T-lymphotropic virus 2
ucacacauuuucc

SEQ ID NO: 2924461 - RNA, 15 nt, Human T-lymphotropic virus 2
cucuccaagcggccu

SEQ ID NO: 2924462 - RNA, 20 nt, Human T-lymphotropic virus 2
aacacaacaaaccccaggcc

SEQ ID NO: 2924463 - RNA, 18 nt, Human T-lymphotropic virus 2
caucuuucaacccaagca

SEQ ID NO: 2924464 - RNA, 19 nt, Human T-lymphotropic virus 2
caucuuaacaaccccaggu

SEQ ID NO: 2924465 - RNA, 22 nt, Human T-lymphotropic virus 2
ucauccaagugucggcauccuc

SEQ ID NO: 2924466 - RNA, 19 nt, Human T-lymphotropic virus 2
cuaagugcggcuccuccau

SEQ ID NO: 2924467 - RNA, 20 nt, Human T-lymphotropic virus 2
uuccauaaccuuggcagcca

SEQ ID NO: 2924468 - RNA, 14 nt, Human T-lymphotropic virus 2
ucuccaaggcccug

SEQ ID NO: 2924469 - RNA, 22 nt, Human T-lymphotropic virus 2
gccuccccuccuuccccaccca

SEQ ID NO: 2924470 - RNA, 13 nt, Human T-lymphotropic virus 2
acauuccucccau

SEQ ID NO: 2924471 - RNA, 14 nt, Human T-lymphotropic virus 2
cccaggagcccccu

SEQ ID NO: 2924472 - RNA, 21 nt, Human T-lymphotropic virus 2
cuaacccccgcucacauuccu

SEQ ID NO: 2924473 - RNA, 19 nt, Human T-lymphotropic virus 2
ccucgcucccguaccuccu

SEQ ID NO: 2924474 - RNA, 16 nt, Human T-lymphotropic virus 2
ugggaccgucucccgg

SEQ ID NO: 2924475 - RNA, 20 nt, Human T-lymphotropic virus 2
acaucucgauacucccacuc

SEQ ID NO: 2924476 - RNA, 22 nt, Human T-lymphotropic virus 2
acaacggaccaacgacuacacc

SEQ ID NO: 2924477 - RNA, 15 nt, Human T-lymphotropic virus 2
cccucaccgacccuc

SEQ ID NO: 2924478 - RNA, 16 nt, Human T-lymphotropic virus 2
agacaauuaggagccu

SEQ ID NO: 2924479 - RNA, 15 nt, Human T-lymphotropic virus 2
aucaaugcgaaagca

SEQ ID NO: 2924480 - RNA, 16 nt, Human T-lymphotropic virus 2
ugacaaagacaucucc

SEQ ID NO: 2924481 - RNA, 21 nt, Human T-lymphotropic virus 2
cccccagggggcuaucaaccc

SEQ ID NO: 2924482 - RNA, 13 nt, Human T-lymphotropic virus 2
ccaaacagacagg

SEQ ID NO: 2924483 - RNA, 17 nt, Human T-lymphotropic virus 2
cggccucggcaccuccu

SEQ ID NO: 2924484 - RNA, 17 nt, Human T-lymphotropic virus 2
ggcucccuaucucuggc

SEQ ID NO: 2924485 - RNA, 16 nt, Human T-lymphotropic virus 2
cacaccaaccuccccg

SEQ ID NO: 2924486 - RNA, 15 nt, Human T-lymphotropic virus 2
cguggagcgcagcaa

SEQ ID NO: 2924487 - RNA, 21 nt, Human T-lymphotropic virus 2
uaacacacuaauuaccgaggc

SEQ ID NO: 2924488 - RNA, 15 nt, Human T-lymphotropic virus 2
ccuaccucuccuugg

SEQ ID NO: 2924489 - RNA, 22 nt, Human T-lymphotropic virus 2
ccauucucgcucuacuccuccu

SEQ ID NO: 2924490 - RNA, 13 nt, Human T-lymphotropic virus 2
ccaacccuucccu

SEQ ID NO: 2924491 - RNA, 18 nt, Human T-lymphotropic virus 2
ccuucucgguuccucucc

SEQ ID NO: 2924492 - RNA, 17 nt, Human T-lymphotropic virus 2
uugaaccauacucagga

SEQ ID NO: 2924493 - RNA, 15 nt, Human T-lymphotropic virus 2
uccgauggcuccccu

SEQ ID NO: 2924494 - RNA, 16 nt, Human T-lymphotropic virus 2
cauugcaaucccucca

SEQ ID NO: 2924495 - RNA, 13 nt, Human T-lymphotropic virus 2
cuuaccccaaagc

SEQ ID NO: 2924496 - RNA, 22 nt, Human T-lymphotropic virus 2
agcgcccccgccgccccaguuc

SEQ ID NO: 2924497 - RNA, 14 nt, Human T-lymphotropic virus 2
cagccuugcucucc

SEQ ID NO: 2924498 - RNA, 20 nt, Human T-lymphotropic virus 2
uaggccucgaacaccuuccc

SEQ ID NO: 2924499 - RNA, 15 nt, Human T-lymphotropic virus 2
cggccuugccacccc

SEQ ID NO: 2924500 - RNA, 16 nt, Human T-lymphotropic virus 2
cacaauguuccaaccc

SEQ ID NO: 2924501 - RNA, 19 nt, Human T-lymphotropic virus 2
ugaauuccuccauucucac

SEQ ID NO: 2924502 - RNA, 12 nt, Human T-lymphotropic virus 2
ccacuuccccua

SEQ ID NO: 2924503 - RNA, 18 nt, Human T-lymphotropic virus 2
ugccugguguacaggacu

SEQ ID NO: 2924504 - RNA, 22 nt, Human T-lymphotropic virus 2
ugcggcuccuccaugacccucc

SEQ ID NO: 2924505 - RNA, 18 nt, Human T-lymphotropic virus 2
cuccugaacugcuccucc

SEQ ID NO: 2924506 - RNA, 23 nt, Human T-lymphotropic virus 2
gcagggccccuaagaaugcaggc

SEQ ID NO: 2924507 - RNA, 13 nt, Human T-lymphotropic virus 2
acggagacucacc

SEQ ID NO: 2924508 - RNA, 17 nt, Human T-lymphotropic virus 2
ccauccucuuuccuucc

SEQ ID NO: 2924509 - RNA, 13 nt, Human T-lymphotropic virus 2
aucccucgccucc

SEQ ID NO: 2924510 - RNA, 12 nt, Human T-lymphotropic virus 2
ccccccuucccc

SEQ ID NO: 2924511 - RNA, 20 nt, Human T-lymphotropic virus 2
ccuacuacuacuccuccgcc

SEQ ID NO: 2924512 - RNA, 12 nt, Human T-lymphotropic virus 2
uuccuccugccu

SEQ ID NO: 2924513 - RNA, 15 nt, Human T-lymphotropic virus 2
cagucucacacauuu

SEQ ID NO: 2924514 - RNA, 15 nt, Human T-lymphotropic virus 2
acaucccccaggagc

SEQ ID NO: 2924515 - RNA, 16 nt, Human T-lymphotropic virus 2
acccgugaccccucuu

SEQ ID NO: 2924516 - RNA, 19 nt, Human T-lymphotropic virus 2
accaguuuauguccuuggg

SEQ ID NO: 2924517 - RNA, 22 nt, Human T-lymphotropic virus 2
acagucauaguccucccggagg

SEQ ID NO: 2924518 - RNA, 19 nt, Human T-lymphotropic virus 2
ucaaggacccucaaggucc

SEQ ID NO: 2924519 - RNA, 14 nt, Human T-lymphotropic virus 2
auuucacccaggaa

SEQ ID NO: 2924520 - RNA, 13 nt, Human T-lymphotropic virus 2
acuuccagcagcu

SEQ ID NO: 2924521 - RNA, 23 nt, Human T-lymphotropic virus 2
uuccaguaaaagccuucuccucg

SEQ ID NO: 2924522 - RNA, 19 nt, Human T-lymphotropic virus 2
auugcaaucccuccaggaa

SEQ ID NO: 2924523 - RNA, 19 nt, Human T-lymphotropic virus 2
aaccccaccagcucaggcc

SEQ ID NO: 2924524 - RNA, 20 nt, Human T-lymphotropic virus 2
uguacaggacuucuccccua

SEQ ID NO: 2924525 - RNA, 17 nt, Human T-lymphotropic virus 2
aggaacuccccucaucc

SEQ ID NO: 2924526 - RNA, 18 nt, Human T-lymphotropic virus 2
ucaccucagaacccacuc

SEQ ID NO: 2924527 - RNA, 15 nt, Human T-lymphotropic virus 2
cccugacgucccucc

SEQ ID NO: 2924528 - RNA, 17 nt, Human T-lymphotropic virus 2
accccauggcagggccc

SEQ ID NO: 2924529 - RNA, 22 nt, Human T-lymphotropic virus 2
ccuucaacaggacaucacuccc

SEQ ID NO: 2924530 - RNA, 16 nt, Human T-lymphotropic virus 2
cuccucugcucuuggc

SEQ ID NO: 2924531 - RNA, 18 nt, Human T-lymphotropic virus 2
aauccugucuccucucag

SEQ ID NO: 2924532 - RNA, 16 nt, Human T-lymphotropic virus 2
cuccccucaaaaggca

SEQ ID NO: 2924533 - RNA, 16 nt, Human T-lymphotropic virus 2
caacaacucucccagc

SEQ ID NO: 2924534 - RNA, 21 nt, Human T-lymphotropic virus 2
aaccauccucuuuccuucccu

SEQ ID NO: 2924535 - RNA, 19 nt, Human T-lymphotropic virus 2
gcagccacaccaaccuccc

SEQ ID NO: 2924536 - RNA, 17 nt, Human T-lymphotropic virus 2
cccuaucucuggcuucc

SEQ ID NO: 2924537 - RNA, 20 nt, Human T-lymphotropic virus 2
cgcucggcuagacucugccu

SEQ ID NO: 2924538 - RNA, 21 nt, Human T-lymphotropic virus 2
uucaacaggacaucacucccc

SEQ ID NO: 2924539 - RNA, 17 nt, Human T-lymphotropic virus 2
acaccucagccuaccca

SEQ ID NO: 2924540 - RNA, 16 nt, Human T-lymphotropic virus 2
ggcucugacgucuccc

SEQ ID NO: 2924541 - RNA, 13 nt, Human T-lymphotropic virus 2
acccgccuacauc

SEQ ID NO: 2924542 - RNA, 16 nt, Human T-lymphotropic virus 2
caucccaacccuuccc

SEQ ID NO: 2924543 - RNA, 15 nt, Human T-lymphotropic virus 2
caacaacucucccag

SEQ ID NO: 2924544 - RNA, 18 nt, Human T-lymphotropic virus 2
ugcucuuggcagccccca

SEQ ID NO: 2924545 - RNA, 22 nt, Human T-lymphotropic virus 2
cauggccuuccaauuucccagg

SEQ ID NO: 2924546 - RNA, 20 nt, Human T-lymphotropic virus 2
gcuacuugacacaggagccg

SEQ ID NO: 2924547 - RNA, 22 nt, Human T-lymphotropic virus 2
ucccucucccggcgcuuuugau

SEQ ID NO: 2924548 - RNA, 21 nt, Human T-lymphotropic virus 2
auuacaauccugucuccucuc

SEQ ID NO: 2924549 - RNA, 15 nt, Human T-lymphotropic virus 2
cugcacguggaaccu

SEQ ID NO: 2924550 - RNA, 22 nt, Human T-lymphotropic virus 2
ucuccaggaaccacgacuccuc

SEQ ID NO: 2924551 - RNA, 22 nt, Human T-lymphotropic virus 2
ccuuaaaugaccuggucuccaa

SEQ ID NO: 2924552 - RNA, 22 nt, Human T-lymphotropic virus 2
cgcugguggaguaacaggcucc

SEQ ID NO: 2924553 - RNA, 20 nt, Human T-lymphotropic virus 2
ccccuccuguuggaucuccc

SEQ ID NO: 2924554 - RNA, 23 nt, Human T-lymphotropic virus 2
ccuccggcgacaagacgccgccg

SEQ ID NO: 2924555 - RNA, 22 nt, Human T-lymphotropic virus 2
caccagaugucagacucgccuc

SEQ ID NO: 2924556 - RNA, 18 nt, Human T-lymphotropic virus 2
uacacccccaacaucucc

SEQ ID NO: 2924557 - RNA, 16 nt, Human T-lymphotropic virus 2
gaacccacucagccuc

SEQ ID NO: 2924558 - RNA, 23 nt, Human T-lymphotropic virus 2
acaggcucccuaucucuggcuuc

SEQ ID NO: 2924559 - RNA, 19 nt, Human T-lymphotropic virus 2
cgccgcccucuuggcaggc

SEQ ID NO: 2924560 - RNA, 14 nt, Human T-lymphotropic virus 2
cucagccuccacca

SEQ ID NO: 2924561 - RNA, 16 nt, Human T-lymphotropic virus 2
uucaugcagacccucc

SEQ ID NO: 2924562 - RNA, 17 nt, Human T-lymphotropic virus 2
ccucccaacccuucucc

SEQ ID NO: 2924563 - RNA, 15 nt, Human T-lymphotropic virus 2
cuucgaacaacaauu

SEQ ID NO: 2924564 - RNA, 22 nt, Human T-lymphotropic virus 2
augacauacuuuuagccagccc

SEQ ID NO: 2924565 - RNA, 13 nt, Human T-lymphotropic virus 2
ccagccucucauc

SEQ ID NO: 2924566 - RNA, 19 nt, Human T-lymphotropic virus 2
ccugccucuuagacaccca

SEQ ID NO: 2924567 - RNA, 13 nt, Human T-lymphotropic virus 2
aaggcccuggagg

SEQ ID NO: 2924568 - RNA, 22 nt, Human T-lymphotropic virus 2
cgccagugggcaaaccaacacc

SEQ ID NO: 2924569 - RNA, 18 nt, Human T-lymphotropic virus 2
aaccacggcccugacguc

SEQ ID NO: 2924570 - RNA, 16 nt, Human T-lymphotropic virus 2
cagcuuuccccaccca

SEQ ID NO: 2924571 - RNA, 18 nt, Human T-lymphotropic virus 2
gcuccucacgcuccugca

SEQ ID NO: 2924572 - RNA, 20 nt, Human T-lymphotropic virus 2
cugccaagccauggccuucc

SEQ ID NO: 2924573 - RNA, 17 nt, Human T-lymphotropic virus 2
ccugagcgccuccaggc

SEQ ID NO: 2924574 - RNA, 18 nt, Human T-lymphotropic virus 2
gccccuggcuuggcucca

SEQ ID NO: 2924575 - RNA, 23 nt, Human T-lymphotropic virus 2
uacacuccaacugcugaugccuu

SEQ ID NO: 2924576 - RNA, 21 nt, Human T-lymphotropic virus 2
cacccaguucaaacuccucca

SEQ ID NO: 2924577 - RNA, 16 nt, Human T-lymphotropic virus 2
cucacauuccucccau

SEQ ID NO: 2924578 - RNA, 19 nt, Human T-lymphotropic virus 2
gccaagauccuucucacug

SEQ ID NO: 2924579 - RNA, 18 nt, Human T-lymphotropic virus 2
ucccacucaucccccugc

SEQ ID NO: 2924580 - RNA, 15 nt, Human T-lymphotropic virus 2
uggcuggcugcuuuc

SEQ ID NO: 2924581 - RNA, 13 nt, Human T-lymphotropic virus 2
ucccccguuaucc

SEQ ID NO: 2924582 - RNA, 20 nt, Human T-lymphotropic virus 2
cuucaccauuccccagccau

SEQ ID NO: 2924583 - RNA, 17 nt, Human T-lymphotropic virus 2
accagcucaggccuggu

SEQ ID NO: 2924584 - RNA, 17 nt, Human T-lymphotropic virus 2
uccuaucuacucucuca

SEQ ID NO: 2924585 - RNA, 15 nt, Human T-lymphotropic virus 2
agcgcagcaagggcu

SEQ ID NO: 2924586 - RNA, 18 nt, Human T-lymphotropic virus 2
gauugguaucuccuccua

SEQ ID NO: 2924587 - RNA, 23 nt, Human T-lymphotropic virus 2
uaccauugacccauccacagucc

SEQ ID NO: 2924588 - RNA, 13 nt, Human T-lymphotropic virus 2
ccucucaggucga

SEQ ID NO: 2924589 - RNA, 14 nt, Human T-lymphotropic virus 2
caauuucccaggaa

SEQ ID NO: 2924590 - RNA, 16 nt, Human T-lymphotropic virus 2
accuuggcagccaacc

SEQ ID NO: 2924591 - RNA, 19 nt, Human T-lymphotropic virus 2
uagacaaugccauucacaa

SEQ ID NO: 2924592 - RNA, 17 nt, Human T-lymphotropic virus 2
ucucgguuccucuccag

SEQ ID NO: 2924593 - RNA, 14 nt, Human T-lymphotropic virus 2
ucaagucuccccua

SEQ ID NO: 2924594 - RNA, 19 nt, Human T-lymphotropic virus 2
ggccgguaaagcuccacga

SEQ ID NO: 2924595 - RNA, 14 nt, Human T-lymphotropic virus 2
ccuccgccaccucc

SEQ ID NO: 2924596 - RNA, 17 nt, Human T-lymphotropic virus 2
caucaccggcuggggac

SEQ ID NO: 2924597 - RNA, 14 nt, Human T-lymphotropic virus 2
cccucuuggcaggc

SEQ ID NO: 2924598 - RNA, 15 nt, Human T-lymphotropic virus 2
cugagcgccuccagg

SEQ ID NO: 2924599 - RNA, 22 nt, Human T-lymphotropic virus 2
acccggguuuccgccugcgcuc

SEQ ID NO: 2924600 - RNA, 14 nt, Human T-lymphotropic virus 2
gcaaucccuccagg

SEQ ID NO: 2924601 - RNA, 14 nt, Human T-lymphotropic virus 2
cugaaaccacggcc

SEQ ID NO: 2924602 - RNA, 19 nt, Human T-lymphotropic virus 2
ccaaccgucugguccgugg

SEQ ID NO: 2924603 - RNA, 21 nt, Human T-lymphotropic virus 2
ccgggauuugaauuccuccau

SEQ ID NO: 2924604 - RNA, 14 nt, Human T-lymphotropic virus 2
uccacggccucacc

SEQ ID NO: 2924605 - RNA, 17 nt, Human T-lymphotropic virus 2
caccaauuacuccugca

SEQ ID NO: 2924606 - RNA, 20 nt, Human T-lymphotropic virus 2
uccacagcgguuacaaaacc

SEQ ID NO: 2924607 - RNA, 16 nt, Human T-lymphotropic virus 2
ccgccugcgcucggcu

SEQ ID NO: 2924608 - RNA, 16 nt, Human T-lymphotropic virus 2
gaccuacccaccacaa

SEQ ID NO: 2924609 - RNA, 12 nt, Human T-lymphotropic virus 2
aggcccuuccac

SEQ ID NO: 2924610 - RNA, 14 nt, Human T-lymphotropic virus 2
aucagcuccccucc

SEQ ID NO: 2924611 - RNA, 13 nt, Human T-lymphotropic virus 2
aacugaaaccacg

SEQ ID NO: 2924612 - RNA, 13 nt, Human T-lymphotropic virus 2
cuggucacggaga

SEQ ID NO: 2924613 - RNA, 18 nt, Human T-lymphotropic virus 2
aucaaauaccuacauucc

SEQ ID NO: 2924614 - RNA, 17 nt, Human T-lymphotropic virus 2
guccaugacuccgaccu

SEQ ID NO: 2924615 - RNA, 15 nt, Human T-lymphotropic virus 2
guucaucaccucaga

SEQ ID NO: 2924616 - RNA, 18 nt, Human T-lymphotropic virus 2
caaacaccauaggccucg

SEQ ID NO: 2924617 - RNA, 18 nt, Human T-lymphotropic virus 2
ucaaacgccaacaaagaa

SEQ ID NO: 2924618 - RNA, 19 nt, Human T-lymphotropic virus 2
acucgcuuuuagcuagccu

SEQ ID NO: 2924619 - RNA, 22 nt, Human T-lymphotropic virus 2
ccuccuaguagaugccccugga

SEQ ID NO: 2924620 - RNA, 16 nt, Human T-lymphotropic virus 2
cuccucaggccaauuu

SEQ ID NO: 2924621 - RNA, 18 nt, Human T-lymphotropic virus 2
uauaccagcuuuccccac

SEQ ID NO: 2924622 - RNA, 21 nt, Human T-lymphotropic virus 2
ccacgacuccucaggccaauu

SEQ ID NO: 2924623 - RNA, 22 nt, Human T-lymphotropic virus 2
uuugcguggauagauccagccu

SEQ ID NO: 2924624 - RNA, 16 nt, Human T-lymphotropic virus 2
uugguaucuccuccua

SEQ ID NO: 2924625 - RNA, 19 nt, Human T-lymphotropic virus 2
gauguaaauuucacccagg

SEQ ID NO: 2924626 - RNA, 19 nt, Human T-lymphotropic virus 2
cacuucucuaagugcggcu

SEQ ID NO: 2924627 - RNA, 13 nt, Human T-lymphotropic virus 2
acugcuccuccca

SEQ ID NO: 2924628 - RNA, 18 nt, Human T-lymphotropic virus 2
ccccgauguccagcccua

SEQ ID NO: 2924629 - RNA, 20 nt, Human T-lymphotropic virus 2
ccagacaggcauaaccauuc

SEQ ID NO: 2924630 - RNA, 23 nt, Human T-lymphotropic virus 2
ccgcagccacaccaaccuccccg

SEQ ID NO: 2924631 - RNA, 16 nt, Human T-lymphotropic virus 2
cauugcuaccaaccuc

SEQ ID NO: 2924632 - RNA, 11 nt, Human T-lymphotropic virus 2
uuccuuacacc

SEQ ID NO: 2924633 - RNA, 13 nt, Human T-lymphotropic virus 2
ccguccucaaccc

SEQ ID NO: 2924634 - RNA, 13 nt, Human T-lymphotropic virus 2
acgccccaaggcc

SEQ ID NO: 2924635 - RNA, 22 nt, Human T-lymphotropic virus 2
cuccccgacccaauuuccaccu

SEQ ID NO: 2924636 - RNA, 13 nt, Human T-lymphotropic virus 2
cuguccuuccaca

SEQ ID NO: 2924637 - RNA, 23 nt, Human T-lymphotropic virus 2
gcuuaacuuucuccaggcugcuu

SEQ ID NO: 2924638 - RNA, 15 nt, Human T-lymphotropic virus 2
uacucuacaccccca

SEQ ID NO: 2924639 - RNA, 17 nt, Human T-lymphotropic virus 2
ucaggcacuacugagga

SEQ ID NO: 2924640 - RNA, 16 nt, Human T-lymphotropic virus 2
acagacucccuuaucu

SEQ ID NO: 2924641 - RNA, 15 nt, Human T-lymphotropic virus 2
cuguccagagcacca

SEQ ID NO: 2924642 - RNA, 21 nt, Human T-lymphotropic virus 2
ccuccugaacugcuccuccca

SEQ ID NO: 2924643 - RNA, 19 nt, Human T-lymphotropic virus 2
ccuccccgacccaauuucc

SEQ ID NO: 2924644 - RNA, 21 nt, Human T-lymphotropic virus 2
cagccacgccccccuccuggc

SEQ ID NO: 2924645 - RNA, 19 nt, Human T-lymphotropic virus 2
caaaucccccuccccaagc

SEQ ID NO: 2924646 - RNA, 20 nt, Human T-lymphotropic virus 2
cucccucaccgacccucugg

SEQ ID NO: 2924647 - RNA, 20 nt, Human T-lymphotropic virus 2
acacauauucuugcccuucc

SEQ ID NO: 2924648 - RNA, 14 nt, Human T-lymphotropic virus 2
cgguuccucuccag

SEQ ID NO: 2924649 - RNA, 18 nt, Human T-lymphotropic virus 2
ucccggccucggcaccuc

SEQ ID NO: 2924650 - RNA, 14 nt, Human T-lymphotropic virus 2
aagucuccucucag

SEQ ID NO: 2924651 - RNA, 22 nt, Human T-lymphotropic virus 2
ucucccggcgcuuuugauccuu

SEQ ID NO: 2924652 - RNA, 18 nt, Human T-lymphotropic virus 2
ccuccuggccaccugucc

SEQ ID NO: 2924653 - RNA, 22 nt, Human T-lymphotropic virus 2
caccucagaacccacucagccu

SEQ ID NO: 2924654 - RNA, 14 nt, Human T-lymphotropic virus 2
cccuaccucuccuu

SEQ ID NO: 2924655 - RNA, 17 nt, Human T-lymphotropic virus 2
ucccuauauucugcccu

SEQ ID NO: 2924656 - RNA, 17 nt, Human T-lymphotropic virus 2
cccagccacgccccccu

SEQ ID NO: 2924657 - RNA, 15 nt, Human T-lymphotropic virus 2
guggagcgcagcaag

SEQ ID NO: 2924658 - RNA, 22 nt, Human T-lymphotropic virus 2
ucaccucuccuuccccagggcc

SEQ ID NO: 2924659 - RNA, 19 nt, Human T-lymphotropic virus 2
gagcuuguaucacccucac

SEQ ID NO: 2924660 - RNA, 20 nt, Human T-lymphotropic virus 2
cccucucacgaaacacauuc

SEQ ID NO: 2924661 - RNA, 12 nt, Human T-lymphotropic virus 2
cuccuccaugac

SEQ ID NO: 2924662 - RNA, 13 nt, Human T-lymphotropic virus 2
cccgcugcuccuc

SEQ ID NO: 2924663 - RNA, 16 nt, Human T-lymphotropic virus 2
uccccagggccccccg

SEQ ID NO: 2924664 - RNA, 22 nt, Human T-lymphotropic virus 2
cucaccuuggggauccauccuc

SEQ ID NO: 2924665 - RNA, 15 nt, Human T-lymphotropic virus 2
gaacugaaaccacgg

SEQ ID NO: 2924666 - RNA, 23 nt, Human T-lymphotropic virus 2
uaugcauggacuguccuuccaca

SEQ ID NO: 2924667 - RNA, 17 nt, Human T-lymphotropic virus 2
caacauaacugccgugg

SEQ ID NO: 2924668 - RNA, 17 nt, Human T-lymphotropic virus 2
uguauccguccuccagg

SEQ ID NO: 2924669 - RNA, 15 nt, Human T-lymphotropic virus 2
aaagaaagaaaccag

SEQ ID NO: 2924670 - RNA, 15 nt, Human T-lymphotropic virus 2
cguugucagcucucc

SEQ ID NO: 2924671 - RNA, 14 nt, Human T-lymphotropic virus 2
augggacaaacacc

SEQ ID NO: 2924672 - RNA, 17 nt, Human T-lymphotropic virus 2
accuacauucccucgcc

SEQ ID NO: 2924673 - RNA, 17 nt, Human T-lymphotropic virus 2
cauugcuaccaaccucg

SEQ ID NO: 2924674 - RNA, 12 nt, Human T-lymphotropic virus 2
ugcccuccuggc

SEQ ID NO: 2924675 - RNA, 18 nt, Human T-lymphotropic virus 2
ccuccgccaacagucucc

SEQ ID NO: 2924676 - RNA, 13 nt, Human T-lymphotropic virus 2
uuccuccugccuc

SEQ ID NO: 2924677 - RNA, 13 nt, Human T-lymphotropic virus 2
uaggcaggcccgc

SEQ ID NO: 2924678 - RNA, 22 nt, Human T-lymphotropic virus 2
ccaacuccaauacccaaagccc

SEQ ID NO: 2924679 - RNA, 21 nt, Human T-lymphotropic virus 2
ccccaguucaugcagacccuc

SEQ ID NO: 2924680 - RNA, 21 nt, Human T-lymphotropic virus 2
gcuuccugaaccucuccggga

SEQ ID NO: 2924681 - RNA, 16 nt, Human T-lymphotropic virus 2
cagcccccaccaauug

SEQ ID NO: 2924682 - RNA, 18 nt, Human T-lymphotropic virus 2
uacaagaucuccuccagu

SEQ ID NO: 2924683 - RNA, 16 nt, Human T-lymphotropic virus 2
ccugaggaacuccccu

SEQ ID NO: 2924684 - RNA, 15 nt, Human T-lymphotropic virus 2
caccgacccucuggu

SEQ ID NO: 2924685 - RNA, 11 nt, Human T-lymphotropic virus 2
acuccagcccc

SEQ ID NO: 2924686 - RNA, 21 nt, Human T-lymphotropic virus 2
ccccaaaacaucuacaccacc

SEQ ID NO: 2924687 - RNA, 14 nt, Human T-lymphotropic virus 2
ccaugacuccgacc

SEQ ID NO: 2924688 - RNA, 15 nt, Human T-lymphotropic virus 2
gaaaaaaauagaccu

SEQ ID NO: 2924689 - RNA, 15 nt, Human T-lymphotropic virus 2
uccacccugccaggc

SEQ ID NO: 2924690 - RNA, 16 nt, Human T-lymphotropic virus 2
caucccccaggagccc

SEQ ID NO: 2924691 - RNA, 13 nt, Human T-lymphotropic virus 2
gccagccacccag

SEQ ID NO: 2924692 - RNA, 17 nt, Human T-lymphotropic virus 2
auuuccggcccuuaccc

SEQ ID NO: 2924693 - RNA, 13 nt, Human T-lymphotropic virus 2
uaguccucccgga

SEQ ID NO: 2924694 - RNA, 19 nt, Human T-lymphotropic virus 2
cacugaaaacgaaaccuca

SEQ ID NO: 2924695 - RNA, 13 nt, Human T-lymphotropic virus 2
uauaccucccaga

SEQ ID NO: 2924696 - RNA, 20 nt, Human T-lymphotropic virus 2
cugcuccuccgccaacaguc

SEQ ID NO: 2924697 - RNA, 18 nt, Human T-lymphotropic virus 2
caagcgcuacuugacaca

SEQ ID NO: 2924698 - RNA, 16 nt, Human T-lymphotropic virus 2
uacaauccugucuccu

SEQ ID NO: 2924699 - RNA, 19 nt, Human T-lymphotropic virus 2
uggaagacucucuuacacc

SEQ ID NO: 2924700 - RNA, 14 nt, Human T-lymphotropic virus 2
gcccagcagagccg

SEQ ID NO: 2924701 - RNA, 17 nt, Human T-lymphotropic virus 2
caccauuccccagccau

SEQ ID NO: 2924702 - RNA, 20 nt, Human T-lymphotropic virus 2
ccuccuuccccacccagaga

SEQ ID NO: 2924703 - RNA, 22 nt, Human T-lymphotropic virus 2
caaaacaucuacaccaccuggg

SEQ ID NO: 2924704 - RNA, 21 nt, Human T-lymphotropic virus 2
gcauacacgggccccgucucc

SEQ ID NO: 2924705 - RNA, 15 nt, Human T-lymphotropic virus 2
gucagcucuccucuc

SEQ ID NO: 2924706 - RNA, 15 nt, Human T-lymphotropic virus 2
ccucgaacaccuucc

SEQ ID NO: 2924707 - RNA, 21 nt, Human T-lymphotropic virus 2
caggccaauuuucacccucuc

SEQ ID NO: 2924708 - RNA, 21 nt, Human T-lymphotropic virus 2
uccuccaucccaacccuuccc

SEQ ID NO: 2924709 - RNA, 15 nt, Human T-lymphotropic virus 2
uaccuuaucccucgc

SEQ ID NO: 2924710 - RNA, 17 nt, Human T-lymphotropic virus 2
auacaauacuccuccuu

SEQ ID NO: 2924711 - RNA, 15 nt, Human T-lymphotropic virus 2
caucaaaacccagga

SEQ ID NO: 2924712 - RNA, 15 nt, Human T-lymphotropic virus 2
aaagccuucuccucg

SEQ ID NO: 2924713 - RNA, 18 nt, Human T-lymphotropic virus 2
gccccuggauaugauccu

SEQ ID NO: 2924714 - RNA, 23 nt, Human T-lymphotropic virus 2
cagcaagggcuagggcuuccuga

SEQ ID NO: 2924715 - RNA, 22 nt, Human T-lymphotropic virus 2
agacaucucgauacucccacuc

SEQ ID NO: 2924716 - RNA, 17 nt, Human T-lymphotropic virus 2
acguggaacccaccacc

SEQ ID NO: 2924717 - RNA, 14 nt, Human T-lymphotropic virus 2
cugccuuaaacuuc

SEQ ID NO: 2924718 - RNA, 18 nt, Human T-lymphotropic virus 2
uucaccauuccccagcca

SEQ ID NO: 2924719 - RNA, 15 nt, Human T-lymphotropic virus 2
auccucuuuccuucc

SEQ ID NO: 2924720 - RNA, 22 nt, Human T-lymphotropic virus 2
caacaccauggguaauguuuuc

SEQ ID NO: 2924721 - RNA, 18 nt, Human T-lymphotropic virus 2
caggcacuacugaggaaa

SEQ ID NO: 2924722 - RNA, 11 nt, Human T-lymphotropic virus 2
accucagccua

SEQ ID NO: 2924723 - RNA, 15 nt, Human T-lymphotropic virus 2
agggaagccaagucc

SEQ ID NO: 2924724 - RNA, 13 nt, Human T-lymphotropic virus 2
ccuuccaauuucc

SEQ ID NO: 2924725 - RNA, 19 nt, Human T-lymphotropic virus 2
auccucuuuccuucccuug

SEQ ID NO: 2924726 - RNA, 18 nt, Human T-lymphotropic virus 2
guccucaaccccaugagg

SEQ ID NO: 2924727 - RNA, 23 nt, Human T-lymphotropic virus 2
cccuugcucgcuacaaugccccu

SEQ ID NO: 2924728 - RNA, 17 nt, Human T-lymphotropic virus 2
ccaagguuccaccugcc

SEQ ID NO: 2924729 - RNA, 15 nt, Human T-lymphotropic virus 2
uugacaaagacaucu

SEQ ID NO: 2924730 - RNA, 21 nt, Human T-lymphotropic virus 2
cucacgaaacacauuccgcac

SEQ ID NO: 2924731 - RNA, 18 nt, Human T-lymphotropic virus 2
cucucccagcuaacccuc

SEQ ID NO: 2924732 - RNA, 14 nt, Human T-lymphotropic virus 2
cgaucccgacccca

SEQ ID NO: 2924733 - RNA, 21 nt, Human T-lymphotropic virus 2
agcaggaggucagcuccucug

SEQ ID NO: 2924734 - RNA, 18 nt, Human T-lymphotropic virus 2
cgcguugucagcucuccu

SEQ ID NO: 2924735 - RNA, 12 nt, Human T-lymphotropic virus 2
ggggccaacaua

SEQ ID NO: 2924736 - RNA, 15 nt, Human T-lymphotropic virus 2
gucuccucucagccc

SEQ ID NO: 2924737 - RNA, 22 nt, Human T-lymphotropic virus 2
ugccauucaacaagcucuacaa

SEQ ID NO: 2924738 - RNA, 20 nt, Human T-lymphotropic virus 2
uggcuuaacuuucuccaggc

SEQ ID NO: 2924739 - RNA, 23 nt, Human T-lymphotropic virus 2
uacaccucccaacccuucuccag

SEQ ID NO: 2924740 - RNA, 22 nt, Human T-lymphotropic virus 2
uuuuccaaaucccccuccccaa

SEQ ID NO: 2924741 - RNA, 15 nt, Human T-lymphotropic virus 2
agggauauccaggaa

SEQ ID NO: 2924742 - RNA, 21 nt, Human T-lymphotropic virus 2
acugaccacgcauggccuucc

SEQ ID NO: 2924743 - RNA, 17 nt, Human T-lymphotropic virus 2
gccguccucaaccccau

SEQ ID NO: 2924744 - RNA, 23 nt, Human T-lymphotropic virus 2
ugcccuccuggccaccuguccag

SEQ ID NO: 2924745 - RNA, 22 nt, Human T-lymphotropic virus 2
agacgccgccgugccguuccaa

SEQ ID NO: 2924746 - RNA, 11 nt, Human T-lymphotropic virus 2
cgccgcccucu

SEQ ID NO: 2924747 - RNA, 19 nt, Human T-lymphotropic virus 2
uuuuuccgauggcuccccu

SEQ ID NO: 2924748 - RNA, 18 nt, Human T-lymphotropic virus 2
ugcugccaauagccacuc

SEQ ID NO: 2924749 - RNA, 19 nt, Human T-lymphotropic virus 2
aagguaagucuccucucag

SEQ ID NO: 2924750 - RNA, 16 nt, Human T-lymphotropic virus 2
aucuuggacuguccca

SEQ ID NO: 2924751 - RNA, 17 nt, Human T-lymphotropic virus 2
agcuaacccuccaggca

SEQ ID NO: 2924752 - RNA, 15 nt, Human T-lymphotropic virus 2
ccgguaaagcuccac

SEQ ID NO: 2924753 - RNA, 22 nt, Human T-lymphotropic virus 2
caagcaggaggucagcuccucu

SEQ ID NO: 2924754 - RNA, 15 nt, Human T-lymphotropic virus 2
ugacacggcccccug

SEQ ID NO: 2924755 - RNA, 20 nt, Human T-lymphotropic virus 2
acgcguugucagcucuccuc

SEQ ID NO: 2924756 - RNA, 14 nt, Human T-lymphotropic virus 2
ugagcgccuccagg

SEQ ID NO: 2924757 - RNA, 20 nt, Human T-lymphotropic virus 2
ccagcugaccuuacagagca

SEQ ID NO: 2924758 - RNA, 16 nt, Human T-lymphotropic virus 2
cucaaacccccucagg

SEQ ID NO: 2924759 - RNA, 15 nt, Human T-lymphotropic virus 2
uucaugcagacccuc

SEQ ID NO: 2924760 - RNA, 21 nt, Human T-lymphotropic virus 2
acuucuccccuaucacuccau

SEQ ID NO: 2924761 - RNA, 21 nt, Human T-lymphotropic virus 2
uacaugccauucaacaagcuc

SEQ ID NO: 2924762 - RNA, 17 nt, Human T-lymphotropic virus 2
uccgauggcuccccuca

SEQ ID NO: 2924763 - RNA, 15 nt, Human T-lymphotropic virus 2
cauccucauucacca

SEQ ID NO: 2924764 - RNA, 13 nt, Human T-lymphotropic virus 2
acaaaaccaaggu

SEQ ID NO: 2924765 - RNA, 22 nt, Human T-lymphotropic virus 2
ugccuuucuucccucucccggc

SEQ ID NO: 2924766 - RNA, 21 nt, Human T-lymphotropic virus 2
cuugacacggcccccugccuu

SEQ ID NO: 2924767 - RNA, 22 nt, Human T-lymphotropic virus 2
ucugcgccgcucccgcuccuca

SEQ ID NO: 2924768 - RNA, 20 nt, Human T-lymphotropic virus 2
caccuccugaacugcuccuc

SEQ ID NO: 2924769 - RNA, 22 nt, Human T-lymphotropic virus 2
acauucgccggggccucuugcc

SEQ ID NO: 2924770 - RNA, 22 nt, Human T-lymphotropic virus 2
uggcccuugacaacggccuccc

SEQ ID NO: 2924771 - RNA, 17 nt, Human T-lymphotropic virus 2
gccucuuagacacccac

SEQ ID NO: 2924772 - RNA, 21 nt, Human T-lymphotropic virus 2
uccacgggcuuuccccaacuc

SEQ ID NO: 2924773 - RNA, 14 nt, Human T-lymphotropic virus 2
ccucuucgccguca

SEQ ID NO: 2924774 - RNA, 14 nt, Human T-lymphotropic virus 2
uccccugcccucuc

SEQ ID NO: 2924775 - RNA, 14 nt, Human T-lymphotropic virus 2
uacuuauucccaca

SEQ ID NO: 2924776 - RNA, 18 nt, Human T-lymphotropic virus 2
aaauucgaaaccaaagcc

SEQ ID NO: 2924777 - RNA, 13 nt, Human T-lymphotropic virus 2
guaaaggcucuga

SEQ ID NO: 2924778 - RNA, 23 nt, Human T-lymphotropic virus 2
gccaauuuucacccucucccccg

SEQ ID NO: 2924779 - RNA, 23 nt, Human T-lymphotropic virus 2
cccacaacucaaacccccucagg

SEQ ID NO: 2924780 - RNA, 18 nt, Human T-lymphotropic virus 2
caccaauuacuccugcau

SEQ ID NO: 2924781 - RNA, 13 nt, Human T-lymphotropic virus 2
cucuagacaaaua

SEQ ID NO: 2924782 - RNA, 20 nt, Human T-lymphotropic virus 2
agcuuguaucacccucaccc

SEQ ID NO: 2924783 - RNA, 16 nt, Human T-lymphotropic virus 2
cccggguuuccgccug

SEQ ID NO: 2924784 - RNA, 21 nt, Human T-lymphotropic virus 2
uccgcccaucaaacccuccag

SEQ ID NO: 2924785 - RNA, 12 nt, Human T-lymphotropic virus 2
uccuaaccuucc

SEQ ID NO: 2924786 - RNA, 21 nt, Human T-lymphotropic virus 2
ccuccacggccucacccauug

SEQ ID NO: 2924787 - RNA, 23 nt, Human T-lymphotropic virus 2
uacucucucaucagcuuauacaa

SEQ ID NO: 2924788 - RNA, 16 nt, Human T-lymphotropic virus 2
acaggucaucuccccu

SEQ ID NO: 2924789 - RNA, 16 nt, Human T-lymphotropic virus 2
gucccuccccccuagg

SEQ ID NO: 2924790 - RNA, 12 nt, Human T-lymphotropic virus 2
ucaucuccccua

SEQ ID NO: 2924791 - RNA, 22 nt, Human T-lymphotropic virus 2
uaccucccagacgaccccagcc

SEQ ID NO: 2924792 - RNA, 20 nt, Human T-lymphotropic virus 2
caggcuacaaccccauggca

SEQ ID NO: 2924793 - RNA, 18 nt, Human T-lymphotropic virus 2
cuaagugcggcuccucca

SEQ ID NO: 2924794 - RNA, 16 nt, Human T-lymphotropic virus 2
ccaccuguccagagca

SEQ ID NO: 2924795 - RNA, 14 nt, Human T-lymphotropic virus 2
auccauccucucca

SEQ ID NO: 2924796 - RNA, 13 nt, Human T-lymphotropic virus 2
agacaccuucucc

SEQ ID NO: 2924797 - RNA, 22 nt, Human T-lymphotropic virus 2
agaggucuauugcuauaggcag

SEQ ID NO: 2924798 - RNA, 18 nt, Human T-lymphotropic virus 2
ggcggccuugccaccccu

SEQ ID NO: 2924799 - RNA, 19 nt, Human T-lymphotropic virus 2
cggcccuuaccccaaagca

SEQ ID NO: 2924800 - RNA, 20 nt, Human T-lymphotropic virus 2
agucuccgacgagagucucg

SEQ ID NO: 2924801 - RNA, 13 nt, Human T-lymphotropic virus 2
accuccaccaugu

SEQ ID NO: 2924802 - RNA, 14 nt, Human T-lymphotropic virus 2
cucuuggcagcccc

SEQ ID NO: 2924803 - RNA, 19 nt, Human T-lymphotropic virus 2
uaaaccugagcgccuccag

SEQ ID NO: 2924804 - RNA, 17 nt, Human T-lymphotropic virus 2
ccuagguucgucccccu

SEQ ID NO: 2924805 - RNA, 14 nt, Human T-lymphotropic virus 2
cuagacucugccuu

SEQ ID NO: 2924806 - RNA, 14 nt, Human T-lymphotropic virus 2
accuggccuccguc

SEQ ID NO: 2924807 - RNA, 17 nt, Human T-lymphotropic virus 2
cccccaagguuccaccu

SEQ ID NO: 2924808 - RNA, 21 nt, Human T-lymphotropic virus 2
ucccggccucggcaccuccug

SEQ ID NO: 2924809 - RNA, 19 nt, Human T-lymphotropic virus 2
gguaucuccuccuaccacu

SEQ ID NO: 2924810 - RNA, 21 nt, Human T-lymphotropic virus 2
caacaggacaucacuccccug

SEQ ID NO: 2924811 - RNA, 19 nt, Human T-lymphotropic virus 2
uaggacaggucaucucccc

SEQ ID NO: 2924812 - RNA, 21 nt, Human T-lymphotropic virus 2
gguggaguaacaggcucccua

SEQ ID NO: 2924813 - RNA, 17 nt, Human T-lymphotropic virus 2
cuccaggcggccuugcc

SEQ ID NO: 2924814 - RNA, 18 nt, Human T-lymphotropic virus 2
ccuccaucccaacccuuc

SEQ ID NO: 2924815 - RNA, 15 nt, Human T-lymphotropic virus 2
cuccuccgccaccuc

SEQ ID NO: 2924816 - RNA, 13 nt, Human T-lymphotropic virus 2
uauauucugcccu

SEQ ID NO: 2924817 - RNA, 12 nt, Human T-lymphotropic virus 2
auggacacucac

SEQ ID NO: 2924818 - RNA, 12 nt, Human T-lymphotropic virus 2
ggcaccuccuga

SEQ ID NO: 2924819 - RNA, 19 nt, Human T-lymphotropic virus 2
cucggcugccccuuaggua

SEQ ID NO: 2924820 - RNA, 23 nt, Human T-lymphotropic virus 2
ccucaagguccuuaccccuccca

SEQ ID NO: 2924821 - RNA, 22 nt, Human T-lymphotropic virus 2
cacaccaagggaagccaagucc

SEQ ID NO: 2924822 - RNA, 20 nt, Human T-lymphotropic virus 2
ucaccucuccuuccccaggg

SEQ ID NO: 2924823 - RNA, 21 nt, Human T-lymphotropic virus 2
gucuucccggggaagacaaac

SEQ ID NO: 2924824 - RNA, 17 nt, Human T-lymphotropic virus 2
aguguggcuugucuccg

SEQ ID NO: 2924825 - RNA, 19 nt, Human T-lymphotropic virus 2
ucgcucccguaccuccucc

SEQ ID NO: 2924826 - RNA, 20 nt, Human T-lymphotropic virus 2
cucagaacccacucagccuc

SEQ ID NO: 2924827 - RNA, 16 nt, Human T-lymphotropic virus 2
cacacaaacaauccca

SEQ ID NO: 2924828 - RNA, 18 nt, Human T-lymphotropic virus 2
uacucaaauuuauccagc

SEQ ID NO: 2924829 - RNA, 16 nt, Human T-lymphotropic virus 2
cccaaggccuccacgg

SEQ ID NO: 2924830 - RNA, 13 nt, Human T-lymphotropic virus 2
ccacggccucacc

SEQ ID NO: 2924831 - RNA, 18 nt, Human T-lymphotropic virus 2
cagacucgccucucccug

SEQ ID NO: 2924832 - RNA, 18 nt, Human T-lymphotropic virus 2
uccccaacaaaccuccuc

SEQ ID NO: 2924833 - RNA, 14 nt, Human T-lymphotropic virus 2
ccauaaccuuggca

SEQ ID NO: 2924834 - RNA, 19 nt, Human T-lymphotropic virus 2
ggccgccucaaccccgccc

SEQ ID NO: 2924835 - RNA, 14 nt, Human T-lymphotropic virus 2
cuccuuccccaggg

SEQ ID NO: 2924836 - RNA, 13 nt, Human T-lymphotropic virus 2
ucagcuccccucc

SEQ ID NO: 2924837 - RNA, 17 nt, Human T-lymphotropic virus 2
guaguucaguccucccu

SEQ ID NO: 2924838 - RNA, 13 nt, Human T-lymphotropic virus 2
acaggcuacaacc

SEQ ID NO: 2924839 - RNA, 14 nt, Human T-lymphotropic virus 2
aagccaagucccuu

SEQ ID NO: 2924840 - RNA, 12 nt, Human T-lymphotropic virus 2
uccaccugccuu

SEQ ID NO: 2924841 - RNA, 15 nt, Human T-lymphotropic virus 2
gccguccucaacccc

SEQ ID NO: 2924842 - RNA, 21 nt, Human T-lymphotropic virus 2
cccaccacaauguuccaaccc

SEQ ID NO: 2924843 - RNA, 15 nt, Human T-lymphotropic virus 2
gcagccacaccaacc

SEQ ID NO: 2924844 - RNA, 14 nt, Human T-lymphotropic virus 2
cuuccgugggaccg

SEQ ID NO: 2924845 - RNA, 17 nt, Human T-lymphotropic virus 2
guggcaagguaggacac

SEQ ID NO: 2924846 - RNA, 14 nt, Human T-lymphotropic virus 2
ugcggcuccuccau

SEQ ID NO: 2924847 - RNA, 17 nt, Human T-lymphotropic virus 2
uucgaaaccaaagccuu

SEQ ID NO: 2924848 - RNA, 21 nt, Human T-lymphotropic virus 2
ugacccuugcucgcuacaaug

SEQ ID NO: 2924849 - RNA, 21 nt, Human T-lymphotropic virus 2
ccagcuaacccuccaggcacu

SEQ ID NO: 2924850 - RNA, 16 nt, Human T-lymphotropic virus 2
cgcauacacgggcccc

SEQ ID NO: 2924851 - RNA, 14 nt, Human T-lymphotropic virus 2
ccaacccuucccuu

SEQ ID NO: 2924852 - RNA, 22 nt, Human T-lymphotropic virus 2
augccuggaaccaacccucggg

SEQ ID NO: 2924853 - RNA, 19 nt, Human T-lymphotropic virus 2
ccucuucgccgucacugaa

SEQ ID NO: 2924854 - RNA, 17 nt, Human T-lymphotropic virus 2
ccacgcauggccuucca

SEQ ID NO: 2924855 - RNA, 19 nt, Human T-lymphotropic virus 2
aggaaggggaaccccuccu

SEQ ID NO: 2924856 - RNA, 13 nt, Human T-lymphotropic virus 2
cgccacaccaagg

SEQ ID NO: 2924857 - RNA, 13 nt, Human T-lymphotropic virus 2
cuaccccucccaa

SEQ ID NO: 2924858 - RNA, 17 nt, Human T-lymphotropic virus 2
cuccccucauccaagug

SEQ ID NO: 2924859 - RNA, 22 nt, Human T-lymphotropic virus 2
cagccauacuucgccuucacca

SEQ ID NO: 2924860 - RNA, 14 nt, Human T-lymphotropic virus 2
ggacgaccuaccca

SEQ ID NO: 2924861 - RNA, 23 nt, Human T-lymphotropic virus 2
ccgacgagagucucgcaccugcu

SEQ ID NO: 2924862 - RNA, 22 nt, Human T-lymphotropic virus 2
ccauacuucgccuucaccauuc

SEQ ID NO: 2924863 - RNA, 18 nt, Human T-lymphotropic virus 2
ggccucggcaccuccuga

SEQ ID NO: 2924864 - RNA, 17 nt, Human T-lymphotropic virus 2
cgagcucggcugccccu

SEQ ID NO: 2924865 - RNA, 17 nt, Human T-lymphotropic virus 2
caaagacaucucccacc

SEQ ID NO: 2924866 - RNA, 16 nt, Human T-lymphotropic virus 2
cucccgaaccauccuc

SEQ ID NO: 2924867 - RNA, 17 nt, Human T-lymphotropic virus 2
ccuccuggccccugccc

SEQ ID NO: 2924868 - RNA, 19 nt, Human T-lymphotropic virus 2
cucaaccccgcccuaccuc

SEQ ID NO: 2924869 - RNA, 21 nt, Human T-lymphotropic virus 2
cuccuguuggaucucccuucc

SEQ ID NO: 2924870 - RNA, 21 nt, Human T-lymphotropic virus 2
acaacaugucaaagcaagccc

SEQ ID NO: 2924871 - RNA, 23 nt, Human T-lymphotropic virus 2
caggaggaaggggaaccccuccu

SEQ ID NO: 2924872 - RNA, 19 nt, Human T-lymphotropic virus 2
cguucuuuccucuucgccg

SEQ ID NO: 2924873 - RNA, 14 nt, Human T-lymphotropic virus 2
cugccaccccagac

SEQ ID NO: 2924874 - RNA, 15 nt, Human T-lymphotropic virus 2
ugcccgcuccuccau

SEQ ID NO: 2924875 - RNA, 20 nt, Human T-lymphotropic virus 2
cuuacaccucccaacccuuc

SEQ ID NO: 2924876 - RNA, 18 nt, Human T-lymphotropic virus 2
ugcuuucuccacccugcc

SEQ ID NO: 2924877 - RNA, 17 nt, Human T-lymphotropic virus 2
caucccaacccuucccu

SEQ ID NO: 2924878 - RNA, 22 nt, Human T-lymphotropic virus 2
cagauguaaauuucacccagga

SEQ ID NO: 2924879 - RNA, 12 nt, Human T-lymphotropic virus 2
ugcccgcuccuc

SEQ ID NO: 2924880 - RNA, 12 nt, Human T-lymphotropic virus 2
acaacaacucca

SEQ ID NO: 2924881 - RNA, 21 nt, Human T-lymphotropic virus 2
ucauucaugaccuaagagcca

SEQ ID NO: 2924882 - RNA, 17 nt, Human T-lymphotropic virus 2
cucaccucuccuucccc

SEQ ID NO: 2924883 - RNA, 16 nt, Human T-lymphotropic virus 2
ccaucaaaacccagga

SEQ ID NO: 2924884 - RNA, 14 nt, Human T-lymphotropic virus 2
ugacgccccaaggc

SEQ ID NO: 2924885 - RNA, 16 nt, Human T-lymphotropic virus 2
cugucccaaugggcac

SEQ ID NO: 2924886 - RNA, 19 nt, Human T-lymphotropic virus 2
ccaacccgucugcacgugg

SEQ ID NO: 2924887 - RNA, 13 nt, Human T-lymphotropic virus 2
aguaccagccaua

SEQ ID NO: 2924888 - RNA, 22 nt, Human T-lymphotropic virus 2
cacccaggaagucagccaagug

SEQ ID NO: 2924889 - RNA, 14 nt, Human T-lymphotropic virus 2
ucuccccuaucacu

SEQ ID NO: 2924890 - RNA, 20 nt, Human T-lymphotropic virus 2
ucuccgggagaggucuauug

SEQ ID NO: 2924891 - RNA, 21 nt, Human T-lymphotropic virus 2
cucuaagugcggcuccuccau

SEQ ID NO: 2924892 - RNA, 15 nt, Human T-lymphotropic virus 2
gccagccacccaggg

SEQ ID NO: 2924893 - RNA, 14 nt, Human T-lymphotropic virus 2
ucccaacccuucuc

SEQ ID NO: 2924894 - RNA, 19 nt, Human T-lymphotropic virus 2
uaagugcggcuccuccaug

SEQ ID NO: 2924895 - RNA, 16 nt, Human T-lymphotropic virus 2
ccuucuuuuccccuuc

SEQ ID NO: 2924896 - RNA, 19 nt, Human T-lymphotropic virus 2
cgucucccggccucggcac

SEQ ID NO: 2924897 - RNA, 11 nt, Human T-lymphotropic virus 2
aacccccucca

SEQ ID NO: 2924898 - RNA, 16 nt, Human T-lymphotropic virus 2
uccaaacaccauaggc

SEQ ID NO: 2924899 - RNA, 12 nt, Human T-lymphotropic virus 2
caaggcucugac

SEQ ID NO: 2924900 - RNA, 16 nt, Human T-lymphotropic virus 2
ccuccuaccacuccag

SEQ ID NO: 2924901 - RNA, 22 nt, Human T-lymphotropic virus 2
ccagccccuguagcccaaccca

SEQ ID NO: 2924902 - RNA, 15 nt, Human T-lymphotropic virus 2
ucacauuccucccau

SEQ ID NO: 2924903 - RNA, 11 nt, Human T-lymphotropic virus 2
cacuccagccc

SEQ ID NO: 2924904 - RNA, 18 nt, Human T-lymphotropic virus 2
uccguccccaaaacaucu

SEQ ID NO: 2924905 - RNA, 23 nt, Human T-lymphotropic virus 2
cucaaaaggcagcguacguucuc

SEQ ID NO: 2924906 - RNA, 13 nt, Human T-lymphotropic virus 2
gcuauaggcaggc

SEQ ID NO: 2924907 - RNA, 15 nt, Human T-lymphotropic virus 2
caccaauugcugcca

SEQ ID NO: 2924908 - RNA, 20 nt, Human T-lymphotropic virus 2
ccaauuuucacccucucccc

SEQ ID NO: 2924909 - RNA, 14 nt, Human T-lymphotropic virus 2
ccuuacccaggcca

SEQ ID NO: 2924910 - RNA, 12 nt, Human T-lymphotropic virus 2
cauucccucgcc

SEQ ID NO: 2924911 - RNA, 22 nt, Human T-lymphotropic virus 2
ugcuccuccgccaacagucucc

SEQ ID NO: 2924912 - RNA, 20 nt, Human T-lymphotropic virus 2
cccagcuaacccuccaggca

SEQ ID NO: 2924913 - RNA, 16 nt, Human T-lymphotropic virus 2
accuuaucccucgccu

SEQ ID NO: 2924914 - RNA, 22 nt, Human T-lymphotropic virus 2
gacagccuuaccccaccuacag

SEQ ID NO: 2924915 - RNA, 13 nt, Human T-lymphotropic virus 2
agcgccuccaggc

SEQ ID NO: 2924916 - RNA, 15 nt, Human T-lymphotropic virus 2
cuggucuccaaggcc

SEQ ID NO: 2924917 - RNA, 14 nt, Human T-lymphotropic virus 2
caugccauucaaca

SEQ ID NO: 2924918 - RNA, 13 nt, Human T-lymphotropic virus 2
aucaagacaucuc

SEQ ID NO: 2924919 - RNA, 21 nt, Human T-lymphotropic virus 2
acagagcaccaauuacuccug

SEQ ID NO: 2924920 - RNA, 15 nt, Human T-lymphotropic virus 2
ccgcucccgcuccuc

SEQ ID NO: 2924921 - RNA, 22 nt, Human T-lymphotropic virus 2
ccauuacuaccacccucaccuc

SEQ ID NO: 2924922 - RNA, 16 nt, Human T-lymphotropic virus 2
gccguucuucaggcca

SEQ ID NO: 2924923 - RNA, 19 nt, Human T-lymphotropic virus 2
accgcuugcagccuaggcc

SEQ ID NO: 2924924 - RNA, 21 nt, Human T-lymphotropic virus 2
cucccuuaucuuagcuccccu

SEQ ID NO: 2924925 - RNA, 21 nt, Human T-lymphotropic virus 2
gcuccccucccucgccuuccc

SEQ ID NO: 2924926 - RNA, 19 nt, Human T-lymphotropic virus 2
acccuccaggcacugacca

SEQ ID NO: 2924927 - RNA, 11 nt, Human T-lymphotropic virus 2
caccucagccu

SEQ ID NO: 2924928 - RNA, 17 nt, Human T-lymphotropic virus 2
cacaacaaaccccaggc

SEQ ID NO: 2924929 - RNA, 17 nt, Human T-lymphotropic virus 2
cuuccaucccuccuauc

SEQ ID NO: 2924930 - RNA, 18 nt, Human T-lymphotropic virus 2
gcaggcgucccggggcca

SEQ ID NO: 2924931 - RNA, 14 nt, Human T-lymphotropic virus 2
auccuucucacugg

SEQ ID NO: 2924932 - RNA, 14 nt, Human T-lymphotropic virus 2
ugcaaucccuccag

SEQ ID NO: 2924933 - RNA, 20 nt, Human T-lymphotropic virus 2
cagcucauaggcccuggcag

SEQ ID NO: 2924934 - RNA, 21 nt, Human T-lymphotropic virus 2
cagguggucuauguuccaccc

SEQ ID NO: 2924935 - RNA, 15 nt, Human T-lymphotropic virus 2
uccugaaccucuccg

SEQ ID NO: 2924936 - RNA, 18 nt, Human T-lymphotropic virus 2
gacaaacaccucagccua

SEQ ID NO: 2924937 - RNA, 13 nt, Human T-lymphotropic virus 2
ugaccccucuugg

SEQ ID NO: 2924938 - RNA, 12 nt, Human T-lymphotropic virus 2
cguaccuccucc

SEQ ID NO: 2924939 - RNA, 18 nt, Human T-lymphotropic virus 2
cggccucggcaccuccug

SEQ ID NO: 2924940 - RNA, 18 nt, Human T-lymphotropic virus 2
ccgucuccaguccauccu

SEQ ID NO: 2924941 - RNA, 21 nt, Human T-lymphotropic virus 2
cagacaauuaggagccuuccu

SEQ ID NO: 2924942 - RNA, 15 nt, Human T-lymphotropic virus 2
ccauuacuaccaccc

SEQ ID NO: 2924943 - RNA, 18 nt, Human T-lymphotropic virus 2
ugcugccaagccauggcc

SEQ ID NO: 2924944 - RNA, 21 nt, Human T-lymphotropic virus 2
cucacgauugguaucuccucc

SEQ ID NO: 2924945 - RNA, 22 nt, Human T-lymphotropic virus 2
caccucuccuuccccagggccc

SEQ ID NO: 2924946 - RNA, 19 nt, Human T-lymphotropic virus 2
gcuccucacgcuccugcag

SEQ ID NO: 2924947 - RNA, 21 nt, Human T-lymphotropic virus 2
caucacuccccugcccucuca

SEQ ID NO: 2924948 - RNA, 12 nt, Human T-lymphotropic virus 2
uccucucagccc

SEQ ID NO: 2924949 - RNA, 17 nt, Human T-lymphotropic virus 2
caagcaguaccagccau

SEQ ID NO: 2924950 - RNA, 18 nt, Human T-lymphotropic virus 2
ccaccauguccgcagcca

SEQ ID NO: 2924951 - RNA, 21 nt, Human T-lymphotropic virus 2
ccuugacaacggccuccccga

SEQ ID NO: 2924952 - RNA, 13 nt, Human T-lymphotropic virus 2
ccaacucaccugg

SEQ ID NO: 2924953 - RNA, 22 nt, Human T-lymphotropic virus 2
cucuccagggggaggcacacca

SEQ ID NO: 2924954 - RNA, 21 nt, Human T-lymphotropic virus 2
augaccuggucuccaaggccc

SEQ ID NO: 2924955 - RNA, 17 nt, Human T-lymphotropic virus 2
ugaccuggucuccaagg

SEQ ID NO: 2924956 - RNA, 18 nt, Human T-lymphotropic virus 2
agccacgccccccuccug

SEQ ID NO: 2924957 - RNA, 20 nt, Human T-lymphotropic virus 2
agccucccgagccagccacc

SEQ ID NO: 2924958 - RNA, 14 nt, Human T-lymphotropic virus 2
ccuguauccagacu

SEQ ID NO: 2924959 - RNA, 13 nt, Human T-lymphotropic virus 2
gaaccccuccugu

SEQ ID NO: 2924960 - RNA, 17 nt, Human T-lymphotropic virus 2
ccauugcuaccaaccuc

SEQ ID NO: 2924961 - RNA, 15 nt, Human T-lymphotropic virus 2
cuaacccuccaggca

SEQ ID NO: 2924962 - RNA, 16 nt, Human T-lymphotropic virus 2
cgcugcuccuccgcca

SEQ ID NO: 2924963 - RNA, 13 nt, Human T-lymphotropic virus 2
cuacgugcugcca

SEQ ID NO: 2924964 - RNA, 16 nt, Human T-lymphotropic virus 2
cuacaccaccugggga

SEQ ID NO: 2924965 - RNA, 18 nt, Human T-lymphotropic virus 2
accccucccaccacuccu

SEQ ID NO: 2924966 - RNA, 20 nt, Human T-lymphotropic virus 2
ucgcccccgauguccagccc

SEQ ID NO: 2924967 - RNA, 16 nt, Human T-lymphotropic virus 2
ucaccauuccccagcc

SEQ ID NO: 2924968 - RNA, 19 nt, Human T-lymphotropic virus 2
ccuuugcgacuuccugagg

SEQ ID NO: 2924969 - RNA, 20 nt, Human T-lymphotropic virus 2
cuggucuccaaggcccugga

SEQ ID NO: 2924970 - RNA, 18 nt, Human T-lymphotropic virus 2
agcgcugaaaaacaaggc

SEQ ID NO: 2924971 - RNA, 19 nt, Human T-lymphotropic virus 2
ggaggaaggggaaccccuc

SEQ ID NO: 2924972 - RNA, 18 nt, Human T-lymphotropic virus 2
gcccugcccgcuccucca

SEQ ID NO: 2924973 - RNA, 23 nt, Human T-lymphotropic virus 2
uaaaugaccuggucuccaaggcc

SEQ ID NO: 2924974 - RNA, 16 nt, Human T-lymphotropic virus 2
uugccaccccuacugc

SEQ ID NO: 2924975 - RNA, 13 nt, Human T-lymphotropic virus 2
guccgcagccaca

SEQ ID NO: 2924976 - RNA, 21 nt, Human T-lymphotropic virus 2
agcccccaccaauugcugcca

SEQ ID NO: 2924977 - RNA, 18 nt, Human T-lymphotropic virus 2
gagucucgcaccugcucg

SEQ ID NO: 2924978 - RNA, 21 nt, Human T-lymphotropic virus 2
accccaugaggaaaauguuuc

SEQ ID NO: 2924979 - RNA, 16 nt, Human T-lymphotropic virus 2
ccauaaccuuggcagc

SEQ ID NO: 2924980 - RNA, 19 nt, Human T-lymphotropic virus 2
cccacucagccuccaccaa

SEQ ID NO: 2924981 - RNA, 23 nt, Human T-lymphotropic virus 2
ccuuccuacaaugacccuugcuc

SEQ ID NO: 2924982 - RNA, 23 nt, Human T-lymphotropic virus 2
ccaacccucggggaucagcuccc

SEQ ID NO: 2924983 - RNA, 14 nt, Human T-lymphotropic virus 2
gaacugaaaccacg

SEQ ID NO: 2924984 - RNA, 15 nt, Human T-lymphotropic virus 2
gaccuggucuccaag

SEQ ID NO: 2924985 - RNA, 16 nt, Human T-lymphotropic virus 2
ugagcgccuccaggcc

SEQ ID NO: 2924986 - RNA, 18 nt, Human T-lymphotropic virus 2
ccuacuuuuauucagucu

SEQ ID NO: 2924987 - RNA, 16 nt, Human T-lymphotropic virus 2
cacucaucccccugcg

SEQ ID NO: 2924988 - RNA, 14 nt, Human T-lymphotropic virus 2
uuagccagccccac

SEQ ID NO: 2924989 - RNA, 14 nt, Human T-lymphotropic virus 2
ccaagcggccucgg

SEQ ID NO: 2924990 - RNA, 17 nt, Human T-lymphotropic virus 2
cugacgauuacccccug

SEQ ID NO: 2924991 - RNA, 15 nt, Human T-lymphotropic virus 2
gaacccacucagccu

SEQ ID NO: 2924992 - RNA, 21 nt, Human T-lymphotropic virus 2
aucagcuccccucccucgccu

SEQ ID NO: 2924993 - RNA, 15 nt, Human T-lymphotropic virus 2
cacucagccuccacc

SEQ ID NO: 2924994 - RNA, 20 nt, Human T-lymphotropic virus 2
accgaucccgaccccagagg

SEQ ID NO: 2924995 - RNA, 20 nt, Human T-lymphotropic virus 2
cuucgccgucacugaaaacg

SEQ ID NO: 2924996 - RNA, 23 nt, Human T-lymphotropic virus 2
auagaccucacccuuacccacuu

SEQ ID NO: 2924997 - RNA, 18 nt, Human T-lymphotropic virus 2
aaccccaugaggaaaaug

SEQ ID NO: 2924998 - RNA, 18 nt, Human T-lymphotropic virus 2
gcacgagaagcccuccag

SEQ ID NO: 2924999 - RNA, 18 nt, Human T-lymphotropic virus 2
uccuaccacuccagcccc

SEQ ID NO: 2925000 - RNA, 17 nt, Human T-lymphotropic virus 2
cccuuuuucccucgcuc

SEQ ID NO: 2925001 - RNA, 20 nt, Human T-lymphotropic virus 2
gccccccgaucucacuagcc

SEQ ID NO: 2925002 - RNA, 17 nt, Human T-lymphotropic virus 2
uccccuagguucguccc

SEQ ID NO: 2925003 - RNA, 12 nt, Human T-lymphotropic virus 2
accccaccuaca

SEQ ID NO: 2925004 - RNA, 21 nt, Human T-lymphotropic virus 2
cgggccgguaaagcuccacga

SEQ ID NO: 2925005 - RNA, 22 nt, Human T-lymphotropic virus 2
auguaaauuucacccaggaagu

SEQ ID NO: 2925006 - RNA, 19 nt, Human T-lymphotropic virus 2
cucaacgccgcccucuugg

SEQ ID NO: 2925007 - RNA, 16 nt, Human T-lymphotropic virus 2
caccauuccccagcca

SEQ ID NO: 2925008 - RNA, 22 nt, Human T-lymphotropic virus 2
gaccuuacgguuauaccccaga

SEQ ID NO: 2925009 - RNA, 13 nt, Human T-lymphotropic virus 2
auucugccacccc

SEQ ID NO: 2925010 - RNA, 21 nt, Human T-lymphotropic virus 2
aacaccuucccccaccucccc

SEQ ID NO: 2925011 - RNA, 16 nt, Human T-lymphotropic virus 2
agccacuccaaacacc

SEQ ID NO: 2925012 - RNA, 16 nt, Human T-lymphotropic virus 2
uggcagcccccaguuc

SEQ ID NO: 2925013 - RNA, 16 nt, Human T-lymphotropic virus 2
cacgcaaugcuucccu

SEQ ID NO: 2925014 - RNA, 17 nt, Human T-lymphotropic virus 2
uacaccaacaucccugu

SEQ ID NO: 2925015 - RNA, 18 nt, Human T-lymphotropic virus 2
gauaacugcaacaacucc

SEQ ID NO: 2925016 - RNA, 18 nt, Human T-lymphotropic virus 2
cauauucuugcccuuccg

SEQ ID NO: 2925017 - RNA, 15 nt, Human T-lymphotropic virus 2
ccuuccaucccuccu

SEQ ID NO: 2925018 - RNA, 19 nt, Human T-lymphotropic virus 2
auguauccguccuccagga

SEQ ID NO: 2925019 - RNA, 21 nt, Human T-lymphotropic virus 2
cucugacgauuacccccugcc

SEQ ID NO: 2925020 - RNA, 17 nt, Human T-lymphotropic virus 2
ccaucccaacccuuccc

SEQ ID NO: 2925021 - RNA, 19 nt, Human T-lymphotropic virus 2
cugacgauuacccccugcc

SEQ ID NO: 2925022 - RNA, 23 nt, Human T-lymphotropic virus 2
uacaccaucagcagcuuaacaca

SEQ ID NO: 2925023 - RNA, 17 nt, Human T-lymphotropic virus 2
aagaacuucuauacaaa

SEQ ID NO: 2925024 - RNA, 12 nt, Human T-lymphotropic virus 2
cuugcccuuccg

SEQ ID NO: 2925025 - RNA, 17 nt, Human T-lymphotropic virus 2
ccauugcaaucccucca

SEQ ID NO: 2925026 - RNA, 16 nt, Human T-lymphotropic virus 2
cacuccaacugcugau

SEQ ID NO: 2925027 - RNA, 16 nt, Human T-lymphotropic virus 2
cugacgucucccccuu

SEQ ID NO: 2925028 - RNA, 20 nt, Human T-lymphotropic virus 2
aggcucugacgucucccccu

SEQ ID NO: 2925029 - RNA, 23 nt, Human T-lymphotropic virus 2
cuuccuacuuuuauucagucuca

SEQ ID NO: 2925030 - RNA, 16 nt, Human T-lymphotropic virus 2
caaaacauccuccggg

SEQ ID NO: 2925031 - RNA, 20 nt, Human T-lymphotropic virus 2
cacccagagaaccucaagga

SEQ ID NO: 2925032 - RNA, 18 nt, Human T-lymphotropic virus 2
ccucuccuuccccagggc

SEQ ID NO: 2925033 - RNA, 14 nt, Human T-lymphotropic virus 2
ucuccccccauccc

SEQ ID NO: 2925034 - RNA, 19 nt, Human T-lymphotropic virus 2
ugcccgcuccuccauccca

SEQ ID NO: 2925035 - RNA, 13 nt, Human T-lymphotropic virus 2
ccacaccaaccuc

SEQ ID NO: 2925036 - RNA, 16 nt, Human T-lymphotropic virus 2
caaaccaccucccaaa

SEQ ID NO: 2925037 - RNA, 13 nt, Human T-lymphotropic virus 2
cuaacccuccagg

SEQ ID NO: 2925038 - RNA, 19 nt, Human T-lymphotropic virus 2
acaaacaccucagccuacc

SEQ ID NO: 2925039 - RNA, 22 nt, Human T-lymphotropic virus 2
acuccaauacccaaagccccca

SEQ ID NO: 2925040 - RNA, 22 nt, Human T-lymphotropic virus 2
gucggcauccucauucaccaca

SEQ ID NO: 2925041 - RNA, 19 nt, Human T-lymphotropic virus 2
gccccuguauccuccgcca

SEQ ID NO: 2925042 - RNA, 15 nt, Human T-lymphotropic virus 2
caugacccuccuagu

SEQ ID NO: 2925043 - RNA, 16 nt, Human T-lymphotropic virus 2
agaccaccaacaccau

SEQ ID NO: 2925044 - RNA, 18 nt, Human T-lymphotropic virus 2
aagccauggccuucccuu

SEQ ID NO: 2925045 - RNA, 22 nt, Human T-lymphotropic virus 2
gcacugaccacgcauggccuuc

SEQ ID NO: 2925046 - RNA, 19 nt, Human T-lymphotropic virus 2
cuuaucccucgccuccccu

SEQ ID NO: 2925047 - RNA, 17 nt, Human T-lymphotropic virus 2
caggccauuucccuccu

SEQ ID NO: 2925048 - RNA, 14 nt, Human T-lymphotropic virus 2
agugucccuucgac

SEQ ID NO: 2925049 - RNA, 19 nt, Human T-lymphotropic virus 2
gccuucaccauuccccagc

SEQ ID NO: 2925050 - RNA, 14 nt, Human T-lymphotropic virus 2
ucaaaacccaggag

SEQ ID NO: 2925051 - RNA, 15 nt, Human T-lymphotropic virus 2
uggacuguccuucca

SEQ ID NO: 2925052 - RNA, 16 nt, Human T-lymphotropic virus 2
ccaacccuucuccagg

SEQ ID NO: 2925053 - RNA, 20 nt, Human T-lymphotropic virus 2
cuccugaacugcuccuccca

SEQ ID NO: 2925054 - RNA, 22 nt, Human T-lymphotropic virus 2
ucaagcaggaggucagcuccuc

SEQ ID NO: 2925055 - RNA, 21 nt, Human T-lymphotropic virus 2
ugccaagcauggacauccgca

SEQ ID NO: 2925056 - RNA, 22 nt, Human T-lymphotropic virus 2
gcugccaagccauggccuuccc

SEQ ID NO: 2925057 - RNA, 16 nt, Human T-lymphotropic virus 2
auccuucgcaaacacc

SEQ ID NO: 2925058 - RNA, 14 nt, Human T-lymphotropic virus 2
aaagcccccagggg

SEQ ID NO: 2925059 - RNA, 13 nt, Human T-lymphotropic virus 2
gccgcccucuugg

SEQ ID NO: 2925060 - RNA, 19 nt, Human T-lymphotropic virus 2
ggaauuacaacaacucucc

SEQ ID NO: 2925061 - RNA, 14 nt, Human T-lymphotropic virus 2
gucgcuccccgagg

SEQ ID NO: 2925062 - RNA, 22 nt, Human T-lymphotropic virus 2
acagggccuaggguacuacucg

SEQ ID NO: 2925063 - RNA, 21 nt, Human T-lymphotropic virus 2
ccuuacgguuauaccccagac

SEQ ID NO: 2925064 - RNA, 20 nt, Human T-lymphotropic virus 2
caccuuggggauccauccuc

SEQ ID NO: 2925065 - RNA, 16 nt, Human T-lymphotropic virus 2
augucaugaaccccag

SEQ ID NO: 2925066 - RNA, 15 nt, Human T-lymphotropic virus 2
agcaccaacucaccu

SEQ ID NO: 2925067 - RNA, 21 nt, Human T-lymphotropic virus 2
ccuacuacuacuccuccgcca

SEQ ID NO: 2925068 - RNA, 9 nt, Human T-lymphotropic virus 2
accucccaa

SEQ ID NO: 2925069 - RNA, 13 nt, Human T-lymphotropic virus 2
uuacccacuuccc

SEQ ID NO: 2925070 - RNA, 16 nt, Human T-lymphotropic virus 2
uccuuaccccucccac

SEQ ID NO: 2925071 - RNA, 16 nt, Human T-lymphotropic virus 2
ccuccaccaacuucuc

SEQ ID NO: 2925072 - RNA, 17 nt, Human T-lymphotropic virus 2
aauuuucacccucuccc

SEQ ID NO: 2925073 - RNA, 19 nt, Human T-lymphotropic virus 2
ccaacaaaccuccucccga

SEQ ID NO: 2925074 - RNA, 16 nt, Human T-lymphotropic virus 2
aguuauccuaggagag

SEQ ID NO: 2925075 - RNA, 13 nt, Human T-lymphotropic virus 2
acuguccuaaccu

SEQ ID NO: 2925076 - RNA, 23 nt, Human T-lymphotropic virus 2
ugccuggaaccaacccucgggga

SEQ ID NO: 2925077 - RNA, 14 nt, Human T-lymphotropic virus 2
gcaggcgucccggg

SEQ ID NO: 2925078 - RNA, 18 nt, Human T-lymphotropic virus 2
cucccuguauccagacug

SEQ ID NO: 2925079 - RNA, 21 nt, Human T-lymphotropic virus 2
ccgcagccacaccaaccuccc

SEQ ID NO: 2925080 - RNA, 14 nt, Human T-lymphotropic virus 2
guuccuacacacag

SEQ ID NO: 2925081 - RNA, 21 nt, Human T-lymphotropic virus 2
cccucgcucccguaccuccuc

SEQ ID NO: 2925082 - RNA, 13 nt, Human T-lymphotropic virus 2
ccauccucuccaa

SEQ ID NO: 2925083 - RNA, 11 nt, Human T-lymphotropic virus 2
auuggccccug

SEQ ID NO: 2925084 - RNA, 15 nt, Human T-lymphotropic virus 2
cacuaccacccauuc

SEQ ID NO: 2925085 - RNA, 16 nt, Human T-lymphotropic virus 2
ucagcuccccucccuc

SEQ ID NO: 2925086 - RNA, 20 nt, Human T-lymphotropic virus 2
ccacuagcccagcagagccg

SEQ ID NO: 2925087 - RNA, 17 nt, Human T-lymphotropic virus 2
ccacaacaacuccaugc

SEQ ID NO: 2925088 - RNA, 13 nt, Human T-lymphotropic virus 2
ccgucuccagucc

SEQ ID NO: 2925089 - RNA, 13 nt, Human T-lymphotropic virus 2
gcagccguccuca

SEQ ID NO: 2925090 - RNA, 18 nt, Human T-lymphotropic virus 2
cccaacccuucuccagga

SEQ ID NO: 2925091 - RNA, 15 nt, Human T-lymphotropic virus 2
cuacaccaccugggg

SEQ ID NO: 2925092 - RNA, 15 nt, Human T-lymphotropic virus 2
caacaaagaaugcca

SEQ ID NO: 2925093 - RNA, 18 nt, Human T-lymphotropic virus 2
uagcagccguccucaacc

SEQ ID NO: 2925094 - RNA, 23 nt, Human T-lymphotropic virus 2
cuucgaacaacaauuagcagccg

SEQ ID NO: 2925095 - RNA, 14 nt, Human T-lymphotropic virus 2
ccacgcauggccuu

SEQ ID NO: 2925096 - RNA, 23 nt, Human T-lymphotropic virus 2
ccaaugccauuacuaccacccuc

SEQ ID NO: 2925097 - RNA, 13 nt, Human T-lymphotropic virus 2
cuaaucucccccc

SEQ ID NO: 2925098 - RNA, 13 nt, Human T-lymphotropic virus 2
cuuccccacccag

SEQ ID NO: 2925099 - RNA, 17 nt, Human T-lymphotropic virus 2
ucauguauccguccucc

SEQ ID NO: 2925100 - RNA, 18 nt, Human T-lymphotropic virus 2
ccgaaccuggccuccguc

SEQ ID NO: 2925101 - RNA, 16 nt, Human T-lymphotropic virus 2
gacuacacccccccug

SEQ ID NO: 2925102 - RNA, 14 nt, Human T-lymphotropic virus 2
ccucgaacaccuuc

SEQ ID NO: 2925103 - RNA, 23 nt, Human T-lymphotropic virus 2
cuagucucuuuuggcgccacacc

SEQ ID NO: 2925104 - RNA, 19 nt, Human T-lymphotropic virus 2
caccacaauguuccaaccc

SEQ ID NO: 2925105 - RNA, 22 nt, Human T-lymphotropic virus 2
cuccccaagcaguaccagccau

SEQ ID NO: 2925106 - RNA, 17 nt, Human T-lymphotropic virus 2
gccuuucuucccucucc

SEQ ID NO: 2925107 - RNA, 19 nt, Human T-lymphotropic virus 2
gcccccgauguccagcccu

SEQ ID NO: 2925108 - RNA, 14 nt, Human T-lymphotropic virus 2
cuccucucagccca

SEQ ID NO: 2925109 - RNA, 12 nt, Human T-lymphotropic virus 2
ucgguuccucuc

SEQ ID NO: 2925110 - RNA, 14 nt, Human T-lymphotropic virus 2
ucgaaaccaaagcc

SEQ ID NO: 2925111 - RNA, 13 nt, Human T-lymphotropic virus 2
gucuccucucagc

SEQ ID NO: 2925112 - RNA, 18 nt, Human T-lymphotropic virus 2
cucucacgaaacacauuc

SEQ ID NO: 2925113 - RNA, 16 nt, Human T-lymphotropic virus 2
caacccuucuccagga

SEQ ID NO: 2925114 - RNA, 20 nt, Human T-lymphotropic virus 2
accauguccgcagccacacc

SEQ ID NO: 2925115 - RNA, 14 nt, Human T-lymphotropic virus 2
acccacucagccuc

SEQ ID NO: 2925116 - RNA, 17 nt, Human T-lymphotropic virus 2
gacgucccuccccccua

SEQ ID NO: 2925117 - RNA, 23 nt, Human T-lymphotropic virus 2
ccccuuacguggaacccaccacc

SEQ ID NO: 2925118 - RNA, 15 nt, Human T-lymphotropic virus 2
ccuuaccccaaagca

SEQ ID NO: 2925119 - RNA, 15 nt, Human T-lymphotropic virus 2
caugcagacccuccg

SEQ ID NO: 2925120 - RNA, 13 nt, Human T-lymphotropic virus 2
agacucugccuua

SEQ ID NO: 2925121 - RNA, 14 nt, Human T-lymphotropic virus 2
ucaaaacauccucc

SEQ ID NO: 2925122 - RNA, 23 nt, Human T-lymphotropic virus 2
ucgcugguggaguaacaggcucc

SEQ ID NO: 2925123 - RNA, 19 nt, Human T-lymphotropic virus 2
uuaucccucgccuccccuc

SEQ ID NO: 2925124 - RNA, 17 nt, Human T-lymphotropic virus 2
uccgcccaucaaacccu

SEQ ID NO: 2925125 - RNA, 15 nt, Human T-lymphotropic virus 2
ucucgcaccugcucg

SEQ ID NO: 2925126 - RNA, 12 nt, Human T-lymphotropic virus 2
ccuccccaagca

SEQ ID NO: 2925127 - RNA, 15 nt, Human T-lymphotropic virus 2
cuuaacaaccccagg

SEQ ID NO: 2925128 - RNA, 14 nt, Human T-lymphotropic virus 2
ccuccaccaugucc

SEQ ID NO: 2925129 - RNA, 21 nt, Human T-lymphotropic virus 2
cauucgccggggccucuugcc

SEQ ID NO: 2925130 - RNA, 20 nt, Human T-lymphotropic virus 2
cccuccuaguagaugccccu

SEQ ID NO: 2925131 - RNA, 15 nt, Human T-lymphotropic virus 2
aguucaguccucccu

SEQ ID NO: 2925132 - RNA, 17 nt, Human T-lymphotropic virus 2
gccaccuccccccccuu

SEQ ID NO: 2925133 - RNA, 15 nt, Human T-lymphotropic virus 2
cgaucucacuagccu

SEQ ID NO: 2925134 - RNA, 16 nt, Human T-lymphotropic virus 2
cgacaccuaucugccc

SEQ ID NO: 2925135 - RNA, 17 nt, Human T-lymphotropic virus 2
ccgauggcuccccucaa

SEQ ID NO: 2925136 - RNA, 18 nt, Human T-lymphotropic virus 2
cacgauugguaucuccuc

SEQ ID NO: 2925137 - RNA, 16 nt, Human T-lymphotropic virus 2
ucucccgcugcuccuc

SEQ ID NO: 2925138 - RNA, 14 nt, Human T-lymphotropic virus 2
caacucucccagcu

SEQ ID NO: 2925139 - RNA, 13 nt, Human T-lymphotropic virus 2
gcuccacaccccc

SEQ ID NO: 2925140 - RNA, 14 nt, Human T-lymphotropic virus 2
ccaacucaccuggg

SEQ ID NO: 2925141 - RNA, 14 nt, Human T-lymphotropic virus 2
agcucuccucucca

SEQ ID NO: 2925142 - RNA, 15 nt, Human T-lymphotropic virus 2
agacuauccuucaac

SEQ ID NO: 2925143 - RNA, 22 nt, Human T-lymphotropic virus 2
ggucucuaaaggaacacccauc

SEQ ID NO: 2925144 - RNA, 15 nt, Human T-lymphotropic virus 2
cucuacuccuccucg

SEQ ID NO: 2925145 - RNA, 13 nt, Human T-lymphotropic virus 2
cccguaccuccuc

SEQ ID NO: 2925146 - RNA, 14 nt, Human T-lymphotropic virus 2
ucuuaacaacccca

SEQ ID NO: 2925147 - RNA, 16 nt, Human T-lymphotropic virus 2
gagccagccacccagg

SEQ ID NO: 2925148 - RNA, 22 nt, Human T-lymphotropic virus 2
auccuuuaugguucaucaccuc

SEQ ID NO: 2925149 - RNA, 14 nt, Human T-lymphotropic virus 2
uaccuaugcuccuc

SEQ ID NO: 2925150 - RNA, 13 nt, Human T-lymphotropic virus 2
uccucauucacca

SEQ ID NO: 2925151 - RNA, 17 nt, Human T-lymphotropic virus 2
acccaucaaaacccagg

SEQ ID NO: 2925152 - RNA, 17 nt, Human T-lymphotropic virus 2
gccacgccccccuccug

SEQ ID NO: 2925153 - RNA, 17 nt, Human T-lymphotropic virus 2
ggccucggcaccuccug

SEQ ID NO: 2925154 - RNA, 17 nt, Human T-lymphotropic virus 2
cuauugcuauaggcagg

SEQ ID NO: 2925155 - RNA, 15 nt, Human T-lymphotropic virus 2
acgauuacccccugc

SEQ ID NO: 2925156 - RNA, 13 nt, Human T-lymphotropic virus 2
ucccacucauccc

SEQ ID NO: 2925157 - RNA, 19 nt, Human T-lymphotropic virus 2
cuccauagacggcuccccc

SEQ ID NO: 2925158 - RNA, 18 nt, Human T-lymphotropic virus 2
agccguccucaaccccau

SEQ ID NO: 2925159 - RNA, 15 nt, Human T-lymphotropic virus 2
aagcagggcagccau

SEQ ID NO: 2925160 - RNA, 15 nt, Human T-lymphotropic virus 2
ccuagacaaugccau

SEQ ID NO: 2925161 - RNA, 19 nt, Human T-lymphotropic virus 2
ccuuccccuagacaaugcc

SEQ ID NO: 2925162 - RNA, 15 nt, Human T-lymphotropic virus 2
ccagccucucauccu

SEQ ID NO: 2925163 - RNA, 17 nt, Human T-lymphotropic virus 2
guggccgccucaacccc

SEQ ID NO: 2925164 - RNA, 12 nt, Human T-lymphotropic virus 2
cgacauaaccag

SEQ ID NO: 2925165 - RNA, 13 nt, Human T-lymphotropic virus 2
gcauggccuucca

SEQ ID NO: 2925166 - RNA, 15 nt, Human T-lymphotropic virus 2
gacuccucaggccaa

SEQ ID NO: 2925167 - RNA, 15 nt, Human T-lymphotropic virus 2
ccacggccucaccca

SEQ ID NO: 2925168 - RNA, 23 nt, Human T-lymphotropic virus 2
ccaccaauugcugccaauagcca

SEQ ID NO: 2925169 - RNA, 18 nt, Human T-lymphotropic virus 2
gccuucaccauuccccag

SEQ ID NO: 2925170 - RNA, 14 nt, Human T-lymphotropic virus 2
guucaucaccucag

SEQ ID NO: 2925171 - RNA, 15 nt, Human T-lymphotropic virus 2
ccucuuuccuucccu

SEQ ID NO: 2925172 - RNA, 13 nt, Human T-lymphotropic virus 2
caacaaaccuccu

SEQ ID NO: 2925173 - RNA, 24 nt, Human T-lymphotropic virus 2
caggggcuucuauaccucccagac

SEQ ID NO: 2925174 - RNA, 17 nt, Human T-lymphotropic virus 2
gaaaaacaaggcucuga

SEQ ID NO: 2925175 - RNA, 20 nt, Human T-lymphotropic virus 2
cuccccaaguggaccaauuu

SEQ ID NO: 2925176 - RNA, 16 nt, Human T-lymphotropic virus 2
cuccccuaucacucca

SEQ ID NO: 2925177 - RNA, 18 nt, Human T-lymphotropic virus 2
gcccaucaaacccuccag

SEQ ID NO: 2925178 - RNA, 19 nt, Human T-lymphotropic virus 2
ccguggagcgcagcaaggg

SEQ ID NO: 2925179 - RNA, 20 nt, Human T-lymphotropic virus 2
gaagccucuaccccucccaa

SEQ ID NO: 2925180 - RNA, 17 nt, Human T-lymphotropic virus 2
ucccccaggagcccccu

SEQ ID NO: 2925181 - RNA, 16 nt, Human T-lymphotropic virus 2
caacaaaccccaggcc

SEQ ID NO: 2925182 - RNA, 23 nt, Human T-lymphotropic virus 2
ccuggcauguacucuacaccccc

SEQ ID NO: 2925183 - RNA, 18 nt, Human T-lymphotropic virus 2
cccuaccauugacccauc

SEQ ID NO: 2925184 - RNA, 17 nt, Human T-lymphotropic virus 2
ccaaccucgccuacagg

SEQ ID NO: 2925185 - RNA, 13 nt, Human T-lymphotropic virus 2
auucagucucaca

SEQ ID NO: 2925186 - RNA, 18 nt, Human T-lymphotropic virus 2
caggagcccccucagcuc

SEQ ID NO: 2925187 - RNA, 15 nt, Human T-lymphotropic virus 2
uggccugcaccaucu

SEQ ID NO: 2925188 - RNA, 21 nt, Human T-lymphotropic virus 2
gcccaucaaacccuccaggcg

SEQ ID NO: 2925189 - RNA, 16 nt, Human T-lymphotropic virus 2
ccgccucaaccccgcc

SEQ ID NO: 2925190 - RNA, 18 nt, Human T-lymphotropic virus 2
agagauuauaaauauccu

SEQ ID NO: 2925191 - RNA, 18 nt, Human T-lymphotropic virus 2
ggcuucuauaccucccag

SEQ ID NO: 2925192 - RNA, 23 nt, Human T-lymphotropic virus 2
uccgccaccuccccccccuuccc

SEQ ID NO: 2925193 - RNA, 22 nt, Human T-lymphotropic virus 2
cacgucuggguagacaccuucu

SEQ ID NO: 2925194 - RNA, 18 nt, Human T-lymphotropic virus 2
uaccgacagccuuacccc

SEQ ID NO: 2925195 - RNA, 15 nt, Human T-lymphotropic virus 2
gacgaccccagcccc

SEQ ID NO: 2925196 - RNA, 14 nt, Human T-lymphotropic virus 2
gcccugcccgcucc

SEQ ID NO: 2925197 - RNA, 13 nt, Human T-lymphotropic virus 2
uccacccugccag

SEQ ID NO: 2925198 - RNA, 16 nt, Human T-lymphotropic virus 2
agaccaucuaccucca

SEQ ID NO: 2925199 - RNA, 16 nt, Human T-lymphotropic virus 2
ccuuaccccucccacc

SEQ ID NO: 2925200 - RNA, 23 nt, Human T-lymphotropic virus 2
acaauccugucuccucucagccc

SEQ ID NO: 2925201 - RNA, 17 nt, Human T-lymphotropic virus 2
cucaaacccccucagga

SEQ ID NO: 2925202 - RNA, 18 nt, Human T-lymphotropic virus 2
guaucacccucaccccac

SEQ ID NO: 2925203 - RNA, 21 nt, Human T-lymphotropic virus 2
acucuacacccccaacaucuc

SEQ ID NO: 2925204 - RNA, 18 nt, Human T-lymphotropic virus 2
ccuucgacuacacuucuc

SEQ ID NO: 2925205 - RNA, 23 nt, Human T-lymphotropic virus 2
ccgccaaauccaggcccuuccac

SEQ ID NO: 2925206 - RNA, 23 nt, Human T-lymphotropic virus 2
cgaaccauccucuuuccuucccu

SEQ ID NO: 2925207 - RNA, 14 nt, Human T-lymphotropic virus 2
ccagcucugccaau

SEQ ID NO: 2925208 - RNA, 19 nt, Human T-lymphotropic virus 2
acccucaagguccuuaccc

SEQ ID NO: 2925209 - RNA, 22 nt, Human T-lymphotropic virus 2
gaaaaauucgaaaccaaagccu

SEQ ID NO: 2925210 - RNA, 17 nt, Human T-lymphotropic virus 2
gccugcaccaucuuaac

SEQ ID NO: 2925211 - RNA, 12 nt, Human T-lymphotropic virus 2
cacccucucccc

SEQ ID NO: 2925212 - RNA, 21 nt, Human T-lymphotropic virus 2
ccuaagagccaccaaugccau

SEQ ID NO: 2925213 - RNA, 23 nt, Human T-lymphotropic virus 2
caucaagcaggaggucagcuccu

SEQ ID NO: 2925214 - RNA, 21 nt, Human T-lymphotropic virus 2
ucucagcccauuucccaggau

SEQ ID NO: 2925215 - RNA, 14 nt, Human T-lymphotropic virus 2
ccucgccuacaggc

SEQ ID NO: 2925216 - RNA, 16 nt, Human T-lymphotropic virus 2
uccuaccacuccagcc

SEQ ID NO: 2925217 - RNA, 14 nt, Human T-lymphotropic virus 2
gccuaggcccuccg

SEQ ID NO: 2925218 - RNA, 14 nt, Human T-lymphotropic virus 2
ucuucgaacaacaa

SEQ ID NO: 2925219 - RNA, 23 nt, Human T-lymphotropic virus 2
uccgccaaauccaggcccuucca

SEQ ID NO: 2925220 - RNA, 11 nt, Human T-lymphotropic virus 2
acuccccggcc

SEQ ID NO: 2925221 - RNA, 17 nt, Human T-lymphotropic virus 2
ccgccaaauccaggccc

SEQ ID NO: 2925222 - RNA, 22 nt, Human T-lymphotropic virus 2
uuccugaagccucuaccccucc

SEQ ID NO: 2925223 - RNA, 14 nt, Human T-lymphotropic virus 2
gcaaaccaacaccc

SEQ ID NO: 2925224 - RNA, 11 nt, Human T-lymphotropic virus 2
accccaaagca

SEQ ID NO: 2925225 - RNA, 15 nt, Human T-lymphotropic virus 2
ugaccuuacagagca

SEQ ID NO: 2925226 - RNA, 19 nt, Human T-lymphotropic virus 2
aucucccaccuuacccagg

SEQ ID NO: 2925227 - RNA, 14 nt, Human T-lymphotropic virus 2
aggcgucccggggc

SEQ ID NO: 2925228 - RNA, 16 nt, Human T-lymphotropic virus 2
cugacgccccaaggcc

SEQ ID NO: 2925229 - RNA, 18 nt, Human T-lymphotropic virus 2
uccuauauggauaccccg

SEQ ID NO: 2925230 - RNA, 17 nt, Human T-lymphotropic virus 2
cgccgcucccgcuccuc

SEQ ID NO: 2925231 - RNA, 12 nt, Human T-lymphotropic virus 2
cuuuccuucccu

SEQ ID NO: 2925232 - RNA, 20 nt, Human T-lymphotropic virus 2
agccuuccaucccuccuauc

SEQ ID NO: 2925233 - RNA, 17 nt, Human T-lymphotropic virus 2
acuccccugcccucuca

SEQ ID NO: 2925234 - RNA, 16 nt, Human T-lymphotropic virus 2
gcccaucaaacccucc

SEQ ID NO: 2925235 - RNA, 16 nt, Human T-lymphotropic virus 2
ccaaagccuuccaucc

SEQ ID NO: 2925236 - RNA, 22 nt, Human T-lymphotropic virus 2
caccuguccagagcaccaacuc

SEQ ID NO: 2925237 - RNA, 20 nt, Human T-lymphotropic virus 2
cucaccucuccuuccccagg

SEQ ID NO: 2925238 - RNA, 18 nt, Human T-lymphotropic virus 2
cacaccccccacccuccg

SEQ ID NO: 2925239 - RNA, 22 nt, Human T-lymphotropic virus 2
ccuguccagagcaccaacucac

SEQ ID NO: 2925240 - RNA, 15 nt, Human T-lymphotropic virus 2
cauaacccugaagca

SEQ ID NO: 2925241 - RNA, 18 nt, Human T-lymphotropic virus 2
cugaaccucuccgggaga

SEQ ID NO: 2925242 - RNA, 19 nt, Human T-lymphotropic virus 2
caaucccuauauucugccc

SEQ ID NO: 2925243 - RNA, 15 nt, Human T-lymphotropic virus 2
ccucccaccacuccu

SEQ ID NO: 2925244 - RNA, 15 nt, Human T-lymphotropic virus 2
caggcccgcccuagg

SEQ ID NO: 2925245 - RNA, 22 nt, Human T-lymphotropic virus 2
uggcuccacaccccccacccuc

SEQ ID NO: 2925246 - RNA, 16 nt, Human T-lymphotropic virus 2
caggcgucccggggcc

SEQ ID NO: 2925247 - RNA, 15 nt, Human T-lymphotropic virus 2
uacaauacuccuccu

SEQ ID NO: 2925248 - RNA, 19 nt, Human T-lymphotropic virus 2
ucaccucuccuuccccagg

SEQ ID NO: 2925249 - RNA, 14 nt, Human T-lymphotropic virus 2
aucaagcaggaggu

SEQ ID NO: 2925250 - RNA, 14 nt, Human T-lymphotropic virus 2
acagcucuccagaa

SEQ ID NO: 2925251 - RNA, 16 nt, Human T-lymphotropic virus 2
cccucccaccacuccu

SEQ ID NO: 2925252 - RNA, 18 nt, Human T-lymphotropic virus 2
auggcgacuagccucccg

SEQ ID NO: 2925253 - RNA, 16 nt, Human T-lymphotropic virus 2
cuaaccuuccccuaga

SEQ ID NO: 2925254 - RNA, 11 nt, Human T-lymphotropic virus 2
auuccucccau

SEQ ID NO: 2925255 - RNA, 13 nt, Human T-lymphotropic virus 2
cgcauggccuucc

SEQ ID NO: 2925256 - RNA, 17 nt, Human T-lymphotropic virus 2
cacccuuacccacuucc

SEQ ID NO: 2925257 - RNA, 15 nt, Human T-lymphotropic virus 2
ugccaagccauggcc

SEQ ID NO: 2925258 - RNA, 17 nt, Human T-lymphotropic virus 2
ggcccugacgucccucc

SEQ ID NO: 2925259 - RNA, 15 nt, Human T-lymphotropic virus 2
uuuucccucgcuccc

SEQ ID NO: 2925260 - RNA, 17 nt, Human T-lymphotropic virus 2
gcaccaacucaccuggg

SEQ ID NO: 2925261 - RNA, 12 nt, Human T-lymphotropic virus 2
acuaacagcccc

SEQ ID NO: 2925262 - RNA, 16 nt, Human T-lymphotropic virus 2
cccuuccaccucaggc

SEQ ID NO: 2925263 - RNA, 13 nt, Human T-lymphotropic virus 2
cgacuacaccccc

SEQ ID NO: 2925264 - RNA, 17 nt, Human T-lymphotropic virus 2
ccucaaauaguuccucu

SEQ ID NO: 2925265 - RNA, 18 nt, Human T-lymphotropic virus 2
ccaaguaaaggcucugac

SEQ ID NO: 2925266 - RNA, 16 nt, Human T-lymphotropic virus 2
ccucgccuccccuccu

SEQ ID NO: 2925267 - RNA, 15 nt, Human T-lymphotropic virus 2
agccacaccaaccuc

SEQ ID NO: 2925268 - RNA, 21 nt, Human T-lymphotropic virus 2
caggggcuucuauaccuccca

SEQ ID NO: 2925269 - RNA, 17 nt, Human T-lymphotropic virus 2
cuaucuuacauccccca

SEQ ID NO: 2925270 - RNA, 17 nt, Human T-lymphotropic virus 2
cuuuccaccacaacaug

SEQ ID NO: 2925271 - RNA, 23 nt, Human T-lymphotropic virus 2
uucaacaggacaucacuccccug

SEQ ID NO: 2925272 - RNA, 15 nt, Human T-lymphotropic virus 2
caucucccaccuuac

SEQ ID NO: 2925273 - RNA, 15 nt, Human T-lymphotropic virus 2
agucuauaaaagcgc

SEQ ID NO: 2925274 - RNA, 15 nt, Human T-lymphotropic virus 2
cccuuacccacuucc

SEQ ID NO: 2925275 - RNA, 18 nt, Human T-lymphotropic virus 2
gcuuccugaaccucuccg

SEQ ID NO: 2925276 - RNA, 18 nt, Human T-lymphotropic virus 2
ucaccauuccccagccau

SEQ ID NO: 2925277 - RNA, 17 nt, Human T-lymphotropic virus 2
accaucuaccuccacca

SEQ ID NO: 2925278 - RNA, 22 nt, Human T-lymphotropic virus 2
cccucaagguccuuaccccucc

SEQ ID NO: 2925279 - RNA, 20 nt, Human T-lymphotropic virus 2
caggaguccuauacacucca

SEQ ID NO: 2925280 - RNA, 13 nt, Human T-lymphotropic virus 2
cagcaagggcuag

SEQ ID NO: 2925281 - RNA, 21 nt, Human T-lymphotropic virus 2
ugaccgaucccgaccccagag

SEQ ID NO: 2925282 - RNA, 17 nt, Human T-lymphotropic virus 2
acagccuuaccccaccu

SEQ ID NO: 2925283 - RNA, 16 nt, Human T-lymphotropic virus 2
accuccuauucuggga

SEQ ID NO: 2925284 - RNA, 19 nt, Human T-lymphotropic virus 2
ccuucccccaccuccccaa

SEQ ID NO: 2925285 - RNA, 24 nt, Human T-lymphotropic virus 2
uagccacuccaaacaccauaggcc

SEQ ID NO: 2925286 - RNA, 12 nt, Human T-lymphotropic virus 2
ccgucucccggc

SEQ ID NO: 2925287 - RNA, 17 nt, Human T-lymphotropic virus 2
gcccuuaccccaaagca

SEQ ID NO: 2925288 - RNA, 17 nt, Human T-lymphotropic virus 2
auacuucgccuucacca

SEQ ID NO: 2925289 - RNA, 17 nt, Human T-lymphotropic virus 2
caguucaaacuccucca

SEQ ID NO: 2925290 - RNA, 22 nt, Human T-lymphotropic virus 2
cuccuuccccagggccccccga

SEQ ID NO: 2925291 - RNA, 13 nt, Human T-lymphotropic virus 2
accucuccuuggc

SEQ ID NO: 2925292 - RNA, 11 nt, Human T-lymphotropic virus 2
caccugccuuc

SEQ ID NO: 2925293 - RNA, 14 nt, Human T-lymphotropic virus 2
cagccccaccaaug

SEQ ID NO: 2925294 - RNA, 17 nt, Human T-lymphotropic virus 2
ugagacgccuuccgugg

SEQ ID NO: 2925295 - RNA, 17 nt, Human T-lymphotropic virus 2
agccccuguagcccaac

SEQ ID NO: 2925296 - RNA, 20 nt, Human T-lymphotropic virus 2
augccauuacuaccacccuc

SEQ ID NO: 2925297 - RNA, 15 nt, Human T-lymphotropic virus 2
caacaaaccccaggc

SEQ ID NO: 2925298 - RNA, 13 nt, Human T-lymphotropic virus 2
cugccaccccaga

SEQ ID NO: 2925299 - RNA, 15 nt, Human T-lymphotropic virus 2
cccccaccuccccaa

SEQ ID NO: 2925300 - RNA, 14 nt, Human T-lymphotropic virus 2
caaucccuccagga

SEQ ID NO: 2925301 - RNA, 17 nt, Human T-lymphotropic virus 2
cuccuccaucccaaccc

SEQ ID NO: 2925302 - RNA, 22 nt, Human T-lymphotropic virus 2
gcgcuccuuucugcgccgcucc

SEQ ID NO: 2925303 - RNA, 20 nt, Human T-lymphotropic virus 2
cgcccuaccucuccuuggcc

SEQ ID NO: 2925304 - RNA, 12 nt, Human T-lymphotropic virus 2
aggaacugaaac

SEQ ID NO: 2925305 - RNA, 16 nt, Human T-lymphotropic virus 2
gggauccauccucucc

SEQ ID NO: 2925306 - RNA, 15 nt, Human T-lymphotropic virus 2
agcuaacccuccagg

SEQ ID NO: 2925307 - RNA, 14 nt, Human T-lymphotropic virus 2
caaacuccuccaaa

SEQ ID NO: 2925308 - RNA, 16 nt, Human T-lymphotropic virus 2
gccagccacccagggc

SEQ ID NO: 2925309 - RNA, 17 nt, Human T-lymphotropic virus 2
cgagguugacaaagaca

SEQ ID NO: 2925310 - RNA, 20 nt, Human T-lymphotropic virus 2
caacagaccaccaacaccau

SEQ ID NO: 2925311 - RNA, 17 nt, Human T-lymphotropic virus 2
cugacgccccaaggccu

SEQ ID NO: 2925312 - RNA, 15 nt, Human T-lymphotropic virus 2
cgcccuacaacaaug

SEQ ID NO: 2925313 - RNA, 17 nt, Human T-lymphotropic virus 2
cagcuaacccuccaggc

SEQ ID NO: 2925314 - RNA, 17 nt, Human T-lymphotropic virus 2
cucacacauuuuccacu

SEQ ID NO: 2925315 - RNA, 17 nt, Human T-lymphotropic virus 2
ccucugcucuuggcagc

SEQ ID NO: 2925316 - RNA, 16 nt, Human T-lymphotropic virus 2
uacguggaacccacca

SEQ ID NO: 2925317 - RNA, 21 nt, Human T-lymphotropic virus 2
uggcagggccccuaagaaugc

SEQ ID NO: 2925318 - RNA, 21 nt, Human T-lymphotropic virus 2
cagcccccaccaauugcugcc

SEQ ID NO: 2925319 - RNA, 17 nt, Human T-lymphotropic virus 2
ugggaccgucucccggc

SEQ ID NO: 2925320 - RNA, 23 nt, Human T-lymphotropic virus 2
caacauacgccguggagcgcagc

SEQ ID NO: 2925321 - RNA, 14 nt, Human T-lymphotropic virus 2
ggaacagcucucca

SEQ ID NO: 2925322 - RNA, 12 nt, Human T-lymphotropic virus 2
aagucuccucuc

SEQ ID NO: 2925323 - RNA, 20 nt, Human T-lymphotropic virus 2
uacacgggccccgucuccag

SEQ ID NO: 2925324 - RNA, 13 nt, Human T-lymphotropic virus 2
auuauccuccccc

SEQ ID NO: 2925325 - RNA, 14 nt, Human T-lymphotropic virus 2
ucgccucucccugg

SEQ ID NO: 2925326 - RNA, 17 nt, Human T-lymphotropic virus 2
acuacuccuccgccacc

SEQ ID NO: 2925327 - RNA, 12 nt, Human T-lymphotropic virus 2
caauugcugcca

SEQ ID NO: 2925328 - RNA, 22 nt, Human T-lymphotropic virus 2
caccuccccccccuuccccgga

SEQ ID NO: 2925329 - RNA, 17 nt, Human T-lymphotropic virus 2
uagggcuuccugaaccu

SEQ ID NO: 2925330 - RNA, 19 nt, Human T-lymphotropic virus 2
cagagcaccaacucaccug

SEQ ID NO: 2925331 - RNA, 17 nt, Human T-lymphotropic virus 2
cuuggcuccacaccccc

SEQ ID NO: 2925332 - RNA, 16 nt, Human T-lymphotropic virus 2
gccaccuguccagagc

SEQ ID NO: 2925333 - RNA, 15 nt, Human T-lymphotropic virus 2
ugacgccccaaggcc

SEQ ID NO: 2925334 - RNA, 14 nt, Human T-lymphotropic virus 2
uggugucccgucuc

SEQ ID NO: 2925335 - RNA, 16 nt, Human T-lymphotropic virus 2
ggcagcuauccuacag

SEQ ID NO: 2925336 - RNA, 18 nt, Human T-lymphotropic virus 2
cuacgugcugccaagcca

SEQ ID NO: 2925337 - RNA, 18 nt, Human T-lymphotropic virus 2
accauucucgcucuacuc

SEQ ID NO: 2925338 - RNA, 17 nt, Human T-lymphotropic virus 2
ucccagcuaacccucca

SEQ ID NO: 2925339 - RNA, 18 nt, Human T-lymphotropic virus 2
ggagccuuccucaccaag

SEQ ID NO: 2925340 - RNA, 18 nt, Human T-lymphotropic virus 2
gguccuuaccccucccac

SEQ ID NO: 2925341 - RNA, 16 nt, Human T-lymphotropic virus 2
ucauaguccucccgga

SEQ ID NO: 2925342 - RNA, 11 nt, Human T-lymphotropic virus 2
caaccccacca

SEQ ID NO: 2925343 - RNA, 14 nt, Human T-lymphotropic virus 2
agcccccucagcuc

SEQ ID NO: 2925344 - RNA, 19 nt, Human T-lymphotropic virus 2
cuuacaagaucuccuccag

SEQ ID NO: 2925345 - RNA, 15 nt, Human T-lymphotropic virus 2
auuacuaccacccuc

SEQ ID NO: 2925346 - RNA, 14 nt, Human T-lymphotropic virus 2
gggcuaucaaccca

SEQ ID NO: 2925347 - RNA, 15 nt, Human T-lymphotropic virus 2
ggaggucagcuccuc

SEQ ID NO: 2925348 - RNA, 20 nt, Human T-lymphotropic virus 2
ggaggcccauguuccccccc

SEQ ID NO: 2925349 - RNA, 19 nt, Human T-lymphotropic virus 2
agacuguccuaaccuuccc

SEQ ID NO: 2925350 - RNA, 21 nt, Human T-lymphotropic virus 2
ugccauuacuaccacccucac

SEQ ID NO: 2925351 - RNA, 20 nt, Human T-lymphotropic virus 2
gcggccggggcagccuugcu

SEQ ID NO: 2925352 - RNA, 19 nt, Human T-lymphotropic virus 2
ccuccaucccaacccuucc

SEQ ID NO: 2925353 - RNA, 20 nt, Human T-lymphotropic virus 2
ugccauuacuaccacccuca

SEQ ID NO: 2925354 - RNA, 15 nt, Human T-lymphotropic virus 2
cuacuccuccgccac

SEQ ID NO: 2925355 - RNA, 13 nt, Human T-lymphotropic virus 2
aaaauagaccuca

SEQ ID NO: 2925356 - RNA, 15 nt, Human T-lymphotropic virus 2
cuacaaugccccuac

SEQ ID NO: 2925357 - RNA, 15 nt, Human T-lymphotropic virus 2
agugcggcuccucca

SEQ ID NO: 2925358 - RNA, 15 nt, Human T-lymphotropic virus 2
cauggccuucccuua

SEQ ID NO: 2925359 - RNA, 23 nt, Human T-lymphotropic virus 2
caagagcuuguaucacccucacc

SEQ ID NO: 2925360 - RNA, 19 nt, Human T-lymphotropic virus 2
ucugcucuuggcagccccc

SEQ ID NO: 2925361 - RNA, 14 nt, Human T-lymphotropic virus 2
ccuuccaccucagg

SEQ ID NO: 2925362 - RNA, 23 nt, Human T-lymphotropic virus 2
cccuccuguuggaucucccuucc

SEQ ID NO: 2925363 - RNA, 19 nt, Human T-lymphotropic virus 2
cuggcugcuuucuccaccc

SEQ ID NO: 2925364 - RNA, 16 nt, Human T-lymphotropic virus 2
gcucuuggcagccccc

SEQ ID NO: 2925365 - RNA, 13 nt, Human T-lymphotropic virus 2
cucucauccuggc

SEQ ID NO: 2925366 - RNA, 21 nt, Human T-lymphotropic virus 2
gaacccacucagccuccacca

SEQ ID NO: 2925367 - RNA, 16 nt, Human T-lymphotropic virus 2
ucccagcuaacccucc

SEQ ID NO: 2925368 - RNA, 21 nt, Human T-lymphotropic virus 2
acccaagcaaaauuggccccu

SEQ ID NO: 2925369 - RNA, 17 nt, Human T-lymphotropic virus 2
uaaacuccccggccuua

SEQ ID NO: 2925370 - RNA, 16 nt, Human T-lymphotropic virus 2
ccaugacuccgaccuu

SEQ ID NO: 2925371 - RNA, 23 nt, Human T-lymphotropic virus 2
ccucuaacccccgcucacauucc

SEQ ID NO: 2925372 - RNA, 19 nt, Human T-lymphotropic virus 2
cucgccuccccuccuuccc

SEQ ID NO: 2925373 - RNA, 15 nt, Human T-lymphotropic virus 2
cccauggcagggccc

SEQ ID NO: 2925374 - RNA, 19 nt, Human T-lymphotropic virus 2
ucucgcucuacuccuccuc

SEQ ID NO: 2925375 - RNA, 18 nt, Human T-lymphotropic virus 2
agucaaaauaaaagaugc

SEQ ID NO: 2925376 - RNA, 16 nt, Human T-lymphotropic virus 2
uacuucgccuucacca

SEQ ID NO: 2925377 - RNA, 22 nt, Human T-lymphotropic virus 2
ccagccauacuucgccuucacc

SEQ ID NO: 2925378 - RNA, 13 nt, Human T-lymphotropic virus 2
cacuuauacccca

SEQ ID NO: 2925379 - RNA, 20 nt, Human T-lymphotropic virus 2
caaucccuauauucugcccu

SEQ ID NO: 2925380 - RNA, 15 nt, Human T-lymphotropic virus 2
uccacaccccccacc

SEQ ID NO: 2925381 - RNA, 20 nt, Human T-lymphotropic virus 2
gccuucaccauuccccagcc

SEQ ID NO: 2925382 - RNA, 12 nt, Human T-lymphotropic virus 2
aguucaggaggu

SEQ ID NO: 2925383 - RNA, 13 nt, Human T-lymphotropic virus 2
acuucucccccau

SEQ ID NO: 2925384 - RNA, 17 nt, Human T-lymphotropic virus 2
cuaacccuccaggcacu

SEQ ID NO: 2925385 - RNA, 13 nt, Human T-lymphotropic virus 2
uccugaaccucuc

SEQ ID NO: 2925386 - RNA, 14 nt, Human T-lymphotropic virus 2
uaucaacccaccac

SEQ ID NO: 2925387 - RNA, 15 nt, Human T-lymphotropic virus 2
uagacaccuucuccg

SEQ ID NO: 2925388 - RNA, 20 nt, Human T-lymphotropic virus 2
cccauugguccaugacuccg

SEQ ID NO: 2925389 - RNA, 15 nt, Human T-lymphotropic virus 2
uuagccagccccacc

SEQ ID NO: 2925390 - RNA, 15 nt, Human T-lymphotropic virus 2
gacuuccugaggaac

SEQ ID NO: 2925391 - RNA, 16 nt, Human T-lymphotropic virus 2
agauccagccucucau

SEQ ID NO: 2925392 - RNA, 20 nt, Human T-lymphotropic virus 2
gacucucuuacaccucccaa

SEQ ID NO: 2925393 - RNA, 18 nt, Human T-lymphotropic virus 2
accuugaacauguccuaa

SEQ ID NO: 2925394 - RNA, 22 nt, Human T-lymphotropic virus 2
ggaugacaauggcgacuagccu

SEQ ID NO: 2925395 - RNA, 13 nt, Human T-lymphotropic virus 2
gccaagauccuuc

SEQ ID NO: 2925396 - RNA, 21 nt, Human T-lymphotropic virus 2
ccuuuaugguucaucaccuca

SEQ ID NO: 2925397 - RNA, 14 nt, Human T-lymphotropic virus 2
acuacgugcugcca

SEQ ID NO: 2925398 - RNA, 18 nt, Human T-lymphotropic virus 2
agaaguuuuaagaucucc

SEQ ID NO: 2925399 - RNA, 20 nt, Human T-lymphotropic virus 2
cccacaacucaaacccccuc

SEQ ID NO: 2925400 - RNA, 17 nt, Human T-lymphotropic virus 2
auccucauucaccacau

SEQ ID NO: 2925401 - RNA, 20 nt, Human T-lymphotropic virus 2
caucucgauacucccacuca

SEQ ID NO: 2925402 - RNA, 22 nt, Human T-lymphotropic virus 2
gcugcuuucuccacccugccag

SEQ ID NO: 2925403 - RNA, 15 nt, Human T-lymphotropic virus 2
ccucaccucuccuuc

SEQ ID NO: 2925404 - RNA, 23 nt, Human T-lymphotropic virus 2
cuccucuccaauaccuuaucccu

SEQ ID NO: 2925405 - RNA, 20 nt, Human T-lymphotropic virus 2
uccaguaaaagccuucuccu

SEQ ID NO: 2925406 - RNA, 18 nt, Human T-lymphotropic virus 2
gcuagccuuauccccaag

SEQ ID NO: 2925407 - RNA, 20 nt, Human T-lymphotropic virus 2
auuggugucccgucucaggu

SEQ ID NO: 2925408 - RNA, 17 nt, Human T-lymphotropic virus 2
guacuacucgccuuccu

SEQ ID NO: 2925409 - RNA, 23 nt, Human T-lymphotropic virus 2
cagcucugccaaucuuuccacca

SEQ ID NO: 2925410 - RNA, 18 nt, Human T-lymphotropic virus 2
uacaacaacucucccagc

SEQ ID NO: 2925411 - RNA, 12 nt, Human T-lymphotropic virus 2
acuucuauacaa

SEQ ID NO: 2925412 - RNA, 18 nt, Human T-lymphotropic virus 2
cucccaaaccaccuccca

SEQ ID NO: 2925413 - RNA, 15 nt, Human T-lymphotropic virus 2
ccgccugcgcucggc

SEQ ID NO: 2925414 - RNA, 14 nt, Human T-lymphotropic virus 2
gcgauuguguacag

SEQ ID NO: 2925415 - RNA, 18 nt, Human T-lymphotropic virus 2
uccaccacaguccuccac

SEQ ID NO: 2925416 - RNA, 14 nt, Human T-lymphotropic virus 2
cacuccccugcccu

SEQ ID NO: 2925417 - RNA, 19 nt, Human T-lymphotropic virus 2
ccauguuccccccccuuac

SEQ ID NO: 2925418 - RNA, 15 nt, Human T-lymphotropic virus 2
uccaguaaaagccuu

SEQ ID NO: 2925419 - RNA, 14 nt, Human T-lymphotropic virus 2
auggccuucccuua

SEQ ID NO: 2925420 - RNA, 12 nt, Human T-lymphotropic virus 2
uccuggccccug

SEQ ID NO: 2925421 - RNA, 14 nt, Human T-lymphotropic virus 2
acagagccuccuau

SEQ ID NO: 2925422 - RNA, 15 nt, Human T-lymphotropic virus 2
acccaguucaaacuc

SEQ ID NO: 2925423 - RNA, 13 nt, Human T-lymphotropic virus 2
cagggcaagacca

SEQ ID NO: 2925424 - RNA, 23 nt, Human T-lymphotropic virus 2
ccgcuccuccaucccaacccuuc

SEQ ID NO: 2925425 - RNA, 14 nt, Human T-lymphotropic virus 2
caccaacaucccug

SEQ ID NO: 2925426 - RNA, 19 nt, Human T-lymphotropic virus 2
accuucccccaccucccca

SEQ ID NO: 2925427 - RNA, 21 nt, Human T-lymphotropic virus 2
uccuccuaccacuccagcccc

SEQ ID NO: 2925428 - RNA, 13 nt, Human T-lymphotropic virus 2
ucuccuuccccag

SEQ ID NO: 2925429 - RNA, 19 nt, Human T-lymphotropic virus 2
gaggaaggggaaccccucc

SEQ ID NO: 2925430 - RNA, 16 nt, Human T-lymphotropic virus 2
gaacaggaacagcucu

SEQ ID NO: 2925431 - RNA, 17 nt, Human T-lymphotropic virus 2
ccagcuuuccccaccca

SEQ ID NO: 2925432 - RNA, 19 nt, Human T-lymphotropic virus 2
cucucacgaaacacauucc

SEQ ID NO: 2925433 - RNA, 19 nt, Human T-lymphotropic virus 2
ugcccuccuggccaccugu

SEQ ID NO: 2925434 - RNA, 15 nt, Human T-lymphotropic virus 2
gcgcagcaagggcua

SEQ ID NO: 2925435 - RNA, 17 nt, Human T-lymphotropic virus 2
uaccccaccuacagacc

SEQ ID NO: 2925436 - RNA, 20 nt, Human T-lymphotropic virus 2
ccaugcguuacaugccauuc

SEQ ID NO: 2925437 - RNA, 24 nt, Human T-lymphotropic virus 2
ucccccaggagcccccucagcuca

SEQ ID NO: 2925438 - RNA, 15 nt, Human T-lymphotropic virus 2
agccagccacccagg

SEQ ID NO: 2925439 - RNA, 19 nt, Human T-lymphotropic virus 2
uccuggccccugcccccua

SEQ ID NO: 2925440 - RNA, 20 nt, Human T-lymphotropic virus 2
augacaggcuacaaccccau

SEQ ID NO: 2925441 - RNA, 13 nt, Human T-lymphotropic virus 2
agcauucuaccca

SEQ ID NO: 2925442 - RNA, 15 nt, Human T-lymphotropic virus 2
ccuccuaccacucca

SEQ ID NO: 2925443 - RNA, 18 nt, Human T-lymphotropic virus 2
cagcuccccucccucgcc

SEQ ID NO: 2925444 - RNA, 13 nt, Human T-lymphotropic virus 2
cagccacccaggg

SEQ ID NO: 2925445 - RNA, 17 nt, Human T-lymphotropic virus 2
uacaagaucuccuccag

SEQ ID NO: 2925446 - RNA, 13 nt, Human T-lymphotropic virus 2
agcucggcugccc

SEQ ID NO: 2925447 - RNA, 14 nt, Human T-lymphotropic virus 2
gucuccucucaggu

SEQ ID NO: 2925448 - RNA, 18 nt, Human T-lymphotropic virus 2
cuccuccuaccacuccag

SEQ ID NO: 2925449 - RNA, 15 nt, Human T-lymphotropic virus 2
uccugaagccucuac

SEQ ID NO: 2925450 - RNA, 20 nt, Human T-lymphotropic virus 2
acuccaugcguuacaugcca

SEQ ID NO: 2925451 - RNA, 13 nt, Human T-lymphotropic virus 2
ucgacuuccagca

SEQ ID NO: 2925452 - RNA, 13 nt, Human T-lymphotropic virus 2
ucacuccccugcc

SEQ ID NO: 2925453 - RNA, 14 nt, Human T-lymphotropic virus 2
aaucccccucccca

SEQ ID NO: 2925454 - RNA, 17 nt, Human T-lymphotropic virus 2
uuaucuuagcuccccuu

SEQ ID NO: 2925455 - RNA, 14 nt, Human T-lymphotropic virus 2
cgccgcccucuugg

SEQ ID NO: 2925456 - RNA, 22 nt, Human T-lymphotropic virus 2
guuaugggacaaacaccucagc

SEQ ID NO: 2925457 - RNA, 18 nt, Human T-lymphotropic virus 2
aaaggcucugacgucucc

SEQ ID NO: 2925458 - RNA, 15 nt, Human T-lymphotropic virus 2
cccaagcaguaccag

SEQ ID NO: 2925459 - RNA, 13 nt, Human T-lymphotropic virus 2
ucccaacccuucu

SEQ ID NO: 2925460 - RNA, 19 nt, Human T-lymphotropic virus 2
uaacugccguggccgccuc

SEQ ID NO: 2925461 - RNA, 12 nt, Human T-lymphotropic virus 2
ucacuccccugc

SEQ ID NO: 2925462 - RNA, 18 nt, Human T-lymphotropic virus 2
cacgagaagcccuccaga

SEQ ID NO: 2925463 - RNA, 20 nt, Human T-lymphotropic virus 2
cucccggccucggcaccucc

SEQ ID NO: 2925464 - RNA, 13 nt, Human T-lymphotropic virus 2
ccaguccauccug

SEQ ID NO: 2925465 - RNA, 20 nt, Human T-lymphotropic virus 2
auagccacuccaaacaccau

SEQ ID NO: 2925466 - RNA, 16 nt, Human T-lymphotropic virus 2
gcccauuucccaggau

SEQ ID NO: 2925467 - RNA, 15 nt, Human T-lymphotropic virus 2
cucacauuccuccca

SEQ ID NO: 2925468 - RNA, 20 nt, Human T-lymphotropic virus 2
uagacuguccuaaccuuccc

SEQ ID NO: 2925469 - RNA, 22 nt, Human T-lymphotropic virus 2
cgccaccuccccccccuucccc

SEQ ID NO: 2925470 - RNA, 22 nt, Human T-lymphotropic virus 2
cuucaggccauuucccuccuag

SEQ ID NO: 2925471 - RNA, 13 nt, Human T-lymphotropic virus 2
cucccgcuccuca

SEQ ID NO: 2925472 - RNA, 22 nt, Human T-lymphotropic virus 2
acuccuccgccaccuccccccc

SEQ ID NO: 2925473 - RNA, 16 nt, Human T-lymphotropic virus 2
uccacaccccccaccc

SEQ ID NO: 2925474 - RNA, 16 nt, Human T-lymphotropic virus 2
ccgcuccuccauccca

SEQ ID NO: 2925475 - RNA, 22 nt, Human T-lymphotropic virus 2
ugggcaaaccaacacccaguuc

SEQ ID NO: 2925476 - RNA, 15 nt, Human T-lymphotropic virus 2
ccuccaggccuuaaa

SEQ ID NO: 2925477 - RNA, 18 nt, Human T-lymphotropic virus 2
accacggcccugacgucc

SEQ ID NO: 2925478 - RNA, 13 nt, Human T-lymphotropic virus 2
gagacucaccuug

SEQ ID NO: 2925479 - RNA, 18 nt, Human T-lymphotropic virus 2
cuacucucucaucagcuu

SEQ ID NO: 2925480 - RNA, 14 nt, Human T-lymphotropic virus 2
uccacccugccagg

SEQ ID NO: 2925481 - RNA, 14 nt, Human T-lymphotropic virus 2
guucaguccucccu

SEQ ID NO: 2925482 - RNA, 21 nt, Human T-lymphotropic virus 2
acgacacccugauccuaggcg

SEQ ID NO: 2925483 - RNA, 17 nt, Human T-lymphotropic virus 2
cccauugguccaugacu

SEQ ID NO: 2925484 - RNA, 21 nt, Human T-lymphotropic virus 2
ccccgcucacauuccucccau

SEQ ID NO: 2925485 - RNA, 18 nt, Human T-lymphotropic virus 2
ccuuucuucccucucccg

SEQ ID NO: 2925486 - RNA, 21 nt, Human T-lymphotropic virus 2
cugccguggccgccucaaccc

SEQ ID NO: 2925487 - RNA, 16 nt, Human T-lymphotropic virus 2
cagacgaccccagccc

SEQ ID NO: 2925488 - RNA, 18 nt, Human T-lymphotropic virus 2
ucccagcuaacccuccag

SEQ ID NO: 2925489 - RNA, 16 nt, Human T-lymphotropic virus 2
accccccacccuccga

SEQ ID NO: 2925490 - RNA, 16 nt, Human T-lymphotropic virus 2
gcuuggcuccacaccc

SEQ ID NO: 2925491 - RNA, 22 nt, Human T-lymphotropic virus 2
cucacgauugguaucuccuccu

SEQ ID NO: 2925492 - RNA, 20 nt, Human T-lymphotropic virus 2
caggagcaauguugcuuccu

SEQ ID NO: 2925493 - RNA, 20 nt, Human T-lymphotropic virus 2
cugagcgccuccaggccuua

SEQ ID NO: 2925494 - RNA, 15 nt, Human T-lymphotropic virus 2
cuccuaccacuccag

SEQ ID NO: 2925495 - RNA, 22 nt, Human T-lymphotropic virus 2
caacgacuacacccccccugcc

SEQ ID NO: 2925496 - RNA, 18 nt, Human T-lymphotropic virus 2
cgccuuaacguggcccuu

SEQ ID NO: 2925497 - RNA, 13 nt, Human T-lymphotropic virus 2
caccuccccaagu

SEQ ID NO: 2925498 - RNA, 15 nt, Human T-lymphotropic virus 2
cucacgcuccugcag

SEQ ID NO: 2925499 - RNA, 17 nt, Human T-lymphotropic virus 2
cccgcgggaugacaggc

SEQ ID NO: 2925500 - RNA, 14 nt, Human T-lymphotropic virus 2
accuacaaucccua

SEQ ID NO: 2925501 - RNA, 14 nt, Human T-lymphotropic virus 2
cacggcccccugcc

SEQ ID NO: 2925502 - RNA, 14 nt, Human T-lymphotropic virus 2
acacagacucccuu

SEQ ID NO: 2925503 - RNA, 19 nt, Human T-lymphotropic virus 2
acaccucagccuacccaag

SEQ ID NO: 2925504 - RNA, 22 nt, Human T-lymphotropic virus 2
cccucaccucuccuuccccagg

SEQ ID NO: 2925505 - RNA, 15 nt, Human T-lymphotropic virus 2
ugagcgccuccaggc

SEQ ID NO: 2925506 - RNA, 14 nt, Human T-lymphotropic virus 2
gacgucccuccccc

SEQ ID NO: 2925507 - RNA, 19 nt, Human T-lymphotropic virus 2
cauacuuuuagccagcccc

SEQ ID NO: 2925508 - RNA, 14 nt, Human T-lymphotropic virus 2
ccuuucuucccucu

SEQ ID NO: 2925509 - RNA, 15 nt, Human T-lymphotropic virus 2
cccugcccgcuccuc

SEQ ID NO: 2925510 - RNA, 17 nt, Human T-lymphotropic virus 2
agcaccaauuacuccug

SEQ ID NO: 2925511 - RNA, 14 nt, Human T-lymphotropic virus 2
acuccuccuuccau

SEQ ID NO: 2925512 - RNA, 23 nt, Human T-lymphotropic virus 2
cauuccccaacaaaccuccuccc

SEQ ID NO: 2925513 - RNA, 18 nt, Human T-lymphotropic virus 2
accacccucaccucuccu

SEQ ID NO: 2925514 - RNA, 16 nt, Human T-lymphotropic virus 2
acaucacuccccugcc

SEQ ID NO: 2925515 - RNA, 15 nt, Human T-lymphotropic virus 2
cguaccuccuccggc

SEQ ID NO: 2925516 - RNA, 14 nt, Human T-lymphotropic virus 2
cccugcccucucac

SEQ ID NO: 2925517 - RNA, 23 nt, Human T-lymphotropic virus 2
guccguggaagacucucuuacac

SEQ ID NO: 2925518 - RNA, 21 nt, Human T-lymphotropic virus 2
gucuauugcuauaggcaggcc

SEQ ID NO: 2925519 - RNA, 17 nt, Human T-lymphotropic virus 2
acuacacccccccugcc

SEQ ID NO: 2925520 - RNA, 20 nt, Human T-lymphotropic virus 2
uaaaagcgcaaggacaguuc

SEQ ID NO: 2925521 - RNA, 20 nt, Human T-lymphotropic virus 2
aaaggcucugacgucucccc

SEQ ID NO: 2925522 - RNA, 20 nt, Human T-lymphotropic virus 2
gacgccuuuuuccaaauccc

SEQ ID NO: 2925523 - RNA, 17 nt, Human T-lymphotropic virus 2
uccaaacaccauaggcc

SEQ ID NO: 2925524 - RNA, 14 nt, Human T-lymphotropic virus 2
ucaucaaaacaucc

SEQ ID NO: 2925525 - RNA, 16 nt, Human T-lymphotropic virus 2
acgcuucuuaggacag

SEQ ID NO: 2925526 - RNA, 18 nt, Human T-lymphotropic virus 2
ucuccuuggccucaucuc

SEQ ID NO: 2925527 - RNA, 22 nt, Human T-lymphotropic virus 2
uucuuaggacaggucaucuccc

SEQ ID NO: 2925528 - RNA, 14 nt, Human T-lymphotropic virus 2
ggaggccccccccc

SEQ ID NO: 2925529 - RNA, 14 nt, Human T-lymphotropic virus 2
uauaccauacaacc

SEQ ID NO: 2925530 - RNA, 18 nt, Human T-lymphotropic virus 2
ccuuaaacuucacuuccg

SEQ ID NO: 2925531 - RNA, 15 nt, Human T-lymphotropic virus 2
caacccuucuccagg

SEQ ID NO: 2925532 - RNA, 21 nt, Human T-lymphotropic virus 2
ggcccuugacaacggccuccc

SEQ ID NO: 2925533 - RNA, 19 nt, Human T-lymphotropic virus 2
caauaccuuaucccucgcc

SEQ ID NO: 2925534 - RNA, 16 nt, Human T-lymphotropic virus 2
acaacaaugccagggg

SEQ ID NO: 2925535 - RNA, 21 nt, Human T-lymphotropic virus 2
gauccagccucucauccuggc

SEQ ID NO: 2925536 - RNA, 14 nt, Human T-lymphotropic virus 2
aacucucccagcua

SEQ ID NO: 2925537 - RNA, 18 nt, Human T-lymphotropic virus 2
ucgagcucggcugccccu

SEQ ID NO: 2925538 - RNA, 23 nt, Human T-lymphotropic virus 2
cauggccuuccaauuucccagga

SEQ ID NO: 2925539 - RNA, 18 nt, Human T-lymphotropic virus 2
ucucagcccauuucccag

SEQ ID NO: 2925540 - RNA, 20 nt, Human T-lymphotropic virus 2
ugggacaaacaccucagccu

SEQ ID NO: 2925541 - RNA, 16 nt, Human T-lymphotropic virus 2
cucucagcccauuucc

SEQ ID NO: 2925542 - RNA, 12 nt, Human T-lymphotropic virus 2
cgcucccucacc

SEQ ID NO: 2925543 - RNA, 14 nt, Human T-lymphotropic virus 2
caaagcccccaggg

SEQ ID NO: 2925544 - RNA, 20 nt, Human T-lymphotropic virus 2
acccaggaagucagccaagu

SEQ ID NO: 2925545 - RNA, 15 nt, Human T-lymphotropic virus 2
ccacgacuccucagg

SEQ ID NO: 2925546 - RNA, 18 nt, Human T-lymphotropic virus 2
cccaucaaacccuccagg

SEQ ID NO: 2925547 - RNA, 22 nt, Human T-lymphotropic virus 2
ggccuccccgaggguaccccca

SEQ ID NO: 2925548 - RNA, 21 nt, Human T-lymphotropic virus 2
ucucuaaaggaacacccaucc

SEQ ID NO: 2925549 - RNA, 14 nt, Human T-lymphotropic virus 2
ccuggggaaaaacc

SEQ ID NO: 2925550 - RNA, 19 nt, Human T-lymphotropic virus 2
cgccauuggggccuuccuc

SEQ ID NO: 2925551 - RNA, 16 nt, Human T-lymphotropic virus 2
cugcccgcuccuccau

SEQ ID NO: 2925552 - RNA, 24 nt, Human T-lymphotropic virus 2
ccaucuuuaguaguucaguccucc

SEQ ID NO: 2925553 - RNA, 18 nt, Human T-lymphotropic virus 2
ucaaaacauccuccgggu

SEQ ID NO: 2925554 - RNA, 21 nt, Human T-lymphotropic virus 2
gaagacucucuuacaccuccc

SEQ ID NO: 2925555 - RNA, 22 nt, Human T-lymphotropic virus 2
ucaaacuccuccaaaccccccu

SEQ ID NO: 2925556 - RNA, 23 nt, Human T-lymphotropic virus 2
gccccuaagaaugcaggcuaaua

SEQ ID NO: 2925557 - RNA, 21 nt, Human T-lymphotropic virus 2
cccuccaggcggccuugccac

SEQ ID NO: 2925558 - RNA, 20 nt, Human T-lymphotropic virus 2
ccuacuuuuauucagucuca

SEQ ID NO: 2925559 - RNA, 21 nt, Human T-lymphotropic virus 2
ccuccuagggaaaccacucca

SEQ ID NO: 2925560 - RNA, 17 nt, Human T-lymphotropic virus 2
uuccaaaucccccuccc

SEQ ID NO: 2925561 - RNA, 20 nt, Human T-lymphotropic virus 2
aauacuccuccuuccauaac

SEQ ID NO: 2925562 - RNA, 18 nt, Human T-lymphotropic virus 2
ucccccaggagcccccuc

SEQ ID NO: 2925563 - RNA, 16 nt, Human T-lymphotropic virus 2
cauuacuaccacccuc

SEQ ID NO: 2925564 - RNA, 21 nt, Human T-lymphotropic virus 2
gggucucuaaaggaacaccca

SEQ ID NO: 2925565 - RNA, 21 nt, Human T-lymphotropic virus 2
cugacgccccaaggccuccac

SEQ ID NO: 2925566 - RNA, 15 nt, Human T-lymphotropic virus 2
cgcccucuuggcagg

SEQ ID NO: 2925567 - RNA, 21 nt, Human T-lymphotropic virus 2
ccugucaaaccaucaacucac

SEQ ID NO: 2925568 - RNA, 18 nt, Human T-lymphotropic virus 2
cuuacccaggccauaguc

SEQ ID NO: 2925569 - RNA, 19 nt, Human T-lymphotropic virus 2
ucccgagccagccacccag

SEQ ID NO: 2925570 - RNA, 20 nt, Human T-lymphotropic virus 2
agccuccaccaacuucuccc

SEQ ID NO: 2925571 - RNA, 22 nt, Human T-lymphotropic virus 2
cuuccgcccaucaaacccucca

SEQ ID NO: 2925572 - RNA, 16 nt, Human T-lymphotropic virus 2
uccauaaccuucaccu

SEQ ID NO: 2925573 - RNA, 24 nt, Human T-lymphotropic virus 2
gccaggggcuucuauaccucccag

SEQ ID NO: 2925574 - RNA, 22 nt, Human T-lymphotropic virus 2
cacccucaccccacaacaacuc

SEQ ID NO: 2925575 - RNA, 16 nt, Human T-lymphotropic virus 2
uacacccccaacaucu

SEQ ID NO: 2925576 - RNA, 20 nt, Human T-lymphotropic virus 2
uccucuuuccuucccuugcc

SEQ ID NO: 2925577 - RNA, 17 nt, Human T-lymphotropic virus 2
cugcuuucuccacccug

SEQ ID NO: 2925578 - RNA, 19 nt, Human T-lymphotropic virus 2
ggccagccuuccuaucaca

SEQ ID NO: 2925579 - RNA, 20 nt, Human T-lymphotropic virus 2
cuggcauguacucuacaccc

SEQ ID NO: 2925580 - RNA, 16 nt, Human T-lymphotropic virus 2
auccuuuccuccugcc

SEQ ID NO: 2925581 - RNA, 20 nt, Human T-lymphotropic virus 2
uuccccaacaaaccuccucc

SEQ ID NO: 2925582 - RNA, 14 nt, Human T-lymphotropic virus 2
accuaagagccacc

SEQ ID NO: 2925583 - RNA, 17 nt, Human T-lymphotropic virus 2
cccucaccucuccuucc

SEQ ID NO: 2925584 - RNA, 19 nt, Human T-lymphotropic virus 2
cuagccuaccgacagccuu

SEQ ID NO: 2925585 - RNA, 17 nt, Human T-lymphotropic virus 2
acuccuccgccaccucc

SEQ ID NO: 2925586 - RNA, 17 nt, Human T-lymphotropic virus 2
uauguuccacccgccua

SEQ ID NO: 2925587 - RNA, 16 nt, Human T-lymphotropic virus 2
gcucccguaccuccuc

SEQ ID NO: 2925588 - RNA, 12 nt, Human T-lymphotropic virus 2
cuacuccuccuc

SEQ ID NO: 2925589 - RNA, 15 nt, Human T-lymphotropic virus 2
cuccacuaccaccca

SEQ ID NO: 2925590 - RNA, 19 nt, Human T-lymphotropic virus 2
uaucagcgccguucuucag

SEQ ID NO: 2925591 - RNA, 14 nt, Human T-lymphotropic virus 2
cagagcaccaacuc

SEQ ID NO: 2925592 - RNA, 14 nt, Human T-lymphotropic virus 2
ugccugguguacag

SEQ ID NO: 2925593 - RNA, 23 nt, Human T-lymphotropic virus 2
aaauucgaaaccaaagccuucca

SEQ ID NO: 2925594 - RNA, 22 nt, Human T-lymphotropic virus 2
aucacauuacauaugagaguac

SEQ ID NO: 2925595 - RNA, 16 nt, Human T-lymphotropic virus 2
caugaccuaagagcca

SEQ ID NO: 2925596 - RNA, 15 nt, Human T-lymphotropic virus 2
ccgcuccuccauccc

SEQ ID NO: 2925597 - RNA, 21 nt, Human T-lymphotropic virus 2
cgccccaaggccuccacggcc

SEQ ID NO: 2925598 - RNA, 13 nt, Human T-lymphotropic virus 2
ccuccuaccacuc

SEQ ID NO: 2925599 - RNA, 22 nt, Human T-lymphotropic virus 2
ucaaauuuauccagcugaccuu

SEQ ID NO: 2925600 - RNA, 19 nt, Human T-lymphotropic virus 2
uccgacaccuaucugcccu

SEQ ID NO: 2925601 - RNA, 23 nt, Human T-lymphotropic virus 2
aaccccaugaggaaaauguuucc

SEQ ID NO: 2925602 - RNA, 17 nt, Human T-lymphotropic virus 2
ccaccuuacccaggcca

SEQ ID NO: 2925603 - RNA, 19 nt, Human T-lymphotropic virus 2
ccaguucaaacuccuccaa

SEQ ID NO: 2925604 - RNA, 23 nt, Human T-lymphotropic virus 2
ggaggcccauguuccccccccuu

SEQ ID NO: 2925605 - RNA, 18 nt, Human T-lymphotropic virus 2
ugccauuacuaccacccu

SEQ ID NO: 2925606 - RNA, 19 nt, Human T-lymphotropic virus 2
gcccugcccgcuccuccau

SEQ ID NO: 2925607 - RNA, 23 nt, Human T-lymphotropic virus 2
ccuaauuacuuacucuggcuucc

SEQ ID NO: 2925608 - RNA, 16 nt, Human T-lymphotropic virus 2
uccuccgccaccuccc

SEQ ID NO: 2925609 - RNA, 13 nt, Human T-lymphotropic virus 2
acucugccuuaaa

SEQ ID NO: 2925610 - RNA, 19 nt, Human T-lymphotropic virus 2
accucuccuuggccucauc

SEQ ID NO: 2925611 - RNA, 15 nt, Human T-lymphotropic virus 2
agccuuccaucccuc

SEQ ID NO: 2925612 - RNA, 15 nt, Human T-lymphotropic virus 2
ucaaacccuccaggc

SEQ ID NO: 2925613 - RNA, 20 nt, Human T-lymphotropic virus 2
ucccgagccagccacccagg

SEQ ID NO: 2925614 - RNA, 13 nt, Human T-lymphotropic virus 2
ucccggggccaac

SEQ ID NO: 2925615 - RNA, 19 nt, Human T-lymphotropic virus 2
cccucaccgacccucuggu

SEQ ID NO: 2925616 - RNA, 24 nt, Human T-lymphotropic virus 2
ccuucaaugaauacacagacuccc

SEQ ID NO: 2925617 - RNA, 13 nt, Human T-lymphotropic virus 2
gcucccgcuccuc

SEQ ID NO: 2925618 - RNA, 12 nt, Human T-lymphotropic virus 2
uccccaacucca

SEQ ID NO: 2925619 - RNA, 15 nt, Human T-lymphotropic virus 2
caaaccuccucccga

SEQ ID NO: 2925620 - RNA, 17 nt, Human T-lymphotropic virus 2
ccauaaccuucaccuuc

SEQ ID NO: 2925621 - RNA, 19 nt, Human T-lymphotropic virus 2
auacccaaagcccccaggg

SEQ ID NO: 2925622 - RNA, 21 nt, Human T-lymphotropic virus 2
ugcccacaacucaaacccccu

SEQ ID NO: 2925623 - RNA, 13 nt, Human T-lymphotropic virus 2
acaauacuccucc

SEQ ID NO: 2925624 - RNA, 16 nt, Human T-lymphotropic virus 2
ccccaagguuccaccu

SEQ ID NO: 2925625 - RNA, 19 nt, Human T-lymphotropic virus 2
ccaccaauugcugccaaua

SEQ ID NO: 2925626 - RNA, 14 nt, Human T-lymphotropic virus 2
agccuuccucacca

SEQ ID NO: 2925627 - RNA, 19 nt, Human T-lymphotropic virus 2
auccagcugaccuuacaga

SEQ ID NO: 2925628 - RNA, 22 nt, Human T-lymphotropic virus 2
uuggccccuguauccuccgcca

SEQ ID NO: 2925629 - RNA, 16 nt, Human T-lymphotropic virus 2
cacuaccacccauucc

SEQ ID NO: 2925630 - RNA, 22 nt, Human T-lymphotropic virus 2
auacucccacucaucccccugc

SEQ ID NO: 2925631 - RNA, 15 nt, Human T-lymphotropic virus 2
caagaucuccuccag

SEQ ID NO: 2925632 - RNA, 16 nt, Human T-lymphotropic virus 2
ccuuucuucccucucc

SEQ ID NO: 2925633 - RNA, 16 nt, Human T-lymphotropic virus 2
ccuuccuacaaugacc

SEQ ID NO: 2925634 - RNA, 16 nt, Human T-lymphotropic virus 2
cuuaacuuucuccagg

SEQ ID NO: 2925635 - RNA, 20 nt, Human T-lymphotropic virus 2
caaaagggggagcuccuugc

SEQ ID NO: 2925636 - RNA, 21 nt, Human T-lymphotropic virus 2
auccucuuuccuucccuugcc

SEQ ID NO: 2925637 - RNA, 16 nt, Human T-lymphotropic virus 2
cccucgccuccccucc

SEQ ID NO: 2925638 - RNA, 18 nt, Human T-lymphotropic virus 2
cguggagcgcagcaaggg

SEQ ID NO: 2925639 - RNA, 14 nt, Human T-lymphotropic virus 2
ugcagacccuccgg

SEQ ID NO: 2925640 - RNA, 16 nt, Human T-lymphotropic virus 2
ucuacaacauaacugc

SEQ ID NO: 2925641 - RNA, 18 nt, Human T-lymphotropic virus 2
uagccuuauccccaaggg

SEQ ID NO: 2925642 - RNA, 16 nt, Human T-lymphotropic virus 2
uaucucuggcuuccag

SEQ ID NO: 2925643 - RNA, 20 nt, Human T-lymphotropic virus 2
gcugaaaaacaaggcucuga

SEQ ID NO: 2925644 - RNA, 21 nt, Human T-lymphotropic virus 2
gcucccucaccgacccucugg

SEQ ID NO: 2925645 - RNA, 15 nt, Human T-lymphotropic virus 2
ccuccuggccaccug

SEQ ID NO: 2925646 - RNA, 18 nt, Human T-lymphotropic virus 2
accccagcccccaccaau

SEQ ID NO: 2925647 - RNA, 17 nt, Human T-lymphotropic virus 2
ucccauaggaccuucuu

SEQ ID NO: 2925648 - RNA, 13 nt, Human T-lymphotropic virus 2
ccauguccgcagc

SEQ ID NO: 2925649 - RNA, 16 nt, Human T-lymphotropic virus 2
ggcuagacucugccuu

SEQ ID NO: 2925650 - RNA, 20 nt, Human T-lymphotropic virus 2
cagccacgccccccuccugg

SEQ ID NO: 2925651 - RNA, 23 nt, Human T-lymphotropic virus 2
acugaccacgcauggccuuccaa

SEQ ID NO: 2925652 - RNA, 21 nt, Human T-lymphotropic virus 2
uguccuaaccuuccccuagac

SEQ ID NO: 2925653 - RNA, 18 nt, Human T-lymphotropic virus 2
cucguaguuuccuuacac

SEQ ID NO: 2925654 - RNA, 15 nt, Human T-lymphotropic virus 2
gcgaaagcacacccc

SEQ ID NO: 2925655 - RNA, 20 nt, Human T-lymphotropic virus 2
uccccuccuuccccacccag

SEQ ID NO: 2925656 - RNA, 19 nt, Human T-lymphotropic virus 2
cuaagagccaccaaugcca

SEQ ID NO: 2925657 - RNA, 20 nt, Human T-lymphotropic virus 2
acaaauggaccaucauugga

SEQ ID NO: 2925658 - RNA, 17 nt, Human T-lymphotropic virus 2
cccgugaccccucuugg

SEQ ID NO: 2925659 - RNA, 19 nt, Human T-lymphotropic virus 2
ccucucaggucgagcucgg

SEQ ID NO: 2925660 - RNA, 20 nt, Human T-lymphotropic virus 2
gccucgguugagacgccuuc

SEQ ID NO: 2925661 - RNA, 16 nt, Human T-lymphotropic virus 2
ggcgacuagccucccg

SEQ ID NO: 2925662 - RNA, 15 nt, Human T-lymphotropic virus 2
agccacgccccccuc

SEQ ID NO: 2925663 - RNA, 16 nt, Human T-lymphotropic virus 2
auugcuauaggcaggc

SEQ ID NO: 2925664 - RNA, 18 nt, Human T-lymphotropic virus 2
ccacgcauggccuuccaa

SEQ ID NO: 2925665 - RNA, 13 nt, Human T-lymphotropic virus 2
accaaccucgccu

SEQ ID NO: 2925666 - RNA, 22 nt, Human T-lymphotropic virus 2
ggccucacccauugcaaucaaa

SEQ ID NO: 2925667 - RNA, 20 nt, Human T-lymphotropic virus 2
ugcacguggaaccucgaccu

SEQ ID NO: 2925668 - RNA, 21 nt, Human T-lymphotropic virus 2
aggucgagcucggcugccccu

SEQ ID NO: 2925669 - RNA, 17 nt, Human T-lymphotropic virus 2
caauacuccuccuucca

SEQ ID NO: 2925670 - RNA, 14 nt, Human T-lymphotropic virus 2
cguccucaacccca

SEQ ID NO: 2925671 - RNA, 11 nt, Human T-lymphotropic virus 2
aauuuccaccu

SEQ ID NO: 2925672 - RNA, 22 nt, Human T-lymphotropic virus 2
cuucucuaagugcggcuccucc

SEQ ID NO: 2925673 - RNA, 23 nt, Human T-lymphotropic virus 2
ccccgucuccaguccauccugga

SEQ ID NO: 2925674 - RNA, 18 nt, Human T-lymphotropic virus 2
agguggucuauguuccac

SEQ ID NO: 2925675 - RNA, 22 nt, Human T-lymphotropic virus 2
acuucgccuucaccauucccca

SEQ ID NO: 2925676 - RNA, 14 nt, Human T-lymphotropic virus 2
acaucuacaccacc

SEQ ID NO: 2925677 - RNA, 19 nt, Human T-lymphotropic virus 2
cucagcccauuucccagga

SEQ ID NO: 2925678 - RNA, 16 nt, Human T-lymphotropic virus 2
accucagaacccacuc

SEQ ID NO: 2925679 - RNA, 16 nt, Human T-lymphotropic virus 2
cagccacccagggcga

SEQ ID NO: 2925680 - RNA, 19 nt, Human T-lymphotropic virus 2
cuuccccguuaaaaaacca

SEQ ID NO: 2925681 - RNA, 13 nt, Human T-lymphotropic virus 2
acugcaacaacuc

SEQ ID NO: 2925682 - RNA, 22 nt, Human T-lymphotropic virus 2
cucccuuaucuuagcuccccuu

SEQ ID NO: 2925683 - RNA, 12 nt, Human T-lymphotropic virus 2
ccuaucuuacau

SEQ ID NO: 2925684 - RNA, 13 nt, Human T-lymphotropic virus 2
caacucaccuggg

SEQ ID NO: 2925685 - RNA, 14 nt, Human T-lymphotropic virus 2
gagccaccaaugcc

SEQ ID NO: 2925686 - RNA, 23 nt, Human T-lymphotropic virus 2
ucaaacuccuccaaaccccccua

SEQ ID NO: 2925687 - RNA, 14 nt, Human T-lymphotropic virus 2
cucaccugggaccc

SEQ ID NO: 2925688 - RNA, 17 nt, Human T-lymphotropic virus 2
caacuccaugcguuaca

SEQ ID NO: 2925689 - RNA, 19 nt, Human T-lymphotropic virus 2
agcugcaugcccaagacca

SEQ ID NO: 2925690 - RNA, 22 nt, Human T-lymphotropic virus 2
uaagaucucccgcugcuccucc

SEQ ID NO: 2925691 - RNA, 20 nt, Human T-lymphotropic virus 2
acugaaaacgaaaccucaac

SEQ ID NO: 2925692 - RNA, 12 nt, Human T-lymphotropic virus 2
cgccccaaggcc

SEQ ID NO: 2925693 - RNA, 20 nt, Human T-lymphotropic virus 2
gcaggcuaauaaccccgccc

SEQ ID NO: 2925694 - RNA, 14 nt, Human T-lymphotropic virus 2
cggcccccucuuga

SEQ ID NO: 2925695 - RNA, 12 nt, Human T-lymphotropic virus 2
cucgcucccuca

SEQ ID NO: 2925696 - RNA, 13 nt, Human T-lymphotropic virus 2
ucuccacccugcc

SEQ ID NO: 2925697 - RNA, 21 nt, Human T-lymphotropic virus 2
cccuugcccugcccgcuccuc

SEQ ID NO: 2925698 - RNA, 23 nt, Human T-lymphotropic virus 2
cccgagccagccacccagggcga

SEQ ID NO: 2925699 - RNA, 21 nt, Human T-lymphotropic virus 2
cgucuccaguccauccuggaa

SEQ ID NO: 2925700 - RNA, 13 nt, Human T-lymphotropic virus 2
uaggaacugaaac

SEQ ID NO: 2925701 - RNA, 14 nt, Human T-lymphotropic virus 2
cuacaacaaugcca

SEQ ID NO: 2925702 - RNA, 22 nt, Human T-lymphotropic virus 2
ccgcggacacacuaacagcccc

SEQ ID NO: 2925703 - RNA, 19 nt, Human T-lymphotropic virus 2
cugccaauagccacuccaa

SEQ ID NO: 2925704 - RNA, 21 nt, Human T-lymphotropic virus 2
ccaagcaaaauuggccccugg

SEQ ID NO: 2925705 - RNA, 20 nt, Human T-lymphotropic virus 2
ccaucuuaacaaccccaggu

SEQ ID NO: 2925706 - RNA, 19 nt, Human T-lymphotropic virus 2
accucagaacccacucagc

SEQ ID NO: 2925707 - RNA, 20 nt, Human T-lymphotropic virus 2
cccauaaaauuugccuaguc

SEQ ID NO: 2925708 - RNA, 17 nt, Human T-lymphotropic virus 2
cauugcaaucccuccag

SEQ ID NO: 2925709 - RNA, 19 nt, Human T-lymphotropic virus 2
uccacgacacccugauccu

SEQ ID NO: 2925710 - RNA, 20 nt, Human T-lymphotropic virus 2
ccuaucacaagaauuccagg

SEQ ID NO: 2925711 - RNA, 22 nt, Human T-lymphotropic virus 2
ccaggggcuucuauaccuccca

SEQ ID NO: 2925712 - RNA, 20 nt, Human T-lymphotropic virus 2
aaccucgaccuuaauucccu

SEQ ID NO: 2925713 - RNA, 20 nt, Human T-lymphotropic virus 2
uccccaagcaguaccagcca

SEQ ID NO: 2925714 - RNA, 19 nt, Human T-lymphotropic virus 2
gccuuaccccaccuacaga

SEQ ID NO: 2925715 - RNA, 15 nt, Human T-lymphotropic virus 2
accugggaccccauc

SEQ ID NO: 2925716 - RNA, 22 nt, Human T-lymphotropic virus 2
ggacuuacaagaucuccuccag

SEQ ID NO: 2925717 - RNA, 18 nt, Human T-lymphotropic virus 2
ucaccucuccuuccccag

SEQ ID NO: 2925718 - RNA, 24 nt, Human T-lymphotropic virus 2
acccgauggcaaauccaccacagu

SEQ ID NO: 2925719 - RNA, 20 nt, Human T-lymphotropic virus 2
ccauugcaaucccuccagga

SEQ ID NO: 2925720 - RNA, 17 nt, Human T-lymphotropic virus 2
guggcuugucuccgccc

SEQ ID NO: 2925721 - RNA, 17 nt, Human T-lymphotropic virus 2
cccuaccucuccuuggc

SEQ ID NO: 2925722 - RNA, 23 nt, Human T-lymphotropic virus 2
cuccgccaccuccccccccuucc

SEQ ID NO: 2925723 - RNA, 17 nt, Human T-lymphotropic virus 2
gcucccuguauccagac

SEQ ID NO: 2925724 - RNA, 17 nt, Human T-lymphotropic virus 2
cgagaagcccuccagac

SEQ ID NO: 2925725 - RNA, 18 nt, Human T-lymphotropic virus 2
auaacugcaacaacucca

SEQ ID NO: 2925726 - RNA, 23 nt, Human T-lymphotropic virus 2
agcgcugaaaaacaaggcucuga

SEQ ID NO: 2925727 - RNA, 21 nt, Human T-lymphotropic virus 2
uccccgaaccuggccuccguc

SEQ ID NO: 2925728 - RNA, 20 nt, Human T-lymphotropic virus 2
cgugggaccgucucccggcc

SEQ ID NO: 2925729 - RNA, 22 nt, Human T-lymphotropic virus 2
acaaaagggggagcuccuugca

SEQ ID NO: 2925730 - RNA, 10 nt, Human T-lymphotropic virus 2
gaaccccagu

SEQ ID NO: 2925731 - RNA, 22 nt, Human T-lymphotropic virus 2
uacaacaguuugaccccaccgc

SEQ ID NO: 2925732 - RNA, 17 nt, Human T-lymphotropic virus 2
accucaacgccgcccuc

SEQ ID NO: 2925733 - RNA, 19 nt, Human T-lymphotropic virus 2
cucccagcuaacccuccag

SEQ ID NO: 2925734 - RNA, 17 nt, Human T-lymphotropic virus 2
agcccauuucccaggau

SEQ ID NO: 2925735 - RNA, 13 nt, Human T-lymphotropic virus 2
caggcuacaaccc

SEQ ID NO: 2925736 - RNA, 14 nt, Human T-lymphotropic virus 2
cugagcgccuccag

SEQ ID NO: 2925737 - RNA, 20 nt, Human T-lymphotropic virus 2
gcggacacacuaacagcccc

SEQ ID NO: 2925738 - RNA, 14 nt, Human T-lymphotropic virus 2
ucuauaccucccag

SEQ ID NO: 2925739 - RNA, 20 nt, Human T-lymphotropic virus 2
ccucccaaaccaccucccaa

SEQ ID NO: 2925740 - RNA, 16 nt, Human T-lymphotropic virus 2
ucccgaaccauccucu

SEQ ID NO: 2925741 - RNA, 13 nt, Human T-lymphotropic virus 2
uuagccagcccca

SEQ ID NO: 2925742 - RNA, 12 nt, Human T-lymphotropic virus 2
cccccuccccaa

SEQ ID NO: 2925743 - RNA, 12 nt, Human T-lymphotropic virus 2
uaaaaacagccc

SEQ ID NO: 2925744 - RNA, 16 nt, Human T-lymphotropic virus 2
aucucuggcuuccagu

SEQ ID NO: 2925745 - RNA, 16 nt, Human T-lymphotropic virus 2
cuggccaccuguccag

SEQ ID NO: 2925746 - RNA, 13 nt, Human T-lymphotropic virus 2
gaagccaaguccc

SEQ ID NO: 2925747 - RNA, 23 nt, Human T-lymphotropic virus 2
gggcuuccugaaccucuccggga

SEQ ID NO: 2925748 - RNA, 12 nt, Human T-lymphotropic virus 2
uaccccaaagca

SEQ ID NO: 2925749 - RNA, 15 nt, Human T-lymphotropic virus 2
ugagggcucccugua

SEQ ID NO: 2925750 - RNA, 17 nt, Human T-lymphotropic virus 2
aaaaucacacauaauua

SEQ ID NO: 2925751 - RNA, 20 nt, Human T-lymphotropic virus 2
uagcagccguccucaacccc

SEQ ID NO: 2925752 - RNA, 15 nt, Human T-lymphotropic virus 2
ugaaccucuccggga

SEQ ID NO: 2925753 - RNA, 19 nt, Human T-lymphotropic virus 2
cagccacaccaaccucccc

SEQ ID NO: 2925754 - RNA, 16 nt, Human T-lymphotropic virus 2
ugcagccuaggcccuc

SEQ ID NO: 2925755 - RNA, 12 nt, Human T-lymphotropic virus 2
uuggacagagcc

SEQ ID NO: 2925756 - RNA, 14 nt, Human T-lymphotropic virus 2
ucuucgccgucacu

SEQ ID NO: 2925757 - RNA, 14 nt, Human T-lymphotropic virus 2
gccagccacccagg

SEQ ID NO: 2925758 - RNA, 12 nt, Human T-lymphotropic virus 2
agacaaugccau

SEQ ID NO: 2925759 - RNA, 13 nt, Human T-lymphotropic virus 2
uccucacgcuccu

SEQ ID NO: 2925760 - RNA, 14 nt, Human T-lymphotropic virus 2
auccguccuccagg

SEQ ID NO: 2925761 - RNA, 21 nt, Human T-lymphotropic virus 2
uccgcagccacaccaaccucc

SEQ ID NO: 2925762 - RNA, 20 nt, Human T-lymphotropic virus 2
caggccaauuuucacccucu

SEQ ID NO: 2925763 - RNA, 19 nt, Human T-lymphotropic virus 2
accccgcccuaccucuccu

SEQ ID NO: 2925764 - RNA, 18 nt, Human T-lymphotropic virus 2
ccuccugaacugcuccuc

SEQ ID NO: 2925765 - RNA, 15 nt, Human T-lymphotropic virus 2
agccccacccucuuc

SEQ ID NO: 2925766 - RNA, 13 nt, Human T-lymphotropic virus 2
accaguauucccu

SEQ ID NO: 2925767 - RNA, 19 nt, Human T-lymphotropic virus 2
gccuccccuccuuccccac

SEQ ID NO: 2925768 - RNA, 19 nt, Human T-lymphotropic virus 2
gcacaguaugcagcccaaa

SEQ ID NO: 2925769 - RNA, 13 nt, Human T-lymphotropic virus 2
ucccgcugcuccu

SEQ ID NO: 2925770 - RNA, 17 nt, Human T-lymphotropic virus 2
cagacucgccucucccu

SEQ ID NO: 2925771 - RNA, 16 nt, Human T-lymphotropic virus 2
ggacaguucaggaggu

SEQ ID NO: 2925772 - RNA, 12 nt, Human T-lymphotropic virus 2
cuccgccaccuc

SEQ ID NO: 2925773 - RNA, 23 nt, Human T-lymphotropic virus 2
ccuccaccauguccgcagccaca

SEQ ID NO: 2925774 - RNA, 21 nt, Human T-lymphotropic virus 2
ggucucuaaaggaacacccau

SEQ ID NO: 2925775 - RNA, 16 nt, Human T-lymphotropic virus 2
guccuccacuaccacc

SEQ ID NO: 2925776 - RNA, 12 nt, Human T-lymphotropic virus 2
aaacccuccagg

SEQ ID NO: 2925777 - RNA, 11 nt, Human T-lymphotropic virus 2
gcccuccuggc

SEQ ID NO: 2925778 - RNA, 22 nt, Human T-lymphotropic virus 2
acuccagccccuguagcccaac

SEQ ID NO: 2925779 - RNA, 17 nt, Human T-lymphotropic virus 2
ccccaagguuccaccug

SEQ ID NO: 2925780 - RNA, 18 nt, Human T-lymphotropic virus 2
ugacccauccacaguccu

SEQ ID NO: 2925781 - RNA, 21 nt, Human T-lymphotropic virus 2
gcuuccaguaaaagccuucuc

SEQ ID NO: 2925782 - RNA, 21 nt, Human T-lymphotropic virus 2
caacgccgcccucuuggcagg

SEQ ID NO: 2925783 - RNA, 19 nt, Human T-lymphotropic virus 2
cacuccaucuuaacaaccc

SEQ ID NO: 2925784 - RNA, 20 nt, Human T-lymphotropic virus 2
uccuccgccaaauccaggcc

SEQ ID NO: 2925785 - RNA, 22 nt, Human T-lymphotropic virus 2
ucaggcguggacacccaaggac

SEQ ID NO: 2925786 - RNA, 20 nt, Human T-lymphotropic virus 2
guuuaaaaacagccccaccc

SEQ ID NO: 2925787 - RNA, 20 nt, Human T-lymphotropic virus 2
caggacaucacuccccugcc

SEQ ID NO: 2925788 - RNA, 22 nt, Human T-lymphotropic virus 2
agauguaaauuucacccaggaa

SEQ ID NO: 2925789 - RNA, 15 nt, Human T-lymphotropic virus 2
ggcuagggcuuccug

SEQ ID NO: 2925790 - RNA, 22 nt, Human T-lymphotropic virus 2
cugccaagccauggccuucccu

SEQ ID NO: 2925791 - RNA, 14 nt, Human T-lymphotropic virus 2
cggagacucaccuu

SEQ ID NO: 2925792 - RNA, 20 nt, Human T-lymphotropic virus 2
cgggcuuuccccaacuccaa

SEQ ID NO: 2925793 - RNA, 13 nt, Human T-lymphotropic virus 2
guccucaacccca

SEQ ID NO: 2925794 - RNA, 13 nt, Human T-lymphotropic virus 2
ucuucccucuccc

SEQ ID NO: 2925795 - RNA, 13 nt, Human T-lymphotropic virus 2
acauuuuccacua

SEQ ID NO: 2925796 - RNA, 16 nt, Human T-lymphotropic virus 2
ugucagcucuccucuc

SEQ ID NO: 2925797 - RNA, 19 nt, Human T-lymphotropic virus 2
uucgaaaccaaagccuucc

SEQ ID NO: 2925798 - RNA, 15 nt, Human T-lymphotropic virus 2
ucacuccccugcccu

SEQ ID NO: 2925799 - RNA, 22 nt, Human T-lymphotropic virus 2
gaugucagacucgccucucccu

SEQ ID NO: 2925800 - RNA, 19 nt, Human T-lymphotropic virus 2
uacaacaacucucccagcu

SEQ ID NO: 2925801 - RNA, 23 nt, Human T-lymphotropic virus 2
guugacaaagacaucucccaccu

SEQ ID NO: 2925802 - RNA, 18 nt, Human T-lymphotropic virus 2
aacauacgccguggagcg

SEQ ID NO: 2925803 - RNA, 13 nt, Human T-lymphotropic virus 2
ccccuccccaagc

SEQ ID NO: 2925804 - RNA, 18 nt, Human T-lymphotropic virus 2
auguaaauuucacccagg

SEQ ID NO: 2925805 - RNA, 19 nt, Human T-lymphotropic virus 2
aucccucgccuccccuccu

SEQ ID NO: 2925806 - RNA, 21 nt, Human T-lymphotropic virus 2
ccucagaacccacucagccuc

SEQ ID NO: 2925807 - RNA, 19 nt, Human T-lymphotropic virus 2
uuccuacaaugacccuugc

SEQ ID NO: 2925808 - RNA, 22 nt, Human T-lymphotropic virus 2
gauaugcauggacuguccuucc

SEQ ID NO: 2925809 - RNA, 15 nt, Human T-lymphotropic virus 2
uuauccuccccccuu

SEQ ID NO: 2925810 - RNA, 21 nt, Human T-lymphotropic virus 2
cggcuccuccaugacccuccu

SEQ ID NO: 2925811 - RNA, 18 nt, Human T-lymphotropic virus 2
ucccuuaucuuagcuccc

SEQ ID NO: 2925812 - RNA, 18 nt, Human T-lymphotropic virus 2
gccacgccccccuccugg

SEQ ID NO: 2925813 - RNA, 12 nt, Human T-lymphotropic virus 2
acaccucagccu

SEQ ID NO: 2925814 - RNA, 15 nt, Human T-lymphotropic virus 2
accccacaacaacuc

SEQ ID NO: 2925815 - RNA, 17 nt, Human T-lymphotropic virus 2
cuucuauaccucccaga

SEQ ID NO: 2925816 - RNA, 20 nt, Human T-lymphotropic virus 2
cuuguaucacccucacccca

SEQ ID NO: 2925817 - RNA, 19 nt, Human T-lymphotropic virus 2
cuuacccacuuccccuagc

SEQ ID NO: 2925818 - RNA, 17 nt, Human T-lymphotropic virus 2
cucgccucucccugguc

SEQ ID NO: 2925819 - RNA, 21 nt, Human T-lymphotropic virus 2
gccucccgagccagccaccca

SEQ ID NO: 2925820 - RNA, 21 nt, Human T-lymphotropic virus 2
ggccccuggcuuggcuccaca

SEQ ID NO: 2925821 - RNA, 17 nt, Human T-lymphotropic virus 2
cuugucuccgcccuagc

SEQ ID NO: 2925822 - RNA, 17 nt, Human T-lymphotropic virus 2
aggagccuuccucacca

SEQ ID NO: 2925823 - RNA, 17 nt, Human T-lymphotropic virus 2
ccauuacuaccacccuc

SEQ ID NO: 2925824 - RNA, 15 nt, Human T-lymphotropic virus 2
cccccaacaucucca

SEQ ID NO: 2925825 - RNA, 23 nt, Human T-lymphotropic virus 2
cacaguccuccacuaccacccau

SEQ ID NO: 2925826 - RNA, 21 nt, Human T-lymphotropic virus 2
uaaaccugagcgccuccaggc

SEQ ID NO: 2925827 - RNA, 19 nt, Human T-lymphotropic virus 2
gaacugcuccucccaaggu

SEQ ID NO: 2925828 - RNA, 15 nt, Human T-lymphotropic virus 2
acucgccuuccuaca

SEQ ID NO: 2925829 - RNA, 16 nt, Human T-lymphotropic virus 2
caucagcuuauacaau

SEQ ID NO: 2925830 - RNA, 14 nt, Human T-lymphotropic virus 2
ccacgcaaugcuuc

SEQ ID NO: 2925831 - RNA, 20 nt, Human T-lymphotropic virus 2
augccaagauccuucucacu

SEQ ID NO: 2925832 - RNA, 13 nt, Human T-lymphotropic virus 2
ucccucucccggc

SEQ ID NO: 2925833 - RNA, 15 nt, Human T-lymphotropic virus 2
cagacgaccccagcc

SEQ ID NO: 2925834 - RNA, 22 nt, Human T-lymphotropic virus 2
caauagccacuccaaacaccau

SEQ ID NO: 2925835 - RNA, 15 nt, Human T-lymphotropic virus 2
caccccccacccucc

SEQ ID NO: 2925836 - RNA, 20 nt, Human T-lymphotropic virus 2
ugcgccgcucccgcuccuca

SEQ ID NO: 2925837 - RNA, 23 nt, Human T-lymphotropic virus 2
ccuccccaaguggaccaauuucc

SEQ ID NO: 2925838 - RNA, 17 nt, Human T-lymphotropic virus 2
uuucacccaggaaguca

SEQ ID NO: 2925839 - RNA, 13 nt, Human T-lymphotropic virus 2
aaaccaaagccuu

SEQ ID NO: 2925840 - RNA, 17 nt, Human T-lymphotropic virus 2
ccuccugaacugcuccu

SEQ ID NO: 2925841 - RNA, 22 nt, Human T-lymphotropic virus 2
uaaaccugagcgccuccaggcc

SEQ ID NO: 2925842 - RNA, 15 nt, Human T-lymphotropic virus 2
ccgaucucacuagcc

SEQ ID NO: 2925843 - RNA, 13 nt, Human T-lymphotropic virus 2
acuccugucuccc

SEQ ID NO: 2925844 - RNA, 13 nt, Human T-lymphotropic virus 2
aacagcucuccag

SEQ ID NO: 2925845 - RNA, 23 nt, Human T-lymphotropic virus 2
gccaggcaauacccgugaccccu

SEQ ID NO: 2925846 - RNA, 23 nt, Human T-lymphotropic virus 2
cuaacccccuccacguccuggac

SEQ ID NO: 2925847 - RNA, 13 nt, Human T-lymphotropic virus 2
gcccugcuuucgu

SEQ ID NO: 2925848 - RNA, 13 nt, Human T-lymphotropic virus 2
cacuagcccagca

SEQ ID NO: 2925849 - RNA, 20 nt, Human T-lymphotropic virus 2
acaggccaucaagcaggagg

SEQ ID NO: 2925850 - RNA, 17 nt, Human T-lymphotropic virus 2
caauagccacuccaaac

SEQ ID NO: 2925851 - RNA, 15 nt, Human T-lymphotropic virus 2
cagccacaccaaccu

SEQ ID NO: 2925852 - RNA, 21 nt, Human T-lymphotropic virus 2
cagccguccucaaccccauga

SEQ ID NO: 2925853 - RNA, 14 nt, Human T-lymphotropic virus 2
ccagaugucagacu

SEQ ID NO: 2925854 - RNA, 20 nt, Human T-lymphotropic virus 2
agcccuuugcgacuuccuga

SEQ ID NO: 2925855 - RNA, 16 nt, Human T-lymphotropic virus 2
cccuguagcccaaccc

SEQ ID NO: 2925856 - RNA, 15 nt, Human T-lymphotropic virus 2
cagccuaggcccucc

SEQ ID NO: 2925857 - RNA, 23 nt, Human T-lymphotropic virus 2
acaacucaaacccccucaggagg

SEQ ID NO: 2925858 - RNA, 17 nt, Human T-lymphotropic virus 2
aaucagcuaaaugucau

SEQ ID NO: 2925859 - RNA, 18 nt, Human T-lymphotropic virus 2
gaccaucuaccuccacca

SEQ ID NO: 2925860 - RNA, 15 nt, Human T-lymphotropic virus 2
uccgccaccuccccc

SEQ ID NO: 2925861 - RNA, 23 nt, Human T-lymphotropic virus 2
auuucacccaggaagucagccaa

SEQ ID NO: 2925862 - RNA, 19 nt, Human T-lymphotropic virus 2
ccucacccuuacccacuuc

SEQ ID NO: 2925863 - RNA, 15 nt, Human T-lymphotropic virus 2
ccaccaacuucuccc

SEQ ID NO: 2925864 - RNA, 21 nt, Human T-lymphotropic virus 2
accauccucuuuccuucccuu

SEQ ID NO: 2925865 - RNA, 20 nt, Human T-lymphotropic virus 2
cacauuggauaaaaaagcca

SEQ ID NO: 2925866 - RNA, 18 nt, Human T-lymphotropic virus 2
uccugaggaacuccccuc

SEQ ID NO: 2925867 - RNA, 21 nt, Human T-lymphotropic virus 2
ggccuccacggccucacccau

SEQ ID NO: 2925868 - RNA, 23 nt, Human T-lymphotropic virus 2
cuguccuaaccuuccccuagaca

SEQ ID NO: 2925869 - RNA, 18 nt, Human T-lymphotropic virus 2
cccuagguucgucccccu

SEQ ID NO: 2925870 - RNA, 22 nt, Human T-lymphotropic virus 2
aaaccacuccacauuaacacag

SEQ ID NO: 2925871 - RNA, 13 nt, Human T-lymphotropic virus 2
cagcuaacccucc

SEQ ID NO: 2925872 - RNA, 13 nt, Human T-lymphotropic virus 2
caaaccaccuccc

SEQ ID NO: 2925873 - RNA, 19 nt, Human T-lymphotropic virus 2
agcccaucuuacguucccu

SEQ ID NO: 2925874 - RNA, 21 nt, Human T-lymphotropic virus 2
cacgggccccgucuccagucc

SEQ ID NO: 2925875 - RNA, 16 nt, Human T-lymphotropic virus 2
guaccuaugcuccucc

SEQ ID NO: 2925876 - RNA, 22 nt, Human T-lymphotropic virus 2
ggcuuccugaaccucuccggga

SEQ ID NO: 2925877 - RNA, 19 nt, Human T-lymphotropic virus 2
cgacagccuuaccccaccu

SEQ ID NO: 2925878 - RNA, 18 nt, Human T-lymphotropic virus 2
ccuccaggcggccuugcc

SEQ ID NO: 2925879 - RNA, 13 nt, Human T-lymphotropic virus 2
uggccccugcccc

SEQ ID NO: 2925880 - RNA, 23 nt, Human T-lymphotropic virus 2
aagcgcaaggacaguucaggagg

SEQ ID NO: 2925881 - RNA, 15 nt, Human T-lymphotropic virus 2
caccaaccuccccga

SEQ ID NO: 2925882 - RNA, 16 nt, Human T-lymphotropic virus 2
gaaauggaugccugga

SEQ ID NO: 2925883 - RNA, 17 nt, Human T-lymphotropic virus 2
acaccuucccccaccuc

SEQ ID NO: 2925884 - RNA, 16 nt, Human T-lymphotropic virus 2
cugaggaacuccccuc

SEQ ID NO: 2925885 - RNA, 23 nt, Human T-lymphotropic virus 2
ccugacgucccuccccccuagga

SEQ ID NO: 2925886 - RNA, 19 nt, Human T-lymphotropic virus 2
caacugcugaugccuuucu

SEQ ID NO: 2925887 - RNA, 17 nt, Human T-lymphotropic virus 2
ggcugcuuucuccaccc

SEQ ID NO: 2925888 - RNA, 19 nt, Human T-lymphotropic virus 2
caccucuccuuccccaggg

SEQ ID NO: 2925889 - RNA, 14 nt, Human T-lymphotropic virus 2
auuagaccuccuau

SEQ ID NO: 2925890 - RNA, 17 nt, Human T-lymphotropic virus 2
cucgcucuacuccuccu

SEQ ID NO: 2925891 - RNA, 17 nt, Human T-lymphotropic virus 2
ccaaaucccccucccca

SEQ ID NO: 2925892 - RNA, 22 nt, Human T-lymphotropic virus 2
gccaccuguccagagcaccaac

SEQ ID NO: 2925893 - RNA, 17 nt, Human T-lymphotropic virus 2
cuuaacuuucuccaggc

SEQ ID NO: 2925894 - RNA, 17 nt, Human T-lymphotropic virus 2
auccaggcccuuccaca

SEQ ID NO: 2925895 - RNA, 19 nt, Human T-lymphotropic virus 2
gccucaaccccgcccuacc

SEQ ID NO: 2925896 - RNA, 15 nt, Human T-lymphotropic virus 2
uccaaaccccccuac

SEQ ID NO: 2925897 - RNA, 17 nt, Human T-lymphotropic virus 2
cccguuauccuuuccuc

SEQ ID NO: 2925898 - RNA, 16 nt, Human T-lymphotropic virus 2
cucucuuacaccuccc

SEQ ID NO: 2925899 - RNA, 18 nt, Human T-lymphotropic virus 2
gaggaacuccccucaucc

SEQ ID NO: 2925900 - RNA, 15 nt, Human T-lymphotropic virus 2
ugcaugcccaagacc

SEQ ID NO: 2925901 - RNA, 18 nt, Human T-lymphotropic virus 2
cgauuccauaaccuuggc

SEQ ID NO: 2925902 - RNA, 15 nt, Human T-lymphotropic virus 2
accaucuaccuccac

SEQ ID NO: 2925903 - RNA, 17 nt, Human T-lymphotropic virus 2
auccaccacaguccucc

SEQ ID NO: 2925904 - RNA, 16 nt, Human T-lymphotropic virus 2
ucccacucaucccccu

SEQ ID NO: 2925905 - RNA, 16 nt, Human T-lymphotropic virus 2
cuccacuaccacccau

SEQ ID NO: 2925906 - RNA, 14 nt, Human T-lymphotropic virus 2
ccccgucuccaguc

SEQ ID NO: 2925907 - RNA, 19 nt, Human T-lymphotropic virus 2
acuuccugaggaacucccc

SEQ ID NO: 2925908 - RNA, 13 nt, Human T-lymphotropic virus 2
cccccucagcuca

SEQ ID NO: 2925909 - RNA, 16 nt, Human T-lymphotropic virus 2
uauucagucucacaca

SEQ ID NO: 2925910 - RNA, 23 nt, Human T-lymphotropic virus 2
uccgcccaucaaacccuccaggc

SEQ ID NO: 2925911 - RNA, 21 nt, Human T-lymphotropic virus 2
cacccucaccucuccuucccc

SEQ ID NO: 2925912 - RNA, 17 nt, Human T-lymphotropic virus 2
aacaucuccauucccca

SEQ ID NO: 2925913 - RNA, 22 nt, Human T-lymphotropic virus 2
uccuccaguaccuaugcuccuc

SEQ ID NO: 2925914 - RNA, 19 nt, Human T-lymphotropic virus 2
aauccugucuccucucagc

SEQ ID NO: 2925915 - RNA, 19 nt, Human T-lymphotropic virus 2
uccaccauguccgcagcca

SEQ ID NO: 2925916 - RNA, 20 nt, Human T-lymphotropic virus 2
gauccagccucucauccugg

SEQ ID NO: 2925917 - RNA, 20 nt, Human T-lymphotropic virus 2
auuccccaacaaaccuccuc

SEQ ID NO: 2925918 - RNA, 18 nt, Human T-lymphotropic virus 2
gguuuaaaaacagcccca

SEQ ID NO: 2925919 - RNA, 22 nt, Human T-lymphotropic virus 2
cgcagccacaccaaccuccccg

SEQ ID NO: 2925920 - RNA, 13 nt, Human T-lymphotropic virus 2
aucagcuccccuc

SEQ ID NO: 2925921 - RNA, 18 nt, Human T-lymphotropic virus 2
cguggauagauccagccu

SEQ ID NO: 2925922 - RNA, 17 nt, Human T-lymphotropic virus 2
ucuccaguccauccugg

SEQ ID NO: 2925923 - RNA, 20 nt, Human T-lymphotropic virus 2
ucaugaccuaagagccacca

SEQ ID NO: 2925924 - RNA, 20 nt, Human T-lymphotropic virus 2
cguugucagcucuccucucc

SEQ ID NO: 2925925 - RNA, 18 nt, Human T-lymphotropic virus 2
cuggcuuggcuccacacc

SEQ ID NO: 2925926 - RNA, 22 nt, Human T-lymphotropic virus 2
cucgaacaccuucccccaccuc

SEQ ID NO: 2925927 - RNA, 14 nt, Human T-lymphotropic virus 2
gaccccagccccca

SEQ ID NO: 2925928 - RNA, 15 nt, Human T-lymphotropic virus 2
ccaagguuccaccug

SEQ ID NO: 2925929 - RNA, 21 nt, Human T-lymphotropic virus 2
gcccaucuuacguucccuagc

SEQ ID NO: 2925930 - RNA, 15 nt, Human T-lymphotropic virus 2
cccucguaguuuccu

SEQ ID NO: 2925931 - RNA, 16 nt, Human T-lymphotropic virus 2
caaccccaugaggaaa

SEQ ID NO: 2925932 - RNA, 22 nt, Human T-lymphotropic virus 2
ggaacugaaaccacggcccuga

SEQ ID NO: 2925933 - RNA, 17 nt, Human T-lymphotropic virus 2
cccucuuggcaggcguc

SEQ ID NO: 2925934 - RNA, 16 nt, Human T-lymphotropic virus 2
cuauguuccacccgcc

SEQ ID NO: 2925935 - RNA, 15 nt, Human T-lymphotropic virus 2
cucccguaccuccuc

SEQ ID NO: 2925936 - RNA, 18 nt, Human T-lymphotropic virus 2
gguagucgcuccccgagg

SEQ ID NO: 2925937 - RNA, 17 nt, Human T-lymphotropic virus 2
ccaacccgucugcacgu

SEQ ID NO: 2925938 - RNA, 18 nt, Human T-lymphotropic virus 2
caguuugaccccaccgcc

SEQ ID NO: 2925939 - RNA, 12 nt, Human T-lymphotropic virus 2
cuccucucaggu

SEQ ID NO: 2925940 - RNA, 20 nt, Human T-lymphotropic virus 2
uucacccaggaagucagcca

SEQ ID NO: 2925941 - RNA, 13 nt, Human T-lymphotropic virus 2
accaacacccagu

SEQ ID NO: 2925942 - RNA, 11 nt, Human T-lymphotropic virus 2
gccccacccuc

SEQ ID NO: 2925943 - RNA, 16 nt, Human T-lymphotropic virus 2
uucccccaccucccca

SEQ ID NO: 2925944 - RNA, 23 nt, Human T-lymphotropic virus 2
caguuccgacaccuaucugcccu

SEQ ID NO: 2925945 - RNA, 15 nt, Human T-lymphotropic virus 2
ccucagaacccacuc

SEQ ID NO: 2925946 - RNA, 19 nt, Human T-lymphotropic virus 2
cgcguugucagcucuccuc

SEQ ID NO: 2925947 - RNA, 12 nt, Human T-lymphotropic virus 2
uuagacacccac

SEQ ID NO: 2925948 - RNA, 21 nt, Human T-lymphotropic virus 2
cugcccuacuacuacuccucc

SEQ ID NO: 2925949 - RNA, 21 nt, Human T-lymphotropic virus 2
acaucacuccccugcccucuc

SEQ ID NO: 2925950 - RNA, 15 nt, Human T-lymphotropic virus 2
caacaucccugucuc

SEQ ID NO: 2925951 - RNA, 16 nt, Human T-lymphotropic virus 2
cuaccacccucaccuc

SEQ ID NO: 2925952 - RNA, 11 nt, Human T-lymphotropic virus 2
acuaccacccu

SEQ ID NO: 2925953 - RNA, 22 nt, Human T-lymphotropic virus 2
aguuauccuaggagagauccag

SEQ ID NO: 2925954 - RNA, 19 nt, Human T-lymphotropic virus 2
acuccaaacaccauaggcc

SEQ ID NO: 2925955 - RNA, 13 nt, Human T-lymphotropic virus 2
cccuccagacagg

SEQ ID NO: 2925956 - RNA, 17 nt, Human T-lymphotropic virus 2
cggggaucagcuccccu

SEQ ID NO: 2925957 - RNA, 13 nt, Human T-lymphotropic virus 2
acuacugaggaaa

SEQ ID NO: 2925958 - RNA, 20 nt, Human T-lymphotropic virus 2
ucagccaagugucccuucga

SEQ ID NO: 2925959 - RNA, 20 nt, Human T-lymphotropic virus 2
ucccuuaucuuagcuccccu

SEQ ID NO: 2925960 - RNA, 18 nt, Human T-lymphotropic virus 2
cccccuccacguccugga

SEQ ID NO: 2925961 - RNA, 21 nt, Human T-lymphotropic virus 2
ccccaggagcccccucagcuc

SEQ ID NO: 2925962 - RNA, 15 nt, Human T-lymphotropic virus 2
cgccccccuccuggc

SEQ ID NO: 2925963 - RNA, 13 nt, Human T-lymphotropic virus 2
cauaaaaucccaa

SEQ ID NO: 2925964 - RNA, 14 nt, Human T-lymphotropic virus 2
cuccuccgccaccu

SEQ ID NO: 2925965 - RNA, 18 nt, Human T-lymphotropic virus 2
uccuuccauaaccuucac

SEQ ID NO: 2925966 - RNA, 20 nt, Human T-lymphotropic virus 2
cacccaggaagucagccaag

SEQ ID NO: 2925967 - RNA, 20 nt, Human T-lymphotropic virus 2
gagucgggacuguacccagc

SEQ ID NO: 2925968 - RNA, 23 nt, Human T-lymphotropic virus 2
uaccgacagccuuaccccaccua

SEQ ID NO: 2925969 - RNA, 15 nt, Human T-lymphotropic virus 2
ccuuacccacuuccc

SEQ ID NO: 2925970 - RNA, 21 nt, Human T-lymphotropic virus 2
cccgggccgguaaagcuccac

SEQ ID NO: 2925971 - RNA, 17 nt, Human T-lymphotropic virus 2
cuccaugacccuccuag

SEQ ID NO: 2925972 - RNA, 19 nt, Human T-lymphotropic virus 2
gacuacacccccccugccc

SEQ ID NO: 2925973 - RNA, 20 nt, Human T-lymphotropic virus 2
uccuucccuugcccugcccg

SEQ ID NO: 2925974 - RNA, 20 nt, Human T-lymphotropic virus 2
acccccuccacguccuggac

SEQ ID NO: 2925975 - RNA, 17 nt, Human T-lymphotropic virus 2
uaagucuccucucaggu

SEQ ID NO: 2925976 - RNA, 14 nt, Human T-lymphotropic virus 2
caaacccuccaggc

SEQ ID NO: 2925977 - RNA, 18 nt, Human T-lymphotropic virus 2
cuggaaccaacccucggg

SEQ ID NO: 2925978 - RNA, 19 nt, Human T-lymphotropic virus 2
cccaacaaaccuccucccg

SEQ ID NO: 2925979 - RNA, 16 nt, Human T-lymphotropic virus 2
cuagccuuauccccaa

SEQ ID NO: 2925980 - RNA, 20 nt, Human T-lymphotropic virus 2
ccccaugucauauucugcca

SEQ ID NO: 2925981 - RNA, 16 nt, Human T-lymphotropic virus 2
uuguaucacccucacc

SEQ ID NO: 2925982 - RNA, 15 nt, Human T-lymphotropic virus 2
accucacccuuaccc

SEQ ID NO: 2925983 - RNA, 19 nt, Human T-lymphotropic virus 2
ucauguauccguccuccag

SEQ ID NO: 2925984 - RNA, 20 nt, Human T-lymphotropic virus 2
ucuccauuccccaacaaacc

SEQ ID NO: 2925985 - RNA, 21 nt, Human T-lymphotropic virus 2
caugucaggcguggacaccca

SEQ ID NO: 2925986 - RNA, 14 nt, Human T-lymphotropic virus 2
cucccauaggaccu

SEQ ID NO: 2925987 - RNA, 14 nt, Human T-lymphotropic virus 2
uucacccucucccc

SEQ ID NO: 2925988 - RNA, 14 nt, Human T-lymphotropic virus 2
uacaaugccccuac

SEQ ID NO: 2925989 - RNA, 14 nt, Human T-lymphotropic virus 2
cacccaugacaugg

SEQ ID NO: 2925990 - RNA, 23 nt, Human T-lymphotropic virus 2
caagguaagucuccucucagguc

SEQ ID NO: 2925991 - RNA, 15 nt, Human T-lymphotropic virus 2
cccuccccccuagga

SEQ ID NO: 2925992 - RNA, 22 nt, Human T-lymphotropic virus 2
caccaacucaccugggacccca

SEQ ID NO: 2925993 - RNA, 14 nt, Human T-lymphotropic virus 2
caacuucuccccca

SEQ ID NO: 2925994 - RNA, 21 nt, Human T-lymphotropic virus 2
acuacacccccccugcccuaa

SEQ ID NO: 2925995 - RNA, 15 nt, Human T-lymphotropic virus 2
ucaccuacuggccug

SEQ ID NO: 2925996 - RNA, 18 nt, Human T-lymphotropic virus 2
ucaggcguggacacccaa

SEQ ID NO: 2925997 - RNA, 18 nt, Human T-lymphotropic virus 2
cagucauaguccucccgg

SEQ ID NO: 2925998 - RNA, 15 nt, Human T-lymphotropic virus 2
gcuacgacgcuuucu

SEQ ID NO: 2925999 - RNA, 16 nt, Human T-lymphotropic virus 2
cccuaucuuacauccc

SEQ ID NO: 2926000 - RNA, 16 nt, Human T-lymphotropic virus 2
ccuguauccuccgcca

SEQ ID NO: 2926001 - RNA, 18 nt, Human T-lymphotropic virus 2
uccaguaccuaugcuccu

SEQ ID NO: 2926002 - RNA, 22 nt, Human T-lymphotropic virus 2
cagcuuauacaauacuccuccu

SEQ ID NO: 2926003 - RNA, 22 nt, Human T-lymphotropic virus 2
gaugccuuucuucccucucccg

SEQ ID NO: 2926004 - RNA, 14 nt, Human T-lymphotropic virus 2
cucccuuccaccuc

SEQ ID NO: 2926005 - RNA, 20 nt, Human T-lymphotropic virus 2
uauccagcugaccuuacaga

SEQ ID NO: 2926006 - RNA, 11 nt, Human T-lymphotropic virus 2
agacacccggg

SEQ ID NO: 2926007 - RNA, 19 nt, Human T-lymphotropic virus 2
accuccugaacugcuccuc

SEQ ID NO: 2926008 - RNA, 20 nt, Human T-lymphotropic virus 2
agggcaagaccaucuaccuc

SEQ ID NO: 2926009 - RNA, 12 nt, Human T-lymphotropic virus 2
ucuuuccaccac

SEQ ID NO: 2926010 - RNA, 14 nt, Human T-lymphotropic virus 2
ccgauguccagccc

SEQ ID NO: 2926011 - RNA, 18 nt, Human T-lymphotropic virus 2
cccagccacgccccccuc

SEQ ID NO: 2926012 - RNA, 12 nt, Human T-lymphotropic virus 2
cuauaauagacc

SEQ ID NO: 2926013 - RNA, 14 nt, Human T-lymphotropic virus 2
ccucaacgccgccc

SEQ ID NO: 2926014 - RNA, 17 nt, Human T-lymphotropic virus 2
uauggccagcucugcca

SEQ ID NO: 2926015 - RNA, 14 nt, Human T-lymphotropic virus 2
ucacuccccugccc

SEQ ID NO: 2926016 - RNA, 14 nt, Human T-lymphotropic virus 2
ccucccgaaccauc

SEQ ID NO: 2926017 - RNA, 14 nt, Human T-lymphotropic virus 2
acccuucuccagga

SEQ ID NO: 2926018 - RNA, 19 nt, Human T-lymphotropic virus 2
ucuuagacacccacaacaa

SEQ ID NO: 2926019 - RNA, 22 nt, Human T-lymphotropic virus 2
ucacccaggaagucagccaagu

SEQ ID NO: 2926020 - RNA, 19 nt, Human T-lymphotropic virus 2
cugcccgcuccuccauccc

SEQ ID NO: 2926021 - RNA, 18 nt, Human T-lymphotropic virus 2
aagagccaccaaugccau

SEQ ID NO: 2926022 - RNA, 15 nt, Human T-lymphotropic virus 2
cgauuacccccugcc

SEQ ID NO: 2926023 - RNA, 20 nt, Human T-lymphotropic virus 2
cuuuuuccaaaucccccucc

SEQ ID NO: 2926024 - RNA, 17 nt, Human T-lymphotropic virus 2
ccugcccgcuccuccau

SEQ ID NO: 2926025 - RNA, 23 nt, Human T-lymphotropic virus 2
ucccccuaccauugacccaucca

SEQ ID NO: 2926026 - RNA, 20 nt, Human T-lymphotropic virus 2
agcggccucgguugagacgc

SEQ ID NO: 2926027 - RNA, 17 nt, Human T-lymphotropic virus 2
ccacaccccccacccuc

SEQ ID NO: 2926028 - RNA, 16 nt, Human T-lymphotropic virus 2
cggcacuuccgcccau

SEQ ID NO: 2926029 - RNA, 23 nt, Human T-lymphotropic virus 2
cagccacaccaaccuccccgacc

SEQ ID NO: 2926030 - RNA, 15 nt, Human T-lymphotropic virus 2
acccuucuccaggaa

SEQ ID NO: 2926031 - RNA, 20 nt, Human T-lymphotropic virus 2
ggcaggcgucccggggccaa

SEQ ID NO: 2926032 - RNA, 15 nt, Human T-lymphotropic virus 2
acuacucgccuuccu

SEQ ID NO: 2926033 - RNA, 18 nt, Human T-lymphotropic virus 2
aagcccgcggacacacua

SEQ ID NO: 2926034 - RNA, 21 nt, Human T-lymphotropic virus 2
cuacaucgacaugcccuccug

SEQ ID NO: 2926035 - RNA, 22 nt, Human T-lymphotropic virus 2
acacauuuuccacuagcccagc

SEQ ID NO: 2926036 - RNA, 14 nt, Human T-lymphotropic virus 2
ccuugccaccccua

SEQ ID NO: 2926037 - RNA, 21 nt, Human T-lymphotropic virus 2
cacggcccugacgucccuccc

SEQ ID NO: 2926038 - RNA, 15 nt, Human T-lymphotropic virus 2
acccccugcccauaa

SEQ ID NO: 2926039 - RNA, 19 nt, Human T-lymphotropic virus 2
acggcccugacgucccucc

SEQ ID NO: 2926040 - RNA, 20 nt, Human T-lymphotropic virus 2
cacaacaaauggaccaucau

SEQ ID NO: 2926041 - RNA, 23 nt, Human T-lymphotropic virus 2
caguaugcagcccaaaauagacg

SEQ ID NO: 2926042 - RNA, 23 nt, Human T-lymphotropic virus 2
ccuugcccugcccgcuccuccau

SEQ ID NO: 2926043 - RNA, 21 nt, Human T-lymphotropic virus 2
ucuccguuaugggacaaacac

SEQ ID NO: 2926044 - RNA, 20 nt, Human T-lymphotropic virus 2
ucgaaaccaaagccuuccau

SEQ ID NO: 2926045 - RNA, 16 nt, Human T-lymphotropic virus 2
caccaacaucccuguc

SEQ ID NO: 2926046 - RNA, 19 nt, Human T-lymphotropic virus 2
auccacgggcuuuccccaa

SEQ ID NO: 2926047 - RNA, 18 nt, Human T-lymphotropic virus 2
caagggcuagggcuuccu

SEQ ID NO: 2926048 - RNA, 22 nt, Human T-lymphotropic virus 2
cagcaagggcuagggcuuccug

SEQ ID NO: 2926049 - RNA, 17 nt, Human T-lymphotropic virus 2
uccacuaccacccauuc

SEQ ID NO: 2926050 - RNA, 20 nt, Human T-lymphotropic virus 2
cucacgauugguaucuccuc

SEQ ID NO: 2926051 - RNA, 14 nt, Human T-lymphotropic virus 2
cuuacaccucccaa

SEQ ID NO: 2926052 - RNA, 14 nt, Human T-lymphotropic virus 2
cuuaccccucccac

SEQ ID NO: 2926053 - RNA, 21 nt, Human T-lymphotropic virus 2
ucaggccauuucccuccuagg

SEQ ID NO: 2926054 - RNA, 15 nt, Human T-lymphotropic virus 2
aucuccauuccccaa

SEQ ID NO: 2926055 - RNA, 14 nt, Human T-lymphotropic virus 2
ucuacaccaccugg

SEQ ID NO: 2926056 - RNA, 16 nt, Human T-lymphotropic virus 2
auuccccaacaaaccu

SEQ ID NO: 2926057 - RNA, 24 nt, Human T-lymphotropic virus 2
gccaucuuuaguaguucaguccuc

SEQ ID NO: 2926058 - RNA, 11 nt, Human T-lymphotropic virus 2
gcccugcuuuc

SEQ ID NO: 2926059 - RNA, 22 nt, Human T-lymphotropic virus 2
ccaacccgugagggcucccugu

SEQ ID NO: 2926060 - RNA, 22 nt, Human T-lymphotropic virus 2
ccauuccccaacaaaccuccuc

SEQ ID NO: 2926061 - RNA, 19 nt, Human T-lymphotropic virus 2
ccuuccgugggaccgucuc

SEQ ID NO: 2926062 - RNA, 15 nt, Human T-lymphotropic virus 2
cuguacccagccacg

SEQ ID NO: 2926063 - RNA, 14 nt, Human T-lymphotropic virus 2
cuuaaacuucacuu

SEQ ID NO: 2926064 - RNA, 16 nt, Human T-lymphotropic virus 2
accucaacgccgcccu

SEQ ID NO: 2926065 - RNA, 14 nt, Human T-lymphotropic virus 2
ccaccucaggcacu

SEQ ID NO: 2926066 - RNA, 16 nt, Human T-lymphotropic virus 2
ucuccaagcggccucg

SEQ ID NO: 2926067 - RNA, 17 nt, Human T-lymphotropic virus 2
cgccauuggggccuucc

SEQ ID NO: 2926068 - RNA, 17 nt, Human T-lymphotropic virus 2
acagacuugccauaccu

SEQ ID NO: 2926069 - RNA, 22 nt, Human T-lymphotropic virus 2
ccuucgcaaacaccuacaaucc

SEQ ID NO: 2926070 - RNA, 22 nt, Human T-lymphotropic virus 2
cuguccuucucgguuccucucc

SEQ ID NO: 2926071 - RNA, 18 nt, Human T-lymphotropic virus 2
cucccagacgaccccagc

SEQ ID NO: 2926072 - RNA, 19 nt, Human T-lymphotropic virus 2
uccuaccacuccagccccu

SEQ ID NO: 2926073 - RNA, 18 nt, Human T-lymphotropic virus 2
ccauccacaguccucuau

SEQ ID NO: 2926074 - RNA, 23 nt, Human T-lymphotropic virus 2
cuccgccaaauccaggcccuucc

SEQ ID NO: 2926075 - RNA, 15 nt, Human T-lymphotropic virus 2
ccuucccccaccucc

SEQ ID NO: 2926076 - RNA, 13 nt, Human T-lymphotropic virus 2
gccagccccacca

SEQ ID NO: 2926077 - RNA, 19 nt, Human T-lymphotropic virus 2
uccuccgccaaauccaggc

SEQ ID NO: 2926078 - RNA, 17 nt, Human T-lymphotropic virus 2
ccucggggaucagcucc

SEQ ID NO: 2926079 - RNA, 16 nt, Human T-lymphotropic virus 2
caauagcaguguggcu

SEQ ID NO: 2926080 - RNA, 23 nt, Human T-lymphotropic virus 2
accccuccuguuggaucucccuu

SEQ ID NO: 2926081 - RNA, 15 nt, Human T-lymphotropic virus 2
cugccaauagccacu

SEQ ID NO: 2926082 - RNA, 14 nt, Human T-lymphotropic virus 2
uacuacuccuccgc

SEQ ID NO: 2926083 - RNA, 15 nt, Human T-lymphotropic virus 2
aucagcuccccuccc

SEQ ID NO: 2926084 - RNA, 23 nt, Human T-lymphotropic virus 2
uguccuaacccccuccacguccu

SEQ ID NO: 2926085 - RNA, 18 nt, Human T-lymphotropic virus 2
ccucccgagccagccacc

SEQ ID NO: 2926086 - RNA, 20 nt, Human T-lymphotropic virus 2
cccuggcuuggcuccacacc

SEQ ID NO: 2926087 - RNA, 17 nt, Human T-lymphotropic virus 2
cuccccccuuuuucccu

SEQ ID NO: 2926088 - RNA, 17 nt, Human T-lymphotropic virus 2
cuucgacuacacuucuc

SEQ ID NO: 2926089 - RNA, 20 nt, Human T-lymphotropic virus 2
ucuauucgaugaauacacca

SEQ ID NO: 2926090 - RNA, 19 nt, Human T-lymphotropic virus 2
cccgcugcuccuccgccaa

SEQ ID NO: 2926091 - RNA, 12 nt, Human T-lymphotropic virus 2
auaguuccucua

SEQ ID NO: 2926092 - RNA, 19 nt, Human T-lymphotropic virus 2
cugacgccccaaggccucc

SEQ ID NO: 2926093 - RNA, 11 nt, Human T-lymphotropic virus 2
gcucuccagaa

SEQ ID NO: 2926094 - RNA, 15 nt, Human T-lymphotropic virus 2
aggcaggcccgcccu

SEQ ID NO: 2926095 - RNA, 20 nt, Human T-lymphotropic virus 2
gccuuaccccaccuacagac

SEQ ID NO: 2926096 - RNA, 13 nt, Human T-lymphotropic virus 2
gcagcaagggcua

SEQ ID NO: 2926097 - RNA, 18 nt, Human T-lymphotropic virus 2
cuucgccgucacugaaaa

SEQ ID NO: 2926098 - RNA, 22 nt, Human T-lymphotropic virus 2
caagacgccgccgugccguucc

SEQ ID NO: 2926099 - RNA, 17 nt, Human T-lymphotropic virus 2
gccaagccauggccuuc

SEQ ID NO: 2926100 - RNA, 15 nt, Human T-lymphotropic virus 2
caaagacaucuccca

SEQ ID NO: 2926101 - RNA, 14 nt, Human T-lymphotropic virus 2
ucacaaaacccauc

SEQ ID NO: 2926102 - RNA, 12 nt, Human T-lymphotropic virus 2
acgucccucccc

SEQ ID NO: 2926103 - RNA, 21 nt, Human T-lymphotropic virus 2
gacgcccuacaacaaugccag

SEQ ID NO: 2926104 - RNA, 17 nt, Human T-lymphotropic virus 2
caggagguggcucgcuc

SEQ ID NO: 2926105 - RNA, 17 nt, Human T-lymphotropic virus 2
uccucccgaaccauccu

SEQ ID NO: 2926106 - RNA, 18 nt, Human T-lymphotropic virus 2
gccgcccucuuggcaggc

SEQ ID NO: 2926107 - RNA, 17 nt, Human T-lymphotropic virus 2
ccagacgaccccagccc

SEQ ID NO: 2926108 - RNA, 14 nt, Human T-lymphotropic virus 2
ugacacggcccccu

SEQ ID NO: 2926109 - RNA, 12 nt, Human T-lymphotropic virus 2
aguccauccugg

SEQ ID NO: 2926110 - RNA, 21 nt, Human T-lymphotropic virus 2
gcggacacacuaacagccccc

SEQ ID NO: 2926111 - RNA, 13 nt, Human T-lymphotropic virus 2
cuccauuccccaa

SEQ ID NO: 2926112 - RNA, 15 nt, Human T-lymphotropic virus 2
cugaggaacuccccu

SEQ ID NO: 2926113 - RNA, 17 nt, Human T-lymphotropic virus 2
cucccauaggaccuucu

SEQ ID NO: 2926114 - RNA, 15 nt, Human T-lymphotropic virus 2
uuugaauuccuccau

SEQ ID NO: 2926115 - RNA, 18 nt, Human T-lymphotropic virus 2
cuacaacauaacugccgu

SEQ ID NO: 2926116 - RNA, 16 nt, Human T-lymphotropic virus 2
caggcccgcccuagga

SEQ ID NO: 2926117 - RNA, 22 nt, Human T-lymphotropic virus 2
guggacuacgugcugccaagcc

SEQ ID NO: 2926118 - RNA, 17 nt, Human T-lymphotropic virus 2
gaacccacucagccucc

SEQ ID NO: 2926119 - RNA, 21 nt, Human T-lymphotropic virus 2
gauuuccggcccuuaccccaa

SEQ ID NO: 2926120 - RNA, 19 nt, Human T-lymphotropic virus 2
cgaacaccuucccccaccu

SEQ ID NO: 2926121 - RNA, 20 nt, Human T-lymphotropic virus 2
ccuccccgaggguaccccca

SEQ ID NO: 2926122 - RNA, 17 nt, Human T-lymphotropic virus 2
ccuuccaauuucccagg

SEQ ID NO: 2926123 - RNA, 19 nt, Human T-lymphotropic virus 2
ccuuaccccucccaccacu

SEQ ID NO: 2926124 - RNA, 14 nt, Human T-lymphotropic virus 2
accagcucaggccu

SEQ ID NO: 2926125 - RNA, 18 nt, Human T-lymphotropic virus 2
ggccaucaagcaggaggu

SEQ ID NO: 2926126 - RNA, 22 nt, Human T-lymphotropic virus 2
caauccugucuccucucagccc

SEQ ID NO: 2926127 - RNA, 12 nt, Human T-lymphotropic virus 2
cuuccaucccuc

SEQ ID NO: 2926128 - RNA, 15 nt, Human T-lymphotropic virus 2
uguuccccccccuua

SEQ ID NO: 2926129 - RNA, 12 nt, Human T-lymphotropic virus 2
cugcuccuccca

SEQ ID NO: 2926130 - RNA, 23 nt, Human T-lymphotropic virus 2
ccaggcacugaccacgcauggcc

SEQ ID NO: 2926131 - RNA, 19 nt, Human T-lymphotropic virus 2
gccaauuuucacccucucc

SEQ ID NO: 2926132 - RNA, 15 nt, Human T-lymphotropic virus 2
auggcagggccccua

SEQ ID NO: 2926133 - RNA, 14 nt, Human T-lymphotropic virus 2
ccgaucccgacccc

SEQ ID NO: 2926134 - RNA, 16 nt, Human T-lymphotropic virus 2
uaccacuccagccccu

SEQ ID NO: 2926135 - RNA, 17 nt, Human T-lymphotropic virus 2
cuccacccugccaggca

SEQ ID NO: 2926136 - RNA, 14 nt, Human T-lymphotropic virus 2
guggacacccaagg

SEQ ID NO: 2926137 - RNA, 18 nt, Human T-lymphotropic virus 2
caccaaugauuuccggcc

SEQ ID NO: 2926138 - RNA, 16 nt, Human T-lymphotropic virus 2
uacucaggaccaggca

SEQ ID NO: 2926139 - RNA, 15 nt, Human T-lymphotropic virus 2
uacccaaagccccca

SEQ ID NO: 2926140 - RNA, 23 nt, Human T-lymphotropic virus 2
gucucccccaagguuccaccugc

SEQ ID NO: 2926141 - RNA, 24 nt, Human T-lymphotropic virus 2
cgacuuccugaggaacuccccuca

SEQ ID NO: 2926142 - RNA, 22 nt, Human T-lymphotropic virus 2
ugcccacaacucaaacccccuc

SEQ ID NO: 2926143 - RNA, 17 nt, Human T-lymphotropic virus 2
ccucggcacuuccgccc

SEQ ID NO: 2926144 - RNA, 20 nt, Human T-lymphotropic virus 2
ccuuaccccucccaccacuc

SEQ ID NO: 2926145 - RNA, 19 nt, Human T-lymphotropic virus 2
ccuacacacagggacaguc

SEQ ID NO: 2926146 - RNA, 13 nt, Human T-lymphotropic virus 2
uaacccuccaggc

SEQ ID NO: 2926147 - RNA, 21 nt, Human T-lymphotropic virus 2
uccaggaaccacgacuccuca

SEQ ID NO: 2926148 - RNA, 13 nt, Human T-lymphotropic virus 2
cacccugccaggc

SEQ ID NO: 2926149 - RNA, 22 nt, Human T-lymphotropic virus 2
acucagccuccaccaacuucuc

SEQ ID NO: 2926150 - RNA, 18 nt, Human T-lymphotropic virus 2
ccucaccgacccucuggu

SEQ ID NO: 2926151 - RNA, 18 nt, Human T-lymphotropic virus 2
cauguccuaacccccucc

SEQ ID NO: 2926152 - RNA, 16 nt, Human T-lymphotropic virus 2
caagguuccaccugcc

SEQ ID NO: 2926153 - RNA, 14 nt, Human T-lymphotropic virus 2
ggcaggcccgcccu

SEQ ID NO: 2926154 - RNA, 18 nt, Human T-lymphotropic virus 2
cuccccuccuuccccacc

SEQ ID NO: 2926155 - RNA, 16 nt, Human T-lymphotropic virus 2
aauccugucuccucuc

SEQ ID NO: 2926156 - RNA, 19 nt, Human T-lymphotropic virus 2
gacaauggcgacuagccuc

SEQ ID NO: 2926157 - RNA, 15 nt, Human T-lymphotropic virus 2
caaggacaguucagg

SEQ ID NO: 2926158 - RNA, 15 nt, Human T-lymphotropic virus 2
ccaccuuacccaggc

SEQ ID NO: 2926159 - RNA, 22 nt, Human T-lymphotropic virus 2
aacaaauggaccaucauuggaa

SEQ ID NO: 2926160 - RNA, 12 nt, Human T-lymphotropic virus 2
uuggcagccccc

SEQ ID NO: 2926161 - RNA, 12 nt, Human T-lymphotropic virus 2
auugucuucccg

SEQ ID NO: 2926162 - RNA, 17 nt, Human T-lymphotropic virus 2
acuccccggccuuacca

SEQ ID NO: 2926163 - RNA, 22 nt, Human T-lymphotropic virus 2
cacccaguucaaacuccuccaa

SEQ ID NO: 2926164 - RNA, 19 nt, Human T-lymphotropic virus 2
ccgucucccggccucggca

SEQ ID NO: 2926165 - RNA, 21 nt, Human T-lymphotropic virus 2
ucucuaagugcggcuccucca

SEQ ID NO: 2926166 - RNA, 16 nt, Human T-lymphotropic virus 2
cccgcuccucacgcuc

SEQ ID NO: 2926167 - RNA, 19 nt, Human T-lymphotropic virus 2
ccuucaccauuccccagcc

SEQ ID NO: 2926168 - RNA, 20 nt, Human T-lymphotropic virus 2
gcaaacaccuacaaucccua

SEQ ID NO: 2926169 - RNA, 20 nt, Human T-lymphotropic virus 2
ccuucuuucaaucaaugcga

SEQ ID NO: 2926170 - RNA, 17 nt, Human T-lymphotropic virus 2
cagccuugcucuccaua

SEQ ID NO: 2926171 - RNA, 16 nt, Human T-lymphotropic virus 2
ucuccuuccccagggc

SEQ ID NO: 2926172 - RNA, 16 nt, Human T-lymphotropic virus 2
cagaaaaaaauagacc

SEQ ID NO: 2926173 - RNA, 21 nt, Human T-lymphotropic virus 2
cagcuccucugcucuuggcag

SEQ ID NO: 2926174 - RNA, 14 nt, Human T-lymphotropic virus 2
cgaacaccuucccc

SEQ ID NO: 2926175 - RNA, 22 nt, Human T-lymphotropic virus 2
cucccucaccgacccucugguc

SEQ ID NO: 2926176 - RNA, 19 nt, Human T-lymphotropic virus 2
aauagccacuccaaacacc

SEQ ID NO: 2926177 - RNA, 19 nt, Human T-lymphotropic virus 2
cuaggaacaggaacagcuc

SEQ ID NO: 2926178 - RNA, 15 nt, Human T-lymphotropic virus 2
cucacacaaacaauc

SEQ ID NO: 2926179 - RNA, 17 nt, Human T-lymphotropic virus 2
ugcuucccuaucuuaca

SEQ ID NO: 2926180 - RNA, 20 nt, Human T-lymphotropic virus 2
cuuccugaaccucuccggga

SEQ ID NO: 2926181 - RNA, 15 nt, Human T-lymphotropic virus 2
aucuuuccaccacaa

SEQ ID NO: 2926182 - RNA, 17 nt, Human T-lymphotropic virus 2
ccaagcaguaccagcca

SEQ ID NO: 2926183 - RNA, 13 nt, Human T-lymphotropic virus 2
cauccucuccaag

SEQ ID NO: 2926184 - RNA, 16 nt, Human T-lymphotropic virus 2
cuuccugaaccucucc

SEQ ID NO: 2926185 - RNA, 11 nt, Human T-lymphotropic virus 2
ugaccccaccg

SEQ ID NO: 2926186 - RNA, 14 nt, Human T-lymphotropic virus 2
gccuggaaccaacc

SEQ ID NO: 2926187 - RNA, 15 nt, Human T-lymphotropic virus 2
cauaguccucccgga

SEQ ID NO: 2926188 - RNA, 18 nt, Human T-lymphotropic virus 2
ucuccaauaccuuauccc

SEQ ID NO: 2926189 - RNA, 15 nt, Human T-lymphotropic virus 2
cuccccccccuuccc

SEQ ID NO: 2926190 - RNA, 19 nt, Human T-lymphotropic virus 2
cucuaaaggaacacccauc

SEQ ID NO: 2926191 - RNA, 21 nt, Human T-lymphotropic virus 2
cauuccccaacaaaccuccuc

SEQ ID NO: 2926192 - RNA, 15 nt, Human T-lymphotropic virus 2
cgacuagccucccga

SEQ ID NO: 2926193 - RNA, 16 nt, Human T-lymphotropic virus 2
gagcgcagcaagggcu

SEQ ID NO: 2926194 - RNA, 20 nt, Human T-lymphotropic virus 2
auuuccggcccuuaccccaa

SEQ ID NO: 2926195 - RNA, 19 nt, Human T-lymphotropic virus 2
caggaguuuuguaccuccu

SEQ ID NO: 2926196 - RNA, 17 nt, Human T-lymphotropic virus 2
ccuguuggaucucccuu

SEQ ID NO: 2926197 - RNA, 22 nt, Human T-lymphotropic virus 2
acuccaucuuaacaaccccagg

SEQ ID NO: 2926198 - RNA, 16 nt, Human T-lymphotropic virus 2
cucauaggcccuggca

SEQ ID NO: 2926199 - RNA, 16 nt, Human T-lymphotropic virus 2
ccucaacgccgcccuc

SEQ ID NO: 2926200 - RNA, 14 nt, Human T-lymphotropic virus 2
aacaaggcucugac

SEQ ID NO: 2926201 - RNA, 19 nt, Human T-lymphotropic virus 2
accuaagagccaccaaugc

SEQ ID NO: 2926202 - RNA, 20 nt, Human T-lymphotropic virus 2
ccucaaccccgcccuaccuc

SEQ ID NO: 2926203 - RNA, 14 nt, Human T-lymphotropic virus 2
accccccacccucc

SEQ ID NO: 2926204 - RNA, 11 nt, Human T-lymphotropic virus 2
cuaucugcccu

SEQ ID NO: 2926205 - RNA, 23 nt, Human T-lymphotropic virus 2
uccucaggccaauuuucacccuc

SEQ ID NO: 2926206 - RNA, 16 nt, Human T-lymphotropic virus 2
acugcaacaacuccau

SEQ ID NO: 2926207 - RNA, 13 nt, Human T-lymphotropic virus 2
cccagcccccacc

SEQ ID NO: 2926208 - RNA, 18 nt, Human T-lymphotropic virus 2
ucccaaaccaccucccaa

SEQ ID NO: 2926209 - RNA, 15 nt, Human T-lymphotropic virus 2
augccauuacuacca

SEQ ID NO: 2926210 - RNA, 16 nt, Human T-lymphotropic virus 2
uacucuggcuuccaua

SEQ ID NO: 2926211 - RNA, 17 nt, Human T-lymphotropic virus 2
ggcuuuccccaacucca

SEQ ID NO: 2926212 - RNA, 15 nt, Human T-lymphotropic virus 2
uaccacccucaccuc

SEQ ID NO: 2926213 - RNA, 20 nt, Human T-lymphotropic virus 2
ugccuuucuucccucucccg

SEQ ID NO: 2926214 - RNA, 19 nt, Human T-lymphotropic virus 2
ugcccaagaccagacgcca

SEQ ID NO: 2926215 - RNA, 19 nt, Human T-lymphotropic virus 2
caagguccuuaccccuccc

SEQ ID NO: 2926216 - RNA, 18 nt, Human T-lymphotropic virus 2
ccaucaaacccuccaggc

SEQ ID NO: 2926217 - RNA, 14 nt, Human T-lymphotropic virus 2
cugcccgcuccucc

SEQ ID NO: 2926218 - RNA, 20 nt, Human T-lymphotropic virus 2
acucauguauccguccucca

SEQ ID NO: 2926219 - RNA, 20 nt, Human T-lymphotropic virus 2
uguccuaacccccuccacgu

SEQ ID NO: 2926220 - RNA, 20 nt, Human T-lymphotropic virus 2
cccccguuauccuuuccucc

SEQ ID NO: 2926221 - RNA, 17 nt, Human T-lymphotropic virus 2
cugacgucccucccccc

SEQ ID NO: 2926222 - RNA, 19 nt, Human T-lymphotropic virus 2
cauaaccuuggcagccaac

SEQ ID NO: 2926223 - RNA, 15 nt, Human T-lymphotropic virus 2
cuccccuccuucccc

SEQ ID NO: 2926224 - RNA, 15 nt, Human T-lymphotropic virus 2
cauuauccucccccc

SEQ ID NO: 2926225 - RNA, 19 nt, Human T-lymphotropic virus 2
ccagacacucgugcccggg

SEQ ID NO: 2926226 - RNA, 19 nt, Human T-lymphotropic virus 2
auggccacuuauaccccau

SEQ ID NO: 2926227 - RNA, 19 nt, Human T-lymphotropic virus 2
ugcuuucuccacccugcca

SEQ ID NO: 2926228 - RNA, 18 nt, Human T-lymphotropic virus 2
cuccacggccucacccau

SEQ ID NO: 2926229 - RNA, 21 nt, Human T-lymphotropic virus 2
ccuacuuuuauucagucucac

SEQ ID NO: 2926230 - RNA, 20 nt, Human T-lymphotropic virus 2
gcugcuuucuccacccugcc

SEQ ID NO: 2926231 - RNA, 16 nt, Human T-lymphotropic virus 2
agccucccgagccagc

SEQ ID NO: 2926232 - RNA, 15 nt, Human T-lymphotropic virus 2
auucugccaccccag

SEQ ID NO: 2926233 - RNA, 16 nt, Human T-lymphotropic virus 2
gaacacccauccuucg

SEQ ID NO: 2926234 - RNA, 17 nt, Human T-lymphotropic virus 2
caacccaccacuggcuu

SEQ ID NO: 2926235 - RNA, 22 nt, Human T-lymphotropic virus 2
ggucuaauauggaccuucaaug

SEQ ID NO: 2926236 - RNA, 17 nt, Human T-lymphotropic virus 2
cacuuauaccccauguc

SEQ ID NO: 2926237 - RNA, 19 nt, Human T-lymphotropic virus 2
ucucguucuuuccucuucg

SEQ ID NO: 2926238 - RNA, 19 nt, Human T-lymphotropic virus 2
ggcucugacgucucccccu

SEQ ID NO: 2926239 - RNA, 21 nt, Human T-lymphotropic virus 2
ucucccgcugcuccuccgcca

SEQ ID NO: 2926240 - RNA, 19 nt, Human T-lymphotropic virus 2
agccccaccaaugaggaau

SEQ ID NO: 2926241 - RNA, 14 nt, Human T-lymphotropic virus 2
cuauguuccacccg

SEQ ID NO: 2926242 - RNA, 17 nt, Human T-lymphotropic virus 2
ccuucaaugacggcuca

SEQ ID NO: 2926243 - RNA, 21 nt, Human T-lymphotropic virus 2
caauggcgacuagccucccga

SEQ ID NO: 2926244 - RNA, 12 nt, Human T-lymphotropic virus 2
uccccagccaug

SEQ ID NO: 2926245 - RNA, 15 nt, Human T-lymphotropic virus 2
ggaagccaagucccu

SEQ ID NO: 2926246 - RNA, 18 nt, Human T-lymphotropic virus 2
ugggaccgucucccggcc

SEQ ID NO: 2926247 - RNA, 16 nt, Human T-lymphotropic virus 2
agccacgccccccucc

SEQ ID NO: 2926248 - RNA, 19 nt, Human T-lymphotropic virus 2
ccgcucacauuccucccau

SEQ ID NO: 2926249 - RNA, 13 nt, Human T-lymphotropic virus 2
cagccccacccuc

SEQ ID NO: 2926250 - RNA, 17 nt, Human T-lymphotropic virus 2
uccuauacacuccaacu

SEQ ID NO: 2926251 - RNA, 22 nt, Human T-lymphotropic virus 2
gagagucucgcaccugcucgcu

SEQ ID NO: 2926252 - RNA, 16 nt, Human T-lymphotropic virus 2
cucgcucccguaccuc

SEQ ID NO: 2926253 - RNA, 15 nt, Human T-lymphotropic virus 2
acugaaaccacggcc

SEQ ID NO: 2926254 - RNA, 22 nt, Human T-lymphotropic virus 2
gggagaucuaaucuccccccau

SEQ ID NO: 2926255 - RNA, 12 nt, Human T-lymphotropic virus 2
uccccagggccc

SEQ ID NO: 2926256 - RNA, 16 nt, Human T-lymphotropic virus 2
gaccaucuaccuccac

SEQ ID NO: 2926257 - RNA, 15 nt, Human T-lymphotropic virus 2
ccucuggucacggag

SEQ ID NO: 2926258 - RNA, 14 nt, Human T-lymphotropic virus 2
guaagucuccucuc

SEQ ID NO: 2926259 - RNA, 11 nt, Human T-lymphotropic virus 2
ccuuccucacc

SEQ ID NO: 2926260 - RNA, 17 nt, Human T-lymphotropic virus 2
accaacaucccugucuc

SEQ ID NO: 2926261 - RNA, 12 nt, Human T-lymphotropic virus 2
ggcuggcugcuu

SEQ ID NO: 2926262 - RNA, 14 nt, Human T-lymphotropic virus 2
ucuacuccuccucg

SEQ ID NO: 2926263 - RNA, 20 nt, Human T-lymphotropic virus 2
ccacgggcuuuccccaacuc

SEQ ID NO: 2926264 - RNA, 17 nt, Human T-lymphotropic virus 2
cccgcccuaccucuccu

SEQ ID NO: 2926265 - RNA, 16 nt, Human T-lymphotropic virus 2
ccuccccccccuuccc

SEQ ID NO: 2926266 - RNA, 13 nt, Human T-lymphotropic virus 2
caguccuccacua

SEQ ID NO: 2926267 - RNA, 17 nt, Human T-lymphotropic virus 2
cuuccaauuucccagga

SEQ ID NO: 2926268 - RNA, 17 nt, Human T-lymphotropic virus 2
aauucgaaaccaaagcc

SEQ ID NO: 2926269 - RNA, 15 nt, Human T-lymphotropic virus 2
cgguuauaccccaga

SEQ ID NO: 2926270 - RNA, 13 nt, Human T-lymphotropic virus 2
ucccucgccuccc

SEQ ID NO: 2926271 - RNA, 18 nt, Human T-lymphotropic virus 2
caccccacaacaacucca

SEQ ID NO: 2926272 - RNA, 14 nt, Human T-lymphotropic virus 2
cuggccuccguccc

SEQ ID NO: 2926273 - RNA, 21 nt, Human T-lymphotropic virus 2
cauauucugccaccccagaca

SEQ ID NO: 2926274 - RNA, 23 nt, Human T-lymphotropic virus 2
cccuccuaguagaugccccugga

SEQ ID NO: 2926275 - RNA, 15 nt, Human T-lymphotropic virus 2
cgugagggcucccug

SEQ ID NO: 2926276 - RNA, 15 nt, Human T-lymphotropic virus 2
cuacuccuccucguc

SEQ ID NO: 2926277 - RNA, 12 nt, Human T-lymphotropic virus 2
guggcucgcucc

SEQ ID NO: 2926278 - RNA, 15 nt, Human T-lymphotropic virus 2
ucgaacaccuucccc

SEQ ID NO: 2926279 - RNA, 13 nt, Human T-lymphotropic virus 2
guucuuuccucuu

SEQ ID NO: 2926280 - RNA, 12 nt, Human T-lymphotropic virus 2
acucccuuaucu

SEQ ID NO: 2926281 - RNA, 14 nt, Human T-lymphotropic virus 2
accauuccccagcc

SEQ ID NO: 2926282 - RNA, 15 nt, Human T-lymphotropic virus 2
ccauuccccagccau

SEQ ID NO: 2926283 - RNA, 23 nt, Human T-lymphotropic virus 2
acaaucccaaguaaaggcucuga

SEQ ID NO: 2926284 - RNA, 14 nt, Human T-lymphotropic virus 2
uuacccccugccca

SEQ ID NO: 2926285 - RNA, 22 nt, Human T-lymphotropic virus 2
ccucaaccccgcccuaccucuc

SEQ ID NO: 2926286 - RNA, 19 nt, Human T-lymphotropic virus 2
gauggcaaauccaccacag

SEQ ID NO: 2926287 - RNA, 21 nt, Human T-lymphotropic virus 2
cuaacccccuccacguccugg

SEQ ID NO: 2926288 - RNA, 18 nt, Human T-lymphotropic virus 2
aucccaacccuucccuug

SEQ ID NO: 2926289 - RNA, 16 nt, Human T-lymphotropic virus 2
cucgaacaccuucccc

SEQ ID NO: 2926290 - RNA, 19 nt, Human T-lymphotropic virus 2
cuguuggaucucccuucca

SEQ ID NO: 2926291 - RNA, 15 nt, Human T-lymphotropic virus 2
cugcccgcuccucca

SEQ ID NO: 2926292 - RNA, 18 nt, Human T-lymphotropic virus 2
aacuccauuauccucccc

SEQ ID NO: 2926293 - RNA, 14 nt, Human T-lymphotropic virus 2
cucacgcuccugca

SEQ ID NO: 2926294 - RNA, 19 nt, Human T-lymphotropic virus 2
gacgauuacccccugccca

SEQ ID NO: 2926295 - RNA, 10 nt, Human T-lymphotropic virus 2
cccucucccg

SEQ ID NO: 2926296 - RNA, 14 nt, Human T-lymphotropic virus 2
cauauucugccacc

SEQ ID NO: 2926297 - RNA, 21 nt, Human T-lymphotropic virus 2
uccuguuggaucucccuucca

SEQ ID NO: 2926298 - RNA, 20 nt, Human T-lymphotropic virus 2
accucgaccuuaauucccua

SEQ ID NO: 2926299 - RNA, 16 nt, Human T-lymphotropic virus 2
caggucgagcucggcu

SEQ ID NO: 2926300 - RNA, 18 nt, Human T-lymphotropic virus 2
cgagaagcccuccagaca

SEQ ID NO: 2926301 - RNA, 20 nt, Human T-lymphotropic virus 2
aaugaccuggucuccaaggc

SEQ ID NO: 2926302 - RNA, 18 nt, Human T-lymphotropic virus 2
ugucucccccaagguucc

SEQ ID NO: 2926303 - RNA, 14 nt, Human T-lymphotropic virus 2
ccucccaacccuuc

SEQ ID NO: 2926304 - RNA, 14 nt, Human T-lymphotropic virus 2
caucaaacccucca

SEQ ID NO: 2926305 - RNA, 15 nt, Human T-lymphotropic virus 2
cacccucaccucucc

SEQ ID NO: 2926306 - RNA, 20 nt, Human T-lymphotropic virus 2
aagcggccggggcagccuug

SEQ ID NO: 2926307 - RNA, 16 nt, Human T-lymphotropic virus 2
augccaagauccuucu

SEQ ID NO: 2926308 - RNA, 13 nt, Human T-lymphotropic virus 2
ccuccaccauguc

SEQ ID NO: 2926309 - RNA, 13 nt, Human T-lymphotropic virus 2
gacggcucccccc

SEQ ID NO: 2926310 - RNA, 21 nt, Human T-lymphotropic virus 2
cuaucacaagaauuccaggag

SEQ ID NO: 2926311 - RNA, 14 nt, Human T-lymphotropic virus 2
cuauaccucccaga

SEQ ID NO: 2926312 - RNA, 18 nt, Human T-lymphotropic virus 2
caggcuaauaaccccgcc

SEQ ID NO: 2926313 - RNA, 19 nt, Human T-lymphotropic virus 2
caaugcgaaagcacacccc

SEQ ID NO: 2926314 - RNA, 24 nt, Human T-lymphotropic virus 2
acucuacacccccaacaucuccau

SEQ ID NO: 2926315 - RNA, 21 nt, Human T-lymphotropic virus 2
cagggggcuaucaacccacca

SEQ ID NO: 2926316 - RNA, 16 nt, Human T-lymphotropic virus 2
ugacccauccacaguc

SEQ ID NO: 2926317 - RNA, 19 nt, Human T-lymphotropic virus 2
ucucccaccuuacccaggc

SEQ ID NO: 2926318 - RNA, 21 nt, Human T-lymphotropic virus 2
cccagccauguaacuauggcc

SEQ ID NO: 2926319 - RNA, 16 nt, Human T-lymphotropic virus 2
acaucuccauucccca

SEQ ID NO: 2926320 - RNA, 16 nt, Human T-lymphotropic virus 2
uggccccugcccccua

SEQ ID NO: 2926321 - RNA, 13 nt, Human T-lymphotropic virus 2
cugauccuaggcg

SEQ ID NO: 2926322 - RNA, 19 nt, Human T-lymphotropic virus 2
gcuuaacuuucuccaggcu

SEQ ID NO: 2926323 - RNA, 22 nt, Human T-lymphotropic virus 2
accacaugggucgauuccauaa

SEQ ID NO: 2926324 - RNA, 14 nt, Human T-lymphotropic virus 2
ccuccccuccuucc

SEQ ID NO: 2926325 - RNA, 16 nt, Human T-lymphotropic virus 2
agucuccucucagguc

SEQ ID NO: 2926326 - RNA, 14 nt, Human T-lymphotropic virus 2
ugauccuuuucccg

SEQ ID NO: 2926327 - RNA, 18 nt, Human T-lymphotropic virus 2
caaauccaggcccuucca

SEQ ID NO: 2926328 - RNA, 16 nt, Human T-lymphotropic virus 2
gccccaaggccuccac

SEQ ID NO: 2926329 - RNA, 14 nt, Human T-lymphotropic virus 2
caccuccccaagug

SEQ ID NO: 2926330 - RNA, 20 nt, Human T-lymphotropic virus 2
ccuccaguaccuaugcuccu

SEQ ID NO: 2926331 - RNA, 21 nt, Human T-lymphotropic virus 2
auccuccccccuuuuucccuc

SEQ ID NO: 2926332 - RNA, 20 nt, Human T-lymphotropic virus 2
ggcauccucauucaccacau

SEQ ID NO: 2926333 - RNA, 14 nt, Human T-lymphotropic virus 2
aaaacaaggcucug

SEQ ID NO: 2926334 - RNA, 20 nt, Human T-lymphotropic virus 2
aggaaggggaaccccuccug

SEQ ID NO: 2926335 - RNA, 15 nt, Human T-lymphotropic virus 2
gccacaccaaccucc

SEQ ID NO: 2926336 - RNA, 17 nt, Human T-lymphotropic virus 2
gacaaacaccucagccu

SEQ ID NO: 2926337 - RNA, 19 nt, Human T-lymphotropic virus 2
uguggacuacgugcugcca

SEQ ID NO: 2926338 - RNA, 22 nt, Human T-lymphotropic virus 2
gccuccaccaacuucuccccca

SEQ ID NO: 2926339 - RNA, 14 nt, Human T-lymphotropic virus 2
accauccucuuucc

SEQ ID NO: 2926340 - RNA, 13 nt, Human T-lymphotropic virus 2
cagcucuccagaa

SEQ ID NO: 2926341 - RNA, 15 nt, Human T-lymphotropic virus 2
auccuaggagagauc

SEQ ID NO: 2926342 - RNA, 23 nt, Human T-lymphotropic virus 2
gcgagucaucgacccaaaagguc

SEQ ID NO: 2926343 - RNA, 14 nt, Human T-lymphotropic virus 2
ucuauguuccaccc

SEQ ID NO: 2926344 - RNA, 23 nt, Human T-lymphotropic virus 2
cacucacgauugguaucuccucc

SEQ ID NO: 2926345 - RNA, 21 nt, Human T-lymphotropic virus 2
cuccaccaacuucucccccau

SEQ ID NO: 2926346 - RNA, 17 nt, Human T-lymphotropic virus 2
uacacccccccugcccu

SEQ ID NO: 2926347 - RNA, 16 nt, Human T-lymphotropic virus 2
cuggucuccaaggccc

SEQ ID NO: 2926348 - RNA, 19 nt, Human T-lymphotropic virus 2
ggcacgagaagcccuccag

SEQ ID NO: 2926349 - RNA, 13 nt, Human T-lymphotropic virus 2
cgccgcccucuug

SEQ ID NO: 2926350 - RNA, 16 nt, Human T-lymphotropic virus 2
ucgccuucaccauucc

SEQ ID NO: 2926351 - RNA, 18 nt, Human T-lymphotropic virus 2
ccacgacuccucaggcca

SEQ ID NO: 2926352 - RNA, 19 nt, Human T-lymphotropic virus 2
gcacgagaagcccuccaga

SEQ ID NO: 2926353 - RNA, 17 nt, Human T-lymphotropic virus 2
gcgacuagccucccgag

SEQ ID NO: 2926354 - RNA, 14 nt, Human T-lymphotropic virus 2
uggauaugauccuu

SEQ ID NO: 2926355 - RNA, 12 nt, Human T-lymphotropic virus 2
ccuuauccccaa

SEQ ID NO: 2926356 - RNA, 13 nt, Human T-lymphotropic virus 2
cgccggggccucu

SEQ ID NO: 2926357 - RNA, 20 nt, Human T-lymphotropic virus 2
ugaacauguccuaacccccu

SEQ ID NO: 2926358 - RNA, 16 nt, Human T-lymphotropic virus 2
gaacugcuccucccaa

SEQ ID NO: 2926359 - RNA, 14 nt, Human T-lymphotropic virus 2
cauaaccuucaccu

SEQ ID NO: 2926360 - RNA, 20 nt, Human T-lymphotropic virus 2
gaagucagccaagugucccu

SEQ ID NO: 2926361 - RNA, 12 nt, Human T-lymphotropic virus 2
cgccgucacuga

SEQ ID NO: 2926362 - RNA, 16 nt, Human T-lymphotropic virus 2
aacucuagacaaauau

SEQ ID NO: 2926363 - RNA, 23 nt, Human T-lymphotropic virus 2
gaggaauuacaacaacucuccca

SEQ ID NO: 2926364 - RNA, 21 nt, Human T-lymphotropic virus 2
gcguugucagcucuccucucc

SEQ ID NO: 2926365 - RNA, 18 nt, Human T-lymphotropic virus 2
ggcuuaacuuucuccagg

SEQ ID NO: 2926366 - RNA, 17 nt, Human T-lymphotropic virus 2
ucccgagccagccaccc

SEQ ID NO: 2926367 - RNA, 15 nt, Human T-lymphotropic virus 2
acaccaaccuccccg

SEQ ID NO: 2926368 - RNA, 19 nt, Human T-lymphotropic virus 2
cccccugcggcagcaacag

SEQ ID NO: 2926369 - RNA, 14 nt, Human T-lymphotropic virus 2
cccucgccuccccu

SEQ ID NO: 2926370 - RNA, 12 nt, Human T-lymphotropic virus 2
caaacccuccag

SEQ ID NO: 2926371 - RNA, 18 nt, Human T-lymphotropic virus 2
cuagggcuuccugaaccu

SEQ ID NO: 2926372 - RNA, 16 nt, Human T-lymphotropic virus 2
ugcuuucuccacccug

SEQ ID NO: 2926373 - RNA, 14 nt, Human T-lymphotropic virus 2
gacucgccucuccc

SEQ ID NO: 2926374 - RNA, 10 nt, Human T-lymphotropic virus 2
auccagccuc

SEQ ID NO: 2926375 - RNA, 17 nt, Human T-lymphotropic virus 2
ucagcucauaggcccug

SEQ ID NO: 2926376 - RNA, 19 nt, Human T-lymphotropic virus 2
ccccuguauccuccgccaa

SEQ ID NO: 2926377 - RNA, 22 nt, Human T-lymphotropic virus 2
acacauauucuugcccuuccga

SEQ ID NO: 2926378 - RNA, 14 nt, Human T-lymphotropic virus 2
agcgccuccaggcc

SEQ ID NO: 2926379 - RNA, 21 nt, Human T-lymphotropic virus 2
agucgggacuguacccagcca

SEQ ID NO: 2926380 - RNA, 22 nt, Human T-lymphotropic virus 2
ccagacaauuaggagccuuccu

SEQ ID NO: 2926381 - RNA, 15 nt, Human T-lymphotropic virus 2
ucagaccgucucaca

SEQ ID NO: 2926382 - RNA, 23 nt, Human T-lymphotropic virus 2
cgaaccuggccuccguccccaaa

SEQ ID NO: 2926383 - RNA, 16 nt, Human T-lymphotropic virus 2
cucaccgacccucugg

SEQ ID NO: 2926384 - RNA, 13 nt, Human T-lymphotropic virus 2
acuccccucaucc

SEQ ID NO: 2926385 - RNA, 20 nt, Human T-lymphotropic virus 2
ccaugucauauucugccacc

SEQ ID NO: 2926386 - RNA, 17 nt, Human T-lymphotropic virus 2
uggguagacaccuucuc

SEQ ID NO: 2926387 - RNA, 21 nt, Human T-lymphotropic virus 2
gcgcccccgccgccccaguuc

SEQ ID NO: 2926388 - RNA, 14 nt, Human T-lymphotropic virus 2
cagcaagggcuagg

SEQ ID NO: 2926389 - RNA, 13 nt, Human T-lymphotropic virus 2
cggcaccuccuga

SEQ ID NO: 2926390 - RNA, 17 nt, Human T-lymphotropic virus 2
ccucuccuuccccaggg

SEQ ID NO: 2926391 - RNA, 13 nt, Human T-lymphotropic virus 2
gaacugcuccucc

SEQ ID NO: 2926392 - RNA, 23 nt, Human T-lymphotropic virus 2
ccgaaccauccucuuuccuuccc

SEQ ID NO: 2926393 - RNA, 13 nt, Human T-lymphotropic virus 2
ugcccgcuccucc

SEQ ID NO: 2926394 - RNA, 17 nt, Human T-lymphotropic virus 2
auuuuccacuagcccag

SEQ ID NO: 2926395 - RNA, 21 nt, Human T-lymphotropic virus 2
agacucaccuuggggauccau

SEQ ID NO: 2926396 - RNA, 13 nt, Human T-lymphotropic virus 2
cccgcuccuccau

SEQ ID NO: 2926397 - RNA, 19 nt, Human T-lymphotropic virus 2
caccaucuuaacucuagac

SEQ ID NO: 2926398 - RNA, 14 nt, Human T-lymphotropic virus 2
augcccuccuggcc

SEQ ID NO: 2926399 - RNA, 16 nt, Human T-lymphotropic virus 2
caggcuacaaccccau

SEQ ID NO: 2926400 - RNA, 20 nt, Human T-lymphotropic virus 2
cccuucccuuggacccauug

SEQ ID NO: 2926401 - RNA, 16 nt, Human T-lymphotropic virus 2
uguccgcagccacacc

SEQ ID NO: 2926402 - RNA, 13 nt, Human T-lymphotropic virus 2
uccuggccaccug

SEQ ID NO: 2926403 - RNA, 16 nt, Human T-lymphotropic virus 2
cccauugguccaugac

SEQ ID NO: 2926404 - RNA, 22 nt, Human T-lymphotropic virus 2
ggguacccccaaagagcccauc

SEQ ID NO: 2926405 - RNA, 19 nt, Human T-lymphotropic virus 2
aaaccugagcgccuccagg

SEQ ID NO: 2926406 - RNA, 15 nt, Human T-lymphotropic virus 2
uaaaggaacacccau

SEQ ID NO: 2926407 - RNA, 16 nt, Human T-lymphotropic virus 2
cacaacaaaccccagg

SEQ ID NO: 2926408 - RNA, 15 nt, Human T-lymphotropic virus 2
ccucuaccccuccca

SEQ ID NO: 2926409 - RNA, 22 nt, Human T-lymphotropic virus 2
auccuacaggggcuggaggaac

SEQ ID NO: 2926410 - RNA, 18 nt, Human T-lymphotropic virus 2
acccaauuuccaccuuca

SEQ ID NO: 2926411 - RNA, 23 nt, Human T-lymphotropic virus 2
cuccaggcggccuugccaccccu

SEQ ID NO: 2926412 - RNA, 13 nt, Human T-lymphotropic virus 2
cccacacagcccu

SEQ ID NO: 2926413 - RNA, 12 nt, Human T-lymphotropic virus 2
ucuuggcaggcg

SEQ ID NO: 2926414 - RNA, 21 nt, Human T-lymphotropic virus 2
ugccccuuagguagucgcucc

SEQ ID NO: 2926415 - RNA, 18 nt, Human T-lymphotropic virus 2
cuaguagaugccccugga

SEQ ID NO: 2926416 - RNA, 20 nt, Human T-lymphotropic virus 2
caaagccuuccaucccuccu

SEQ ID NO: 2926417 - RNA, 13 nt, Human T-lymphotropic virus 2
accacccucaccu

SEQ ID NO: 2926418 - RNA, 23 nt, Human T-lymphotropic virus 2
cuccaauacccaaagcccccagg

SEQ ID NO: 2926419 - RNA, 15 nt, Human T-lymphotropic virus 2
ugcccaaccacauau

SEQ ID NO: 2926420 - RNA, 16 nt, Human T-lymphotropic virus 2
ugaaccauacucagga

SEQ ID NO: 2926421 - RNA, 12 nt, Human T-lymphotropic virus 2
uuucacccucuc

SEQ ID NO: 2926422 - RNA, 21 nt, Human T-lymphotropic virus 2
accuuccccuagacaaugcca

SEQ ID NO: 2926423 - RNA, 14 nt, Human T-lymphotropic virus 2
acagcccugcuuuc

SEQ ID NO: 2926424 - RNA, 13 nt, Human T-lymphotropic virus 2
ccuucaccauucc

SEQ ID NO: 2926425 - RNA, 16 nt, Human T-lymphotropic virus 2
caucccgaucaagaca

SEQ ID NO: 2926426 - RNA, 17 nt, Human T-lymphotropic virus 2
uacacacagggacaguc

SEQ ID NO: 2926427 - RNA, 21 nt, Human T-lymphotropic virus 2
cucucuuacaccucccaaccc

SEQ ID NO: 2926428 - RNA, 16 nt, Human T-lymphotropic virus 2
gcaagggcuagggcuu

SEQ ID NO: 2926429 - RNA, 16 nt, Human T-lymphotropic virus 2
cccucccucgccuucc

SEQ ID NO: 2926430 - RNA, 13 nt, Human T-lymphotropic virus 2
ggccagccuuccu

SEQ ID NO: 2926431 - RNA, 13 nt, Human T-lymphotropic virus 2
acaucacuccccu

SEQ ID NO: 2926432 - RNA, 21 nt, Human T-lymphotropic virus 2
accccucccaaaccaccuccc

SEQ ID NO: 2926433 - RNA, 13 nt, Human T-lymphotropic virus 2
acucaccugggac

SEQ ID NO: 2926434 - RNA, 14 nt, Human T-lymphotropic virus 2
ccccagcccccacc

SEQ ID NO: 2926435 - RNA, 16 nt, Human T-lymphotropic virus 2
cacucagccuccacca

SEQ ID NO: 2926436 - RNA, 21 nt, Human T-lymphotropic virus 2
cccaggauuuggacagagccu

SEQ ID NO: 2926437 - RNA, 22 nt, Human T-lymphotropic virus 2
auucgaaaccaaagccuuccau

SEQ ID NO: 2926438 - RNA, 13 nt, Human T-lymphotropic virus 2
aauguugcuuccu

SEQ ID NO: 2926439 - RNA, 16 nt, Human T-lymphotropic virus 2
ccuucccccaccuccc

SEQ ID NO: 2926440 - RNA, 22 nt, Human T-lymphotropic virus 2
cacgggcuuuccccaacuccaa

SEQ ID NO: 2926441 - RNA, 20 nt, Human T-lymphotropic virus 2
cucucccagcuaacccucca

SEQ ID NO: 2926442 - RNA, 16 nt, Human T-lymphotropic virus 2
gcgcucggcuagacuc

SEQ ID NO: 2926443 - RNA, 23 nt, Human T-lymphotropic virus 2
ccuccuguuggaucucccuucca

SEQ ID NO: 2926444 - RNA, 13 nt, Human T-lymphotropic virus 2
gaccccagccccc

SEQ ID NO: 2926445 - RNA, 16 nt, Human T-lymphotropic virus 2
ugcaaucccuccagga

SEQ ID NO: 2926446 - RNA, 20 nt, Human T-lymphotropic virus 2
caggaacggcccccucuuga

SEQ ID NO: 2926447 - RNA, 17 nt, Human T-lymphotropic virus 2
gaaaccaaagccuucca

SEQ ID NO: 2926448 - RNA, 20 nt, Human T-lymphotropic virus 2
gcuuauacaauacuccuccu

SEQ ID NO: 2926449 - RNA, 18 nt, Human T-lymphotropic virus 2
uauacaauacuccuccuu

SEQ ID NO: 2926450 - RNA, 17 nt, Human T-lymphotropic virus 2
acccuuacccacuuccc

SEQ ID NO: 2926451 - RNA, 23 nt, Human T-lymphotropic virus 2
ccagccauacuucgccuucacca

SEQ ID NO: 2926452 - RNA, 17 nt, Human T-lymphotropic virus 2
ugacaacggccuccccg

SEQ ID NO: 2926453 - RNA, 17 nt, Human T-lymphotropic virus 2
gccccgucuccagucca

SEQ ID NO: 2926454 - RNA, 14 nt, Human T-lymphotropic virus 2
ggaacccaccacca

SEQ ID NO: 2926455 - RNA, 17 nt, Human T-lymphotropic virus 2
accccuacuauucccau

SEQ ID NO: 2926456 - RNA, 21 nt, Human T-lymphotropic virus 2
accucuccuuccccagggccc

SEQ ID NO: 2926457 - RNA, 20 nt, Human T-lymphotropic virus 2
auuacaauccugucuccucu

SEQ ID NO: 2926458 - RNA, 20 nt, Human T-lymphotropic virus 2
gaaaccaaagccuuccaucc

SEQ ID NO: 2926459 - RNA, 20 nt, Human T-lymphotropic virus 2
accuuuugcuguccuucucg

SEQ ID NO: 2926460 - RNA, 13 nt, Human T-lymphotropic virus 2
caguaccagccau

SEQ ID NO: 2926461 - RNA, 14 nt, Human T-lymphotropic virus 2
caauccugucuccu

SEQ ID NO: 2926462 - RNA, 22 nt, Human T-lymphotropic virus 2
aacugccguggccgccucaacc

SEQ ID NO: 2926463 - RNA, 21 nt, Human T-lymphotropic virus 2
cgccuacaucgacaugcccuc

SEQ ID NO: 2926464 - RNA, 14 nt, Human T-lymphotropic virus 2
ucuuuccuucccuu

SEQ ID NO: 2926465 - RNA, 20 nt, Human T-lymphotropic virus 2
cacccaguucaaacuccucc

SEQ ID NO: 2926466 - RNA, 20 nt, Human T-lymphotropic virus 2
cagacacucgugcccgggcc

SEQ ID NO: 2926467 - RNA, 15 nt, Human T-lymphotropic virus 2
ccguggccgccucaa

SEQ ID NO: 2926468 - RNA, 12 nt, Human T-lymphotropic virus 2
accacuccagcc

SEQ ID NO: 2926469 - RNA, 17 nt, Human T-lymphotropic virus 2
ugaccuaagagccacca

SEQ ID NO: 2926470 - RNA, 16 nt, Human T-lymphotropic virus 2
aacuccccucauccaa

SEQ ID NO: 2926471 - RNA, 22 nt, Human T-lymphotropic virus 2
caugaggaaaauguuucccaca

SEQ ID NO: 2926472 - RNA, 17 nt, Human T-lymphotropic virus 2
ccagaugagucgccccc

SEQ ID NO: 2926473 - RNA, 15 nt, Human T-lymphotropic virus 2
gaggucagcuccucu

SEQ ID NO: 2926474 - RNA, 21 nt, Human T-lymphotropic virus 2
gccuuuuuuccgauggcuccc

SEQ ID NO: 2926475 - RNA, 19 nt, Human T-lymphotropic virus 2
gggcuuccugaaccucucc

SEQ ID NO: 2926476 - RNA, 17 nt, Human T-lymphotropic virus 2
aacaggaacagcucucc

SEQ ID NO: 2926477 - RNA, 12 nt, Human T-lymphotropic virus 2
cuaacccuccag

SEQ ID NO: 2926478 - RNA, 22 nt, Human T-lymphotropic virus 2
cauuccccaacaaaccuccucc

SEQ ID NO: 2926479 - RNA, 21 nt, Human T-lymphotropic virus 2
guugacaaagacaucucccac

SEQ ID NO: 2926480 - RNA, 16 nt, Human T-lymphotropic virus 2
agccucuaccccuccc

SEQ ID NO: 2926481 - RNA, 18 nt, Human T-lymphotropic virus 2
accccagacacucgugcc

SEQ ID NO: 2926482 - RNA, 15 nt, Human T-lymphotropic virus 2
aagguaagucuccuc

SEQ ID NO: 2926483 - RNA, 15 nt, Human T-lymphotropic virus 2
ucuuacaccucccaa

SEQ ID NO: 2926484 - RNA, 14 nt, Human T-lymphotropic virus 2
uccccggccuuacc

SEQ ID NO: 2926485 - RNA, 20 nt, Human T-lymphotropic virus 2
uuuccaaaucccccucccca

SEQ ID NO: 2926486 - RNA, 12 nt, Human T-lymphotropic virus 2
uggcgccacacc

SEQ ID NO: 2926487 - RNA, 20 nt, Human T-lymphotropic virus 2
aacccaucaaaacccaggag

SEQ ID NO: 2926488 - RNA, 21 nt, Human T-lymphotropic virus 2
uacauaugagaguaccccuac

SEQ ID NO: 2926489 - RNA, 14 nt, Human T-lymphotropic virus 2
ucaaacuccuccaa

SEQ ID NO: 2926490 - RNA, 18 nt, Human T-lymphotropic virus 2
gaucucccuuccaccuca

SEQ ID NO: 2926491 - RNA, 15 nt, Human T-lymphotropic virus 2
ccuaacccccuccac

SEQ ID NO: 2926492 - RNA, 16 nt, Human T-lymphotropic virus 2
caagguaagucuccuc

SEQ ID NO: 2926493 - RNA, 13 nt, Human T-lymphotropic virus 2
caugcccaagacc

SEQ ID NO: 2926494 - RNA, 13 nt, Human T-lymphotropic virus 2
acacuaacagccc

SEQ ID NO: 2926495 - RNA, 14 nt, Human T-lymphotropic virus 2
ccugagcgccucca

SEQ ID NO: 2926496 - RNA, 23 nt, Human T-lymphotropic virus 2
uccccaaaacaucuacaccaccu

SEQ ID NO: 2926497 - RNA, 12 nt, Human T-lymphotropic virus 2
ucccccaccucc

SEQ ID NO: 2926498 - RNA, 16 nt, Human T-lymphotropic virus 2
caguucaaacuccucc

SEQ ID NO: 2926499 - RNA, 14 nt, Human T-lymphotropic virus 2
agacucgccucucc

SEQ ID NO: 2926500 - RNA, 13 nt, Human T-lymphotropic virus 2
acccauauaccau

SEQ ID NO: 2926501 - RNA, 21 nt, Human T-lymphotropic virus 2
aagcaagucacaaaacccauc

SEQ ID NO: 2926502 - RNA, 22 nt, Human T-lymphotropic virus 2
accauucucgcucuacuccucc

SEQ ID NO: 2926503 - RNA, 19 nt, Human T-lymphotropic virus 2
gcuagccuuauccccaagg

SEQ ID NO: 2926504 - RNA, 14 nt, Human T-lymphotropic virus 2
auaccccagacacu

SEQ ID NO: 2926505 - RNA, 17 nt, Human T-lymphotropic virus 2
uccucucagcccauuuc

SEQ ID NO: 2926506 - RNA, 19 nt, Human T-lymphotropic virus 2
ugaagccucuaccccuccc

SEQ ID NO: 2926507 - RNA, 23 nt, Human T-lymphotropic virus 2
ccccagggggcuaucaacccacc

SEQ ID NO: 2926508 - RNA, 13 nt, Human T-lymphotropic virus 2
caaacccuccagg

SEQ ID NO: 2926509 - RNA, 13 nt, Human T-lymphotropic virus 2
ccaacaucccugu

SEQ ID NO: 2926510 - RNA, 15 nt, Human T-lymphotropic virus 2
aucaagucuccccua

SEQ ID NO: 2926511 - RNA, 19 nt, Human T-lymphotropic virus 2
cuccguuaugggacaaaca

SEQ ID NO: 2926512 - RNA, 13 nt, Human T-lymphotropic virus 2
aacccuucccuug

SEQ ID NO: 2926513 - RNA, 18 nt, Human T-lymphotropic virus 2
cuauaccuauaccagcuu

SEQ ID NO: 2926514 - RNA, 14 nt, Human T-lymphotropic virus 2
uguccuaaccuucc

SEQ ID NO: 2926515 - RNA, 17 nt, Human T-lymphotropic virus 2
gucacggagacucaccu

SEQ ID NO: 2926516 - RNA, 13 nt, Human T-lymphotropic virus 2
cuuuuccccuuca

SEQ ID NO: 2926517 - RNA, 15 nt, Human T-lymphotropic virus 2
cuccacaccccccac

SEQ ID NO: 2926518 - RNA, 22 nt, Human T-lymphotropic virus 2
uuccugaggaacuccccucauc

SEQ ID NO: 2926519 - RNA, 22 nt, Human T-lymphotropic virus 2
aaagcugcaugcccaagaccag

SEQ ID NO: 2926520 - RNA, 20 nt, Human T-lymphotropic virus 2
ggcucugacgucucccccuu

SEQ ID NO: 2926521 - RNA, 17 nt, Human T-lymphotropic virus 2
auuccauaaccuuggca

SEQ ID NO: 2926522 - RNA, 20 nt, Human T-lymphotropic virus 2
uccgcccaucaaacccucca

SEQ ID NO: 2926523 - RNA, 23 nt, Human T-lymphotropic virus 2
cgccuacaucgacaugcccuccu

SEQ ID NO: 2926524 - RNA, 16 nt, Human T-lymphotropic virus 2
acuaccacccucaccu

SEQ ID NO: 2926525 - RNA, 15 nt, Human T-lymphotropic virus 2
cagacucgccucucc

SEQ ID NO: 2926526 - RNA, 21 nt, Human T-lymphotropic virus 2
gcccccuuggggagaugcucc

SEQ ID NO: 2926527 - RNA, 16 nt, Human T-lymphotropic virus 2
uccaugacuccgaccu

SEQ ID NO: 2926528 - RNA, 20 nt, Human T-lymphotropic virus 2
caggagguggcucgcucccu

SEQ ID NO: 2926529 - RNA, 17 nt, Human T-lymphotropic virus 2
uuccacuagcccagcag

SEQ ID NO: 2926530 - RNA, 16 nt, Human T-lymphotropic virus 2
guuccaacccgugagg

SEQ ID NO: 2926531 - RNA, 15 nt, Human T-lymphotropic virus 2
uacuccuccuuccau

SEQ ID NO: 2926532 - RNA, 23 nt, Human T-lymphotropic virus 2
cacuggcuuaacuuucuccaggc

SEQ ID NO: 2926533 - RNA, 17 nt, Human T-lymphotropic virus 2
cuccuccuaccacucca

SEQ ID NO: 2926534 - RNA, 21 nt, Human T-lymphotropic virus 2
acuccgaccuugaacaugucc

SEQ ID NO: 2926535 - RNA, 12 nt, Human T-lymphotropic virus 2
ccuggccaccug

SEQ ID NO: 2926536 - RNA, 15 nt, Human T-lymphotropic virus 2
acccacucagccucc

SEQ ID NO: 2926537 - RNA, 16 nt, Human T-lymphotropic virus 2
gacgaccccagccccc

SEQ ID NO: 2926538 - RNA, 16 nt, Human T-lymphotropic virus 2
cuucuauaccucccag

SEQ ID NO: 2926539 - RNA, 18 nt, Human T-lymphotropic virus 2
cuccacaccccccacccu

SEQ ID NO: 2926540 - RNA, 14 nt, Human T-lymphotropic virus 2
ccgauggcuccccu

SEQ ID NO: 2926541 - RNA, 17 nt, Human T-lymphotropic virus 2
ccuugacaacggccucc

SEQ ID NO: 2926542 - RNA, 16 nt, Human T-lymphotropic virus 2
agccuaggcccuccga

SEQ ID NO: 2926543 - RNA, 13 nt, Human T-lymphotropic virus 2
auagaccucaccc

SEQ ID NO: 2926544 - RNA, 21 nt, Human T-lymphotropic virus 2
ccccaaagcagggcagccauc

SEQ ID NO: 2926545 - RNA, 23 nt, Human T-lymphotropic virus 2
augccuuucuucccucucccggc

SEQ ID NO: 2926546 - RNA, 18 nt, Human T-lymphotropic virus 2
ccaccaauugcugccaau

SEQ ID NO: 2926547 - RNA, 15 nt, Human T-lymphotropic virus 2
gcagcaacagcaacc

SEQ ID NO: 2926548 - RNA, 22 nt, Human T-lymphotropic virus 2
uucaacaggacaucacuccccu

SEQ ID NO: 2926549 - RNA, 12 nt, Human T-lymphotropic virus 2
cugucuccccca

SEQ ID NO: 2926550 - RNA, 22 nt, Human T-lymphotropic virus 2
uuucccacaucgaccauugucc

SEQ ID NO: 2926551 - RNA, 19 nt, Human T-lymphotropic virus 2
cucuacacccccaacaucu

SEQ ID NO: 2926552 - RNA, 18 nt, Human T-lymphotropic virus 2
cugaaaaacaaggcucug

SEQ ID NO: 2926553 - RNA, 13 nt, Human T-lymphotropic virus 2
uaacuuucuccag

SEQ ID NO: 2926554 - RNA, 18 nt, Human T-lymphotropic virus 2
ccacuuauaccccauguc

SEQ ID NO: 2926555 - RNA, 13 nt, Human T-lymphotropic virus 2
cuccucucagguc

SEQ ID NO: 2926556 - RNA, 17 nt, Human T-lymphotropic virus 2
accuuaucccucgccuc

SEQ ID NO: 2926557 - RNA, 17 nt, Human T-lymphotropic virus 2
ccgcccuaggagcauug

SEQ ID NO: 2926558 - RNA, 16 nt, Human T-lymphotropic virus 2
ccccauggcagggccc

SEQ ID NO: 2926559 - RNA, 15 nt, Human T-lymphotropic virus 2
caggcaauaaccccg

SEQ ID NO: 2926560 - RNA, 19 nt, Human T-lymphotropic virus 2
uuccugaggaacuccccuc

SEQ ID NO: 2926561 - RNA, 14 nt, Human T-lymphotropic virus 2
gucccgucucaggu

SEQ ID NO: 2926562 - RNA, 15 nt, Human T-lymphotropic virus 2
cagccacgccccccu

SEQ ID NO: 2926563 - RNA, 16 nt, Human T-lymphotropic virus 2
auucgaaaccaaagcc

SEQ ID NO: 2926564 - RNA, 21 nt, Human T-lymphotropic virus 2
agguccuuaccccucccacca

SEQ ID NO: 2926565 - RNA, 16 nt, Human T-lymphotropic virus 2
ccaacauacgccgugg

SEQ ID NO: 2926566 - RNA, 20 nt, Human T-lymphotropic virus 2
augggacaaacaccucagcc

SEQ ID NO: 2926567 - RNA, 20 nt, Human T-lymphotropic virus 2
acauacuuuuagccagcccc

SEQ ID NO: 2926568 - RNA, 13 nt, Human T-lymphotropic virus 2
uaaaggcucugac

SEQ ID NO: 2926569 - RNA, 15 nt, Human T-lymphotropic virus 2
ugcaaucccuccagg

SEQ ID NO: 2926570 - RNA, 22 nt, Human T-lymphotropic virus 2
caagagcuuguaucacccucac

SEQ ID NO: 2926571 - RNA, 20 nt, Human T-lymphotropic virus 2
cuccauagacggcucccccc

SEQ ID NO: 2926572 - RNA, 21 nt, Human T-lymphotropic virus 2
ugaacauguccuaacccccuc

SEQ ID NO: 2926573 - RNA, 20 nt, Human T-lymphotropic virus 2
cucccuuaucuuagcucccc

SEQ ID NO: 2926574 - RNA, 23 nt, Human T-lymphotropic virus 2
agacaauuaggagccuuccucac

SEQ ID NO: 2926575 - RNA, 18 nt, Human T-lymphotropic virus 2
uggcauguacucuacacc

SEQ ID NO: 2926576 - RNA, 14 nt, Human T-lymphotropic virus 2
aauagaccucaccc

SEQ ID NO: 2926577 - RNA, 17 nt, Human T-lymphotropic virus 2
cugcacguggaaccucg

SEQ ID NO: 2926578 - RNA, 15 nt, Human T-lymphotropic virus 2
gccauuacuaccacc

SEQ ID NO: 2926579 - RNA, 17 nt, Human T-lymphotropic virus 2
ucccucgccuccccucc

SEQ ID NO: 2926580 - RNA, 17 nt, Human T-lymphotropic virus 2
cagccuccaccaacuuc

SEQ ID NO: 2926581 - RNA, 12 nt, Human T-lymphotropic virus 2
acggccuccccg

SEQ ID NO: 2926582 - RNA, 19 nt, Human T-lymphotropic virus 2
cauugcuaccaaccucgcc

SEQ ID NO: 2926583 - RNA, 21 nt, Human T-lymphotropic virus 2
gcaaucuccuaaaauagucua

SEQ ID NO: 2926584 - RNA, 21 nt, Human T-lymphotropic virus 2
ucgaacaccuucccccaccuc

SEQ ID NO: 2926585 - RNA, 12 nt, Human T-lymphotropic virus 2
uccccucaucca

SEQ ID NO: 2926586 - RNA, 20 nt, Human T-lymphotropic virus 2
cucaccgacccucuggucac

SEQ ID NO: 2926587 - RNA, 17 nt, Human T-lymphotropic virus 2
acccaguucaaacuccu

SEQ ID NO: 2926588 - RNA, 17 nt, Human T-lymphotropic virus 2
ccaucuuaacucuagac

SEQ ID NO: 2926589 - RNA, 16 nt, Human T-lymphotropic virus 2
uacaccaucagcagcu

SEQ ID NO: 2926590 - RNA, 22 nt, Human T-lymphotropic virus 2
ucccccuaccauugacccaucc

SEQ ID NO: 2926591 - RNA, 18 nt, Human T-lymphotropic virus 2
ccacccugccaggcaaua

SEQ ID NO: 2926592 - RNA, 18 nt, Human T-lymphotropic virus 2
uaauaaccccgcccagca

SEQ ID NO: 2926593 - RNA, 16 nt, Human T-lymphotropic virus 2
cucccguaccuccucc

SEQ ID NO: 2926594 - RNA, 18 nt, Human T-lymphotropic virus 2
acuccaauacccaaagcc

SEQ ID NO: 2926595 - RNA, 21 nt, Human T-lymphotropic virus 2
uccggcccuuaccccaaagca

SEQ ID NO: 2926596 - RNA, 20 nt, Human T-lymphotropic virus 2
accucccagacgaccccagc

SEQ ID NO: 2926597 - RNA, 15 nt, Human T-lymphotropic virus 2
aaaccaucaacucac

SEQ ID NO: 2926598 - RNA, 21 nt, Human T-lymphotropic virus 2
gaugccuuucuucccucuccc

SEQ ID NO: 2926599 - RNA, 15 nt, Human T-lymphotropic virus 2
aacugcaacaacucc

SEQ ID NO: 2926600 - RNA, 19 nt, Human T-lymphotropic virus 2
uuauacaauacuccuccuu

SEQ ID NO: 2926601 - RNA, 22 nt, Human T-lymphotropic virus 2
cucauguauccguccuccagga

SEQ ID NO: 2926602 - RNA, 22 nt, Human T-lymphotropic virus 2
ggucaccuacuggccugcacca

SEQ ID NO: 2926603 - RNA, 17 nt, Human T-lymphotropic virus 2
ugacccauccacagucc

SEQ ID NO: 2926604 - RNA, 21 nt, Human T-lymphotropic virus 2
gccccuggcuuggcuccacac

SEQ ID NO: 2926605 - RNA, 11 nt, Human T-lymphotropic virus 2
cgccgucacug

SEQ ID NO: 2926606 - RNA, 13 nt, Human T-lymphotropic virus 2
ucccggggaagac

SEQ ID NO: 2926607 - RNA, 16 nt, Human T-lymphotropic virus 2
uggcuccacacccccc

SEQ ID NO: 2926608 - RNA, 13 nt, Human T-lymphotropic virus 2
accccagccccca

SEQ ID NO: 2926609 - RNA, 22 nt, Human T-lymphotropic virus 2
cagacuauccuucaacaggaca

SEQ ID NO: 2926610 - RNA, 13 nt, Human T-lymphotropic virus 2
cugucuccucuca

SEQ ID NO: 2926611 - RNA, 15 nt, Human T-lymphotropic virus 2
cuaccucuccuuggc

SEQ ID NO: 2926612 - RNA, 22 nt, Human T-lymphotropic virus 2
acugcugaugccuuucuucccu

SEQ ID NO: 2926613 - RNA, 16 nt, Human T-lymphotropic virus 2
cagcucuccucuccaa

SEQ ID NO: 2926614 - RNA, 12 nt, Human T-lymphotropic virus 2
ccaccaaugcca

SEQ ID NO: 2926615 - RNA, 19 nt, Human T-lymphotropic virus 2
gcuccccucaaaaggcagc

SEQ ID NO: 2926616 - RNA, 22 nt, Human T-lymphotropic virus 2
cccaagagcuuguaucacccuc

SEQ ID NO: 2926617 - RNA, 21 nt, Human T-lymphotropic virus 2
caucucccaccuuacccaggc

SEQ ID NO: 2926618 - RNA, 16 nt, Human T-lymphotropic virus 2
uccgccaacagucucc

SEQ ID NO: 2926619 - RNA, 22 nt, Human T-lymphotropic virus 2
agcgccuuaacguggcccuuga

SEQ ID NO: 2926620 - RNA, 13 nt, Human T-lymphotropic virus 2
uaccacccucacc

SEQ ID NO: 2926621 - RNA, 14 nt, Human T-lymphotropic virus 2
gagguggcucgcuc

SEQ ID NO: 2926622 - RNA, 19 nt, Human T-lymphotropic virus 2
ccuccuagggaaaccacuc

SEQ ID NO: 2926623 - RNA, 20 nt, Human T-lymphotropic virus 2
acccuccaggcggccuugcc

SEQ ID NO: 2926624 - RNA, 23 nt, Human T-lymphotropic virus 2
gccuacaucgacaugcccuccug

SEQ ID NO: 2926625 - RNA, 18 nt, Human T-lymphotropic virus 2
cgggacuguacccagcca

SEQ ID NO: 2926626 - RNA, 17 nt, Human T-lymphotropic virus 2
agcagcuuaacacacua

SEQ ID NO: 2926627 - RNA, 14 nt, Human T-lymphotropic virus 2
ccuaggagcauugu

SEQ ID NO: 2926628 - RNA, 22 nt, Human T-lymphotropic virus 2
acuacugaggaaaaaaacuccu

SEQ ID NO: 2926629 - RNA, 14 nt, Human T-lymphotropic virus 2
ucuccauuccccaa

SEQ ID NO: 2926630 - RNA, 19 nt, Human T-lymphotropic virus 2
acgaggauuagaccuccua

SEQ ID NO: 2926631 - RNA, 20 nt, Human T-lymphotropic virus 2
caccaagggaagccaagucc

SEQ ID NO: 2926632 - RNA, 19 nt, Human T-lymphotropic virus 2
uagccuaccgacagccuua

SEQ ID NO: 2926633 - RNA, 14 nt, Human T-lymphotropic virus 2
caaaccaccuccca

SEQ ID NO: 2926634 - RNA, 21 nt, Human T-lymphotropic virus 2
uccauaaccuucaccuucuau

SEQ ID NO: 2926635 - RNA, 21 nt, Human T-lymphotropic virus 2
cgcucccguaccuccuccggc

SEQ ID NO: 2926636 - RNA, 13 nt, Human T-lymphotropic virus 2
agagcaccaacuc

SEQ ID NO: 2926637 - RNA, 12 nt, Human T-lymphotropic virus 2
ccgucucaggug

SEQ ID NO: 2926638 - RNA, 17 nt, Human T-lymphotropic virus 2
gcgcagcaagggcuagg

SEQ ID NO: 2926639 - RNA, 21 nt, Human T-lymphotropic virus 2
accccuccuguuggaucuccc

SEQ ID NO: 2926640 - RNA, 19 nt, Human T-lymphotropic virus 2
gcucggcuagacucugccu

SEQ ID NO: 2926641 - RNA, 19 nt, Human T-lymphotropic virus 2
cauuccugaagccucuacc

SEQ ID NO: 2926642 - RNA, 15 nt, Human T-lymphotropic virus 2
ccccucccaccacuc

SEQ ID NO: 2926643 - RNA, 20 nt, Human T-lymphotropic virus 2
auccugucuccucucagccc

SEQ ID NO: 2926644 - RNA, 13 nt, Human T-lymphotropic virus 2
cacccccccugcc

SEQ ID NO: 2926645 - RNA, 22 nt, Human T-lymphotropic virus 2
accacggcccugacgucccucc

SEQ ID NO: 2926646 - RNA, 16 nt, Human T-lymphotropic virus 2
acgccgcccucuuggc

SEQ ID NO: 2926647 - RNA, 21 nt, Human T-lymphotropic virus 2
ucaagcaggaggucagcuccu

SEQ ID NO: 2926648 - RNA, 14 nt, Human T-lymphotropic virus 2
uuccaccucaggca

SEQ ID NO: 2926649 - RNA, 16 nt, Human T-lymphotropic virus 2
caagucuccccuagcg

SEQ ID NO: 2926650 - RNA, 23 nt, Human T-lymphotropic virus 2
acccauauaccauacaaccccac

SEQ ID NO: 2926651 - RNA, 19 nt, Human T-lymphotropic virus 2
ucacauugaaccauacuca

SEQ ID NO: 2926652 - RNA, 22 nt, Human T-lymphotropic virus 2
aaggcagcguacguucucuggg

SEQ ID NO: 2926653 - RNA, 19 nt, Human T-lymphotropic virus 2
acccuuacccacuuccccu

SEQ ID NO: 2926654 - RNA, 16 nt, Human T-lymphotropic virus 2
gaaccacgacuccuca

SEQ ID NO: 2926655 - RNA, 22 nt, Human T-lymphotropic virus 2
cgugcuugacacggcccccugc

SEQ ID NO: 2926656 - RNA, 11 nt, Human T-lymphotropic virus 2
aagacaaacaa

SEQ ID NO: 2926657 - RNA, 14 nt, Human T-lymphotropic virus 2
ugaaccucuccggg

SEQ ID NO: 2926658 - RNA, 13 nt, Human T-lymphotropic virus 2
cugcccgcuccuc

SEQ ID NO: 2926659 - RNA, 15 nt, Human T-lymphotropic virus 2
ccccaacaaaccucc

SEQ ID NO: 2926660 - RNA, 23 nt, Human T-lymphotropic virus 2
aucagcuccccucccucgccuuc

SEQ ID NO: 2926661 - RNA, 21 nt, Human T-lymphotropic virus 2
uacaucccccaggagcccccu

SEQ ID NO: 2926662 - RNA, 19 nt, Human T-lymphotropic virus 2
cccucggggaucagcuccc

SEQ ID NO: 2926663 - RNA, 17 nt, Human T-lymphotropic virus 2
cacgccgcaacagacca

SEQ ID NO: 2926664 - RNA, 11 nt, Human T-lymphotropic virus 2
auccagccucu

SEQ ID NO: 2926665 - RNA, 19 nt, Human T-lymphotropic virus 2
cucccgagccagccaccca

SEQ ID NO: 2926666 - RNA, 21 nt, Human T-lymphotropic virus 2
ggggccucuugcccaaccaca

SEQ ID NO: 2926667 - RNA, 14 nt, Human T-lymphotropic virus 2
gucucccccaaggu

SEQ ID NO: 2926668 - RNA, 23 nt, Human T-lymphotropic virus 2
cucacuggaaaagggacugccca

SEQ ID NO: 2926669 - RNA, 14 nt, Human T-lymphotropic virus 2
cacccucucccccg

SEQ ID NO: 2926670 - RNA, 21 nt, Human T-lymphotropic virus 2
ccggccucggcaccuccugaa

SEQ ID NO: 2926671 - RNA, 13 nt, Human T-lymphotropic virus 2
gugagggcucccu

SEQ ID NO: 2926672 - RNA, 16 nt, Human T-lymphotropic virus 2
cucccgcugcuccucc

SEQ ID NO: 2926673 - RNA, 18 nt, Human T-lymphotropic virus 2
aggucagaccgucucaca

SEQ ID NO: 2926674 - RNA, 13 nt, Human T-lymphotropic virus 2
ccuaucucuggcu

SEQ ID NO: 2926675 - RNA, 20 nt, Human T-lymphotropic virus 2
uccccaacaaaccuccuccc

SEQ ID NO: 2926676 - RNA, 13 nt, Human T-lymphotropic virus 2
accccucccacca

SEQ ID NO: 2926677 - RNA, 13 nt, Human T-lymphotropic virus 2
agccuaggcccuc

SEQ ID NO: 2926678 - RNA, 22 nt, Human T-lymphotropic virus 2
cgaacaacaauuagcagccguc

SEQ ID NO: 2926679 - RNA, 21 nt, Human T-lymphotropic virus 2
agccuaccgacagccuuaccc

SEQ ID NO: 2926680 - RNA, 20 nt, Human T-lymphotropic virus 2
uacaccucccaacccuucuc

SEQ ID NO: 2926681 - RNA, 13 nt, Human T-lymphotropic virus 2
ugagcgccuccag

SEQ ID NO: 2926682 - RNA, 17 nt, Human T-lymphotropic virus 2
accuucccccaccuccc

SEQ ID NO: 2926683 - RNA, 15 nt, Human T-lymphotropic virus 2
cuccacccugccagg

SEQ ID NO: 2926684 - RNA, 17 nt, Human T-lymphotropic virus 2
cgucucccggccucggc

SEQ ID NO: 2926685 - RNA, 22 nt, Human T-lymphotropic virus 2
gucacugaaaacgaaaccucaa

SEQ ID NO: 2926686 - RNA, 13 nt, Human T-lymphotropic virus 2
gcgccuccaggcc

SEQ ID NO: 2926687 - RNA, 11 nt, Human T-lymphotropic virus 2
ucagucucaca

SEQ ID NO: 2926688 - RNA, 17 nt, Human T-lymphotropic virus 2
uacaacaacucucccag

SEQ ID NO: 2926689 - RNA, 14 nt, Human T-lymphotropic virus 2
uccacuagcccagc

SEQ ID NO: 2926690 - RNA, 13 nt, Human T-lymphotropic virus 2
cgcaaggacaguu

SEQ ID NO: 2926691 - RNA, 20 nt, Human T-lymphotropic virus 2
ccaccucaggcacuacugag

SEQ ID NO: 2926692 - RNA, 18 nt, Human T-lymphotropic virus 2
acaccaagggaagccaag

SEQ ID NO: 2926693 - RNA, 20 nt, Human T-lymphotropic virus 2
cuucgaaaaauucgaaacca

SEQ ID NO: 2926694 - RNA, 19 nt, Human T-lymphotropic virus 2
caagauccuucucacugga

SEQ ID NO: 2926695 - RNA, 22 nt, Human T-lymphotropic virus 2
ccaugucauauucugccacccc

SEQ ID NO: 2926696 - RNA, 12 nt, Human T-lymphotropic virus 2
aucccucgccuc

SEQ ID NO: 2926697 - RNA, 22 nt, Human T-lymphotropic virus 2
cuaacccccuccacguccugga

SEQ ID NO: 2926698 - RNA, 17 nt, Human T-lymphotropic virus 2
ccccugacgccccaagg

SEQ ID NO: 2926699 - RNA, 22 nt, Human T-lymphotropic virus 2
ccuccuguuggaucucccuucc

SEQ ID NO: 2926700 - RNA, 15 nt, Human T-lymphotropic virus 2
uacucaggaccaggc

SEQ ID NO: 2926701 - RNA, 23 nt, Human T-lymphotropic virus 2
ggcucccuguauccagacugccu

SEQ ID NO: 2926702 - RNA, 22 nt, Human T-lymphotropic virus 2
gccauuacuaccacccucaccu

SEQ ID NO: 2926703 - RNA, 21 nt, Human T-lymphotropic virus 2
ccuuagguagucgcuccccga

SEQ ID NO: 2926704 - RNA, 17 nt, Human T-lymphotropic virus 2
cgaacaccuucccccac

SEQ ID NO: 2926705 - RNA, 22 nt, Human T-lymphotropic virus 2
ucucccccaagguuccaccugc

SEQ ID NO: 2926706 - RNA, 19 nt, Human T-lymphotropic virus 2
acuguccuaaccuuccccu

SEQ ID NO: 2926707 - RNA, 13 nt, Human T-lymphotropic virus 2
gagacgccuuccg

SEQ ID NO: 2926708 - RNA, 12 nt, Human T-lymphotropic virus 2
uacccagccacg

SEQ ID NO: 2926709 - RNA, 12 nt, Human T-lymphotropic virus 2
ccaccagcucag

SEQ ID NO: 2926710 - RNA, 22 nt, Human T-lymphotropic virus 2
ucccucgcucccguaccuccuc

SEQ ID NO: 2926711 - RNA, 18 nt, Human T-lymphotropic virus 2
cuucuauaccucccagac

SEQ ID NO: 2926712 - RNA, 20 nt, Human T-lymphotropic virus 2
cagccccuguagcccaaccc

SEQ ID NO: 2926713 - RNA, 20 nt, Human T-lymphotropic virus 2
ggcaggcccgcccuaggagc

SEQ ID NO: 2926714 - RNA, 21 nt, Human T-lymphotropic virus 2
uccagccucucauccuggcau

SEQ ID NO: 2926715 - RNA, 20 nt, Human T-lymphotropic virus 2
uaccagcuuuccccacccau

SEQ ID NO: 2926716 - RNA, 16 nt, Human T-lymphotropic virus 2
ucuccaauaccuuauc

SEQ ID NO: 2926717 - RNA, 19 nt, Human T-lymphotropic virus 2
ccuagcgcccccgccgccc

SEQ ID NO: 2926718 - RNA, 16 nt, Human T-lymphotropic virus 2
uggcugcuuucuccac

SEQ ID NO: 2926719 - RNA, 20 nt, Human T-lymphotropic virus 2
cauuacuaccacccucaccu

SEQ ID NO: 2926720 - RNA, 17 nt, Human T-lymphotropic virus 2
acccccaacaucuccau

SEQ ID NO: 2926721 - RNA, 19 nt, Human T-lymphotropic virus 2
cuccucugcucuuggcagc

SEQ ID NO: 2926722 - RNA, 21 nt, Human T-lymphotropic virus 2
aucucgauacucccacucauc

SEQ ID NO: 2926723 - RNA, 22 nt, Human T-lymphotropic virus 2
gaagacucucuuacaccuccca

SEQ ID NO: 2926724 - RNA, 23 nt, Human T-lymphotropic virus 2
ugccccuacuugggcugccaagc

SEQ ID NO: 2926725 - RNA, 14 nt, Human T-lymphotropic virus 2
cauacucaggacca

SEQ ID NO: 2926726 - RNA, 14 nt, Human T-lymphotropic virus 2
accucagccuaccc

SEQ ID NO: 2926727 - RNA, 13 nt, Human T-lymphotropic virus 2
uauacccuacaac

SEQ ID NO: 2926728 - RNA, 22 nt, Human T-lymphotropic virus 2
cuacaacauuauggccagcucu

SEQ ID NO: 2926729 - RNA, 23 nt, Human T-lymphotropic virus 2
cuccuccaucccaacccuucccu

SEQ ID NO: 2926730 - RNA, 14 nt, Human T-lymphotropic virus 2
uucuccaggaacca

SEQ ID NO: 2926731 - RNA, 14 nt, Human T-lymphotropic virus 2
uccuccgccaccuc

SEQ ID NO: 2926732 - RNA, 22 nt, Human T-lymphotropic virus 2
uguccagagcaccaacucaccu

SEQ ID NO: 2926733 - RNA, 21 nt, Human T-lymphotropic virus 2
guccagagcaccaacucaccu

SEQ ID NO: 2926734 - RNA, 14 nt, Human T-lymphotropic virus 2
cucccaccuuaccc

SEQ ID NO: 2926735 - RNA, 20 nt, Human T-lymphotropic virus 2
cugaaaaacaaggcucugac

SEQ ID NO: 2926736 - RNA, 14 nt, Human T-lymphotropic virus 2
cauaaccuuggcag

SEQ ID NO: 2926737 - RNA, 19 nt, Human T-lymphotropic virus 2
auuacaaguuauccuagga

SEQ ID NO: 2926738 - RNA, 14 nt, Human T-lymphotropic virus 2
acgccccaaggccu

SEQ ID NO: 2926739 - RNA, 22 nt, Human T-lymphotropic virus 2
cuacaucgacaugcccuccugg

SEQ ID NO: 2926740 - RNA, 13 nt, Human T-lymphotropic virus 2
ccguccuccagga

SEQ ID NO: 2926741 - RNA, 19 nt, Human T-lymphotropic virus 2
cccugcccgcuccuccauc

SEQ ID NO: 2926742 - RNA, 18 nt, Human T-lymphotropic virus 2
gcucggcuagacucugcc

SEQ ID NO: 2926743 - RNA, 20 nt, Human T-lymphotropic virus 2
accagaugucagacucgccu

SEQ ID NO: 2926744 - RNA, 23 nt, Human T-lymphotropic virus 2
caucccuccuaucuacucucuca

SEQ ID NO: 2926745 - RNA, 18 nt, Human T-lymphotropic virus 2
guacaggacuucuccccu

SEQ ID NO: 2926746 - RNA, 19 nt, Human T-lymphotropic virus 2
cagaugucagacucgccuc

SEQ ID NO: 2926747 - RNA, 13 nt, Human T-lymphotropic virus 2
ugcugccaagcca

SEQ ID NO: 2926748 - RNA, 14 nt, Human T-lymphotropic virus 2
uggccaccugucca

SEQ ID NO: 2926749 - RNA, 22 nt, Human T-lymphotropic virus 2
uguuuggccccuguauccuccg

SEQ ID NO: 2926750 - RNA, 14 nt, Human T-lymphotropic virus 2
accuacauucccuc

SEQ ID NO: 2926751 - RNA, 20 nt, Human T-lymphotropic virus 2
cuuccauaaccuucaccuuc

SEQ ID NO: 2926752 - RNA, 17 nt, Human T-lymphotropic virus 2
uaccuacauucccucgc

SEQ ID NO: 2926753 - RNA, 21 nt, Human T-lymphotropic virus 2
cuucucuaagugcggcuccuc

SEQ ID NO: 2926754 - RNA, 22 nt, Human T-lymphotropic virus 2
auacuuuuagccagccccacca

SEQ ID NO: 2926755 - RNA, 23 nt, Human T-lymphotropic virus 2
aacuucuauacaaaauguuccua

SEQ ID NO: 2926756 - RNA, 14 nt, Human T-lymphotropic virus 2
aacuccccucaucc

SEQ ID NO: 2926757 - RNA, 18 nt, Human T-lymphotropic virus 2
ccaucaaaacccaggagu

SEQ ID NO: 2926758 - RNA, 16 nt, Human T-lymphotropic virus 2
auuuucacccucuccc

SEQ ID NO: 2926759 - RNA, 17 nt, Human T-lymphotropic virus 2
gguucgucccccuacca

SEQ ID NO: 2926760 - RNA, 14 nt, Human T-lymphotropic virus 2
gcccccucagcuca

SEQ ID NO: 2926761 - RNA, 19 nt, Human T-lymphotropic virus 2
ccaugucauauucugccac

SEQ ID NO: 2926762 - RNA, 18 nt, Human T-lymphotropic virus 2
cuggucuccaaggcccug

SEQ ID NO: 2926763 - RNA, 18 nt, Human T-lymphotropic virus 2
guagucgcuccccgaggg

SEQ ID NO: 2926764 - RNA, 18 nt, Human T-lymphotropic virus 2
gggcuucuauaccuccca

SEQ ID NO: 2926765 - RNA, 15 nt, Human T-lymphotropic virus 2
cagaccaccaacacc

SEQ ID NO: 2926766 - RNA, 16 nt, Human T-lymphotropic virus 2
caucuacaccaccugg

SEQ ID NO: 2926767 - RNA, 13 nt, Human T-lymphotropic virus 2
cuaccacuccagc

SEQ ID NO: 2926768 - RNA, 17 nt, Human T-lymphotropic virus 2
cagccccacccucuucg

SEQ ID NO: 2926769 - RNA, 23 nt, Human T-lymphotropic virus 2
ggcuuccaguaaaagccuucucc

SEQ ID NO: 2926770 - RNA, 16 nt, Human T-lymphotropic virus 2
cacccaggaagucagc

SEQ ID NO: 2926771 - RNA, 21 nt, Human T-lymphotropic virus 2
cacucauguauccguccucca

SEQ ID NO: 2926772 - RNA, 20 nt, Human T-lymphotropic virus 2
uccaagugucggcauccuca

SEQ ID NO: 2926773 - RNA, 15 nt, Human T-lymphotropic virus 2
acaaaaccaaggucc

SEQ ID NO: 2926774 - RNA, 22 nt, Human T-lymphotropic virus 2
ccaccacuccugucucccccaa

SEQ ID NO: 2926775 - RNA, 14 nt, Human T-lymphotropic virus 2
caacaacucuccca

SEQ ID NO: 2926776 - RNA, 17 nt, Human T-lymphotropic virus 2
cccaucaaaacccagga

SEQ ID NO: 2926777 - RNA, 19 nt, Human T-lymphotropic virus 2
accccuacuauucccauaa

SEQ ID NO: 2926778 - RNA, 22 nt, Human T-lymphotropic virus 2
cugacgucccuccccccuagga

SEQ ID NO: 2926779 - RNA, 13 nt, Human T-lymphotropic virus 2
caguaaaagccuu

SEQ ID NO: 2926780 - RNA, 11 nt, Human T-lymphotropic virus 2
accuuggcagc

SEQ ID NO: 2926781 - RNA, 20 nt, Human T-lymphotropic virus 2
ccgcauacacgggccccguc

SEQ ID NO: 2926782 - RNA, 18 nt, Human T-lymphotropic virus 2
ccuaccacuccagccccu

SEQ ID NO: 2926783 - RNA, 16 nt, Human T-lymphotropic virus 2
uacaugccauucaaca

SEQ ID NO: 2926784 - RNA, 18 nt, Human T-lymphotropic virus 2
ccauguccgcagccacac

SEQ ID NO: 2926785 - RNA, 16 nt, Human T-lymphotropic virus 2
uacaaccccaccagcu

SEQ ID NO: 2926786 - RNA, 18 nt, Human T-lymphotropic virus 2
acccauuccugaagccuc

SEQ ID NO: 2926787 - RNA, 17 nt, Human T-lymphotropic virus 2
caggauuuggacagagc

SEQ ID NO: 2926788 - RNA, 18 nt, Human T-lymphotropic virus 2
acucucuuacaccuccca

SEQ ID NO: 2926789 - RNA, 14 nt, Human T-lymphotropic virus 2
caacaaugccaggg

SEQ ID NO: 2926790 - RNA, 15 nt, Human T-lymphotropic virus 2
acacauauucuugcc

SEQ ID NO: 2926791 - RNA, 21 nt, Human T-lymphotropic virus 2
ucacgauugguaucuccuccu

SEQ ID NO: 2926792 - RNA, 22 nt, Human T-lymphotropic virus 2
acaguccuccacuaccacccau

SEQ ID NO: 2926793 - RNA, 17 nt, Human T-lymphotropic virus 2
aguccuauacacuccaa

SEQ ID NO: 2926794 - RNA, 20 nt, Human T-lymphotropic virus 2
ucgagcucggcugccccuua

SEQ ID NO: 2926795 - RNA, 13 nt, Human T-lymphotropic virus 2
cucagccuccacc

SEQ ID NO: 2926796 - RNA, 16 nt, Human T-lymphotropic virus 2
aaaacacaacaaaccc

SEQ ID NO: 2926797 - RNA, 24 nt, Human T-lymphotropic virus 2
gcuuuccccaacuccaauacccaa

SEQ ID NO: 2926798 - RNA, 12 nt, Human T-lymphotropic virus 2
aguauucccuua

SEQ ID NO: 2926799 - RNA, 12 nt, Human T-lymphotropic virus 2
cacuccacauua

SEQ ID NO: 2926800 - RNA, 20 nt, Human T-lymphotropic virus 2
uccuucucacuggaaaaggg

SEQ ID NO: 2926801 - RNA, 21 nt, Human T-lymphotropic virus 2
cuccuuccauaaccuucaccu

SEQ ID NO: 2926802 - RNA, 17 nt, Human T-lymphotropic virus 2
ucagcccauuucccagg

SEQ ID NO: 2926803 - RNA, 13 nt, Human T-lymphotropic virus 2
ugaauuccuccau

SEQ ID NO: 2926804 - RNA, 19 nt, Human T-lymphotropic virus 2
ggacacacuaacagccccc

SEQ ID NO: 2926805 - RNA, 12 nt, Human T-lymphotropic virus 2
ucucccuuccac

SEQ ID NO: 2926806 - RNA, 17 nt, Human T-lymphotropic virus 2
cuuuccccacccaugac

SEQ ID NO: 2926807 - RNA, 14 nt, Human T-lymphotropic virus 2
cuuaccccaaagca

SEQ ID NO: 2926808 - RNA, 13 nt, Human T-lymphotropic virus 2
aaucuuuccacca

SEQ ID NO: 2926809 - RNA, 18 nt, Human T-lymphotropic virus 2
cagccacgccccccuccu

SEQ ID NO: 2926810 - RNA, 17 nt, Human T-lymphotropic virus 2
gcggcuccuccaugacc

SEQ ID NO: 2926811 - RNA, 19 nt, Human T-lymphotropic virus 2
gcgccgcucccgcuccuca

SEQ ID NO: 2926812 - RNA, 19 nt, Human T-lymphotropic virus 2
uccugaacugcuccuccca

SEQ ID NO: 2926813 - RNA, 16 nt, Human T-lymphotropic virus 2
cgacuuccugaggaac

SEQ ID NO: 2926814 - RNA, 20 nt, Human T-lymphotropic virus 2
cccgauggcaaauccaccac

SEQ ID NO: 2926815 - RNA, 13 nt, Human T-lymphotropic virus 2
ucugcgccgcucc

SEQ ID NO: 2926816 - RNA, 22 nt, Human T-lymphotropic virus 2
cccucagcucauaggcccuggc

SEQ ID NO: 2926817 - RNA, 14 nt, Human T-lymphotropic virus 2
gccccaaggccucc

SEQ ID NO: 2926818 - RNA, 15 nt, Human T-lymphotropic virus 2
caucuaccuccacca

SEQ ID NO: 2926819 - RNA, 15 nt, Human T-lymphotropic virus 2
cuuauucccacauug

SEQ ID NO: 2926820 - RNA, 19 nt, Human T-lymphotropic virus 2
cuguauccuccgccaaauc

SEQ ID NO: 2926821 - RNA, 20 nt, Human T-lymphotropic virus 2
cguggauagauccagccucu

SEQ ID NO: 2926822 - RNA, 20 nt, Human T-lymphotropic virus 2
ucccccauugguccaugacu

SEQ ID NO: 2926823 - RNA, 16 nt, Human T-lymphotropic virus 2
acugcagggcaagacc

SEQ ID NO: 2926824 - RNA, 13 nt, Human T-lymphotropic virus 2
ucuccuccuacca

SEQ ID NO: 2926825 - RNA, 15 nt, Human T-lymphotropic virus 2
accuuaauucccuaa

SEQ ID NO: 2926826 - RNA, 18 nt, Human T-lymphotropic virus 2
caggaacagcucuccaga

SEQ ID NO: 2926827 - RNA, 13 nt, Human T-lymphotropic virus 2
uccuccuuccaua

SEQ ID NO: 2926828 - RNA, 15 nt, Human T-lymphotropic virus 2
cgccgcccucuuggc

SEQ ID NO: 2926829 - RNA, 16 nt, Human T-lymphotropic virus 2
caccuucccccaccuc

SEQ ID NO: 2926830 - RNA, 17 nt, Human T-lymphotropic virus 2
uacccacuuccccuagc

SEQ ID NO: 2926831 - RNA, 11 nt, Human T-lymphotropic virus 2
cagcccccuug

SEQ ID NO: 2926832 - RNA, 20 nt, Human T-lymphotropic virus 2
gucugcacguggaaccucga

SEQ ID NO: 2926833 - RNA, 14 nt, Human T-lymphotropic virus 2
gccgucacugaaaa

SEQ ID NO: 2926834 - RNA, 14 nt, Human T-lymphotropic virus 2
acugcuccucccaa

SEQ ID NO: 2926835 - RNA, 11 nt, Human T-lymphotropic virus 2
acaaagaaugc

SEQ ID NO: 2926836 - RNA, 14 nt, Human T-lymphotropic virus 2
caccuacagaccau

SEQ ID NO: 2926837 - RNA, 20 nt, Human T-lymphotropic virus 2
ccucugcucuuggcagcccc

SEQ ID NO: 2926838 - RNA, 22 nt, Human T-lymphotropic virus 2
caggucgagcucggcugccccu

SEQ ID NO: 2926839 - RNA, 15 nt, Human T-lymphotropic virus 2
cuuaucaacccagaa

SEQ ID NO: 2926840 - RNA, 18 nt, Human T-lymphotropic virus 2
uggccccuguauccuccg

SEQ ID NO: 2926841 - RNA, 16 nt, Human T-lymphotropic virus 2
accuucccccaccucc

SEQ ID NO: 2926842 - RNA, 14 nt, Human T-lymphotropic virus 2
cagcuaacccucca

SEQ ID NO: 2926843 - RNA, 19 nt, Human T-lymphotropic virus 2
ccgagccagccacccaggg

SEQ ID NO: 2926844 - RNA, 17 nt, Human T-lymphotropic virus 2
cccacuuccccuagcgc

SEQ ID NO: 2926845 - RNA, 16 nt, Human T-lymphotropic virus 2
acugccguggccgccu

SEQ ID NO: 2926846 - RNA, 13 nt, Human T-lymphotropic virus 2
acccccugcccau

SEQ ID NO: 2926847 - RNA, 17 nt, Human T-lymphotropic virus 2
gccucccgagccagcca

SEQ ID NO: 2926848 - RNA, 18 nt, Human T-lymphotropic virus 2
uccuacaaugacccuugc

SEQ ID NO: 2926849 - RNA, 15 nt, Human T-lymphotropic virus 2
uuaugggacaaacac

SEQ ID NO: 2926850 - RNA, 15 nt, Human T-lymphotropic virus 2
cuucccccaccuccc

SEQ ID NO: 2926851 - RNA, 17 nt, Human T-lymphotropic virus 2
agguccuuaccccuccc

SEQ ID NO: 2926852 - RNA, 21 nt, Human T-lymphotropic virus 2
gucacugaaaacgaaaccuca

SEQ ID NO: 2926853 - RNA, 20 nt, Human T-lymphotropic virus 2
agcucugccaaucuuuccac

SEQ ID NO: 2926854 - RNA, 13 nt, Human T-lymphotropic virus 2
cauuauccucccc

SEQ ID NO: 2926855 - RNA, 15 nt, Human T-lymphotropic virus 2
ccugucuccucucag

SEQ ID NO: 2926856 - RNA, 18 nt, Human T-lymphotropic virus 2
cccgcugcuccuccgcca

SEQ ID NO: 2926857 - RNA, 22 nt, Human T-lymphotropic virus 2
uucgaaaccaaagccuuccauc

SEQ ID NO: 2926858 - RNA, 22 nt, Human T-lymphotropic virus 2
agcaagggcuagggcuuccuga

SEQ ID NO: 2926859 - RNA, 21 nt, Human T-lymphotropic virus 2
cuacaaugacccuugcucgcu

SEQ ID NO: 2926860 - RNA, 23 nt, Human T-lymphotropic virus 2
gccaucuuuaguaguucaguccu

SEQ ID NO: 2926861 - RNA, 19 nt, Human T-lymphotropic virus 2
ucccucaccgacccucugg

SEQ ID NO: 2926862 - RNA, 14 nt, Human T-lymphotropic virus 2
uccacauuaacaca

SEQ ID NO: 2926863 - RNA, 23 nt, Human T-lymphotropic virus 2
acccucggggaucagcuccccuc

SEQ ID NO: 2926864 - RNA, 15 nt, Human T-lymphotropic virus 2
gacaucucccaccuu

SEQ ID NO: 2926865 - RNA, 18 nt, Human T-lymphotropic virus 2
cuccauuauccucccccc

SEQ ID NO: 2926866 - RNA, 17 nt, Human T-lymphotropic virus 2
ccuccuaccacuccagc

SEQ ID NO: 2926867 - RNA, 18 nt, Human T-lymphotropic virus 2
gccucucccuggucuccu

SEQ ID NO: 2926868 - RNA, 18 nt, Human T-lymphotropic virus 2
cauguauccguccuccag

SEQ ID NO: 2926869 - RNA, 22 nt, Human T-lymphotropic virus 2
aaccuuccccuagacaaugcca

SEQ ID NO: 2926870 - RNA, 18 nt, Human T-lymphotropic virus 2
uccccuaucacuccaucu

SEQ ID NO: 2926871 - RNA, 22 nt, Human T-lymphotropic virus 2
gcuccacaccccccacccuccg

SEQ ID NO: 2926872 - RNA, 23 nt, Human T-lymphotropic virus 2
uuggcuccacaccccccacccuc

SEQ ID NO: 2926873 - RNA, 12 nt, Human T-lymphotropic virus 2
cccuaucacucc

SEQ ID NO: 2926874 - RNA, 14 nt, Human T-lymphotropic virus 2
uccuuuccuccugc

SEQ ID NO: 2926875 - RNA, 14 nt, Human T-lymphotropic virus 2
caccccccacccuc

SEQ ID NO: 2926876 - RNA, 15 nt, Human T-lymphotropic virus 2
ucccguaccuccucc

SEQ ID NO: 2926877 - RNA, 19 nt, Human T-lymphotropic virus 2
ccuaccauugacccaucca

SEQ ID NO: 2926878 - RNA, 20 nt, Human T-lymphotropic virus 2
accagccauacuucgccuuc

SEQ ID NO: 2926879 - RNA, 17 nt, Human T-lymphotropic virus 2
ugccaagccauggccuu

SEQ ID NO: 2926880 - RNA, 18 nt, Human T-lymphotropic virus 2
ccucuaacccccgcucac

SEQ ID NO: 2926881 - RNA, 12 nt, Human T-lymphotropic virus 2
cccgucuccagu

SEQ ID NO: 2926882 - RNA, 12 nt, Human T-lymphotropic virus 2
cccuucuccagg

SEQ ID NO: 2926883 - RNA, 20 nt, Human T-lymphotropic virus 2
ccaagcaaaauuggccccug

SEQ ID NO: 2926884 - RNA, 19 nt, Human T-lymphotropic virus 2
accacgcauggccuuccaa

SEQ ID NO: 2926885 - RNA, 15 nt, Human T-lymphotropic virus 2
cugaaccucuccggg

SEQ ID NO: 2926886 - RNA, 18 nt, Human T-lymphotropic virus 2
acccucggggaucagcuc

SEQ ID NO: 2926887 - RNA, 20 nt, Human T-lymphotropic virus 2
uggccuuccaauuucccagg

SEQ ID NO: 2926888 - RNA, 18 nt, Human T-lymphotropic virus 2
aucccucgccuccccucc

SEQ ID NO: 2926889 - RNA, 18 nt, Human T-lymphotropic virus 2
cucgguuccucuccaggg

SEQ ID NO: 2926890 - RNA, 16 nt, Human T-lymphotropic virus 2
gguggcucgcucccuc

SEQ ID NO: 2926891 - RNA, 12 nt, Human T-lymphotropic virus 2
cucgcaccugcu

SEQ ID NO: 2926892 - RNA, 22 nt, Human T-lymphotropic virus 2
aggcccccccccacacagcccu

SEQ ID NO: 2926893 - RNA, 15 nt, Human T-lymphotropic virus 2
ccgaugcacacucac

SEQ ID NO: 2926894 - RNA, 19 nt, Human T-lymphotropic virus 2
ccccaagguuccaccugcc

SEQ ID NO: 2926895 - RNA, 19 nt, Human T-lymphotropic virus 2
uccacaccccccacccucc

SEQ ID NO: 2926896 - RNA, 19 nt, Human T-lymphotropic virus 2
cuacaacauaacugccgug

SEQ ID NO: 2926897 - RNA, 19 nt, Human T-lymphotropic virus 2
aacaccuacaaucccuaua

SEQ ID NO: 2926898 - RNA, 19 nt, Human T-lymphotropic virus 2
augguaaauggagguucau

SEQ ID NO: 2926899 - RNA, 20 nt, Human T-lymphotropic virus 2
gccguccucaaccccaugag

SEQ ID NO: 2926900 - RNA, 13 nt, Human T-lymphotropic virus 2
aguccucccuauu

SEQ ID NO: 2926901 - RNA, 17 nt, Human T-lymphotropic virus 2
aagacuuauuccuuaua

SEQ ID NO: 2926902 - RNA, 20 nt, Human T-lymphotropic virus 2
ugccauuacuaccacccuca

SEQ ID NO: 2926903 - RNA, 17 nt, Human T-lymphotropic virus 2
gccaauuuucacccucu

SEQ ID NO: 2926904 - RNA, 15 nt, Human T-lymphotropic virus 2
aacaggcucccuauc

SEQ ID NO: 2926905 - RNA, 17 nt, Human T-lymphotropic virus 2
aacccaggaguccuaua

SEQ ID NO: 2926906 - RNA, 21 nt, Human T-lymphotropic virus 2
aacccgugagggcucccugua

SEQ ID NO: 2926907 - RNA, 18 nt, Human T-lymphotropic virus 2
aaccguaguaugccuaua

SEQ ID NO: 2926908 - RNA, 22 nt, Human T-lymphotropic virus 2
aaccucgaccuuaauucccuaa

SEQ ID NO: 2926909 - RNA, 19 nt, Human T-lymphotropic virus 2
acaacaacuccaugcguua

SEQ ID NO: 2926910 - RNA, 20 nt, Human T-lymphotropic virus 2
ccacagcgguuacaaaaccg

SEQ ID NO: 2926911 - RNA, 13 nt, Human T-lymphotropic virus 2
uguaucacccuca

SEQ ID NO: 2926912 - RNA, 20 nt, Human T-lymphotropic virus 2
uaccgggacccaagagcuug

SEQ ID NO: 2926913 - RNA, 20 nt, Human T-lymphotropic virus 2
uauccagcugaccuuacaga

SEQ ID NO: 2926914 - RNA, 12 nt, Human T-lymphotropic virus 2
gccccacccucu

SEQ ID NO: 2926915 - RNA, 20 nt, Human T-lymphotropic virus 2
cugcaugguuugcguggaua

SEQ ID NO: 2926916 - RNA, 19 nt, Human T-lymphotropic virus 2
ccccuguauccuccgccaa

SEQ ID NO: 2926917 - RNA, 16 nt, Human
cucuccgaccagacac

SEQ ID NO: 2926918 - RNA, 20 nt, Human
cucuccuccuuuucacaguu

SEQ ID NO: 2926919 - RNA, 13 nt, Human
cucuccuccuuuu

SEQ ID NO: 2926920 - RNA, 13 nt, Human
cucucccuuggau

SEQ ID NO: 2926921 - RNA, 19 nt, Human
cucucuggccuucggccuc

SEQ ID NO: 2926922 - RNA, 17 nt, Human
cucucuggccuucggcc

SEQ ID NO: 2926923 - RNA, 10 nt, Human
cucuccucug

SEQ ID NO: 2926924 - RNA, 16 nt, Human
cucugcacaagcugca

SEQ ID NO: 2926925 - RNA, 23 nt, Human
cucgguguggagaagcggcuggc

SEQ ID NO: 2926926 - RNA, 11 nt, Human
cucggugccuu

SEQ ID NO: 2926927 - RNA, 24 nt, Human
cuccuuuucacaguucucuccuuc

SEQ ID NO: 2926928 - RNA, 23 nt, Human
cuccuuugugaggaagccgcugg

SEQ ID NO: 2926929 - RNA, 16 nt, Human
cuccuuuagcgcccag

SEQ ID NO: 2926930 - RNA, 17 nt, Human
cuccuuuagcgcccagu

SEQ ID NO: 2926931 - RNA, 22 nt, Human
cuccuagccugugccucuggga

SEQ ID NO: 2926932 - RNA, 22 nt, Human
cuccuuuagcgcccaguugggu

SEQ ID NO: 2926933 - RNA, 14 nt, Human
cucccaccucagcc

SEQ ID NO: 2926934 - RNA, 16 nt, Human
cucccaccucagccuc

SEQ ID NO: 2926935 - RNA, 17 nt, Human
cucccaccucagccucc

SEQ ID NO: 2926936 - RNA, 13 nt, Human
cucccaccucagc

SEQ ID NO: 2926937 - RNA, 11 nt, Human
cucccagccag

SEQ ID NO: 2926938 - RNA, 13 nt, Human
cucccagccaggc

SEQ ID NO: 2926939 - RNA, 14 nt, Human
cucccagccaggcc

SEQ ID NO: 2926940 - RNA, 16 nt, Human
cucccagccaggcccu

SEQ ID NO: 2926941 - RNA, 18 nt, Human
cuccaggugcacaagcuc

SEQ ID NO: 2926942 - RNA, 20 nt, Human
cuccaggugcacaagcucca

SEQ ID NO: 2926943 - RNA, 19 nt, Human
cuccaggugcacaagcucc

SEQ ID NO: 2926944 - RNA, 21 nt, Human
cuccagugagacagcucugca

SEQ ID NO: 2926945 - RNA, 22 nt, Human
cuccaggugcacaagcuccaag

SEQ ID NO: 2926946 - RNA, 23 nt, Human
cuccaggcuguaucccaugagcc

SEQ ID NO: 2926947 - RNA, 22 nt, Human
cuccaggcuguaucccaugagc

SEQ ID NO: 2926948 - RNA, 21 nt, Human
cuccagaauuucccaaagcag

SEQ ID NO: 2926949 - RNA, 16 nt, Human
cucagaaucucaaaua

SEQ ID NO: 2926950 - RNA, 17 nt, Human
cucagaaucucaaauaa

SEQ ID NO: 2926951 - RNA, 16 nt, Human
cuccagacacaugucc

SEQ ID NO: 2926952 - RNA, 11 nt, Human
cuccagacaca

SEQ ID NO: 2926953 - RNA, 22 nt, Human
cuccagaauuucccaaagcagu

SEQ ID NO: 2926954 - RNA, 15 nt, Human
cucccucuuucccuc

SEQ ID NO: 2926955 - RNA, 16 nt, Human
cucccucccucuuucc

SEQ ID NO: 2926956 - RNA, 19 nt, Human
cucccucuuucccucccuu

SEQ ID NO: 2926957 - RNA, 21 nt, Human
cuccgcuuucuacccagcgag

SEQ ID NO: 2926958 - RNA, 20 nt, Human
cuccgcuuucuacccagcga

SEQ ID NO: 2926959 - RNA, 14 nt, Human
cuccgucaacucau

SEQ ID NO: 2926960 - RNA, 22 nt, Human
cuccgcuuucuacccagcgagc

SEQ ID NO: 2926961 - RNA, 18 nt, Human
cucugcacaagcugcacc

SEQ ID NO: 2926962 - RNA, 17 nt, Human
cucugcacaagcugcac

SEQ ID NO: 2926963 - RNA, 23 nt, Human
cucuugagccuugaacuuugacc

SEQ ID NO: 2926964 - RNA, 16 nt, Human
cucuugagccugggag

SEQ ID NO: 2926965 - RNA, 15 nt, Human
cucuugagccuggga

SEQ ID NO: 2926966 - RNA, 22 nt, Human
cucuugauucauaaugacuuaa

SEQ ID NO: 2926967 - RNA, 14 nt, Human
cucuugagccuggg

SEQ ID NO: 2926968 - RNA, 13 nt, Human
cucuugagccugg

SEQ ID NO: 2926969 - RNA, 24 nt, Human
cucuugauucauaaugacuuaagc

SEQ ID NO: 2926970 - RNA, 13 nt, Human
cugaaagaggaau

SEQ ID NO: 2926971 - RNA, 17 nt, Human
cugaaagaggaaugaag

SEQ ID NO: 2926972 - RNA, 13 nt, Human
cugacacacagcu

SEQ ID NO: 2926973 - RNA, 15 nt, Human
cugacacacagcucu

SEQ ID NO: 2926974 - RNA, 14 nt, Human
cugaaaauguaugu

SEQ ID NO: 2926975 - RNA, 16 nt, Human
cugacacacagcucug

SEQ ID NO: 2926976 - RNA, 17 nt, Human
cugacacacagcucugu

SEQ ID NO: 2926977 - RNA, 18 nt, Human
cugacacacagcucuguc

SEQ ID NO: 2926978 - RNA, 19 nt, Human
cugacacacagcucugucc

SEQ ID NO: 2926979 - RNA, 20 nt, Human
cugacacacagcucuguccu

SEQ ID NO: 2926980 - RNA, 21 nt, Human
cugacacacagcucuguccug

SEQ ID NO: 2926981 - RNA, 22 nt, Human
cugacacacagcucuguccugg

SEQ ID NO: 2926982 - RNA, 23 nt, Human
cugacacacagcucuguccuggg

SEQ ID NO: 2926983 - RNA, 21 nt, Human
cugacacaugcugaacaucac

SEQ ID NO: 2926984 - RNA, 19 nt, Human
cugacccugcuucaaauau

SEQ ID NO: 2926985 - RNA, 22 nt, Human
cugagcugggaugauuggaggg

SEQ ID NO: 2926986 - RNA, 12 nt, Human
cugagcugggau

SEQ ID NO: 2926987 - RNA, 18 nt, Human
cugagggggccuggaugc

SEQ ID NO: 2926988 - RNA, 22 nt, Human
cugaggugggaggaucucuuga

SEQ ID NO: 2926989 - RNA, 12 nt, Human
cugaggugggag

SEQ ID NO: 2926990 - RNA, 13 nt, Human
cugaggugggagg

SEQ ID NO: 2926991 - RNA, 14 nt, Human
cugaggggccucuu

SEQ ID NO: 2926992 - RNA, 23 nt, Human
cugaggaauccagacccggcugc

SEQ ID NO: 2926993 - RNA, 14 nt, Human
cugaucucucguga

SEQ ID NO: 2926994 - RNA, 18 nt, Human
cugaucucucgugauuga

SEQ ID NO: 2926995 - RNA, 17 nt, Human
cugaucucucgugauug

SEQ ID NO: 2926996 - RNA, 14 nt, Human
cuaacuggacuggu

SEQ ID NO: 2926997 - RNA, 22 nt, Human
cuaaaguguauuuuuuuacuaa

SEQ ID NO: 2926998 - RNA, 17 nt, Human
cuaaaggcuaccuuugu

SEQ ID NO: 2926999 - RNA, 19 nt, Human
cuaaaggcuaccuuuguau

SEQ ID NO: 2927000 - RNA, 19 nt, Human
cuaaaguguauuuuuuuac

SEQ ID NO: 2927001 - RNA, 17 nt, Human
cuaaagaaguuugaaca

SEQ ID NO: 2927002 - RNA, 14 nt, Human
cuaaagcugccagc

SEQ ID NO: 2927003 - RNA, 15 nt, Human
cuaaaggcuaccuuu

SEQ ID NO: 2927004 - RNA, 16 nt, Human
cuaaaggcuaccuuug

SEQ ID NO: 2927005 - RNA, 15 nt, Human
cuaaagcugccagcc

SEQ ID NO: 2927006 - RNA, 13 nt, Human
cguuaaaauacca

SEQ ID NO: 2927007 - RNA, 13 nt, Human
cguacacauuuua

SEQ ID NO: 2927008 - RNA, 16 nt, Human
cguacacauuuuauuu

SEQ ID NO: 2927009 - RNA, 15 nt, Human
cgguuuauauaagcu

SEQ ID NO: 2927010 - RNA, 15 nt, Human
cggagacggaguccc

SEQ ID NO: 2927011 - RNA, 24 nt, Human
cggagaagagcuguucacagccag

SEQ ID NO: 2927012 - RNA, 23 nt, Human
cggagaagagcuguucacagcca

SEQ ID NO: 2927013 - RNA, 16 nt, Human
cgccuuaaggauguuc

SEQ ID NO: 2927014 - RNA, 18 nt, Human
cgcugccccuggcagccc

SEQ ID NO: 2927015 - RNA, 19 nt, Human
cgcuggaccuugaacuggg

SEQ ID NO: 2927016 - RNA, 23 nt, Human
cgcuggaccuugaacuggguacu

SEQ ID NO: 2927017 - RNA, 13 nt, Human
cgcugccccuggc

SEQ ID NO: 2927018 - RNA, 17 nt, Human
cgcugccccuggcagcc

SEQ ID NO: 2927019 - RNA, 16 nt, Human
cgcugccccuggcagc

SEQ ID NO: 2927020 - RNA, 17 nt, Human
cgcuggggccaguuggu

SEQ ID NO: 2927021 - RNA, 20 nt, Human
cgcuggggccaguugguccc

SEQ ID NO: 2927022 - RNA, 14 nt, Human
cuauguugcccagg

SEQ ID NO: 2927023 - RNA, 15 nt, Human
cuauguugcccaggc

SEQ ID NO: 2927024 - RNA, 22 nt, Human
cuauguguagggcgggaggaug

SEQ ID NO: 2927025 - RNA, 16 nt, Human
cuauguaucaaugagu

SEQ ID NO: 2927026 - RNA, 17 nt, Human
cuaugugagcacaaagg

SEQ ID NO: 2927027 - RNA, 18 nt, Human
cuaucucccccagcccca

SEQ ID NO: 2927028 - RNA, 19 nt, Human
cuauguaucaaugaguaac

SEQ ID NO: 2927029 - RNA, 20 nt, Human
cuaucucccccagccccauc

SEQ ID NO: 2927030 - RNA, 16 nt, Human
cuauguugcccaggca

SEQ ID NO: 2927031 - RNA, 17 nt, Human
cuauguugcccaggcag

SEQ ID NO: 2927032 - RNA, 17 nt, Human
cucaaaaaaagaaaaag

SEQ ID NO: 2927033 - RNA, 18 nt, Human
cucaaaaaaagaaaaaga

SEQ ID NO: 2927034 - RNA, 13 nt, Human
cucaaaacugcac

SEQ ID NO: 2927035 - RNA, 17 nt, Human
cucacaauccuugccac

SEQ ID NO: 2927036 - RNA, 12 nt, Human
cucaaauaacua

SEQ ID NO: 2927037 - RNA, 14 nt, Human
cucacaaaggaugc

SEQ ID NO: 2927038 - RNA, 21 nt, Human
cucacacaugagcaucaggcc

SEQ ID NO: 2927039 - RNA, 14 nt, Human
cucacacaugagca

SEQ ID NO: 2927040 - RNA, 13 nt, Human
cucaccucucccu

SEQ ID NO: 2927041 - RNA, 17 nt, Human
cucaccucucccuugga

SEQ ID NO: 2927042 - RNA, 16 nt, Human
cucaccucucccuugg

SEQ ID NO: 2927043 - RNA, 15 nt, Human
cucaccucucccuug

SEQ ID NO: 2927044 - RNA, 14 nt, Human
cucaccucucccuu

SEQ ID NO: 2927045 - RNA, 13 nt, Human
cucaccugccccu

SEQ ID NO: 2927046 - RNA, 18 nt, Human
cucaccugccccucaacu

SEQ ID NO: 2927047 - RNA, 16 nt, Human
cucaccugccccucaa

SEQ ID NO: 2927048 - RNA, 14 nt, Human
cucaccugccccuc

SEQ ID NO: 2927049 - RNA, 18 nt, Human
cucacuuguuuuauuuaa

SEQ ID NO: 2927050 - RNA, 19 nt, Human
cucagaaaacaaggaugaa

SEQ ID NO: 2927051 - RNA, 23 nt, Human
cucagaaaacaaggaugaauuaa

SEQ ID NO: 2927052 - RNA, 15 nt, Human
cuaguuugauuaaau

SEQ ID NO: 2927053 - RNA, 20 nt, Human
cuaguuugauuaaauucuug

SEQ ID NO: 2927054 - RNA, 17 nt, Human
cuaguuugauuaaauuc

SEQ ID NO: 2927055 - RNA, 19 nt, Human
cuaguuugauuaaauucuu

SEQ ID NO: 2927056 - RNA, 14 nt, Human
cuagggaagauaau

SEQ ID NO: 2927057 - RNA, 17 nt, Human
cuagccagaggagagag

SEQ ID NO: 2927058 - RNA, 19 nt, Human
cuagccagaggagagagga

SEQ ID NO: 2927059 - RNA, 13 nt, Human
cuaggccuggcca

SEQ ID NO: 2927060 - RNA, 13 nt, Human
cuaggccugggga

SEQ ID NO: 2927061 - RNA, 12 nt, Human
cuaggccugggg

SEQ ID NO: 2927062 - RNA, 14 nt, Human
cuaggccuggccag

SEQ ID NO: 2927063 - RNA, 15 nt, Human
cuaggccuggccaga

SEQ ID NO: 2927064 - RNA, 18 nt, Human
cuaggccuggccagaugc

SEQ ID NO: 2927065 - RNA, 19 nt, Human
cuaggccuggccagaugca

SEQ ID NO: 2927066 - RNA, 16 nt, Human
cuagcauacguacaca

SEQ ID NO: 2927067 - RNA, 18 nt, Human
cuagcauacguacacauu

SEQ ID NO: 2927068 - RNA, 19 nt, Human
cuagcauacguacacauuu

SEQ ID NO: 2927069 - RNA, 20 nt, Human
cuagcauacguacacauuuu

SEQ ID NO: 2927070 - RNA, 20 nt, Human
cuacuaaaaaugcaaaaaaa

SEQ ID NO: 2927071 - RNA, 23 nt, Human
cuaccugaggggccucuuauggg

SEQ ID NO: 2927072 - RNA, 19 nt, Human
cuaccugaggggccucuua

SEQ ID NO: 2927073 - RNA, 16 nt, Human
cuaccugaggggccuc

SEQ ID NO: 2927074 - RNA, 15 nt, Human
cuaccugaggggccu

SEQ ID NO: 2927075 - RNA, 12 nt, Human
ccuaauguguuu

SEQ ID NO: 2927076 - RNA, 21 nt, Human
ccuagcauacguacacauuuu

SEQ ID NO: 2927077 - RNA, 14 nt, Human
ccuaauaaaaaggu

SEQ ID NO: 2927078 - RNA, 20 nt, Human
ccuaauaaaaaggugaccau

SEQ ID NO: 2927079 - RNA, 16 nt, Human
ccuaauaaaaagguga

SEQ ID NO: 2927080 - RNA, 15 nt, Human
ccuaauaaaaaggug

SEQ ID NO: 2927081 - RNA, 22 nt, Human
ccuagccuuagaagucacacag

SEQ ID NO: 2927082 - RNA, 19 nt, Human
ccuagccuuagaagucaca

SEQ ID NO: 2927083 - RNA, 23 nt, Human
ccuagccugugccucugggacug

SEQ ID NO: 2927084 - RNA, 17 nt, Human
ccggccaccugcggugc

SEQ ID NO: 2927085 - RNA, 18 nt, Human
ccggccaccugcggugcu

SEQ ID NO: 2927086 - RNA, 23 nt, Human
ccgcagcccugcagagggcacag

SEQ ID NO: 2927087 - RNA, 18 nt, Human
ccgcagcccugcagaggg

SEQ ID NO: 2927088 - RNA, 14 nt, Human
ccgcagcccugcag

SEQ ID NO: 2927089 - RNA, 19 nt, Human
cccuguggaugcugcugcc

SEQ ID NO: 2927090 - RNA, 14 nt, Human
cccuccuuucacca

SEQ ID NO: 2927091 - RNA, 21 nt, Human
cccugugaguacuacaguccu

SEQ ID NO: 2927092 - RNA, 15 nt, Human
cccugugauggggcc

SEQ ID NO: 2927093 - RNA, 23 nt, Human
cccugugaguacuacaguccucc

SEQ ID NO: 2927094 - RNA, 23 nt, Human
cccuuuuuuggcugcugaaggcu

SEQ ID NO: 2927095 - RNA, 22 nt, Human
cccuuuuuuggcugcugaaggc

SEQ ID NO: 2927096 - RNA, 21 nt, Human
cccuuuuuuggcugcugaagg

SEQ ID NO: 2927097 - RNA, 19 nt, Human
cccuucucuccagccccug

SEQ ID NO: 2927098 - RNA, 14 nt, Human
cccuucucuccagc

SEQ ID NO: 2927099 - RNA, 20 nt, Human
ccuccaagaccuucuccuuc

SEQ ID NO: 2927100 - RNA, 12 nt, Human
ccucccaucacc

SEQ ID NO: 2927101 - RNA, 16 nt, Human
ccuccaagaccuucuc

SEQ ID NO: 2927102 - RNA, 19 nt, Human
ccuccaagaccuucuccuu

SEQ ID NO: 2927103 - RNA, 17 nt, Human
ccuccaagaccuucucc

SEQ ID NO: 2927104 - RNA, 17 nt, Human
ccucccaucacccgcua

SEQ ID NO: 2927105 - RNA, 23 nt, Human
ccucaagugauucuccugccuca

SEQ ID NO: 2927106 - RNA, 20 nt, Human
ccucaagugauucuccugcc

SEQ ID NO: 2927107 - RNA, 18 nt, Human
ccucaggcaggugggaug

SEQ ID NO: 2927108 - RNA, 12 nt, Human
ccucaggcaggu

SEQ ID NO: 2927109 - RNA, 10 nt, Human
ccucaggccu

SEQ ID NO: 2927110 - RNA, 18 nt, Human
ccucauuagcauuuugcu

SEQ ID NO: 2927111 - RNA, 15 nt, Human
ccucaaccuccuggg

SEQ ID NO: 2927112 - RNA, 19 nt, Human
ccucaacucuccuccagag

SEQ ID NO: 2927113 - RNA, 23 nt, Human
ccucaacucuccuccagagucag

SEQ ID NO: 2927114 - RNA, 21 nt, Human
ccucaacucuccuccagaguc

SEQ ID NO: 2927115 - RNA, 16 nt, Human
ccucaacaccucugca

SEQ ID NO: 2927116 - RNA, 13 nt, Human
ccuccgccucuug

SEQ ID NO: 2927117 - RNA, 14 nt, Human
ccuccgccucuugg

SEQ ID NO: 2927118 - RNA, 16 nt, Human
ccucccuucucuucac

SEQ ID NO: 2927119 - RNA, 23 nt, Human
ccuccuuugugaggaagccgcug

SEQ ID NO: 2927120 - RNA, 18 nt, Human
ccuccuuuucacaguucu

SEQ ID NO: 2927121 - RNA, 20 nt, Human
ccucggaccccacuccggcc

SEQ ID NO: 2927122 - RNA, 22 nt, Human
ccucggaccccacuccggcccu

SEQ ID NO: 2927123 - RNA, 14 nt, Human
ccucggagaagagc

SEQ ID NO: 2927124 - RNA, 12 nt, Human
ccucggagaaga

SEQ ID NO: 2927125 - RNA, 16 nt, Human
ccugccucagccuccc

SEQ ID NO: 2927126 - RNA, 15 nt, Human
ccugccucagccucc

SEQ ID NO: 2927127 - RNA, 21 nt, Human
ccugcccaggccccugccacc

SEQ ID NO: 2927128 - RNA, 18 nt, Human
ccugcccaggccccugcc

SEQ ID NO: 2927129 - RNA, 19 nt, Human
ccugcccaggccccugcca

SEQ ID NO: 2927130 - RNA, 19 nt, Human
ccugcccaccuggccucug

SEQ ID NO: 2927131 - RNA, 18 nt, Human
ccugcccaccuggccucu

SEQ ID NO: 2927132 - RNA, 17 nt, Human
ccugcccaccuggccuc

SEQ ID NO: 2927133 - RNA, 15 nt, Human
ccugcccaccuggcc

SEQ ID NO: 2927134 - RNA, 14 nt, Human
ccugcaggcagcca

SEQ ID NO: 2927135 - RNA, 13 nt, Human
ccugcaggcagcc

SEQ ID NO: 2927136 - RNA, 12 nt, Human
ccugcaggcagc

SEQ ID NO: 2927137 - RNA, 16 nt, Human
ccucuuucccucccuu

SEQ ID NO: 2927138 - RNA, 19 nt, Human
ccucuuucccucccuuccu

SEQ ID NO: 2927139 - RNA, 15 nt, Human
ccucuuugagugaag

SEQ ID NO: 2927140 - RNA, 15 nt, Human
ccugggcuacaagga

SEQ ID NO: 2927141 - RNA, 15 nt, Human
ccuggggagaaagua

SEQ ID NO: 2927142 - RNA, 13 nt, Human
ccugguguggaag

SEQ ID NO: 2927143 - RNA, 20 nt, Human
ccugguggcagugggagcug

SEQ ID NO: 2927144 - RNA, 15 nt, Human
ccugguggcaguggg

SEQ ID NO: 2927145 - RNA, 18 nt, Human
ccugguggcagugggagc

SEQ ID NO: 2927146 - RNA, 19 nt, Human
ccugguggcagugggagcu

SEQ ID NO: 2927147 - RNA, 22 nt, Human
ccuggccucaagugauucuccu

SEQ ID NO: 2927148 - RNA, 21 nt, Human
ccuggccccucagggucccug

SEQ ID NO: 2927149 - RNA, 20 nt, Human
ccuggccccucagggucccu

SEQ ID NO: 2927150 - RNA, 18 nt, Human
ccuggccccucagggucc

SEQ ID NO: 2927151 - RNA, 16 nt, Human
ccuggccccucagggu

SEQ ID NO: 2927152 - RNA, 19 nt, Human
ccuggaugcccccugugga

SEQ ID NO: 2927153 - RNA, 16 nt, Human
ccuggaugcccccugu

SEQ ID NO: 2927154 - RNA, 18 nt, Human
ccuggaugcccccugugg

SEQ ID NO: 2927155 - RNA, 18 nt, Human
ccuggauggggcugcacc

SEQ ID NO: 2927156 - RNA, 17 nt, Human
ccuggauggggcugcac

SEQ ID NO: 2927157 - RNA, 15 nt, Human
ccuggauggggcugc

SEQ ID NO: 2927158 - RNA, 13 nt, Human
ccuggaugccauc

SEQ ID NO: 2927159 - RNA, 14 nt, Human
ccuggaugccaucc

SEQ ID NO: 2927160 - RNA, 18 nt, Human
ccuggaugccauccaagu

SEQ ID NO: 2927161 - RNA, 14 nt, Human
ccuggaugcccccu

SEQ ID NO: 2927162 - RNA, 17 nt, Human
ccugucucuacuaaaaa

SEQ ID NO: 2927163 - RNA, 13 nt, Human
cccaagcucugcu

SEQ ID NO: 2927164 - RNA, 14 nt, Human
cccaagcucugcuc

SEQ ID NO: 2927165 - RNA, 12 nt, Human
cccaagcucugc

SEQ ID NO: 2927166 - RNA, 16 nt, Human
cccaagacucccauga

SEQ ID NO: 2927167 - RNA, 20 nt, Human
cccaagacucccaugaggga

SEQ ID NO: 2927168 - RNA, 13 nt, Human
cccaacuccagaa

SEQ ID NO: 2927169 - RNA, 20 nt, Human
cccaacucaccccagcccca

SEQ ID NO: 2927170 - RNA, 17 nt, Human
cccaacucaccccagcc

SEQ ID NO: 2927171 - RNA, 14 nt, Human
cccacuccggcccu

SEQ ID NO: 2927172 - RNA, 12 nt, Human
cccacucccugc

SEQ ID NO: 2927173 - RNA, 13 nt, Human
cccacucccugca

SEQ ID NO: 2927174 - RNA, 19 nt, Human
cccacuccggcccuccaga

SEQ ID NO: 2927175 - RNA, 21 nt, Human
cccacuccggcccuccagagc

SEQ ID NO: 2927176 - RNA, 23 nt, Human
cccacugcuuuuggucuguguga

SEQ ID NO: 2927177 - RNA, 22 nt, Human
cccacugcuuuuggucugugug

SEQ ID NO: 2927178 - RNA, 16 nt, Human
ccauucuuggcccagg

SEQ ID NO: 2927179 - RNA, 15 nt, Human
ccauuggggcuccca

SEQ ID NO: 2927180 - RNA, 16 nt, Human
ccauuggggcucccag

SEQ ID NO: 2927181 - RNA, 17 nt, Human
ccauuggggcucccagc

SEQ ID NO: 2927182 - RNA, 16 nt, Human
cccaacucaccccagc

SEQ ID NO: 2927183 - RNA, 15 nt, Human
cccaacucaccccag

SEQ ID NO: 2927184 - RNA, 23 nt, Human
ccaugagggagaugccaugagcc

SEQ ID NO: 2927185 - RNA, 18 nt, Human
ccaugagggagaugccau

SEQ ID NO: 2927186 - RNA, 19 nt, Human
ccaugagggagaugccaug

SEQ ID NO: 2927187 - RNA, 20 nt, Human
ccaugagggagaugccauga

SEQ ID NO: 2927188 - RNA, 21 nt, Human
ccaugagggagaugccaugag

SEQ ID NO: 2927189 - RNA, 18 nt, Human
ccaugaguccccuguuug

SEQ ID NO: 2927190 - RNA, 17 nt, Human
ccaugagggagaugcca

SEQ ID NO: 2927191 - RNA, 23 nt, Human
ccaugaggaacaaggcaaggcug

SEQ ID NO: 2927192 - RNA, 14 nt, Human
ccaucccucccucc

SEQ ID NO: 2927193 - RNA, 15 nt, Human
ccaucccucccucca

SEQ ID NO: 2927194 - RNA, 20 nt, Human
ccaugaggaacaaggcaagg

SEQ ID NO: 2927195 - RNA, 22 nt, Human
ccaguuggagcagaugccuccc

SEQ ID NO: 2927196 - RNA, 23 nt, Human
ccaguuggguggaugccuggugg

SEQ ID NO: 2927197 - RNA, 13 nt, Human
ccaguuggucccc

SEQ ID NO: 2927198 - RNA, 17 nt, Human
ccauaagcuacugccau

SEQ ID NO: 2927199 - RNA, 18 nt, Human
ccauaagcuacugccauc

SEQ ID NO: 2927200 - RNA, 21 nt, Human
ccauaagcuacugccauccug

SEQ ID NO: 2927201 - RNA, 16 nt, Human
ccauaagcuacugcca

SEQ ID NO: 2927202 - RNA, 20 nt, Human
ccaguuggucccccuuccau

SEQ ID NO: 2927203 - RNA, 18 nt, Human
ccaguuggucccccuucc

SEQ ID NO: 2927204 - RNA, 18 nt, Human
ccauccagguucagcuug

SEQ ID NO: 2927205 - RNA, 19 nt, Human
ccauccagguucagcuugu

SEQ ID NO: 2927206 - RNA, 20 nt, Human
ccaucccaaacccuucagug

SEQ ID NO: 2927207 - RNA, 20 nt, Human
ccaucccauaugccugggca

SEQ ID NO: 2927208 - RNA, 19 nt, Human
ccaucccauaugccugggc

SEQ ID NO: 2927209 - RNA, 13 nt, Human
ccaucccucccuc

SEQ ID NO: 2927210 - RNA, 21 nt, Human
ccaucccauaugccugggcag

SEQ ID NO: 2927211 - RNA, 22 nt, Human
ccauccccuguagagugggagc

SEQ ID NO: 2927212 - RNA, 12 nt, Human
ccaguccugccc

SEQ ID NO: 2927213 - RNA, 13 nt, Human
ccaguccugcccg

SEQ ID NO: 2927214 - RNA, 15 nt, Human
ccaguccugcccgcc

SEQ ID NO: 2927215 - RNA, 16 nt, Human
ccaguccugcccgcca

SEQ ID NO: 2927216 - RNA, 22 nt, Human
ccagucauuauguuaauauuuc

SEQ ID NO: 2927217 - RNA, 21 nt, Human
ccagucauuauguuaauauuu

SEQ ID NO: 2927218 - RNA, 21 nt, Human
ccaggggaaaaucagccugcu

SEQ ID NO: 2927219 - RNA, 12 nt, Human
ccaggcuggcgu

SEQ ID NO: 2927220 - RNA, 23 nt, Human
ccaggcaggucuugaacuccugg

SEQ ID NO: 2927221 - RNA, 12 nt, Human
ccaggcaggucu

SEQ ID NO: 2927222 - RNA, 14 nt, Human
ccaggcaggucuug

SEQ ID NO: 2927223 - RNA, 21 nt, Human
ccagcacuuugggaggcugag

SEQ ID NO: 2927224 - RNA, 23 nt, Human
ccagcacuuugggaggcugaggc

SEQ ID NO: 2927225 - RNA, 17 nt, Human
ccagccccauccucugu

SEQ ID NO: 2927226 - RNA, 15 nt, Human
ccagccccauccucu

SEQ ID NO: 2927227 - RNA, 17 nt, Human
ccagccccagugcccac

SEQ ID NO: 2927228 - RNA, 14 nt, Human
ccagcagagcaccu

SEQ ID NO: 2927229 - RNA, 13 nt, Human
ccagcagagcacc

SEQ ID NO: 2927230 - RNA, 12 nt, Human
ccagcagagcac

SEQ ID NO: 2927231 - RNA, 21 nt, Human
ccagcuacucgggaggcugag

SEQ ID NO: 2927232 - RNA, 23 nt, Human
ccagcuacucgggaggcugaggc

SEQ ID NO: 2927233 - RNA, 24 nt, Human
ccagccccuucugacccaugcugc

SEQ ID NO: 2927234 - RNA, 23 nt, Human
ccagccccuucugacccaugcug

SEQ ID NO: 2927235 - RNA, 15 nt, Human
ccccagauugcaaca

SEQ ID NO: 2927236 - RNA, 20 nt, Human
ccccagauugcaacaggcug

SEQ ID NO: 2927237 - RNA, 15 nt, Human
cccauuugcuccuuu

SEQ ID NO: 2927238 - RNA, 19 nt, Human
cccauucugccugcccagg

SEQ ID NO: 2927239 - RNA, 14 nt, Human
cccauucugccugc

SEQ ID NO: 2927240 - RNA, 15 nt, Human
cccauucugccugcc

SEQ ID NO: 2927241 - RNA, 14 nt, Human
ccccgcacugggcu

SEQ ID NO: 2927242 - RNA, 22 nt, Human
cccauccucuguacagagccca

SEQ ID NO: 2927243 - RNA, 21 nt, Human
cccauccucuguacagagccc

SEQ ID NO: 2927244 - RNA, 22 nt, Human
cccaggcuuagucacugagaca

SEQ ID NO: 2927245 - RNA, 18 nt, Human
cccaggaaaggcuccagg

SEQ ID NO: 2927246 - RNA, 17 nt, Human
cccaggaaaggcuccag

SEQ ID NO: 2927247 - RNA, 20 nt, Human
cccauauuuguacaccaaua

SEQ ID NO: 2927248 - RNA, 16 nt, Human
cccaggaaaggcucca

SEQ ID NO: 2927249 - RNA, 15 nt, Human
cccaggaaaggcucc

SEQ ID NO: 2927250 - RNA, 18 nt, Human
cccagcaauuaugaaaau

SEQ ID NO: 2927251 - RNA, 20 nt, Human
cccagcacaaagcagauccu

SEQ ID NO: 2927252 - RNA, 16 nt, Human
cccagcaauuaugaaa

SEQ ID NO: 2927253 - RNA, 23 nt, Human
cccagcaagugagagcugggugu

SEQ ID NO: 2927254 - RNA, 24 nt, Human
cccagccagcaguucagagcugcc

SEQ ID NO: 2927255 - RNA, 14 nt, Human
cccagccaggcccu

SEQ ID NO: 2927256 - RNA, 12 nt, Human
cccagccaggcc

SEQ ID NO: 2927257 - RNA, 16 nt, Human
cccggccccugcuggu

SEQ ID NO: 2927258 - RNA, 15 nt, Human
cccggccccugcugg

SEQ ID NO: 2927259 - RNA, 15 nt, Human
cccgggaagggggcu

SEQ ID NO: 2927260 - RNA, 13 nt, Human
ccccuucugaccc

SEQ ID NO: 2927261 - RNA, 14 nt, Human
ccccuucugaccca

SEQ ID NO: 2927262 - RNA, 16 nt, Human
cccgaauagcugggac

SEQ ID NO: 2927263 - RNA, 17 nt, Human
cccgaauagcugggacu

SEQ ID NO: 2927264 - RNA, 18 nt, Human
cccgaauagcugggacua

SEQ ID NO: 2927265 - RNA, 16 nt, Human
cccucaacucuccucc

SEQ ID NO: 2927266 - RNA, 16 nt, Human
cccucaacaccucugc

SEQ ID NO: 2927267 - RNA, 21 nt, Human
cccgggaagggggcugggaca

SEQ ID NO: 2927268 - RNA, 18 nt, Human
cccgggaagggggcuggg

SEQ ID NO: 2927269 - RNA, 22 nt, Human
ccccugcacagcaggcugccag

SEQ ID NO: 2927270 - RNA, 23 nt, Human
ccccugcacagcaggcugccagu

SEQ ID NO: 2927271 - RNA, 14 nt, Human
ccccugccacccug

SEQ ID NO: 2927272 - RNA, 16 nt, Human
ccccugccacccuggg

SEQ ID NO: 2927273 - RNA, 13 nt, Human
ccccugaauuuaa

SEQ ID NO: 2927274 - RNA, 15 nt, Human
ccccugacaacacuc

SEQ ID NO: 2927275 - RNA, 17 nt, Human
ccccugaauuuaaauag

SEQ ID NO: 2927276 - RNA, 15 nt, Human
ccccugcacagcagg

SEQ ID NO: 2927277 - RNA, 16 nt, Human
ccccugcacagcaggc

SEQ ID NO: 2927278 - RNA, 21 nt, Human
ccccugcacagcaggcugcca

SEQ ID NO: 2927279 - RNA, 13 nt, Human
ccccugcacucca

SEQ ID NO: 2927280 - RNA, 13 nt, Human
cccuccucugcuu

SEQ ID NO: 2927281 - RNA, 22 nt, Human
cccuccucugcuugccaucccu

SEQ ID NO: 2927282 - RNA, 15 nt, Human
cagucucaggaaauc

SEQ ID NO: 2927283 - RNA, 14 nt, Human
cagugcaguauaga

SEQ ID NO: 2927284 - RNA, 15 nt, Human
cagugccaaaaacaa

SEQ ID NO: 2927285 - RNA, 11 nt, Human
cagugggagcu

SEQ ID NO: 2927286 - RNA, 12 nt, Human
cagugcccacag

SEQ ID NO: 2927287 - RNA, 22 nt, Human
cagugcacuaauguguaagaca

SEQ ID NO: 2927288 - RNA, 19 nt, Human
cagucugauucccaagcuc

SEQ ID NO: 2927289 - RNA, 20 nt, Human
cagucugauucccaagcucu

SEQ ID NO: 2927290 - RNA, 19 nt, Human
cagugcaugcugucccuua

SEQ ID NO: 2927291 - RNA, 23 nt, Human
cagugcaugcugucccuuacgug

SEQ ID NO: 2927292 - RNA, 22 nt, Human
cagugcaugcugucccuuacgu

SEQ ID NO: 2927293 - RNA, 21 nt, Human
cagggucucacucugucgccc

SEQ ID NO: 2927294 - RNA, 17 nt, Human
cagggucucacucuguc

SEQ ID NO: 2927295 - RNA, 18 nt, Human
cagggucucacucugucg

SEQ ID NO: 2927296 - RNA, 22 nt, Human
caggugcacaagcuccaagcuc

SEQ ID NO: 2927297 - RNA, 12 nt, Human
caggguuggccc

SEQ ID NO: 2927298 - RNA, 16 nt, Human
caggugauccacccac

SEQ ID NO: 2927299 - RNA, 17 nt, Human
caggugauccacccacc

SEQ ID NO: 2927300 - RNA, 14 nt, Human
caggugcgaaagga

SEQ ID NO: 2927301 - RNA, 20 nt, Human
caggugcuaggaacacuccu

SEQ ID NO: 2927302 - RNA, 18 nt, Human
caggugcuaggaacacuc

SEQ ID NO: 2927303 - RNA, 14 nt, Human
cagguugguggggg

SEQ ID NO: 2927304 - RNA, 19 nt, Human
cagucaccccggccaccug

SEQ ID NO: 2927305 - RNA, 20 nt, Human
cagucaccccggccaccugc

SEQ ID NO: 2927306 - RNA, 22 nt, Human
cagucaccccggccaccugcgg

SEQ ID NO: 2927307 - RNA, 18 nt, Human
cagguuuaagcuguuacu

SEQ ID NO: 2927308 - RNA, 16 nt, Human
cagguuuaagcuguua

SEQ ID NO: 2927309 - RNA, 17 nt, Human
caggaggccagccuuga

SEQ ID NO: 2927310 - RNA, 18 nt, Human
caggcacccaccaucaug

SEQ ID NO: 2927311 - RNA, 22 nt, Human
caggcacccaccaucaugucug

SEQ ID NO: 2927312 - RNA, 23 nt, Human
caggcacccaccaucaugucugg

SEQ ID NO: 2927313 - RNA, 16 nt, Human
caggaggccagccuug

SEQ ID NO: 2927314 - RNA, 15 nt, Human
caggaggccagccuu

SEQ ID NO: 2927315 - RNA, 14 nt, Human
caggaggccagccu

SEQ ID NO: 2927316 - RNA, 23 nt, Human
caggccagagggagugacagagg

SEQ ID NO: 2927317 - RNA, 16 nt, Human
caggccagagggagug

SEQ ID NO: 2927318 - RNA, 16 nt, Human
caggcagcagacacau

SEQ ID NO: 2927319 - RNA, 15 nt, Human
caggcagcagacaca

SEQ ID NO: 2927320 - RNA, 17 nt, Human
caggcagcagacacaug

SEQ ID NO: 2927321 - RNA, 19 nt, Human
caggccagagggagugaca

SEQ ID NO: 2927322 - RNA, 21 nt, Human
caggccagagggagugacaga

SEQ ID NO: 2927323 - RNA, 22 nt, Human
cagggaguccgaaagggacuug

SEQ ID NO: 2927324 - RNA, 18 nt, Human
cagggaggugaccccagg

SEQ ID NO: 2927325 - RNA, 16 nt, Human
caggcugggcuucagu

SEQ ID NO: 2927326 - RNA, 15 nt, Human
caggcugggcuucag

SEQ ID NO: 2927327 - RNA, 17 nt, Human
caggcugggcuucagug

SEQ ID NO: 2927328 - RNA, 19 nt, Human
caggcugggcuucaguggc

SEQ ID NO: 2927329 - RNA, 17 nt, Human
cagggaggacgcucucu

SEQ ID NO: 2927330 - RNA, 18 nt, Human
cagggaggacgcucucug

SEQ ID NO: 2927331 - RNA, 22 nt, Human
cagaguaggcuauuccugagag

SEQ ID NO: 2927332 - RNA, 22 nt, Human
cagaguaggggucugucuuuua

SEQ ID NO: 2927333 - RNA, 23 nt, Human
cagaguaggggucugucuuuuaa

SEQ ID NO: 2927334 - RNA, 20 nt, Human
cagaguaggggucugucuuu

SEQ ID NO: 2927335 - RNA, 20 nt, Human
cagagucagaaguuucugcc

SEQ ID NO: 2927336 - RNA, 20 nt, Human
cagaggggguggccucccaa

SEQ ID NO: 2927337 - RNA, 19 nt, Human
cagaggggguggccuccca

SEQ ID NO: 2927338 - RNA, 17 nt, Human
cagaggggguggccucc

SEQ ID NO: 2927339 - RNA, 18 nt, Human
cagaggggguggccuccc

SEQ ID NO: 2927340 - RNA, 15 nt, Human
cagauaugauucaaa

SEQ ID NO: 2927341 - RNA, 16 nt, Human
cagauaugauucaaau

SEQ ID NO: 2927342 - RNA, 17 nt, Human
cagauaugauucaaaug

SEQ ID NO: 2927343 - RNA, 19 nt, Human
cagauaugauucaaauguc

SEQ ID NO: 2927344 - RNA, 22 nt, Human
cagagggccugcaagggaguga

SEQ ID NO: 2927345 - RNA, 13 nt, Human
cagagcugcccuc

SEQ ID NO: 2927346 - RNA, 15 nt, Human
cagagcugcccucuc

SEQ ID NO: 2927347 - RNA, 18 nt, Human
cagagcugccaccugccu

SEQ ID NO: 2927348 - RNA, 16 nt, Human
cagagcugccaccugc

SEQ ID NO: 2927349 - RNA, 23 nt, Human
cagaaguuugagaucagccuggg

SEQ ID NO: 2927350 - RNA, 22 nt, Human
cagaaguuugagaucagccugg

SEQ ID NO: 2927351 - RNA, 19 nt, Human
cagaaguuucugccgcagc

SEQ ID NO: 2927352 - RNA, 23 nt, Human
cagaaguuucugccgcagcccug

SEQ ID NO: 2927353 - RNA, 20 nt, Human
cagaaguuugagaucagccu

SEQ ID NO: 2927354 - RNA, 22 nt, Human
cagcacagccucuuagaugcag

SEQ ID NO: 2927355 - RNA, 22 nt, Human
cagccaggccacaagacccuug

SEQ ID NO: 2927356 - RNA, 13 nt, Human
cagccaggccaca

SEQ ID NO: 2927357 - RNA, 12 nt, Human
cagccaggccac

SEQ ID NO: 2927358 - RNA, 14 nt, Human
cagccagcaguuca

SEQ ID NO: 2927359 - RNA, 15 nt, Human
cagccagcaguucag

SEQ ID NO: 2927360 - RNA, 21 nt, Human
cagccagcaguucagagcugc

SEQ ID NO: 2927361 - RNA, 15 nt, Human
cagcagugagacugg

SEQ ID NO: 2927362 - RNA, 23 nt, Human
cagcauauucaggaagcucaggg

SEQ ID NO: 2927363 - RNA, 22 nt, Human
cagcauauucaggaagcucagg

SEQ ID NO: 2927364 - RNA, 19 nt, Human
cagcauauucaggaagcuc

SEQ ID NO: 2927365 - RNA, 17 nt, Human
cagcaguugaaaagacu

SEQ ID NO: 2927366 - RNA, 14 nt, Human
cagcagugagacug

SEQ ID NO: 2927367 - RNA, 21 nt, Human
cagcaguugaaaagacuccaa

SEQ ID NO: 2927368 - RNA, 20 nt, Human
cagcaguugaaaagacucca

SEQ ID NO: 2927369 - RNA, 15 nt, Human
cagcggggacagcuc

SEQ ID NO: 2927370 - RNA, 14 nt, Human
cagcggggacagcu

SEQ ID NO: 2927371 - RNA, 16 nt, Human
cagcggggacagcucc

SEQ ID NO: 2927372 - RNA, 17 nt, Human
cagcggggacagcuccu

SEQ ID NO: 2927373 - RNA, 18 nt, Human
cagccugagcgacaguga

SEQ ID NO: 2927374 - RNA, 19 nt, Human
cagccugagcgacagugag

SEQ ID NO: 2927375 - RNA, 15 nt, Human
cagcccuuagcaggg

SEQ ID NO: 2927376 - RNA, 16 nt, Human
cagcccuuagcaggga

SEQ ID NO: 2927377 - RNA, 21 nt, Human
cagcccuuagcagggaaacag

SEQ ID NO: 2927378 - RNA, 21 nt, Human
cagccccuggaugcagccuca

SEQ ID NO: 2927379 - RNA, 19 nt, Human
cagccccuggaugcagccu

SEQ ID NO: 2927380 - RNA, 18 nt, Human
cagccccuggaugcagcc

SEQ ID NO: 2927381 - RNA, 17 nt, Human
cagccccuggaugcagc

SEQ ID NO: 2927382 - RNA, 14 nt, Human
cagccccuggaugc

SEQ ID NO: 2927383 - RNA, 13 nt, Human
cagccccuggaug

SEQ ID NO: 2927384 - RNA, 12 nt, Human
cagccccuggau

SEQ ID NO: 2927385 - RNA, 21 nt, Human
cagccgagauagccaaggcca

SEQ ID NO: 2927386 - RNA, 20 nt, Human
cagccgagauagccaaggcc

SEQ ID NO: 2927387 - RNA, 15 nt, Human
cagcccuucuuucca

SEQ ID NO: 2927388 - RNA, 19 nt, Human
cagcccuucuuuccacaga

SEQ ID NO: 2927389 - RNA, 20 nt, Human
cagcccuucuuuccacagaa

SEQ ID NO: 2927390 - RNA, 22 nt, Human
cagcuccagcucaccagcccca

SEQ ID NO: 2927391 - RNA, 16 nt, Human
cagcuccagcucacca

SEQ ID NO: 2927392 - RNA, 17 nt, Human
cagcuccagcucaccag

SEQ ID NO: 2927393 - RNA, 18 nt, Human
cagcuccagcucaccagc

SEQ ID NO: 2927394 - RNA, 20 nt, Human
cagcuccagcucaccagccc

SEQ ID NO: 2927395 - RNA, 13 nt, Human
cagcuccagcuca

SEQ ID NO: 2927396 - RNA, 19 nt, Human
cagcuccaagaauuucuag

SEQ ID NO: 2927397 - RNA, 14 nt, Human
cagcuccagcucac

SEQ ID NO: 2927398 - RNA, 15 nt, Human
cagcuccagcucacc

SEQ ID NO: 2927399 - RNA, 16 nt, Human
cagcuccaagaauuuc

SEQ ID NO: 2927400 - RNA, 23 nt, Human
cagcugccuccccuccucugcuu

SEQ ID NO: 2927401 - RNA, 24 nt, Human
cagcugccuccccuccucugcuug

SEQ ID NO: 2927402 - RNA, 21 nt, Human
cagcugccuccccuccucugc

SEQ ID NO: 2927403 - RNA, 22 nt, Human
cagcugccuccccuccucugcu

SEQ ID NO: 2927404 - RNA, 16 nt, Human
cagcuccccucggaga

SEQ ID NO: 2927405 - RNA, 18 nt, Human
cagcuccccucggagaag

SEQ ID NO: 2927406 - RNA, 17 nt, Human
cagcuccccucggagaa

SEQ ID NO: 2927407 - RNA, 18 nt, Human
cagcugugcucuggacag

SEQ ID NO: 2927408 - RNA, 15 nt, Human
cagcuucauuuccug

SEQ ID NO: 2927409 - RNA, 18 nt, Human
cagcuucauuuccugugu

SEQ ID NO: 2927410 - RNA, 20 nt, Human
caggaaagagaacuuccaga

SEQ ID NO: 2927411 - RNA, 15 nt, Human
caggaaaggcuccag

SEQ ID NO: 2927412 - RNA, 14 nt, Human
caggaaaggcucca

SEQ ID NO: 2927413 - RNA, 23 nt, Human
caggaaaucaaauaugcaaagca

SEQ ID NO: 2927414 - RNA, 22 nt, Human
caggaaaucaaauaugcaaagc

SEQ ID NO: 2927415 - RNA, 14 nt, Human
cauccccuguagag

SEQ ID NO: 2927416 - RNA, 19 nt, Human
caucccauaugccugggca

SEQ ID NO: 2927417 - RNA, 21 nt, Human
caucugcgggggcagugcuca

SEQ ID NO: 2927418 - RNA, 19 nt, Human
caucugcgggggcagugcu

SEQ ID NO: 2927419 - RNA, 20 nt, Human
caucugcgggggcagugcuc

SEQ ID NO: 2927420 - RNA, 17 nt, Human
caucugcgggggcagug

SEQ ID NO: 2927421 - RNA, 17 nt, Human
caucccagccccaauga

SEQ ID NO: 2927422 - RNA, 19 nt, Human
caucaggccaggcccucug

SEQ ID NO: 2927423 - RNA, 16 nt, Human
caucaggccaggcccu

SEQ ID NO: 2927424 - RNA, 14 nt, Human
caucaggccaggcc

SEQ ID NO: 2927425 - RNA, 15 nt, Human
caucaggccaggccc

SEQ ID NO: 2927426 - RNA, 15 nt, Human
cauauucaggaagcu

SEQ ID NO: 2927427 - RNA, 14 nt, Human
cauauucaggaagc

SEQ ID NO: 2927428 - RNA, 20 nt, Human
cauauucaggaagcucaggg

SEQ ID NO: 2927429 - RNA, 22 nt, Human
cauauucaggaagcucagggcc

SEQ ID NO: 2927430 - RNA, 20 nt, Human
cauaugccugggcagaagga

SEQ ID NO: 2927431 - RNA, 15 nt, Human
cauaugccugggcag

SEQ ID NO: 2927432 - RNA, 22 nt, Human
cauaugccugggcagaaggaag

SEQ ID NO: 2927433 - RNA, 19 nt, Human
cauagcagagaaugaaagg

SEQ ID NO: 2927434 - RNA, 22 nt, Human
cauagcagagaaugaaagggcc

SEQ ID NO: 2927435 - RNA, 13 nt, Human
cauagcugugauu

SEQ ID NO: 2927436 - RNA, 15 nt, Human
cauagcugugauuuu

SEQ ID NO: 2927437 - RNA, 18 nt, Human
cauagcugugauuuuugg

SEQ ID NO: 2927438 - RNA, 15 nt, Human
caugcugcccuguga

SEQ ID NO: 2927439 - RNA, 14 nt, Human
caugcugcccugug

SEQ ID NO: 2927440 - RNA, 23 nt, Human
caugacacgaauauugcugaugg

SEQ ID NO: 2927441 - RNA, 21 nt, Human
caugacacgaauauugcugau

SEQ ID NO: 2927442 - RNA, 15 nt, Human
caugaaguaauaugc

SEQ ID NO: 2927443 - RNA, 19 nt, Human
caugaaguaauaugcacac

SEQ ID NO: 2927444 - RNA, 22 nt, Human
caugaaguaauaugcacacauu

SEQ ID NO: 2927445 - RNA, 23 nt, Human
caugaaguaauaugcacacauuu

SEQ ID NO: 2927446 - RNA, 16 nt, Human
caugcacgugugugca

SEQ ID NO: 2927447 - RNA, 13 nt, Human
caugcuccuggcc

SEQ ID NO: 2927448 - RNA, 13 nt, Human
caugcugcccugu

SEQ ID NO: 2927449 - RNA, 12 nt, Human
caugcugcccug

SEQ ID NO: 2927450 - RNA, 24 nt, Human
caugauuaaccacuucagcugacu

SEQ ID NO: 2927451 - RNA, 23 nt, Human
caugauuaaccacuucagcugac

SEQ ID NO: 2927452 - RNA, 22 nt, Human
caugauuaaccacuucagcuga

SEQ ID NO: 2927453 - RNA, 13 nt, Human
caugucagacaca

SEQ ID NO: 2927454 - RNA, 14 nt, Human
caugucagacacag

SEQ ID NO: 2927455 - RNA, 12 nt, Human
cauuccuguucc

SEQ ID NO: 2927456 - RNA, 12 nt, Human
cauguuggccag

SEQ ID NO: 2927457 - RNA, 13 nt, Human
cauguuggccagg

SEQ ID NO: 2927458 - RNA, 18 nt, Human
cauguccaagaagcccag

SEQ ID NO: 2927459 - RNA, 20 nt, Human
cauguccaagaagcccagga

SEQ ID NO: 2927460 - RNA, 19 nt, Human
cauguccaagaagcccagg

SEQ ID NO: 2927461 - RNA, 14 nt, Human
cauuagguugugaa

SEQ ID NO: 2927462 - RNA, 15 nt, Human
cauuagguugugaau

SEQ ID NO: 2927463 - RNA, 16 nt, Human
cauuagguugugaaug

SEQ ID NO: 2927464 - RNA, 22 nt, Human
cauuaggugugacugaauuucu

SEQ ID NO: 2927465 - RNA, 12 nt, Human
cauuaucucaaa

SEQ ID NO: 2927466 - RNA, 23 nt, Human
cauuaucuagauacuguaucaug

SEQ ID NO: 2927467 - RNA, 13 nt, Human
cauuaucucaaaa

SEQ ID NO: 2927468 - RNA, 13 nt, Human
cauuaguuuugaa

SEQ ID NO: 2927469 - RNA, 12 nt, Human
ccaagcuggucc

SEQ ID NO: 2927470 - RNA, 19 nt, Human
ccaagcuggucccacucag

SEQ ID NO: 2927471 - RNA, 14 nt, Human
ccaagaagcccagg

SEQ ID NO: 2927472 - RNA, 15 nt, Human
ccaaggccaaaggaa

SEQ ID NO: 2927473 - RNA, 22 nt, Human
ccaaauggaaaugggcagagca

SEQ ID NO: 2927474 - RNA, 15 nt, Human
ccaacgucugugcca

SEQ ID NO: 2927475 - RNA, 13 nt, Human
ccaacgucugugc

SEQ ID NO: 2927476 - RNA, 13 nt, Human
ccaagaagcccag

SEQ ID NO: 2927477 - RNA, 16 nt, Human
ccaaggccaaaggaag

SEQ ID NO: 2927478 - RNA, 19 nt, Human
cauuuuuuaaaugcaccug

SEQ ID NO: 2927479 - RNA, 15 nt, Human
cauuuuuuaaaugca

SEQ ID NO: 2927480 - RNA, 16 nt, Human
cauuuuuuaaaugcac

SEQ ID NO: 2927481 - RNA, 14 nt, Human
cauuuauucugcuc

SEQ ID NO: 2927482 - RNA, 15 nt, Human
cauuuauucugcuca

SEQ ID NO: 2927483 - RNA, 14 nt, Human
cauuugucccaagu

SEQ ID NO: 2927484 - RNA, 16 nt, Human
cauuugucccaagugc

SEQ ID NO: 2927485 - RNA, 18 nt, Human
cauuugucccaagugcca

SEQ ID NO: 2927486 - RNA, 19 nt, Human
cauuugucccaagugccaa

SEQ ID NO: 2927487 - RNA, 17 nt, Human
cauuugucacacacuuu

SEQ ID NO: 2927488 - RNA, 12 nt, Human
cauuugucccaa

SEQ ID NO: 2927489 - RNA, 13 nt, Human
cauuugucccaag

SEQ ID NO: 2927490 - RNA, 15 nt, Human
cauuuggauuggaug

SEQ ID NO: 2927491 - RNA, 18 nt, Human
ccacgcuggaccuugaac

SEQ ID NO: 2927492 - RNA, 18 nt, Human
ccaccuuggcugcaggga

SEQ ID NO: 2927493 - RNA, 19 nt, Human
ccaccuuggcugcagggag

SEQ ID NO: 2927494 - RNA, 12 nt, Human
ccaccuuggcug

SEQ ID NO: 2927495 - RNA, 14 nt, Human
ccaccuuggcugca

SEQ ID NO: 2927496 - RNA, 15 nt, Human
ccaccuuggcugcag

SEQ ID NO: 2927497 - RNA, 16 nt, Human
ccaccuuggcugcagg

SEQ ID NO: 2927498 - RNA, 19 nt, Human
ccaccgccuugcccagccu

SEQ ID NO: 2927499 - RNA, 16 nt, Human
ccaccgccuugcccag

SEQ ID NO: 2927500 - RNA, 17 nt, Human
ccaccgccuugcccagc

SEQ ID NO: 2927501 - RNA, 19 nt, Human
ccaccaucaugucuggcua

SEQ ID NO: 2927502 - RNA, 18 nt, Human
ccaccaucaccagacagg

SEQ ID NO: 2927503 - RNA, 20 nt, Human
ccaccagugccucucccugc

SEQ ID NO: 2927504 - RNA, 19 nt, Human
ccaccagugccucucccug

SEQ ID NO: 2927505 - RNA, 18 nt, Human
ccaccaucaugucuggcu

SEQ ID NO: 2927506 - RNA, 12 nt, Human
ccaccagugccu

SEQ ID NO: 2927507 - RNA, 13 nt, Human
ccaccagugccuc

SEQ ID NO: 2927508 - RNA, 14 nt, Human
ccaccagugccucu

SEQ ID NO: 2927509 - RNA, 15 nt, Human
ccaccagugccucuc

SEQ ID NO: 2927510 - RNA, 17 nt, Human
ccaccagugccucuccc

SEQ ID NO: 2927511 - RNA, 22 nt, Human
ccacagagaaaguacuucucca

SEQ ID NO: 2927512 - RNA, 18 nt, Human
ccacagaagcuccaggua

SEQ ID NO: 2927513 - RNA, 18 nt, Human
ccaccagucugacuguuu

SEQ ID NO: 2927514 - RNA, 16 nt, Human
ccacagaagcuccagg

SEQ ID NO: 2927515 - RNA, 20 nt, Human
auuucauaccuaucaucuua

SEQ ID NO: 2927516 - RNA, 14 nt, Human
auuucuaugaaaua

SEQ ID NO: 2927517 - RNA, 16 nt, Human
auuuaaugaaagacug

SEQ ID NO: 2927518 - RNA, 15 nt, Human
auuuaaugaaagacu

SEQ ID NO: 2927519 - RNA, 20 nt, Human
auuuaaugaaagacuguaca

SEQ ID NO: 2927520 - RNA, 21 nt, Human
auuuaaugaaagacuguacaa

SEQ ID NO: 2927521 - RNA, 16 nt, Human
auuuaauaaaugugcc

SEQ ID NO: 2927522 - RNA, 16 nt, Human
auuguugucugcaacu

SEQ ID NO: 2927523 - RNA, 15 nt, Human
auuguuuaaaaucau

SEQ ID NO: 2927524 - RNA, 17 nt, Human
auucuccuuguguuacu

SEQ ID NO: 2927525 - RNA, 18 nt, Human
auucuccuuguguuacua

SEQ ID NO: 2927526 - RNA, 19 nt, Human
auucuccuuguguuacuaa

SEQ ID NO: 2927527 - RNA, 21 nt, Human
auucuccuuguguuacuaagu

SEQ ID NO: 2927528 - RNA, 22 nt, Human
auucuccuuguguuacuaaguu

SEQ ID NO: 2927529 - RNA, 17 nt, Human
auucucuaguuugauua

SEQ ID NO: 2927530 - RNA, 18 nt, Human
auucucuaguuugauuaa

SEQ ID NO: 2927531 - RNA, 19 nt, Human
auucuucugcuucagccuc

SEQ ID NO: 2927532 - RNA, 20 nt, Human
auucuucugcuucagccucc

SEQ ID NO: 2927533 - RNA, 22 nt, Human
auucuucuguacgucugacagg

SEQ ID NO: 2927534 - RNA, 14 nt, Human
auucuugcaaagua

SEQ ID NO: 2927535 - RNA, 15 nt, Human
auucuugcaaaguau

SEQ ID NO: 2927536 - RNA, 16 nt, Human
auucuugcaaaguauc

SEQ ID NO: 2927537 - RNA, 14 nt, Human
auuauggaaacaga

SEQ ID NO: 2927538 - RNA, 18 nt, Human
auucaaauguauuacagu

SEQ ID NO: 2927539 - RNA, 16 nt, Human
auucaaaugucuauaa

SEQ ID NO: 2927540 - RNA, 18 nt, Human
auucaacagguuuuccug

SEQ ID NO: 2927541 - RNA, 14 nt, Human
auuaaaugacucuu

SEQ ID NO: 2927542 - RNA, 12 nt, Human
auuaaaugacuc

SEQ ID NO: 2927543 - RNA, 13 nt, Human
auuaaaugacucu

SEQ ID NO: 2927544 - RNA, 19 nt, Human
auuaaaugcccagccccuu

SEQ ID NO: 2927545 - RNA, 17 nt, Human
auuaaaugcccagcccc

SEQ ID NO: 2927546 - RNA, 22 nt, Human
auuaugaauuacauuuguauaa

SEQ ID NO: 2927547 - RNA, 19 nt, Human
auuaugaauuacauuugua

SEQ ID NO: 2927548 - RNA, 20 nt, Human
auuaugaauuacauuuguau

SEQ ID NO: 2927549 - RNA, 23 nt, Human
caaaugcuguaacuuucugaaau

SEQ ID NO: 2927550 - RNA, 21 nt, Human
caaaucugcuuuuuaaagaau

SEQ ID NO: 2927551 - RNA, 21 nt, Human
caaaucuuaacuugaaggagu

SEQ ID NO: 2927552 - RNA, 20 nt, Human
caaaguagaucaugcauaga

SEQ ID NO: 2927553 - RNA, 22 nt, Human
caaaguagaagucuuagaugua

SEQ ID NO: 2927554 - RNA, 17 nt, Human
caaaguagaucaugcau

SEQ ID NO: 2927555 - RNA, 19 nt, Human
caaaguaucccuacuguaa

SEQ ID NO: 2927556 - RNA, 21 nt, Human
caaaguaucccuacuguaauu

SEQ ID NO: 2927557 - RNA, 22 nt, Human
caaagcagugcaugcugucccu

SEQ ID NO: 2927558 - RNA, 21 nt, Human
caaagcagugcaugcuguccc

SEQ ID NO: 2927559 - RNA, 18 nt, Human
caaagcagugcaugcugu

SEQ ID NO: 2927560 - RNA, 14 nt, Human
caaagauauuuugc

SEQ ID NO: 2927561 - RNA, 16 nt, Human
caaagauauuuugcuu

SEQ ID NO: 2927562 - RNA, 18 nt, Human
caacucaccccagcccca

SEQ ID NO: 2927563 - RNA, 17 nt, Human
caacucaccccagcccc

SEQ ID NO: 2927564 - RNA, 17 nt, Human
caacucauauuuucaug

SEQ ID NO: 2927565 - RNA, 22 nt, Human
caagaauugaagcaggacuaaa

SEQ ID NO: 2927566 - RNA, 14 nt, Human
caacucuccuccag

SEQ ID NO: 2927567 - RNA, 19 nt, Human
caagacccaaaaggcagaa

SEQ ID NO: 2927568 - RNA, 17 nt, Human
caagaccacguuucuaa

SEQ ID NO: 2927569 - RNA, 18 nt, Human
caagaccacguuucuaaa

SEQ ID NO: 2927570 - RNA, 24 nt, Human
caaacccaguguuuuaggagcaug

SEQ ID NO: 2927571 - RNA, 17 nt, Human
caaacagucucccuucc

SEQ ID NO: 2927572 - RNA, 17 nt, Human
caaacagucucaggaaa

SEQ ID NO: 2927573 - RNA, 16 nt, Human
caaacagucucaggaa

SEQ ID NO: 2927574 - RNA, 15 nt, Human
caaacagucucagga

SEQ ID NO: 2927575 - RNA, 21 nt, Human
caaaaggauaaugaauacuuu

SEQ ID NO: 2927576 - RNA, 19 nt, Human
caaaagcugggcagguugg

SEQ ID NO: 2927577 - RNA, 22 nt, Human
auuuuuuuuuccuucagugccu

SEQ ID NO: 2927578 - RNA, 20 nt, Human
auuuuuuuuuccuucagugc

SEQ ID NO: 2927579 - RNA, 16 nt, Human
auuuuuuugagacaga

SEQ ID NO: 2927580 - RNA, 18 nt, Human
auuuuuuuuuccuucagu

SEQ ID NO: 2927581 - RNA, 15 nt, Human
auuuuuauauuugaa

SEQ ID NO: 2927582 - RNA, 14 nt, Human
auuuuuagacagag

SEQ ID NO: 2927583 - RNA, 16 nt, Human
auuuuuaagugcugca

SEQ ID NO: 2927584 - RNA, 18 nt, Human
auuuuuaagugcugcauu

SEQ ID NO: 2927585 - RNA, 19 nt, Human
auuuuuaagugcugcauuu

SEQ ID NO: 2927586 - RNA, 13 nt, Human
auuuugaaauugu

SEQ ID NO: 2927587 - RNA, 15 nt, Human
auuuugaaauuguuu

SEQ ID NO: 2927588 - RNA, 13 nt, Human
auuuuaugucuuu

SEQ ID NO: 2927589 - RNA, 19 nt, Human
auuuuagggguagcauuug

SEQ ID NO: 2927590 - RNA, 21 nt, Human
auuuuauaucaauuuaaaaaa

SEQ ID NO: 2927591 - RNA, 17 nt, Human
cacauuuuauuuuauua

SEQ ID NO: 2927592 - RNA, 19 nt, Human
cacauuuuauuuuauuaug

SEQ ID NO: 2927593 - RNA, 20 nt, Human
cacauuuuauuuuauuaugc

SEQ ID NO: 2927594 - RNA, 21 nt, Human
cacauuuuauuuuauuaugca

SEQ ID NO: 2927595 - RNA, 15 nt, Human
cacaucuguuuugua

SEQ ID NO: 2927596 - RNA, 14 nt, Human
caccaacgucugug

SEQ ID NO: 2927597 - RNA, 16 nt, Human
caccaacgucugugcc

SEQ ID NO: 2927598 - RNA, 22 nt, Human
cacaucuaguaguuguucugaa

SEQ ID NO: 2927599 - RNA, 23 nt, Human
cacaucuaguaguuguucugaaa

SEQ ID NO: 2927600 - RNA, 18 nt, Human
cacccaggaacuccugac

SEQ ID NO: 2927601 - RNA, 16 nt, Human
cacccaggagccccga

SEQ ID NO: 2927602 - RNA, 18 nt, Human
cacccaccucagccuccc

SEQ ID NO: 2927603 - RNA, 16 nt, Human
caccagccccagugcc

SEQ ID NO: 2927604 - RNA, 13 nt, Human
caccagccccagu

SEQ ID NO: 2927605 - RNA, 17 nt, Human
cacccaccucagccucc

SEQ ID NO: 2927606 - RNA, 15 nt, Human
cacacuuuggcccag

SEQ ID NO: 2927607 - RNA, 18 nt, Human
cacacuuuggcccagggu

SEQ ID NO: 2927608 - RNA, 19 nt, Human
cacacuuuggcccagggug

SEQ ID NO: 2927609 - RNA, 10 nt, Human
cacacauuuu

SEQ ID NO: 2927610 - RNA, 11 nt, Human
cacacauuuuu

SEQ ID NO: 2927611 - RNA, 12 nt, Human
cacacauuuuuu

SEQ ID NO: 2927612 - RNA, 16 nt, Human
cacacauuuuuuaaau

SEQ ID NO: 2927613 - RNA, 19 nt, Human
cacacauuuuuuaaaugca

SEQ ID NO: 2927614 - RNA, 20 nt, Human
cacacauuuuuuaaaugcac

SEQ ID NO: 2927615 - RNA, 17 nt, Human
cacagcucuucuccagg

SEQ ID NO: 2927616 - RNA, 14 nt, Human
cacagcucuucucc

SEQ ID NO: 2927617 - RNA, 15 nt, Human
cacagcucuucucca

SEQ ID NO: 2927618 - RNA, 15 nt, Human
cacagcucuguccug

SEQ ID NO: 2927619 - RNA, 16 nt, Human
cacagcucuguccugg

SEQ ID NO: 2927620 - RNA, 18 nt, Human
cacagcucuguccuggga

SEQ ID NO: 2927621 - RNA, 11 nt, Human
cacagcucugu

SEQ ID NO: 2927622 - RNA, 14 nt, Human
cacagcucuguccu

SEQ ID NO: 2927623 - RNA, 18 nt, Human
cacagacccugcccugug

SEQ ID NO: 2927624 - RNA, 13 nt, Human
cacagaagaugaa

SEQ ID NO: 2927625 - RNA, 14 nt, Human
cacagacccugccc

SEQ ID NO: 2927626 - RNA, 17 nt, Human
cacagacccugcccugu

SEQ ID NO: 2927627 - RNA, 16 nt, Human
cacagacccugcccug

SEQ ID NO: 2927628 - RNA, 23 nt, Human
caauugaaguaaaauguggcagg

SEQ ID NO: 2927629 - RNA, 15 nt, Human
caaugggagcucaug

SEQ ID NO: 2927630 - RNA, 19 nt, Human
cacaagagcccaggccucc

SEQ ID NO: 2927631 - RNA, 18 nt, Human
cacaagagcccaggccuc

SEQ ID NO: 2927632 - RNA, 19 nt, Human
cacaagcuccaagcuccca

SEQ ID NO: 2927633 - RNA, 18 nt, Human
cacaagcuccaagcuccc

SEQ ID NO: 2927634 - RNA, 20 nt, Human
cacaagagcccaggccuccu

SEQ ID NO: 2927635 - RNA, 17 nt, Human
cacaagagcccaggccu

SEQ ID NO: 2927636 - RNA, 13 nt, Human
caaucaugucagu

SEQ ID NO: 2927637 - RNA, 16 nt, Human
caauggcagccuuggc

SEQ ID NO: 2927638 - RNA, 12 nt, Human
caaugcuggcug

SEQ ID NO: 2927639 - RNA, 20 nt, Human
caaugcuggcuguuggcugg

SEQ ID NO: 2927640 - RNA, 21 nt, Human
caaugcuggcuguuggcuggg

SEQ ID NO: 2927641 - RNA, 13 nt, Human
caaugcuggcugu

SEQ ID NO: 2927642 - RNA, 21 nt, Human
cacaagcuccaagcucccagg

SEQ ID NO: 2927643 - RNA, 20 nt, Human
cacaagcuccaagcucccag

SEQ ID NO: 2927644 - RNA, 21 nt, Human
caaggccaaaggaagcacaug

SEQ ID NO: 2927645 - RNA, 20 nt, Human
caaggccaaaggaagcacau

SEQ ID NO: 2927646 - RNA, 19 nt, Human
caaggccaaaggaagcaca

SEQ ID NO: 2927647 - RNA, 16 nt, Human
caaggcaaggcuguca

SEQ ID NO: 2927648 - RNA, 17 nt, Human
caaggcaaggcugucaa

SEQ ID NO: 2927649 - RNA, 18 nt, Human
caaggcaaggcugucaau

SEQ ID NO: 2927650 - RNA, 21 nt, Human
caaggccuuccccuggcacug

SEQ ID NO: 2927651 - RNA, 18 nt, Human
caaggccuuccccuggca

SEQ ID NO: 2927652 - RNA, 21 nt, Human
caaggccugucagcuaaagaa

SEQ ID NO: 2927653 - RNA, 21 nt, Human
caagucagucauucagauaug

SEQ ID NO: 2927654 - RNA, 12 nt, Human
caaguuugaauu

SEQ ID NO: 2927655 - RNA, 20 nt, Human
caauaaaauccauacauuug

SEQ ID NO: 2927656 - RNA, 23 nt, Human
caauaaaauccauacauuugugu

SEQ ID NO: 2927657 - RNA, 15 nt, Human
caauaaaauggguuu

SEQ ID NO: 2927658 - RNA, 12 nt, Human
caccucagccuc

SEQ ID NO: 2927659 - RNA, 21 nt, Human
caccuuuuucauacaaggccc

SEQ ID NO: 2927660 - RNA, 19 nt, Human
caccuuuuucauacaaggc

SEQ ID NO: 2927661 - RNA, 14 nt, Human
caccuuucccaucu

SEQ ID NO: 2927662 - RNA, 18 nt, Human
caccuuggcugcagggag

SEQ ID NO: 2927663 - RNA, 15 nt, Human
caccuuggcugcagg

SEQ ID NO: 2927664 - RNA, 16 nt, Human
caccuuggcugcaggg

SEQ ID NO: 2927665 - RNA, 20 nt, Human
cacucuuauugcccacgcug

SEQ ID NO: 2927666 - RNA, 21 nt, Human
cacucuuauugcccacgcugg

SEQ ID NO: 2927667 - RNA, 22 nt, Human
cacucuuauugcccacgcugga

SEQ ID NO: 2927668 - RNA, 14 nt, Human
cacggcucacugca

SEQ ID NO: 2927669 - RNA, 17 nt, Human
cacggccaggccagagg

SEQ ID NO: 2927670 - RNA, 12 nt, Human
cacggccaggcc

SEQ ID NO: 2927671 - RNA, 13 nt, Human
cacggccaggcca

SEQ ID NO: 2927672 - RNA, 20 nt, Human
cacucugucgcccagucugg

SEQ ID NO: 2927673 - RNA, 13 nt, Human
cacuccagccugg

SEQ ID NO: 2927674 - RNA, 14 nt, Human
cacuccagccuggg

SEQ ID NO: 2927675 - RNA, 23 nt, Human
cacuccagccugagcgacaguga

SEQ ID NO: 2927676 - RNA, 16 nt, Human
cacuacauucuguuaa

SEQ ID NO: 2927677 - RNA, 17 nt, Human
cacuacauucuguuaau

SEQ ID NO: 2927678 - RNA, 21 nt, Human
cacuacauucuguuaaucauu

SEQ ID NO: 2927679 - RNA, 13 nt, Human
cacuccagccuga

SEQ ID NO: 2927680 - RNA, 12 nt, Human
cacuccagccug

SEQ ID NO: 2927681 - RNA, 16 nt, Human
cagaaauguacagcaa

SEQ ID NO: 2927682 - RNA, 16 nt, Human
cagaaguuucugccgc

SEQ ID NO: 2927683 - RNA, 14 nt, Human
cagaaguuucugcc

SEQ ID NO: 2927684 - RNA, 11 nt, Human
cagaacaguga

SEQ ID NO: 2927685 - RNA, 12 nt, Human
cagaacagugau

SEQ ID NO: 2927686 - RNA, 17 nt, Human
cagaacagugauuacca

SEQ ID NO: 2927687 - RNA, 13 nt, Human
cacuuucuagcca

SEQ ID NO: 2927688 - RNA, 17 nt, Human
cacuuucuagccagagg

SEQ ID NO: 2927689 - RNA, 16 nt, Human
cacuuucuagccagag

SEQ ID NO: 2927690 - RNA, 13 nt, Human
cacuuuaaaacac

SEQ ID NO: 2927691 - RNA, 18 nt, Human
cacuuguguuaugaagca

SEQ ID NO: 2927692 - RNA, 17 nt, Human
cacugccaugccagcuu

SEQ ID NO: 2927693 - RNA, 20 nt, Human
cacugcagccucaaccuccu

SEQ ID NO: 2927694 - RNA, 21 nt, Human
cacugcagccucaaccuccug

SEQ ID NO: 2927695 - RNA, 22 nt, Human
cacugcagccucaaccuccugg

SEQ ID NO: 2927696 - RNA, 23 nt, Human
cacugcagccucaaccuccuggg

SEQ ID NO: 2927697 - RNA, 19 nt, Human
cacugcagccucaaccucc

SEQ ID NO: 2927698 - RNA, 14 nt, Human
cacugcagccucaa

SEQ ID NO: 2927699 - RNA, 18 nt, Human
cacuggguguaaacacau

SEQ ID NO: 2927700 - RNA, 23 nt, Human
cacuguugcccaggcuggcgugc

SEQ ID NO: 2927701 - RNA, 18 nt, Human
cacuguugcccaggcugg

SEQ ID NO: 2927702 - RNA, 19 nt, Human
cacuguugcccaggcuggc

SEQ ID NO: 2927703 - RNA, 15 nt, Human
cacuuaaaaaugguu

SEQ ID NO: 2927704 - RNA, 18 nt, Human
cuggcagaguugaagaca

SEQ ID NO: 2927705 - RNA, 17 nt, Human
cuggcagaguugaagac

SEQ ID NO: 2927706 - RNA, 12 nt, Human
cuggcagccccu

SEQ ID NO: 2927707 - RNA, 11 nt, Human
cuggcagccca

SEQ ID NO: 2927708 - RNA, 11 nt, Human
cugggacacag

SEQ ID NO: 2927709 - RNA, 14 nt, Human
cuggccuagcauac

SEQ ID NO: 2927710 - RNA, 22 nt, Human
cuggccccucagggucccuggu

SEQ ID NO: 2927711 - RNA, 15 nt, Human
cugggcagaaggaag

SEQ ID NO: 2927712 - RNA, 12 nt, Human
cugggcagaagg

SEQ ID NO: 2927713 - RNA, 14 nt, Human
cuggggagaaagua

SEQ ID NO: 2927714 - RNA, 18 nt, Human
cuggguucacugcaaccu

SEQ ID NO: 2927715 - RNA, 20 nt, Human
cuggguucacugcaaccucc

SEQ ID NO: 2927716 - RNA, 15 nt, Human
cuggguucacugcaa

SEQ ID NO: 2927717 - RNA, 18 nt, Human
cuggauauagcuagguga

SEQ ID NO: 2927718 - RNA, 19 nt, Human
cuggauaguccgucucugc

SEQ ID NO: 2927719 - RNA, 18 nt, Human
cuggauaguccgucucug

SEQ ID NO: 2927720 - RNA, 19 nt, Human
cugcuuuugucuaugggac

SEQ ID NO: 2927721 - RNA, 21 nt, Human
cugcuuuugucuaugggacuc

SEQ ID NO: 2927722 - RNA, 19 nt, Human
cugcuuuuuaaagaaugcu

SEQ ID NO: 2927723 - RNA, 23 nt, Human
cuggacugagggggccuggaugc

SEQ ID NO: 2927724 - RNA, 20 nt, Human
cuggacugagggggccugga

SEQ ID NO: 2927725 - RNA, 21 nt, Human
cuggacugagggggccuggau

SEQ ID NO: 2927726 - RNA, 22 nt, Human
cuggacugagggggccuggaug

SEQ ID NO: 2927727 - RNA, 18 nt, Human
cuggacugagggggccug

SEQ ID NO: 2927728 - RNA, 14 nt, Human
cuggagaaaaugga

SEQ ID NO: 2927729 - RNA, 14 nt, Human
cugcuucaaauauu

SEQ ID NO: 2927730 - RNA, 20 nt, Human
cugcuucaaggauccugagc

SEQ ID NO: 2927731 - RNA, 20 nt, Human
cugcuuuugucuaugggacu

SEQ ID NO: 2927732 - RNA, 23 nt, Human
cugcuucaaggauccugagccag

SEQ ID NO: 2927733 - RNA, 22 nt, Human
cugcuucaaggauccugagcca

SEQ ID NO: 2927734 - RNA, 21 nt, Human
cugcuucaaggauccugagcc

SEQ ID NO: 2927735 - RNA, 13 nt, Human
cugcuucaaggau

SEQ ID NO: 2927736 - RNA, 12 nt, Human
cugcuucaagga

SEQ ID NO: 2927737 - RNA, 19 nt, Human
cugcuucaaauauuucccu

SEQ ID NO: 2927738 - RNA, 21 nt, Human
cugcugacuguuuucucuuga

SEQ ID NO: 2927739 - RNA, 18 nt, Human
cugcugacuguuuucucu

SEQ ID NO: 2927740 - RNA, 23 nt, Human
cugccuguugggccaggagccuc

SEQ ID NO: 2927741 - RNA, 22 nt, Human
cugccuguugggccaggagccu

SEQ ID NO: 2927742 - RNA, 21 nt, Human
cugccuguugggccaggagcc

SEQ ID NO: 2927743 - RNA, 21 nt, Human
cugccuccccuccucugcuug

SEQ ID NO: 2927744 - RNA, 17 nt, Human
cugccuguucagcucca

SEQ ID NO: 2927745 - RNA, 18 nt, Human
cugccuguucagcuccag

SEQ ID NO: 2927746 - RNA, 19 nt, Human
cugccuguucagcuccagc

SEQ ID NO: 2927747 - RNA, 20 nt, Human
cugccuguugggccaggagc

SEQ ID NO: 2927748 - RNA, 15 nt, Human
cugccucucccauca

SEQ ID NO: 2927749 - RNA, 22 nt, Human
cugccucucccaucacuucccu

SEQ ID NO: 2927750 - RNA, 23 nt, Human
cugccucucccaucacuucccua

SEQ ID NO: 2927751 - RNA, 17 nt, Human
cugucggagcccugucu

SEQ ID NO: 2927752 - RNA, 15 nt, Human
cugucgcccagucug

SEQ ID NO: 2927753 - RNA, 16 nt, Human
cugucgcccagucugg

SEQ ID NO: 2927754 - RNA, 21 nt, Human
cuguccugggagugagcuggu

SEQ ID NO: 2927755 - RNA, 20 nt, Human
cugucaauuacaggaaguac

SEQ ID NO: 2927756 - RNA, 19 nt, Human
cugucaauuacaggaagua

SEQ ID NO: 2927757 - RNA, 23 nt, Human
cugucaauuacaggaaguacugg

SEQ ID NO: 2927758 - RNA, 13 nt, Human
cuguagaguggga

SEQ ID NO: 2927759 - RNA, 12 nt, Human
cugugcugcccu

SEQ ID NO: 2927760 - RNA, 14 nt, Human
cugugcugcccugc

SEQ ID NO: 2927761 - RNA, 13 nt, Human
cugugcugcccug

SEQ ID NO: 2927762 - RNA, 18 nt, Human
cugugccucugggacugg

SEQ ID NO: 2927763 - RNA, 19 nt, Human
cugugucagcauagaagua

SEQ ID NO: 2927764 - RNA, 17 nt, Human
cugugucagcauagaag

SEQ ID NO: 2927765 - RNA, 19 nt, Human
cugugcugcccugcccacc

SEQ ID NO: 2927766 - RNA, 18 nt, Human
cugugcugcccugcccac

SEQ ID NO: 2927767 - RNA, 17 nt, Human
cugugcugcccugccca

SEQ ID NO: 2927768 - RNA, 15 nt, Human
cugugcugcccugcc

SEQ ID NO: 2927769 - RNA, 13 nt, Human
cuguuauaaucuu

SEQ ID NO: 2927770 - RNA, 21 nt, Human
cuuagggaaggauacaaaagc

SEQ ID NO: 2927771 - RNA, 19 nt, Human
cuuagggaaggauacaaaa

SEQ ID NO: 2927772 - RNA, 16 nt, Human
cuuaccagcagagcac

SEQ ID NO: 2927773 - RNA, 22 nt, Human
cuuagcucauucuccuuguguu

SEQ ID NO: 2927774 - RNA, 23 nt, Human
cuuagcucauucuccuuguguua

SEQ ID NO: 2927775 - RNA, 14 nt, Human
cuguuggcuggggg

SEQ ID NO: 2927776 - RNA, 19 nt, Human
cuguuggcugggggccuca

SEQ ID NO: 2927777 - RNA, 22 nt, Human
cuguuggcugggggccucagug

SEQ ID NO: 2927778 - RNA, 21 nt, Human
cuuaaaaaugguuuaaauggu

SEQ ID NO: 2927779 - RNA, 15 nt, Human
cuuaccagcagagca

SEQ ID NO: 2927780 - RNA, 14 nt, Human
cuuaaaacaacacu

SEQ ID NO: 2927781 - RNA, 22 nt, Human
cuuggauuguccccgacccuug

SEQ ID NO: 2927782 - RNA, 24 nt, Human
cuuggauuguccccgacccuugcc

SEQ ID NO: 2927783 - RNA, 23 nt, Human
cuuggauuguccccgacccuugc

SEQ ID NO: 2927784 - RNA, 12 nt, Human
cuugauucauaa

SEQ ID NO: 2927785 - RNA, 12 nt, Human
cuugcaaaguau

SEQ ID NO: 2927786 - RNA, 18 nt, Human
cuugauguguuaucucuu

SEQ ID NO: 2927787 - RNA, 17 nt, Human
cuugauauccucuuuga

SEQ ID NO: 2927788 - RNA, 22 nt, Human
cuugauauccucuuugagugaa

SEQ ID NO: 2927789 - RNA, 20 nt, Human
cuugacagggcacaccgggc

SEQ ID NO: 2927790 - RNA, 16 nt, Human
cuugacaucaacugca

SEQ ID NO: 2927791 - RNA, 14 nt, Human
cuucuucagagacu

SEQ ID NO: 2927792 - RNA, 13 nt, Human
cuucuucagagac

SEQ ID NO: 2927793 - RNA, 23 nt, Human
cuucugaacuuggcgcugccccu

SEQ ID NO: 2927794 - RNA, 13 nt, Human
cuuccuccuggug

SEQ ID NO: 2927795 - RNA, 22 nt, Human
cuuccucuuuccaucuacccuc

SEQ ID NO: 2927796 - RNA, 21 nt, Human
cuuccucuuuccaucuacccu

SEQ ID NO: 2927797 - RNA, 20 nt, Human
cuucucacauuuauauuuuu

SEQ ID NO: 2927798 - RNA, 13 nt, Human
cuucucacauuua

SEQ ID NO: 2927799 - RNA, 21 nt, Human
cuucuaaguaaaaccacagca

SEQ ID NO: 2927800 - RNA, 17 nt, Human
cuucuaaguaaaaccac

SEQ ID NO: 2927801 - RNA, 13 nt, Human
cuucuaaguaaaa

SEQ ID NO: 2927802 - RNA, 15 nt, Human
cuuucuacccagcga

SEQ ID NO: 2927803 - RNA, 16 nt, Human
cuuucuacccagcgag

SEQ ID NO: 2927804 - RNA, 17 nt, Human
cuuugacgccaucccag

SEQ ID NO: 2927805 - RNA, 16 nt, Human
cuuugacgccauccca

SEQ ID NO: 2927806 - RNA, 19 nt, Human
cuuuuauaaacuuuaccuu

SEQ ID NO: 2927807 - RNA, 22 nt, Human
cuuuguauucucuccuguaccu

SEQ ID NO: 2927808 - RNA, 20 nt, Human
cuuuuauaaacuuuaccuuu

SEQ ID NO: 2927809 - RNA, 21 nt, Human
cuuuuauaaacuuuaccuuuu

SEQ ID NO: 2927810 - RNA, 15 nt, Human
cuuugcacacuuugg

SEQ ID NO: 2927811 - RNA, 23 nt, Human
cuuugguuauuuuacuuuuugga

SEQ ID NO: 2927812 - RNA, 17 nt, Human
cuuugguuauuuuacuu

SEQ ID NO: 2927813 - RNA, 19 nt, Human
cuuugguuauuuuacuuuu

SEQ ID NO: 2927814 - RNA, 13 nt, Human
cuuugguuauuuu

SEQ ID NO: 2927815 - RNA, 22 nt, Human
cuuugcacacuuuggcccaggg

SEQ ID NO: 2927816 - RNA, 19 nt, Human
cuuugcacacuuuggccca

SEQ ID NO: 2927817 - RNA, 20 nt, Human
cuuugcacacuuuggcccag

SEQ ID NO: 2927818 - RNA, 17 nt, Human
cuuuguauucucuccug

SEQ ID NO: 2927819 - RNA, 23 nt, Human
cuuuaaugucacaggcaggucca

SEQ ID NO: 2927820 - RNA, 18 nt, Human
cuuuaccaauugaaguaa

SEQ ID NO: 2927821 - RNA, 16 nt, Human
cuuuaccaauugaagu

SEQ ID NO: 2927822 - RNA, 19 nt, Human
cuuuaccaauugaaguaaa

SEQ ID NO: 2927823 - RNA, 20 nt, Human
cuuuaccaauugaaguaaaa

SEQ ID NO: 2927824 - RNA, 20 nt, Human
cuuucacccuuuucuguuug

SEQ ID NO: 2927825 - RNA, 15 nt, Human
cuuucacccuuuucu

SEQ ID NO: 2927826 - RNA, 14 nt, Human
cuuucacccuuuuc

SEQ ID NO: 2927827 - RNA, 22 nt, Human
cuugguagaagcccuucuaccu

SEQ ID NO: 2927828 - RNA, 19 nt, Human
cuuggucugugagaugcua

SEQ ID NO: 2927829 - RNA, 16 nt, Human
cuuggucugugagaug

SEQ ID NO: 2927830 - RNA, 14 nt, Human
cuugguccugcugc

SEQ ID NO: 2927831 - RNA, 19 nt, Human
cuuggugucgggcaugaca

SEQ ID NO: 2927832 - RNA, 20 nt, Human
cuuggugucgggcaugacac

SEQ ID NO: 2927833 - RNA, 22 nt, Human
cuugugaauaaagagggugggu

SEQ ID NO: 2927834 - RNA, 18 nt, Human
cuugucuuuggacccuga

SEQ ID NO: 2927835 - RNA, 15 nt, Human
cuugucuuuggaccc

SEQ ID NO: 2927836 - RNA, 13 nt, Human
cuugucuuuggac

SEQ ID NO: 2927837 - RNA, 18 nt, Human
gaaccaccacacccagcc

SEQ ID NO: 2927838 - RNA, 20 nt, Human
gaaccaccacacccagccca

SEQ ID NO: 2927839 - RNA, 21 nt, Human
gaaccaccacacccagcccac

SEQ ID NO: 2927840 - RNA, 22 nt, Human
gaaccaccacacccagcccacu

SEQ ID NO: 2927841 - RNA, 22 nt, Human
gaacugaucauguuuaugagaa

SEQ ID NO: 2927842 - RNA, 20 nt, Human
gaacugaucauguuuaugag

SEQ ID NO: 2927843 - RNA, 17 nt, Human
gaacugauguaaguaaa

SEQ ID NO: 2927844 - RNA, 14 nt, Human
gaacuccuggccuc

SEQ ID NO: 2927845 - RNA, 13 nt, Human
gaacuccuggccu

SEQ ID NO: 2927846 - RNA, 17 nt, Human
gaacccgggaggcagag

SEQ ID NO: 2927847 - RNA, 23 nt, Human
gaaccaccacacccagcccacuu

SEQ ID NO: 2927848 - RNA, 22 nt, Human
gaaccauggucggaaaacaugc

SEQ ID NO: 2927849 - RNA, 17 nt, Human
gaacccaaguccaagca

SEQ ID NO: 2927850 - RNA, 16 nt, Human
gaacccaaguccaagc

SEQ ID NO: 2927851 - RNA, 16 nt, Human
gaagacacugaugggc

SEQ ID NO: 2927852 - RNA, 21 nt, Human
gaagacacugaugggcaaccc

SEQ ID NO: 2927853 - RNA, 13 nt, Human
gaagacagcucuu

SEQ ID NO: 2927854 - RNA, 12 nt, Human
gaagacagcucu

SEQ ID NO: 2927855 - RNA, 15 nt, Human
gaagacagagcuaca

SEQ ID NO: 2927856 - RNA, 13 nt, Human
gaagacagagcua

SEQ ID NO: 2927857 - RNA, 15 nt, Human
gaagacagcucuuau

SEQ ID NO: 2927858 - RNA, 14 nt, Human
gaagacagcucuua

SEQ ID NO: 2927859 - RNA, 20 nt, Human
gaagcacccauuaugcgcug

SEQ ID NO: 2927860 - RNA, 21 nt, Human
gaagcacaugccucucucagg

SEQ ID NO: 2927861 - RNA, 16 nt, Human
gaagcaccauaacuuu

SEQ ID NO: 2927862 - RNA, 13 nt, Human
gaagcacagcuuc

SEQ ID NO: 2927863 - RNA, 14 nt, Human
gaagcacagcuuca

SEQ ID NO: 2927864 - RNA, 22 nt, Human
gaagcacaugccucucucaggc

SEQ ID NO: 2927865 - RNA, 17 nt, Human
gaagcacagugaucaag

SEQ ID NO: 2927866 - RNA, 17 nt, Human
gaagacucauucuucug

SEQ ID NO: 2927867 - RNA, 18 nt, Human
gaagacucauucuucugu

SEQ ID NO: 2927868 - RNA, 16 nt, Human
gaagacucauucuucu

SEQ ID NO: 2927869 - RNA, 16 nt, Human
gaaaauuauucuauaa

SEQ ID NO: 2927870 - RNA, 17 nt, Human
gaaaagacuccaaagaa

SEQ ID NO: 2927871 - RNA, 16 nt, Human
gaaaagacuccaaaga

SEQ ID NO: 2927872 - RNA, 14 nt, Human
gaaaagacuccaaa

SEQ ID NO: 2927873 - RNA, 23 nt, Human
gaaaagaaaaaugagccuggcaa

SEQ ID NO: 2927874 - RNA, 21 nt, Human
gaaaacuuuaugcuaagugaa

SEQ ID NO: 2927875 - RNA, 13 nt, Human
gaaacuggauuaa

SEQ ID NO: 2927876 - RNA, 17 nt, Human
gaaacuggauuaaacuu

SEQ ID NO: 2927877 - RNA, 17 nt, Human
gaaacuggcaaagcaga

SEQ ID NO: 2927878 - RNA, 16 nt, Human
gaaacuggcaaagcag

SEQ ID NO: 2927879 - RNA, 18 nt, Human
gaaagaaaaucaggcugg

SEQ ID NO: 2927880 - RNA, 13 nt, Human
gaaaggcuccagg

SEQ ID NO: 2927881 - RNA, 15 nt, Human
gaaaggcuccaggag

SEQ ID NO: 2927882 - RNA, 14 nt, Human
gaaaggcuccagga

SEQ ID NO: 2927883 - RNA, 13 nt, Human
gaaagggcccaga

SEQ ID NO: 2927884 - RNA, 20 nt, Human
gaaagggauuuucagcccuc

SEQ ID NO: 2927885 - RNA, 12 nt, Human
gaaagggauuuu

SEQ ID NO: 2927886 - RNA, 12 nt, Human
gaaaggcuccag

SEQ ID NO: 2927887 - RNA, 18 nt, Human
gaaaucuaggaaaauuau

SEQ ID NO: 2927888 - RNA, 15 nt, Human
gaaagggcccagaga

SEQ ID NO: 2927889 - RNA, 16 nt, Human
gaaagggcccagagag

SEQ ID NO: 2927890 - RNA, 22 nt, Human
gcacuauaauguaagcucuacu

SEQ ID NO: 2927891 - RNA, 22 nt, Human
gcacuauagccuaggugacaga

SEQ ID NO: 2927892 - RNA, 15 nt, Human
gcacuauuuauuuac

SEQ ID NO: 2927893 - RNA, 21 nt, Human
gcacuauuuauuuacaaaugu

SEQ ID NO: 2927894 - RNA, 17 nt, Human
gcacuauuuauuuacaa

SEQ ID NO: 2927895 - RNA, 18 nt, Human
gcacuauuuauuuacaaa

SEQ ID NO: 2927896 - RNA, 15 nt, Human
gcacuccagccuggg

SEQ ID NO: 2927897 - RNA, 17 nt, Human
gcacuccagccugggug

SEQ ID NO: 2927898 - RNA, 12 nt, Human
gcaccuccugcc

SEQ ID NO: 2927899 - RNA, 16 nt, Human
gcaccggcuggccugg

SEQ ID NO: 2927900 - RNA, 15 nt, Human
gcaccggcuggccug

SEQ ID NO: 2927901 - RNA, 17 nt, Human
gcaccggcuggccuggc

SEQ ID NO: 2927902 - RNA, 20 nt, Human
gcacacaccagagcccaccu

SEQ ID NO: 2927903 - RNA, 11 nt, Human
gcacacauuuu

SEQ ID NO: 2927904 - RNA, 12 nt, Human
gcacacauuuuu

SEQ ID NO: 2927905 - RNA, 18 nt, Human
gcaaccuccgccucuugg

SEQ ID NO: 2927906 - RNA, 22 nt, Human
gcaacccuggugaccagcacca

SEQ ID NO: 2927907 - RNA, 17 nt, Human
gcaacccccagccugcu

SEQ ID NO: 2927908 - RNA, 16 nt, Human
gcaaaagaugcuucuc

SEQ ID NO: 2927909 - RNA, 18 nt, Human
gcaacccccagccugcua

SEQ ID NO: 2927910 - RNA, 15 nt, Human
gcaaaagaugcuucu

SEQ ID NO: 2927911 - RNA, 12 nt, Human
gcacacaccaga

SEQ ID NO: 2927912 - RNA, 14 nt, Human
gcacacaccagagc

SEQ ID NO: 2927913 - RNA, 15 nt, Human
gcacacaccagagcc

SEQ ID NO: 2927914 - RNA, 16 nt, Human
gcacacaccagagccc

SEQ ID NO: 2927915 - RNA, 17 nt, Human
gcacacaccagagccca

SEQ ID NO: 2927916 - RNA, 18 nt, Human
gcacacaccagagcccac

SEQ ID NO: 2927917 - RNA, 19 nt, Human
gcacacaccagagcccacc

SEQ ID NO: 2927918 - RNA, 23 nt, Human
gcaauaaggggagaguaacccug

SEQ ID NO: 2927919 - RNA, 18 nt, Human
gcaauagucaaauugugu

SEQ ID NO: 2927920 - RNA, 16 nt, Human
gcaauaaaauggguuu

SEQ ID NO: 2927921 - RNA, 11 nt, Human
gcaauaaagca

SEQ ID NO: 2927922 - RNA, 19 nt, Human
gauucuccugccucagccu

SEQ ID NO: 2927923 - RNA, 20 nt, Human
gauucuccugccucagccuc

SEQ ID NO: 2927924 - RNA, 21 nt, Human
gauucuccugccucagccucc

SEQ ID NO: 2927925 - RNA, 21 nt, Human
gauucuucugcuucagccucc

SEQ ID NO: 2927926 - RNA, 23 nt, Human
gauucuuauggacaaugacccag

SEQ ID NO: 2927927 - RNA, 20 nt, Human
gauuuaacagaaauguacag

SEQ ID NO: 2927928 - RNA, 23 nt, Human
gauuuaacagaaauguacagcaa

SEQ ID NO: 2927929 - RNA, 15 nt, Human
gauucuuguauuuau

SEQ ID NO: 2927930 - RNA, 21 nt, Human
gauucuuguauuuauuacaac

SEQ ID NO: 2927931 - RNA, 13 nt, Human
gcaaaaaaaauua

SEQ ID NO: 2927932 - RNA, 16 nt, Human
gcaaaaaaaauuagcc

SEQ ID NO: 2927933 - RNA, 22 nt, Human
gauuuuuuuuuccuucagugcc

SEQ ID NO: 2927934 - RNA, 23 nt, Human
gauuuuuuuuuccuucagugccu

SEQ ID NO: 2927935 - RNA, 16 nt, Human
gauuucacucuccuug

SEQ ID NO: 2927936 - RNA, 13 nt, Human
gauuucacucucc

SEQ ID NO: 2927937 - RNA, 18 nt, Human
gauuucacucuccuuggu

SEQ ID NO: 2927938 - RNA, 17 nt, Human
gauuucacucuccuugg

SEQ ID NO: 2927939 - RNA, 20 nt, Human
gaucuggguucacugcaacc

SEQ ID NO: 2927940 - RNA, 18 nt, Human
gaucuggguucacugcaa

SEQ ID NO: 2927941 - RNA, 21 nt, Human
gaugaugaaaugaggucagag

SEQ ID NO: 2927942 - RNA, 21 nt, Human
gaugcugucuucguacuggga

SEQ ID NO: 2927943 - RNA, 19 nt, Human
gauggaggacuccaggcag

SEQ ID NO: 2927944 - RNA, 14 nt, Human
gaugcuuguacaua

SEQ ID NO: 2927945 - RNA, 16 nt, Human
gaugcuuguacauaau

SEQ ID NO: 2927946 - RNA, 17 nt, Human
gcauccuggcacccggc

SEQ ID NO: 2927947 - RNA, 21 nt, Human
gcauccuggcacccggccccu

SEQ ID NO: 2927948 - RNA, 14 nt, Human
gcauccuggcaccc

SEQ ID NO: 2927949 - RNA, 22 nt, Human
gcauccuggcacccggccccug

SEQ ID NO: 2927950 - RNA, 23 nt, Human
gcauccuggcacccggccccugc

SEQ ID NO: 2927951 - RNA, 19 nt, Human
gcaugggaaugaaugucag

SEQ ID NO: 2927952 - RNA, 16 nt, Human
gcaugggaaugaaugu

SEQ ID NO: 2927953 - RNA, 13 nt, Human
gcaugggaaugaa

SEQ ID NO: 2927954 - RNA, 18 nt, Human
gcauguauuuuugucaau

SEQ ID NO: 2927955 - RNA, 17 nt, Human
gcaugugaugagaggaa

SEQ ID NO: 2927956 - RNA, 16 nt, Human
gcauuguaaaugugcu

SEQ ID NO: 2927957 - RNA, 12 nt, Human
gcauuuaaaaga

SEQ ID NO: 2927958 - RNA, 15 nt, Human
gcauuuaaaagauac

SEQ ID NO: 2927959 - RNA, 14 nt, Human
gcauuugaaaauuu

SEQ ID NO: 2927960 - RNA, 16 nt, Human
gcauuugaaaauuuug

SEQ ID NO: 2927961 - RNA, 18 nt, Human
gccaagaauucuuaaaua

SEQ ID NO: 2927962 - RNA, 14 nt, Human
gccaagaauucuua

SEQ ID NO: 2927963 - RNA, 11 nt, Human
gccaaggccaa

SEQ ID NO: 2927964 - RNA, 17 nt, Human
gccaaggccaaaggaag

SEQ ID NO: 2927965 - RNA, 18 nt, Human
gcacuuugggaggcugag

SEQ ID NO: 2927966 - RNA, 16 nt, Human
gcacuuuguucuggcu

SEQ ID NO: 2927967 - RNA, 22 nt, Human
gcagcugcgguccacccaggag

SEQ ID NO: 2927968 - RNA, 23 nt, Human
gcagcugcgguccacccaggagc

SEQ ID NO: 2927969 - RNA, 13 nt, Human
gcagcugcuuuug

SEQ ID NO: 2927970 - RNA, 20 nt, Human
gcagcugcuuuugucuaugg

SEQ ID NO: 2927971 - RNA, 16 nt, Human
gcagcuugaggguugg

SEQ ID NO: 2927972 - RNA, 15 nt, Human
gcagcuuauucacaa

SEQ ID NO: 2927973 - RNA, 13 nt, Human
gcagggaaacagc

SEQ ID NO: 2927974 - RNA, 22 nt, Human
gcagggaaacagcuaaugggac

SEQ ID NO: 2927975 - RNA, 17 nt, Human
gcaggcucucaggccag

SEQ ID NO: 2927976 - RNA, 14 nt, Human
gcaggcuggaguua

SEQ ID NO: 2927977 - RNA, 18 nt, Human
gcaggcugccagugccug

SEQ ID NO: 2927978 - RNA, 17 nt, Human
gcaggcugccagugccu

SEQ ID NO: 2927979 - RNA, 19 nt, Human
gcagcuugaggguugggcu

SEQ ID NO: 2927980 - RNA, 21 nt, Human
gcagcuugaggguugggcugg

SEQ ID NO: 2927981 - RNA, 12 nt, Human
gcaggcucucag

SEQ ID NO: 2927982 - RNA, 22 nt, Human
gcaggcucgggcuccccagccc

SEQ ID NO: 2927983 - RNA, 16 nt, Human
gcaggcucucaggcca

SEQ ID NO: 2927984 - RNA, 15 nt, Human
gcaggcucucaggcc

SEQ ID NO: 2927985 - RNA, 14 nt, Human
gcaggcucucaggc

SEQ ID NO: 2927986 - RNA, 13 nt, Human
gcaggcucucagg

SEQ ID NO: 2927987 - RNA, 16 nt, Human
gcauaccacuuuuguu

SEQ ID NO: 2927988 - RNA, 15 nt, Human
gcauaccacuuuugu

SEQ ID NO: 2927989 - RNA, 15 nt, Human
gcauaaaaauuagcc

SEQ ID NO: 2927990 - RNA, 23 nt, Human
gcaguugccagucaccccggcca

SEQ ID NO: 2927991 - RNA, 14 nt, Human
gcaguugccaguca

SEQ ID NO: 2927992 - RNA, 22 nt, Human
gcaguugaaaagacuccaaaga

SEQ ID NO: 2927993 - RNA, 20 nt, Human
gaggccagagacacaagccu

SEQ ID NO: 2927994 - RNA, 17 nt, Human
gaggcucugcccuuggu

SEQ ID NO: 2927995 - RNA, 15 nt, Human
gaggcucugcccuug

SEQ ID NO: 2927996 - RNA, 14 nt, Human
gaggcucugcccuu

SEQ ID NO: 2927997 - RNA, 13 nt, Human
gaggcucugcccu

SEQ ID NO: 2927998 - RNA, 12 nt, Human
gaggcucugccc

SEQ ID NO: 2927999 - RNA, 12 nt, Human
gaggggaacaga

SEQ ID NO: 2928000 - RNA, 15 nt, Human
gagggcuccagacac

SEQ ID NO: 2928001 - RNA, 14 nt, Human
gagggcuccagaca

SEQ ID NO: 2928002 - RNA, 13 nt, Human
gagggcuccagac

SEQ ID NO: 2928003 - RNA, 12 nt, Human
gagggcuccaga

SEQ ID NO: 2928004 - RNA, 13 nt, Human
gaggugggauccu

SEQ ID NO: 2928005 - RNA, 16 nt, Human
gaggugggauccucca

SEQ ID NO: 2928006 - RNA, 15 nt, Human
gaggugggauccucc

SEQ ID NO: 2928007 - RNA, 17 nt, Human
gaggugggauccuccag

SEQ ID NO: 2928008 - RNA, 21 nt, Human
gagucacuggaacacuaauga

SEQ ID NO: 2928009 - RNA, 14 nt, Human
gagucacuggaaca

SEQ ID NO: 2928010 - RNA, 19 nt, Human
gaguugauacuacaguuug

SEQ ID NO: 2928011 - RNA, 21 nt, Human
gaguugauagcacagacccug

SEQ ID NO: 2928012 - RNA, 22 nt, Human
gaguugauacuacaguuuguua

SEQ ID NO: 2928013 - RNA, 13 nt, Human
gagugcagugagc

SEQ ID NO: 2928014 - RNA, 18 nt, Human
gagugcagugagccgaga

SEQ ID NO: 2928015 - RNA, 14 nt, Human
gagugagacucugu

SEQ ID NO: 2928016 - RNA, 18 nt, Human
gagugagacucugucuca

SEQ ID NO: 2928017 - RNA, 18 nt, Human
gagucagaaguuucugcc

SEQ ID NO: 2928018 - RNA, 22 nt, Human
gagcaucaggccaggcccucug

SEQ ID NO: 2928019 - RNA, 20 nt, Human
gagcaucaggccaggcccuc

SEQ ID NO: 2928020 - RNA, 15 nt, Human
gagcugccuguucag

SEQ ID NO: 2928021 - RNA, 17 nt, Human
gagcggagaaaggaagg

SEQ ID NO: 2928022 - RNA, 16 nt, Human
gagcugccuguucagc

SEQ ID NO: 2928023 - RNA, 19 nt, Human
gagcugccuguucagcucc

SEQ ID NO: 2928024 - RNA, 17 nt, Human
gagcaucaggccaggcc

SEQ ID NO: 2928025 - RNA, 13 nt, Human
gagcgacagugag

SEQ ID NO: 2928026 - RNA, 15 nt, Human
gagcgacagugagac

SEQ ID NO: 2928027 - RNA, 13 nt, Human
gagccuuccaggg

SEQ ID NO: 2928028 - RNA, 12 nt, Human
gagccuuccagg

SEQ ID NO: 2928029 - RNA, 17 nt, Human
gagaagcggcuggcagc

SEQ ID NO: 2928030 - RNA, 22 nt, Human
gacuguacaaaguagaagucuu

SEQ ID NO: 2928031 - RNA, 17 nt, Human
gacucaaugcacugaca

SEQ ID NO: 2928032 - RNA, 14 nt, Human
gacucaaugcacug

SEQ ID NO: 2928033 - RNA, 21 nt, Human
gacuuuucuguccgagcuuug

SEQ ID NO: 2928034 - RNA, 22 nt, Human
gacuuuguuaguuucuccaagc

SEQ ID NO: 2928035 - RNA, 22 nt, Human
gacuuugguuauuuuacuuuuu

SEQ ID NO: 2928036 - RNA, 14 nt, Human
gacuuuggaaagag

SEQ ID NO: 2928037 - RNA, 14 nt, Human
gacuuuggaaagac

SEQ ID NO: 2928038 - RNA, 18 nt, Human
gacuguuuucucuugaga

SEQ ID NO: 2928039 - RNA, 16 nt, Human
gacuguuuucucuuga

SEQ ID NO: 2928040 - RNA, 16 nt, Human
gacuauucaaacaguc

SEQ ID NO: 2928041 - RNA, 15 nt, Human
gacuauucaaacagu

SEQ ID NO: 2928042 - RNA, 13 nt, Human
gacgcugugcugc

SEQ ID NO: 2928043 - RNA, 12 nt, Human
gacgcugugcug

SEQ ID NO: 2928044 - RNA, 21 nt, Human
gacccucucaaacuaacaggc

SEQ ID NO: 2928045 - RNA, 15 nt, Human
gaccaucccugaagg

SEQ ID NO: 2928046 - RNA, 14 nt, Human
gaccaucccugaag

SEQ ID NO: 2928047 - RNA, 16 nt, Human
gaccauucuccaccug

SEQ ID NO: 2928048 - RNA, 17 nt, Human
gaccaucccugaaggcc

SEQ ID NO: 2928049 - RNA, 16 nt, Human
gaccaucccugaaggc

SEQ ID NO: 2928050 - RNA, 12 nt, Human
gacccggcugcg

SEQ ID NO: 2928051 - RNA, 13 nt, Human
gacccggcugcgu

SEQ ID NO: 2928052 - RNA, 16 nt, Human
gacccuauugcugcuu

SEQ ID NO: 2928053 - RNA, 14 nt, Human
gacccgucuccagc

SEQ ID NO: 2928054 - RNA, 15 nt, Human
gacccgucuccagcu

SEQ ID NO: 2928055 - RNA, 18 nt, Human
gacccgucuccagcugcu

SEQ ID NO: 2928056 - RNA, 14 nt, Human
gacagaaagcagaa

SEQ ID NO: 2928057 - RNA, 21 nt, Human
gacagcccuucuuuccacaga

SEQ ID NO: 2928058 - RNA, 20 nt, Human
gacagaaagcagaacaguga

SEQ ID NO: 2928059 - RNA, 13 nt, Human
gacagcuccuucu

SEQ ID NO: 2928060 - RNA, 14 nt, Human
gacagcuccuucug

SEQ ID NO: 2928061 - RNA, 15 nt, Human
gacagcuccuucugu

SEQ ID NO: 2928062 - RNA, 20 nt, Human
ggcaguggugguuuucuguu

SEQ ID NO: 2928063 - RNA, 21 nt, Human
ggcaguggugguuuucuguuc

SEQ ID NO: 2928064 - RNA, 22 nt, Human
ggcagccccuguucuggcagag

SEQ ID NO: 2928065 - RNA, 16 nt, Human
ggagagaagagaaugc

SEQ ID NO: 2928066 - RNA, 19 nt, Human
ggcacagaaaauggaagac

SEQ ID NO: 2928067 - RNA, 21 nt, Human
ggcacagaaaauggaagacag

SEQ ID NO: 2928068 - RNA, 20 nt, Human
ggcacagaaaauggaagaca

SEQ ID NO: 2928069 - RNA, 23 nt, Human
ggcacucagaagacacugauggg

SEQ ID NO: 2928070 - RNA, 20 nt, Human
ggcacucagaagacacugau

SEQ ID NO: 2928071 - RNA, 13 nt, Human
ggcacaucagcac

SEQ ID NO: 2928072 - RNA, 21 nt, Human
ggcacaguuuucugagaaaga

SEQ ID NO: 2928073 - RNA, 23 nt, Human
ggcacagaaaauggaagacagcu

SEQ ID NO: 2928074 - RNA, 23 nt, Human
ggcagccccauucugccugccca

SEQ ID NO: 2928075 - RNA, 11 nt, Human
ggcagccccug

SEQ ID NO: 2928076 - RNA, 20 nt, Human
ggcacugguuuguucccugu

SEQ ID NO: 2928077 - RNA, 16 nt, Human
ggcacuuuaaaacacu

SEQ ID NO: 2928078 - RNA, 18 nt, Human
ggcacuuuaaaacacucu

SEQ ID NO: 2928079 - RNA, 23 nt, Human
ggccccugcugguucaggguugg

SEQ ID NO: 2928080 - RNA, 13 nt, Human
ggcccggcuccag

SEQ ID NO: 2928081 - RNA, 13 nt, Human
ggccccugcuggu

SEQ ID NO: 2928082 - RNA, 14 nt, Human
ggccccugcugguu

SEQ ID NO: 2928083 - RNA, 15 nt, Human
ggcccggcuccaggc

SEQ ID NO: 2928084 - RNA, 21 nt, Human
ggcccuucucuccagccccug

SEQ ID NO: 2928085 - RNA, 20 nt, Human
ggcccuucucuccagccccu

SEQ ID NO: 2928086 - RNA, 19 nt, Human
ggcccuucucuccagcccc

SEQ ID NO: 2928087 - RNA, 14 nt, Human
ggccuccauccuga

SEQ ID NO: 2928088 - RNA, 15 nt, Human
ggccuccauccugag

SEQ ID NO: 2928089 - RNA, 13 nt, Human
ggccuccauccug

SEQ ID NO: 2928090 - RNA, 17 nt, Human
ggcccuugucggcccca

SEQ ID NO: 2928091 - RNA, 19 nt, Human
ggcccuuuuucaauaacug

SEQ ID NO: 2928092 - RNA, 23 nt, Human
ggcccuucucuccagccccugga

SEQ ID NO: 2928093 - RNA, 22 nt, Human
ggcccuucucuccagccccugg

SEQ ID NO: 2928094 - RNA, 23 nt, Human
ggccucaagugauucuccugccu

SEQ ID NO: 2928095 - RNA, 17 nt, Human
ggccaguuggucccccu

SEQ ID NO: 2928096 - RNA, 14 nt, Human
ggccaguugguccc

SEQ ID NO: 2928097 - RNA, 20 nt, Human
ggccagugugacaaggauug

SEQ ID NO: 2928098 - RNA, 21 nt, Human
ggcugcucccaccuggcucug

SEQ ID NO: 2928099 - RNA, 22 nt, Human
ggcugcucccaccuggcucugu

SEQ ID NO: 2928100 - RNA, 13 nt, Human
ggcugcucccacc

SEQ ID NO: 2928101 - RNA, 15 nt, Human
ggcugcucccaccug

SEQ ID NO: 2928102 - RNA, 18 nt, Human
ggcugcucccaccuggcu

SEQ ID NO: 2928103 - RNA, 19 nt, Human
ggcugcucccaccuggcuc

SEQ ID NO: 2928104 - RNA, 11 nt, Human
ggcugcuccca

SEQ ID NO: 2928105 - RNA, 12 nt, Human
ggcugcucccac

SEQ ID NO: 2928106 - RNA, 16 nt, Human
ggcugggagagccuuc

SEQ ID NO: 2928107 - RNA, 15 nt, Human
ggcugggagagccuu

SEQ ID NO: 2928108 - RNA, 14 nt, Human
ggcugggagagccu

SEQ ID NO: 2928109 - RNA, 13 nt, Human
ggcugggagagcc

SEQ ID NO: 2928110 - RNA, 11 nt, Human
ggcucucaggc

SEQ ID NO: 2928111 - RNA, 13 nt, Human
ggcucucaggcca

SEQ ID NO: 2928112 - RNA, 12 nt, Human
ggcucuuccagg

SEQ ID NO: 2928113 - RNA, 22 nt, Human
ggcugcggaaugaaccacaucu

SEQ ID NO: 2928114 - RNA, 21 nt, Human
ggcugccaaugggagcucaug

SEQ ID NO: 2928115 - RNA, 18 nt, Human
ggcugaacuuuguggucg

SEQ ID NO: 2928116 - RNA, 22 nt, Human
ggcugcaugcgggcuuccuccu

SEQ ID NO: 2928117 - RNA, 20 nt, Human
ggcugccaaugggagcucau

SEQ ID NO: 2928118 - RNA, 19 nt, Human
ggcugccaaugggagcuca

SEQ ID NO: 2928119 - RNA, 14 nt, Human
ggcuccacuugguc

SEQ ID NO: 2928120 - RNA, 20 nt, Human
ggcucagguggggucacucu

SEQ ID NO: 2928121 - RNA, 19 nt, Human
ggcucagguggggucacuc

SEQ ID NO: 2928122 - RNA, 19 nt, Human
ggcucagcggggacagcuc

SEQ ID NO: 2928123 - RNA, 20 nt, Human
ggcucagcggggacagcucc

SEQ ID NO: 2928124 - RNA, 18 nt, Human
ggcucagcggggacagcu

SEQ ID NO: 2928125 - RNA, 13 nt, Human
aaaacaugcuaca

SEQ ID NO: 2928126 - RNA, 14 nt, Human
aaaacaugcuacac

SEQ ID NO: 2928127 - RNA, 12 nt, Human
aaaacccaagug

SEQ ID NO: 2928128 - RNA, 14 nt, Human
aaaaccacagcagu

SEQ ID NO: 2928129 - RNA, 20 nt, Human
gggaccagagcugccaccug

SEQ ID NO: 2928130 - RNA, 14 nt, Human
gggaccagagcugc

SEQ ID NO: 2928131 - RNA, 19 nt, Human
aaaaaugguagcauuuuaa

SEQ ID NO: 2928132 - RNA, 20 nt, Human
aaaaaugguagcauuuuaaa

SEQ ID NO: 2928133 - RNA, 17 nt, Human
aaaaaugguuuaaaugg

SEQ ID NO: 2928134 - RNA, 18 nt, Human
aaaacucuccucugcugc

SEQ ID NO: 2928135 - RNA, 13 nt, Human
aaaacugagcaua

SEQ ID NO: 2928136 - RNA, 15 nt, Human
aaaacuucagacaua

SEQ ID NO: 2928137 - RNA, 12 nt, Human
aaaagcauuuuu

SEQ ID NO: 2928138 - RNA, 20 nt, Human
aaaaggaagcuuacaugccu

SEQ ID NO: 2928139 - RNA, 21 nt, Human
aaaaggaagcuuacaugccua

SEQ ID NO: 2928140 - RNA, 21 nt, Human
gggagaaccaaaaagaggcua

SEQ ID NO: 2928141 - RNA, 15 nt, Human
gggacuuggaagcuc

SEQ ID NO: 2928142 - RNA, 17 nt, Human
gggacuuggaagcuccg

SEQ ID NO: 2928143 - RNA, 18 nt, Human
gggacuuggaagcuccgc

SEQ ID NO: 2928144 - RNA, 23 nt, Human
gggacuuggaagcuccgcuuucu

SEQ ID NO: 2928145 - RNA, 23 nt, Human
gggagcaggcucgggcuccccag

SEQ ID NO: 2928146 - RNA, 19 nt, Human
gggagagccuuccaggggu

SEQ ID NO: 2928147 - RNA, 15 nt, Human
gggagagccuuccag

SEQ ID NO: 2928148 - RNA, 16 nt, Human
gggagggagggcucca

SEQ ID NO: 2928149 - RNA, 18 nt, Human
gggaggcugaggcaggag

SEQ ID NO: 2928150 - RNA, 15 nt, Human
gggagggagggcucc

SEQ ID NO: 2928151 - RNA, 18 nt, Human
gggaggucaaggcugcag

SEQ ID NO: 2928152 - RNA, 22 nt, Human
ggcuucauccuccucagaucuu

SEQ ID NO: 2928153 - RNA, 18 nt, Human
ggcuucauccuccucaga

SEQ ID NO: 2928154 - RNA, 16 nt, Human
ggcuuccucauaguau

SEQ ID NO: 2928155 - RNA, 18 nt, Human
ggcuucaguggcagcugc

SEQ ID NO: 2928156 - RNA, 17 nt, Human
ggcuucaguggcagcug

SEQ ID NO: 2928157 - RNA, 19 nt, Human
ggcuucaguggcagcugcu

SEQ ID NO: 2928158 - RNA, 20 nt, Human
ggcuucaguggcagcugcuu

SEQ ID NO: 2928159 - RNA, 18 nt, Human
ggcuguaucccaugagcc

SEQ ID NO: 2928160 - RNA, 19 nt, Human
ggcuggguggcaccagcag

SEQ ID NO: 2928161 - RNA, 21 nt, Human
ggcuggguucuacccaggugc

SEQ ID NO: 2928162 - RNA, 19 nt, Human
ggcuggguucuacccaggu

SEQ ID NO: 2928163 - RNA, 15 nt, Human
ggcugggggccucag

SEQ ID NO: 2928164 - RNA, 16 nt, Human
ggcugggggccucagu

SEQ ID NO: 2928165 - RNA, 17 nt, Human
ggcugggggccucagug

SEQ ID NO: 2928166 - RNA, 19 nt, Human
ggcugggggccucagugcc

SEQ ID NO: 2928167 - RNA, 14 nt, Human
aaaaauaacaauga

SEQ ID NO: 2928168 - RNA, 21 nt, Human
ggcuuccuccugguguggaag

SEQ ID NO: 2928169 - RNA, 18 nt, Human
gggaagaagcucucuccu

SEQ ID NO: 2928170 - RNA, 20 nt, Human
gggaacccaaguccaagcau

SEQ ID NO: 2928171 - RNA, 12 nt, Human
gggacagcuccu

SEQ ID NO: 2928172 - RNA, 13 nt, Human
gggacagcuccuu

SEQ ID NO: 2928173 - RNA, 13 nt, Human
gggaagagacuug

SEQ ID NO: 2928174 - RNA, 15 nt, Human
gggacagcuccuucu

SEQ ID NO: 2928175 - RNA, 22 nt, Human
gggacagucaccucauggaauu

SEQ ID NO: 2928176 - RNA, 20 nt, Human
gggacagucaccucauggaa

SEQ ID NO: 2928177 - RNA, 21 nt, Human
gggacagucaccucauggaau

SEQ ID NO: 2928178 - RNA, 16 nt, Human
guaccacuuuugcaaa

SEQ ID NO: 2928179 - RNA, 12 nt, Human
guacccacugcu

SEQ ID NO: 2928180 - RNA, 19 nt, Human
guacauggaauaacaugua

SEQ ID NO: 2928181 - RNA, 17 nt, Human
guacaugaaaacacauu

SEQ ID NO: 2928182 - RNA, 18 nt, Human
guacaugaaaacacauuu

SEQ ID NO: 2928183 - RNA, 19 nt, Human
guacaugaaaacacauuuu

SEQ ID NO: 2928184 - RNA, 20 nt, Human
guacaugaaaacacauuuuu

SEQ ID NO: 2928185 - RNA, 14 nt, Human
guacaugaaaacac

SEQ ID NO: 2928186 - RNA, 15 nt, Human
guacaugaaaacaca

SEQ ID NO: 2928187 - RNA, 16 nt, Human
guacaugaaaacacau

SEQ ID NO: 2928188 - RNA, 15 nt, Human
aaauccauacauuug

SEQ ID NO: 2928189 - RNA, 19 nt, Human
aaauauuaagaaagacuau

SEQ ID NO: 2928190 - RNA, 17 nt, Human
aaauauuauguuaaaac

SEQ ID NO: 2928191 - RNA, 14 nt, Human
aaaucagguuuucu

SEQ ID NO: 2928192 - RNA, 16 nt, Human
aaaucagguuuucuuu

SEQ ID NO: 2928193 - RNA, 18 nt, Human
aaaucagguuuucuuuua

SEQ ID NO: 2928194 - RNA, 19 nt, Human
aaaucagguuuucuuuuaa

SEQ ID NO: 2928195 - RNA, 22 nt, Human
aaaucagguuuucuuuuaagaa

SEQ ID NO: 2928196 - RNA, 12 nt, Human
aaaucauuucug

SEQ ID NO: 2928197 - RNA, 16 nt, Human
aaaucagcugcuacua

SEQ ID NO: 2928198 - RNA, 18 nt, Human
aaaucagccugcuccagc

SEQ ID NO: 2928199 - RNA, 12 nt, Human
aaaucagccugc

SEQ ID NO: 2928200 - RNA, 19 nt, Human
aaaucagccguguaaccau

SEQ ID NO: 2928201 - RNA, 11 nt, Human
aaaucauuucu

SEQ ID NO: 2928202 - RNA, 23 nt, Human
aaaucauuucugcaucagcugcu

SEQ ID NO: 2928203 - RNA, 22 nt, Human
aaaucauuucugcaucagcugc

SEQ ID NO: 2928204 - RNA, 21 nt, Human
aaaucauuucugcaucagcug

SEQ ID NO: 2928205 - RNA, 19 nt, Human
aaaucauuucugcaucagc

SEQ ID NO: 2928206 - RNA, 22 nt, Human
guagaaguucuaguguuuucaa

SEQ ID NO: 2928207 - RNA, 18 nt, Human
guagaaguucuaguguuu

SEQ ID NO: 2928208 - RNA, 19 nt, Human
guagaaguucuaguguuuu

SEQ ID NO: 2928209 - RNA, 14 nt, Human
guagaauguuuuca

SEQ ID NO: 2928210 - RNA, 18 nt, Human
guagaagcccuucuaccu

SEQ ID NO: 2928211 - RNA, 21 nt, Human
guagaagucuuagauguauau

SEQ ID NO: 2928212 - RNA, 20 nt, Human
guagaaauaucugaaaaugu

SEQ ID NO: 2928213 - RNA, 21 nt, Human
guagaaauaucugaaaaugua

SEQ ID NO: 2928214 - RNA, 23 nt, Human
guagaaauaucugaaaauguaug

SEQ ID NO: 2928215 - RNA, 15 nt, Human
guagagccagggucu

SEQ ID NO: 2928216 - RNA, 13 nt, Human
guagagacagggu

SEQ ID NO: 2928217 - RNA, 10 nt, Human
guagagccag

SEQ ID NO: 2928218 - RNA, 11 nt, Human
guagagccagg

SEQ ID NO: 2928219 - RNA, 16 nt, Human
guagacaguuggguuu

SEQ ID NO: 2928220 - RNA, 11 nt, Human
guagagacagg

SEQ ID NO: 2928221 - RNA, 12 nt, Human
guagagacaggg

SEQ ID NO: 2928222 - RNA, 23 nt, Human
guagacgugcacgcacacugucu

SEQ ID NO: 2928223 - RNA, 20 nt, Human
guagacgugcacgcacacug

SEQ ID NO: 2928224 - RNA, 21 nt, Human
guacucugccacuuuauuucu

SEQ ID NO: 2928225 - RNA, 15 nt, Human
guacuauguaucaau

SEQ ID NO: 2928226 - RNA, 17 nt, Human
guacuauguaucaauga

SEQ ID NO: 2928227 - RNA, 17 nt, Human
guacuacaguccuccca

SEQ ID NO: 2928228 - RNA, 21 nt, Human
guacuaucugugcguagaagu

SEQ ID NO: 2928229 - RNA, 13 nt, Human
guacuauguauca

SEQ ID NO: 2928230 - RNA, 13 nt, Human
guacccacugcuc

SEQ ID NO: 2928231 - RNA, 14 nt, Human
guacccacugcucu

SEQ ID NO: 2928232 - RNA, 19 nt, Human
guacuacaguccucccauc

SEQ ID NO: 2928233 - RNA, 18 nt, Human
guacuacaguccucccau

SEQ ID NO: 2928234 - RNA, 16 nt, Human
guacuggagaaaaugg

SEQ ID NO: 2928235 - RNA, 15 nt, Human
guacuucaugcuguc

SEQ ID NO: 2928236 - RNA, 21 nt, Human
guacuucaaauccuugaagau

SEQ ID NO: 2928237 - RNA, 22 nt, Human
guacuucaaauccuugaagauu

SEQ ID NO: 2928238 - RNA, 14 nt, Human
guaacucuguaauu

SEQ ID NO: 2928239 - RNA, 20 nt, Human
guaauaggcguaacuaauuu

SEQ ID NO: 2928240 - RNA, 22 nt, Human
guaauuugugauacaaugcugu

SEQ ID NO: 2928241 - RNA, 14 nt, Human
guaauaugcacaca

SEQ ID NO: 2928242 - RNA, 16 nt, Human
guaauaugcacacauu

SEQ ID NO: 2928243 - RNA, 17 nt, Human
guaauaugcacacauuu

SEQ ID NO: 2928244 - RNA, 18 nt, Human
guaauaugcacacauuuu

SEQ ID NO: 2928245 - RNA, 14 nt, Human
aaauauaauugaca

SEQ ID NO: 2928246 - RNA, 22 nt, Human
aaauacgugggcauucaaaugu

SEQ ID NO: 2928247 - RNA, 18 nt, Human
aaauaccagccaguaaau

SEQ ID NO: 2928248 - RNA, 19 nt, Human
aaauacacacucaaaucaa

SEQ ID NO: 2928249 - RNA, 17 nt, Human
aaauacagauagauaua

SEQ ID NO: 2928250 - RNA, 22 nt, Human
aaauaauuuuuauauuugaaau

SEQ ID NO: 2928251 - RNA, 23 nt, Human
aaauaauuuuuauauuugaaaua

SEQ ID NO: 2928252 - RNA, 15 nt, Human
aaauacacacucaaa

SEQ ID NO: 2928253 - RNA, 14 nt, Human
guacacauaagcca

SEQ ID NO: 2928254 - RNA, 23 nt, Human
guacacugccuucucaacuccaa

SEQ ID NO: 2928255 - RNA, 21 nt, Human
aaauaauuuuuauauuugaaa

SEQ ID NO: 2928256 - RNA, 16 nt, Human
aaagguacuuugcagg

SEQ ID NO: 2928257 - RNA, 20 nt, Human
aaagguauuuuaaucaccaa

SEQ ID NO: 2928258 - RNA, 20 nt, Human
aaaguacacuguuucaaacu

SEQ ID NO: 2928259 - RNA, 19 nt, Human
aaaguacuucuccacccug

SEQ ID NO: 2928260 - RNA, 23 nt, Human
aaaguacuucuccacccugcucu

SEQ ID NO: 2928261 - RNA, 20 nt, Human
aaaguacuucuccacccugc

SEQ ID NO: 2928262 - RNA, 21 nt, Human
aaaguacuucuccacccugcu

SEQ ID NO: 2928263 - RNA, 18 nt, Human
aaaguauguuagugcaaa

SEQ ID NO: 2928264 - RNA, 18 nt, Human
aaaguaucccuacuguaa

SEQ ID NO: 2928265 - RNA, 23 nt, Human
aaaguucugcagauaaacaguag

SEQ ID NO: 2928266 - RNA, 17 nt, Human
aaaguauguuagugcaa

SEQ ID NO: 2928267 - RNA, 20 nt, Human
aaauaaguguauuuugaaau

SEQ ID NO: 2928268 - RNA, 13 nt, Human
aaauaaucucuga

SEQ ID NO: 2928269 - RNA, 14 nt, Human
aaauaaguguauuu

SEQ ID NO: 2928270 - RNA, 19 nt, Human
aaauaaguguauuuugaaa

SEQ ID NO: 2928271 - RNA, 16 nt, Human
aaauaacagaagaaaa

SEQ ID NO: 2928272 - RNA, 17 nt, Human
aaauaacagaagaaaau

SEQ ID NO: 2928273 - RNA, 11 nt, Human
gguccugcugc

SEQ ID NO: 2928274 - RNA, 12 nt, Human
gguccugcugca

SEQ ID NO: 2928275 - RNA, 23 nt, Human
aaagacugaguacguugugcauu

SEQ ID NO: 2928276 - RNA, 13 nt, Human
aaagacuguacaa

SEQ ID NO: 2928277 - RNA, 14 nt, Human
aaagacuguacaaa

SEQ ID NO: 2928278 - RNA, 19 nt, Human
aaagaugcuucucacugcc

SEQ ID NO: 2928279 - RNA, 14 nt, Human
aaagaugcuucuca

SEQ ID NO: 2928280 - RNA, 17 nt, Human
aaagaugcuucucacug

SEQ ID NO: 2928281 - RNA, 15 nt, Human
aaagaggaaugaagu

SEQ ID NO: 2928282 - RNA, 15 nt, Human
aaagaggcagcuuga

SEQ ID NO: 2928283 - RNA, 14 nt, Human
ggguggggcagugc

SEQ ID NO: 2928284 - RNA, 14 nt, Human
ggguggccucccaa

SEQ ID NO: 2928285 - RNA, 23 nt, Human
aaacuucagcgguuuauauaagc

SEQ ID NO: 2928286 - RNA, 19 nt, Human
aaacuucagacauagaauu

SEQ ID NO: 2928287 - RNA, 13 nt, Human
aaagacagugaaa

SEQ ID NO: 2928288 - RNA, 17 nt, Human
aaagacuauucaaacag

SEQ ID NO: 2928289 - RNA, 19 nt, Human
aaagacuauucaaacaguc

SEQ ID NO: 2928290 - RNA, 18 nt, Human
aaagacuauucaaacagu

SEQ ID NO: 2928291 - RNA, 14 nt, Human
aaagacuccaaaga

SEQ ID NO: 2928292 - RNA, 21 nt, Human
aaagacuccaaagaaauguaa

SEQ ID NO: 2928293 - RNA, 15 nt, Human
aaagacuccaaagaa

SEQ ID NO: 2928294 - RNA, 21 nt, Human
aaagacuauucaaacagucuc

SEQ ID NO: 2928295 - RNA, 13 nt, Human
gguggaugccugg

SEQ ID NO: 2928296 - RNA, 12 nt, Human
ggugcaaugacc

SEQ ID NO: 2928297 - RNA, 16 nt, Human
ggugcaaugaccuuuc

SEQ ID NO: 2928298 - RNA, 13 nt, Human
ggugcaaugaccu

SEQ ID NO: 2928299 - RNA, 18 nt, Human
ggugauccacccaccuca

SEQ ID NO: 2928300 - RNA, 23 nt, Human
ggugauccacccaccucagccuc

SEQ ID NO: 2928301 - RNA, 24 nt, Human
ggugauccacccaccucagccucc

SEQ ID NO: 2928302 - RNA, 13 nt, Human
ggugaacagaaca

SEQ ID NO: 2928303 - RNA, 13 nt, Human
ggucgaggcagga

SEQ ID NO: 2928304 - RNA, 13 nt, Human
aaagcugcugaca

SEQ ID NO: 2928305 - RNA, 15 nt, Human
aaagcuuguuaagau

SEQ ID NO: 2928306 - RNA, 13 nt, Human
aaagcuuuugcau

SEQ ID NO: 2928307 - RNA, 15 nt, Human
aaagcucacuuuacu

SEQ ID NO: 2928308 - RNA, 21 nt, Human
aaagcacugacuucuaaguaa

SEQ ID NO: 2928309 - RNA, 17 nt, Human
aaagcacugacuucuaa

SEQ ID NO: 2928310 - RNA, 17 nt, Human
aaaggagauuggaagga

SEQ ID NO: 2928311 - RNA, 17 nt, Human
aaaggagagcuagcagc

SEQ ID NO: 2928312 - RNA, 21 nt, Human
aaaggagagcuagcagcaggg

SEQ ID NO: 2928313 - RNA, 14 nt, Human
aaagcuuuugcaua

SEQ ID NO: 2928314 - RNA, 17 nt, Human
aaagcuuuugcauauug

SEQ ID NO: 2928315 - RNA, 22 nt, Human
aaaggaaagagggagguaagga

SEQ ID NO: 2928316 - RNA, 22 nt, Human
aaagggacuuggaagcuccgcu

SEQ ID NO: 2928317 - RNA, 14 nt, Human
aaagguacuucaaa

SEQ ID NO: 2928318 - RNA, 15 nt, Human
aaacucguuaauuug

SEQ ID NO: 2928319 - RNA, 13 nt, Human
aaacgucuuaaau

SEQ ID NO: 2928320 - RNA, 14 nt, Human
aaacgucuuaaaua

SEQ ID NO: 2928321 - RNA, 13 nt, Human
aaacucuccucug

SEQ ID NO: 2928322 - RNA, 19 nt, Human
ggguggcaccagcagccug

SEQ ID NO: 2928323 - RNA, 17 nt, Human
aaacuuaaucuaaaugg

SEQ ID NO: 2928324 - RNA, 18 nt, Human
aaacuuaaucuaaaugga

SEQ ID NO: 2928325 - RNA, 16 nt, Human
aaacuuaaucuaaaug

SEQ ID NO: 2928326 - RNA, 14 nt, Human
aaacuuaaucuaaa

SEQ ID NO: 2928327 - RNA, 15 nt, Human
gggggccuggaugcc

SEQ ID NO: 2928328 - RNA, 15 nt, Human
aaacgggcucagcaa

SEQ ID NO: 2928329 - RNA, 23 nt, Human
aaaccaagucaagugaaaaagga

SEQ ID NO: 2928330 - RNA, 12 nt, Human
aaaccacagcag

SEQ ID NO: 2928331 - RNA, 11 nt, Human
aaacacagcaa

SEQ ID NO: 2928332 - RNA, 19 nt, Human
aaacacaaacgggcucagc

SEQ ID NO: 2928333 - RNA, 21 nt, Human
aaacacauuaaagguacuuug

SEQ ID NO: 2928334 - RNA, 11 nt, Human
aaacacauuaa

SEQ ID NO: 2928335 - RNA, 15 nt, Human
aaacacauuaaaggu

SEQ ID NO: 2928336 - RNA, 11 nt, Human
aaacacauuuu

SEQ ID NO: 2928337 - RNA, 18 nt, Human
aaacacaucuaguaguug

SEQ ID NO: 2928338 - RNA, 14 nt, Human
aaacacagcaaggg

SEQ ID NO: 2928339 - RNA, 12 nt, Human
aaacacagcaag

SEQ ID NO: 2928340 - RNA, 20 nt, Human
aaaauuuugauguuuuaagg

SEQ ID NO: 2928341 - RNA, 19 nt, Human
aaaauuuagaaauauaauu

SEQ ID NO: 2928342 - RNA, 13 nt, Human
gggaugagaaagg

SEQ ID NO: 2928343 - RNA, 15 nt, Human
ggggccucagugcca

SEQ ID NO: 2928344 - RNA, 12 nt, Human
gggggccucagu

SEQ ID NO: 2928345 - RNA, 15 nt, Human
gggggccucagugcc

SEQ ID NO: 2928346 - RNA, 17 nt, Human
gggggccucagugccac

SEQ ID NO: 2928347 - RNA, 18 nt, Human
gggggccucagugccacu

SEQ ID NO: 2928348 - RNA, 11 nt, Human
ggggagaaagu

SEQ ID NO: 2928349 - RNA, 18 nt, Human
ggggaauguuugccucug

SEQ ID NO: 2928350 - RNA, 22 nt, Human
ggggaauguuugccucugccuc

SEQ ID NO: 2928351 - RNA, 15 nt, Human
ggggaccagagcugc

SEQ ID NO: 2928352 - RNA, 16 nt, Human
ggggaccagagcugcc

SEQ ID NO: 2928353 - RNA, 19 nt, Human
ggggaauugaggacacuga

SEQ ID NO: 2928354 - RNA, 17 nt, Human
aaacauggccuuugcuu

SEQ ID NO: 2928355 - RNA, 14 nt, Human
aaacaguagugaua

SEQ ID NO: 2928356 - RNA, 15 nt, Human
aaacagucucaggaa

SEQ ID NO: 2928357 - RNA, 16 nt, Human
aaacauggccuuugcu

SEQ ID NO: 2928358 - RNA, 18 nt, Human
gcuucaaggauccugagc

SEQ ID NO: 2928359 - RNA, 19 nt, Human
gcuucaaggauccugagcc

SEQ ID NO: 2928360 - RNA, 21 nt, Human
gcuucaaggauccugagccag

SEQ ID NO: 2928361 - RNA, 20 nt, Human
gcuucaaggauccugagcca

SEQ ID NO: 2928362 - RNA, 15 nt, Human
gcuucacggaagagc

SEQ ID NO: 2928363 - RNA, 17 nt, Human
gcuucacggaagagccu

SEQ ID NO: 2928364 - RNA, 12 nt, Human
gcuucagccucc

SEQ ID NO: 2928365 - RNA, 18 nt, Human
gcuucacggaagagccuu

SEQ ID NO: 2928366 - RNA, 22 nt, Human
gcuuccucauaguaugguggcu

SEQ ID NO: 2928367 - RNA, 20 nt, Human
gcuuguaaauagcucaggug

SEQ ID NO: 2928368 - RNA, 14 nt, Human
gcuugagcucagga

SEQ ID NO: 2928369 - RNA, 16 nt, Human
gcuuguacacucauuc

SEQ ID NO: 2928370 - RNA, 12 nt, Human
gcuuguacauaa

SEQ ID NO: 2928371 - RNA, 13 nt, Human
gcugcuggcuggu

SEQ ID NO: 2928372 - RNA, 13 nt, Human
gcucugcccuugg

SEQ ID NO: 2928373 - RNA, 16 nt, Human
gcucugguccauagag

SEQ ID NO: 2928374 - RNA, 15 nt, Human
gcucugguccauaga

SEQ ID NO: 2928375 - RNA, 15 nt, Human
gcugcugaaggcucg

SEQ ID NO: 2928376 - RNA, 14 nt, Human
gcugcugaaggcuc

SEQ ID NO: 2928377 - RNA, 13 nt, Human
gcugcugaaggcu

SEQ ID NO: 2928378 - RNA, 20 nt, Human
gcuggcgugcaguggugcga

SEQ ID NO: 2928379 - RNA, 18 nt, Human
gcuggagugcagugagcc

SEQ ID NO: 2928380 - RNA, 17 nt, Human
gcuggagugcagugagc

SEQ ID NO: 2928381 - RNA, 22 nt, Human
gcuggagugcagugagccgaga

SEQ ID NO: 2928382 - RNA, 20 nt, Human
gcuggccuggccccucaggg

SEQ ID NO: 2928383 - RNA, 23 nt, Human
gcuggguggcaccagcagccugg

SEQ ID NO: 2928384 - RNA, 22 nt, Human
gcuggguggcaccagcagccug

SEQ ID NO: 2928385 - RNA, 21 nt, Human
gcuggguggcaccagcagccu

SEQ ID NO: 2928386 - RNA, 15 nt, Human
gcuggcuguuggcug

SEQ ID NO: 2928387 - RNA, 16 nt, Human
gcuggcuguuggcugg

SEQ ID NO: 2928388 - RNA, 12 nt, Human
ggacccccugaa

SEQ ID NO: 2928389 - RNA, 11 nt, Human
ggacccugagg

SEQ ID NO: 2928390 - RNA, 13 nt, Human
ggacccugaggcc

SEQ ID NO: 2928391 - RNA, 12 nt, Human
ggacccugaggc

SEQ ID NO: 2928392 - RNA, 13 nt, Human
ggaccucaggccu

SEQ ID NO: 2928393 - RNA, 20 nt, Human
ggacguguuaugacuccaga

SEQ ID NO: 2928394 - RNA, 15 nt, Human
ggaccucaggccugg

SEQ ID NO: 2928395 - RNA, 14 nt, Human
ggaccucaggccug

SEQ ID NO: 2928396 - RNA, 14 nt, Human
ggacuuggaagcuc

SEQ ID NO: 2928397 - RNA, 23 nt, Human
ggacuuugcacacuuuggcccag

SEQ ID NO: 2928398 - RNA, 14 nt, Human
ggacuuugcacacu

SEQ ID NO: 2928399 - RNA, 13 nt, Human
ggagaaacuggaa

SEQ ID NO: 2928400 - RNA, 16 nt, Human
ggagaaaggaagggcu

SEQ ID NO: 2928401 - RNA, 20 nt, Human
ggacuaacuugucuuuggac

SEQ ID NO: 2928402 - RNA, 15 nt, Human
ggacucaaugcacug

SEQ ID NO: 2928403 - RNA, 14 nt, Human
ggacuacaggugug

SEQ ID NO: 2928404 - RNA, 24 nt, Human
ggacuaacuugucuuuggacccug

SEQ ID NO: 2928405 - RNA, 16 nt, Human
ggacucaaugcacuga

SEQ ID NO: 2928406 - RNA, 18 nt, Human
ggacucaaugcacugaca

SEQ ID NO: 2928407 - RNA, 21 nt, Human
ggacuccaggcagcagacaca

SEQ ID NO: 2928408 - RNA, 22 nt, Human
ggacuccaggcagcagacacau

SEQ ID NO: 2928409 - RNA, 22 nt, Human
ggacucauuuuaaaaaauggaa

SEQ ID NO: 2928410 - RNA, 15 nt, Human
ggaagagaaaaaaua

SEQ ID NO: 2928411 - RNA, 18 nt, Human
ggaagacuuuggaaagag

SEQ ID NO: 2928412 - RNA, 13 nt, Human
ggaagagaaaaaa

SEQ ID NO: 2928413 - RNA, 22 nt, Human
ggaagacaaugugaaaagaaaa

SEQ ID NO: 2928414 - RNA, 14 nt, Human
ggaagacagcucuu

SEQ ID NO: 2928415 - RNA, 13 nt, Human
ggaagacagcucu

SEQ ID NO: 2928416 - RNA, 12 nt, Human
ggaagacuuugg

SEQ ID NO: 2928417 - RNA, 17 nt, Human
ggaagacuuuggaaaga

SEQ ID NO: 2928418 - RNA, 13 nt, Human
ggaagacuuugga

SEQ ID NO: 2928419 - RNA, 14 nt, Human
ggaacacucugaga

SEQ ID NO: 2928420 - RNA, 12 nt, Human
ggaacacucuga

SEQ ID NO: 2928421 - RNA, 23 nt, Human
ggaacagaagaggaaagagagac

SEQ ID NO: 2928422 - RNA, 16 nt, Human
ggaacacucugagacu

SEQ ID NO: 2928423 - RNA, 15 nt, Human
ggaacacucugagac

SEQ ID NO: 2928424 - RNA, 15 nt, Human
ggaagccgcuggggc

SEQ ID NO: 2928425 - RNA, 20 nt, Human
ggaaggaaacccagcucugg

SEQ ID NO: 2928426 - RNA, 19 nt, Human
ggaaggaaacccagcucug

SEQ ID NO: 2928427 - RNA, 22 nt, Human
ggaagcucagggccuggcucag

SEQ ID NO: 2928428 - RNA, 11 nt, Human
ggaagcuccgc

SEQ ID NO: 2928429 - RNA, 23 nt, Human
ggaagcucagggccuggcucagg

SEQ ID NO: 2928430 - RNA, 15 nt, Human
ggaagcucagggccu

SEQ ID NO: 2928431 - RNA, 16 nt, Human
ggaaggaaacccagcu

SEQ ID NO: 2928432 - RNA, 17 nt, Human
ggacacuaaccacgcug

SEQ ID NO: 2928433 - RNA, 22 nt, Human
ggacacuaaccacgcuggaccu

SEQ ID NO: 2928434 - RNA, 19 nt, Human
ggacagcuccuucuguccu

SEQ ID NO: 2928435 - RNA, 20 nt, Human
ggacagcuccuucuguccua

SEQ ID NO: 2928436 - RNA, 17 nt, Human
ggacagcuccuucuguc

SEQ ID NO: 2928437 - RNA, 14 nt, Human
ggacacagcucuuc

SEQ ID NO: 2928438 - RNA, 21 nt, Human
ggacacagcucuucuccaggc

SEQ ID NO: 2928439 - RNA, 15 nt, Human
ggacacagcucuucu

SEQ ID NO: 2928440 - RNA, 18 nt, Human
ggacacagcucuucucca

SEQ ID NO: 2928441 - RNA, 19 nt, Human
ggaaugaagauacugaaau

SEQ ID NO: 2928442 - RNA, 13 nt, Human
ggacaagagcagg

SEQ ID NO: 2928443 - RNA, 23 nt, Human
ggacaaggaugaucuaggaagac

SEQ ID NO: 2928444 - RNA, 22 nt, Human
ggacaaggaugaucuaggaaga

SEQ ID NO: 2928445 - RNA, 16 nt, Human
ggaauccagacccggc

SEQ ID NO: 2928446 - RNA, 17 nt, Human
ggaauaagacagagacc

SEQ ID NO: 2928447 - RNA, 13 nt, Human
ggaauaagacaga

SEQ ID NO: 2928448 - RNA, 18 nt, Human
ggaauaacauguaauuaa

SEQ ID NO: 2928449 - RNA, 23 nt, Human
gcucugaucauccacugugccau

SEQ ID NO: 2928450 - RNA, 17 nt, Human
gcucugaucauccacug

SEQ ID NO: 2928451 - RNA, 23 nt, Human
gcucugcaagaauugaagcagga

SEQ ID NO: 2928452 - RNA, 11 nt, Human
gcucugcccuu

SEQ ID NO: 2928453 - RNA, 19 nt, Human
gcuccaccuugcagcucuc

SEQ ID NO: 2928454 - RNA, 15 nt, Human
gcuccacuuggucug

SEQ ID NO: 2928455 - RNA, 18 nt, Human
gcucccaccuggcucugu

SEQ ID NO: 2928456 - RNA, 14 nt, Human
gcucccaccuggcu

SEQ ID NO: 2928457 - RNA, 16 nt, Human
gcucccaccuggcucu

SEQ ID NO: 2928458 - RNA, 18 nt, Human
gcucccagccaggcccuu

SEQ ID NO: 2928459 - RNA, 16 nt, Human
gcucccagccaggccc

SEQ ID NO: 2928460 - RNA, 17 nt, Human
gcucccagccaggcccu

SEQ ID NO: 2928461 - RNA, 14 nt, Human
gcucccagccaggc

SEQ ID NO: 2928462 - RNA, 15 nt, Human
gcucccagccaggcc

SEQ ID NO: 2928463 - RNA, 17 nt, Human
gcucccaggcauucccc

SEQ ID NO: 2928464 - RNA, 20 nt, Human
gcuccagcucaccagcccca

SEQ ID NO: 2928465 - RNA, 21 nt, Human
gcuccagcucaccagccccag

SEQ ID NO: 2928466 - RNA, 17 nt, Human
gcuccagcucaccagcc

SEQ ID NO: 2928467 - RNA, 18 nt, Human
gcuccagcucaccagccc

SEQ ID NO: 2928468 - RNA, 18 nt, Human
gcuccacuuggucuguga

SEQ ID NO: 2928469 - RNA, 19 nt, Human
gcuccacuuggucugugag

SEQ ID NO: 2928470 - RNA, 15 nt, Human
gcuccuggcccacug

SEQ ID NO: 2928471 - RNA, 14 nt, Human
gcuccuggcccacu

SEQ ID NO: 2928472 - RNA, 20 nt, Human
gcuccuggcccacugcaucg

SEQ ID NO: 2928473 - RNA, 19 nt, Human
gcuccuggcccacugcauc

SEQ ID NO: 2928474 - RNA, 18 nt, Human
gcuccuggcccacugcau

SEQ ID NO: 2928475 - RNA, 18 nt, Human
gcuccccucggagaagag

SEQ ID NO: 2928476 - RNA, 21 nt, Human
gcuccccucggagaagagcug

SEQ ID NO: 2928477 - RNA, 17 nt, Human
gcuaggccuggccagau

SEQ ID NO: 2928478 - RNA, 23 nt, Human
gcuaggccuggccagaugcacca

SEQ ID NO: 2928479 - RNA, 16 nt, Human
gcuaggccuggccaga

SEQ ID NO: 2928480 - RNA, 19 nt, Human
gcuauucaguaauaacucu

SEQ ID NO: 2928481 - RNA, 13 nt, Human
gcuaugcauuuga

SEQ ID NO: 2928482 - RNA, 12 nt, Human
gcuaugcauuug

SEQ ID NO: 2928483 - RNA, 22 nt, Human
gcuagugugguguuuccuggca

SEQ ID NO: 2928484 - RNA, 21 nt, Human
gcuagugugguguuuccuggc

SEQ ID NO: 2928485 - RNA, 13 nt, Human
gcucagagagggu

SEQ ID NO: 2928486 - RNA, 14 nt, Human
gcucagagagggug

SEQ ID NO: 2928487 - RNA, 16 nt, Human
gcucaggugucccugc

SEQ ID NO: 2928488 - RNA, 14 nt, Human
gcucaggugucccu

SEQ ID NO: 2928489 - RNA, 23 nt, Human
gcucagguggggucacucuggca

SEQ ID NO: 2928490 - RNA, 17 nt, Human
gcucacugcagccucaa

SEQ ID NO: 2928491 - RNA, 15 nt, Human
gcucacugcagccuc

SEQ ID NO: 2928492 - RNA, 16 nt, Human
gcucacugcagccuca

SEQ ID NO: 2928493 - RNA, 11 nt, Human
gcucacugcag

SEQ ID NO: 2928494 - RNA, 12 nt, Human
gcucacugcagc

SEQ ID NO: 2928495 - RNA, 13 nt, Human
gcucacugcagcc

SEQ ID NO: 2928496 - RNA, 14 nt, Human
gcucacugcagccu

SEQ ID NO: 2928497 - RNA, 18 nt, Human
gcuauucaguaauaacuc

SEQ ID NO: 2928498 - RNA, 20 nt, Human
gcuauucaguaauaacucua

SEQ ID NO: 2928499 - RNA, 11 nt, Human
gcuacugccau

SEQ ID NO: 2928500 - RNA, 13 nt, Human
gcuacugccaucc

SEQ ID NO: 2928501 - RNA, 16 nt, Human
gcuagaacucccuuuc

SEQ ID NO: 2928502 - RNA, 23 nt, Human
gcuacucgggaggcugaggcagg

SEQ ID NO: 2928503 - RNA, 17 nt, Human
gcuacucgggaggcuga

SEQ ID NO: 2928504 - RNA, 18 nt, Human
gcuacucgggaggcugag

SEQ ID NO: 2928505 - RNA, 12 nt, Human
gcuagaacuccc

SEQ ID NO: 2928506 - RNA, 13 nt, Human
gcuagaacucccu

SEQ ID NO: 2928507 - RNA, 14 nt, Human
gcuagaacucccuu

SEQ ID NO: 2928508 - RNA, 15 nt, Human
gcuagaacucccuuu

SEQ ID NO: 2928509 - RNA, 20 nt, Human
gcgugcacacaccagagccc

SEQ ID NO: 2928510 - RNA, 21 nt, Human
gcgggaggauguucugggaca

SEQ ID NO: 2928511 - RNA, 22 nt, Human
gcgggaggauguucugggacac

SEQ ID NO: 2928512 - RNA, 20 nt, Human
gcgggaggauguucugggac

SEQ ID NO: 2928513 - RNA, 19 nt, Human
gcgugcacacaccagagcc

SEQ ID NO: 2928514 - RNA, 23 nt, Human
gcgugcacacaccagagcccacc

SEQ ID NO: 2928515 - RNA, 18 nt, Human
gcguuucuaugacacaug

SEQ ID NO: 2928516 - RNA, 23 nt, Human
gcuaagugauccucccaccucag

SEQ ID NO: 2928517 - RNA, 13 nt, Human
gcuaaugggacac

SEQ ID NO: 2928518 - RNA, 15 nt, Human
gcuaaugggacacua

SEQ ID NO: 2928519 - RNA, 22 nt, Human
gccugcccaggccccugccacc

SEQ ID NO: 2928520 - RNA, 15 nt, Human
gccugcccaggcccc

SEQ ID NO: 2928521 - RNA, 20 nt, Human
gccugcccaggccccugcca

SEQ ID NO: 2928522 - RNA, 17 nt, Human
gccucgaacuggcugca

SEQ ID NO: 2928523 - RNA, 19 nt, Human
gccuccugugugugcgccu

SEQ ID NO: 2928524 - RNA, 23 nt, Human
gccuccugugugugcgccuacag

SEQ ID NO: 2928525 - RNA, 16 nt, Human
gccucccaaagugcug

SEQ ID NO: 2928526 - RNA, 13 nt, Human
gccuccugugugu

SEQ ID NO: 2928527 - RNA, 17 nt, Human
gccucccaaagugcugg

SEQ ID NO: 2928528 - RNA, 13 nt, Human
gccugcccaggcc

SEQ ID NO: 2928529 - RNA, 14 nt, Human
gccugcccaggccc

SEQ ID NO: 2928530 - RNA, 14 nt, Human
gccucuuggguuca

SEQ ID NO: 2928531 - RNA, 21 nt, Human
gccucuuaugggcuggguucu

SEQ ID NO: 2928532 - RNA, 20 nt, Human
gccucgaacuggcugcaaag

SEQ ID NO: 2928533 - RNA, 22 nt, Human
gccucgaacuggcugcaaaggg

SEQ ID NO: 2928534 - RNA, 15 nt, Human
gccucuuagaugcag

SEQ ID NO: 2928535 - RNA, 16 nt, Human
gccucuuaugggcugg

SEQ ID NO: 2928536 - RNA, 18 nt, Human
gccucuuaugggcugggu

SEQ ID NO: 2928537 - RNA, 17 nt, Human
gccucuuaugggcuggg

SEQ ID NO: 2928538 - RNA, 20 nt, Human
gccuggccugagcugggaug

SEQ ID NO: 2928539 - RNA, 18 nt, Human
gccuggccugagcuggga

SEQ ID NO: 2928540 - RNA, 14 nt, Human
gccuggccugagcu

SEQ ID NO: 2928541 - RNA, 13 nt, Human
gccuggccugagc

SEQ ID NO: 2928542 - RNA, 18 nt, Human
gccugugccucugggacu

SEQ ID NO: 2928543 - RNA, 13 nt, Human
gccuggcucaggu

SEQ ID NO: 2928544 - RNA, 16 nt, Human
gccugugccucuggga

SEQ ID NO: 2928545 - RNA, 17 nt, Human
gccugugccucugggac

SEQ ID NO: 2928546 - RNA, 14 nt, Human
gccuguugggccag

SEQ ID NO: 2928547 - RNA, 20 nt, Human
gccuguugggccaggagccu

SEQ ID NO: 2928548 - RNA, 18 nt, Human
gccuguugggccaggagc

SEQ ID NO: 2928549 - RNA, 16 nt, Human
gccuguugggccagga

SEQ ID NO: 2928550 - RNA, 15 nt, Human
gccuguugggccagg

SEQ ID NO: 2928551 - RNA, 22 nt, Human
gcgaucuggguucacugcaacc

SEQ ID NO: 2928552 - RNA, 18 nt, Human
gccuugcccagccuggau

SEQ ID NO: 2928553 - RNA, 19 nt, Human
gccuugcccagccuggaug

SEQ ID NO: 2928554 - RNA, 14 nt, Human
gccuugcccagccu

SEQ ID NO: 2928555 - RNA, 15 nt, Human
gccuugcccagccug

SEQ ID NO: 2928556 - RNA, 17 nt, Human
gccuugcccagccugga

SEQ ID NO: 2928557 - RNA, 13 nt, Human
gccuugcccagcc

SEQ ID NO: 2928558 - RNA, 17 nt, Human
gcgagcccugguggcag

SEQ ID NO: 2928559 - RNA, 15 nt, Human
gcgagcccugguggc

SEQ ID NO: 2928560 - RNA, 20 nt, Human
gccuugaccauucuccaccu

SEQ ID NO: 2928561 - RNA, 19 nt, Human
gccuugaccauucuccacc

SEQ ID NO: 2928562 - RNA, 17 nt, Human
gccuugaccauucucca

SEQ ID NO: 2928563 - RNA, 21 nt, Human
gccuucggccuccauccugag

SEQ ID NO: 2928564 - RNA, 20 nt, Human
gccuucggccuccauccuga

SEQ ID NO: 2928565 - RNA, 12 nt, Human
gcccccacuggu

SEQ ID NO: 2928566 - RNA, 17 nt, Human
gccccugccacccuggg

SEQ ID NO: 2928567 - RNA, 16 nt, Human
gccccugccacccugg

SEQ ID NO: 2928568 - RNA, 16 nt, Human
gcccucaauugugaaa

SEQ ID NO: 2928569 - RNA, 23 nt, Human
gcccgggcucugccucccaucac

SEQ ID NO: 2928570 - RNA, 16 nt, Human
gcccugcagagggcac

SEQ ID NO: 2928571 - RNA, 18 nt, Human
gcccugcagagggcacag

SEQ ID NO: 2928572 - RNA, 11 nt, Human
gcccugccucc

SEQ ID NO: 2928573 - RNA, 22 nt, Human
gcccugcccaccuggccucugc

SEQ ID NO: 2928574 - RNA, 21 nt, Human
gcccugcccaccuggccucug

SEQ ID NO: 2928575 - RNA, 20 nt, Human
gcccugcccaccuggccucu

SEQ ID NO: 2928576 - RNA, 17 nt, Human
gcccugcccaccuggcc

SEQ ID NO: 2928577 - RNA, 23 nt, Human
gccgcccaaggccuuccccuggc

SEQ ID NO: 2928578 - RNA, 14 nt, Human
gccgcccaaggccu

SEQ ID NO: 2928579 - RNA, 19 nt, Human
gccgcagcccugcagaggg

SEQ ID NO: 2928580 - RNA, 20 nt, Human
gccgcagcccugcagagggc

SEQ ID NO: 2928581 - RNA, 22 nt, Human
gcccuuagcagggaaacagcua

SEQ ID NO: 2928582 - RNA, 13 nt, Human
gcccugccuccuu

SEQ ID NO: 2928583 - RNA, 12 nt, Human
gcccugccuccu

SEQ ID NO: 2928584 - RNA, 19 nt, Human
gcccuuagcagggaaacag

SEQ ID NO: 2928585 - RNA, 20 nt, Human
gcccuuagcagggaaacagc

SEQ ID NO: 2928586 - RNA, 20 nt, Human
gccuaggugacagagugaga

SEQ ID NO: 2928587 - RNA, 23 nt, Human
gccuagcauacguacacauuuua

SEQ ID NO: 2928588 - RNA, 21 nt, Human
gccuagcauacguacacauuu

SEQ ID NO: 2928589 - RNA, 22 nt, Human
gccuagcauacguacacauuuu

SEQ ID NO: 2928590 - RNA, 20 nt, Human
gccuagcauacguacacauu

SEQ ID NO: 2928591 - RNA, 13 nt, Human
gccuaggugacag

SEQ ID NO: 2928592 - RNA, 14 nt, Human
gccuaggugacaga

SEQ ID NO: 2928593 - RNA, 15 nt, Human
gccuaggugacagag

SEQ ID NO: 2928594 - RNA, 13 nt, Human
uaacaagccaccc

SEQ ID NO: 2928595 - RNA, 13 nt, Human
uaacaaugcugua

SEQ ID NO: 2928596 - RNA, 15 nt, Human
uaacaaugcuguauu

SEQ ID NO: 2928597 - RNA, 17 nt, Human
uaacaaugcuguauuuu

SEQ ID NO: 2928598 - RNA, 22 nt, Human
uaaauuaacuuuuauaaacuuu

SEQ ID NO: 2928599 - RNA, 16 nt, Human
uaaaugacucuucccu

SEQ ID NO: 2928600 - RNA, 20 nt, Human
uaaaucuccaaaauaaaacu

SEQ ID NO: 2928601 - RNA, 21 nt, Human
uaaaucuccaaaauaaaacuu

SEQ ID NO: 2928602 - RNA, 15 nt, Human
uaaauguugacaugg

SEQ ID NO: 2928603 - RNA, 17 nt, Human
uaaaugauuucauucaa

SEQ ID NO: 2928604 - RNA, 12 nt, Human
uaaauagcuuuu

SEQ ID NO: 2928605 - RNA, 19 nt, Human
uaaaucuccaaaauaaaac

SEQ ID NO: 2928606 - RNA, 16 nt, Human
aauacaccacuacauu

SEQ ID NO: 2928607 - RNA, 18 nt, Human
aauacaccacuacauucu

SEQ ID NO: 2928608 - RNA, 20 nt, Human
aauacaccacuacauucugu

SEQ ID NO: 2928609 - RNA, 14 nt, Human
aauacacacucaaa

SEQ ID NO: 2928610 - RNA, 15 nt, Human
aauacaccacuacau

SEQ ID NO: 2928611 - RNA, 15 nt, Human
aauaacuaaaaggua

SEQ ID NO: 2928612 - RNA, 12 nt, Human
aauaagucugau

SEQ ID NO: 2928613 - RNA, 15 nt, Human
aauaagucugauuua

SEQ ID NO: 2928614 - RNA, 19 nt, Human
aauaauguuucaaacauau

SEQ ID NO: 2928615 - RNA, 12 nt, Human
aauaaauuauuu

SEQ ID NO: 2928616 - RNA, 21 nt, Human
aauaaaugugccuucauuuuu

SEQ ID NO: 2928617 - RNA, 12 nt, Human
aauaaaugugcc

SEQ ID NO: 2928618 - RNA, 15 nt, Human
aauaacaauaaaaga

SEQ ID NO: 2928619 - RNA, 22 nt, Human
aauaacagaagaaaauagaauu

SEQ ID NO: 2928620 - RNA, 12 nt, Human
aauaacauguaa

SEQ ID NO: 2928621 - RNA, 15 nt, Human
aauaacgauaaaaga

SEQ ID NO: 2928622 - RNA, 19 nt, Human
aauaacauguaauuaagua

SEQ ID NO: 2928623 - RNA, 13 nt, Human
uaaagucaggggu

SEQ ID NO: 2928624 - RNA, 14 nt, Human
uaaaguguauuuuu

SEQ ID NO: 2928625 - RNA, 15 nt, Human
uaaaguguauuuuuu

SEQ ID NO: 2928626 - RNA, 19 nt, Human
uaaaguguauuuuuuuacu

SEQ ID NO: 2928627 - RNA, 14 nt, Human
aauaaaguaauuau

SEQ ID NO: 2928628 - RNA, 22 nt, Human
aauaaaauccauacauuugugu

SEQ ID NO: 2928629 - RNA, 12 nt, Human
aauaaaaauaau

SEQ ID NO: 2928630 - RNA, 19 nt, Human
uaaaauuauggaaacagau

SEQ ID NO: 2928631 - RNA, 16 nt, Human
uaaaauuauggaaaca

SEQ ID NO: 2928632 - RNA, 18 nt, Human
uaaacaaaauagaaaguu

SEQ ID NO: 2928633 - RNA, 22 nt, Human
uaaacaaaauagaaaguugcaa

SEQ ID NO: 2928634 - RNA, 15 nt, Human
uaaacaaaauagaaa

SEQ ID NO: 2928635 - RNA, 16 nt, Human
uaaacaaaauagaaag

SEQ ID NO: 2928636 - RNA, 17 nt, Human
uaaacaaaauagaaagu

SEQ ID NO: 2928637 - RNA, 19 nt, Human
uaaaccaaggcuagaacca

SEQ ID NO: 2928638 - RNA, 13 nt, Human
aaguuuugagaaa

SEQ ID NO: 2928639 - RNA, 12 nt, Human
aaguuaaauaaa

SEQ ID NO: 2928640 - RNA, 14 nt, Human
aaguuaaauaaauc

SEQ ID NO: 2928641 - RNA, 14 nt, Human
aaguucuaguguuu

SEQ ID NO: 2928642 - RNA, 21 nt, Human
aaguucuaguguuuucaauuu

SEQ ID NO: 2928643 - RNA, 22 nt, Human
aaguucuaguguuuucaauuuu

SEQ ID NO: 2928644 - RNA, 13 nt, Human
uaaacgucuuaaa

SEQ ID NO: 2928645 - RNA, 17 nt, Human
uaaacgucuuaaauauu

SEQ ID NO: 2928646 - RNA, 22 nt, Human
uaaacuacauuagguugugaau

SEQ ID NO: 2928647 - RNA, 18 nt, Human
uaaaccgccaaggcuggg

SEQ ID NO: 2928648 - RNA, 16 nt, Human
uaaaccgccaaggcug

SEQ ID NO: 2928649 - RNA, 17 nt, Human
uaaacucauuucuagca

SEQ ID NO: 2928650 - RNA, 12 nt, Human
uaaacucauuuc

SEQ ID NO: 2928651 - RNA, 20 nt, Human
uaaacucugagugcaaacuu

SEQ ID NO: 2928652 - RNA, 13 nt, Human
uaaagaaguuuga

SEQ ID NO: 2928653 - RNA, 14 nt, Human
uaaagaaguuugaa

SEQ ID NO: 2928654 - RNA, 18 nt, Human
uaaagaaguuugaacauu

SEQ ID NO: 2928655 - RNA, 19 nt, Human
uaaaggcuaccuuuguauu

SEQ ID NO: 2928656 - RNA, 21 nt, Human
uaaaggcuaccuuuguauucu

SEQ ID NO: 2928657 - RNA, 12 nt, Human
guucucugcccu

SEQ ID NO: 2928658 - RNA, 14 nt, Human
guucucugaggaca

SEQ ID NO: 2928659 - RNA, 20 nt, Human
guucuccagucauuauguua

SEQ ID NO: 2928660 - RNA, 18 nt, Human
guucuccagucauuaugu

SEQ ID NO: 2928661 - RNA, 16 nt, Human
guucucugaggacacu

SEQ ID NO: 2928662 - RNA, 11 nt, Human
guucucugccc

SEQ ID NO: 2928663 - RNA, 22 nt, Human
guugauagcacagacccugccc

SEQ ID NO: 2928664 - RNA, 23 nt, Human
guugauagcacagacccugcccu

SEQ ID NO: 2928665 - RNA, 13 nt, Human
guugaauuuuaca

SEQ ID NO: 2928666 - RNA, 13 nt, Human
guguuuauuguca

SEQ ID NO: 2928667 - RNA, 11 nt, Human
aagcucccagg

SEQ ID NO: 2928668 - RNA, 23 nt, Human
aagcucccaggcauuccccagga

SEQ ID NO: 2928669 - RNA, 22 nt, Human
aagcucccaggcauuccccagg

SEQ ID NO: 2928670 - RNA, 12 nt, Human
aagcucccaggc

SEQ ID NO: 2928671 - RNA, 13 nt, Human
aagcucugcuccu

SEQ ID NO: 2928672 - RNA, 18 nt, Human
aagcuguuacugucuuca

SEQ ID NO: 2928673 - RNA, 19 nt, Human
aaggaaaaaauaacaauga

SEQ ID NO: 2928674 - RNA, 16 nt, Human
aaggaaaaaauaacaa

SEQ ID NO: 2928675 - RNA, 20 nt, Human
aaggccugucagcuaaagaa

SEQ ID NO: 2928676 - RNA, 13 nt, Human
aaggcuaccuuug

SEQ ID NO: 2928677 - RNA, 14 nt, Human
guugcccaggcugg

SEQ ID NO: 2928678 - RNA, 15 nt, Human
aaggcuaccuuugua

SEQ ID NO: 2928679 - RNA, 19 nt, Human
aaggccccgcccaggcuua

SEQ ID NO: 2928680 - RNA, 16 nt, Human
aaggccccgcccaggc

SEQ ID NO: 2928681 - RNA, 14 nt, Human
aaggccccgcccag

SEQ ID NO: 2928682 - RNA, 24 nt, Human
aaggaugcacagaguuguuacauu

SEQ ID NO: 2928683 - RNA, 22 nt, Human
aaggaugcacagaguuguuaca

SEQ ID NO: 2928684 - RNA, 14 nt, Human
aaggaugcccaaag

SEQ ID NO: 2928685 - RNA, 19 nt, Human
aaggaugcccaaagaugca

SEQ ID NO: 2928686 - RNA, 23 nt, Human
guuggcugggggccucagugcca

SEQ ID NO: 2928687 - RNA, 15 nt, Human
guugcccaggcuggc

SEQ ID NO: 2928688 - RNA, 23 nt, Human
guugcuaacagcaacacaaagcu

SEQ ID NO: 2928689 - RNA, 16 nt, Human
guugcccaggcuggcg

SEQ ID NO: 2928690 - RNA, 15 nt, Human
guugggcugguguca

SEQ ID NO: 2928691 - RNA, 17 nt, Human
guugggcuggugucacc

SEQ ID NO: 2928692 - RNA, 15 nt, Human
aaggaaacccagcuc

SEQ ID NO: 2928693 - RNA, 18 nt, Human
aaggagauuuacaacugg

SEQ ID NO: 2928694 - RNA, 17 nt, Human
aaggagauuuacaacug

SEQ ID NO: 2928695 - RNA, 12 nt, Human
aaggauccugag

SEQ ID NO: 2928696 - RNA, 11 nt, Human
aaggauccuga

SEQ ID NO: 2928697 - RNA, 22 nt, Human
aaggauccugagccagauuuca

SEQ ID NO: 2928698 - RNA, 20 nt, Human
aaggauccugagccagauuu

SEQ ID NO: 2928699 - RNA, 20 nt, Human
aaggaggaagagaaaaaaua

SEQ ID NO: 2928700 - RNA, 18 nt, Human
guuuuucuaggccugggg

SEQ ID NO: 2928701 - RNA, 18 nt, Human
aagucuuagauguauaua

SEQ ID NO: 2928702 - RNA, 19 nt, Human
aagucuuagauguauauau

SEQ ID NO: 2928703 - RNA, 17 nt, Human
aagucuuagauguauau

SEQ ID NO: 2928704 - RNA, 16 nt, Human
guuuuugucuuaaaaa

SEQ ID NO: 2928705 - RNA, 23 nt, Human
guuuuuuaagggcccuuuuucaa

SEQ ID NO: 2928706 - RNA, 23 nt, Human
guuuuuuuuuaaaaaagaaacau

SEQ ID NO: 2928707 - RNA, 20 nt, Human
aagucacauuccugaacagg

SEQ ID NO: 2928708 - RNA, 13 nt, Human
aagucacacagug

SEQ ID NO: 2928709 - RNA, 18 nt, Human
aaguauucuuauuuaaug

SEQ ID NO: 2928710 - RNA, 19 nt, Human
aaguauucuuauuuaauga

SEQ ID NO: 2928711 - RNA, 24 nt, Human
aagucacacaguauuacuucugcu

SEQ ID NO: 2928712 - RNA, 22 nt, Human
aagucaaggcuuagacccucau

SEQ ID NO: 2928713 - RNA, 13 nt, Human
aagucaaggcuua

SEQ ID NO: 2928714 - RNA, 21 nt, Human
aagucaagugaaaaaggagga

SEQ ID NO: 2928715 - RNA, 21 nt, Human
aaguacuucuccacccugcuc

SEQ ID NO: 2928716 - RNA, 15 nt, Human
aaguacuggagaaaa

SEQ ID NO: 2928717 - RNA, 16 nt, Human
aaguacuauguaucaa

SEQ ID NO: 2928718 - RNA, 22 nt, Human
guuuucugagaaagacuauuca

SEQ ID NO: 2928719 - RNA, 15 nt, Human
aaguacuauguauca

SEQ ID NO: 2928720 - RNA, 17 nt, Human
guuuucugagaaagacu

SEQ ID NO: 2928721 - RNA, 16 nt, Human
guuuucugagaaagac

SEQ ID NO: 2928722 - RNA, 22 nt, Human
aaguacuucuccacccugcucu

SEQ ID NO: 2928723 - RNA, 23 nt, Human
aaguacuucuccacccugcucuc

SEQ ID NO: 2928724 - RNA, 23 nt, Human
aaguauguuagugcaaauuguca

SEQ ID NO: 2928725 - RNA, 21 nt, Human
aaguauguuagugcaaauugu

SEQ ID NO: 2928726 - RNA, 18 nt, Human
aaguaaaaccacagcagu

SEQ ID NO: 2928727 - RNA, 17 nt, Human
aaguaaaaccacagcag

SEQ ID NO: 2928728 - RNA, 21 nt, Human
guuucuagcaugaagacagag

SEQ ID NO: 2928729 - RNA, 14 nt, Human
aaguaaaaccacag

SEQ ID NO: 2928730 - RNA, 16 nt, Human
aaguaaaaccacagca

SEQ ID NO: 2928731 - RNA, 15 nt, Human
aaguaaaaccacagc

SEQ ID NO: 2928732 - RNA, 21 nt, Human
aagggugaugggaaagcauug

SEQ ID NO: 2928733 - RNA, 15 nt, Human
aagggcccagagagg

SEQ ID NO: 2928734 - RNA, 13 nt, Human
aagggcccagaga

SEQ ID NO: 2928735 - RNA, 22 nt, Human
aagggcccuuuuucaauaacug

SEQ ID NO: 2928736 - RNA, 16 nt, Human
aagggcccuuuuucaa

SEQ ID NO: 2928737 - RNA, 17 nt, Human
aaggguaucaggugcug

SEQ ID NO: 2928738 - RNA, 14 nt, Human
aaggggcaguggug

SEQ ID NO: 2928739 - RNA, 19 nt, Human
aaggguaucaggugcugcc

SEQ ID NO: 2928740 - RNA, 16 nt, Human
aaggguaucuggugac

SEQ ID NO: 2928741 - RNA, 22 nt, Human
guuucugccgcagcccugcaga

SEQ ID NO: 2928742 - RNA, 18 nt, Human
guuucugccgcagcccug

SEQ ID NO: 2928743 - RNA, 17 nt, Human
guuugccucugccucug

SEQ ID NO: 2928744 - RNA, 13 nt, Human
guuugcuaaguga

SEQ ID NO: 2928745 - RNA, 14 nt, Human
guuuuaagaggcag

SEQ ID NO: 2928746 - RNA, 16 nt, Human
guuuuaagaggcaggg

SEQ ID NO: 2928747 - RNA, 11 nt, Human
guuuggccaga

SEQ ID NO: 2928748 - RNA, 23 nt, Human
guuuggccagaagucaaggcuua

SEQ ID NO: 2928749 - RNA, 18 nt, Human
guuuggccagaagucaag

SEQ ID NO: 2928750 - RNA, 12 nt, Human
guuuggccagaa

SEQ ID NO: 2928751 - RNA, 15 nt, Human
guuuuacugcagcuu

SEQ ID NO: 2928752 - RNA, 18 nt, Human
guuuuacugcagcuuugu

SEQ ID NO: 2928753 - RNA, 16 nt, Human
guuuuacugcagcuuu

SEQ ID NO: 2928754 - RNA, 15 nt, Human
guuuuauaauuuugu

SEQ ID NO: 2928755 - RNA, 22 nt, Human
guuuuauaauuuugugaagcaa

SEQ ID NO: 2928756 - RNA, 15 nt, Human
guuuucugagaaaga

SEQ ID NO: 2928757 - RNA, 23 nt, Human
gugguggcaggcaccuguagucc

SEQ ID NO: 2928758 - RNA, 14 nt, Human
gugguggcaggcac

SEQ ID NO: 2928759 - RNA, 16 nt, Human
gugguguuuccuggca

SEQ ID NO: 2928760 - RNA, 15 nt, Human
gugguguuuccuggc

SEQ ID NO: 2928761 - RNA, 14 nt, Human
guggguagacacac

SEQ ID NO: 2928762 - RNA, 12 nt, Human
gugggagcugag

SEQ ID NO: 2928763 - RNA, 18 nt, Human
gugggauccuccaggugc

SEQ ID NO: 2928764 - RNA, 15 nt, Human
gugggauccuccagg

SEQ ID NO: 2928765 - RNA, 14 nt, Human
guggccucccaacu

SEQ ID NO: 2928766 - RNA, 13 nt, Human
guggccucccaac

SEQ ID NO: 2928767 - RNA, 15 nt, Human
guggccucccaacuc

SEQ ID NO: 2928768 - RNA, 16 nt, Human
aagagcccaggccucc

SEQ ID NO: 2928769 - RNA, 14 nt, Human
aagagcccaggccu

SEQ ID NO: 2928770 - RNA, 12 nt, Human
aagagcccaggc

SEQ ID NO: 2928771 - RNA, 19 nt, Human
aagagauugugguuucauu

SEQ ID NO: 2928772 - RNA, 16 nt, Human
aagagauugugguuuc

SEQ ID NO: 2928773 - RNA, 18 nt, Human
aagagcuguucacagcca

SEQ ID NO: 2928774 - RNA, 17 nt, Human
aagacugcauuauauuu

SEQ ID NO: 2928775 - RNA, 22 nt, Human
aagacucccaugagggagaugc

SEQ ID NO: 2928776 - RNA, 17 nt, Human
aagacucauucuucugu

SEQ ID NO: 2928777 - RNA, 14 nt, Human
aagacuccaaagaa

SEQ ID NO: 2928778 - RNA, 17 nt, Human
aagacuccaaagaaaug

SEQ ID NO: 2928779 - RNA, 16 nt, Human
aagacuccaaagaaau

SEQ ID NO: 2928780 - RNA, 22 nt, Human
aagacgcugugcugcccugccc

SEQ ID NO: 2928781 - RNA, 21 nt, Human
aagacgcugugcugcccugcc

SEQ ID NO: 2928782 - RNA, 14 nt, Human
aagacuauucaaac

SEQ ID NO: 2928783 - RNA, 13 nt, Human
aagacuauucaaa

SEQ ID NO: 2928784 - RNA, 20 nt, Human
aagacgcugugcugcccugc

SEQ ID NO: 2928785 - RNA, 23 nt, Human
aagacgcugugcugcccugccca

SEQ ID NO: 2928786 - RNA, 23 nt, Human
guguguggucaacauuucucaug

SEQ ID NO: 2928787 - RNA, 19 nt, Human
gugugguguuuccuggcac

SEQ ID NO: 2928788 - RNA, 21 nt, Human
gugucuugcaauggcagccuu

SEQ ID NO: 2928789 - RNA, 13 nt, Human
gugugagucacca

SEQ ID NO: 2928790 - RNA, 18 nt, Human
gugugagucaccaagccc

SEQ ID NO: 2928791 - RNA, 15 nt, Human
gugugguguuuccug

SEQ ID NO: 2928792 - RNA, 19 nt, Human
gugucuugcaauggcagcc

SEQ ID NO: 2928793 - RNA, 20 nt, Human
gugucccaaaaagaaaggag

SEQ ID NO: 2928794 - RNA, 16 nt, Human
aagcaaguauuagaau

SEQ ID NO: 2928795 - RNA, 22 nt, Human
aagauauuuugcuuugugauuu

SEQ ID NO: 2928796 - RNA, 17 nt, Human
aagauauuuugcuuugu

SEQ ID NO: 2928797 - RNA, 20 nt, Human
aagauauuuugcuuugugau

SEQ ID NO: 2928798 - RNA, 20 nt, Human
gugguuauaacuuaaugaaa

SEQ ID NO: 2928799 - RNA, 17 nt, Human
gugguuauaacuuaaug

SEQ ID NO: 2928800 - RNA, 19 nt, Human
gugguguuuccuggcacug

SEQ ID NO: 2928801 - RNA, 18 nt, Human
gugguuauggagagggug

SEQ ID NO: 2928802 - RNA, 15 nt, Human
aagauauuuugcuuu

SEQ ID NO: 2928803 - RNA, 19 nt, Human
aagaguaggaagacuuugg

SEQ ID NO: 2928804 - RNA, 18 nt, Human
aagaguaggaagacuuug

SEQ ID NO: 2928805 - RNA, 16 nt, Human
aagaguaggaagacuu

SEQ ID NO: 2928806 - RNA, 19 nt, Human
aagcaaaauuuuuucucua

SEQ ID NO: 2928807 - RNA, 19 nt, Human
aagauguagaggagaaacu

SEQ ID NO: 2928808 - RNA, 13 nt, Human
aagcaaaauguga

SEQ ID NO: 2928809 - RNA, 22 nt, Human
aagauguagaggagaaacugga

SEQ ID NO: 2928810 - RNA, 12 nt, Human
gugcacacacca

SEQ ID NO: 2928811 - RNA, 14 nt, Human
gugcacacaccaga

SEQ ID NO: 2928812 - RNA, 18 nt, Human
gugcacguacacacacau

SEQ ID NO: 2928813 - RNA, 23 nt, Human
gugcacaagcuccaagcucccag

SEQ ID NO: 2928814 - RNA, 17 nt, Human
gugcacacaccagagcc

SEQ ID NO: 2928815 - RNA, 14 nt, Human
gugccaagcagagg

SEQ ID NO: 2928816 - RNA, 15 nt, Human
gugcauuuggugguu

SEQ ID NO: 2928817 - RNA, 20 nt, Human
gugcacuaauguguaagaca

SEQ ID NO: 2928818 - RNA, 20 nt, Human
gugcauuugaggucuguucu

SEQ ID NO: 2928819 - RNA, 21 nt, Human
gugcauuugaggucuguucuu

SEQ ID NO: 2928820 - RNA, 22 nt, Human
gugcauuugaggucuguucuuu

SEQ ID NO: 2928821 - RNA, 14 nt, Human
gugccucugggacu

SEQ ID NO: 2928822 - RNA, 15 nt, Human
gugccucugggacug

SEQ ID NO: 2928823 - RNA, 21 nt, Human
gugccuggguggaugggccac

SEQ ID NO: 2928824 - RNA, 14 nt, Human
aacuuggcgcugcc

SEQ ID NO: 2928825 - RNA, 22 nt, Human
aacuugucuuuggacccugagg

SEQ ID NO: 2928826 - RNA, 23 nt, Human
aacuugguucccauuugcuccuu

SEQ ID NO: 2928827 - RNA, 18 nt, Human
aagaaaaguuuauaaaag

SEQ ID NO: 2928828 - RNA, 22 nt, Human
aagaaaaaggaugcacagaguu

SEQ ID NO: 2928829 - RNA, 19 nt, Human
aagaaaaaggaugcacaga

SEQ ID NO: 2928830 - RNA, 20 nt, Human
aagaaaaaggaugcacagag

SEQ ID NO: 2928831 - RNA, 15 nt, Human
aagaagcucucuccu

SEQ ID NO: 2928832 - RNA, 14 nt, Human
aagaagcucucucc

SEQ ID NO: 2928833 - RNA, 22 nt, Human
aagaagcaccaaucaugaauua

SEQ ID NO: 2928834 - RNA, 17 nt, Human
aagaagcccaggaaagg

SEQ ID NO: 2928835 - RNA, 16 nt, Human
aagaagcccaggaaag

SEQ ID NO: 2928836 - RNA, 13 nt, Human
aagaaaauaucac

SEQ ID NO: 2928837 - RNA, 14 nt, Human
guggacacagcucu

SEQ ID NO: 2928838 - RNA, 15 nt, Human
guggacacagcucuu

SEQ ID NO: 2928839 - RNA, 24 nt, Human
guggacacagcucuucuccaggcu

SEQ ID NO: 2928840 - RNA, 18 nt, Human
gugcugcccugcccaccu

SEQ ID NO: 2928841 - RNA, 20 nt, Human
gugcugcccugcccaccugg

SEQ ID NO: 2928842 - RNA, 19 nt, Human
gugcugcccugcccaccug

SEQ ID NO: 2928843 - RNA, 21 nt, Human
gugcugcccugcccaccuggc

SEQ ID NO: 2928844 - RNA, 21 nt, Human
guggauuuaacagaaauguac

SEQ ID NO: 2928845 - RNA, 20 nt, Human
guggauuuaacagaaaugua

SEQ ID NO: 2928846 - RNA, 23 nt, Human
guggauuuaacagaaauguacag

SEQ ID NO: 2928847 - RNA, 14 nt, Human
guggcaccagcagc

SEQ ID NO: 2928848 - RNA, 13 nt, Human
guggcaccagcag

SEQ ID NO: 2928849 - RNA, 14 nt, Human
guggcagcugcggu

SEQ ID NO: 2928850 - RNA, 22 nt, Human
guggcagcucaccucucccuug

SEQ ID NO: 2928851 - RNA, 24 nt, Human
aagaauuucuaggacugaauuaug

SEQ ID NO: 2928852 - RNA, 13 nt, Human
aagacccaaaagg

SEQ ID NO: 2928853 - RNA, 17 nt, Human
guggcagcugcggucca

SEQ ID NO: 2928854 - RNA, 13 nt, Human
aagaauauuuuaa

SEQ ID NO: 2928855 - RNA, 17 nt, Human
aacagucucaggaaauc

SEQ ID NO: 2928856 - RNA, 19 nt, Human
aacagucucaggaaaucaa

SEQ ID NO: 2928857 - RNA, 13 nt, Human
guccuacccaccc

SEQ ID NO: 2928858 - RNA, 20 nt, Human
aacagacuggaagcacagcu

SEQ ID NO: 2928859 - RNA, 19 nt, Human
aacagauuauuaccuuaca

SEQ ID NO: 2928860 - RNA, 20 nt, Human
aacauacucccaucugugaa

SEQ ID NO: 2928861 - RNA, 16 nt, Human
aacauacucccaucug

SEQ ID NO: 2928862 - RNA, 18 nt, Human
aacauacucccaucugug

SEQ ID NO: 2928863 - RNA, 23 nt, Human
aacagugagagacuccauaguuu

SEQ ID NO: 2928864 - RNA, 19 nt, Human
aacauauccaaguuugaau

SEQ ID NO: 2928865 - RNA, 20 nt, Human
aacauauccaaguuugaauu

SEQ ID NO: 2928866 - RNA, 14 nt, Human
aacaucaacaucuu

SEQ ID NO: 2928867 - RNA, 16 nt, Human
aacauauauaacaaug

SEQ ID NO: 2928868 - RNA, 14 nt, Human
aacauauccaaguu

SEQ ID NO: 2928869 - RNA, 22 nt, Human
aacauguuuuucuucucccuca

SEQ ID NO: 2928870 - RNA, 23 nt, Human
guccccuguuuguuucugaaagg

SEQ ID NO: 2928871 - RNA, 16 nt, Human
guccccgcacugggcu

SEQ ID NO: 2928872 - RNA, 15 nt, Human
guccccgcacugggc

SEQ ID NO: 2928873 - RNA, 13 nt, Human
gucccccugacaa

SEQ ID NO: 2928874 - RNA, 22 nt, Human
guccgaaagggacuuggaagcu

SEQ ID NO: 2928875 - RNA, 21 nt, Human
guccgaaagggacuuggaagc

SEQ ID NO: 2928876 - RNA, 13 nt, Human
gucccuuuuccuu

SEQ ID NO: 2928877 - RNA, 19 nt, Human
gucccaccuuggcugcagg

SEQ ID NO: 2928878 - RNA, 17 nt, Human
gucccaccuuggcugca

SEQ ID NO: 2928879 - RNA, 18 nt, Human
gucccaccuuggcugcag

SEQ ID NO: 2928880 - RNA, 23 nt, Human
guccaugaagauguagaggagaa

SEQ ID NO: 2928881 - RNA, 22 nt, Human
guagcucuaggagggcuggcaa

SEQ ID NO: 2928882 - RNA, 16 nt, Human
guccugcugcaguugc

SEQ ID NO: 2928883 - RNA, 13 nt, Human
guccugcugcagu

SEQ ID NO: 2928884 - RNA, 20 nt, Human
gucuaccugaggggccucuu

SEQ ID NO: 2928885 - RNA, 23 nt, Human
gucgcccagucuggaaugcagug

SEQ ID NO: 2928886 - RNA, 14 nt, Human
gucgaggacaggga

SEQ ID NO: 2928887 - RNA, 13 nt, Human
gucgcccagucug

SEQ ID NO: 2928888 - RNA, 14 nt, Human
gucgcccagucugg

SEQ ID NO: 2928889 - RNA, 23 nt, Human
aaccaucauugaaaucuuuuugc

SEQ ID NO: 2928890 - RNA, 13 nt, Human
aaccacaucuugc

SEQ ID NO: 2928891 - RNA, 14 nt, Human
gucuccagcugcug

SEQ ID NO: 2928892 - RNA, 13 nt, Human
gucuccauguuug

SEQ ID NO: 2928893 - RNA, 13 nt, Human
gucuccagcugcu

SEQ ID NO: 2928894 - RNA, 19 nt, Human
gucucaaaaaaagaaaaag

SEQ ID NO: 2928895 - RNA, 22 nt, Human
gucucaaacucuugaccucagg

SEQ ID NO: 2928896 - RNA, 14 nt, Human
gucuaugggacuca

SEQ ID NO: 2928897 - RNA, 23 nt, Human
gucucaguccaugaagauguaga

SEQ ID NO: 2928898 - RNA, 23 nt, Human
aacguggcugcuucaaggauccu

SEQ ID NO: 2928899 - RNA, 22 nt, Human
aacuaacaggcuuagugaugua

SEQ ID NO: 2928900 - RNA, 18 nt, Human
aacuaacaggcuuaguga

SEQ ID NO: 2928901 - RNA, 18 nt, Human
aaccugauugugucucuu

SEQ ID NO: 2928902 - RNA, 19 nt, Human
aaccugauugugucucuug

SEQ ID NO: 2928903 - RNA, 16 nt, Human
gucuucaguaagccgu

SEQ ID NO: 2928904 - RNA, 16 nt, Human
gucuuuguacagacaa

SEQ ID NO: 2928905 - RNA, 15 nt, Human
gucuuuguacagaca

SEQ ID NO: 2928906 - RNA, 18 nt, Human
gucucuuuaaugucacag

SEQ ID NO: 2928907 - RNA, 19 nt, Human
gucucuuuaaugucacagg

SEQ ID NO: 2928908 - RNA, 20 nt, Human
gucucuuuaaugucacaggc

SEQ ID NO: 2928909 - RNA, 14 nt, Human
gucugaaggcuggg

SEQ ID NO: 2928910 - RNA, 19 nt, Human
gucugaaggcuggguucug

SEQ ID NO: 2928911 - RNA, 22 nt, Human
gucucuuuaaugucacaggcag

SEQ ID NO: 2928912 - RNA, 17 nt, Human
gucucuugguccugcug

SEQ ID NO: 2928913 - RNA, 19 nt, Human
gucucuugguccugcugca

SEQ ID NO: 2928914 - RNA, 18 nt, Human
gucucuugguccugcugc

SEQ ID NO: 2928915 - RNA, 20 nt, Human
gucucuugguccugcugcag

SEQ ID NO: 2928916 - RNA, 13 nt, Human
gucucuugguccu

SEQ ID NO: 2928917 - RNA, 18 nt, Human
gucuggaaugcaguggua

SEQ ID NO: 2928918 - RNA, 21 nt, Human
gucugacaggcaaugcuggcu

SEQ ID NO: 2928919 - RNA, 22 nt, Human
gucugacaggcaaugcuggcug

SEQ ID NO: 2928920 - RNA, 23 nt, Human
gucugacaggcaaugcuggcugu

SEQ ID NO: 2928921 - RNA, 13 nt, Human
gucuucacaacag

SEQ ID NO: 2928922 - RNA, 14 nt, Human
gugaagugaagaca

SEQ ID NO: 2928923 - RNA, 23 nt, Human
gugaagacaaugacuuacuguac

SEQ ID NO: 2928924 - RNA, 13 nt, Human
aacuauauuguuu

SEQ ID NO: 2928925 - RNA, 20 nt, Human
aacuaucucauuuccaagca

SEQ ID NO: 2928926 - RNA, 16 nt, Human
gugacagaggcagccc

SEQ ID NO: 2928927 - RNA, 18 nt, Human
gugacagaggcagcccca

SEQ ID NO: 2928928 - RNA, 19 nt, Human
gugacagaggcagccccau

SEQ ID NO: 2928929 - RNA, 14 nt, Human
gugacaugucuuuu

SEQ ID NO: 2928930 - RNA, 18 nt, Human
gugaccauguuuuguuua

SEQ ID NO: 2928931 - RNA, 21 nt, Human
gugaccagcaccaucucuccu

SEQ ID NO: 2928932 - RNA, 18 nt, Human
gugaccagcaccaucucu

SEQ ID NO: 2928933 - RNA, 17 nt, Human
gugaccaaugaugguca

SEQ ID NO: 2928934 - RNA, 12 nt, Human
gugagagcuggg

SEQ ID NO: 2928935 - RNA, 12 nt, Human
gugaccccaggu

SEQ ID NO: 2928936 - RNA, 17 nt, Human
gugaguacuacaguccu

SEQ ID NO: 2928937 - RNA, 21 nt, Human
gugagcacuaaggugugcucu

SEQ ID NO: 2928938 - RNA, 15 nt, Human
gugagcaauccugca

SEQ ID NO: 2928939 - RNA, 13 nt, Human
gugagagcugggu

SEQ ID NO: 2928940 - RNA, 16 nt, Human
gugagaggggaacaga

SEQ ID NO: 2928941 - RNA, 20 nt, Human
gugaguccuggcaugggaau

SEQ ID NO: 2928942 - RNA, 17 nt, Human
gugaguccuggcauggg

SEQ ID NO: 2928943 - RNA, 19 nt, Human
gugaguacuacaguccucc

SEQ ID NO: 2928944 - RNA, 13 nt, Human
aacucuguaauuc

SEQ ID NO: 2928945 - RNA, 13 nt, Human
aacugaaaucaua

SEQ ID NO: 2928946 - RNA, 20 nt, Human
aacugaaaucauacuucuua

SEQ ID NO: 2928947 - RNA, 23 nt, Human
aaucuucugaacuuggcgcugcc

SEQ ID NO: 2928948 - RNA, 19 nt, Human
aaucuuuuaugauugccuu

SEQ ID NO: 2928949 - RNA, 15 nt, Human
aaugaaugaaugaau

SEQ ID NO: 2928950 - RNA, 14 nt, Human
aaugaaugaaacau

SEQ ID NO: 2928951 - RNA, 14 nt, Human
aaugaaugucagug

SEQ ID NO: 2928952 - RNA, 15 nt, Human
aaugaaugucagugu

SEQ ID NO: 2928953 - RNA, 16 nt, Human
uaauguaagcucuacu

SEQ ID NO: 2928954 - RNA, 17 nt, Human
uaauguaagcucuacug

SEQ ID NO: 2928955 - RNA, 16 nt, Human
uaaugucacaggcagg

SEQ ID NO: 2928956 - RNA, 17 nt, Human
uaaugucacaggcaggu

SEQ ID NO: 2928957 - RNA, 15 nt, Human
uaaugucacaggcag

SEQ ID NO: 2928958 - RNA, 12 nt, Human
uaaugugaaacu

SEQ ID NO: 2928959 - RNA, 20 nt, Human
uaaugugaaacuggauuaaa

SEQ ID NO: 2928960 - RNA, 22 nt, Human
uaaugugaaacuggauuaaacu

SEQ ID NO: 2928961 - RNA, 23 nt, Human
uaaugugaaacuggauuaaacuu

SEQ ID NO: 2928962 - RNA, 21 nt, Human
uaauauugauaugcuuauaca

SEQ ID NO: 2928963 - RNA, 20 nt, Human
aauacaguaucucagggccu

SEQ ID NO: 2928964 - RNA, 23 nt, Human
uaauacaccacuacauucuguua

SEQ ID NO: 2928965 - RNA, 22 nt, Human
uaauacaccacuacauucuguu

SEQ ID NO: 2928966 - RNA, 21 nt, Human
uaauacaccacuacauucugu

SEQ ID NO: 2928967 - RNA, 22 nt, Human
uaauuuccauuuacuuaagacu

SEQ ID NO: 2928968 - RNA, 18 nt, Human
uaauuuaccugaagucuu

SEQ ID NO: 2928969 - RNA, 17 nt, Human
uaauuuaccugaagucu

SEQ ID NO: 2928970 - RNA, 20 nt, Human
uaauuugaagguagaauguu

SEQ ID NO: 2928971 - RNA, 21 nt, Human
uacaagcgugagccacugcac

SEQ ID NO: 2928972 - RNA, 16 nt, Human
uacaagcgugagccac

SEQ ID NO: 2928973 - RNA, 18 nt, Human
uacaagcgugagccacug

SEQ ID NO: 2928974 - RNA, 19 nt, Human
uacaagcgugagccacugc

SEQ ID NO: 2928975 - RNA, 20 nt, Human
uacaagcgugagccacugca

SEQ ID NO: 2928976 - RNA, 16 nt, Human
uacaaaaacacagcaa

SEQ ID NO: 2928977 - RNA, 16 nt, Human
uacaaaaacauggccu

SEQ ID NO: 2928978 - RNA, 18 nt, Human
uacaaaaacacagcaagg

SEQ ID NO: 2928979 - RNA, 17 nt, Human
uacaaaaacacagcaag

SEQ ID NO: 2928980 - RNA, 21 nt, Human
aaugcaaagaugaaggucugu

SEQ ID NO: 2928981 - RNA, 14 nt, Human
aaugcaaagaugaa

SEQ ID NO: 2928982 - RNA, 18 nt, Human
aaugcaaagaugaagguc

SEQ ID NO: 2928983 - RNA, 12 nt, Human
aaugcaaagaug

SEQ ID NO: 2928984 - RNA, 23 nt, Human
aaugcaaaccaucauugaaaucu

SEQ ID NO: 2928985 - RNA, 22 nt, Human
aaugcaaaccaucauugaaauc

SEQ ID NO: 2928986 - RNA, 18 nt, Human
aaugcacaaacagaggcc

SEQ ID NO: 2928987 - RNA, 21 nt, Human
aaugaaugucagugugacuga

SEQ ID NO: 2928988 - RNA, 20 nt, Human
aaugaaugucagugugacug

SEQ ID NO: 2928989 - RNA, 16 nt, Human
aaugcaaaccaucauu

SEQ ID NO: 2928990 - RNA, 14 nt, Human
aaugcaaaccauca

SEQ ID NO: 2928991 - RNA, 14 nt, Human
aaugaccuuucaau

SEQ ID NO: 2928992 - RNA, 13 nt, Human
aaugaccuuucaa

SEQ ID NO: 2928993 - RNA, 23 nt, Human
uaauuaguuccucauuagcauuu

SEQ ID NO: 2928994 - RNA, 20 nt, Human
aaugcacuuuguucuggcuc

SEQ ID NO: 2928995 - RNA, 19 nt, Human
aaugcacuuuguucuggcu

SEQ ID NO: 2928996 - RNA, 16 nt, Human
aaugcacuuuguucug

SEQ ID NO: 2928997 - RNA, 13 nt, Human
aaugcacuuuguu

SEQ ID NO: 2928998 - RNA, 20 nt, Human
aaugcacaaacagaggccgc

SEQ ID NO: 2928999 - RNA, 19 nt, Human
aaugcacaaacagaggccg

SEQ ID NO: 2929000 - RNA, 21 nt, Human
uaauuaugguuaguagaggua

SEQ ID NO: 2929001 - RNA, 14 nt, Human
uacauacuuuuugg

SEQ ID NO: 2929002 - RNA, 15 nt, Human
uacauacuuuuuggg

SEQ ID NO: 2929003 - RNA, 12 nt, Human
uacauacuuuuu

SEQ ID NO: 2929004 - RNA, 14 nt, Human
aauguaggcuggcu

SEQ ID NO: 2929005 - RNA, 13 nt, Human
aaugucacaggca

SEQ ID NO: 2929006 - RNA, 14 nt, Human
aaugucacaggcag

SEQ ID NO: 2929007 - RNA, 22 nt, Human
aaugugaaacuggauuaaacuu

SEQ ID NO: 2929008 - RNA, 20 nt, Human
uacaguggggaaugaagaua

SEQ ID NO: 2929009 - RNA, 18 nt, Human
uacaguccucccaucuca

SEQ ID NO: 2929010 - RNA, 17 nt, Human
uacaguccucccaucuc

SEQ ID NO: 2929011 - RNA, 15 nt, Human
uacaguccucccauc

SEQ ID NO: 2929012 - RNA, 12 nt, Human
uacaguccuccc

SEQ ID NO: 2929013 - RNA, 18 nt, Human
uacaguaucucagggccu

SEQ ID NO: 2929014 - RNA, 21 nt, Human
aauguacagcaaggagauuua

SEQ ID NO: 2929015 - RNA, 23 nt, Human
aauguacagcaaggagauuuaca

SEQ ID NO: 2929016 - RNA, 22 nt, Human
uacagcaaggagauuuacaacu

SEQ ID NO: 2929017 - RNA, 22 nt, Human
aaugguuuucuuguguguuuau

SEQ ID NO: 2929018 - RNA, 18 nt, Human
aaugguuuucuugugugu

SEQ ID NO: 2929019 - RNA, 17 nt, Human
aaugguuuucuugugug

SEQ ID NO: 2929020 - RNA, 13 nt, Human
aauguaagcucua

SEQ ID NO: 2929021 - RNA, 15 nt, Human
aauguaagcucuacu

SEQ ID NO: 2929022 - RNA, 16 nt, Human
aaugguuuaaaugguc

SEQ ID NO: 2929023 - RNA, 20 nt, Human
uacccgggaagggggcuggg

SEQ ID NO: 2929024 - RNA, 15 nt, Human
uacccucauguucuu

SEQ ID NO: 2929025 - RNA, 16 nt, Human
uacccucauguucuua

SEQ ID NO: 2929026 - RNA, 20 nt, Human
uacccuggcacuauaaugua

SEQ ID NO: 2929027 - RNA, 22 nt, Human
uacccuggcacuauaauguaag

SEQ ID NO: 2929028 - RNA, 17 nt, Human
uaccacuuuugcaaaua

SEQ ID NO: 2929029 - RNA, 15 nt, Human
uaccacuuuugcaaa

SEQ ID NO: 2929030 - RNA, 17 nt, Human
uaccacuuuuguucuug

SEQ ID NO: 2929031 - RNA, 17 nt, Human
uaccauccccuguagag

SEQ ID NO: 2929032 - RNA, 16 nt, Human
uacauuagguugugaa

SEQ ID NO: 2929033 - RNA, 23 nt, Human
uacauggcuggagcuagaauuug

SEQ ID NO: 2929034 - RNA, 13 nt, Human
aauuaaguacuau

SEQ ID NO: 2929035 - RNA, 18 nt, Human
aauguugacaugggacau

SEQ ID NO: 2929036 - RNA, 18 nt, Human
aauuaacuuuuauaaacu

SEQ ID NO: 2929037 - RNA, 20 nt, Human
aauuaacuuuuauaaacuuu

SEQ ID NO: 2929038 - RNA, 15 nt, Human
aauuaagagagucua

SEQ ID NO: 2929039 - RNA, 22 nt, Human
aauuaacuuuuauaaacuuuac

SEQ ID NO: 2929040 - RNA, 13 nt, Human
aauugacccacaa

SEQ ID NO: 2929041 - RNA, 16 nt, Human
aauugacccacaagaa

SEQ ID NO: 2929042 - RNA, 19 nt, Human
aauugacccacaagaaaug

SEQ ID NO: 2929043 - RNA, 15 nt, Human
uacguacacauuuua

SEQ ID NO: 2929044 - RNA, 14 nt, Human
uacguacacauuuu

SEQ ID NO: 2929045 - RNA, 14 nt, Human
aauucuuucauuuu

SEQ ID NO: 2929046 - RNA, 13 nt, Human
aauucuuaaauau

SEQ ID NO: 2929047 - RNA, 22 nt, Human
aauucuucuccacuuucuagcc

SEQ ID NO: 2929048 - RNA, 21 nt, Human
aauucuugccaaauauaaaua

SEQ ID NO: 2929049 - RNA, 14 nt, Human
aauucuugcaaagu

SEQ ID NO: 2929050 - RNA, 20 nt, Human
aauucuugcaaaguaucccu

SEQ ID NO: 2929051 - RNA, 21 nt, Human
uacucugugucagguggggca

SEQ ID NO: 2929052 - RNA, 20 nt, Human
uacucuuauaucuauauuuu

SEQ ID NO: 2929053 - RNA, 22 nt, Human
uacucuuauaucuauauuuuac

SEQ ID NO: 2929054 - RNA, 18 nt, Human
uacuauuaaacaugcugu

SEQ ID NO: 2929055 - RNA, 14 nt, Human
uacuauuaaacaug

SEQ ID NO: 2929056 - RNA, 15 nt, Human
uacuauuaaacaugc

SEQ ID NO: 2929057 - RNA, 16 nt, Human
uacuauuaaacaugcu

SEQ ID NO: 2929058 - RNA, 16 nt, Human
uacuauaauuuaccug

SEQ ID NO: 2929059 - RNA, 13 nt, Human
uacuauuaaacau

SEQ ID NO: 2929060 - RNA, 16 nt, Human
uacuauguaucaauga

SEQ ID NO: 2929061 - RNA, 13 nt, Human
uacguugugcauu

SEQ ID NO: 2929062 - RNA, 14 nt, Human
uacguugugcauuu

SEQ ID NO: 2929063 - RNA, 14 nt, Human
uacgucugacaggc

SEQ ID NO: 2929064 - RNA, 19 nt, Human
aauuuacauacucugcuua

SEQ ID NO: 2929065 - RNA, 16 nt, Human
aauuuaaauagcuuuu

SEQ ID NO: 2929066 - RNA, 15 nt, Human
aauuuaaauagcuuu

SEQ ID NO: 2929067 - RNA, 13 nt, Human
aauuuaaaagucu

SEQ ID NO: 2929068 - RNA, 21 nt, Human
aauuguuugacggcaagguuu

SEQ ID NO: 2929069 - RNA, 22 nt, Human
aauuguuuggggaugagaaagg

SEQ ID NO: 2929070 - RNA, 23 nt, Human
aauugugugaaagguacuucaaa

SEQ ID NO: 2929071 - RNA, 16 nt, Human
aauuugauaugugaac

SEQ ID NO: 2929072 - RNA, 18 nt, Human
aauuugauaugugaacag

SEQ ID NO: 2929073 - RNA, 15 nt, Human
aauuugauaugugaa

SEQ ID NO: 2929074 - RNA, 19 nt, Human
aauuugauaugugaacagu

SEQ ID NO: 2929075 - RNA, 14 nt, Human
uacuucaaauccuu

SEQ ID NO: 2929076 - RNA, 19 nt, Human
uacuucaaauccuugaaga

SEQ ID NO: 2929077 - RNA, 17 nt, Human
aauuuagaaauauaauu

SEQ ID NO: 2929078 - RNA, 13 nt, Human
aauuucuaaaucu

SEQ ID NO: 2929079 - RNA, 21 nt, Human
aauuucuaaaucuccaaaaua

SEQ ID NO: 2929080 - RNA, 19 nt, Human
aauuucucccagucauuua

SEQ ID NO: 2929081 - RNA, 20 nt, Human
aauuucucccagucauuuaa

SEQ ID NO: 2929082 - RNA, 19 nt, Human
aauuuuuucucuaggaaau

SEQ ID NO: 2929083 - RNA, 17 nt, Human
aauuuuuuugagacaga

SEQ ID NO: 2929084 - RNA, 16 nt, Human
acaaaaacacagcaag

SEQ ID NO: 2929085 - RNA, 13 nt, Human
acaaaaacauggc

SEQ ID NO: 2929086 - RNA, 14 nt, Human
uagacagucccugc

SEQ ID NO: 2929087 - RNA, 12 nt, Human
uagacagucccu

SEQ ID NO: 2929088 - RNA, 17 nt, Human
aauuuuuauuaaauuau

SEQ ID NO: 2929089 - RNA, 18 nt, Human
aauuuuuauuaaauuaug

SEQ ID NO: 2929090 - RNA, 13 nt, Human
aauuuuaaacaua

SEQ ID NO: 2929091 - RNA, 14 nt, Human
aauuuuaaacauau

SEQ ID NO: 2929092 - RNA, 19 nt, Human
aauuuuuauauuugaaaua

SEQ ID NO: 2929093 - RNA, 21 nt, Human
uagacagagucucacuguugc

SEQ ID NO: 2929094 - RNA, 16 nt, Human
uagacaauuuauuaug

SEQ ID NO: 2929095 - RNA, 16 nt, Human
uagaagucacacagua

SEQ ID NO: 2929096 - RNA, 23 nt, Human
uagaagucacauuccugaacagg

SEQ ID NO: 2929097 - RNA, 16 nt, Human
uagaagucuuagaugu

SEQ ID NO: 2929098 - RNA, 17 nt, Human
uagaagucuuagaugua

SEQ ID NO: 2929099 - RNA, 18 nt, Human
uagaagucuuagauguau

SEQ ID NO: 2929100 - RNA, 19 nt, Human
uagaagucuuagauguaua

SEQ ID NO: 2929101 - RNA, 19 nt, Human
uagaauugacauugaaauc

SEQ ID NO: 2929102 - RNA, 21 nt, Human
uagaauugacauugaaaucua

SEQ ID NO: 2929103 - RNA, 21 nt, Human
uacuucaaauccuugaagauu

SEQ ID NO: 2929104 - RNA, 15 nt, Human
uagaacucccuuuca

SEQ ID NO: 2929105 - RNA, 15 nt, Human
uagaagucacacagu

SEQ ID NO: 2929106 - RNA, 18 nt, Human
uagaacucccuuucaaca

SEQ ID NO: 2929107 - RNA, 14 nt, Human
acaaauguuuugcu

SEQ ID NO: 2929108 - RNA, 23 nt, Human
acaaauguuuugcucaauagauu

SEQ ID NO: 2929109 - RNA, 13 nt, Human
acaaauguuuugc

SEQ ID NO: 2929110 - RNA, 19 nt, Human
uagcauuuguguugaagag

SEQ ID NO: 2929111 - RNA, 12 nt, Human
acaacacucaca

SEQ ID NO: 2929112 - RNA, 15 nt, Human
acaacaacaaaauga

SEQ ID NO: 2929113 - RNA, 22 nt, Human
acaagaaaugaaagcagggacu

SEQ ID NO: 2929114 - RNA, 18 nt, Human
acaagcgugagccacugc

SEQ ID NO: 2929115 - RNA, 13 nt, Human
acaagcugcaccc

SEQ ID NO: 2929116 - RNA, 20 nt, Human
acaagcgugagccacugcac

SEQ ID NO: 2929117 - RNA, 21 nt, Human
acaagcgugagccacugcacc

SEQ ID NO: 2929118 - RNA, 12 nt, Human
acaagccacccc

SEQ ID NO: 2929119 - RNA, 17 nt, Human
acaagagcccaggccuc

SEQ ID NO: 2929120 - RNA, 18 nt, Human
acaagcacuaaacaaaga

SEQ ID NO: 2929121 - RNA, 16 nt, Human
uagaugcaguucugaa

SEQ ID NO: 2929122 - RNA, 17 nt, Human
uagaugcaguucugaag

SEQ ID NO: 2929123 - RNA, 19 nt, Human
uagaugcaguucugaagaa

SEQ ID NO: 2929124 - RNA, 22 nt, Human
uagauuuuagacccuauugcug

SEQ ID NO: 2929125 - RNA, 19 nt, Human
uagcacagacccugcccug

SEQ ID NO: 2929126 - RNA, 18 nt, Human
uagcacagacccugcccu

SEQ ID NO: 2929127 - RNA, 17 nt, Human
uagcacagacccugccc

SEQ ID NO: 2929128 - RNA, 16 nt, Human
uagcacagacccugcc

SEQ ID NO: 2929129 - RNA, 24 nt, Human
uagcacagacccugcccugugggc

SEQ ID NO: 2929130 - RNA, 18 nt, Human
uagcaugucgucaaagcu

SEQ ID NO: 2929131 - RNA, 21 nt, Human
uagcaugucgucaaagcugaa

SEQ ID NO: 2929132 - RNA, 13 nt, Human
uauuuauuuaaau

SEQ ID NO: 2929133 - RNA, 16 nt, Human
uauuuauuuacaaaug

SEQ ID NO: 2929134 - RNA, 15 nt, Human
uauuuauuuacaaau

SEQ ID NO: 2929135 - RNA, 14 nt, Human
uauuuauuuaaauu

SEQ ID NO: 2929136 - RNA, 14 nt, Human
uauuuauuuauuua

SEQ ID NO: 2929137 - RNA, 13 nt, Human
uauuuauuuguga

SEQ ID NO: 2929138 - RNA, 18 nt, Human
uauuuauuuuaauaaugu

SEQ ID NO: 2929139 - RNA, 14 nt, Human
uauuuauuuuaaua

SEQ ID NO: 2929140 - RNA, 16 nt, Human
uauuuauuuuaauaau

SEQ ID NO: 2929141 - RNA, 23 nt, Human
uauuuaauuuuuuugagacagag

SEQ ID NO: 2929142 - RNA, 14 nt, Human
uauuuacaaauguu

SEQ ID NO: 2929143 - RNA, 21 nt, Human
uauuuacaaauguuuugcuca

SEQ ID NO: 2929144 - RNA, 13 nt, Human
uauuuaauuugaa

SEQ ID NO: 2929145 - RNA, 23 nt, Human
uauuuaauuugaagguagaaugu

SEQ ID NO: 2929146 - RNA, 16 nt, Human
uauuuaauuugaaggu

SEQ ID NO: 2929147 - RNA, 18 nt, Human
uauuuacuucuuauacau

SEQ ID NO: 2929148 - RNA, 17 nt, Human
uauuguagcauccugga

SEQ ID NO: 2929149 - RNA, 18 nt, Human
uauuguagcauccuggaa

SEQ ID NO: 2929150 - RNA, 20 nt, Human
uauuguagcauccuggaaua

SEQ ID NO: 2929151 - RNA, 21 nt, Human
uauuguagcauccuggaauau

SEQ ID NO: 2929152 - RNA, 17 nt, Human
uauugucaaagugguga

SEQ ID NO: 2929153 - RNA, 13 nt, Human
uauugucaaagug

SEQ ID NO: 2929154 - RNA, 15 nt, Human
uauuuaaugaaagac

SEQ ID NO: 2929155 - RNA, 21 nt, Human
uauuuaaugaaagacuguaca

SEQ ID NO: 2929156 - RNA, 14 nt, Human
uauuuaauagguuu

SEQ ID NO: 2929157 - RNA, 13 nt, Human
uauuuaaucuuuu

SEQ ID NO: 2929158 - RNA, 15 nt, Human
uauuuaaucuuuuau

SEQ ID NO: 2929159 - RNA, 17 nt, Human
uauuuaaccucuaaauu

SEQ ID NO: 2929160 - RNA, 18 nt, Human
uauuuaaccucuaaauuc

SEQ ID NO: 2929161 - RNA, 17 nt, Human
uauugucuagugaaacu

SEQ ID NO: 2929162 - RNA, 16 nt, Human
uauugaaaugauuuca

SEQ ID NO: 2929163 - RNA, 14 nt, Human
uauugaagcagagu

SEQ ID NO: 2929164 - RNA, 16 nt, Human
uauugaagcagagugg

SEQ ID NO: 2929165 - RNA, 20 nt, Human
uauugaagcagaguggcagu

SEQ ID NO: 2929166 - RNA, 15 nt, Human
uauucugagaugacu

SEQ ID NO: 2929167 - RNA, 15 nt, Human
uauucuuauuuaaug

SEQ ID NO: 2929168 - RNA, 16 nt, Human
uauucuguuggccagu

SEQ ID NO: 2929169 - RNA, 17 nt, Human
acaguucucuccuucuu

SEQ ID NO: 2929170 - RNA, 18 nt, Human
uauucucuccuguaccuc

SEQ ID NO: 2929171 - RNA, 20 nt, Human
uauucucuccuguaccucuu

SEQ ID NO: 2929172 - RNA, 24 nt, Human
uauucucuccuguaccucuugagc

SEQ ID NO: 2929173 - RNA, 13 nt, Human
acaguuacucaga

SEQ ID NO: 2929174 - RNA, 20 nt, Human
acaguuacucagaauucucu

SEQ ID NO: 2929175 - RNA, 20 nt, Human
acaguucaauucucauuugu

SEQ ID NO: 2929176 - RNA, 23 nt, Human
acaguucggugagcuacaaaugc

SEQ ID NO: 2929177 - RNA, 16 nt, Human
acaguucucuccuucu

SEQ ID NO: 2929178 - RNA, 22 nt, Human
acaguucggugagcuacaaaug

SEQ ID NO: 2929179 - RNA, 19 nt, Human
acaguucggugagcuacaa

SEQ ID NO: 2929180 - RNA, 12 nt, Human
uauuagagaaga

SEQ ID NO: 2929181 - RNA, 16 nt, Human
uauuaccacagacaua

SEQ ID NO: 2929182 - RNA, 15 nt, Human
uauuagaauaccaca

SEQ ID NO: 2929183 - RNA, 16 nt, Human
uauucaggaagcucag

SEQ ID NO: 2929184 - RNA, 22 nt, Human
uauucaggaagcucagggccug

SEQ ID NO: 2929185 - RNA, 18 nt, Human
uauucaggaagcucaggg

SEQ ID NO: 2929186 - RNA, 23 nt, Human
uauucauagcagcuuauucacaa

SEQ ID NO: 2929187 - RNA, 23 nt, Human
uauuacaguggggaaugaagaua

SEQ ID NO: 2929188 - RNA, 23 nt, Human
uauuaaaaaucucaaauuucuaa

SEQ ID NO: 2929189 - RNA, 12 nt, Human
uauuaaaacuca

SEQ ID NO: 2929190 - RNA, 17 nt, Human
uauuaaacaugcuguac

SEQ ID NO: 2929191 - RNA, 15 nt, Human
uauuaaacaugcugu

SEQ ID NO: 2929192 - RNA, 19 nt, Human
uauuaaacaugcuguacau

SEQ ID NO: 2929193 - RNA, 15 nt, Human
uauguuuuauauagc

SEQ ID NO: 2929194 - RNA, 17 nt, Human
uauguuuuaagaggcag

SEQ ID NO: 2929195 - RNA, 19 nt, Human
uauguuuuaagaggcaggg

SEQ ID NO: 2929196 - RNA, 16 nt, Human
uauuaaaaaucucaaa

SEQ ID NO: 2929197 - RNA, 18 nt, Human
uauuaaaaaucucaaauu

SEQ ID NO: 2929198 - RNA, 20 nt, Human
uauuaaaaaucucaaauuuc

SEQ ID NO: 2929199 - RNA, 22 nt, Human
uauuaaaaaucucaaauuucua

SEQ ID NO: 2929200 - RNA, 17 nt, Human
acagucucaggaaauca

SEQ ID NO: 2929201 - RNA, 20 nt, Human
acagugaaagaaaauaacaa

SEQ ID NO: 2929202 - RNA, 22 nt, Human
acaguccuuaccagcagagcac

SEQ ID NO: 2929203 - RNA, 21 nt, Human
acaguccuuaccagcagagca

SEQ ID NO: 2929204 - RNA, 16 nt, Human
acagucucaggaaauc

SEQ ID NO: 2929205 - RNA, 15 nt, Human
acagucucaggaaau

SEQ ID NO: 2929206 - RNA, 14 nt, Human
acagucucaggaaa

SEQ ID NO: 2929207 - RNA, 13 nt, Human
acagucucaggaa

SEQ ID NO: 2929208 - RNA, 22 nt, Human
acaguguguggucaacauuucu

SEQ ID NO: 2929209 - RNA, 12 nt, Human
acagugagagac

SEQ ID NO: 2929210 - RNA, 23 nt, Human
acagugagagacuccauaguuug

SEQ ID NO: 2929211 - RNA, 14 nt, Human
acagugagacucug

SEQ ID NO: 2929212 - RNA, 18 nt, Human
acagugagacucugucuc

SEQ ID NO: 2929213 - RNA, 21 nt, Human
acaguuaccucugccucagaa

SEQ ID NO: 2929214 - RNA, 15 nt, Human
acaguuaagagaaau

SEQ ID NO: 2929215 - RNA, 13 nt, Human
acagucccugcca

SEQ ID NO: 2929216 - RNA, 12 nt, Human
acagucccugcc

SEQ ID NO: 2929217 - RNA, 15 nt, Human
acaguauuacuucug

SEQ ID NO: 2929218 - RNA, 16 nt, Human
acaguauuacuucugc

SEQ ID NO: 2929219 - RNA, 17 nt, Human
acaguauuacuucugcu

SEQ ID NO: 2929220 - RNA, 19 nt, Human
acaguauuacuucugcuac

SEQ ID NO: 2929221 - RNA, 17 nt, Human
acaguccucccaucuca

SEQ ID NO: 2929222 - RNA, 20 nt, Human
acaguccuuaccagcagagc

SEQ ID NO: 2929223 - RNA, 18 nt, Human
acaguccuuaccagcaga

SEQ ID NO: 2929224 - RNA, 15 nt, Human
acaguccucccaucu

SEQ ID NO: 2929225 - RNA, 14 nt, Human
acaguccucccauc

SEQ ID NO: 2929226 - RNA, 13 nt, Human
acaguccucccau

SEQ ID NO: 2929227 - RNA, 15 nt, Human
acagucccugccaau

SEQ ID NO: 2929228 - RNA, 22 nt, Human
acagggcacaccgggcacucag

SEQ ID NO: 2929229 - RNA, 22 nt, Human
acagguuuuccugaagaauuga

SEQ ID NO: 2929230 - RNA, 21 nt, Human
acaggcugggcuucaguggca

SEQ ID NO: 2929231 - RNA, 14 nt, Human
acaggcugggcuuc

SEQ ID NO: 2929232 - RNA, 17 nt, Human
acaggcugggcuucagu

SEQ ID NO: 2929233 - RNA, 21 nt, Human
acaguaacauagcugugauuu

SEQ ID NO: 2929234 - RNA, 21 nt, Human
acaguauggcagcuuuccuca

SEQ ID NO: 2929235 - RNA, 20 nt, Human
uaucacuuccaugacauaag

SEQ ID NO: 2929236 - RNA, 18 nt, Human
uaucacccagaagaaaau

SEQ ID NO: 2929237 - RNA, 15 nt, Human
uauauuuacaaaugg

SEQ ID NO: 2929238 - RNA, 21 nt, Human
uaucaaguauuauaccuuuuu

SEQ ID NO: 2929239 - RNA, 18 nt, Human
uaucaaguauuauaccuu

SEQ ID NO: 2929240 - RNA, 14 nt, Human
uauauuuacaaaug

SEQ ID NO: 2929241 - RNA, 16 nt, Human
acagacccugcccugu

SEQ ID NO: 2929242 - RNA, 17 nt, Human
acagacccugcccugug

SEQ ID NO: 2929243 - RNA, 23 nt, Human
acagacacaggcccggcuccagg

SEQ ID NO: 2929244 - RNA, 11 nt, Human
acacuccuuca

SEQ ID NO: 2929245 - RNA, 19 nt, Human
uauauucucagcagagugc

SEQ ID NO: 2929246 - RNA, 17 nt, Human
uauauucucagcagagu

SEQ ID NO: 2929247 - RNA, 14 nt, Human
acagacuggaagca

SEQ ID NO: 2929248 - RNA, 20 nt, Human
acagacccugcccugugggc

SEQ ID NO: 2929249 - RNA, 18 nt, Human
acagacccugcccugugg

SEQ ID NO: 2929250 - RNA, 15 nt, Human
uaucuagauacugua

SEQ ID NO: 2929251 - RNA, 16 nt, Human
uaucuagauacuguau

SEQ ID NO: 2929252 - RNA, 14 nt, Human
uaucagaacuaugu

SEQ ID NO: 2929253 - RNA, 20 nt, Human
uaucagaacuauguuuuugu

SEQ ID NO: 2929254 - RNA, 17 nt, Human
uaucucccccagcccca

SEQ ID NO: 2929255 - RNA, 18 nt, Human
uaucucccccagccccau

SEQ ID NO: 2929256 - RNA, 16 nt, Human
uaucucccccagcccc

SEQ ID NO: 2929257 - RNA, 19 nt, Human
uaucuagauacuguaucau

SEQ ID NO: 2929258 - RNA, 22 nt, Human
acagagaccugcccucaagagc

SEQ ID NO: 2929259 - RNA, 22 nt, Human
acagacuggaagcacagcuuca

SEQ ID NO: 2929260 - RNA, 21 nt, Human
acagaguggaauaagacagag

SEQ ID NO: 2929261 - RNA, 22 nt, Human
acagaguggaauaagacagaga

SEQ ID NO: 2929262 - RNA, 23 nt, Human
acagaguggaauaagacagagac

SEQ ID NO: 2929263 - RNA, 18 nt, Human
acagagcuacacagggga

SEQ ID NO: 2929264 - RNA, 21 nt, Human
acagagugagacucugucuca

SEQ ID NO: 2929265 - RNA, 20 nt, Human
acagagcccacgcccccacu

SEQ ID NO: 2929266 - RNA, 16 nt, Human
acagagcuacacaggg

SEQ ID NO: 2929267 - RNA, 13 nt, Human
uaugggagcuguc

SEQ ID NO: 2929268 - RNA, 10 nt, Human
uaugggagag

SEQ ID NO: 2929269 - RNA, 16 nt, Human
uauggcuuuugugcau

SEQ ID NO: 2929270 - RNA, 17 nt, Human
uauggcuauaggugcua

SEQ ID NO: 2929271 - RNA, 15 nt, Human
acagcuccaagaauu

SEQ ID NO: 2929272 - RNA, 17 nt, Human
acagcuaacauggaagu

SEQ ID NO: 2929273 - RNA, 15 nt, Human
acagcuaacauggaa

SEQ ID NO: 2929274 - RNA, 14 nt, Human
acagcuaacaugga

SEQ ID NO: 2929275 - RNA, 18 nt, Human
uaugcucugcauguuaca

SEQ ID NO: 2929276 - RNA, 14 nt, Human
uaugcucugcaugu

SEQ ID NO: 2929277 - RNA, 14 nt, Human
uaugaugacuguuu

SEQ ID NO: 2929278 - RNA, 15 nt, Human
uaugaugacuguuuu

SEQ ID NO: 2929279 - RNA, 19 nt, Human
uaugcucugcauguuacau

SEQ ID NO: 2929280 - RNA, 22 nt, Human
uauggcccuggccuagcauacg

SEQ ID NO: 2929281 - RNA, 16 nt, Human
uauggcuauaggugcu

SEQ ID NO: 2929282 - RNA, 14 nt, Human
uaucuugaagacuu

SEQ ID NO: 2929283 - RNA, 20 nt, Human
acagaguuuucacucuuauu

SEQ ID NO: 2929284 - RNA, 18 nt, Human
acagaguuuucacucuua

SEQ ID NO: 2929285 - RNA, 14 nt, Human
acagcaggcugcca

SEQ ID NO: 2929286 - RNA, 23 nt, Human
uaugaggcauuuguuugaacuga

SEQ ID NO: 2929287 - RNA, 13 nt, Human
uaugaggcauuug

SEQ ID NO: 2929288 - RNA, 15 nt, Human
uaucuugaagacuuu

SEQ ID NO: 2929289 - RNA, 14 nt, Human
uaugaucacggcuc

SEQ ID NO: 2929290 - RNA, 21 nt, Human
uaugaucacggcucacugcag

SEQ ID NO: 2929291 - RNA, 23 nt, Human
uaugaucacggcucacugcagcc

SEQ ID NO: 2929292 - RNA, 18 nt, Human
uauaacaaugcuguauuu

SEQ ID NO: 2929293 - RNA, 20 nt, Human
uauaaccaguguuguggauu

SEQ ID NO: 2929294 - RNA, 21 nt, Human
uauaauuuaccugaagucuuu

SEQ ID NO: 2929295 - RNA, 15 nt, Human
uauaauuuccauuua

SEQ ID NO: 2929296 - RNA, 20 nt, Human
uauaauuuccauuuacuuaa

SEQ ID NO: 2929297 - RNA, 21 nt, Human
uauaauuuccauuuacuuaag

SEQ ID NO: 2929298 - RNA, 22 nt, Human
uauaauuuccauuuacuuaaga

SEQ ID NO: 2929299 - RNA, 14 nt, Human
uauaauuuugugaa

SEQ ID NO: 2929300 - RNA, 13 nt, Human
uauacauaaacaa

SEQ ID NO: 2929301 - RNA, 14 nt, Human
uauacauaaacaag

SEQ ID NO: 2929302 - RNA, 14 nt, Human
uauacauuugauaa

SEQ ID NO: 2929303 - RNA, 23 nt, Human
uauauauuuuuuucugaaauuuc

SEQ ID NO: 2929304 - RNA, 20 nt, Human
uauauauuuuuuucugaaau

SEQ ID NO: 2929305 - RNA, 21 nt, Human
uauauauuuuuuucugaaauu

SEQ ID NO: 2929306 - RNA, 22 nt, Human
uauauauuuuuuucugaaauuu

SEQ ID NO: 2929307 - RNA, 19 nt, Human
acacucauugaccugaggc

SEQ ID NO: 2929308 - RNA, 23 nt, Human
acacucauugaccugaggcccuu

SEQ ID NO: 2929309 - RNA, 21 nt, Human
acacucauugaccugaggccc

SEQ ID NO: 2929310 - RNA, 23 nt, Human
uauaggugcuacaaaaacacagc

SEQ ID NO: 2929311 - RNA, 20 nt, Human
uauaggugcuacaaaaacac

SEQ ID NO: 2929312 - RNA, 21 nt, Human
uauaggugcuacaaaaacaca

SEQ ID NO: 2929313 - RNA, 22 nt, Human
uauagcuaggugacauauacau

SEQ ID NO: 2929314 - RNA, 19 nt, Human
uauagcuaggugacauaua

SEQ ID NO: 2929315 - RNA, 13 nt, Human
uauagcaagacau

SEQ ID NO: 2929316 - RNA, 20 nt, Human
uauagccuaggugacagagu

SEQ ID NO: 2929317 - RNA, 14 nt, Human
uauaggaauugacc

SEQ ID NO: 2929318 - RNA, 13 nt, Human
uauaggaauugac

SEQ ID NO: 2929319 - RNA, 12 nt, Human
uauaggaauuga

SEQ ID NO: 2929320 - RNA, 20 nt, Human
uaguuccucauuagcauuuu

SEQ ID NO: 2929321 - RNA, 15 nt, Human
uaguuuuauaugcuu

SEQ ID NO: 2929322 - RNA, 16 nt, Human
uaguuuuauaugcuuc

SEQ ID NO: 2929323 - RNA, 21 nt, Human
uagucaggugccucaagagaa

SEQ ID NO: 2929324 - RNA, 23 nt, Human
acaagcugcacccucaggcaggu

SEQ ID NO: 2929325 - RNA, 22 nt, Human
acaagcugcacccucaggcagg

SEQ ID NO: 2929326 - RNA, 21 nt, Human
acaagcugcacccucaggcag

SEQ ID NO: 2929327 - RNA, 19 nt, Human
acaagcugcacccucaggc

SEQ ID NO: 2929328 - RNA, 15 nt, Human
uagucauucuucccu

SEQ ID NO: 2929329 - RNA, 14 nt, Human
uagucauucuuccc

SEQ ID NO: 2929330 - RNA, 22 nt, Human
uagugagcagucaggaaagaga

SEQ ID NO: 2929331 - RNA, 18 nt, Human
acacaugcaaggucauuu

SEQ ID NO: 2929332 - RNA, 19 nt, Human
acacaugcaaggucauuuu

SEQ ID NO: 2929333 - RNA, 20 nt, Human
acacaugcaaggucauuuuu

SEQ ID NO: 2929334 - RNA, 22 nt, Human
acacaucagcuugcccuguuaa

SEQ ID NO: 2929335 - RNA, 21 nt, Human
uauaaaauaauuuuuauauuu

SEQ ID NO: 2929336 - RNA, 22 nt, Human
uauaaaauaauuuuuauauuug

SEQ ID NO: 2929337 - RNA, 19 nt, Human
acaccauaagcuacugcca

SEQ ID NO: 2929338 - RNA, 20 nt, Human
acaccauaagcuacugccau

SEQ ID NO: 2929339 - RNA, 11 nt, Human
acacccuguga

SEQ ID NO: 2929340 - RNA, 18 nt, Human
acacccugugauggggcc

SEQ ID NO: 2929341 - RNA, 12 nt, Human
acacccugugau

SEQ ID NO: 2929342 - RNA, 19 nt, Human
acacccagcccacuucugc

SEQ ID NO: 2929343 - RNA, 20 nt, Human
acacccagcccacuucugcc

SEQ ID NO: 2929344 - RNA, 21 nt, Human
acacccagcccacuucugcca

SEQ ID NO: 2929345 - RNA, 21 nt, Human
acacaugcaaggucauuuuuu

SEQ ID NO: 2929346 - RNA, 19 nt, Human
acucuccucugcugcuggc

SEQ ID NO: 2929347 - RNA, 18 nt, Human
acucuccucugcugcugg

SEQ ID NO: 2929348 - RNA, 16 nt, Human
acucugccacuuuauu

SEQ ID NO: 2929349 - RNA, 23 nt, Human
acucuuauaucuauauuuuacau

SEQ ID NO: 2929350 - RNA, 22 nt, Human
acucuuauaucuauauuuuaca

SEQ ID NO: 2929351 - RNA, 17 nt, Human
acucgcgacaaugcaaa

SEQ ID NO: 2929352 - RNA, 23 nt, Human
acucgcgacaaugcaaaccauca

SEQ ID NO: 2929353 - RNA, 20 nt, Human
acucgcgacaaugcaaacca

SEQ ID NO: 2929354 - RNA, 19 nt, Human
uccuaggcauuugcugaau

SEQ ID NO: 2929355 - RNA, 18 nt, Human
acucgcgacaaugcaaac

SEQ ID NO: 2929356 - RNA, 21 nt, Human
acucgggaggcugaggcagga

SEQ ID NO: 2929357 - RNA, 17 nt, Human
acucuccucugcugcug

SEQ ID NO: 2929358 - RNA, 22 nt, Human
uccucauacccacccccaccca

SEQ ID NO: 2929359 - RNA, 18 nt, Human
uccucauacccaccccca

SEQ ID NO: 2929360 - RNA, 14 nt, Human
uccucauacccacc

SEQ ID NO: 2929361 - RNA, 12 nt, Human
uccucuccccag

SEQ ID NO: 2929362 - RNA, 19 nt, Human
uccucccucccucuuuccc

SEQ ID NO: 2929363 - RNA, 17 nt, Human
uccucccucccucuuuc

SEQ ID NO: 2929364 - RNA, 15 nt, Human
uccucccucccucuu

SEQ ID NO: 2929365 - RNA, 20 nt, Human
uccucagaucuucugugggu

SEQ ID NO: 2929366 - RNA, 16 nt, Human
acucuuauugcccacg

SEQ ID NO: 2929367 - RNA, 19 nt, Human
acucuuauugcccacgcug

SEQ ID NO: 2929368 - RNA, 20 nt, Human
uccucaaaacuucagacaua

SEQ ID NO: 2929369 - RNA, 21 nt, Human
ucccucagucuggcccuuccu

SEQ ID NO: 2929370 - RNA, 22 nt, Human
ucccucauccucauacccaccc

SEQ ID NO: 2929371 - RNA, 17 nt, Human
acuccaggcagcagaca

SEQ ID NO: 2929372 - RNA, 20 nt, Human
acuccaggcagcagacacau

SEQ ID NO: 2929373 - RNA, 22 nt, Human
acuccaggcagcagacacaugc

SEQ ID NO: 2929374 - RNA, 15 nt, Human
ucccuuucccuuggu

SEQ ID NO: 2929375 - RNA, 22 nt, Human
ucccuuuccaaaugcccagcuu

SEQ ID NO: 2929376 - RNA, 22 nt, Human
ucccuuacgugaguccuggcau

SEQ ID NO: 2929377 - RNA, 18 nt, Human
ucccuuacgugaguccug

SEQ ID NO: 2929378 - RNA, 23 nt, Human
ucccugguggcagcucaccucuc

SEQ ID NO: 2929379 - RNA, 17 nt, Human
uccuaaaauuauggaaa

SEQ ID NO: 2929380 - RNA, 22 nt, Human
uccuaaaauuauggaaacagau

SEQ ID NO: 2929381 - RNA, 16 nt, Human
uccuaaaacaacagau

SEQ ID NO: 2929382 - RNA, 20 nt, Human
uccuaaaacaacagauguac

SEQ ID NO: 2929383 - RNA, 13 nt, Human
uccuaaaacaaca

SEQ ID NO: 2929384 - RNA, 12 nt, Human
uccuaaaacaac

SEQ ID NO: 2929385 - RNA, 14 nt, Human
uccuaggcauuugc

SEQ ID NO: 2929386 - RNA, 21 nt, Human
ucccuuugacgccaucccagc

SEQ ID NO: 2929387 - RNA, 23 nt, Human
ucccuuugacgccaucccagccc

SEQ ID NO: 2929388 - RNA, 22 nt, Human
ucccuuugacgccaucccagcc

SEQ ID NO: 2929389 - RNA, 17 nt, Human
acuauagccuaggugac

SEQ ID NO: 2929390 - RNA, 21 nt, Human
acuauaauguaagcucuacug

SEQ ID NO: 2929391 - RNA, 23 nt, Human
acuauaauuuaccugaagucuuu

SEQ ID NO: 2929392 - RNA, 24 nt, Human
uccccaccgcagacaggaccaggg

SEQ ID NO: 2929393 - RNA, 23 nt, Human
uccccaggaggccagccuugacc

SEQ ID NO: 2929394 - RNA, 20 nt, Human
acuaucugugcguagaaguu

SEQ ID NO: 2929395 - RNA, 22 nt, Human
acuaucugugcguagaaguucu

SEQ ID NO: 2929396 - RNA, 17 nt, Human
acuauguugcccaggca

SEQ ID NO: 2929397 - RNA, 18 nt, Human
acuauguugcccaggcag

SEQ ID NO: 2929398 - RNA, 21 nt, Human
acuauuaaacaugcuguacau

SEQ ID NO: 2929399 - RNA, 19 nt, Human
acuauguugcccaggcagg

SEQ ID NO: 2929400 - RNA, 20 nt, Human
acuauguugcccaggcaggu

SEQ ID NO: 2929401 - RNA, 20 nt, Human
acuauguuuuuguucaguuu

SEQ ID NO: 2929402 - RNA, 23 nt, Human
acuauguugcccaggcaggucuu

SEQ ID NO: 2929403 - RNA, 18 nt, Human
ucccuauuagagaagaga

SEQ ID NO: 2929404 - RNA, 20 nt, Human
ucccgaguagcugggacuac

SEQ ID NO: 2929405 - RNA, 18 nt, Human
ucccgaauagcugggacu

SEQ ID NO: 2929406 - RNA, 15 nt, Human
ucccgaauagcuggg

SEQ ID NO: 2929407 - RNA, 16 nt, Human
ucccgaauagcuggga

SEQ ID NO: 2929408 - RNA, 12 nt, Human
uccccuccucug

SEQ ID NO: 2929409 - RNA, 15 nt, Human
ucccauaugccuggg

SEQ ID NO: 2929410 - RNA, 13 nt, Human
ucccaucucacac

SEQ ID NO: 2929411 - RNA, 19 nt, Human
ucccaucucacacaugagc

SEQ ID NO: 2929412 - RNA, 14 nt, Human
ucccaucucacaca

SEQ ID NO: 2929413 - RNA, 18 nt, Human
acuacauuagguugugaa

SEQ ID NO: 2929414 - RNA, 19 nt, Human
acuacauuagguugugaau

SEQ ID NO: 2929415 - RNA, 20 nt, Human
acuacauuagguugugaaug

SEQ ID NO: 2929416 - RNA, 16 nt, Human
acuacaguccucccau

SEQ ID NO: 2929417 - RNA, 22 nt, Human
ucccagugccgagaaggaagcc

SEQ ID NO: 2929418 - RNA, 19 nt, Human
ucccagugccgagaaggaa

SEQ ID NO: 2929419 - RNA, 15 nt, Human
acuacaguccuccca

SEQ ID NO: 2929420 - RNA, 23 nt, Human
acuacaggugugagucaccaagc

SEQ ID NO: 2929421 - RNA, 17 nt, Human
acuaaccagcagaaaug

SEQ ID NO: 2929422 - RNA, 13 nt, Human
acuaaccacgcug

SEQ ID NO: 2929423 - RNA, 16 nt, Human
acuaaccagcagaaau

SEQ ID NO: 2929424 - RNA, 14 nt, Human
acuaaaauguucua

SEQ ID NO: 2929425 - RNA, 13 nt, Human
uccagccugggug

SEQ ID NO: 2929426 - RNA, 24 nt, Human
uccagccugggugacagagcaagu

SEQ ID NO: 2929427 - RNA, 14 nt, Human
uccagcucaccagc

SEQ ID NO: 2929428 - RNA, 12 nt, Human
acguuucuaaag

SEQ ID NO: 2929429 - RNA, 14 nt, Human
acguuucuaaaggc

SEQ ID NO: 2929430 - RNA, 15 nt, Human
acuaaaaaugcaaaa

SEQ ID NO: 2929431 - RNA, 13 nt, Human
acuaaaaauacaa

SEQ ID NO: 2929432 - RNA, 12 nt, Human
uccuucagugcc

SEQ ID NO: 2929433 - RNA, 13 nt, Human
uccuucagccuga

SEQ ID NO: 2929434 - RNA, 11 nt, Human
uccuucagugc

SEQ ID NO: 2929435 - RNA, 22 nt, Human
uccuucagugccuuauggaaca

SEQ ID NO: 2929436 - RNA, 20 nt, Human
uccuucagugccuuauggaa

SEQ ID NO: 2929437 - RNA, 13 nt, Human
uccuucagugccu

SEQ ID NO: 2929438 - RNA, 15 nt, Human
acuggcaaagcagaa

SEQ ID NO: 2929439 - RNA, 13 nt, Human
acuggcaaagcag

SEQ ID NO: 2929440 - RNA, 22 nt, Human
acuggcacaguuuucugagaaa

SEQ ID NO: 2929441 - RNA, 21 nt, Human
acuggcacaguuuucugagaa

SEQ ID NO: 2929442 - RNA, 21 nt, Human
acuggcgugaacccaggaggc

SEQ ID NO: 2929443 - RNA, 15 nt, Human
acuggcucacccagu

SEQ ID NO: 2929444 - RNA, 12 nt, Human
acuggcucaccc

SEQ ID NO: 2929445 - RNA, 18 nt, Human
acuggcucacccaguccu

SEQ ID NO: 2929446 - RNA, 22 nt, Human
acuggcugcaaaggguaucagg

SEQ ID NO: 2929447 - RNA, 20 nt, Human
acugccuucucaacuccaaa

SEQ ID NO: 2929448 - RNA, 22 nt, Human
acugccuucucaacuccaaacu

SEQ ID NO: 2929449 - RNA, 23 nt, Human
acugcuuccagugaggcucugcc

SEQ ID NO: 2929450 - RNA, 22 nt, Human
acugcuuccagugaggcucugc

SEQ ID NO: 2929451 - RNA, 21 nt, Human
acugcuuccagugaggcucug

SEQ ID NO: 2929452 - RNA, 18 nt, Human
acugcuuccagugaggcu

SEQ ID NO: 2929453 - RNA, 22 nt, Human
acuggauuaaacuuaaucuaaa

SEQ ID NO: 2929454 - RNA, 21 nt, Human
acuggcaaacagggccucugc

SEQ ID NO: 2929455 - RNA, 17 nt, Human
acuggcaaacagggccu

SEQ ID NO: 2929456 - RNA, 19 nt, Human
acuggcaaacagggccucu

SEQ ID NO: 2929457 - RNA, 20 nt, Human
acuggcaaacagggccucug

SEQ ID NO: 2929458 - RNA, 14 nt, Human
ucgaggacagggag

SEQ ID NO: 2929459 - RNA, 17 nt, Human
ucgaggacagggaggug

SEQ ID NO: 2929460 - RNA, 14 nt, Human
ucgcgacaaugcaa

SEQ ID NO: 2929461 - RNA, 13 nt, Human
ucgcgacaaugca

SEQ ID NO: 2929462 - RNA, 13 nt, Human
ucgaggacaggga

SEQ ID NO: 2929463 - RNA, 14 nt, Human
ucgagcaugccugg

SEQ ID NO: 2929464 - RNA, 15 nt, Human
uccuuucaccacaug

SEQ ID NO: 2929465 - RNA, 15 nt, Human
ucgaacuggcugcaa

SEQ ID NO: 2929466 - RNA, 14 nt, Human
ucgaacuggcugca

SEQ ID NO: 2929467 - RNA, 13 nt, Human
ucgaacuggcugc

SEQ ID NO: 2929468 - RNA, 20 nt, Human
acuggguacuuguggacaca

SEQ ID NO: 2929469 - RNA, 23 nt, Human
acuggguacuuguggacacagcu

SEQ ID NO: 2929470 - RNA, 19 nt, Human
acuggguacuuguggacac

SEQ ID NO: 2929471 - RNA, 12 nt, Human
ucgcuccugugu

SEQ ID NO: 2929472 - RNA, 13 nt, Human
ucgcuccuguguc

SEQ ID NO: 2929473 - RNA, 22 nt, Human
acugggcuuggggaccagagcu

SEQ ID NO: 2929474 - RNA, 23 nt, Human
acuguacaugaaaacacauuuuu

SEQ ID NO: 2929475 - RNA, 13 nt, Human
acuguacaugaaa

SEQ ID NO: 2929476 - RNA, 14 nt, Human
acuguacaugaaaa

SEQ ID NO: 2929477 - RNA, 19 nt, Human
acuguaauuugugauacaa

SEQ ID NO: 2929478 - RNA, 13 nt, Human
acuguacaaagua

SEQ ID NO: 2929479 - RNA, 14 nt, Human
acuguacaaaguag

SEQ ID NO: 2929480 - RNA, 15 nt, Human
acuguacaaaguaga

SEQ ID NO: 2929481 - RNA, 18 nt, Human
uccugugugugcgccuac

SEQ ID NO: 2929482 - RNA, 13 nt, Human
uccugugugugcg

SEQ ID NO: 2929483 - RNA, 14 nt, Human
uccugugugugcgc

SEQ ID NO: 2929484 - RNA, 23 nt, Human
uccugugucuugcaauggcagcc

SEQ ID NO: 2929485 - RNA, 24 nt, Human
uccugugucuugcaauggcagccu

SEQ ID NO: 2929486 - RNA, 19 nt, Human
uccuguucccaugagauga

SEQ ID NO: 2929487 - RNA, 15 nt, Human
uccuguuuuuauuau

SEQ ID NO: 2929488 - RNA, 21 nt, Human
uccuguuuuuauuauuaacaa

SEQ ID NO: 2929489 - RNA, 16 nt, Human
uccuguuuuuauuauu

SEQ ID NO: 2929490 - RNA, 20 nt, Human
uccuguuuuuauuauuaaca

SEQ ID NO: 2929491 - RNA, 19 nt, Human
acugcagccucaaccuccu

SEQ ID NO: 2929492 - RNA, 21 nt, Human
acugcagccucaaccuccugg

SEQ ID NO: 2929493 - RNA, 22 nt, Human
acugcagccucaaccuccuggg

SEQ ID NO: 2929494 - RNA, 13 nt, Human
acugcacuguuuu

SEQ ID NO: 2929495 - RNA, 23 nt, Human
acugcagccucaaccuccugggc

SEQ ID NO: 2929496 - RNA, 18 nt, Human
uccugggcagcugccucc

SEQ ID NO: 2929497 - RNA, 19 nt, Human
uccugggcagcugccuccc

SEQ ID NO: 2929498 - RNA, 22 nt, Human
uccugggcagcugccuccccuc

SEQ ID NO: 2929499 - RNA, 23 nt, Human
uccugggcagcugccuccccucc

SEQ ID NO: 2929500 - RNA, 14 nt, Human
uccugggcagcugc

SEQ ID NO: 2929501 - RNA, 15 nt, Human
uccugggcagcugcc

SEQ ID NO: 2929502 - RNA, 16 nt, Human
uccugggcagcugccu

SEQ ID NO: 2929503 - RNA, 17 nt, Human
uccugggcagcugccuc

SEQ ID NO: 2929504 - RNA, 13 nt, Human
uccugcugcaguu

SEQ ID NO: 2929505 - RNA, 20 nt, Human
uccugcugagccucacagca

SEQ ID NO: 2929506 - RNA, 20 nt, Human
uccugccucgaacuggcugc

SEQ ID NO: 2929507 - RNA, 22 nt, Human
uccugcaggcagccaggccaca

SEQ ID NO: 2929508 - RNA, 19 nt, Human
uccugccucagccucccaa

SEQ ID NO: 2929509 - RNA, 20 nt, Human
uccugcaggcagccaggcca

SEQ ID NO: 2929510 - RNA, 19 nt, Human
uccugcaggcagccaggcc

SEQ ID NO: 2929511 - RNA, 17 nt, Human
uccugcaggcagccagg

SEQ ID NO: 2929512 - RNA, 16 nt, Human
uccugcaggcagccag

SEQ ID NO: 2929513 - RNA, 15 nt, Human
uccugcaggcagcca

SEQ ID NO: 2929514 - RNA, 19 nt, Human
acugagggggccuggaugc

SEQ ID NO: 2929515 - RNA, 22 nt, Human
acugaguacguugugcauuugg

SEQ ID NO: 2929516 - RNA, 23 nt, Human
acugaguacguugugcauuuggu

SEQ ID NO: 2929517 - RNA, 16 nt, Human
acugagggggccugga

SEQ ID NO: 2929518 - RNA, 17 nt, Human
acugagggggccuggau

SEQ ID NO: 2929519 - RNA, 18 nt, Human
acugagggggccuggaug

SEQ ID NO: 2929520 - RNA, 18 nt, Human
acugaguacguugugcau

SEQ ID NO: 2929521 - RNA, 19 nt, Human
acugaguacguugugcauu

SEQ ID NO: 2929522 - RNA, 21 nt, Human
acugaguacguugugcauuug

SEQ ID NO: 2929523 - RNA, 13 nt, Human
acugcaaccuccg

SEQ ID NO: 2929524 - RNA, 14 nt, Human
acugcaaccuccgc

SEQ ID NO: 2929525 - RNA, 16 nt, Human
acugcaaccuccgccu

SEQ ID NO: 2929526 - RNA, 22 nt, Human
acugcaaccuccgccucuuggg

SEQ ID NO: 2929527 - RNA, 15 nt, Human
uccucuccccagcaa

SEQ ID NO: 2929528 - RNA, 17 nt, Human
acugaggggaggggagc

SEQ ID NO: 2929529 - RNA, 22 nt, Human
acugaggggaggggagcauggg

SEQ ID NO: 2929530 - RNA, 23 nt, Human
accuuuguauucucuccuguacc

SEQ ID NO: 2929531 - RNA, 15 nt, Human
accuuuguauucucu

SEQ ID NO: 2929532 - RNA, 19 nt, Human
accuuuguauucucuccug

SEQ ID NO: 2929533 - RNA, 22 nt, Human
uccagaaguuugagaucagccu

SEQ ID NO: 2929534 - RNA, 14 nt, Human
uccagccccuggau

SEQ ID NO: 2929535 - RNA, 15 nt, Human
uccagccccuggaug

SEQ ID NO: 2929536 - RNA, 21 nt, Human
uccagccccuggaugcagccu

SEQ ID NO: 2929537 - RNA, 19 nt, Human
uccagccccuggaugcagc

SEQ ID NO: 2929538 - RNA, 17 nt, Human
uccagccccuggaugca

SEQ ID NO: 2929539 - RNA, 16 nt, Human
uccagccccuggaugc

SEQ ID NO: 2929540 - RNA, 11 nt, Human
uccagccuggg

SEQ ID NO: 2929541 - RNA, 21 nt, Human
uccagccugagcgacagugag

SEQ ID NO: 2929542 - RNA, 22 nt, Human
uccagccccuggaugcagccuc

SEQ ID NO: 2929543 - RNA, 20 nt, Human
uccagccugagcgacaguga

SEQ ID NO: 2929544 - RNA, 15 nt, Human
accuugacagggcac

SEQ ID NO: 2929545 - RNA, 14 nt, Human
accuugacagggca

SEQ ID NO: 2929546 - RNA, 15 nt, Human
accuugaaugaugcc

SEQ ID NO: 2929547 - RNA, 13 nt, Human
accuucuccuuca

SEQ ID NO: 2929548 - RNA, 12 nt, Human
accuucuccuuc

SEQ ID NO: 2929549 - RNA, 15 nt, Human
uccaccaucaagcca

SEQ ID NO: 2929550 - RNA, 17 nt, Human
accuuagacagucccug

SEQ ID NO: 2929551 - RNA, 18 nt, Human
accugcggugcuaucucc

SEQ ID NO: 2929552 - RNA, 22 nt, Human
accugaagucuuuguacagaca

SEQ ID NO: 2929553 - RNA, 15 nt, Human
accugaagucuuugu

SEQ ID NO: 2929554 - RNA, 23 nt, Human
accugcggugcuaucucccccag

SEQ ID NO: 2929555 - RNA, 22 nt, Human
accugcggugcuaucuccccca

SEQ ID NO: 2929556 - RNA, 19 nt, Human
accugcggugcuaucuccc

SEQ ID NO: 2929557 - RNA, 19 nt, Human
ucauuugagcagggcucag

SEQ ID NO: 2929558 - RNA, 14 nt, Human
accuggaauauaua

SEQ ID NO: 2929559 - RNA, 17 nt, Human
accuggaauauauaacc

SEQ ID NO: 2929560 - RNA, 20 nt, Human
ucauuuuagggguagcauuu

SEQ ID NO: 2929561 - RNA, 21 nt, Human
ucauuugagcagggcucagcg

SEQ ID NO: 2929562 - RNA, 13 nt, Human
ucauuuuuuuuaa

SEQ ID NO: 2929563 - RNA, 21 nt, Human
uccacauuuguuuugccaauu

SEQ ID NO: 2929564 - RNA, 17 nt, Human
uccaauaaaaugccuca

SEQ ID NO: 2929565 - RNA, 11 nt, Human
uccaagcuggu

SEQ ID NO: 2929566 - RNA, 16 nt, Human
uccaagcucccaggca

SEQ ID NO: 2929567 - RNA, 15 nt, Human
uccaagcucccaggc

SEQ ID NO: 2929568 - RNA, 14 nt, Human
uccaagcucccagg

SEQ ID NO: 2929569 - RNA, 13 nt, Human
uccaagcucccag

SEQ ID NO: 2929570 - RNA, 12 nt, Human
uccaagcuccca

SEQ ID NO: 2929571 - RNA, 13 nt, Human
accuagccuuaga

SEQ ID NO: 2929572 - RNA, 14 nt, Human
accuccuaaaacaa

SEQ ID NO: 2929573 - RNA, 18 nt, Human
ucauccacugugccaugu

SEQ ID NO: 2929574 - RNA, 20 nt, Human
accuccgccucuuggguuca

SEQ ID NO: 2929575 - RNA, 10 nt, Human
acccuuuucu

SEQ ID NO: 2929576 - RNA, 20 nt, Human
ucauauuuacuucuuauaca

SEQ ID NO: 2929577 - RNA, 21 nt, Human
ucauauuuacuucuuauacau

SEQ ID NO: 2929578 - RNA, 22 nt, Human
ucauauuuacuucuuauacauu

SEQ ID NO: 2929579 - RNA, 16 nt, Human
ucauauuuacuucuua

SEQ ID NO: 2929580 - RNA, 21 nt, Human
accgaacugauguaaguaaac

SEQ ID NO: 2929581 - RNA, 17 nt, Human
accgcagacaggaccag

SEQ ID NO: 2929582 - RNA, 17 nt, Human
accgccaaggcuggggg

SEQ ID NO: 2929583 - RNA, 20 nt, Human
accgcagacaggaccaggga

SEQ ID NO: 2929584 - RNA, 12 nt, Human
accucugcacaa

SEQ ID NO: 2929585 - RNA, 19 nt, Human
accucucucacuccuugaa

SEQ ID NO: 2929586 - RNA, 14 nt, Human
accucucucacucc

SEQ ID NO: 2929587 - RNA, 23 nt, Human
accucucccuuggauuguccccg

SEQ ID NO: 2929588 - RNA, 21 nt, Human
accucuaaauucuuucauuuu

SEQ ID NO: 2929589 - RNA, 15 nt, Human
accucucccuuggau

SEQ ID NO: 2929590 - RNA, 14 nt, Human
accucucccuugga

SEQ ID NO: 2929591 - RNA, 13 nt, Human
accucucccuugg

SEQ ID NO: 2929592 - RNA, 18 nt, Human
accucuaaauucuuucau

SEQ ID NO: 2929593 - RNA, 17 nt, Human
accucggugccuuccuc

SEQ ID NO: 2929594 - RNA, 19 nt, Human
ucauugaccugaggcccuu

SEQ ID NO: 2929595 - RNA, 21 nt, Human
ucauucuccuuguguuacuaa

SEQ ID NO: 2929596 - RNA, 22 nt, Human
ucauugaccugaggcccuucuc

SEQ ID NO: 2929597 - RNA, 11 nt, Human
ucauguucuua

SEQ ID NO: 2929598 - RNA, 17 nt, Human
ucauguucuuaauucuu

SEQ ID NO: 2929599 - RNA, 13 nt, Human
ucaugucuggcua

SEQ ID NO: 2929600 - RNA, 21 nt, Human
ucaugaauuaguuuuauaugc

SEQ ID NO: 2929601 - RNA, 19 nt, Human
ucaugacaaagacugagua

SEQ ID NO: 2929602 - RNA, 19 nt, Human
ucauccacugugccaugug

SEQ ID NO: 2929603 - RNA, 21 nt, Human
ucauccacugugccaugugcc

SEQ ID NO: 2929604 - RNA, 23 nt, Human
ucauccacugugccaugugccag

SEQ ID NO: 2929605 - RNA, 22 nt, Human
ucaugaauuaguuuuauaugcu

SEQ ID NO: 2929606 - RNA, 15 nt, Human
acccccagccugcua

SEQ ID NO: 2929607 - RNA, 14 nt, Human
acccccagccugcu

SEQ ID NO: 2929608 - RNA, 12 nt, Human
ucagccugggca

SEQ ID NO: 2929609 - RNA, 10 nt, Human
ucagccuggg

SEQ ID NO: 2929610 - RNA, 16 nt, Human
acccaguccugcccgc

SEQ ID NO: 2929611 - RNA, 15 nt, Human
acccagcucuggucc

SEQ ID NO: 2929612 - RNA, 13 nt, Human
acccagcucuggu

SEQ ID NO: 2929613 - RNA, 19 nt, Human
ucagaacuauguuuuuguu

SEQ ID NO: 2929614 - RNA, 16 nt, Human
ucagaacuauguuuuu

SEQ ID NO: 2929615 - RNA, 13 nt, Human
ucagaucuucugu

SEQ ID NO: 2929616 - RNA, 13 nt, Human
ucagaagacacug

SEQ ID NO: 2929617 - RNA, 18 nt, Human
ucagaugcacaugagcug

SEQ ID NO: 2929618 - RNA, 14 nt, Human
acccucuuagaaaa

SEQ ID NO: 2929619 - RNA, 14 nt, Human
acccugcccugugg

SEQ ID NO: 2929620 - RNA, 13 nt, Human
acccugcccugug

SEQ ID NO: 2929621 - RNA, 12 nt, Human
acccugcccugu

SEQ ID NO: 2929622 - RNA, 11 nt, Human
acccugcccug

SEQ ID NO: 2929623 - RNA, 15 nt, Human
acccuugugguccca

SEQ ID NO: 2929624 - RNA, 19 nt, Human
acccuuguggucccacccc

SEQ ID NO: 2929625 - RNA, 17 nt, Human
acccuuguggucccacc

SEQ ID NO: 2929626 - RNA, 16 nt, Human
acccuuguggucccac

SEQ ID NO: 2929627 - RNA, 23 nt, Human
ucaggguuggccccugcccggcu

SEQ ID NO: 2929628 - RNA, 20 nt, Human
accccuucgcuccugugucu

SEQ ID NO: 2929629 - RNA, 13 nt, Human
ucagggucccugg

SEQ ID NO: 2929630 - RNA, 18 nt, Human
ucagggucccugguggca

SEQ ID NO: 2929631 - RNA, 14 nt, Human
ucagggucccuggu

SEQ ID NO: 2929632 - RNA, 13 nt, Human
ucagguaacaggc

SEQ ID NO: 2929633 - RNA, 15 nt, Human
ucagguaacaggcag

SEQ ID NO: 2929634 - RNA, 16 nt, Human
ucagguaacaggcaga

SEQ ID NO: 2929635 - RNA, 19 nt, Human
accccuucgcuccuguguc

SEQ ID NO: 2929636 - RNA, 14 nt, Human
ucaggccagcugcu

SEQ ID NO: 2929637 - RNA, 11 nt, Human
ucaggccaggc

SEQ ID NO: 2929638 - RNA, 20 nt, Human
ucaggccagcugcuugggcu

SEQ ID NO: 2929639 - RNA, 15 nt, Human
ucaggccagcugcuu

SEQ ID NO: 2929640 - RNA, 15 nt, Human
ucagcggggacagcu

SEQ ID NO: 2929641 - RNA, 16 nt, Human
ucagcggggacagcuc

SEQ ID NO: 2929642 - RNA, 17 nt, Human
ucagcggggacagcucc

SEQ ID NO: 2929643 - RNA, 20 nt, Human
ucaggaagcucagggccugg

SEQ ID NO: 2929644 - RNA, 19 nt, Human
ucaggaagcucagggccug

SEQ ID NO: 2929645 - RNA, 17 nt, Human
ucaggaagcucagggcc

SEQ ID NO: 2929646 - RNA, 16 nt, Human
ucaggaagcucagggc

SEQ ID NO: 2929647 - RNA, 23 nt, Human
ucaggccaaacucaccugccccu

SEQ ID NO: 2929648 - RNA, 20 nt, Human
ucaggccaaacucaccugcc

SEQ ID NO: 2929649 - RNA, 12 nt, Human
ucacugcagccu

SEQ ID NO: 2929650 - RNA, 16 nt, Human
ucacuguugcccaggc

SEQ ID NO: 2929651 - RNA, 13 nt, Human
ucacugagacagc

SEQ ID NO: 2929652 - RNA, 15 nt, Human
ucacugagacagccc

SEQ ID NO: 2929653 - RNA, 14 nt, Human
ucacugagacagcc

SEQ ID NO: 2929654 - RNA, 16 nt, Human
ucaccuccuaaaacaa

SEQ ID NO: 2929655 - RNA, 16 nt, Human
ucaccugccccucaac

SEQ ID NO: 2929656 - RNA, 17 nt, Human
ucacuguugcccaggcu

SEQ ID NO: 2929657 - RNA, 18 nt, Human
ucacuguugcccaggcug

SEQ ID NO: 2929658 - RNA, 13 nt, Human
accagugccucuc

SEQ ID NO: 2929659 - RNA, 10 nt, Human
accagugccu

SEQ ID NO: 2929660 - RNA, 18 nt, Human
accagugccucucccugc

SEQ ID NO: 2929661 - RNA, 21 nt, Human
accagugccucucccugcugc

SEQ ID NO: 2929662 - RNA, 22 nt, Human
accagugccucucccugcugcu

SEQ ID NO: 2929663 - RNA, 23 nt, Human
accagugccucucccugcugcuc

SEQ ID NO: 2929664 - RNA, 21 nt, Human
accaguguuguggauuuaaca

SEQ ID NO: 2929665 - RNA, 16 nt, Human
acccagcccacuucug

SEQ ID NO: 2929666 - RNA, 17 nt, Human
acccagcccacuucugc

SEQ ID NO: 2929667 - RNA, 18 nt, Human
acccagcccacuucugcc

SEQ ID NO: 2929668 - RNA, 16 nt, Human
ucagaacagagccuuu

SEQ ID NO: 2929669 - RNA, 16 nt, Human
acccagaagaaaauag

SEQ ID NO: 2929670 - RNA, 18 nt, Human
acccaaaaggcagaagca

SEQ ID NO: 2929671 - RNA, 21 nt, Human
acccaaauguucaucaaugaa

SEQ ID NO: 2929672 - RNA, 23 nt, Human
accaugauuaaccacuucagcug

SEQ ID NO: 2929673 - RNA, 22 nt, Human
accaugauuaaccacuucagcu

SEQ ID NO: 2929674 - RNA, 18 nt, Human
accauucuccaccugcca

SEQ ID NO: 2929675 - RNA, 16 nt, Human
accauucuccaccugc

SEQ ID NO: 2929676 - RNA, 13 nt, Human
accauucuccacc

SEQ ID NO: 2929677 - RNA, 22 nt, Human
accauuuugggguacccacugc

SEQ ID NO: 2929678 - RNA, 23 nt, Human
accauuuugggguacccacugcu

SEQ ID NO: 2929679 - RNA, 13 nt, Human
acccaaaaggcag

SEQ ID NO: 2929680 - RNA, 15 nt, Human
acccaaaaggcagaa

SEQ ID NO: 2929681 - RNA, 19 nt, Human
accagagcccaccuuggcu

SEQ ID NO: 2929682 - RNA, 22 nt, Human
accagagcccaccuuggcucaa

SEQ ID NO: 2929683 - RNA, 17 nt, Human
accagagcccaccuugg

SEQ ID NO: 2929684 - RNA, 22 nt, Human
accagacaccuugacagggcac

SEQ ID NO: 2929685 - RNA, 23 nt, Human
accagacaccuugacagggcaca

SEQ ID NO: 2929686 - RNA, 17 nt, Human
accagacaccuugacag

SEQ ID NO: 2929687 - RNA, 12 nt, Human
accacuuuuguu

SEQ ID NO: 2929688 - RNA, 19 nt, Human
accacuuguguuuugcaag

SEQ ID NO: 2929689 - RNA, 23 nt, Human
accacuuguguuuugcaagccag

SEQ ID NO: 2929690 - RNA, 23 nt, Human
ucaccugaagacucauucuucug

SEQ ID NO: 2929691 - RNA, 16 nt, Human
ucaccugaagacucau

SEQ ID NO: 2929692 - RNA, 19 nt, Human
ucaccugaagacucauucu

SEQ ID NO: 2929693 - RNA, 11 nt, Human
ucaccuccuaa

SEQ ID NO: 2929694 - RNA, 20 nt, Human
accacucuaucaaguauuau

SEQ ID NO: 2929695 - RNA, 20 nt, Human
accacaucuugcucugcuga

SEQ ID NO: 2929696 - RNA, 21 nt, Human
accacaucuugcucugcugac

SEQ ID NO: 2929697 - RNA, 24 nt, Human
accacaucuugcucugcugacaga

SEQ ID NO: 2929698 - RNA, 15 nt, Human
accacuucagcugac

SEQ ID NO: 2929699 - RNA, 14 nt, Human
accacuucagcuga

SEQ ID NO: 2929700 - RNA, 13 nt, Human
accacuucagcug

SEQ ID NO: 2929701 - RNA, 13 nt, Human
accacugcagaag

SEQ ID NO: 2929702 - RNA, 14 nt, Human
accacugcagaaga

SEQ ID NO: 2929703 - RNA, 19 nt, Human
accacugcagaagacagua

SEQ ID NO: 2929704 - RNA, 21 nt, Human
accacagacauacuaaccagc

SEQ ID NO: 2929705 - RNA, 22 nt, Human
accacagacauacuaaccagca

SEQ ID NO: 2929706 - RNA, 14 nt, Human
accacaucuugcuc

SEQ ID NO: 2929707 - RNA, 11 nt, Human
accacagcagu

SEQ ID NO: 2929708 - RNA, 12 nt, Human
uauuucauuucu

SEQ ID NO: 2929709 - RNA, 15 nt, Human
agcacagugaucaag

SEQ ID NO: 2929710 - RNA, 16 nt, Human
agcacagcuucauuuc

SEQ ID NO: 2929711 - RNA, 22 nt, Human
agcacagccucuuagaugcagu

SEQ ID NO: 2929712 - RNA, 22 nt, Human
agcaccaaaagcuuaccaaggg

SEQ ID NO: 2929713 - RNA, 14 nt, Human
agcacaugccucuc

SEQ ID NO: 2929714 - RNA, 13 nt, Human
agcacaugccucu

SEQ ID NO: 2929715 - RNA, 16 nt, Human
agcaccaaucaugaau

SEQ ID NO: 2929716 - RNA, 22 nt, Human
agcaagugagagcuggguguca

SEQ ID NO: 2929717 - RNA, 18 nt, Human
agcaagugagagcugggu

SEQ ID NO: 2929718 - RNA, 14 nt, Human
agcaagugagagcu

SEQ ID NO: 2929719 - RNA, 20 nt, Human
agcaagugagacccugucuc

SEQ ID NO: 2929720 - RNA, 13 nt, Human
agcaagugagagc

SEQ ID NO: 2929721 - RNA, 22 nt, Human
ugagccagauuucacucuccuu

SEQ ID NO: 2929722 - RNA, 17 nt, Human
ugagccagauuucacuc

SEQ ID NO: 2929723 - RNA, 21 nt, Human
ugagcaucaggccaggcccuc

SEQ ID NO: 2929724 - RNA, 23 nt, Human
ugagcaucgcuuaggagaagucu

SEQ ID NO: 2929725 - RNA, 24 nt, Human
ugagcaucaggccaggcccucugc

SEQ ID NO: 2929726 - RNA, 22 nt, Human
ugagcaucaggccaggcccucu

SEQ ID NO: 2929727 - RNA, 21 nt, Human
ugagccacugcaccgggccac

SEQ ID NO: 2929728 - RNA, 18 nt, Human
ugagccacugcaccgggc

SEQ ID NO: 2929729 - RNA, 23 nt, Human
ugagccacugcaccgggccacag

SEQ ID NO: 2929730 - RNA, 13 nt, Human
ugagccagauuuc

SEQ ID NO: 2929731 - RNA, 16 nt, Human
ugagccagauuucacu

SEQ ID NO: 2929732 - RNA, 14 nt, Human
ugagccagauuuca

SEQ ID NO: 2929733 - RNA, 20 nt, Human
ugagcacuaaggugugcucu

SEQ ID NO: 2929734 - RNA, 21 nt, Human
ugagcacuaaggugugcucug

SEQ ID NO: 2929735 - RNA, 22 nt, Human
ugagcacuaaggugugcucuga

SEQ ID NO: 2929736 - RNA, 23 nt, Human
ugagcacuaaggugugcucugau

SEQ ID NO: 2929737 - RNA, 15 nt, Human
ugagcaauccugcaa

SEQ ID NO: 2929738 - RNA, 14 nt, Human
agcaacgcaggccc

SEQ ID NO: 2929739 - RNA, 10 nt, Human
ugagccuggc

SEQ ID NO: 2929740 - RNA, 16 nt, Human
agcagagaccaucccu

SEQ ID NO: 2929741 - RNA, 15 nt, Human
agcagagaccauccc

SEQ ID NO: 2929742 - RNA, 22 nt, Human
agcagagaaugaaagggcccag

SEQ ID NO: 2929743 - RNA, 23 nt, Human
agcagagaaugaaagggcccaga

SEQ ID NO: 2929744 - RNA, 14 nt, Human
agcagagaauucuc

SEQ ID NO: 2929745 - RNA, 21 nt, Human
agcagagaauucucuuaucca

SEQ ID NO: 2929746 - RNA, 13 nt, Human
agcagaaugugau

SEQ ID NO: 2929747 - RNA, 16 nt, Human
agcagacacaugccag

SEQ ID NO: 2929748 - RNA, 11 nt, Human
agcagacacau

SEQ ID NO: 2929749 - RNA, 12 nt, Human
agcagacacaug

SEQ ID NO: 2929750 - RNA, 22 nt, Human
agcagaccauuggggcucccag

SEQ ID NO: 2929751 - RNA, 23 nt, Human
agcagaccauuggggcucccagc

SEQ ID NO: 2929752 - RNA, 21 nt, Human
agcagagaaugaaagggccca

SEQ ID NO: 2929753 - RNA, 14 nt, Human
ugagccugggaggu

SEQ ID NO: 2929754 - RNA, 16 nt, Human
ugagccuggcaagaau

SEQ ID NO: 2929755 - RNA, 11 nt, Human
ugagccuggca

SEQ ID NO: 2929756 - RNA, 14 nt, Human
ugagccuugaacuu

SEQ ID NO: 2929757 - RNA, 22 nt, Human
ugagccugggaggucaaggcug

SEQ ID NO: 2929758 - RNA, 19 nt, Human
ugagccugggaggucaagg

SEQ ID NO: 2929759 - RNA, 13 nt, Human
ugagcgacaguga

SEQ ID NO: 2929760 - RNA, 14 nt, Human
ugagcgacagugag

SEQ ID NO: 2929761 - RNA, 16 nt, Human
ugagcgacagugagac

SEQ ID NO: 2929762 - RNA, 20 nt, Human
ugagcgacagugagacucug

SEQ ID NO: 2929763 - RNA, 15 nt, Human
ugagccuugaacuuu

SEQ ID NO: 2929764 - RNA, 17 nt, Human
ugagccuugaacuuuga

SEQ ID NO: 2929765 - RNA, 18 nt, Human
ugagccuugaacuuugac

SEQ ID NO: 2929766 - RNA, 19 nt, Human
ugagccuugaacuuugacc

SEQ ID NO: 2929767 - RNA, 22 nt, Human
agcaccuuagacagucccugcc

SEQ ID NO: 2929768 - RNA, 21 nt, Human
agcaccuuagacagucccugc

SEQ ID NO: 2929769 - RNA, 20 nt, Human
agcaccuuagacagucccug

SEQ ID NO: 2929770 - RNA, 19 nt, Human
agcaccuuagacagucccu

SEQ ID NO: 2929771 - RNA, 13 nt, Human
agcacgauuucug

SEQ ID NO: 2929772 - RNA, 23 nt, Human
agcaccuuagacagucccugcca

SEQ ID NO: 2929773 - RNA, 16 nt, Human
agcacgauuucuguuu

SEQ ID NO: 2929774 - RNA, 14 nt, Human
agcacgauuucugu

SEQ ID NO: 2929775 - RNA, 15 nt, Human
agcacgauuucuguu

SEQ ID NO: 2929776 - RNA, 22 nt, Human
agcacuuugggaggccaaggug

SEQ ID NO: 2929777 - RNA, 19 nt, Human
agcacuuugggaggcugag

SEQ ID NO: 2929778 - RNA, 23 nt, Human
agcacuuugggaggccaaggugg

SEQ ID NO: 2929779 - RNA, 14 nt, Human
agcagaacagugau

SEQ ID NO: 2929780 - RNA, 12 nt, Human
agcagaaaugcc

SEQ ID NO: 2929781 - RNA, 13 nt, Human
agcagaaaugccu

SEQ ID NO: 2929782 - RNA, 19 nt, Human
agcagaaaugccuuacccu

SEQ ID NO: 2929783 - RNA, 21 nt, Human
ugaggaagccgcuggggccag

SEQ ID NO: 2929784 - RNA, 19 nt, Human
ugaggaagccgcuggggcc

SEQ ID NO: 2929785 - RNA, 18 nt, Human
ugaggaagccgcuggggc

SEQ ID NO: 2929786 - RNA, 17 nt, Human
ugaggaagccgcugggg

SEQ ID NO: 2929787 - RNA, 14 nt, Human
ugaggaagccgcug

SEQ ID NO: 2929788 - RNA, 22 nt, Human
ugaggaagcaaaagcaucuaug

SEQ ID NO: 2929789 - RNA, 15 nt, Human
ugaggaagcaaaagc

SEQ ID NO: 2929790 - RNA, 16 nt, Human
ugagcuacaaaugcau

SEQ ID NO: 2929791 - RNA, 14 nt, Human
ugagcuacaaaugc

SEQ ID NO: 2929792 - RNA, 13 nt, Human
ugagcuacaaaug

SEQ ID NO: 2929793 - RNA, 13 nt, Human
ugaggcccagagg

SEQ ID NO: 2929794 - RNA, 12 nt, Human
ugaggcccagag

SEQ ID NO: 2929795 - RNA, 16 nt, Human
ugaggccagagacaca

SEQ ID NO: 2929796 - RNA, 14 nt, Human
ugaggccagagaca

SEQ ID NO: 2929797 - RNA, 20 nt, Human
ugaggccagagacacaagcc

SEQ ID NO: 2929798 - RNA, 20 nt, Human
ugaggcccagagggccugca

SEQ ID NO: 2929799 - RNA, 18 nt, Human
ugaggcccagagggccug

SEQ ID NO: 2929800 - RNA, 17 nt, Human
ugaggcccagagggccu

SEQ ID NO: 2929801 - RNA, 15 nt, Human
ugaggcccagagggc

SEQ ID NO: 2929802 - RNA, 22 nt, Human
ugaggcccagagggccugcaag

SEQ ID NO: 2929803 - RNA, 21 nt, Human
ugaggcccagagggccugcaa

SEQ ID NO: 2929804 - RNA, 23 nt, Human
ugaggcccagagggccugcaagg

SEQ ID NO: 2929805 - RNA, 21 nt, Human
ugaggaauccagacccggcug

SEQ ID NO: 2929806 - RNA, 22 nt, Human
ugaggaauccagacccggcugc

SEQ ID NO: 2929807 - RNA, 12 nt, Human
ugaggccagaga

SEQ ID NO: 2929808 - RNA, 23 nt, Human
ugaggcauuuguuugaacugaua

SEQ ID NO: 2929809 - RNA, 21 nt, Human
ugaggacacuaaccacgcugg

SEQ ID NO: 2929810 - RNA, 15 nt, Human
ugaggacacugauau

SEQ ID NO: 2929811 - RNA, 19 nt, Human
ugagggauacccaucccau

SEQ ID NO: 2929812 - RNA, 16 nt, Human
ugaggcccuucucucc

SEQ ID NO: 2929813 - RNA, 19 nt, Human
ugaggcccuucucuccagc

SEQ ID NO: 2929814 - RNA, 18 nt, Human
ugaggcccuucucuccag

SEQ ID NO: 2929815 - RNA, 24 nt, Human
ugaggcccuucucuccagccccug

SEQ ID NO: 2929816 - RNA, 23 nt, Human
ugaggcccuucucuccagccccu

SEQ ID NO: 2929817 - RNA, 22 nt, Human
ugaggcccuucucuccagcccc

SEQ ID NO: 2929818 - RNA, 20 nt, Human
ugaggcccuucucuccagcc

SEQ ID NO: 2929819 - RNA, 12 nt, Human
ugaggggccucu

SEQ ID NO: 2929820 - RNA, 13 nt, Human
ugaggggccucuu

SEQ ID NO: 2929821 - RNA, 10 nt, Human
agcagagugc

SEQ ID NO: 2929822 - RNA, 13 nt, Human
agcagagugcuuu

SEQ ID NO: 2929823 - RNA, 17 nt, Human
agcagaggaaggagagg

SEQ ID NO: 2929824 - RNA, 19 nt, Human
agcagauggagaccccuug

SEQ ID NO: 2929825 - RNA, 20 nt, Human
agcagagaccaucccugaag

SEQ ID NO: 2929826 - RNA, 20 nt, Human
agcagagcaccuuagacagu

SEQ ID NO: 2929827 - RNA, 17 nt, Human
ugaggucagagccugca

SEQ ID NO: 2929828 - RNA, 17 nt, Human
agcagagaccaucccug

SEQ ID NO: 2929829 - RNA, 19 nt, Human
agcagagaccaucccugaa

SEQ ID NO: 2929830 - RNA, 18 nt, Human
agcagagaccaucccuga

SEQ ID NO: 2929831 - RNA, 20 nt, Human
ugaggguugggcugguguca

SEQ ID NO: 2929832 - RNA, 17 nt, Human
ugagguacugagaguga

SEQ ID NO: 2929833 - RNA, 14 nt, Human
ugaggucagagccu

SEQ ID NO: 2929834 - RNA, 16 nt, Human
ugaggucagagccugc

SEQ ID NO: 2929835 - RNA, 13 nt, Human
ugaggucagagcc

SEQ ID NO: 2929836 - RNA, 22 nt, Human
ugagguacugagagugaacaaa

SEQ ID NO: 2929837 - RNA, 19 nt, Human
ugaauggacuuugcacacu

SEQ ID NO: 2929838 - RNA, 20 nt, Human
ugaaugcccagugagacugu

SEQ ID NO: 2929839 - RNA, 16 nt, Human
ugaaugucacuucugg

SEQ ID NO: 2929840 - RNA, 14 nt, Human
ugaaugucagugug

SEQ ID NO: 2929841 - RNA, 18 nt, Human
ugaaugucagugugacug

SEQ ID NO: 2929842 - RNA, 15 nt, Human
ugaaugucaguguga

SEQ ID NO: 2929843 - RNA, 20 nt, Human
agagucucacuguugcccag

SEQ ID NO: 2929844 - RNA, 22 nt, Human
agagucucacuguugcccaggc

SEQ ID NO: 2929845 - RNA, 14 nt, Human
agagugaacaaauu

SEQ ID NO: 2929846 - RNA, 15 nt, Human
agagugagacucugu

SEQ ID NO: 2929847 - RNA, 16 nt, Human
agagugagacucuguc

SEQ ID NO: 2929848 - RNA, 18 nt, Human
agagucuauuuacggaac

SEQ ID NO: 2929849 - RNA, 22 nt, Human
agagugaacaaauuuacagaga

SEQ ID NO: 2929850 - RNA, 17 nt, Human
agauaaggguaucuggu

SEQ ID NO: 2929851 - RNA, 19 nt, Human
agauaaggguaucugguga

SEQ ID NO: 2929852 - RNA, 19 nt, Human
agagugagacucugucuca

SEQ ID NO: 2929853 - RNA, 22 nt, Human
agauauuuugcuuugugauuuu

SEQ ID NO: 2929854 - RNA, 19 nt, Human
agauacaggaaaagcugcu

SEQ ID NO: 2929855 - RNA, 14 nt, Human
agaucaaccccuuc

SEQ ID NO: 2929856 - RNA, 19 nt, Human
agaucaaccccuucgcucc

SEQ ID NO: 2929857 - RNA, 21 nt, Human
agaucaaccccuucgcuccug

SEQ ID NO: 2929858 - RNA, 19 nt, Human
agagcugggugucaagagg

SEQ ID NO: 2929859 - RNA, 19 nt, Human
agaggaaagcaaaggagau

SEQ ID NO: 2929860 - RNA, 18 nt, Human
agaggaaagcaaaggaga

SEQ ID NO: 2929861 - RNA, 16 nt, Human
agaggaaagcaaagga

SEQ ID NO: 2929862 - RNA, 12 nt, Human
agaggaaagcaa

SEQ ID NO: 2929863 - RNA, 12 nt, Human
agaggaaaucac

SEQ ID NO: 2929864 - RNA, 11 nt, Human
agaggaaauca

SEQ ID NO: 2929865 - RNA, 21 nt, Human
agaggaaaucaccgaaaacgu

SEQ ID NO: 2929866 - RNA, 18 nt, Human
agaggcaacugcauuggc

SEQ ID NO: 2929867 - RNA, 21 nt, Human
ucuuuggucuacacugugcug

SEQ ID NO: 2929868 - RNA, 14 nt, Human
ucuuuggucuacac

SEQ ID NO: 2929869 - RNA, 11 nt, Human
ugaacuuugac

SEQ ID NO: 2929870 - RNA, 16 nt, Human
ugaacuuugaccucug

SEQ ID NO: 2929871 - RNA, 14 nt, Human
ugaagaagauggua

SEQ ID NO: 2929872 - RNA, 20 nt, Human
ugaagaagcaccaaucauga

SEQ ID NO: 2929873 - RNA, 13 nt, Human
ugaagacaaugac

SEQ ID NO: 2929874 - RNA, 17 nt, Human
ugaagacaaugacuuac

SEQ ID NO: 2929875 - RNA, 11 nt, Human
ugaagacaaug

SEQ ID NO: 2929876 - RNA, 20 nt, Human
agagggagggagggcuccag

SEQ ID NO: 2929877 - RNA, 21 nt, Human
agagggagggagggcuccaga

SEQ ID NO: 2929878 - RNA, 22 nt, Human
agagggagggagggcuccagac

SEQ ID NO: 2929879 - RNA, 17 nt, Human
ugaagauguagaggaga

SEQ ID NO: 2929880 - RNA, 17 nt, Human
ugaagcagaguggcagu

SEQ ID NO: 2929881 - RNA, 21 nt, Human
ugaagauucuauguuaauauu

SEQ ID NO: 2929882 - RNA, 18 nt, Human
ugaagauguagaggagaa

SEQ ID NO: 2929883 - RNA, 12 nt, Human
ugaccugaggcc

SEQ ID NO: 2929884 - RNA, 14 nt, Human
ugaccucugccuga

SEQ ID NO: 2929885 - RNA, 13 nt, Human
ugaccucugccug

SEQ ID NO: 2929886 - RNA, 16 nt, Human
agaugcuucucacugc

SEQ ID NO: 2929887 - RNA, 18 nt, Human
agaugcuucucacugcca

SEQ ID NO: 2929888 - RNA, 23 nt, Human
agaugcuagaacucccuuucaac

SEQ ID NO: 2929889 - RNA, 22 nt, Human
agaugcuagaacucccuuucaa

SEQ ID NO: 2929890 - RNA, 14 nt, Human
ugacauugcaccug

SEQ ID NO: 2929891 - RNA, 17 nt, Human
ugacauugcaccuggau

SEQ ID NO: 2929892 - RNA, 13 nt, Human
ugacauugaaauc

SEQ ID NO: 2929893 - RNA, 20 nt, Human
ugacauugaaaucuaggaaa

SEQ ID NO: 2929894 - RNA, 21 nt, Human
ugacauugaaaucuaggaaaa

SEQ ID NO: 2929895 - RNA, 14 nt, Human
ugacauugacuauu

SEQ ID NO: 2929896 - RNA, 16 nt, Human
ugacauugacuauuuu

SEQ ID NO: 2929897 - RNA, 14 nt, Human
agauccuggaaauc

SEQ ID NO: 2929898 - RNA, 19 nt, Human
agaugaugaugaucuuuaa

SEQ ID NO: 2929899 - RNA, 14 nt, Human
agauuucacucucc

SEQ ID NO: 2929900 - RNA, 13 nt, Human
agauuucacucuc

SEQ ID NO: 2929901 - RNA, 16 nt, Human
agauuuaccacuugug

SEQ ID NO: 2929902 - RNA, 16 nt, Human
agauugugccccugca

SEQ ID NO: 2929903 - RNA, 15 nt, Human
agcaacacaaagcuu

SEQ ID NO: 2929904 - RNA, 21 nt, Human
agcaacacaaagcuuuugcau

SEQ ID NO: 2929905 - RNA, 16 nt, Human
agcaacacaaagcuuu

SEQ ID NO: 2929906 - RNA, 18 nt, Human
agcaacacaaagcuuuug

SEQ ID NO: 2929907 - RNA, 24 nt, Human
ugacuucuaaguaaaaccacagca

SEQ ID NO: 2929908 - RNA, 23 nt, Human
agauuauauauauuuuuuucuga

SEQ ID NO: 2929909 - RNA, 22 nt, Human
agauucaaugccccugaauuua

SEQ ID NO: 2929910 - RNA, 21 nt, Human
agauucaaugccccugaauuu

SEQ ID NO: 2929911 - RNA, 17 nt, Human
ugaccugaggcccuucu

SEQ ID NO: 2929912 - RNA, 15 nt, Human
ugaccugaggcccuu

SEQ ID NO: 2929913 - RNA, 14 nt, Human
ugaccugaggcccu

SEQ ID NO: 2929914 - RNA, 19 nt, Human
ugacuccagaauuucccaa

SEQ ID NO: 2929915 - RNA, 17 nt, Human
ugacuccagaauuuccc

SEQ ID NO: 2929916 - RNA, 23 nt, Human
ugacuccagaauuucccaaagca

SEQ ID NO: 2929917 - RNA, 20 nt, Human
ugacuccagaauuucccaaa

SEQ ID NO: 2929918 - RNA, 15 nt, Human
ugacuguuuccauca

SEQ ID NO: 2929919 - RNA, 17 nt, Human
ucucuccuguaccucuu

SEQ ID NO: 2929920 - RNA, 15 nt, Human
ucucuccagccccug

SEQ ID NO: 2929921 - RNA, 20 nt, Human
ucucuccuguaccucuugag

SEQ ID NO: 2929922 - RNA, 22 nt, Human
ucucuccuguaccucuugagcc

SEQ ID NO: 2929923 - RNA, 18 nt, Human
ucuccuucaccuuugucc

SEQ ID NO: 2929924 - RNA, 20 nt, Human
ucuccuucaccuuugucccc

SEQ ID NO: 2929925 - RNA, 14 nt, Human
ucucuccagccccu

SEQ ID NO: 2929926 - RNA, 13 nt, Human
ucucuccagcccc

SEQ ID NO: 2929927 - RNA, 12 nt, Human
ucucuucuuuaa

SEQ ID NO: 2929928 - RNA, 13 nt, Human
ucucuucuuuaaa

SEQ ID NO: 2929929 - RNA, 14 nt, Human
ucucuugagagggu

SEQ ID NO: 2929930 - RNA, 13 nt, Human
ucucuggccuucg

SEQ ID NO: 2929931 - RNA, 16 nt, Human
ucucuggccuucggcc

SEQ ID NO: 2929932 - RNA, 17 nt, Human
ucucuggccuucggccu

SEQ ID NO: 2929933 - RNA, 15 nt, Human
ucucuugagccuggg

SEQ ID NO: 2929934 - RNA, 14 nt, Human
ucucuugagccugg

SEQ ID NO: 2929935 - RNA, 13 nt, Human
ucucuugagccug

SEQ ID NO: 2929936 - RNA, 22 nt, Human
ucucuuuaaugucacaggcagg

SEQ ID NO: 2929937 - RNA, 18 nt, Human
agaaaaaggaugcacaga

SEQ ID NO: 2929938 - RNA, 17 nt, Human
agaaaaaugagccuggc

SEQ ID NO: 2929939 - RNA, 16 nt, Human
agaaaacaaggaugaa

SEQ ID NO: 2929940 - RNA, 19 nt, Human
agaaaacaaggaugaauua

SEQ ID NO: 2929941 - RNA, 15 nt, Human
agaaacauuugguaa

SEQ ID NO: 2929942 - RNA, 14 nt, Human
agaaagaaaaucag

SEQ ID NO: 2929943 - RNA, 13 nt, Human
agaaacuggaacu

SEQ ID NO: 2929944 - RNA, 22 nt, Human
acuuuuuauggcacuaguauuu

SEQ ID NO: 2929945 - RNA, 14 nt, Human
acuuuuggaaggua

SEQ ID NO: 2929946 - RNA, 23 nt, Human
acuuugaccucugcagcaauaaa

SEQ ID NO: 2929947 - RNA, 19 nt, Human
acuuugaccucugcagcaa

SEQ ID NO: 2929948 - RNA, 19 nt, Human
acuuuaccuuuuuuauaca

SEQ ID NO: 2929949 - RNA, 22 nt, Human
acuuuaccuuuuuuauacauaa

SEQ ID NO: 2929950 - RNA, 18 nt, Human
acuuuaccuuuuuuauac

SEQ ID NO: 2929951 - RNA, 12 nt, Human
acuuuggaaaga

SEQ ID NO: 2929952 - RNA, 14 nt, Human
acuuuggaaagacu

SEQ ID NO: 2929953 - RNA, 13 nt, Human
acuuuggaaagac

SEQ ID NO: 2929954 - RNA, 17 nt, Human
acuuuggaaagacuuuu

SEQ ID NO: 2929955 - RNA, 15 nt, Human
ucucccagucauuua

SEQ ID NO: 2929956 - RNA, 18 nt, Human
ucucccuuggauuguccc

SEQ ID NO: 2929957 - RNA, 11 nt, Human
ucucccuugga

SEQ ID NO: 2929958 - RNA, 20 nt, Human
acuuguugaggguauguuuu

SEQ ID NO: 2929959 - RNA, 14 nt, Human
ucuccucugcugcu

SEQ ID NO: 2929960 - RNA, 13 nt, Human
ucuccucugcugc

SEQ ID NO: 2929961 - RNA, 15 nt, Human
ucuccucucucugua

SEQ ID NO: 2929962 - RNA, 12 nt, Human
ucuccucugcug

SEQ ID NO: 2929963 - RNA, 19 nt, Human
ucucccuuggauugucccc

SEQ ID NO: 2929964 - RNA, 20 nt, Human
agaacaaaggggcuuaauua

SEQ ID NO: 2929965 - RNA, 11 nt, Human
agaaauguguu

SEQ ID NO: 2929966 - RNA, 17 nt, Human
agaaauguacagcaagg

SEQ ID NO: 2929967 - RNA, 16 nt, Human
agaaauguacagcaag

SEQ ID NO: 2929968 - RNA, 17 nt, Human
agaacuaaaauguucua

SEQ ID NO: 2929969 - RNA, 19 nt, Human
agaagaaaauagaauugac

SEQ ID NO: 2929970 - RNA, 14 nt, Human
agaacucccuuuca

SEQ ID NO: 2929971 - RNA, 19 nt, Human
ucugacccugcuucaaaua

SEQ ID NO: 2929972 - RNA, 23 nt, Human
agaaagacuauucaaacagucuc

SEQ ID NO: 2929973 - RNA, 20 nt, Human
agaaagacuauucaaacagu

SEQ ID NO: 2929974 - RNA, 18 nt, Human
agaaagacuauucaaaca

SEQ ID NO: 2929975 - RNA, 19 nt, Human
agaaagacuauucaaacag

SEQ ID NO: 2929976 - RNA, 21 nt, Human
ucugacuguuuccaucaaggg

SEQ ID NO: 2929977 - RNA, 20 nt, Human
ucugagaaagacuauucaaa

SEQ ID NO: 2929978 - RNA, 19 nt, Human
ucugagaaagacuauucaa

SEQ ID NO: 2929979 - RNA, 15 nt, Human
ucugagaaagacuau

SEQ ID NO: 2929980 - RNA, 14 nt, Human
ucugagaaagacua

SEQ ID NO: 2929981 - RNA, 18 nt, Human
ucugauucccaagcucug

SEQ ID NO: 2929982 - RNA, 16 nt, Human
ucugauacagaaaagu

SEQ ID NO: 2929983 - RNA, 17 nt, Human
ucugauacagaaaaguu

SEQ ID NO: 2929984 - RNA, 19 nt, Human
ucugauucccaagcucugc

SEQ ID NO: 2929985 - RNA, 20 nt, Human
ucugauucccaagcucugcu

SEQ ID NO: 2929986 - RNA, 21 nt, Human
ucugauucccaagcucugcuc

SEQ ID NO: 2929987 - RNA, 22 nt, Human
ucugcacuccccugcugggugu

SEQ ID NO: 2929988 - RNA, 23 nt, Human
ucugagaaagacuauucaaacag

SEQ ID NO: 2929989 - RNA, 22 nt, Human
ucugagaaagacuauucaaaca

SEQ ID NO: 2929990 - RNA, 21 nt, Human
ucugagaaagacuauucaaac

SEQ ID NO: 2929991 - RNA, 23 nt, Human
ucugccgcagcccugcagagggc

SEQ ID NO: 2929992 - RNA, 14 nt, Human
ucugcccuccaaga

SEQ ID NO: 2929993 - RNA, 21 nt, Human
agaagaacugaaaucauacuu

SEQ ID NO: 2929994 - RNA, 16 nt, Human
ucugcucacauaucug

SEQ ID NO: 2929995 - RNA, 12 nt, Human
ucugcuuagaaa

SEQ ID NO: 2929996 - RNA, 14 nt, Human
ucugcuuagaaaua

SEQ ID NO: 2929997 - RNA, 16 nt, Human
ucugcuuagaaauaac

SEQ ID NO: 2929998 - RNA, 17 nt, Human
ucugcuuagaaauaaca

SEQ ID NO: 2929999 - RNA, 22 nt, Human
ucugcuuagaaauaacagaaga

SEQ ID NO: 2930000 - RNA, 11 nt, Human
ucugcuugcca

SEQ ID NO: 2930001 - RNA, 16 nt, Human
agaagcggcuggcagc

SEQ ID NO: 2930002 - RNA, 15 nt, Human
agaagcggcuggcag

SEQ ID NO: 2930003 - RNA, 15 nt, Human
ucuggcagcucagag

SEQ ID NO: 2930004 - RNA, 14 nt, Human
ucuggcagcucaga

SEQ ID NO: 2930005 - RNA, 15 nt, Human
ucuggauucauauuu

SEQ ID NO: 2930006 - RNA, 18 nt, Human
ucuggagguacgaaaaga

SEQ ID NO: 2930007 - RNA, 23 nt, Human
ucugcuuuuuaaagaaugcucuu

SEQ ID NO: 2930008 - RNA, 12 nt, Human
ucugcuugccau

SEQ ID NO: 2930009 - RNA, 19 nt, Human
agacccucaugcugccaau

SEQ ID NO: 2930010 - RNA, 18 nt, Human
agacccucaugcugccaa

SEQ ID NO: 2930011 - RNA, 21 nt, Human
agacccucaugcugccaauau

SEQ ID NO: 2930012 - RNA, 20 nt, Human
agacccucaugcugccaaua

SEQ ID NO: 2930013 - RNA, 24 nt, Human
agacccucaugcugccaauauccu

SEQ ID NO: 2930014 - RNA, 16 nt, Human
agacccucucaaacua

SEQ ID NO: 2930015 - RNA, 12 nt, Human
agacccugcccu

SEQ ID NO: 2930016 - RNA, 14 nt, Human
agacccugcccugu

SEQ ID NO: 2930017 - RNA, 13 nt, Human
agacccugcccug

SEQ ID NO: 2930018 - RNA, 15 nt, Human
agacccuuguggucc

SEQ ID NO: 2930019 - RNA, 13 nt, Human
agacccuuguggu

SEQ ID NO: 2930020 - RNA, 23 nt, Human
agacccugcccugugggccccca

SEQ ID NO: 2930021 - RNA, 21 nt, Human
agacccugcccugugggcccc

SEQ ID NO: 2930022 - RNA, 19 nt, Human
agacccugcccugugggcc

SEQ ID NO: 2930023 - RNA, 16 nt, Human
agacccugcccugugg

SEQ ID NO: 2930024 - RNA, 23 nt, Human
agacccuuguggucccaccccac

SEQ ID NO: 2930025 - RNA, 22 nt, Human
agacccuuguggucccacccca

SEQ ID NO: 2930026 - RNA, 20 nt, Human
agacccuuguggucccaccc

SEQ ID NO: 2930027 - RNA, 19 nt, Human
agacccuuguggucccacc

SEQ ID NO: 2930028 - RNA, 17 nt, Human
ucuugcaauggcagccu

SEQ ID NO: 2930029 - RNA, 13 nt, Human
ucuugcaauggca

SEQ ID NO: 2930030 - RNA, 16 nt, Human
ucuugcaauggcagcc

SEQ ID NO: 2930031 - RNA, 19 nt, Human
agacuccaaagaaauguaa

SEQ ID NO: 2930032 - RNA, 16 nt, Human
agacuccaaagaaaug

SEQ ID NO: 2930033 - RNA, 15 nt, Human
agacuaucuaaaugu

SEQ ID NO: 2930034 - RNA, 16 nt, Human
agacuauucaaacagu

SEQ ID NO: 2930035 - RNA, 19 nt, Human
agacuaucuaaauguugaa

SEQ ID NO: 2930036 - RNA, 17 nt, Human
agacuaucuaaauguug

SEQ ID NO: 2930037 - RNA, 18 nt, Human
agacuaucuaaauguuga

SEQ ID NO: 2930038 - RNA, 18 nt, Human
agacucauucuucuguac

SEQ ID NO: 2930039 - RNA, 12 nt, Human
agacuccaaaga

SEQ ID NO: 2930040 - RNA, 14 nt, Human
agacuccaaagaaa

SEQ ID NO: 2930041 - RNA, 13 nt, Human
agacuccaaagaa

SEQ ID NO: 2930042 - RNA, 17 nt, Human
agacucauucuucugua

SEQ ID NO: 2930043 - RNA, 21 nt, Human
agacuauucaaacagucucag

SEQ ID NO: 2930044 - RNA, 20 nt, Human
agacuauucaaacagucuca

SEQ ID NO: 2930045 - RNA, 18 nt, Human
agacuauucaaacagucu

SEQ ID NO: 2930046 - RNA, 17 nt, Human
agacuucaucccucugg

SEQ ID NO: 2930047 - RNA, 14 nt, Human
agacuucaucccuc

SEQ ID NO: 2930048 - RNA, 21 nt, Human
agacuggauaguccgucucug

SEQ ID NO: 2930049 - RNA, 15 nt, Human
agacuggcacaguuu

SEQ ID NO: 2930050 - RNA, 14 nt, Human
agacuggcacaguu

SEQ ID NO: 2930051 - RNA, 18 nt, Human
agagaaugaaagggccca

SEQ ID NO: 2930052 - RNA, 14 nt, Human
agacuuuggaaaga

SEQ ID NO: 2930053 - RNA, 12 nt, Human
agacuuuggaaa

SEQ ID NO: 2930054 - RNA, 17 nt, Human
agagacacacugaagaa

SEQ ID NO: 2930055 - RNA, 15 nt, Human
agagaaugagagaca

SEQ ID NO: 2930056 - RNA, 15 nt, Human
agagaccaucccuga

SEQ ID NO: 2930057 - RNA, 18 nt, Human
agagacacacugaagaag

SEQ ID NO: 2930058 - RNA, 20 nt, Human
agagacacacugaagaagca

SEQ ID NO: 2930059 - RNA, 14 nt, Human
agagaccaucccug

SEQ ID NO: 2930060 - RNA, 13 nt, Human
agagaccaucccu

SEQ ID NO: 2930061 - RNA, 19 nt, Human
agacucuacagaggccaug

SEQ ID NO: 2930062 - RNA, 20 nt, Human
agacuggauaguccgucucu

SEQ ID NO: 2930063 - RNA, 17 nt, Human
agacucuacagaggcca

SEQ ID NO: 2930064 - RNA, 21 nt, Human
agacucgcgacaaugcaaacc

SEQ ID NO: 2930065 - RNA, 23 nt, Human
agacuccugcaggcagccaggcc

SEQ ID NO: 2930066 - RNA, 20 nt, Human
agacuccugcaggcagccag

SEQ ID NO: 2930067 - RNA, 19 nt, Human
agacuccugcaggcagcca

SEQ ID NO: 2930068 - RNA, 18 nt, Human
agacuccugcaggcagcc

SEQ ID NO: 2930069 - RNA, 17 nt, Human
agacuccugcaggcagc

SEQ ID NO: 2930070 - RNA, 16 nt, Human
agacuccugcaggcag

SEQ ID NO: 2930071 - RNA, 15 nt, Human
agacuccugcaggca

SEQ ID NO: 2930072 - RNA, 14 nt, Human
agacuccugcaggc

SEQ ID NO: 2930073 - RNA, 15 nt, Human
ucuuuccugaggcug

SEQ ID NO: 2930074 - RNA, 14 nt, Human
ucuuuccugaggcu

SEQ ID NO: 2930075 - RNA, 13 nt, Human
ucuuuccugaggc

SEQ ID NO: 2930076 - RNA, 15 nt, Human
ucuuuacuucaugga

SEQ ID NO: 2930077 - RNA, 17 nt, Human
ucuuuaaaauacacacu

SEQ ID NO: 2930078 - RNA, 21 nt, Human
ucuuuaaagggauggcaagau

SEQ ID NO: 2930079 - RNA, 16 nt, Human
ucuucccucaaaugug

SEQ ID NO: 2930080 - RNA, 22 nt, Human
ucuuccaggcugggagagccuu

SEQ ID NO: 2930081 - RNA, 14 nt, Human
ucuuauugcccacg

SEQ ID NO: 2930082 - RNA, 18 nt, Human
ucuuauugcccacgcugg

SEQ ID NO: 2930083 - RNA, 22 nt, Human
ucuuauugcccacgcuggagug

SEQ ID NO: 2930084 - RNA, 14 nt, Human
ucuuaugggcuggg

SEQ ID NO: 2930085 - RNA, 16 nt, Human
ucuuaugggcuggguu

SEQ ID NO: 2930086 - RNA, 15 nt, Human
ucuuaugggcugggu

SEQ ID NO: 2930087 - RNA, 14 nt, Human
ucuuaauuaaaaga

SEQ ID NO: 2930088 - RNA, 21 nt, Human
ucuuaauuaaaagaauauuuu

SEQ ID NO: 2930089 - RNA, 18 nt, Human
ucuuaauuaaaagaauau

SEQ ID NO: 2930090 - RNA, 14 nt, Human
agacagucccugcc

SEQ ID NO: 2930091 - RNA, 15 nt, Human
agacagucccugcca

SEQ ID NO: 2930092 - RNA, 17 nt, Human
agacagucccugccaau

SEQ ID NO: 2930093 - RNA, 16 nt, Human
agacagucccugccaa

SEQ ID NO: 2930094 - RNA, 23 nt, Human
agacaggcaagcaccuccugccu

SEQ ID NO: 2930095 - RNA, 22 nt, Human
agacaggcaagcaccuccugcc

SEQ ID NO: 2930096 - RNA, 15 nt, Human
agacaggaccaggga

SEQ ID NO: 2930097 - RNA, 21 nt, Human
agacaggguuuugccauguug

SEQ ID NO: 2930098 - RNA, 20 nt, Human
agaauuugauaugugaacag

SEQ ID NO: 2930099 - RNA, 18 nt, Human
agaauuugauaugugaac

SEQ ID NO: 2930100 - RNA, 19 nt, Human
agaauuugauaugugaaca

SEQ ID NO: 2930101 - RNA, 17 nt, Human
agaauuugauaugugaa

SEQ ID NO: 2930102 - RNA, 18 nt, Human
ucuguuggccagugugac

SEQ ID NO: 2930103 - RNA, 19 nt, Human
ucuguuggccagugugaca

SEQ ID NO: 2930104 - RNA, 20 nt, Human
ucuguuggccagugugacaa

SEQ ID NO: 2930105 - RNA, 18 nt, Human
ucugucuuuuaaacucug

SEQ ID NO: 2930106 - RNA, 16 nt, Human
ucugugcguagaaguu

SEQ ID NO: 2930107 - RNA, 12 nt, Human
ucugucuuuuaa

SEQ ID NO: 2930108 - RNA, 16 nt, Human
ucugucuuuuaaacuc

SEQ ID NO: 2930109 - RNA, 21 nt, Human
ucugugaaaggaaagagggag

SEQ ID NO: 2930110 - RNA, 15 nt, Human
ucugugaaaggaaag

SEQ ID NO: 2930111 - RNA, 18 nt, Human
agaauuucccaaagcagu

SEQ ID NO: 2930112 - RNA, 17 nt, Human
agaauuucccaaagcag

SEQ ID NO: 2930113 - RNA, 13 nt, Human
agaauuucuagga

SEQ ID NO: 2930114 - RNA, 21 nt, Human
agaauuucuaggacugaauua

SEQ ID NO: 2930115 - RNA, 23 nt, Human
agaauuucccaaagcagugcaug

SEQ ID NO: 2930116 - RNA, 18 nt, Human
ucuguuuuauaauuuugu

SEQ ID NO: 2930117 - RNA, 11 nt, Human
ucuggggcugu

SEQ ID NO: 2930118 - RNA, 14 nt, Human
ucuggguucacugc

SEQ ID NO: 2930119 - RNA, 16 nt, Human
ucuggguucacugcaa

SEQ ID NO: 2930120 - RNA, 18 nt, Human
ucugguccauagagagca

SEQ ID NO: 2930121 - RNA, 20 nt, Human
ucugucauuugagcagggcu

SEQ ID NO: 2930122 - RNA, 23 nt, Human
ucugucauuugagcagggcucag

SEQ ID NO: 2930123 - RNA, 15 nt, Human
ucugucauuugagca

SEQ ID NO: 2930124 - RNA, 14 nt, Human
ugcagugagccgag

SEQ ID NO: 2930125 - RNA, 18 nt, Human
ugcagccucaaccuccug

SEQ ID NO: 2930126 - RNA, 19 nt, Human
ugcagccucaaccuccugg

SEQ ID NO: 2930127 - RNA, 17 nt, Human
agccucaaccuccuggg

SEQ ID NO: 2930128 - RNA, 18 nt, Human
agccucaaccuccugggc

SEQ ID NO: 2930129 - RNA, 13 nt, Human
agccucagcaucc

SEQ ID NO: 2930130 - RNA, 14 nt, Human
agccucagcauccu

SEQ ID NO: 2930131 - RNA, 15 nt, Human
agccucagcauccug

SEQ ID NO: 2930132 - RNA, 18 nt, Human
agccugagcgacagugag

SEQ ID NO: 2930133 - RNA, 17 nt, Human
ugcauacuauuaaacau

SEQ ID NO: 2930134 - RNA, 18 nt, Human
ugcauacuauuaaacaug

SEQ ID NO: 2930135 - RNA, 20 nt, Human
ugcauacuauuaaacaugcu

SEQ ID NO: 2930136 - RNA, 22 nt, Human
ugcauaccacuuuuguucuugg

SEQ ID NO: 2930137 - RNA, 12 nt, Human
ugcauacuauua

SEQ ID NO: 2930138 - RNA, 15 nt, Human
ugcauacuauuaaac

SEQ ID NO: 2930139 - RNA, 16 nt, Human
ugcauacuauuaaaca

SEQ ID NO: 2930140 - RNA, 21 nt, Human
ugcauaccacuuuuguucuug

SEQ ID NO: 2930141 - RNA, 13 nt, Human
ugcaugcuguccc

SEQ ID NO: 2930142 - RNA, 15 nt, Human
ugcaugcugucccuu

SEQ ID NO: 2930143 - RNA, 14 nt, Human
ugcaugcugucccu

SEQ ID NO: 2930144 - RNA, 21 nt, Human
ugcaugaggcuaguguggugu

SEQ ID NO: 2930145 - RNA, 22 nt, Human
ugcaugaaguaauaugcacaca

SEQ ID NO: 2930146 - RNA, 20 nt, Human
ugcaugaaguaauaugcaca

SEQ ID NO: 2930147 - RNA, 23 nt, Human
agccugcaguuauuaacacuaac

SEQ ID NO: 2930148 - RNA, 19 nt, Human
agccugccucuucucuacu

SEQ ID NO: 2930149 - RNA, 16 nt, Human
agccugccucuucucu

SEQ ID NO: 2930150 - RNA, 16 nt, Human
ugcaugcugucccuua

SEQ ID NO: 2930151 - RNA, 15 nt, Human
ugcacacacauauau

SEQ ID NO: 2930152 - RNA, 18 nt, Human
ugcacacacauauauuau

SEQ ID NO: 2930153 - RNA, 13 nt, Human
ugcacacacauau

SEQ ID NO: 2930154 - RNA, 17 nt, Human
ugcacaucuguuuugua

SEQ ID NO: 2930155 - RNA, 15 nt, Human
ugcacacaccagagc

SEQ ID NO: 2930156 - RNA, 16 nt, Human
ugcacaagcuccaagc

SEQ ID NO: 2930157 - RNA, 15 nt, Human
ugcacaagcuccaag

SEQ ID NO: 2930158 - RNA, 23 nt, Human
ugcacaagcuccaagcucccagg

SEQ ID NO: 2930159 - RNA, 22 nt, Human
ugcacaagcuccaagcucccag

SEQ ID NO: 2930160 - RNA, 20 nt, Human
ugcacaagcuccaagcuccc

SEQ ID NO: 2930161 - RNA, 18 nt, Human
ugcacaagcuccaagcuc

SEQ ID NO: 2930162 - RNA, 14 nt, Human
ugcaccacugcacu

SEQ ID NO: 2930163 - RNA, 19 nt, Human
ugcacguacacacacauac

SEQ ID NO: 2930164 - RNA, 13 nt, Human
ugcacuccccugc

SEQ ID NO: 2930165 - RNA, 12 nt, Human
ugcacuccccug

SEQ ID NO: 2930166 - RNA, 19 nt, Human
ugcagacucuacagaggcc

SEQ ID NO: 2930167 - RNA, 20 nt, Human
ugcagacucuacagaggcca

SEQ ID NO: 2930168 - RNA, 18 nt, Human
ugcagacucuacagaggc

SEQ ID NO: 2930169 - RNA, 15 nt, Human
ugcacuccccugcug

SEQ ID NO: 2930170 - RNA, 22 nt, Human
ugcagacucuacagaggccaug

SEQ ID NO: 2930171 - RNA, 17 nt, Human
agcccuucuuuccacag

SEQ ID NO: 2930172 - RNA, 15 nt, Human
agccucaaccuccug

SEQ ID NO: 2930173 - RNA, 15 nt, Human
agccuaggugacaga

SEQ ID NO: 2930174 - RNA, 17 nt, Human
agccuaggugacagagu

SEQ ID NO: 2930175 - RNA, 18 nt, Human
agcccuucuuuccacaga

SEQ ID NO: 2930176 - RNA, 19 nt, Human
agcccuucuuuccacagaa

SEQ ID NO: 2930177 - RNA, 12 nt, Human
agcuacugccau

SEQ ID NO: 2930178 - RNA, 13 nt, Human
agcuacugccauc

SEQ ID NO: 2930179 - RNA, 14 nt, Human
agcuacugccaucc

SEQ ID NO: 2930180 - RNA, 16 nt, Human
agcuacugccauccug

SEQ ID NO: 2930181 - RNA, 18 nt, Human
agcuacugccauccuggc

SEQ ID NO: 2930182 - RNA, 19 nt, Human
agcuacucgggaggcugag

SEQ ID NO: 2930183 - RNA, 15 nt, Human
agcuacucgggaggc

SEQ ID NO: 2930184 - RNA, 22 nt, Human
agcuacugccauccuggcccag

SEQ ID NO: 2930185 - RNA, 21 nt, Human
ugccauguuggccaggcuggu

SEQ ID NO: 2930186 - RNA, 20 nt, Human
ugccauguuggccaggcugg

SEQ ID NO: 2930187 - RNA, 17 nt, Human
ugccauguuggccaggc

SEQ ID NO: 2930188 - RNA, 17 nt, Human
agcucagggccuggcuc

SEQ ID NO: 2930189 - RNA, 18 nt, Human
ugccauguuggccaggcu

SEQ ID NO: 2930190 - RNA, 19 nt, Human
ugccauguuggccaggcug

SEQ ID NO: 2930191 - RNA, 16 nt, Human
agcucagggccuggcu

SEQ ID NO: 2930192 - RNA, 15 nt, Human
agcucagggccuggc

SEQ ID NO: 2930193 - RNA, 14 nt, Human
agcucagggccugg

SEQ ID NO: 2930194 - RNA, 12 nt, Human
ugcccaggcccc

SEQ ID NO: 2930195 - RNA, 20 nt, Human
ugcccaggccccugccaccc

SEQ ID NO: 2930196 - RNA, 22 nt, Human
ugcccaggccccugccacccug

SEQ ID NO: 2930197 - RNA, 14 nt, Human
ugcccacaggauca

SEQ ID NO: 2930198 - RNA, 15 nt, Human
ugcccaggcaggucu

SEQ ID NO: 2930199 - RNA, 16 nt, Human
ugcccaggcaggucuu

SEQ ID NO: 2930200 - RNA, 17 nt, Human
ugcccaggcaggucuug

SEQ ID NO: 2930201 - RNA, 20 nt, Human
ugcccaggcaggucuugaac

SEQ ID NO: 2930202 - RNA, 11 nt, Human
ugcccaggccc

SEQ ID NO: 2930203 - RNA, 13 nt, Human
ugcccccugugga

SEQ ID NO: 2930204 - RNA, 19 nt, Human
ugcccccuguggaugcugc

SEQ ID NO: 2930205 - RNA, 21 nt, Human
ugcccccuguggaugcugcug

SEQ ID NO: 2930206 - RNA, 19 nt, Human
ugcccucaagagcaaagua

SEQ ID NO: 2930207 - RNA, 14 nt, Human
agcgcccaguuggg

SEQ ID NO: 2930208 - RNA, 22 nt, Human
agcgcccaguuggguggaugcc

SEQ ID NO: 2930209 - RNA, 19 nt, Human
ugcauuugaaaauuuugau

SEQ ID NO: 2930210 - RNA, 23 nt, Human
ugcauuugaaaauuuugauguuu

SEQ ID NO: 2930211 - RNA, 23 nt, Human
ugccaauauccuaauaaaaaggu

SEQ ID NO: 2930212 - RNA, 21 nt, Human
ugccaauauccuaauaaaaag

SEQ ID NO: 2930213 - RNA, 19 nt, Human
ugccaauauccuaauaaaa

SEQ ID NO: 2930214 - RNA, 18 nt, Human
ugccaauauccuaauaaa

SEQ ID NO: 2930215 - RNA, 17 nt, Human
ugccaauauccuaauaa

SEQ ID NO: 2930216 - RNA, 16 nt, Human
ugccaauauccuaaua

SEQ ID NO: 2930217 - RNA, 15 nt, Human
ugccaauauccuaau

SEQ ID NO: 2930218 - RNA, 23 nt, Human
ugccagucaccccggccaccugc

SEQ ID NO: 2930219 - RNA, 22 nt, Human
ugccagucaccccggccaccug

SEQ ID NO: 2930220 - RNA, 16 nt, Human
ugccauauucuguugg

SEQ ID NO: 2930221 - RNA, 17 nt, Human
ugccauauucuguuggc

SEQ ID NO: 2930222 - RNA, 15 nt, Human
ugccauauucuguug

SEQ ID NO: 2930223 - RNA, 20 nt, Human
ugccagucaccccggccacc

SEQ ID NO: 2930224 - RNA, 18 nt, Human
ugccagucaccccggcca

SEQ ID NO: 2930225 - RNA, 16 nt, Human
ugccagucaccccggc

SEQ ID NO: 2930226 - RNA, 15 nt, Human
ugccagucaccccgg

SEQ ID NO: 2930227 - RNA, 13 nt, Human
agcgugagccacu

SEQ ID NO: 2930228 - RNA, 15 nt, Human
agcgugagccacugc

SEQ ID NO: 2930229 - RNA, 16 nt, Human
agcggggacagcuccu

SEQ ID NO: 2930230 - RNA, 17 nt, Human
agcggggacagcuccuu

SEQ ID NO: 2930231 - RNA, 15 nt, Human
agcggggacagcucc

SEQ ID NO: 2930232 - RNA, 20 nt, Human
ugccauauucuguuggccag

SEQ ID NO: 2930233 - RNA, 21 nt, Human
ugccauauucuguuggccagu

SEQ ID NO: 2930234 - RNA, 16 nt, Human
agcgugagccacugca

SEQ ID NO: 2930235 - RNA, 17 nt, Human
agcgugagccacugcac

SEQ ID NO: 2930236 - RNA, 20 nt, Human
agcgugguggacaugcacag

SEQ ID NO: 2930237 - RNA, 23 nt, Human
agcgugguggacaugcacagcua

SEQ ID NO: 2930238 - RNA, 19 nt, Human
agcuacuaauuuuaaaaug

SEQ ID NO: 2930239 - RNA, 19 nt, Human
ugcgaaaggaugaaaguga

SEQ ID NO: 2930240 - RNA, 18 nt, Human
ugcggacagccacggcca

SEQ ID NO: 2930241 - RNA, 17 nt, Human
ugcggacagccacggcc

SEQ ID NO: 2930242 - RNA, 13 nt, Human
ugcgaaaggauga

SEQ ID NO: 2930243 - RNA, 15 nt, Human
ugccuguucagcucc

SEQ ID NO: 2930244 - RNA, 16 nt, Human
ugccuguucagcucca

SEQ ID NO: 2930245 - RNA, 23 nt, Human
agcugggaugauuggagggggga

SEQ ID NO: 2930246 - RNA, 17 nt, Human
agcugggacuacaggug

SEQ ID NO: 2930247 - RNA, 19 nt, Human
agcugggacuacaggugug

SEQ ID NO: 2930248 - RNA, 14 nt, Human
agcugggcagguug

SEQ ID NO: 2930249 - RNA, 22 nt, Human
ugccucugacacacagcucugu

SEQ ID NO: 2930250 - RNA, 17 nt, Human
agcugccuccccuccuc

SEQ ID NO: 2930251 - RNA, 18 nt, Human
agcugccuccccuccucu

SEQ ID NO: 2930252 - RNA, 19 nt, Human
agcugccuccccuccucug

SEQ ID NO: 2930253 - RNA, 20 nt, Human
agcugccuccccuccucugc

SEQ ID NO: 2930254 - RNA, 21 nt, Human
agcugccuccccuccucugcu

SEQ ID NO: 2930255 - RNA, 22 nt, Human
agcugccuccccuccucugcuu

SEQ ID NO: 2930256 - RNA, 23 nt, Human
agcugccuccccuccucugcuug

SEQ ID NO: 2930257 - RNA, 13 nt, Human
agcuggaaaagua

SEQ ID NO: 2930258 - RNA, 19 nt, Human
agcugccugggaucccuca

SEQ ID NO: 2930259 - RNA, 13 nt, Human
agcugccugggau

SEQ ID NO: 2930260 - RNA, 21 nt, Human
agcugccugggaucccucauc

SEQ ID NO: 2930261 - RNA, 20 nt, Human
ugccucugacacacagcucu

SEQ ID NO: 2930262 - RNA, 21 nt, Human
ugccucugacacacagcucug

SEQ ID NO: 2930263 - RNA, 15 nt, Human
ugccucucucaggcc

SEQ ID NO: 2930264 - RNA, 14 nt, Human
ugccucucucaggc

SEQ ID NO: 2930265 - RNA, 13 nt, Human
ugccucucucagg

SEQ ID NO: 2930266 - RNA, 19 nt, Human
ugccucccaucacccgcua

SEQ ID NO: 2930267 - RNA, 14 nt, Human
ugccucccaucacc

SEQ ID NO: 2930268 - RNA, 13 nt, Human
ugccucccaucac

SEQ ID NO: 2930269 - RNA, 18 nt, Human
agcugcauacaguuugca

SEQ ID NO: 2930270 - RNA, 13 nt, Human
agcugccaccugc

SEQ ID NO: 2930271 - RNA, 17 nt, Human
agcugcacccucaggca

SEQ ID NO: 2930272 - RNA, 13 nt, Human
agcugcacccuca

SEQ ID NO: 2930273 - RNA, 22 nt, Human
agcugcacccucaggcaggugg

SEQ ID NO: 2930274 - RNA, 20 nt, Human
agcugcacccucaggcaggu

SEQ ID NO: 2930275 - RNA, 19 nt, Human
agcugcacccucaggcagg

SEQ ID NO: 2930276 - RNA, 18 nt, Human
agcugcacccucaggcag

SEQ ID NO: 2930277 - RNA, 20 nt, Human
agcugaucgcuucuccccca

SEQ ID NO: 2930278 - RNA, 18 nt, Human
agcucuucuccaggcugu

SEQ ID NO: 2930279 - RNA, 17 nt, Human
agcucuucuccaggcug

SEQ ID NO: 2930280 - RNA, 12 nt, Human
agcucuguccug

SEQ ID NO: 2930281 - RNA, 12 nt, Human
agcucugcuccu

SEQ ID NO: 2930282 - RNA, 22 nt, Human
agcucugcuccucuccccagca

SEQ ID NO: 2930283 - RNA, 20 nt, Human
agcucugguccauagagagc

SEQ ID NO: 2930284 - RNA, 16 nt, Human
agcucucuccucccuu

SEQ ID NO: 2930285 - RNA, 22 nt, Human
ugcccuccaagaccuucuccuu

SEQ ID NO: 2930286 - RNA, 20 nt, Human
ugcccuccaagaccuucucc

SEQ ID NO: 2930287 - RNA, 19 nt, Human
ugcccuccaagaccuucuc

SEQ ID NO: 2930288 - RNA, 15 nt, Human
agcuuaucucagggg

SEQ ID NO: 2930289 - RNA, 14 nt, Human
agcuuaucucaggg

SEQ ID NO: 2930290 - RNA, 12 nt, Human
agcuuaucucag

SEQ ID NO: 2930291 - RNA, 20 nt, Human
ugcggacagccacggccagg

SEQ ID NO: 2930292 - RNA, 21 nt, Human
ugcggacagccacggccaggc

SEQ ID NO: 2930293 - RNA, 18 nt, Human
agcuuguaaauagcucag

SEQ ID NO: 2930294 - RNA, 19 nt, Human
agcuuguaaauagcucagg

SEQ ID NO: 2930295 - RNA, 20 nt, Human
agcuuguaaauagcucaggu

SEQ ID NO: 2930296 - RNA, 21 nt, Human
agcuuguaaauagcucaggug

SEQ ID NO: 2930297 - RNA, 21 nt, Human
agcuuauugucuagugaaacu

SEQ ID NO: 2930298 - RNA, 15 nt, Human
agcuuauuaaaacuc

SEQ ID NO: 2930299 - RNA, 20 nt, Human
agcuuauuaaaacucauuuu

SEQ ID NO: 2930300 - RNA, 21 nt, Human
aggaaacccagcucuggucca

SEQ ID NO: 2930301 - RNA, 20 nt, Human
aggaaacccagcucuggucc

SEQ ID NO: 2930302 - RNA, 18 nt, Human
aggaaacccagcucuggu

SEQ ID NO: 2930303 - RNA, 15 nt, Human
aggaaacccagcucu

SEQ ID NO: 2930304 - RNA, 17 nt, Human
aggaaacccagcucugg

SEQ ID NO: 2930305 - RNA, 16 nt, Human
aggaaacccagcucug

SEQ ID NO: 2930306 - RNA, 19 nt, Human
agcuuugaaaauucagugg

SEQ ID NO: 2930307 - RNA, 18 nt, Human
agcuuugaaaauucagug

SEQ ID NO: 2930308 - RNA, 16 nt, Human
agcuuugaaaauucag

SEQ ID NO: 2930309 - RNA, 12 nt, Human
agcuuugaaaau

SEQ ID NO: 2930310 - RNA, 13 nt, Human
aggaaagagaacu

SEQ ID NO: 2930311 - RNA, 19 nt, Human
aggaaagagaacuuccaga

SEQ ID NO: 2930312 - RNA, 13 nt, Human
aggaaagaggcuc

SEQ ID NO: 2930313 - RNA, 12 nt, Human
aggaaagaggcu

SEQ ID NO: 2930314 - RNA, 14 nt, Human
ugcuaguaauugga

SEQ ID NO: 2930315 - RNA, 17 nt, Human
aggaaagcaaaggagau

SEQ ID NO: 2930316 - RNA, 16 nt, Human
aggaaagaggcucugg

SEQ ID NO: 2930317 - RNA, 16 nt, Human
ugcuaguaauuggaaa

SEQ ID NO: 2930318 - RNA, 19 nt, Human
ugcucugaucauccacugu

SEQ ID NO: 2930319 - RNA, 22 nt, Human
ugcucugaucauccacugugcc

SEQ ID NO: 2930320 - RNA, 17 nt, Human
ugcugacuguuuucucu

SEQ ID NO: 2930321 - RNA, 17 nt, Human
ugcucuggacaggcaug

SEQ ID NO: 2930322 - RNA, 15 nt, Human
ugcucugcauguuac

SEQ ID NO: 2930323 - RNA, 18 nt, Human
ugcucugcauguuacaua

SEQ ID NO: 2930324 - RNA, 23 nt, Human
aggaaagcaaaucaguuugguug

SEQ ID NO: 2930325 - RNA, 19 nt, Human
aggaaagcaaaggagauug

SEQ ID NO: 2930326 - RNA, 16 nt, Human
ugcugacuguuuucuc

SEQ ID NO: 2930327 - RNA, 24 nt, Human
ugcugacuguuuucucuugagagg

SEQ ID NO: 2930328 - RNA, 21 nt, Human
ugcugacuguuuucucuugag

SEQ ID NO: 2930329 - RNA, 20 nt, Human
aggaaaggcuccaggagcag

SEQ ID NO: 2930330 - RNA, 18 nt, Human
aggaaaggcuccaggagc

SEQ ID NO: 2930331 - RNA, 14 nt, Human
aggaaauauuuauu

SEQ ID NO: 2930332 - RNA, 18 nt, Human
aggaaauauuuauuuuaa

SEQ ID NO: 2930333 - RNA, 13 nt, Human
aggaaauauuuau

SEQ ID NO: 2930334 - RNA, 22 nt, Human
aggaaaggcuccaggagcagcc

SEQ ID NO: 2930335 - RNA, 21 nt, Human
ugcugccauccagguucagcu

SEQ ID NO: 2930336 - RNA, 22 nt, Human
ugcugccauccagguucagcuu

SEQ ID NO: 2930337 - RNA, 12 nt, Human
ugcugccaucca

SEQ ID NO: 2930338 - RNA, 13 nt, Human
ugcugccauccag

SEQ ID NO: 2930339 - RNA, 14 nt, Human
ugcugccauccagg

SEQ ID NO: 2930340 - RNA, 15 nt, Human
ugcugccauccaggu

SEQ ID NO: 2930341 - RNA, 11 nt, Human
ugcugccaucc

SEQ ID NO: 2930342 - RNA, 23 nt, Human
ugcugccaauauccuaauaaaaa

SEQ ID NO: 2930343 - RNA, 15 nt, Human
aggaaugcaaagaug

SEQ ID NO: 2930344 - RNA, 17 nt, Human
aggaagcucagggccug

SEQ ID NO: 2930345 - RNA, 22 nt, Human
aggaagcucagggccuggcuca

SEQ ID NO: 2930346 - RNA, 18 nt, Human
aggaagcucagggccugg

SEQ ID NO: 2930347 - RNA, 14 nt, Human
aggaagagaaaaaa

SEQ ID NO: 2930348 - RNA, 15 nt, Human
aggaagacuuuggaa

SEQ ID NO: 2930349 - RNA, 23 nt, Human
aggaauccagacccggcugcgug

SEQ ID NO: 2930350 - RNA, 19 nt, Human
aggaauugacccacaagaa

SEQ ID NO: 2930351 - RNA, 21 nt, Human
uggagcucgugggacagucac

SEQ ID NO: 2930352 - RNA, 15 nt, Human
aggcaaugcuggcug

SEQ ID NO: 2930353 - RNA, 16 nt, Human
aggcaaugcuggcugu

SEQ ID NO: 2930354 - RNA, 22 nt, Human
uggacuuuguuaguuucuccaa

SEQ ID NO: 2930355 - RNA, 11 nt, Human
uggacuuuguu

SEQ ID NO: 2930356 - RNA, 16 nt, Human
uggagaagaacugaaa

SEQ ID NO: 2930357 - RNA, 14 nt, Human
uggagaagaacuga

SEQ ID NO: 2930358 - RNA, 24 nt, Human
uggacuuuguuaguuucuccaagc

SEQ ID NO: 2930359 - RNA, 22 nt, Human
aggcagccccauucugccugcc

SEQ ID NO: 2930360 - RNA, 19 nt, Human
aggcagccccauucugccu

SEQ ID NO: 2930361 - RNA, 20 nt, Human
aggcagccccauucugccug

SEQ ID NO: 2930362 - RNA, 21 nt, Human
aggcagccccauucugccugc

SEQ ID NO: 2930363 - RNA, 15 nt, Human
aggcaggagacuggc

SEQ ID NO: 2930364 - RNA, 18 nt, Human
aggcaggagacuggcgug

SEQ ID NO: 2930365 - RNA, 12 nt, Human
aggcaggauggc

SEQ ID NO: 2930366 - RNA, 21 nt, Human
aggcaggucuugaacuccugg

SEQ ID NO: 2930367 - RNA, 22 nt, Human
aggcagggucucacucugucgc

SEQ ID NO: 2930368 - RNA, 14 nt, Human
aggcagguccaggg

SEQ ID NO: 2930369 - RNA, 19 nt, Human
aggcagggucucacucugu

SEQ ID NO: 2930370 - RNA, 18 nt, Human
aggcagggucucacucug

SEQ ID NO: 2930371 - RNA, 20 nt, Human
aggcagggucucacucuguc

SEQ ID NO: 2930372 - RNA, 21 nt, Human
aggcagggucucacucugucg

SEQ ID NO: 2930373 - RNA, 18 nt, Human
uggaaguacuauaauuua

SEQ ID NO: 2930374 - RNA, 20 nt, Human
uggaaguacuauaauuuacc

SEQ ID NO: 2930375 - RNA, 13 nt, Human
uggaagcuccgcu

SEQ ID NO: 2930376 - RNA, 14 nt, Human
uggaacacucugag

SEQ ID NO: 2930377 - RNA, 12 nt, Human
uggaacacucug

SEQ ID NO: 2930378 - RNA, 19 nt, Human
uggaacacucuauaacaaa

SEQ ID NO: 2930379 - RNA, 12 nt, Human
ugcugcccugcc

SEQ ID NO: 2930380 - RNA, 22 nt, Human
ugcugccccugcacagcaggcu

SEQ ID NO: 2930381 - RNA, 10 nt, Human
ugcugcccug

SEQ ID NO: 2930382 - RNA, 21 nt, Human
ugcugccccugcacagcaggc

SEQ ID NO: 2930383 - RNA, 20 nt, Human
ugcugccccugcacagcagg

SEQ ID NO: 2930384 - RNA, 15 nt, Human
aggaggccagccuug

SEQ ID NO: 2930385 - RNA, 21 nt, Human
aggaguuugagaccaaccugg

SEQ ID NO: 2930386 - RNA, 13 nt, Human
aggaguuuggcca

SEQ ID NO: 2930387 - RNA, 12 nt, Human
aggaguuuggcc

SEQ ID NO: 2930388 - RNA, 22 nt, Human
aggauugcuacuguccuaccca

SEQ ID NO: 2930389 - RNA, 18 nt, Human
aggaugcuuguacauaau

SEQ ID NO: 2930390 - RNA, 12 nt, Human
aggaucagucug

SEQ ID NO: 2930391 - RNA, 21 nt, Human
aggauccugagccagauuuca

SEQ ID NO: 2930392 - RNA, 15 nt, Human
aggaugcuuguacau

SEQ ID NO: 2930393 - RNA, 16 nt, Human
aggaugcuuguacaua

SEQ ID NO: 2930394 - RNA, 14 nt, Human
uggacaaaauggaa

SEQ ID NO: 2930395 - RNA, 17 nt, Human
uggacaaaauggaauac

SEQ ID NO: 2930396 - RNA, 15 nt, Human
uggacaccggaaaca

SEQ ID NO: 2930397 - RNA, 14 nt, Human
aggcaagcaccucc

SEQ ID NO: 2930398 - RNA, 19 nt, Human
aggcaacugcauuggcuuu

SEQ ID NO: 2930399 - RNA, 16 nt, Human
aggcccagagggccug

SEQ ID NO: 2930400 - RNA, 15 nt, Human
aggcccagagggccu

SEQ ID NO: 2930401 - RNA, 18 nt, Human
aggccaugggccuccugu

SEQ ID NO: 2930402 - RNA, 23 nt, Human
aggccagagacacaagccuucgg

SEQ ID NO: 2930403 - RNA, 15 nt, Human
uggcagcucagagag

SEQ ID NO: 2930404 - RNA, 14 nt, Human
uggcagcucagaga

SEQ ID NO: 2930405 - RNA, 18 nt, Human
aggccagagacacaagcc

SEQ ID NO: 2930406 - RNA, 13 nt, Human
aggccagagacac

SEQ ID NO: 2930407 - RNA, 16 nt, Human
uggcagcucagagagg

SEQ ID NO: 2930408 - RNA, 17 nt, Human
uggcaccagcagccugg

SEQ ID NO: 2930409 - RNA, 16 nt, Human
uggcaccagcagccug

SEQ ID NO: 2930410 - RNA, 13 nt, Human
aggccuggccaga

SEQ ID NO: 2930411 - RNA, 12 nt, Human
aggccuggccag

SEQ ID NO: 2930412 - RNA, 14 nt, Human
aggcccggcuccag

SEQ ID NO: 2930413 - RNA, 15 nt, Human
aggcccggcuccagg

SEQ ID NO: 2930414 - RNA, 16 nt, Human
aggcccggcuccaggc

SEQ ID NO: 2930415 - RNA, 13 nt, Human
aggccccugccac

SEQ ID NO: 2930416 - RNA, 15 nt, Human
aggccccugccaccc

SEQ ID NO: 2930417 - RNA, 20 nt, Human
aggcccagagggccugcaag

SEQ ID NO: 2930418 - RNA, 19 nt, Human
aggcccagagggccugcaa

SEQ ID NO: 2930419 - RNA, 17 nt, Human
aggccccugccacccug

SEQ ID NO: 2930420 - RNA, 18 nt, Human
aggccccugccacccugg

SEQ ID NO: 2930421 - RNA, 12 nt, Human
aggccccugcca

SEQ ID NO: 2930422 - RNA, 21 nt, Human
aggccccugccacccugggga

SEQ ID NO: 2930423 - RNA, 18 nt, Human
uggccugagcugggauga

SEQ ID NO: 2930424 - RNA, 20 nt, Human
uggccucugcacuccccugc

SEQ ID NO: 2930425 - RNA, 18 nt, Human
uggccucugcacuccccu

SEQ ID NO: 2930426 - RNA, 19 nt, Human
uggccucugcacuccccug

SEQ ID NO: 2930427 - RNA, 22 nt, Human
uggcaugggaaugaaugucagu

SEQ ID NO: 2930428 - RNA, 19 nt, Human
uggcccacgcacuucggga

SEQ ID NO: 2930429 - RNA, 14 nt, Human
uggcccacugcauc

SEQ ID NO: 2930430 - RNA, 13 nt, Human
uggcccacugcau

SEQ ID NO: 2930431 - RNA, 11 nt, Human
uggcccaggag

SEQ ID NO: 2930432 - RNA, 12 nt, Human
uggcccaggagu

SEQ ID NO: 2930433 - RNA, 15 nt, Human
aggcuauuccugaga

SEQ ID NO: 2930434 - RNA, 20 nt, Human
aggcuauuccugagagcugc

SEQ ID NO: 2930435 - RNA, 22 nt, Human
aggcuauuccugagagcugcau

SEQ ID NO: 2930436 - RNA, 17 nt, Human
aggccuucucugaagga

SEQ ID NO: 2930437 - RNA, 18 nt, Human
aggccuucucugaaggac

SEQ ID NO: 2930438 - RNA, 13 nt, Human
aggcuccaggagc

SEQ ID NO: 2930439 - RNA, 16 nt, Human
aggcuccaggagcagc

SEQ ID NO: 2930440 - RNA, 14 nt, Human
aggcuccaggagca

SEQ ID NO: 2930441 - RNA, 11 nt, Human
aggcuccacuu

SEQ ID NO: 2930442 - RNA, 17 nt, Human
aggcuccacuuggucug

SEQ ID NO: 2930443 - RNA, 21 nt, Human
aggcuccacuuggucugugag

SEQ ID NO: 2930444 - RNA, 22 nt, Human
aggcuccacuuggucugugaga

SEQ ID NO: 2930445 - RNA, 12 nt, Human
agggcccagaga

SEQ ID NO: 2930446 - RNA, 13 nt, Human
agggcccagagag

SEQ ID NO: 2930447 - RNA, 23 nt, Human
agggaguccgaaagggacuugga

SEQ ID NO: 2930448 - RNA, 20 nt, Human
agggagugacagaggcagcc

SEQ ID NO: 2930449 - RNA, 20 nt, Human
agggagugaguugauagcac

SEQ ID NO: 2930450 - RNA, 20 nt, Human
agggaguccgaaagggacuu

SEQ ID NO: 2930451 - RNA, 22 nt, Human
agggagggcuccagacacaugu

SEQ ID NO: 2930452 - RNA, 17 nt, Human
agggagggagggcucca

SEQ ID NO: 2930453 - RNA, 12 nt, Human
agggagggcucc

SEQ ID NO: 2930454 - RNA, 19 nt, Human
agggagggcuccagacaca

SEQ ID NO: 2930455 - RNA, 17 nt, Human
agggagggcuccagaca

SEQ ID NO: 2930456 - RNA, 14 nt, Human
agggcccagagagg

SEQ ID NO: 2930457 - RNA, 20 nt, Human
agggcuccagacacaugucc

SEQ ID NO: 2930458 - RNA, 21 nt, Human
ugggcucccuucccaccucuc

SEQ ID NO: 2930459 - RNA, 15 nt, Human
ugggcucccuuccca

SEQ ID NO: 2930460 - RNA, 14 nt, Human
ugggcucccuuccc

SEQ ID NO: 2930461 - RNA, 22 nt, Human
agggcuguuauaaucuuucaca

SEQ ID NO: 2930462 - RNA, 18 nt, Human
agggacuuggaagcuccg

SEQ ID NO: 2930463 - RNA, 19 nt, Human
agggacuuggaagcuccgc

SEQ ID NO: 2930464 - RNA, 15 nt, Human
agggacuuggaagcu

SEQ ID NO: 2930465 - RNA, 23 nt, Human
agggacuucugucuucacaacag

SEQ ID NO: 2930466 - RNA, 20 nt, Human
agggacuuggaagcuccgcu

SEQ ID NO: 2930467 - RNA, 14 nt, Human
agggagagaagaua

SEQ ID NO: 2930468 - RNA, 13 nt, Human
agggagagaagau

SEQ ID NO: 2930469 - RNA, 18 nt, Human
ugggacuacaggcaccca

SEQ ID NO: 2930470 - RNA, 16 nt, Human
ugggacuacaggugug

SEQ ID NO: 2930471 - RNA, 18 nt, Human
ugggacucaaugcacuga

SEQ ID NO: 2930472 - RNA, 14 nt, Human
ugggcaacagagca

SEQ ID NO: 2930473 - RNA, 19 nt, Human
ugggcaacagagcaagacu

SEQ ID NO: 2930474 - RNA, 15 nt, Human
ugggcaacagagcaa

SEQ ID NO: 2930475 - RNA, 21 nt, Human
ugggcaacccccagccugcua

SEQ ID NO: 2930476 - RNA, 13 nt, Human
ugggcagaaggaa

SEQ ID NO: 2930477 - RNA, 20 nt, Human
ugggcagaaggaagacuuca

SEQ ID NO: 2930478 - RNA, 16 nt, Human
ugggcagaaggaagac

SEQ ID NO: 2930479 - RNA, 14 nt, Human
ugggcauucaaaug

SEQ ID NO: 2930480 - RNA, 13 nt, Human
ugggcauucaaau

SEQ ID NO: 2930481 - RNA, 23 nt, Human
ugggcagaaggaagacuucaucc

SEQ ID NO: 2930482 - RNA, 19 nt, Human
ugggaggcugagaugggag

SEQ ID NO: 2930483 - RNA, 21 nt, Human
ugggagaaccaaaaagaggcu

SEQ ID NO: 2930484 - RNA, 21 nt, Human
ugggaggauugcuugagcuca

SEQ ID NO: 2930485 - RNA, 18 nt, Human
ugggaggauugcuugagc

SEQ ID NO: 2930486 - RNA, 22 nt, Human
ugggaggauugcuugagcucag

SEQ ID NO: 2930487 - RNA, 17 nt, Human
aggcugggggaagaagc

SEQ ID NO: 2930488 - RNA, 22 nt, Human
aggcugggcuucaguggcagcu

SEQ ID NO: 2930489 - RNA, 23 nt, Human
aggcugggcuucaguggcagcug

SEQ ID NO: 2930490 - RNA, 18 nt, Human
aggcugggcuucaguggc

SEQ ID NO: 2930491 - RNA, 19 nt, Human
aggcugggcuucaguggca

SEQ ID NO: 2930492 - RNA, 20 nt, Human
aggcugggcuucaguggcag

SEQ ID NO: 2930493 - RNA, 21 nt, Human
aggcugggcuucaguggcagc

SEQ ID NO: 2930494 - RNA, 17 nt, Human
aggcuggguucugaucc

SEQ ID NO: 2930495 - RNA, 14 nt, Human
aggcuggguucuga

SEQ ID NO: 2930496 - RNA, 22 nt, Human
aggcugggggaagaagcucucu

SEQ ID NO: 2930497 - RNA, 13 nt, Human
aggcugggcuccc

SEQ ID NO: 2930498 - RNA, 18 nt, Human
aggcugggcucccuuccc

SEQ ID NO: 2930499 - RNA, 14 nt, Human
aggcugggcucccu

SEQ ID NO: 2930500 - RNA, 14 nt, Human
aggcugggcuucag

SEQ ID NO: 2930501 - RNA, 23 nt, Human
aggcugggcucccuucccaccuc

SEQ ID NO: 2930502 - RNA, 21 nt, Human
aggcugggcucccuucccacc

SEQ ID NO: 2930503 - RNA, 22 nt, Human
aggcugggagagccuuccaggg

SEQ ID NO: 2930504 - RNA, 21 nt, Human
aggcugggagagccuuccagg

SEQ ID NO: 2930505 - RNA, 20 nt, Human
aggcugggagagccuuccag

SEQ ID NO: 2930506 - RNA, 20 nt, Human
ugggaacccaaguccaagca

SEQ ID NO: 2930507 - RNA, 16 nt, Human
aggcugggagagccuu

SEQ ID NO: 2930508 - RNA, 19 nt, Human
aggcugggagagccuucca

SEQ ID NO: 2930509 - RNA, 22 nt, Human
aggcuuagucacugagacagcc

SEQ ID NO: 2930510 - RNA, 21 nt, Human
aggcuuagucacugagacagc

SEQ ID NO: 2930511 - RNA, 23 nt, Human
aggcuuagucacugagacagccc

SEQ ID NO: 2930512 - RNA, 19 nt, Human
aggcuuagugauguaauua

SEQ ID NO: 2930513 - RNA, 17 nt, Human
aggcuuagugauguaau

SEQ ID NO: 2930514 - RNA, 18 nt, Human
aggcuuagugauguaauu

SEQ ID NO: 2930515 - RNA, 15 nt, Human
agggaaacugccagc

SEQ ID NO: 2930516 - RNA, 14 nt, Human
agggaaacugccag

SEQ ID NO: 2930517 - RNA, 23 nt, Human
agggaaacugccagcaacgcagg

SEQ ID NO: 2930518 - RNA, 21 nt, Human
agggaaacugccagcaacgca

SEQ ID NO: 2930519 - RNA, 19 nt, Human
agggaaacugccagcaacg

SEQ ID NO: 2930520 - RNA, 16 nt, Human
agggaaacugccagca

SEQ ID NO: 2930521 - RNA, 23 nt, Human
uggcuguuggcugggggccucag

SEQ ID NO: 2930522 - RNA, 14 nt, Human
uggcuucacggaag

SEQ ID NO: 2930523 - RNA, 16 nt, Human
uggcuguuggcugggg

SEQ ID NO: 2930524 - RNA, 18 nt, Human
uggcuguuggcugggggc

SEQ ID NO: 2930525 - RNA, 14 nt, Human
uggcugugaacuga

SEQ ID NO: 2930526 - RNA, 23 nt, Human
uggcugcaaaggguaucaggugc

SEQ ID NO: 2930527 - RNA, 16 nt, Human
ugggaaagcauuguaa

SEQ ID NO: 2930528 - RNA, 14 nt, Human
ugggaaagcauugu

SEQ ID NO: 2930529 - RNA, 18 nt, Human
ugggaaagcauuguaaau

SEQ ID NO: 2930530 - RNA, 17 nt, Human
ugggaaagcauuguaaa

SEQ ID NO: 2930531 - RNA, 21 nt, Human
uggcuuuugugcauuaucuag

SEQ ID NO: 2930532 - RNA, 18 nt, Human
ugggaaacaaaaggauaa

SEQ ID NO: 2930533 - RNA, 15 nt, Human
uggcuuuugugcauu

SEQ ID NO: 2930534 - RNA, 16 nt, Human
uggcuuuugugcauua

SEQ ID NO: 2930535 - RNA, 20 nt, Human
uggcuucacggaagagccuu

SEQ ID NO: 2930536 - RNA, 17 nt, Human
uggcuucacggaagagc

SEQ ID NO: 2930537 - RNA, 13 nt, Human
uggcucacccagu

SEQ ID NO: 2930538 - RNA, 16 nt, Human
uggcucacccaguccu

SEQ ID NO: 2930539 - RNA, 13 nt, Human
uggcucacgccug

SEQ ID NO: 2930540 - RNA, 23 nt, Human
uggcuauaggugcuacaaaaaca

SEQ ID NO: 2930541 - RNA, 14 nt, Human
uggcuaaauucaug

SEQ ID NO: 2930542 - RNA, 18 nt, Human
uggcuaagcaaaauguga

SEQ ID NO: 2930543 - RNA, 23 nt, Human
aggcuccaggagcagccacauuc

SEQ ID NO: 2930544 - RNA, 19 nt, Human
aggcuccaggagcagccac

SEQ ID NO: 2930545 - RNA, 18 nt, Human
aggcuccaggagcagcca

SEQ ID NO: 2930546 - RNA, 17 nt, Human
aggcuccaggagcagcc

SEQ ID NO: 2930547 - RNA, 16 nt, Human
uggcuaacuuggguua

SEQ ID NO: 2930548 - RNA, 17 nt, Human
uggcuaauguacugcau

SEQ ID NO: 2930549 - RNA, 19 nt, Human
uggcuaauguacugcauau

SEQ ID NO: 2930550 - RNA, 19 nt, Human
uggcuauaggugcuacaaa

SEQ ID NO: 2930551 - RNA, 15 nt, Human
uggcuauaggugcua

SEQ ID NO: 2930552 - RNA, 14 nt, Human
agucaggaaagaga

SEQ ID NO: 2930553 - RNA, 20 nt, Human
ugucggccccaccagugccu

SEQ ID NO: 2930554 - RNA, 21 nt, Human
ugucggccccaccagugccuc

SEQ ID NO: 2930555 - RNA, 22 nt, Human
ugucggccccaccagugccucu

SEQ ID NO: 2930556 - RNA, 23 nt, Human
ugucggccccaccagugccucuc

SEQ ID NO: 2930557 - RNA, 23 nt, Human
ugucccuuacgugaguccuggca

SEQ ID NO: 2930558 - RNA, 19 nt, Human
ugucccuuacgugaguccu

SEQ ID NO: 2930559 - RNA, 19 nt, Human
agucccagcuacucgggag

SEQ ID NO: 2930560 - RNA, 18 nt, Human
agucccaccuuggcugca

SEQ ID NO: 2930561 - RNA, 19 nt, Human
agucccaccuuggcugcag

SEQ ID NO: 2930562 - RNA, 15 nt, Human
agucccaccuuggcu

SEQ ID NO: 2930563 - RNA, 16 nt, Human
agucccaccuuggcug

SEQ ID NO: 2930564 - RNA, 23 nt, Human
agucucacuguugcccaggcugg

SEQ ID NO: 2930565 - RNA, 15 nt, Human
agucuauuuacggaa

SEQ ID NO: 2930566 - RNA, 20 nt, Human
agucuauuuacggaacucaa

SEQ ID NO: 2930567 - RNA, 20 nt, Human
agucuagguugguagaguuu

SEQ ID NO: 2930568 - RNA, 22 nt, Human
ugucucaguccaugaagaugua

SEQ ID NO: 2930569 - RNA, 21 nt, Human
agucucacuguugcccaggcu

SEQ ID NO: 2930570 - RNA, 13 nt, Human
agucucaggaaau

SEQ ID NO: 2930571 - RNA, 16 nt, Human
aguccccucuccucca

SEQ ID NO: 2930572 - RNA, 16 nt, Human
aguccucccaucucac

SEQ ID NO: 2930573 - RNA, 14 nt, Human
aguccucccaucuc

SEQ ID NO: 2930574 - RNA, 15 nt, Human
uguccaagaagccca

SEQ ID NO: 2930575 - RNA, 14 nt, Human
uguccaagaagccc

SEQ ID NO: 2930576 - RNA, 17 nt, Human
ugucagguggggcagcu

SEQ ID NO: 2930577 - RNA, 18 nt, Human
ugucagguggggcagcuu

SEQ ID NO: 2930578 - RNA, 20 nt, Human
ugucagguggggcagcuuga

SEQ ID NO: 2930579 - RNA, 20 nt, Human
ugucauuugagcagggcuca

SEQ ID NO: 2930580 - RNA, 21 nt, Human
ugucauuugagcagggcucag

SEQ ID NO: 2930581 - RNA, 22 nt, Human
ugucauuugagcagggcucagc

SEQ ID NO: 2930582 - RNA, 20 nt, Human
ugucccugcacuugcagacu

SEQ ID NO: 2930583 - RNA, 22 nt, Human
ugucccugcacuugcagacucu

SEQ ID NO: 2930584 - RNA, 23 nt, Human
ugucccugcacuugcagacucua

SEQ ID NO: 2930585 - RNA, 20 nt, Human
uguccagccccguagacgug

SEQ ID NO: 2930586 - RNA, 22 nt, Human
uguccaagaagcccaggaaagg

SEQ ID NO: 2930587 - RNA, 18 nt, Human
uguccaagaagcccagga

SEQ ID NO: 2930588 - RNA, 17 nt, Human
uguccaagaagcccagg

SEQ ID NO: 2930589 - RNA, 16 nt, Human
uguccaagaagcccag

SEQ ID NO: 2930590 - RNA, 15 nt, Human
agucaccaagcccag

SEQ ID NO: 2930591 - RNA, 17 nt, Human
agucaccccggccaccu

SEQ ID NO: 2930592 - RNA, 19 nt, Human
aguauucuuauuuaaugaa

SEQ ID NO: 2930593 - RNA, 12 nt, Human
aguauagaauag

SEQ ID NO: 2930594 - RNA, 15 nt, Human
aguauagaaaaucuu

SEQ ID NO: 2930595 - RNA, 16 nt, Human
aguauagaaaaucuuc

SEQ ID NO: 2930596 - RNA, 14 nt, Human
agguugaagcacca

SEQ ID NO: 2930597 - RNA, 14 nt, Human
agguugcagugagc

SEQ ID NO: 2930598 - RNA, 16 nt, Human
aggugucccugcacuu

SEQ ID NO: 2930599 - RNA, 21 nt, Human
aggugugagucaccaagccca

SEQ ID NO: 2930600 - RNA, 22 nt, Human
aggugugagucaccaagcccag

SEQ ID NO: 2930601 - RNA, 22 nt, Human
aggugggauaucacuuccauga

SEQ ID NO: 2930602 - RNA, 12 nt, Human
aggugggaggau

SEQ ID NO: 2930603 - RNA, 16 nt, Human
aggugcuacaaaaaca

SEQ ID NO: 2930604 - RNA, 20 nt, Human
uguacauacuuuuuggguuu

SEQ ID NO: 2930605 - RNA, 15 nt, Human
uguacauacuuuuug

SEQ ID NO: 2930606 - RNA, 16 nt, Human
uguacaugaaaacaca

SEQ ID NO: 2930607 - RNA, 14 nt, Human
uguacaugaaaaca

SEQ ID NO: 2930608 - RNA, 20 nt, Human
uguaauuuuuuuaucgucac

SEQ ID NO: 2930609 - RNA, 19 nt, Human
uguacauaaugcgugcaua

SEQ ID NO: 2930610 - RNA, 20 nt, Human
uguacauaaugcgugcauac

SEQ ID NO: 2930611 - RNA, 20 nt, Human
agguuggcaaaaaggcagga

SEQ ID NO: 2930612 - RNA, 18 nt, Human
uguaagggaaacugccag

SEQ ID NO: 2930613 - RNA, 13 nt, Human
uguaagggaaacu

SEQ ID NO: 2930614 - RNA, 19 nt, Human
uguaagggaaacugccagc

SEQ ID NO: 2930615 - RNA, 18 nt, Human
uguaauuaaguacuaugu

SEQ ID NO: 2930616 - RNA, 19 nt, Human
uguaauuaaguacuaugua

SEQ ID NO: 2930617 - RNA, 21 nt, Human
uguaauuaaguacuauguauc

SEQ ID NO: 2930618 - RNA, 23 nt, Human
aguacacuguuucaaacuuuacu

SEQ ID NO: 2930619 - RNA, 21 nt, Human
aguacacuguuucaaacuuua

SEQ ID NO: 2930620 - RNA, 17 nt, Human
aguaaugagcuuaagaa

SEQ ID NO: 2930621 - RNA, 12 nt, Human
aguaauuggaaa

SEQ ID NO: 2930622 - RNA, 13 nt, Human
aguaauuggaaag

SEQ ID NO: 2930623 - RNA, 16 nt, Human
agguuuuuuuuucuca

SEQ ID NO: 2930624 - RNA, 20 nt, Human
aguaaaaaaugguguuuuau

SEQ ID NO: 2930625 - RNA, 21 nt, Human
uguacauggaauaacauguaa

SEQ ID NO: 2930626 - RNA, 16 nt, Human
aguaauaaaugaaugu

SEQ ID NO: 2930627 - RNA, 19 nt, Human
aguaauaaaugaaugucac

SEQ ID NO: 2930628 - RNA, 19 nt, Human
aguaaaaccacagcaguug

SEQ ID NO: 2930629 - RNA, 17 nt, Human
aguaaaaccacagcagu

SEQ ID NO: 2930630 - RNA, 16 nt, Human
aguaaaaccacagcag

SEQ ID NO: 2930631 - RNA, 16 nt, Human
uguaggguuauaauaa

SEQ ID NO: 2930632 - RNA, 17 nt, Human
uguaggguuauaauaau

SEQ ID NO: 2930633 - RNA, 15 nt, Human
uguagugagccgaga

SEQ ID NO: 2930634 - RNA, 16 nt, Human
uguaguguuggagaag

SEQ ID NO: 2930635 - RNA, 16 nt, Human
uguauauguagaugua

SEQ ID NO: 2930636 - RNA, 21 nt, Human
uguauauguagauguaugcac

SEQ ID NO: 2930637 - RNA, 22 nt, Human
uguauauauuuccuauauuguu

SEQ ID NO: 2930638 - RNA, 18 nt, Human
uguauauauuuccuauau

SEQ ID NO: 2930639 - RNA, 17 nt, Human
uguaguguuggagaaga

SEQ ID NO: 2930640 - RNA, 18 nt, Human
uguaguguuggagaagaa

SEQ ID NO: 2930641 - RNA, 19 nt, Human
uguuccacaaguuaaauaa

SEQ ID NO: 2930642 - RNA, 22 nt, Human
agugugguguuuccuggcacug

SEQ ID NO: 2930643 - RNA, 13 nt, Human
uguuaugacucca

SEQ ID NO: 2930644 - RNA, 17 nt, Human
uguuaugacuccagaau

SEQ ID NO: 2930645 - RNA, 20 nt, Human
agugugacugaucucucgug

SEQ ID NO: 2930646 - RNA, 20 nt, Human
agugugccugaagucccaga

SEQ ID NO: 2930647 - RNA, 21 nt, Human
agugugccugaagucccagau

SEQ ID NO: 2930648 - RNA, 20 nt, Human
agugugguguuuccuggcac

SEQ ID NO: 2930649 - RNA, 19 nt, Human
aguguguggucaacauuuc

SEQ ID NO: 2930650 - RNA, 23 nt, Human
uguugcccaggcuggcgugcagu

SEQ ID NO: 2930651 - RNA, 20 nt, Human
uguugcccaggcuggcgugc

SEQ ID NO: 2930652 - RNA, 22 nt, Human
uguugcccacagcuguaugauu

SEQ ID NO: 2930653 - RNA, 22 nt, Human
uguucuaaauaucccuuggaca

SEQ ID NO: 2930654 - RNA, 15 nt, Human
uguucuaagaaguga

SEQ ID NO: 2930655 - RNA, 13 nt, Human
aguuacucagaau

SEQ ID NO: 2930656 - RNA, 19 nt, Human
aguguuguggauuuaacag

SEQ ID NO: 2930657 - RNA, 20 nt, Human
aguguuguggauuuaacaga

SEQ ID NO: 2930658 - RNA, 23 nt, Human
aguguuggagaagaacugaaauc

SEQ ID NO: 2930659 - RNA, 16 nt, Human
aguguuguggauuuaa

SEQ ID NO: 2930660 - RNA, 18 nt, Human
agugggggaucacagccu

SEQ ID NO: 2930661 - RNA, 22 nt, Human
agugggcccaaugcacuuuguu

SEQ ID NO: 2930662 - RNA, 16 nt, Human
aguggggaaugaagau

SEQ ID NO: 2930663 - RNA, 13 nt, Human
uguuaauauuuua

SEQ ID NO: 2930664 - RNA, 19 nt, Human
uguuacauaagauaaaugu

SEQ ID NO: 2930665 - RNA, 22 nt, Human
uguguuaucacccagaagaaaa

SEQ ID NO: 2930666 - RNA, 20 nt, Human
ugugucagguggggcagcuu

SEQ ID NO: 2930667 - RNA, 13 nt, Human
ugugucauuucaa

SEQ ID NO: 2930668 - RNA, 14 nt, Human
ugugucauuucaaa

SEQ ID NO: 2930669 - RNA, 22 nt, Human
uguggucaacauuucucauguu

SEQ ID NO: 2930670 - RNA, 11 nt, Human
uguguguuuau

SEQ ID NO: 2930671 - RNA, 22 nt, Human
ugugucucuugguccugcugca

SEQ ID NO: 2930672 - RNA, 21 nt, Human
ugugcugcccugcccaccugg

SEQ ID NO: 2930673 - RNA, 20 nt, Human
ugugcugcccugcccaccug

SEQ ID NO: 2930674 - RNA, 19 nt, Human
ugugcugcccugcccaccu

SEQ ID NO: 2930675 - RNA, 18 nt, Human
ugugcugcccugcccacc

SEQ ID NO: 2930676 - RNA, 14 nt, Human
uguggaugauaaaa

SEQ ID NO: 2930677 - RNA, 23 nt, Human
agugagcugguuuuuagcggaga

SEQ ID NO: 2930678 - RNA, 22 nt, Human
uguggauuuaacagaaauguac

SEQ ID NO: 2930679 - RNA, 19 nt, Human
uguggauuuaacagaaaug

SEQ ID NO: 2930680 - RNA, 20 nt, Human
uguggauuuaacagaaaugu

SEQ ID NO: 2930681 - RNA, 15 nt, Human
ugugccuaauguguu

SEQ ID NO: 2930682 - RNA, 14 nt, Human
ugugccuaaugugu

SEQ ID NO: 2930683 - RNA, 18 nt, Human
ugugccuaauguguuuga

SEQ ID NO: 2930684 - RNA, 17 nt, Human
ugugccuaauguguuug

SEQ ID NO: 2930685 - RNA, 19 nt, Human
ugugcugagucugaaggcu

SEQ ID NO: 2930686 - RNA, 18 nt, Human
ugugcugagucugaaggc

SEQ ID NO: 2930687 - RNA, 17 nt, Human
agugcagugagccgaga

SEQ ID NO: 2930688 - RNA, 14 nt, Human
agugcacuaaugug

SEQ ID NO: 2930689 - RNA, 17 nt, Human
agugcacuaauguguaa

SEQ ID NO: 2930690 - RNA, 21 nt, Human
agugcacuaauguguaagaca

SEQ ID NO: 2930691 - RNA, 16 nt, Human
agugcaugcugucccu

SEQ ID NO: 2930692 - RNA, 14 nt, Human
agugcaugcugucc

SEQ ID NO: 2930693 - RNA, 14 nt, Human
agugccaaaaacaa

SEQ ID NO: 2930694 - RNA, 16 nt, Human
agugaggaugaaaaaa

SEQ ID NO: 2930695 - RNA, 12 nt, Human
agugaggcucug

SEQ ID NO: 2930696 - RNA, 13 nt, Human
agugaggcucugc

SEQ ID NO: 2930697 - RNA, 22 nt, Human
agugcaaauugucacaggacag

SEQ ID NO: 2930698 - RNA, 18 nt, Human
agugcaaacuucagaguu

SEQ ID NO: 2930699 - RNA, 15 nt, Human
agucucccuuccuau

SEQ ID NO: 2930700 - RNA, 11 nt, Human
ugugaggaagc

SEQ ID NO: 2930701 - RNA, 16 nt, Human
ugugacugaucucucg

SEQ ID NO: 2930702 - RNA, 17 nt, Human
agucucuugauucauaa

SEQ ID NO: 2930703 - RNA, 16 nt, Human
agucucuugauucaua

SEQ ID NO: 2930704 - RNA, 14 nt, Human
agucuuagauguau

SEQ ID NO: 2930705 - RNA, 16 nt, Human
agucuuagauguauau

SEQ ID NO: 2930706 - RNA, 13 nt, Human
agucuuagaugua

SEQ ID NO: 2930707 - RNA, 18 nt, Human
ugugaugagaggaaauca

SEQ ID NO: 2930708 - RNA, 19 nt, Human
ugugaugagaggaaaucac

SEQ ID NO: 2930709 - RNA, 22 nt, Human
ugugaugaugaaaugaggucag

SEQ ID NO: 2930710 - RNA, 12 nt, Human
agugagcugguu

SEQ ID NO: 2930711 - RNA, 14 nt, Human
agugagcacuaagg

SEQ ID NO: 2930712 - RNA, 22 nt, Human
agugagcacuaaggugugcucu

SEQ ID NO: 2930713 - RNA, 21 nt, Human
agugacugauggcuaauguac

SEQ ID NO: 2930714 - RNA, 16 nt, Human
agugaacuugggccac

SEQ ID NO: 2930715 - RNA, 22 nt, Human
agugaacaaauuuacagagaca

SEQ ID NO: 2930716 - RNA, 23 nt, Human
agugaacaaauuuacagagacag

SEQ ID NO: 2930717 - RNA, 16 nt, Human
agucuuucacauuuaa

SEQ ID NO: 2930718 - RNA, 21 nt, Human
agugaacaaauuuacagagac

SEQ ID NO: 2930719 - RNA, 20 nt, Human
auacauacuuacaugugugu

SEQ ID NO: 2930720 - RNA, 18 nt, Human
auacauacuuacaugugu

SEQ ID NO: 2930721 - RNA, 20 nt, Human
auacauaaacaagaccacgu

SEQ ID NO: 2930722 - RNA, 20 nt, Human
auacaguuacucagaauucu

SEQ ID NO: 2930723 - RNA, 18 nt, Human
auacaguuacucagaauu

SEQ ID NO: 2930724 - RNA, 23 nt, Human
auacagauagauauaugcucugc

SEQ ID NO: 2930725 - RNA, 22 nt, Human
auacaggaaaagcugcugacag

SEQ ID NO: 2930726 - RNA, 23 nt, Human
auacaggaaaagcugcugacagu

SEQ ID NO: 2930727 - RNA, 17 nt, Human
auacagaggcaacugca

SEQ ID NO: 2930728 - RNA, 16 nt, Human
auacagaggcaacugc

SEQ ID NO: 2930729 - RNA, 17 nt, Human
uuauaaacuuuaccuuu

SEQ ID NO: 2930730 - RNA, 18 nt, Human
uuauaaacuuuaccuuuu

SEQ ID NO: 2930731 - RNA, 13 nt, Human
auacguacacauu

SEQ ID NO: 2930732 - RNA, 14 nt, Human
auacguacacauuu

SEQ ID NO: 2930733 - RNA, 15 nt, Human
auacguacacauuuu

SEQ ID NO: 2930734 - RNA, 18 nt, Human
auacgugggcauucaaau

SEQ ID NO: 2930735 - RNA, 19 nt, Human
auacgugggcauucaaaug

SEQ ID NO: 2930736 - RNA, 16 nt, Human
auacguacacauuuua

SEQ ID NO: 2930737 - RNA, 14 nt, Human
auaccuuuuuuaga

SEQ ID NO: 2930738 - RNA, 22 nt, Human
auaccacaggaaccacaagacu

SEQ ID NO: 2930739 - RNA, 17 nt, Human
auaccacuuuuguucuu

SEQ ID NO: 2930740 - RNA, 18 nt, Human
auaccacuuuuguucuug

SEQ ID NO: 2930741 - RNA, 20 nt, Human
auacuauuaaacaugcugua

SEQ ID NO: 2930742 - RNA, 15 nt, Human
uuauauuugaaauau

SEQ ID NO: 2930743 - RNA, 18 nt, Human
auacuauuaaacaugcug

SEQ ID NO: 2930744 - RNA, 19 nt, Human
auacuauuaaacaugcugu

SEQ ID NO: 2930745 - RNA, 19 nt, Human
uuauauuugaaauauugac

SEQ ID NO: 2930746 - RNA, 17 nt, Human
auacuauggaauuucuc

SEQ ID NO: 2930747 - RNA, 17 nt, Human
auacuauuaaacaugcu

SEQ ID NO: 2930748 - RNA, 13 nt, Human
auacuaaccagca

SEQ ID NO: 2930749 - RNA, 19 nt, Human
auacuaaccagcagaaaug

SEQ ID NO: 2930750 - RNA, 20 nt, Human
auacuaaccagcagaaaugc

SEQ ID NO: 2930751 - RNA, 22 nt, Human
uuaugggcuggguucuacccag

SEQ ID NO: 2930752 - RNA, 24 nt, Human
uuaugggagcugucaagcauguau

SEQ ID NO: 2930753 - RNA, 13 nt, Human
uuaugggcugggu

SEQ ID NO: 2930754 - RNA, 19 nt, Human
uuauggcuuuugugcauua

SEQ ID NO: 2930755 - RNA, 18 nt, Human
uuauggcuuuugugcauu

SEQ ID NO: 2930756 - RNA, 19 nt, Human
uuaugauuaaguaaugaua

SEQ ID NO: 2930757 - RNA, 17 nt, Human
uuaucacccagaagaaa

SEQ ID NO: 2930758 - RNA, 18 nt, Human
uuaucacccagaagaaaa

SEQ ID NO: 2930759 - RNA, 19 nt, Human
uuaucacccagaagaaaau

SEQ ID NO: 2930760 - RNA, 21 nt, Human
uuaucacccagaagaaaauag

SEQ ID NO: 2930761 - RNA, 19 nt, Human
uuaugaaacuuuuggaagg

SEQ ID NO: 2930762 - RNA, 13 nt, Human
uuaugaaaauaau

SEQ ID NO: 2930763 - RNA, 14 nt, Human
uuaugaaacuuuug

SEQ ID NO: 2930764 - RNA, 17 nt, Human
uuaugaaacuuuuggaa

SEQ ID NO: 2930765 - RNA, 18 nt, Human
uuaugaaacuuuuggaag

SEQ ID NO: 2930766 - RNA, 21 nt, Human
uuaugagaaacuggcaaagca

SEQ ID NO: 2930767 - RNA, 23 nt, Human
uuaugagaaacuggcaaagcaga

SEQ ID NO: 2930768 - RNA, 11 nt, Human
uuaugacucca

SEQ ID NO: 2930769 - RNA, 21 nt, Human
uuaugaauuacauuuguauaa

SEQ ID NO: 2930770 - RNA, 14 nt, Human
uuaugaauuacauu

SEQ ID NO: 2930771 - RNA, 16 nt, Human
uuaugaauuacauuug

SEQ ID NO: 2930772 - RNA, 17 nt, Human
uuaugaauuacauuugu

SEQ ID NO: 2930773 - RNA, 13 nt, Human
auagaaguaaaaa

SEQ ID NO: 2930774 - RNA, 23 nt, Human
auagacaauuuauuauggcacau

SEQ ID NO: 2930775 - RNA, 13 nt, Human
auagaauugacau

SEQ ID NO: 2930776 - RNA, 18 nt, Human
auagaauugacauugaaa

SEQ ID NO: 2930777 - RNA, 22 nt, Human
auagaauugacauugaaaucua

SEQ ID NO: 2930778 - RNA, 16 nt, Human
auagacaauuuauuau

SEQ ID NO: 2930779 - RNA, 22 nt, Human
auagacaauuuauuauggcaca

SEQ ID NO: 2930780 - RNA, 18 nt, Human
auagaauaggcacuuuaa

SEQ ID NO: 2930781 - RNA, 20 nt, Human
auagaauaggcacuuuaaaa

SEQ ID NO: 2930782 - RNA, 22 nt, Human
auagaauaggcacuuuaaaaca

SEQ ID NO: 2930783 - RNA, 17 nt, Human
auagaauuaacacauga

SEQ ID NO: 2930784 - RNA, 20 nt, Human
auagauguugcuaacagcaa

SEQ ID NO: 2930785 - RNA, 14 nt, Human
auagauguugcuaa

SEQ ID NO: 2930786 - RNA, 17 nt, Human
auagauugcucaaauca

SEQ ID NO: 2930787 - RNA, 14 nt, Human
auagagagagacca

SEQ ID NO: 2930788 - RNA, 16 nt, Human
auagagugugauguau

SEQ ID NO: 2930789 - RNA, 22 nt, Human
auagagugugauguauguguaa

SEQ ID NO: 2930790 - RNA, 18 nt, Human
auagauaggucagugcaa

SEQ ID NO: 2930791 - RNA, 11 nt, Human
auacucccauc

SEQ ID NO: 2930792 - RNA, 16 nt, Human
auacucauuaggaugg

SEQ ID NO: 2930793 - RNA, 22 nt, Human
uuauuccaagggaauauugcca

SEQ ID NO: 2930794 - RNA, 14 nt, Human
auacucccaucugu

SEQ ID NO: 2930795 - RNA, 17 nt, Human
auacuccuccaagguua

SEQ ID NO: 2930796 - RNA, 14 nt, Human
auacucuuauaucu

SEQ ID NO: 2930797 - RNA, 18 nt, Human
auacucuuauaucuauau

SEQ ID NO: 2930798 - RNA, 16 nt, Human
auacucugcuuagaau

SEQ ID NO: 2930799 - RNA, 20 nt, Human
auacugccuuguuuaauggu

SEQ ID NO: 2930800 - RNA, 18 nt, Human
auacugccuuguuuaaug

SEQ ID NO: 2930801 - RNA, 13 nt, Human
uuauuauuaacaa

SEQ ID NO: 2930802 - RNA, 14 nt, Human
uuauuauuaacaaa

SEQ ID NO: 2930803 - RNA, 13 nt, Human
uuauuaugcauga

SEQ ID NO: 2930804 - RNA, 21 nt, Human
uuauucauuaguuuugaagau

SEQ ID NO: 2930805 - RNA, 18 nt, Human
uuauucauuaguuuugaa

SEQ ID NO: 2930806 - RNA, 15 nt, Human
uuauuauauuuacaa

SEQ ID NO: 2930807 - RNA, 12 nt, Human
uuauuaugcaug

SEQ ID NO: 2930808 - RNA, 14 nt, Human
uuauuauauuuaca

SEQ ID NO: 2930809 - RNA, 13 nt, Human
uuauguuaauauu

SEQ ID NO: 2930810 - RNA, 19 nt, Human
uuauguuaaaacugggaca

SEQ ID NO: 2930811 - RNA, 16 nt, Human
aguuuuauaugcuucu

SEQ ID NO: 2930812 - RNA, 19 nt, Human
aguuuuuuuccuucaagaa

SEQ ID NO: 2930813 - RNA, 23 nt, Human
uuaacuuuuauaaacuuuaccuu

SEQ ID NO: 2930814 - RNA, 22 nt, Human
uuaacuuuuauaaacuuuaccu

SEQ ID NO: 2930815 - RNA, 18 nt, Human
uuaacuuuuauaaacuuu

SEQ ID NO: 2930816 - RNA, 16 nt, Human
uuaagacuuaaugaga

SEQ ID NO: 2930817 - RNA, 19 nt, Human
uuaagacuuugguuauuuu

SEQ ID NO: 2930818 - RNA, 23 nt, Human
uuaagacuuaaugagacuuuaaa

SEQ ID NO: 2930819 - RNA, 22 nt, Human
uuaagagagucuauuuacggaa

SEQ ID NO: 2930820 - RNA, 15 nt, Human
uuaaucuaaauggaa

SEQ ID NO: 2930821 - RNA, 16 nt, Human
uuaauuuauccucugu

SEQ ID NO: 2930822 - RNA, 16 nt, Human
uuaauuugguuuucac

SEQ ID NO: 2930823 - RNA, 15 nt, Human
aguuuaucuguucau

SEQ ID NO: 2930824 - RNA, 12 nt, Human
uuaacagaaaug

SEQ ID NO: 2930825 - RNA, 13 nt, Human
uuaacagaaaugu

SEQ ID NO: 2930826 - RNA, 14 nt, Human
uuaacagaaaugua

SEQ ID NO: 2930827 - RNA, 14 nt, Human
aguuucucuuuuca

SEQ ID NO: 2930828 - RNA, 15 nt, Human
aguuucugccgcagc

SEQ ID NO: 2930829 - RNA, 15 nt, Human
aguuuuacaguguuu

SEQ ID NO: 2930830 - RNA, 22 nt, Human
aguuuguuaguaugaggcauuu

SEQ ID NO: 2930831 - RNA, 19 nt, Human
aguuucugccgcagcccug

SEQ ID NO: 2930832 - RNA, 14 nt, Human
uuaaaaucauuucu

SEQ ID NO: 2930833 - RNA, 22 nt, Human
uuaaaaucauuucugcaucagc

SEQ ID NO: 2930834 - RNA, 17 nt, Human
uuaaaaaucucaaauuu

SEQ ID NO: 2930835 - RNA, 20 nt, Human
uuaaaaaucucaaauuucua

SEQ ID NO: 2930836 - RNA, 16 nt, Human
uuaaaaaauggaacau

SEQ ID NO: 2930837 - RNA, 19 nt, Human
uuaaaaaucucaaauuucu

SEQ ID NO: 2930838 - RNA, 18 nt, Human
aguuuagcccugaacauu

SEQ ID NO: 2930839 - RNA, 22 nt, Human
aguuuagcccugaacauuucau

SEQ ID NO: 2930840 - RNA, 19 nt, Human
uuaaaaaagaaacauuugg

SEQ ID NO: 2930841 - RNA, 15 nt, Human
aguuuagcuggaaaa

SEQ ID NO: 2930842 - RNA, 20 nt, Human
aguuuaaauuguaauaggcg

SEQ ID NO: 2930843 - RNA, 17 nt, Human
aguuuaaauuguaauag

SEQ ID NO: 2930844 - RNA, 13 nt, Human
uuauaaacuuuac

SEQ ID NO: 2930845 - RNA, 15 nt, Human
uuauaaaagugaaua

SEQ ID NO: 2930846 - RNA, 14 nt, Human
uuaguagagacagg

SEQ ID NO: 2930847 - RNA, 13 nt, Human
uuaguagagacag

SEQ ID NO: 2930848 - RNA, 16 nt, Human
uuagguugaaacauau

SEQ ID NO: 2930849 - RNA, 14 nt, Human
uuagguugaaacau

SEQ ID NO: 2930850 - RNA, 19 nt, Human
uuaggugugggggaagcac

SEQ ID NO: 2930851 - RNA, 15 nt, Human
uuagggagagaagau

SEQ ID NO: 2930852 - RNA, 14 nt, Human
uuagggagagaaga

SEQ ID NO: 2930853 - RNA, 14 nt, Human
uuaggguuaugauu

SEQ ID NO: 2930854 - RNA, 16 nt, Human
uuaggguuaugauuaa

SEQ ID NO: 2930855 - RNA, 19 nt, Human
auaagccaaaacugagcau

SEQ ID NO: 2930856 - RNA, 22 nt, Human
auaagccaaaaaaugcuugcuu

SEQ ID NO: 2930857 - RNA, 21 nt, Human
auaagauucauauuuacuucu

SEQ ID NO: 2930858 - RNA, 18 nt, Human
auaauuuaccugaagucu

SEQ ID NO: 2930859 - RNA, 22 nt, Human
auaauuuccauuuacuuaagac

SEQ ID NO: 2930860 - RNA, 23 nt, Human
auaauuuccauuuacuuaagacu

SEQ ID NO: 2930861 - RNA, 14 nt, Human
auaaucuuucacag

SEQ ID NO: 2930862 - RNA, 16 nt, Human
uuagaagucacacagu

SEQ ID NO: 2930863 - RNA, 14 nt, Human
auaagauucauauu

SEQ ID NO: 2930864 - RNA, 22 nt, Human
auaacuuuuuauauucucagca

SEQ ID NO: 2930865 - RNA, 15 nt, Human
uuacugcagcuuugu

SEQ ID NO: 2930866 - RNA, 12 nt, Human
uuacuguacaug

SEQ ID NO: 2930867 - RNA, 13 nt, Human
uuacuguacauga

SEQ ID NO: 2930868 - RNA, 14 nt, Human
uuacuguacaugaa

SEQ ID NO: 2930869 - RNA, 22 nt, Human
uuacuguacaugaaaacacauu

SEQ ID NO: 2930870 - RNA, 23 nt, Human
uuacuguacaugaaaacacauuu

SEQ ID NO: 2930871 - RNA, 14 nt, Human
uuacaggugugaac

SEQ ID NO: 2930872 - RNA, 19 nt, Human
uuaccagcagagcaccuua

SEQ ID NO: 2930873 - RNA, 17 nt, Human
uuacaguggggaaugaa

SEQ ID NO: 2930874 - RNA, 11 nt, Human
uuacaaauguu

SEQ ID NO: 2930875 - RNA, 13 nt, Human
aucuugcucugcu

SEQ ID NO: 2930876 - RNA, 20 nt, Human
aucuuggucagauuugaacu

SEQ ID NO: 2930877 - RNA, 18 nt, Human
aucugugaaaggaaagag

SEQ ID NO: 2930878 - RNA, 17 nt, Human
aucugugaaaggaaaga

SEQ ID NO: 2930879 - RNA, 10 nt, Human
aucuggugac

SEQ ID NO: 2930880 - RNA, 17 nt, Human
aucuggugacuuuccuc

SEQ ID NO: 2930881 - RNA, 16 nt, Human
aucuggugacuuuccu

SEQ ID NO: 2930882 - RNA, 18 nt, Human
aucugcgggggcagugcu

SEQ ID NO: 2930883 - RNA, 19 nt, Human
aucugcgggggcagugcuc

SEQ ID NO: 2930884 - RNA, 20 nt, Human
aucugcgggggcagugcuca

SEQ ID NO: 2930885 - RNA, 21 nt, Human
aucugcgggggcagugcucac

SEQ ID NO: 2930886 - RNA, 23 nt, Human
aucugcgggggcagugcucaccc

SEQ ID NO: 2930887 - RNA, 15 nt, Human
augaaagggcccaga

SEQ ID NO: 2930888 - RNA, 18 nt, Human
augaaagggcccagagag

SEQ ID NO: 2930889 - RNA, 17 nt, Human
aucuuugcagacaggca

SEQ ID NO: 2930890 - RNA, 22 nt, Human
aucuuuucauuuaggugaggaa

SEQ ID NO: 2930891 - RNA, 23 nt, Human
uuggcuauuagagaucaaccccu

SEQ ID NO: 2930892 - RNA, 18 nt, Human
uuggccccugcccggcug

SEQ ID NO: 2930893 - RNA, 16 nt, Human
uuggagggugucccaa

SEQ ID NO: 2930894 - RNA, 14 nt, Human
uugcuugaaagaaa

SEQ ID NO: 2930895 - RNA, 14 nt, Human
augaaaugagguca

SEQ ID NO: 2930896 - RNA, 19 nt, Human
augaaagggcccagagagg

SEQ ID NO: 2930897 - RNA, 16 nt, Human
augaauuacauuugua

SEQ ID NO: 2930898 - RNA, 18 nt, Human
uuggggaccagagcugcc

SEQ ID NO: 2930899 - RNA, 15 nt, Human
augaauuaaguuuuu

SEQ ID NO: 2930900 - RNA, 15 nt, Human
augaauuacauuugu

SEQ ID NO: 2930901 - RNA, 23 nt, Human
augaauggcuaagcaaaauguga

SEQ ID NO: 2930902 - RNA, 21 nt, Human
uugaaggaugcugucuucgua

SEQ ID NO: 2930903 - RNA, 17 nt, Human
uugaagggaaauuucag

SEQ ID NO: 2930904 - RNA, 18 nt, Human
auccuccugggauuggcu

SEQ ID NO: 2930905 - RNA, 17 nt, Human
auccucuguacagagcc

SEQ ID NO: 2930906 - RNA, 16 nt, Human
auccucuguacagagc

SEQ ID NO: 2930907 - RNA, 17 nt, Human
aucuaaauggaaccacu

SEQ ID NO: 2930908 - RNA, 18 nt, Human
aucuaaauggaaccacuc

SEQ ID NO: 2930909 - RNA, 13 nt, Human
aucuaaauggaac

SEQ ID NO: 2930910 - RNA, 15 nt, Human
uugagaucagccugg

SEQ ID NO: 2930911 - RNA, 16 nt, Human
uugagaucagccuggg

SEQ ID NO: 2930912 - RNA, 12 nt, Human
uugagacagagu

SEQ ID NO: 2930913 - RNA, 20 nt, Human
uugaguugauucagcucugc

SEQ ID NO: 2930914 - RNA, 20 nt, Human
uugagugaagcugggagaac

SEQ ID NO: 2930915 - RNA, 18 nt, Human
aucuaauauguaacaagc

SEQ ID NO: 2930916 - RNA, 18 nt, Human
aucuacacuccagugaga

SEQ ID NO: 2930917 - RNA, 19 nt, Human
aucuacacuccagugagac

SEQ ID NO: 2930918 - RNA, 15 nt, Human
aucucuugagccugg

SEQ ID NO: 2930919 - RNA, 14 nt, Human
aucugaaaauguau

SEQ ID NO: 2930920 - RNA, 18 nt, Human
aucucuugagccugggag

SEQ ID NO: 2930921 - RNA, 16 nt, Human
aucugaaaauguaugu

SEQ ID NO: 2930922 - RNA, 19 nt, Human
aucugaaaauguaugugua

SEQ ID NO: 2930923 - RNA, 20 nt, Human
aucugaaaauguauguguaa

SEQ ID NO: 2930924 - RNA, 22 nt, Human
aucugaaaauguauguguaagu

SEQ ID NO: 2930925 - RNA, 15 nt, Human
aucucccccagcccc

SEQ ID NO: 2930926 - RNA, 14 nt, Human
aucucccccagccc

SEQ ID NO: 2930927 - RNA, 17 nt, Human
aucucccccagccccau

SEQ ID NO: 2930928 - RNA, 16 nt, Human
aucucccccagcccca

SEQ ID NO: 2930929 - RNA, 16 nt, Human
aucucagggccugguc

SEQ ID NO: 2930930 - RNA, 14 nt, Human
aucucagggccugg

SEQ ID NO: 2930931 - RNA, 14 nt, Human
aucuccaaaauaaa

SEQ ID NO: 2930932 - RNA, 17 nt, Human
aucuccaaaauaaaacu

SEQ ID NO: 2930933 - RNA, 20 nt, Human
aucuccaaaauaaaacuuuu

SEQ ID NO: 2930934 - RNA, 21 nt, Human
aucuccaaaauaaaacuuuuu

SEQ ID NO: 2930935 - RNA, 13 nt, Human
aucuccaaaauaa

SEQ ID NO: 2930936 - RNA, 16 nt, Human
uugcaauggcagccuu

SEQ ID NO: 2930937 - RNA, 17 nt, Human
uugcaauggcagccuug

SEQ ID NO: 2930938 - RNA, 19 nt, Human
uugcaauggcagccuuggc

SEQ ID NO: 2930939 - RNA, 18 nt, Human
uugcaccacugcacucca

SEQ ID NO: 2930940 - RNA, 16 nt, Human
uugcaccacugcacuc

SEQ ID NO: 2930941 - RNA, 15 nt, Human
uugcaccacugcacu

SEQ ID NO: 2930942 - RNA, 14 nt, Human
uugcaccacugcac

SEQ ID NO: 2930943 - RNA, 17 nt, Human
uugcauauugcauacua

SEQ ID NO: 2930944 - RNA, 13 nt, Human
uugcaucaauuuu

SEQ ID NO: 2930945 - RNA, 23 nt, Human
aucugaaaauguauguguaagua

SEQ ID NO: 2930946 - RNA, 12 nt, Human
aucugaaaaugu

SEQ ID NO: 2930947 - RNA, 17 nt, Human
aucugaaauaaggaaug

SEQ ID NO: 2930948 - RNA, 13 nt, Human
uugauuaaauucu

SEQ ID NO: 2930949 - RNA, 23 nt, Human
uugauguuuuaaggaugcuugua

SEQ ID NO: 2930950 - RNA, 14 nt, Human
uugauuaaauucuu

SEQ ID NO: 2930951 - RNA, 22 nt, Human
uugcaagccagauuuuccugaa

SEQ ID NO: 2930952 - RNA, 16 nt, Human
uugcaaggcaaauguu

SEQ ID NO: 2930953 - RNA, 18 nt, Human
uugaacccgggaggcaga

SEQ ID NO: 2930954 - RNA, 17 nt, Human
uugaaauuguauuacaa

SEQ ID NO: 2930955 - RNA, 19 nt, Human
uugaacccgggaggcagag

SEQ ID NO: 2930956 - RNA, 16 nt, Human
auccuccucagaucuu

SEQ ID NO: 2930957 - RNA, 16 nt, Human
auccuaggcauuugcu

SEQ ID NO: 2930958 - RNA, 12 nt, Human
auccuaagcuau

SEQ ID NO: 2930959 - RNA, 20 nt, Human
uucuucugcuucagccuccc

SEQ ID NO: 2930960 - RNA, 13 nt, Human
uucuucugcuuca

SEQ ID NO: 2930961 - RNA, 15 nt, Human
uucuucugcuucagc

SEQ ID NO: 2930962 - RNA, 14 nt, Human
uucuucucccucag

SEQ ID NO: 2930963 - RNA, 11 nt, Human
uucuucucccu

SEQ ID NO: 2930964 - RNA, 13 nt, Human
uucuucucccuca

SEQ ID NO: 2930965 - RNA, 24 nt, Human
aucccauaugccugggcagaagga

SEQ ID NO: 2930966 - RNA, 14 nt, Human
aucccucauccuca

SEQ ID NO: 2930967 - RNA, 13 nt, Human
aucccucauccuc

SEQ ID NO: 2930968 - RNA, 23 nt, Human
aucccucauccucauacccaccc

SEQ ID NO: 2930969 - RNA, 21 nt, Human
aucccucauccucauacccac

SEQ ID NO: 2930970 - RNA, 18 nt, Human
auccaagcuggucccacu

SEQ ID NO: 2930971 - RNA, 21 nt, Human
auccaagcuggucccacucag

SEQ ID NO: 2930972 - RNA, 13 nt, Human
auccacccaccuc

SEQ ID NO: 2930973 - RNA, 15 nt, Human
auccacccaccucag

SEQ ID NO: 2930974 - RNA, 16 nt, Human
auccaguaucuugaag

SEQ ID NO: 2930975 - RNA, 15 nt, Human
auccaguaucuugaa

SEQ ID NO: 2930976 - RNA, 18 nt, Human
aucccauaugccugggca

SEQ ID NO: 2930977 - RNA, 12 nt, Human
aucccagcccca

SEQ ID NO: 2930978 - RNA, 20 nt, Human
aucccaaacccuucagugcc

SEQ ID NO: 2930979 - RNA, 19 nt, Human
aucccaaacccuucagugc

SEQ ID NO: 2930980 - RNA, 21 nt, Human
auccaguaucuugaagacuuu

SEQ ID NO: 2930981 - RNA, 17 nt, Human
uucuggcucuuccaggc

SEQ ID NO: 2930982 - RNA, 16 nt, Human
uucuggcucuuccagg

SEQ ID NO: 2930983 - RNA, 21 nt, Human
uucugccugcccaggccccug

SEQ ID NO: 2930984 - RNA, 15 nt, Human
uucuggcucuuccag

SEQ ID NO: 2930985 - RNA, 17 nt, Human
uucugccugcccaggcc

SEQ ID NO: 2930986 - RNA, 18 nt, Human
uucugccugcccaggccc

SEQ ID NO: 2930987 - RNA, 15 nt, Human
uucugccauauucug

SEQ ID NO: 2930988 - RNA, 23 nt, Human
uucugaacuuggcgcugccccug

SEQ ID NO: 2930989 - RNA, 22 nt, Human
uucugaacuuggcgcugccccu

SEQ ID NO: 2930990 - RNA, 19 nt, Human
uucugaacuuggcgcugcc

SEQ ID NO: 2930991 - RNA, 20 nt, Human
aucagguuuucuuuuaagaa

SEQ ID NO: 2930992 - RNA, 21 nt, Human
uucuccuuguguuacuaaguu

SEQ ID NO: 2930993 - RNA, 12 nt, Human
uucucuaggaaa

SEQ ID NO: 2930994 - RNA, 15 nt, Human
uucucuaguuugauu

SEQ ID NO: 2930995 - RNA, 17 nt, Human
uucucuaguuugauuaa

SEQ ID NO: 2930996 - RNA, 14 nt, Human
uucggccuccaucc

SEQ ID NO: 2930997 - RNA, 15 nt, Human
uucgcuccugugucu

SEQ ID NO: 2930998 - RNA, 19 nt, Human
uucgcuccugugucuugca

SEQ ID NO: 2930999 - RNA, 21 nt, Human
uucuaaaucuccaaaauaaaa

SEQ ID NO: 2931000 - RNA, 15 nt, Human
uucggccuccauccu

SEQ ID NO: 2931001 - RNA, 19 nt, Human
uucuaaaggcuaccuuugu

SEQ ID NO: 2931002 - RNA, 20 nt, Human
uucuaaaggcuaccuuugua

SEQ ID NO: 2931003 - RNA, 21 nt, Human
uucuaaaggcuaccuuuguau

SEQ ID NO: 2931004 - RNA, 16 nt, Human
uucuagcauggcugcc

SEQ ID NO: 2931005 - RNA, 19 nt, Human
uucuagcaugaagacagag

SEQ ID NO: 2931006 - RNA, 23 nt, Human
uucuaagaagugaaaaucuacac

SEQ ID NO: 2931007 - RNA, 13 nt, Human
uucuaagaaguga

SEQ ID NO: 2931008 - RNA, 15 nt, Human
uucuaaguaaaacca

SEQ ID NO: 2931009 - RNA, 16 nt, Human
uucuaaguaaaaccac

SEQ ID NO: 2931010 - RNA, 12 nt, Human
aucagaauucuc

SEQ ID NO: 2931011 - RNA, 18 nt, Human
aucaggccaggcccucug

SEQ ID NO: 2931012 - RNA, 16 nt, Human
aucaggccaggcccuc

SEQ ID NO: 2931013 - RNA, 15 nt, Human
aucaggccaggcccu

SEQ ID NO: 2931014 - RNA, 13 nt, Human
aucagcacgauuu

SEQ ID NO: 2931015 - RNA, 14 nt, Human
aucaggccaggccc

SEQ ID NO: 2931016 - RNA, 17 nt, Human
aucaggguuaguauugu

SEQ ID NO: 2931017 - RNA, 13 nt, Human
uucuaggacugaa

SEQ ID NO: 2931018 - RNA, 14 nt, Human
uucuaggacugaau

SEQ ID NO: 2931019 - RNA, 20 nt, Human
uucucacagcuccaagaauu

SEQ ID NO: 2931020 - RNA, 16 nt, Human
uucuaggacugaauua

SEQ ID NO: 2931021 - RNA, 11 nt, Human
aucagaauucu

SEQ ID NO: 2931022 - RNA, 22 nt, Human
aucacuugucaauaaaauccau

SEQ ID NO: 2931023 - RNA, 18 nt, Human
aucacggcucacugcagc

SEQ ID NO: 2931024 - RNA, 19 nt, Human
aucacggcucacugcagcc

SEQ ID NO: 2931025 - RNA, 13 nt, Human
aucacgccacugc

SEQ ID NO: 2931026 - RNA, 15 nt, Human
aucacggcucacugc

SEQ ID NO: 2931027 - RNA, 20 nt, Human
aucaaucaugucagucugcu

SEQ ID NO: 2931028 - RNA, 14 nt, Human
aucaaugaguaaca

SEQ ID NO: 2931029 - RNA, 11 nt, Human
uuccugugucu

SEQ ID NO: 2931030 - RNA, 17 nt, Human
aucaacagugagagacu

SEQ ID NO: 2931031 - RNA, 21 nt, Human
aucaagaugugacauguuuua

SEQ ID NO: 2931032 - RNA, 14 nt, Human
aucaacagauaaau

SEQ ID NO: 2931033 - RNA, 18 nt, Human
auauuuuuuguuaaauga

SEQ ID NO: 2931034 - RNA, 20 nt, Human
auauuuuuuguuaaaugauu

SEQ ID NO: 2931035 - RNA, 13 nt, Human
uuccuaaaauuau

SEQ ID NO: 2931036 - RNA, 17 nt, Human
uuccuaauccucuagga

SEQ ID NO: 2931037 - RNA, 15 nt, Human
uuccugaacaggaua

SEQ ID NO: 2931038 - RNA, 18 nt, Human
uuccugaagaauugaaaa

SEQ ID NO: 2931039 - RNA, 14 nt, Human
uuccugaacaggau

SEQ ID NO: 2931040 - RNA, 14 nt, Human
uuccugaaccgaug

SEQ ID NO: 2931041 - RNA, 17 nt, Human
uuccucuuuccaucuac

SEQ ID NO: 2931042 - RNA, 22 nt, Human
uuccucuuuccaucuacccucc

SEQ ID NO: 2931043 - RNA, 13 nt, Human
uuccucuuuccau

SEQ ID NO: 2931044 - RNA, 15 nt, Human
uucccuauuagagaa

SEQ ID NO: 2931045 - RNA, 20 nt, Human
uucccucaccuuucccaucu

SEQ ID NO: 2931046 - RNA, 15 nt, Human
uucccucaaaugugu

SEQ ID NO: 2931047 - RNA, 14 nt, Human
uuccguuaaaauac

SEQ ID NO: 2931048 - RNA, 16 nt, Human
uuccguuaaaauacca

SEQ ID NO: 2931049 - RNA, 19 nt, Human
uuccguagguuauuuucag

SEQ ID NO: 2931050 - RNA, 17 nt, Human
uuugugaagcaaaauuu

SEQ ID NO: 2931051 - RNA, 17 nt, Human
uuuguaguguuggagaa

SEQ ID NO: 2931052 - RNA, 19 nt, Human
uuuguaguguuggagaaga

SEQ ID NO: 2931053 - RNA, 21 nt, Human
uuuguaguguuggagaagaac

SEQ ID NO: 2931054 - RNA, 19 nt, Human
augugaugagaggaaauca

SEQ ID NO: 2931055 - RNA, 17 nt, Human
augugaugagaggaaau

SEQ ID NO: 2931056 - RNA, 15 nt, Human
augugaugagaggaa

SEQ ID NO: 2931057 - RNA, 16 nt, Human
augugaugagaggaaa

SEQ ID NO: 2931058 - RNA, 19 nt, Human
augugcacaucuguuuugu

SEQ ID NO: 2931059 - RNA, 23 nt, Human
augugcacaugcacgugugugca

SEQ ID NO: 2931060 - RNA, 13 nt, Human
augucaguauuuc

SEQ ID NO: 2931061 - RNA, 16 nt, Human
augucaguauuucaac

SEQ ID NO: 2931062 - RNA, 22 nt, Human
auguauuacaguggggaaugaa

SEQ ID NO: 2931063 - RNA, 16 nt, Human
auguauguguaaguau

SEQ ID NO: 2931064 - RNA, 17 nt, Human
auguauguguaauaaau

SEQ ID NO: 2931065 - RNA, 15 nt, Human
auguauguguaagua

SEQ ID NO: 2931066 - RNA, 15 nt, Human
auguaugcacacaca

SEQ ID NO: 2931067 - RNA, 16 nt, Human
auguaugcacacacau

SEQ ID NO: 2931068 - RNA, 17 nt, Human
auguaugcacacacaua

SEQ ID NO: 2931069 - RNA, 18 nt, Human
augucagucugcuuagaa

SEQ ID NO: 2931070 - RNA, 19 nt, Human
augucagucugcuuagaaa

SEQ ID NO: 2931071 - RNA, 20 nt, Human
augucagucugcuuagaaau

SEQ ID NO: 2931072 - RNA, 21 nt, Human
augucagucugcuuagaaaua

SEQ ID NO: 2931073 - RNA, 22 nt, Human
augucagucugcuuagaaauaa

SEQ ID NO: 2931074 - RNA, 16 nt, Human
auguccacugguucuu

SEQ ID NO: 2931075 - RNA, 17 nt, Human
auguccacugguucuuc

SEQ ID NO: 2931076 - RNA, 13 nt, Human
augucagugugac

SEQ ID NO: 2931077 - RNA, 12 nt, Human
augucaguguga

SEQ ID NO: 2931078 - RNA, 17 nt, Human
auguagauguaugcaca

SEQ ID NO: 2931079 - RNA, 18 nt, Human
auguagauguaugcacac

SEQ ID NO: 2931080 - RNA, 17 nt, Human
auguagaggagaaacug

SEQ ID NO: 2931081 - RNA, 19 nt, Human
auguagaggagaaacugga

SEQ ID NO: 2931082 - RNA, 20 nt, Human
auguagacaguuggguuuuu

SEQ ID NO: 2931083 - RNA, 18 nt, Human
auguagacaguuggguuu

SEQ ID NO: 2931084 - RNA, 12 nt, Human
auguagaggaga

SEQ ID NO: 2931085 - RNA, 13 nt, Human
auguagaggagaa

SEQ ID NO: 2931086 - RNA, 17 nt, Human
auguacgacuugcauac

SEQ ID NO: 2931087 - RNA, 16 nt, Human
auguacuucaugcugu

SEQ ID NO: 2931088 - RNA, 19 nt, Human
auguagauguaugcacaca

SEQ ID NO: 2931089 - RNA, 22 nt, Human
auguagauguaugcacacacau

SEQ ID NO: 2931090 - RNA, 22 nt, Human
auguaggcuggcuuucagagua

SEQ ID NO: 2931091 - RNA, 12 nt, Human
uuugaccucugc

SEQ ID NO: 2931092 - RNA, 22 nt, Human
uuugauguucuuucacccuuuu

SEQ ID NO: 2931093 - RNA, 13 nt, Human
uuugauuaaauuc

SEQ ID NO: 2931094 - RNA, 18 nt, Human
uuugauuaaauucuugca

SEQ ID NO: 2931095 - RNA, 21 nt, Human
uuugauuaaauucuugcaaag

SEQ ID NO: 2931096 - RNA, 21 nt, Human
uuugauucagacagcugccug

SEQ ID NO: 2931097 - RNA, 23 nt, Human
uuugauuaaauucuugcaaagua

SEQ ID NO: 2931098 - RNA, 20 nt, Human
uuugacgccaucccagcccc

SEQ ID NO: 2931099 - RNA, 19 nt, Human
uuugacgccaucccagccc

SEQ ID NO: 2931100 - RNA, 16 nt, Human
uuugacgccaucccag

SEQ ID NO: 2931101 - RNA, 14 nt, Human
uuugacgccauccc

SEQ ID NO: 2931102 - RNA, 13 nt, Human
uuugacgccaucc

SEQ ID NO: 2931103 - RNA, 13 nt, Human
uuugcaaauaagu

SEQ ID NO: 2931104 - RNA, 22 nt, Human
uuugauucagacagcugccugg

SEQ ID NO: 2931105 - RNA, 14 nt, Human
uuugcaagccagau

SEQ ID NO: 2931106 - RNA, 15 nt, Human
uuugccguuauuaaa

SEQ ID NO: 2931107 - RNA, 13 nt, Human
uuugccucugccu

SEQ ID NO: 2931108 - RNA, 13 nt, Human
uuugcucauggaa

SEQ ID NO: 2931109 - RNA, 14 nt, Human
augguuuucuugug

SEQ ID NO: 2931110 - RNA, 16 nt, Human
augguuuucaaaauaa

SEQ ID NO: 2931111 - RNA, 15 nt, Human
augguuuggagcuga

SEQ ID NO: 2931112 - RNA, 14 nt, Human
augguuuggagcug

SEQ ID NO: 2931113 - RNA, 14 nt, Human
augguuuucaaaau

SEQ ID NO: 2931114 - RNA, 15 nt, Human
augguuuucaaaaua

SEQ ID NO: 2931115 - RNA, 21 nt, Human
augguucccuugaugaagaag

SEQ ID NO: 2931116 - RNA, 12 nt, Human
augguggcuggg

SEQ ID NO: 2931117 - RNA, 13 nt, Human
augguggcugggu

SEQ ID NO: 2931118 - RNA, 15 nt, Human
augguggcuggguug

SEQ ID NO: 2931119 - RNA, 17 nt, Human
augguggcuggguugga

SEQ ID NO: 2931120 - RNA, 20 nt, Human
auggugagggauacccaucc

SEQ ID NO: 2931121 - RNA, 15 nt, Human
augggugcuuggagg

SEQ ID NO: 2931122 - RNA, 15 nt, Human
auggugcaaugaccu

SEQ ID NO: 2931123 - RNA, 13 nt, Human
auggugcaaugac

SEQ ID NO: 2931124 - RNA, 12 nt, Human
auggugcaauga

SEQ ID NO: 2931125 - RNA, 17 nt, Human
auggugcaaugaccuuu

SEQ ID NO: 2931126 - RNA, 16 nt, Human
auggugcaaugaccuu

SEQ ID NO: 2931127 - RNA, 19 nt, Human
auggugcaaugaccuuuca

SEQ ID NO: 2931128 - RNA, 21 nt, Human
uuucugcagccacuauuguua

SEQ ID NO: 2931129 - RNA, 19 nt, Human
uuucugcagccacuauugu

SEQ ID NO: 2931130 - RNA, 15 nt, Human
uuucuggcuaugcau

SEQ ID NO: 2931131 - RNA, 16 nt, Human
uuucuggcuaugcauu

SEQ ID NO: 2931132 - RNA, 18 nt, Human
uuucuggcuaugcauuug

SEQ ID NO: 2931133 - RNA, 19 nt, Human
uuucuggcuaugcauuuga

SEQ ID NO: 2931134 - RNA, 15 nt, Human
augggauccuggagu

SEQ ID NO: 2931135 - RNA, 18 nt, Human
uuucucccagucauuuaa

SEQ ID NO: 2931136 - RNA, 17 nt, Human
uuucucccagucauuua

SEQ ID NO: 2931137 - RNA, 15 nt, Human
augggggugcauuug

SEQ ID NO: 2931138 - RNA, 14 nt, Human
augggggugcauuu

SEQ ID NO: 2931139 - RNA, 24 nt, Human
auggggcugcaccggcuggccugg

SEQ ID NO: 2931140 - RNA, 12 nt, Human
auggggcugcac

SEQ ID NO: 2931141 - RNA, 20 nt, Human
augggcuggguucuacccag

SEQ ID NO: 2931142 - RNA, 18 nt, Human
augggccuccugugugug

SEQ ID NO: 2931143 - RNA, 15 nt, Human
uuugaaauauugacu

SEQ ID NO: 2931144 - RNA, 15 nt, Human
uuuaaauagaugaca

SEQ ID NO: 2931145 - RNA, 18 nt, Human
uuuaaauauaugcuaagu

SEQ ID NO: 2931146 - RNA, 12 nt, Human
uuuacaaauguu

SEQ ID NO: 2931147 - RNA, 22 nt, Human
uuuaauuugaagguagaauguu

SEQ ID NO: 2931148 - RNA, 19 nt, Human
uuuaauuuuuuugagacag

SEQ ID NO: 2931149 - RNA, 18 nt, Human
augcagccucacaguccu

SEQ ID NO: 2931150 - RNA, 14 nt, Human
augcccagccccuu

SEQ ID NO: 2931151 - RNA, 13 nt, Human
augcccagccccu

SEQ ID NO: 2931152 - RNA, 12 nt, Human
augcccagcccc

SEQ ID NO: 2931153 - RNA, 11 nt, Human
augcccagccc

SEQ ID NO: 2931154 - RNA, 21 nt, Human
augccauuuaaagcuuauuaa

SEQ ID NO: 2931155 - RNA, 17 nt, Human
augccauuuaaagcuua

SEQ ID NO: 2931156 - RNA, 23 nt, Human
augcagugguaugaucacggcuc

SEQ ID NO: 2931157 - RNA, 13 nt, Human
augcagugcuucc

SEQ ID NO: 2931158 - RNA, 13 nt, Human
augcaguucugaa

SEQ ID NO: 2931159 - RNA, 21 nt, Human
uuguuccacaaguuaaauaaa

SEQ ID NO: 2931160 - RNA, 16 nt, Human
uuggugcgggguacac

SEQ ID NO: 2931161 - RNA, 13 nt, Human
uuguguuacuaag

SEQ ID NO: 2931162 - RNA, 15 nt, Human
uuguguuacuaaguu

SEQ ID NO: 2931163 - RNA, 20 nt, Human
uuguguuacuaaguuuuuau

SEQ ID NO: 2931164 - RNA, 20 nt, Human
uuguucuugguuuguaaauu

SEQ ID NO: 2931165 - RNA, 19 nt, Human
uuguugaggguauguuuua

SEQ ID NO: 2931166 - RNA, 15 nt, Human
augauaacuggaaac

SEQ ID NO: 2931167 - RNA, 16 nt, Human
augauauaagguuuuu

SEQ ID NO: 2931168 - RNA, 15 nt, Human
augaucuaggaagac

SEQ ID NO: 2931169 - RNA, 20 nt, Human
augaucuaggaagacuuugg

SEQ ID NO: 2931170 - RNA, 17 nt, Human
augaucuaggaagacuu

SEQ ID NO: 2931171 - RNA, 18 nt, Human
augauuaaguaaugauaa

SEQ ID NO: 2931172 - RNA, 14 nt, Human
augauuaaguaaug

SEQ ID NO: 2931173 - RNA, 18 nt, Human
uuguuuugccaauuugca

SEQ ID NO: 2931174 - RNA, 23 nt, Human
uuuaaaaauacagauagauauau

SEQ ID NO: 2931175 - RNA, 17 nt, Human
uuuaaagauguagacag

SEQ ID NO: 2931176 - RNA, 13 nt, Human
uuuaaagaaugcu

SEQ ID NO: 2931177 - RNA, 22 nt, Human
augcaccagcccuuagcaggga

SEQ ID NO: 2931178 - RNA, 13 nt, Human
augcaccuggaau

SEQ ID NO: 2931179 - RNA, 16 nt, Human
augcacuuuguucugg

SEQ ID NO: 2931180 - RNA, 17 nt, Human
augcacuuuguucuggc

SEQ ID NO: 2931181 - RNA, 20 nt, Human
augcacuuuguucuggcucu

SEQ ID NO: 2931182 - RNA, 19 nt, Human
augcacuuuguucuggcuc

SEQ ID NO: 2931183 - RNA, 19 nt, Human
augauugccuuuuuauaac

SEQ ID NO: 2931184 - RNA, 14 nt, Human
auggcacuaguauu

SEQ ID NO: 2931185 - RNA, 16 nt, Human
auggcacuaguauuuc

SEQ ID NO: 2931186 - RNA, 15 nt, Human
augggagagaagaga

SEQ ID NO: 2931187 - RNA, 21 nt, Human
augggagcugucaagcaugua

SEQ ID NO: 2931188 - RNA, 19 nt, Human
augggagagaagagaaugc

SEQ ID NO: 2931189 - RNA, 22 nt, Human
augggagcugucaagcauguau

SEQ ID NO: 2931190 - RNA, 23 nt, Human
auggcuauaggugcuacaaaaac

SEQ ID NO: 2931191 - RNA, 18 nt, Human
auggcuaauguacugcau

SEQ ID NO: 2931192 - RNA, 19 nt, Human
auggcuaagcaaaauguga

SEQ ID NO: 2931193 - RNA, 19 nt, Human
auggacuaacuugucuuug

SEQ ID NO: 2931194 - RNA, 22 nt, Human
auggacuuugcacacuuuggcc

SEQ ID NO: 2931195 - RNA, 12 nt, Human
auggacuuuguu

SEQ ID NO: 2931196 - RNA, 11 nt, Human
auggacuuugu

SEQ ID NO: 2931197 - RNA, 14 nt, Human
auggacuucuggau

SEQ ID NO: 2931198 - RNA, 14 nt, Human
uuucaaauguucuc

SEQ ID NO: 2931199 - RNA, 18 nt, Human
uuuccaugaguccccugu

SEQ ID NO: 2931200 - RNA, 17 nt, Human
uuuccaugaguccccug

SEQ ID NO: 2931201 - RNA, 15 nt, Human
uuucaaacuuuacua

SEQ ID NO: 2931202 - RNA, 22 nt, Human
uuucaaacuuuacuauggcccu

SEQ ID NO: 2931203 - RNA, 16 nt, Human
uuucaaacuuuacuau

SEQ ID NO: 2931204 - RNA, 16 nt, Human
uuucaaacauauauaa

SEQ ID NO: 2931205 - RNA, 13 nt, Human
augcugcugcccc

SEQ ID NO: 2931206 - RNA, 15 nt, Human
augcugcugccccug

SEQ ID NO: 2931207 - RNA, 21 nt, Human
augcugcugccccugcacagc

SEQ ID NO: 2931208 - RNA, 22 nt, Human
augcugcugccccugcacagca

SEQ ID NO: 2931209 - RNA, 23 nt, Human
augcugcugccccugcacagcag

SEQ ID NO: 2931210 - RNA, 17 nt, Human
augcuguucaugaaaga

SEQ ID NO: 2931211 - RNA, 22 nt, Human
augcugugcccuaaaguguauu

SEQ ID NO: 2931212 - RNA, 19 nt, Human
augcuguucaugaaagauu

SEQ ID NO: 2931213 - RNA, 13 nt, Human
augcuucucacug

SEQ ID NO: 2931214 - RNA, 19 nt, Human
augcuagaacucccuuuca

SEQ ID NO: 2931215 - RNA, 22 nt, Human
augcuagaacucccuuucaaca

SEQ ID NO: 2931216 - RNA, 20 nt, Human
augcuagaacucccuuucaa

SEQ ID NO: 2931217 - RNA, 21 nt, Human
augcuagaacucccuuucaac

SEQ ID NO: 2931218 - RNA, 17 nt, Human
auuuaaaagauacaguu

SEQ ID NO: 2931219 - RNA, 14 nt, Human
auuuaaaagauaca

SEQ ID NO: 2931220 - RNA, 16 nt, Human
auuuaaaagauacagu

SEQ ID NO: 2931221 - RNA, 13 nt, Human
auuuaaaagauac

SEQ ID NO: 2931222 - RNA, 21 nt, Human
auuguuuggggaugagaaagg

SEQ ID NO: 2931223 - RNA, 16 nt, Human
auugucaaagugguga

SEQ ID NO: 2931224 - RNA, 23 nt, Human
auugucaaaguggugagaggcau

SEQ ID NO: 2931225 - RNA, 13 nt, Human
auugugggaaggg

SEQ ID NO: 2931226 - RNA, 14 nt, Human
auugugggaagggg

SEQ ID NO: 2931227 - RNA, 13 nt, Human
auugucuagugaa

SEQ ID NO: 2931228 - RNA, 21 nt, Human
auugauuuccguuaaaauacc

SEQ ID NO: 2931229 - RNA, 19 nt, Human
auugauugggcacaucauu

SEQ ID NO: 2931230 - RNA, 23 nt, Human
auugauugggcacaucauuucaa

SEQ ID NO: 2931231 - RNA, 13 nt, Human
auugacuuuuuau

SEQ ID NO: 2931232 - RNA, 20 nt, Human
auugauuauuacuggcaaaa

SEQ ID NO: 2931233 - RNA, 19 nt, Human
auuggagcucgugggacag

SEQ ID NO: 2931234 - RNA, 19 nt, Human
auuggacaguaaaauccac

SEQ ID NO: 2931235 - RNA, 19 nt, Human
auuucccaaagcagugcau

SEQ ID NO: 2931236 - RNA, 16 nt, Human
auuuauuuauuuauuc

SEQ ID NO: 2931237 - RNA, 12 nt, Human
auuuauuuaaau

SEQ ID NO: 2931238 - RNA, 14 nt, Human
auuuauuuaaauuu

SEQ ID NO: 2931239 - RNA, 14 nt, Human
auuuauuuuaauaa

SEQ ID NO: 2931240 - RNA, 20 nt, Human
auuucuaggacugaauuaug

SEQ ID NO: 2931241 - RNA, 23 nt, Human
auuucuaggacugaauuaugaaa

SEQ ID NO: 2931242 - RNA, 23 nt, Human
auuucuuccacaagagcccaggc

SEQ ID NO: 2931243 - RNA, 20 nt, Human
auuucuuccacaagagccca

SEQ ID NO: 2931244 - RNA, 17 nt, Human
auuucuaggacugaauu

SEQ ID NO: 2931245 - RNA, 18 nt, Human
auuucuaggacugaauua

SEQ ID NO: 2931246 - RNA, 14 nt, Human
auuugaaacacugg

SEQ ID NO: 2931247 - RNA, 17 nt, Human
auuugaaacacugguuu

SEQ ID NO: 2931248 - RNA, 16 nt, Human
auuugaaaauuuugau

SEQ ID NO: 2931249 - RNA, 15 nt, Human
auuugaaaauuuuga

SEQ ID NO: 2931250 - RNA, 16 nt, Human
auuuuaaaagaaugau

SEQ ID NO: 2931251 - RNA, 22 nt, Human
auuuuaaaaauacagauagaua

SEQ ID NO: 2931252 - RNA, 18 nt, Human
auuugucccaagugccaa

SEQ ID NO: 2931253 - RNA, 13 nt, Human
auuugucccaagu

SEQ ID NO: 2931254 - RNA, 14 nt, Human
auuugucccaagug

SEQ ID NO: 2931255 - RNA, 23 nt, Human
auuuuaaaagaaugauuaugaau

SEQ ID NO: 2931256 - RNA, 19 nt, Human
auuuguaguguuggagaag

SEQ ID NO: 2931257 - RNA, 22 nt, Human
auuuguaguguuggagaagaac

SEQ ID NO: 2931258 - RNA, 14 nt, Human
auuuguauaaaaua

SEQ ID NO: 2931259 - RNA, 19 nt, Human
auuuuuuacauuuuacaca

SEQ ID NO: 2931260 - RNA, 20 nt, Human
auuuuuucucuaggaaauau

SEQ ID NO: 2931261 - RNA, 23 nt, Human
auuuuuucucuaggaaauauuua

SEQ ID NO: 2931262 - RNA, 18 nt, Human
auuuuuuguuaaaugauu

SEQ ID NO: 2931263 - RNA, 23 nt, Human
auuuuuuaaccuccuaaguauca

SEQ ID NO: 2931264 - RNA, 13 nt, Human
auuuuuuaaaugc

SEQ ID NO: 2931265 - RNA, 14 nt, Human
auuuuuuaaaugca

SEQ ID NO: 2931266 - RNA, 14 nt, Human
auuuuuuaaaauaa

SEQ ID NO: 2931267 - RNA, 21 nt, Human
auuuuuguuuucauuaucuca

SEQ ID NO: 2931268 - RNA, 21 nt, Human
auuuuuguuuuuauuaaaagg

SEQ ID NO: 2931269 - RNA, 19 nt, Human
auuuuuguuuuuauuaaaa

SEQ ID NO: 2931270 - RNA, 19 nt, Human
auuuuuguagagccagggu

SEQ ID NO: 2931271 - RNA, 12 nt, Human
auuuuuguaauu

SEQ ID NO: 2931272 - RNA, 22 nt, Human
auuuuugugauuuugugauuga

SEQ ID NO: 2931273 - RNA, 21 nt, Human
auuuuucuuagggaaggauac

SEQ ID NO: 2931274 - RNA, 21 nt, Human
auuuuguuuuugucuuaaaaa

SEQ ID NO: 2931275 - RNA, 19 nt, Human
auuuuugguauuugaaaca

SEQ ID NO: 2931276 - RNA, 15 nt, Human
auuuuucuuauuuca

SEQ ID NO: 2931277 - RNA, 22 nt, Human
auuuuucuuagggaaggauaca

SEQ ID NO: 2931278 - RNA, 20 nt, Human
auuuuucuuauuucauuucu

SEQ ID NO: 2931279 - RNA, 19 nt, Human
auuuuucuuauuucauuuc

SEQ ID NO: 2931280 - RNA, 20 nt, Human
auuuuggaaaauaaauuauu

SEQ ID NO: 2931281 - RNA, 14 nt, Human
auuuuggaaaauaa

SEQ ID NO: 2931282 - RNA, 19 nt, Human
auuuuggaaaauaaauuau

SEQ ID NO: 2931283 - RNA, 18 nt, Human
auuuugcuuugugauuuu

SEQ ID NO: 2931284 - RNA, 20 nt, Human
auuuugcuuugugauuuuug

SEQ ID NO: 2931285 - RNA, 12 nt, Human
auuuugcuuugu

SEQ ID NO: 2931286 - RNA, 19 nt, Human
auuuugugcccccauguaa

SEQ ID NO: 2931287 - RNA, 23 nt, Human
auuuugucauauaagauucauau

SEQ ID NO: 2931288 - RNA, 16 nt, Human
auuuuguuucagugca

SEQ ID NO: 2931289 - RNA, 20 nt, Human
auuuugcuaaaugugaauga

SEQ ID NO: 2931290 - RNA, 21 nt, Human
auuuugcugucccuuuuccuu

SEQ ID NO: 2931291 - RNA, 18 nt, Human
auuuugauccaagcuggu

SEQ ID NO: 2931292 - RNA, 19 nt, Human
auuuugauccaagcugguc

SEQ ID NO: 2931293 - RNA, 15 nt, Human
auuuugauguuuuaa

SEQ ID NO: 2931294 - RNA, 17 nt, Human
auuuugauguuuuaagg

SEQ ID NO: 2931295 - RNA, 16 nt, Human
auuuuccugccaggca

SEQ ID NO: 2931296 - RNA, 14 nt, Human
auuuuccugaaaac

SEQ ID NO: 2931297 - RNA, 19 nt, Human
auuuucccuauuagagaag

SEQ ID NO: 2931298 - RNA, 15 nt, Human
auuuucuauaauuua

SEQ ID NO: 2931299 - RNA, 14 nt, Human
auuuucuauaauuu

SEQ ID NO: 2931300 - RNA, 14 nt, Human
auucuuaaauaugu

SEQ ID NO: 2931301 - RNA, 12 nt, Human
auugaaaucuuu

SEQ ID NO: 2931302 - RNA, 20 nt, Human
auugaaaucuuuuugcuuug

SEQ ID NO: 2931303 - RNA, 18 nt, Human
auugaaaucuuuuugcuu

SEQ ID NO: 2931304 - RNA, 17 nt, Human
auugaaaucuuuuugcu

SEQ ID NO: 2931305 - RNA, 19 nt, Human
auugacacuuaaaaauggu

SEQ ID NO: 2931306 - RNA, 17 nt, Human
auugaccugaggcccuu

SEQ ID NO: 2931307 - RNA, 18 nt, Human
auugaagcagaguggcag

SEQ ID NO: 2931308 - RNA, 14 nt, Human
auugaagcagagug

SEQ ID NO: 2931309 - RNA, 15 nt, Human
auugaagcagagugg

SEQ ID NO: 2931310 - RNA, 13 nt, Human
auugaagcagagu

SEQ ID NO: 2931311 - RNA, 15 nt, Human
auugacacuuaaaaa

SEQ ID NO: 2931312 - RNA, 17 nt, Human
auugacacuuaaaaaug

SEQ ID NO: 2931313 - RNA, 17 nt, Human
auucucauuugucacac

SEQ ID NO: 2931314 - RNA, 11 nt, Human
auucugccugc

SEQ ID NO: 2931315 - RNA, 13 nt, Human
auucugccugccc

SEQ ID NO: 2931316 - RNA, 14 nt, Human
auucugccugccca

SEQ ID NO: 2931317 - RNA, 15 nt, Human
auucugccugcccag

SEQ ID NO: 2931318 - RNA, 16 nt, Human
auucugccugcccagg

SEQ ID NO: 2931319 - RNA, 17 nt, Human
auucugccugcccaggc

SEQ ID NO: 2931320 - RNA, 18 nt, Human
auucugccugcccaggcc

SEQ ID NO: 2931321 - RNA, 19 nt, Human
auucugccugcccaggccc

SEQ ID NO: 2931322 - RNA, 18 nt, Human
auucugcucacauaucug

SEQ ID NO: 2931323 - RNA, 20 nt, Human
auucugccugcccaggcccc

SEQ ID NO: 2931324 - RNA, 21 nt, Human
auucugccugcccaggccccu

SEQ ID NO: 2931325 - RNA, 19 nt, Human
auucugcucacauaucugu

SEQ ID NO: 2931326 - RNA, 20 nt, Human
auucugcucacauaucuguc

SEQ ID NO: 2931327 - RNA, 21 nt, Human
auucugcucacauaucuguca

SEQ ID NO: 2931328 - RNA, 22 nt, Human
auucugcucacauaucugucau

SEQ ID NO: 2931329 - RNA, 19 nt, Human
auucuguuggccaguguga

SEQ ID NO: 2931330 - RNA, 21 nt, Human
auucuguuggccagugugaca

SEQ ID NO: 2931331 - RNA, 14 nt, Human
auucuguuggccag

SEQ ID NO: 2931332 - RNA, 17 nt, Human
uuuguggaaaauaacuc

SEQ ID NO: 2931333 - RNA, 21 nt, Human
auuaguuuugaagauucuaug

SEQ ID NO: 2931334 - RNA, 16 nt, Human
auuauauucauucuuu

SEQ ID NO: 2931335 - RNA, 19 nt, Human
auucagacagcugccuggg

SEQ ID NO: 2931336 - RNA, 11 nt, Human
auucagacagc

SEQ ID NO: 2931337 - RNA, 13 nt, Human
auucagacagcug

SEQ ID NO: 2931338 - RNA, 12 nt, Human
auucagacagcu

SEQ ID NO: 2931339 - RNA, 12 nt, Human
auucaggaagcu

SEQ ID NO: 2931340 - RNA, 18 nt, Human
auucagacagcugccugg

SEQ ID NO: 2931341 - RNA, 17 nt, Human
auucagacagcugccug

SEQ ID NO: 2931342 - RNA, 16 nt, Human
auucagacagcugccu

SEQ ID NO: 2931343 - RNA, 15 nt, Human
auucagacagcugcc

SEQ ID NO: 2931344 - RNA, 14 nt, Human
auucagacagcugc

SEQ ID NO: 2931345 - RNA, 13 nt, Human
auucaggaagcuc

SEQ ID NO: 2931346 - RNA, 15 nt, Human
auuauauuuauuacu

SEQ ID NO: 2931347 - RNA, 18 nt, Human
auuauauuuauuacugua

SEQ ID NO: 2931348 - RNA, 21 nt, Human
auuauguuaaaacugggacag

SEQ ID NO: 2931349 - RNA, 14 nt, Human
auuaucuagauacu

SEQ ID NO: 2931350 - RNA, 18 nt, Human
auuaucuagauacuguau

SEQ ID NO: 2931351 - RNA, 17 nt, Human
auuauguuaauauuucu

SEQ ID NO: 2931352 - RNA, 20 nt, Human
auuauuaccuuacagaaguu

SEQ ID NO: 2931353 - RNA, 13 nt, Human
auuauguuaauau

SEQ ID NO: 2931354 - RNA, 16 nt, Human
auuauguuaauauuuc

SEQ ID NO: 2931355 - RNA, 14 nt, Human
auuauguuaauauu

SEQ ID NO: 2931356 - RNA, 18 nt, Human
auucaaacagucucagga

SEQ ID NO: 2931357 - RNA, 16 nt, Human
auucaaacagucucag

SEQ ID NO: 2931358 - RNA, 20 nt, Human
auucaaacagucucaggaaa

SEQ ID NO: 2931359 - RNA, 19 nt, Human
auucaaacagucucaggaa

SEQ ID NO: 2931360 - RNA, 15 nt, Human
aaaaaauauuuuccu

SEQ ID NO: 2931361 - RNA, 12 nt, Human
aaaaacacagca

SEQ ID NO: 2931362 - RNA, 18 nt, Human
aaaaacacagcaagggug

SEQ ID NO: 2931363 - RNA, 13 nt, Human
aaaaacacagcaa

SEQ ID NO: 2931364 - RNA, 14 nt, Human
acucaaaucaagaa

SEQ ID NO: 2931365 - RNA, 13 nt, Human
acucaaaagcugg

SEQ ID NO: 2931366 - RNA, 16 nt, Human
acuauuuauuuacaaa

SEQ ID NO: 2931367 - RNA, 17 nt, Human
acuauuuauuuacaaau

SEQ ID NO: 2931368 - RNA, 18 nt, Human
acuauuuauuuacaaaug

SEQ ID NO: 2931369 - RNA, 20 nt, Human
acuauuuuuguuuuuauuaa

SEQ ID NO: 2931370 - RNA, 19 nt, Human
acuauucugagaugacuau

SEQ ID NO: 2931371 - RNA, 18 nt, Human
acuauucugagaugacua

SEQ ID NO: 2931372 - RNA, 21 nt, Human
acuauucaaacagucucagga

SEQ ID NO: 2931373 - RNA, 20 nt, Human
acuaguauuucuaugaaaua

SEQ ID NO: 2931374 - RNA, 21 nt, Human
acuauuuuuguuuuuauuaaa

SEQ ID NO: 2931375 - RNA, 22 nt, Human
acuauuuuuguuuuuauuaaaa

SEQ ID NO: 2931376 - RNA, 19 nt, Human
acucaguccauagcagaga

SEQ ID NO: 2931377 - RNA, 19 nt, Human
acuauuuauuuacaaaugu

SEQ ID NO: 2931378 - RNA, 15 nt, Human
acucauauuuucaug

SEQ ID NO: 2931379 - RNA, 19 nt, Human
acucugucgcccagucugg

SEQ ID NO: 2931380 - RNA, 21 nt, Human
acucuaucaaguauuauaccu

SEQ ID NO: 2931381 - RNA, 17 nt, Human
acucuauguucuaagaa

SEQ ID NO: 2931382 - RNA, 23 nt, Human
acucuaucaaguauuauaccuuu

SEQ ID NO: 2931383 - RNA, 17 nt, Human
acucuagggaaaaacca

SEQ ID NO: 2931384 - RNA, 15 nt, Human
acucuagggaaaaac

SEQ ID NO: 2931385 - RNA, 11 nt, Human
acgugaguccu

SEQ ID NO: 2931386 - RNA, 13 nt, Human
acuaagagagaau

SEQ ID NO: 2931387 - RNA, 13 nt, Human
acgucugacaggc

SEQ ID NO: 2931388 - RNA, 14 nt, Human
acggaacucaaaua

SEQ ID NO: 2931389 - RNA, 14 nt, Human
acgucugacaggca

SEQ ID NO: 2931390 - RNA, 11 nt, Human
acgcugugcug

SEQ ID NO: 2931391 - RNA, 14 nt, Human
acgcugugcugccc

SEQ ID NO: 2931392 - RNA, 12 nt, Human
acgcugugcugc

SEQ ID NO: 2931393 - RNA, 22 nt, Human
acgcaggcccccaggugccagu

SEQ ID NO: 2931394 - RNA, 19 nt, Human
acgcaggcccccaggugcc

SEQ ID NO: 2931395 - RNA, 18 nt, Human
accuuggcugcagggagu

SEQ ID NO: 2931396 - RNA, 17 nt, Human
accuuggcugcagggag

SEQ ID NO: 2931397 - RNA, 13 nt, Human
accuuucccaucu

SEQ ID NO: 2931398 - RNA, 18 nt, Human
accuuucccaucuuccaa

SEQ ID NO: 2931399 - RNA, 15 nt, Human
accuuuaagagaaau

SEQ ID NO: 2931400 - RNA, 16 nt, Human
accugucccccugaca

SEQ ID NO: 2931401 - RNA, 15 nt, Human
accugucccccugac

SEQ ID NO: 2931402 - RNA, 12 nt, Human
accugucccccu

SEQ ID NO: 2931403 - RNA, 21 nt, Human
accucugcagcaauaaagcag

SEQ ID NO: 2931404 - RNA, 18 nt, Human
accucugcagcaauaaag

SEQ ID NO: 2931405 - RNA, 20 nt, Human
accucugcagcaauaaagca

SEQ ID NO: 2931406 - RNA, 15 nt, Human
accucugcagcaaua

SEQ ID NO: 2931407 - RNA, 17 nt, Human
acugguuuguucccugu

SEQ ID NO: 2931408 - RNA, 18 nt, Human
acugguuccauggccucu

SEQ ID NO: 2931409 - RNA, 14 nt, Human
acugguuuuaaaua

SEQ ID NO: 2931410 - RNA, 22 nt, Human
acuguaagaaaauaucacuugu

SEQ ID NO: 2931411 - RNA, 19 nt, Human
acuguaagaaaauaucacu

SEQ ID NO: 2931412 - RNA, 13 nt, Human
acuguaagaaaau

SEQ ID NO: 2931413 - RNA, 16 nt, Human
acuggaagcacagcuu

SEQ ID NO: 2931414 - RNA, 19 nt, Human
acuggaagcacagcuucau

SEQ ID NO: 2931415 - RNA, 17 nt, Human
acuggaagcacagcuuc

SEQ ID NO: 2931416 - RNA, 15 nt, Human
acuggagaaaaugga

SEQ ID NO: 2931417 - RNA, 13 nt, Human
acugccagcaacg

SEQ ID NO: 2931418 - RNA, 20 nt, Human
acucugucucaguccaugaa

SEQ ID NO: 2931419 - RNA, 18 nt, Human
acucugucucaguccaug

SEQ ID NO: 2931420 - RNA, 16 nt, Human
acuucacgcccuuggc

SEQ ID NO: 2931421 - RNA, 23 nt, Human
acuucacauauugauuuccguua

SEQ ID NO: 2931422 - RNA, 21 nt, Human
acuucugucuucacaacagau

SEQ ID NO: 2931423 - RNA, 12 nt, Human
acuucagacaua

SEQ ID NO: 2931424 - RNA, 21 nt, Human
acuuggucugugagaugcuag

SEQ ID NO: 2931425 - RNA, 16 nt, Human
acuugguuuuuaaaaa

SEQ ID NO: 2931426 - RNA, 15 nt, Human
acuugggccacugug

SEQ ID NO: 2931427 - RNA, 14 nt, Human
acuugggccacugu

SEQ ID NO: 2931428 - RNA, 22 nt, Human
acuucugucuucacaacagauu

SEQ ID NO: 2931429 - RNA, 20 nt, Human
acugugcuccagccugggca

SEQ ID NO: 2931430 - RNA, 22 nt, Human
acugugcugagucugaaggcug

SEQ ID NO: 2931431 - RNA, 18 nt, Human
acugugcuccagccuggg

SEQ ID NO: 2931432 - RNA, 20 nt, Human
acugugcugagucugaaggc

SEQ ID NO: 2931433 - RNA, 23 nt, Human
agaaaaucuucauggaauucaca

SEQ ID NO: 2931434 - RNA, 22 nt, Human
agaaaguacuucuccacccugc

SEQ ID NO: 2931435 - RNA, 23 nt, Human
agaaaguacuucuccacccugcu

SEQ ID NO: 2931436 - RNA, 22 nt, Human
agaaauaacagaagaaaauaga

SEQ ID NO: 2931437 - RNA, 13 nt, Human
agaaauaacagaa

SEQ ID NO: 2931438 - RNA, 21 nt, Human
agaaauaacagaagaaaauag

SEQ ID NO: 2931439 - RNA, 22 nt, Human
agaaaguugcaaggcaaauguu

SEQ ID NO: 2931440 - RNA, 12 nt, Human
acuuuuaagacu

SEQ ID NO: 2931441 - RNA, 13 nt, Human
acuuuuaagacuu

SEQ ID NO: 2931442 - RNA, 19 nt, Human
acuuuguucuggcucuucc

SEQ ID NO: 2931443 - RNA, 20 nt, Human
acuuuguucuggcucuucca

SEQ ID NO: 2931444 - RNA, 13 nt, Human
acuuuuauaaacu

SEQ ID NO: 2931445 - RNA, 16 nt, Human
acuuuauuucucucau

SEQ ID NO: 2931446 - RNA, 22 nt, Human
acuuuauuuucuauaauuuaaa

SEQ ID NO: 2931447 - RNA, 17 nt, Human
acuuuguucuggcucuu

SEQ ID NO: 2931448 - RNA, 16 nt, Human
acuuuguucuggcucu

SEQ ID NO: 2931449 - RNA, 20 nt, Human
acuuuucauaaccuagccuu

SEQ ID NO: 2931450 - RNA, 16 nt, Human
acuuuucuuucagcca

SEQ ID NO: 2931451 - RNA, 15 nt, Human
acuuuugcaaauaag

SEQ ID NO: 2931452 - RNA, 14 nt, Human
acuuuugcaaauaa

SEQ ID NO: 2931453 - RNA, 14 nt, Human
acuuuucuuugugg

SEQ ID NO: 2931454 - RNA, 14 nt, Human
agaaaauaacaaua

SEQ ID NO: 2931455 - RNA, 16 nt, Human
agaaaaucaggcuggc

SEQ ID NO: 2931456 - RNA, 19 nt, Human
agaaaauaguggugugauu

SEQ ID NO: 2931457 - RNA, 15 nt, Human
agaaaauaccaagga

SEQ ID NO: 2931458 - RNA, 19 nt, Human
accagagcugccaccugcc

SEQ ID NO: 2931459 - RNA, 13 nt, Human
accagcagaaaug

SEQ ID NO: 2931460 - RNA, 17 nt, Human
accagccaguaaauggg

SEQ ID NO: 2931461 - RNA, 15 nt, Human
acauuuauucugcuc

SEQ ID NO: 2931462 - RNA, 12 nt, Human
accaagcccagu

SEQ ID NO: 2931463 - RNA, 14 nt, Human
acauuuauucugcu

SEQ ID NO: 2931464 - RNA, 16 nt, Human
acaugugcacaugcac

SEQ ID NO: 2931465 - RNA, 18 nt, Human
acaugugcacaugcacgu

SEQ ID NO: 2931466 - RNA, 19 nt, Human
acaugaucuucuuuauaau

SEQ ID NO: 2931467 - RNA, 18 nt, Human
acaucagcacgauuucug

SEQ ID NO: 2931468 - RNA, 15 nt, Human
acaucagcacgauuu

SEQ ID NO: 2931469 - RNA, 17 nt, Human
acaucagcacgauuucu

SEQ ID NO: 2931470 - RNA, 23 nt, Human
acauaaugcgugcauaccacuuu

SEQ ID NO: 2931471 - RNA, 22 nt, Human
acauaaugcgugcauaccacuu

SEQ ID NO: 2931472 - RNA, 21 nt, Human
acauaaugcgugcauaccacu

SEQ ID NO: 2931473 - RNA, 19 nt, Human
acaggguuuugccauguug

SEQ ID NO: 2931474 - RNA, 19 nt, Human
acaggcaaugcuggcuguu

SEQ ID NO: 2931475 - RNA, 23 nt, Human
acaggcaaugcuggcuguuggcu

SEQ ID NO: 2931476 - RNA, 16 nt, Human
accccuccaugugggc

SEQ ID NO: 2931477 - RNA, 19 nt, Human
accccuccaugugggcuag

SEQ ID NO: 2931478 - RNA, 14 nt, Human
accauauuaccaca

SEQ ID NO: 2931479 - RNA, 16 nt, Human
accauauuaccacaga

SEQ ID NO: 2931480 - RNA, 11 nt, Human
acccccugaau

SEQ ID NO: 2931481 - RNA, 16 nt, Human
acccaccucagccucc

SEQ ID NO: 2931482 - RNA, 19 nt, Human
acccaguguuuuaggagca

SEQ ID NO: 2931483 - RNA, 22 nt, Human
acccaguguuuuaggagcauga

SEQ ID NO: 2931484 - RNA, 20 nt, Human
accauccuggcuaacacggu

SEQ ID NO: 2931485 - RNA, 20 nt, Human
accauauuaccacagacaua

SEQ ID NO: 2931486 - RNA, 18 nt, Human
acccaagggccuggccug

SEQ ID NO: 2931487 - RNA, 22 nt, Human
acccaagggccuggccugagcu

SEQ ID NO: 2931488 - RNA, 19 nt, Human
acccaagggccuggccuga

SEQ ID NO: 2931489 - RNA, 13 nt, Human
acccaccucagcc

SEQ ID NO: 2931490 - RNA, 14 nt, Human
acccaccucagccu

SEQ ID NO: 2931491 - RNA, 15 nt, Human
acccaccucagccuc

SEQ ID NO: 2931492 - RNA, 21 nt, Human
acccacaagaaaugaaagcag

SEQ ID NO: 2931493 - RNA, 17 nt, Human
acccacaagaaaugaaa

SEQ ID NO: 2931494 - RNA, 23 nt, Human
acccaagggccuggccugagcug

SEQ ID NO: 2931495 - RNA, 20 nt, Human
acacagcucuguccugggag

SEQ ID NO: 2931496 - RNA, 14 nt, Human
acacagcucugucc

SEQ ID NO: 2931497 - RNA, 19 nt, Human
acacagaggcugccucucc

SEQ ID NO: 2931498 - RNA, 21 nt, Human
acacauuuuauuuuauuaugc

SEQ ID NO: 2931499 - RNA, 22 nt, Human
acacauuuuauuuuauuaugca

SEQ ID NO: 2931500 - RNA, 11 nt, Human
acacagcucuu

SEQ ID NO: 2931501 - RNA, 13 nt, Human
acacagcucuucu

SEQ ID NO: 2931502 - RNA, 20 nt, Human
acacauuuuuuaaaugcacc

SEQ ID NO: 2931503 - RNA, 22 nt, Human
acacauuuuuuaaaugcaccug

SEQ ID NO: 2931504 - RNA, 12 nt, Human
acacauuuuucu

SEQ ID NO: 2931505 - RNA, 19 nt, Human
acacgagcaggcuacuguc

SEQ ID NO: 2931506 - RNA, 14 nt, Human
acacgagcaggcua

SEQ ID NO: 2931507 - RNA, 15 nt, Human
acacgcgugcacaca

SEQ ID NO: 2931508 - RNA, 17 nt, Human
acacgcgugcacacacc

SEQ ID NO: 2931509 - RNA, 21 nt, Human
acacgagcaggcuacugucag

SEQ ID NO: 2931510 - RNA, 20 nt, Human
acaaggcaaggcugucaauu

SEQ ID NO: 2931511 - RNA, 17 nt, Human
acaaggauugcuacugu

SEQ ID NO: 2931512 - RNA, 14 nt, Human
acaaggcaaggcug

SEQ ID NO: 2931513 - RNA, 12 nt, Human
acaaggcaaggc

SEQ ID NO: 2931514 - RNA, 22 nt, Human
acaaaauguaggguuauaauaa

SEQ ID NO: 2931515 - RNA, 18 nt, Human
acagccacggccaggcca

SEQ ID NO: 2931516 - RNA, 15 nt, Human
acagccacggccagg

SEQ ID NO: 2931517 - RNA, 16 nt, Human
acagccacggccaggc

SEQ ID NO: 2931518 - RNA, 17 nt, Human
acagccacggccaggcc

SEQ ID NO: 2931519 - RNA, 16 nt, Human
acagcucuucuccagg

SEQ ID NO: 2931520 - RNA, 17 nt, Human
acagcucuucuccaggc

SEQ ID NO: 2931521 - RNA, 15 nt, Human
acaggaucagucuga

SEQ ID NO: 2931522 - RNA, 14 nt, Human
acaggauuauugga

SEQ ID NO: 2931523 - RNA, 18 nt, Human
acaggcaaugcuggcugu

SEQ ID NO: 2931524 - RNA, 12 nt, Human
acaggcaagcac

SEQ ID NO: 2931525 - RNA, 21 nt, Human
acacuggcucacccaguccug

SEQ ID NO: 2931526 - RNA, 20 nt, Human
acacuggcucacccaguccu

SEQ ID NO: 2931527 - RNA, 14 nt, Human
acacugcauguuug

SEQ ID NO: 2931528 - RNA, 15 nt, Human
acacugcauguuugu

SEQ ID NO: 2931529 - RNA, 19 nt, Human
acagaggcagccccauucu

SEQ ID NO: 2931530 - RNA, 23 nt, Human
acagaggccaugggccuccugug

SEQ ID NO: 2931531 - RNA, 13 nt, Human
acagacacaggcc

SEQ ID NO: 2931532 - RNA, 14 nt, Human
acagacacaggccc

SEQ ID NO: 2931533 - RNA, 14 nt, Human
acagaggcagcccc

SEQ ID NO: 2931534 - RNA, 15 nt, Human
acagaggcagcccca

SEQ ID NO: 2931535 - RNA, 15 nt, Human
acacuguacugcaau

SEQ ID NO: 2931536 - RNA, 11 nt, Human
acagacacagg

SEQ ID NO: 2931537 - RNA, 23 nt, Human
acagagucucacuguugcccagg

SEQ ID NO: 2931538 - RNA, 15 nt, Human
acagagugagacucu

SEQ ID NO: 2931539 - RNA, 14 nt, Human
acagaggggguggc

SEQ ID NO: 2931540 - RNA, 19 nt, Human
acagagugagacucugucu

SEQ ID NO: 2931541 - RNA, 21 nt, Human
acagcaguugaaaagacucca

SEQ ID NO: 2931542 - RNA, 23 nt, Human
acagcaguugaaaagacuccaaa

SEQ ID NO: 2931543 - RNA, 22 nt, Human
acagcaguugaaaagacuccaa

SEQ ID NO: 2931544 - RNA, 16 nt, Human
aaagccuccuccagcc

SEQ ID NO: 2931545 - RNA, 16 nt, Human
aaaggcuccaggagca

SEQ ID NO: 2931546 - RNA, 15 nt, Human
aaaggcuccaggagc

SEQ ID NO: 2931547 - RNA, 14 nt, Human
aaaggcagaagcaa

SEQ ID NO: 2931548 - RNA, 20 nt, Human
aaaggcuccaggagcagcca

SEQ ID NO: 2931549 - RNA, 19 nt, Human
aaaggcuccaggagcagcc

SEQ ID NO: 2931550 - RNA, 13 nt, Human
aaaguggaaaaau

SEQ ID NO: 2931551 - RNA, 13 nt, Human
aaauaaaacuuuu

SEQ ID NO: 2931552 - RNA, 16 nt, Human
aaauaaaacuuuuuaa

SEQ ID NO: 2931553 - RNA, 19 nt, Human
aaauaaaacuuuuuaaaau

SEQ ID NO: 2931554 - RNA, 19 nt, Human
aaauaguggugugauuugg

SEQ ID NO: 2931555 - RNA, 20 nt, Human
aaauagcuuuuuucucugau

SEQ ID NO: 2931556 - RNA, 17 nt, Human
aaauagcuuuuuucucu

SEQ ID NO: 2931557 - RNA, 24 nt, Human
aaauagcucaggugucccugcacu

SEQ ID NO: 2931558 - RNA, 18 nt, Human
aaaucugcuuuuuaaaga

SEQ ID NO: 2931559 - RNA, 20 nt, Human
aaauauuuauuuuaauaaug

SEQ ID NO: 2931560 - RNA, 13 nt, Human
aaauauuuauuuu

SEQ ID NO: 2931561 - RNA, 15 nt, Human
aaauauuuauuuuaa

SEQ ID NO: 2931562 - RNA, 14 nt, Human
aaaucaaauaugca

SEQ ID NO: 2931563 - RNA, 12 nt, Human
aaaucaaauaug

SEQ ID NO: 2931564 - RNA, 15 nt, Human
aaaucaaauaugcaa

SEQ ID NO: 2931565 - RNA, 15 nt, Human
aaagaaauguaaggg

SEQ ID NO: 2931566 - RNA, 13 nt, Human
aaagaagcagacc

SEQ ID NO: 2931567 - RNA, 16 nt, Human
aaagaagcagaccauu

SEQ ID NO: 2931568 - RNA, 23 nt, Human
aaagaaggcauggacuucuggau

SEQ ID NO: 2931569 - RNA, 14 nt, Human
aaagaguaggaaga

SEQ ID NO: 2931570 - RNA, 11 nt, Human
aaacugagcau

SEQ ID NO: 2931571 - RNA, 15 nt, Human
aaacucugagugcaa

SEQ ID NO: 2931572 - RNA, 13 nt, Human
aaacucugagugc

SEQ ID NO: 2931573 - RNA, 23 nt, Human
aaacugagaugugaacacaucag

SEQ ID NO: 2931574 - RNA, 21 nt, Human
aaacugagaugugaacacauc

SEQ ID NO: 2931575 - RNA, 12 nt, Human
aaagauauuuug

SEQ ID NO: 2931576 - RNA, 16 nt, Human
aaagauauuuugcuuu

SEQ ID NO: 2931577 - RNA, 17 nt, Human
aaagauauuuugcuuug

SEQ ID NO: 2931578 - RNA, 18 nt, Human
aaacucuccucugcugcu

SEQ ID NO: 2931579 - RNA, 20 nt, Human
aaacccgucucuacuaaaaa

SEQ ID NO: 2931580 - RNA, 21 nt, Human
aaacccgucucuacuaaaaau

SEQ ID NO: 2931581 - RNA, 18 nt, Human
aaaccaucauugaaaucu

SEQ ID NO: 2931582 - RNA, 22 nt, Human
aaaaucccuuaccucggugccu

SEQ ID NO: 2931583 - RNA, 21 nt, Human
aaaaucuacacuccagugaga

SEQ ID NO: 2931584 - RNA, 18 nt, Human
aaaaguucugcagauaaa

SEQ ID NO: 2931585 - RNA, 13 nt, Human
aaaaguugaauuu

SEQ ID NO: 2931586 - RNA, 17 nt, Human
aaaauaaaacuuuuuaa

SEQ ID NO: 2931587 - RNA, 15 nt, Human
aaaaagaaaggaggg

SEQ ID NO: 2931588 - RNA, 16 nt, Human
aaaaagaaacauuugg

SEQ ID NO: 2931589 - RNA, 19 nt, Human
aaacacugguuuuaaauau

SEQ ID NO: 2931590 - RNA, 16 nt, Human
aaacacuguucucugc

SEQ ID NO: 2931591 - RNA, 16 nt, Human
aaaaucucaauauuuc

SEQ ID NO: 2931592 - RNA, 19 nt, Human
aaaaucucaaauuucuaaa

SEQ ID NO: 2931593 - RNA, 22 nt, Human
aaaaucucaaauuucuaaaucu

SEQ ID NO: 2931594 - RNA, 14 nt, Human
aacugaucauguuu

SEQ ID NO: 2931595 - RNA, 14 nt, Human
aacugauaaagaug

SEQ ID NO: 2931596 - RNA, 19 nt, Human
aacuuaaauaaugugaaac

SEQ ID NO: 2931597 - RNA, 15 nt, Human
aacugacucuuaaga

SEQ ID NO: 2931598 - RNA, 18 nt, Human
aacugacucuuaagaaga

SEQ ID NO: 2931599 - RNA, 20 nt, Human
aacugagaugugaacacauc

SEQ ID NO: 2931600 - RNA, 19 nt, Human
aacugacucuuaagaagac

SEQ ID NO: 2931601 - RNA, 20 nt, Human
aacugacucuuaagaagacu

SEQ ID NO: 2931602 - RNA, 13 nt, Human
aacuuaaugaaaa

SEQ ID NO: 2931603 - RNA, 18 nt, Human
aacuuaaucuaaauggaa

SEQ ID NO: 2931604 - RNA, 15 nt, Human
aacuuaaucuaaaug

SEQ ID NO: 2931605 - RNA, 16 nt, Human
aacuuaaucuaaaugg

SEQ ID NO: 2931606 - RNA, 21 nt, Human
aacuuuaugcuaagugaaaua

SEQ ID NO: 2931607 - RNA, 20 nt, Human
aacuuuaugcuaagugaaau

SEQ ID NO: 2931608 - RNA, 21 nt, Human
aacacaucuaguaguuguucu

SEQ ID NO: 2931609 - RNA, 20 nt, Human
aacacauuaaagguacuuug

SEQ ID NO: 2931610 - RNA, 15 nt, Human
aacacauuaaaggua

SEQ ID NO: 2931611 - RNA, 16 nt, Human
aacacaucagcuugcc

SEQ ID NO: 2931612 - RNA, 18 nt, Human
aacaaauuuacagagaca

SEQ ID NO: 2931613 - RNA, 19 nt, Human
aaauugacacuuaaaaaug

SEQ ID NO: 2931614 - RNA, 13 nt, Human
aaauucuuucauu

SEQ ID NO: 2931615 - RNA, 21 nt, Human
aaauucuugcaaaguaucccu

SEQ ID NO: 2931616 - RNA, 18 nt, Human
aaauucuugcaaaguauc

SEQ ID NO: 2931617 - RNA, 23 nt, Human
aaaugccuuacccucauguucuu

SEQ ID NO: 2931618 - RNA, 17 nt, Human
aaaucuuauaauuuaaa

SEQ ID NO: 2931619 - RNA, 22 nt, Human
aaauguuguucucuucuuuaaa

SEQ ID NO: 2931620 - RNA, 22 nt, Human
aaauguuuauuuaaaagagcag

SEQ ID NO: 2931621 - RNA, 15 nt, Human
aaauguuuauuuaaa

SEQ ID NO: 2931622 - RNA, 17 nt, Human
aaauguuuauuuaaaag

SEQ ID NO: 2931623 - RNA, 18 nt, Human
aaauguuuauuuaaaaga

SEQ ID NO: 2931624 - RNA, 14 nt, Human
aaauguuuauuuaa

SEQ ID NO: 2931625 - RNA, 22 nt, Human
aacagcaacacaaagcuuuugc

SEQ ID NO: 2931626 - RNA, 13 nt, Human
aaccacgcuggac

SEQ ID NO: 2931627 - RNA, 15 nt, Human
aaccacuucagcuga

SEQ ID NO: 2931628 - RNA, 22 nt, Human
aaccacuggaaaguuuaugguu

SEQ ID NO: 2931629 - RNA, 21 nt, Human
aaccgaacugauguaaguaaa

SEQ ID NO: 2931630 - RNA, 16 nt, Human
aacccgggaggcagag

SEQ ID NO: 2931631 - RNA, 17 nt, Human
aaccuagggugauauua

SEQ ID NO: 2931632 - RNA, 12 nt, Human
aaguugaauuuu

SEQ ID NO: 2931633 - RNA, 21 nt, Human
aaguggaaaaauagccugccu

SEQ ID NO: 2931634 - RNA, 19 nt, Human
aaguggaaaaauagccugc

SEQ ID NO: 2931635 - RNA, 20 nt, Human
aagucuagguugguagaguu

SEQ ID NO: 2931636 - RNA, 22 nt, Human
aaguccucuuuucugagaggac

SEQ ID NO: 2931637 - RNA, 18 nt, Human
aaguccucuuuucugaga

SEQ ID NO: 2931638 - RNA, 18 nt, Human
aaguccaagcauuuagau

SEQ ID NO: 2931639 - RNA, 17 nt, Human
aaguccaagcauaccaa

SEQ ID NO: 2931640 - RNA, 12 nt, Human
aaggugcaucug

SEQ ID NO: 2931641 - RNA, 19 nt, Human
aaguagaagucuuagaugu

SEQ ID NO: 2931642 - RNA, 20 nt, Human
aaguagaagucuuagaugua

SEQ ID NO: 2931643 - RNA, 17 nt, Human
aaguaucccuacuguaa

SEQ ID NO: 2931644 - RNA, 18 nt, Human
aaguaucccuacuguaau

SEQ ID NO: 2931645 - RNA, 23 nt, Human
aaguaucccuacuguaauuugug

SEQ ID NO: 2931646 - RNA, 21 nt, Human
aaguagaagucuuagauguau

SEQ ID NO: 2931647 - RNA, 21 nt, Human
aaguagggacuucugucuuca

SEQ ID NO: 2931648 - RNA, 18 nt, Human
aaggucauuuuuuuuaag

SEQ ID NO: 2931649 - RNA, 19 nt, Human
aaggucauuuuuuuuaaga

SEQ ID NO: 2931650 - RNA, 23 nt, Human
aagggaaacugccagcaacgcag

SEQ ID NO: 2931651 - RNA, 17 nt, Human
aagggaaacugccagca

SEQ ID NO: 2931652 - RNA, 16 nt, Human
aagggaaacugccagc

SEQ ID NO: 2931653 - RNA, 22 nt, Human
aagcuacugccauccuggccca

SEQ ID NO: 2931654 - RNA, 17 nt, Human
aagcuacugccauccug

SEQ ID NO: 2931655 - RNA, 15 nt, Human
aagcugggcagguug

SEQ ID NO: 2931656 - RNA, 18 nt, Human
aagcuggucccacucagu

SEQ ID NO: 2931657 - RNA, 21 nt, Human
aagcuggucccacucagucca

SEQ ID NO: 2931658 - RNA, 13 nt, Human
aaggacacuagaa

SEQ ID NO: 2931659 - RNA, 15 nt, Human
aaggauguucuagca

SEQ ID NO: 2931660 - RNA, 15 nt, Human
aaggauugcuacugu

SEQ ID NO: 2931661 - RNA, 20 nt, Human
aaggcagcucuaaaugucaa

SEQ ID NO: 2931662 - RNA, 21 nt, Human
aagcgauucuucugcuucagc

SEQ ID NO: 2931663 - RNA, 17 nt, Human
aagcgauucuucugcuu

SEQ ID NO: 2931664 - RNA, 23 nt, Human
aagccagcaggcucucaggccag

SEQ ID NO: 2931665 - RNA, 20 nt, Human
aagccagcaggcucucaggc

SEQ ID NO: 2931666 - RNA, 19 nt, Human
aagauucuauguuaauauu

SEQ ID NO: 2931667 - RNA, 11 nt, Human
aagauucuaug

SEQ ID NO: 2931668 - RNA, 17 nt, Human
aagcagcguuucuauga

SEQ ID NO: 2931669 - RNA, 20 nt, Human
aagcagcguuucuaugacac

SEQ ID NO: 2931670 - RNA, 14 nt, Human
aagcagcguuucua

SEQ ID NO: 2931671 - RNA, 21 nt, Human
aagcagcguuucuaugacaca

SEQ ID NO: 2931672 - RNA, 22 nt, Human
aagcagcguuucuaugacacau

SEQ ID NO: 2931673 - RNA, 19 nt, Human
aagccagcaggcucucagg

SEQ ID NO: 2931674 - RNA, 12 nt, Human
aagauaaaugug

SEQ ID NO: 2931675 - RNA, 23 nt, Human
aagauacaguuacucagaauucu

SEQ ID NO: 2931676 - RNA, 13 nt, Human
aagauaaaugugc

SEQ ID NO: 2931677 - RNA, 13 nt, Human
aagauacugaaau

SEQ ID NO: 2931678 - RNA, 13 nt, Human
aauacucuuauau

SEQ ID NO: 2931679 - RNA, 22 nt, Human
aauacucuacccucuuagaaaa

SEQ ID NO: 2931680 - RNA, 20 nt, Human
aauacucuacccucuuagaa

SEQ ID NO: 2931681 - RNA, 13 nt, Human
aauagacaauuua

SEQ ID NO: 2931682 - RNA, 15 nt, Human
aauagaauugacauu

SEQ ID NO: 2931683 - RNA, 21 nt, Human
aauagaauugacauugaaauc

SEQ ID NO: 2931684 - RNA, 22 nt, Human
aauagaauugacauugaaaucu

SEQ ID NO: 2931685 - RNA, 13 nt, Human
aauauguuucaca

SEQ ID NO: 2931686 - RNA, 15 nt, Human
aauauguuucacaca

SEQ ID NO: 2931687 - RNA, 14 nt, Human
aaucaccgaaaacg

SEQ ID NO: 2931688 - RNA, 15 nt, Human
aaucaccgaaaacgu

SEQ ID NO: 2931689 - RNA, 19 nt, Human
aauccagacccggcugcgu

SEQ ID NO: 2931690 - RNA, 17 nt, Human
aauccagacccggcugc

SEQ ID NO: 2931691 - RNA, 16 nt, Human
aaucucaaauuucuaa

SEQ ID NO: 2931692 - RNA, 15 nt, Human
aaucucaaauuucua

SEQ ID NO: 2931693 - RNA, 21 nt, Human
aaucucugauucccugauuua

SEQ ID NO: 2931694 - RNA, 17 nt, Human
aaucucaaauuucuaaa

SEQ ID NO: 2931695 - RNA, 18 nt, Human
aaucucaaauuucuaaau

SEQ ID NO: 2931696 - RNA, 15 nt, Human
aaugauuaugaauua

SEQ ID NO: 2931697 - RNA, 21 nt, Human
aaugauuaugaauuacauuug

SEQ ID NO: 2931698 - RNA, 16 nt, Human
aaugauuaauuaaaac

SEQ ID NO: 2931699 - RNA, 15 nt, Human
aaugugaaaagaaaa

SEQ ID NO: 2931700 - RNA, 15 nt, Human
aauguuugccucugc

SEQ ID NO: 2931701 - RNA, 16 nt, Human
aauguuugccucugcc

SEQ ID NO: 2931702 - RNA, 23 nt, Human
aauguuucaaacauauauaacaa

SEQ ID NO: 2931703 - RNA, 19 nt, Human
aaugcgugcauaccacuuu

SEQ ID NO: 2931704 - RNA, 18 nt, Human
aaugcgugcauaccacuu

SEQ ID NO: 2931705 - RNA, 23 nt, Human
aaugccuuacccucauguucuua

SEQ ID NO: 2931706 - RNA, 15 nt, Human
agcaugaagacagag

SEQ ID NO: 2931707 - RNA, 19 nt, Human
agcaucgcuuaggagaagu

SEQ ID NO: 2931708 - RNA, 18 nt, Human
agcauccuggcacccggc

SEQ ID NO: 2931709 - RNA, 22 nt, Human
agcauccuggcacccggccccu

SEQ ID NO: 2931710 - RNA, 23 nt, Human
agcauccuggcacccggccccug

SEQ ID NO: 2931711 - RNA, 23 nt, Human
agcaugccuggauggggcugcac

SEQ ID NO: 2931712 - RNA, 20 nt, Human
agcaugccuggauggggcug

SEQ ID NO: 2931713 - RNA, 23 nt, Human
agccaagugugguagagugugcc

SEQ ID NO: 2931714 - RNA, 16 nt, Human
agcaguugaaaagacu

SEQ ID NO: 2931715 - RNA, 13 nt, Human
agcaguugaaaag

SEQ ID NO: 2931716 - RNA, 23 nt, Human
agcaguucagagcugcccucucc

SEQ ID NO: 2931717 - RNA, 20 nt, Human
agcaguucagagcugcccuc

SEQ ID NO: 2931718 - RNA, 13 nt, Human
agcagcguuucua

SEQ ID NO: 2931719 - RNA, 20 nt, Human
agcagugcaugcugucccuu

SEQ ID NO: 2931720 - RNA, 19 nt, Human
agcagugcaugcugucccu

SEQ ID NO: 2931721 - RNA, 18 nt, Human
agcagugcaugcuguccc

SEQ ID NO: 2931722 - RNA, 12 nt, Human
agcacacuggcu

SEQ ID NO: 2931723 - RNA, 19 nt, Human
agcacacuggcucacccag

SEQ ID NO: 2931724 - RNA, 23 nt, Human
agcacacuugacaucaacugcau

SEQ ID NO: 2931725 - RNA, 20 nt, Human
agcacacuggcucacccagu

SEQ ID NO: 2931726 - RNA, 17 nt, Human
agcacagacccugcccu

SEQ ID NO: 2931727 - RNA, 20 nt, Human
agcacagacccugcccugug

SEQ ID NO: 2931728 - RNA, 19 nt, Human
agcacagacccugcccugu

SEQ ID NO: 2931729 - RNA, 18 nt, Human
agcacagacccugcccug

SEQ ID NO: 2931730 - RNA, 16 nt, Human
agcacugacuucuaag

SEQ ID NO: 2931731 - RNA, 13 nt, Human
agccccagugccc

SEQ ID NO: 2931732 - RNA, 14 nt, Human
agccccagugccca

SEQ ID NO: 2931733 - RNA, 15 nt, Human
agccccagugcccac

SEQ ID NO: 2931734 - RNA, 17 nt, Human
agcccucaauugugaaa

SEQ ID NO: 2931735 - RNA, 16 nt, Human
agcccucaauugugaa

SEQ ID NO: 2931736 - RNA, 13 nt, Human
agccccauucugc

SEQ ID NO: 2931737 - RNA, 16 nt, Human
agccccauucugccug

SEQ ID NO: 2931738 - RNA, 20 nt, Human
agccagcaggcucucaggcc

SEQ ID NO: 2931739 - RNA, 17 nt, Human
agccagcaggcucucag

SEQ ID NO: 2931740 - RNA, 19 nt, Human
agccagcaggcucucaggc

SEQ ID NO: 2931741 - RNA, 18 nt, Human
agccagcaggcucucagg

SEQ ID NO: 2931742 - RNA, 22 nt, Human
agccgggcgugguggcaggcac

SEQ ID NO: 2931743 - RNA, 22 nt, Human
agccucccacgacugcccggca

SEQ ID NO: 2931744 - RNA, 21 nt, Human
agccucccaaagugcugggau

SEQ ID NO: 2931745 - RNA, 14 nt, Human
agccuccuccagcc

SEQ ID NO: 2931746 - RNA, 20 nt, Human
agccucccgaguagcuggga

SEQ ID NO: 2931747 - RNA, 18 nt, Human
agccucccgaguagcugg

SEQ ID NO: 2931748 - RNA, 19 nt, Human
agccucccgaguagcuggg

SEQ ID NO: 2931749 - RNA, 21 nt, Human
agccgccaugcuccuggccca

SEQ ID NO: 2931750 - RNA, 13 nt, Human
agccgcuggggcc

SEQ ID NO: 2931751 - RNA, 12 nt, Human
agccgcccaagg

SEQ ID NO: 2931752 - RNA, 13 nt, Human
agccgcccaaggc

SEQ ID NO: 2931753 - RNA, 15 nt, Human
agccgcccaaggccu

SEQ ID NO: 2931754 - RNA, 16 nt, Human
agccgcccaaggccuu

SEQ ID NO: 2931755 - RNA, 23 nt, Human
agacagagucucacuguugccca

SEQ ID NO: 2931756 - RNA, 21 nt, Human
agacagauacuccuccaaggu

SEQ ID NO: 2931757 - RNA, 15 nt, Human
agacagauacuccuc

SEQ ID NO: 2931758 - RNA, 15 nt, Human
agacagcccgggcuc

SEQ ID NO: 2931759 - RNA, 14 nt, Human
agacagcccgggcu

SEQ ID NO: 2931760 - RNA, 12 nt, Human
agacagcugccu

SEQ ID NO: 2931761 - RNA, 12 nt, Human
agacagcucuua

SEQ ID NO: 2931762 - RNA, 11 nt, Human
agacagcucuu

SEQ ID NO: 2931763 - RNA, 21 nt, Human
agacgcugugcugcccugccc

SEQ ID NO: 2931764 - RNA, 18 nt, Human
agacggagucccaccuug

SEQ ID NO: 2931765 - RNA, 22 nt, Human
agacgcugugcugcccugccca

SEQ ID NO: 2931766 - RNA, 22 nt, Human
agacgugcacgcacacugucug

SEQ ID NO: 2931767 - RNA, 21 nt, Human
agacgugcacgcacacugucu

SEQ ID NO: 2931768 - RNA, 19 nt, Human
agagcccaccuuggcucaa

SEQ ID NO: 2931769 - RNA, 13 nt, Human
agagcccacgccc

SEQ ID NO: 2931770 - RNA, 16 nt, Human
agagcccacgccccca

SEQ ID NO: 2931771 - RNA, 22 nt, Human
agagaggguggugaccucugcc

SEQ ID NO: 2931772 - RNA, 20 nt, Human
agagaggguggugaccucug

SEQ ID NO: 2931773 - RNA, 21 nt, Human
agagaggguggugaccucugc

SEQ ID NO: 2931774 - RNA, 17 nt, Human
agagaacuuccagaucc

SEQ ID NO: 2931775 - RNA, 19 nt, Human
agacuggaagcacagcuuc

SEQ ID NO: 2931776 - RNA, 17 nt, Human
agacuggaagcacagcu

SEQ ID NO: 2931777 - RNA, 16 nt, Human
agacuggaagcacagc

SEQ ID NO: 2931778 - RNA, 21 nt, Human
agacugcauuauauuuauuac

SEQ ID NO: 2931779 - RNA, 19 nt, Human
agauauaugcucugcaugu

SEQ ID NO: 2931780 - RNA, 14 nt, Human
agaucuucuguggg

SEQ ID NO: 2931781 - RNA, 16 nt, Human
agaggaaggagaggag

SEQ ID NO: 2931782 - RNA, 23 nt, Human
agaggacuuuucuuuguggcuuc

SEQ ID NO: 2931783 - RNA, 16 nt, Human
agaggagagaggaccc

SEQ ID NO: 2931784 - RNA, 15 nt, Human
agaggagagaggacc

SEQ ID NO: 2931785 - RNA, 19 nt, Human
agaggguggugaccucugc

SEQ ID NO: 2931786 - RNA, 20 nt, Human
agaggguggugaccucugcc

SEQ ID NO: 2931787 - RNA, 22 nt, Human
agaggguggugaccucugccug

SEQ ID NO: 2931788 - RNA, 12 nt, Human
agagggcacaga

SEQ ID NO: 2931789 - RNA, 11 nt, Human
agagugggagc

SEQ ID NO: 2931790 - RNA, 19 nt, Human
agaguggggauaugauuua

SEQ ID NO: 2931791 - RNA, 20 nt, Human
agagugugauguauguguaa

SEQ ID NO: 2931792 - RNA, 14 nt, Human
agagugugccugaa

SEQ ID NO: 2931793 - RNA, 14 nt, Human
agagcccaggccuc

SEQ ID NO: 2931794 - RNA, 13 nt, Human
agagcccaggccu

SEQ ID NO: 2931795 - RNA, 15 nt, Human
agagcccaggccucc

SEQ ID NO: 2931796 - RNA, 23 nt, Human
agcugcgguccacccaggagccc

SEQ ID NO: 2931797 - RNA, 23 nt, Human
agcuccgcuuucuacccagcgag

SEQ ID NO: 2931798 - RNA, 20 nt, Human
agcuccgcuuucuacccagc

SEQ ID NO: 2931799 - RNA, 21 nt, Human
agcuccgcuuucuacccagcg

SEQ ID NO: 2931800 - RNA, 12 nt, Human
agcuccuucugu

SEQ ID NO: 2931801 - RNA, 13 nt, Human
agcuccuucuguc

SEQ ID NO: 2931802 - RNA, 21 nt, Human
agcugcgguccacccaggagc

SEQ ID NO: 2931803 - RNA, 22 nt, Human
agcuccccucggagaagagcug

SEQ ID NO: 2931804 - RNA, 12 nt, Human
agcuuuugcaua

SEQ ID NO: 2931805 - RNA, 20 nt, Human
aggaauccagacccggcugc

SEQ ID NO: 2931806 - RNA, 17 nt, Human
aggaauccagacccggc

SEQ ID NO: 2931807 - RNA, 21 nt, Human
aggaaucaugugccaagcaga

SEQ ID NO: 2931808 - RNA, 22 nt, Human
aggagaagucuucuauuuauuu

SEQ ID NO: 2931809 - RNA, 23 nt, Human
aggagaagucuucuauuuauuua

SEQ ID NO: 2931810 - RNA, 13 nt, Human
aggaccucaggug

SEQ ID NO: 2931811 - RNA, 21 nt, Human
aggaugcuuguacauaaugcg

SEQ ID NO: 2931812 - RNA, 23 nt, Human
aggaugcuuguacauaaugcgug

SEQ ID NO: 2931813 - RNA, 14 nt, Human
aggauuauuggaaa

SEQ ID NO: 2931814 - RNA, 17 nt, Human
aggauguugaaaaaguu

SEQ ID NO: 2931815 - RNA, 15 nt, Human
aggauguucugggac

SEQ ID NO: 2931816 - RNA, 16 nt, Human
aggauguucugggaca

SEQ ID NO: 2931817 - RNA, 22 nt, Human
aggauguucuagcauggcugcc

SEQ ID NO: 2931818 - RNA, 23 nt, Human
aggaugguucccuugaugaagaa

SEQ ID NO: 2931819 - RNA, 20 nt, Human
agguaaaagcaucacaugaa

SEQ ID NO: 2931820 - RNA, 20 nt, Human
agguaaugaccaugaaagac

SEQ ID NO: 2931821 - RNA, 21 nt, Human
agguaaugaccaugaaagacu

SEQ ID NO: 2931822 - RNA, 19 nt, Human
agguaaugaccaugaaaga

SEQ ID NO: 2931823 - RNA, 14 nt, Human
agguacacuuguga

SEQ ID NO: 2931824 - RNA, 18 nt, Human
aggucuguucuuuccaaa

SEQ ID NO: 2931825 - RNA, 22 nt, Human
aggucuguuuuguguacuuuua

SEQ ID NO: 2931826 - RNA, 18 nt, Human
aggugcuacaaaaacaca

SEQ ID NO: 2931827 - RNA, 22 nt, Human
aggucuguucuuuccaaaguac

SEQ ID NO: 2931828 - RNA, 23 nt, Human
aggucuguucuuuccaaaguaca

SEQ ID NO: 2931829 - RNA, 22 nt, Human
aggugcuacaaaaacacagcaa

SEQ ID NO: 2931830 - RNA, 21 nt, Human
aggugcuacaaaaacacagca

SEQ ID NO: 2931831 - RNA, 20 nt, Human
aggugcuacaaaaacacagc

SEQ ID NO: 2931832 - RNA, 19 nt, Human
aggugcuacaaaaacacag

SEQ ID NO: 2931833 - RNA, 16 nt, Human
agguuaaaaagaaaag

SEQ ID NO: 2931834 - RNA, 23 nt, Human
aggugcuaggaacacuccuucac

SEQ ID NO: 2931835 - RNA, 24 nt, Human
aggugcuacaaaaacacagcaagg

SEQ ID NO: 2931836 - RNA, 23 nt, Human
aggugcuacaaaaacacagcaag

SEQ ID NO: 2931837 - RNA, 22 nt, Human
aggugcuaggaacacuccuuca

SEQ ID NO: 2931838 - RNA, 19 nt, Human
aggugcuaggaacacuccu

SEQ ID NO: 2931839 - RNA, 23 nt, Human
agguucccuuugacgccauccca

SEQ ID NO: 2931840 - RNA, 14 nt, Human
agguucaaagauau

SEQ ID NO: 2931841 - RNA, 13 nt, Human
agguucccuuuga

SEQ ID NO: 2931842 - RNA, 22 nt, Human
agguucccuuugacgccauccc

SEQ ID NO: 2931843 - RNA, 11 nt, Human
agggucccugg

SEQ ID NO: 2931844 - RNA, 19 nt, Human
aggguaucaggugcugcca

SEQ ID NO: 2931845 - RNA, 18 nt, Human
aggguaucaggugcugcc

SEQ ID NO: 2931846 - RNA, 21 nt, Human
aggguaucaggugcugccauc

SEQ ID NO: 2931847 - RNA, 15 nt, Human
aggguaucuggugac

SEQ ID NO: 2931848 - RNA, 21 nt, Human
aggggccucuuaugggcuggg

SEQ ID NO: 2931849 - RNA, 20 nt, Human
aggggccucuuaugggcugg

SEQ ID NO: 2931850 - RNA, 19 nt, Human
aggggccucuuaugggcug

SEQ ID NO: 2931851 - RNA, 23 nt, Human
agggacagaggggguggccuccc

SEQ ID NO: 2931852 - RNA, 21 nt, Human
aggcugucaauuacaggaagu

SEQ ID NO: 2931853 - RNA, 22 nt, Human
agggacagaggggguggccucc

SEQ ID NO: 2931854 - RNA, 13 nt, Human
aggcuguauccca

SEQ ID NO: 2931855 - RNA, 18 nt, Human
aggcuguaucccaugagc

SEQ ID NO: 2931856 - RNA, 19 nt, Human
aggcugucaauuacaggaa

SEQ ID NO: 2931857 - RNA, 20 nt, Human
aggcugucaauuacaggaag

SEQ ID NO: 2931858 - RNA, 17 nt, Human
aggcuagauguauguac

SEQ ID NO: 2931859 - RNA, 15 nt, Human
aggcuagauguaugu

SEQ ID NO: 2931860 - RNA, 16 nt, Human
aggcuagauguaugua

SEQ ID NO: 2931861 - RNA, 22 nt, Human
aggcccuugucggccccaccag

SEQ ID NO: 2931862 - RNA, 23 nt, Human
aggcccuucucuccagccccugg

SEQ ID NO: 2931863 - RNA, 22 nt, Human
aggcccuucucuccagccccug

SEQ ID NO: 2931864 - RNA, 21 nt, Human
aggcccuucucuccagccccu

SEQ ID NO: 2931865 - RNA, 20 nt, Human
aggcccuucucuccagcccc

SEQ ID NO: 2931866 - RNA, 21 nt, Human
aggcuagaaccaccugccuau

SEQ ID NO: 2931867 - RNA, 17 nt, Human
aggcuacugucagcucc

SEQ ID NO: 2931868 - RNA, 16 nt, Human
auauuauguuaaaacu

SEQ ID NO: 2931869 - RNA, 22 nt, Human
auauuauuugcagugcaguaua

SEQ ID NO: 2931870 - RNA, 22 nt, Human
auauuuauuacuguaagaaaau

SEQ ID NO: 2931871 - RNA, 19 nt, Human
auauuuacuucuuauacau

SEQ ID NO: 2931872 - RNA, 13 nt, Human
auauuuauuuuaa

SEQ ID NO: 2931873 - RNA, 16 nt, Human
auauccaaguuugaau

SEQ ID NO: 2931874 - RNA, 20 nt, Human
auaucccuuggacauuuuau

SEQ ID NO: 2931875 - RNA, 14 nt, Human
auauccuaauaaaa

SEQ ID NO: 2931876 - RNA, 13 nt, Human
auauccuaauaaa

SEQ ID NO: 2931877 - RNA, 12 nt, Human
auauccuaauaa

SEQ ID NO: 2931878 - RNA, 23 nt, Human
auaucccuuggacauuuuauguc

SEQ ID NO: 2931879 - RNA, 22 nt, Human
auaucccuuggacauuuuaugu

SEQ ID NO: 2931880 - RNA, 20 nt, Human
auauccuaauaaaaagguga

SEQ ID NO: 2931881 - RNA, 18 nt, Human
auauccuaauaaaaaggu

SEQ ID NO: 2931882 - RNA, 16 nt, Human
auauccuaauaaaaag

SEQ ID NO: 2931883 - RNA, 19 nt, Human
auauuaccacagacauacu

SEQ ID NO: 2931884 - RNA, 22 nt, Human
auauuaccacagacauacuaac

SEQ ID NO: 2931885 - RNA, 20 nt, Human
auaugcuucuguuuuauaau

SEQ ID NO: 2931886 - RNA, 22 nt, Human
auaugcuucuguuuuauaauuu

SEQ ID NO: 2931887 - RNA, 21 nt, Human
auaugcuuauacacuuacacu

SEQ ID NO: 2931888 - RNA, 19 nt, Human
auauauuuuuuucugaaau

SEQ ID NO: 2931889 - RNA, 21 nt, Human
auagccaaggccaaaggaagc

SEQ ID NO: 2931890 - RNA, 15 nt, Human
auagccaaggccaaa

SEQ ID NO: 2931891 - RNA, 18 nt, Human
auagcagcuuauucacaa

SEQ ID NO: 2931892 - RNA, 21 nt, Human
auagcaguaaaaaaugguguu

SEQ ID NO: 2931893 - RNA, 15 nt, Human
auagcaguaaaaaau

SEQ ID NO: 2931894 - RNA, 23 nt, Human
auaggugcuacaaaaacacagca

SEQ ID NO: 2931895 - RNA, 21 nt, Human
auaggugcuacaaaaacacag

SEQ ID NO: 2931896 - RNA, 15 nt, Human
auaggugcuacaaaa

SEQ ID NO: 2931897 - RNA, 14 nt, Human
auaggugcuacaaa

SEQ ID NO: 2931898 - RNA, 17 nt, Human
auaguaugguggcuggg

SEQ ID NO: 2931899 - RNA, 18 nt, Human
auaguaugguggcugggu

SEQ ID NO: 2931900 - RNA, 14 nt, Human
auagguuuggacaa

SEQ ID NO: 2931901 - RNA, 15 nt, Human
auagguuuaauaauu

SEQ ID NO: 2931902 - RNA, 14 nt, Human
auagucaaauugug

SEQ ID NO: 2931903 - RNA, 17 nt, Human
auaccugucccccugac

SEQ ID NO: 2931904 - RNA, 18 nt, Human
auaccugucccccugaca

SEQ ID NO: 2931905 - RNA, 11 nt, Human
auacccacccc

SEQ ID NO: 2931906 - RNA, 12 nt, Human
auacccaccccc

SEQ ID NO: 2931907 - RNA, 14 nt, Human
auaauguaagcucu

SEQ ID NO: 2931908 - RNA, 21 nt, Human
auaaugcgugcauaccacuuu

SEQ ID NO: 2931909 - RNA, 20 nt, Human
auaaugcgugcauaccacuu

SEQ ID NO: 2931910 - RNA, 15 nt, Human
auaauguaagcucua

SEQ ID NO: 2931911 - RNA, 23 nt, Human
auaauguuucaaacauauauaac

SEQ ID NO: 2931912 - RNA, 15 nt, Human
auaaugucccuucac

SEQ ID NO: 2931913 - RNA, 21 nt, Human
auacaccacuacauucuguua

SEQ ID NO: 2931914 - RNA, 19 nt, Human
auacaccacuacauucugu

SEQ ID NO: 2931915 - RNA, 20 nt, Human
auacaccacuacauucuguu

SEQ ID NO: 2931916 - RNA, 18 nt, Human
auacacacucaaaucaag

SEQ ID NO: 2931917 - RNA, 17 nt, Human
auacacacucaaaucaa

SEQ ID NO: 2931918 - RNA, 18 nt, Human
auacaccacuacauucug

SEQ ID NO: 2931919 - RNA, 17 nt, Human
auaaaacuuuuuaaaau

SEQ ID NO: 2931920 - RNA, 21 nt, Human
auaaacuuuaccuuuuuuaua

SEQ ID NO: 2931921 - RNA, 16 nt, Human
auaaacuuuaccuuuu

SEQ ID NO: 2931922 - RNA, 24 nt, Human
auaaacuuuaccuuuuuuauacau

SEQ ID NO: 2931923 - RNA, 15 nt, Human
auaaaacuuuuuaaa

SEQ ID NO: 2931924 - RNA, 11 nt, Human
auaaaacuuuu

SEQ ID NO: 2931925 - RNA, 13 nt, Human
auaaagcagcguu

SEQ ID NO: 2931926 - RNA, 14 nt, Human
auaaagcagcguuu

SEQ ID NO: 2931927 - RNA, 18 nt, Human
auaaagcagcguuucuau

SEQ ID NO: 2931928 - RNA, 19 nt, Human
auaaagcagcguuucuaug

SEQ ID NO: 2931929 - RNA, 20 nt, Human
auaaagcagcguuucuauga

SEQ ID NO: 2931930 - RNA, 21 nt, Human
auaacaaaggauacuuauuua

SEQ ID NO: 2931931 - RNA, 20 nt, Human
auaacaaaggauacuuauuu

SEQ ID NO: 2931932 - RNA, 18 nt, Human
auaaaggauuaaugucaa

SEQ ID NO: 2931933 - RNA, 23 nt, Human
aguggcuuaaaacaacacucaca

SEQ ID NO: 2931934 - RNA, 15 nt, Human
agugggagcugccug

SEQ ID NO: 2931935 - RNA, 14 nt, Human
agugggagcugccu

SEQ ID NO: 2931936 - RNA, 16 nt, Human
aguguauuuugaaauu

SEQ ID NO: 2931937 - RNA, 17 nt, Human
aguguauuuuuuuacua

SEQ ID NO: 2931938 - RNA, 18 nt, Human
aguguauuuuuuuacuaa

SEQ ID NO: 2931939 - RNA, 15 nt, Human
agugucuuaauuaaa

SEQ ID NO: 2931940 - RNA, 18 nt, Human
agugucuuaauuaaaaga

SEQ ID NO: 2931941 - RNA, 17 nt, Human
agugucuuaauuaaaag

SEQ ID NO: 2931942 - RNA, 22 nt, Human
aguugaaaagacuccaaagaaa

SEQ ID NO: 2931943 - RNA, 23 nt, Human
aguugaaaaucuuauaauuuaaa

SEQ ID NO: 2931944 - RNA, 21 nt, Human
aguugugugaauaccccaaga

SEQ ID NO: 2931945 - RNA, 16 nt, Human
aguuguguuugaagca

SEQ ID NO: 2931946 - RNA, 14 nt, Human
aguugaagacagag

SEQ ID NO: 2931947 - RNA, 13 nt, Human
aguuguucugaaa

SEQ ID NO: 2931948 - RNA, 17 nt, Human
aguuguucugaaauguc

SEQ ID NO: 2931949 - RNA, 20 nt, Human
aguuguuugauucagacagc

SEQ ID NO: 2931950 - RNA, 12 nt, Human
aguuaaauaaau

SEQ ID NO: 2931951 - RNA, 18 nt, Human
aguuacacuaaaagguga

SEQ ID NO: 2931952 - RNA, 16 nt, Human
aguuacagacaaagcg

SEQ ID NO: 2931953 - RNA, 14 nt, Human
aguuacagacaaag

SEQ ID NO: 2931954 - RNA, 20 nt, Human
aguucagguaacaggcagau

SEQ ID NO: 2931955 - RNA, 19 nt, Human
aguucagguaacaggcaga

SEQ ID NO: 2931956 - RNA, 22 nt, Human
aguucaucuugaauuguaagga

SEQ ID NO: 2931957 - RNA, 21 nt, Human
aguugaaaagacuccaaagaa

SEQ ID NO: 2931958 - RNA, 22 nt, Human
aguugaaaaucuuauaauuuaa

SEQ ID NO: 2931959 - RNA, 14 nt, Human
agugaagacaauga

SEQ ID NO: 2931960 - RNA, 16 nt, Human
agugaagacaaugacu

SEQ ID NO: 2931961 - RNA, 16 nt, Human
agucugauucccaagc

SEQ ID NO: 2931962 - RNA, 18 nt, Human
agucugauucccaagcuc

SEQ ID NO: 2931963 - RNA, 17 nt, Human
agucuggaaugcagugg

SEQ ID NO: 2931964 - RNA, 20 nt, Human
agugaacuugggccacugug

SEQ ID NO: 2931965 - RNA, 17 nt, Human
agucugcuuagaaauaa

SEQ ID NO: 2931966 - RNA, 22 nt, Human
aguccuggcaugggaaugaaug

SEQ ID NO: 2931967 - RNA, 21 nt, Human
aguccuggcaugggaaugaau

SEQ ID NO: 2931968 - RNA, 20 nt, Human
aguccuggcaugggaaugaa

SEQ ID NO: 2931969 - RNA, 12 nt, Human
aguccuguaaug

SEQ ID NO: 2931970 - RNA, 15 nt, Human
agucugaaggcuggg

SEQ ID NO: 2931971 - RNA, 13 nt, Human
agucugaaggcug

SEQ ID NO: 2931972 - RNA, 16 nt, Human
agucugaaggcugggu

SEQ ID NO: 2931973 - RNA, 12 nt, Human
agucugaaggcu

SEQ ID NO: 2931974 - RNA, 15 nt, Human
aguaugaggcauuug

SEQ ID NO: 2931975 - RNA, 16 nt, Human
aguaugaggcauuugu

SEQ ID NO: 2931976 - RNA, 15 nt, Human
aguaucucagggccu

SEQ ID NO: 2931977 - RNA, 15 nt, Human
aguaucuugaagacu

SEQ ID NO: 2931978 - RNA, 12 nt, Human
aguaucuugaag

SEQ ID NO: 2931979 - RNA, 11 nt, Human
aguaucuugaa

SEQ ID NO: 2931980 - RNA, 23 nt, Human
agucaaauugugugaaagguacu

SEQ ID NO: 2931981 - RNA, 19 nt, Human
agucaaauugugugaaagg

SEQ ID NO: 2931982 - RNA, 18 nt, Human
auguuuucaaauguucuc

SEQ ID NO: 2931983 - RNA, 17 nt, Human
auguuuuauauagcaag

SEQ ID NO: 2931984 - RNA, 15 nt, Human
auguuuucaaauguu

SEQ ID NO: 2931985 - RNA, 12 nt, Human
auguuuucaaau

SEQ ID NO: 2931986 - RNA, 19 nt, Human
auguuugccucugccucug

SEQ ID NO: 2931987 - RNA, 22 nt, Human
auguuugccucugccucugaca

SEQ ID NO: 2931988 - RNA, 18 nt, Human
auguuugccucugccucu

SEQ ID NO: 2931989 - RNA, 13 nt, Human
auguucugggaca

SEQ ID NO: 2931990 - RNA, 17 nt, Human
auguuucacacaaacaa

SEQ ID NO: 2931991 - RNA, 16 nt, Human
auguuucacacaaaca

SEQ ID NO: 2931992 - RNA, 21 nt, Human
auguuucaaacauauauaaca

SEQ ID NO: 2931993 - RNA, 20 nt, Human
auguucuccagucauuaugu

SEQ ID NO: 2931994 - RNA, 11 nt, Human
auguucuggga

SEQ ID NO: 2931995 - RNA, 12 nt, Human
auguucugggac

SEQ ID NO: 2931996 - RNA, 18 nt, Human
augugggcagugauguca

SEQ ID NO: 2931997 - RNA, 17 nt, Human
auguucuaagaagugaa

SEQ ID NO: 2931998 - RNA, 14 nt, Human
augucuuuucuugc

SEQ ID NO: 2931999 - RNA, 23 nt, Human
augugaacaguuguguuugaagc

SEQ ID NO: 2932000 - RNA, 11 nt, Human
augugaacagu

SEQ ID NO: 2932001 - RNA, 21 nt, Human
augugaacaguuguguuugaa

SEQ ID NO: 2932002 - RNA, 22 nt, Human
augugaaacuggauuaaacuua

SEQ ID NO: 2932003 - RNA, 19 nt, Human
auggucaccaaaucagcug

SEQ ID NO: 2932004 - RNA, 17 nt, Human
auguauuuuugucaauu

SEQ ID NO: 2932005 - RNA, 16 nt, Human
auguaagggaaacugc

SEQ ID NO: 2932006 - RNA, 14 nt, Human
auguaagggaaacu

SEQ ID NO: 2932007 - RNA, 19 nt, Human
auguaagggaaacugccag

SEQ ID NO: 2932008 - RNA, 15 nt, Human
auguaauuaaguacu

SEQ ID NO: 2932009 - RNA, 17 nt, Human
auguaauuaaguacuau

SEQ ID NO: 2932010 - RNA, 15 nt, Human
augcacaaacagagg

SEQ ID NO: 2932011 - RNA, 24 nt, Human
augauguuuuccaugaguccccug

SEQ ID NO: 2932012 - RNA, 17 nt, Human
augaugccaugaggaac

SEQ ID NO: 2932013 - RNA, 16 nt, Human
augaugccaugaggaa

SEQ ID NO: 2932014 - RNA, 19 nt, Human
augccucucucaggccaaa

SEQ ID NO: 2932015 - RNA, 16 nt, Human
augcaugaaguaauau

SEQ ID NO: 2932016 - RNA, 17 nt, Human
augccucucucaggcca

SEQ ID NO: 2932017 - RNA, 23 nt, Human
augcacacauuuuuuaaaugcac

SEQ ID NO: 2932018 - RNA, 16 nt, Human
augcacagaguuguua

SEQ ID NO: 2932019 - RNA, 17 nt, Human
augcacaaacagaggcc

SEQ ID NO: 2932020 - RNA, 16 nt, Human
augcacaaacagaggc

SEQ ID NO: 2932021 - RNA, 17 nt, Human
augcacagaguuguuac

SEQ ID NO: 2932022 - RNA, 18 nt, Human
augcacagaguuguuaca

SEQ ID NO: 2932023 - RNA, 13 nt, Human
augcuuguacaua

SEQ ID NO: 2932024 - RNA, 14 nt, Human
augcuuguacauaa

SEQ ID NO: 2932025 - RNA, 12 nt, Human
augcuuguacau

SEQ ID NO: 2932026 - RNA, 17 nt, Human
auggaggacuccaggca

SEQ ID NO: 2932027 - RNA, 18 nt, Human
auggaggacuccaggcag

SEQ ID NO: 2932028 - RNA, 19 nt, Human
auggaggacuccaggcagc

SEQ ID NO: 2932029 - RNA, 21 nt, Human
auggaggacuccaggcagcag

SEQ ID NO: 2932030 - RNA, 15 nt, Human
auggauuuccagcca

SEQ ID NO: 2932031 - RNA, 16 nt, Human
augcucuuuacuucau

SEQ ID NO: 2932032 - RNA, 11 nt, Human
augcugcccug

SEQ ID NO: 2932033 - RNA, 23 nt, Human
augcugccaauauccuaauaaaa

SEQ ID NO: 2932034 - RNA, 22 nt, Human
augcugccaauauccuaauaaa

SEQ ID NO: 2932035 - RNA, 21 nt, Human
augcugccaauauccuaauaa

SEQ ID NO: 2932036 - RNA, 20 nt, Human
augcugccaauauccuaaua

SEQ ID NO: 2932037 - RNA, 13 nt, Human
augcugccaauau

SEQ ID NO: 2932038 - RNA, 19 nt, Human
augcugccaauauccuaau

SEQ ID NO: 2932039 - RNA, 18 nt, Human
augcugccaauauccuaa

SEQ ID NO: 2932040 - RNA, 17 nt, Human
augcugccaauauccua

SEQ ID NO: 2932041 - RNA, 14 nt, Human
augcugccaauauc

SEQ ID NO: 2932042 - RNA, 23 nt, Human
aucagcugcugaaacaacaaaua

SEQ ID NO: 2932043 - RNA, 22 nt, Human
aucagcugcugaaacaacaaau

SEQ ID NO: 2932044 - RNA, 23 nt, Human
aucagcacgauuucuguuuagau

SEQ ID NO: 2932045 - RNA, 19 nt, Human
aucagcacgauuucuguuu

SEQ ID NO: 2932046 - RNA, 20 nt, Human
aucagcacgauuucuguuua

SEQ ID NO: 2932047 - RNA, 14 nt, Human
aucaccgaaaacgu

SEQ ID NO: 2932048 - RNA, 21 nt, Human
aucaccgaaaacguggcugcu

SEQ ID NO: 2932049 - RNA, 19 nt, Human
aucaccgaaaacguggcug

SEQ ID NO: 2932050 - RNA, 21 nt, Human
aucagcugcugaaacaacaaa

SEQ ID NO: 2932051 - RNA, 18 nt, Human
aucagccugcuccagcug

SEQ ID NO: 2932052 - RNA, 17 nt, Human
aucagccugcuccagcu

SEQ ID NO: 2932053 - RNA, 19 nt, Human
aucagccugcuccagcugu

SEQ ID NO: 2932054 - RNA, 21 nt, Human
aucacagccucugaaaaccaa

SEQ ID NO: 2932055 - RNA, 18 nt, Human
aucaccaacgucugugcc

SEQ ID NO: 2932056 - RNA, 23 nt, Human
aucacccgcuaagagggagggag

SEQ ID NO: 2932057 - RNA, 19 nt, Human
aucaccaacgucugugcca

SEQ ID NO: 2932058 - RNA, 17 nt, Human
auauuuauuuuaauaau

SEQ ID NO: 2932059 - RNA, 14 nt, Human
auauuuauuuuaau

SEQ ID NO: 2932060 - RNA, 15 nt, Human
auauuuauuuuaaua

SEQ ID NO: 2932061 - RNA, 20 nt, Human
auccucccaccucagccucc

SEQ ID NO: 2932062 - RNA, 18 nt, Human
auccucccaccucagccu

SEQ ID NO: 2932063 - RNA, 19 nt, Human
auccucccaccucagccuc

SEQ ID NO: 2932064 - RNA, 15 nt, Human
aucccauuuaaaaaa

SEQ ID NO: 2932065 - RNA, 14 nt, Human
aucccauuuaaaaa

SEQ ID NO: 2932066 - RNA, 15 nt, Human
auccagacccggcug

SEQ ID NO: 2932067 - RNA, 15 nt, Human
auccccuguagagug

SEQ ID NO: 2932068 - RNA, 15 nt, Human
auccucccaccucag

SEQ ID NO: 2932069 - RNA, 23 nt, Human
auccuccaggugcacaagcucca

SEQ ID NO: 2932070 - RNA, 23 nt, Human
auccucauacccacccccaccca

SEQ ID NO: 2932071 - RNA, 11 nt, Human
auccuccaggu

SEQ ID NO: 2932072 - RNA, 23 nt, Human
augaccuuucaauaggaaaaacu

SEQ ID NO: 2932073 - RNA, 22 nt, Human
augaccuuucaauaggaaaaac

SEQ ID NO: 2932074 - RNA, 21 nt, Human
augaccuuucaauaggaaaaa

SEQ ID NO: 2932075 - RNA, 13 nt, Human
augaaagacugua

SEQ ID NO: 2932076 - RNA, 16 nt, Human
augaaagacuguacaa

SEQ ID NO: 2932077 - RNA, 17 nt, Human
augaaagacuguacaaa

SEQ ID NO: 2932078 - RNA, 19 nt, Human
augaaagacuguacaaagu

SEQ ID NO: 2932079 - RNA, 17 nt, Human
aucuugaauuguaagga

SEQ ID NO: 2932080 - RNA, 14 nt, Human
aucuucuuuauaau

SEQ ID NO: 2932081 - RNA, 18 nt, Human
aucuugaagacuuuucuu

SEQ ID NO: 2932082 - RNA, 22 nt, Human
aucuucugaacuuggcgcugcc

SEQ ID NO: 2932083 - RNA, 22 nt, Human
aucugcuuuuuaaagaaugcuc

SEQ ID NO: 2932084 - RNA, 21 nt, Human
aucucccccagccccauccuc

SEQ ID NO: 2932085 - RNA, 14 nt, Human
aucuauauuuuaca

SEQ ID NO: 2932086 - RNA, 17 nt, Human
aucuauauuuuacauaa

SEQ ID NO: 2932087 - RNA, 21 nt, Human
aucuauauuuuacauaaauuu

SEQ ID NO: 2932088 - RNA, 21 nt, Human
caaauguucaucaaugaauga

SEQ ID NO: 2932089 - RNA, 20 nt, Human
caaauguucaucaaugaaug

SEQ ID NO: 2932090 - RNA, 22 nt, Human
caaauucugcuugcuugcuuuu

SEQ ID NO: 2932091 - RNA, 16 nt, Human
caaaucagcugcuacu

SEQ ID NO: 2932092 - RNA, 13 nt, Human
caaaucagcugcu

SEQ ID NO: 2932093 - RNA, 18 nt, Human
caaauaugcaaagcacug

SEQ ID NO: 2932094 - RNA, 17 nt, Human
caaauaugcaaagcacu

SEQ ID NO: 2932095 - RNA, 16 nt, Human
caaauaugcaaagcac

SEQ ID NO: 2932096 - RNA, 16 nt, Human
caaauaaguguauuuu

SEQ ID NO: 2932097 - RNA, 17 nt, Human
caaauaaguguauuuug

SEQ ID NO: 2932098 - RNA, 18 nt, Human
caaauaaguguauuuuga

SEQ ID NO: 2932099 - RNA, 13 nt, Human
caaauaaguguau

SEQ ID NO: 2932100 - RNA, 21 nt, Human
caaaggaugcccaaagaugca

SEQ ID NO: 2932101 - RNA, 21 nt, Human
caaaggauacuuauuuaaaua

SEQ ID NO: 2932102 - RNA, 16 nt, Human
caaaggauacuuauuu

SEQ ID NO: 2932103 - RNA, 19 nt, Human
caaauaaguguauuuugaa

SEQ ID NO: 2932104 - RNA, 20 nt, Human
caaauaaguguauuuugaaa

SEQ ID NO: 2932105 - RNA, 21 nt, Human
caaauaaguguauuuugaaau

SEQ ID NO: 2932106 - RNA, 14 nt, Human
caaauaugcaaagc

SEQ ID NO: 2932107 - RNA, 18 nt, Human
auuuuuuuacuaauagac

SEQ ID NO: 2932108 - RNA, 23 nt, Human
caaacuuuauugauucaccuccu

SEQ ID NO: 2932109 - RNA, 16 nt, Human
caaagcuuguuaagau

SEQ ID NO: 2932110 - RNA, 17 nt, Human
caaagcuuuugcauauu

SEQ ID NO: 2932111 - RNA, 18 nt, Human
caaagcuaggccuggcca

SEQ ID NO: 2932112 - RNA, 16 nt, Human
caaagcuaggccuggc

SEQ ID NO: 2932113 - RNA, 17 nt, Human
caaagcuaggccuggcc

SEQ ID NO: 2932114 - RNA, 20 nt, Human
caaagccaaagcuaggccug

SEQ ID NO: 2932115 - RNA, 21 nt, Human
caaagccaaagcuaggccugg

SEQ ID NO: 2932116 - RNA, 15 nt, Human
caaagcuaggccugg

SEQ ID NO: 2932117 - RNA, 23 nt, Human
caacaugccagccacugugauag

SEQ ID NO: 2932118 - RNA, 22 nt, Human
caacauuucucauguugaaacu

SEQ ID NO: 2932119 - RNA, 21 nt, Human
caaccccuucgcuccuguguc

SEQ ID NO: 2932120 - RNA, 18 nt, Human
caaccccuucgcuccugu

SEQ ID NO: 2932121 - RNA, 19 nt, Human
caaccccuucgcuccugug

SEQ ID NO: 2932122 - RNA, 16 nt, Human
caacagugagagacuc

SEQ ID NO: 2932123 - RNA, 22 nt, Human
caacaucuuggucagauuugaa

SEQ ID NO: 2932124 - RNA, 15 nt, Human
caacagguuuuccug

SEQ ID NO: 2932125 - RNA, 18 nt, Human
caacaggguuuuuuucca

SEQ ID NO: 2932126 - RNA, 19 nt, Human
caacagguuuuccugaaga

SEQ ID NO: 2932127 - RNA, 24 nt, Human
caacaggcugggcuucaguggcag

SEQ ID NO: 2932128 - RNA, 23 nt, Human
caacaggcugggcuucaguggca

SEQ ID NO: 2932129 - RNA, 15 nt, Human
caaauuuacagagac

SEQ ID NO: 2932130 - RNA, 14 nt, Human
caaauuuacagaga

SEQ ID NO: 2932131 - RNA, 15 nt, Human
caaauugugugaaag

SEQ ID NO: 2932132 - RNA, 19 nt, Human
caacucuccuccagaguca

SEQ ID NO: 2932133 - RNA, 16 nt, Human
caaccugauugugucu

SEQ ID NO: 2932134 - RNA, 15 nt, Human
caacccucaucacca

SEQ ID NO: 2932135 - RNA, 12 nt, Human
caacccucauca

SEQ ID NO: 2932136 - RNA, 16 nt, Human
caacugcauuggcuuu

SEQ ID NO: 2932137 - RNA, 21 nt, Human
caacucugaaggguaauuaua

SEQ ID NO: 2932138 - RNA, 20 nt, Human
caacucuccuccagagucag

SEQ ID NO: 2932139 - RNA, 15 nt, Human
caaggauugcuacug

SEQ ID NO: 2932140 - RNA, 16 nt, Human
caagggccuggccuga

SEQ ID NO: 2932141 - RNA, 19 nt, Human
caagggccuggccugagcu

SEQ ID NO: 2932142 - RNA, 12 nt, Human
caaggugggagg

SEQ ID NO: 2932143 - RNA, 23 nt, Human
caaggugggaggauugcuugagc

SEQ ID NO: 2932144 - RNA, 22 nt, Human
caagugugguagagugugccug

SEQ ID NO: 2932145 - RNA, 22 nt, Human
caagugauucuccugccucagc

SEQ ID NO: 2932146 - RNA, 21 nt, Human
caagugauucuccugccucag

SEQ ID NO: 2932147 - RNA, 19 nt, Human
caagugaaaaaggaggaag

SEQ ID NO: 2932148 - RNA, 16 nt, Human
caagugauucuccugc

SEQ ID NO: 2932149 - RNA, 17 nt, Human
caagugauucuccugcc

SEQ ID NO: 2932150 - RNA, 17 nt, Human
caagcgugagccacugc

SEQ ID NO: 2932151 - RNA, 18 nt, Human
caagcgugagccacugca

SEQ ID NO: 2932152 - RNA, 22 nt, Human
caaggacccagccugagauggu

SEQ ID NO: 2932153 - RNA, 22 nt, Human
caaggauccugagccagauuuc

SEQ ID NO: 2932154 - RNA, 21 nt, Human
caaggaugaucuaggaagacu

SEQ ID NO: 2932155 - RNA, 13 nt, Human
caaggauccugag

SEQ ID NO: 2932156 - RNA, 16 nt, Human
caagcgugagccacug

SEQ ID NO: 2932157 - RNA, 21 nt, Human
caagccaccaacauacuccca

SEQ ID NO: 2932158 - RNA, 18 nt, Human
caagcaccuccugccucg

SEQ ID NO: 2932159 - RNA, 17 nt, Human
caagcacuaaacaaaga

SEQ ID NO: 2932160 - RNA, 17 nt, Human
cacaugugcacaugcac

SEQ ID NO: 2932161 - RNA, 14 nt, Human
cacaugugcacaug

SEQ ID NO: 2932162 - RNA, 15 nt, Human
cacaugugcacaugc

SEQ ID NO: 2932163 - RNA, 17 nt, Human
cacauuaaagguacuuu

SEQ ID NO: 2932164 - RNA, 13 nt, Human
cacauuaaaugac

SEQ ID NO: 2932165 - RNA, 15 nt, Human
cacauuaaaugacuc

SEQ ID NO: 2932166 - RNA, 16 nt, Human
cacauuccugaacagg

SEQ ID NO: 2932167 - RNA, 16 nt, Human
cacauuccugaugcuu

SEQ ID NO: 2932168 - RNA, 12 nt, Human
cacauaucuguc

SEQ ID NO: 2932169 - RNA, 18 nt, Human
cacaucagcacgauuucu

SEQ ID NO: 2932170 - RNA, 18 nt, Human
cacaugccucucucaggc

SEQ ID NO: 2932171 - RNA, 17 nt, Human
cacaugccucucucagg

SEQ ID NO: 2932172 - RNA, 13 nt, Human
cacaugccucucu

SEQ ID NO: 2932173 - RNA, 19 nt, Human
cacaucagcacgauuucug

SEQ ID NO: 2932174 - RNA, 23 nt, Human
cacauguccaagaagcccaggaa

SEQ ID NO: 2932175 - RNA, 19 nt, Human
cacaugccucucucaggcc

SEQ ID NO: 2932176 - RNA, 19 nt, Human
caccacaugugcacaugca

SEQ ID NO: 2932177 - RNA, 15 nt, Human
caccacaugugcaca

SEQ ID NO: 2932178 - RNA, 18 nt, Human
caccacaugugcacaugc

SEQ ID NO: 2932179 - RNA, 19 nt, Human
caccacuacauucuguuaa

SEQ ID NO: 2932180 - RNA, 20 nt, Human
caccacuacauucuguuaau

SEQ ID NO: 2932181 - RNA, 14 nt, Human
caccaccucuuugg

SEQ ID NO: 2932182 - RNA, 16 nt, Human
caccacuacauucugu

SEQ ID NO: 2932183 - RNA, 17 nt, Human
caccacuacauucuguu

SEQ ID NO: 2932184 - RNA, 18 nt, Human
caccacuacauucuguua

SEQ ID NO: 2932185 - RNA, 17 nt, Human
caccacacccagcccac

SEQ ID NO: 2932186 - RNA, 13 nt, Human
caccacacccagc

SEQ ID NO: 2932187 - RNA, 15 nt, Human
caccacacccagccc

SEQ ID NO: 2932188 - RNA, 17 nt, Human
cacauuggaaacaaguc

SEQ ID NO: 2932189 - RNA, 15 nt, Human
caccaagcccaguua

SEQ ID NO: 2932190 - RNA, 19 nt, Human
cacagugagucgaggacag

SEQ ID NO: 2932191 - RNA, 20 nt, Human
cacagugagucgaggacagg

SEQ ID NO: 2932192 - RNA, 18 nt, Human
cacagugagucgaggaca

SEQ ID NO: 2932193 - RNA, 20 nt, Human
cacaggcccggcuccaggcu

SEQ ID NO: 2932194 - RNA, 23 nt, Human
cacaggcccggcuccaggcuccu

SEQ ID NO: 2932195 - RNA, 17 nt, Human
cacauacacacacacgc

SEQ ID NO: 2932196 - RNA, 22 nt, Human
cacauaagccaaaacugagcau

SEQ ID NO: 2932197 - RNA, 19 nt, Human
cacauaagccaaaacugag

SEQ ID NO: 2932198 - RNA, 21 nt, Human
cacauaagccaaaacugagca

SEQ ID NO: 2932199 - RNA, 14 nt, Human
cacaguuuucugag

SEQ ID NO: 2932200 - RNA, 16 nt, Human
cacaggcccggcucca

SEQ ID NO: 2932201 - RNA, 17 nt, Human
cacaggcccggcuccag

SEQ ID NO: 2932202 - RNA, 18 nt, Human
cacaggcccggcuccagg

SEQ ID NO: 2932203 - RNA, 19 nt, Human
cacaggcccggcuccaggc

SEQ ID NO: 2932204 - RNA, 10 nt, Human
cacaggcagg

SEQ ID NO: 2932205 - RNA, 12 nt, Human
cacaggaucagu

SEQ ID NO: 2932206 - RNA, 15 nt, Human
cacaggaucagucug

SEQ ID NO: 2932207 - RNA, 16 nt, Human
cacaggaucagucuga

SEQ ID NO: 2932208 - RNA, 19 nt, Human
cacaggaaccacaagacug

SEQ ID NO: 2932209 - RNA, 15 nt, Human
cacaggaaguagagg

SEQ ID NO: 2932210 - RNA, 20 nt, Human
cacaggaaccacaagacugc

SEQ ID NO: 2932211 - RNA, 20 nt, Human
cacagaguuguuacauuuuu

SEQ ID NO: 2932212 - RNA, 18 nt, Human
cacagaugggugcuugga

SEQ ID NO: 2932213 - RNA, 14 nt, Human
cacagaugggugcu

SEQ ID NO: 2932214 - RNA, 20 nt, Human
cacagaugggugcuuggagg

SEQ ID NO: 2932215 - RNA, 22 nt, Human
cacagcaguugaaaagacucca

SEQ ID NO: 2932216 - RNA, 15 nt, Human
cacaccagagcccac

SEQ ID NO: 2932217 - RNA, 12 nt, Human
cacaccagagcc

SEQ ID NO: 2932218 - RNA, 13 nt, Human
cacaccagagccc

SEQ ID NO: 2932219 - RNA, 15 nt, Human
cacaccauaagcuac

SEQ ID NO: 2932220 - RNA, 21 nt, Human
cacaccauaagcuacugccau

SEQ ID NO: 2932221 - RNA, 23 nt, Human
cacaccauaagcuacugccaucc

SEQ ID NO: 2932222 - RNA, 12 nt, Human
cacacagcucug

SEQ ID NO: 2932223 - RNA, 19 nt, Human
cacacagaggcugccucuc

SEQ ID NO: 2932224 - RNA, 14 nt, Human
cacacaccagagcc

SEQ ID NO: 2932225 - RNA, 13 nt, Human
cacaacuauauug

SEQ ID NO: 2932226 - RNA, 21 nt, Human
cacacuugacaucaacugcau

SEQ ID NO: 2932227 - RNA, 22 nt, Human
cacagacccugcccugugggcc

SEQ ID NO: 2932228 - RNA, 21 nt, Human
cacagagaaaguacuucucca

SEQ ID NO: 2932229 - RNA, 16 nt, Human
cacagaguuguuacau

SEQ ID NO: 2932230 - RNA, 17 nt, Human
cacagaguuguuacauu

SEQ ID NO: 2932231 - RNA, 15 nt, Human
cacacuggcucaccc

SEQ ID NO: 2932232 - RNA, 16 nt, Human
cacacuggcucaccca

SEQ ID NO: 2932233 - RNA, 19 nt, Human
cacacuggcucacccaguc

SEQ ID NO: 2932234 - RNA, 12 nt, Human
cacacuggcuca

SEQ ID NO: 2932235 - RNA, 14 nt, Human
cacacugaagaagc

SEQ ID NO: 2932236 - RNA, 19 nt, Human
cacacucaaaucaagaaac

SEQ ID NO: 2932237 - RNA, 13 nt, Human
caauuuuaaacau

SEQ ID NO: 2932238 - RNA, 15 nt, Human
caauuuuaaacauau

SEQ ID NO: 2932239 - RNA, 23 nt, Human
cacaaagaaccaccaggaaagca

SEQ ID NO: 2932240 - RNA, 15 nt, Human
cacaaagcagauccu

SEQ ID NO: 2932241 - RNA, 16 nt, Human
cacaaaaguuucucuu

SEQ ID NO: 2932242 - RNA, 18 nt, Human
cacaaaaguuucucuuuu

SEQ ID NO: 2932243 - RNA, 11 nt, Human
cacaacagauu

SEQ ID NO: 2932244 - RNA, 20 nt, Human
caauaggaaaaacugauuuu

SEQ ID NO: 2932245 - RNA, 21 nt, Human
caauaggaaaaacugauuuuu

SEQ ID NO: 2932246 - RNA, 22 nt, Human
caauaggugcugaguguacaga

SEQ ID NO: 2932247 - RNA, 21 nt, Human
caauaucuuuuuuuuaauaaa

SEQ ID NO: 2932248 - RNA, 18 nt, Human
caaugcaaaccaucauug

SEQ ID NO: 2932249 - RNA, 17 nt, Human
caaugcaaaccaucauu

SEQ ID NO: 2932250 - RNA, 23 nt, Human
caaugcacuuuguucuggcucuu

SEQ ID NO: 2932251 - RNA, 19 nt, Human
caaugcaaaccaucauuga

SEQ ID NO: 2932252 - RNA, 22 nt, Human
caaugaaugaaugaauggcuaa

SEQ ID NO: 2932253 - RNA, 13 nt, Human
caccccagcccca

SEQ ID NO: 2932254 - RNA, 12 nt, Human
caccccagcccc

SEQ ID NO: 2932255 - RNA, 12 nt, Human
cacccaccucag

SEQ ID NO: 2932256 - RNA, 13 nt, Human
cacccaccucagc

SEQ ID NO: 2932257 - RNA, 14 nt, Human
cacccaccucagcc

SEQ ID NO: 2932258 - RNA, 16 nt, Human
cacccaccucagccuc

SEQ ID NO: 2932259 - RNA, 20 nt, Human
cacccaccaucaugucuggc

SEQ ID NO: 2932260 - RNA, 22 nt, Human
cacccaccaucaugucuggcua

SEQ ID NO: 2932261 - RNA, 15 nt, Human
cacccacaccauaag

SEQ ID NO: 2932262 - RNA, 23 nt, Human
cacccaagggccuggccugagcu

SEQ ID NO: 2932263 - RNA, 21 nt, Human
cacccaagggccuggccugag

SEQ ID NO: 2932264 - RNA, 20 nt, Human
cacccaagggccuggccuga

SEQ ID NO: 2932265 - RNA, 19 nt, Human
cacccaagggccuggccug

SEQ ID NO: 2932266 - RNA, 18 nt, Human
cacccaagggccuggccu

SEQ ID NO: 2932267 - RNA, 17 nt, Human
cacccaagggccuggcc

SEQ ID NO: 2932268 - RNA, 16 nt, Human
cacccaagggccuggc

SEQ ID NO: 2932269 - RNA, 17 nt, Human
caccccggccaccugcg

SEQ ID NO: 2932270 - RNA, 16 nt, Human
caccccggccaccugc

SEQ ID NO: 2932271 - RNA, 15 nt, Human
caccccggccaccug

SEQ ID NO: 2932272 - RNA, 14 nt, Human
caccccggccaccu

SEQ ID NO: 2932273 - RNA, 22 nt, Human
cacccccacccaagggccuggc

SEQ ID NO: 2932274 - RNA, 15 nt, Human
ccacugugaagagaa

SEQ ID NO: 2932275 - RNA, 14 nt, Human
ccacugugaagaga

SEQ ID NO: 2932276 - RNA, 19 nt, Human
ccacuggguguaaacacau

SEQ ID NO: 2932277 - RNA, 15 nt, Human
ccacugguucuucuu

SEQ ID NO: 2932278 - RNA, 23 nt, Human
ccacuggugacaugucuuuucuu

SEQ ID NO: 2932279 - RNA, 22 nt, Human
ccacugcuuuuggucuguguga

SEQ ID NO: 2932280 - RNA, 20 nt, Human
ccacugcuuuuggucugugu

SEQ ID NO: 2932281 - RNA, 11 nt, Human
ccacugcucug

SEQ ID NO: 2932282 - RNA, 12 nt, Human
ccacugcucugg

SEQ ID NO: 2932283 - RNA, 13 nt, Human
ccacugcucuggu

SEQ ID NO: 2932284 - RNA, 15 nt, Human
ccacugcucugguua

SEQ ID NO: 2932285 - RNA, 23 nt, Human
ccacugcaucguuucaucuucca

SEQ ID NO: 2932286 - RNA, 21 nt, Human
ccacugcaucguuucaucuuc

SEQ ID NO: 2932287 - RNA, 20 nt, Human
ccacugugcuccagccuggg

SEQ ID NO: 2932288 - RNA, 19 nt, Human
ccacugugccaugugccag

SEQ ID NO: 2932289 - RNA, 15 nt, Human
ccacugugccaugug

SEQ ID NO: 2932290 - RNA, 16 nt, Human
ccacugugccaugugc

SEQ ID NO: 2932291 - RNA, 22 nt, Human
ccagaagaaaauagugguguga

SEQ ID NO: 2932292 - RNA, 14 nt, Human
ccagacccggcugc

SEQ ID NO: 2932293 - RNA, 15 nt, Human
ccagacccggcugcg

SEQ ID NO: 2932294 - RNA, 22 nt, Human
ccagacacauguccaagaagcc

SEQ ID NO: 2932295 - RNA, 20 nt, Human
ccagacacauguccaagaag

SEQ ID NO: 2932296 - RNA, 17 nt, Human
ccagacacauguccaag

SEQ ID NO: 2932297 - RNA, 14 nt, Human
ccagacaucaacag

SEQ ID NO: 2932298 - RNA, 14 nt, Human
ccacccuccuuuca

SEQ ID NO: 2932299 - RNA, 19 nt, Human
ccaccccucaacaccucug

SEQ ID NO: 2932300 - RNA, 12 nt, Human
ccacccccuagg

SEQ ID NO: 2932301 - RNA, 19 nt, Human
ccacccccacccaagggcc

SEQ ID NO: 2932302 - RNA, 15 nt, Human
ccaccugccagggac

SEQ ID NO: 2932303 - RNA, 12 nt, Human
ccaccugccagg

SEQ ID NO: 2932304 - RNA, 14 nt, Human
ccaccugccaggga

SEQ ID NO: 2932305 - RNA, 13 nt, Human
ccaccugccaggg

SEQ ID NO: 2932306 - RNA, 14 nt, Human
ccaccuggcucugu

SEQ ID NO: 2932307 - RNA, 16 nt, Human
ccaccuggcucugugg

SEQ ID NO: 2932308 - RNA, 13 nt, Human
ccaccuggcucug

SEQ ID NO: 2932309 - RNA, 12 nt, Human
ccaccuggcucu

SEQ ID NO: 2932310 - RNA, 20 nt, Human
ccaccuggccucugcacucc

SEQ ID NO: 2932311 - RNA, 18 nt, Human
ccaccuggccucugcacu

SEQ ID NO: 2932312 - RNA, 13 nt, Human
ccaccuggccucu

SEQ ID NO: 2932313 - RNA, 20 nt, Human
ccaccucucucacuccuuga

SEQ ID NO: 2932314 - RNA, 19 nt, Human
ccaccucucucacuccuug

SEQ ID NO: 2932315 - RNA, 16 nt, Human
ccaccucucucacucc

SEQ ID NO: 2932316 - RNA, 14 nt, Human
ccaccucucucacu

SEQ ID NO: 2932317 - RNA, 11 nt, Human
ccacccugcuc

SEQ ID NO: 2932318 - RNA, 12 nt, Human
ccacccugcucu

SEQ ID NO: 2932319 - RNA, 15 nt, Human
ccaccucccugcaau

SEQ ID NO: 2932320 - RNA, 14 nt, Human
ccaccucccugcaa

SEQ ID NO: 2932321 - RNA, 19 nt, Human
ccaccucccugcaauaaaa

SEQ ID NO: 2932322 - RNA, 21 nt, Human
ccaccucccugcaauaaaaug

SEQ ID NO: 2932323 - RNA, 18 nt, Human
ccagcaccaucucuccuc

SEQ ID NO: 2932324 - RNA, 17 nt, Human
ccagcaccaucucuccu

SEQ ID NO: 2932325 - RNA, 16 nt, Human
ccagcaggcucucagg

SEQ ID NO: 2932326 - RNA, 18 nt, Human
ccagcaggcucucaggcc

SEQ ID NO: 2932327 - RNA, 17 nt, Human
ccagcaggcucucaggc

SEQ ID NO: 2932328 - RNA, 14 nt, Human
ccagcacaaagcag

SEQ ID NO: 2932329 - RNA, 17 nt, Human
ccagcaagugagagcug

SEQ ID NO: 2932330 - RNA, 18 nt, Human
ccagcaagugagagcugg

SEQ ID NO: 2932331 - RNA, 19 nt, Human
ccagcaagugagagcuggg

SEQ ID NO: 2932332 - RNA, 17 nt, Human
ccagagccccacagccc

SEQ ID NO: 2932333 - RNA, 23 nt, Human
ccagagccccacagccccaucug

SEQ ID NO: 2932334 - RNA, 14 nt, Human
ccagauugcaacag

SEQ ID NO: 2932335 - RNA, 16 nt, Human
ccagauugcaacaggc

SEQ ID NO: 2932336 - RNA, 14 nt, Human
ccagagcccaccuu

SEQ ID NO: 2932337 - RNA, 16 nt, Human
ccagagccccacagcc

SEQ ID NO: 2932338 - RNA, 13 nt, Human
ccagagccccaca

SEQ ID NO: 2932339 - RNA, 23 nt, Human
ccagauugcaacaggcugggcuu

SEQ ID NO: 2932340 - RNA, 22 nt, Human
ccagauugcaacaggcugggcu

SEQ ID NO: 2932341 - RNA, 15 nt, Human
ccagauuucacucuc

SEQ ID NO: 2932342 - RNA, 19 nt, Human
ccagauuucacucuccuug

SEQ ID NO: 2932343 - RNA, 18 nt, Human
ccagauuucacucuccuu

SEQ ID NO: 2932344 - RNA, 16 nt, Human
ccagcccacuucugcc

SEQ ID NO: 2932345 - RNA, 17 nt, Human
ccagcccacuucugcca

SEQ ID NO: 2932346 - RNA, 23 nt, Human
ccagcaggcucucaggccagcug

SEQ ID NO: 2932347 - RNA, 21 nt, Human
ccagcaggcucucaggccagc

SEQ ID NO: 2932348 - RNA, 20 nt, Human
ccagcaggcucucaggccag

SEQ ID NO: 2932349 - RNA, 19 nt, Human
ccagcaggcucucaggcca

SEQ ID NO: 2932350 - RNA, 19 nt, Human
ccagccccaaaacucuccu

SEQ ID NO: 2932351 - RNA, 17 nt, Human
ccagccgagauagccaa

SEQ ID NO: 2932352 - RNA, 22 nt, Human
ccagccgagauagccaaggcca

SEQ ID NO: 2932353 - RNA, 20 nt, Human
ccagccgagauagccaaggc

SEQ ID NO: 2932354 - RNA, 13 nt, Human
ccagccuggguga

SEQ ID NO: 2932355 - RNA, 23 nt, Human
ccagccuugaccauucuccaccu

SEQ ID NO: 2932356 - RNA, 13 nt, Human
ccagcgagcccug

SEQ ID NO: 2932357 - RNA, 19 nt, Human
ccagccugagcgacaguga

SEQ ID NO: 2932358 - RNA, 15 nt, Human
ccauucugccugccc

SEQ ID NO: 2932359 - RNA, 13 nt, Human
ccauuugcuccuu

SEQ ID NO: 2932360 - RNA, 16 nt, Human
ccaucuuaaaaacaac

SEQ ID NO: 2932361 - RNA, 18 nt, Human
ccauguuuuguuuacggu

SEQ ID NO: 2932362 - RNA, 14 nt, Human
cccaagggccuggc

SEQ ID NO: 2932363 - RNA, 12 nt, Human
cccaagggccug

SEQ ID NO: 2932364 - RNA, 21 nt, Human
ccauuuuguauuuuacuaaua

SEQ ID NO: 2932365 - RNA, 20 nt, Human
ccauuuugcugucccuuuuc

SEQ ID NO: 2932366 - RNA, 13 nt, Human
cccaagugccaaa

SEQ ID NO: 2932367 - RNA, 15 nt, Human
cccaagugccaaaga

SEQ ID NO: 2932368 - RNA, 16 nt, Human
cccaagggccuggccu

SEQ ID NO: 2932369 - RNA, 16 nt, Human
cccacagccccaucug

SEQ ID NO: 2932370 - RNA, 17 nt, Human
cccacaggaucagucug

SEQ ID NO: 2932371 - RNA, 13 nt, Human
cccacaggaucag

SEQ ID NO: 2932372 - RNA, 12 nt, Human
cccaccucagcc

SEQ ID NO: 2932373 - RNA, 14 nt, Human
cccaccucagccuc

SEQ ID NO: 2932374 - RNA, 15 nt, Human
cccaccucagccucc

SEQ ID NO: 2932375 - RNA, 19 nt, Human
cccaccucucucacuccuu

SEQ ID NO: 2932376 - RNA, 12 nt, Human
cccaccuuggcu

SEQ ID NO: 2932377 - RNA, 21 nt, Human
cccaccucagccucccaaagu

SEQ ID NO: 2932378 - RNA, 13 nt, Human
cccaccucucuca

SEQ ID NO: 2932379 - RNA, 17 nt, Human
cccaccucucucacucc

SEQ ID NO: 2932380 - RNA, 14 nt, Human
cccaccucucucac

SEQ ID NO: 2932381 - RNA, 19 nt, Human
cccacgcccccacugguga

SEQ ID NO: 2932382 - RNA, 17 nt, Human
cccacgcccccacuggu

SEQ ID NO: 2932383 - RNA, 15 nt, Human
cccaccuuggcucaa

SEQ ID NO: 2932384 - RNA, 22 nt, Human
cccaccuuggcucaaguccucu

SEQ ID NO: 2932385 - RNA, 14 nt, Human
cccaccuuggcugc

SEQ ID NO: 2932386 - RNA, 15 nt, Human
cccaccuuggcugca

SEQ ID NO: 2932387 - RNA, 13 nt, Human
ccagugagacugu

SEQ ID NO: 2932388 - RNA, 18 nt, Human
ccagugacagucagggaa

SEQ ID NO: 2932389 - RNA, 16 nt, Human
ccagguuucuaugugu

SEQ ID NO: 2932390 - RNA, 13 nt, Human
ccagguuuaagcu

SEQ ID NO: 2932391 - RNA, 20 nt, Human
ccaguaaaugggggugcauu

SEQ ID NO: 2932392 - RNA, 21 nt, Human
ccaguaaaugggggugcauuu

SEQ ID NO: 2932393 - RNA, 22 nt, Human
ccaguaaaugggggugcauuug

SEQ ID NO: 2932394 - RNA, 21 nt, Human
ccaggugcuaggaacacuccu

SEQ ID NO: 2932395 - RNA, 12 nt, Human
ccaggugccagu

SEQ ID NO: 2932396 - RNA, 12 nt, Human
ccaucaugucug

SEQ ID NO: 2932397 - RNA, 13 nt, Human
ccaucaugucugg

SEQ ID NO: 2932398 - RNA, 12 nt, Human
ccaucauugaaa

SEQ ID NO: 2932399 - RNA, 14 nt, Human
ccaucaagccacca

SEQ ID NO: 2932400 - RNA, 13 nt, Human
ccaucaagccacc

SEQ ID NO: 2932401 - RNA, 16 nt, Human
ccaucaagccaccaac

SEQ ID NO: 2932402 - RNA, 15 nt, Human
ccauaugccugggca

SEQ ID NO: 2932403 - RNA, 12 nt, Human
ccaucaagccac

SEQ ID NO: 2932404 - RNA, 13 nt, Human
ccauaugccuggg

SEQ ID NO: 2932405 - RNA, 14 nt, Human
ccagugugacaagg

SEQ ID NO: 2932406 - RNA, 23 nt, Human
ccagugugacaaggauugcuacu

SEQ ID NO: 2932407 - RNA, 15 nt, Human
ccaucucuccuccuu

SEQ ID NO: 2932408 - RNA, 21 nt, Human
ccaucucacacaugagcauca

SEQ ID NO: 2932409 - RNA, 20 nt, Human
ccaucucacacaugagcauc

SEQ ID NO: 2932410 - RNA, 18 nt, Human
ccaucucacacaugagca

SEQ ID NO: 2932411 - RNA, 17 nt, Human
ccaucucacacaugagc

SEQ ID NO: 2932412 - RNA, 15 nt, Human
ccaucucacacauga

SEQ ID NO: 2932413 - RNA, 14 nt, Human
ccaucucacacaug

SEQ ID NO: 2932414 - RNA, 17 nt, Human
ccauccuggcccagggc

SEQ ID NO: 2932415 - RNA, 20 nt, Human
ccauccugaggcuccacuug

SEQ ID NO: 2932416 - RNA, 18 nt, Human
ccauccugaggcuccacu

SEQ ID NO: 2932417 - RNA, 17 nt, Human
ccaucauugaaaucuuu

SEQ ID NO: 2932418 - RNA, 16 nt, Human
ccaucauugaaaucuu

SEQ ID NO: 2932419 - RNA, 14 nt, Human
ccaucauugaaauc

SEQ ID NO: 2932420 - RNA, 14 nt, Human
ccaggcccucugcc

SEQ ID NO: 2932421 - RNA, 13 nt, Human
ccaggcccucugc

SEQ ID NO: 2932422 - RNA, 12 nt, Human
ccaggccagagg

SEQ ID NO: 2932423 - RNA, 14 nt, Human
ccaggccccugcca

SEQ ID NO: 2932424 - RNA, 15 nt, Human
ccaggccccugccac

SEQ ID NO: 2932425 - RNA, 16 nt, Human
ccaggccccugccacc

SEQ ID NO: 2932426 - RNA, 14 nt, Human
ccaggaggccagcc

SEQ ID NO: 2932427 - RNA, 18 nt, Human
ccaggaggccagccuuga

SEQ ID NO: 2932428 - RNA, 15 nt, Human
ccaggaggccagccu

SEQ ID NO: 2932429 - RNA, 20 nt, Human
ccaggaggccagccuugacc

SEQ ID NO: 2932430 - RNA, 21 nt, Human
ccaggccacaagacccuugug

SEQ ID NO: 2932431 - RNA, 22 nt, Human
ccaggaggcggaccuuguagug

SEQ ID NO: 2932432 - RNA, 21 nt, Human
ccaggcuuagucacugagaca

SEQ ID NO: 2932433 - RNA, 23 nt, Human
ccaggcuuagucacugagacagc

SEQ ID NO: 2932434 - RNA, 22 nt, Human
ccaggcuuagucacugagacag

SEQ ID NO: 2932435 - RNA, 23 nt, Human
ccaggcugggagagccuuccagg

SEQ ID NO: 2932436 - RNA, 15 nt, Human
ccaggcccucugccc

SEQ ID NO: 2932437 - RNA, 18 nt, Human
ccaggguggccacaccuc

SEQ ID NO: 2932438 - RNA, 24 nt, Human
ccaggguggccacaccucuauccc

SEQ ID NO: 2932439 - RNA, 20 nt, Human
ccagguagaggguguguaag

SEQ ID NO: 2932440 - RNA, 14 nt, Human
cccaugagccucag

SEQ ID NO: 2932441 - RNA, 20 nt, Human
cccaugagggagaugccaug

SEQ ID NO: 2932442 - RNA, 21 nt, Human
cccaugagggagaugccauga

SEQ ID NO: 2932443 - RNA, 22 nt, Human
cccaugagccucagcauccugg

SEQ ID NO: 2932444 - RNA, 22 nt, Human
cccaucugcgggggcagugcuc

SEQ ID NO: 2932445 - RNA, 21 nt, Human
cccaucugcgggggcagugcu

SEQ ID NO: 2932446 - RNA, 17 nt, Human
cccaucugcagggcccc

SEQ ID NO: 2932447 - RNA, 19 nt, Human
cccaucucuacaaaaagca

SEQ ID NO: 2932448 - RNA, 14 nt, Human
cccaguugggugga

SEQ ID NO: 2932449 - RNA, 16 nt, Human
ccccacuccggcccuc

SEQ ID NO: 2932450 - RNA, 20 nt, Human
ccccacuccggcccuccaga

SEQ ID NO: 2932451 - RNA, 14 nt, Human
ccccacuggugaca

SEQ ID NO: 2932452 - RNA, 19 nt, Human
ccccaccgcagacaggacc

SEQ ID NO: 2932453 - RNA, 15 nt, Human
ccccaccgcagacag

SEQ ID NO: 2932454 - RNA, 21 nt, Human
ccccacccaagggccuggccu

SEQ ID NO: 2932455 - RNA, 19 nt, Human
ccccuguggaugcugcugc

SEQ ID NO: 2932456 - RNA, 20 nt, Human
ccccuguggaugcugcugcc

SEQ ID NO: 2932457 - RNA, 22 nt, Human
ccccuguggaugcugcugcccc

SEQ ID NO: 2932458 - RNA, 22 nt, Human
cccgaauagcugggacuacagg

SEQ ID NO: 2932459 - RNA, 20 nt, Human
ccccuuccauggacuuuguu

SEQ ID NO: 2932460 - RNA, 13 nt, Human
ccccuuccaugga

SEQ ID NO: 2932461 - RNA, 23 nt, Human
cccgcuaagagggagggagggcu

SEQ ID NO: 2932462 - RNA, 22 nt, Human
cccgcccaggcuuagucacuga

SEQ ID NO: 2932463 - RNA, 20 nt, Human
cccgcccaggcuuagucacu

SEQ ID NO: 2932464 - RNA, 17 nt, Human
ccccugcccggcugcgg

SEQ ID NO: 2932465 - RNA, 19 nt, Human
ccccugcccggcugcggaa

SEQ ID NO: 2932466 - RNA, 15 nt, Human
ccccuggaugcagcc

SEQ ID NO: 2932467 - RNA, 14 nt, Human
ccccuggcacuggc

SEQ ID NO: 2932468 - RNA, 16 nt, Human
ccccuggcacuggcaa

SEQ ID NO: 2932469 - RNA, 19 nt, Human
ccccuggaugcagccucac

SEQ ID NO: 2932470 - RNA, 18 nt, Human
ccccuggaugcagccuca

SEQ ID NO: 2932471 - RNA, 17 nt, Human
ccccugcuggguguggc

SEQ ID NO: 2932472 - RNA, 14 nt, Human
ccccugcugggugu

SEQ ID NO: 2932473 - RNA, 11 nt, Human
ccccugcuggu

SEQ ID NO: 2932474 - RNA, 13 nt, Human
ccccugcugguuc

SEQ ID NO: 2932475 - RNA, 15 nt, Human
ccccugcugguucag

SEQ ID NO: 2932476 - RNA, 20 nt, Human
ccccugcugguucaggguug

SEQ ID NO: 2932477 - RNA, 24 nt, Human
cccccacccaagggccuggccuga

SEQ ID NO: 2932478 - RNA, 13 nt, Human
cccccacccaagg

SEQ ID NO: 2932479 - RNA, 14 nt, Human
ccccauccucugua

SEQ ID NO: 2932480 - RNA, 13 nt, Human
cccccacugguga

SEQ ID NO: 2932481 - RNA, 11 nt, Human
cccccacuggu

SEQ ID NO: 2932482 - RNA, 15 nt, Human
cccccacuggugaca

SEQ ID NO: 2932483 - RNA, 14 nt, Human
ccccagugcccaca

SEQ ID NO: 2932484 - RNA, 15 nt, Human
ccccagugcccacag

SEQ ID NO: 2932485 - RNA, 16 nt, Human
ccccagugcccacagg

SEQ ID NO: 2932486 - RNA, 20 nt, Human
ccccagugcccacaggauca

SEQ ID NO: 2932487 - RNA, 17 nt, Human
cccccugacaacacuca

SEQ ID NO: 2932488 - RNA, 19 nt, Human
cccccugacaacacucauu

SEQ ID NO: 2932489 - RNA, 12 nt, Human
cccccagccugc

SEQ ID NO: 2932490 - RNA, 23 nt, Human
ccccucaacucuccuccagaguc

SEQ ID NO: 2932491 - RNA, 16 nt, Human
ccccucaacaccucug

SEQ ID NO: 2932492 - RNA, 15 nt, Human
ccccucaacaccucu

SEQ ID NO: 2932493 - RNA, 12 nt, Human
ccccuccaugug

SEQ ID NO: 2932494 - RNA, 22 nt, Human
ccccucagggucccugguggca

SEQ ID NO: 2932495 - RNA, 16 nt, Human
ccccucagggucccug

SEQ ID NO: 2932496 - RNA, 13 nt, Human
ccccuccucugcu

SEQ ID NO: 2932497 - RNA, 14 nt, Human
ccccuccucugcuu

SEQ ID NO: 2932498 - RNA, 17 nt, Human
ccccuccucugcuugcc

SEQ ID NO: 2932499 - RNA, 15 nt, Human
ccccucggagaagag

SEQ ID NO: 2932500 - RNA, 19 nt, Human
ccgagcuuugaaaauucag

SEQ ID NO: 2932501 - RNA, 14 nt, Human
ccgaguagcuggga

SEQ ID NO: 2932502 - RNA, 16 nt, Human
ccgaguagcugggacu

SEQ ID NO: 2932503 - RNA, 23 nt, Human
ccgcacugggcuuggggaccaga

SEQ ID NO: 2932504 - RNA, 21 nt, Human
ccgagauugcaccacugcacu

SEQ ID NO: 2932505 - RNA, 19 nt, Human
ccgagauugcaccacugca

SEQ ID NO: 2932506 - RNA, 15 nt, Human
ccgagauugcaccac

SEQ ID NO: 2932507 - RNA, 18 nt, Human
ccgugaggccagagacac

SEQ ID NO: 2932508 - RNA, 15 nt, Human
ccgggcucugccucc

SEQ ID NO: 2932509 - RNA, 14 nt, Human
ccgggcucugccuc

SEQ ID NO: 2932510 - RNA, 13 nt, Human
ccgggcucugccu

SEQ ID NO: 2932511 - RNA, 18 nt, Human
ccgggcucugccucccau

SEQ ID NO: 2932512 - RNA, 16 nt, Human
ccggcuccaggcuccu

SEQ ID NO: 2932513 - RNA, 21 nt, Human
ccggcuccaggcuccuuuagc

SEQ ID NO: 2932514 - RNA, 20 nt, Human
ccgggcacucagaagacacu

SEQ ID NO: 2932515 - RNA, 22 nt, Human
ccgggcacucagaagacacuga

SEQ ID NO: 2932516 - RNA, 13 nt, Human
ccgggccacagag

SEQ ID NO: 2932517 - RNA, 11 nt, Human
ccgcuggggcc

SEQ ID NO: 2932518 - RNA, 14 nt, Human
ccgcuggggccagu

SEQ ID NO: 2932519 - RNA, 21 nt, Human
ccuacaguugaaaaacagcug

SEQ ID NO: 2932520 - RNA, 23 nt, Human
ccuaggcauuugcugaauacaga

SEQ ID NO: 2932521 - RNA, 18 nt, Human
ccuaggugacagagugag

SEQ ID NO: 2932522 - RNA, 18 nt, Human
ccuacaggagugagcacu

SEQ ID NO: 2932523 - RNA, 20 nt, Human
cccugcagagggcacagaaa

SEQ ID NO: 2932524 - RNA, 12 nt, Human
cccugaggccca

SEQ ID NO: 2932525 - RNA, 11 nt, Human
cccugccuccu

SEQ ID NO: 2932526 - RNA, 12 nt, Human
cccugcugcucc

SEQ ID NO: 2932527 - RNA, 14 nt, Human
cccugcugcuccua

SEQ ID NO: 2932528 - RNA, 22 nt, Human
cccugcucuccgaccagacacc

SEQ ID NO: 2932529 - RNA, 21 nt, Human
cccugcucuccgaccagacac

SEQ ID NO: 2932530 - RNA, 14 nt, Human
cccugguggcagug

SEQ ID NO: 2932531 - RNA, 21 nt, Human
cccuguagagugggagcugag

SEQ ID NO: 2932532 - RNA, 13 nt, Human
cccugguggcagu

SEQ ID NO: 2932533 - RNA, 21 nt, Human
cccugguggcagcucaccucu

SEQ ID NO: 2932534 - RNA, 21 nt, Human
cccuggugaccagcaccaucu

SEQ ID NO: 2932535 - RNA, 14 nt, Human
cccuguucuggcag

SEQ ID NO: 2932536 - RNA, 13 nt, Human
cccuguucuggca

SEQ ID NO: 2932537 - RNA, 16 nt, Human
cccuguuuguuucuga

SEQ ID NO: 2932538 - RNA, 19 nt, Human
cccuguuuguuucugaaag

SEQ ID NO: 2932539 - RNA, 17 nt, Human
cccuuaccugccaggaa

SEQ ID NO: 2932540 - RNA, 23 nt, Human
cccuuaccugccaggaagccagc

SEQ ID NO: 2932541 - RNA, 20 nt, Human
cccuuaccugccaggaagcc

SEQ ID NO: 2932542 - RNA, 23 nt, Human
cccuuagcagggaaacagcuaau

SEQ ID NO: 2932543 - RNA, 14 nt, Human
cccuuagcagggaa

SEQ ID NO: 2932544 - RNA, 17 nt, Human
cccuuacgugaguccug

SEQ ID NO: 2932545 - RNA, 15 nt, Human
cccuuacgugagucc

SEQ ID NO: 2932546 - RNA, 12 nt, Human
cccuuccaugga

SEQ ID NO: 2932547 - RNA, 23 nt, Human
cccucccucuuucccucccuucc

SEQ ID NO: 2932548 - RNA, 12 nt, Human
cccucuuucccu

SEQ ID NO: 2932549 - RNA, 17 nt, Human
cccucuuucccucccuu

SEQ ID NO: 2932550 - RNA, 20 nt, Human
cccucuuucccucccuuccu

SEQ ID NO: 2932551 - RNA, 20 nt, Human
cccucuccugggcagcugcc

SEQ ID NO: 2932552 - RNA, 15 nt, Human
cccucuccugggcag

SEQ ID NO: 2932553 - RNA, 21 nt, Human
cccucuccugggcagcugccu

SEQ ID NO: 2932554 - RNA, 22 nt, Human
cccucuccugggcagcugccuc

SEQ ID NO: 2932555 - RNA, 19 nt, Human
cccucugcccacucccugc

SEQ ID NO: 2932556 - RNA, 23 nt, Human
cccucuccugggcagcugccucc

SEQ ID NO: 2932557 - RNA, 11 nt, Human
cccucugccca

SEQ ID NO: 2932558 - RNA, 18 nt, Human
cccucugcccacucccug

SEQ ID NO: 2932559 - RNA, 15 nt, Human
cccucugcccacucc

SEQ ID NO: 2932560 - RNA, 22 nt, Human
cucaggaaaucaaauaugcaaa

SEQ ID NO: 2932561 - RNA, 18 nt, Human
cucagggucccugguggc

SEQ ID NO: 2932562 - RNA, 24 nt, Human
cucagggucccugguggcagcuca

SEQ ID NO: 2932563 - RNA, 22 nt, Human
cucagggucccugguggcagcu

SEQ ID NO: 2932564 - RNA, 21 nt, Human
cucagggucccugguggcagc

SEQ ID NO: 2932565 - RNA, 20 nt, Human
cucagggucccugguggcag

SEQ ID NO: 2932566 - RNA, 14 nt, Human
cucagggccugguc

SEQ ID NO: 2932567 - RNA, 21 nt, Human
cucagguggggucacucuggc

SEQ ID NO: 2932568 - RNA, 20 nt, Human
cucagguggggucacucugg

SEQ ID NO: 2932569 - RNA, 19 nt, Human
cucagguggggucacucug

SEQ ID NO: 2932570 - RNA, 22 nt, Human
cucaggugauccacccaccuca

SEQ ID NO: 2932571 - RNA, 23 nt, Human
cucaggugauccacccaccucag

SEQ ID NO: 2932572 - RNA, 15 nt, Human
cucaggcagguggga

SEQ ID NO: 2932573 - RNA, 18 nt, Human
cucaggcaggugggaugg

SEQ ID NO: 2932574 - RNA, 18 nt, Human
cucagggccuggcucagg

SEQ ID NO: 2932575 - RNA, 20 nt, Human
cucagggccuggcucaggug

SEQ ID NO: 2932576 - RNA, 19 nt, Human
cucagggccuggcucaggu

SEQ ID NO: 2932577 - RNA, 13 nt, Human
cucagcauccugg

SEQ ID NO: 2932578 - RNA, 21 nt, Human
cucagcauccuggcacccggc

SEQ ID NO: 2932579 - RNA, 22 nt, Human
cucagcauccuggcacccggcc

SEQ ID NO: 2932580 - RNA, 16 nt, Human
cucagcaggggagggu

SEQ ID NO: 2932581 - RNA, 20 nt, Human
cucagcaaaagaugcuucuc

SEQ ID NO: 2932582 - RNA, 19 nt, Human
cucagcaaaagaugcuucu

SEQ ID NO: 2932583 - RNA, 13 nt, Human
cucagcggggaca

SEQ ID NO: 2932584 - RNA, 23 nt, Human
cucagcggggacagcuccuucug

SEQ ID NO: 2932585 - RNA, 14 nt, Human
cucagcggggacag

SEQ ID NO: 2932586 - RNA, 15 nt, Human
cucagcggggacagc

SEQ ID NO: 2932587 - RNA, 16 nt, Human
cucagcggggacagcu

SEQ ID NO: 2932588 - RNA, 18 nt, Human
cucagcggggacagcucc

SEQ ID NO: 2932589 - RNA, 19 nt, Human
cucagcggggacagcuccu

SEQ ID NO: 2932590 - RNA, 20 nt, Human
cucagcggggacagcuccuu

SEQ ID NO: 2932591 - RNA, 21 nt, Human
cucagcggggacagcuccuuc

SEQ ID NO: 2932592 - RNA, 14 nt, Human
cucacagcagugag

SEQ ID NO: 2932593 - RNA, 15 nt, Human
cucacugcagccuca

SEQ ID NO: 2932594 - RNA, 16 nt, Human
cucacugcagccucaa

SEQ ID NO: 2932595 - RNA, 14 nt, Human
cucacugcagccuc

SEQ ID NO: 2932596 - RNA, 18 nt, Human
cucacagcagugagacug

SEQ ID NO: 2932597 - RNA, 14 nt, Human
cucacuguugccca

SEQ ID NO: 2932598 - RNA, 15 nt, Human
cucacuguugcccag

SEQ ID NO: 2932599 - RNA, 18 nt, Human
cucagagagggugggagu

SEQ ID NO: 2932600 - RNA, 19 nt, Human
cucagagagggugggagug

SEQ ID NO: 2932601 - RNA, 19 nt, Human
cucacagcagugagacugg

SEQ ID NO: 2932602 - RNA, 23 nt, Human
cucagagagggugggagugggcc

SEQ ID NO: 2932603 - RNA, 16 nt, Human
cucacuguugcccagg

SEQ ID NO: 2932604 - RNA, 17 nt, Human
cucacuguugcccaggc

SEQ ID NO: 2932605 - RNA, 18 nt, Human
cucacuguugcccaggcu

SEQ ID NO: 2932606 - RNA, 19 nt, Human
cucacuguugcccaggcug

SEQ ID NO: 2932607 - RNA, 21 nt, Human
cucagaugcacaugagcuggc

SEQ ID NO: 2932608 - RNA, 16 nt, Human
cucagaucuucugugg

SEQ ID NO: 2932609 - RNA, 24 nt, Human
cucccaugagggagaugccaugag

SEQ ID NO: 2932610 - RNA, 14 nt, Human
cucccaucacccgc

SEQ ID NO: 2932611 - RNA, 16 nt, Human
cucccaucacuucccu

SEQ ID NO: 2932612 - RNA, 15 nt, Human
cucccacaaaggaga

SEQ ID NO: 2932613 - RNA, 15 nt, Human
cucccaacucacccc

SEQ ID NO: 2932614 - RNA, 14 nt, Human
cucccaacucaccc

SEQ ID NO: 2932615 - RNA, 16 nt, Human
cucccaaagugcuggg

SEQ ID NO: 2932616 - RNA, 23 nt, Human
cucccaaagugcugggauuacag

SEQ ID NO: 2932617 - RNA, 21 nt, Human
cuccagcugcugagauccugg

SEQ ID NO: 2932618 - RNA, 23 nt, Human
cuccagcugcugagauccuggac

SEQ ID NO: 2932619 - RNA, 20 nt, Human
cuccagcugcugagauccug

SEQ ID NO: 2932620 - RNA, 14 nt, Human
cuccagcugcugag

SEQ ID NO: 2932621 - RNA, 20 nt, Human
cucccgaauagcugggacua

SEQ ID NO: 2932622 - RNA, 23 nt, Human
cucccgaauagcugggacuacag

SEQ ID NO: 2932623 - RNA, 19 nt, Human
cucccgaauagcugggacu

SEQ ID NO: 2932624 - RNA, 14 nt, Human
cucccugcugcucc

SEQ ID NO: 2932625 - RNA, 16 nt, Human
cucccugcugcuccua

SEQ ID NO: 2932626 - RNA, 17 nt, Human
cucccugcugcuccuag

SEQ ID NO: 2932627 - RNA, 15 nt, Human
cucccuucauccuuc

SEQ ID NO: 2932628 - RNA, 23 nt, Human
cuccccugcuggguguggcgcag

SEQ ID NO: 2932629 - RNA, 21 nt, Human
cuccccugcuggguguggcgc

SEQ ID NO: 2932630 - RNA, 14 nt, Human
cuccccugcugggu

SEQ ID NO: 2932631 - RNA, 14 nt, Human
cuccccucggagaa

SEQ ID NO: 2932632 - RNA, 14 nt, Human
cuccagcucaccag

SEQ ID NO: 2932633 - RNA, 15 nt, Human
cuccagcucaccagc

SEQ ID NO: 2932634 - RNA, 16 nt, Human
cuccagcucaccagcc

SEQ ID NO: 2932635 - RNA, 18 nt, Human
cuccagcucaccagcccc

SEQ ID NO: 2932636 - RNA, 11 nt, Human
cuccagccccu

SEQ ID NO: 2932637 - RNA, 14 nt, Human
cuccagccccugga

SEQ ID NO: 2932638 - RNA, 13 nt, Human
cuccagccccugg

SEQ ID NO: 2932639 - RNA, 16 nt, Human
cuccagagccccacag

SEQ ID NO: 2932640 - RNA, 16 nt, Human
cuccagagucagaagu

SEQ ID NO: 2932641 - RNA, 18 nt, Human
cuccagagccccacagcc

SEQ ID NO: 2932642 - RNA, 21 nt, Human
cuccagagccccacagcccca

SEQ ID NO: 2932643 - RNA, 21 nt, Human
cucauugaccugaggcccuuc

SEQ ID NO: 2932644 - RNA, 19 nt, Human
cucauugaccugaggcccu

SEQ ID NO: 2932645 - RNA, 18 nt, Human
cucauucuccuuguguua

SEQ ID NO: 2932646 - RNA, 22 nt, Human
cucauucuccuuguguuacuaa

SEQ ID NO: 2932647 - RNA, 17 nt, Human
cucauugaccugaggcc

SEQ ID NO: 2932648 - RNA, 18 nt, Human
cuccaaaauaaaacuuuu

SEQ ID NO: 2932649 - RNA, 23 nt, Human
cucauuuuuauaaugucccuuca

SEQ ID NO: 2932650 - RNA, 17 nt, Human
cuccaagcucccaggca

SEQ ID NO: 2932651 - RNA, 21 nt, Human
cucauuugucacacacuuugg

SEQ ID NO: 2932652 - RNA, 18 nt, Human
cucauuugucacacacuu

SEQ ID NO: 2932653 - RNA, 17 nt, Human
cucauuuccaagcaagu

SEQ ID NO: 2932654 - RNA, 13 nt, Human
cucauuuccaagc

SEQ ID NO: 2932655 - RNA, 14 nt, Human
cucauuuccaagca

SEQ ID NO: 2932656 - RNA, 12 nt, Human
cucauuuccaag

SEQ ID NO: 2932657 - RNA, 21 nt, Human
cuaugcauuugaaaauuuuga

SEQ ID NO: 2932658 - RNA, 20 nt, Human
cuauauaauuccuguuuuua

SEQ ID NO: 2932659 - RNA, 18 nt, Human
cuauauaauuccuguuuu

SEQ ID NO: 2932660 - RNA, 18 nt, Human
cuaugaaauauuauguua

SEQ ID NO: 2932661 - RNA, 19 nt, Human
cuaugaaauauuauguuaa

SEQ ID NO: 2932662 - RNA, 19 nt, Human
cuauagccuaggugacaga

SEQ ID NO: 2932663 - RNA, 18 nt, Human
cuauagccuaggugacag

SEQ ID NO: 2932664 - RNA, 20 nt, Human
cuauagccuaggugacagag

SEQ ID NO: 2932665 - RNA, 21 nt, Human
cuauagccuaggugacagagu

SEQ ID NO: 2932666 - RNA, 12 nt, Human
cuauaauuuaaa

SEQ ID NO: 2932667 - RNA, 17 nt, Human
cuaggaagacuuuggaa

SEQ ID NO: 2932668 - RNA, 15 nt, Human
cuaggaagacuuugg

SEQ ID NO: 2932669 - RNA, 20 nt, Human
cuaggaacacuccuucacag

SEQ ID NO: 2932670 - RNA, 15 nt, Human
cuaggaaaauuauuc

SEQ ID NO: 2932671 - RNA, 13 nt, Human
cuauguaucaaug

SEQ ID NO: 2932672 - RNA, 23 nt, Human
cuauucagcacaaggaaauaaaa

SEQ ID NO: 2932673 - RNA, 17 nt, Human
cuauucaguaauaacuc

SEQ ID NO: 2932674 - RNA, 18 nt, Human
cuauucugagaugacuau

SEQ ID NO: 2932675 - RNA, 15 nt, Human
cuauucugagaugac

SEQ ID NO: 2932676 - RNA, 16 nt, Human
cuauucugagaugacu

SEQ ID NO: 2932677 - RNA, 23 nt, Human
cuauucaguaauaacucuacccu

SEQ ID NO: 2932678 - RNA, 23 nt, Human
cucacacggacacucaaaagcug

SEQ ID NO: 2932679 - RNA, 15 nt, Human
cucacagaagaugaa

SEQ ID NO: 2932680 - RNA, 18 nt, Human
cucaacucuccuccagag

SEQ ID NO: 2932681 - RNA, 16 nt, Human
cucaacucuccuccag

SEQ ID NO: 2932682 - RNA, 13 nt, Human
cucaaauuucuaa

SEQ ID NO: 2932683 - RNA, 15 nt, Human
cucaaauuucuaaau

SEQ ID NO: 2932684 - RNA, 17 nt, Human
cucaaauuucuaaaucu

SEQ ID NO: 2932685 - RNA, 14 nt, Human
cucaacucuccucc

SEQ ID NO: 2932686 - RNA, 14 nt, Human
cucaaauuucuaaa

SEQ ID NO: 2932687 - RNA, 15 nt, Human
cuauuuauuuacaaa

SEQ ID NO: 2932688 - RNA, 16 nt, Human
cuauuuauuuacaaau

SEQ ID NO: 2932689 - RNA, 19 nt, Human
cuauuuauuuauuuauuca

SEQ ID NO: 2932690 - RNA, 12 nt, Human
cuauuuauuuau

SEQ ID NO: 2932691 - RNA, 16 nt, Human
cuauugcugcuugagg

SEQ ID NO: 2932692 - RNA, 14 nt, Human
cuauuuauuuacaa

SEQ ID NO: 2932693 - RNA, 18 nt, Human
cuauuguuagucucuuga

SEQ ID NO: 2932694 - RNA, 14 nt, Human
cuaggaaauauuua

SEQ ID NO: 2932695 - RNA, 15 nt, Human
cuaggaaauauuuau

SEQ ID NO: 2932696 - RNA, 19 nt, Human
cuaggaaauauuuauuuua

SEQ ID NO: 2932697 - RNA, 20 nt, Human
cuaggaaauauuuauuuuaa

SEQ ID NO: 2932698 - RNA, 22 nt, Human
cuagccuuagaagucacacagu

SEQ ID NO: 2932699 - RNA, 23 nt, Human
cuagccuuagaagucacacagua

SEQ ID NO: 2932700 - RNA, 24 nt, Human
cuagauacuguaucaugacaaaga

SEQ ID NO: 2932701 - RNA, 13 nt, Human
cuagauacuguau

SEQ ID NO: 2932702 - RNA, 16 nt, Human
cuagauacuguaucau

SEQ ID NO: 2932703 - RNA, 21 nt, Human
cuagccuuagaagucacacag

SEQ ID NO: 2932704 - RNA, 22 nt, Human
cuagccugugccucugggacug

SEQ ID NO: 2932705 - RNA, 21 nt, Human
cuagccugugccucugggacu

SEQ ID NO: 2932706 - RNA, 19 nt, Human
cuagccugugccucuggga

SEQ ID NO: 2932707 - RNA, 14 nt, Human
cuacugccauccug

SEQ ID NO: 2932708 - RNA, 15 nt, Human
cuacugccauccugg

SEQ ID NO: 2932709 - RNA, 16 nt, Human
cuacugccauccuggc

SEQ ID NO: 2932710 - RNA, 17 nt, Human
cuacugccauccuggcc

SEQ ID NO: 2932711 - RNA, 18 nt, Human
cuacugccauccuggccc

SEQ ID NO: 2932712 - RNA, 19 nt, Human
cuacugccauccuggccca

SEQ ID NO: 2932713 - RNA, 20 nt, Human
cuacugccauccuggcccag

SEQ ID NO: 2932714 - RNA, 22 nt, Human
cuacugccauccuggcccaggg

SEQ ID NO: 2932715 - RNA, 23 nt, Human
cuacugccauccuggcccagggc

SEQ ID NO: 2932716 - RNA, 19 nt, Human
cuacuguccuacccacccu

SEQ ID NO: 2932717 - RNA, 21 nt, Human
cuacuguaauuugugauacaa

SEQ ID NO: 2932718 - RNA, 17 nt, Human
cuacucgggaggcugag

SEQ ID NO: 2932719 - RNA, 12 nt, Human
cuacucuguguc

SEQ ID NO: 2932720 - RNA, 15 nt, Human
cuacucgaguuacag

SEQ ID NO: 2932721 - RNA, 19 nt, Human
cuacucgaguuacagacaa

SEQ ID NO: 2932722 - RNA, 16 nt, Human
cuacucgaguuacaga

SEQ ID NO: 2932723 - RNA, 20 nt, Human
cuacuguccuacccacccuc

SEQ ID NO: 2932724 - RNA, 17 nt, Human
cuagagguucaaagaua

SEQ ID NO: 2932725 - RNA, 18 nt, Human
cuagagguucaaagauau

SEQ ID NO: 2932726 - RNA, 21 nt, Human
cuagagguucaaagauauuuu

SEQ ID NO: 2932727 - RNA, 19 nt, Human
cuagaguuuagcuggaaaa

SEQ ID NO: 2932728 - RNA, 18 nt, Human
cuagaguuuagcuggaaa

SEQ ID NO: 2932729 - RNA, 15 nt, Human
cuagagguucaaaga

SEQ ID NO: 2932730 - RNA, 19 nt, Human
cuaaauucuuucauuuuag

SEQ ID NO: 2932731 - RNA, 19 nt, Human
cuaaauugacacuuaaaaa

SEQ ID NO: 2932732 - RNA, 16 nt, Human
cuaaauucaugcugcu

SEQ ID NO: 2932733 - RNA, 12 nt, Human
cuaaccacgcug

SEQ ID NO: 2932734 - RNA, 14 nt, Human
cuaaccacgcugga

SEQ ID NO: 2932735 - RNA, 20 nt, Human
cuaacagcaacacaaagcuu

SEQ ID NO: 2932736 - RNA, 23 nt, Human
cuaagagggagggagggcuccag

SEQ ID NO: 2932737 - RNA, 13 nt, Human
cuaagagggaggg

SEQ ID NO: 2932738 - RNA, 22 nt, Human
cuaagagggagggagggcucca

SEQ ID NO: 2932739 - RNA, 15 nt, Human
cuaagagggagggag

SEQ ID NO: 2932740 - RNA, 14 nt, Human
cuaagagagaauga

SEQ ID NO: 2932741 - RNA, 15 nt, Human
cuaagagagaaugag

SEQ ID NO: 2932742 - RNA, 22 nt, Human
cuaaaugaaaaucgugacaaca

SEQ ID NO: 2932743 - RNA, 21 nt, Human
cuaaaucuccaaaauaaaacu

SEQ ID NO: 2932744 - RNA, 23 nt, Human
cgggaggauguucugggacacag

SEQ ID NO: 2932745 - RNA, 21 nt, Human
cgggaggauguucugggacac

SEQ ID NO: 2932746 - RNA, 20 nt, Human
cgggaggcagagguugcagu

SEQ ID NO: 2932747 - RNA, 19 nt, Human
cuaauaugaugacuguuuu

SEQ ID NO: 2932748 - RNA, 21 nt, Human
cuaauaugaugacuguuuuua

SEQ ID NO: 2932749 - RNA, 12 nt, Human
cuaaugggacac

SEQ ID NO: 2932750 - RNA, 13 nt, Human
cuaaugggacacu

SEQ ID NO: 2932751 - RNA, 21 nt, Human
cuacacacugcauguuuguga

SEQ ID NO: 2932752 - RNA, 21 nt, Human
cuacacaggggaaaagaggag

SEQ ID NO: 2932753 - RNA, 14 nt, Human
cuacacuaagagag

SEQ ID NO: 2932754 - RNA, 23 nt, Human
cuacacgagauacagaauuuuau

SEQ ID NO: 2932755 - RNA, 22 nt, Human
cuaagcuauucaguaauaacuc

SEQ ID NO: 2932756 - RNA, 21 nt, Human
cuaagcuucacuguaaaauaa

SEQ ID NO: 2932757 - RNA, 17 nt, Human
cuaauagacaauuuauu

SEQ ID NO: 2932758 - RNA, 19 nt, Human
cuaauagacaauuuauuau

SEQ ID NO: 2932759 - RNA, 23 nt, Human
cuaauagacaauuuauuauggca

SEQ ID NO: 2932760 - RNA, 19 nt, Human
cuaaguaaaaccacagcag

SEQ ID NO: 2932761 - RNA, 18 nt, Human
cuaaguaaaaccacagca

SEQ ID NO: 2932762 - RNA, 14 nt, Human
cuaaguaaaaccac

SEQ ID NO: 2932763 - RNA, 13 nt, Human
cuacaguaauaaa

SEQ ID NO: 2932764 - RNA, 16 nt, Human
cuacaggugugaguca

SEQ ID NO: 2932765 - RNA, 14 nt, Human
cuacaggugugagu

SEQ ID NO: 2932766 - RNA, 13 nt, Human
cuacaguccuccc

SEQ ID NO: 2932767 - RNA, 18 nt, Human
cuacauggaguauauguc

SEQ ID NO: 2932768 - RNA, 20 nt, Human
cuacauggaguauaugucaa

SEQ ID NO: 2932769 - RNA, 15 nt, Human
cuacaggcacccacc

SEQ ID NO: 2932770 - RNA, 17 nt, Human
cuacaggcacccaccau

SEQ ID NO: 2932771 - RNA, 14 nt, Human
cuacaggagugagc

SEQ ID NO: 2932772 - RNA, 15 nt, Human
cuacaggagugagca

SEQ ID NO: 2932773 - RNA, 16 nt, Human
cuacaggagugagcac

SEQ ID NO: 2932774 - RNA, 23 nt, Human
cuacagcuugaccgugaggccag

SEQ ID NO: 2932775 - RNA, 22 nt, Human
cuacagcuugaccgugaggcca

SEQ ID NO: 2932776 - RNA, 19 nt, Human
cuacagcuugaccgugagg

SEQ ID NO: 2932777 - RNA, 22 nt, Human
cuacagaggccaugggccuccu

SEQ ID NO: 2932778 - RNA, 18 nt, Human
cuacagaggccaugggcc

SEQ ID NO: 2932779 - RNA, 20 nt, Human
cuacagaggccaugggccuc

SEQ ID NO: 2932780 - RNA, 17 nt, Human
cuacagaggccaugggc

SEQ ID NO: 2932781 - RNA, 17 nt, Human
cuacacugugcugaguc

SEQ ID NO: 2932782 - RNA, 14 nt, Human
cuacacugugcuga

SEQ ID NO: 2932783 - RNA, 13 nt, Human
cuacacugugcug

SEQ ID NO: 2932784 - RNA, 17 nt, Human
cuacccucuuagaaaaa

SEQ ID NO: 2932785 - RNA, 18 nt, Human
cuacccagcgagcccugg

SEQ ID NO: 2932786 - RNA, 13 nt, Human
cuacccaggugcu

SEQ ID NO: 2932787 - RNA, 12 nt, Human
cuacccaggugc

SEQ ID NO: 2932788 - RNA, 15 nt, Human
cuacccagcgagccc

SEQ ID NO: 2932789 - RNA, 17 nt, Human
cuacccagcgagcccug

SEQ ID NO: 2932790 - RNA, 17 nt, Human
cuacauugacagauuga

SEQ ID NO: 2932791 - RNA, 13 nt, Human
cuacauucuguua

SEQ ID NO: 2932792 - RNA, 14 nt, Human
cuacauucuguuaa

SEQ ID NO: 2932793 - RNA, 22 nt, Human
cuacauuauaaaugucucuuua

SEQ ID NO: 2932794 - RNA, 18 nt, Human
cuacauuagguugugaau

SEQ ID NO: 2932795 - RNA, 17 nt, Human
cuacauuagguugugaa

SEQ ID NO: 2932796 - RNA, 21 nt, Human
cuaccaauauuuaaucuuuua

SEQ ID NO: 2932797 - RNA, 15 nt, Human
cuaccaauauuuaau

SEQ ID NO: 2932798 - RNA, 13 nt, Human
cuaccaauauuua

SEQ ID NO: 2932799 - RNA, 18 nt, Human
cuaccauccccuguagag

SEQ ID NO: 2932800 - RNA, 20 nt, Human
ccugugccucugggacugga

SEQ ID NO: 2932801 - RNA, 20 nt, Human
ccugugggcccccaaaugga

SEQ ID NO: 2932802 - RNA, 17 nt, Human
ccuguggaugcugcugc

SEQ ID NO: 2932803 - RNA, 19 nt, Human
ccuguggaugcugcugccc

SEQ ID NO: 2932804 - RNA, 20 nt, Human
ccuguggaugauaaaacaca

SEQ ID NO: 2932805 - RNA, 16 nt, Human
ccuucucuccagcccc

SEQ ID NO: 2932806 - RNA, 15 nt, Human
ccuucucuccagccc

SEQ ID NO: 2932807 - RNA, 13 nt, Human
ccuucucuccagc

SEQ ID NO: 2932808 - RNA, 12 nt, Human
ccuucucuccag

SEQ ID NO: 2932809 - RNA, 13 nt, Human
ccuuccaggggug

SEQ ID NO: 2932810 - RNA, 17 nt, Human
ccuuccauggacuuugu

SEQ ID NO: 2932811 - RNA, 16 nt, Human
ccuucggccuccaucc

SEQ ID NO: 2932812 - RNA, 17 nt, Human
ccuucggccuccauccu

SEQ ID NO: 2932813 - RNA, 18 nt, Human
ccuucggccuccauccug

SEQ ID NO: 2932814 - RNA, 20 nt, Human
ccuuggugucgggcaugaca

SEQ ID NO: 2932815 - RNA, 19 nt, Human
ccuuggugucgggcaugac

SEQ ID NO: 2932816 - RNA, 14 nt, Human
ccuuggcugcaggg

SEQ ID NO: 2932817 - RNA, 16 nt, Human
ccuuggcugcagggag

SEQ ID NO: 2932818 - RNA, 14 nt, Human
ccuuggggagcagg

SEQ ID NO: 2932819 - RNA, 18 nt, Human
ccuugacagggcacaccg

SEQ ID NO: 2932820 - RNA, 21 nt, Human
ccuugacagggcacaccgggc

SEQ ID NO: 2932821 - RNA, 18 nt, Human
ccuucucuccagccccug

SEQ ID NO: 2932822 - RNA, 17 nt, Human
ccuucucuccagccccu

SEQ ID NO: 2932823 - RNA, 22 nt, Human
ccuuggcucaaguccucuuuuc

SEQ ID NO: 2932824 - RNA, 15 nt, Human
ccuuggacucauuuu

SEQ ID NO: 2932825 - RNA, 15 nt, Human
ccuuggauugucccc

SEQ ID NO: 2932826 - RNA, 19 nt, Human
ccuucucuccagccccugg

SEQ ID NO: 2932827 - RNA, 23 nt, Human
cgaaagggacuuggaagcuccgc

SEQ ID NO: 2932828 - RNA, 22 nt, Human
ccuuuuuuggcugcugaaggcu

SEQ ID NO: 2932829 - RNA, 20 nt, Human
ccuuuuuuggcugcugaagg

SEQ ID NO: 2932830 - RNA, 18 nt, Human
ccuuuuuuggcugcugaa

SEQ ID NO: 2932831 - RNA, 17 nt, Human
ccuuuuuuggcugcuga

SEQ ID NO: 2932832 - RNA, 21 nt, Human
cgaacauguuuuucuucuccc

SEQ ID NO: 2932833 - RNA, 23 nt, Human
cgaacauguuuuucuucucccuc

SEQ ID NO: 2932834 - RNA, 17 nt, Human
cgaauauugcugauggu

SEQ ID NO: 2932835 - RNA, 15 nt, Human
cgaauauugcugaug

SEQ ID NO: 2932836 - RNA, 15 nt, Human
cgaauagcugggacu

SEQ ID NO: 2932837 - RNA, 16 nt, Human
cgaauagcugggacua

SEQ ID NO: 2932838 - RNA, 11 nt, Human
cgaauauugcu

SEQ ID NO: 2932839 - RNA, 14 nt, Human
cgaauauugcugau

SEQ ID NO: 2932840 - RNA, 12 nt, Human
cgaauauugcug

SEQ ID NO: 2932841 - RNA, 19 nt, Human
ccuuuuuuauacauaaaca

SEQ ID NO: 2932842 - RNA, 15 nt, Human
ccuuuuuuggcugcu

SEQ ID NO: 2932843 - RNA, 14 nt, Human
ccuuugugaggaag

SEQ ID NO: 2932844 - RNA, 23 nt, Human
ccuuuguccccaccgcagacagg

SEQ ID NO: 2932845 - RNA, 22 nt, Human
ccuuuguccccaccgcagacag

SEQ ID NO: 2932846 - RNA, 23 nt, Human
ccuuugugaggaagccgcugggg

SEQ ID NO: 2932847 - RNA, 17 nt, Human
ccuuugugaggaagccg

SEQ ID NO: 2932848 - RNA, 16 nt, Human
ccuuugugaggaagcc

SEQ ID NO: 2932849 - RNA, 15 nt, Human
ccuuugugaggaagc

SEQ ID NO: 2932850 - RNA, 24 nt, Human
ccuuuguauucucuccuguaccuc

SEQ ID NO: 2932851 - RNA, 22 nt, Human
ccuuuguauucucuccuguacc

SEQ ID NO: 2932852 - RNA, 23 nt, Human
ccuuuguauucucuccuguaccu

SEQ ID NO: 2932853 - RNA, 14 nt, Human
ccuuuguccccacc

SEQ ID NO: 2932854 - RNA, 18 nt, Human
ccuuuguccccaccgcag

SEQ ID NO: 2932855 - RNA, 16 nt, Human
ccuuuguccccaccgc

SEQ ID NO: 2932856 - RNA, 23 nt, Human
ccuugucggccccaccagugccu

SEQ ID NO: 2932857 - RNA, 16 nt, Human
cgaggacagggaggug

SEQ ID NO: 2932858 - RNA, 18 nt, Human
cgagcccugguggcagug

SEQ ID NO: 2932859 - RNA, 14 nt, Human
cgaggacagggagg

SEQ ID NO: 2932860 - RNA, 19 nt, Human
cgagcccugguggcagugg

SEQ ID NO: 2932861 - RNA, 23 nt, Human
cgauggaggacuccaggcagcag

SEQ ID NO: 2932862 - RNA, 13 nt, Human
cgcacugggcuug

SEQ ID NO: 2932863 - RNA, 17 nt, Human
cgcacugggcuugggga

SEQ ID NO: 2932864 - RNA, 17 nt, Human
cgcagcccugcagaggg

SEQ ID NO: 2932865 - RNA, 15 nt, Human
cgcagcccugcagag

SEQ ID NO: 2932866 - RNA, 20 nt, Human
cgcagcauauucaggaagcu

SEQ ID NO: 2932867 - RNA, 19 nt, Human
cgcagcauauucaggaagc

SEQ ID NO: 2932868 - RNA, 13 nt, Human
cggcccuccagag

SEQ ID NO: 2932869 - RNA, 12 nt, Human
cggccaggccag

SEQ ID NO: 2932870 - RNA, 20 nt, Human
cggccaggccagagggagug

SEQ ID NO: 2932871 - RNA, 11 nt, Human
cggccaggcca

SEQ ID NO: 2932872 - RNA, 16 nt, Human
cggcccuccagagccc

SEQ ID NO: 2932873 - RNA, 20 nt, Human
cggcccuccagagccccaca

SEQ ID NO: 2932874 - RNA, 14 nt, Human
cggcuggcagccca

SEQ ID NO: 2932875 - RNA, 13 nt, Human
cggcuggccuggc

SEQ ID NO: 2932876 - RNA, 23 nt, Human
cggcuggcagcccaccccucaac

SEQ ID NO: 2932877 - RNA, 16 nt, Human
cgggaagggggcuggg

SEQ ID NO: 2932878 - RNA, 20 nt, Human
cgggaagggggcugggacau

SEQ ID NO: 2932879 - RNA, 19 nt, Human
cgggaagggggcugggaca

SEQ ID NO: 2932880 - RNA, 14 nt, Human
cgcuuucuacccag

SEQ ID NO: 2932881 - RNA, 16 nt, Human
cgcuuucuacccagcg

SEQ ID NO: 2932882 - RNA, 20 nt, Human
cggacagccacggccaggcc

SEQ ID NO: 2932883 - RNA, 14 nt, Human
cggaauaguuggcu

SEQ ID NO: 2932884 - RNA, 16 nt, Human
cggaauaguuggcuag

SEQ ID NO: 2932885 - RNA, 17 nt, Human
cggaauaguuggcuagg

SEQ ID NO: 2932886 - RNA, 15 nt, Human
cggagaaaggaaggg

SEQ ID NO: 2932887 - RNA, 17 nt, Human
cggagaaaggaagggcu

SEQ ID NO: 2932888 - RNA, 21 nt, Human
cggacagccacggccaggcca

SEQ ID NO: 2932889 - RNA, 22 nt, Human
cggacagccacggccaggccag

SEQ ID NO: 2932890 - RNA, 19 nt, Human
cgcugugcugcccugccca

SEQ ID NO: 2932891 - RNA, 23 nt, Human
cgcugugcugcccugcccaccug

SEQ ID NO: 2932892 - RNA, 21 nt, Human
cgcugugcugcccugcccacc

SEQ ID NO: 2932893 - RNA, 11 nt, Human
cgcugugcugc

SEQ ID NO: 2932894 - RNA, 14 nt, Human
cgcugugcugcccu

SEQ ID NO: 2932895 - RNA, 13 nt, Human
cgcugugcugccc

SEQ ID NO: 2932896 - RNA, 19 nt, Human
cgcagcccugcagagggca

SEQ ID NO: 2932897 - RNA, 18 nt, Human
cgcagcccugcagagggc

SEQ ID NO: 2932898 - RNA, 12 nt, Human
cgcccaaggccu

SEQ ID NO: 2932899 - RNA, 13 nt, Human
cgcccagucugga

SEQ ID NO: 2932900 - RNA, 19 nt, Human
cgcccagucuggaaugcag

SEQ ID NO: 2932901 - RNA, 21 nt, Human
cgcccagucuggaaugcagug

SEQ ID NO: 2932902 - RNA, 17 nt, Human
cgcccaaggccuucccc

SEQ ID NO: 2932903 - RNA, 12 nt, Human
cgcccagucugg

SEQ ID NO: 2932904 - RNA, 15 nt, Human
cgccuugcccagccu

SEQ ID NO: 2932905 - RNA, 16 nt, Human
cgccuugcccagccug

SEQ ID NO: 2932906 - RNA, 19 nt, Human
cgccuugcccagccuggau

SEQ ID NO: 2932907 - RNA, 14 nt, Human
cgcgacaaugcaaa

SEQ ID NO: 2932908 - RNA, 19 nt, Human
cgcgguggcucacgccugu

SEQ ID NO: 2932909 - RNA, 24 nt, Human
cgcuacccgggaagggggcuggga

SEQ ID NO: 2932910 - RNA, 21 nt, Human
cgcuacccgggaagggggcug

SEQ ID NO: 2932911 - RNA, 18 nt, Human
cgcuacccgggaaggggg

SEQ ID NO: 2932912 - RNA, 17 nt, Human
cgcuacccgggaagggg

SEQ ID NO: 2932913 - RNA, 17 nt, Human
ccugcuaauuccccaga

SEQ ID NO: 2932914 - RNA, 21 nt, Human
ccugcuaauuccccagauugc

SEQ ID NO: 2932915 - RNA, 20 nt, Human
ccugccuguugggccaggag

SEQ ID NO: 2932916 - RNA, 19 nt, Human
ccugccuguugggccagga

SEQ ID NO: 2932917 - RNA, 18 nt, Human
ccugccuguugggccagg

SEQ ID NO: 2932918 - RNA, 19 nt, Human
ccuggcacccggccccugc

SEQ ID NO: 2932919 - RNA, 20 nt, Human
ccuggcacccggccccugcu

SEQ ID NO: 2932920 - RNA, 21 nt, Human
ccuggcacccggccccugcug

SEQ ID NO: 2932921 - RNA, 18 nt, Human
ccuggcacccggccccug

SEQ ID NO: 2932922 - RNA, 22 nt, Human
ccuggcacuauaauguaagcuc

SEQ ID NO: 2932923 - RNA, 12 nt, Human
ccuggcacugcu

SEQ ID NO: 2932924 - RNA, 14 nt, Human
ccuggcccacugca

SEQ ID NO: 2932925 - RNA, 13 nt, Human
ccuggcccacugc

SEQ ID NO: 2932926 - RNA, 21 nt, Human
ccuggccagaugcaccagccc

SEQ ID NO: 2932927 - RNA, 23 nt, Human
ccuggccagaugcaccagcccuu

SEQ ID NO: 2932928 - RNA, 20 nt, Human
ccuggccagaugcaccagcc

SEQ ID NO: 2932929 - RNA, 23 nt, Human
ccuggcaugggaaugaaugucag

SEQ ID NO: 2932930 - RNA, 13 nt, Human
ccuggcaugggaa

SEQ ID NO: 2932931 - RNA, 16 nt, Human
ccuggcacugcuucca

SEQ ID NO: 2932932 - RNA, 13 nt, Human
ccuggcacugcuu

SEQ ID NO: 2932933 - RNA, 16 nt, Human
ccuggcccagggcauc

SEQ ID NO: 2932934 - RNA, 21 nt, Human
ccuggcccagggcaucuggga

SEQ ID NO: 2932935 - RNA, 13 nt, Human
ccuggcccagggc

SEQ ID NO: 2932936 - RNA, 14 nt, Human
ccuggcccagggca

SEQ ID NO: 2932937 - RNA, 15 nt, Human
ccuggcccagggcau

SEQ ID NO: 2932938 - RNA, 12 nt, Human
ccuggcccaggg

SEQ ID NO: 2932939 - RNA, 16 nt, Human
ccuggcccacugcauc

SEQ ID NO: 2932940 - RNA, 16 nt, Human
ccugggagugagcugg

SEQ ID NO: 2932941 - RNA, 22 nt, Human
ccugggaggucaaggcugcagu

SEQ ID NO: 2932942 - RNA, 16 nt, Human
ccugggcagaaggaag

SEQ ID NO: 2932943 - RNA, 18 nt, Human
ccugggagugagcugguu

SEQ ID NO: 2932944 - RNA, 15 nt, Human
ccugggcagaaggaa

SEQ ID NO: 2932945 - RNA, 18 nt, Human
ccugggggcugggcagag

SEQ ID NO: 2932946 - RNA, 13 nt, Human
ccugggcagcugc

SEQ ID NO: 2932947 - RNA, 14 nt, Human
ccugggcagcugcc

SEQ ID NO: 2932948 - RNA, 19 nt, Human
ccugggggcugggcagagg

SEQ ID NO: 2932949 - RNA, 21 nt, Human
ccugggggcugggcagaggaa

SEQ ID NO: 2932950 - RNA, 20 nt, Human
ccugggggcugggcagagga

SEQ ID NO: 2932951 - RNA, 10 nt, Human
ccuguaccuc

SEQ ID NO: 2932952 - RNA, 13 nt, Human
ccugguggcagug

SEQ ID NO: 2932953 - RNA, 14 nt, Human
ccugguggcagugg

SEQ ID NO: 2932954 - RNA, 16 nt, Human
ccuguagagugggagc

SEQ ID NO: 2932955 - RNA, 15 nt, Human
ccuguagagugggag

SEQ ID NO: 2932956 - RNA, 13 nt, Human
ccuguagcccuaa

SEQ ID NO: 2932957 - RNA, 12 nt, Human
ccugucccccug

SEQ ID NO: 2932958 - RNA, 15 nt, Human
ccugucccccugaca

SEQ ID NO: 2932959 - RNA, 14 nt, Human
ccugucccccugac

SEQ ID NO: 2932960 - RNA, 13 nt, Human
ccugucccccuga

SEQ ID NO: 2932961 - RNA, 14 nt, Human
ccugguggcagcug

SEQ ID NO: 2932962 - RNA, 22 nt, Human
ccugguggcagcucaccucucc

SEQ ID NO: 2932963 - RNA, 21 nt, Human
ccugguggcagcucaccucuc

SEQ ID NO: 2932964 - RNA, 19 nt, Human
ccugguggcagcucaccuc

SEQ ID NO: 2932965 - RNA, 15 nt, Human
ccugguggcagcugc

SEQ ID NO: 2932966 - RNA, 16 nt, Human
ccugguggcagcugcg

SEQ ID NO: 2932967 - RNA, 17 nt, Human
ccugguggcagcugcgg

SEQ ID NO: 2932968 - RNA, 18 nt, Human
ccugguggcagcugcggu

SEQ ID NO: 2932969 - RNA, 22 nt, Human
ccugaagucuuuguacagacaa

SEQ ID NO: 2932970 - RNA, 20 nt, Human
ccugaagucacacagugagu

SEQ ID NO: 2932971 - RNA, 19 nt, Human
ccugaagucacacagugag

SEQ ID NO: 2932972 - RNA, 18 nt, Human
ccugagccagauuucacu

SEQ ID NO: 2932973 - RNA, 16 nt, Human
ccugagccagauuuca

SEQ ID NO: 2932974 - RNA, 12 nt, Human
ccugagccagau

SEQ ID NO: 2932975 - RNA, 15 nt, Human
ccugagccagauuuc

SEQ ID NO: 2932976 - RNA, 15 nt, Human
ccugaggcugggcuc

SEQ ID NO: 2932977 - RNA, 14 nt, Human
ccugaggcugggcu

SEQ ID NO: 2932978 - RNA, 13 nt, Human
ccugaggcugggc

SEQ ID NO: 2932979 - RNA, 13 nt, Human
ccugaggcuccac

SEQ ID NO: 2932980 - RNA, 14 nt, Human
ccugaggcuccacu

SEQ ID NO: 2932981 - RNA, 12 nt, Human
ccugagcuggga

SEQ ID NO: 2932982 - RNA, 18 nt, Human
ccugaggcccagagggcc

SEQ ID NO: 2932983 - RNA, 17 nt, Human
ccugaggcccagagggc

SEQ ID NO: 2932984 - RNA, 16 nt, Human
ccugaggcccagaggg

SEQ ID NO: 2932985 - RNA, 15 nt, Human
ccugaggcccagagg

SEQ ID NO: 2932986 - RNA, 23 nt, Human
ccugcacagcaggcugccagugc

SEQ ID NO: 2932987 - RNA, 14 nt, Human
ccugcacagcaggc

SEQ ID NO: 2932988 - RNA, 17 nt, Human
ccugcacagcaggcugc

SEQ ID NO: 2932989 - RNA, 19 nt, Human
ccugcacagcaggcugcca

SEQ ID NO: 2932990 - RNA, 20 nt, Human
ccugcacagcaggcugccag

SEQ ID NO: 2932991 - RNA, 21 nt, Human
ccugcacagcaggcugccagu

SEQ ID NO: 2932992 - RNA, 19 nt, Human
ccugccaauggacuaacuu

SEQ ID NO: 2932993 - RNA, 16 nt, Human
ccugccacccugggga

SEQ ID NO: 2932994 - RNA, 22 nt, Human
ccugccacccuggggagaaagu

SEQ ID NO: 2932995 - RNA, 14 nt, Human
ccugccacccuggg

SEQ ID NO: 2932996 - RNA, 12 nt, Human
ccugccacccug

SEQ ID NO: 2932997 - RNA, 13 nt, Human
ccugccacccugg

SEQ ID NO: 2932998 - RNA, 14 nt, Human
ccugaaagcccuga

SEQ ID NO: 2932999 - RNA, 13 nt, Human
ccugaaagcccug

SEQ ID NO: 2933000 - RNA, 18 nt, Human
ccugaaagcccugagcuu

SEQ ID NO: 2933001 - RNA, 21 nt, Human
ccugaagacucauucuucugu

SEQ ID NO: 2933002 - RNA, 14 nt, Human
ccugaaggccccgc

SEQ ID NO: 2933003 - RNA, 19 nt, Human
ccugaaggccccgcccagg

SEQ ID NO: 2933004 - RNA, 18 nt, Human
ccugaaggccccgcccag

SEQ ID NO: 2933005 - RNA, 21 nt, Human
ccugaaggccccgcccaggcu

SEQ ID NO: 2933006 - RNA, 20 nt, Human
ccugaaggccccgcccaggc

SEQ ID NO: 2933007 - RNA, 22 nt, Human
ccugaaggccccgcccaggcuu

SEQ ID NO: 2933008 - RNA, 15 nt, Human
ccugagcugggauga

SEQ ID NO: 2933009 - RNA, 11 nt, Human
ccugcccugug

SEQ ID NO: 2933010 - RNA, 14 nt, Human
ccugcccugugggc

SEQ ID NO: 2933011 - RNA, 12 nt, Human
ccugcccugugg

SEQ ID NO: 2933012 - RNA, 13 nt, Human
ccugccucagccu

SEQ ID NO: 2933013 - RNA, 14 nt, Human
ccugccucagccuc

SEQ ID NO: 2933014 - RNA, 12 nt, Human
ccugccucagcc

SEQ ID NO: 2933015 - RNA, 11 nt, Human
ccugccucagc

SEQ ID NO: 2933016 - RNA, 14 nt, Human
ccugccuguugggc

SEQ ID NO: 2933017 - RNA, 22 nt, Human
ccugcccuuaccugccaggaag

SEQ ID NO: 2933018 - RNA, 21 nt, Human
ccugcccuuaccugccaggaa

SEQ ID NO: 2933019 - RNA, 19 nt, Human
ccugcccuuaccugccagg

SEQ ID NO: 2933020 - RNA, 15 nt, Human
ccugcccugugggcc

SEQ ID NO: 2933021 - RNA, 22 nt, Human
ccugccagggacagagggggug

SEQ ID NO: 2933022 - RNA, 12 nt, Human
ccugccaggcau

SEQ ID NO: 2933023 - RNA, 14 nt, Human
ccugcccggcugcg

SEQ ID NO: 2933024 - RNA, 16 nt, Human
ccugcccggcugcgga

SEQ ID NO: 2933025 - RNA, 17 nt, Human
ccugccccugagcccau

SEQ ID NO: 2933026 - RNA, 22 nt, Human
ccugccuguugggccaggagcc

SEQ ID NO: 2933027 - RNA, 17 nt, Human
gaaagcccugagcuuuc

SEQ ID NO: 2933028 - RNA, 22 nt, Human
gaaagcccugagcuuucugcua

SEQ ID NO: 2933029 - RNA, 21 nt, Human
gaaagcccugagcuuucugcu

SEQ ID NO: 2933030 - RNA, 14 nt, Human
gaaagcagggacuu

SEQ ID NO: 2933031 - RNA, 22 nt, Human
gaaagcagaacagugauuacca

SEQ ID NO: 2933032 - RNA, 14 nt, Human
gaaagcagaacagu

SEQ ID NO: 2933033 - RNA, 17 nt, Human
gaaagcagaacagugau

SEQ ID NO: 2933034 - RNA, 16 nt, Human
gaaagaguaggaagac

SEQ ID NO: 2933035 - RNA, 15 nt, Human
gaaagaguaggaaga

SEQ ID NO: 2933036 - RNA, 21 nt, Human
gaaagaggaaugaaguacuca

SEQ ID NO: 2933037 - RNA, 20 nt, Human
gaaagaggcagcuugaaacu

SEQ ID NO: 2933038 - RNA, 22 nt, Human
gaaagacuucucuacccaucuu

SEQ ID NO: 2933039 - RNA, 17 nt, Human
gaaagacuguacaaagu

SEQ ID NO: 2933040 - RNA, 17 nt, Human
gaaagagaacuuccaga

SEQ ID NO: 2933041 - RNA, 19 nt, Human
gaaagacuuuuccaacccu

SEQ ID NO: 2933042 - RNA, 22 nt, Human
gaaacccgucucuacuaaaaau

SEQ ID NO: 2933043 - RNA, 23 nt, Human
gaaacccagcucugguccauaga

SEQ ID NO: 2933044 - RNA, 14 nt, Human
gaaacccugucucu

SEQ ID NO: 2933045 - RNA, 23 nt, Human
gaaacucguuaauuuguaguguu

SEQ ID NO: 2933046 - RNA, 14 nt, Human
gaaacccagcucug

SEQ ID NO: 2933047 - RNA, 13 nt, Human
gaaacccagcucu

SEQ ID NO: 2933048 - RNA, 19 nt, Human
gaaacccagcucuggucca

SEQ ID NO: 2933049 - RNA, 18 nt, Human
gaaacccagcucuggucc

SEQ ID NO: 2933050 - RNA, 16 nt, Human
gaaacccagcucuggu

SEQ ID NO: 2933051 - RNA, 15 nt, Human
gaaacccagcucugg

SEQ ID NO: 2933052 - RNA, 21 nt, Human
gaaacaagucagucauucaga

SEQ ID NO: 2933053 - RNA, 11 nt, Human
gaaacauuugg

SEQ ID NO: 2933054 - RNA, 16 nt, Human
gaaacacaacuauauu

SEQ ID NO: 2933055 - RNA, 16 nt, Human
cuuuuuuggcugcuga

SEQ ID NO: 2933056 - RNA, 15 nt, Human
gaaaaaggaggaaga

SEQ ID NO: 2933057 - RNA, 12 nt, Human
gaaaaaggagga

SEQ ID NO: 2933058 - RNA, 14 nt, Human
gaaaacacauuuuu

SEQ ID NO: 2933059 - RNA, 18 nt, Human
gaaaacacauuuuucuua

SEQ ID NO: 2933060 - RNA, 19 nt, Human
gaaaacacauuuuucuuag

SEQ ID NO: 2933061 - RNA, 17 nt, Human
cuuuuuuggcugcugaa

SEQ ID NO: 2933062 - RNA, 22 nt, Human
cuuuuuuggcugcugaaggcuc

SEQ ID NO: 2933063 - RNA, 20 nt, Human
cuuuuuuggcugcugaaggc

SEQ ID NO: 2933064 - RNA, 21 nt, Human
cuuuuuggguuuauuuggaaa

SEQ ID NO: 2933065 - RNA, 11 nt, Human
cuuuuguucuu

SEQ ID NO: 2933066 - RNA, 12 nt, Human
cuuuuguucuug

SEQ ID NO: 2933067 - RNA, 18 nt, Human
cuuuguuaguuucuccaa

SEQ ID NO: 2933068 - RNA, 24 nt, Human
gaaaacacuguucucugcccucca

SEQ ID NO: 2933069 - RNA, 22 nt, Human
gaaaacacuguucucugcccuc

SEQ ID NO: 2933070 - RNA, 19 nt, Human
gaaaagcugcugacagugu

SEQ ID NO: 2933071 - RNA, 19 nt, Human
gaaaacguggcugcuucaa

SEQ ID NO: 2933072 - RNA, 22 nt, Human
gaaaacguggcugcuucaagga

SEQ ID NO: 2933073 - RNA, 20 nt, Human
gaaaacguggcugcuucaag

SEQ ID NO: 2933074 - RNA, 17 nt, Human
gaaaaggccuucuuccc

SEQ ID NO: 2933075 - RNA, 14 nt, Human
gaaaaguugaauuu

SEQ ID NO: 2933076 - RNA, 15 nt, Human
gaaaaguugaauuuu

SEQ ID NO: 2933077 - RNA, 13 nt, Human
gaaaaguuuauaa

SEQ ID NO: 2933078 - RNA, 14 nt, Human
gaaaaguuuauaaa

SEQ ID NO: 2933079 - RNA, 18 nt, Human
gaaaauauuuguaucaca

SEQ ID NO: 2933080 - RNA, 18 nt, Human
gaaaaucuuauaauuuaa

SEQ ID NO: 2933081 - RNA, 22 nt, Human
gaaaaucuacacuccagugaga

SEQ ID NO: 2933082 - RNA, 22 nt, Human
gaaaaucagccugcuccagcug

SEQ ID NO: 2933083 - RNA, 20 nt, Human
gaaaaucagccugcuccagc

SEQ ID NO: 2933084 - RNA, 23 nt, Human
cuugugguuauaacuuaaugaaa

SEQ ID NO: 2933085 - RNA, 23 nt, Human
cuugucaauaaaauccauacauu

SEQ ID NO: 2933086 - RNA, 17 nt, Human
cuuguaaauagcucagg

SEQ ID NO: 2933087 - RNA, 18 nt, Human
cuuguaaauagcucaggu

SEQ ID NO: 2933088 - RNA, 15 nt, Human
cuuguacauaaugcg

SEQ ID NO: 2933089 - RNA, 12 nt, Human
cuuguacauaau

SEQ ID NO: 2933090 - RNA, 22 nt, Human
cuuguacauaaugcgugcauac

SEQ ID NO: 2933091 - RNA, 19 nt, Human
cuuguacauaaugcgugca

SEQ ID NO: 2933092 - RNA, 21 nt, Human
cuuguacauaaugcgugcaua

SEQ ID NO: 2933093 - RNA, 16 nt, Human
cuuguaaauagcucag

SEQ ID NO: 2933094 - RNA, 22 nt, Human
cuuggggggcugaggugggagg

SEQ ID NO: 2933095 - RNA, 19 nt, Human
cuugaguuuaaauuguaau

SEQ ID NO: 2933096 - RNA, 23 nt, Human
cuuggggggcugaggugggagga

SEQ ID NO: 2933097 - RNA, 15 nt, Human
cuuuaaaagcauuuu

SEQ ID NO: 2933098 - RNA, 22 nt, Human
cuuuaaaagcauuuuuuaaccu

SEQ ID NO: 2933099 - RNA, 13 nt, Human
cuuuacuauggcc

SEQ ID NO: 2933100 - RNA, 22 nt, Human
cuuuaccuuuuuuauacauaaa

SEQ ID NO: 2933101 - RNA, 14 nt, Human
cuuuagcgcccagu

SEQ ID NO: 2933102 - RNA, 15 nt, Human
cuuuagcgcccaguu

SEQ ID NO: 2933103 - RNA, 13 nt, Human
cuuuauaauucua

SEQ ID NO: 2933104 - RNA, 19 nt, Human
cuuuauaauucuacuuuga

SEQ ID NO: 2933105 - RNA, 15 nt, Human
cuuuaugcacaaaau

SEQ ID NO: 2933106 - RNA, 14 nt, Human
cuuugaccucugca

SEQ ID NO: 2933107 - RNA, 15 nt, Human
cuuugaccucugcag

SEQ ID NO: 2933108 - RNA, 17 nt, Human
cuuugaccucugcagca

SEQ ID NO: 2933109 - RNA, 18 nt, Human
cuuugaccucugcagcaa

SEQ ID NO: 2933110 - RNA, 20 nt, Human
cuuugaccucugcagcaaua

SEQ ID NO: 2933111 - RNA, 24 nt, Human
cuuugaccucugcagcaauaaagc

SEQ ID NO: 2933112 - RNA, 16 nt, Human
cuuugcagacaggcaa

SEQ ID NO: 2933113 - RNA, 13 nt, Human
cuuugaccucugc

SEQ ID NO: 2933114 - RNA, 14 nt, Human
cuuugcaggaaauc

SEQ ID NO: 2933115 - RNA, 20 nt, Human
cuuugcagacaggcaagcac

SEQ ID NO: 2933116 - RNA, 14 nt, Human
cuuuguccccaccg

SEQ ID NO: 2933117 - RNA, 13 nt, Human
cuuuggcccaggg

SEQ ID NO: 2933118 - RNA, 16 nt, Human
cuuuggcccagggugg

SEQ ID NO: 2933119 - RNA, 14 nt, Human
cuuuggcccagggu

SEQ ID NO: 2933120 - RNA, 15 nt, Human
cuuuggcccagggug

SEQ ID NO: 2933121 - RNA, 19 nt, Human
cuuuggcuauuagagauca

SEQ ID NO: 2933122 - RNA, 15 nt, Human
cuuuguccccaccgc

SEQ ID NO: 2933123 - RNA, 15 nt, Human
cuuugugaggaagcc

SEQ ID NO: 2933124 - RNA, 15 nt, Human
cuuuccaggaaggcu

SEQ ID NO: 2933125 - RNA, 15 nt, Human
cuuuccaucuacccu

SEQ ID NO: 2933126 - RNA, 16 nt, Human
cuuuccucuuuggucu

SEQ ID NO: 2933127 - RNA, 12 nt, Human
cuuuccugaggc

SEQ ID NO: 2933128 - RNA, 11 nt, Human
cuuucccuccc

SEQ ID NO: 2933129 - RNA, 13 nt, Human
cuuucccucccuu

SEQ ID NO: 2933130 - RNA, 14 nt, Human
cuuucccucccuuc

SEQ ID NO: 2933131 - RNA, 16 nt, Human
cuuucccucccuuccu

SEQ ID NO: 2933132 - RNA, 17 nt, Human
cuuucuggcuaugcauu

SEQ ID NO: 2933133 - RNA, 18 nt, Human
cuuucuggcuaugcauuu

SEQ ID NO: 2933134 - RNA, 19 nt, Human
cuuucuggcuaugcauuug

SEQ ID NO: 2933135 - RNA, 20 nt, Human
cuuucuggcuaugcauuuga

SEQ ID NO: 2933136 - RNA, 15 nt, Human
cuuuccugaggcugg

SEQ ID NO: 2933137 - RNA, 13 nt, Human
cuuuccugaggcu

SEQ ID NO: 2933138 - RNA, 23 nt, Human
cuucacagaugggugcuuggagg

SEQ ID NO: 2933139 - RNA, 10 nt, Human
cuucaaggau

SEQ ID NO: 2933140 - RNA, 16 nt, Human
cuucaaggauccugag

SEQ ID NO: 2933141 - RNA, 15 nt, Human
cuucaaggauccuga

SEQ ID NO: 2933142 - RNA, 13 nt, Human
cuucaaggauccu

SEQ ID NO: 2933143 - RNA, 15 nt, Human
cuuauuucauuucuu

SEQ ID NO: 2933144 - RNA, 15 nt, Human
cuuauuuccucauuu

SEQ ID NO: 2933145 - RNA, 17 nt, Human
cuuauuuaaugaaagac

SEQ ID NO: 2933146 - RNA, 18 nt, Human
cuuauuuaaugaaagacu

SEQ ID NO: 2933147 - RNA, 14 nt, Human
cuuauuucauuucu

SEQ ID NO: 2933148 - RNA, 16 nt, Human
cuuagucacugagaca

SEQ ID NO: 2933149 - RNA, 22 nt, Human
cuuagaugcaguucugaagaag

SEQ ID NO: 2933150 - RNA, 13 nt, Human
cuuagauguauau

SEQ ID NO: 2933151 - RNA, 16 nt, Human
cuguucuggcagaguu

SEQ ID NO: 2933152 - RNA, 20 nt, Human
cuuagaugcaguucugaaga

SEQ ID NO: 2933153 - RNA, 14 nt, Human
cuuagucacugaga

SEQ ID NO: 2933154 - RNA, 19 nt, Human
cuuagucacugagacagcc

SEQ ID NO: 2933155 - RNA, 18 nt, Human
cuuagucacugagacagc

SEQ ID NO: 2933156 - RNA, 15 nt, Human
cuuagugauguaauu

SEQ ID NO: 2933157 - RNA, 16 nt, Human
cuuagugauguaauua

SEQ ID NO: 2933158 - RNA, 19 nt, Human
cuuauaucuauauuuuaca

SEQ ID NO: 2933159 - RNA, 15 nt, Human
cuuauacauuugaua

SEQ ID NO: 2933160 - RNA, 17 nt, Human
cuucccuacaguugaaa

SEQ ID NO: 2933161 - RNA, 17 nt, Human
cuuccccuggcacuggc

SEQ ID NO: 2933162 - RNA, 21 nt, Human
cuuccaggggugggacacccu

SEQ ID NO: 2933163 - RNA, 17 nt, Human
cuuccaggggugggaca

SEQ ID NO: 2933164 - RNA, 15 nt, Human
cuuccagggguggga

SEQ ID NO: 2933165 - RNA, 14 nt, Human
cuuccagggguggg

SEQ ID NO: 2933166 - RNA, 19 nt, Human
cuuccaggcugggagagcc

SEQ ID NO: 2933167 - RNA, 16 nt, Human
cuuccaggcugggaga

SEQ ID NO: 2933168 - RNA, 15 nt, Human
cuuccaggcugggag

SEQ ID NO: 2933169 - RNA, 14 nt, Human
cuuccaggcuggga

SEQ ID NO: 2933170 - RNA, 12 nt, Human
cuuccaggcugg

SEQ ID NO: 2933171 - RNA, 16 nt, Human
cuuccacaagagccca

SEQ ID NO: 2933172 - RNA, 17 nt, Human
cuuccacaagagcccag

SEQ ID NO: 2933173 - RNA, 21 nt, Human
cuuccacaagagcccaggccu

SEQ ID NO: 2933174 - RNA, 19 nt, Human
cuuccacaagagcccaggc

SEQ ID NO: 2933175 - RNA, 17 nt, Human
cuucaguggcagcugcu

SEQ ID NO: 2933176 - RNA, 20 nt, Human
cuucauucaacccaccugcg

SEQ ID NO: 2933177 - RNA, 15 nt, Human
cuucaguaagccgug

SEQ ID NO: 2933178 - RNA, 22 nt, Human
cuucagugccuuauggaacacu

SEQ ID NO: 2933179 - RNA, 18 nt, Human
cuucagugccuuauggaa

SEQ ID NO: 2933180 - RNA, 13 nt, Human
cuucaguggcagc

SEQ ID NO: 2933181 - RNA, 14 nt, Human
cuucaguggcagcu

SEQ ID NO: 2933182 - RNA, 15 nt, Human
cuucaguggcagcug

SEQ ID NO: 2933183 - RNA, 16 nt, Human
cuucaguggcagcugc

SEQ ID NO: 2933184 - RNA, 23 nt, Human
cuucaguaagccgugauuuucau

SEQ ID NO: 2933185 - RNA, 16 nt, Human
cuucaguaagccguga

SEQ ID NO: 2933186 - RNA, 17 nt, Human
cuugaacuuugaccucu

SEQ ID NO: 2933187 - RNA, 21 nt, Human
cuugaacuuugaccucugcag

SEQ ID NO: 2933188 - RNA, 13 nt, Human
cuugaacuccugg

SEQ ID NO: 2933189 - RNA, 13 nt, Human
cuugaccucaggu

SEQ ID NO: 2933190 - RNA, 21 nt, Human
cuugaccgugaggccagagac

SEQ ID NO: 2933191 - RNA, 20 nt, Human
cuugaccgugaggccagaga

SEQ ID NO: 2933192 - RNA, 18 nt, Human
cuugaccgugaggccaga

SEQ ID NO: 2933193 - RNA, 23 nt, Human
cuugaccauucuccaccugccag

SEQ ID NO: 2933194 - RNA, 22 nt, Human
cuugaccauucuccaccugcca

SEQ ID NO: 2933195 - RNA, 17 nt, Human
cuugaccgugaggccag

SEQ ID NO: 2933196 - RNA, 16 nt, Human
cuugagccugggaggu

SEQ ID NO: 2933197 - RNA, 15 nt, Human
cuugagccuugaacu

SEQ ID NO: 2933198 - RNA, 17 nt, Human
cuugagccuugaacuuu

SEQ ID NO: 2933199 - RNA, 18 nt, Human
cuugagccuugaacuuug

SEQ ID NO: 2933200 - RNA, 13 nt, Human
cuugagcucagga

SEQ ID NO: 2933201 - RNA, 21 nt, Human
cuugaggguugggcugguguc

SEQ ID NO: 2933202 - RNA, 21 nt, Human
cuugaguugauucagcucugc

SEQ ID NO: 2933203 - RNA, 19 nt, Human
cuugaggguugggcuggug

SEQ ID NO: 2933204 - RNA, 20 nt, Human
cuugaggguugggcuggugu

SEQ ID NO: 2933205 - RNA, 23 nt, Human
cuugaaaacacuguucucugccc

SEQ ID NO: 2933206 - RNA, 14 nt, Human
cuugaaaacacugu

SEQ ID NO: 2933207 - RNA, 13 nt, Human
cuucuguggguuu

SEQ ID NO: 2933208 - RNA, 21 nt, Human
cuucuguggguuucuaaagcu

SEQ ID NO: 2933209 - RNA, 14 nt, Human
cuucuguggguuuc

SEQ ID NO: 2933210 - RNA, 12 nt, Human
cuucuccaggcu

SEQ ID NO: 2933211 - RNA, 13 nt, Human
cuucuccaggcug

SEQ ID NO: 2933212 - RNA, 20 nt, Human
cuucuccacuuucuagccag

SEQ ID NO: 2933213 - RNA, 11 nt, Human
cuucuccacuu

SEQ ID NO: 2933214 - RNA, 12 nt, Human
cuucucuccagc

SEQ ID NO: 2933215 - RNA, 19 nt, Human
cuucuccuucaccuuuguc

SEQ ID NO: 2933216 - RNA, 19 nt, Human
cuucucuccagccccugga

SEQ ID NO: 2933217 - RNA, 17 nt, Human
cuucucuccagccccug

SEQ ID NO: 2933218 - RNA, 15 nt, Human
cuucucuccagcccc

SEQ ID NO: 2933219 - RNA, 13 nt, Human
cuucucuccagcc

SEQ ID NO: 2933220 - RNA, 13 nt, Human
cuucucugaagga

SEQ ID NO: 2933221 - RNA, 20 nt, Human
cuucugccauuucugagauc

SEQ ID NO: 2933222 - RNA, 13 nt, Human
cuucugcuucagc

SEQ ID NO: 2933223 - RNA, 21 nt, Human
cuucuguacgucugacaggca

SEQ ID NO: 2933224 - RNA, 14 nt, Human
cuucuguacgucug

SEQ ID NO: 2933225 - RNA, 15 nt, Human
cuucuguacgucuga

SEQ ID NO: 2933226 - RNA, 18 nt, Human
cuucuguacgucugacag

SEQ ID NO: 2933227 - RNA, 20 nt, Human
cuucuguacgucugacaggc

SEQ ID NO: 2933228 - RNA, 16 nt, Human
cuucuguccuacucug

SEQ ID NO: 2933229 - RNA, 17 nt, Human
cuucuguccuacucugu

SEQ ID NO: 2933230 - RNA, 18 nt, Human
cuucuguccuacucugug

SEQ ID NO: 2933231 - RNA, 19 nt, Human
cuucuguccuacucugugu

SEQ ID NO: 2933232 - RNA, 21 nt, Human
cuucuguccuacucuguguca

SEQ ID NO: 2933233 - RNA, 18 nt, Human
cuucugucuucacaacag

SEQ ID NO: 2933234 - RNA, 22 nt, Human
cuucugucuucacaacagauua

SEQ ID NO: 2933235 - RNA, 21 nt, Human
cuucugucuucacaacagauu

SEQ ID NO: 2933236 - RNA, 14 nt, Human
cuggccagaugcac

SEQ ID NO: 2933237 - RNA, 15 nt, Human
cuggcccacugcauc

SEQ ID NO: 2933238 - RNA, 22 nt, Human
cuggcacugguuuguucccugu

SEQ ID NO: 2933239 - RNA, 22 nt, Human
cuggcacuggcaaacagggccu

SEQ ID NO: 2933240 - RNA, 18 nt, Human
cuggcacugcuuccagug

SEQ ID NO: 2933241 - RNA, 23 nt, Human
cuggcacugcuuccagugaggcu

SEQ ID NO: 2933242 - RNA, 20 nt, Human
cuggcacugcuuccagugag

SEQ ID NO: 2933243 - RNA, 19 nt, Human
cuggcacugcuuccaguga

SEQ ID NO: 2933244 - RNA, 20 nt, Human
cuggcacccggccccugcug

SEQ ID NO: 2933245 - RNA, 21 nt, Human
cuggcacccggccccugcugg

SEQ ID NO: 2933246 - RNA, 19 nt, Human
cuggcacccggccccugcu

SEQ ID NO: 2933247 - RNA, 20 nt, Human
cuggagugcagugagccgag

SEQ ID NO: 2933248 - RNA, 20 nt, Human
cuggcacaguuuucugagaa

SEQ ID NO: 2933249 - RNA, 22 nt, Human
cuggcacaguuuucugagaaag

SEQ ID NO: 2933250 - RNA, 21 nt, Human
cuggcacaguuuucugagaaa

SEQ ID NO: 2933251 - RNA, 24 nt, Human
cuggcucuuccaggcugggagagc

SEQ ID NO: 2933252 - RNA, 16 nt, Human
cuggcuaacacgguga

SEQ ID NO: 2933253 - RNA, 22 nt, Human
cuggcgugaacccaggaggcgg

SEQ ID NO: 2933254 - RNA, 22 nt, Human
cuggcucuuccaggcugggaga

SEQ ID NO: 2933255 - RNA, 21 nt, Human
cuggcucuuccaggcugggag

SEQ ID NO: 2933256 - RNA, 14 nt, Human
cuggcgugcagugg

SEQ ID NO: 2933257 - RNA, 15 nt, Human
cuggcgugcaguggu

SEQ ID NO: 2933258 - RNA, 23 nt, Human
cuggccuucggccuccauccuga

SEQ ID NO: 2933259 - RNA, 16 nt, Human
cuggccucugcacucc

SEQ ID NO: 2933260 - RNA, 21 nt, Human
cuggccucugcacuccccugc

SEQ ID NO: 2933261 - RNA, 20 nt, Human
cuggccucugcacuccccug

SEQ ID NO: 2933262 - RNA, 18 nt, Human
cuggccucugcacucccc

SEQ ID NO: 2933263 - RNA, 19 nt, Human
cuggccuggccccucaggg

SEQ ID NO: 2933264 - RNA, 24 nt, Human
cuggccuggccccucagggucccu

SEQ ID NO: 2933265 - RNA, 22 nt, Human
cuggccuucggccuccauccug

SEQ ID NO: 2933266 - RNA, 16 nt, Human
cuggaccuugaacugg

SEQ ID NO: 2933267 - RNA, 15 nt, Human
cuggacccuguggau

SEQ ID NO: 2933268 - RNA, 21 nt, Human
cuggaccuugaacuggguacu

SEQ ID NO: 2933269 - RNA, 17 nt, Human
cuggaccuugaacuggg

SEQ ID NO: 2933270 - RNA, 20 nt, Human
cuggaccuugaacuggguac

SEQ ID NO: 2933271 - RNA, 23 nt, Human
cuggacaggcauguucucugagg

SEQ ID NO: 2933272 - RNA, 14 nt, Human
cuggacaggcaugu

SEQ ID NO: 2933273 - RNA, 17 nt, Human
cuggacaggcauguucu

SEQ ID NO: 2933274 - RNA, 22 nt, Human
cuggagguacgaaaagagggga

SEQ ID NO: 2933275 - RNA, 17 nt, Human
cuggagguacgaaaaga

SEQ ID NO: 2933276 - RNA, 14 nt, Human
cuggagugcaguga

SEQ ID NO: 2933277 - RNA, 15 nt, Human
cuggagugcagugag

SEQ ID NO: 2933278 - RNA, 16 nt, Human
cuggagugcagugagc

SEQ ID NO: 2933279 - RNA, 17 nt, Human
cuggagugcagugagcc

SEQ ID NO: 2933280 - RNA, 12 nt, Human
cuggagcucugc

SEQ ID NO: 2933281 - RNA, 13 nt, Human
cuggagcucugcc

SEQ ID NO: 2933282 - RNA, 16 nt, Human
cuggagcucugcccau

SEQ ID NO: 2933283 - RNA, 15 nt, Human
cugcugcuccuagga

SEQ ID NO: 2933284 - RNA, 18 nt, Human
cugcugcuccuaggaccc

SEQ ID NO: 2933285 - RNA, 15 nt, Human
cugcugcuggcuggu

SEQ ID NO: 2933286 - RNA, 14 nt, Human
cugcugcuggcugg

SEQ ID NO: 2933287 - RNA, 15 nt, Human
cugcuuccagugagg

SEQ ID NO: 2933288 - RNA, 18 nt, Human
cugcuuccagugaggcuc

SEQ ID NO: 2933289 - RNA, 16 nt, Human
cugcuuccagugaggc

SEQ ID NO: 2933290 - RNA, 23 nt, Human
cugcuuccagugaggcucugccc

SEQ ID NO: 2933291 - RNA, 21 nt, Human
cugcuuccagugaggcucugc

SEQ ID NO: 2933292 - RNA, 20 nt, Human
cugcuuccagugaggcucug

SEQ ID NO: 2933293 - RNA, 19 nt, Human
cugcuuccagugaggcucu

SEQ ID NO: 2933294 - RNA, 13 nt, Human
cugcugguucagg

SEQ ID NO: 2933295 - RNA, 15 nt, Human
cugcugguucagggu

SEQ ID NO: 2933296 - RNA, 23 nt, Human
cugcugguucaggguuggccccu

SEQ ID NO: 2933297 - RNA, 19 nt, Human
cugcgaccacaagaaggau

SEQ ID NO: 2933298 - RNA, 20 nt, Human
cugcuccagcuguucagcug

SEQ ID NO: 2933299 - RNA, 19 nt, Human
cugcuccagcuguucagcu

SEQ ID NO: 2933300 - RNA, 15 nt, Human
cugcucccaccuggc

SEQ ID NO: 2933301 - RNA, 10 nt, Human
cugcucccac

SEQ ID NO: 2933302 - RNA, 19 nt, Human
cugcucuccgaccagacac

SEQ ID NO: 2933303 - RNA, 16 nt, Human
cugcugccccugcaca

SEQ ID NO: 2933304 - RNA, 14 nt, Human
cugcugccccugca

SEQ ID NO: 2933305 - RNA, 22 nt, Human
cugcugccccugcacagcaggc

SEQ ID NO: 2933306 - RNA, 23 nt, Human
cugcugccccugcacagcaggcu

SEQ ID NO: 2933307 - RNA, 16 nt, Human
cugcucccaccuggcu

SEQ ID NO: 2933308 - RNA, 18 nt, Human
cugcugaaacaacaaaua

SEQ ID NO: 2933309 - RNA, 11 nt, Human
cugcugaaggc

SEQ ID NO: 2933310 - RNA, 20 nt, Human
cugccugcccaggccccugc

SEQ ID NO: 2933311 - RNA, 21 nt, Human
cugccugggaucccucauccu

SEQ ID NO: 2933312 - RNA, 15 nt, Human
cugccugaagucaca

SEQ ID NO: 2933313 - RNA, 15 nt, Human
cugccugcccaggcc

SEQ ID NO: 2933314 - RNA, 16 nt, Human
cugccugcccaggccc

SEQ ID NO: 2933315 - RNA, 17 nt, Human
cugccugcccaggcccc

SEQ ID NO: 2933316 - RNA, 14 nt, Human
cugccucuucucua

SEQ ID NO: 2933317 - RNA, 15 nt, Human
cugccucuucucuac

SEQ ID NO: 2933318 - RNA, 11 nt, Human
cugccucccau

SEQ ID NO: 2933319 - RNA, 19 nt, Human
cugccucccaucacccgcu

SEQ ID NO: 2933320 - RNA, 16 nt, Human
cugccucccaucaccc

SEQ ID NO: 2933321 - RNA, 14 nt, Human
cugccucccaucac

SEQ ID NO: 2933322 - RNA, 12 nt, Human
cugccucccauc

SEQ ID NO: 2933323 - RNA, 22 nt, Human
cugccucugacacacagcucug

SEQ ID NO: 2933324 - RNA, 23 nt, Human
cugccucugacacacagcucugu

SEQ ID NO: 2933325 - RNA, 13 nt, Human
cugccuccccucc

SEQ ID NO: 2933326 - RNA, 15 nt, Human
cugccgcagcccugc

SEQ ID NO: 2933327 - RNA, 14 nt, Human
cugccgcagcccug

SEQ ID NO: 2933328 - RNA, 18 nt, Human
cugccgcagcccugcaga

SEQ ID NO: 2933329 - RNA, 17 nt, Human
cugccgcagcccugcag

SEQ ID NO: 2933330 - RNA, 16 nt, Human
cugcccucaagagcaa

SEQ ID NO: 2933331 - RNA, 12 nt, Human
cugcccuccaag

SEQ ID NO: 2933332 - RNA, 17 nt, Human
cucccuucccaccucuc

SEQ ID NO: 2933333 - RNA, 16 nt, Human
cucccuucccaccucu

SEQ ID NO: 2933334 - RNA, 15 nt, Human
cucccuucccaccuc

SEQ ID NO: 2933335 - RNA, 14 nt, Human
cucccuucccaccu

SEQ ID NO: 2933336 - RNA, 16 nt, Human
cugcccucuccugggc

SEQ ID NO: 2933337 - RNA, 18 nt, Human
cugcccucuccugggcag

SEQ ID NO: 2933338 - RNA, 19 nt, Human
cugcccucuccugggcagc

SEQ ID NO: 2933339 - RNA, 20 nt, Human
cugcccucuccugggcagcu

SEQ ID NO: 2933340 - RNA, 21 nt, Human
cugcccucuccugggcagcug

SEQ ID NO: 2933341 - RNA, 23 nt, Human
cuguaucccaugagccucagcau

SEQ ID NO: 2933342 - RNA, 22 nt, Human
cuguauuuuaaaagaaugauua

SEQ ID NO: 2933343 - RNA, 20 nt, Human
cuguauuuuaaaagaaugau

SEQ ID NO: 2933344 - RNA, 19 nt, Human
cuguauuuuaaaagaauga

SEQ ID NO: 2933345 - RNA, 22 nt, Human
cuguagucccagcuacucggga

SEQ ID NO: 2933346 - RNA, 13 nt, Human
cuguacagagccc

SEQ ID NO: 2933347 - RNA, 20 nt, Human
cugucccuuacgugaguccu

SEQ ID NO: 2933348 - RNA, 14 nt, Human
cuguccgagcuuug

SEQ ID NO: 2933349 - RNA, 22 nt, Human
cuguccccgcacugggcuuggg

SEQ ID NO: 2933350 - RNA, 19 nt, Human
cuguccccgcacugggcuu

SEQ ID NO: 2933351 - RNA, 18 nt, Human
cuguccccgcacugggcu

SEQ ID NO: 2933352 - RNA, 17 nt, Human
cuguccccgcacugggc

SEQ ID NO: 2933353 - RNA, 23 nt, Human
cugucucaaaaaaacacaaaagu

SEQ ID NO: 2933354 - RNA, 16 nt, Human
cugucucaaaaaaaga

SEQ ID NO: 2933355 - RNA, 18 nt, Human
cugucucaaaaaaagaaa

SEQ ID NO: 2933356 - RNA, 14 nt, Human
cuguccuacccacc

SEQ ID NO: 2933357 - RNA, 15 nt, Human
cuguccgagcuuuga

SEQ ID NO: 2933358 - RNA, 20 nt, Human
cugucuacacuaagagagaa

SEQ ID NO: 2933359 - RNA, 17 nt, Human
cuggguucuacccaggu

SEQ ID NO: 2933360 - RNA, 16 nt, Human
cuggguucuacccagg

SEQ ID NO: 2933361 - RNA, 15 nt, Human
cuggguucuacccag

SEQ ID NO: 2933362 - RNA, 14 nt, Human
cuggguucuaccca

SEQ ID NO: 2933363 - RNA, 20 nt, Human
cuggguaacuagggaagaua

SEQ ID NO: 2933364 - RNA, 22 nt, Human
cuggguaacuagggaagauaau

SEQ ID NO: 2933365 - RNA, 13 nt, Human
cugggggaagaag

SEQ ID NO: 2933366 - RNA, 24 nt, Human
cugggcuucaguggcagcugcuuu

SEQ ID NO: 2933367 - RNA, 15 nt, Human
cugggggaagaagcu

SEQ ID NO: 2933368 - RNA, 22 nt, Human
cugggggggauuguaaaauggu

SEQ ID NO: 2933369 - RNA, 19 nt, Human
cugggggcugggcagagga

SEQ ID NO: 2933370 - RNA, 21 nt, Human
cugguacucugccacuuuauu

SEQ ID NO: 2933371 - RNA, 23 nt, Human
cugguggcagcucaccucucccu

SEQ ID NO: 2933372 - RNA, 21 nt, Human
cugguggcagcucaccucucc

SEQ ID NO: 2933373 - RNA, 13 nt, Human
cugguggcagcug

SEQ ID NO: 2933374 - RNA, 14 nt, Human
cugguggcagcugc

SEQ ID NO: 2933375 - RNA, 20 nt, Human
cuguaauccuagcacuuugg

SEQ ID NO: 2933376 - RNA, 15 nt, Human
cuguacaaaguagaa

SEQ ID NO: 2933377 - RNA, 13 nt, Human
cuguacaaaguag

SEQ ID NO: 2933378 - RNA, 16 nt, Human
cugguuccauggccuc

SEQ ID NO: 2933379 - RNA, 22 nt, Human
cuguaauaaacucauuucuagc

SEQ ID NO: 2933380 - RNA, 23 nt, Human
cuguaaucacagcuacuugggag

SEQ ID NO: 2933381 - RNA, 13 nt, Human
cuguucucugccc

SEQ ID NO: 2933382 - RNA, 20 nt, Human
cuguucucugcccuccaaga

SEQ ID NO: 2933383 - RNA, 19 nt, Human
cuguucucugcccuccaag

SEQ ID NO: 2933384 - RNA, 18 nt, Human
cuguucucugcccuccaa

SEQ ID NO: 2933385 - RNA, 17 nt, Human
cuguucucugcccucca

SEQ ID NO: 2933386 - RNA, 16 nt, Human
cuguucucugcccucc

SEQ ID NO: 2933387 - RNA, 15 nt, Human
cuguucucugcccuc

SEQ ID NO: 2933388 - RNA, 14 nt, Human
cuguucucugcccu

SEQ ID NO: 2933389 - RNA, 21 nt, Human
cuguucagcugguugagguuu

SEQ ID NO: 2933390 - RNA, 19 nt, Human
cuguucagcugguugaggu

SEQ ID NO: 2933391 - RNA, 18 nt, Human
cuguucagcugguugagg

SEQ ID NO: 2933392 - RNA, 18 nt, Human
cuguucaugaaagauuca

SEQ ID NO: 2933393 - RNA, 23 nt, Human
cuguucaugaaagauucaaugcc

SEQ ID NO: 2933394 - RNA, 17 nt, Human
cuguucaugaaagauuc

SEQ ID NO: 2933395 - RNA, 21 nt, Human
cugugucuugcaauggcagcc

SEQ ID NO: 2933396 - RNA, 20 nt, Human
cugugucuugcaauggcagc

SEQ ID NO: 2933397 - RNA, 22 nt, Human
cugugucuugcaauggcagccu

SEQ ID NO: 2933398 - RNA, 23 nt, Human
cugugucuugcaauggcagccuu

SEQ ID NO: 2933399 - RNA, 18 nt, Human
cugugugugcgccuacag

SEQ ID NO: 2933400 - RNA, 20 nt, Human
cugugugugcgccuacagga

SEQ ID NO: 2933401 - RNA, 23 nt, Human
cuguuaaaagaugaaaauauuug

SEQ ID NO: 2933402 - RNA, 21 nt, Human
cuguuaaaagaugaaaauauu

SEQ ID NO: 2933403 - RNA, 20 nt, Human
cuguuaaaagaugaaaauau

SEQ ID NO: 2933404 - RNA, 17 nt, Human
cuguggaugauaaaaca

SEQ ID NO: 2933405 - RNA, 14 nt, Human
cuguggaugcugcu

SEQ ID NO: 2933406 - RNA, 22 nt, Human
cuguggaugcugcugccccugc

SEQ ID NO: 2933407 - RNA, 23 nt, Human
cuguggaugcugcugccccugca

SEQ ID NO: 2933408 - RNA, 16 nt, Human
cuguggaugcugcugc

SEQ ID NO: 2933409 - RNA, 18 nt, Human
cuguggaugcugcugccc

SEQ ID NO: 2933410 - RNA, 19 nt, Human
cuguggaugcugcugcccc

SEQ ID NO: 2933411 - RNA, 21 nt, Human
cuguggaugcugcugccccug

SEQ ID NO: 2933412 - RNA, 22 nt, Human
cuguggcgagccauuuguccca

SEQ ID NO: 2933413 - RNA, 23 nt, Human
cuguggcgagccauuugucccaa

SEQ ID NO: 2933414 - RNA, 14 nt, Human
cugugggcccccaa

SEQ ID NO: 2933415 - RNA, 22 nt, Human
cugugcugcccugcccaccugg

SEQ ID NO: 2933416 - RNA, 17 nt, Human
cugugccucugggacug

SEQ ID NO: 2933417 - RNA, 21 nt, Human
cugugcugcccugcccaccug

SEQ ID NO: 2933418 - RNA, 14 nt, Human
cugugccucuggga

SEQ ID NO: 2933419 - RNA, 16 nt, Human
cugugccucugggacu

SEQ ID NO: 2933420 - RNA, 21 nt, Human
cugugcaucuagccucaagcu

SEQ ID NO: 2933421 - RNA, 20 nt, Human
cugugauggggcccugccuc

SEQ ID NO: 2933422 - RNA, 19 nt, Human
cugugauggggcccugccu

SEQ ID NO: 2933423 - RNA, 14 nt, Human
cugugccauuuugu

SEQ ID NO: 2933424 - RNA, 16 nt, Human
cugugccaugugccag

SEQ ID NO: 2933425 - RNA, 18 nt, Human
cugugccaugugccaggu

SEQ ID NO: 2933426 - RNA, 19 nt, Human
cugugaugacauucccugc

SEQ ID NO: 2933427 - RNA, 17 nt, Human
cugugauggggcccugc

SEQ ID NO: 2933428 - RNA, 18 nt, Human
cugugauggggcccugcc

SEQ ID NO: 2933429 - RNA, 23 nt, Human
cugugaguacuacaguccuccca

SEQ ID NO: 2933430 - RNA, 21 nt, Human
cugugaguacuacaguccucc

SEQ ID NO: 2933431 - RNA, 20 nt, Human
cugugaguacuacaguccuc

SEQ ID NO: 2933432 - RNA, 18 nt, Human
cugucuccauguuugaug

SEQ ID NO: 2933433 - RNA, 14 nt, Human
gaauugaagcagga

SEQ ID NO: 2933434 - RNA, 16 nt, Human
gaauugacccacaaga

SEQ ID NO: 2933435 - RNA, 21 nt, Human
gaauugacccacaagaaauga

SEQ ID NO: 2933436 - RNA, 16 nt, Human
gaauugacauugaaau

SEQ ID NO: 2933437 - RNA, 16 nt, Human
gaauuggagcucgugg

SEQ ID NO: 2933438 - RNA, 13 nt, Human
gaaugucagugug

SEQ ID NO: 2933439 - RNA, 22 nt, Human
gaaugucaguuguuauuuauug

SEQ ID NO: 2933440 - RNA, 15 nt, Human
gaaugucacuucugg

SEQ ID NO: 2933441 - RNA, 22 nt, Human
gaauguaggcuggcuuucagag

SEQ ID NO: 2933442 - RNA, 13 nt, Human
gaauguaggcugg

SEQ ID NO: 2933443 - RNA, 18 nt, Human
gaauccagacccggcugc

SEQ ID NO: 2933444 - RNA, 20 nt, Human
gaauccagacccggcugcgu

SEQ ID NO: 2933445 - RNA, 20 nt, Human
gaaugcacaaacagaggccg

SEQ ID NO: 2933446 - RNA, 21 nt, Human
gaaugaaagggcccagagagg

SEQ ID NO: 2933447 - RNA, 21 nt, Human
gaaugcacaaacagaggccgc

SEQ ID NO: 2933448 - RNA, 15 nt, Human
gacaagcucacagac

SEQ ID NO: 2933449 - RNA, 23 nt, Human
gacaacacucauugaccugaggc

SEQ ID NO: 2933450 - RNA, 22 nt, Human
gacaacacucauugaccugagg

SEQ ID NO: 2933451 - RNA, 15 nt, Human
gaauuguaaggaaug

SEQ ID NO: 2933452 - RNA, 19 nt, Human
gaauuucuaggacugaauu

SEQ ID NO: 2933453 - RNA, 20 nt, Human
gaauuucuaggacugaauua

SEQ ID NO: 2933454 - RNA, 20 nt, Human
gaauuugauaugugaacagu

SEQ ID NO: 2933455 - RNA, 22 nt, Human
gaauuucuuuugccguuauuaa

SEQ ID NO: 2933456 - RNA, 20 nt, Human
gacaaugugaaaagaaaaau

SEQ ID NO: 2933457 - RNA, 19 nt, Human
gacaaugugaaaagaaaaa

SEQ ID NO: 2933458 - RNA, 22 nt, Human
gacaaugcaaaccaucauugaa

SEQ ID NO: 2933459 - RNA, 18 nt, Human
gacaaugugaaaagaaaa

SEQ ID NO: 2933460 - RNA, 12 nt, Human
gacaaugugaaa

SEQ ID NO: 2933461 - RNA, 18 nt, Human
gacaaggauugcuacugu

SEQ ID NO: 2933462 - RNA, 21 nt, Human
gacaaggaugaucuaggaaga

SEQ ID NO: 2933463 - RNA, 19 nt, Human
gacaaggauugcuacuguc

SEQ ID NO: 2933464 - RNA, 16 nt, Human
gacaaggaaaaaauaa

SEQ ID NO: 2933465 - RNA, 17 nt, Human
gacacaugccagggcca

SEQ ID NO: 2933466 - RNA, 23 nt, Human
gacacauguccaagaagcccagg

SEQ ID NO: 2933467 - RNA, 20 nt, Human
gacacauguccaagaagccc

SEQ ID NO: 2933468 - RNA, 15 nt, Human
gacacauguccaaga

SEQ ID NO: 2933469 - RNA, 19 nt, Human
gacacaugcaaggucauuu

SEQ ID NO: 2933470 - RNA, 14 nt, Human
gacacaugcaaggu

SEQ ID NO: 2933471 - RNA, 20 nt, Human
gacacaggcccggcuccagg

SEQ ID NO: 2933472 - RNA, 21 nt, Human
gacacaggcccggcuccaggc

SEQ ID NO: 2933473 - RNA, 19 nt, Human
gacacaggcccggcuccag

SEQ ID NO: 2933474 - RNA, 16 nt, Human
gacacaagccuucggc

SEQ ID NO: 2933475 - RNA, 23 nt, Human
gacagggcacaccgggcacucag

SEQ ID NO: 2933476 - RNA, 16 nt, Human
gacagggaggugaccc

SEQ ID NO: 2933477 - RNA, 18 nt, Human
gacagggaggacgcucuc

SEQ ID NO: 2933478 - RNA, 14 nt, Human
gacaguuaagagaa

SEQ ID NO: 2933479 - RNA, 24 nt, Human
gacagggcacaccgggcacucaga

SEQ ID NO: 2933480 - RNA, 17 nt, Human
gacagggaggacgcucu

SEQ ID NO: 2933481 - RNA, 14 nt, Human
gacaggaccaggga

SEQ ID NO: 2933482 - RNA, 23 nt, Human
gacaggaccagggauuuccauga

SEQ ID NO: 2933483 - RNA, 15 nt, Human
gacaggaccagggau

SEQ ID NO: 2933484 - RNA, 14 nt, Human
gacaugggaaaggg

SEQ ID NO: 2933485 - RNA, 14 nt, Human
gacaugaucuucuu

SEQ ID NO: 2933486 - RNA, 22 nt, Human
gacaguuaagagaaaugagcuu

SEQ ID NO: 2933487 - RNA, 20 nt, Human
gacauagaauuaacacauga

SEQ ID NO: 2933488 - RNA, 13 nt, Human
gacagagggggug

SEQ ID NO: 2933489 - RNA, 20 nt, Human
gacagagugagacucugucu

SEQ ID NO: 2933490 - RNA, 22 nt, Human
gacagagugagacucugucuca

SEQ ID NO: 2933491 - RNA, 14 nt, Human
gacagccacggcca

SEQ ID NO: 2933492 - RNA, 17 nt, Human
gacagccacggccaggc

SEQ ID NO: 2933493 - RNA, 18 nt, Human
gacagccacggccaggcc

SEQ ID NO: 2933494 - RNA, 19 nt, Human
gacagccacggccaggcca

SEQ ID NO: 2933495 - RNA, 21 nt, Human
gacagcugccugggaucccuc

SEQ ID NO: 2933496 - RNA, 18 nt, Human
gacagcugccugggaucc

SEQ ID NO: 2933497 - RNA, 20 nt, Human
gacagccacggccaggccag

SEQ ID NO: 2933498 - RNA, 21 nt, Human
gacagccacggccaggccaga

SEQ ID NO: 2933499 - RNA, 17 nt, Human
gacagcugccugggauc

SEQ ID NO: 2933500 - RNA, 16 nt, Human
gacagcugccugggau

SEQ ID NO: 2933501 - RNA, 17 nt, Human
gacagaggcagccccau

SEQ ID NO: 2933502 - RNA, 15 nt, Human
gacagaggggguggc

SEQ ID NO: 2933503 - RNA, 19 nt, Human
gacagaggggguggccucc

SEQ ID NO: 2933504 - RNA, 18 nt, Human
gacagaggggguggccuc

SEQ ID NO: 2933505 - RNA, 23 nt, Human
gacagaggggguggccucccaac

SEQ ID NO: 2933506 - RNA, 22 nt, Human
gacagaggggguggccucccaa

SEQ ID NO: 2933507 - RNA, 21 nt, Human
gacagaggggguggccuccca

SEQ ID NO: 2933508 - RNA, 21 nt, Human
gacagagcaagugagacccug

SEQ ID NO: 2933509 - RNA, 14 nt, Human
gacagaggcagccc

SEQ ID NO: 2933510 - RNA, 16 nt, Human
gacagaggcagcccca

SEQ ID NO: 2933511 - RNA, 12 nt, Human
gacagaggcagc

SEQ ID NO: 2933512 - RNA, 19 nt, Human
gacagagccccacccucag

SEQ ID NO: 2933513 - RNA, 20 nt, Human
gaccauucuccaccugccag

SEQ ID NO: 2933514 - RNA, 19 nt, Human
gaccauucuccaccugcca

SEQ ID NO: 2933515 - RNA, 17 nt, Human
gaccauucuccaccugc

SEQ ID NO: 2933516 - RNA, 17 nt, Human
gaccauuggggcuccca

SEQ ID NO: 2933517 - RNA, 19 nt, Human
gaccauuggggcucccagc

SEQ ID NO: 2933518 - RNA, 20 nt, Human
gaccauuggggcucccagcc

SEQ ID NO: 2933519 - RNA, 21 nt, Human
gaccauuggggcucccagcca

SEQ ID NO: 2933520 - RNA, 22 nt, Human
gaccauucuccaccugccaggg

SEQ ID NO: 2933521 - RNA, 21 nt, Human
gaccauucuccaccugccagg

SEQ ID NO: 2933522 - RNA, 19 nt, Human
gaccagagcugccaccugc

SEQ ID NO: 2933523 - RNA, 18 nt, Human
gaccagagcugccaccug

SEQ ID NO: 2933524 - RNA, 17 nt, Human
gaccagagcugccaccu

SEQ ID NO: 2933525 - RNA, 15 nt, Human
gaccagagcugccac

SEQ ID NO: 2933526 - RNA, 14 nt, Human
gaccagagcugcca

SEQ ID NO: 2933527 - RNA, 13 nt, Human
gaccagagcugcc

SEQ ID NO: 2933528 - RNA, 16 nt, Human
gacaugggacauuugc

SEQ ID NO: 2933529 - RNA, 18 nt, Human
gacaugggaaaggggaag

SEQ ID NO: 2933530 - RNA, 24 nt, Human
gaccagacaccuugacagggcaca

SEQ ID NO: 2933531 - RNA, 11 nt, Human
gaccagagcug

SEQ ID NO: 2933532 - RNA, 21 nt, Human
gaccacugcagaagacaguau

SEQ ID NO: 2933533 - RNA, 14 nt, Human
gaccacguuucuaa

SEQ ID NO: 2933534 - RNA, 12 nt, Human
gacccugucuca

SEQ ID NO: 2933535 - RNA, 20 nt, Human
gacccuuguggucccacccc

SEQ ID NO: 2933536 - RNA, 19 nt, Human
gacccuuguggucccaccc

SEQ ID NO: 2933537 - RNA, 21 nt, Human
gacccuuguggucccacccca

SEQ ID NO: 2933538 - RNA, 15 nt, Human
gacccuugugguccc

SEQ ID NO: 2933539 - RNA, 17 nt, Human
gaccgugaggccagaga

SEQ ID NO: 2933540 - RNA, 16 nt, Human
gaccgugaggccagag

SEQ ID NO: 2933541 - RNA, 18 nt, Human
gaccgugaggccagagac

SEQ ID NO: 2933542 - RNA, 23 nt, Human
gacccugaggcccagagggccug

SEQ ID NO: 2933543 - RNA, 14 nt, Human
gaccccuccaugug

SEQ ID NO: 2933544 - RNA, 18 nt, Human
gaccccuccaugugggcu

SEQ ID NO: 2933545 - RNA, 21 nt, Human
gaccccuccaugugggcuagu

SEQ ID NO: 2933546 - RNA, 22 nt, Human
gacccugaggcccagagggccu

SEQ ID NO: 2933547 - RNA, 20 nt, Human
gacccaaaaggcagaagcaa

SEQ ID NO: 2933548 - RNA, 16 nt, Human
gacccaaaaggcagaa

SEQ ID NO: 2933549 - RNA, 15 nt, Human
gacccacaagaaaug

SEQ ID NO: 2933550 - RNA, 22 nt, Human
gagaacuuccagauccuggaaa

SEQ ID NO: 2933551 - RNA, 23 nt, Human
gagaacuuccagauccuggaaau

SEQ ID NO: 2933552 - RNA, 14 nt, Human
gagaagagaaugca

SEQ ID NO: 2933553 - RNA, 16 nt, Human
gagaagcagaggaagg

SEQ ID NO: 2933554 - RNA, 16 nt, Human
gagaagagaaugcaca

SEQ ID NO: 2933555 - RNA, 17 nt, Human
gagaaugagagacacac

SEQ ID NO: 2933556 - RNA, 21 nt, Human
gagaaccuagggugauauuaa

SEQ ID NO: 2933557 - RNA, 22 nt, Human
gagaaccuagggugauauuaac

SEQ ID NO: 2933558 - RNA, 14 nt, Human
gagaaaugagcuug

SEQ ID NO: 2933559 - RNA, 16 nt, Human
gagaaagguugaagca

SEQ ID NO: 2933560 - RNA, 19 nt, Human
gacuugcauaccugcuuuu

SEQ ID NO: 2933561 - RNA, 19 nt, Human
gacuuaagcacacuugaca

SEQ ID NO: 2933562 - RNA, 16 nt, Human
gacuucuaaguaaaac

SEQ ID NO: 2933563 - RNA, 18 nt, Human
gacuucuaaguaaaacca

SEQ ID NO: 2933564 - RNA, 17 nt, Human
gacuucuaaguaaaacc

SEQ ID NO: 2933565 - RNA, 23 nt, Human
gacuucugucuucacaacagauu

SEQ ID NO: 2933566 - RNA, 20 nt, Human
gacuucugucuucacaacag

SEQ ID NO: 2933567 - RNA, 24 nt, Human
gacuucuaaguaaaaccacagcag

SEQ ID NO: 2933568 - RNA, 23 nt, Human
gacuucuaaguaaaaccacagca

SEQ ID NO: 2933569 - RNA, 19 nt, Human
gacuucuaaguaaaaccac

SEQ ID NO: 2933570 - RNA, 13 nt, Human
gacuacaggugug

SEQ ID NO: 2933571 - RNA, 18 nt, Human
gacuacaggugugaguca

SEQ ID NO: 2933572 - RNA, 21 nt, Human
gacuacaggugugagucacca

SEQ ID NO: 2933573 - RNA, 14 nt, Human
gacucauucuucug

SEQ ID NO: 2933574 - RNA, 15 nt, Human
gacucauucuucugu

SEQ ID NO: 2933575 - RNA, 13 nt, Human
gacucgcgacaau

SEQ ID NO: 2933576 - RNA, 13 nt, Human
gacuccugcaggc

SEQ ID NO: 2933577 - RNA, 12 nt, Human
gacuccugcagg

SEQ ID NO: 2933578 - RNA, 16 nt, Human
gacuccaaagaaaugu

SEQ ID NO: 2933579 - RNA, 15 nt, Human
gacuccaaagaaaug

SEQ ID NO: 2933580 - RNA, 12 nt, Human
gacuccaaagaa

SEQ ID NO: 2933581 - RNA, 11 nt, Human
gacuccaaaga

SEQ ID NO: 2933582 - RNA, 21 nt, Human
gacucauuuuaaaaaauggaa

SEQ ID NO: 2933583 - RNA, 20 nt, Human
gacugcugggagguuaaaaa

SEQ ID NO: 2933584 - RNA, 14 nt, Human
gacuggaagcacag

SEQ ID NO: 2933585 - RNA, 15 nt, Human
gacuggaagcacagc

SEQ ID NO: 2933586 - RNA, 16 nt, Human
gacuggaagcacagcu

SEQ ID NO: 2933587 - RNA, 19 nt, Human
gacuggggccacuacauuu

SEQ ID NO: 2933588 - RNA, 18 nt, Human
gacuggaagcacagcuuc

SEQ ID NO: 2933589 - RNA, 16 nt, Human
gacuggauaguccguc

SEQ ID NO: 2933590 - RNA, 17 nt, Human
gacucgcgacaaugcaa

SEQ ID NO: 2933591 - RNA, 21 nt, Human
gacugaguacguugugcauuu

SEQ ID NO: 2933592 - RNA, 22 nt, Human
gacugaguacguugugcauuug

SEQ ID NO: 2933593 - RNA, 13 nt, Human
gacugcccggcag

SEQ ID NO: 2933594 - RNA, 15 nt, Human
gacugcccggcaggg

SEQ ID NO: 2933595 - RNA, 23 nt, Human
gacugaguacguugugcauuugg

SEQ ID NO: 2933596 - RNA, 14 nt, Human
gacugcauuauauu

SEQ ID NO: 2933597 - RNA, 16 nt, Human
gacugcauuauauuua

SEQ ID NO: 2933598 - RNA, 17 nt, Human
gagcaaaguagaucaug

SEQ ID NO: 2933599 - RNA, 19 nt, Human
gagaucacgccacugcacu

SEQ ID NO: 2933600 - RNA, 18 nt, Human
gagaucacgccacugcac

SEQ ID NO: 2933601 - RNA, 14 nt, Human
gagauagccaaggc

SEQ ID NO: 2933602 - RNA, 23 nt, Human
gagaucaaccccuucgcuccugu

SEQ ID NO: 2933603 - RNA, 16 nt, Human
gagauagccaaggcca

SEQ ID NO: 2933604 - RNA, 20 nt, Human
gagcaccuuagacagucccu

SEQ ID NO: 2933605 - RNA, 21 nt, Human
gagcacuaaggugugcucuga

SEQ ID NO: 2933606 - RNA, 15 nt, Human
gagcacuaaggugug

SEQ ID NO: 2933607 - RNA, 22 nt, Human
gagcaccuuagacagucccugc

SEQ ID NO: 2933608 - RNA, 21 nt, Human
gagcaccuuagacagucccug

SEQ ID NO: 2933609 - RNA, 18 nt, Human
gagcccugguggcagugg

SEQ ID NO: 2933610 - RNA, 19 nt, Human
gagccagggucucacuaug

SEQ ID NO: 2933611 - RNA, 14 nt, Human
gagccagggucuca

SEQ ID NO: 2933612 - RNA, 23 nt, Human
gagccagauuucacucuccuugg

SEQ ID NO: 2933613 - RNA, 16 nt, Human
gagcagagaauucucu

SEQ ID NO: 2933614 - RNA, 12 nt, Human
gagcagagacca

SEQ ID NO: 2933615 - RNA, 19 nt, Human
gagccaauuuaaagaaaac

SEQ ID NO: 2933616 - RNA, 20 nt, Human
gagccagauuucacucuccu

SEQ ID NO: 2933617 - RNA, 19 nt, Human
gagaggggaacagacugga

SEQ ID NO: 2933618 - RNA, 13 nt, Human
gagaggggcacag

SEQ ID NO: 2933619 - RNA, 16 nt, Human
gagagggugggagugg

SEQ ID NO: 2933620 - RNA, 14 nt, Human
gagagggugggagu

SEQ ID NO: 2933621 - RNA, 19 nt, Human
gagagacacacugaagaag

SEQ ID NO: 2933622 - RNA, 22 nt, Human
gagacuggcgugaacccaggag

SEQ ID NO: 2933623 - RNA, 19 nt, Human
gagacuggcgugaacccag

SEQ ID NO: 2933624 - RNA, 18 nt, Human
gagacuccugcaggcagc

SEQ ID NO: 2933625 - RNA, 19 nt, Human
gagacuccugcaggcagcc

SEQ ID NO: 2933626 - RNA, 21 nt, Human
gagacuccugcaggcagccag

SEQ ID NO: 2933627 - RNA, 20 nt, Human
gagacuccugcaggcagcca

SEQ ID NO: 2933628 - RNA, 13 nt, Human
gagacucugucuc

SEQ ID NO: 2933629 - RNA, 21 nt, Human
gagacucgcgacaaugcaaac

SEQ ID NO: 2933630 - RNA, 20 nt, Human
gagacucgcgacaaugcaaa

SEQ ID NO: 2933631 - RNA, 22 nt, Human
gagacaggguuuugccauguug

SEQ ID NO: 2933632 - RNA, 12 nt, Human
gagaccaucccu

SEQ ID NO: 2933633 - RNA, 14 nt, Human
gagaccaucccuga

SEQ ID NO: 2933634 - RNA, 21 nt, Human
gagaccaucccugaaggcccc

SEQ ID NO: 2933635 - RNA, 18 nt, Human
gagaccaucccugaaggc

SEQ ID NO: 2933636 - RNA, 23 nt, Human
gagaaugcacaaacagaggccgc

SEQ ID NO: 2933637 - RNA, 20 nt, Human
gagaaugagagacacacuga

SEQ ID NO: 2933638 - RNA, 20 nt, Human
gagacagcucugcauacuca

SEQ ID NO: 2933639 - RNA, 22 nt, Human
gauaaauggcuuccuggcaaua

SEQ ID NO: 2933640 - RNA, 21 nt, Human
gaguugaagacagagcuacac

SEQ ID NO: 2933641 - RNA, 17 nt, Human
gaguugaagacagagcu

SEQ ID NO: 2933642 - RNA, 15 nt, Human
gaguugaagacagag

SEQ ID NO: 2933643 - RNA, 20 nt, Human
gaguucauacccuguuacca

SEQ ID NO: 2933644 - RNA, 14 nt, Human
gaguucaucuugaa

SEQ ID NO: 2933645 - RNA, 20 nt, Human
gaguucaucuugaauuguaa

SEQ ID NO: 2933646 - RNA, 19 nt, Human
gaguucaucuugaauugua

SEQ ID NO: 2933647 - RNA, 15 nt, Human
gaguuacagacaaag

SEQ ID NO: 2933648 - RNA, 13 nt, Human
gaguuacagacaa

SEQ ID NO: 2933649 - RNA, 13 nt, Human
gagugggugaaua

SEQ ID NO: 2933650 - RNA, 17 nt, Human
gagugacagaggcagcc

SEQ ID NO: 2933651 - RNA, 15 nt, Human
gaguguacagagugg

SEQ ID NO: 2933652 - RNA, 16 nt, Human
gaguggucagaacaga

SEQ ID NO: 2933653 - RNA, 20 nt, Human
gagugugccugaagucccag

SEQ ID NO: 2933654 - RNA, 12 nt, Human
gaguuacagaca

SEQ ID NO: 2933655 - RNA, 15 nt, Human
gauagcacagacccu

SEQ ID NO: 2933656 - RNA, 14 nt, Human
gauagccaaggcca

SEQ ID NO: 2933657 - RNA, 22 nt, Human
gauagccaaggccaaaggaagc

SEQ ID NO: 2933658 - RNA, 20 nt, Human
gauacaggaaaagcugcuga

SEQ ID NO: 2933659 - RNA, 22 nt, Human
gauaagaaccuuuugagugccu

SEQ ID NO: 2933660 - RNA, 19 nt, Human
gauacaggaaaagcugcug

SEQ ID NO: 2933661 - RNA, 21 nt, Human
gauacaggaaaagcugcugac

SEQ ID NO: 2933662 - RNA, 23 nt, Human
gauacaggaaaagcugcugacag

SEQ ID NO: 2933663 - RNA, 18 nt, Human
gaucacggcucacugcag

SEQ ID NO: 2933664 - RNA, 15 nt, Human
gaucacggcucacug

SEQ ID NO: 2933665 - RNA, 16 nt, Human
gaucacggcucacugc

SEQ ID NO: 2933666 - RNA, 24 nt, Human
gauaugauucaaaugucuauaaac

SEQ ID NO: 2933667 - RNA, 14 nt, Human
gauaugauucaaau

SEQ ID NO: 2933668 - RNA, 22 nt, Human
gauaugauucaaaugucuauaa

SEQ ID NO: 2933669 - RNA, 17 nt, Human
gaggucagagccugcag

SEQ ID NO: 2933670 - RNA, 20 nt, Human
gaggucagagccugcaguua

SEQ ID NO: 2933671 - RNA, 17 nt, Human
gagguugggaggccauu

SEQ ID NO: 2933672 - RNA, 15 nt, Human
gagguugggaggcca

SEQ ID NO: 2933673 - RNA, 16 nt, Human
gagguuucaaaccucc

SEQ ID NO: 2933674 - RNA, 19 nt, Human
gaguagcugggacuacagg

SEQ ID NO: 2933675 - RNA, 22 nt, Human
gaguagcugggacuacaggcac

SEQ ID NO: 2933676 - RNA, 12 nt, Human
gaguaggaagac

SEQ ID NO: 2933677 - RNA, 17 nt, Human
gaguaggaagacuuugg

SEQ ID NO: 2933678 - RNA, 13 nt, Human
gaguaggaagacu

SEQ ID NO: 2933679 - RNA, 20 nt, Human
gaguacuacaguccucccau

SEQ ID NO: 2933680 - RNA, 23 nt, Human
gaguacuacaguccucccaucuc

SEQ ID NO: 2933681 - RNA, 21 nt, Human
gaguacuacaguccucccauc

SEQ ID NO: 2933682 - RNA, 19 nt, Human
gaguaggaagacuuuggaa

SEQ ID NO: 2933683 - RNA, 18 nt, Human
gaguaggaagacuuugga

SEQ ID NO: 2933684 - RNA, 11 nt, Human
gaguauauguc

SEQ ID NO: 2933685 - RNA, 15 nt, Human
gagucgaggacaggg

SEQ ID NO: 2933686 - RNA, 16 nt, Human
gagucgaggacaggga

SEQ ID NO: 2933687 - RNA, 19 nt, Human
gaguccgaaagggacuugg

SEQ ID NO: 2933688 - RNA, 14 nt, Human
gagucgaggacagg

SEQ ID NO: 2933689 - RNA, 14 nt, Human
gagucugaaggcug

SEQ ID NO: 2933690 - RNA, 15 nt, Human
gagucugaaggcugg

SEQ ID NO: 2933691 - RNA, 21 nt, Human
gagucuauuuacggaacucaa

SEQ ID NO: 2933692 - RNA, 13 nt, Human
gagucugaaggcu

SEQ ID NO: 2933693 - RNA, 12 nt, Human
gagucugaaggc

SEQ ID NO: 2933694 - RNA, 14 nt, Human
gagugacagaggca

SEQ ID NO: 2933695 - RNA, 15 nt, Human
gagugacagaggcag

SEQ ID NO: 2933696 - RNA, 16 nt, Human
gagugacagaggcagc

SEQ ID NO: 2933697 - RNA, 23 nt, Human
gagugaacaaauuuacagagaca

SEQ ID NO: 2933698 - RNA, 17 nt, Human
gagugaagcugggagaa

SEQ ID NO: 2933699 - RNA, 15 nt, Human
gagggggcugcuccc

SEQ ID NO: 2933700 - RNA, 15 nt, Human
gagggggccuggaug

SEQ ID NO: 2933701 - RNA, 17 nt, Human
gaggggguggccuccca

SEQ ID NO: 2933702 - RNA, 13 nt, Human
gaggguaaggcug

SEQ ID NO: 2933703 - RNA, 21 nt, Human
gagggagugacagaggcagcc

SEQ ID NO: 2933704 - RNA, 22 nt, Human
gagggagugacagaggcagccc

SEQ ID NO: 2933705 - RNA, 18 nt, Human
gagggagugacagaggca

SEQ ID NO: 2933706 - RNA, 16 nt, Human
gagggagugacagagg

SEQ ID NO: 2933707 - RNA, 16 nt, Human
gagggagggcuccaga

SEQ ID NO: 2933708 - RNA, 20 nt, Human
gagggagggcuccagacaca

SEQ ID NO: 2933709 - RNA, 20 nt, Human
gaggcugggcucccuuccca

SEQ ID NO: 2933710 - RNA, 19 nt, Human
gagggagggcuccagacac

SEQ ID NO: 2933711 - RNA, 13 nt, Human
gagggucugagga

SEQ ID NO: 2933712 - RNA, 14 nt, Human
gagggucugaggaa

SEQ ID NO: 2933713 - RNA, 12 nt, Human
gaggguggaaua

SEQ ID NO: 2933714 - RNA, 21 nt, Human
gagggugaagugaagacaaug

SEQ ID NO: 2933715 - RNA, 14 nt, Human
gaggguggugaccu

SEQ ID NO: 2933716 - RNA, 15 nt, Human
gagggugggaguggg

SEQ ID NO: 2933717 - RNA, 21 nt, Human
gaggguggugaccucugccug

SEQ ID NO: 2933718 - RNA, 22 nt, Human
gagggugucccaaaaagaaagg

SEQ ID NO: 2933719 - RNA, 12 nt, Human
gaggucagagcc

SEQ ID NO: 2933720 - RNA, 13 nt, Human
gaggucagagccu

SEQ ID NO: 2933721 - RNA, 17 nt, Human
gaggucaaggcugcagu

SEQ ID NO: 2933722 - RNA, 18 nt, Human
gagguacacuugugaaua

SEQ ID NO: 2933723 - RNA, 24 nt, Human
gagguaaggaauaccugucccccu

SEQ ID NO: 2933724 - RNA, 21 nt, Human
gagguaaggaauaccuguccc

SEQ ID NO: 2933725 - RNA, 15 nt, Human
gaggguugggcuggu

SEQ ID NO: 2933726 - RNA, 14 nt, Human
gaggguugggcugg

SEQ ID NO: 2933727 - RNA, 20 nt, Human
gaggcccuucucuccagccc

SEQ ID NO: 2933728 - RNA, 15 nt, Human
gaggcccuucucucc

SEQ ID NO: 2933729 - RNA, 21 nt, Human
gaggcccuucucuccagcccc

SEQ ID NO: 2933730 - RNA, 16 nt, Human
gaggcccagagggccu

SEQ ID NO: 2933731 - RNA, 15 nt, Human
gaggcccagagggcc

SEQ ID NO: 2933732 - RNA, 19 nt, Human
gaggcccagagggccugca

SEQ ID NO: 2933733 - RNA, 14 nt, Human
gaggcccagagggc

SEQ ID NO: 2933734 - RNA, 13 nt, Human
gaggcccagaggg

SEQ ID NO: 2933735 - RNA, 11 nt, Human
gaggcccagag

SEQ ID NO: 2933736 - RNA, 16 nt, Human
gaggcugggcucccuu

SEQ ID NO: 2933737 - RNA, 20 nt, Human
gaggcggaccuuguagugag

SEQ ID NO: 2933738 - RNA, 14 nt, Human
gaggcugccucucc

SEQ ID NO: 2933739 - RNA, 16 nt, Human
gaggccuucucugaag

SEQ ID NO: 2933740 - RNA, 18 nt, Human
gaggccuucucugaagga

SEQ ID NO: 2933741 - RNA, 19 nt, Human
gaggccuucucugaaggac

SEQ ID NO: 2933742 - RNA, 20 nt, Human
gaggcagccccauucugccu

SEQ ID NO: 2933743 - RNA, 9 nt, Human
gaggcaggg

SEQ ID NO: 2933744 - RNA, 19 nt, Human
gaggcagccccauucugcc

SEQ ID NO: 2933745 - RNA, 18 nt, Human
gaggcagccccauucugc

SEQ ID NO: 2933746 - RNA, 14 nt, Human
gaggccaugggccu

SEQ ID NO: 2933747 - RNA, 17 nt, Human
gaggccaugggccuccu

SEQ ID NO: 2933748 - RNA, 18 nt, Human
gaggccaugggccuccug

SEQ ID NO: 2933749 - RNA, 20 nt, Human
gaggccaugggccuccugug

SEQ ID NO: 2933750 - RNA, 21 nt, Human
gaggccaugggccuccugugu

SEQ ID NO: 2933751 - RNA, 23 nt, Human
gaggccaugggccuccugugugu

SEQ ID NO: 2933752 - RNA, 20 nt, Human
gaggauugcuugagcucagg

SEQ ID NO: 2933753 - RNA, 22 nt, Human
gaggaucucuugagccugggag

SEQ ID NO: 2933754 - RNA, 19 nt, Human
gaggaucucuugagccugg

SEQ ID NO: 2933755 - RNA, 16 nt, Human
gaggaucucuugagcc

SEQ ID NO: 2933756 - RNA, 13 nt, Human
gaggaucucuuga

SEQ ID NO: 2933757 - RNA, 12 nt, Human
gagcccugucuc

SEQ ID NO: 2933758 - RNA, 12 nt, Human
gcaccauaacuu

SEQ ID NO: 2933759 - RNA, 19 nt, Human
gcaccuuagacagucccug

SEQ ID NO: 2933760 - RNA, 13 nt, Human
gcacgauuucugu

SEQ ID NO: 2933761 - RNA, 15 nt, Human
gcacgauuucuguuu

SEQ ID NO: 2933762 - RNA, 21 nt, Human
gcaccuuagacagucccugcc

SEQ ID NO: 2933763 - RNA, 20 nt, Human
gcaccuuagacagucccugc

SEQ ID NO: 2933764 - RNA, 16 nt, Human
gcacauuaaaugacuc

SEQ ID NO: 2933765 - RNA, 21 nt, Human
gcacauuaaaugacucuuccc

SEQ ID NO: 2933766 - RNA, 12 nt, Human
gcacauuaaaug

SEQ ID NO: 2933767 - RNA, 14 nt, Human
gcacauuaaaugac

SEQ ID NO: 2933768 - RNA, 22 nt, Human
gcacagaguuguuacauuuuua

SEQ ID NO: 2933769 - RNA, 16 nt, Human
gcacagaguuguuaca

SEQ ID NO: 2933770 - RNA, 18 nt, Human
gcacagaguuguuacauu

SEQ ID NO: 2933771 - RNA, 19 nt, Human
gcacagaguuguuacauuu

SEQ ID NO: 2933772 - RNA, 21 nt, Human
gcacagaguuguuacauuuuu

SEQ ID NO: 2933773 - RNA, 18 nt, Human
gcagaaggaagacuucau

SEQ ID NO: 2933774 - RNA, 13 nt, Human
gcagacaggcaag

SEQ ID NO: 2933775 - RNA, 14 nt, Human
gcagacaggcaagc

SEQ ID NO: 2933776 - RNA, 12 nt, Human
gcagacaggcaa

SEQ ID NO: 2933777 - RNA, 18 nt, Human
gcagacaggaccagggau

SEQ ID NO: 2933778 - RNA, 19 nt, Human
gcacuggcaaacagggccu

SEQ ID NO: 2933779 - RNA, 20 nt, Human
gcacuggcaaacagggccuc

SEQ ID NO: 2933780 - RNA, 22 nt, Human
gcacuggcaaacagggccucug

SEQ ID NO: 2933781 - RNA, 23 nt, Human
gcacuggcaaacagggccucugc

SEQ ID NO: 2933782 - RNA, 17 nt, Human
gcacuggcaaacagggc

SEQ ID NO: 2933783 - RNA, 22 nt, Human
gcacugcuuccagugaggcucu

SEQ ID NO: 2933784 - RNA, 23 nt, Human
gcacugcuuccagugaggcucug

SEQ ID NO: 2933785 - RNA, 18 nt, Human
gcacugacuucuaaguaa

SEQ ID NO: 2933786 - RNA, 15 nt, Human
gcacugacuucuaag

SEQ ID NO: 2933787 - RNA, 16 nt, Human
gcacgauuucuguuua

SEQ ID NO: 2933788 - RNA, 15 nt, Human
gcaauggcagccuug

SEQ ID NO: 2933789 - RNA, 13 nt, Human
gcaacucugaagg

SEQ ID NO: 2933790 - RNA, 14 nt, Human
gcaacucaucuuag

SEQ ID NO: 2933791 - RNA, 19 nt, Human
gcaauuaugaaaauaaucu

SEQ ID NO: 2933792 - RNA, 14 nt, Human
gcaauuaugaaaau

SEQ ID NO: 2933793 - RNA, 16 nt, Human
gcaauuaugaaaauaa

SEQ ID NO: 2933794 - RNA, 12 nt, Human
gcaauuaugaaa

SEQ ID NO: 2933795 - RNA, 14 nt, Human
gcaaugugauaaaa

SEQ ID NO: 2933796 - RNA, 16 nt, Human
gcacaaacagaggccg

SEQ ID NO: 2933797 - RNA, 15 nt, Human
gcacaaacagaggcc

SEQ ID NO: 2933798 - RNA, 14 nt, Human
gcacaaacagaggc

SEQ ID NO: 2933799 - RNA, 23 nt, Human
gcacagaaaauggaagacagcuc

SEQ ID NO: 2933800 - RNA, 22 nt, Human
gcacagaaaauggaagacagcu

SEQ ID NO: 2933801 - RNA, 21 nt, Human
gcacagaaaauggaagacagc

SEQ ID NO: 2933802 - RNA, 17 nt, Human
gcacagacccugcccug

SEQ ID NO: 2933803 - RNA, 16 nt, Human
gcacagacccugcccu

SEQ ID NO: 2933804 - RNA, 15 nt, Human
gcacagacccugccc

SEQ ID NO: 2933805 - RNA, 14 nt, Human
gcacagacccugcc

SEQ ID NO: 2933806 - RNA, 22 nt, Human
gcacagacccugcccugugggc

SEQ ID NO: 2933807 - RNA, 15 nt, Human
gcacagaguuguuac

SEQ ID NO: 2933808 - RNA, 21 nt, Human
gcacagacccugcccuguggg

SEQ ID NO: 2933809 - RNA, 20 nt, Human
gcacagacccugcccugugg

SEQ ID NO: 2933810 - RNA, 19 nt, Human
gcacagacccugcccugug

SEQ ID NO: 2933811 - RNA, 18 nt, Human
gcacagacccugcccugu

SEQ ID NO: 2933812 - RNA, 17 nt, Human
gcacaagcuccaagcuc

SEQ ID NO: 2933813 - RNA, 15 nt, Human
gcacaagcuccaagc

SEQ ID NO: 2933814 - RNA, 18 nt, Human
gcacaagcuccaagcucc

SEQ ID NO: 2933815 - RNA, 13 nt, Human
gcacacuggcuca

SEQ ID NO: 2933816 - RNA, 20 nt, Human
gcacaccgggcacucagaag

SEQ ID NO: 2933817 - RNA, 18 nt, Human
gcacacuuuggcccaggg

SEQ ID NO: 2933818 - RNA, 16 nt, Human
gcacacuuuggcccag

SEQ ID NO: 2933819 - RNA, 20 nt, Human
gcacagaaaauggaagacag

SEQ ID NO: 2933820 - RNA, 22 nt, Human
gcacacuggcucacccaguccu

SEQ ID NO: 2933821 - RNA, 19 nt, Human
gcacacuggcucacccagu

SEQ ID NO: 2933822 - RNA, 13 nt, Human
gcacacugucugc

SEQ ID NO: 2933823 - RNA, 19 nt, Human
gaugcccaaagaugcagcc

SEQ ID NO: 2933824 - RNA, 22 nt, Human
gaugccaugagccgcccaaggc

SEQ ID NO: 2933825 - RNA, 20 nt, Human
gaugcccaaagaugcagccg

SEQ ID NO: 2933826 - RNA, 18 nt, Human
gaugcuagaacucccuuu

SEQ ID NO: 2933827 - RNA, 20 nt, Human
gaugcuagaacucccuuuca

SEQ ID NO: 2933828 - RNA, 19 nt, Human
gaugggugcuuggaggaag

SEQ ID NO: 2933829 - RNA, 13 nt, Human
gauggggcugcac

SEQ ID NO: 2933830 - RNA, 15 nt, Human
gauggggcugcaccg

SEQ ID NO: 2933831 - RNA, 22 nt, Human
gauggccgggcgcgguggcuca

SEQ ID NO: 2933832 - RNA, 20 nt, Human
gaugggcaacccccagccug

SEQ ID NO: 2933833 - RNA, 21 nt, Human
gaugggcaacccccagccugc

SEQ ID NO: 2933834 - RNA, 24 nt, Human
gauggggcccugccuccuuuguga

SEQ ID NO: 2933835 - RNA, 14 nt, Human
gauggugcaaugac

SEQ ID NO: 2933836 - RNA, 12 nt, Human
gauggugcaaug

SEQ ID NO: 2933837 - RNA, 16 nt, Human
gauggugcaaugaccu

SEQ ID NO: 2933838 - RNA, 15 nt, Human
gauggugcaaugacc

SEQ ID NO: 2933839 - RNA, 17 nt, Human
gauggugcaaugaccuu

SEQ ID NO: 2933840 - RNA, 22 nt, Human
gauuacaagcgugagccacugc

SEQ ID NO: 2933841 - RNA, 15 nt, Human
gauuaaacuuaaucu

SEQ ID NO: 2933842 - RNA, 23 nt, Human
gauuacaagcgugagccacugca

SEQ ID NO: 2933843 - RNA, 16 nt, Human
gauguugcuaacagca

SEQ ID NO: 2933844 - RNA, 19 nt, Human
gauguugaaaaaguucugc

SEQ ID NO: 2933845 - RNA, 19 nt, Human
gauuuugauccaagcuggu

SEQ ID NO: 2933846 - RNA, 21 nt, Human
gauuuugaaauuuuuauuaaa

SEQ ID NO: 2933847 - RNA, 12 nt, Human
gcaaaccaucau

SEQ ID NO: 2933848 - RNA, 18 nt, Human
gcaaagaugaaggucugu

SEQ ID NO: 2933849 - RNA, 14 nt, Human
gcaaagaugaaggu

SEQ ID NO: 2933850 - RNA, 15 nt, Human
gcaaaccaucauuga

SEQ ID NO: 2933851 - RNA, 19 nt, Human
gcaaauguuuauuuaaaag

SEQ ID NO: 2933852 - RNA, 20 nt, Human
gcaaauguuuauuuaaaaga

SEQ ID NO: 2933853 - RNA, 17 nt, Human
gcaaauguuuauuuaaa

SEQ ID NO: 2933854 - RNA, 16 nt, Human
gcaaauugucacagga

SEQ ID NO: 2933855 - RNA, 12 nt, Human
gauuuaaaucag

SEQ ID NO: 2933856 - RNA, 13 nt, Human
gauuuaacagaaa

SEQ ID NO: 2933857 - RNA, 14 nt, Human
gauuuaacagaaau

SEQ ID NO: 2933858 - RNA, 15 nt, Human
gauuuaacagaaaug

SEQ ID NO: 2933859 - RNA, 22 nt, Human
gauuuccguuaaaauaccagcc

SEQ ID NO: 2933860 - RNA, 15 nt, Human
gauugccuuuuuaua

SEQ ID NO: 2933861 - RNA, 21 nt, Human
gauugccuuuuuauaacuuuu

SEQ ID NO: 2933862 - RNA, 22 nt, Human
gauugccuuuuuauaacuuuuu

SEQ ID NO: 2933863 - RNA, 14 nt, Human
gauucuccugccuc

SEQ ID NO: 2933864 - RNA, 21 nt, Human
gauucaaugccccugaauuua

SEQ ID NO: 2933865 - RNA, 19 nt, Human
gauucaaugccccugaauu

SEQ ID NO: 2933866 - RNA, 20 nt, Human
gauucaaugccccugaauuu

SEQ ID NO: 2933867 - RNA, 16 nt, Human
ggauucuuauggacaa

SEQ ID NO: 2933868 - RNA, 23 nt, Human
ggauuacaagcgugagccacugc

SEQ ID NO: 2933869 - RNA, 17 nt, Human
ggauugcuacuguccua

SEQ ID NO: 2933870 - RNA, 16 nt, Human
ggcaacccccagccug

SEQ ID NO: 2933871 - RNA, 17 nt, Human
ggcaacccccagccugc

SEQ ID NO: 2933872 - RNA, 15 nt, Human
ggauuguaaaauggu

SEQ ID NO: 2933873 - RNA, 14 nt, Human
ggcaaugcuggcug

SEQ ID NO: 2933874 - RNA, 15 nt, Human
ggcaaugcuggcugu

SEQ ID NO: 2933875 - RNA, 23 nt, Human
ggcaaugcuggcuguuggcuggg

SEQ ID NO: 2933876 - RNA, 18 nt, Human
ggcaacccccagccugcu

SEQ ID NO: 2933877 - RNA, 20 nt, Human
ggcacccaccaucaugucug

SEQ ID NO: 2933878 - RNA, 23 nt, Human
ggcacccaccaucaugucuggcu

SEQ ID NO: 2933879 - RNA, 22 nt, Human
ggcacccggccccugcugguuc

SEQ ID NO: 2933880 - RNA, 17 nt, Human
ggaucccucauccucau

SEQ ID NO: 2933881 - RNA, 13 nt, Human
ggaucccucaucc

SEQ ID NO: 2933882 - RNA, 22 nt, Human
ggaucccucauccucauaccca

SEQ ID NO: 2933883 - RNA, 14 nt, Human
ggagugcagugagc

SEQ ID NO: 2933884 - RNA, 12 nt, Human
ggagugcaguga

SEQ ID NO: 2933885 - RNA, 21 nt, Human
ggagaugccaugagccgccca

SEQ ID NO: 2933886 - RNA, 23 nt, Human
ggagugaguugauagcacagacc

SEQ ID NO: 2933887 - RNA, 18 nt, Human
ggauacaaaagcauguga

SEQ ID NO: 2933888 - RNA, 13 nt, Human
ggauacuuauuua

SEQ ID NO: 2933889 - RNA, 19 nt, Human
ggaugcagccucacagucc

SEQ ID NO: 2933890 - RNA, 17 nt, Human
ggaugcugcugccccug

SEQ ID NO: 2933891 - RNA, 15 nt, Human
ggaugcuuguacaua

SEQ ID NO: 2933892 - RNA, 19 nt, Human
ggauuacaagcgugagcca

SEQ ID NO: 2933893 - RNA, 17 nt, Human
ggaugcagccucacagu

SEQ ID NO: 2933894 - RNA, 16 nt, Human
ggaugcagccucacag

SEQ ID NO: 2933895 - RNA, 21 nt, Human
ggaugauuggaggggggaggu

SEQ ID NO: 2933896 - RNA, 23 nt, Human
ggaugcacagaguuguuacauuu

SEQ ID NO: 2933897 - RNA, 13 nt, Human
ggauccuccaggu

SEQ ID NO: 2933898 - RNA, 12 nt, Human
ggauccuccagg

SEQ ID NO: 2933899 - RNA, 15 nt, Human
ggcauggacuucugg

SEQ ID NO: 2933900 - RNA, 14 nt, Human
ggcauggacuucug

SEQ ID NO: 2933901 - RNA, 15 nt, Human
ggcaugaagacagau

SEQ ID NO: 2933902 - RNA, 18 nt, Human
ggcaugacacgaauauug

SEQ ID NO: 2933903 - RNA, 19 nt, Human
ggcagggucucacucuguc

SEQ ID NO: 2933904 - RNA, 20 nt, Human
ggcagggucucacucugucg

SEQ ID NO: 2933905 - RNA, 13 nt, Human
ggcagugggagcu

SEQ ID NO: 2933906 - RNA, 14 nt, Human
ggcagugggagcug

SEQ ID NO: 2933907 - RNA, 16 nt, Human
ggcagugggagcugcc

SEQ ID NO: 2933908 - RNA, 21 nt, Human
ggcagcucagagaggguggga

SEQ ID NO: 2933909 - RNA, 13 nt, Human
ggcagcucagaga

SEQ ID NO: 2933910 - RNA, 22 nt, Human
ggcagcugcuuuugucuauggg

SEQ ID NO: 2933911 - RNA, 17 nt, Human
ggcagcuugaggguugg

SEQ ID NO: 2933912 - RNA, 20 nt, Human
ggcaccuguagucccagcua

SEQ ID NO: 2933913 - RNA, 15 nt, Human
ggcacuauuuauuua

SEQ ID NO: 2933914 - RNA, 14 nt, Human
ggcagcucaccucu

SEQ ID NO: 2933915 - RNA, 12 nt, Human
ggcagcucaccu

SEQ ID NO: 2933916 - RNA, 20 nt, Human
ggccagccuugaccauucuc

SEQ ID NO: 2933917 - RNA, 17 nt, Human
ggccagcugcuugggcu

SEQ ID NO: 2933918 - RNA, 22 nt, Human
ggccagccuugaccauucucca

SEQ ID NO: 2933919 - RNA, 18 nt, Human
ggccaggcccucugccca

SEQ ID NO: 2933920 - RNA, 23 nt, Human
ggccagcugcuugggcuucaucc

SEQ ID NO: 2933921 - RNA, 16 nt, Human
ggccaugucagacaca

SEQ ID NO: 2933922 - RNA, 17 nt, Human
ggccaugucagacacag

SEQ ID NO: 2933923 - RNA, 16 nt, Human
ggccaugggccuccug

SEQ ID NO: 2933924 - RNA, 18 nt, Human
ggccaccgccuugcccag

SEQ ID NO: 2933925 - RNA, 16 nt, Human
ggccaccgccuugccc

SEQ ID NO: 2933926 - RNA, 16 nt, Human
ggcauuccccaggagg

SEQ ID NO: 2933927 - RNA, 19 nt, Human
ggcauuccccaggaggcca

SEQ ID NO: 2933928 - RNA, 18 nt, Human
ggcauuccccaggaggcc

SEQ ID NO: 2933929 - RNA, 14 nt, Human
ggcauggcugggaa

SEQ ID NO: 2933930 - RNA, 18 nt, Human
ggcaugggaaugaauguc

SEQ ID NO: 2933931 - RNA, 17 nt, Human
ggcauuccccaggaggc

SEQ ID NO: 2933932 - RNA, 22 nt, Human
ggcaugggaaugaaugucagug

SEQ ID NO: 2933933 - RNA, 23 nt, Human
ggccuagcauacguacacauuuu

SEQ ID NO: 2933934 - RNA, 17 nt, Human
ggccucuuaugggcugg

SEQ ID NO: 2933935 - RNA, 18 nt, Human
ggccucuuaugggcuggg

SEQ ID NO: 2933936 - RNA, 16 nt, Human
ggccucugcacucccc

SEQ ID NO: 2933937 - RNA, 15 nt, Human
ggccucugcacuccc

SEQ ID NO: 2933938 - RNA, 14 nt, Human
ggccucugcacucc

SEQ ID NO: 2933939 - RNA, 13 nt, Human
ggccucugcacuc

SEQ ID NO: 2933940 - RNA, 11 nt, Human
ggcccagagag

SEQ ID NO: 2933941 - RNA, 17 nt, Human
ggcccucugcccacucc

SEQ ID NO: 2933942 - RNA, 16 nt, Human
ggcccucugcccacuc

SEQ ID NO: 2933943 - RNA, 15 nt, Human
ggcccucugcccacu

SEQ ID NO: 2933944 - RNA, 13 nt, Human
ggcccucugccca

SEQ ID NO: 2933945 - RNA, 20 nt, Human
ggcccucugcccacucccug

SEQ ID NO: 2933946 - RNA, 19 nt, Human
ggcccucugcccacucccu

SEQ ID NO: 2933947 - RNA, 21 nt, Human
ggcccucugcccacucccugc

SEQ ID NO: 2933948 - RNA, 15 nt, Human
ggcccugccuccuuu

SEQ ID NO: 2933949 - RNA, 14 nt, Human
ggcccugccuccuu

SEQ ID NO: 2933950 - RNA, 13 nt, Human
ggcccugccuccu

SEQ ID NO: 2933951 - RNA, 15 nt, Human
ggcuaugcauuugaa

SEQ ID NO: 2933952 - RNA, 14 nt, Human
ggcuaugcauuuga

SEQ ID NO: 2933953 - RNA, 16 nt, Human
ggcuaguugggcuucc

SEQ ID NO: 2933954 - RNA, 15 nt, Human
ggcuaguugggcuuc

SEQ ID NO: 2933955 - RNA, 23 nt, Human
ggcuagugugguguuuccuggca

SEQ ID NO: 2933956 - RNA, 22 nt, Human
ggcuaggaccccuccauguggg

SEQ ID NO: 2933957 - RNA, 16 nt, Human
ggcuaggaccccucca

SEQ ID NO: 2933958 - RNA, 22 nt, Human
ggcuagagguucaaagauauuu

SEQ ID NO: 2933959 - RNA, 17 nt, Human
ggcuagagguucaaaga

SEQ ID NO: 2933960 - RNA, 16 nt, Human
ggcuagagguucaaag

SEQ ID NO: 2933961 - RNA, 15 nt, Human
ggcucaaguccucuu

SEQ ID NO: 2933962 - RNA, 21 nt, Human
ggcucaaguccucuuuucuga

SEQ ID NO: 2933963 - RNA, 12 nt, Human
ggcuccaggagc

SEQ ID NO: 2933964 - RNA, 19 nt, Human
ggcuccaggagcagccaca

SEQ ID NO: 2933965 - RNA, 13 nt, Human
ggcuccaggagca

SEQ ID NO: 2933966 - RNA, 15 nt, Human
ggcuccaggcuccuu

SEQ ID NO: 2933967 - RNA, 11 nt, Human
ggcuccaggcu

SEQ ID NO: 2933968 - RNA, 18 nt, Human
ggcuccaggagcagccac

SEQ ID NO: 2933969 - RNA, 16 nt, Human
ggcuccaggcuccuuu

SEQ ID NO: 2933970 - RNA, 20 nt, Human
ggcggaccuuguagugagcc

SEQ ID NO: 2933971 - RNA, 21 nt, Human
ggcggaccuuguagugagccg

SEQ ID NO: 2933972 - RNA, 23 nt, Human
ggcgcugccccuggcagccccug

SEQ ID NO: 2933973 - RNA, 21 nt, Human
ggcgcugccccuggcagcccc

SEQ ID NO: 2933974 - RNA, 19 nt, Human
ggcgcugccccuggcagcc

SEQ ID NO: 2933975 - RNA, 18 nt, Human
ggcgcugccccuggcagc

SEQ ID NO: 2933976 - RNA, 19 nt, Human
ggccuggccugagcuggga

SEQ ID NO: 2933977 - RNA, 20 nt, Human
ggccugucagcuaaagaagu

SEQ ID NO: 2933978 - RNA, 14 nt, Human
ggccugggggcugg

SEQ ID NO: 2933979 - RNA, 22 nt, Human
ggccugggggcugggcagagga

SEQ ID NO: 2933980 - RNA, 20 nt, Human
ggccugggggcugggcagag

SEQ ID NO: 2933981 - RNA, 15 nt, Human
ggagaaucacuugaa

SEQ ID NO: 2933982 - RNA, 19 nt, Human
ggagaaucacuugaacccg

SEQ ID NO: 2933983 - RNA, 18 nt, Human
ggagaagcggcuggcagc

SEQ ID NO: 2933984 - RNA, 17 nt, Human
ggagaagcggcuggcag

SEQ ID NO: 2933985 - RNA, 13 nt, Human
ggacgcucucugg

SEQ ID NO: 2933986 - RNA, 14 nt, Human
ggacgcucucuggc

SEQ ID NO: 2933987 - RNA, 13 nt, Human
ggaccagagcugc

SEQ ID NO: 2933988 - RNA, 23 nt, Human
ggaccucaggugagaagcagagg

SEQ ID NO: 2933989 - RNA, 20 nt, Human
ggaccucaggccugggggcu

SEQ ID NO: 2933990 - RNA, 19 nt, Human
ggaccucaggugagaagca

SEQ ID NO: 2933991 - RNA, 15 nt, Human
ggaccuugaacuggg

SEQ ID NO: 2933992 - RNA, 17 nt, Human
ggaccuugaacugggua

SEQ ID NO: 2933993 - RNA, 17 nt, Human
ggacgcuacccgggaag

SEQ ID NO: 2933994 - RNA, 20 nt, Human
ggacgcuacccgggaagggg

SEQ ID NO: 2933995 - RNA, 19 nt, Human
ggacgcuacccgggaaggg

SEQ ID NO: 2933996 - RNA, 17 nt, Human
ggacacucaaaagcugg

SEQ ID NO: 2933997 - RNA, 15 nt, Human
ggacagccacggcca

SEQ ID NO: 2933998 - RNA, 19 nt, Human
ggacagccacggccaggcc

SEQ ID NO: 2933999 - RNA, 20 nt, Human
ggacagccacggccaggcca

SEQ ID NO: 2934000 - RNA, 21 nt, Human
ggacagccacggccaggccag

SEQ ID NO: 2934001 - RNA, 14 nt, Human
ggacauggacaagg

SEQ ID NO: 2934002 - RNA, 20 nt, Human
ggacauugcggacagccacg

SEQ ID NO: 2934003 - RNA, 23 nt, Human
ggaaggggagauaaggguaucug

SEQ ID NO: 2934004 - RNA, 18 nt, Human
ggaaguacuggagaaaau

SEQ ID NO: 2934005 - RNA, 16 nt, Human
ggaaguacuggagaaa

SEQ ID NO: 2934006 - RNA, 12 nt, Human
ggaaguacugga

SEQ ID NO: 2934007 - RNA, 14 nt, Human
ggaaugauuaauua

SEQ ID NO: 2934008 - RNA, 20 nt, Human
ggaagugacgguuuaauggg

SEQ ID NO: 2934009 - RNA, 13 nt, Human
ggaaugcaaagau

SEQ ID NO: 2934010 - RNA, 12 nt, Human
ggaaugcagugg

SEQ ID NO: 2934011 - RNA, 24 nt, Human
ggaaugauuaauuaaaacacaaca

SEQ ID NO: 2934012 - RNA, 19 nt, Human
ggaauguuugccucugccu

SEQ ID NO: 2934013 - RNA, 16 nt, Human
ggacaaaauggaauac

SEQ ID NO: 2934014 - RNA, 17 nt, Human
ggacaaaauggaauacu

SEQ ID NO: 2934015 - RNA, 16 nt, Human
ggaauuggagcucgug

SEQ ID NO: 2934016 - RNA, 22 nt, Human
ggaauuggagcucgugggacag

SEQ ID NO: 2934017 - RNA, 23 nt, Human
ggaauuucucccagucauuuaau

SEQ ID NO: 2934018 - RNA, 23 nt, Human
ggaaagggauuuucagcccucag

SEQ ID NO: 2934019 - RNA, 22 nt, Human
ggaaaggcuccaggagcagcca

SEQ ID NO: 2934020 - RNA, 21 nt, Human
ggaaaggcuccaggagcagcc

SEQ ID NO: 2934021 - RNA, 20 nt, Human
ggaaaggcuccaggagcagc

SEQ ID NO: 2934022 - RNA, 19 nt, Human
ggaaaggcuccaggagcag

SEQ ID NO: 2934023 - RNA, 17 nt, Human
ggaaaggcuccaggagc

SEQ ID NO: 2934024 - RNA, 12 nt, Human
ggaaaggcucca

SEQ ID NO: 2934025 - RNA, 14 nt, Human
ggaaaggcuccagg

SEQ ID NO: 2934026 - RNA, 13 nt, Human
ggaaaggcuccag

SEQ ID NO: 2934027 - RNA, 19 nt, Human
ggaaaaucagccugcucca

SEQ ID NO: 2934028 - RNA, 23 nt, Human
ggaaaaucagccugcuccagcug

SEQ ID NO: 2934029 - RNA, 16 nt, Human
ggaaaucaaauaugca

SEQ ID NO: 2934030 - RNA, 21 nt, Human
ggaaaucaccgaaaacguggc

SEQ ID NO: 2934031 - RNA, 17 nt, Human
ggaaaucaaauaugcaa

SEQ ID NO: 2934032 - RNA, 14 nt, Human
ggaaaucaccgaaa

SEQ ID NO: 2934033 - RNA, 16 nt, Human
ggaacaggaaacugau

SEQ ID NO: 2934034 - RNA, 18 nt, Human
gcuugaggguugggcugg

SEQ ID NO: 2934035 - RNA, 20 nt, Human
gcuugaggguugggcuggug

SEQ ID NO: 2934036 - RNA, 15 nt, Human
gcuuugugauuuuug

SEQ ID NO: 2934037 - RNA, 21 nt, Human
gcuuuguuuguugucagcuga

SEQ ID NO: 2934038 - RNA, 18 nt, Human
ggaaaacaugcuacacac

SEQ ID NO: 2934039 - RNA, 14 nt, Human
ggaaaagcugcuga

SEQ ID NO: 2934040 - RNA, 18 nt, Human
ggaaaagcugcugacagu

SEQ ID NO: 2934041 - RNA, 20 nt, Human
ggaaaagcugcugacagugu

SEQ ID NO: 2934042 - RNA, 21 nt, Human
gcuuaggagaagucuucuauu

SEQ ID NO: 2934043 - RNA, 17 nt, Human
gcuuagucacugagaca

SEQ ID NO: 2934044 - RNA, 15 nt, Human
gcuuagucacugaga

SEQ ID NO: 2934045 - RNA, 20 nt, Human
gcuuagucacugagacagcc

SEQ ID NO: 2934046 - RNA, 19 nt, Human
gcuuagucacugagacagc

SEQ ID NO: 2934047 - RNA, 21 nt, Human
gcuuagucacugagacagccc

SEQ ID NO: 2934048 - RNA, 21 nt, Human
gcuguucaugaaagauucaau

SEQ ID NO: 2934049 - RNA, 12 nt, Human
gcuguucaugaa

SEQ ID NO: 2934050 - RNA, 13 nt, Human
gcuguucagcugg

SEQ ID NO: 2934051 - RNA, 14 nt, Human
gcuguucagcuggu

SEQ ID NO: 2934052 - RNA, 23 nt, Human
gcugccaauauccuaauaaaaag

SEQ ID NO: 2934053 - RNA, 20 nt, Human
gcugucuacacuaagagaga

SEQ ID NO: 2934054 - RNA, 21 nt, Human
gcugccaauauccuaauaaaa

SEQ ID NO: 2934055 - RNA, 20 nt, Human
gcugccaauauccuaauaaa

SEQ ID NO: 2934056 - RNA, 15 nt, Human
gcugccaaugggagc

SEQ ID NO: 2934057 - RNA, 19 nt, Human
gcugccaaugggagcucau

SEQ ID NO: 2934058 - RNA, 16 nt, Human
gcugccaaugggagcu

SEQ ID NO: 2934059 - RNA, 16 nt, Human
gcuucaguggcagcug

SEQ ID NO: 2934060 - RNA, 15 nt, Human
gcuucaguggcagcu

SEQ ID NO: 2934061 - RNA, 19 nt, Human
gcuuaucucaggggugugc

SEQ ID NO: 2934062 - RNA, 13 nt, Human
gcuuaucucaggg

SEQ ID NO: 2934063 - RNA, 12 nt, Human
gcuuauacacuu

SEQ ID NO: 2934064 - RNA, 17 nt, Human
gcuucaguggcagcugc

SEQ ID NO: 2934065 - RNA, 18 nt, Human
gcuucaguggcagcugcu

SEQ ID NO: 2934066 - RNA, 13 nt, Human
gcuucauuuccug

SEQ ID NO: 2934067 - RNA, 16 nt, Human
gcuucauuuccugugu

SEQ ID NO: 2934068 - RNA, 15 nt, Human
gcuucauccuccuca

SEQ ID NO: 2934069 - RNA, 12 nt, Human
gcuucauccucc

SEQ ID NO: 2934070 - RNA, 22 nt, Human
gcuucucccccacccccuaggg

SEQ ID NO: 2934071 - RNA, 16 nt, Human
gcuugaggguugggcu

SEQ ID NO: 2934072 - RNA, 15 nt, Human
gcuuccagugaggcu

SEQ ID NO: 2934073 - RNA, 17 nt, Human
gcuucauuuccuguguc

SEQ ID NO: 2934074 - RNA, 16 nt, Human
gcuuccagugaggcuc

SEQ ID NO: 2934075 - RNA, 16 nt, Human
gcccggcuccaggcuc

SEQ ID NO: 2934076 - RNA, 13 nt, Human
gccccugccaccc

SEQ ID NO: 2934077 - RNA, 14 nt, Human
gccccugccacccu

SEQ ID NO: 2934078 - RNA, 15 nt, Human
gccccugccacccug

SEQ ID NO: 2934079 - RNA, 17 nt, Human
gccccuguucuggcaga

SEQ ID NO: 2934080 - RNA, 21 nt, Human
gccccuguucuggcagaguug

SEQ ID NO: 2934081 - RNA, 15 nt, Human
gcagacucuacagag

SEQ ID NO: 2934082 - RNA, 17 nt, Human
gcccggcuccaggcucc

SEQ ID NO: 2934083 - RNA, 18 nt, Human
gcccggcuccaggcuccu

SEQ ID NO: 2934084 - RNA, 14 nt, Human
gcccugagcuuucu

SEQ ID NO: 2934085 - RNA, 16 nt, Human
gcccugagcuuucugc

SEQ ID NO: 2934086 - RNA, 12 nt, Human
gcccucugccca

SEQ ID NO: 2934087 - RNA, 22 nt, Human
gcccucuccugggcagcugccu

SEQ ID NO: 2934088 - RNA, 23 nt, Human
gcccucuccugggcagcugccuc

SEQ ID NO: 2934089 - RNA, 12 nt, Human
gcccucuccugg

SEQ ID NO: 2934090 - RNA, 13 nt, Human
gcccucuccuggg

SEQ ID NO: 2934091 - RNA, 22 nt, Human
gcccuucucuccagccccugga

SEQ ID NO: 2934092 - RNA, 21 nt, Human
gcccuucucuccagccccugg

SEQ ID NO: 2934093 - RNA, 19 nt, Human
gcccuucucuccagccccu

SEQ ID NO: 2934094 - RNA, 18 nt, Human
gccgagaucacgccacug

SEQ ID NO: 2934095 - RNA, 19 nt, Human
gccgagaucacgccacugc

SEQ ID NO: 2934096 - RNA, 17 nt, Human
gccgagauugcaccacu

SEQ ID NO: 2934097 - RNA, 18 nt, Human
gccgagauugcaccacug

SEQ ID NO: 2934098 - RNA, 16 nt, Human
gccgagaucacgccac

SEQ ID NO: 2934099 - RNA, 14 nt, Human
gcccuuuuucaaua

SEQ ID NO: 2934100 - RNA, 14 nt, Human
gcccugguggcagu

SEQ ID NO: 2934101 - RNA, 17 nt, Human
gcccugguggcaguggg

SEQ ID NO: 2934102 - RNA, 18 nt, Human
gcccugguggcaguggga

SEQ ID NO: 2934103 - RNA, 19 nt, Human
gcccugguggcagugggag

SEQ ID NO: 2934104 - RNA, 20 nt, Human
gcccugguggcagugggagc

SEQ ID NO: 2934105 - RNA, 21 nt, Human
gcccugguggcagugggagcu

SEQ ID NO: 2934106 - RNA, 22 nt, Human
gcccugguggcagugggagcug

SEQ ID NO: 2934107 - RNA, 23 nt, Human
gcccugguggcagugggagcugc

SEQ ID NO: 2934108 - RNA, 20 nt, Human
gccugggggcugggcagagg

SEQ ID NO: 2934109 - RNA, 17 nt, Human
gccugggcagaaggaag

SEQ ID NO: 2934110 - RNA, 16 nt, Human
gccugggcagaaggaa

SEQ ID NO: 2934111 - RNA, 18 nt, Human
gccugggcagaaggaaga

SEQ ID NO: 2934112 - RNA, 15 nt, Human
gccugggcagaagga

SEQ ID NO: 2934113 - RNA, 14 nt, Human
gccuggccagaugc

SEQ ID NO: 2934114 - RNA, 15 nt, Human
gccuggccagaugca

SEQ ID NO: 2934115 - RNA, 22 nt, Human
gccuggccagaugcaccagccc

SEQ ID NO: 2934116 - RNA, 14 nt, Human
gccuggauggggcu

SEQ ID NO: 2934117 - RNA, 15 nt, Human
gccuggauggggcug

SEQ ID NO: 2934118 - RNA, 19 nt, Human
gccucugcggagcacacug

SEQ ID NO: 2934119 - RNA, 21 nt, Human
gccucugcggagcacacuggc

SEQ ID NO: 2934120 - RNA, 24 nt, Human
gccucugcggagcacacuggcuca

SEQ ID NO: 2934121 - RNA, 22 nt, Human
gccugaagucacacagugaguc

SEQ ID NO: 2934122 - RNA, 18 nt, Human
gccucugccucugacaca

SEQ ID NO: 2934123 - RNA, 18 nt, Human
gccugcuccagcuguuca

SEQ ID NO: 2934124 - RNA, 16 nt, Human
gccugcuccagcuguu

SEQ ID NO: 2934125 - RNA, 15 nt, Human
gccugcuccagcugu

SEQ ID NO: 2934126 - RNA, 12 nt, Human
gccucagugcca

SEQ ID NO: 2934127 - RNA, 14 nt, Human
gccucagugccacu

SEQ ID NO: 2934128 - RNA, 23 nt, Human
gccucagccucccaaagugcugg

SEQ ID NO: 2934129 - RNA, 21 nt, Human
gccucacaguccuuaccagca

SEQ ID NO: 2934130 - RNA, 14 nt, Human
gccucaaccuccug

SEQ ID NO: 2934131 - RNA, 16 nt, Human
gccucaaccuccuggg

SEQ ID NO: 2934132 - RNA, 19 nt, Human
gccucaagugauucuccug

SEQ ID NO: 2934133 - RNA, 20 nt, Human
gccucaagugauucuccugc

SEQ ID NO: 2934134 - RNA, 21 nt, Human
gccucaagugauucuccugcc

SEQ ID NO: 2934135 - RNA, 17 nt, Human
gccuaagugcagccccg

SEQ ID NO: 2934136 - RNA, 19 nt, Human
gccgagauagccaaggcca

SEQ ID NO: 2934137 - RNA, 18 nt, Human
gcccuuuuucaauaacug

SEQ ID NO: 2934138 - RNA, 18 nt, Human
gccuaauaugaugacugu

SEQ ID NO: 2934139 - RNA, 22 nt, Human
gccuauauuuuuuguuaaauga

SEQ ID NO: 2934140 - RNA, 17 nt, Human
gccucucccugcugcuc

SEQ ID NO: 2934141 - RNA, 22 nt, Human
gccucucccugcugcuccuagg

SEQ ID NO: 2934142 - RNA, 18 nt, Human
gccucucccugcugcucc

SEQ ID NO: 2934143 - RNA, 19 nt, Human
gccucucccugcugcuccu

SEQ ID NO: 2934144 - RNA, 20 nt, Human
gccucucccugcugcuccua

SEQ ID NO: 2934145 - RNA, 21 nt, Human
gccucucccugcugcuccuag

SEQ ID NO: 2934146 - RNA, 23 nt, Human
gccucccgaauagcugggacuac

SEQ ID NO: 2934147 - RNA, 15 nt, Human
gccucccgaguagcu

SEQ ID NO: 2934148 - RNA, 15 nt, Human
gccucagugccacua

SEQ ID NO: 2934149 - RNA, 21 nt, Human
gccucccaacucaccccagcc

SEQ ID NO: 2934150 - RNA, 23 nt, Human
gccucccaacucaccccagcccc

SEQ ID NO: 2934151 - RNA, 22 nt, Human
gccucccaacucaccccagccc

SEQ ID NO: 2934152 - RNA, 21 nt, Human
gccucccgaauagcugggacu

SEQ ID NO: 2934153 - RNA, 14 nt, Human
gccucccacgacug

SEQ ID NO: 2934154 - RNA, 23 nt, Human
gccuccccuccucugcuugccau

SEQ ID NO: 2934155 - RNA, 21 nt, Human
gccucccacgacugcccggca

SEQ ID NO: 2934156 - RNA, 16 nt, Human
gcuaaaugugaaugau

SEQ ID NO: 2934157 - RNA, 13 nt, Human
gcuaaaugugaau

SEQ ID NO: 2934158 - RNA, 19 nt, Human
gcuaacacggugaaacccg

SEQ ID NO: 2934159 - RNA, 22 nt, Human
gcuaagagggagggagggcucc

SEQ ID NO: 2934160 - RNA, 21 nt, Human
gcuaagagggagggagggcuc

SEQ ID NO: 2934161 - RNA, 20 nt, Human
gcgugaacccaggaggcgga

SEQ ID NO: 2934162 - RNA, 16 nt, Human
gcgugagccacugcac

SEQ ID NO: 2934163 - RNA, 18 nt, Human
gcgugagccacugcaccg

SEQ ID NO: 2934164 - RNA, 23 nt, Human
gcgugagccacugcaccgggcca

SEQ ID NO: 2934165 - RNA, 18 nt, Human
gcgguccacccaggagcc

SEQ ID NO: 2934166 - RNA, 19 nt, Human
gcgguccacccaggagccc

SEQ ID NO: 2934167 - RNA, 12 nt, Human
gcggggacagcu

SEQ ID NO: 2934168 - RNA, 15 nt, Human
gcgggcuuccuccug

SEQ ID NO: 2934169 - RNA, 13 nt, Human
gcggggacagcuc

SEQ ID NO: 2934170 - RNA, 16 nt, Human
gcgguccacccaggag

SEQ ID NO: 2934171 - RNA, 15 nt, Human
gcuaucucccccagc

SEQ ID NO: 2934172 - RNA, 23 nt, Human
gcuaucucccccagccccauccu

SEQ ID NO: 2934173 - RNA, 22 nt, Human
gcuaucucccccagccccaucc

SEQ ID NO: 2934174 - RNA, 21 nt, Human
gcuaucucccccagccccauc

SEQ ID NO: 2934175 - RNA, 20 nt, Human
gcuaucucccccagccccau

SEQ ID NO: 2934176 - RNA, 19 nt, Human
gcuaucucccccagcccca

SEQ ID NO: 2934177 - RNA, 22 nt, Human
gcuagcagcagggagggcuucu

SEQ ID NO: 2934178 - RNA, 18 nt, Human
gcuaucucccccagcccc

SEQ ID NO: 2934179 - RNA, 17 nt, Human
gcuaucucccccagccc

SEQ ID NO: 2934180 - RNA, 16 nt, Human
gcuaucucccccagcc

SEQ ID NO: 2934181 - RNA, 21 nt, Human
gcuacccgggaagggggcugg

SEQ ID NO: 2934182 - RNA, 19 nt, Human
gcuagagguucaaagauau

SEQ ID NO: 2934183 - RNA, 21 nt, Human
gcuagagguucaaagauauuu

SEQ ID NO: 2934184 - RNA, 18 nt, Human
gcuagagguucaaagaua

SEQ ID NO: 2934185 - RNA, 15 nt, Human
gcuacccgggaaggg

SEQ ID NO: 2934186 - RNA, 14 nt, Human
gcuacccgggaagg

SEQ ID NO: 2934187 - RNA, 14 nt, Human
gcuaagcauuccaa

SEQ ID NO: 2934188 - RNA, 17 nt, Human
gcuaagcaaaaugugau

SEQ ID NO: 2934189 - RNA, 23 nt, Human
gcuaagagggagggagggcucca

SEQ ID NO: 2934190 - RNA, 13 nt, Human
gcuccaagcuccc

SEQ ID NO: 2934191 - RNA, 15 nt, Human
gcuccaagcucccag

SEQ ID NO: 2934192 - RNA, 14 nt, Human
gcuccaagcuccca

SEQ ID NO: 2934193 - RNA, 14 nt, Human
gcuccaagaauuuc

SEQ ID NO: 2934194 - RNA, 21 nt, Human
gcuccaagcucccaggcauuc

SEQ ID NO: 2934195 - RNA, 19 nt, Human
gcuccaagcucccaggcau

SEQ ID NO: 2934196 - RNA, 18 nt, Human
gcuccaagcucccaggca

SEQ ID NO: 2934197 - RNA, 17 nt, Human
gcuccaagcucccaggc

SEQ ID NO: 2934198 - RNA, 16 nt, Human
gcuccaagcucccagg

SEQ ID NO: 2934199 - RNA, 17 nt, Human
gcuccauccuccuggga

SEQ ID NO: 2934200 - RNA, 13 nt, Human
gcuccaggcuccu

SEQ ID NO: 2934201 - RNA, 11 nt, Human
gcuccagcugu

SEQ ID NO: 2934202 - RNA, 16 nt, Human
gcuccaggcuccuuua

SEQ ID NO: 2934203 - RNA, 23 nt, Human
gcuccaggcuccuuuagcgccca

SEQ ID NO: 2934204 - RNA, 15 nt, Human
gcucacccaguccug

SEQ ID NO: 2934205 - RNA, 17 nt, Human
gcucaccccaucauccc

SEQ ID NO: 2934206 - RNA, 19 nt, Human
gcucaccccaucaucccuu

SEQ ID NO: 2934207 - RNA, 20 nt, Human
gcucaccagccccagugccc

SEQ ID NO: 2934208 - RNA, 23 nt, Human
gcucaccagccccagugcccaca

SEQ ID NO: 2934209 - RNA, 18 nt, Human
gcucaccagccccagugc

SEQ ID NO: 2934210 - RNA, 19 nt, Human
gcucaccagccccagugcc

SEQ ID NO: 2934211 - RNA, 23 nt, Human
gcucagcaaaagaugcuucucac

SEQ ID NO: 2934212 - RNA, 22 nt, Human
gcucagcaaaagaugcuucuca

SEQ ID NO: 2934213 - RNA, 20 nt, Human
gcucagcaaaagaugcuucu

SEQ ID NO: 2934214 - RNA, 17 nt, Human
gcucagcaaaagaugcu

SEQ ID NO: 2934215 - RNA, 19 nt, Human
gcucaggugucccugcacu

SEQ ID NO: 2934216 - RNA, 21 nt, Human
gcucagcggggacagcuccuu

SEQ ID NO: 2934217 - RNA, 22 nt, Human
gcucagcggggacagcuccuuc

SEQ ID NO: 2934218 - RNA, 18 nt, Human
gcucaggugucccugcac

SEQ ID NO: 2934219 - RNA, 17 nt, Human
gcucaggugucccugca

SEQ ID NO: 2934220 - RNA, 20 nt, Human
gcucagcggggacagcuccu

SEQ ID NO: 2934221 - RNA, 19 nt, Human
gcucagcggggacagcucc

SEQ ID NO: 2934222 - RNA, 15 nt, Human
gcucagcggggacag

SEQ ID NO: 2934223 - RNA, 21 nt, Human
gcugacagacacaggcccggc

SEQ ID NO: 2934224 - RNA, 20 nt, Human
gcugacagacacaggcccgg

SEQ ID NO: 2934225 - RNA, 22 nt, Human
gcucuuccaggcugggagagcc

SEQ ID NO: 2934226 - RNA, 12 nt, Human
gcucuucuccag

SEQ ID NO: 2934227 - RNA, 18 nt, Human
gcucuuccaggcugggag

SEQ ID NO: 2934228 - RNA, 19 nt, Human
gcucuuccaggcugggaga

SEQ ID NO: 2934229 - RNA, 14 nt, Human
gcucuucuccaggc

SEQ ID NO: 2934230 - RNA, 16 nt, Human
gcucuucuccaggcug

SEQ ID NO: 2934231 - RNA, 23 nt, Human
gcugagugggggaucacagccuc

SEQ ID NO: 2934232 - RNA, 22 nt, Human
gcugagugggggaucacagccu

SEQ ID NO: 2934233 - RNA, 16 nt, Human
gcugauggugcaauga

SEQ ID NO: 2934234 - RNA, 15 nt, Human
gcugauggugcaaug

SEQ ID NO: 2934235 - RNA, 15 nt, Human
gcugagucugaaggc

SEQ ID NO: 2934236 - RNA, 18 nt, Human
gcugagucugaaggcugg

SEQ ID NO: 2934237 - RNA, 16 nt, Human
gcugagucugaaggcu

SEQ ID NO: 2934238 - RNA, 19 nt, Human
gcugagucugaaggcuggg

SEQ ID NO: 2934239 - RNA, 21 nt, Human
gcugauggugcaaugaccuuu

SEQ ID NO: 2934240 - RNA, 18 nt, Human
gcugauggugcaaugacc

SEQ ID NO: 2934241 - RNA, 20 nt, Human
gcugcaguugccagucaccc

SEQ ID NO: 2934242 - RNA, 18 nt, Human
gcugcaguugccagucac

SEQ ID NO: 2934243 - RNA, 21 nt, Human
gcugcaguugccagucacccc

SEQ ID NO: 2934244 - RNA, 13 nt, Human
gcugcaguuuuuu

SEQ ID NO: 2934245 - RNA, 15 nt, Human
gcugccaauauccua

SEQ ID NO: 2934246 - RNA, 14 nt, Human
gcugccaauauccu

SEQ ID NO: 2934247 - RNA, 19 nt, Human
gcugccaauauccuaauaa

SEQ ID NO: 2934248 - RNA, 18 nt, Human
gcugccaauauccuaaua

SEQ ID NO: 2934249 - RNA, 17 nt, Human
gcugccaauauccuaau

SEQ ID NO: 2934250 - RNA, 16 nt, Human
gcugccaauauccuaa

SEQ ID NO: 2934251 - RNA, 14 nt, Human
gcucuggacaggca

SEQ ID NO: 2934252 - RNA, 15 nt, Human
gcucuggacaggcau

SEQ ID NO: 2934253 - RNA, 16 nt, Human
gcucuggacaggcaug

SEQ ID NO: 2934254 - RNA, 21 nt, Human
gcucuggacaggcauguucuc

SEQ ID NO: 2934255 - RNA, 22 nt, Human
gcucuggacaggcauguucucu

SEQ ID NO: 2934256 - RNA, 19 nt, Human
gcucugcuccucuccccag

SEQ ID NO: 2934257 - RNA, 21 nt, Human
gcucugcuccucuccccagca

SEQ ID NO: 2934258 - RNA, 13 nt, Human
gcucugcugacag

SEQ ID NO: 2934259 - RNA, 14 nt, Human
gcucugcugacaga

SEQ ID NO: 2934260 - RNA, 18 nt, Human
gcucugcugacagacaca

SEQ ID NO: 2934261 - RNA, 19 nt, Human
gcucugcugacagacacag

SEQ ID NO: 2934262 - RNA, 20 nt, Human
gcucugcugacagacacagg

SEQ ID NO: 2934263 - RNA, 23 nt, Human
gcucugcugacagacacaggccc

SEQ ID NO: 2934264 - RNA, 13 nt, Human
gcucugcuccucu

SEQ ID NO: 2934265 - RNA, 14 nt, Human
gcucugcuccucuc

SEQ ID NO: 2934266 - RNA, 22 nt, Human
gcucugccucccaucacccgcu

SEQ ID NO: 2934267 - RNA, 15 nt, Human
gcucugccucccauc

SEQ ID NO: 2934268 - RNA, 14 nt, Human
gcucugccucccau

SEQ ID NO: 2934269 - RNA, 13 nt, Human
gcucugccuccca

SEQ ID NO: 2934270 - RNA, 14 nt, Human
gcucugcccuuggu

SEQ ID NO: 2934271 - RNA, 11 nt, Human
gcucugccucc

SEQ ID NO: 2934272 - RNA, 23 nt, Human
gcucugcccuugguuaggcauug

SEQ ID NO: 2934273 - RNA, 14 nt, Human
gcucucuggccuuc

SEQ ID NO: 2934274 - RNA, 15 nt, Human
gcucucuggccuucg

SEQ ID NO: 2934275 - RNA, 19 nt, Human
gcucucuggccuucggccu

SEQ ID NO: 2934276 - RNA, 20 nt, Human
gcucucuggccuucggccuc

SEQ ID NO: 2934277 - RNA, 16 nt, Human
gcucgagcaugccugg

SEQ ID NO: 2934278 - RNA, 15 nt, Human
gcucccuucccaccu

SEQ ID NO: 2934279 - RNA, 18 nt, Human
gcucccuucccaccucuc

SEQ ID NO: 2934280 - RNA, 16 nt, Human
gcucccuucccaccuc

SEQ ID NO: 2934281 - RNA, 15 nt, Human
gcuccuucuguccua

SEQ ID NO: 2934282 - RNA, 19 nt, Human
gcucccuucccaccucucu

SEQ ID NO: 2934283 - RNA, 21 nt, Human
gcuccuucuguccuacucugu

SEQ ID NO: 2934284 - RNA, 19 nt, Human
gcucuccgaccagacaccu

SEQ ID NO: 2934285 - RNA, 13 nt, Human
gcucuccgaccag

SEQ ID NO: 2934286 - RNA, 17 nt, Human
gcucuccgaccagacac

SEQ ID NO: 2934287 - RNA, 12 nt, Human
gcucucuggccu

SEQ ID NO: 2934288 - RNA, 13 nt, Human
gcucucuggccuu

SEQ ID NO: 2934289 - RNA, 11 nt, Human
gcucucuggcc

SEQ ID NO: 2934290 - RNA, 15 nt, Human
guaaauuaacuuuua

SEQ ID NO: 2934291 - RNA, 16 nt, Human
guaaauuaacuuuuau

SEQ ID NO: 2934292 - RNA, 17 nt, Human
guaaauuaacuuuuaua

SEQ ID NO: 2934293 - RNA, 21 nt, Human
guaaauuaacuuuuauaaacu

SEQ ID NO: 2934294 - RNA, 22 nt, Human
guaaauuaacuuuuauaaacuu

SEQ ID NO: 2934295 - RNA, 18 nt, Human
guaaaugggggugcauuu

SEQ ID NO: 2934296 - RNA, 19 nt, Human
guaaaugggggugcauuug

SEQ ID NO: 2934297 - RNA, 20 nt, Human
guaaaugggggugcauuuga

SEQ ID NO: 2934298 - RNA, 22 nt, Human
guaacuguuuagaugaauguca

SEQ ID NO: 2934299 - RNA, 23 nt, Human
guaaauuaacuuuuauaaacuuu

SEQ ID NO: 2934300 - RNA, 18 nt, Human
guaaggaauaccuguccc

SEQ ID NO: 2934301 - RNA, 13 nt, Human
guaaggaaugauu

SEQ ID NO: 2934302 - RNA, 23 nt, Human
guaaggaauaccugucccccuga

SEQ ID NO: 2934303 - RNA, 21 nt, Human
guaaggaauaccugucccccu

SEQ ID NO: 2934304 - RNA, 20 nt, Human
guaaggaauaccuguccccc

SEQ ID NO: 2934305 - RNA, 22 nt, Human
guaaguauucuuauuuaaugaa

SEQ ID NO: 2934306 - RNA, 17 nt, Human
guaagggaaacugccag

SEQ ID NO: 2934307 - RNA, 18 nt, Human
guaagggaaacugccagc

SEQ ID NO: 2934308 - RNA, 13 nt, Human
gguggccucccaa

SEQ ID NO: 2934309 - RNA, 21 nt, Human
gguucaagcgauucuucugcu

SEQ ID NO: 2934310 - RNA, 17 nt, Human
gguggccucccaacuca

SEQ ID NO: 2934311 - RNA, 20 nt, Human
gguucacugcaaccuccgcc

SEQ ID NO: 2934312 - RNA, 22 nt, Human
gguucaagcgauucuucugcuu

SEQ ID NO: 2934313 - RNA, 23 nt, Human
gguucaagcgauucuucugcuuc

SEQ ID NO: 2934314 - RNA, 14 nt, Human
gguugaagcaccaa

SEQ ID NO: 2934315 - RNA, 14 nt, Human
gguugggcuggugu

SEQ ID NO: 2934316 - RNA, 10 nt, Human
gguugugaau

SEQ ID NO: 2934317 - RNA, 13 nt, Human
gguuggugggggc

SEQ ID NO: 2934318 - RNA, 13 nt, Human
gguuuaagcuguu

SEQ ID NO: 2934319 - RNA, 23 nt, Human
gguuuugccauguuggccaggcu

SEQ ID NO: 2934320 - RNA, 20 nt, Human
gguuuucacauuggaaacaa

SEQ ID NO: 2934321 - RNA, 16 nt, Human
gguuuucuuuuaagaa

SEQ ID NO: 2934322 - RNA, 15 nt, Human
gguuuucuguucuuu

SEQ ID NO: 2934323 - RNA, 12 nt, Human
gguuuucuguuc

SEQ ID NO: 2934324 - RNA, 13 nt, Human
gguuuucuguucu

SEQ ID NO: 2934325 - RNA, 18 nt, Human
guaaaaaaugguguuuua

SEQ ID NO: 2934326 - RNA, 16 nt, Human
guaaaaaaugguguuu

SEQ ID NO: 2934327 - RNA, 23 nt, Human
guaaaaccacagcaguugaaaag

SEQ ID NO: 2934328 - RNA, 18 nt, Human
guaaaaccacagcaguug

SEQ ID NO: 2934329 - RNA, 16 nt, Human
guaaaaccacagcagu

SEQ ID NO: 2934330 - RNA, 15 nt, Human
guaaaaccacagcag

SEQ ID NO: 2934331 - RNA, 14 nt, Human
guaaaaccacagca

SEQ ID NO: 2934332 - RNA, 16 nt, Human
guacuuguggacacag

SEQ ID NO: 2934333 - RNA, 20 nt, Human
guacuuguggacacagcucu

SEQ ID NO: 2934334 - RNA, 20 nt, Human
guacuucuccacccugcucu

SEQ ID NO: 2934335 - RNA, 21 nt, Human
guacuucuccacccugcucuc

SEQ ID NO: 2934336 - RNA, 16 nt, Human
guacuucuccacccug

SEQ ID NO: 2934337 - RNA, 17 nt, Human
guacuucuccacccugc

SEQ ID NO: 2934338 - RNA, 18 nt, Human
guacuucuccacccugcu

SEQ ID NO: 2934339 - RNA, 19 nt, Human
guacuucuccacccugcuc

SEQ ID NO: 2934340 - RNA, 14 nt, Human
guacuuuuaagacu

SEQ ID NO: 2934341 - RNA, 21 nt, Human
guacuuguggacacagcucuu

SEQ ID NO: 2934342 - RNA, 23 nt, Human
guacuuuauuuucuauaauuuaa

SEQ ID NO: 2934343 - RNA, 15 nt, Human
guagaggagaaacug

SEQ ID NO: 2934344 - RNA, 15 nt, Human
guagagguacacuug

SEQ ID NO: 2934345 - RNA, 17 nt, Human
guagagguacacuugug

SEQ ID NO: 2934346 - RNA, 19 nt, Human
guagagguacacuugugaa

SEQ ID NO: 2934347 - RNA, 16 nt, Human
guagagcggagaaagg

SEQ ID NO: 2934348 - RNA, 18 nt, Human
guagagccagggucucac

SEQ ID NO: 2934349 - RNA, 18 nt, Human
guacuaacauuuauuuga

SEQ ID NO: 2934350 - RNA, 14 nt, Human
guacuucuccaccc

SEQ ID NO: 2934351 - RNA, 15 nt, Human
guacuucuccacccu

SEQ ID NO: 2934352 - RNA, 17 nt, Human
guacguugugcauuugg

SEQ ID NO: 2934353 - RNA, 15 nt, Human
guacuaaggaaucuu

SEQ ID NO: 2934354 - RNA, 23 nt, Human
guacuaaggaaucuuucugcuuu

SEQ ID NO: 2934355 - RNA, 14 nt, Human
guacgucugacagg

SEQ ID NO: 2934356 - RNA, 15 nt, Human
guacgucugacaggc

SEQ ID NO: 2934357 - RNA, 17 nt, Human
guacgucugacaggcaa

SEQ ID NO: 2934358 - RNA, 14 nt, Human
guacguugugcauu

SEQ ID NO: 2934359 - RNA, 15 nt, Human
guacguugugcauuu

SEQ ID NO: 2934360 - RNA, 16 nt, Human
guacguugugcauuug

SEQ ID NO: 2934361 - RNA, 13 nt, Human
guaccucuugagc

SEQ ID NO: 2934362 - RNA, 21 nt, Human
guaccucuugagccuugaacu

SEQ ID NO: 2934363 - RNA, 22 nt, Human
guaccucuugagccuugaacuu

SEQ ID NO: 2934364 - RNA, 16 nt, Human
guacccacugcucugg

SEQ ID NO: 2934365 - RNA, 15 nt, Human
guaccgcaaugugac

SEQ ID NO: 2934366 - RNA, 19 nt, Human
guacauacuuuuuggguuu

SEQ ID NO: 2934367 - RNA, 13 nt, Human
guacauacuuuuu

SEQ ID NO: 2934368 - RNA, 14 nt, Human
guacauacuuuuug

SEQ ID NO: 2934369 - RNA, 15 nt, Human
guacccacugcucug

SEQ ID NO: 2934370 - RNA, 20 nt, Human
guacauaaugcgugcauacc

SEQ ID NO: 2934371 - RNA, 19 nt, Human
guacagaguggaauaagac

SEQ ID NO: 2934372 - RNA, 15 nt, Human
guacaggacauauau

SEQ ID NO: 2934373 - RNA, 17 nt, Human
guacaggacauauauuu

SEQ ID NO: 2934374 - RNA, 23 nt, Human
guacaggacauauauuuuuuaaa

SEQ ID NO: 2934375 - RNA, 20 nt, Human
guacagcaaggagauuuaca

SEQ ID NO: 2934376 - RNA, 22 nt, Human
guacagagcccacgcccccacu

SEQ ID NO: 2934377 - RNA, 18 nt, Human
guacagagcccacgcccc

SEQ ID NO: 2934378 - RNA, 12 nt, Human
guacagagccca

SEQ ID NO: 2934379 - RNA, 15 nt, Human
guacacuugugaaua

SEQ ID NO: 2934380 - RNA, 16 nt, Human
guacagacaacaaacc

SEQ ID NO: 2934381 - RNA, 19 nt, Human
guacacuguuucaaacuuu

SEQ ID NO: 2934382 - RNA, 20 nt, Human
guacacuguuucaaacuuua

SEQ ID NO: 2934383 - RNA, 21 nt, Human
guacacuguuucaaacuuuac

SEQ ID NO: 2934384 - RNA, 14 nt, Human
guacacuugugaau

SEQ ID NO: 2934385 - RNA, 14 nt, Human
guaauuaaguacua

SEQ ID NO: 2934386 - RNA, 17 nt, Human
guaauuaaguacuaugu

SEQ ID NO: 2934387 - RNA, 20 nt, Human
guaauuaaguacuauguauc

SEQ ID NO: 2934388 - RNA, 21 nt, Human
guaauuaaguacuauguauca

SEQ ID NO: 2934389 - RNA, 18 nt, Human
guacacuguuucaaacuu

SEQ ID NO: 2934390 - RNA, 15 nt, Human
guaauuggaaaggca

SEQ ID NO: 2934391 - RNA, 17 nt, Human
guaaugaccaugaaaga

SEQ ID NO: 2934392 - RNA, 19 nt, Human
guaaugauaacuggaaacu

SEQ ID NO: 2934393 - RNA, 21 nt, Human
ggguagccacuggacugacga

SEQ ID NO: 2934394 - RNA, 23 nt, Human
ggguucccuuuuuuggcugcuga

SEQ ID NO: 2934395 - RNA, 22 nt, Human
ggguucuacccaggugcuagga

SEQ ID NO: 2934396 - RNA, 17 nt, Human
ggguucuacccaggugc

SEQ ID NO: 2934397 - RNA, 16 nt, Human
ggguuggccccugccc

SEQ ID NO: 2934398 - RNA, 19 nt, Human
ggguuggccccugcccggc

SEQ ID NO: 2934399 - RNA, 17 nt, Human
gguacccacugcucugg

SEQ ID NO: 2934400 - RNA, 16 nt, Human
gguacccacugcucug

SEQ ID NO: 2934401 - RNA, 15 nt, Human
ggguugggcuggugu

SEQ ID NO: 2934402 - RNA, 20 nt, Human
gguacuuguggacacagcuc

SEQ ID NO: 2934403 - RNA, 22 nt, Human
gguacuuguggacacagcucuu

SEQ ID NO: 2934404 - RNA, 21 nt, Human
gguacuuguggacacagcucu

SEQ ID NO: 2934405 - RNA, 22 nt, Human
gguacuucaaauccuugaagau

SEQ ID NO: 2934406 - RNA, 22 nt, Human
ggucccaccccacacacgccag

SEQ ID NO: 2934407 - RNA, 22 nt, Human
ggucccacucaguccauagcag

SEQ ID NO: 2934408 - RNA, 12 nt, Human
ggucccacucag

SEQ ID NO: 2934409 - RNA, 14 nt, Human
ggucccacucaguc

SEQ ID NO: 2934410 - RNA, 20 nt, Human
ggucccaucugcagggcccc

SEQ ID NO: 2934411 - RNA, 13 nt, Human
ggucccccuucca

SEQ ID NO: 2934412 - RNA, 23 nt, Human
ggucccccuuccauggacuuugu

SEQ ID NO: 2934413 - RNA, 18 nt, Human
ggucccccuuccauggac

SEQ ID NO: 2934414 - RNA, 12 nt, Human
ggucagagccug

SEQ ID NO: 2934415 - RNA, 22 nt, Human
ggucacucuggcagcucagaga

SEQ ID NO: 2934416 - RNA, 20 nt, Human
ggucacucuggcagcucaga

SEQ ID NO: 2934417 - RNA, 16 nt, Human
ggucacucuggcagcu

SEQ ID NO: 2934418 - RNA, 13 nt, Human
ggucagagccugc

SEQ ID NO: 2934419 - RNA, 14 nt, Human
ggucagagccugca

SEQ ID NO: 2934420 - RNA, 15 nt, Human
ggucagagccugcag

SEQ ID NO: 2934421 - RNA, 16 nt, Human
ggucagagccugcagu

SEQ ID NO: 2934422 - RNA, 12 nt, Human
ggucacucuggc

SEQ ID NO: 2934423 - RNA, 22 nt, Human
gguagacacacaugaaguccaa

SEQ ID NO: 2934424 - RNA, 23 nt, Human
gguagaauguuuucaaauguucu

SEQ ID NO: 2934425 - RNA, 15 nt, Human
gguagacacacauga

SEQ ID NO: 2934426 - RNA, 14 nt, Human
ggucccugguggca

SEQ ID NO: 2934427 - RNA, 22 nt, Human
ggucucacuauguugcccaggc

SEQ ID NO: 2934428 - RNA, 23 nt, Human
gguccuagaaauuccccacccug

SEQ ID NO: 2934429 - RNA, 22 nt, Human
ggucccugguggcagcucaccu

SEQ ID NO: 2934430 - RNA, 15 nt, Human
ggucugacccacugc

SEQ ID NO: 2934431 - RNA, 16 nt, Human
ggucugacccacugcu

SEQ ID NO: 2934432 - RNA, 21 nt, Human
ggucucacuauguugcccagg

SEQ ID NO: 2934433 - RNA, 12 nt, Human
ggucucacucug

SEQ ID NO: 2934434 - RNA, 16 nt, Human
ggucucacucugucgc

SEQ ID NO: 2934435 - RNA, 19 nt, Human
ggucugaggaauccagacc

SEQ ID NO: 2934436 - RNA, 16 nt, Human
ggugaacuugguuccc

SEQ ID NO: 2934437 - RNA, 18 nt, Human
ggugaagugaagacaaug

SEQ ID NO: 2934438 - RNA, 16 nt, Human
ggugaccucugccuga

SEQ ID NO: 2934439 - RNA, 14 nt, Human
ggugaccucugccu

SEQ ID NO: 2934440 - RNA, 15 nt, Human
gguggcagcugcggu

SEQ ID NO: 2934441 - RNA, 23 nt, Human
gguggcagcugcgguccacccag

SEQ ID NO: 2934442 - RNA, 11 nt, Human
gguggcagcug

SEQ ID NO: 2934443 - RNA, 13 nt, Human
gguggcagcucac

SEQ ID NO: 2934444 - RNA, 12 nt, Human
gguggcagcugc

SEQ ID NO: 2934445 - RNA, 13 nt, Human
gguggcagcugcg

SEQ ID NO: 2934446 - RNA, 22 nt, Human
ggugcuaucucccccagcccca

SEQ ID NO: 2934447 - RNA, 21 nt, Human
ggugcuaucucccccagcccc

SEQ ID NO: 2934448 - RNA, 23 nt, Human
ggugcuaucucccccagccccau

SEQ ID NO: 2934449 - RNA, 15 nt, Human
ggugcgaucuggguu

SEQ ID NO: 2934450 - RNA, 19 nt, Human
ggugcuacaaaaacacagc

SEQ ID NO: 2934451 - RNA, 14 nt, Human
gggcuucaguggca

SEQ ID NO: 2934452 - RNA, 14 nt, Human
gggcugcaccggcu

SEQ ID NO: 2934453 - RNA, 16 nt, Human
gggcugaggugggagg

SEQ ID NO: 2934454 - RNA, 13 nt, Human
gggcucugccucc

SEQ ID NO: 2934455 - RNA, 20 nt, Human
gggcucugccucccaucacc

SEQ ID NO: 2934456 - RNA, 17 nt, Human
gggcucugccucccauc

SEQ ID NO: 2934457 - RNA, 16 nt, Human
gggcucugccucccau

SEQ ID NO: 2934458 - RNA, 15 nt, Human
gggcucugccuccca

SEQ ID NO: 2934459 - RNA, 18 nt, Human
ggcucccagccaggcccu

SEQ ID NO: 2934460 - RNA, 16 nt, Human
ggcucccagccaggcc

SEQ ID NO: 2934461 - RNA, 17 nt, Human
ggcucccagccaggccc

SEQ ID NO: 2934462 - RNA, 14 nt, Human
ggcucccagccagg

SEQ ID NO: 2934463 - RNA, 15 nt, Human
ggcucccagccaggc

SEQ ID NO: 2934464 - RNA, 12 nt, Human
gggccuggaugc

SEQ ID NO: 2934465 - RNA, 19 nt, Human
gggccuggccugagcuggg

SEQ ID NO: 2934466 - RNA, 12 nt, Human
gggccuggcuca

SEQ ID NO: 2934467 - RNA, 16 nt, Human
gggccuggcucaggug

SEQ ID NO: 2934468 - RNA, 14 nt, Human
gggccuggcucagg

SEQ ID NO: 2934469 - RNA, 18 nt, Human
gggccuggucguuuucaa

SEQ ID NO: 2934470 - RNA, 16 nt, Human
gggcgcgguggcucac

SEQ ID NO: 2934471 - RNA, 13 nt, Human
gggcucccuuccc

SEQ ID NO: 2934472 - RNA, 23 nt, Human
gggcucccuucccaccucucuca

SEQ ID NO: 2934473 - RNA, 18 nt, Human
gggcucccuucccaccuc

SEQ ID NO: 2934474 - RNA, 17 nt, Human
gggcucccuucccaccu

SEQ ID NO: 2934475 - RNA, 14 nt, Human
gggcucccuuccca

SEQ ID NO: 2934476 - RNA, 20 nt, Human
gggcuucauccuccucagau

SEQ ID NO: 2934477 - RNA, 20 nt, Human
gggcuuggggaccagagcug

SEQ ID NO: 2934478 - RNA, 19 nt, Human
gggcuucaguggcagcugc

SEQ ID NO: 2934479 - RNA, 20 nt, Human
gggcuucaguggcagcugcu

SEQ ID NO: 2934480 - RNA, 19 nt, Human
gggcuucauccuccucaga

SEQ ID NO: 2934481 - RNA, 15 nt, Human
gggcuucaguggcag

SEQ ID NO: 2934482 - RNA, 16 nt, Human
gggcuucaguggcagc

SEQ ID NO: 2934483 - RNA, 17 nt, Human
gggcuucaguggcagcu

SEQ ID NO: 2934484 - RNA, 18 nt, Human
gggcuucaguggcagcug

SEQ ID NO: 2934485 - RNA, 21 nt, Human
gggcuuggggaccagagcugc

SEQ ID NO: 2934486 - RNA, 13 nt, Human
ggggaguggccac

SEQ ID NO: 2934487 - RNA, 17 nt, Human
ggggaucacagccucug

SEQ ID NO: 2934488 - RNA, 14 nt, Human
ggggcugcucccac

SEQ ID NO: 2934489 - RNA, 18 nt, Human
ggggcugcucccaccugg

SEQ ID NO: 2934490 - RNA, 17 nt, Human
ggggcugggcagaggaa

SEQ ID NO: 2934491 - RNA, 16 nt, Human
ggggcugggcagagga

SEQ ID NO: 2934492 - RNA, 13 nt, Human
ggggcugggacau

SEQ ID NO: 2934493 - RNA, 23 nt, Human
gggguucccuuuuuuggcugcug

SEQ ID NO: 2934494 - RNA, 19 nt, Human
ggguacuuguggacacagc

SEQ ID NO: 2934495 - RNA, 22 nt, Human
ggguacuuguggacacagcucu

SEQ ID NO: 2934496 - RNA, 23 nt, Human
ggguacuuguggacacagcucuu

SEQ ID NO: 2934497 - RNA, 23 nt, Human
ggguagagcggagaaaggaaggg

SEQ ID NO: 2934498 - RNA, 13 nt, Human
ggguacccacugc

SEQ ID NO: 2934499 - RNA, 15 nt, Human
ggguacccacugcuc

SEQ ID NO: 2934500 - RNA, 18 nt, Human
ggguacccacugcucugg

SEQ ID NO: 2934501 - RNA, 16 nt, Human
guauuuuaaaagaaug

SEQ ID NO: 2934502 - RNA, 17 nt, Human
guauuuuaaaagaauga

SEQ ID NO: 2934503 - RNA, 18 nt, Human
gucaagagggucugagga

SEQ ID NO: 2934504 - RNA, 19 nt, Human
gucaagagggucugaggaa

SEQ ID NO: 2934505 - RNA, 14 nt, Human
gucaaggcuuagac

SEQ ID NO: 2934506 - RNA, 13 nt, Human
gucaaggcuuaga

SEQ ID NO: 2934507 - RNA, 19 nt, Human
gucaagugaaaaaggagga

SEQ ID NO: 2934508 - RNA, 18 nt, Human
gucaagugaaaaaggagg

SEQ ID NO: 2934509 - RNA, 16 nt, Human
gucaagugaaaaagga

SEQ ID NO: 2934510 - RNA, 14 nt, Human
gucaagcauguauu

SEQ ID NO: 2934511 - RNA, 16 nt, Human
gucaagcauguauuuu

SEQ ID NO: 2934512 - RNA, 16 nt, Human
gucaauuacaggaagu

SEQ ID NO: 2934513 - RNA, 15 nt, Human
gucaauuacaggaag

SEQ ID NO: 2934514 - RNA, 13 nt, Human
gucaauuacagga

SEQ ID NO: 2934515 - RNA, 21 nt, Human
gucaauaaaauccauacauuu

SEQ ID NO: 2934516 - RNA, 15 nt, Human
gucaauaaaauccau

SEQ ID NO: 2934517 - RNA, 13 nt, Human
gucaccccggcca

SEQ ID NO: 2934518 - RNA, 20 nt, Human
gucaccugaagacucauucu

SEQ ID NO: 2934519 - RNA, 14 nt, Human
gucaccucauggaa

SEQ ID NO: 2934520 - RNA, 20 nt, Human
guagagguacacuugugaau

SEQ ID NO: 2934521 - RNA, 13 nt, Human
guagagugggagc

SEQ ID NO: 2934522 - RNA, 20 nt, Human
guauuacaguggggaaugaa

SEQ ID NO: 2934523 - RNA, 15 nt, Human
guagagugggagcug

SEQ ID NO: 2934524 - RNA, 22 nt, Human
guauuacaguggggaaugaaga

SEQ ID NO: 2934525 - RNA, 13 nt, Human
guauuacuucugc

SEQ ID NO: 2934526 - RNA, 14 nt, Human
guauuacuucugcu

SEQ ID NO: 2934527 - RNA, 15 nt, Human
guauuacuucugcua

SEQ ID NO: 2934528 - RNA, 14 nt, Human
guauuauaccuuuu

SEQ ID NO: 2934529 - RNA, 17 nt, Human
guauuucuaugaaauau

SEQ ID NO: 2934530 - RNA, 22 nt, Human
guauuucuaugaaauauuaugu

SEQ ID NO: 2934531 - RNA, 14 nt, Human
guccacccaggagc

SEQ ID NO: 2934532 - RNA, 13 nt, Human
guccacccaggag

SEQ ID NO: 2934533 - RNA, 15 nt, Human
guccacccaggagcc

SEQ ID NO: 2934534 - RNA, 16 nt, Human
guccacccaggagccc

SEQ ID NO: 2934535 - RNA, 15 nt, Human
gucccacucagucca

SEQ ID NO: 2934536 - RNA, 14 nt, Human
gucccacucagucc

SEQ ID NO: 2934537 - RNA, 17 nt, Human
gucccagauacuugggg

SEQ ID NO: 2934538 - RNA, 20 nt, Human
gucccagccagcaguucaga

SEQ ID NO: 2934539 - RNA, 13 nt, Human
gucagcuaaagaa

SEQ ID NO: 2934540 - RNA, 21 nt, Human
gucauauaagauucauauuua

SEQ ID NO: 2934541 - RNA, 17 nt, Human
gucugauucccaagcuc

SEQ ID NO: 2934542 - RNA, 18 nt, Human
gucugauucccaagcucu

SEQ ID NO: 2934543 - RNA, 19 nt, Human
gucugauucccaagcucug

SEQ ID NO: 2934544 - RNA, 21 nt, Human
gucugaggaauccagacccgg

SEQ ID NO: 2934545 - RNA, 20 nt, Human
gucugauucccaagcucugc

SEQ ID NO: 2934546 - RNA, 21 nt, Human
gucugauucccaagcucugcu

SEQ ID NO: 2934547 - RNA, 13 nt, Human
gucugacccacug

SEQ ID NO: 2934548 - RNA, 14 nt, Human
gucugacccacugc

SEQ ID NO: 2934549 - RNA, 15 nt, Human
gucugacccacugcu

SEQ ID NO: 2934550 - RNA, 18 nt, Human
gucugaggaauccagacc

SEQ ID NO: 2934551 - RNA, 19 nt, Human
gucugaggaauccagaccc

SEQ ID NO: 2934552 - RNA, 20 nt, Human
gucucacuauguugcccagg

SEQ ID NO: 2934553 - RNA, 21 nt, Human
gucucacuauguugcccaggc

SEQ ID NO: 2934554 - RNA, 13 nt, Human
gucucacuguugc

SEQ ID NO: 2934555 - RNA, 23 nt, Human
gucucacuauguugcccaggcag

SEQ ID NO: 2934556 - RNA, 16 nt, Human
gucucacuguugccca

SEQ ID NO: 2934557 - RNA, 17 nt, Human
gucucacuguugcccag

SEQ ID NO: 2934558 - RNA, 18 nt, Human
gucucacuguugcccagg

SEQ ID NO: 2934559 - RNA, 19 nt, Human
gucucacuguugcccaggc

SEQ ID NO: 2934560 - RNA, 20 nt, Human
gucucacuguugcccaggcu

SEQ ID NO: 2934561 - RNA, 21 nt, Human
gucucacuguugcccaggcug

SEQ ID NO: 2934562 - RNA, 22 nt, Human
gucucacuguugcccaggcugg

SEQ ID NO: 2934563 - RNA, 23 nt, Human
gucucacuguugcccaggcuggc

SEQ ID NO: 2934564 - RNA, 15 nt, Human
guccuuaccagcaga

SEQ ID NO: 2934565 - RNA, 17 nt, Human
guccuuaccagcagagc

SEQ ID NO: 2934566 - RNA, 16 nt, Human
guccuuaccagcagag

SEQ ID NO: 2934567 - RNA, 17 nt, Human
gucuacacuaagagaga

SEQ ID NO: 2934568 - RNA, 23 nt, Human
gucuacacuaagagagaaugaga

SEQ ID NO: 2934569 - RNA, 15 nt, Human
gucuacacugugcug

SEQ ID NO: 2934570 - RNA, 19 nt, Human
guccuauuauauucauucu

SEQ ID NO: 2934571 - RNA, 21 nt, Human
guccuauuauauucauucuuu

SEQ ID NO: 2934572 - RNA, 12 nt, Human
gucccagugccg

SEQ ID NO: 2934573 - RNA, 13 nt, Human
guccuacucugug

SEQ ID NO: 2934574 - RNA, 17 nt, Human
gucccugguggcagcuc

SEQ ID NO: 2934575 - RNA, 16 nt, Human
gucccugguggcagcu

SEQ ID NO: 2934576 - RNA, 15 nt, Human
guccuacucuguguc

SEQ ID NO: 2934577 - RNA, 23 nt, Human
guccuacucugugucaggugggg

SEQ ID NO: 2934578 - RNA, 23 nt, Human
guccuagaaauuccccacccuga

SEQ ID NO: 2934579 - RNA, 15 nt, Human
guccugggagugagc

SEQ ID NO: 2934580 - RNA, 16 nt, Human
guccugggagugagcu

SEQ ID NO: 2934581 - RNA, 17 nt, Human
guccuggcaugggaaug

SEQ ID NO: 2934582 - RNA, 12 nt, Human
guccucccaucu

SEQ ID NO: 2934583 - RNA, 14 nt, Human
guccucccaucuca

SEQ ID NO: 2934584 - RNA, 13 nt, Human
guccucccaucuc

SEQ ID NO: 2934585 - RNA, 23 nt, Human
guccucccaucucacacaugagc

SEQ ID NO: 2934586 - RNA, 19 nt, Human
guccugggagugagcuggu

SEQ ID NO: 2934587 - RNA, 17 nt, Human
guccugggagugagcug

SEQ ID NO: 2934588 - RNA, 18 nt, Human
guccugggagugagcugg

SEQ ID NO: 2934589 - RNA, 21 nt, Human
guccugucggagcccugucuc

SEQ ID NO: 2934590 - RNA, 20 nt, Human
guccugucggagcccugucu

SEQ ID NO: 2934591 - RNA, 18 nt, Human
guccugucggagcccugu

SEQ ID NO: 2934592 - RNA, 23 nt, Human
gugaauguaggcuggcuuucaga

SEQ ID NO: 2934593 - RNA, 19 nt, Human
gugaaaggaaagagggagg

SEQ ID NO: 2934594 - RNA, 14 nt, Human
gugaauaccccaag

SEQ ID NO: 2934595 - RNA, 23 nt, Human
gugaauaccccaagacucccaug

SEQ ID NO: 2934596 - RNA, 23 nt, Human
gugaaaagaaaaaugagccuggc

SEQ ID NO: 2934597 - RNA, 14 nt, Human
gugaaaagaaaaau

SEQ ID NO: 2934598 - RNA, 19 nt, Human
gugaaagaaaauaacaaua

SEQ ID NO: 2934599 - RNA, 12 nt, Human
gugaaacuggau

SEQ ID NO: 2934600 - RNA, 20 nt, Human
gugaaacucguuaauuugua

SEQ ID NO: 2934601 - RNA, 16 nt, Human
gugacaacacuugugu

SEQ ID NO: 2934602 - RNA, 16 nt, Human
gugacugaauuucuuu

SEQ ID NO: 2934603 - RNA, 18 nt, Human
gugacugaauuucuuuug

SEQ ID NO: 2934604 - RNA, 15 nt, Human
gugacugaauuucuu

SEQ ID NO: 2934605 - RNA, 11 nt, Human
gugaggaagcc

SEQ ID NO: 2934606 - RNA, 19 nt, Human
gugaggaagccgcuggggc

SEQ ID NO: 2934607 - RNA, 16 nt, Human
gugaggaagccgcugg

SEQ ID NO: 2934608 - RNA, 14 nt, Human
gugagcuacaaaug

SEQ ID NO: 2934609 - RNA, 13 nt, Human
gugagccacugca

SEQ ID NO: 2934610 - RNA, 17 nt, Human
gugacugaucucucgug

SEQ ID NO: 2934611 - RNA, 16 nt, Human
gugagcagucaggaaa

SEQ ID NO: 2934612 - RNA, 23 nt, Human
gugauucuccugccucagccucc

SEQ ID NO: 2934613 - RNA, 12 nt, Human
gugauuuucauu

SEQ ID NO: 2934614 - RNA, 14 nt, Human
gugauucuccugcc

SEQ ID NO: 2934615 - RNA, 16 nt, Human
gugauucuccugccuc

SEQ ID NO: 2934616 - RNA, 17 nt, Human
gugauucuccugccuca

SEQ ID NO: 2934617 - RNA, 18 nt, Human
gugauucuccugccucag

SEQ ID NO: 2934618 - RNA, 19 nt, Human
gugauucuccugccucagc

SEQ ID NO: 2934619 - RNA, 20 nt, Human
gugauucuccugccucagcc

SEQ ID NO: 2934620 - RNA, 22 nt, Human
gugauucuccugccucagccuc

SEQ ID NO: 2934621 - RNA, 20 nt, Human
gugauccucccaccucagcc

SEQ ID NO: 2934622 - RNA, 22 nt, Human
gugauccucccaccucagccuc

SEQ ID NO: 2934623 - RNA, 14 nt, Human
gugauccucccacc

SEQ ID NO: 2934624 - RNA, 15 nt, Human
gugauccucccaccu

SEQ ID NO: 2934625 - RNA, 18 nt, Human
gugauccucccaccucag

SEQ ID NO: 2934626 - RNA, 11 nt, Human
gugaggccaga

SEQ ID NO: 2934627 - RNA, 15 nt, Human
gugauccacccaccu

SEQ ID NO: 2934628 - RNA, 13 nt, Human
gugaggccagaga

SEQ ID NO: 2934629 - RNA, 18 nt, Human
gugauccacccaccucag

SEQ ID NO: 2934630 - RNA, 20 nt, Human
gugauccacccaccucagcc

SEQ ID NO: 2934631 - RNA, 20 nt, Human
gugcccacaggaucagucug

SEQ ID NO: 2934632 - RNA, 20 nt, Human
gugccagguuuuuggucuga

SEQ ID NO: 2934633 - RNA, 22 nt, Human
gugccagguuuuuggucugacc

SEQ ID NO: 2934634 - RNA, 21 nt, Human
gugcauaccacuuuuguucuu

SEQ ID NO: 2934635 - RNA, 13 nt, Human
gugcauaccacuu

SEQ ID NO: 2934636 - RNA, 14 nt, Human
gugcauaccacuuu

SEQ ID NO: 2934637 - RNA, 20 nt, Human
gugcaguauagaauaggcac

SEQ ID NO: 2934638 - RNA, 19 nt, Human
gugcauaaguuaacuucca

SEQ ID NO: 2934639 - RNA, 18 nt, Human
gugcaaauugucacagga

SEQ ID NO: 2934640 - RNA, 24 nt, Human
gugcuuggcccaggaguuuggcca

SEQ ID NO: 2934641 - RNA, 19 nt, Human
gugcuuggcccaggaguuu

SEQ ID NO: 2934642 - RNA, 17 nt, Human
gugcuuggcccaggagu

SEQ ID NO: 2934643 - RNA, 16 nt, Human
gugcuuggcccaggag

SEQ ID NO: 2934644 - RNA, 15 nt, Human
gugcuuggcccagga

SEQ ID NO: 2934645 - RNA, 14 nt, Human
gugcuuggcccagg

SEQ ID NO: 2934646 - RNA, 13 nt, Human
gugcuuggcccag

SEQ ID NO: 2934647 - RNA, 14 nt, Human
guggaaaauaacuc

SEQ ID NO: 2934648 - RNA, 18 nt, Human
guggaaaaauagccugcc

SEQ ID NO: 2934649 - RNA, 22 nt, Human
gugcugccauccagguucagcu

SEQ ID NO: 2934650 - RNA, 11 nt, Human
gugcugcccug

SEQ ID NO: 2934651 - RNA, 12 nt, Human
gugcuuggagga

SEQ ID NO: 2934652 - RNA, 15 nt, Human
gugcuuggaggaagg

SEQ ID NO: 2934653 - RNA, 13 nt, Human
gugcuuggaggaa

SEQ ID NO: 2934654 - RNA, 21 nt, Human
gugcugaguguacagagugga

SEQ ID NO: 2934655 - RNA, 12 nt, Human
gugcugcauuua

SEQ ID NO: 2934656 - RNA, 19 nt, Human
gugcugcauuuaaaagaua

SEQ ID NO: 2934657 - RNA, 20 nt, Human
gugcugcauuuaaaagauac

SEQ ID NO: 2934658 - RNA, 15 nt, Human
gugcugccauccagg

SEQ ID NO: 2934659 - RNA, 18 nt, Human
gugcugccauccagguuc

SEQ ID NO: 2934660 - RNA, 19 nt, Human
gugcugccauccagguuca

SEQ ID NO: 2934661 - RNA, 12 nt, Human
gugcugagucug

SEQ ID NO: 2934662 - RNA, 19 nt, Human
gugcugagucugaaggcug

SEQ ID NO: 2934663 - RNA, 18 nt, Human
gugcugagucugaaggcu

SEQ ID NO: 2934664 - RNA, 17 nt, Human
gugcugagucugaaggc

SEQ ID NO: 2934665 - RNA, 16 nt, Human
gugcugagucugaagg

SEQ ID NO: 2934666 - RNA, 15 nt, Human
gugcucuggacaggc

SEQ ID NO: 2934667 - RNA, 16 nt, Human
gugcucuggacaggca

SEQ ID NO: 2934668 - RNA, 21 nt, Human
gugccuuggggacaagagcag

SEQ ID NO: 2934669 - RNA, 17 nt, Human
gugcucuggacaggcau

SEQ ID NO: 2934670 - RNA, 18 nt, Human
gugcucuggacaggcaug

SEQ ID NO: 2934671 - RNA, 19 nt, Human
gugcugaaugguuuucaaa

SEQ ID NO: 2934672 - RNA, 20 nt, Human
gugcugaaugguuuucaaaa

SEQ ID NO: 2934673 - RNA, 23 nt, Human
gugcugaaugguuuucaaaauaa

SEQ ID NO: 2934674 - RNA, 20 nt, Human
guggagaagcggcuggcagc

SEQ ID NO: 2934675 - RNA, 16 nt, Human
guggaugccugguggc

SEQ ID NO: 2934676 - RNA, 18 nt, Human
guggaugccugguggcag

SEQ ID NO: 2934677 - RNA, 21 nt, Human
guggaucacgaggucaggaga

SEQ ID NO: 2934678 - RNA, 17 nt, Human
guggaguucaucuugaa

SEQ ID NO: 2934679 - RNA, 15 nt, Human
guggcagugggagcu

SEQ ID NO: 2934680 - RNA, 16 nt, Human
guggcagugggagcug

SEQ ID NO: 2934681 - RNA, 17 nt, Human
guggcagugggagcugc

SEQ ID NO: 2934682 - RNA, 19 nt, Human
guggcagcugcgguccacc

SEQ ID NO: 2934683 - RNA, 20 nt, Human
guggaugccugguggcagcu

SEQ ID NO: 2934684 - RNA, 21 nt, Human
guggcagcugcgguccaccca

SEQ ID NO: 2934685 - RNA, 22 nt, Human
guggcagcugcgguccacccag

SEQ ID NO: 2934686 - RNA, 23 nt, Human
guggcagcugcgguccacccagg

SEQ ID NO: 2934687 - RNA, 12 nt, Human
guggcagcugcu

SEQ ID NO: 2934688 - RNA, 13 nt, Human
guggcagcugcuu

SEQ ID NO: 2934689 - RNA, 19 nt, Human
guggcagcugcuuuugucu

SEQ ID NO: 2934690 - RNA, 23 nt, Human
guggccacaccucuaucccggcu

SEQ ID NO: 2934691 - RNA, 22 nt, Human
guggccacaccucuaucccggc

SEQ ID NO: 2934692 - RNA, 19 nt, Human
guggcagugggagcugccu

SEQ ID NO: 2934693 - RNA, 21 nt, Human
guggcagugggagcugccugu

SEQ ID NO: 2934694 - RNA, 18 nt, Human
ucacaagacccaaaaggc

SEQ ID NO: 2934695 - RNA, 22 nt, Human
ucacaagacccaaaaggcagaa

SEQ ID NO: 2934696 - RNA, 14 nt, Human
ucacauuggaaaca

SEQ ID NO: 2934697 - RNA, 20 nt, Human
ucacauuccugaacaggaua

SEQ ID NO: 2934698 - RNA, 15 nt, Human
ucacacacuuuggcu

SEQ ID NO: 2934699 - RNA, 23 nt, Human
ucacacaugagcaucaggccagg

SEQ ID NO: 2934700 - RNA, 22 nt, Human
ucacacaugagcaucaggccag

SEQ ID NO: 2934701 - RNA, 23 nt, Human
ucaccgaaaacguggcugcuuca

SEQ ID NO: 2934702 - RNA, 22 nt, Human
ucaccgaaaacguggcugcuuc

SEQ ID NO: 2934703 - RNA, 21 nt, Human
ucaccgaaaacguggcugcuu

SEQ ID NO: 2934704 - RNA, 20 nt, Human
ucaccgaaaacguggcugcu

SEQ ID NO: 2934705 - RNA, 19 nt, Human
ucaccgaaaacguggcugc

SEQ ID NO: 2934706 - RNA, 15 nt, Human
ucaccgaaaacgugg

SEQ ID NO: 2934707 - RNA, 19 nt, Human
ucacccgcuaagagggagg

SEQ ID NO: 2934708 - RNA, 14 nt, Human
ucaccgaaaacgug

SEQ ID NO: 2934709 - RNA, 12 nt, Human
ucacccuuuucu

SEQ ID NO: 2934710 - RNA, 18 nt, Human
ucacccgcuaagagggag

SEQ ID NO: 2934711 - RNA, 16 nt, Human
ucaccacaugugcaca

SEQ ID NO: 2934712 - RNA, 13 nt, Human
ucaccaagcccag

SEQ ID NO: 2934713 - RNA, 14 nt, Human
ucacauuuauucug

SEQ ID NO: 2934714 - RNA, 21 nt, Human
ucaccaaaucagcugcuacua

SEQ ID NO: 2934715 - RNA, 18 nt, Human
ucaccaacgucugugcca

SEQ ID NO: 2934716 - RNA, 17 nt, Human
ucaccaacgucugugcc

SEQ ID NO: 2934717 - RNA, 12 nt, Human
ucacauuuaaau

SEQ ID NO: 2934718 - RNA, 17 nt, Human
ucacauuggaaacaagu

SEQ ID NO: 2934719 - RNA, 17 nt, Human
ucaagcgauucuucugc

SEQ ID NO: 2934720 - RNA, 20 nt, Human
ucaagccaccaacauacucc

SEQ ID NO: 2934721 - RNA, 12 nt, Human
ucaagccaccaa

SEQ ID NO: 2934722 - RNA, 21 nt, Human
ucaagcgauucuucugcuuca

SEQ ID NO: 2934723 - RNA, 18 nt, Human
ucaagcgauucuucugcu

SEQ ID NO: 2934724 - RNA, 19 nt, Human
ucaagcgauucuucugcuu

SEQ ID NO: 2934725 - RNA, 14 nt, Human
ucaaggauccugag

SEQ ID NO: 2934726 - RNA, 13 nt, Human
ucaaggauccuga

SEQ ID NO: 2934727 - RNA, 17 nt, Human
ucaaggauccugagcca

SEQ ID NO: 2934728 - RNA, 16 nt, Human
ucaaggauccugagcc

SEQ ID NO: 2934729 - RNA, 15 nt, Human
ucaaggauccugagc

SEQ ID NO: 2934730 - RNA, 16 nt, Human
ucaaccuccugggcua

SEQ ID NO: 2934731 - RNA, 20 nt, Human
ucaaccccuucgcuccugug

SEQ ID NO: 2934732 - RNA, 15 nt, Human
ucaaccuccugggcu

SEQ ID NO: 2934733 - RNA, 18 nt, Human
ucaaccccuucgcuccug

SEQ ID NO: 2934734 - RNA, 19 nt, Human
ucaaccccuucgcuccugu

SEQ ID NO: 2934735 - RNA, 20 nt, Human
ucaacucuccuccagaguca

SEQ ID NO: 2934736 - RNA, 22 nt, Human
ucaacuccaaacugacucuuaa

SEQ ID NO: 2934737 - RNA, 17 nt, Human
ucaaauaugcaaagcac

SEQ ID NO: 2934738 - RNA, 16 nt, Human
ucaaauaugcaaagca

SEQ ID NO: 2934739 - RNA, 23 nt, Human
ucaaagagguuuuaaaaaaaucc

SEQ ID NO: 2934740 - RNA, 12 nt, Human
ucaaagagguuu

SEQ ID NO: 2934741 - RNA, 12 nt, Human
ucaaauguguac

SEQ ID NO: 2934742 - RNA, 16 nt, Human
ucaaauccuugaagau

SEQ ID NO: 2934743 - RNA, 15 nt, Human
ucaaauccuugaaga

SEQ ID NO: 2934744 - RNA, 19 nt, Human
ucaaauaugcaaagcacug

SEQ ID NO: 2934745 - RNA, 18 nt, Human
ucaaauaugcaaagcacu

SEQ ID NO: 2934746 - RNA, 20 nt, Human
uauuugcagugcaguauaga

SEQ ID NO: 2934747 - RNA, 22 nt, Human
uauuugcagugcaguauagaau

SEQ ID NO: 2934748 - RNA, 17 nt, Human
ucaaacauauauaacaa

SEQ ID NO: 2934749 - RNA, 22 nt, Human
ucaaacagucucaggaaaucaa

SEQ ID NO: 2934750 - RNA, 20 nt, Human
uauuguuuaaaaucauuucu

SEQ ID NO: 2934751 - RNA, 15 nt, Human
uauuuaaauagauga

SEQ ID NO: 2934752 - RNA, 17 nt, Human
uauuuaaauagaugaca

SEQ ID NO: 2934753 - RNA, 17 nt, Human
uauuuaugggauccugg

SEQ ID NO: 2934754 - RNA, 18 nt, Human
uauuugaaacacugguuu

SEQ ID NO: 2934755 - RNA, 23 nt, Human
uauuucuugugguuauaacuuaa

SEQ ID NO: 2934756 - RNA, 20 nt, Human
uauuucuugugguuauaacu

SEQ ID NO: 2934757 - RNA, 14 nt, Human
uauuucuaugaaau

SEQ ID NO: 2934758 - RNA, 15 nt, Human
uauuucuaugaaaua

SEQ ID NO: 2934759 - RNA, 13 nt, Human
uauuuauuacugu

SEQ ID NO: 2934760 - RNA, 13 nt, Human
uauuucuaugaaa

SEQ ID NO: 2934761 - RNA, 14 nt, Human
uauuuauuacugua

SEQ ID NO: 2934762 - RNA, 22 nt, Human
uauuuauuaaaugcccagcccc

SEQ ID NO: 2934763 - RNA, 23 nt, Human
uauugcauacuauuaaacaugcu

SEQ ID NO: 2934764 - RNA, 19 nt, Human
uauugcauacuauuaaaca

SEQ ID NO: 2934765 - RNA, 23 nt, Human
uauucauucuuuuugaaauguca

SEQ ID NO: 2934766 - RNA, 18 nt, Human
uauucauucuuuuugaaa

SEQ ID NO: 2934767 - RNA, 20 nt, Human
uauugauaugcuuauacacu

SEQ ID NO: 2934768 - RNA, 22 nt, Human
uauugcugauggugcaaugacc

SEQ ID NO: 2934769 - RNA, 23 nt, Human
uauugcugauggugcaaugaccu

SEQ ID NO: 2934770 - RNA, 13 nt, Human
uauugcccacgcu

SEQ ID NO: 2934771 - RNA, 14 nt, Human
uauugcccacgcug

SEQ ID NO: 2934772 - RNA, 14 nt, Human
uauugccaaugcua

SEQ ID NO: 2934773 - RNA, 15 nt, Human
uauugcccacgcugg

SEQ ID NO: 2934774 - RNA, 15 nt, Human
uauuguuuaaaauca

SEQ ID NO: 2934775 - RNA, 17 nt, Human
uauuguuuaaaaucauu

SEQ ID NO: 2934776 - RNA, 16 nt, Human
uauuguuuaaaaucau

SEQ ID NO: 2934777 - RNA, 12 nt, Human
uauuauuugcag

SEQ ID NO: 2934778 - RNA, 20 nt, Human
uauuauuugcagugcaguau

SEQ ID NO: 2934779 - RNA, 21 nt, Human
uauuauuugcagugcaguaua

SEQ ID NO: 2934780 - RNA, 16 nt, Human
uauuauguuaaaacug

SEQ ID NO: 2934781 - RNA, 12 nt, Human
uauuauaccuuu

SEQ ID NO: 2934782 - RNA, 13 nt, Human
uauuauaccuuuu

SEQ ID NO: 2934783 - RNA, 14 nt, Human
uauuaaggaagaca

SEQ ID NO: 2934784 - RNA, 14 nt, Human
uauuauaccuuuuu

SEQ ID NO: 2934785 - RNA, 17 nt, Human
uauuauauuuacaaaug

SEQ ID NO: 2934786 - RNA, 23 nt, Human
uauuauauucauucuuuuugaaa

SEQ ID NO: 2934787 - RNA, 17 nt, Human
uauuauauucauucuuu

SEQ ID NO: 2934788 - RNA, 13 nt, Human
uauuauauucauu

SEQ ID NO: 2934789 - RNA, 13 nt, Human
uauguguucuauu

SEQ ID NO: 2934790 - RNA, 12 nt, Human
uauguuaaaacu

SEQ ID NO: 2934791 - RNA, 14 nt, Human
uauguuaauauuuu

SEQ ID NO: 2934792 - RNA, 16 nt, Human
uauguuaauauuucug

SEQ ID NO: 2934793 - RNA, 13 nt, Human
uauguuaauauuu

SEQ ID NO: 2934794 - RNA, 19 nt, Human
uauguuagugcaaauuguc

SEQ ID NO: 2934795 - RNA, 19 nt, Human
uauggaggcuuugcauaga

SEQ ID NO: 2934796 - RNA, 15 nt, Human
uauuaaaugcccagc

SEQ ID NO: 2934797 - RNA, 19 nt, Human
uauuaaaugcccagccccu

SEQ ID NO: 2934798 - RNA, 17 nt, Human
uauuaaaugcccagccc

SEQ ID NO: 2934799 - RNA, 16 nt, Human
uauuaagaaagacuau

SEQ ID NO: 2934800 - RNA, 21 nt, Human
uauguugcccaggcaggucuu

SEQ ID NO: 2934801 - RNA, 17 nt, Human
uauguucuaagaaguga

SEQ ID NO: 2934802 - RNA, 22 nt, Human
uauguucuuaguggauguucug

SEQ ID NO: 2934803 - RNA, 19 nt, Human
uauauguuuuaagaggcag

SEQ ID NO: 2934804 - RNA, 14 nt, Human
uauccucuguugau

SEQ ID NO: 2934805 - RNA, 16 nt, Human
uaucuaaauguugaaa

SEQ ID NO: 2934806 - RNA, 15 nt, Human
uauccuucagccuga

SEQ ID NO: 2934807 - RNA, 14 nt, Human
uauccuucagccug

SEQ ID NO: 2934808 - RNA, 16 nt, Human
uaucgucacugcuuaa

SEQ ID NO: 2934809 - RNA, 21 nt, Human
uaucuaauauguaacaagcca

SEQ ID NO: 2934810 - RNA, 13 nt, Human
uaucuuacgaaaa

SEQ ID NO: 2934811 - RNA, 16 nt, Human
uaucuuacgaaaaaau

SEQ ID NO: 2934812 - RNA, 18 nt, Human
uaucuguucauauggaua

SEQ ID NO: 2934813 - RNA, 20 nt, Human
uaucugucauuugagcaggg

SEQ ID NO: 2934814 - RNA, 21 nt, Human
uaucugucauuugagcagggc

SEQ ID NO: 2934815 - RNA, 23 nt, Human
uaucugucauuugagcagggcuc

SEQ ID NO: 2934816 - RNA, 12 nt, Human
uaugacacaugc

SEQ ID NO: 2934817 - RNA, 22 nt, Human
uaugacacaugcaaggucauuu

SEQ ID NO: 2934818 - RNA, 17 nt, Human
uaugaauuacauuugua

SEQ ID NO: 2934819 - RNA, 23 nt, Human
uaugaauuacauuuguauaaaau

SEQ ID NO: 2934820 - RNA, 13 nt, Human
uaugcacacauuu

SEQ ID NO: 2934821 - RNA, 14 nt, Human
uaugcacacacaua

SEQ ID NO: 2934822 - RNA, 16 nt, Human
uaugcacacacauaua

SEQ ID NO: 2934823 - RNA, 14 nt, Human
uaugcacacauuuu

SEQ ID NO: 2934824 - RNA, 13 nt, Human
uaugcaaagucua

SEQ ID NO: 2934825 - RNA, 15 nt, Human
uaugcaaagcacuga

SEQ ID NO: 2934826 - RNA, 18 nt, Human
uaugcaaucaaaucugcu

SEQ ID NO: 2934827 - RNA, 12 nt, Human
uaugcaaagcac

SEQ ID NO: 2934828 - RNA, 14 nt, Human
uaugcaaagcacug

SEQ ID NO: 2934829 - RNA, 13 nt, Human
uaugcaaagcacu

SEQ ID NO: 2934830 - RNA, 23 nt, Human
uaugacuccagaauuucccaaag

SEQ ID NO: 2934831 - RNA, 17 nt, Human
uaugacuccagaauuuc

SEQ ID NO: 2934832 - RNA, 16 nt, Human
uaugacuccagaauuu

SEQ ID NO: 2934833 - RNA, 21 nt, Human
uaugagaaacuggcaaagcag

SEQ ID NO: 2934834 - RNA, 23 nt, Human
uaugauugccuuuuuauaacuuu

SEQ ID NO: 2934835 - RNA, 20 nt, Human
uaugauugccuuuuuauaac

SEQ ID NO: 2934836 - RNA, 16 nt, Human
uaugauucccagccag

SEQ ID NO: 2934837 - RNA, 16 nt, Human
uaugauucaaaugucu

SEQ ID NO: 2934838 - RNA, 21 nt, Human
uaugauucaaaugucuauaaa

SEQ ID NO: 2934839 - RNA, 15 nt, Human
uaugcuucuguuuua

SEQ ID NO: 2934840 - RNA, 16 nt, Human
uaugcuucuguuuuau

SEQ ID NO: 2934841 - RNA, 13 nt, Human
uaugcaugaagua

SEQ ID NO: 2934842 - RNA, 18 nt, Human
uaugcaugaaguaauaug

SEQ ID NO: 2934843 - RNA, 22 nt, Human
uaugcuuauacacuuacacuuu

SEQ ID NO: 2934844 - RNA, 17 nt, Human
uauggacaaugacccag

SEQ ID NO: 2934845 - RNA, 16 nt, Human
uauggaagcacccauu

SEQ ID NO: 2934846 - RNA, 19 nt, Human
uauggaacacucugagacu

SEQ ID NO: 2934847 - RNA, 18 nt, Human
uauggaacacucugagac

SEQ ID NO: 2934848 - RNA, 17 nt, Human
uauggaacacucugaga

SEQ ID NO: 2934849 - RNA, 16 nt, Human
uauggaacacucugag

SEQ ID NO: 2934850 - RNA, 13 nt, Human
uauggaacacucu

SEQ ID NO: 2934851 - RNA, 15 nt, Human
uaggcuauuccugag

SEQ ID NO: 2934852 - RNA, 17 nt, Human
uaggcuauuccugagag

SEQ ID NO: 2934853 - RNA, 11 nt, Human
uagggaaaaac

SEQ ID NO: 2934854 - RNA, 19 nt, Human
uagggaaaaaccagcgugu

SEQ ID NO: 2934855 - RNA, 21 nt, Human
uagggaaaaaccagcguguga

SEQ ID NO: 2934856 - RNA, 20 nt, Human
uagggaaaaaccagcgugug

SEQ ID NO: 2934857 - RNA, 16 nt, Human
uaggucagugcaaaua

SEQ ID NO: 2934858 - RNA, 18 nt, Human
uaggccuggccagaugca

SEQ ID NO: 2934859 - RNA, 15 nt, Human
uaggccuggccagau

SEQ ID NO: 2934860 - RNA, 19 nt, Human
uaggacccgucuccagcug

SEQ ID NO: 2934861 - RNA, 18 nt, Human
uaggccaugggacaggga

SEQ ID NO: 2934862 - RNA, 16 nt, Human
uaggccaugggacagg

SEQ ID NO: 2934863 - RNA, 12 nt, Human
uaggaauugacc

SEQ ID NO: 2934864 - RNA, 23 nt, Human
uaguauuuuuuacauuuuacaca

SEQ ID NO: 2934865 - RNA, 13 nt, Human
uagucaaauugug

SEQ ID NO: 2934866 - RNA, 14 nt, Human
uagugcaaauuguc

SEQ ID NO: 2934867 - RNA, 15 nt, Human
uagugcaaauuguca

SEQ ID NO: 2934868 - RNA, 18 nt, Human
uaguauuuuuuacauuuu

SEQ ID NO: 2934869 - RNA, 18 nt, Human
uaguauuucuaugaaaua

SEQ ID NO: 2934870 - RNA, 19 nt, Human
uaguauuucuaugaaauau

SEQ ID NO: 2934871 - RNA, 16 nt, Human
uaguauuucuaugaaa

SEQ ID NO: 2934872 - RNA, 13 nt, Human
uaggugacauaua

SEQ ID NO: 2934873 - RNA, 23 nt, Human
uaggugacagagugagacucugu

SEQ ID NO: 2934874 - RNA, 13 nt, Human
uaguaucaaaaga

SEQ ID NO: 2934875 - RNA, 18 nt, Human
uauaaacuuuaccuuuuu

SEQ ID NO: 2934876 - RNA, 21 nt, Human
uauaucuauauuuuacauaaa

SEQ ID NO: 2934877 - RNA, 20 nt, Human
uauaugcucugcauguuaca

SEQ ID NO: 2934878 - RNA, 21 nt, Human
uauaugcucugcauguuacau

SEQ ID NO: 2934879 - RNA, 13 nt, Human
uauaugcuucugu

SEQ ID NO: 2934880 - RNA, 17 nt, Human
ucaugcuguucaugaaa

SEQ ID NO: 2934881 - RNA, 14 nt, Human
ucauccacugugcc

SEQ ID NO: 2934882 - RNA, 17 nt, Human
ucauccacugugccaug

SEQ ID NO: 2934883 - RNA, 19 nt, Human
ucaucuugaauuguaagga

SEQ ID NO: 2934884 - RNA, 14 nt, Human
ucaucauccuaagc

SEQ ID NO: 2934885 - RNA, 17 nt, Human
ucaucaaugaaugaaug

SEQ ID NO: 2934886 - RNA, 20 nt, Human
ucaguguacauggaauaaca

SEQ ID NO: 2934887 - RNA, 12 nt, Human
ucauagcagcuu

SEQ ID NO: 2934888 - RNA, 11 nt, Human
ucauagcagcu

SEQ ID NO: 2934889 - RNA, 13 nt, Human
uccaaaguacacu

SEQ ID NO: 2934890 - RNA, 17 nt, Human
uccaaagaaauguaagg

SEQ ID NO: 2934891 - RNA, 14 nt, Human
uccaaagaaaugua

SEQ ID NO: 2934892 - RNA, 16 nt, Human
ucauuaggauggcuag

SEQ ID NO: 2934893 - RNA, 20 nt, Human
ucagguggggcagcuugagg

SEQ ID NO: 2934894 - RNA, 21 nt, Human
ucagucugauucccaagcucu

SEQ ID NO: 2934895 - RNA, 22 nt, Human
ucagucugauucccaagcucug

SEQ ID NO: 2934896 - RNA, 23 nt, Human
ucagucugauucccaagcucugc

SEQ ID NO: 2934897 - RNA, 16 nt, Human
ucaggugauccaccca

SEQ ID NO: 2934898 - RNA, 23 nt, Human
ucaggugagaagcagaggaagga

SEQ ID NO: 2934899 - RNA, 23 nt, Human
ucaggugauccacccaccucagc

SEQ ID NO: 2934900 - RNA, 18 nt, Human
ucagguggggcagcuuga

SEQ ID NO: 2934901 - RNA, 19 nt, Human
ucagguggggcagcuugag

SEQ ID NO: 2934902 - RNA, 21 nt, Human
ucaggccugggggcugggcag

SEQ ID NO: 2934903 - RNA, 23 nt, Human
ucagcuccagcucaccagcccca

SEQ ID NO: 2934904 - RNA, 24 nt, Human
ucagcuccagcucaccagccccag

SEQ ID NO: 2934905 - RNA, 23 nt, Human
ucagcucugcaagaauugaagca

SEQ ID NO: 2934906 - RNA, 23 nt, Human
ucaggaagcucagggccuggcuc

SEQ ID NO: 2934907 - RNA, 15 nt, Human
uccauacauuugugu

SEQ ID NO: 2934908 - RNA, 15 nt, Human
uccauagagagcaag

SEQ ID NO: 2934909 - RNA, 14 nt, Human
uccauagagagcaa

SEQ ID NO: 2934910 - RNA, 20 nt, Human
uccaugggccauaugaaaag

SEQ ID NO: 2934911 - RNA, 12 nt, Human
uccauacauuug

SEQ ID NO: 2934912 - RNA, 18 nt, Human
uccagguuuaagcuguua

SEQ ID NO: 2934913 - RNA, 19 nt, Human
uccagguagagggugugua

SEQ ID NO: 2934914 - RNA, 20 nt, Human
uccagguuuaagcuguuacu

SEQ ID NO: 2934915 - RNA, 14 nt, Human
uccagcugcugaga

SEQ ID NO: 2934916 - RNA, 20 nt, Human
uccaggggugggacacccug

SEQ ID NO: 2934917 - RNA, 19 nt, Human
uccaggggugggacacccu

SEQ ID NO: 2934918 - RNA, 15 nt, Human
uccaggagcagccac

SEQ ID NO: 2934919 - RNA, 14 nt, Human
uccaggagcagcca

SEQ ID NO: 2934920 - RNA, 13 nt, Human
uccaggagcagcc

SEQ ID NO: 2934921 - RNA, 12 nt, Human
uccaggagcagc

SEQ ID NO: 2934922 - RNA, 19 nt, Human
uccacuuucuagccagagg

SEQ ID NO: 2934923 - RNA, 23 nt, Human
uccacuuggucugugagaugcua

SEQ ID NO: 2934924 - RNA, 21 nt, Human
uccacuuucuagccagaggag

SEQ ID NO: 2934925 - RNA, 20 nt, Human
uccacuuucuagccagagga

SEQ ID NO: 2934926 - RNA, 21 nt, Human
uccacuuggucugugagaugc

SEQ ID NO: 2934927 - RNA, 17 nt, Human
uccacuuggucugugag

SEQ ID NO: 2934928 - RNA, 14 nt, Human
uccaaaguacacug

SEQ ID NO: 2934929 - RNA, 16 nt, Human
uccaaaguacacuguu

SEQ ID NO: 2934930 - RNA, 13 nt, Human
ucccaccuuggcu

SEQ ID NO: 2934931 - RNA, 14 nt, Human
ucccaccuggcucu

SEQ ID NO: 2934932 - RNA, 15 nt, Human
ucccaccuggcucug

SEQ ID NO: 2934933 - RNA, 16 nt, Human
ucccaccuggcucugu

SEQ ID NO: 2934934 - RNA, 19 nt, Human
ucccaccuggcucuguggc

SEQ ID NO: 2934935 - RNA, 16 nt, Human
ucccaccuuggcugca

SEQ ID NO: 2934936 - RNA, 17 nt, Human
ucccaccuuggcugcag

SEQ ID NO: 2934937 - RNA, 20 nt, Human
ucccagcugugcucuggaca

SEQ ID NO: 2934938 - RNA, 18 nt, Human
ucccaccuuggcugcagg

SEQ ID NO: 2934939 - RNA, 22 nt, Human
ucccaccucucucacuccuuga

SEQ ID NO: 2934940 - RNA, 20 nt, Human
uccaugugggcuaguugggc

SEQ ID NO: 2934941 - RNA, 24 nt, Human
ucccaggcauuccccaggaggcca

SEQ ID NO: 2934942 - RNA, 23 nt, Human
ucccaggcauuccccaggaggcc

SEQ ID NO: 2934943 - RNA, 20 nt, Human
ucccaccuggcucuguggcg

SEQ ID NO: 2934944 - RNA, 23 nt, Human
ucccagcugugcucuggacaggc

SEQ ID NO: 2934945 - RNA, 21 nt, Human
ucccagcugugcucuggacag

SEQ ID NO: 2934946 - RNA, 22 nt, Human
ucccagcugugcucuggacagg

SEQ ID NO: 2934947 - RNA, 15 nt, Human
ucccaucuuccaagg

SEQ ID NO: 2934948 - RNA, 21 nt, Human
ucccaucugugaaaggaaaga

SEQ ID NO: 2934949 - RNA, 18 nt, Human
ucccaugagccucagcau

SEQ ID NO: 2934950 - RNA, 19 nt, Human
ucccaugagccucagcauc

SEQ ID NO: 2934951 - RNA, 14 nt, Human
uccccaggaggcca

SEQ ID NO: 2934952 - RNA, 22 nt, Human
ucccccagccccauccucugua

SEQ ID NO: 2934953 - RNA, 21 nt, Human
ucccccagccccauccucugu

SEQ ID NO: 2934954 - RNA, 20 nt, Human
ucccccagccccauccucug

SEQ ID NO: 2934955 - RNA, 16 nt, Human
uccccaggaggccagc

SEQ ID NO: 2934956 - RNA, 15 nt, Human
uccccaggaggccag

SEQ ID NO: 2934957 - RNA, 17 nt, Human
ucccccagccccauccu

SEQ ID NO: 2934958 - RNA, 13 nt, Human
uccccaggaggcc

SEQ ID NO: 2934959 - RNA, 19 nt, Human
uccccagauugcaacaggc

SEQ ID NO: 2934960 - RNA, 20 nt, Human
uccccagauugcaacaggcu

SEQ ID NO: 2934961 - RNA, 22 nt, Human
uccccagauugcaacaggcugg

SEQ ID NO: 2934962 - RNA, 23 nt, Human
uccccagauugcaacaggcuggg

SEQ ID NO: 2934963 - RNA, 20 nt, Human
uccccagcaagugagagcug

SEQ ID NO: 2934964 - RNA, 21 nt, Human
uccccagcaagugagagcugg

SEQ ID NO: 2934965 - RNA, 22 nt, Human
uccccagcaagugagagcuggg

SEQ ID NO: 2934966 - RNA, 20 nt, Human
ucccaugagccucagcaucc

SEQ ID NO: 2934967 - RNA, 13 nt, Human
uccccagauugca

SEQ ID NO: 2934968 - RNA, 18 nt, Human
uccccagauugcaacagg

SEQ ID NO: 2934969 - RNA, 12 nt, Human
uccucccaccuc

SEQ ID NO: 2934970 - RNA, 10 nt, Human
uccuccaggu

SEQ ID NO: 2934971 - RNA, 16 nt, Human
uccuccacauuuguuu

SEQ ID NO: 2934972 - RNA, 13 nt, Human
uccuccacauuug

SEQ ID NO: 2934973 - RNA, 18 nt, Human
uccucauuagcauuuugc

SEQ ID NO: 2934974 - RNA, 22 nt, Human
uccucauuuuuauaaugucccu

SEQ ID NO: 2934975 - RNA, 23 nt, Human
uccuauauuguuuucaguguaca

SEQ ID NO: 2934976 - RNA, 21 nt, Human
uccuauauuguuuucagugua

SEQ ID NO: 2934977 - RNA, 23 nt, Human
uccuagugaaagaggcagcuuga

SEQ ID NO: 2934978 - RNA, 14 nt, Human
uccuagugaaagag

SEQ ID NO: 2934979 - RNA, 17 nt, Human
uccuagucauucuuccc

SEQ ID NO: 2934980 - RNA, 16 nt, Human
uccgcuuucuacccag

SEQ ID NO: 2934981 - RNA, 18 nt, Human
uccgcuuucuacccagcg

SEQ ID NO: 2934982 - RNA, 20 nt, Human
uccgcuuucuacccagcgag

SEQ ID NO: 2934983 - RNA, 20 nt, Human
uccuaagcuauucaguaaua

SEQ ID NO: 2934984 - RNA, 21 nt, Human
uccuaagcuauucaguaauaa

SEQ ID NO: 2934985 - RNA, 15 nt, Human
ucccuuggacauuuu

SEQ ID NO: 2934986 - RNA, 21 nt, Human
ucccuuggacauuuuaugucu

SEQ ID NO: 2934987 - RNA, 19 nt, Human
ucccuuggacauuuuaugu

SEQ ID NO: 2934988 - RNA, 18 nt, Human
ucccuuggacauuuuaug

SEQ ID NO: 2934989 - RNA, 16 nt, Human
ucccuuggacauuuua

SEQ ID NO: 2934990 - RNA, 14 nt, Human
uccgccucuugggu

SEQ ID NO: 2934991 - RNA, 15 nt, Human
ucccuuccucuuucc

SEQ ID NO: 2934992 - RNA, 16 nt, Human
ucccuuccucuuucca

SEQ ID NO: 2934993 - RNA, 15 nt, Human
ucccccuuccaugga

SEQ ID NO: 2934994 - RNA, 20 nt, Human
ucccuucacaaacccagugu

SEQ ID NO: 2934995 - RNA, 20 nt, Human
uccugcccuuaccugccagg

SEQ ID NO: 2934996 - RNA, 17 nt, Human
uccugcccuuaccugcc

SEQ ID NO: 2934997 - RNA, 22 nt, Human
uccuggacugagggggccugga

SEQ ID NO: 2934998 - RNA, 20 nt, Human
uccuggacugagggggccug

SEQ ID NO: 2934999 - RNA, 14 nt, Human
uccuggacugaggg

SEQ ID NO: 2935000 - RNA, 14 nt, Human
uccuggaguucugg

SEQ ID NO: 2935001 - RNA, 23 nt, Human
uccuggcacccggccccugcugg

SEQ ID NO: 2935002 - RNA, 22 nt, Human
uccuggcacccggccccugcug

SEQ ID NO: 2935003 - RNA, 16 nt, Human
uccuggcacugcuucc

SEQ ID NO: 2935004 - RNA, 13 nt, Human
uccuggcacugcu

SEQ ID NO: 2935005 - RNA, 13 nt, Human
uccuggcccaggg

SEQ ID NO: 2935006 - RNA, 22 nt, Human
uccuggcccagggcaucuggga

SEQ ID NO: 2935007 - RNA, 15 nt, Human
uccuggcccagggca

SEQ ID NO: 2935008 - RNA, 16 nt, Human
uccuggcccagggcau

SEQ ID NO: 2935009 - RNA, 19 nt, Human
uccuggcccagggcaucug

SEQ ID NO: 2935010 - RNA, 12 nt, Human
uccuggccucaa

SEQ ID NO: 2935011 - RNA, 22 nt, Human
uccuguaccucuugagccuuga

SEQ ID NO: 2935012 - RNA, 11 nt, Human
uccuguagccc

SEQ ID NO: 2935013 - RNA, 13 nt, Human
uccuguagcccua

SEQ ID NO: 2935014 - RNA, 21 nt, Human
uccugagccagauuucacucu

SEQ ID NO: 2935015 - RNA, 14 nt, Human
uccugccaggcaug

SEQ ID NO: 2935016 - RNA, 13 nt, Human
uccugccaggcau

SEQ ID NO: 2935017 - RNA, 17 nt, Human
uccugaggcuccacuug

SEQ ID NO: 2935018 - RNA, 19 nt, Human
uccugaggcuccacuuggu

SEQ ID NO: 2935019 - RNA, 20 nt, Human
uccugaggcuccacuugguc

SEQ ID NO: 2935020 - RNA, 18 nt, Human
uccugccccugagcccau

SEQ ID NO: 2935021 - RNA, 17 nt, Human
uccugccccugagccca

SEQ ID NO: 2935022 - RNA, 13 nt, Human
ucgugacaacacu

SEQ ID NO: 2935023 - RNA, 15 nt, Human
ucggccccaccagug

SEQ ID NO: 2935024 - RNA, 12 nt, Human
ucggagaagagc

SEQ ID NO: 2935025 - RNA, 16 nt, Human
ucggagaagagcuguu

SEQ ID NO: 2935026 - RNA, 14 nt, Human
ucggagaagagcug

SEQ ID NO: 2935027 - RNA, 18 nt, Human
ucuaaaggcuaccuuugu

SEQ ID NO: 2935028 - RNA, 17 nt, Human
ucuaaaggcuaccuuug

SEQ ID NO: 2935029 - RNA, 19 nt, Human
ucuaaaggcuaccuuugua

SEQ ID NO: 2935030 - RNA, 20 nt, Human
ucuaaaggcuaccuuuguau

SEQ ID NO: 2935031 - RNA, 21 nt, Human
ucuacacugugcugagucuga

SEQ ID NO: 2935032 - RNA, 15 nt, Human
ucuacagaggccaug

SEQ ID NO: 2935033 - RNA, 16 nt, Human
ucuacagaggccaugg

SEQ ID NO: 2935034 - RNA, 14 nt, Human
ucuaccuuccugca

SEQ ID NO: 2935035 - RNA, 16 nt, Human
ucuaggaagacuuugg

SEQ ID NO: 2935036 - RNA, 15 nt, Human
ucuaggaagacuuug

SEQ ID NO: 2935037 - RNA, 19 nt, Human
ucuaggaagacuuuggaaa

SEQ ID NO: 2935038 - RNA, 18 nt, Human
ucuaugaaauauuauguu

SEQ ID NO: 2935039 - RNA, 14 nt, Human
ucuaugacacaugc

SEQ ID NO: 2935040 - RNA, 17 nt, Human
ucuaugacacaugcaag

SEQ ID NO: 2935041 - RNA, 16 nt, Human
ucucauacucaccuca

SEQ ID NO: 2935042 - RNA, 18 nt, Human
ucucauacucaccucacc

SEQ ID NO: 2935043 - RNA, 19 nt, Human
ucuaugggacucaaugcac

SEQ ID NO: 2935044 - RNA, 12 nt, Human
ucuaugggacuc

SEQ ID NO: 2935045 - RNA, 13 nt, Human
ucuaugggacuca

SEQ ID NO: 2935046 - RNA, 23 nt, Human
ucucaguccaugaagauguagag

SEQ ID NO: 2935047 - RNA, 13 nt, Human
ucuccacccugcu

SEQ ID NO: 2935048 - RNA, 17 nt, Human
ucuccacccugcucucc

SEQ ID NO: 2935049 - RNA, 14 nt, Human
ucuccacccugcuc

SEQ ID NO: 2935050 - RNA, 16 nt, Human
ucuccacccugcucuc

SEQ ID NO: 2935051 - RNA, 22 nt, Human
ucuccaccugccagggacagag

SEQ ID NO: 2935052 - RNA, 19 nt, Human
ucuccaccugccagggaca

SEQ ID NO: 2935053 - RNA, 17 nt, Human
ucuccaccugccaggga

SEQ ID NO: 2935054 - RNA, 16 nt, Human
ucuccaccugccaggg

SEQ ID NO: 2935055 - RNA, 15 nt, Human
ucuccaccugccagg

SEQ ID NO: 2935056 - RNA, 14 nt, Human
ucuccaccugccag

SEQ ID NO: 2935057 - RNA, 18 nt, Human
ucucccugcugcuccuag

SEQ ID NO: 2935058 - RNA, 20 nt, Human
ucucccugcugcuccuagga

SEQ ID NO: 2935059 - RNA, 18 nt, Human
ucucccucagucuggccc

SEQ ID NO: 2935060 - RNA, 23 nt, Human
ucucccucagucuggcccuuccu

SEQ ID NO: 2935061 - RNA, 12 nt, Human
ucucccccagcc

SEQ ID NO: 2935062 - RNA, 15 nt, Human
ucuccagccccugga

SEQ ID NO: 2935063 - RNA, 14 nt, Human
ucuccagccccugg

SEQ ID NO: 2935064 - RNA, 13 nt, Human
ucuccagccccug

SEQ ID NO: 2935065 - RNA, 12 nt, Human
ucuccagccccu

SEQ ID NO: 2935066 - RNA, 13 nt, Human
ucuccagcugcug

SEQ ID NO: 2935067 - RNA, 15 nt, Human
ucuccagcugcugag

SEQ ID NO: 2935068 - RNA, 18 nt, Human
ucuccagccccuggaugc

SEQ ID NO: 2935069 - RNA, 16 nt, Human
ucuccagccccuggau

SEQ ID NO: 2935070 - RNA, 22 nt, Human
ucuccagccccuggaugcagcc

SEQ ID NO: 2935071 - RNA, 13 nt, Human
ugaaguccaagca

SEQ ID NO: 2935072 - RNA, 17 nt, Human
ugaaggccccgcccagg

SEQ ID NO: 2935073 - RNA, 11 nt, Human
ugaaguccaag

SEQ ID NO: 2935074 - RNA, 15 nt, Human
ugaagauacugaaau

SEQ ID NO: 2935075 - RNA, 16 nt, Human
ugaagauacugaaaua

SEQ ID NO: 2935076 - RNA, 18 nt, Human
ugaagauacugaaauaaa

SEQ ID NO: 2935077 - RNA, 23 nt, Human
ugaacauuuggguuacuauuucu

SEQ ID NO: 2935078 - RNA, 17 nt, Human
ugaacuccuggccucaa

SEQ ID NO: 2935079 - RNA, 14 nt, Human
ugaagauacugaaa

SEQ ID NO: 2935080 - RNA, 16 nt, Human
ugaaggccccgcccag

SEQ ID NO: 2935081 - RNA, 15 nt, Human
ugaaggccccgccca

SEQ ID NO: 2935082 - RNA, 22 nt, Human
ugaaggacauugcggacagcca

SEQ ID NO: 2935083 - RNA, 19 nt, Human
ugaaggacauugcggacag

SEQ ID NO: 2935084 - RNA, 20 nt, Human
ugaaggacauugcggacagc

SEQ ID NO: 2935085 - RNA, 16 nt, Human
ugaauuccuaaaauua

SEQ ID NO: 2935086 - RNA, 17 nt, Human
ugaauuccuaaaauuau

SEQ ID NO: 2935087 - RNA, 23 nt, Human
ugaauuccuaaaauuauggaaac

SEQ ID NO: 2935088 - RNA, 15 nt, Human
ugaauuaugaaacuu

SEQ ID NO: 2935089 - RNA, 17 nt, Human
ugaauuaugaaacuuuu

SEQ ID NO: 2935090 - RNA, 13 nt, Human
ugaauuaugaaac

SEQ ID NO: 2935091 - RNA, 14 nt, Human
ugaauuacauuugu

SEQ ID NO: 2935092 - RNA, 15 nt, Human
ugaauuacauuugua

SEQ ID NO: 2935093 - RNA, 16 nt, Human
ugaauuacauuuguau

SEQ ID NO: 2935094 - RNA, 18 nt, Human
ugaauuacauuuguauaa

SEQ ID NO: 2935095 - RNA, 20 nt, Human
ugaaugaauggcuaagcaaa

SEQ ID NO: 2935096 - RNA, 16 nt, Human
ugaccauucuccaccu

SEQ ID NO: 2935097 - RNA, 18 nt, Human
ugaccauucuccaccugc

SEQ ID NO: 2935098 - RNA, 17 nt, Human
ugaccauucuccaccug

SEQ ID NO: 2935099 - RNA, 20 nt, Human
ugaccgugaggccagagaca

SEQ ID NO: 2935100 - RNA, 16 nt, Human
ugaccgugaggccaga

SEQ ID NO: 2935101 - RNA, 14 nt, Human
ugaccgugaggcca

SEQ ID NO: 2935102 - RNA, 13 nt, Human
ugaccgugaggcc

SEQ ID NO: 2935103 - RNA, 13 nt, Human
ugacauauacaua

SEQ ID NO: 2935104 - RNA, 18 nt, Human
ugacauauacauacuuac

SEQ ID NO: 2935105 - RNA, 16 nt, Human
ugacaugggacauuug

SEQ ID NO: 2935106 - RNA, 17 nt, Human
ugacaugggacauuugc

SEQ ID NO: 2935107 - RNA, 18 nt, Human
ugacaugggacauuugcu

SEQ ID NO: 2935108 - RNA, 13 nt, Human
ugacaugucuuuu

SEQ ID NO: 2935109 - RNA, 15 nt, Human
ugacaugucuuuucu

SEQ ID NO: 2935110 - RNA, 18 nt, Human
ugaccacugcagaagaca

SEQ ID NO: 2935111 - RNA, 20 nt, Human
ugaccacugcagaagacagu

SEQ ID NO: 2935112 - RNA, 19 nt, Human
ugaccagcaccaucucucc

SEQ ID NO: 2935113 - RNA, 19 nt, Human
ugacagagugagacucugu

SEQ ID NO: 2935114 - RNA, 18 nt, Human
ugacagaggcagccccau

SEQ ID NO: 2935115 - RNA, 23 nt, Human
ugacagaggcagccccauucugc

SEQ ID NO: 2935116 - RNA, 14 nt, Human
ugacagagugagac

SEQ ID NO: 2935117 - RNA, 17 nt, Human
ugacagagugagacucu

SEQ ID NO: 2935118 - RNA, 13 nt, Human
ugacagaggcagc

SEQ ID NO: 2935119 - RNA, 20 nt, Human
ugacagacacaggcccggcu

SEQ ID NO: 2935120 - RNA, 23 nt, Human
ugacagacacaggcccggcucca

SEQ ID NO: 2935121 - RNA, 14 nt, Human
ugacagaggcagcc

SEQ ID NO: 2935122 - RNA, 15 nt, Human
ugacagaggcagccc

SEQ ID NO: 2935123 - RNA, 16 nt, Human
ugacagaggcagcccc

SEQ ID NO: 2935124 - RNA, 17 nt, Human
ugacagaggcagcccca

SEQ ID NO: 2935125 - RNA, 18 nt, Human
ugacaaggauugcuacug

SEQ ID NO: 2935126 - RNA, 15 nt, Human
ugacaagcucacaga

SEQ ID NO: 2935127 - RNA, 20 nt, Human
ugacaagcucacagaccuuu

SEQ ID NO: 2935128 - RNA, 12 nt, Human
ugacaagcucac

SEQ ID NO: 2935129 - RNA, 13 nt, Human
ugaaagggcccag

SEQ ID NO: 2935130 - RNA, 23 nt, Human
ugaaagggaguauuacaaaaaca

SEQ ID NO: 2935131 - RNA, 16 nt, Human
ugaaagguacuucaaa

SEQ ID NO: 2935132 - RNA, 18 nt, Human
ugaaagggcccagagagg

SEQ ID NO: 2935133 - RNA, 15 nt, Human
ugaaagguacuucaa

SEQ ID NO: 2935134 - RNA, 18 nt, Human
ugaaagcccugagcuuuc

SEQ ID NO: 2935135 - RNA, 18 nt, Human
ugaaagaggcagcuugaa

SEQ ID NO: 2935136 - RNA, 20 nt, Human
ugaaaagccucuguuuugau

SEQ ID NO: 2935137 - RNA, 22 nt, Human
ugaaaagccucuguuuugauau

SEQ ID NO: 2935138 - RNA, 19 nt, Human
ugaaaagccucuguuuuga

SEQ ID NO: 2935139 - RNA, 16 nt, Human
ugaaaagccucuguuu

SEQ ID NO: 2935140 - RNA, 19 nt, Human
ugaaaauuuugauguuuua

SEQ ID NO: 2935141 - RNA, 21 nt, Human
ugaaaauuuugauguuuuaag

SEQ ID NO: 2935142 - RNA, 13 nt, Human
ugaaaauuuugau

SEQ ID NO: 2935143 - RNA, 14 nt, Human
ugaaacauuuuguc

SEQ ID NO: 2935144 - RNA, 22 nt, Human
ugaaacaacaaauaggaauugu

SEQ ID NO: 2935145 - RNA, 13 nt, Human
ugaaaugucaguu

SEQ ID NO: 2935146 - RNA, 17 nt, Human
ugaaaugucaguucuga

SEQ ID NO: 2935147 - RNA, 13 nt, Human
ugaaaugucaacc

SEQ ID NO: 2935148 - RNA, 18 nt, Human
ugaaaugucaguucugau

SEQ ID NO: 2935149 - RNA, 20 nt, Human
ugaaaugucaguucugauau

SEQ ID NO: 2935150 - RNA, 18 nt, Human
ugaaauauuauguuaaaa

SEQ ID NO: 2935151 - RNA, 16 nt, Human
ugaaauauugacuuuu

SEQ ID NO: 2935152 - RNA, 19 nt, Human
ugaaauggacuuuuguaca

SEQ ID NO: 2935153 - RNA, 22 nt, Human
ugaacauuuggguuacuauuuc

SEQ ID NO: 2935154 - RNA, 17 nt, Human
ugaacauuucauggugu

SEQ ID NO: 2935155 - RNA, 22 nt, Human
ugaaccaagaacuuuccaggaa

SEQ ID NO: 2935156 - RNA, 23 nt, Human
ugaaccacaucuugcucugcuga

SEQ ID NO: 2935157 - RNA, 17 nt, Human
ugaaccaccacacccag

SEQ ID NO: 2935158 - RNA, 20 nt, Human
ugaaccaccacacccagccc

SEQ ID NO: 2935159 - RNA, 16 nt, Human
ugaacuccuggccuca

SEQ ID NO: 2935160 - RNA, 19 nt, Human
ugaacaguuguguuugaag

SEQ ID NO: 2935161 - RNA, 17 nt, Human
ugaacaguaacauagcu

SEQ ID NO: 2935162 - RNA, 23 nt, Human
ucuuucacccuuuucuguuugcu

SEQ ID NO: 2935163 - RNA, 17 nt, Human
ucuuucacauuuaaaua

SEQ ID NO: 2935164 - RNA, 21 nt, Human
ucuuguguguuuauugucaaa

SEQ ID NO: 2935165 - RNA, 16 nt, Human
ucuuguguguuuauug

SEQ ID NO: 2935166 - RNA, 23 nt, Human
ucuugcaauggcagccuuggcaa

SEQ ID NO: 2935167 - RNA, 20 nt, Human
ucuccucugcugcuggcugg

SEQ ID NO: 2935168 - RNA, 16 nt, Human
ucucccuucauccuuc

SEQ ID NO: 2935169 - RNA, 17 nt, Human
ucuuuggacacucacac

SEQ ID NO: 2935170 - RNA, 12 nt, Human
ucuuugccaagu

SEQ ID NO: 2935171 - RNA, 13 nt, Human
ucuuuccaaagua

SEQ ID NO: 2935172 - RNA, 14 nt, Human
ucuuuccaaaguac

SEQ ID NO: 2935173 - RNA, 21 nt, Human
ucuuucagccaagaauucuua

SEQ ID NO: 2935174 - RNA, 20 nt, Human
ucuuucagccaagaauucuu

SEQ ID NO: 2935175 - RNA, 19 nt, Human
ucuuucagccaagaauucu

SEQ ID NO: 2935176 - RNA, 16 nt, Human
ucuuucagccaagaau

SEQ ID NO: 2935177 - RNA, 19 nt, Human
ucuuuccacagaagcucca

SEQ ID NO: 2935178 - RNA, 22 nt, Human
ugauugccuuuuuauaacuuuu

SEQ ID NO: 2935179 - RNA, 17 nt, Human
ugauugccuuuuuauaa

SEQ ID NO: 2935180 - RNA, 21 nt, Human
ugauucuccugccucagccuc

SEQ ID NO: 2935181 - RNA, 23 nt, Human
ugauucagacagcugccugggau

SEQ ID NO: 2935182 - RNA, 21 nt, Human
ugauucagacagcugccuggg

SEQ ID NO: 2935183 - RNA, 20 nt, Human
ugauucagacagcugccugg

SEQ ID NO: 2935184 - RNA, 19 nt, Human
ugauucagacagcugccug

SEQ ID NO: 2935185 - RNA, 18 nt, Human
ugauucagacagcugccu

SEQ ID NO: 2935186 - RNA, 16 nt, Human
ugauugugucucuugg

SEQ ID NO: 2935187 - RNA, 15 nt, Human
ugauuuaaacacauu

SEQ ID NO: 2935188 - RNA, 18 nt, Human
ugauuuaaacacauuaaa

SEQ ID NO: 2935189 - RNA, 16 nt, Human
ugauuuaaacacauua

SEQ ID NO: 2935190 - RNA, 17 nt, Human
ugauuuaaacacauuaa

SEQ ID NO: 2935191 - RNA, 23 nt, Human
ugauugggcacaucauuucaaga

SEQ ID NO: 2935192 - RNA, 18 nt, Human
ugauugggcacaucauuu

SEQ ID NO: 2935193 - RNA, 20 nt, Human
ugauugggcacaucauuuca

SEQ ID NO: 2935194 - RNA, 21 nt, Human
ugauugggcacaucauuucaa

SEQ ID NO: 2935195 - RNA, 17 nt, Human
ugauugggcacaucauu

SEQ ID NO: 2935196 - RNA, 21 nt, Human
ugauuggaggggggagguggg

SEQ ID NO: 2935197 - RNA, 13 nt, Human
ugauuggaggggg

SEQ ID NO: 2935198 - RNA, 21 nt, Human
ugauucaccuccuaaaacaac

SEQ ID NO: 2935199 - RNA, 16 nt, Human
ugauucagacagcugc

SEQ ID NO: 2935200 - RNA, 15 nt, Human
ugauucagacagcug

SEQ ID NO: 2935201 - RNA, 14 nt, Human
ugauucagacagcu

SEQ ID NO: 2935202 - RNA, 13 nt, Human
ugauucagacagc

SEQ ID NO: 2935203 - RNA, 20 nt, Human
ugauucaacagguuuuccug

SEQ ID NO: 2935204 - RNA, 16 nt, Human
ugauuauuacuggcaa

SEQ ID NO: 2935205 - RNA, 21 nt, Human
ugauuaugaauuacauuugua

SEQ ID NO: 2935206 - RNA, 22 nt, Human
ugauuaugaauuacauuuguau

SEQ ID NO: 2935207 - RNA, 13 nt, Human
ugauuauauguca

SEQ ID NO: 2935208 - RNA, 17 nt, Human
ugauuaugaauuacauu

SEQ ID NO: 2935209 - RNA, 19 nt, Human
ugauuaugaauuacauuug

SEQ ID NO: 2935210 - RNA, 20 nt, Human
ugauguucuuucacccuuuu

SEQ ID NO: 2935211 - RNA, 16 nt, Human
ugauuaccagggacug

SEQ ID NO: 2935212 - RNA, 17 nt, Human
ugaucagcuuauugucu

SEQ ID NO: 2935213 - RNA, 24 nt, Human
ugaucagcuuauugucuagugaaa

SEQ ID NO: 2935214 - RNA, 14 nt, Human
ugauagcacagacc

SEQ ID NO: 2935215 - RNA, 13 nt, Human
ugauagcacagac

SEQ ID NO: 2935216 - RNA, 18 nt, Human
ugaucauguuuaugagaa

SEQ ID NO: 2935217 - RNA, 13 nt, Human
ugauccaagcugg

SEQ ID NO: 2935218 - RNA, 14 nt, Human
ugauccaagcuggu

SEQ ID NO: 2935219 - RNA, 15 nt, Human
ugauccaagcugguc

SEQ ID NO: 2935220 - RNA, 16 nt, Human
ugauccacccaccuca

SEQ ID NO: 2935221 - RNA, 17 nt, Human
ugaucucucgugauuga

SEQ ID NO: 2935222 - RNA, 17 nt, Human
ugauccacccaccucag

SEQ ID NO: 2935223 - RNA, 18 nt, Human
ugauccacccaccucagc

SEQ ID NO: 2935224 - RNA, 19 nt, Human
ugauccacccaccucagcc

SEQ ID NO: 2935225 - RNA, 14 nt, Human
ugaucuuuaaaaua

SEQ ID NO: 2935226 - RNA, 20 nt, Human
ugaucuucuuuauaauucua

SEQ ID NO: 2935227 - RNA, 16 nt, Human
ugaucuuugcagacag

SEQ ID NO: 2935228 - RNA, 17 nt, Human
ugaucuuuaaaauacac

SEQ ID NO: 2935229 - RNA, 23 nt, Human
ugaugcuacaggauuugaaauug

SEQ ID NO: 2935230 - RNA, 20 nt, Human
ugaugcuacaggauuugaaa

SEQ ID NO: 2935231 - RNA, 16 nt, Human
ugauguguuaucucuu

SEQ ID NO: 2935232 - RNA, 15 nt, Human
ugauggugguauguu

SEQ ID NO: 2935233 - RNA, 17 nt, Human
ugaugcuucuucagaga

SEQ ID NO: 2935234 - RNA, 16 nt, Human
ugaugcuucuucagag

SEQ ID NO: 2935235 - RNA, 16 nt, Human
ugauaacuggaaacuu

SEQ ID NO: 2935236 - RNA, 14 nt, Human
ugagugagcaugcc

SEQ ID NO: 2935237 - RNA, 20 nt, Human
ugaguugauagcacagaccc

SEQ ID NO: 2935238 - RNA, 16 nt, Human
ugaguugauagcacag

SEQ ID NO: 2935239 - RNA, 19 nt, Human
ugaguccagaaguuugaga

SEQ ID NO: 2935240 - RNA, 13 nt, Human
ugaguccagaagu

SEQ ID NO: 2935241 - RNA, 18 nt, Human
ugagucgaggacagggag

SEQ ID NO: 2935242 - RNA, 19 nt, Human
ugagucgaggacagggagg

SEQ ID NO: 2935243 - RNA, 18 nt, Human
ugagucugaaggcugggu

SEQ ID NO: 2935244 - RNA, 17 nt, Human
ugagucugaaggcuggg

SEQ ID NO: 2935245 - RNA, 15 nt, Human
ugagucugaaggcug

SEQ ID NO: 2935246 - RNA, 13 nt, Human
ugagucugaaggc

SEQ ID NO: 2935247 - RNA, 13 nt, Human
ugagcugggauga

SEQ ID NO: 2935248 - RNA, 12 nt, Human
ugaggcauuugu

SEQ ID NO: 2935249 - RNA, 19 nt, Human
ugaggcauuuguuugaacu

SEQ ID NO: 2935250 - RNA, 20 nt, Human
ugaggcauuuguuugaacug

SEQ ID NO: 2935251 - RNA, 23 nt, Human
ugaggcuagugugguguuuccug

SEQ ID NO: 2935252 - RNA, 17 nt, Human
ugaggcuaguguggugu

SEQ ID NO: 2935253 - RNA, 21 nt, Human
ugaggcauuuguuugaacuga

SEQ ID NO: 2935254 - RNA, 13 nt, Human
ugaggugggagga

SEQ ID NO: 2935255 - RNA, 12 nt, Human
ugaggugggagg

SEQ ID NO: 2935256 - RNA, 16 nt, Human
ugagggagaugccaug

SEQ ID NO: 2935257 - RNA, 17 nt, Human
ugagggaacagagaggu

SEQ ID NO: 2935258 - RNA, 18 nt, Human
ugaggcuccacuuggucu

SEQ ID NO: 2935259 - RNA, 20 nt, Human
ugaggcuccacuuggucugu

SEQ ID NO: 2935260 - RNA, 14 nt, Human
ugaggcucugcccu

SEQ ID NO: 2935261 - RNA, 13 nt, Human
ugaggcucugccc

SEQ ID NO: 2935262 - RNA, 22 nt, Human
ugagccucagcauccuggcacc

SEQ ID NO: 2935263 - RNA, 18 nt, Human
ugagccucagcauccugg

SEQ ID NO: 2935264 - RNA, 21 nt, Human
ugagccucagcauccuggcac

SEQ ID NO: 2935265 - RNA, 19 nt, Human
ugagccgagaucacgccac

SEQ ID NO: 2935266 - RNA, 21 nt, Human
ugagccgagaucacgccacug

SEQ ID NO: 2935267 - RNA, 17 nt, Human
ugagccucagcauccug

SEQ ID NO: 2935268 - RNA, 19 nt, Human
ugagcagggcucagcgggg

SEQ ID NO: 2935269 - RNA, 16 nt, Human
ugagcagggcucagcg

SEQ ID NO: 2935270 - RNA, 17 nt, Human
ugagcagggcucagcgg

SEQ ID NO: 2935271 - RNA, 16 nt, Human
ugagcaucaggccagg

SEQ ID NO: 2935272 - RNA, 13 nt, Human
ugagccccaaaag

SEQ ID NO: 2935273 - RNA, 20 nt, Human
ugagcaucaggccaggcccu

SEQ ID NO: 2935274 - RNA, 19 nt, Human
ugagcaucaggccaggccc

SEQ ID NO: 2935275 - RNA, 18 nt, Human
ugagcaucaggccaggcc

SEQ ID NO: 2935276 - RNA, 19 nt, Human
ugagacucgcgacaaugca

SEQ ID NO: 2935277 - RNA, 20 nt, Human
ugaccucaggugauccaccc

SEQ ID NO: 2935278 - RNA, 21 nt, Human
ugaccucaggugauccaccca

SEQ ID NO: 2935279 - RNA, 12 nt, Human
ugagcagggcuc

SEQ ID NO: 2935280 - RNA, 13 nt, Human
ugagcagggcuca

SEQ ID NO: 2935281 - RNA, 14 nt, Human
ugagcagggcucag

SEQ ID NO: 2935282 - RNA, 15 nt, Human
ugagcagggcucagc

SEQ ID NO: 2935283 - RNA, 15 nt, Human
ugagaucagccuggg

SEQ ID NO: 2935284 - RNA, 14 nt, Human
ugagaucagccugg

SEQ ID NO: 2935285 - RNA, 15 nt, Human
ugagaucaaaacggu

SEQ ID NO: 2935286 - RNA, 16 nt, Human
ugagagugaacaaauu

SEQ ID NO: 2935287 - RNA, 23 nt, Human
ugagacucgcgacaaugcaaacc

SEQ ID NO: 2935288 - RNA, 22 nt, Human
ugagacucgcgacaaugcaaac

SEQ ID NO: 2935289 - RNA, 21 nt, Human
ugagacucgcgacaaugcaaa

SEQ ID NO: 2935290 - RNA, 20 nt, Human
ugagacucgcgacaaugcaa

SEQ ID NO: 2935291 - RNA, 21 nt, Human
ugcuacuguccuacccacccu

SEQ ID NO: 2935292 - RNA, 22 nt, Human
ugcuacuguccuacccacccuc

SEQ ID NO: 2935293 - RNA, 23 nt, Human
ugcucuccgaccagacaccuuga

SEQ ID NO: 2935294 - RNA, 17 nt, Human
ugcucacauaucuguca

SEQ ID NO: 2935295 - RNA, 22 nt, Human
ugcuaggaacacuccuucacag

SEQ ID NO: 2935296 - RNA, 20 nt, Human
ugcuaggaacacuccuucac

SEQ ID NO: 2935297 - RNA, 21 nt, Human
ugcuaggaacacuccuucaca

SEQ ID NO: 2935298 - RNA, 13 nt, Human
ugcuagaacuccc

SEQ ID NO: 2935299 - RNA, 14 nt, Human
ugcuagaacucccu

SEQ ID NO: 2935300 - RNA, 15 nt, Human
ugcuagaacucccuu

SEQ ID NO: 2935301 - RNA, 17 nt, Human
ugcuagaacucccuuuc

SEQ ID NO: 2935302 - RNA, 17 nt, Human
ugcuguucaugaaagau

SEQ ID NO: 2935303 - RNA, 21 nt, Human
ugcuguucacuggacacuuca

SEQ ID NO: 2935304 - RNA, 16 nt, Human
ugcuguucaugaaaga

SEQ ID NO: 2935305 - RNA, 13 nt, Human
ugcuggguguggc

SEQ ID NO: 2935306 - RNA, 20 nt, Human
ugcugggggggauuguaaaa

SEQ ID NO: 2935307 - RNA, 17 nt, Human
ugcugggcuugucugua

SEQ ID NO: 2935308 - RNA, 19 nt, Human
ugcugcugccccugcacag

SEQ ID NO: 2935309 - RNA, 12 nt, Human
ugcugcugcccc

SEQ ID NO: 2935310 - RNA, 12 nt, Human
ugcugcuugagg

SEQ ID NO: 2935311 - RNA, 20 nt, Human
ugcugggauuacagguguga

SEQ ID NO: 2935312 - RNA, 19 nt, Human
ugcugcuugaggcaacuca

SEQ ID NO: 2935313 - RNA, 17 nt, Human
ugcugcauuuaaaagau

SEQ ID NO: 2935314 - RNA, 18 nt, Human
ugcugcauuuaaaagaua

SEQ ID NO: 2935315 - RNA, 19 nt, Human
ugcugcauuuaaaagauac

SEQ ID NO: 2935316 - RNA, 19 nt, Human
ugcugccaauauccuaaua

SEQ ID NO: 2935317 - RNA, 18 nt, Human
ugcugccaauauccuaau

SEQ ID NO: 2935318 - RNA, 17 nt, Human
ugcugccaauauccuaa

SEQ ID NO: 2935319 - RNA, 16 nt, Human
ugcugccaauauccua

SEQ ID NO: 2935320 - RNA, 15 nt, Human
ugcugccaauauccu

SEQ ID NO: 2935321 - RNA, 14 nt, Human
ugcugcauuuaaaa

SEQ ID NO: 2935322 - RNA, 23 nt, Human
ugcugcauuuaaaagauacaguu

SEQ ID NO: 2935323 - RNA, 21 nt, Human
ugcugccaauauccuaauaaa

SEQ ID NO: 2935324 - RNA, 22 nt, Human
ugcugccaauauccuaauaaaa

SEQ ID NO: 2935325 - RNA, 22 nt, Human
ugcaucaauuuuucuuauuuca

SEQ ID NO: 2935326 - RNA, 15 nt, Human
ugcauauugcauacu

SEQ ID NO: 2935327 - RNA, 23 nt, Human
ugcauauugcauacuauuaaaca

SEQ ID NO: 2935328 - RNA, 16 nt, Human
ugcaguugccagucac

SEQ ID NO: 2935329 - RNA, 12 nt, Human
ugcaguucugaa

SEQ ID NO: 2935330 - RNA, 20 nt, Human
ugcaguggugcgaucugggu

SEQ ID NO: 2935331 - RNA, 21 nt, Human
ugcaguggugcgaucuggguu

SEQ ID NO: 2935332 - RNA, 21 nt, Human
ugcaguuacacuaaaagguga

SEQ ID NO: 2935333 - RNA, 17 nt, Human
ugauuuaauaugcaaag

SEQ ID NO: 2935334 - RNA, 15 nt, Human
ugauuuaauaugcaa

SEQ ID NO: 2935335 - RNA, 16 nt, Human
ugcagggacagagcau

SEQ ID NO: 2935336 - RNA, 13 nt, Human
ugcagggaguccg

SEQ ID NO: 2935337 - RNA, 20 nt, Human
ugccacccuggggagaaagu

SEQ ID NO: 2935338 - RNA, 14 nt, Human
ugccaggcauggug

SEQ ID NO: 2935339 - RNA, 10 nt, Human
ugccaggcau

SEQ ID NO: 2935340 - RNA, 16 nt, Human
ugccacuaaauugaca

SEQ ID NO: 2935341 - RNA, 22 nt, Human
ugccaggaagccagcaggcucu

SEQ ID NO: 2935342 - RNA, 20 nt, Human
ugccaggaagccagcaggcu

SEQ ID NO: 2935343 - RNA, 17 nt, Human
ugccaaagaagcagacc

SEQ ID NO: 2935344 - RNA, 23 nt, Human
ugcauuuggugguuucagaaaug

SEQ ID NO: 2935345 - RNA, 21 nt, Human
ugcauuuggugguuucagaaa

SEQ ID NO: 2935346 - RNA, 13 nt, Human
ugcaucagcugcu

SEQ ID NO: 2935347 - RNA, 16 nt, Human
ugccccuggcagcccc

SEQ ID NO: 2935348 - RNA, 12 nt, Human
ugcccggcugcg

SEQ ID NO: 2935349 - RNA, 14 nt, Human
ugcccggcugcgga

SEQ ID NO: 2935350 - RNA, 18 nt, Human
ugcccaggcuggcgugca

SEQ ID NO: 2935351 - RNA, 19 nt, Human
ugcccaggcuggcgugcag

SEQ ID NO: 2935352 - RNA, 13 nt, Human
ugcccaggcuggc

SEQ ID NO: 2935353 - RNA, 20 nt, Human
ugcccaggcuggcgugcagu

SEQ ID NO: 2935354 - RNA, 14 nt, Human
ugcccugcccaccu

SEQ ID NO: 2935355 - RNA, 15 nt, Human
ugcccugcccaccug

SEQ ID NO: 2935356 - RNA, 20 nt, Human
ugcccugcccaccuggccuc

SEQ ID NO: 2935357 - RNA, 16 nt, Human
ugcccugcccaccugg

SEQ ID NO: 2935358 - RNA, 14 nt, Human
ugccucaagagaag

SEQ ID NO: 2935359 - RNA, 15 nt, Human
ugccucaagagaagg

SEQ ID NO: 2935360 - RNA, 23 nt, Human
uggacaggcauguucucugagga

SEQ ID NO: 2935361 - RNA, 19 nt, Human
uggacugagggggccugga

SEQ ID NO: 2935362 - RNA, 23 nt, Human
uggacugagggggccuggaugcc

SEQ ID NO: 2935363 - RNA, 20 nt, Human
uggacugagggggccuggau

SEQ ID NO: 2935364 - RNA, 22 nt, Human
uggacugagggggccuggaugc

SEQ ID NO: 2935365 - RNA, 23 nt, Human
uggaggaaggaaacccagcucug

SEQ ID NO: 2935366 - RNA, 21 nt, Human
uggaggaaggaaacccagcuc

SEQ ID NO: 2935367 - RNA, 19 nt, Human
uggaucuguauguguucua

SEQ ID NO: 2935368 - RNA, 13 nt, Human
uggcaaagcagaa

SEQ ID NO: 2935369 - RNA, 18 nt, Human
uggcaaagcagaauguga

SEQ ID NO: 2935370 - RNA, 15 nt, Human
uggcaaacagggccu

SEQ ID NO: 2935371 - RNA, 16 nt, Human
uggcaaacagggccuc

SEQ ID NO: 2935372 - RNA, 18 nt, Human
uggcaaacagggccucug

SEQ ID NO: 2935373 - RNA, 19 nt, Human
uggcaaacagggccucugc

SEQ ID NO: 2935374 - RNA, 20 nt, Human
uggcaaacagggccucugcg

SEQ ID NO: 2935375 - RNA, 24 nt, Human
uggcaaacagggccucugcggagc

SEQ ID NO: 2935376 - RNA, 16 nt, Human
uggcaaaaaggcagga

SEQ ID NO: 2935377 - RNA, 12 nt, Human
uggcaaaaaggc

SEQ ID NO: 2935378 - RNA, 15 nt, Human
uggcacuauaaugua

SEQ ID NO: 2935379 - RNA, 16 nt, Human
uggcacuauaauguaa

SEQ ID NO: 2935380 - RNA, 20 nt, Human
uggcaauagucaaauugugu

SEQ ID NO: 2935381 - RNA, 15 nt, Human
uggcacuaguauuuc

SEQ ID NO: 2935382 - RNA, 11 nt, Human
uggcugcuuca

SEQ ID NO: 2935383 - RNA, 15 nt, Human
uggcugggggccuca

SEQ ID NO: 2935384 - RNA, 15 nt, Human
uggcugcuucaagga

SEQ ID NO: 2935385 - RNA, 23 nt, Human
uggccucccaacucaccccagcc

SEQ ID NO: 2935386 - RNA, 23 nt, Human
uggcgcagcauauucaggaagcu

SEQ ID NO: 2935387 - RNA, 22 nt, Human
uggcgcagcauauucaggaagc

SEQ ID NO: 2935388 - RNA, 23 nt, Human
uggcgagccauuugucccaagug

SEQ ID NO: 2935389 - RNA, 22 nt, Human
uggcgagccauuugucccaagu

SEQ ID NO: 2935390 - RNA, 16 nt, Human
uggcgcugccccuggc

SEQ ID NO: 2935391 - RNA, 23 nt, Human
uggcgcugccccuggcagccccu

SEQ ID NO: 2935392 - RNA, 15 nt, Human
uggcgcugccccugg

SEQ ID NO: 2935393 - RNA, 14 nt, Human
uggccccugcccgg

SEQ ID NO: 2935394 - RNA, 15 nt, Human
uggccccugcccggc

SEQ ID NO: 2935395 - RNA, 16 nt, Human
uggccccugcccggcu

SEQ ID NO: 2935396 - RNA, 13 nt, Human
uggccaggcuggu

SEQ ID NO: 2935397 - RNA, 16 nt, Human
uggcccaggguggcca

SEQ ID NO: 2935398 - RNA, 17 nt, Human
uggcccaggguggccac

SEQ ID NO: 2935399 - RNA, 18 nt, Human
uggcccaggguggccaca

SEQ ID NO: 2935400 - RNA, 17 nt, Human
uggccagaugcaccagc

SEQ ID NO: 2935401 - RNA, 18 nt, Human
uggccagaugcaccagcc

SEQ ID NO: 2935402 - RNA, 19 nt, Human
uggcagaguugaagacaga

SEQ ID NO: 2935403 - RNA, 17 nt, Human
uggcagaguugaagaca

SEQ ID NO: 2935404 - RNA, 21 nt, Human
uggcagaguggauucuugaac

SEQ ID NO: 2935405 - RNA, 15 nt, Human
uggcagaguugaaga

SEQ ID NO: 2935406 - RNA, 19 nt, Human
uggccagaugcaccagccc

SEQ ID NO: 2935407 - RNA, 17 nt, Human
uggguacuuguggacac

SEQ ID NO: 2935408 - RNA, 18 nt, Human
uggguacuuguggacaca

SEQ ID NO: 2935409 - RNA, 18 nt, Human
uggguauagauguugcua

SEQ ID NO: 2935410 - RNA, 14 nt, Human
uggguauagauguu

SEQ ID NO: 2935411 - RNA, 16 nt, Human
ugggggaguggccaca

SEQ ID NO: 2935412 - RNA, 22 nt, Human
ugggcuucauccuccucagauc

SEQ ID NO: 2935413 - RNA, 15 nt, Human
uggggaugagaaagg

SEQ ID NO: 2935414 - RNA, 23 nt, Human
uggggaugagaaagguugaagca

SEQ ID NO: 2935415 - RNA, 20 nt, Human
uggggccaguuggucccccu

SEQ ID NO: 2935416 - RNA, 16 nt, Human
ugggagugggcccaau

SEQ ID NO: 2935417 - RNA, 14 nt, Human
ugggagugggccca

SEQ ID NO: 2935418 - RNA, 20 nt, Human
uggcugggggccucagugcc

SEQ ID NO: 2935419 - RNA, 16 nt, Human
uggcugggggccucag

SEQ ID NO: 2935420 - RNA, 17 nt, Human
uggcugggggccucagu

SEQ ID NO: 2935421 - RNA, 14 nt, Human
ugggauccuccagg

SEQ ID NO: 2935422 - RNA, 13 nt, Human
ugggauccuccag

SEQ ID NO: 2935423 - RNA, 12 nt, Human
ugggauccucca

SEQ ID NO: 2935424 - RNA, 22 nt, Human
ugggauuacaagcgugagccac

SEQ ID NO: 2935425 - RNA, 18 nt, Human
ugggcagagcagagacca

SEQ ID NO: 2935426 - RNA, 22 nt, Human
ugggcagagcagagaccauccc

SEQ ID NO: 2935427 - RNA, 14 nt, Human
ugggccuggcuccc

SEQ ID NO: 2935428 - RNA, 23 nt, Human
ugggcagagcagagaccaucccu

SEQ ID NO: 2935429 - RNA, 12 nt, Human
ugggcagcugcc

SEQ ID NO: 2935430 - RNA, 13 nt, Human
ugggcagcugccu

SEQ ID NO: 2935431 - RNA, 14 nt, Human
ugggcagcugccuc

SEQ ID NO: 2935432 - RNA, 15 nt, Human
ugggcagcugccucc

SEQ ID NO: 2935433 - RNA, 17 nt, Human
ugggcagcugccucccc

SEQ ID NO: 2935434 - RNA, 19 nt, Human
ugggcagcugccuccccuc

SEQ ID NO: 2935435 - RNA, 14 nt, Human
uggucggaaaacau

SEQ ID NO: 2935436 - RNA, 17 nt, Human
uggucggaaaacaugcu

SEQ ID NO: 2935437 - RNA, 13 nt, Human
uggugaccucugc

SEQ ID NO: 2935438 - RNA, 14 nt, Human
uggugaccucugcc

SEQ ID NO: 2935439 - RNA, 19 nt, Human
uggucuacacugugcugag

SEQ ID NO: 2935440 - RNA, 18 nt, Human
uggucuacacugugcuga

SEQ ID NO: 2935441 - RNA, 17 nt, Human
uggucuacacugugcug

SEQ ID NO: 2935442 - RNA, 16 nt, Human
uggucuacacugugcu

SEQ ID NO: 2935443 - RNA, 15 nt, Human
uggucuacacugugc

SEQ ID NO: 2935444 - RNA, 20 nt, Human
uggugcaaugaccuuucaau

SEQ ID NO: 2935445 - RNA, 21 nt, Human
uggugcaaugaccuuucaaua

SEQ ID NO: 2935446 - RNA, 22 nt, Human
uggugauuuagcaggaagcugu

SEQ ID NO: 2935447 - RNA, 16 nt, Human
uggugauuuagcagga

SEQ ID NO: 2935448 - RNA, 15 nt, Human
uggugaccucugccu

SEQ ID NO: 2935449 - RNA, 16 nt, Human
uggugaccucugccug

SEQ ID NO: 2935450 - RNA, 17 nt, Human
uggugaccucugccuga

SEQ ID NO: 2935451 - RNA, 22 nt, Human
uggugaccucugccugaaguca

SEQ ID NO: 2935452 - RNA, 19 nt, Human
uggugacuuuccucuuugg

SEQ ID NO: 2935453 - RNA, 19 nt, Human
ugguccuaaucuucugaac

SEQ ID NO: 2935454 - RNA, 17 nt, Human
ugguccuaaucuucuga

SEQ ID NO: 2935455 - RNA, 23 nt, Human
ugguccugcugcaguugccaguc

SEQ ID NO: 2935456 - RNA, 15 nt, Human
ugguccugcugcagu

SEQ ID NO: 2935457 - RNA, 13 nt, Human
ugguccugcugca

SEQ ID NO: 2935458 - RNA, 23 nt, Human
uggucccccuuccauggacuuug

SEQ ID NO: 2935459 - RNA, 18 nt, Human
uggucccccuuccaugga

SEQ ID NO: 2935460 - RNA, 16 nt, Human
uggucccccuuccaug

SEQ ID NO: 2935461 - RNA, 15 nt, Human
uggucccccuuccau

SEQ ID NO: 2935462 - RNA, 13 nt, Human
uggucccacucag

SEQ ID NO: 2935463 - RNA, 16 nt, Human
uggucccagccagcag

SEQ ID NO: 2935464 - RNA, 14 nt, Human
uggucccccuucca

SEQ ID NO: 2935465 - RNA, 17 nt, Human
uggucacaggaaguaga

SEQ ID NO: 2935466 - RNA, 14 nt, Human
uggucaacauuucu

SEQ ID NO: 2935467 - RNA, 22 nt, Human
uggucacaggaaguagaggagg

SEQ ID NO: 2935468 - RNA, 18 nt, Human
ugguaugaucacggcuca

SEQ ID NO: 2935469 - RNA, 15 nt, Human
ugguauuugaaacac

SEQ ID NO: 2935470 - RNA, 13 nt, Human
ugguauguuuuca

SEQ ID NO: 2935471 - RNA, 14 nt, Human
uuaaaagcauuuuu

SEQ ID NO: 2935472 - RNA, 19 nt, Human
uuaaaauacacacucaaau

SEQ ID NO: 2935473 - RNA, 21 nt, Human
uuaaaauaccagccaguaaau

SEQ ID NO: 2935474 - RNA, 18 nt, Human
uuaaaagaugaaaauauu

SEQ ID NO: 2935475 - RNA, 15 nt, Human
uuaaaagaugaaaau

SEQ ID NO: 2935476 - RNA, 21 nt, Human
uuaaacucugagugcaaacuu

SEQ ID NO: 2935477 - RNA, 22 nt, Human
uguuuuaagaggcagggucuca

SEQ ID NO: 2935478 - RNA, 18 nt, Human
uguuuuaaggaugcuugu

SEQ ID NO: 2935479 - RNA, 22 nt, Human
uuaaaagaauauuuuaacuucc

SEQ ID NO: 2935480 - RNA, 21 nt, Human
uuaaaagaauauuuuaacuuc

SEQ ID NO: 2935481 - RNA, 14 nt, Human
uuaaaagauacagu

SEQ ID NO: 2935482 - RNA, 17 nt, Human
uuaaaagauacaguuac

SEQ ID NO: 2935483 - RNA, 19 nt, Human
uguuuggggaugagaaagg

SEQ ID NO: 2935484 - RNA, 23 nt, Human
uguuuccuggcacugcuuccagu

SEQ ID NO: 2935485 - RNA, 13 nt, Human
uguuugugauuga

SEQ ID NO: 2935486 - RNA, 20 nt, Human
uguuuuaagaggcagggucu

SEQ ID NO: 2935487 - RNA, 15 nt, Human
uguuucaaacuuuac

SEQ ID NO: 2935488 - RNA, 21 nt, Human
uguuucaaacauauauaacaa

SEQ ID NO: 2935489 - RNA, 22 nt, Human
uguuucaaacauauauaacaau

SEQ ID NO: 2935490 - RNA, 19 nt, Human
uguuucaaacauauauaac

SEQ ID NO: 2935491 - RNA, 16 nt, Human
uguuuagauaauacac

SEQ ID NO: 2935492 - RNA, 19 nt, Human
uuaaugguaguuuuacagu

SEQ ID NO: 2935493 - RNA, 21 nt, Human
uuacaagcgugagccacugca

SEQ ID NO: 2935494 - RNA, 20 nt, Human
uuacaagcgugagccacugc

SEQ ID NO: 2935495 - RNA, 17 nt, Human
uuaagcuguuacugucu

SEQ ID NO: 2935496 - RNA, 18 nt, Human
uuaauauugauaugcuua

SEQ ID NO: 2935497 - RNA, 22 nt, Human
uuaauauugauaugcuuauaca

SEQ ID NO: 2935498 - RNA, 17 nt, Human
uuaaccacuucagcuga

SEQ ID NO: 2935499 - RNA, 16 nt, Human
uuaacuuuuauaaacu

SEQ ID NO: 2935500 - RNA, 17 nt, Human
uuaacuuuuauaaacuu

SEQ ID NO: 2935501 - RNA, 15 nt, Human
uuaacuuuuauaaac

SEQ ID NO: 2935502 - RNA, 16 nt, Human
uuaacuucacauauug

SEQ ID NO: 2935503 - RNA, 17 nt, Human
uuaguagagacaggguu

SEQ ID NO: 2935504 - RNA, 22 nt, Human
uuaguagagguacacuugugaa

SEQ ID NO: 2935505 - RNA, 23 nt, Human
uuaguagagguacacuugugaau

SEQ ID NO: 2935506 - RNA, 20 nt, Human
uuaggagaagucuucuauuu

SEQ ID NO: 2935507 - RNA, 18 nt, Human
uuaggauguugaaaaagu

SEQ ID NO: 2935508 - RNA, 18 nt, Human
uuaguaugaggcauuugu

SEQ ID NO: 2935509 - RNA, 16 nt, Human
uuaguaugaggcauuu

SEQ ID NO: 2935510 - RNA, 12 nt, Human
uuagcuggaaaa

SEQ ID NO: 2935511 - RNA, 13 nt, Human
uuagcuggaaaag

SEQ ID NO: 2935512 - RNA, 14 nt, Human
uuagaguugauacu

SEQ ID NO: 2935513 - RNA, 22 nt, Human
uuagauaauacaccacuacauu

SEQ ID NO: 2935514 - RNA, 20 nt, Human
uuagaugcaguucugaagaa

SEQ ID NO: 2935515 - RNA, 21 nt, Human
uuagaugcaguucugaagaag

SEQ ID NO: 2935516 - RNA, 21 nt, Human
uuacuuaaaccgccaaggcug

SEQ ID NO: 2935517 - RNA, 22 nt, Human
uuacuuaagacuuaaugagacu

SEQ ID NO: 2935518 - RNA, 18 nt, Human
uuacuuagguguggggga

SEQ ID NO: 2935519 - RNA, 11 nt, Human
uuacuucugcu

SEQ ID NO: 2935520 - RNA, 12 nt, Human
uuacuucugcua

SEQ ID NO: 2935521 - RNA, 23 nt, Human
uuacuucuuauacauuugauaaa

SEQ ID NO: 2935522 - RNA, 13 nt, Human
uuacuaaguuuuu

SEQ ID NO: 2935523 - RNA, 14 nt, Human
uuacuaaguuuuua

SEQ ID NO: 2935524 - RNA, 16 nt, Human
uuacuaauagacaauu

SEQ ID NO: 2935525 - RNA, 17 nt, Human
uuacuaguuucccuugc

SEQ ID NO: 2935526 - RNA, 14 nt, Human
uuagacagucccug

SEQ ID NO: 2935527 - RNA, 18 nt, Human
uuagacagucccugccaa

SEQ ID NO: 2935528 - RNA, 17 nt, Human
uuagacagucccugcca

SEQ ID NO: 2935529 - RNA, 16 nt, Human
uuagacagucccugcc

SEQ ID NO: 2935530 - RNA, 20 nt, Human
uuagacccucaugcugccaa

SEQ ID NO: 2935531 - RNA, 19 nt, Human
uuagacccucaugcugcca

SEQ ID NO: 2935532 - RNA, 13 nt, Human
uuacuuuaaacua

SEQ ID NO: 2935533 - RNA, 17 nt, Human
uuacuuuaaaaggagcc

SEQ ID NO: 2935534 - RNA, 18 nt, Human
uuacuuuaaaaggagcca

SEQ ID NO: 2935535 - RNA, 14 nt, Human
uuacuuuguguuca

SEQ ID NO: 2935536 - RNA, 19 nt, Human
uuagaaacacaacuauauu

SEQ ID NO: 2935537 - RNA, 15 nt, Human
uuagacagucccugc

SEQ ID NO: 2935538 - RNA, 17 nt, Human
uucccuugaugaagaag

SEQ ID NO: 2935539 - RNA, 13 nt, Human
uuccucauuagca

SEQ ID NO: 2935540 - RNA, 22 nt, Human
uucccuuugacgccaucccagc

SEQ ID NO: 2935541 - RNA, 21 nt, Human
uucccuuugacgccaucccag

SEQ ID NO: 2935542 - RNA, 20 nt, Human
uucccuuugacgccauccca

SEQ ID NO: 2935543 - RNA, 20 nt, Human
uuccuugaguugauucagcu

SEQ ID NO: 2935544 - RNA, 14 nt, Human
uuccuggcacugcu

SEQ ID NO: 2935545 - RNA, 17 nt, Human
uuccugccaggcauggu

SEQ ID NO: 2935546 - RNA, 15 nt, Human
uuccugaugcuucuu

SEQ ID NO: 2935547 - RNA, 19 nt, Human
uuccugaugcuucuucaga

SEQ ID NO: 2935548 - RNA, 18 nt, Human
uuccugaugcuucuucag

SEQ ID NO: 2935549 - RNA, 17 nt, Human
uucuaaagcugccagcc

SEQ ID NO: 2935550 - RNA, 13 nt, Human
uucuaaagcugcc

SEQ ID NO: 2935551 - RNA, 22 nt, Human
uucggccuccauccugaggcuc

SEQ ID NO: 2935552 - RNA, 20 nt, Human
uucgggaggucgaggcagga

SEQ ID NO: 2935553 - RNA, 17 nt, Human
uuccuuggacucauuuu

SEQ ID NO: 2935554 - RNA, 20 nt, Human
uuccuuggacucauuuuaaa

SEQ ID NO: 2935555 - RNA, 19 nt, Human
uuccagauccuggaaauca

SEQ ID NO: 2935556 - RNA, 15 nt, Human
uuccaaauucugcuu

SEQ ID NO: 2935557 - RNA, 21 nt, Human
uucaucuugaauuguaaggaa

SEQ ID NO: 2935558 - RNA, 17 nt, Human
uucaugaaagauucaau

SEQ ID NO: 2935559 - RNA, 15 nt, Human
uucaugaaagauuca

SEQ ID NO: 2935560 - RNA, 17 nt, Human
uucaucuugaauuguaa

SEQ ID NO: 2935561 - RNA, 13 nt, Human
uucaggaagcuca

SEQ ID NO: 2935562 - RNA, 11 nt, Human
uucaggaagcu

SEQ ID NO: 2935563 - RNA, 15 nt, Human
uucauuuccuguguc

SEQ ID NO: 2935564 - RNA, 16 nt, Human
uucauuuccugugucu

SEQ ID NO: 2935565 - RNA, 16 nt, Human
uuccccaggaggccag

SEQ ID NO: 2935566 - RNA, 15 nt, Human
uuccccaggaggcca

SEQ ID NO: 2935567 - RNA, 16 nt, Human
uucccauuugcuccuu

SEQ ID NO: 2935568 - RNA, 11 nt, Human
uucccucccuu

SEQ ID NO: 2935569 - RNA, 17 nt, Human
uucccucccuuccucuu

SEQ ID NO: 2935570 - RNA, 20 nt, Human
uucccucccuuccucuuucc

SEQ ID NO: 2935571 - RNA, 21 nt, Human
uuccccaggaggccagccuug

SEQ ID NO: 2935572 - RNA, 20 nt, Human
uuccccaggaggccagccuu

SEQ ID NO: 2935573 - RNA, 19 nt, Human
uuccccaggaggccagccu

SEQ ID NO: 2935574 - RNA, 18 nt, Human
uuccccaggaggccagcc

SEQ ID NO: 2935575 - RNA, 17 nt, Human
uuccccaggaggccagc

SEQ ID NO: 2935576 - RNA, 15 nt, Human
uuauuuuacuuuuug

SEQ ID NO: 2935577 - RNA, 13 nt, Human
uuauuuuacuuuu

SEQ ID NO: 2935578 - RNA, 17 nt, Human
uuauuuuaauucaguug

SEQ ID NO: 2935579 - RNA, 15 nt, Human
uuauuuuaauaaugu

SEQ ID NO: 2935580 - RNA, 16 nt, Human
uuauuuuaauaauguu

SEQ ID NO: 2935581 - RNA, 17 nt, Human
uuauugucaaaguggug

SEQ ID NO: 2935582 - RNA, 15 nt, Human
uuauugucuagugaa

SEQ ID NO: 2935583 - RNA, 18 nt, Human
uuauugucaaagugguga

SEQ ID NO: 2935584 - RNA, 17 nt, Human
uucaauuuuaaacauau

SEQ ID NO: 2935585 - RNA, 20 nt, Human
uucaauaggaaaaacugauu

SEQ ID NO: 2935586 - RNA, 18 nt, Human
uucaauaggaaaaacuga

SEQ ID NO: 2935587 - RNA, 15 nt, Human
uucaauaggaaaaac

SEQ ID NO: 2935588 - RNA, 13 nt, Human
uucaauaggaaaa

SEQ ID NO: 2935589 - RNA, 18 nt, Human
uucacggaagagccuugc

SEQ ID NO: 2935590 - RNA, 15 nt, Human
uucacgugguccuaa

SEQ ID NO: 2935591 - RNA, 13 nt, Human
uucacucuccuug

SEQ ID NO: 2935592 - RNA, 20 nt, Human
uucagacauagaauuaacac

SEQ ID NO: 2935593 - RNA, 19 nt, Human
uucagagacuccugcaggc

SEQ ID NO: 2935594 - RNA, 16 nt, Human
uucagacauagaauua

SEQ ID NO: 2935595 - RNA, 21 nt, Human
uucagacagcugccugggauc

SEQ ID NO: 2935596 - RNA, 13 nt, Human
uucagagcugccc

SEQ ID NO: 2935597 - RNA, 14 nt, Human
uuaguuccuugagu

SEQ ID NO: 2935598 - RNA, 16 nt, Human
uuaguuccucauuagc

SEQ ID NO: 2935599 - RNA, 14 nt, Human
uuaucuagauacug

SEQ ID NO: 2935600 - RNA, 16 nt, Human
uuaucuagauacugua

SEQ ID NO: 2935601 - RNA, 17 nt, Human
uuaucuagauacuguau

SEQ ID NO: 2935602 - RNA, 16 nt, Human
uuaugcaugaaguaau

SEQ ID NO: 2935603 - RNA, 22 nt, Human
uuaugcaugaaguaauaugcac

SEQ ID NO: 2935604 - RNA, 21 nt, Human
uuauggcacuaguauuucuau

SEQ ID NO: 2935605 - RNA, 16 nt, Human
uuauggaacacucuga

SEQ ID NO: 2935606 - RNA, 15 nt, Human
uuauugauguuuuca

SEQ ID NO: 2935607 - RNA, 15 nt, Human
uuauugcccacgcug

SEQ ID NO: 2935608 - RNA, 13 nt, Human
uuauugaagcaga

SEQ ID NO: 2935609 - RNA, 15 nt, Human
uuauugaagcagagu

SEQ ID NO: 2935610 - RNA, 16 nt, Human
uuauugaagcagagug

SEQ ID NO: 2935611 - RNA, 17 nt, Human
uuauugaagcagagugg

SEQ ID NO: 2935612 - RNA, 12 nt, Human
uuauugaagcag

SEQ ID NO: 2935613 - RNA, 11 nt, Human
uuauucugcuc

SEQ ID NO: 2935614 - RNA, 17 nt, Human
uuauggcuauaggugcu

SEQ ID NO: 2935615 - RNA, 16 nt, Human
uuauuacuguaagaaa

SEQ ID NO: 2935616 - RNA, 17 nt, Human
uuauuacuguaagaaaa

SEQ ID NO: 2935617 - RNA, 18 nt, Human
uuauuacuguaagaaaau

SEQ ID NO: 2935618 - RNA, 19 nt, Human
uuuacaguguuucuggcuu

SEQ ID NO: 2935619 - RNA, 17 nt, Human
uuuacaguguuucuggc

SEQ ID NO: 2935620 - RNA, 16 nt, Human
uuuaauaugcaaaguc

SEQ ID NO: 2935621 - RNA, 12 nt, Human
uuuaauaugcaa

SEQ ID NO: 2935622 - RNA, 13 nt, Human
uuuacagagacag

SEQ ID NO: 2935623 - RNA, 14 nt, Human
uuuaacagaaaugu

SEQ ID NO: 2935624 - RNA, 15 nt, Human
uuuaacagaaaugua

SEQ ID NO: 2935625 - RNA, 14 nt, Human
uuuaaccucuaaau

SEQ ID NO: 2935626 - RNA, 19 nt, Human
uuuaauaauguuucaaaca

SEQ ID NO: 2935627 - RNA, 13 nt, Human
uuuaauaaaccau

SEQ ID NO: 2935628 - RNA, 14 nt, Human
uuuaauaauguuuc

SEQ ID NO: 2935629 - RNA, 15 nt, Human
uuuaauaauguuuca

SEQ ID NO: 2935630 - RNA, 23 nt, Human
uuuauccuagucauucuucccua

SEQ ID NO: 2935631 - RNA, 15 nt, Human
uuuaucuguucauau

SEQ ID NO: 2935632 - RNA, 16 nt, Human
uuuaucuguucauaug

SEQ ID NO: 2935633 - RNA, 22 nt, Human
uuuaugagaaacuggcaaagca

SEQ ID NO: 2935634 - RNA, 22 nt, Human
uuuauccuagucauucuucccu

SEQ ID NO: 2935635 - RNA, 12 nt, Human
uuuauacauaaa

SEQ ID NO: 2935636 - RNA, 20 nt, Human
uuuauacauaaacaagacca

SEQ ID NO: 2935637 - RNA, 19 nt, Human
uuuagacccuauugcugcu

SEQ ID NO: 2935638 - RNA, 22 nt, Human
uuuagacccuauugcugcuuga

SEQ ID NO: 2935639 - RNA, 18 nt, Human
uuuauaaacuuuaccuuu

SEQ ID NO: 2935640 - RNA, 20 nt, Human
uuguuuggggaugagaaagg

SEQ ID NO: 2935641 - RNA, 24 nt, Human
uugucuuuggacccugaggcccag

SEQ ID NO: 2935642 - RNA, 20 nt, Human
uugucuuuggacccugaggc

SEQ ID NO: 2935643 - RNA, 15 nt, Human
uugucuuuggacccu

SEQ ID NO: 2935644 - RNA, 23 nt, Human
uuguuuaaugguaguuuuacagu

SEQ ID NO: 2935645 - RNA, 12 nt, Human
uuguuuaauggu

SEQ ID NO: 2935646 - RNA, 15 nt, Human
uuguuauuuauugaa

SEQ ID NO: 2935647 - RNA, 20 nt, Human
uuguuauuuauugaaaugau

SEQ ID NO: 2935648 - RNA, 17 nt, Human
uuguuuaaaaucauuuc

SEQ ID NO: 2935649 - RNA, 18 nt, Human
uuguuuaaaaucauuucu

SEQ ID NO: 2935650 - RNA, 13 nt, Human
uuuaaacauaucc

SEQ ID NO: 2935651 - RNA, 22 nt, Human
uuuaaacauauccaaguuugaa

SEQ ID NO: 2935652 - RNA, 14 nt, Human
uuuaaacacauuaa

SEQ ID NO: 2935653 - RNA, 15 nt, Human
uuuaaacacauuaaa

SEQ ID NO: 2935654 - RNA, 12 nt, Human
uuuaaacauauc

SEQ ID NO: 2935655 - RNA, 15 nt, Human
uuuaaacuacauuag

SEQ ID NO: 2935656 - RNA, 13 nt, Human
uuuaacagaaaug

SEQ ID NO: 2935657 - RNA, 16 nt, Human
uuuaaacaaaauagaa

SEQ ID NO: 2935658 - RNA, 13 nt, Human
uuuaaacaaaaua

SEQ ID NO: 2935659 - RNA, 12 nt, Human
uuuaaaaugucu

SEQ ID NO: 2935660 - RNA, 15 nt, Human
uuuaaaagcauuuuu

SEQ ID NO: 2935661 - RNA, 14 nt, Human
uuuaaaagcauuuu

SEQ ID NO: 2935662 - RNA, 13 nt, Human
uuuaaaagauaca

SEQ ID NO: 2935663 - RNA, 17 nt, Human
uuuaaaagaaugauuau

SEQ ID NO: 2935664 - RNA, 14 nt, Human
uuuaaaagaaugau

SEQ ID NO: 2935665 - RNA, 16 nt, Human
uuuaaaaucauuucug

SEQ ID NO: 2935666 - RNA, 16 nt, Human
uuuaaaauaagucuga

SEQ ID NO: 2935667 - RNA, 19 nt, Human
uuuaaaauacacacucaaa

SEQ ID NO: 2935668 - RNA, 19 nt, Human
uuucuuguguguuuauugu

SEQ ID NO: 2935669 - RNA, 18 nt, Human
uuugaagcacagugauca

SEQ ID NO: 2935670 - RNA, 21 nt, Human
uuugaaauuguauuacaaauc

SEQ ID NO: 2935671 - RNA, 17 nt, Human
uuugagaucagccuggg

SEQ ID NO: 2935672 - RNA, 16 nt, Human
uuugagaucagccugg

SEQ ID NO: 2935673 - RNA, 21 nt, Human
uuugaagguagaauguuuuca

SEQ ID NO: 2935674 - RNA, 18 nt, Human
uuugauauggguaguauu

SEQ ID NO: 2935675 - RNA, 14 nt, Human
uuugauaugugaac

SEQ ID NO: 2935676 - RNA, 15 nt, Human
uuugauaugugaaca

SEQ ID NO: 2935677 - RNA, 17 nt, Human
uuugauaugugaacagu

SEQ ID NO: 2935678 - RNA, 20 nt, Human
uuugccaauuugcacauuaa

SEQ ID NO: 2935679 - RNA, 15 nt, Human
uuugccaauuugcac

SEQ ID NO: 2935680 - RNA, 16 nt, Human
uuugcuugaaagaaaa

SEQ ID NO: 2935681 - RNA, 14 nt, Human
uuugcuugaaagaa

SEQ ID NO: 2935682 - RNA, 23 nt, Human
uuugcuuuauggguuuggcuugu

SEQ ID NO: 2935683 - RNA, 19 nt, Human
uuuggacccugaggcccag

SEQ ID NO: 2935684 - RNA, 15 nt, Human
uuuggacccugaggc

SEQ ID NO: 2935685 - RNA, 22 nt, Human
uuugguugguaacucuguaauu

SEQ ID NO: 2935686 - RNA, 14 nt, Human
uuugguuauuuuac

SEQ ID NO: 2935687 - RNA, 17 nt, Human
uuuggguuuauuuggaa

SEQ ID NO: 2935688 - RNA, 18 nt, Human
uuugguaaggggaauuga

SEQ ID NO: 2935689 - RNA, 22 nt, Human
uuucacaguguguggucaacau

SEQ ID NO: 2935690 - RNA, 16 nt, Human
uuucacacaaacaagg

SEQ ID NO: 2935691 - RNA, 17 nt, Human
uuucagccaagaauucu

SEQ ID NO: 2935692 - RNA, 16 nt, Human
uuucagccaagaauuc

SEQ ID NO: 2935693 - RNA, 19 nt, Human
uuucuaaaucuccaaaaua

SEQ ID NO: 2935694 - RNA, 23 nt, Human
uuuccuggcacugcuuccaguga

SEQ ID NO: 2935695 - RNA, 19 nt, Human
uuuccuggcacugcuucca

SEQ ID NO: 2935696 - RNA, 14 nt, Human
uuucugaaauaaca

SEQ ID NO: 2935697 - RNA, 12 nt, Human
uuucugaaauuu

SEQ ID NO: 2935698 - RNA, 22 nt, Human
uuucuacccagcgagcccuggu

SEQ ID NO: 2935699 - RNA, 15 nt, Human
uuucuacccagcgag

SEQ ID NO: 2935700 - RNA, 18 nt, Human
uuucuacccagcgagccc

SEQ ID NO: 2935701 - RNA, 12 nt, Human
uuucucuaggaa

SEQ ID NO: 2935702 - RNA, 20 nt, Human
uucuggcagaguugaagaca

SEQ ID NO: 2935703 - RNA, 24 nt, Human
uucuaaguaaaaccacagcaguug

SEQ ID NO: 2935704 - RNA, 13 nt, Human
uucuuguauuuau

SEQ ID NO: 2935705 - RNA, 13 nt, Human
uucuucagagacu

SEQ ID NO: 2935706 - RNA, 19 nt, Human
uucuuaggguuaugauuaa

SEQ ID NO: 2935707 - RNA, 17 nt, Human
uucuuagggaaggauac

SEQ ID NO: 2935708 - RNA, 14 nt, Human
uugaagcagagugg

SEQ ID NO: 2935709 - RNA, 12 nt, Human
uugaagcagagu

SEQ ID NO: 2935710 - RNA, 20 nt, Human
uugaagcacagugaucaagu

SEQ ID NO: 2935711 - RNA, 21 nt, Human
uugaagagguuuuaaagcuuc

SEQ ID NO: 2935712 - RNA, 13 nt, Human
uugaagauucuau

SEQ ID NO: 2935713 - RNA, 23 nt, Human
uugaagauucuauguuaauauuu

SEQ ID NO: 2935714 - RNA, 22 nt, Human
uugaagauucuauguuaauauu

SEQ ID NO: 2935715 - RNA, 16 nt, Human
uugaagagguuuuaaa

SEQ ID NO: 2935716 - RNA, 17 nt, Human
uugaacuuugaccucug

SEQ ID NO: 2935717 - RNA, 18 nt, Human
uugaacuuugaccucugc

SEQ ID NO: 2935718 - RNA, 16 nt, Human
uugaaugaugccauga

SEQ ID NO: 2935719 - RNA, 12 nt, Human
uugaaugaugcc

SEQ ID NO: 2935720 - RNA, 15 nt, Human
uugaaacacugguuu

SEQ ID NO: 2935721 - RNA, 15 nt, Human
uugaacuuugaccuc

SEQ ID NO: 2935722 - RNA, 18 nt, Human
uucuuuccacagaagcuc

SEQ ID NO: 2935723 - RNA, 21 nt, Human
uucuuuccugaggcugggcuc

SEQ ID NO: 2935724 - RNA, 21 nt, Human
uugaaaaucuuauaauuuaaa

SEQ ID NO: 2935725 - RNA, 19 nt, Human
uugagccuugaacuuugac

SEQ ID NO: 2935726 - RNA, 22 nt, Human
uugaauuccuaaaauuauggaa

SEQ ID NO: 2935727 - RNA, 15 nt, Human
uugagccuugaacuu

SEQ ID NO: 2935728 - RNA, 16 nt, Human
uugagccuugaacuuu

SEQ ID NO: 2935729 - RNA, 14 nt, Human
uugagccuugaacu

SEQ ID NO: 2935730 - RNA, 14 nt, Human
uugagccugggagg

SEQ ID NO: 2935731 - RNA, 21 nt, Human
uugauucagacagcugccugg

SEQ ID NO: 2935732 - RNA, 17 nt, Human
uugauucagacagcugc

SEQ ID NO: 2935733 - RNA, 23 nt, Human
uugauucagacagcugccuggga

SEQ ID NO: 2935734 - RNA, 16 nt, Human
uugauucagcucugca

SEQ ID NO: 2935735 - RNA, 16 nt, Human
uugauaugugaacagu

SEQ ID NO: 2935736 - RNA, 16 nt, Human
uugauaugcuuauaca

SEQ ID NO: 2935737 - RNA, 20 nt, Human
uugauaugccuuuucccaac

SEQ ID NO: 2935738 - RNA, 17 nt, Human
uugauucauaaugacuu

SEQ ID NO: 2935739 - RNA, 13 nt, Human
uugauucauaaug

SEQ ID NO: 2935740 - RNA, 23 nt, Human
uugcagacaggcaagcaccuccu

SEQ ID NO: 2935741 - RNA, 23 nt, Human
uugcagcucuccccuucucugua

SEQ ID NO: 2935742 - RNA, 13 nt, Human
uugccaucccucc

SEQ ID NO: 2935743 - RNA, 16 nt, Human
uugccauguuggccag

SEQ ID NO: 2935744 - RNA, 17 nt, Human
uugccauguuggccagg

SEQ ID NO: 2935745 - RNA, 18 nt, Human
uugccauguuggccaggc

SEQ ID NO: 2935746 - RNA, 19 nt, Human
uugccauguuggccaggcu

SEQ ID NO: 2935747 - RNA, 22 nt, Human
uugccaucccucccuccaccuc

SEQ ID NO: 2935748 - RNA, 23 nt, Human
uugccaucccucccuccaccucc

SEQ ID NO: 2935749 - RNA, 14 nt, Human
uugccaucccuccc

SEQ ID NO: 2935750 - RNA, 16 nt, Human
uugccaucccucccuc

SEQ ID NO: 2935751 - RNA, 17 nt, Human
uugccaucccucccucc

SEQ ID NO: 2935752 - RNA, 18 nt, Human
uugccaucccucccucca

SEQ ID NO: 2935753 - RNA, 18 nt, Human
uugguaacucuguaauuc

SEQ ID NO: 2935754 - RNA, 20 nt, Human
uugggcacaucauuucaaga

SEQ ID NO: 2935755 - RNA, 20 nt, Human
uugguaaggggaauugagga

SEQ ID NO: 2935756 - RNA, 13 nt, Human
uugguccugcugc

SEQ ID NO: 2935757 - RNA, 20 nt, Human
uuggucugacccacugcuuu

SEQ ID NO: 2935758 - RNA, 12 nt, Human
uuguaaaauggu

SEQ ID NO: 2935759 - RNA, 13 nt, Human
uuguaaaauggug

SEQ ID NO: 2935760 - RNA, 23 nt, Human
uuggcuucacggaagagccuugc

SEQ ID NO: 2935761 - RNA, 20 nt, Human
uuguauuuuacuaauaaaau

SEQ ID NO: 2935762 - RNA, 14 nt, Human
uugucuaugggacu

SEQ ID NO: 2935763 - RNA, 22 nt, Human
uugucaaaguggugagaggcau

SEQ ID NO: 2935764 - RNA, 22 nt, Human
uugucuuaaaaaguggaaaaau

SEQ ID NO: 2935765 - RNA, 20 nt, Human
uugucuaugggacucaaugc

SEQ ID NO: 2935766 - RNA, 15 nt, Human
uuguagcauccugga

SEQ ID NO: 2935767 - RNA, 22 nt, Human
uuguagaagucacauuccugaa

SEQ ID NO: 2935768 - RNA, 17 nt, Human
uuguagaagucacauuc

SEQ ID NO: 2935769 - RNA, 20 nt, Human
uuguaccacuuuugcaaaua

SEQ ID NO: 2935770 - RNA, 16 nt, Human
uuguaccgcaauguga

SEQ ID NO: 2935771 - RNA, 20 nt, Human
uuguaaaauggugugaccac

SEQ ID NO: 2935772 - RNA, 17 nt, Human
uugccuuuuuauaacuu

SEQ ID NO: 2935773 - RNA, 18 nt, Human
uugccuuggcugcaguuu

SEQ ID NO: 2935774 - RNA, 20 nt, Human
uugccauguuggccaggcug

SEQ ID NO: 2935775 - RNA, 21 nt, Human
uugccauguuggccaggcugg

SEQ ID NO: 2935776 - RNA, 16 nt, Human
uugcugcuuguacacu

SEQ ID NO: 2935777 - RNA, 16 nt, Human
uugcugucccuuuucc

SEQ ID NO: 2935778 - RNA, 18 nt, Human
uugcugucccuuuuccuu

SEQ ID NO: 2935779 - RNA, 21 nt, Human
uugcugcugauuuaaacacau

SEQ ID NO: 2935780 - RNA, 17 nt, Human
uugcugcugauuuaaac

SEQ ID NO: 2935781 - RNA, 19 nt, Human
uugcugcugauuuaaacac

SEQ ID NO: 2935782 - RNA, 16 nt, Human
uugcugcuugaggcaa

SEQ ID NO: 2935783 - RNA, 14 nt, Human
uugcugcuugaggc

SEQ ID NO: 2935784 - RNA, 23 nt, Human
uugcuaacagcaacacaaagcuu

SEQ ID NO: 2935785 - RNA, 16 nt, Human
uugcuaagcauuccaa

SEQ ID NO: 2935786 - RNA, 18 nt, Human
uugcuaagcauuccaacu

SEQ ID NO: 2935787 - RNA, 15 nt, Human
uuggacauuuuaugu

SEQ ID NO: 2935788 - RNA, 15 nt, Human
uuggauuguccccga

SEQ ID NO: 2935789 - RNA, 21 nt, Human
uuggacccugaggcccagagg

SEQ ID NO: 2935790 - RNA, 19 nt, Human
uuggacccugaggcccaga

SEQ ID NO: 2935791 - RNA, 18 nt, Human
uuggacccugaggcccag

SEQ ID NO: 2935792 - RNA, 15 nt, Human
uuggacccugaggcc

SEQ ID NO: 2935793 - RNA, 18 nt, Human
uuggacaaaauggaauac

SEQ ID NO: 2935794 - RNA, 19 nt, Human
uuggaagcuccgcuuucua

SEQ ID NO: 2935795 - RNA, 17 nt, Human
uuuguguacuuuuaaga

SEQ ID NO: 2935796 - RNA, 13 nt, Human
uuuguguacuuuu

SEQ ID NO: 2935797 - RNA, 14 nt, Human
uuuguguacuuuua

SEQ ID NO: 2935798 - RNA, 14 nt, Human
cucguuaauuugua

SEQ ID NO: 2935799 - RNA, 15 nt, Human
cucgaacuggcugca

SEQ ID NO: 2935800 - RNA, 13 nt, Human
cucgaacuggcug

SEQ ID NO: 2935801 - RNA, 14 nt, Human
cucgaacuggcugc

SEQ ID NO: 2935802 - RNA, 12 nt, Human
cuccuaaaacaa

SEQ ID NO: 2935803 - RNA, 20 nt, Human
cuccuaaaacaacagaugua

SEQ ID NO: 2935804 - RNA, 13 nt, Human
cuccuaaaacaac

SEQ ID NO: 2935805 - RNA, 16 nt, Human
cuccucugcugcuggc

SEQ ID NO: 2935806 - RNA, 12 nt, Human
cuccucugcuug

SEQ ID NO: 2935807 - RNA, 14 nt, Human
cuccucugcuugcc

SEQ ID NO: 2935808 - RNA, 18 nt, Human
cuccucugcugcuggcug

SEQ ID NO: 2935809 - RNA, 12 nt, Human
cuccugggcagc

SEQ ID NO: 2935810 - RNA, 18 nt, Human
cuccuggcccacugcauc

SEQ ID NO: 2935811 - RNA, 16 nt, Human
cuccuggcccacugca

SEQ ID NO: 2935812 - RNA, 22 nt, Human
cuccugggcagcugccuccccu

SEQ ID NO: 2935813 - RNA, 23 nt, Human
cuccugggauuggcugugaacug

SEQ ID NO: 2935814 - RNA, 18 nt, Human
cuccugggauuggcugug

SEQ ID NO: 2935815 - RNA, 18 nt, Human
cuccugggcagcugccuc

SEQ ID NO: 2935816 - RNA, 19 nt, Human
cuccugggcagcugccucc

SEQ ID NO: 2935817 - RNA, 14 nt, Human
cuccugggcagcug

SEQ ID NO: 2935818 - RNA, 15 nt, Human
cuccugggcagcugc

SEQ ID NO: 2935819 - RNA, 16 nt, Human
cuccugggcagcugcc

SEQ ID NO: 2935820 - RNA, 17 nt, Human
cuccugggcagcugccu

SEQ ID NO: 2935821 - RNA, 21 nt, Human
cuccucugcuugccaucccuc

SEQ ID NO: 2935822 - RNA, 15 nt, Human
cuccucugcuugcca

SEQ ID NO: 2935823 - RNA, 16 nt, Human
cuccucugcuugccau

SEQ ID NO: 2935824 - RNA, 17 nt, Human
cuccucugcuugccauc

SEQ ID NO: 2935825 - RNA, 20 nt, Human
cuccucugcuugccaucccu

SEQ ID NO: 2935826 - RNA, 22 nt, Human
cucccccagccccauccucugu

SEQ ID NO: 2935827 - RNA, 20 nt, Human
cucccccagccccauccucu

SEQ ID NO: 2935828 - RNA, 15 nt, Human
cucccccagccccau

SEQ ID NO: 2935829 - RNA, 13 nt, Human
cuccaagaauuuc

SEQ ID NO: 2935830 - RNA, 14 nt, Human
cuccaagaauuucu

SEQ ID NO: 2935831 - RNA, 21 nt, Human
cuccaagaccuucuccuucac

SEQ ID NO: 2935832 - RNA, 22 nt, Human
cuccaagaccuucuccuucacc

SEQ ID NO: 2935833 - RNA, 24 nt, Human
cuccaagcaggacauggacaagga

SEQ ID NO: 2935834 - RNA, 22 nt, Human
cuccaagcaggacauggacaag

SEQ ID NO: 2935835 - RNA, 14 nt, Human
cuccaagcaggaca

SEQ ID NO: 2935836 - RNA, 13 nt, Human
cuccaagcaggac

SEQ ID NO: 2935837 - RNA, 16 nt, Human
cuccaagcucccaggc

SEQ ID NO: 2935838 - RNA, 15 nt, Human
cuccaagcucccagg

SEQ ID NO: 2935839 - RNA, 14 nt, Human
cuccaagcucccag

SEQ ID NO: 2935840 - RNA, 13 nt, Human
cuccaagcuccca

SEQ ID NO: 2935841 - RNA, 13 nt, Human
cuccacuuggucu

SEQ ID NO: 2935842 - RNA, 15 nt, Human
cuccacuuggucugu

SEQ ID NO: 2935843 - RNA, 16 nt, Human
cuccacuuggucugug

SEQ ID NO: 2935844 - RNA, 17 nt, Human
cuccacuuggucuguga

SEQ ID NO: 2935845 - RNA, 21 nt, Human
cuccacuuggucugugagaug

SEQ ID NO: 2935846 - RNA, 22 nt, Human
cuccacuuggucugugagaugc

SEQ ID NO: 2935847 - RNA, 15 nt, Human
cucccaccuggcucu

SEQ ID NO: 2935848 - RNA, 22 nt, Human
cucccaccuggcucuguggcga

SEQ ID NO: 2935849 - RNA, 13 nt, Human
cucccaccuggcu

SEQ ID NO: 2935850 - RNA, 14 nt, Human
cucccaccuggcuc

SEQ ID NO: 2935851 - RNA, 19 nt, Human
cuccccaugauguuuagaa

SEQ ID NO: 2935852 - RNA, 23 nt, Human
cuccacuuggucugugagaugcu

SEQ ID NO: 2935853 - RNA, 19 nt, Human
cuccacuuucuagccagag

SEQ ID NO: 2935854 - RNA, 16 nt, Human
cuccacuuucuagcca

SEQ ID NO: 2935855 - RNA, 18 nt, Human
cucuugagccuugaacuu

SEQ ID NO: 2935856 - RNA, 16 nt, Human
cucuugagccuugaac

SEQ ID NO: 2935857 - RNA, 17 nt, Human
cucuugagccuugaacu

SEQ ID NO: 2935858 - RNA, 23 nt, Human
cugacaacacucauugaccugag

SEQ ID NO: 2935859 - RNA, 22 nt, Human
cugacaacacucauugaccuga

SEQ ID NO: 2935860 - RNA, 21 nt, Human
cugaaggccccgcccaggcuu

SEQ ID NO: 2935861 - RNA, 19 nt, Human
cugaaggccccgcccaggc

SEQ ID NO: 2935862 - RNA, 18 nt, Human
cugaaggccccgcccagg

SEQ ID NO: 2935863 - RNA, 23 nt, Human
cugaaggacauugcggacagcca

SEQ ID NO: 2935864 - RNA, 15 nt, Human
cugaaacaacaaaua

SEQ ID NO: 2935865 - RNA, 13 nt, Human
cucugcugacaga

SEQ ID NO: 2935866 - RNA, 14 nt, Human
cucugcugacagac

SEQ ID NO: 2935867 - RNA, 16 nt, Human
cucugcugacagacac

SEQ ID NO: 2935868 - RNA, 14 nt, Human
cucugguccauaga

SEQ ID NO: 2935869 - RNA, 13 nt, Human
cucugcuccucuc

SEQ ID NO: 2935870 - RNA, 18 nt, Human
cucugcuccucuccccag

SEQ ID NO: 2935871 - RNA, 18 nt, Human
cucugcacuccccugcug

SEQ ID NO: 2935872 - RNA, 20 nt, Human
cucugcacuccccugcuggg

SEQ ID NO: 2935873 - RNA, 21 nt, Human
cucugcacuccccugcugggu

SEQ ID NO: 2935874 - RNA, 16 nt, Human
cucuccccuucucugu

SEQ ID NO: 2935875 - RNA, 14 nt, Human
cucuucaaucucuu

SEQ ID NO: 2935876 - RNA, 18 nt, Human
cucuucagaucucuaacu

SEQ ID NO: 2935877 - RNA, 19 nt, Human
cucuucagaucucuaacuu

SEQ ID NO: 2935878 - RNA, 14 nt, Human
cucuuauugcccac

SEQ ID NO: 2935879 - RNA, 15 nt, Human
cucuuauugcccacg

SEQ ID NO: 2935880 - RNA, 19 nt, Human
cucuuauugcccacgcugg

SEQ ID NO: 2935881 - RNA, 20 nt, Human
cucuuauugcccacgcugga

SEQ ID NO: 2935882 - RNA, 13 nt, Human
cucuuauugccca

SEQ ID NO: 2935883 - RNA, 22 nt, Human
cucuuagaugcaguucugaaga

SEQ ID NO: 2935884 - RNA, 21 nt, Human
cucuuagaugcaguucugaag

SEQ ID NO: 2935885 - RNA, 21 nt, Human
cugagauccuggacugagggg

SEQ ID NO: 2935886 - RNA, 13 nt, Human
cugagauccugga

SEQ ID NO: 2935887 - RNA, 15 nt, Human
cugagauccuggacu

SEQ ID NO: 2935888 - RNA, 17 nt, Human
cugagauccuggacuga

SEQ ID NO: 2935889 - RNA, 21 nt, Human
cugagaucaaaacgguuuuac

SEQ ID NO: 2935890 - RNA, 15 nt, Human
cugagcuuucugcua

SEQ ID NO: 2935891 - RNA, 14 nt, Human
cugagcuuucugcu

SEQ ID NO: 2935892 - RNA, 23 nt, Human
cugaggacacuaaccacgcugga

SEQ ID NO: 2935893 - RNA, 21 nt, Human
cugaggaauccagacccggcu

SEQ ID NO: 2935894 - RNA, 20 nt, Human
cugaggacacuaaccacgcu

SEQ ID NO: 2935895 - RNA, 17 nt, Human
cugaggaauccagaccc

SEQ ID NO: 2935896 - RNA, 20 nt, Human
cugaggaauccagacccggc

SEQ ID NO: 2935897 - RNA, 14 nt, Human
cugaggaauccaga

SEQ ID NO: 2935898 - RNA, 21 nt, Human
cugaguacguugugcauuugg

SEQ ID NO: 2935899 - RNA, 18 nt, Human
cugaguacguugugcauu

SEQ ID NO: 2935900 - RNA, 17 nt, Human
cugaguacguugugcau

SEQ ID NO: 2935901 - RNA, 19 nt, Human
cugaguacguugugcauuu

SEQ ID NO: 2935902 - RNA, 20 nt, Human
cugaguacguugugcauuug

SEQ ID NO: 2935903 - RNA, 21 nt, Human
cugagaggacuuuucuuugug

SEQ ID NO: 2935904 - RNA, 22 nt, Human
cugagaggacuuuucuuugugg

SEQ ID NO: 2935905 - RNA, 17 nt, Human
cugagaguagagucacu

SEQ ID NO: 2935906 - RNA, 22 nt, Human
cugagacucgcgacaaugcaaa

SEQ ID NO: 2935907 - RNA, 22 nt, Human
cugacccaugcugcccugugag

SEQ ID NO: 2935908 - RNA, 21 nt, Human
cugacccaugcugcccuguga

SEQ ID NO: 2935909 - RNA, 20 nt, Human
cugagacucgcgacaaugca

SEQ ID NO: 2935910 - RNA, 21 nt, Human
cugagacucgcgacaaugcaa

SEQ ID NO: 2935911 - RNA, 23 nt, Human
cugagacagcccgggcucugccu

SEQ ID NO: 2935912 - RNA, 16 nt, Human
cggagucccaccuugg

SEQ ID NO: 2935913 - RNA, 12 nt, Human
cgggccacagag

SEQ ID NO: 2935914 - RNA, 14 nt, Human
cgggccacagagaa

SEQ ID NO: 2935915 - RNA, 13 nt, Human
cggcuccaggcuc

SEQ ID NO: 2935916 - RNA, 14 nt, Human
cggcuccaggcucc

SEQ ID NO: 2935917 - RNA, 15 nt, Human
cggcuccaggcuccu

SEQ ID NO: 2935918 - RNA, 16 nt, Human
cggcuccaggcuccuu

SEQ ID NO: 2935919 - RNA, 12 nt, Human
cggcuccaggcu

SEQ ID NO: 2935920 - RNA, 16 nt, Human
cggcucacugcagccu

SEQ ID NO: 2935921 - RNA, 18 nt, Human
cggagucccaccuuggcu

SEQ ID NO: 2935922 - RNA, 20 nt, Human
cggagucccaccuuggcugc

SEQ ID NO: 2935923 - RNA, 15 nt, Human
cggcucacugcagcc

SEQ ID NO: 2935924 - RNA, 14 nt, Human
cggcucacugcagc

SEQ ID NO: 2935925 - RNA, 15 nt, Human
cggggacagcuccuu

SEQ ID NO: 2935926 - RNA, 13 nt, Human
cgguguggagaag

SEQ ID NO: 2935927 - RNA, 18 nt, Human
cgguguuauuccaaggga

SEQ ID NO: 2935928 - RNA, 18 nt, Human
cgguguggagaagcggcu

SEQ ID NO: 2935929 - RNA, 14 nt, Human
cggggacagcuccu

SEQ ID NO: 2935930 - RNA, 17 nt, Human
cgggcucugccucccau

SEQ ID NO: 2935931 - RNA, 13 nt, Human
cgggcucugccuc

SEQ ID NO: 2935932 - RNA, 15 nt, Human
cgggcucagcaaaag

SEQ ID NO: 2935933 - RNA, 16 nt, Human
cgggcucugccuccca

SEQ ID NO: 2935934 - RNA, 14 nt, Human
cgggcucugccucc

SEQ ID NO: 2935935 - RNA, 11 nt, Human
cgggcucagca

SEQ ID NO: 2935936 - RNA, 16 nt, Human
cgguuuuacugcagcu

SEQ ID NO: 2935937 - RNA, 16 nt, Human
cgugaggccagagaca

SEQ ID NO: 2935938 - RNA, 17 nt, Human
cgugaguccuggcaugg

SEQ ID NO: 2935939 - RNA, 16 nt, Human
cgugaguccuggcaug

SEQ ID NO: 2935940 - RNA, 17 nt, Human
cgugaggccagagacac

SEQ ID NO: 2935941 - RNA, 20 nt, Human
cguguaaccauggacccaau

SEQ ID NO: 2935942 - RNA, 15 nt, Human
cguggugauuuagca

SEQ ID NO: 2935943 - RNA, 22 nt, Human
cguggugauuuagcaggaagcu

SEQ ID NO: 2935944 - RNA, 14 nt, Human
cgugguggcaggca

SEQ ID NO: 2935945 - RNA, 18 nt, Human
ccuuucaauaggaaaaac

SEQ ID NO: 2935946 - RNA, 21 nt, Human
ccuuucaauaggaaaaacuga

SEQ ID NO: 2935947 - RNA, 17 nt, Human
ccuuuugagugccuuac

SEQ ID NO: 2935948 - RNA, 15 nt, Human
ccuuuugagugccuu

SEQ ID NO: 2935949 - RNA, 16 nt, Human
ccuugccgucuaccug

SEQ ID NO: 2935950 - RNA, 14 nt, Human
ccuuuaagagaaau

SEQ ID NO: 2935951 - RNA, 17 nt, Human
cgacugcccggcagggu

SEQ ID NO: 2935952 - RNA, 20 nt, Human
cgacccuugccgucuaccug

SEQ ID NO: 2935953 - RNA, 19 nt, Human
cgacccuugccgucuaccu

SEQ ID NO: 2935954 - RNA, 13 nt, Human
cgacaaugcaaac

SEQ ID NO: 2935955 - RNA, 12 nt, Human
cgacaaugcaaa

SEQ ID NO: 2935956 - RNA, 12 nt, Human
ccuuuuuauaac

SEQ ID NO: 2935957 - RNA, 15 nt, Human
ccuuuuuauaacuuu

SEQ ID NO: 2935958 - RNA, 21 nt, Human
ccuuuuuauaacuuuuuauau

SEQ ID NO: 2935959 - RNA, 16 nt, Human
ccuuuuucaauaacug

SEQ ID NO: 2935960 - RNA, 21 nt, Human
ccuuuuuuagaguugauacua

SEQ ID NO: 2935961 - RNA, 14 nt, Human
cgccuacaggagug

SEQ ID NO: 2935962 - RNA, 16 nt, Human
cgaguagcugggacua

SEQ ID NO: 2935963 - RNA, 14 nt, Human
cgauagugguggug

SEQ ID NO: 2935964 - RNA, 18 nt, Human
cgcaggcccccaggugcc

SEQ ID NO: 2935965 - RNA, 22 nt, Human
cgcaggauucuuccucccuccc

SEQ ID NO: 2935966 - RNA, 23 nt, Human
cuagaauuugauaugugaacagu

SEQ ID NO: 2935967 - RNA, 21 nt, Human
cuagcauacguacacauuuua

SEQ ID NO: 2935968 - RNA, 23 nt, Human
cuagcauacguacacauuuuauu

SEQ ID NO: 2935969 - RNA, 22 nt, Human
cuagaagauuuugaaauuuuua

SEQ ID NO: 2935970 - RNA, 12 nt, Human
cuagaacucccu

SEQ ID NO: 2935971 - RNA, 13 nt, Human
cuagaacucccuu

SEQ ID NO: 2935972 - RNA, 11 nt, Human
cuaauaaaaag

SEQ ID NO: 2935973 - RNA, 23 nt, Human
cuaaguuuuuauggcuuuugugc

SEQ ID NO: 2935974 - RNA, 13 nt, Human
cuaauaaaaaggu

SEQ ID NO: 2935975 - RNA, 14 nt, Human
cuaauaaaaaggug

SEQ ID NO: 2935976 - RNA, 15 nt, Human
cuaauaaaaagguga

SEQ ID NO: 2935977 - RNA, 23 nt, Human
cuaagugauccucccaccucagc

SEQ ID NO: 2935978 - RNA, 23 nt, Human
cuaaguaaaaccacagcaguuga

SEQ ID NO: 2935979 - RNA, 22 nt, Human
cuaaguaaaaccacagcaguug

SEQ ID NO: 2935980 - RNA, 21 nt, Human
cuaagugguacuaacuuuccu

SEQ ID NO: 2935981 - RNA, 20 nt, Human
cuaaguuuuuauggcuuuug

SEQ ID NO: 2935982 - RNA, 20 nt, Human
cgugugugugcguccugucg

SEQ ID NO: 2935983 - RNA, 20 nt, Human
cuaaguaaaaccacagcagu

SEQ ID NO: 2935984 - RNA, 17 nt, Human
cuaccuuuguauucucu

SEQ ID NO: 2935985 - RNA, 20 nt, Human
cuacaugagguacugagagu

SEQ ID NO: 2935986 - RNA, 18 nt, Human
cuacaugagguacugaga

SEQ ID NO: 2935987 - RNA, 20 nt, Human
cuacaguccucccaucucac

SEQ ID NO: 2935988 - RNA, 21 nt, Human
cuacaguugaaaaacagcuga

SEQ ID NO: 2935989 - RNA, 19 nt, Human
cuacaguugaaaaacagcu

SEQ ID NO: 2935990 - RNA, 18 nt, Human
cuacauacuauggaauuu

SEQ ID NO: 2935991 - RNA, 22 nt, Human
cuacaguugaaaaacagcugag

SEQ ID NO: 2935992 - RNA, 15 nt, Human
cuacaaaaacacagc

SEQ ID NO: 2935993 - RNA, 18 nt, Human
cuacaaaaacacagcaag

SEQ ID NO: 2935994 - RNA, 19 nt, Human
cuacaguccucccaucuca

SEQ ID NO: 2935995 - RNA, 17 nt, Human
cuacaaaaacacagcaa

SEQ ID NO: 2935996 - RNA, 16 nt, Human
cuacaaaaacacagca

SEQ ID NO: 2935997 - RNA, 12 nt, Human
cuagccagagga

SEQ ID NO: 2935998 - RNA, 15 nt, Human
cuagccagaggagag

SEQ ID NO: 2935999 - RNA, 13 nt, Human
cuagccagaggag

SEQ ID NO: 2936000 - RNA, 23 nt, Human
cuaguuguuugauucagacagcu

SEQ ID NO: 2936001 - RNA, 22 nt, Human
cuaguuguuugauucagacagc

SEQ ID NO: 2936002 - RNA, 13 nt, Human
cuaguuugauuaa

SEQ ID NO: 2936003 - RNA, 21 nt, Human
cuaguuugauuaaauucuugc

SEQ ID NO: 2936004 - RNA, 22 nt, Human
cuaguuugauuaaauucuugca

SEQ ID NO: 2936005 - RNA, 15 nt, Human
cuaucucccccagcc

SEQ ID NO: 2936006 - RNA, 14 nt, Human
cuaucuaaauguug

SEQ ID NO: 2936007 - RNA, 12 nt, Human
cucaauugugaa

SEQ ID NO: 2936008 - RNA, 13 nt, Human
cucaauugugaaa

SEQ ID NO: 2936009 - RNA, 13 nt, Human
cucaaugcacuga

SEQ ID NO: 2936010 - RNA, 15 nt, Human
cucaaugcacugaca

SEQ ID NO: 2936011 - RNA, 17 nt, Human
cucaauaaacauuucau

SEQ ID NO: 2936012 - RNA, 21 nt, Human
cucaauaaacauuucauuucc

SEQ ID NO: 2936013 - RNA, 21 nt, Human
cucaaacuaacaggcuuagug

SEQ ID NO: 2936014 - RNA, 20 nt, Human
cucaaacucuugaccucagg

SEQ ID NO: 2936015 - RNA, 15 nt, Human
cuauuuuuguuuuua

SEQ ID NO: 2936016 - RNA, 21 nt, Human
cuauuuuuguuuuuauuaaaa

SEQ ID NO: 2936017 - RNA, 21 nt, Human
cuauuaaacaugcuguacaua

SEQ ID NO: 2936018 - RNA, 17 nt, Human
cuaucucccccagcccc

SEQ ID NO: 2936019 - RNA, 16 nt, Human
cuaucucccccagccc

SEQ ID NO: 2936020 - RNA, 17 nt, Human
cucaaaacugcacuguc

SEQ ID NO: 2936021 - RNA, 23 nt, Human
cucaaaauaccaugccauuuaaa

SEQ ID NO: 2936022 - RNA, 18 nt, Human
cucaaaagcugggcaggu

SEQ ID NO: 2936023 - RNA, 22 nt, Human
ccugucuaaugaaaccuguguc

SEQ ID NO: 2936024 - RNA, 22 nt, Human
ccugucggagcccugucuccuc

SEQ ID NO: 2936025 - RNA, 15 nt, Human
ccugucuaaugaaac

SEQ ID NO: 2936026 - RNA, 21 nt, Human
ccugguggcagugggagcugc

SEQ ID NO: 2936027 - RNA, 16 nt, Human
ccugucggagcccugu

SEQ ID NO: 2936028 - RNA, 21 nt, Human
ccugucggagcccugucuccu

SEQ ID NO: 2936029 - RNA, 17 nt, Human
ccugucggagcccuguc

SEQ ID NO: 2936030 - RNA, 15 nt, Human
ccuguaaucacagcu

SEQ ID NO: 2936031 - RNA, 22 nt, Human
ccuggccucugcacuccccugc

SEQ ID NO: 2936032 - RNA, 21 nt, Human
ccuggccucugcacuccccug

SEQ ID NO: 2936033 - RNA, 20 nt, Human
ccuggccucugcacuccccu

SEQ ID NO: 2936034 - RNA, 22 nt, Human
ccuggccuagcauacguacaca

SEQ ID NO: 2936035 - RNA, 16 nt, Human
ccuggccucugcacuc

SEQ ID NO: 2936036 - RNA, 13 nt, Human
ccugcccaggccc

SEQ ID NO: 2936037 - RNA, 13 nt, Human
ccugcccaccugg

SEQ ID NO: 2936038 - RNA, 20 nt, Human
ccugcccaccuggccucugc

SEQ ID NO: 2936039 - RNA, 14 nt, Human
ccugcccaccuggc

SEQ ID NO: 2936040 - RNA, 12 nt, Human
ccugcccaccug

SEQ ID NO: 2936041 - RNA, 20 nt, Human
ccugcugcaguugccaguca

SEQ ID NO: 2936042 - RNA, 21 nt, Human
ccugcugcaguugccagucac

SEQ ID NO: 2936043 - RNA, 13 nt, Human
ccugcugcuccua

SEQ ID NO: 2936044 - RNA, 15 nt, Human
ccugcugcuccuagg

SEQ ID NO: 2936045 - RNA, 16 nt, Human
ccugcugcuccuagga

SEQ ID NO: 2936046 - RNA, 17 nt, Human
ccugcugcuccuaggac

SEQ ID NO: 2936047 - RNA, 19 nt, Human
ccugccucgaacuggcugc

SEQ ID NO: 2936048 - RNA, 21 nt, Human
ccugccucgaacuggcugcaa

SEQ ID NO: 2936049 - RNA, 23 nt, Human
ccugccucgaacuggcugcaaag

SEQ ID NO: 2936050 - RNA, 19 nt, Human
ccugcugcaguugccaguc

SEQ ID NO: 2936051 - RNA, 17 nt, Human
ccugcugcaguugccag

SEQ ID NO: 2936052 - RNA, 18 nt, Human
ccugcacuugcagacucu

SEQ ID NO: 2936053 - RNA, 14 nt, Human
ccugcagagggcac

SEQ ID NO: 2936054 - RNA, 16 nt, Human
ccugcacuugcagacu

SEQ ID NO: 2936055 - RNA, 17 nt, Human
ccugcacuugcagacuc

SEQ ID NO: 2936056 - RNA, 13 nt, Human
ccucuuucccucc

SEQ ID NO: 2936057 - RNA, 11 nt, Human
ccucuuucccu

SEQ ID NO: 2936058 - RNA, 14 nt, Human
cccuucgcuccugu

SEQ ID NO: 2936059 - RNA, 15 nt, Human
cccuucgcuccugug

SEQ ID NO: 2936060 - RNA, 21 nt, Human
cccuucucuccagccccugga

SEQ ID NO: 2936061 - RNA, 22 nt, Human
cccuucucuccagccccuggau

SEQ ID NO: 2936062 - RNA, 13 nt, Human
ccggccccugcug

SEQ ID NO: 2936063 - RNA, 13 nt, Human
cccuucgcuccug

SEQ ID NO: 2936064 - RNA, 20 nt, Human
cccugugauggggcccugcc

SEQ ID NO: 2936065 - RNA, 19 nt, Human
cccugugauggggcccugc

SEQ ID NO: 2936066 - RNA, 18 nt, Human
cccugugauggggcccug

SEQ ID NO: 2936067 - RNA, 17 nt, Human
cccugugauggggcccu

SEQ ID NO: 2936068 - RNA, 19 nt, Human
cccugucuccucucucugu

SEQ ID NO: 2936069 - RNA, 13 nt, Human
cccugucuaauga

SEQ ID NO: 2936070 - RNA, 16 nt, Human
cccugucuaaugaaac

SEQ ID NO: 2936071 - RNA, 23 nt, Human
cccugucucaaaaaaagaaaaag

SEQ ID NO: 2936072 - RNA, 20 nt, Human
cccugucucaaaaaaagaaa

SEQ ID NO: 2936073 - RNA, 14 nt, Human
ccggccccugcugg

SEQ ID NO: 2936074 - RNA, 16 nt, Human
ccucccaucucacaca

SEQ ID NO: 2936075 - RNA, 13 nt, Human
ccucccaucucac

SEQ ID NO: 2936076 - RNA, 15 nt, Human
ccucccaccucagcc

SEQ ID NO: 2936077 - RNA, 17 nt, Human
ccucccaccucagccuc

SEQ ID NO: 2936078 - RNA, 21 nt, Human
ccucauuuuuauaaugucccu

SEQ ID NO: 2936079 - RNA, 23 nt, Human
ccucauggaauuggagcucgugg

SEQ ID NO: 2936080 - RNA, 21 nt, Human
ccucaugcugccaauauccua

SEQ ID NO: 2936081 - RNA, 20 nt, Human
ccucaugcugccaauauccu

SEQ ID NO: 2936082 - RNA, 20 nt, Human
cccucaacucuccuccagag

SEQ ID NO: 2936083 - RNA, 20 nt, Human
cccucaagagcaaaguagau

SEQ ID NO: 2936084 - RNA, 17 nt, Human
ccccuucugacccaugc

SEQ ID NO: 2936085 - RNA, 16 nt, Human
ccccuucugacccaug

SEQ ID NO: 2936086 - RNA, 18 nt, Human
cccggcuuuggugcgggg

SEQ ID NO: 2936087 - RNA, 12 nt, Human
cccgggaagggg

SEQ ID NO: 2936088 - RNA, 12 nt, Human
cccggcugcgga

SEQ ID NO: 2936089 - RNA, 15 nt, Human
ccccauucugccugc

SEQ ID NO: 2936090 - RNA, 13 nt, Human
ccccauucugccu

SEQ ID NO: 2936091 - RNA, 14 nt, Human
ccccauucugccug

SEQ ID NO: 2936092 - RNA, 19 nt, Human
ccccuucgcuccugugucu

SEQ ID NO: 2936093 - RNA, 14 nt, Human
ccccuucgcuccug

SEQ ID NO: 2936094 - RNA, 15 nt, Human
ccccuucgcuccugu

SEQ ID NO: 2936095 - RNA, 17 nt, Human
ccccuucgcuccugugu

SEQ ID NO: 2936096 - RNA, 18 nt, Human
ccccugcacuccagccug

SEQ ID NO: 2936097 - RNA, 21 nt, Human
ccccagauugcaacaggcugg

SEQ ID NO: 2936098 - RNA, 22 nt, Human
ccccagauugcaacaggcuggg

SEQ ID NO: 2936099 - RNA, 23 nt, Human
ccccagauugcaacaggcugggc

SEQ ID NO: 2936100 - RNA, 17 nt, Human
ccccagcaagugagagc

SEQ ID NO: 2936101 - RNA, 19 nt, Human
ccccagcaagugagagcug

SEQ ID NO: 2936102 - RNA, 20 nt, Human
ccccagcaagugagagcugg

SEQ ID NO: 2936103 - RNA, 17 nt, Human
ccccauccucuguacag

SEQ ID NO: 2936104 - RNA, 24 nt, Human
ccccaucugcgggggcagugcuca

SEQ ID NO: 2936105 - RNA, 22 nt, Human
ccccauccucuguacagagccc

SEQ ID NO: 2936106 - RNA, 21 nt, Human
ccccauccucuguacagagcc

SEQ ID NO: 2936107 - RNA, 19 nt, Human
ccccauccucuguacagag

SEQ ID NO: 2936108 - RNA, 20 nt, Human
cccauucugccugcccaggc

SEQ ID NO: 2936109 - RNA, 21 nt, Human
cccauucugccugcccaggcc

SEQ ID NO: 2936110 - RNA, 22 nt, Human
cccauucugccugcccaggccc

SEQ ID NO: 2936111 - RNA, 20 nt, Human
cccagcacuuugggaggcug

SEQ ID NO: 2936112 - RNA, 14 nt, Human
cccagcccacuucu

SEQ ID NO: 2936113 - RNA, 23 nt, Human
cccaggaaaggcuccaggagcag

SEQ ID NO: 2936114 - RNA, 22 nt, Human
cccaggaaaggcuccaggagca

SEQ ID NO: 2936115 - RNA, 21 nt, Human
cccaggaaaggcuccaggagc

SEQ ID NO: 2936116 - RNA, 21 nt, Human
cccagcugugcucuggacagg

SEQ ID NO: 2936117 - RNA, 23 nt, Human
cccagcugugcucuggacaggca

SEQ ID NO: 2936118 - RNA, 19 nt, Human
cccaggaaaggcuccagga

SEQ ID NO: 2936119 - RNA, 15 nt, Human
cccaggcuuagucac

SEQ ID NO: 2936120 - RNA, 20 nt, Human
cccaggcuuagucacugaga

SEQ ID NO: 2936121 - RNA, 21 nt, Human
cccaggcuggcgugcaguggu

SEQ ID NO: 2936122 - RNA, 19 nt, Human
ccagcagagcaccuuagac

SEQ ID NO: 2936123 - RNA, 23 nt, Human
ccagcagagcaccuuagacaguc

SEQ ID NO: 2936124 - RNA, 16 nt, Human
ccagcuuaucucaggg

SEQ ID NO: 2936125 - RNA, 21 nt, Human
ccaggaaaggcuccaggagca

SEQ ID NO: 2936126 - RNA, 23 nt, Human
ccaggaaaggcuccaggagcagc

SEQ ID NO: 2936127 - RNA, 22 nt, Human
ccaggaaaggcuccaggagcag

SEQ ID NO: 2936128 - RNA, 21 nt, Human
ccagccccuggaugcagccuc

SEQ ID NO: 2936129 - RNA, 10 nt, Human
ccagccccuu

SEQ ID NO: 2936130 - RNA, 14 nt, Human
ccagcagccuggac

SEQ ID NO: 2936131 - RNA, 15 nt, Human
ccagcagccuggacc

SEQ ID NO: 2936132 - RNA, 20 nt, Human
ccagcagccuggacccugug

SEQ ID NO: 2936133 - RNA, 19 nt, Human
ccagcagccuggacccugu

SEQ ID NO: 2936134 - RNA, 20 nt, Human
ccaggauuauugucaaagaa

SEQ ID NO: 2936135 - RNA, 14 nt, Human
ccaggcugggagag

SEQ ID NO: 2936136 - RNA, 13 nt, Human
ccaggcugggaga

SEQ ID NO: 2936137 - RNA, 21 nt, Human
ccaggcugggagagccuucca

SEQ ID NO: 2936138 - RNA, 18 nt, Human
ccaggcugggagagccuu

SEQ ID NO: 2936139 - RNA, 17 nt, Human
ccaggcugggagagccu

SEQ ID NO: 2936140 - RNA, 15 nt, Human
ccaggcugggagagc

SEQ ID NO: 2936141 - RNA, 22 nt, Human
ccaggcugggagagccuuccag

SEQ ID NO: 2936142 - RNA, 19 nt, Human
ccagucaccccggccaccu

SEQ ID NO: 2936143 - RNA, 21 nt, Human
ccagucaccccggccaccugc

SEQ ID NO: 2936144 - RNA, 20 nt, Human
ccagucaccccggccaccug

SEQ ID NO: 2936145 - RNA, 13 nt, Human
ccagucaccccgg

SEQ ID NO: 2936146 - RNA, 12 nt, Human
ccagucaccccg

SEQ ID NO: 2936147 - RNA, 16 nt, Human
ccauccccuguagagu

SEQ ID NO: 2936148 - RNA, 13 nt, Human
ccaugagccucag

SEQ ID NO: 2936149 - RNA, 14 nt, Human
ccaugagccucagc

SEQ ID NO: 2936150 - RNA, 18 nt, Human
ccaugagccucagcaucc

SEQ ID NO: 2936151 - RNA, 19 nt, Human
ccaugagccucagcauccu

SEQ ID NO: 2936152 - RNA, 13 nt, Human
ccaugaguccccu

SEQ ID NO: 2936153 - RNA, 13 nt, Human
ccaugggccuccu

SEQ ID NO: 2936154 - RNA, 16 nt, Human
ccaugaguccccuguu

SEQ ID NO: 2936155 - RNA, 15 nt, Human
ccaugaguccccugu

SEQ ID NO: 2936156 - RNA, 14 nt, Human
ccaugaguccccug

SEQ ID NO: 2936157 - RNA, 23 nt, Human
ccaucccaaacccuucagugcca

SEQ ID NO: 2936158 - RNA, 12 nt, Human
ccaucccagccc

SEQ ID NO: 2936159 - RNA, 13 nt, Human
ccauacauuugug

SEQ ID NO: 2936160 - RNA, 14 nt, Human
ccauacauuugugu

SEQ ID NO: 2936161 - RNA, 14 nt, Human
ccaugggccuccug

SEQ ID NO: 2936162 - RNA, 15 nt, Human
ccaugggccuccugu

SEQ ID NO: 2936163 - RNA, 17 nt, Human
ccauuuacuuaagacuu

SEQ ID NO: 2936164 - RNA, 23 nt, Human
ccauuuacuuaagacuuaaugag

SEQ ID NO: 2936165 - RNA, 22 nt, Human
ccauuuaaagcuuauuaaaacu

SEQ ID NO: 2936166 - RNA, 17 nt, Human
cauauucuguuggccag

SEQ ID NO: 2936167 - RNA, 18 nt, Human
cauauucuguuggccagu

SEQ ID NO: 2936168 - RNA, 14 nt, Human
cauauggauaaaua

SEQ ID NO: 2936169 - RNA, 19 nt, Human
caguggugguuuucuguuc

SEQ ID NO: 2936170 - RNA, 20 nt, Human
caguggugguuuucuguucu

SEQ ID NO: 2936171 - RNA, 21 nt, Human
caguggugguuuucuguucuu

SEQ ID NO: 2936172 - RNA, 22 nt, Human
caguggugguuuucuguucuuu

SEQ ID NO: 2936173 - RNA, 18 nt, Human
caucuguuacacaaagaa

SEQ ID NO: 2936174 - RNA, 14 nt, Human
caucuuaaaaacaa

SEQ ID NO: 2936175 - RNA, 22 nt, Human
cauccuggcacccggccccugc

SEQ ID NO: 2936176 - RNA, 12 nt, Human
cauccuggaaua

SEQ ID NO: 2936177 - RNA, 21 nt, Human
cauccccuguagagugggagc

SEQ ID NO: 2936178 - RNA, 12 nt, Human
caucacuucccu

SEQ ID NO: 2936179 - RNA, 14 nt, Human
caucacuucccuac

SEQ ID NO: 2936180 - RNA, 15 nt, Human
cauccuggcacccgg

SEQ ID NO: 2936181 - RNA, 15 nt, Human
cauuaguuuugaaga

SEQ ID NO: 2936182 - RNA, 14 nt, Human
cauuaguuuugaag

SEQ ID NO: 2936183 - RNA, 17 nt, Human
cauuauauagcaguaaa

SEQ ID NO: 2936184 - RNA, 16 nt, Human
cauuaguuuugaagau

SEQ ID NO: 2936185 - RNA, 20 nt, Human
cauuauauagcaguaaaaaa

SEQ ID NO: 2936186 - RNA, 13 nt, Human
cauucuccaccug

SEQ ID NO: 2936187 - RNA, 16 nt, Human
cauucuccaccugcca

SEQ ID NO: 2936188 - RNA, 14 nt, Human
cauucuccaccugc

SEQ ID NO: 2936189 - RNA, 19 nt, Human
cauguuggccaggcugguc

SEQ ID NO: 2936190 - RNA, 16 nt, Human
cauguuggccaggcug

SEQ ID NO: 2936191 - RNA, 14 nt, Human
cauguuggccaggc

SEQ ID NO: 2936192 - RNA, 15 nt, Human
cauguuggccaggcu

SEQ ID NO: 2936193 - RNA, 17 nt, Human
caugggaaugaauguca

SEQ ID NO: 2936194 - RNA, 16 nt, Human
caugggaaugaauguc

SEQ ID NO: 2936195 - RNA, 15 nt, Human
caugggaaugaaugu

SEQ ID NO: 2936196 - RNA, 14 nt, Human
caugggaaugaaug

SEQ ID NO: 2936197 - RNA, 20 nt, Human
caugcuccuggcccacugca

SEQ ID NO: 2936198 - RNA, 13 nt, Human
caugauguuuucc

SEQ ID NO: 2936199 - RNA, 14 nt, Human
caugcuacacacug

SEQ ID NO: 2936200 - RNA, 20 nt, Human
caugcuacacacugcauguu

SEQ ID NO: 2936201 - RNA, 23 nt, Human
caugcuacacacugcauguuugu

SEQ ID NO: 2936202 - RNA, 14 nt, Human
caugauguuuagaa

SEQ ID NO: 2936203 - RNA, 22 nt, Human
ccacuccggcccuccagagccc

SEQ ID NO: 2936204 - RNA, 21 nt, Human
ccacuccggcccuccagagcc

SEQ ID NO: 2936205 - RNA, 20 nt, Human
ccacuccggcccuccagagc

SEQ ID NO: 2936206 - RNA, 17 nt, Human
ccacucccugcaaccug

SEQ ID NO: 2936207 - RNA, 13 nt, Human
ccacgcccccacu

SEQ ID NO: 2936208 - RNA, 19 nt, Human
ccacgcccccacuggugac

SEQ ID NO: 2936209 - RNA, 18 nt, Human
ccacgcccccacugguga

SEQ ID NO: 2936210 - RNA, 17 nt, Human
ccacgcccccacuggug

SEQ ID NO: 2936211 - RNA, 16 nt, Human
ccacgcccccacuggu

SEQ ID NO: 2936212 - RNA, 21 nt, Human
ccaccuuugaagaaguaagga

SEQ ID NO: 2936213 - RNA, 19 nt, Human
ccaccgcagacaggaccag

SEQ ID NO: 2936214 - RNA, 22 nt, Human
ccaccgcagacaggaccaggga

SEQ ID NO: 2936215 - RNA, 15 nt, Human
ccaccaucaagccac

SEQ ID NO: 2936216 - RNA, 17 nt, Human
ccaccacacccagccca

SEQ ID NO: 2936217 - RNA, 17 nt, Human
ccaccaccaauugccaa

SEQ ID NO: 2936218 - RNA, 24 nt, Human
ccaccagugccucucccugcugcu

SEQ ID NO: 2936219 - RNA, 14 nt, Human
ccaccaucaagcca

SEQ ID NO: 2936220 - RNA, 13 nt, Human
ccaccaucaagcc

SEQ ID NO: 2936221 - RNA, 23 nt, Human
ccacagcaguugaaaagacucca

SEQ ID NO: 2936222 - RNA, 18 nt, Human
ccacagcaguugaaaaga

SEQ ID NO: 2936223 - RNA, 17 nt, Human
ccacagcaguugaaaag

SEQ ID NO: 2936224 - RNA, 12 nt, Human
ccacagcaguug

SEQ ID NO: 2936225 - RNA, 17 nt, Human
ccaaaacugagcauaag

SEQ ID NO: 2936226 - RNA, 21 nt, Human
ccaaaacucuccucugcugcu

SEQ ID NO: 2936227 - RNA, 20 nt, Human
ccaaaacucuccucugcugc

SEQ ID NO: 2936228 - RNA, 22 nt, Human
cauuuuuuuuaagaaaaaggau

SEQ ID NO: 2936229 - RNA, 20 nt, Human
cauuuguguugaagagguuu

SEQ ID NO: 2936230 - RNA, 16 nt, Human
cauuuguguugaagag

SEQ ID NO: 2936231 - RNA, 19 nt, Human
cauuuguauaaaauaauuu

SEQ ID NO: 2936232 - RNA, 20 nt, Human
cauuuguauaaaauaauuuu

SEQ ID NO: 2936233 - RNA, 17 nt, Human
cauuuguauaaaauaau

SEQ ID NO: 2936234 - RNA, 14 nt, Human
ccaaugggagcuca

SEQ ID NO: 2936235 - RNA, 17 nt, Human
ccaaugggagcucaugg

SEQ ID NO: 2936236 - RNA, 17 nt, Human
ccaauauuuaccagacc

SEQ ID NO: 2936237 - RNA, 15 nt, Human
ccaaugauggucacc

SEQ ID NO: 2936238 - RNA, 14 nt, Human
ccaaugcacuuugu

SEQ ID NO: 2936239 - RNA, 18 nt, Human
ccaagcucugcuccucuc

SEQ ID NO: 2936240 - RNA, 12 nt, Human
ccaagcucugcu

SEQ ID NO: 2936241 - RNA, 17 nt, Human
ccaagcucugcuccucu

SEQ ID NO: 2936242 - RNA, 13 nt, Human
ccaagcucugcuc

SEQ ID NO: 2936243 - RNA, 18 nt, Human
ccaacucaccccagcccc

SEQ ID NO: 2936244 - RNA, 17 nt, Human
ccaacucaccccagccc

SEQ ID NO: 2936245 - RNA, 16 nt, Human
ccaacucaccccagcc

SEQ ID NO: 2936246 - RNA, 17 nt, Human
ccaaauguucaucaaug

SEQ ID NO: 2936247 - RNA, 14 nt, Human
ccaacucaccccag

SEQ ID NO: 2936248 - RNA, 23 nt, Human
ccaaauggaaaugggcagagcag

SEQ ID NO: 2936249 - RNA, 21 nt, Human
caggcugggcuucaguggcag

SEQ ID NO: 2936250 - RNA, 22 nt, Human
caggcugggcuucaguggcagc

SEQ ID NO: 2936251 - RNA, 20 nt, Human
caggcugggcuucaguggca

SEQ ID NO: 2936252 - RNA, 15 nt, Human
caggcugggagagcc

SEQ ID NO: 2936253 - RNA, 14 nt, Human
caggcugggagagc

SEQ ID NO: 2936254 - RNA, 12 nt, Human
caggcugggaga

SEQ ID NO: 2936255 - RNA, 20 nt, Human
caggggaaaaucagccugcu

SEQ ID NO: 2936256 - RNA, 19 nt, Human
caggggaaaaucagccugc

SEQ ID NO: 2936257 - RNA, 21 nt, Human
cagggcucagcggggacagcu

SEQ ID NO: 2936258 - RNA, 23 nt, Human
cagggcucagcggggacagcucc

SEQ ID NO: 2936259 - RNA, 18 nt, Human
caggcagauacaggaaaa

SEQ ID NO: 2936260 - RNA, 13 nt, Human
caggccagaggga

SEQ ID NO: 2936261 - RNA, 15 nt, Human
caggccagagggagu

SEQ ID NO: 2936262 - RNA, 23 nt, Human
caggccagcugcuugggcuucau

SEQ ID NO: 2936263 - RNA, 21 nt, Human
caggccagcugcuugggcuuc

SEQ ID NO: 2936264 - RNA, 19 nt, Human
caggccagcugcuugggcu

SEQ ID NO: 2936265 - RNA, 17 nt, Human
caggccagcugcuuggg

SEQ ID NO: 2936266 - RNA, 18 nt, Human
caggccaggcccucugcc

SEQ ID NO: 2936267 - RNA, 17 nt, Human
caggccaggcccucugc

SEQ ID NO: 2936268 - RNA, 19 nt, Human
caggccaggcccucugccc

SEQ ID NO: 2936269 - RNA, 20 nt, Human
caggccaggcccucugccca

SEQ ID NO: 2936270 - RNA, 15 nt, Human
caggugcacaagcuc

SEQ ID NO: 2936271 - RNA, 22 nt, Human
caggugauccacccaccucagc

SEQ ID NO: 2936272 - RNA, 23 nt, Human
caggugauccacccaccucagcc

SEQ ID NO: 2936273 - RNA, 20 nt, Human
caggugcacaagcuccaagc

SEQ ID NO: 2936274 - RNA, 19 nt, Human
caggugcacaagcuccaag

SEQ ID NO: 2936275 - RNA, 18 nt, Human
caggugcacaagcuccaa

SEQ ID NO: 2936276 - RNA, 17 nt, Human
caggugcacaagcucca

SEQ ID NO: 2936277 - RNA, 21 nt, Human
caggugauccacccaccucag

SEQ ID NO: 2936278 - RNA, 20 nt, Human
caggugauccacccaccuca

SEQ ID NO: 2936279 - RNA, 19 nt, Human
cagguuuucuuuuaagaau

SEQ ID NO: 2936280 - RNA, 16 nt, Human
cagguuuuccugaaga

SEQ ID NO: 2936281 - RNA, 18 nt, Human
cagguuuucuuuuaagaa

SEQ ID NO: 2936282 - RNA, 12 nt, Human
cagguuuuccug

SEQ ID NO: 2936283 - RNA, 14 nt, Human
cagguuuaagcugu

SEQ ID NO: 2936284 - RNA, 21 nt, Human
cagguuggugggggccucggu

SEQ ID NO: 2936285 - RNA, 19 nt, Human
caggugccaguuauggcua

SEQ ID NO: 2936286 - RNA, 21 nt, Human
caggugcacaagcuccaagcu

SEQ ID NO: 2936287 - RNA, 15 nt, Human
cagucaccucaugga

SEQ ID NO: 2936288 - RNA, 19 nt, Human
cagucaccucauggaauug

SEQ ID NO: 2936289 - RNA, 15 nt, Human
cagucacauuccaag

SEQ ID NO: 2936290 - RNA, 16 nt, Human
cagucaccucauggaa

SEQ ID NO: 2936291 - RNA, 20 nt, Human
caguggugcgaucuggguuc

SEQ ID NO: 2936292 - RNA, 21 nt, Human
caguggugcgaucuggguuca

SEQ ID NO: 2936293 - RNA, 18 nt, Human
caguggugguuuucuguu

SEQ ID NO: 2936294 - RNA, 14 nt, Human
caguggggaaugaa

SEQ ID NO: 2936295 - RNA, 13 nt, Human
cagugcccacagg

SEQ ID NO: 2936296 - RNA, 15 nt, Human
cagugcccacaggau

SEQ ID NO: 2936297 - RNA, 17 nt, Human
cagugcaugcugucccu

SEQ ID NO: 2936298 - RNA, 16 nt, Human
cagugcaugcuguccc

SEQ ID NO: 2936299 - RNA, 17 nt, Human
cagugcccacaggauca

SEQ ID NO: 2936300 - RNA, 20 nt, Human
cagugggagcugccuguuca

SEQ ID NO: 2936301 - RNA, 23 nt, Human
cagugggagcugccuguucagcu

SEQ ID NO: 2936302 - RNA, 14 nt, Human
cagugcaugcuguc

SEQ ID NO: 2936303 - RNA, 13 nt, Human
cagugcaugcugu

SEQ ID NO: 2936304 - RNA, 15 nt, Human
cagucuggaaugcag

SEQ ID NO: 2936305 - RNA, 14 nt, Human
cagucugcuuagaa

SEQ ID NO: 2936306 - RNA, 17 nt, Human
cagucugcuuagaaaua

SEQ ID NO: 2936307 - RNA, 15 nt, Human
cagucugcuuagaaa

SEQ ID NO: 2936308 - RNA, 16 nt, Human
cagucugcuuagaaau

SEQ ID NO: 2936309 - RNA, 17 nt, Human
cagucuggaaugcagug

SEQ ID NO: 2936310 - RNA, 20 nt, Human
cagucugacuguuuccauca

SEQ ID NO: 2936311 - RNA, 20 nt, Human
cagcaucauggagguuugaa

SEQ ID NO: 2936312 - RNA, 17 nt, Human
cagauugcaacaggcug

SEQ ID NO: 2936313 - RNA, 22 nt, Human
cagauucuuuccugaggcuggg

SEQ ID NO: 2936314 - RNA, 20 nt, Human
cagauucuuuccugaggcug

SEQ ID NO: 2936315 - RNA, 16 nt, Human
cagcacgauuucuguu

SEQ ID NO: 2936316 - RNA, 18 nt, Human
cagcacgauuucuguuua

SEQ ID NO: 2936317 - RNA, 19 nt, Human
cagcacgauuucuguuuag

SEQ ID NO: 2936318 - RNA, 20 nt, Human
cagcacgauuucuguuuaga

SEQ ID NO: 2936319 - RNA, 16 nt, Human
cagcagugagacuggg

SEQ ID NO: 2936320 - RNA, 13 nt, Human
cagcaguucagag

SEQ ID NO: 2936321 - RNA, 22 nt, Human
cagcaguugaaaagacuccaaa

SEQ ID NO: 2936322 - RNA, 23 nt, Human
cagaggggguggccucccaacuc

SEQ ID NO: 2936323 - RNA, 22 nt, Human
cagaggggguggccucccaacu

SEQ ID NO: 2936324 - RNA, 21 nt, Human
cagaguaggcuauuccugaga

SEQ ID NO: 2936325 - RNA, 17 nt, Human
cagagguugcagugagc

SEQ ID NO: 2936326 - RNA, 16 nt, Human
cagagguugcagugag

SEQ ID NO: 2936327 - RNA, 12 nt, Human
cagauccuggaa

SEQ ID NO: 2936328 - RNA, 19 nt, Human
cagauucuuuccugaggcu

SEQ ID NO: 2936329 - RNA, 18 nt, Human
cagauucuuuccugaggc

SEQ ID NO: 2936330 - RNA, 17 nt, Human
cagauucuuuccugagg

SEQ ID NO: 2936331 - RNA, 15 nt, Human
cagauucuuuccuga

SEQ ID NO: 2936332 - RNA, 18 nt, Human
cagcggggacagcuccuu

SEQ ID NO: 2936333 - RNA, 19 nt, Human
cagcggggacagcuccuuc

SEQ ID NO: 2936334 - RNA, 21 nt, Human
cagcggggacagcuccuucug

SEQ ID NO: 2936335 - RNA, 19 nt, Human
cagccugcuaauuccccag

SEQ ID NO: 2936336 - RNA, 12 nt, Human
cagccugcucca

SEQ ID NO: 2936337 - RNA, 19 nt, Human
cagccgagauagccaaggc

SEQ ID NO: 2936338 - RNA, 17 nt, Human
cagccucugaaaaccaa

SEQ ID NO: 2936339 - RNA, 18 nt, Human
caggaaaagcugcugaca

SEQ ID NO: 2936340 - RNA, 15 nt, Human
caggaaaagcugcug

SEQ ID NO: 2936341 - RNA, 16 nt, Human
caggaaaagcugcuga

SEQ ID NO: 2936342 - RNA, 19 nt, Human
cagcugagggugagugggu

SEQ ID NO: 2936343 - RNA, 12 nt, Human
cagcugccuggg

SEQ ID NO: 2936344 - RNA, 14 nt, Human
cagcugccugggau

SEQ ID NO: 2936345 - RNA, 13 nt, Human
cagcugccuggga

SEQ ID NO: 2936346 - RNA, 19 nt, Human
cagcugugcucuggacagg

SEQ ID NO: 2936347 - RNA, 20 nt, Human
cagcugugcucuggacaggc

SEQ ID NO: 2936348 - RNA, 24 nt, Human
cagcugugcucuggacaggcaugu

SEQ ID NO: 2936349 - RNA, 19 nt, Human
cagcuguucagcugguuga

SEQ ID NO: 2936350 - RNA, 20 nt, Human
cagcuccccucggagaagag

SEQ ID NO: 2936351 - RNA, 22 nt, Human
cagcuccccucggagaagagcu

SEQ ID NO: 2936352 - RNA, 21 nt, Human
cagcuccccucggagaagagc

SEQ ID NO: 2936353 - RNA, 17 nt, Human
auuuaaucuuuuaugau

SEQ ID NO: 2936354 - RNA, 14 nt, Human
auuuaaucuuuuau

SEQ ID NO: 2936355 - RNA, 14 nt, Human
auuuaaugaaagac

SEQ ID NO: 2936356 - RNA, 14 nt, Human
auuuaauaugcaaa

SEQ ID NO: 2936357 - RNA, 15 nt, Human
auuuaauaugcaaag

SEQ ID NO: 2936358 - RNA, 16 nt, Human
auuuaauaugcaaagu

SEQ ID NO: 2936359 - RNA, 23 nt, Human
auuucaagaaguccccucuccuc

SEQ ID NO: 2936360 - RNA, 15 nt, Human
auuucucauguugaa

SEQ ID NO: 2936361 - RNA, 20 nt, Human
auuucuaugaaauauuaugu

SEQ ID NO: 2936362 - RNA, 15 nt, Human
auuucuaugaaauau

SEQ ID NO: 2936363 - RNA, 18 nt, Human
auuucuaugaaauauuau

SEQ ID NO: 2936364 - RNA, 14 nt, Human
auuucuguuuagau

SEQ ID NO: 2936365 - RNA, 16 nt, Human
auuucuguuuagauaa

SEQ ID NO: 2936366 - RNA, 12 nt, Human
auuucuguuuag

SEQ ID NO: 2936367 - RNA, 17 nt, Human
auuguaaaugugcuuuu

SEQ ID NO: 2936368 - RNA, 15 nt, Human
auuguaaaugugcuu

SEQ ID NO: 2936369 - RNA, 14 nt, Human
auuguaaaugugcu

SEQ ID NO: 2936370 - RNA, 16 nt, Human
auuguaaggaaugauu

SEQ ID NO: 2936371 - RNA, 15 nt, Human
auuguaaggaaugau

SEQ ID NO: 2936372 - RNA, 19 nt, Human
auuguucuuaguuugcagu

SEQ ID NO: 2936373 - RNA, 19 nt, Human
auuguuuaaaaucauuucu

SEQ ID NO: 2936374 - RNA, 18 nt, Human
auugacuuuuuauggcac

SEQ ID NO: 2936375 - RNA, 16 nt, Human
auucucuccuguaccu

SEQ ID NO: 2936376 - RNA, 19 nt, Human
auucugagaugacuauuca

SEQ ID NO: 2936377 - RNA, 17 nt, Human
auucuugccaaauauaa

SEQ ID NO: 2936378 - RNA, 21 nt, Human
auuccugaugcuucuucagag

SEQ ID NO: 2936379 - RNA, 19 nt, Human
auucucuccuguaccucuu

SEQ ID NO: 2936380 - RNA, 21 nt, Human
auucucuccuguaccucuuga

SEQ ID NO: 2936381 - RNA, 13 nt, Human
auuccugaacagg

SEQ ID NO: 2936382 - RNA, 22 nt, Human
auucuuuccugaggcugggcuc

SEQ ID NO: 2936383 - RNA, 17 nt, Human
auucuuuccugaggcug

SEQ ID NO: 2936384 - RNA, 20 nt, Human
auucauauuuacuucuuaua

SEQ ID NO: 2936385 - RNA, 18 nt, Human
auucauauuuacuucuua

SEQ ID NO: 2936386 - RNA, 19 nt, Human
auucauauuuacuucuuau

SEQ ID NO: 2936387 - RNA, 17 nt, Human
auucacaaaguaauuug

SEQ ID NO: 2936388 - RNA, 21 nt, Human
auucacaaaguaauuuggaaa

SEQ ID NO: 2936389 - RNA, 20 nt, Human
auuaaauucuugcaaaguau

SEQ ID NO: 2936390 - RNA, 14 nt, Human
auuaaauucuugca

SEQ ID NO: 2936391 - RNA, 18 nt, Human
auuaaauucuugcaaagu

SEQ ID NO: 2936392 - RNA, 16 nt, Human
auucacaaaguaauuu

SEQ ID NO: 2936393 - RNA, 18 nt, Human
auucacaagacccaaaag

SEQ ID NO: 2936394 - RNA, 12 nt, Human
auuuuuuuuucc

SEQ ID NO: 2936395 - RNA, 16 nt, Human
auuuuuuuuuccuuca

SEQ ID NO: 2936396 - RNA, 13 nt, Human
auuuuuuuuuccu

SEQ ID NO: 2936397 - RNA, 13 nt, Human
auuuuuaagugcu

SEQ ID NO: 2936398 - RNA, 13 nt, Human
caaaaaaaauuag

SEQ ID NO: 2936399 - RNA, 18 nt, Human
caaaaaaaauuagccggg

SEQ ID NO: 2936400 - RNA, 17 nt, Human
auuuuuuuuuccuucag

SEQ ID NO: 2936401 - RNA, 15 nt, Human
caaaagcugggcagg

SEQ ID NO: 2936402 - RNA, 14 nt, Human
auuuguuugaacug

SEQ ID NO: 2936403 - RNA, 16 nt, Human
auuuguuugaacugau

SEQ ID NO: 2936404 - RNA, 13 nt, Human
auuuguuugaacu

SEQ ID NO: 2936405 - RNA, 22 nt, Human
caagacccuuguggucccaccc

SEQ ID NO: 2936406 - RNA, 19 nt, Human
caagacccuugugguccca

SEQ ID NO: 2936407 - RNA, 18 nt, Human
caagacccuugugguccc

SEQ ID NO: 2936408 - RNA, 23 nt, Human
caagaauuucuaggacugaauua

SEQ ID NO: 2936409 - RNA, 20 nt, Human
caagaaguccccucuccucc

SEQ ID NO: 2936410 - RNA, 20 nt, Human
caagaauuucuaggacugaa

SEQ ID NO: 2936411 - RNA, 15 nt, Human
caacucaccccagcc

SEQ ID NO: 2936412 - RNA, 13 nt, Human
caacucaccccag

SEQ ID NO: 2936413 - RNA, 16 nt, Human
caacucaccccagccc

SEQ ID NO: 2936414 - RNA, 15 nt, Human
caacccccagccugc

SEQ ID NO: 2936415 - RNA, 16 nt, Human
caacccccagccugcu

SEQ ID NO: 2936416 - RNA, 17 nt, Human
caacccccagccugcua

SEQ ID NO: 2936417 - RNA, 21 nt, Human
caacuaucucauuuccaagca

SEQ ID NO: 2936418 - RNA, 19 nt, Human
caacccaaauguucaucaa

SEQ ID NO: 2936419 - RNA, 18 nt, Human
caaccacugcgaccacaa

SEQ ID NO: 2936420 - RNA, 23 nt, Human
caacaaaccuguuucugcagcca

SEQ ID NO: 2936421 - RNA, 18 nt, Human
caaaguaauuuggaaauu

SEQ ID NO: 2936422 - RNA, 20 nt, Human
caaaguaauuuggaaauuag

SEQ ID NO: 2936423 - RNA, 14 nt, Human
caaagaugcagccg

SEQ ID NO: 2936424 - RNA, 13 nt, Human
caaagaugcagcc

SEQ ID NO: 2936425 - RNA, 21 nt, Human
caaaguacacuguuucaaacu

SEQ ID NO: 2936426 - RNA, 16 nt, Human
caaaguacacuguuuc

SEQ ID NO: 2936427 - RNA, 20 nt, Human
caaaguacacuguuucaaac

SEQ ID NO: 2936428 - RNA, 17 nt, Human
caaaucagcugcuacua

SEQ ID NO: 2936429 - RNA, 23 nt, Human
caaaucagguuuucuuuuaagaa

SEQ ID NO: 2936430 - RNA, 15 nt, Human
caaauccuugaagau

SEQ ID NO: 2936431 - RNA, 20 nt, Human
caacaccuuguuucccucuc

SEQ ID NO: 2936432 - RNA, 22 nt, Human
caacaccucugcacaagcugca

SEQ ID NO: 2936433 - RNA, 17 nt, Human
cacuguugcccaggcug

SEQ ID NO: 2936434 - RNA, 19 nt, Human
cacuguuucaaacuuuacu

SEQ ID NO: 2936435 - RNA, 11 nt, Human
cacuugugaau

SEQ ID NO: 2936436 - RNA, 12 nt, Human
cacuugugaaua

SEQ ID NO: 2936437 - RNA, 17 nt, Human
cacuuggucugugagau

SEQ ID NO: 2936438 - RNA, 20 nt, Human
cacuuggucugugagaugcu

SEQ ID NO: 2936439 - RNA, 17 nt, Human
cacuggugacaugucuu

SEQ ID NO: 2936440 - RNA, 14 nt, Human
cacuguugcccagg

SEQ ID NO: 2936441 - RNA, 15 nt, Human
cacuguugcccaggc

SEQ ID NO: 2936442 - RNA, 16 nt, Human
cacuguugcccaggcu

SEQ ID NO: 2936443 - RNA, 23 nt, Human
cacugggcuuggggaccagagcu

SEQ ID NO: 2936444 - RNA, 20 nt, Human
cacugggcuuggggaccaga

SEQ ID NO: 2936445 - RNA, 22 nt, Human
cacugggcuuggggaccagagc

SEQ ID NO: 2936446 - RNA, 17 nt, Human
cagaaauguguuaucac

SEQ ID NO: 2936447 - RNA, 21 nt, Human
cagaaguuucugccgcagccc

SEQ ID NO: 2936448 - RNA, 20 nt, Human
cagaaguuucugccgcagcc

SEQ ID NO: 2936449 - RNA, 22 nt, Human
cagaaguuucugccgcagcccu

SEQ ID NO: 2936450 - RNA, 20 nt, Human
cacggagggugacgggggug

SEQ ID NO: 2936451 - RNA, 14 nt, Human
cacggccaggccag

SEQ ID NO: 2936452 - RNA, 15 nt, Human
cacggccaggccaga

SEQ ID NO: 2936453 - RNA, 16 nt, Human
cacggccaggccagag

SEQ ID NO: 2936454 - RNA, 23 nt, Human
cacuacggaauaguuggcuagga

SEQ ID NO: 2936455 - RNA, 17 nt, Human
cacucuuauugcccacg

SEQ ID NO: 2936456 - RNA, 18 nt, Human
cacucuuauugcccacgc

SEQ ID NO: 2936457 - RNA, 19 nt, Human
cacucuuauugcccacgcu

SEQ ID NO: 2936458 - RNA, 14 nt, Human
caccuuugaagaag

SEQ ID NO: 2936459 - RNA, 17 nt, Human
caccuuuguccccaccg

SEQ ID NO: 2936460 - RNA, 15 nt, Human
caccuuuguccccac

SEQ ID NO: 2936461 - RNA, 14 nt, Human
caccuuugucccca

SEQ ID NO: 2936462 - RNA, 13 nt, Human
caccuuggcucaa

SEQ ID NO: 2936463 - RNA, 22 nt, Human
caccuugcagcucuccccuucu

SEQ ID NO: 2936464 - RNA, 19 nt, Human
caccuugacagggcacacc

SEQ ID NO: 2936465 - RNA, 17 nt, Human
caccugccagggacaga

SEQ ID NO: 2936466 - RNA, 15 nt, Human
caccuugcagcucuc

SEQ ID NO: 2936467 - RNA, 13 nt, Human
caccuugcagcuc

SEQ ID NO: 2936468 - RNA, 13 nt, Human
caccugccaggga

SEQ ID NO: 2936469 - RNA, 23 nt, Human
caccucaaaauaccaugccauuu

SEQ ID NO: 2936470 - RNA, 16 nt, Human
caccugccagggacag

SEQ ID NO: 2936471 - RNA, 14 nt, Human
caccugccagggac

SEQ ID NO: 2936472 - RNA, 21 nt, Human
caccuacaugagguacugaga

SEQ ID NO: 2936473 - RNA, 16 nt, Human
caccguuaucgguguc

SEQ ID NO: 2936474 - RNA, 19 nt, Human
caauaaacauuucauuucc

SEQ ID NO: 2936475 - RNA, 20 nt, Human
caaguauuagaauaccacag

SEQ ID NO: 2936476 - RNA, 14 nt, Human
caaguauuagaaua

SEQ ID NO: 2936477 - RNA, 14 nt, Human
cacaagccuucggc

SEQ ID NO: 2936478 - RNA, 16 nt, Human
cacaagacugcacauc

SEQ ID NO: 2936479 - RNA, 12 nt, Human
caauuuaaaaaa

SEQ ID NO: 2936480 - RNA, 16 nt, Human
cacaagacccuugugg

SEQ ID NO: 2936481 - RNA, 14 nt, Human
cacaagacccuugu

SEQ ID NO: 2936482 - RNA, 22 nt, Human
caaugcugugcccuaaagugua

SEQ ID NO: 2936483 - RNA, 22 nt, Human
caaugcuggcuguuggcugggg

SEQ ID NO: 2936484 - RNA, 23 nt, Human
caaugcuggcuguuggcuggggg

SEQ ID NO: 2936485 - RNA, 14 nt, Human
caaugcuguauuuu

SEQ ID NO: 2936486 - RNA, 23 nt, Human
caaugcuguauuuuaaaagaaug

SEQ ID NO: 2936487 - RNA, 12 nt, Human
caauauuucaga

SEQ ID NO: 2936488 - RNA, 20 nt, Human
caauauuucagauaaucaca

SEQ ID NO: 2936489 - RNA, 16 nt, Human
cacaucuugcucugcu

SEQ ID NO: 2936490 - RNA, 17 nt, Human
cacaucuugcucugcug

SEQ ID NO: 2936491 - RNA, 22 nt, Human
cacaucagcacgauuucuguuu

SEQ ID NO: 2936492 - RNA, 20 nt, Human
cacaucagcacgauuucugu

SEQ ID NO: 2936493 - RNA, 21 nt, Human
cacaucagcacgauuucuguu

SEQ ID NO: 2936494 - RNA, 18 nt, Human
cacaucuugcucugcuga

SEQ ID NO: 2936495 - RNA, 15 nt, Human
cacauuuuauuuuau

SEQ ID NO: 2936496 - RNA, 17 nt, Human
caccaacauacucccau

SEQ ID NO: 2936497 - RNA, 21 nt, Human
caccaacauacucccaucugu

SEQ ID NO: 2936498 - RNA, 20 nt, Human
caccaacauacucccaucug

SEQ ID NO: 2936499 - RNA, 13 nt, Human
cacauuuuucuua

SEQ ID NO: 2936500 - RNA, 14 nt, Human
cacauuuuucuuag

SEQ ID NO: 2936501 - RNA, 17 nt, Human
cacauuuuuuaaaugca

SEQ ID NO: 2936502 - RNA, 21 nt, Human
cacauuuuuuaaaugcaccug

SEQ ID NO: 2936503 - RNA, 24 nt, Human
cacccaggagccccgaggccuucu

SEQ ID NO: 2936504 - RNA, 19 nt, Human
cacccagcccacuucugcc

SEQ ID NO: 2936505 - RNA, 20 nt, Human
cacccaggagccccgaggcc

SEQ ID NO: 2936506 - RNA, 23 nt, Human
cacccaggagccccgaggccuuc

SEQ ID NO: 2936507 - RNA, 21 nt, Human
caccagcccuuagcagggaaa

SEQ ID NO: 2936508 - RNA, 15 nt, Human
caccagcagccugga

SEQ ID NO: 2936509 - RNA, 12 nt, Human
caccagcagccu

SEQ ID NO: 2936510 - RNA, 14 nt, Human
caccagcagccugg

SEQ ID NO: 2936511 - RNA, 23 nt, Human
caccaacauacucccaucuguga

SEQ ID NO: 2936512 - RNA, 16 nt, Human
cacccagcccacuucu

SEQ ID NO: 2936513 - RNA, 17 nt, Human
cacccagcccacuucug

SEQ ID NO: 2936514 - RNA, 22 nt, Human
cacagcuaacauggaaguacua

SEQ ID NO: 2936515 - RNA, 20 nt, Human
cacagcucuguccugggagu

SEQ ID NO: 2936516 - RNA, 23 nt, Human
cacagcucuguccugggagugag

SEQ ID NO: 2936517 - RNA, 10 nt, Human
cacagcucuu

SEQ ID NO: 2936518 - RNA, 19 nt, Human
cacagcucuguccugggag

SEQ ID NO: 2936519 - RNA, 16 nt, Human
cacagcuaacauggaa

SEQ ID NO: 2936520 - RNA, 15 nt, Human
cacagcuaacaugga

SEQ ID NO: 2936521 - RNA, 19 nt, Human
cacagacccugcccugugg

SEQ ID NO: 2936522 - RNA, 21 nt, Human
cacagacccugcccugugggc

SEQ ID NO: 2936523 - RNA, 20 nt, Human
cacagacccugcccuguggg

SEQ ID NO: 2936524 - RNA, 16 nt, Human
cacaguauuacuucug

SEQ ID NO: 2936525 - RNA, 18 nt, Human
cacaguauuacuucugcu

SEQ ID NO: 2936526 - RNA, 19 nt, Human
cacaguauuacuucugcua

SEQ ID NO: 2936527 - RNA, 23 nt, Human
ggccucccaacucaccccagccc

SEQ ID NO: 2936528 - RNA, 22 nt, Human
ggccucccaacucaccccagcc

SEQ ID NO: 2936529 - RNA, 20 nt, Human
ggccucccaacucaccccag

SEQ ID NO: 2936530 - RNA, 13 nt, Human
ggccucagugcca

SEQ ID NO: 2936531 - RNA, 17 nt, Human
ggccucccaacucaccc

SEQ ID NO: 2936532 - RNA, 19 nt, Human
ggccucccaacucacccca

SEQ ID NO: 2936533 - RNA, 18 nt, Human
ggccucccaacucacccc

SEQ ID NO: 2936534 - RNA, 15 nt, Human
ggccagaugcaccag

SEQ ID NO: 2936535 - RNA, 16 nt, Human
ggccagaugcaccagc

SEQ ID NO: 2936536 - RNA, 16 nt, Human
ggccugcaagggagug

SEQ ID NO: 2936537 - RNA, 11 nt, Human
ggccuggaugc

SEQ ID NO: 2936538 - RNA, 20 nt, Human
ggccuggaugcccccugugg

SEQ ID NO: 2936539 - RNA, 16 nt, Human
ggccuggccagaugca

SEQ ID NO: 2936540 - RNA, 12 nt, Human
ggccuggccaga

SEQ ID NO: 2936541 - RNA, 15 nt, Human
ggccuggccagaugc

SEQ ID NO: 2936542 - RNA, 20 nt, Human
ggcuaagugauccucccacc

SEQ ID NO: 2936543 - RNA, 16 nt, Human
ggcuaauguacugcau

SEQ ID NO: 2936544 - RNA, 13 nt, Human
ggcuaccuuugua

SEQ ID NO: 2936545 - RNA, 14 nt, Human
ggcuaccuuuguau

SEQ ID NO: 2936546 - RNA, 15 nt, Human
ggcgugaacccagga

SEQ ID NO: 2936547 - RNA, 15 nt, Human
ggcuaacuuggguua

SEQ ID NO: 2936548 - RNA, 20 nt, Human
ggcuaagcuucacuguaaaa

SEQ ID NO: 2936549 - RNA, 21 nt, Human
ggcgagccauuugucccaagu

SEQ ID NO: 2936550 - RNA, 20 nt, Human
ggccuuccccuggcacuggc

SEQ ID NO: 2936551 - RNA, 18 nt, Human
ggccuucggccuccaucc

SEQ ID NO: 2936552 - RNA, 16 nt, Human
ggccuucggccuccau

SEQ ID NO: 2936553 - RNA, 14 nt, Human
ggccuuccccuggc

SEQ ID NO: 2936554 - RNA, 13 nt, Human
ggcucacugcagc

SEQ ID NO: 2936555 - RNA, 14 nt, Human
ggcucacugcagcc

SEQ ID NO: 2936556 - RNA, 15 nt, Human
ggcucacugcagccu

SEQ ID NO: 2936557 - RNA, 14 nt, Human
ggcucuuccaggcu

SEQ ID NO: 2936558 - RNA, 15 nt, Human
ggcucuuccaggcug

SEQ ID NO: 2936559 - RNA, 18 nt, Human
ggcucuuccaggcuggga

SEQ ID NO: 2936560 - RNA, 17 nt, Human
ggcucuuccaggcuggg

SEQ ID NO: 2936561 - RNA, 13 nt, Human
ggcucccuuccca

SEQ ID NO: 2936562 - RNA, 13 nt, Human
ggcuggccuggcc

SEQ ID NO: 2936563 - RNA, 15 nt, Human
ggcuggccuggcccc

SEQ ID NO: 2936564 - RNA, 14 nt, Human
ggcuggccuggccc

SEQ ID NO: 2936565 - RNA, 22 nt, Human
aaaaaacugcugacuguuuucu

SEQ ID NO: 2936566 - RNA, 14 nt, Human
aaaaaggaggaaga

SEQ ID NO: 2936567 - RNA, 21 nt, Human
aaaaaggaugcacagaguugu

SEQ ID NO: 2936568 - RNA, 12 nt, Human
aaaaaggcagga

SEQ ID NO: 2936569 - RNA, 14 nt, Human
ggcuggguuggagg

SEQ ID NO: 2936570 - RNA, 22 nt, Human
ggcuggguucuacccaggugcu

SEQ ID NO: 2936571 - RNA, 13 nt, Human
aaaaauacaaaaa

SEQ ID NO: 2936572 - RNA, 22 nt, Human
ggagguaaggaauaccuguccc

SEQ ID NO: 2936573 - RNA, 21 nt, Human
ggagggugacgggggugaacu

SEQ ID NO: 2936574 - RNA, 23 nt, Human
ggaggugggauccuccaggugca

SEQ ID NO: 2936575 - RNA, 22 nt, Human
ggaggugggauccuccaggugc

SEQ ID NO: 2936576 - RNA, 20 nt, Human
ggaggcggaccuuguaguga

SEQ ID NO: 2936577 - RNA, 14 nt, Human
ggaggggggaggug

SEQ ID NO: 2936578 - RNA, 13 nt, Human
ggaggggggaggu

SEQ ID NO: 2936579 - RNA, 15 nt, Human
ggaguggccacagaa

SEQ ID NO: 2936580 - RNA, 22 nt, Human
ggagugggcccaaugcacuuug

SEQ ID NO: 2936581 - RNA, 12 nt, Human
ggagugggccca

SEQ ID NO: 2936582 - RNA, 16 nt, Human
ggaguggccacagaaa

SEQ ID NO: 2936583 - RNA, 19 nt, Human
ggaguuauugaagcagagu

SEQ ID NO: 2936584 - RNA, 18 nt, Human
ggaucucuugagccuggg

SEQ ID NO: 2936585 - RNA, 23 nt, Human
ggauccugagccagauuucacuc

SEQ ID NO: 2936586 - RNA, 20 nt, Human
ggauccugagccagauuuca

SEQ ID NO: 2936587 - RNA, 19 nt, Human
ggauccugagccagauuuc

SEQ ID NO: 2936588 - RNA, 18 nt, Human
ggauccugagccagauuu

SEQ ID NO: 2936589 - RNA, 16 nt, Human
ggauccugagccagau

SEQ ID NO: 2936590 - RNA, 15 nt, Human
ggauccugagccaga

SEQ ID NO: 2936591 - RNA, 16 nt, Human
ggaguucaucuugaau

SEQ ID NO: 2936592 - RNA, 22 nt, Human
ggauuuaacagaaauguacagc

SEQ ID NO: 2936593 - RNA, 16 nt, Human
ggauuuaacagaaaug

SEQ ID NO: 2936594 - RNA, 17 nt, Human
ggauuuaacagaaaugu

SEQ ID NO: 2936595 - RNA, 23 nt, Human
ggauugugccuaauguguuugag

SEQ ID NO: 2936596 - RNA, 12 nt, Human
ggauuuaacaga

SEQ ID NO: 2936597 - RNA, 20 nt, Human
ggauuguccccgacccuugc

SEQ ID NO: 2936598 - RNA, 16 nt, Human
ggauuguccccgaccc

SEQ ID NO: 2936599 - RNA, 14 nt, Human
ggaugaaaaaauaa

SEQ ID NO: 2936600 - RNA, 13 nt, Human
ggauuguccccga

SEQ ID NO: 2936601 - RNA, 15 nt, Human
ggcaaaaaggcagga

SEQ ID NO: 2936602 - RNA, 18 nt, Human
ggcacaccgggcacucag

SEQ ID NO: 2936603 - RNA, 16 nt, Human
ggcacugcuuccagug

SEQ ID NO: 2936604 - RNA, 14 nt, Human
ggcacaucauuuca

SEQ ID NO: 2936605 - RNA, 15 nt, Human
ggcacaucauuucaa

SEQ ID NO: 2936606 - RNA, 18 nt, Human
ggcacaucagcacgauuu

SEQ ID NO: 2936607 - RNA, 18 nt, Human
ggcaggaggaucacuuga

SEQ ID NO: 2936608 - RNA, 16 nt, Human
ggcagccccauucugc

SEQ ID NO: 2936609 - RNA, 20 nt, Human
ggcagccccauucugccugc

SEQ ID NO: 2936610 - RNA, 21 nt, Human
ggcagccccauucugccugcc

SEQ ID NO: 2936611 - RNA, 22 nt, Human
ggcagccccauucugccugccc

SEQ ID NO: 2936612 - RNA, 13 nt, Human
ggcagccaggcca

SEQ ID NO: 2936613 - RNA, 20 nt, Human
ggcacugcuuccagugaggc

SEQ ID NO: 2936614 - RNA, 14 nt, Human
ggcauuugcugaau

SEQ ID NO: 2936615 - RNA, 19 nt, Human
ggccaaaggaagcacaugc

SEQ ID NO: 2936616 - RNA, 16 nt, Human
ggccaaaggaagcaca

SEQ ID NO: 2936617 - RNA, 14 nt, Human
ggccaaaggaagca

SEQ ID NO: 2936618 - RNA, 17 nt, Human
ggcauuuguuugaacug

SEQ ID NO: 2936619 - RNA, 13 nt, Human
ggccaaaggaagc

SEQ ID NO: 2936620 - RNA, 17 nt, Human
ggccagagggagugaca

SEQ ID NO: 2936621 - RNA, 19 nt, Human
ggccagagggagugacaga

SEQ ID NO: 2936622 - RNA, 18 nt, Human
ggccagagacacaagccu

SEQ ID NO: 2936623 - RNA, 17 nt, Human
ggccagagacacaagcc

SEQ ID NO: 2936624 - RNA, 20 nt, Human
gguuuguaaauuaacuuuua

SEQ ID NO: 2936625 - RNA, 17 nt, Human
gguuuucacauuggaaa

SEQ ID NO: 2936626 - RNA, 19 nt, Human
gguuuuauuguuuaaaauc

SEQ ID NO: 2936627 - RNA, 22 nt, Human
gguuucuaaagcugccagccga

SEQ ID NO: 2936628 - RNA, 16 nt, Human
gguuucuaaagcugcc

SEQ ID NO: 2936629 - RNA, 15 nt, Human
gguuucagaaaugug

SEQ ID NO: 2936630 - RNA, 14 nt, Human
aaaguguauuuuuu

SEQ ID NO: 2936631 - RNA, 21 nt, Human
aaaguguauuuuuuuacuaau

SEQ ID NO: 2936632 - RNA, 22 nt, Human
aaaguagaucaugcauagagug

SEQ ID NO: 2936633 - RNA, 21 nt, Human
aaaguaucccuacuguaauuu

SEQ ID NO: 2936634 - RNA, 20 nt, Human
aaaguagaagucuuagaugu

SEQ ID NO: 2936635 - RNA, 22 nt, Human
aaaguagaagucuuagauguau

SEQ ID NO: 2936636 - RNA, 14 nt, Human
aaaguaauuuggaa

SEQ ID NO: 2936637 - RNA, 22 nt, Human
aaaguaauuuggaaauuagguu

SEQ ID NO: 2936638 - RNA, 18 nt, Human
aaaguacacuguuucaaa

SEQ ID NO: 2936639 - RNA, 19 nt, Human
aaaguacacuguuucaaac

SEQ ID NO: 2936640 - RNA, 23 nt, Human
gguucccuuugacgccaucccag

SEQ ID NO: 2936641 - RNA, 22 nt, Human
gguucccuuuuuuggcugcuga

SEQ ID NO: 2936642 - RNA, 17 nt, Human
gguucccauuugcuccu

SEQ ID NO: 2936643 - RNA, 19 nt, Human
gguguuuccuggcacugcu

SEQ ID NO: 2936644 - RNA, 17 nt, Human
gguguuuccuggcacug

SEQ ID NO: 2936645 - RNA, 13 nt, Human
ggugggggccucg

SEQ ID NO: 2936646 - RNA, 12 nt, Human
gguguggagaag

SEQ ID NO: 2936647 - RNA, 23 nt, Human
gguguggagaagcggcuggcagc

SEQ ID NO: 2936648 - RNA, 14 nt, Human
gguguggagaagcg

SEQ ID NO: 2936649 - RNA, 13 nt, Human
ggugugggggaag

SEQ ID NO: 2936650 - RNA, 11 nt, Human
gguguggggga

SEQ ID NO: 2936651 - RNA, 20 nt, Human
aaagggauggcaagaugugg

SEQ ID NO: 2936652 - RNA, 20 nt, Human
aaagggcccagagagggugg

SEQ ID NO: 2936653 - RNA, 21 nt, Human
aaagggguaggguuuaaagau

SEQ ID NO: 2936654 - RNA, 20 nt, Human
aaagggcuguuauaaucuuu

SEQ ID NO: 2936655 - RNA, 22 nt, Human
aaagggcuguuauaaucuuuca

SEQ ID NO: 2936656 - RNA, 19 nt, Human
gguggggaccucaggccug

SEQ ID NO: 2936657 - RNA, 16 nt, Human
ggugggacacccugug

SEQ ID NO: 2936658 - RNA, 13 nt, Human
ggugggacacccu

SEQ ID NO: 2936659 - RNA, 17 nt, Human
ggugggacacccuguga

SEQ ID NO: 2936660 - RNA, 20 nt, Human
ggugggaggaucucuugagc

SEQ ID NO: 2936661 - RNA, 18 nt, Human
gguggcuggguuggaggg

SEQ ID NO: 2936662 - RNA, 12 nt, Human
gguggcuggguu

SEQ ID NO: 2936663 - RNA, 16 nt, Human
aaagcagaacagugau

SEQ ID NO: 2936664 - RNA, 20 nt, Human
gguggcaccagcagccugga

SEQ ID NO: 2936665 - RNA, 14 nt, Human
gguggcaccagcag

SEQ ID NO: 2936666 - RNA, 21 nt, Human
ggugcugccauccagguucag

SEQ ID NO: 2936667 - RNA, 12 nt, Human
aaacuuuaugcu

SEQ ID NO: 2936668 - RNA, 19 nt, Human
aaacuuuaugcuaagugaa

SEQ ID NO: 2936669 - RNA, 14 nt, Human
aaagcuaggccugg

SEQ ID NO: 2936670 - RNA, 16 nt, Human
aaagcuaggccuggcc

SEQ ID NO: 2936671 - RNA, 13 nt, Human
aaagcagugcaug

SEQ ID NO: 2936672 - RNA, 13 nt, Human
aaagcugccagcc

SEQ ID NO: 2936673 - RNA, 12 nt, Human
aaagcugccagc

SEQ ID NO: 2936674 - RNA, 22 nt, Human
aaagcugccagccgagauagcc

SEQ ID NO: 2936675 - RNA, 13 nt, Human
guaauaaacucau

SEQ ID NO: 2936676 - RNA, 23 nt, Human
guaauccuagcacuuugggaggc

SEQ ID NO: 2936677 - RNA, 15 nt, Human
guaauuugugauaca

SEQ ID NO: 2936678 - RNA, 17 nt, Human
guaauuugugauacaau

SEQ ID NO: 2936679 - RNA, 20 nt, Human
guaauuugugauacaaugcu

SEQ ID NO: 2936680 - RNA, 21 nt, Human
guaauuuuuuuaucgucacug

SEQ ID NO: 2936681 - RNA, 17 nt, Human
aaauaauuagguauuuu

SEQ ID NO: 2936682 - RNA, 13 nt, Human
guaaacacaucua

SEQ ID NO: 2936683 - RNA, 14 nt, Human
aaauaaugugaaac

SEQ ID NO: 2936684 - RNA, 22 nt, Human
aaauaaugugaaacuggauuaa

SEQ ID NO: 2936685 - RNA, 22 nt, Human
aaaguguauuuuuuuacuaaua

SEQ ID NO: 2936686 - RNA, 17 nt, Human
guaacauagcugugauu

SEQ ID NO: 2936687 - RNA, 20 nt, Human
guaacaggaaaauuuuaaaa

SEQ ID NO: 2936688 - RNA, 19 nt, Human
guaacaggaaaauuuuaaa

SEQ ID NO: 2936689 - RNA, 16 nt, Human
guaacaagccacccca

SEQ ID NO: 2936690 - RNA, 21 nt, Human
aaauauugguugggaugacuu

SEQ ID NO: 2936691 - RNA, 23 nt, Human
aaaucagccugcuccagcuguuc

SEQ ID NO: 2936692 - RNA, 21 nt, Human
aaaucagccugcuccagcugu

SEQ ID NO: 2936693 - RNA, 19 nt, Human
aaaucagccugcuccagcu

SEQ ID NO: 2936694 - RNA, 14 nt, Human
aaauauguuucaca

SEQ ID NO: 2936695 - RNA, 22 nt, Human
aaauauguuucacacaaacaag

SEQ ID NO: 2936696 - RNA, 17 nt, Human
aaauaugcaaagcacug

SEQ ID NO: 2936697 - RNA, 16 nt, Human
aaauaugcaaagcacu

SEQ ID NO: 2936698 - RNA, 15 nt, Human
aaauaugcaaagcac

SEQ ID NO: 2936699 - RNA, 13 nt, Human
aaauaugcaaagc

SEQ ID NO: 2936700 - RNA, 12 nt, Human
aaauaucugaaa

SEQ ID NO: 2936701 - RNA, 14 nt, Human
aaauaucugaaaau

SEQ ID NO: 2936702 - RNA, 17 nt, Human
aaauaucugaaaaugua

SEQ ID NO: 2936703 - RNA, 18 nt, Human
aaauaucugaaaauguau

SEQ ID NO: 2936704 - RNA, 19 nt, Human
aaauaucugaaaauguaug

SEQ ID NO: 2936705 - RNA, 21 nt, Human
aaauaucugaaaauguaugug

SEQ ID NO: 2936706 - RNA, 22 nt, Human
aaauaucugaaaauguaugugu

SEQ ID NO: 2936707 - RNA, 23 nt, Human
aaauaucugaaaauguaugugua

SEQ ID NO: 2936708 - RNA, 15 nt, Human
aaauauaggaacuua

SEQ ID NO: 2936709 - RNA, 20 nt, Human
aaauacgugggcauucaaau

SEQ ID NO: 2936710 - RNA, 21 nt, Human
aaauacgugggcauucaaaug

SEQ ID NO: 2936711 - RNA, 16 nt, Human
guacacacacauacac

SEQ ID NO: 2936712 - RNA, 19 nt, Human
aaauaccagccaguaaaug

SEQ ID NO: 2936713 - RNA, 21 nt, Human
aaauaccaugccauuuaaagc

SEQ ID NO: 2936714 - RNA, 20 nt, Human
aaauaccagccaguaaaugg

SEQ ID NO: 2936715 - RNA, 21 nt, Human
aaauaccagccaguaaauggg

SEQ ID NO: 2936716 - RNA, 18 nt, Human
aaauauaugcuaagucuu

SEQ ID NO: 2936717 - RNA, 23 nt, Human
aaauaucccuuggacauuuuaug

SEQ ID NO: 2936718 - RNA, 22 nt, Human
aaauaucccuuggacauuuuau

SEQ ID NO: 2936719 - RNA, 22 nt, Human
aaauaucacuugucaauaaaau

SEQ ID NO: 2936720 - RNA, 18 nt, Human
gguaacuagggaagauaa

SEQ ID NO: 2936721 - RNA, 23 nt, Human
ggguuuugccauguuggccaggc

SEQ ID NO: 2936722 - RNA, 20 nt, Human
ggguuuugccauguuggcca

SEQ ID NO: 2936723 - RNA, 20 nt, Human
ggguuuuauuguuuaaaauc

SEQ ID NO: 2936724 - RNA, 21 nt, Human
aaacguggcugcuucaaggau

SEQ ID NO: 2936725 - RNA, 20 nt, Human
aaacguggcugcuucaagga

SEQ ID NO: 2936726 - RNA, 19 nt, Human
aaacuguuaauaguucagg

SEQ ID NO: 2936727 - RNA, 18 nt, Human
gggugggacacccuguga

SEQ ID NO: 2936728 - RNA, 15 nt, Human
gggugggacacccug

SEQ ID NO: 2936729 - RNA, 19 nt, Human
aaacuuaaucuaaauggaa

SEQ ID NO: 2936730 - RNA, 20 nt, Human
gguaggguaagugagagagg

SEQ ID NO: 2936731 - RNA, 16 nt, Human
gguauagauguugcua

SEQ ID NO: 2936732 - RNA, 14 nt, Human
gguaucaggugcug

SEQ ID NO: 2936733 - RNA, 20 nt, Human
gguaaggaauaccugucccc

SEQ ID NO: 2936734 - RNA, 18 nt, Human
aaacuuuacuauggcccu

SEQ ID NO: 2936735 - RNA, 22 nt, Human
aaacuugauguguuaucucuua

SEQ ID NO: 2936736 - RNA, 19 nt, Human
gguaucaggugcugccauc

SEQ ID NO: 2936737 - RNA, 14 nt, Human
ggucagugcaaaua

SEQ ID NO: 2936738 - RNA, 22 nt, Human
aaaccugugucucugagaguag

SEQ ID NO: 2936739 - RNA, 15 nt, Human
aaacauuucauuucc

SEQ ID NO: 2936740 - RNA, 19 nt, Human
aaacauuuugucauauaag

SEQ ID NO: 2936741 - RNA, 20 nt, Human
gggucacucuggcagcucag

SEQ ID NO: 2936742 - RNA, 14 nt, Human
gggucacucuggca

SEQ ID NO: 2936743 - RNA, 13 nt, Human
ggggaccagagcu

SEQ ID NO: 2936744 - RNA, 12 nt, Human
ggggaccagagc

SEQ ID NO: 2936745 - RNA, 18 nt, Human
aaaauguauguguaagua

SEQ ID NO: 2936746 - RNA, 14 nt, Human
ggggaccagagcug

SEQ ID NO: 2936747 - RNA, 19 nt, Human
ggggccaguuggucccccu

SEQ ID NO: 2936748 - RNA, 17 nt, Human
gggggaucacagccucu

SEQ ID NO: 2936749 - RNA, 21 nt, Human
gggggcagugcucacccacac

SEQ ID NO: 2936750 - RNA, 14 nt, Human
gggggcugcuccca

SEQ ID NO: 2936751 - RNA, 11 nt, Human
gggggcuggga

SEQ ID NO: 2936752 - RNA, 21 nt, Human
ggggucacucuggcagcucag

SEQ ID NO: 2936753 - RNA, 16 nt, Human
gggguaaggugcaucu

SEQ ID NO: 2936754 - RNA, 13 nt, Human
ggggguggccucc

SEQ ID NO: 2936755 - RNA, 15 nt, Human
gggggcugggcagag

SEQ ID NO: 2936756 - RNA, 17 nt, Human
gggccaugucagacaca

SEQ ID NO: 2936757 - RNA, 14 nt, Human
gggccaggagccuc

SEQ ID NO: 2936758 - RNA, 13 nt, Human
gggccaggagccu

SEQ ID NO: 2936759 - RNA, 12 nt, Human
gggccaggagcc

SEQ ID NO: 2936760 - RNA, 15 nt, Human
gggcgugguggcagg

SEQ ID NO: 2936761 - RNA, 21 nt, Human
gggcggugagaggggaacaga

SEQ ID NO: 2936762 - RNA, 13 nt, Human
gggccucagugcc

SEQ ID NO: 2936763 - RNA, 14 nt, Human
gggccucagugcca

SEQ ID NO: 2936764 - RNA, 15 nt, Human
gggccucagugccac

SEQ ID NO: 2936765 - RNA, 18 nt, Human
gggccucuuaugggcugg

SEQ ID NO: 2936766 - RNA, 21 nt, Human
gggccucugcggagcacacug

SEQ ID NO: 2936767 - RNA, 23 nt, Human
gggccucugcggagcacacuggc

SEQ ID NO: 2936768 - RNA, 22 nt, Human
gggccucgguguggagaagcgg

SEQ ID NO: 2936769 - RNA, 15 nt, Human
gggcucccagccagg

SEQ ID NO: 2936770 - RNA, 17 nt, Human
gggcucccagccaggcc

SEQ ID NO: 2936771 - RNA, 19 nt, Human
gggcucccagccaggcccu

SEQ ID NO: 2936772 - RNA, 19 nt, Human
gggcugcaccggcuggccu

SEQ ID NO: 2936773 - RNA, 17 nt, Human
gggcugcaccggcuggc

SEQ ID NO: 2936774 - RNA, 21 nt, Human
gggcucagcggggacagcucc

SEQ ID NO: 2936775 - RNA, 13 nt, Human
gggcuccagacac

SEQ ID NO: 2936776 - RNA, 10 nt, Human
gggcuccaga

SEQ ID NO: 2936777 - RNA, 22 nt, Human
gggcucagcaaaagaugcuucu

SEQ ID NO: 2936778 - RNA, 15 nt, Human
gggcuaguugggcuu

SEQ ID NO: 2936779 - RNA, 17 nt, Human
gggcucagcggggacag

SEQ ID NO: 2936780 - RNA, 19 nt, Human
gggcucagcggggacagcu

SEQ ID NO: 2936781 - RNA, 13 nt, Human
gggcugcucccac

SEQ ID NO: 2936782 - RNA, 21 nt, Human
gggcugcaccggcuggccugg

SEQ ID NO: 2936783 - RNA, 20 nt, Human
gggcugcaccggcuggccug

SEQ ID NO: 2936784 - RNA, 18 nt, Human
gggcugcucccaccuggc

SEQ ID NO: 2936785 - RNA, 21 nt, Human
gggcugcucccaccuggcucu

SEQ ID NO: 2936786 - RNA, 22 nt, Human
gggcugcucccaccuggcucug

SEQ ID NO: 2936787 - RNA, 23 nt, Human
gggcugcucccaccuggcucugu

SEQ ID NO: 2936788 - RNA, 15 nt, Human
gggcugggcagagga

SEQ ID NO: 2936789 - RNA, 12 nt, Human
gggcugggcaga

SEQ ID NO: 2936790 - RNA, 16 nt, Human
aaaauggguuuuacug

SEQ ID NO: 2936791 - RNA, 17 nt, Human
gggcuggguucuaccca

SEQ ID NO: 2936792 - RNA, 22 nt, Human
gggcugggccucggaccccacu

SEQ ID NO: 2936793 - RNA, 20 nt, Human
aaaaugguguuuuaucuucu

SEQ ID NO: 2936794 - RNA, 22 nt, Human
aaaaugguagcauuuuaaacaa

SEQ ID NO: 2936795 - RNA, 16 nt, Human
aaaaugguuuaaaugg

SEQ ID NO: 2936796 - RNA, 18 nt, Human
aaaaugguuuaaaugguc

SEQ ID NO: 2936797 - RNA, 20 nt, Human
aaaauggaagacagcucuua

SEQ ID NO: 2936798 - RNA, 17 nt, Human
aaaauagaauugacauu

SEQ ID NO: 2936799 - RNA, 13 nt, Human
aaaauagaaaguu

SEQ ID NO: 2936800 - RNA, 17 nt, Human
aaaaucucaauauuuca

SEQ ID NO: 2936801 - RNA, 16 nt, Human
aaaauauuuuccugcc

SEQ ID NO: 2936802 - RNA, 11 nt, Human
aaaaggcagga

SEQ ID NO: 2936803 - RNA, 17 nt, Human
aaaagguuaauaaagua

SEQ ID NO: 2936804 - RNA, 16 nt, Human
aaaagguuaauaaagu

SEQ ID NO: 2936805 - RNA, 22 nt, Human
aaaaggagccaauuuaaagaaa

SEQ ID NO: 2936806 - RNA, 13 nt, Human
aaaaggaugcaca

SEQ ID NO: 2936807 - RNA, 14 nt, Human
aaaaggaugcacag

SEQ ID NO: 2936808 - RNA, 15 nt, Human
aaaaggaugcacaga

SEQ ID NO: 2936809 - RNA, 19 nt, Human
aaaaggaugcacagaguug

SEQ ID NO: 2936810 - RNA, 22 nt, Human
aaaaggaugcacagaguuguua

SEQ ID NO: 2936811 - RNA, 13 nt, Human
aaaauaagucuga

SEQ ID NO: 2936812 - RNA, 19 nt, Human
aaaauaauuagguauuuuc

SEQ ID NO: 2936813 - RNA, 14 nt, Human
aaaauaaucucuga

SEQ ID NO: 2936814 - RNA, 11 nt, Human
aaaauaauuuu

SEQ ID NO: 2936815 - RNA, 13 nt, Human
aaaauaccaagga

SEQ ID NO: 2936816 - RNA, 14 nt, Human
aaaauacacacuca

SEQ ID NO: 2936817 - RNA, 16 nt, Human
aaaauaauuuuuauau

SEQ ID NO: 2936818 - RNA, 17 nt, Human
aaaauaauuuuuauauu

SEQ ID NO: 2936819 - RNA, 16 nt, Human
gcggccuuuggcuuca

SEQ ID NO: 2936820 - RNA, 15 nt, Human
gcggcuggcagccca

SEQ ID NO: 2936821 - RNA, 21 nt, Human
gcgcagcauauucaggaagcu

SEQ ID NO: 2936822 - RNA, 20 nt, Human
gcgcagcauauucaggaagc

SEQ ID NO: 2936823 - RNA, 23 nt, Human
gcgauucuucugcuucagccucc

SEQ ID NO: 2936824 - RNA, 23 nt, Human
gccuugaccauucuccaccugcc

SEQ ID NO: 2936825 - RNA, 22 nt, Human
gcgauucuucugcuucagccuc

SEQ ID NO: 2936826 - RNA, 17 nt, Human
gcgauucuucugcuuca

SEQ ID NO: 2936827 - RNA, 23 nt, Human
gccuugaacuuugaccucugcag

SEQ ID NO: 2936828 - RNA, 22 nt, Human
gccuugaccauucuccaccugc

SEQ ID NO: 2936829 - RNA, 21 nt, Human
gccuugaccauucuccaccug

SEQ ID NO: 2936830 - RNA, 16 nt, Human
gccuugaccauucucc

SEQ ID NO: 2936831 - RNA, 18 nt, Human
gccugggcaacagagcaa

SEQ ID NO: 2936832 - RNA, 20 nt, Human
gccugggcaacagagcaaga

SEQ ID NO: 2936833 - RNA, 21 nt, Human
gccugggcaacagagcaagac

SEQ ID NO: 2936834 - RNA, 11 nt, Human
gccugggcaga

SEQ ID NO: 2936835 - RNA, 21 nt, Human
gccugggaucccucauccuca

SEQ ID NO: 2936836 - RNA, 23 nt, Human
gccugggaucccucauccucaua

SEQ ID NO: 2936837 - RNA, 19 nt, Human
gccugugccucugggacug

SEQ ID NO: 2936838 - RNA, 14 nt, Human
gccuugaacuuuga

SEQ ID NO: 2936839 - RNA, 15 nt, Human
gccuguucagcucca

SEQ ID NO: 2936840 - RNA, 14 nt, Human
gccuguucagcucc

SEQ ID NO: 2936841 - RNA, 16 nt, Human
gccuguucagcuccag

SEQ ID NO: 2936842 - RNA, 17 nt, Human
gccuguucagcuccagc

SEQ ID NO: 2936843 - RNA, 15 nt, Human
gccuucucugaagga

SEQ ID NO: 2936844 - RNA, 16 nt, Human
gccuucucugaaggac

SEQ ID NO: 2936845 - RNA, 23 nt, Human
gccuucggccuccauccugaggc

SEQ ID NO: 2936846 - RNA, 20 nt, Human
gcucagggccuggcucaggu

SEQ ID NO: 2936847 - RNA, 17 nt, Human
gcucagggccuggcuca

SEQ ID NO: 2936848 - RNA, 13 nt, Human
gcucaggaguuug

SEQ ID NO: 2936849 - RNA, 19 nt, Human
gcucagggccuggcucagg

SEQ ID NO: 2936850 - RNA, 18 nt, Human
gcucagggccuggcucag

SEQ ID NO: 2936851 - RNA, 18 nt, Human
gcuaagugauccucccac

SEQ ID NO: 2936852 - RNA, 22 nt, Human
gcuaagugauccucccaccuca

SEQ ID NO: 2936853 - RNA, 20 nt, Human
gcuaggaccccuccaugugg

SEQ ID NO: 2936854 - RNA, 22 nt, Human
gcuaggugacauauacauacuu

SEQ ID NO: 2936855 - RNA, 14 nt, Human
gcuaguugggcuuc

SEQ ID NO: 2936856 - RNA, 16 nt, Human
gcuaguugggcuuccu

SEQ ID NO: 2936857 - RNA, 17 nt, Human
gccccuggcagccccug

SEQ ID NO: 2936858 - RNA, 16 nt, Human
gccccuggcagccccu

SEQ ID NO: 2936859 - RNA, 15 nt, Human
gcccugcccaccugg

SEQ ID NO: 2936860 - RNA, 14 nt, Human
gcccugcccaccug

SEQ ID NO: 2936861 - RNA, 23 nt, Human
gcccuuaccugccaggaagccag

SEQ ID NO: 2936862 - RNA, 22 nt, Human
gcccuuaccugccaggaagcca

SEQ ID NO: 2936863 - RNA, 21 nt, Human
gcccuuaccugccaggaagcc

SEQ ID NO: 2936864 - RNA, 17 nt, Human
gcccugugggcccccaa

SEQ ID NO: 2936865 - RNA, 16 nt, Human
gcccugugggccccca

SEQ ID NO: 2936866 - RNA, 16 nt, Human
gccuacaggagugagc

SEQ ID NO: 2936867 - RNA, 12 nt, Human
gccuagcauacg

SEQ ID NO: 2936868 - RNA, 19 nt, Human
gccuagcauacguacacau

SEQ ID NO: 2936869 - RNA, 17 nt, Human
gccuacaggagugagca

SEQ ID NO: 2936870 - RNA, 22 nt, Human
gccucauguccacugguucuuc

SEQ ID NO: 2936871 - RNA, 12 nt, Human
gccuccauccug

SEQ ID NO: 2936872 - RNA, 14 nt, Human
gccucugggacugg

SEQ ID NO: 2936873 - RNA, 16 nt, Human
gccucgaacuggcugc

SEQ ID NO: 2936874 - RNA, 13 nt, Human
gccucgaacuggc

SEQ ID NO: 2936875 - RNA, 22 nt, Human
gccuccuuugugaggaagccgc

SEQ ID NO: 2936876 - RNA, 13 nt, Human
gccuccauccuga

SEQ ID NO: 2936877 - RNA, 14 nt, Human
gccuccauccugag

SEQ ID NO: 2936878 - RNA, 11 nt, Human
gccccaaaagg

SEQ ID NO: 2936879 - RNA, 21 nt, Human
gccccaaaacucuccucugcu

SEQ ID NO: 2936880 - RNA, 20 nt, Human
gccccaaaacucuccucugc

SEQ ID NO: 2936881 - RNA, 16 nt, Human
gccccaccagugccuc

SEQ ID NO: 2936882 - RNA, 17 nt, Human
gccccaccagugccucu

SEQ ID NO: 2936883 - RNA, 18 nt, Human
gccccaccagugccucuc

SEQ ID NO: 2936884 - RNA, 22 nt, Human
gccccaccagugccucucccug

SEQ ID NO: 2936885 - RNA, 13 nt, Human
gccccaccagugc

SEQ ID NO: 2936886 - RNA, 14 nt, Human
gccccaccagugcc

SEQ ID NO: 2936887 - RNA, 15 nt, Human
gccccaccagugccu

SEQ ID NO: 2936888 - RNA, 18 nt, Human
gccccacagccccaucug

SEQ ID NO: 2936889 - RNA, 12 nt, Human
gccccugcuggu

SEQ ID NO: 2936890 - RNA, 15 nt, Human
gccccugcugguuca

SEQ ID NO: 2936891 - RNA, 16 nt, Human
gccccugcugguucag

SEQ ID NO: 2936892 - RNA, 15 nt, Human
gccccuggcagcccc

SEQ ID NO: 2936893 - RNA, 12 nt, Human
gccccuggcagc

SEQ ID NO: 2936894 - RNA, 18 nt, Human
gcccaggccccugccacc

SEQ ID NO: 2936895 - RNA, 22 nt, Human
gcccaggccccugccacccugg

SEQ ID NO: 2936896 - RNA, 20 nt, Human
gcccaggccccugccacccu

SEQ ID NO: 2936897 - RNA, 21 nt, Human
gcccaggccccugccacccug

SEQ ID NO: 2936898 - RNA, 11 nt, Human
gcccaggcccc

SEQ ID NO: 2936899 - RNA, 12 nt, Human
gcccaggccccu

SEQ ID NO: 2936900 - RNA, 11 nt, Human
gcccaggcagg

SEQ ID NO: 2936901 - RNA, 20 nt, Human
gcccaggaguuuggccagaa

SEQ ID NO: 2936902 - RNA, 19 nt, Human
gcccaggaguuuggccaga

SEQ ID NO: 2936903 - RNA, 23 nt, Human
gcccacgcuggagugcagugagc

SEQ ID NO: 2936904 - RNA, 19 nt, Human
gcccacgcuggagugcagu

SEQ ID NO: 2936905 - RNA, 21 nt, Human
gcccacgcuggagugcaguga

SEQ ID NO: 2936906 - RNA, 13 nt, Human
gcccacuucugcc

SEQ ID NO: 2936907 - RNA, 23 nt, Human
gcccaggaaaggcuccaggagca

SEQ ID NO: 2936908 - RNA, 22 nt, Human
gcccaggaaaggcuccaggagc

SEQ ID NO: 2936909 - RNA, 24 nt, Human
gcccaggaaaggcuccaggagcag

SEQ ID NO: 2936910 - RNA, 21 nt, Human
gcccacgcccccacuggugac

SEQ ID NO: 2936911 - RNA, 17 nt, Human
gcccacgcccccacugg

SEQ ID NO: 2936912 - RNA, 16 nt, Human
gcccacgcccccacug

SEQ ID NO: 2936913 - RNA, 15 nt, Human
gcccacgcccccacu

SEQ ID NO: 2936914 - RNA, 18 nt, Human
gcauuuacuuuguguuca

SEQ ID NO: 2936915 - RNA, 12 nt, Human
gcauuuagaugu

SEQ ID NO: 2936916 - RNA, 19 nt, Human
gcauuuaggccaugggaca

SEQ ID NO: 2936917 - RNA, 13 nt, Human
gcauuuagaugua

SEQ ID NO: 2936918 - RNA, 16 nt, Human
gcugagauccuggacu

SEQ ID NO: 2936919 - RNA, 14 nt, Human
gcugagauccugga

SEQ ID NO: 2936920 - RNA, 22 nt, Human
gcugagauccuggacugagggg

SEQ ID NO: 2936921 - RNA, 16 nt, Human
gcugaggcaggagacu

SEQ ID NO: 2936922 - RNA, 21 nt, Human
gcugaggcaggagacuggcgu

SEQ ID NO: 2936923 - RNA, 14 nt, Human
gcugaggcaggaga

SEQ ID NO: 2936924 - RNA, 13 nt, Human
gcugaggcaggag

SEQ ID NO: 2936925 - RNA, 14 nt, Human
gcugaggugggagg

SEQ ID NO: 2936926 - RNA, 23 nt, Human
gcugagggugagugggugaauaa

SEQ ID NO: 2936927 - RNA, 18 nt, Human
gcugagggugagugggug

SEQ ID NO: 2936928 - RNA, 13 nt, Human
gcugcaccggcug

SEQ ID NO: 2936929 - RNA, 19 nt, Human
gcugcacccucaggcaggu

SEQ ID NO: 2936930 - RNA, 18 nt, Human
gcugcacccucaggcagg

SEQ ID NO: 2936931 - RNA, 16 nt, Human
gcugccccugcacagc

SEQ ID NO: 2936932 - RNA, 19 nt, Human
gcugccccuggcagccccu

SEQ ID NO: 2936933 - RNA, 18 nt, Human
gcugccccuggcagcccc

SEQ ID NO: 2936934 - RNA, 20 nt, Human
gcugccccuggcagccccug

SEQ ID NO: 2936935 - RNA, 17 nt, Human
gcugccccuggcagccc

SEQ ID NO: 2936936 - RNA, 21 nt, Human
gcugccugggaucccucaucc

SEQ ID NO: 2936937 - RNA, 17 nt, Human
gcugccuguucagcucc

SEQ ID NO: 2936938 - RNA, 12 nt, Human
gcugccuguuca

SEQ ID NO: 2936939 - RNA, 13 nt, Human
gcugccuguucag

SEQ ID NO: 2936940 - RNA, 20 nt, Human
gcugccugggaucccucauc

SEQ ID NO: 2936941 - RNA, 16 nt, Human
gcugccucucccauca

SEQ ID NO: 2936942 - RNA, 21 nt, Human
gcuggguucuacccaggugcu

SEQ ID NO: 2936943 - RNA, 20 nt, Human
gcuggguucuacccaggugc

SEQ ID NO: 2936944 - RNA, 17 nt, Human
gcuggguucuacccagg

SEQ ID NO: 2936945 - RNA, 18 nt, Human
gcuggguucuacccaggu

SEQ ID NO: 2936946 - RNA, 23 nt, Human
gcugggguggggaccucaggccu

SEQ ID NO: 2936947 - RNA, 22 nt, Human
gcugggguggggaccucaggcc

SEQ ID NO: 2936948 - RNA, 14 nt, Human
gcugggcagguugg

SEQ ID NO: 2936949 - RNA, 17 nt, Human
gcuggcuguuggcuggg

SEQ ID NO: 2936950 - RNA, 20 nt, Human
gcuggcuguuggcugggggc

SEQ ID NO: 2936951 - RNA, 23 nt, Human
gcuggcuguuggcugggggccuc

SEQ ID NO: 2936952 - RNA, 19 nt, Human
gcugggguggggaccucag

SEQ ID NO: 2936953 - RNA, 17 nt, Human
gcugggguggggaccuc

SEQ ID NO: 2936954 - RNA, 14 nt, Human
gcuggcgugcagug

SEQ ID NO: 2936955 - RNA, 15 nt, Human
gcuggcgugcagugg

SEQ ID NO: 2936956 - RNA, 18 nt, Human
gcuggcgugcaguggugc

SEQ ID NO: 2936957 - RNA, 18 nt, Human
gcuggcuguuggcugggg

SEQ ID NO: 2936958 - RNA, 19 nt, Human
gcuggcuguuggcuggggg

SEQ ID NO: 2936959 - RNA, 13 nt, Human
gcugcugaaacaa

SEQ ID NO: 2936960 - RNA, 12 nt, Human
gcugcugaaggc

SEQ ID NO: 2936961 - RNA, 17 nt, Human
gcuguaucccaugagcc

SEQ ID NO: 2936962 - RNA, 21 nt, Human
gcuguauuuuaaaagaaugau

SEQ ID NO: 2936963 - RNA, 20 nt, Human
gcuguauuuuaaaagaauga

SEQ ID NO: 2936964 - RNA, 18 nt, Human
gcuguauuuuaaaagaau

SEQ ID NO: 2936965 - RNA, 13 nt, Human
gcugugcucugga

SEQ ID NO: 2936966 - RNA, 14 nt, Human
gcugugcugcccug

SEQ ID NO: 2936967 - RNA, 15 nt, Human
gcugugcucuggaca

SEQ ID NO: 2936968 - RNA, 16 nt, Human
gcugugcucuggacag

SEQ ID NO: 2936969 - RNA, 14 nt, Human
gcuguuggcugggg

SEQ ID NO: 2936970 - RNA, 16 nt, Human
gcuguuggcugggggc

SEQ ID NO: 2936971 - RNA, 20 nt, Human
gcuguuggcugggggccuca

SEQ ID NO: 2936972 - RNA, 15 nt, Human
gcuguuggcuggggg

SEQ ID NO: 2936973 - RNA, 17 nt, Human
gcugugcugcccugccc

SEQ ID NO: 2936974 - RNA, 16 nt, Human
gcugugcugcccugcc

SEQ ID NO: 2936975 - RNA, 15 nt, Human
gcugugcugcccugc

SEQ ID NO: 2936976 - RNA, 19 nt, Human
gcuugggcuucauccuccu

SEQ ID NO: 2936977 - RNA, 22 nt, Human
gcuuggggaccagagcugccac

SEQ ID NO: 2936978 - RNA, 21 nt, Human
gcuuggggaccagagcugcca

SEQ ID NO: 2936979 - RNA, 20 nt, Human
gcuuggggaccagagcugcc

SEQ ID NO: 2936980 - RNA, 18 nt, Human
gcuuggggaccagagcug

SEQ ID NO: 2936981 - RNA, 17 nt, Human
gcuuggggaccagagcu

SEQ ID NO: 2936982 - RNA, 23 nt, Human
gcuuucuacccagcgagcccugg

SEQ ID NO: 2936983 - RNA, 13 nt, Human
gcuuucuacccag

SEQ ID NO: 2936984 - RNA, 19 nt, Human
gcuuucuacccagcgagcc

SEQ ID NO: 2936985 - RNA, 22 nt, Human
gcuuucuacccagcgagcccug

SEQ ID NO: 2936986 - RNA, 14 nt, Human
gcuuaacuucacau

SEQ ID NO: 2936987 - RNA, 17 nt, Human
gcuuaacuucacauauu

SEQ ID NO: 2936988 - RNA, 16 nt, Human
gcuucuucagagacuc

SEQ ID NO: 2936989 - RNA, 16 nt, Human
gcuuaacuucacauau

SEQ ID NO: 2936990 - RNA, 16 nt, Human
gcuuggggaccagagc

SEQ ID NO: 2936991 - RNA, 23 nt, Human
gcuugggcuucauccuccucaga

SEQ ID NO: 2936992 - RNA, 19 nt, Human
gcuugaccgugaggccaga

SEQ ID NO: 2936993 - RNA, 18 nt, Human
gcuugaccgugaggccag

SEQ ID NO: 2936994 - RNA, 17 nt, Human
gcuugaccgugaggcca

SEQ ID NO: 2936995 - RNA, 23 nt, Human
gcuucuucagagacuccugcagg

SEQ ID NO: 2936996 - RNA, 16 nt, Human
gcuugaccgugaggcc

SEQ ID NO: 2936997 - RNA, 21 nt, Human
gcuucuucagagacuccugca

SEQ ID NO: 2936998 - RNA, 19 nt, Human
gcuucuucagagacuccug

SEQ ID NO: 2936999 - RNA, 13 nt, Human
gcuuuugcauauu

SEQ ID NO: 2937000 - RNA, 17 nt, Human
ggaaaggaaugcaaaga

SEQ ID NO: 2937001 - RNA, 24 nt, Human
ggaaaggaagugggacuggcacua

SEQ ID NO: 2937002 - RNA, 13 nt, Human
ggaaaggaaugca

SEQ ID NO: 2937003 - RNA, 14 nt, Human
ggaaagaggcucug

SEQ ID NO: 2937004 - RNA, 20 nt, Human
ggaaagacuuuuccaacccu

SEQ ID NO: 2937005 - RNA, 17 nt, Human
ggaaagaguaggaagac

SEQ ID NO: 2937006 - RNA, 16 nt, Human
ggaaagaguaggaaga

SEQ ID NO: 2937007 - RNA, 19 nt, Human
ggaaagcaaaggagauugg

SEQ ID NO: 2937008 - RNA, 17 nt, Human
ggaaacagaugaaaagc

SEQ ID NO: 2937009 - RNA, 20 nt, Human
ggaaacagcuaaugggacac

SEQ ID NO: 2937010 - RNA, 15 nt, Human
ggaaacccagcucug

SEQ ID NO: 2937011 - RNA, 13 nt, Human
ggaaacugccagc

SEQ ID NO: 2937012 - RNA, 15 nt, Human
gcuuuuuaauauuga

SEQ ID NO: 2937013 - RNA, 13 nt, Human
gcuuuugugcauu

SEQ ID NO: 2937014 - RNA, 19 nt, Human
gcuuuugugcauuaucuag

SEQ ID NO: 2937015 - RNA, 16 nt, Human
ggaaaaaauaacaaug

SEQ ID NO: 2937016 - RNA, 19 nt, Human
ggaaaucaggguuaguauu

SEQ ID NO: 2937017 - RNA, 23 nt, Human
ggaaaucaccgaaaacguggcug

SEQ ID NO: 2937018 - RNA, 21 nt, Human
ggaagccagcaggcucucagg

SEQ ID NO: 2937019 - RNA, 23 nt, Human
ggaagccagcaggcucucaggcc

SEQ ID NO: 2937020 - RNA, 22 nt, Human
ggaagccagcaggcucucaggc

SEQ ID NO: 2937021 - RNA, 18 nt, Human
ggaagccgcuggggccag

SEQ ID NO: 2937022 - RNA, 13 nt, Human
ggacauggacaag

SEQ ID NO: 2937023 - RNA, 19 nt, Human
ggacauauauuuuuuaaaa

SEQ ID NO: 2937024 - RNA, 23 nt, Human
ggacacccugugauggggcccug

SEQ ID NO: 2937025 - RNA, 13 nt, Human
ggacacccuguga

SEQ ID NO: 2937026 - RNA, 23 nt, Human
ggacaggcauguucucugaggac

SEQ ID NO: 2937027 - RNA, 17 nt, Human
ggacagggaggugaccc

SEQ ID NO: 2937028 - RNA, 21 nt, Human
ggacagucaccucauggaauu

SEQ ID NO: 2937029 - RNA, 17 nt, Human
ggacagucaccucaugg

SEQ ID NO: 2937030 - RNA, 18 nt, Human
ggacagucaccucaugga

SEQ ID NO: 2937031 - RNA, 19 nt, Human
ggaaugaaugucaguguga

SEQ ID NO: 2937032 - RNA, 20 nt, Human
ggaaugauauaagguuuuuu

SEQ ID NO: 2937033 - RNA, 12 nt, Human
ggacacagcucu

SEQ ID NO: 2937034 - RNA, 13 nt, Human
ggacacagcucuu

SEQ ID NO: 2937035 - RNA, 12 nt, Human
ggacacccugug

SEQ ID NO: 2937036 - RNA, 16 nt, Human
ggaauauauaaccagu

SEQ ID NO: 2937037 - RNA, 19 nt, Human
ggaauacucuuauaucuau

SEQ ID NO: 2937038 - RNA, 19 nt, Human
ggaauaccugucccccuga

SEQ ID NO: 2937039 - RNA, 16 nt, Human
ggaauaccuguccccc

SEQ ID NO: 2937040 - RNA, 15 nt, Human
ggaauaccugucccc

SEQ ID NO: 2937041 - RNA, 21 nt, Human
ggaagcucagggccuggcuca

SEQ ID NO: 2937042 - RNA, 17 nt, Human
ggaagcucagggccugg

SEQ ID NO: 2937043 - RNA, 16 nt, Human
ggaagcucagggccug

SEQ ID NO: 2937044 - RNA, 18 nt, Human
gcauccaguaucuugaag

SEQ ID NO: 2937045 - RNA, 17 nt, Human
gcauccaguaucuugaa

SEQ ID NO: 2937046 - RNA, 14 nt, Human
gcauccaguaucuu

SEQ ID NO: 2937047 - RNA, 13 nt, Human
gcauccuggcacc

SEQ ID NO: 2937048 - RNA, 21 nt, Human
gcauggcugccaaugggagcu

SEQ ID NO: 2937049 - RNA, 16 nt, Human
gcaugguuuggagcug

SEQ ID NO: 2937050 - RNA, 19 nt, Human
gcaugugaugagaggaaau

SEQ ID NO: 2937051 - RNA, 18 nt, Human
gcaugugaugagaggaaa

SEQ ID NO: 2937052 - RNA, 21 nt, Human
gcaugugaugagaggaaauca

SEQ ID NO: 2937053 - RNA, 15 nt, Human
gcauugugggaaggg

SEQ ID NO: 2937054 - RNA, 13 nt, Human
gcauugugggaag

SEQ ID NO: 2937055 - RNA, 15 nt, Human
gcauuuacuuugugu

SEQ ID NO: 2937056 - RNA, 18 nt, Human
gcauuuaaaagauacagu

SEQ ID NO: 2937057 - RNA, 22 nt, Human
gcauuuaaaagauacaguuacu

SEQ ID NO: 2937058 - RNA, 18 nt, Human
gcauugugggaaggggag

SEQ ID NO: 2937059 - RNA, 16 nt, Human
gcauugugggaagggg

SEQ ID NO: 2937060 - RNA, 16 nt, Human
gcauuuaaaagauaca

SEQ ID NO: 2937061 - RNA, 17 nt, Human
gcauuuaaaagauacag

SEQ ID NO: 2937062 - RNA, 15 nt, Human
gcauacguacacauu

SEQ ID NO: 2937063 - RNA, 16 nt, Human
gcauacguacacauuu

SEQ ID NO: 2937064 - RNA, 17 nt, Human
gcauacguacacauuuu

SEQ ID NO: 2937065 - RNA, 13 nt, Human
gcagugaugucac

SEQ ID NO: 2937066 - RNA, 22 nt, Human
gcaguuguugcccacagcugua

SEQ ID NO: 2937067 - RNA, 14 nt, Human
gcagugagacuggg

SEQ ID NO: 2937068 - RNA, 13 nt, Human
gcagugagacugg

SEQ ID NO: 2937069 - RNA, 14 nt, Human
gcagucuucaguuu

SEQ ID NO: 2937070 - RNA, 15 nt, Human
gcagcucuccccuuc

SEQ ID NO: 2937071 - RNA, 18 nt, Human
gcagcccaccccucaaca

SEQ ID NO: 2937072 - RNA, 15 nt, Human
gcagccacauuccug

SEQ ID NO: 2937073 - RNA, 20 nt, Human
gcacucagaagacacugaug

SEQ ID NO: 2937074 - RNA, 17 nt, Human
gcacucagaagacacug

SEQ ID NO: 2937075 - RNA, 18 nt, Human
gcaagugagagcugggug

SEQ ID NO: 2937076 - RNA, 14 nt, Human
gcacuccagccugg

SEQ ID NO: 2937077 - RNA, 14 nt, Human
gcacuccccugcug

SEQ ID NO: 2937078 - RNA, 13 nt, Human
gcacuccccugcu

SEQ ID NO: 2937079 - RNA, 19 nt, Human
gcacuuuguucuggcucuu

SEQ ID NO: 2937080 - RNA, 18 nt, Human
gcacuuuguucuggcucu

SEQ ID NO: 2937081 - RNA, 15 nt, Human
gcacuccccugcugg

SEQ ID NO: 2937082 - RNA, 12 nt, Human
gcacuccccugc

SEQ ID NO: 2937083 - RNA, 22 nt, Human
gcacuuuguucuggcucuucca

SEQ ID NO: 2937084 - RNA, 12 nt, Human
gcagaacaguga

SEQ ID NO: 2937085 - RNA, 13 nt, Human
gcagaacagugau

SEQ ID NO: 2937086 - RNA, 23 nt, Human
gcagcauauucaggaagcucagg

SEQ ID NO: 2937087 - RNA, 19 nt, Human
gcagcauauucaggaagcu

SEQ ID NO: 2937088 - RNA, 18 nt, Human
gcagcauauucaggaagc

SEQ ID NO: 2937089 - RNA, 17 nt, Human
gcagcauauucaggaag

SEQ ID NO: 2937090 - RNA, 14 nt, Human
gcagagggcacaga

SEQ ID NO: 2937091 - RNA, 21 nt, Human
gcagaggaaagcaaaggagau

SEQ ID NO: 2937092 - RNA, 20 nt, Human
gcagaggaaagcaaaggaga

SEQ ID NO: 2937093 - RNA, 18 nt, Human
gcagaggaaagcaaagga

SEQ ID NO: 2937094 - RNA, 14 nt, Human
gcagaggaaagcaa

SEQ ID NO: 2937095 - RNA, 13 nt, Human
gcagaggaaagca

SEQ ID NO: 2937096 - RNA, 18 nt, Human
gcagaacagugauuacca

SEQ ID NO: 2937097 - RNA, 22 nt, Human
gcagaacagugauuaccaggga

SEQ ID NO: 2937098 - RNA, 19 nt, Human
gaucucuugagccugggag

SEQ ID NO: 2937099 - RNA, 18 nt, Human
gaucucuugagccuggga

SEQ ID NO: 2937100 - RNA, 15 nt, Human
gaucucuaacuucac

SEQ ID NO: 2937101 - RNA, 14 nt, Human
gaugauccuaggca

SEQ ID NO: 2937102 - RNA, 13 nt, Human
gaugauccuaggc

SEQ ID NO: 2937103 - RNA, 22 nt, Human
gaugauuggaggggggaggugg

SEQ ID NO: 2937104 - RNA, 23 nt, Human
gaugcuucucacugccaugccag

SEQ ID NO: 2937105 - RNA, 21 nt, Human
gaugcuucuucagagacuccu

SEQ ID NO: 2937106 - RNA, 20 nt, Human
gaugcuucuucagagacucc

SEQ ID NO: 2937107 - RNA, 17 nt, Human
gaugcuucuucagagac

SEQ ID NO: 2937108 - RNA, 16 nt, Human
gauacaguuacucaga

SEQ ID NO: 2937109 - RNA, 19 nt, Human
gauacaguuacucagaauu

SEQ ID NO: 2937110 - RNA, 23 nt, Human
gauacaguuacucagaauucucu

SEQ ID NO: 2937111 - RNA, 12 nt, Human
gauacugaaaua

SEQ ID NO: 2937112 - RNA, 17 nt, Human
gauacuguaucaugaca

SEQ ID NO: 2937113 - RNA, 21 nt, Human
gauacuguaucaugacaaaga

SEQ ID NO: 2937114 - RNA, 12 nt, Human
gauccaagcugg

SEQ ID NO: 2937115 - RNA, 16 nt, Human
gauccaagcugguccc

SEQ ID NO: 2937116 - RNA, 17 nt, Human
gauccaagcugguccca

SEQ ID NO: 2937117 - RNA, 19 nt, Human
gauccaagcuggucccacu

SEQ ID NO: 2937118 - RNA, 22 nt, Human
gauccacccaccucagccuccc

SEQ ID NO: 2937119 - RNA, 20 nt, Human
gauccacccaccucagccuc

SEQ ID NO: 2937120 - RNA, 21 nt, Human
gauccacccaccucagccucc

SEQ ID NO: 2937121 - RNA, 21 nt, Human
gauccaagcuggucccacuca

SEQ ID NO: 2937122 - RNA, 18 nt, Human
gauccacccaccucagcc

SEQ ID NO: 2937123 - RNA, 19 nt, Human
gauccacccaccucagccu

SEQ ID NO: 2937124 - RNA, 23 nt, Human
gaucaaaagguuaauaaaguaau

SEQ ID NO: 2937125 - RNA, 17 nt, Human
gauauuuuuuucuuuuc

SEQ ID NO: 2937126 - RNA, 20 nt, Human
gaucaaaagguuaauaaagu

SEQ ID NO: 2937127 - RNA, 16 nt, Human
gcaagugagagcuggg

SEQ ID NO: 2937128 - RNA, 15 nt, Human
gcaagugagagcugg

SEQ ID NO: 2937129 - RNA, 20 nt, Human
gcaaccuccgccucuugggu

SEQ ID NO: 2937130 - RNA, 14 nt, Human
gcaacccccagccu

SEQ ID NO: 2937131 - RNA, 15 nt, Human
gcaacccccagccug

SEQ ID NO: 2937132 - RNA, 16 nt, Human
gcaacccccagccugc

SEQ ID NO: 2937133 - RNA, 19 nt, Human
gcaaccuccgccucuuggg

SEQ ID NO: 2937134 - RNA, 13 nt, Human
gcaaccaccacca

SEQ ID NO: 2937135 - RNA, 18 nt, Human
gcaaccaccaccaaccac

SEQ ID NO: 2937136 - RNA, 16 nt, Human
gcaaccaccaccaacc

SEQ ID NO: 2937137 - RNA, 16 nt, Human
gcaacaggcugggcuu

SEQ ID NO: 2937138 - RNA, 19 nt, Human
gcaacaggcugggcuucag

SEQ ID NO: 2937139 - RNA, 14 nt, Human
gcaacaggcugggc

SEQ ID NO: 2937140 - RNA, 15 nt, Human
gcaacaggcugggcu

SEQ ID NO: 2937141 - RNA, 13 nt, Human
gcaacaggcuggg

SEQ ID NO: 2937142 - RNA, 12 nt, Human
gauucuucugcu

SEQ ID NO: 2937143 - RNA, 13 nt, Human
gauucuucugcuu

SEQ ID NO: 2937144 - RNA, 15 nt, Human
gauucuucugcuuca

SEQ ID NO: 2937145 - RNA, 14 nt, Human
gauuuaauaugcaa

SEQ ID NO: 2937146 - RNA, 19 nt, Human
gauuuaacagaaauguaca

SEQ ID NO: 2937147 - RNA, 20 nt, Human
gauucuucugcuucagccuc

SEQ ID NO: 2937148 - RNA, 16 nt, Human
gauuuaacagaaaugu

SEQ ID NO: 2937149 - RNA, 17 nt, Human
gauuuaacagaaaugua

SEQ ID NO: 2937150 - RNA, 18 nt, Human
gauuuaacagaaauguac

SEQ ID NO: 2937151 - RNA, 11 nt, Human
gauuucacucu

SEQ ID NO: 2937152 - RNA, 18 nt, Human
gauuuuuuuuuccuucag

SEQ ID NO: 2937153 - RNA, 17 nt, Human
gauuuuuuuuuccuuca

SEQ ID NO: 2937154 - RNA, 12 nt, Human
gauuucacucuc

SEQ ID NO: 2937155 - RNA, 16 nt, Human
gauuuuuuuuuccuuc

SEQ ID NO: 2937156 - RNA, 17 nt, Human
gcaaaagaugcuucuca

SEQ ID NO: 2937157 - RNA, 22 nt, Human
gcaaaagaugcuucucacugcc

SEQ ID NO: 2937158 - RNA, 14 nt, Human
gcaaaaaggcagga

SEQ ID NO: 2937159 - RNA, 21 nt, Human
gauuuuuuuuuccuucagugc

SEQ ID NO: 2937160 - RNA, 22 nt, Human
gagcuguucacagccagacugg

SEQ ID NO: 2937161 - RNA, 13 nt, Human
gagcccugguggc

SEQ ID NO: 2937162 - RNA, 14 nt, Human
gagcccugguggca

SEQ ID NO: 2937163 - RNA, 20 nt, Human
gagcuguucacagccagacu

SEQ ID NO: 2937164 - RNA, 17 nt, Human
gagcuguucacagccag

SEQ ID NO: 2937165 - RNA, 17 nt, Human
gagccccgaggccuucu

SEQ ID NO: 2937166 - RNA, 20 nt, Human
gagccccacagccccaucug

SEQ ID NO: 2937167 - RNA, 17 nt, Human
gagccccacccucagau

SEQ ID NO: 2937168 - RNA, 13 nt, Human
gagccccgaggcc

SEQ ID NO: 2937169 - RNA, 14 nt, Human
gagccccgaggccu

SEQ ID NO: 2937170 - RNA, 16 nt, Human
gagccccacccucaga

SEQ ID NO: 2937171 - RNA, 12 nt, Human
gagccccacagc

SEQ ID NO: 2937172 - RNA, 13 nt, Human
gagccccacagcc

SEQ ID NO: 2937173 - RNA, 14 nt, Human
gagccccacagccc

SEQ ID NO: 2937174 - RNA, 13 nt, Human
gagcaucaggcca

SEQ ID NO: 2937175 - RNA, 16 nt, Human
gagcaucaggccaggc

SEQ ID NO: 2937176 - RNA, 15 nt, Human
gagcaucaggccagg

SEQ ID NO: 2937177 - RNA, 13 nt, Human
gagcaugccugga

SEQ ID NO: 2937178 - RNA, 21 nt, Human
gagcaugccuggauggggcug

SEQ ID NO: 2937179 - RNA, 21 nt, Human
gagcagggcucagcggggaca

SEQ ID NO: 2937180 - RNA, 14 nt, Human
gagcaucaggccag

SEQ ID NO: 2937181 - RNA, 14 nt, Human
gagcagucaggaaa

SEQ ID NO: 2937182 - RNA, 14 nt, Human
gagggccugcaagg

SEQ ID NO: 2937183 - RNA, 21 nt, Human
gagggccugcaagggagugag

SEQ ID NO: 2937184 - RNA, 17 nt, Human
gagggccugcaagggag

SEQ ID NO: 2937185 - RNA, 21 nt, Human
gaggcauuuguuugaacugau

SEQ ID NO: 2937186 - RNA, 15 nt, Human
gaggcuccacuuggu

SEQ ID NO: 2937187 - RNA, 12 nt, Human
gaggcuccacuu

SEQ ID NO: 2937188 - RNA, 21 nt, Human
gaggcaugugaugagaggaaa

SEQ ID NO: 2937189 - RNA, 20 nt, Human
gaggcaugugaugagaggaa

SEQ ID NO: 2937190 - RNA, 22 nt, Human
gaggcaugugaugagaggaaau

SEQ ID NO: 2937191 - RNA, 19 nt, Human
gaggcauuuguuugaacug

SEQ ID NO: 2937192 - RNA, 13 nt, Human
gaggcugaggcag

SEQ ID NO: 2937193 - RNA, 18 nt, Human
gaggcugagaugggagaa

SEQ ID NO: 2937194 - RNA, 17 nt, Human
gaggcuccacuuggucu

SEQ ID NO: 2937195 - RNA, 21 nt, Human
gaggacgcucucuggccuucg

SEQ ID NO: 2937196 - RNA, 20 nt, Human
gaggacgcucucuggccuuc

SEQ ID NO: 2937197 - RNA, 23 nt, Human
gaggacuccaggcagcagacaca

SEQ ID NO: 2937198 - RNA, 18 nt, Human
gaggacuccaggcagcag

SEQ ID NO: 2937199 - RNA, 16 nt, Human
gaggacuuuucuuugu

SEQ ID NO: 2937200 - RNA, 20 nt, Human
gaggacuuuucuuuguggcu

SEQ ID NO: 2937201 - RNA, 23 nt, Human
gaggacuuuucuuuguggcuucc

SEQ ID NO: 2937202 - RNA, 18 nt, Human
gaggcagggucucacucu

SEQ ID NO: 2937203 - RNA, 19 nt, Human
gaggcagggucucacucug

SEQ ID NO: 2937204 - RNA, 20 nt, Human
gaggcagggucucacucugu

SEQ ID NO: 2937205 - RNA, 12 nt, Human
gaggagagagga

SEQ ID NO: 2937206 - RNA, 15 nt, Human
gaggagagaggaccc

SEQ ID NO: 2937207 - RNA, 14 nt, Human
gaggagagaggacc

SEQ ID NO: 2937208 - RNA, 12 nt, Human
gaggagaaacug

SEQ ID NO: 2937209 - RNA, 14 nt, Human
gaggagaaacugga

SEQ ID NO: 2937210 - RNA, 21 nt, Human
gagauugugccccugcacucc

SEQ ID NO: 2937211 - RNA, 14 nt, Human
gagauuggaaggaa

SEQ ID NO: 2937212 - RNA, 21 nt, Human
gagauugcaccacugcacucc

SEQ ID NO: 2937213 - RNA, 20 nt, Human
gagaugcuagaacucccuuu

SEQ ID NO: 2937214 - RNA, 16 nt, Human
gagaugcuagaacucc

SEQ ID NO: 2937215 - RNA, 15 nt, Human
gagaggacccccuga

SEQ ID NO: 2937216 - RNA, 12 nt, Human
gagaggaaauca

SEQ ID NO: 2937217 - RNA, 20 nt, Human
gagagcugggugucaagagg

SEQ ID NO: 2937218 - RNA, 13 nt, Human
gagagcugggugu

SEQ ID NO: 2937219 - RNA, 21 nt, Human
gagagcuagcagcagggaggg

SEQ ID NO: 2937220 - RNA, 15 nt, Human
gagagcuagcagcag

SEQ ID NO: 2937221 - RNA, 20 nt, Human
gagagccuuccagggguggg

SEQ ID NO: 2937222 - RNA, 18 nt, Human
gagagccuuccaggggug

SEQ ID NO: 2937223 - RNA, 15 nt, Human
gagacuccauaguuu

SEQ ID NO: 2937224 - RNA, 16 nt, Human
gagagccuuccagggg

SEQ ID NO: 2937225 - RNA, 15 nt, Human
gagagccuuccaggg

SEQ ID NO: 2937226 - RNA, 14 nt, Human
gagacuccugcagg

SEQ ID NO: 2937227 - RNA, 13 nt, Human
gagacuccugcag

SEQ ID NO: 2937228 - RNA, 14 nt, Human
gacuuuuccaaccc

SEQ ID NO: 2937229 - RNA, 22 nt, Human
gacuuuuuauggcacuaguauu

SEQ ID NO: 2937230 - RNA, 19 nt, Human
gacuuuuccaacccucauc

SEQ ID NO: 2937231 - RNA, 20 nt, Human
gacuuuuccaacccucauca

SEQ ID NO: 2937232 - RNA, 15 nt, Human
gagaaugaaagggcc

SEQ ID NO: 2937233 - RNA, 23 nt, Human
gagaaugaaagggcccagagagg

SEQ ID NO: 2937234 - RNA, 21 nt, Human
gagacccugucucaaaaaaag

SEQ ID NO: 2937235 - RNA, 18 nt, Human
gagaccugcccucaagag

SEQ ID NO: 2937236 - RNA, 18 nt, Human
gagacgggggcagagagg

SEQ ID NO: 2937237 - RNA, 16 nt, Human
gagacggagucccacc

SEQ ID NO: 2937238 - RNA, 19 nt, Human
gagacggagucccaccuug

SEQ ID NO: 2937239 - RNA, 14 nt, Human
gagacggaguccca

SEQ ID NO: 2937240 - RNA, 15 nt, Human
gaauauauaaccagu

SEQ ID NO: 2937241 - RNA, 13 nt, Human
gaauauugccaau

SEQ ID NO: 2937242 - RNA, 11 nt, Human
gaauauugcug

SEQ ID NO: 2937243 - RNA, 13 nt, Human
gaauauugcugau

SEQ ID NO: 2937244 - RNA, 12 nt, Human
gaauauugcuga

SEQ ID NO: 2937245 - RNA, 22 nt, Human
gaauaucuccgucaacucauau

SEQ ID NO: 2937246 - RNA, 24 nt, Human
gaauauugcugauggugcaaugac

SEQ ID NO: 2937247 - RNA, 23 nt, Human
gaauauugcugauggugcaauga

SEQ ID NO: 2937248 - RNA, 22 nt, Human
gaauauugcugauggugcaaug

SEQ ID NO: 2937249 - RNA, 14 nt, Human
gaaugaauggcuaa

SEQ ID NO: 2937250 - RNA, 15 nt, Human
gaaugaauggcuaag

SEQ ID NO: 2937251 - RNA, 20 nt, Human
gaaugaauggcuaagcaaaa

SEQ ID NO: 2937252 - RNA, 14 nt, Human
gaaugauuaugaau

SEQ ID NO: 2937253 - RNA, 14 nt, Human
gaaugauuaauuaa

SEQ ID NO: 2937254 - RNA, 14 nt, Human
gaaugaugccauga

SEQ ID NO: 2937255 - RNA, 20 nt, Human
gaaugaugauccuaggcauu

SEQ ID NO: 2937256 - RNA, 15 nt, Human
gaauguuugccucug

SEQ ID NO: 2937257 - RNA, 19 nt, Human
gaaugcacaaacagaggcc

SEQ ID NO: 2937258 - RNA, 16 nt, Human
gaauguuugccucugc

SEQ ID NO: 2937259 - RNA, 17 nt, Human
gaauguuugccucugcc

SEQ ID NO: 2937260 - RNA, 18 nt, Human
gaaugcacaaacagaggc

SEQ ID NO: 2937261 - RNA, 22 nt, Human
gaaugauuaugaauuacauuug

SEQ ID NO: 2937262 - RNA, 20 nt, Human
gaauuacauuuguauaaaau

SEQ ID NO: 2937263 - RNA, 15 nt, Human
gaauuacauuuguau

SEQ ID NO: 2937264 - RNA, 18 nt, Human
gaauuacauuuguauaaa

SEQ ID NO: 2937265 - RNA, 13 nt, Human
gaauuacauuugu

SEQ ID NO: 2937266 - RNA, 18 nt, Human
gaauguuugccucugccu

SEQ ID NO: 2937267 - RNA, 19 nt, Human
gaauguuugccucugccuc

SEQ ID NO: 2937268 - RNA, 17 nt, Human
gaauguuuucaaauguu

SEQ ID NO: 2937269 - RNA, 14 nt, Human
gaauuaacacauga

SEQ ID NO: 2937270 - RNA, 15 nt, Human
gaauuaacacaugau

SEQ ID NO: 2937271 - RNA, 17 nt, Human
gacacagcucuucucca

SEQ ID NO: 2937272 - RNA, 21 nt, Human
gacacagcucuucuccaggcu

SEQ ID NO: 2937273 - RNA, 15 nt, Human
gacacagauuggcca

SEQ ID NO: 2937274 - RNA, 12 nt, Human
gacacagcucuu

SEQ ID NO: 2937275 - RNA, 19 nt, Human
gacacagcucuucuccagg

SEQ ID NO: 2937276 - RNA, 20 nt, Human
gacacagcucuucuccaggc

SEQ ID NO: 2937277 - RNA, 14 nt, Human
gaauuaugaaacuu

SEQ ID NO: 2937278 - RNA, 19 nt, Human
gacaaacugcauauguacu

SEQ ID NO: 2937279 - RNA, 17 nt, Human
gacccucaugcugccaa

SEQ ID NO: 2937280 - RNA, 16 nt, Human
gacccucaugcugcca

SEQ ID NO: 2937281 - RNA, 14 nt, Human
gacccucaugcugc

SEQ ID NO: 2937282 - RNA, 12 nt, Human
gacccucaugcu

SEQ ID NO: 2937283 - RNA, 19 nt, Human
gaccucaggugauccaccc

SEQ ID NO: 2937284 - RNA, 21 nt, Human
gaccucaggugagaagcagag

SEQ ID NO: 2937285 - RNA, 20 nt, Human
gaccucaggugauccaccca

SEQ ID NO: 2937286 - RNA, 21 nt, Human
gaccucaggugauccacccac

SEQ ID NO: 2937287 - RNA, 19 nt, Human
gaccucaggccugggggcu

SEQ ID NO: 2937288 - RNA, 19 nt, Human
gaccucaggugagaagcag

SEQ ID NO: 2937289 - RNA, 18 nt, Human
gaccucaggugagaagca

SEQ ID NO: 2937290 - RNA, 14 nt, Human
gaccucaggccugg

SEQ ID NO: 2937291 - RNA, 23 nt, Human
gacccucaugcugccaauauccu

SEQ ID NO: 2937292 - RNA, 22 nt, Human
gacccucaugcugccaauaucc

SEQ ID NO: 2937293 - RNA, 21 nt, Human
gacccucaugcugccaauauc

SEQ ID NO: 2937294 - RNA, 18 nt, Human
gacccucaugcugccaau

SEQ ID NO: 2937295 - RNA, 15 nt, Human
gacgcugugcugccc

SEQ ID NO: 2937296 - RNA, 18 nt, Human
gacgcugugcugcccugc

SEQ ID NO: 2937297 - RNA, 17 nt, Human
gacgcugugcugcccug

SEQ ID NO: 2937298 - RNA, 16 nt, Human
gacgcugugcugcccu

SEQ ID NO: 2937299 - RNA, 14 nt, Human
gacgcucucuggcc

SEQ ID NO: 2937300 - RNA, 23 nt, Human
gacgcuacccgggaagggggcug

SEQ ID NO: 2937301 - RNA, 22 nt, Human
gacgcuacccgggaagggggcu

SEQ ID NO: 2937302 - RNA, 21 nt, Human
gacgccaucccagccccaaug

SEQ ID NO: 2937303 - RNA, 19 nt, Human
gacgccaucccagccccaa

SEQ ID NO: 2937304 - RNA, 13 nt, Human
gacgccaucccag

SEQ ID NO: 2937305 - RNA, 12 nt, Human
gacgccauccca

SEQ ID NO: 2937306 - RNA, 16 nt, Human
gaccucugcagcaaua

SEQ ID NO: 2937307 - RNA, 18 nt, Human
gaccucugcagcaauaaa

SEQ ID NO: 2937308 - RNA, 22 nt, Human
gaccucugcagcaauaaagcag

SEQ ID NO: 2937309 - RNA, 20 nt, Human
gacauuuuaugucuuucuug

SEQ ID NO: 2937310 - RNA, 16 nt, Human
gacauuuuaugucuuu

SEQ ID NO: 2937311 - RNA, 17 nt, Human
gacauugcggacagcca

SEQ ID NO: 2937312 - RNA, 23 nt, Human
gacauugcggacagccacggcca

SEQ ID NO: 2937313 - RNA, 20 nt, Human
gacagucccugccaauggac

SEQ ID NO: 2937314 - RNA, 16 nt, Human
gacagucccugccaau

SEQ ID NO: 2937315 - RNA, 15 nt, Human
gacagucccugccaa

SEQ ID NO: 2937316 - RNA, 14 nt, Human
gacagucccugcca

SEQ ID NO: 2937317 - RNA, 12 nt, Human
gacagucccugc

SEQ ID NO: 2937318 - RNA, 18 nt, Human
gacagucaccucauggaa

SEQ ID NO: 2937319 - RNA, 11 nt, Human
gacagcucuua

SEQ ID NO: 2937320 - RNA, 10 nt, Human
gacagcucuu

SEQ ID NO: 2937321 - RNA, 19 nt, Human
gacagcuccuucuguccua

SEQ ID NO: 2937322 - RNA, 12 nt, Human
gacagcucugca

SEQ ID NO: 2937323 - RNA, 16 nt, Human
gacagcuccuucuguc

SEQ ID NO: 2937324 - RNA, 16 nt, Human
gacagcccgggcucug

SEQ ID NO: 2937325 - RNA, 17 nt, Human
gacagcuccuucugucc

SEQ ID NO: 2937326 - RNA, 18 nt, Human
gacagcuccuucuguccu

SEQ ID NO: 2937327 - RNA, 14 nt, Human
gacagcccgggcuc

SEQ ID NO: 2937328 - RNA, 22 nt, Human
cugucuaaugaaaccugugucu

SEQ ID NO: 2937329 - RNA, 23 nt, Human
cugucggagcccugucuccucuc

SEQ ID NO: 2937330 - RNA, 20 nt, Human
cuguccugggagugagcugg

SEQ ID NO: 2937331 - RNA, 13 nt, Human
cuguccugggagu

SEQ ID NO: 2937332 - RNA, 14 nt, Human
cuguccugggagug

SEQ ID NO: 2937333 - RNA, 14 nt, Human
cugucauuugagca

SEQ ID NO: 2937334 - RNA, 15 nt, Human
cuguagagugggagc

SEQ ID NO: 2937335 - RNA, 20 nt, Human
cuguaagaaaauaucacuug

SEQ ID NO: 2937336 - RNA, 18 nt, Human
cuggucuuauuuguaaag

SEQ ID NO: 2937337 - RNA, 22 nt, Human
cuggugacaugucuuuucuugc

SEQ ID NO: 2937338 - RNA, 12 nt, Human
cuguucagcugg

SEQ ID NO: 2937339 - RNA, 16 nt, Human
cuguucagcuccagcu

SEQ ID NO: 2937340 - RNA, 18 nt, Human
cuguucagcuccagcuca

SEQ ID NO: 2937341 - RNA, 19 nt, Human
cuguucagcuccagcucac

SEQ ID NO: 2937342 - RNA, 22 nt, Human
cuguucagcuccagcucaccag

SEQ ID NO: 2937343 - RNA, 14 nt, Human
cuguucagcuccag

SEQ ID NO: 2937344 - RNA, 15 nt, Human
cuguucagcuccagc

SEQ ID NO: 2937345 - RNA, 22 nt, Human
cuguucacagccagacuggcac

SEQ ID NO: 2937346 - RNA, 19 nt, Human
cuguucacagccagacugg

SEQ ID NO: 2937347 - RNA, 12 nt, Human
cuguucacagcc

SEQ ID NO: 2937348 - RNA, 18 nt, Human
cugugcucuggacaggca

SEQ ID NO: 2937349 - RNA, 19 nt, Human
cugugcucuggacaggcau

SEQ ID NO: 2937350 - RNA, 22 nt, Human
cugugucagguggggcagcuug

SEQ ID NO: 2937351 - RNA, 17 nt, Human
cuguuacugucuucagu

SEQ ID NO: 2937352 - RNA, 13 nt, Human
cuguuacugucuu

SEQ ID NO: 2937353 - RNA, 19 nt, Human
cuguuauaaucuuucacag

SEQ ID NO: 2937354 - RNA, 17 nt, Human
cugugcucuggacaggc

SEQ ID NO: 2937355 - RNA, 15 nt, Human
cugugcucuggacag

SEQ ID NO: 2937356 - RNA, 23 nt, Human
cugugagaugcuagaacucccuu

SEQ ID NO: 2937357 - RNA, 21 nt, Human
cugugagaugcuagaacuccc

SEQ ID NO: 2937358 - RNA, 18 nt, Human
cuguugcccaggcuggcg

SEQ ID NO: 2937359 - RNA, 15 nt, Human
cuguuggccagugug

SEQ ID NO: 2937360 - RNA, 12 nt, Human
cuguuggccagu

SEQ ID NO: 2937361 - RNA, 13 nt, Human
cuuaaauaaugug

SEQ ID NO: 2937362 - RNA, 14 nt, Human
cuuaaauaauguga

SEQ ID NO: 2937363 - RNA, 16 nt, Human
cuuaaauaaugugaaa

SEQ ID NO: 2937364 - RNA, 19 nt, Human
cuuaaauaaugugaaacug

SEQ ID NO: 2937365 - RNA, 13 nt, Human
cuuaaaaaugguu

SEQ ID NO: 2937366 - RNA, 20 nt, Human
cuuaaaaaugguuuaaaugg

SEQ ID NO: 2937367 - RNA, 12 nt, Human
cuuaaaaauggu

SEQ ID NO: 2937368 - RNA, 12 nt, Human
cuggcucugugg

SEQ ID NO: 2937369 - RNA, 13 nt, Human
cuggcucuuccag

SEQ ID NO: 2937370 - RNA, 15 nt, Human
cuggcucuuccaggc

SEQ ID NO: 2937371 - RNA, 14 nt, Human
cuggcucuuccagg

SEQ ID NO: 2937372 - RNA, 13 nt, Human
cuggcucuguggc

SEQ ID NO: 2937373 - RNA, 14 nt, Human
cuggcucuguggcg

SEQ ID NO: 2937374 - RNA, 23 nt, Human
cuggcucuguggcgagccauuug

SEQ ID NO: 2937375 - RNA, 16 nt, Human
cugggacuacaggcac

SEQ ID NO: 2937376 - RNA, 17 nt, Human
cugggacuacaggcacc

SEQ ID NO: 2937377 - RNA, 21 nt, Human
cugggacuacaggcacccacc

SEQ ID NO: 2937378 - RNA, 17 nt, Human
cugggacuacaggugug

SEQ ID NO: 2937379 - RNA, 16 nt, Human
cuggcagcucagagag

SEQ ID NO: 2937380 - RNA, 19 nt, Human
cuggcagcucagagagggu

SEQ ID NO: 2937381 - RNA, 17 nt, Human
cuggcagcucagagagg

SEQ ID NO: 2937382 - RNA, 19 nt, Human
cuggcagaguugaagacag

SEQ ID NO: 2937383 - RNA, 21 nt, Human
cuggcagaguugaagacagag

SEQ ID NO: 2937384 - RNA, 20 nt, Human
cuggcagaguugaagacaga

SEQ ID NO: 2937385 - RNA, 23 nt, Human
cuggcagccccuguucuggcaga

SEQ ID NO: 2937386 - RNA, 22 nt, Human
cuggcagaguugaagacagagc

SEQ ID NO: 2937387 - RNA, 13 nt, Human
cuggcagccccug

SEQ ID NO: 2937388 - RNA, 16 nt, Human
cugcuucaaggauccu

SEQ ID NO: 2937389 - RNA, 14 nt, Human
cugcuucaaggauc

SEQ ID NO: 2937390 - RNA, 19 nt, Human
cugcuucaaggauccugag

SEQ ID NO: 2937391 - RNA, 23 nt, Human
cugcuucagccucccgaguagcu

SEQ ID NO: 2937392 - RNA, 14 nt, Human
cugcuuccagugag

SEQ ID NO: 2937393 - RNA, 23 nt, Human
cuggaaaaguauguuagugcaaa

SEQ ID NO: 2937394 - RNA, 22 nt, Human
cuggaguuauugaagcagagug

SEQ ID NO: 2937395 - RNA, 21 nt, Human
cuggaguuauugaagcagagu

SEQ ID NO: 2937396 - RNA, 23 nt, Human
cuggaguuauugaagcagagugg

SEQ ID NO: 2937397 - RNA, 24 nt, Human
cuggaguuauugaagcagaguggc

SEQ ID NO: 2937398 - RNA, 21 nt, Human
cuggagaaaauggacguguua

SEQ ID NO: 2937399 - RNA, 15 nt, Human
cuggaugcagccuca

SEQ ID NO: 2937400 - RNA, 18 nt, Human
cuggaugcagccucacag

SEQ ID NO: 2937401 - RNA, 17 nt, Human
cuggaugcagccucaca

SEQ ID NO: 2937402 - RNA, 16 nt, Human
cuggaugcagccucac

SEQ ID NO: 2937403 - RNA, 23 nt, Human
cugcccuuaccugccaggaagcc

SEQ ID NO: 2937404 - RNA, 22 nt, Human
cugcccuuaccugccaggaagc

SEQ ID NO: 2937405 - RNA, 11 nt, Human
cugcccugugg

SEQ ID NO: 2937406 - RNA, 12 nt, Human
cugcccuguggg

SEQ ID NO: 2937407 - RNA, 19 nt, Human
cugcccuuaccugccagga

SEQ ID NO: 2937408 - RNA, 24 nt, Human
cugcccugugaguacuacaguccu

SEQ ID NO: 2937409 - RNA, 17 nt, Human
cugccuccccuccucug

SEQ ID NO: 2937410 - RNA, 18 nt, Human
cugccuccccuccucugc

SEQ ID NO: 2937411 - RNA, 14 nt, Human
cugccuccccuccu

SEQ ID NO: 2937412 - RNA, 19 nt, Human
cugccucgaacuggcugca

SEQ ID NO: 2937413 - RNA, 20 nt, Human
cugccucgaacuggcugcaa

SEQ ID NO: 2937414 - RNA, 14 nt, Human
cugccucgaacugg

SEQ ID NO: 2937415 - RNA, 23 nt, Human
cugccuccuuugugaggaagccg

SEQ ID NO: 2937416 - RNA, 21 nt, Human
cugccuccuuugugaggaagc

SEQ ID NO: 2937417 - RNA, 17 nt, Human
cugccuccuuugugagg

SEQ ID NO: 2937418 - RNA, 14 nt, Human
cugccuccuuugug

SEQ ID NO: 2937419 - RNA, 19 nt, Human
cugccuccccuccucugcu

SEQ ID NO: 2937420 - RNA, 20 nt, Human
cugccuccccuccucugcuu

SEQ ID NO: 2937421 - RNA, 16 nt, Human
cugcugagauccugga

SEQ ID NO: 2937422 - RNA, 17 nt, Human
cugcugagauccuggac

SEQ ID NO: 2937423 - RNA, 18 nt, Human
cugcugagauccuggacu

SEQ ID NO: 2937424 - RNA, 19 nt, Human
cugcugagauccuggacug

SEQ ID NO: 2937425 - RNA, 23 nt, Human
cugcugagauccuggacugaggg

SEQ ID NO: 2937426 - RNA, 22 nt, Human
cugcugagccucacagcaguga

SEQ ID NO: 2937427 - RNA, 20 nt, Human
cugccuguucagcuccagcu

SEQ ID NO: 2937428 - RNA, 23 nt, Human
cugccuguucagcuccagcucac

SEQ ID NO: 2937429 - RNA, 17 nt, Human
cugcuaucaaagagguu

SEQ ID NO: 2937430 - RNA, 18 nt, Human
cugcugaaggcucgagca

SEQ ID NO: 2937431 - RNA, 23 nt, Human
cugcugaaggcucgagcaugccu

SEQ ID NO: 2937432 - RNA, 24 nt, Human
cugcugaaggcucgagcaugccug

SEQ ID NO: 2937433 - RNA, 15 nt, Human
cuugauguguuaucu

SEQ ID NO: 2937434 - RNA, 19 nt, Human
cuugauucauaaugacuua

SEQ ID NO: 2937435 - RNA, 19 nt, Human
cuugccgucuaccugaggg

SEQ ID NO: 2937436 - RNA, 18 nt, Human
cuugccgucuaccugagg

SEQ ID NO: 2937437 - RNA, 15 nt, Human
cuuggauuguccccg

SEQ ID NO: 2937438 - RNA, 15 nt, Human
cuuggcccaggaguu

SEQ ID NO: 2937439 - RNA, 20 nt, Human
cuuggauuguccccgacccu

SEQ ID NO: 2937440 - RNA, 18 nt, Human
cuuggauuguccccgacc

SEQ ID NO: 2937441 - RNA, 23 nt, Human
cuuggcccaggaguuuggccaga

SEQ ID NO: 2937442 - RNA, 22 nt, Human
cuuggcccaggaguuuggccag

SEQ ID NO: 2937443 - RNA, 20 nt, Human
cuuggcccaggaguuuggcc

SEQ ID NO: 2937444 - RNA, 16 nt, Human
cuuggcccaggaguuu

SEQ ID NO: 2937445 - RNA, 22 nt, Human
cuuggcgcugccccuggcagcc

SEQ ID NO: 2937446 - RNA, 21 nt, Human
cuuggcgcugccccuggcagc

SEQ ID NO: 2937447 - RNA, 23 nt, Human
cuuggcgcugccccuggcagccc

SEQ ID NO: 2937448 - RNA, 17 nt, Human
cuuucaauaggaaaaac

SEQ ID NO: 2937449 - RNA, 15 nt, Human
cuuuaagaacuaaaa

SEQ ID NO: 2937450 - RNA, 22 nt, Human
cuugucuuuggacccugaggcc

SEQ ID NO: 2937451 - RNA, 21 nt, Human
cuugucuuuggacccugaggc

SEQ ID NO: 2937452 - RNA, 22 nt, Human
cuuuaaugucacaggcaggucc

SEQ ID NO: 2937453 - RNA, 15 nt, Human
cuuucaauaggaaaa

SEQ ID NO: 2937454 - RNA, 14 nt, Human
cuuucaauaggaaa

SEQ ID NO: 2937455 - RNA, 17 nt, Human
cuuuaaugucacaggca

SEQ ID NO: 2937456 - RNA, 18 nt, Human
cuuuaaugucacaggcag

SEQ ID NO: 2937457 - RNA, 19 nt, Human
cuuuaaugucacaggcagg

SEQ ID NO: 2937458 - RNA, 20 nt, Human
cuuuaaugucacaggcaggu

SEQ ID NO: 2937459 - RNA, 15 nt, Human
cuugguccugcugca

SEQ ID NO: 2937460 - RNA, 20 nt, Human
cuugguccugcugcaguugc

SEQ ID NO: 2937461 - RNA, 18 nt, Human
cuugguccugcugcaguu

SEQ ID NO: 2937462 - RNA, 17 nt, Human
cuugguccugcugcagu

SEQ ID NO: 2937463 - RNA, 16 nt, Human
cuugguccugcugcag

SEQ ID NO: 2937464 - RNA, 13 nt, Human
cuugucuguagau

SEQ ID NO: 2937465 - RNA, 20 nt, Human
cuugucuuuggacccugagg

SEQ ID NO: 2937466 - RNA, 19 nt, Human
cuugucuuuggacccugag

SEQ ID NO: 2937467 - RNA, 23 nt, Human
cuuggucucagugucaaugcagc

SEQ ID NO: 2937468 - RNA, 22 nt, Human
cuugguccugcugcaguugcca

SEQ ID NO: 2937469 - RNA, 16 nt, Human
cuugguucccauuugc

SEQ ID NO: 2937470 - RNA, 20 nt, Human
cuugguucccauuugcuccu

SEQ ID NO: 2937471 - RNA, 13 nt, Human
cuucuuauacauu

SEQ ID NO: 2937472 - RNA, 16 nt, Human
cuucuuauacauuuga

SEQ ID NO: 2937473 - RNA, 17 nt, Human
cuucugacccaugcugc

SEQ ID NO: 2937474 - RNA, 16 nt, Human
cuucugacccaugcug

SEQ ID NO: 2937475 - RNA, 18 nt, Human
cuucugacccaugcugcc

SEQ ID NO: 2937476 - RNA, 14 nt, Human
cuucuauauaauuc

SEQ ID NO: 2937477 - RNA, 22 nt, Human
cuucuauuuauuuauuuauuca

SEQ ID NO: 2937478 - RNA, 16 nt, Human
cuucuauuuauuuauu

SEQ ID NO: 2937479 - RNA, 19 nt, Human
cuucugaacuuggcgcugc

SEQ ID NO: 2937480 - RNA, 22 nt, Human
cuucugaacuuggcgcugcccc

SEQ ID NO: 2937481 - RNA, 15 nt, Human
cuucugacccaugcu

SEQ ID NO: 2937482 - RNA, 22 nt, Human
cuucucuguauuccuagaaacu

SEQ ID NO: 2937483 - RNA, 12 nt, Human
cuuccucccucc

SEQ ID NO: 2937484 - RNA, 13 nt, Human
cuuccucccuccc

SEQ ID NO: 2937485 - RNA, 14 nt, Human
cuuccucccucccu

SEQ ID NO: 2937486 - RNA, 21 nt, Human
gaacaaggcaaggcugucaau

SEQ ID NO: 2937487 - RNA, 18 nt, Human
gaacaaggcaaggcuguc

SEQ ID NO: 2937488 - RNA, 17 nt, Human
gaacaaggcaaggcugu

SEQ ID NO: 2937489 - RNA, 15 nt, Human
gaacaaggcaaggcu

SEQ ID NO: 2937490 - RNA, 14 nt, Human
gaacaaggcaaggc

SEQ ID NO: 2937491 - RNA, 23 nt, Human
gaaacuucagcgguuuauauaag

SEQ ID NO: 2937492 - RNA, 23 nt, Human
gaacaaauuuacagagacagaaa

SEQ ID NO: 2937493 - RNA, 19 nt, Human
gaaauuuuuauuaaauuau

SEQ ID NO: 2937494 - RNA, 17 nt, Human
gaacaaauuuacagaga

SEQ ID NO: 2937495 - RNA, 18 nt, Human
gaacaaauuuacagagac

SEQ ID NO: 2937496 - RNA, 18 nt, Human
gaaauuuuuauuaaauua

SEQ ID NO: 2937497 - RNA, 18 nt, Human
gaaaugaaagcagggacu

SEQ ID NO: 2937498 - RNA, 23 nt, Human
gaaaucaaauaugcaaagcacug

SEQ ID NO: 2937499 - RNA, 17 nt, Human
gaaaugaaagcagggac

SEQ ID NO: 2937500 - RNA, 17 nt, Human
gaaaucaccgaaaacgu

SEQ ID NO: 2937501 - RNA, 18 nt, Human
gaaagacuaucuaaaugu

SEQ ID NO: 2937502 - RNA, 16 nt, Human
gaaaggcuccaggagc

SEQ ID NO: 2937503 - RNA, 19 nt, Human
gaaaggcuccaggagcagc

SEQ ID NO: 2937504 - RNA, 18 nt, Human
gaaaggcuccaggagcag

SEQ ID NO: 2937505 - RNA, 17 nt, Human
gaaaggcuccaggagca

SEQ ID NO: 2937506 - RNA, 21 nt, Human
gaaaguacuucuccacccugc

SEQ ID NO: 2937507 - RNA, 16 nt, Human
gaaaucaaauaugcaa

SEQ ID NO: 2937508 - RNA, 21 nt, Human
gaaaucaaauaugcaaagcac

SEQ ID NO: 2937509 - RNA, 18 nt, Human
gaaaauuuugauguuuua

SEQ ID NO: 2937510 - RNA, 14 nt, Human
gaaaauuuuaaaaa

SEQ ID NO: 2937511 - RNA, 19 nt, Human
gaaaagccucuguuuugau

SEQ ID NO: 2937512 - RNA, 15 nt, Human
gaaaagccucuguuu

SEQ ID NO: 2937513 - RNA, 17 nt, Human
gaaaaaaugguagcauu

SEQ ID NO: 2937514 - RNA, 19 nt, Human
gaaaaaaugguagcauuuu

SEQ ID NO: 2937515 - RNA, 22 nt, Human
gaaaaaaugguagcauuuuaaa

SEQ ID NO: 2937516 - RNA, 20 nt, Human
gaaaaaauuuacuuuaaacu

SEQ ID NO: 2937517 - RNA, 21 nt, Human
gaaaagacuccaaagaaaugu

SEQ ID NO: 2937518 - RNA, 18 nt, Human
gaaaagacuccaaagaaa

SEQ ID NO: 2937519 - RNA, 20 nt, Human
gaaaagacuccaaagaaaug

SEQ ID NO: 2937520 - RNA, 18 nt, Human
cuuuugccguuauuaaaa

SEQ ID NO: 2937521 - RNA, 16 nt, Human
cuuuugccguuauuaa

SEQ ID NO: 2937522 - RNA, 15 nt, Human
cuuuuggucugugug

SEQ ID NO: 2937523 - RNA, 16 nt, Human
cuuuuggucuguguga

SEQ ID NO: 2937524 - RNA, 17 nt, Human
cuuuugucuaugggacu

SEQ ID NO: 2937525 - RNA, 19 nt, Human
cuuuuguagaagucacauu

SEQ ID NO: 2937526 - RNA, 14 nt, Human
cuuuugugcauuau

SEQ ID NO: 2937527 - RNA, 18 nt, Human
cuuuugugcauuaucuag

SEQ ID NO: 2937528 - RNA, 21 nt, Human
cuuuuuuuuuuuuuuugacaa

SEQ ID NO: 2937529 - RNA, 19 nt, Human
gaaaaaauauuuuccugcc

SEQ ID NO: 2937530 - RNA, 15 nt, Human
guuuuaaagcuucca

SEQ ID NO: 2937531 - RNA, 19 nt, Human
guuuggacaaaauggaaua

SEQ ID NO: 2937532 - RNA, 21 nt, Human
aaguaauaugcacacauuuuu

SEQ ID NO: 2937533 - RNA, 18 nt, Human
aaguaauaugcacacauu

SEQ ID NO: 2937534 - RNA, 20 nt, Human
aaguaauaugcacacauuuu

SEQ ID NO: 2937535 - RNA, 17 nt, Human
aaguaauaugcacacau

SEQ ID NO: 2937536 - RNA, 12 nt, Human
guuuucuguucu

SEQ ID NO: 2937537 - RNA, 14 nt, Human
guuuucuguucuuu

SEQ ID NO: 2937538 - RNA, 15 nt, Human
guuuucuguucuuuc

SEQ ID NO: 2937539 - RNA, 16 nt, Human
guuuucuguucuuucu

SEQ ID NO: 2937540 - RNA, 18 nt, Human
guuuuaaggaugcuugua

SEQ ID NO: 2937541 - RNA, 22 nt, Human
guuuuaaggaugcuuguacaua

SEQ ID NO: 2937542 - RNA, 23 nt, Human
aaguauucuuauuuaaugaaaga

SEQ ID NO: 2937543 - RNA, 21 nt, Human
aaguauucuuauuuaaugaaa

SEQ ID NO: 2937544 - RNA, 16 nt, Human
aaguauuauaccuuuu

SEQ ID NO: 2937545 - RNA, 19 nt, Human
aaguauuauaccuuuuuua

SEQ ID NO: 2937546 - RNA, 14 nt, Human
aaguacuauaauuu

SEQ ID NO: 2937547 - RNA, 17 nt, Human
aaguacuauaauuuacc

SEQ ID NO: 2937548 - RNA, 13 nt, Human
aaguacuauguau

SEQ ID NO: 2937549 - RNA, 16 nt, Human
aaguaauuuggaaauu

SEQ ID NO: 2937550 - RNA, 19 nt, Human
aaguaaugauaacuggaaa

SEQ ID NO: 2937551 - RNA, 19 nt, Human
aaguacuucuccacccugc

SEQ ID NO: 2937552 - RNA, 20 nt, Human
aaguacuucuccacccugcu

SEQ ID NO: 2937553 - RNA, 18 nt, Human
aaguacuucuccacccug

SEQ ID NO: 2937554 - RNA, 15 nt, Human
aaguauuauaccuuu

SEQ ID NO: 2937555 - RNA, 18 nt, Human
aaguauguuagugcaaau

SEQ ID NO: 2937556 - RNA, 19 nt, Human
aaguauguuagugcaaauu

SEQ ID NO: 2937557 - RNA, 16 nt, Human
aaggaaacccagcucu

SEQ ID NO: 2937558 - RNA, 20 nt, Human
guuguuugauucagacagcu

SEQ ID NO: 2937559 - RNA, 23 nt, Human
guuguuugauucagacagcugcc

SEQ ID NO: 2937560 - RNA, 22 nt, Human
aaggaaacccagcucuggucca

SEQ ID NO: 2937561 - RNA, 17 nt, Human
aaggaaacccagcucug

SEQ ID NO: 2937562 - RNA, 21 nt, Human
guuuaagugacugauggcuaa

SEQ ID NO: 2937563 - RNA, 15 nt, Human
guuucacacaaacaa

SEQ ID NO: 2937564 - RNA, 17 nt, Human
guuucaaacuuuacuau

SEQ ID NO: 2937565 - RNA, 16 nt, Human
guuuaugagaaacugg

SEQ ID NO: 2937566 - RNA, 14 nt, Human
guuuaugauuccac

SEQ ID NO: 2937567 - RNA, 13 nt, Human
aagguagaauguu

SEQ ID NO: 2937568 - RNA, 14 nt, Human
aagguagaauguuu

SEQ ID NO: 2937569 - RNA, 13 nt, Human
aaggggagaguaa

SEQ ID NO: 2937570 - RNA, 23 nt, Human
aagggggcugggacaugggaaag

SEQ ID NO: 2937571 - RNA, 12 nt, Human
aagggggcuggg

SEQ ID NO: 2937572 - RNA, 20 nt, Human
aaggcugucaauuacaggaa

SEQ ID NO: 2937573 - RNA, 22 nt, Human
aaggcugggggaagaagcucuc

SEQ ID NO: 2937574 - RNA, 19 nt, Human
aaggcugggggaagaagcu

SEQ ID NO: 2937575 - RNA, 11 nt, Human
guuucagaaau

SEQ ID NO: 2937576 - RNA, 13 nt, Human
guuucagaaaugu

SEQ ID NO: 2937577 - RNA, 14 nt, Human
aaggcugggggaag

SEQ ID NO: 2937578 - RNA, 16 nt, Human
aaggcugggggaagaa

SEQ ID NO: 2937579 - RNA, 15 nt, Human
aagggcuguuauaau

SEQ ID NO: 2937580 - RNA, 17 nt, Human
aagggcuguuauaaucu

SEQ ID NO: 2937581 - RNA, 17 nt, Human
aaggggaauugaggaca

SEQ ID NO: 2937582 - RNA, 20 nt, Human
aaguuugagaucagccuggg

SEQ ID NO: 2937583 - RNA, 9 nt, Human
uaaaauggu

SEQ ID NO: 2937584 - RNA, 19 nt, Human
aaguuauuuuuaauuuggu

SEQ ID NO: 2937585 - RNA, 21 nt, Human
aaguuucugccgcagcccugc

SEQ ID NO: 2937586 - RNA, 19 nt, Human
aaguuucugccgcagcccu

SEQ ID NO: 2937587 - RNA, 13 nt, Human
aaguuugaacauu

SEQ ID NO: 2937588 - RNA, 21 nt, Human
aaguuugaauuccuaaaauua

SEQ ID NO: 2937589 - RNA, 23 nt, Human
aaguuauuaagagguaagacuua

SEQ ID NO: 2937590 - RNA, 21 nt, Human
aaguuauuaagagguaagacu

SEQ ID NO: 2937591 - RNA, 22 nt, Human
aaguuauuaagagguaagacuu

SEQ ID NO: 2937592 - RNA, 13 nt, Human
aagugugguagag

SEQ ID NO: 2937593 - RNA, 23 nt, Human
aaguguauuuuuuuacuaauaga

SEQ ID NO: 2937594 - RNA, 23 nt, Human
aagugauccucccaccucagccu

SEQ ID NO: 2937595 - RNA, 20 nt, Human
aagugauucuccugccucag

SEQ ID NO: 2937596 - RNA, 13 nt, Human
aagugauccuccc

SEQ ID NO: 2937597 - RNA, 19 nt, Human
aagugauccucccaccuca

SEQ ID NO: 2937598 - RNA, 20 nt, Human
aagugauccucccaccucag

SEQ ID NO: 2937599 - RNA, 13 nt, Human
uaaaagucuugug

SEQ ID NO: 2937600 - RNA, 13 nt, Human
uaaaagaauauuu

SEQ ID NO: 2937601 - RNA, 19 nt, Human
uaaaaggugaccaaugaug

SEQ ID NO: 2937602 - RNA, 14 nt, Human
uaaaauaagucuga

SEQ ID NO: 2937603 - RNA, 20 nt, Human
uaaaauaauuuuuauauuug

SEQ ID NO: 2937604 - RNA, 15 nt, Human
uaaaauaagucugau

SEQ ID NO: 2937605 - RNA, 17 nt, Human
uaaaauaagucugauuu

SEQ ID NO: 2937606 - RNA, 18 nt, Human
uaaaauaagucugauuua

SEQ ID NO: 2937607 - RNA, 19 nt, Human
uaaaauaagucugauuuaa

SEQ ID NO: 2937608 - RNA, 22 nt, Human
uaaaauaauuuuuauauuugaa

SEQ ID NO: 2937609 - RNA, 21 nt, Human
uaaaauacacacucaaaucaa

SEQ ID NO: 2937610 - RNA, 13 nt, Human
uaaaacccaagug

SEQ ID NO: 2937611 - RNA, 12 nt, Human
uaaaacuuuuua

SEQ ID NO: 2937612 - RNA, 15 nt, Human
uaaaacuuuuuaaaa

SEQ ID NO: 2937613 - RNA, 15 nt, Human
uaaaaaugagguacu

SEQ ID NO: 2937614 - RNA, 23 nt, Human
uaaaaaucucaaauuucuaaauc

SEQ ID NO: 2937615 - RNA, 13 nt, Human
uaaaaccacagca

SEQ ID NO: 2937616 - RNA, 15 nt, Human
uaaaaccacagcagu

SEQ ID NO: 2937617 - RNA, 14 nt, Human
uaaaaccacagcag

SEQ ID NO: 2937618 - RNA, 22 nt, Human
uaaaaaugagguacucuccugg

SEQ ID NO: 2937619 - RNA, 15 nt, Human
uaaaaaggugaccau

SEQ ID NO: 2937620 - RNA, 13 nt, Human
uaaaaaggugacc

SEQ ID NO: 2937621 - RNA, 21 nt, Human
uaaaaaaaaaccugagcccca

SEQ ID NO: 2937622 - RNA, 14 nt, Human
aagcacaugccucu

SEQ ID NO: 2937623 - RNA, 20 nt, Human
aagcacaugccucucucagg

SEQ ID NO: 2937624 - RNA, 19 nt, Human
aagcacaugccucucucag

SEQ ID NO: 2937625 - RNA, 16 nt, Human
aagcacaugccucucu

SEQ ID NO: 2937626 - RNA, 15 nt, Human
aagcacaugccucuc

SEQ ID NO: 2937627 - RNA, 17 nt, Human
gugugaauaccccaaga

SEQ ID NO: 2937628 - RNA, 16 nt, Human
aagcacacuugacauc

SEQ ID NO: 2937629 - RNA, 12 nt, Human
guguuugaagca

SEQ ID NO: 2937630 - RNA, 21 nt, Human
aagcacaugccucucucaggc

SEQ ID NO: 2937631 - RNA, 13 nt, Human
aagcaccuccugc

SEQ ID NO: 2937632 - RNA, 14 nt, Human
aagcaccuccugcc

SEQ ID NO: 2937633 - RNA, 15 nt, Human
aagcaccuccugccu

SEQ ID NO: 2937634 - RNA, 16 nt, Human
aagcaccuccugccuc

SEQ ID NO: 2937635 - RNA, 17 nt, Human
aagcacugacuucuaag

SEQ ID NO: 2937636 - RNA, 16 nt, Human
aagcacugacuucuaa

SEQ ID NO: 2937637 - RNA, 17 nt, Human
aagcaccuccugccucg

SEQ ID NO: 2937638 - RNA, 16 nt, Human
aagcacuaaacaaaga

SEQ ID NO: 2937639 - RNA, 18 nt, Human
aagcauuguaaaugugcu

SEQ ID NO: 2937640 - RNA, 12 nt, Human
aagcaugugaga

SEQ ID NO: 2937641 - RNA, 20 nt, Human
aagcacugacuucuaaguaa

SEQ ID NO: 2937642 - RNA, 19 nt, Human
aagcacugacuucuaagua

SEQ ID NO: 2937643 - RNA, 17 nt, Human
aagccaaagcuaggccu

SEQ ID NO: 2937644 - RNA, 18 nt, Human
aagccaaagcuaggccug

SEQ ID NO: 2937645 - RNA, 19 nt, Human
aagcauuguaaaugugcuu

SEQ ID NO: 2937646 - RNA, 17 nt, Human
aagcaacccaaauguuc

SEQ ID NO: 2937647 - RNA, 23 nt, Human
aagaucaaaagguuaauaaagua

SEQ ID NO: 2937648 - RNA, 20 nt, Human
aagaucaaaagguuaauaaa

SEQ ID NO: 2937649 - RNA, 22 nt, Human
gugucaccugaagacucauucu

SEQ ID NO: 2937650 - RNA, 14 nt, Human
gugucagguggggc

SEQ ID NO: 2937651 - RNA, 18 nt, Human
gugucagguggggcagcu

SEQ ID NO: 2937652 - RNA, 14 nt, Human
gugucaccugaaga

SEQ ID NO: 2937653 - RNA, 23 nt, Human
gugugaaccaccacacccagccc

SEQ ID NO: 2937654 - RNA, 19 nt, Human
gugucagguggggcagcuu

SEQ ID NO: 2937655 - RNA, 22 nt, Human
gugucuuaauuaaaagaauauu

SEQ ID NO: 2937656 - RNA, 15 nt, Human
guguaaacacaucua

SEQ ID NO: 2937657 - RNA, 14 nt, Human
guguaaacacaucu

SEQ ID NO: 2937658 - RNA, 15 nt, Human
gugguuucagaaaug

SEQ ID NO: 2937659 - RNA, 23 nt, Human
gugcugcccugcccaccuggccu

SEQ ID NO: 2937660 - RNA, 14 nt, Human
aagaggcagggucu

SEQ ID NO: 2937661 - RNA, 11 nt, Human
aagaggcaggg

SEQ ID NO: 2937662 - RNA, 22 nt, Human
aagagggagggagggcuccaga

SEQ ID NO: 2937663 - RNA, 21 nt, Human
aagagggagggagggcuccag

SEQ ID NO: 2937664 - RNA, 17 nt, Human
aagagggugggugggua

SEQ ID NO: 2937665 - RNA, 22 nt, Human
aagagggucugaggaauccaga

SEQ ID NO: 2937666 - RNA, 14 nt, Human
aagauagcagggca

SEQ ID NO: 2937667 - RNA, 15 nt, Human
aagauagcagggcau

SEQ ID NO: 2937668 - RNA, 19 nt, Human
guuagagguucccuuugac

SEQ ID NO: 2937669 - RNA, 19 nt, Human
guuauuauauuuacaaaug

SEQ ID NO: 2937670 - RNA, 21 nt, Human
guuauuuuauugauuauuacu

SEQ ID NO: 2937671 - RNA, 16 nt, Human
guuauuuuacuuuuug

SEQ ID NO: 2937672 - RNA, 15 nt, Human
guuauuuuacuuuuu

SEQ ID NO: 2937673 - RNA, 17 nt, Human
guuauuauauuuacaaa

SEQ ID NO: 2937674 - RNA, 18 nt, Human
guuaaucauuagguguga

SEQ ID NO: 2937675 - RNA, 23 nt, Human
guucagcuuguaaauagcucagg

SEQ ID NO: 2937676 - RNA, 20 nt, Human
guucaggguuggccccugcc

SEQ ID NO: 2937677 - RNA, 21 nt, Human
guucaggguuggccccugccc

SEQ ID NO: 2937678 - RNA, 22 nt, Human
guucaggguuggccccugcccg

SEQ ID NO: 2937679 - RNA, 21 nt, Human
aagccgugauuuucauugcug

SEQ ID NO: 2937680 - RNA, 17 nt, Human
guucagguaacaggcag

SEQ ID NO: 2937681 - RNA, 18 nt, Human
guucagguaacaggcaga

SEQ ID NO: 2937682 - RNA, 16 nt, Human
aagccucccacgacug

SEQ ID NO: 2937683 - RNA, 15 nt, Human
aagccuccuccagcc

SEQ ID NO: 2937684 - RNA, 21 nt, Human
aagccuuggggcugaugcagu

SEQ ID NO: 2937685 - RNA, 18 nt, Human
aagcuuauuaaaacucau

SEQ ID NO: 2937686 - RNA, 17 nt, Human
aagcucugcuccucucc

SEQ ID NO: 2937687 - RNA, 13 nt, Human
aagcuuuugcaua

SEQ ID NO: 2937688 - RNA, 22 nt, Human
aagcuuuugcauauugcauacu

SEQ ID NO: 2937689 - RNA, 15 nt, Human
aagcuuuugcauauu

SEQ ID NO: 2937690 - RNA, 19 nt, Human
aagcuuuugcauauugcau

SEQ ID NO: 2937691 - RNA, 22 nt, Human
guucccuuuuuuggcugcugaa

SEQ ID NO: 2937692 - RNA, 21 nt, Human
guucccuuuuuuggcugcuga

SEQ ID NO: 2937693 - RNA, 18 nt, Human
guucccuugaugaagaag

SEQ ID NO: 2937694 - RNA, 19 nt, Human
guugauagcacagacccug

SEQ ID NO: 2937695 - RNA, 14 nt, Human
guugauagcacaga

SEQ ID NO: 2937696 - RNA, 15 nt, Human
guucuugguuuguaa

SEQ ID NO: 2937697 - RNA, 18 nt, Human
guucuugguuuguaaauu

SEQ ID NO: 2937698 - RNA, 14 nt, Human
guucuugguuugua

SEQ ID NO: 2937699 - RNA, 12 nt, Human
guucucugagga

SEQ ID NO: 2937700 - RNA, 15 nt, Human
guucucucuucucca

SEQ ID NO: 2937701 - RNA, 15 nt, Human
guucucugcccucca

SEQ ID NO: 2937702 - RNA, 13 nt, Human
guucucugcccuc

SEQ ID NO: 2937703 - RNA, 14 nt, Human
guucuaguguuuuc

SEQ ID NO: 2937704 - RNA, 13 nt, Human
guucucuccuucu

SEQ ID NO: 2937705 - RNA, 17 nt, Human
guucuaguguuuucaau

SEQ ID NO: 2937706 - RNA, 19 nt, Human
guucuagcauggcugccaa

SEQ ID NO: 2937707 - RNA, 14 nt, Human
guucuuaauucuua

SEQ ID NO: 2937708 - RNA, 17 nt, Human
guucuuaauucuuagcu

SEQ ID NO: 2937709 - RNA, 18 nt, Human
guucucugcccuccaaga

SEQ ID NO: 2937710 - RNA, 17 nt, Human
guucucugcccuccaag

SEQ ID NO: 2937711 - RNA, 13 nt, Human
guucuuaauucuu

SEQ ID NO: 2937712 - RNA, 17 nt, Human
aaauuccaagugauuga

SEQ ID NO: 2937713 - RNA, 23 nt, Human
aaauuguuugacggcaagguuua

SEQ ID NO: 2937714 - RNA, 17 nt, Human
aaauuguauuacaaauc

SEQ ID NO: 2937715 - RNA, 14 nt, Human
aaauuauggaaaca

SEQ ID NO: 2937716 - RNA, 21 nt, Human
aaauuauggaaacagaugaaa

SEQ ID NO: 2937717 - RNA, 15 nt, Human
aaaugugcuuuuaaa

SEQ ID NO: 2937718 - RNA, 18 nt, Human
aaaugugccuucauuuuu

SEQ ID NO: 2937719 - RNA, 18 nt, Human
guauucucuccuguaccu

SEQ ID NO: 2937720 - RNA, 24 nt, Human
aaaugucuaguuguaacaccauga

SEQ ID NO: 2937721 - RNA, 21 nt, Human
aaaugucucuuuaaugucaca

SEQ ID NO: 2937722 - RNA, 21 nt, Human
gucagaaguuucugccgcagc

SEQ ID NO: 2937723 - RNA, 14 nt, Human
gucaggaaagagaa

SEQ ID NO: 2937724 - RNA, 13 nt, Human
gucaggaaagaga

SEQ ID NO: 2937725 - RNA, 15 nt, Human
gucacugcuuaacuu

SEQ ID NO: 2937726 - RNA, 21 nt, Human
gucacugcuuaacuucacaua

SEQ ID NO: 2937727 - RNA, 16 nt, Human
gucagguggggcagcu

SEQ ID NO: 2937728 - RNA, 17 nt, Human
gucagguggggcagcuu

SEQ ID NO: 2937729 - RNA, 18 nt, Human
gucagguggggcagcuug

SEQ ID NO: 2937730 - RNA, 22 nt, Human
gucagguggggcagcuugaggg

SEQ ID NO: 2937731 - RNA, 19 nt, Human
gucagucugcuuagaaaua

SEQ ID NO: 2937732 - RNA, 12 nt, Human
aaauuucuaaau

SEQ ID NO: 2937733 - RNA, 13 nt, Human
aaauuucuaaauc

SEQ ID NO: 2937734 - RNA, 15 nt, Human
aaauuucuaaaucuc

SEQ ID NO: 2937735 - RNA, 18 nt, Human
gucacauuccugaacagg

SEQ ID NO: 2937736 - RNA, 22 nt, Human
gucaccaaaucagcugcuacua

SEQ ID NO: 2937737 - RNA, 12 nt, Human
gucacaggcagg

SEQ ID NO: 2937738 - RNA, 20 nt, Human
gucacaggaaguagaggagg

SEQ ID NO: 2937739 - RNA, 20 nt, Human
gucaauuaccagaaagauaa

SEQ ID NO: 2937740 - RNA, 21 nt, Human
gucaauuaccagaaagauaac

SEQ ID NO: 2937741 - RNA, 22 nt, Human
gucaauuacaggaaguacugga

SEQ ID NO: 2937742 - RNA, 21 nt, Human
gucaauuuuguuauguauauu

SEQ ID NO: 2937743 - RNA, 13 nt, Human
gucacaggaagua

SEQ ID NO: 2937744 - RNA, 15 nt, Human
gucacaggaaguaga

SEQ ID NO: 2937745 - RNA, 12 nt, Human
gucaccaagccc

SEQ ID NO: 2937746 - RNA, 15 nt, Human
gucaccaagcccagu

SEQ ID NO: 2937747 - RNA, 23 nt, Human
gucacucuggcagcucagagagg

SEQ ID NO: 2937748 - RNA, 16 nt, Human
gucacugagacagccc

SEQ ID NO: 2937749 - RNA, 15 nt, Human
gucacugagacagcc

SEQ ID NO: 2937750 - RNA, 14 nt, Human
gucacugagacagc

SEQ ID NO: 2937751 - RNA, 22 nt, Human
gucacucuggcagcucagagag

SEQ ID NO: 2937752 - RNA, 10 nt, Human
gucacugcuu

SEQ ID NO: 2937753 - RNA, 23 nt, Human
gucacugagacagcccgggcucu

SEQ ID NO: 2937754 - RNA, 21 nt, Human
gucacugagacagcccgggcu

SEQ ID NO: 2937755 - RNA, 18 nt, Human
gucacugagacagcccgg

SEQ ID NO: 2937756 - RNA, 17 nt, Human
gucacugagacagcccg

SEQ ID NO: 2937757 - RNA, 13 nt, Human
aacagucucagga

SEQ ID NO: 2937758 - RNA, 18 nt, Human
aacaguccauugaaaggg

SEQ ID NO: 2937759 - RNA, 15 nt, Human
aacauagcugugauu

SEQ ID NO: 2937760 - RNA, 12 nt, Human
aacauauauaac

SEQ ID NO: 2937761 - RNA, 14 nt, Human
aacagucucaggaa

SEQ ID NO: 2937762 - RNA, 14 nt, Human
aacauaaaauacaa

SEQ ID NO: 2937763 - RNA, 14 nt, Human
guccucuuuucuga

SEQ ID NO: 2937764 - RNA, 16 nt, Human
guccuggcaugggaau

SEQ ID NO: 2937765 - RNA, 17 nt, Human
guccugcugcaguugcc

SEQ ID NO: 2937766 - RNA, 19 nt, Human
guccugcugcaguugccag

SEQ ID NO: 2937767 - RNA, 12 nt, Human
gucgaggcagga

SEQ ID NO: 2937768 - RNA, 16 nt, Human
gucgaggacagggagg

SEQ ID NO: 2937769 - RNA, 20 nt, Human
gucuauuuacggaacucaaa

SEQ ID NO: 2937770 - RNA, 15 nt, Human
gucuaugggacucaa

SEQ ID NO: 2937771 - RNA, 22 nt, Human
gucuaugggacucaaugcacug

SEQ ID NO: 2937772 - RNA, 16 nt, Human
gucuaccugaggggcc

SEQ ID NO: 2937773 - RNA, 15 nt, Human
gucuaccugaggggc

SEQ ID NO: 2937774 - RNA, 13 nt, Human
gucuaccugaggg

SEQ ID NO: 2937775 - RNA, 14 nt, Human
gucuaccugagggg

SEQ ID NO: 2937776 - RNA, 18 nt, Human
guccccuguuuguuucug

SEQ ID NO: 2937777 - RNA, 22 nt, Human
guccccuguuuguuucugaaag

SEQ ID NO: 2937778 - RNA, 19 nt, Human
gucccuuacgugaguccug

SEQ ID NO: 2937779 - RNA, 18 nt, Human
gucccuuacgugaguccu

SEQ ID NO: 2937780 - RNA, 18 nt, Human
gucccugguggcagcuca

SEQ ID NO: 2937781 - RNA, 19 nt, Human
gucccugguggcagcucac

SEQ ID NO: 2937782 - RNA, 13 nt, Human
gucccaagugcca

SEQ ID NO: 2937783 - RNA, 14 nt, Human
gucccaagugccaa

SEQ ID NO: 2937784 - RNA, 15 nt, Human
gucccaccccacaca

SEQ ID NO: 2937785 - RNA, 22 nt, Human
guccccaccgcagacaggacca

SEQ ID NO: 2937786 - RNA, 18 nt, Human
guccccaccgcagacagg

SEQ ID NO: 2937787 - RNA, 19 nt, Human
gucauuugagcagggcuca

SEQ ID NO: 2937788 - RNA, 22 nt, Human
guccaugaagauguagaggaga

SEQ ID NO: 2937789 - RNA, 17 nt, Human
gucauuugagcagggcu

SEQ ID NO: 2937790 - RNA, 18 nt, Human
aacacugguuuuaaauau

SEQ ID NO: 2937791 - RNA, 19 nt, Human
aacacuguucucugcccuc

SEQ ID NO: 2937792 - RNA, 16 nt, Human
aacacugguuuuaaau

SEQ ID NO: 2937793 - RNA, 16 nt, Human
aacacuguucucugcc

SEQ ID NO: 2937794 - RNA, 18 nt, Human
aacacuguucucugcccu

SEQ ID NO: 2937795 - RNA, 17 nt, Human
aacacuguucucugccc

SEQ ID NO: 2937796 - RNA, 21 nt, Human
aacacucacauuuauucugcu

SEQ ID NO: 2937797 - RNA, 19 nt, Human
aacacaaacgggcucagca

SEQ ID NO: 2937798 - RNA, 19 nt, Human
aaauuucuaaaucuccaaa

SEQ ID NO: 2937799 - RNA, 17 nt, Human
aacacaacuauauuguu

SEQ ID NO: 2937800 - RNA, 21 nt, Human
aacacaaagcuuuugcauauu

SEQ ID NO: 2937801 - RNA, 12 nt, Human
aacacaaagcuu

SEQ ID NO: 2937802 - RNA, 18 nt, Human
aacacaaagcuuuugcau

SEQ ID NO: 2937803 - RNA, 19 nt, Human
aacacaaagcuuuugcaua

SEQ ID NO: 2937804 - RNA, 20 nt, Human
aacacaaagcuuuugcauau

SEQ ID NO: 2937805 - RNA, 20 nt, Human
aacacagcaagggugauggg

SEQ ID NO: 2937806 - RNA, 18 nt, Human
aacacagcaagggugaug

SEQ ID NO: 2937807 - RNA, 18 nt, Human
gugaauaaccugaggauu

SEQ ID NO: 2937808 - RNA, 23 nt, Human
gugacagaggcagccccauucug

SEQ ID NO: 2937809 - RNA, 20 nt, Human
gugacagagugagacucugu

SEQ ID NO: 2937810 - RNA, 22 nt, Human
gugacagagugagacucugucu

SEQ ID NO: 2937811 - RNA, 23 nt, Human
gugaauaauacaguaucucaggg

SEQ ID NO: 2937812 - RNA, 22 nt, Human
gugagacccugucucaaaaaaa

SEQ ID NO: 2937813 - RNA, 14 nt, Human
gugagacucugucu

SEQ ID NO: 2937814 - RNA, 16 nt, Human
gugagacucugucuca

SEQ ID NO: 2937815 - RNA, 19 nt, Human
gugacaugucuuuucuugc

SEQ ID NO: 2937816 - RNA, 16 nt, Human
aacugcauuggcuuug

SEQ ID NO: 2937817 - RNA, 23 nt, Human
aacugauuuuuuuuuccuucagu

SEQ ID NO: 2937818 - RNA, 22 nt, Human
aacugauuuuuuuuuccuucag

SEQ ID NO: 2937819 - RNA, 21 nt, Human
aacugauuuuuuuuuccuuca

SEQ ID NO: 2937820 - RNA, 20 nt, Human
aacugauuuuuuuuuccuuc

SEQ ID NO: 2937821 - RNA, 23 nt, Human
aacucuccucugcugcuggcugg

SEQ ID NO: 2937822 - RNA, 22 nt, Human
aacucuccucugcugcuggcug

SEQ ID NO: 2937823 - RNA, 18 nt, Human
gugaggcucugcccuugg

SEQ ID NO: 2937824 - RNA, 17 nt, Human
gugagucaccaagccca

SEQ ID NO: 2937825 - RNA, 23 nt, Human
gugaguacuacaguccucccauc

SEQ ID NO: 2937826 - RNA, 19 nt, Human
gugagucaccaagcccagu

SEQ ID NO: 2937827 - RNA, 17 nt, Human
aacucuccucugcugcu

SEQ ID NO: 2937828 - RNA, 21 nt, Human
gugaguacuacaguccuccca

SEQ ID NO: 2937829 - RNA, 21 nt, Human
aacucuccucugcugcuggcu

SEQ ID NO: 2937830 - RNA, 19 nt, Human
aacucuccucugcugcugg

SEQ ID NO: 2937831 - RNA, 18 nt, Human
gugagacucugucucaaa

SEQ ID NO: 2937832 - RNA, 13 nt, Human
gugaggcucugcc

SEQ ID NO: 2937833 - RNA, 12 nt, Human
gugaggcucugc

SEQ ID NO: 2937834 - RNA, 17 nt, Human
gugaggcucugcccuug

SEQ ID NO: 2937835 - RNA, 16 nt, Human
gugaggcucugcccuu

SEQ ID NO: 2937836 - RNA, 15 nt, Human
gugaggcucugcccu

SEQ ID NO: 2937837 - RNA, 14 nt, Human
gugaggcucugccc

SEQ ID NO: 2937838 - RNA, 13 nt, Human
aacgucugugcca

SEQ ID NO: 2937839 - RNA, 12 nt, Human
aacgucuuaaau

SEQ ID NO: 2937840 - RNA, 14 nt, Human
aacgucuuaaauau

SEQ ID NO: 2937841 - RNA, 15 nt, Human
aacgucuuaaauauu

SEQ ID NO: 2937842 - RNA, 15 nt, Human
aacuaaaauguucua

SEQ ID NO: 2937843 - RNA, 17 nt, Human
aacuagggaagauaaua

SEQ ID NO: 2937844 - RNA, 13 nt, Human
aacguggcugcuu

SEQ ID NO: 2937845 - RNA, 12 nt, Human
aacguggcugcu

SEQ ID NO: 2937846 - RNA, 24 nt, Human
aacucauuuuuguuuucauuaucu

SEQ ID NO: 2937847 - RNA, 21 nt, Human
aacucauuuuuguuuucauua

SEQ ID NO: 2937848 - RNA, 14 nt, Human
gucucaaaaaaaca

SEQ ID NO: 2937849 - RNA, 17 nt, Human
gucucaaaaaaagaaaa

SEQ ID NO: 2937850 - RNA, 23 nt, Human
gucucuuuaaugucacaggcagg

SEQ ID NO: 2937851 - RNA, 14 nt, Human
gucugcuuagaaau

SEQ ID NO: 2937852 - RNA, 20 nt, Human
gucugacaggcaaugcuggc

SEQ ID NO: 2937853 - RNA, 15 nt, Human
gucugacaggcaaug

SEQ ID NO: 2937854 - RNA, 18 nt, Human
gucugacaggcaaugcug

SEQ ID NO: 2937855 - RNA, 12 nt, Human
gucugacaggca

SEQ ID NO: 2937856 - RNA, 13 nt, Human
gucugacaggcaa

SEQ ID NO: 2937857 - RNA, 14 nt, Human
gucugacaggcaau

SEQ ID NO: 2937858 - RNA, 15 nt, Human
gucuggaaugcagug

SEQ ID NO: 2937859 - RNA, 16 nt, Human
gucuggaaugcagugg

SEQ ID NO: 2937860 - RNA, 19 nt, Human
gucuuauauauuguagaua

SEQ ID NO: 2937861 - RNA, 14 nt, Human
gucuuaauuaaaag

SEQ ID NO: 2937862 - RNA, 18 nt, Human
aagaaaaaugagccuggc

SEQ ID NO: 2937863 - RNA, 17 nt, Human
aagaaaaaugagccugg

SEQ ID NO: 2937864 - RNA, 19 nt, Human
aagaaaaaauauuuucccu

SEQ ID NO: 2937865 - RNA, 18 nt, Human
aagaaaaagaaaaagaaa

SEQ ID NO: 2937866 - RNA, 13 nt, Human
aagaaaaagaaaa

SEQ ID NO: 2937867 - RNA, 21 nt, Human
aacuuuaccuuuuuuauacau

SEQ ID NO: 2937868 - RNA, 22 nt, Human
aacuuuaccuuuuuuauacaua

SEQ ID NO: 2937869 - RNA, 23 nt, Human
aacuuuaccuuuuuuauacauaa

SEQ ID NO: 2937870 - RNA, 11 nt, Human
aagaaacauuu

SEQ ID NO: 2937871 - RNA, 15 nt, Human
aagaaaauaguggug

SEQ ID NO: 2937872 - RNA, 16 nt, Human
aagaaaauaccaagga

SEQ ID NO: 2937873 - RNA, 21 nt, Human
aagaaaauaguggugugauuu

SEQ ID NO: 2937874 - RNA, 22 nt, Human
aagaaaauaguggugugauuug

SEQ ID NO: 2937875 - RNA, 14 nt, Human
aagaaagaaaauca

SEQ ID NO: 2937876 - RNA, 13 nt, Human
aagaaagaaaauc

SEQ ID NO: 2937877 - RNA, 16 nt, Human
aagaaagaaaaucagg

SEQ ID NO: 2937878 - RNA, 16 nt, Human
gugcucugaucaucca

SEQ ID NO: 2937879 - RNA, 13 nt, Human
gugcucuggacag

SEQ ID NO: 2937880 - RNA, 14 nt, Human
gugcucuggacagg

SEQ ID NO: 2937881 - RNA, 15 nt, Human
gugcugcccugccca

SEQ ID NO: 2937882 - RNA, 14 nt, Human
gugcugcccugccc

SEQ ID NO: 2937883 - RNA, 13 nt, Human
gugcugcccugcc

SEQ ID NO: 2937884 - RNA, 12 nt, Human
gugcugcccugc

SEQ ID NO: 2937885 - RNA, 22 nt, Human
gugcuacaaaaacacagcaagg

SEQ ID NO: 2937886 - RNA, 21 nt, Human
gugcuacaaaaacacagcaag

SEQ ID NO: 2937887 - RNA, 18 nt, Human
gugcuaguaauuggaaag

SEQ ID NO: 2937888 - RNA, 18 nt, Human
gugcuaucucccccagcc

SEQ ID NO: 2937889 - RNA, 15 nt, Human
gugcuaucuccccca

SEQ ID NO: 2937890 - RNA, 21 nt, Human
gugcacaugcacgugugugca

SEQ ID NO: 2937891 - RNA, 21 nt, Human
gugcacaagcuccaagcuccc

SEQ ID NO: 2937892 - RNA, 16 nt, Human
gugcacaagcuccaag

SEQ ID NO: 2937893 - RNA, 13 nt, Human
gugcacaagcucc

SEQ ID NO: 2937894 - RNA, 18 nt, Human
gugcaaugaccuuucaau

SEQ ID NO: 2937895 - RNA, 23 nt, Human
gugccaaaaacaacaacaaaaug

SEQ ID NO: 2937896 - RNA, 21 nt, Human
gugcauuuggugguuucagaa

SEQ ID NO: 2937897 - RNA, 18 nt, Human
gugcacgcacacugucug

SEQ ID NO: 2937898 - RNA, 17 nt, Human
gugcauuugaggucugu

SEQ ID NO: 2937899 - RNA, 19 nt, Human
gugcauuugaggucuguuc

SEQ ID NO: 2937900 - RNA, 19 nt, Human
gugauguauguguaauaaa

SEQ ID NO: 2937901 - RNA, 23 nt, Human
gugauccucccaccucagccucc

SEQ ID NO: 2937902 - RNA, 17 nt, Human
gugauuaccagggacug

SEQ ID NO: 2937903 - RNA, 11 nt, Human
gugauuaccag

SEQ ID NO: 2937904 - RNA, 16 nt, Human
gugauuaccagggacu

SEQ ID NO: 2937905 - RNA, 14 nt, Human
aacuucacauauug

SEQ ID NO: 2937906 - RNA, 22 nt, Human
aacuucacauauugauuuccgu

SEQ ID NO: 2937907 - RNA, 22 nt, Human
aacuucaccauauuaccacaga

SEQ ID NO: 2937908 - RNA, 23 nt, Human
aacuuccuuggacucauuuuaaa

SEQ ID NO: 2937909 - RNA, 14 nt, Human
aacuucagaguucu

SEQ ID NO: 2937910 - RNA, 13 nt, Human
aacuucagacaua

SEQ ID NO: 2937911 - RNA, 18 nt, Human
aacuucagcgguuuauau

SEQ ID NO: 2937912 - RNA, 22 nt, Human
aacuuccuuggacucauuuuaa

SEQ ID NO: 2937913 - RNA, 17 nt, Human
acaaaggggcuuaauua

SEQ ID NO: 2937914 - RNA, 22 nt, Human
acaaaggaugcccaaagaugca

SEQ ID NO: 2937915 - RNA, 18 nt, Human
acaaaaggauaaugaaua

SEQ ID NO: 2937916 - RNA, 11 nt, Human
acaaaagcaug

SEQ ID NO: 2937917 - RNA, 22 nt, Human
acaaaagcaugugagacugguu

SEQ ID NO: 2937918 - RNA, 19 nt, Human
uagaggagaaacuggaacu

SEQ ID NO: 2937919 - RNA, 18 nt, Human
uagaugacauugacuauu

SEQ ID NO: 2937920 - RNA, 19 nt, Human
uagaugacauugacuauuu

SEQ ID NO: 2937921 - RNA, 19 nt, Human
uagauauaugcucugcaug

SEQ ID NO: 2937922 - RNA, 15 nt, Human
uagauauaugcucug

SEQ ID NO: 2937923 - RNA, 22 nt, Human
uagaggagaaacuggaacucuc

SEQ ID NO: 2937924 - RNA, 19 nt, Human
uagcauggcugccaauggg

SEQ ID NO: 2937925 - RNA, 15 nt, Human
uagaugcaguucuga

SEQ ID NO: 2937926 - RNA, 14 nt, Human
uagccaaggccaaa

SEQ ID NO: 2937927 - RNA, 22 nt, Human
uagcauuuugcuaaaugugaau

SEQ ID NO: 2937928 - RNA, 21 nt, Human
uagccaaggccaaaggaagca

SEQ ID NO: 2937929 - RNA, 16 nt, Human
uagcauuuugcuaaau

SEQ ID NO: 2937930 - RNA, 14 nt, Human
uagcauuuuaaaca

SEQ ID NO: 2937931 - RNA, 15 nt, Human
uagcauuuuaaacaa

SEQ ID NO: 2937932 - RNA, 16 nt, Human
uagcauuuuaaacaaa

SEQ ID NO: 2937933 - RNA, 18 nt, Human
uagcauuuuaaacaaaau

SEQ ID NO: 2937934 - RNA, 23 nt, Human
uagcauuuuaaacaaaauagaaa

SEQ ID NO: 2937935 - RNA, 18 nt, Human
uagcauguccuaaugcuu

SEQ ID NO: 2937936 - RNA, 19 nt, Human
acaagaccacguuucuaaa

SEQ ID NO: 2937937 - RNA, 20 nt, Human
acaagacccaaaaggcagaa

SEQ ID NO: 2937938 - RNA, 19 nt, Human
acaagacccuugugguccc

SEQ ID NO: 2937939 - RNA, 21 nt, Human
acaacacucauugaccugagg

SEQ ID NO: 2937940 - RNA, 23 nt, Human
acaacacucauugaccugaggcc

SEQ ID NO: 2937941 - RNA, 15 nt, Human
uagccagaggagaga

SEQ ID NO: 2937942 - RNA, 11 nt, Human
uagccagagga

SEQ ID NO: 2937943 - RNA, 18 nt, Human
acaaauuuacagagacag

SEQ ID NO: 2937944 - RNA, 19 nt, Human
acaaauuuacagagacaga

SEQ ID NO: 2937945 - RNA, 12 nt, Human
acaaugacuuac

SEQ ID NO: 2937946 - RNA, 17 nt, Human
acaaugacuuacuguac

SEQ ID NO: 2937947 - RNA, 18 nt, Human
acaaugacuuacuguaca

SEQ ID NO: 2937948 - RNA, 15 nt, Human
uagcuaggugacaua

SEQ ID NO: 2937949 - RNA, 17 nt, Human
uagcuaggugacauaua

SEQ ID NO: 2937950 - RNA, 18 nt, Human
acaagaccacguuucuaa

SEQ ID NO: 2937951 - RNA, 13 nt, Human
acaagacugcaca

SEQ ID NO: 2937952 - RNA, 14 nt, Human
acaagacugcacau

SEQ ID NO: 2937953 - RNA, 23 nt, Human
acaauacaucccuuaccugggaa

SEQ ID NO: 2937954 - RNA, 20 nt, Human
uaggagaagucuucuauuua

SEQ ID NO: 2937955 - RNA, 12 nt, Human
uaggagcaugag

SEQ ID NO: 2937956 - RNA, 19 nt, Human
uaggaaauauuuauuuuaa

SEQ ID NO: 2937957 - RNA, 18 nt, Human
uaggaaauauuuauuuua

SEQ ID NO: 2937958 - RNA, 17 nt, Human
uaggcacuuuaaaacac

SEQ ID NO: 2937959 - RNA, 16 nt, Human
uaggcacuuuaaaaca

SEQ ID NO: 2937960 - RNA, 14 nt, Human
uaggcauuguggga

SEQ ID NO: 2937961 - RNA, 20 nt, Human
uaggcauuugcugaauacag

SEQ ID NO: 2937962 - RNA, 16 nt, Human
uaggcauuugcugaau

SEQ ID NO: 2937963 - RNA, 21 nt, Human
uagggaaggauacaaaagcau

SEQ ID NO: 2937964 - RNA, 15 nt, Human
uagggagagaagaua

SEQ ID NO: 2937965 - RNA, 14 nt, Human
uagggagagaagau

SEQ ID NO: 2937966 - RNA, 18 nt, Human
uaguucagguaacaggca

SEQ ID NO: 2937967 - RNA, 20 nt, Human
uaguuccaccaucaagccac

SEQ ID NO: 2937968 - RNA, 23 nt, Human
acaccauaagcuacugccauccu

SEQ ID NO: 2937969 - RNA, 21 nt, Human
acaccauaagcuacugccauc

SEQ ID NO: 2937970 - RNA, 22 nt, Human
acaccauaagcuacugccaucc

SEQ ID NO: 2937971 - RNA, 18 nt, Human
acacaugauccugcaauu

SEQ ID NO: 2937972 - RNA, 21 nt, Human
acacaugagcaucaggccagg

SEQ ID NO: 2937973 - RNA, 15 nt, Human
acacaugaaguccaa

SEQ ID NO: 2937974 - RNA, 15 nt, Human
acacaucagcuugcc

SEQ ID NO: 2937975 - RNA, 13 nt, Human
acacauuuuauuu

SEQ ID NO: 2937976 - RNA, 14 nt, Human
acacauuuuauuuu

SEQ ID NO: 2937977 - RNA, 19 nt, Human
acacauuuuauuuuauuau

SEQ ID NO: 2937978 - RNA, 20 nt, Human
acacauuuuauuuuauuaug

SEQ ID NO: 2937979 - RNA, 21 nt, Human
acaccucugcacaagcugcac

SEQ ID NO: 2937980 - RNA, 19 nt, Human
acaccucugcacaagcugc

SEQ ID NO: 2937981 - RNA, 16 nt, Human
acaccgggcacucaga

SEQ ID NO: 2937982 - RNA, 19 nt, Human
acacccugugauggggccc

SEQ ID NO: 2937983 - RNA, 20 nt, Human
acacuaaccacgcuggaccu

SEQ ID NO: 2937984 - RNA, 20 nt, Human
uauaacuuuuuauauucuca

SEQ ID NO: 2937985 - RNA, 12 nt, Human
uauaacuuuuua

SEQ ID NO: 2937986 - RNA, 17 nt, Human
uauaacuuuuuauauuc

SEQ ID NO: 2937987 - RNA, 16 nt, Human
uauaacuuaaugaaaa

SEQ ID NO: 2937988 - RNA, 14 nt, Human
uauaacuuaaugaa

SEQ ID NO: 2937989 - RNA, 18 nt, Human
uauaacuuaaugaaaaca

SEQ ID NO: 2937990 - RNA, 19 nt, Human
uauaacuuaaugaaaacaa

SEQ ID NO: 2937991 - RNA, 20 nt, Human
acacucacauuuauucugcu

SEQ ID NO: 2937992 - RNA, 18 nt, Human
acacucaaaucaagaaac

SEQ ID NO: 2937993 - RNA, 13 nt, Human
acacuaagagaga

SEQ ID NO: 2937994 - RNA, 19 nt, Human
acacucaaaucaagaaacu

SEQ ID NO: 2937995 - RNA, 15 nt, Human
acacucaaaagcugg

SEQ ID NO: 2937996 - RNA, 17 nt, Human
acaaugugaaaagaaaa

SEQ ID NO: 2937997 - RNA, 19 nt, Human
acaaugugaaaagaaaaau

SEQ ID NO: 2937998 - RNA, 14 nt, Human
acacacacauacac

SEQ ID NO: 2937999 - RNA, 18 nt, Human
acaaugcuguauuuuaaa

SEQ ID NO: 2938000 - RNA, 22 nt, Human
acaaugcuguauuuuaaaagaa

SEQ ID NO: 2938001 - RNA, 21 nt, Human
acaaugcugugcccuaaagug

SEQ ID NO: 2938002 - RNA, 22 nt, Human
acaaugcugugcccuaaagugu

SEQ ID NO: 2938003 - RNA, 23 nt, Human
acaaugcugugcccuaaagugua

SEQ ID NO: 2938004 - RNA, 24 nt, Human
acaaugcugugcccuaaaguguau

SEQ ID NO: 2938005 - RNA, 22 nt, Human
acacacacgcgugcacacacca

SEQ ID NO: 2938006 - RNA, 17 nt, Human
acacacagcucuguccu

SEQ ID NO: 2938007 - RNA, 13 nt, Human
acacacagcucug

SEQ ID NO: 2938008 - RNA, 14 nt, Human
acacacagcucugu

SEQ ID NO: 2938009 - RNA, 14 nt, Human
acacaccagagccc

SEQ ID NO: 2938010 - RNA, 15 nt, Human
acacaccagagccca

SEQ ID NO: 2938011 - RNA, 20 nt, Human
acacaccagagcccaccuug

SEQ ID NO: 2938012 - RNA, 21 nt, Human
acacacgcgugcacacaccag

SEQ ID NO: 2938013 - RNA, 21 nt, Human
acacacugcauguuugugauu

SEQ ID NO: 2938014 - RNA, 15 nt, Human
acacacucaaaucaa

SEQ ID NO: 2938015 - RNA, 19 nt, Human
acacauaagccaaaacuga

SEQ ID NO: 2938016 - RNA, 13 nt, Human
acacagugagucg

SEQ ID NO: 2938017 - RNA, 19 nt, Human
acacaguauuacuucugcu

SEQ ID NO: 2938018 - RNA, 22 nt, Human
acacaguauuacuucugcuaca

SEQ ID NO: 2938019 - RNA, 20 nt, Human
acacacuguacacauaagcc

SEQ ID NO: 2938020 - RNA, 17 nt, Human
acacacuguacacauaa

SEQ ID NO: 2938021 - RNA, 18 nt, Human
acacaguauuacuucugc

SEQ ID NO: 2938022 - RNA, 16 nt, Human
acacaguauuacuucu

SEQ ID NO: 2938023 - RNA, 23 nt, Human
uaguguuggagaagaacugaaau

SEQ ID NO: 2938024 - RNA, 22 nt, Human
uaguguuuucaauuuuaaacau

SEQ ID NO: 2938025 - RNA, 23 nt, Human
uaguguuuucaauuuuaaacaua

SEQ ID NO: 2938026 - RNA, 21 nt, Human
uaguguuuucaauuuuaaaca

SEQ ID NO: 2938027 - RNA, 17 nt, Human
uaguguuggagaagaac

SEQ ID NO: 2938028 - RNA, 22 nt, Human
uagugaaacucguuaauuugua

SEQ ID NO: 2938029 - RNA, 15 nt, Human
acagacccugcccug

SEQ ID NO: 2938030 - RNA, 14 nt, Human
acagacccugcccu

SEQ ID NO: 2938031 - RNA, 13 nt, Human
acagacccugccc

SEQ ID NO: 2938032 - RNA, 15 nt, Human
uauauuguuugcuaa

SEQ ID NO: 2938033 - RNA, 17 nt, Human
acagaaauguacagcaa

SEQ ID NO: 2938034 - RNA, 14 nt, Human
acagaaauguacag

SEQ ID NO: 2938035 - RNA, 16 nt, Human
acagaaauguacagca

SEQ ID NO: 2938036 - RNA, 17 nt, Human
acagaaaauucuucucc

SEQ ID NO: 2938037 - RNA, 13 nt, Human
acagaaauguaca

SEQ ID NO: 2938038 - RNA, 20 nt, Human
acagaaaauggaagacagcu

SEQ ID NO: 2938039 - RNA, 19 nt, Human
uauaauuuugugaagcaaa

SEQ ID NO: 2938040 - RNA, 15 nt, Human
uaucaaguauagaaa

SEQ ID NO: 2938041 - RNA, 16 nt, Human
uaucaaguauagaaaa

SEQ ID NO: 2938042 - RNA, 19 nt, Human
uaucaaguauagaaaaucu

SEQ ID NO: 2938043 - RNA, 17 nt, Human
uaucccuuggacauuuu

SEQ ID NO: 2938044 - RNA, 19 nt, Human
uaucccuuggacauuuuau

SEQ ID NO: 2938045 - RNA, 18 nt, Human
uaucccuuggacauuuua

SEQ ID NO: 2938046 - RNA, 12 nt, Human
uauccuaauaaa

SEQ ID NO: 2938047 - RNA, 18 nt, Human
uauccuaauaaaaaggug

SEQ ID NO: 2938048 - RNA, 15 nt, Human
uauccuaauaaaaag

SEQ ID NO: 2938049 - RNA, 19 nt, Human
uauccuaauaaaaagguga

SEQ ID NO: 2938050 - RNA, 22 nt, Human
uauccuaauaaaaaggugacca

SEQ ID NO: 2938051 - RNA, 15 nt, Human
uaucuauauuuuaca

SEQ ID NO: 2938052 - RNA, 11 nt, Human
acagagaaagu

SEQ ID NO: 2938053 - RNA, 18 nt, Human
acagagaaaguacuucuc

SEQ ID NO: 2938054 - RNA, 13 nt, Human
uaucucccccagc

SEQ ID NO: 2938055 - RNA, 14 nt, Human
uaucucccccagcc

SEQ ID NO: 2938056 - RNA, 23 nt, Human
uaucuauauuuuacauaaauuua

SEQ ID NO: 2938057 - RNA, 18 nt, Human
acagauugaauuugccua

SEQ ID NO: 2938058 - RNA, 12 nt, Human
acagauugaauu

SEQ ID NO: 2938059 - RNA, 12 nt, Human
acagaugaaaag

SEQ ID NO: 2938060 - RNA, 17 nt, Human
acagcaaggagauuuac

SEQ ID NO: 2938061 - RNA, 14 nt, Human
acagagcccacgcc

SEQ ID NO: 2938062 - RNA, 15 nt, Human
acagagcccacgccc

SEQ ID NO: 2938063 - RNA, 19 nt, Human
acagagcccacgcccccac

SEQ ID NO: 2938064 - RNA, 18 nt, Human
acagagcccacgccccca

SEQ ID NO: 2938065 - RNA, 16 nt, Human
acagcaaggagauuua

SEQ ID NO: 2938066 - RNA, 21 nt, Human
acagcaaggagauuuacaacu

SEQ ID NO: 2938067 - RNA, 17 nt, Human
acagcccgggcucugcc

SEQ ID NO: 2938068 - RNA, 19 nt, Human
acagcccgggcucugccuc

SEQ ID NO: 2938069 - RNA, 18 nt, Human
acagcccgggcucugccu

SEQ ID NO: 2938070 - RNA, 21 nt, Human
uaugaaauauuauguuaaaac

SEQ ID NO: 2938071 - RNA, 16 nt, Human
uaugauuaaguaauga

SEQ ID NO: 2938072 - RNA, 20 nt, Human
uaugauuaaguaaugauaac

SEQ ID NO: 2938073 - RNA, 21 nt, Human
uaugauuaaguaaugauaacu

SEQ ID NO: 2938074 - RNA, 11 nt, Human
uaugcauuuga

SEQ ID NO: 2938075 - RNA, 23 nt, Human
uaugcauuugaaaauuuugaugu

SEQ ID NO: 2938076 - RNA, 24 nt, Human
uaugcauuugaaaauuuugauguu

SEQ ID NO: 2938077 - RNA, 17 nt, Human
uaugccugggcagaagg

SEQ ID NO: 2938078 - RNA, 19 nt, Human
uaugccccauucaacaucu

SEQ ID NO: 2938079 - RNA, 15 nt, Human
uaugccccauucaac

SEQ ID NO: 2938080 - RNA, 15 nt, Human
uaugcuuauacacuu

SEQ ID NO: 2938081 - RNA, 18 nt, Human
uauggcuuuugugcauua

SEQ ID NO: 2938082 - RNA, 21 nt, Human
uauggcuuuugugcauuaucu

SEQ ID NO: 2938083 - RNA, 17 nt, Human
uauggcuuuugugcauu

SEQ ID NO: 2938084 - RNA, 13 nt, Human
uauggguuuggcu

SEQ ID NO: 2938085 - RNA, 16 nt, Human
acagccucuuagaugc

SEQ ID NO: 2938086 - RNA, 19 nt, Human
acaggcuuagugauguaau

SEQ ID NO: 2938087 - RNA, 20 nt, Human
acaggcuuagugauguaauu

SEQ ID NO: 2938088 - RNA, 20 nt, Human
acagggaggacgcucucugg

SEQ ID NO: 2938089 - RNA, 21 nt, Human
acagggaggacgcucucuggc

SEQ ID NO: 2938090 - RNA, 12 nt, Human
acaggcugggcu

SEQ ID NO: 2938091 - RNA, 22 nt, Human
acaggcugggcuucaguggcag

SEQ ID NO: 2938092 - RNA, 23 nt, Human
acaggcugggcuucaguggcagc

SEQ ID NO: 2938093 - RNA, 14 nt, Human
acaggcuuagugau

SEQ ID NO: 2938094 - RNA, 13 nt, Human
acaguaauaaaug

SEQ ID NO: 2938095 - RNA, 12 nt, Human
acagggcacacc

SEQ ID NO: 2938096 - RNA, 20 nt, Human
acagggcacaccgggcacuc

SEQ ID NO: 2938097 - RNA, 16 nt, Human
acagucaccucaugga

SEQ ID NO: 2938098 - RNA, 17 nt, Human
acagucaccucauggaa

SEQ ID NO: 2938099 - RNA, 18 nt, Human
acagucaccucauggaau

SEQ ID NO: 2938100 - RNA, 23 nt, Human
uauucaaacagucucaggaaauc

SEQ ID NO: 2938101 - RNA, 15 nt, Human
uauucaaacagucuc

SEQ ID NO: 2938102 - RNA, 13 nt, Human
uauuacuucugcu

SEQ ID NO: 2938103 - RNA, 14 nt, Human
uauuacuucugcua

SEQ ID NO: 2938104 - RNA, 14 nt, Human
uauuacuguaagaa

SEQ ID NO: 2938105 - RNA, 18 nt, Human
uauucaguggcuaacuug

SEQ ID NO: 2938106 - RNA, 20 nt, Human
uauucaguaauaacucuacc

SEQ ID NO: 2938107 - RNA, 14 nt, Human
uauucaggaagcuc

SEQ ID NO: 2938108 - RNA, 17 nt, Human
acaggaaguagaggagg

SEQ ID NO: 2938109 - RNA, 13 nt, Human
acaggaaguacug

SEQ ID NO: 2938110 - RNA, 15 nt, Human
acaggaaaagcugcu

SEQ ID NO: 2938111 - RNA, 16 nt, Human
acaggaaaagcugcug

SEQ ID NO: 2938112 - RNA, 17 nt, Human
acaggaaaagcugcuga

SEQ ID NO: 2938113 - RNA, 22 nt, Human
acaggaaccacaagacugcaca

SEQ ID NO: 2938114 - RNA, 13 nt, Human
acagcuaacaugg

SEQ ID NO: 2938115 - RNA, 14 nt, Human
acaggcauguucuc

SEQ ID NO: 2938116 - RNA, 14 nt, Human
acaggcagguccag

SEQ ID NO: 2938117 - RNA, 16 nt, Human
acaggcagguccaggg

SEQ ID NO: 2938118 - RNA, 16 nt, Human
acaggagugagcacua

SEQ ID NO: 2938119 - RNA, 14 nt, Human
acaggaucagucug

SEQ ID NO: 2938120 - RNA, 13 nt, Human
acaggcaggucca

SEQ ID NO: 2938121 - RNA, 14 nt, Human
acaggacauauauu

SEQ ID NO: 2938122 - RNA, 17 nt, Human
acaggacauauauuuuu

SEQ ID NO: 2938123 - RNA, 23 nt, Human
acaggaccagggauuuccaugau

SEQ ID NO: 2938124 - RNA, 22 nt, Human
acaggcauguucucugaggaca

SEQ ID NO: 2938125 - RNA, 15 nt, Human
acaggcauguucucu

SEQ ID NO: 2938126 - RNA, 18 nt, Human
acaggcauguucucugag

SEQ ID NO: 2938127 - RNA, 19 nt, Human
acaggcauguucucugagg

SEQ ID NO: 2938128 - RNA, 20 nt, Human
acaggcauguucucugagga

SEQ ID NO: 2938129 - RNA, 20 nt, Human
uauguggaguucaucuugaa

SEQ ID NO: 2938130 - RNA, 12 nt, Human
uaugugaacagu

SEQ ID NO: 2938131 - RNA, 22 nt, Human
uaugugaacaguuguguuugaa

SEQ ID NO: 2938132 - RNA, 23 nt, Human
uauguuuuuguucaguuuaucug

SEQ ID NO: 2938133 - RNA, 16 nt, Human
uauuaaaacucauuuu

SEQ ID NO: 2938134 - RNA, 13 nt, Human
uauguguaauaaa

SEQ ID NO: 2938135 - RNA, 16 nt, Human
uauguguaauaaauau

SEQ ID NO: 2938136 - RNA, 21 nt, Human
uauguuuucaggcuagaugua

SEQ ID NO: 2938137 - RNA, 20 nt, Human
uacucugccacuuuauuucu

SEQ ID NO: 2938138 - RNA, 12 nt, Human
uacucuguguca

SEQ ID NO: 2938139 - RNA, 16 nt, Human
uacuggagaaaaugga

SEQ ID NO: 2938140 - RNA, 13 nt, Human
uacuguaagaaaa

SEQ ID NO: 2938141 - RNA, 14 nt, Human
uacuguaagaaaau

SEQ ID NO: 2938142 - RNA, 19 nt, Human
uacuguaauuugugauaca

SEQ ID NO: 2938143 - RNA, 20 nt, Human
uacuguaauuugugauacaa

SEQ ID NO: 2938144 - RNA, 18 nt, Human
uacuguaauuugugauac

SEQ ID NO: 2938145 - RNA, 18 nt, Human
uacuguacaugaaaacac

SEQ ID NO: 2938146 - RNA, 22 nt, Human
uacuguacaugaaaacacauuu

SEQ ID NO: 2938147 - RNA, 21 nt, Human
uacuguacaugaaaacacauu

SEQ ID NO: 2938148 - RNA, 22 nt, Human
aauugacccacaagaaaugaaa

SEQ ID NO: 2938149 - RNA, 21 nt, Human
aauugacccacaagaaaugaa

SEQ ID NO: 2938150 - RNA, 13 nt, Human
uacuacuccugua

SEQ ID NO: 2938151 - RNA, 17 nt, Human
uacuacuccuguaggaa

SEQ ID NO: 2938152 - RNA, 23 nt, Human
uacuauggcccuggccuagcaua

SEQ ID NO: 2938153 - RNA, 12 nt, Human
uacuauguauca

SEQ ID NO: 2938154 - RNA, 13 nt, Human
uacuauguaucaa

SEQ ID NO: 2938155 - RNA, 14 nt, Human
uacuauguaucaau

SEQ ID NO: 2938156 - RNA, 22 nt, Human
uacucuccuggaaauauuaaga

SEQ ID NO: 2938157 - RNA, 23 nt, Human
uacucuccuggaaauauuaagaa

SEQ ID NO: 2938158 - RNA, 18 nt, Human
uacgggaggguaaggcug

SEQ ID NO: 2938159 - RNA, 12 nt, Human
uacguacacauu

SEQ ID NO: 2938160 - RNA, 13 nt, Human
uacguacacauuu

SEQ ID NO: 2938161 - RNA, 15 nt, Human
uacguugugcauuug

SEQ ID NO: 2938162 - RNA, 16 nt, Human
uacguugugcauuugg

SEQ ID NO: 2938163 - RNA, 22 nt, Human
uacgccaggggaaaaucagccu

SEQ ID NO: 2938164 - RNA, 15 nt, Human
aauuccuaaaauuau

SEQ ID NO: 2938165 - RNA, 20 nt, Human
aauuauucuauaauuuccau

SEQ ID NO: 2938166 - RNA, 23 nt, Human
aauuauucuauaauuuccauuua

SEQ ID NO: 2938167 - RNA, 17 nt, Human
aauuauugauguuuuca

SEQ ID NO: 2938168 - RNA, 22 nt, Human
aauuagguugaaacauaucucu

SEQ ID NO: 2938169 - RNA, 15 nt, Human
aauuagguugaaaca

SEQ ID NO: 2938170 - RNA, 17 nt, Human
aauuagguugaaacaua

SEQ ID NO: 2938171 - RNA, 18 nt, Human
aauuagguugaaacauau

SEQ ID NO: 2938172 - RNA, 14 nt, Human
aauuagguugaaac

SEQ ID NO: 2938173 - RNA, 13 nt, Human
aauucacaaagua

SEQ ID NO: 2938174 - RNA, 17 nt, Human
aauucacaaaguaauuu

SEQ ID NO: 2938175 - RNA, 18 nt, Human
aauuccaagugauugaaa

SEQ ID NO: 2938176 - RNA, 12 nt, Human
aauuccccagau

SEQ ID NO: 2938177 - RNA, 14 nt, Human
aauuccccacccug

SEQ ID NO: 2938178 - RNA, 22 nt, Human
aauuccacuuauaggaauugac

SEQ ID NO: 2938179 - RNA, 23 nt, Human
uaccugccaggaagccagcaggc

SEQ ID NO: 2938180 - RNA, 20 nt, Human
uaccugccaggaagccagca

SEQ ID NO: 2938181 - RNA, 18 nt, Human
uaccugccaggaagccag

SEQ ID NO: 2938182 - RNA, 10 nt, Human
uaccuguccc

SEQ ID NO: 2938183 - RNA, 17 nt, Human
uaccugucccccugaca

SEQ ID NO: 2938184 - RNA, 16 nt, Human
uaccugucccccugac

SEQ ID NO: 2938185 - RNA, 14 nt, Human
uaccugucccccug

SEQ ID NO: 2938186 - RNA, 13 nt, Human
uaccugucccccu

SEQ ID NO: 2938187 - RNA, 11 nt, Human
aauuacaggaa

SEQ ID NO: 2938188 - RNA, 15 nt, Human
aauuagccaagugug

SEQ ID NO: 2938189 - RNA, 12 nt, Human
aauggcagccuu

SEQ ID NO: 2938190 - RNA, 16 nt, Human
aauggcagccuuggca

SEQ ID NO: 2938191 - RNA, 22 nt, Human
uacagaguggaauaagacagag

SEQ ID NO: 2938192 - RNA, 20 nt, Human
uacagaguggaauaagacag

SEQ ID NO: 2938193 - RNA, 19 nt, Human
uacagacaaagcguggugg

SEQ ID NO: 2938194 - RNA, 22 nt, Human
uacagacaacaaaccuguuucu

SEQ ID NO: 2938195 - RNA, 19 nt, Human
uacacauuuuauuuuauua

SEQ ID NO: 2938196 - RNA, 21 nt, Human
uacacauuuuauuuuauuaug

SEQ ID NO: 2938197 - RNA, 22 nt, Human
uacacauuuuauuuuauuaugc

SEQ ID NO: 2938198 - RNA, 14 nt, Human
uacacuaagagaga

SEQ ID NO: 2938199 - RNA, 23 nt, Human
uacacauuuuauuuuauuaugca

SEQ ID NO: 2938200 - RNA, 15 nt, Human
uacacuaaaagguga

SEQ ID NO: 2938201 - RNA, 21 nt, Human
aaugcacuuuguucuggcucu

SEQ ID NO: 2938202 - RNA, 17 nt, Human
aaugaccuuucaauagg

SEQ ID NO: 2938203 - RNA, 16 nt, Human
aaugaccuuucaauag

SEQ ID NO: 2938204 - RNA, 18 nt, Human
aaugaccuuucaauagga

SEQ ID NO: 2938205 - RNA, 21 nt, Human
uacaaugcugugcccuaaagu

SEQ ID NO: 2938206 - RNA, 22 nt, Human
aaugcacuuuguucuggcucuu

SEQ ID NO: 2938207 - RNA, 21 nt, Human
aauggacguguuaugacucca

SEQ ID NO: 2938208 - RNA, 14 nt, Human
aauggaaccacucu

SEQ ID NO: 2938209 - RNA, 20 nt, Human
aauggacuaacuugucuuug

SEQ ID NO: 2938210 - RNA, 23 nt, Human
aauggacguguuaugacuccaga

SEQ ID NO: 2938211 - RNA, 21 nt, Human
aauggaaaugggcagagcaga

SEQ ID NO: 2938212 - RNA, 20 nt, Human
aauggaaaugggcagagcag

SEQ ID NO: 2938213 - RNA, 12 nt, Human
aaugcccagccc

SEQ ID NO: 2938214 - RNA, 11 nt, Human
aaugcccagcc

SEQ ID NO: 2938215 - RNA, 16 nt, Human
aaugcuguauuuuaaa

SEQ ID NO: 2938216 - RNA, 16 nt, Human
uacaggugugagucac

SEQ ID NO: 2938217 - RNA, 24 nt, Human
uacauaaugcgugcauaccacuuu

SEQ ID NO: 2938218 - RNA, 21 nt, Human
uacauaaugcgugcauaccac

SEQ ID NO: 2938219 - RNA, 23 nt, Human
uacauaaugcgugcauaccacuu

SEQ ID NO: 2938220 - RNA, 20 nt, Human
uacaucccuuaccugggaaa

SEQ ID NO: 2938221 - RNA, 15 nt, Human
aaugugaaacuggau

SEQ ID NO: 2938222 - RNA, 14 nt, Human
aaugugaaacugga

SEQ ID NO: 2938223 - RNA, 19 nt, Human
aaugugaaaagaaaaauga

SEQ ID NO: 2938224 - RNA, 19 nt, Human
aauguauguguaaguauuc

SEQ ID NO: 2938225 - RNA, 20 nt, Human
aauguauguguaaguauucu

SEQ ID NO: 2938226 - RNA, 17 nt, Human
aaugugaaaagaaaaau

SEQ ID NO: 2938227 - RNA, 22 nt, Human
aauguauuacaguggggaauga

SEQ ID NO: 2938228 - RNA, 21 nt, Human
aauguucucucuucuccaccu

SEQ ID NO: 2938229 - RNA, 11 nt, Human
aauuaacuuuu

SEQ ID NO: 2938230 - RNA, 21 nt, Human
aauuaaugucaguauuucaac

SEQ ID NO: 2938231 - RNA, 20 nt, Human
uacauguguguauauguaga

SEQ ID NO: 2938232 - RNA, 16 nt, Human
uacauguguguauaug

SEQ ID NO: 2938233 - RNA, 18 nt, Human
uaccaccagucugacugu

SEQ ID NO: 2938234 - RNA, 13 nt, Human
uacauucuguuaa

SEQ ID NO: 2938235 - RNA, 18 nt, Human
uaagcacacuugacauca

SEQ ID NO: 2938236 - RNA, 22 nt, Human
uaagcuguuacugucuucagua

SEQ ID NO: 2938237 - RNA, 16 nt, Human
aaucaggguuaguauu

SEQ ID NO: 2938238 - RNA, 21 nt, Human
aaucaggguuaguauugucca

SEQ ID NO: 2938239 - RNA, 22 nt, Human
aaucaggguuaguauuguccag

SEQ ID NO: 2938240 - RNA, 22 nt, Human
aauaugcacacauuuuuuaaau

SEQ ID NO: 2938241 - RNA, 16 nt, Human
aauaugcacacauuuu

SEQ ID NO: 2938242 - RNA, 17 nt, Human
aauaugcacacauuuuu

SEQ ID NO: 2938243 - RNA, 21 nt, Human
uaagacuuaguacuaucugug

SEQ ID NO: 2938244 - RNA, 15 nt, Human
uaagagaaaugagcu

SEQ ID NO: 2938245 - RNA, 21 nt, Human
aauaugccccauucaacaucu

SEQ ID NO: 2938246 - RNA, 24 nt, Human
aauaugccccauucaacaucuagu

SEQ ID NO: 2938247 - RNA, 15 nt, Human
aauauuuauuuuaau

SEQ ID NO: 2938248 - RNA, 19 nt, Human
aauauuuauuuuaauaaug

SEQ ID NO: 2938249 - RNA, 18 nt, Human
aauauuuauuuuaauaau

SEQ ID NO: 2938250 - RNA, 13 nt, Human
aauauuuaaucuu

SEQ ID NO: 2938251 - RNA, 13 nt, Human
uaacuucacauau

SEQ ID NO: 2938252 - RNA, 21 nt, Human
uaacuucacauauugauuucc

SEQ ID NO: 2938253 - RNA, 14 nt, Human
uaacuucaccauau

SEQ ID NO: 2938254 - RNA, 17 nt, Human
uaacuuccaauuuacau

SEQ ID NO: 2938255 - RNA, 20 nt, Human
uaacgauaaaagacagugaa

SEQ ID NO: 2938256 - RNA, 16 nt, Human
uaacuuucugaaauaa

SEQ ID NO: 2938257 - RNA, 13 nt, Human
uaagacagagacc

SEQ ID NO: 2938258 - RNA, 18 nt, Human
uaagaagugaaaaucuac

SEQ ID NO: 2938259 - RNA, 21 nt, Human
aauaguucagguaacaggcag

SEQ ID NO: 2938260 - RNA, 13 nt, Human
aauaguuggcuag

SEQ ID NO: 2938261 - RNA, 22 nt, Human
aauaguggugugauuuggggau

SEQ ID NO: 2938262 - RNA, 16 nt, Human
aauaguggugugauuu

SEQ ID NO: 2938263 - RNA, 16 nt, Human
aauagucaaauugugu

SEQ ID NO: 2938264 - RNA, 18 nt, Human
uaacauggacaugaucuu

SEQ ID NO: 2938265 - RNA, 23 nt, Human
uaacauggacaugaucuucuuua

SEQ ID NO: 2938266 - RNA, 22 nt, Human
aauaucacuugucaauaaaauc

SEQ ID NO: 2938267 - RNA, 20 nt, Human
aauaucacuugucaauaaaa

SEQ ID NO: 2938268 - RNA, 13 nt, Human
uaauguacugcau

SEQ ID NO: 2938269 - RNA, 17 nt, Human
uaaugucaguauuucaa

SEQ ID NO: 2938270 - RNA, 18 nt, Human
uaaugucacaggcagguc

SEQ ID NO: 2938271 - RNA, 17 nt, Human
aaugaaacauuuuguca

SEQ ID NO: 2938272 - RNA, 17 nt, Human
aaugaaaccugugucuc

SEQ ID NO: 2938273 - RNA, 16 nt, Human
aaugaaagacuguaca

SEQ ID NO: 2938274 - RNA, 17 nt, Human
aaugaaagacuguacaa

SEQ ID NO: 2938275 - RNA, 15 nt, Human
aaugaccuuucaaua

SEQ ID NO: 2938276 - RNA, 22 nt, Human
aaugaaugucagugugacugau

SEQ ID NO: 2938277 - RNA, 13 nt, Human
aaugaaugucacu

SEQ ID NO: 2938278 - RNA, 13 nt, Human
aaugaaugucagu

SEQ ID NO: 2938279 - RNA, 22 nt, Human
aaugaauggcuaagcaaaaugu

SEQ ID NO: 2938280 - RNA, 18 nt, Human
uaauagacaauuuauuau

SEQ ID NO: 2938281 - RNA, 22 nt, Human
uaauagacaauuuauuauggca

SEQ ID NO: 2938282 - RNA, 16 nt, Human
uaauacaccacuacau

SEQ ID NO: 2938283 - RNA, 14 nt, Human
uaauacaccacuac

SEQ ID NO: 2938284 - RNA, 18 nt, Human
uaauacaccacuacauuc

SEQ ID NO: 2938285 - RNA, 19 nt, Human
uaauacaccacuacauucu

SEQ ID NO: 2938286 - RNA, 14 nt, Human
uaauagacaauuua

SEQ ID NO: 2938287 - RNA, 16 nt, Human
uaauagacaauuuauu

SEQ ID NO: 2938288 - RNA, 13 nt, Human
uaaugaaaacaau

SEQ ID NO: 2938289 - RNA, 16 nt, Human
uaaugaaaacaaugca

SEQ ID NO: 2938290 - RNA, 17 nt, Human
uaaugaaugaaacauuu

SEQ ID NO: 2938291 - RNA, 11 nt, Human
uaaucuuuuau

SEQ ID NO: 2938292 - RNA, 13 nt, Human
uaaucuuucacag

SEQ ID NO: 2938293 - RNA, 12 nt, Human
uaauaaacucau

SEQ ID NO: 2938294 - RNA, 12 nt, Human
aaucaugaauua

SEQ ID NO: 2938295 - RNA, 15 nt, Human
aaucaugaauuaguu

SEQ ID NO: 2938296 - RNA, 19 nt, Human
uaaguauucuuauuuaaug

SEQ ID NO: 2938297 - RNA, 20 nt, Human
uaaguauucuuauuuaauga

SEQ ID NO: 2938298 - RNA, 17 nt, Human
uaaguacuauguaucaa

SEQ ID NO: 2938299 - RNA, 13 nt, Human
uaaguacuaugua

SEQ ID NO: 2938300 - RNA, 16 nt, Human
uaaguacuauguauca

SEQ ID NO: 2938301 - RNA, 16 nt, Human
uaagcuuguauuccuu

SEQ ID NO: 2938302 - RNA, 19 nt, Human
uaaguaaugauaacuggaa

SEQ ID NO: 2938303 - RNA, 15 nt, Human
aaucauuagguguga

SEQ ID NO: 2938304 - RNA, 17 nt, Human
aaucauuaggugugacu

SEQ ID NO: 2938305 - RNA, 23 nt, Human
aaucauuaggugugacugaauuu

SEQ ID NO: 2938306 - RNA, 23 nt, Human
aaucgcuccaccuugcagcucuc

SEQ ID NO: 2938307 - RNA, 19 nt, Human
aaucuggauucauauuuaa

SEQ ID NO: 2938308 - RNA, 18 nt, Human
aaucuggauucauauuua

SEQ ID NO: 2938309 - RNA, 17 nt, Human
aaucuggauucauauuu

SEQ ID NO: 2938310 - RNA, 16 nt, Human
aaucuggauucauauu

SEQ ID NO: 2938311 - RNA, 19 nt, Human
aaucuacacuccagugaga

SEQ ID NO: 2938312 - RNA, 19 nt, Human
aaucuuauaauuuaaaaua

SEQ ID NO: 2938313 - RNA, 23 nt, Human
ucacuugaacccgggaggcagag

SEQ ID NO: 2938314 - RNA, 10 nt, Human
ucacuugagu

SEQ ID NO: 2938315 - RNA, 15 nt, Human
accaguguuguggau

SEQ ID NO: 2938316 - RNA, 17 nt, Human
accaguguuguggauuu

SEQ ID NO: 2938317 - RNA, 14 nt, Human
accagucugacugu

SEQ ID NO: 2938318 - RNA, 23 nt, Human
ucacuguugcccaggcuggcgug

SEQ ID NO: 2938319 - RNA, 19 nt, Human
ucacuguugcccaggcugg

SEQ ID NO: 2938320 - RNA, 15 nt, Human
ucacugcagccucaa

SEQ ID NO: 2938321 - RNA, 13 nt, Human
ucacugcagccuc

SEQ ID NO: 2938322 - RNA, 16 nt, Human
ucacugagacagcccg

SEQ ID NO: 2938323 - RNA, 14 nt, Human
ucacugcagccuca

SEQ ID NO: 2938324 - RNA, 22 nt, Human
ucacugagacagcccgggcucu

SEQ ID NO: 2938325 - RNA, 21 nt, Human
ucacugagacagcccgggcuc

SEQ ID NO: 2938326 - RNA, 17 nt, Human
ucacugagacagcccgg

SEQ ID NO: 2938327 - RNA, 22 nt, Human
accagcgugugacuacuccccc

SEQ ID NO: 2938328 - RNA, 17 nt, Human
accacuacauucuguua

SEQ ID NO: 2938329 - RNA, 16 nt, Human
accacuacauucuguu

SEQ ID NO: 2938330 - RNA, 15 nt, Human
accacuacauucugu

SEQ ID NO: 2938331 - RNA, 14 nt, Human
ucaccucauggaau

SEQ ID NO: 2938332 - RNA, 12 nt, Human
ucaccucaugga

SEQ ID NO: 2938333 - RNA, 13 nt, Human
ucaccucauggaa

SEQ ID NO: 2938334 - RNA, 16 nt, Human
ucaauucuugccaaau

SEQ ID NO: 2938335 - RNA, 12 nt, Human
ucaauugugaaa

SEQ ID NO: 2938336 - RNA, 16 nt, Human
ucaauugugaaaaaau

SEQ ID NO: 2938337 - RNA, 13 nt, Human
ucaauuuuaaaca

SEQ ID NO: 2938338 - RNA, 14 nt, Human
ucaauuuuaaacau

SEQ ID NO: 2938339 - RNA, 15 nt, Human
ucaauuuuaaacaua

SEQ ID NO: 2938340 - RNA, 16 nt, Human
ucaauuuuaaacauau

SEQ ID NO: 2938341 - RNA, 21 nt, Human
ucacaacagauuauuaccuua

SEQ ID NO: 2938342 - RNA, 17 nt, Human
ucacaaaggaugcccaa

SEQ ID NO: 2938343 - RNA, 13 nt, Human
ucacagccucuga

SEQ ID NO: 2938344 - RNA, 20 nt, Human
ucacaguucucuccuucuuc

SEQ ID NO: 2938345 - RNA, 16 nt, Human
ucacaguucucuccuu

SEQ ID NO: 2938346 - RNA, 16 nt, Human
ucacacugucuucuga

SEQ ID NO: 2938347 - RNA, 20 nt, Human
ucacagaugggugcuuggag

SEQ ID NO: 2938348 - RNA, 17 nt, Human
accacaucuugcucugc

SEQ ID NO: 2938349 - RNA, 18 nt, Human
accacaucuugcucugcu

SEQ ID NO: 2938350 - RNA, 19 nt, Human
accacaucuugcucugcug

SEQ ID NO: 2938351 - RNA, 18 nt, Human
accacaugugcacaugca

SEQ ID NO: 2938352 - RNA, 16 nt, Human
accacaucuugcucug

SEQ ID NO: 2938353 - RNA, 15 nt, Human
accaccacacccagc

SEQ ID NO: 2938354 - RNA, 20 nt, Human
accaccacacccagcccacu

SEQ ID NO: 2938355 - RNA, 15 nt, Human
acauguaauuaagua

SEQ ID NO: 2938356 - RNA, 17 nt, Human
acauguaauuaaguacu

SEQ ID NO: 2938357 - RNA, 19 nt, Human
acauguaauuaaguacuau

SEQ ID NO: 2938358 - RNA, 21 nt, Human
acauguaauuaaguacuaugu

SEQ ID NO: 2938359 - RNA, 22 nt, Human
acauguaauuaaguacuaugua

SEQ ID NO: 2938360 - RNA, 22 nt, Human
acauggcuggagcuagaauuug

SEQ ID NO: 2938361 - RNA, 11 nt, Human
acaugggacau

SEQ ID NO: 2938362 - RNA, 14 nt, Human
acaugggacauuug

SEQ ID NO: 2938363 - RNA, 21 nt, Human
acaugggacauuugcucaugg

SEQ ID NO: 2938364 - RNA, 15 nt, Human
acaugggacauuugc

SEQ ID NO: 2938365 - RNA, 20 nt, Human
acaugggacauuugcucaug

SEQ ID NO: 2938366 - RNA, 16 nt, Human
acaugaaguccaagca

SEQ ID NO: 2938367 - RNA, 16 nt, Human
acaugagguacugaga

SEQ ID NO: 2938368 - RNA, 20 nt, Human
acaugagguacugagaguga

SEQ ID NO: 2938369 - RNA, 20 nt, Human
acaugcuguacauacuuuuu

SEQ ID NO: 2938370 - RNA, 21 nt, Human
acaugcuguacauacuuuuug

SEQ ID NO: 2938371 - RNA, 23 nt, Human
acaugagguacugagagugaaca

SEQ ID NO: 2938372 - RNA, 15 nt, Human
acaugcuacacacug

SEQ ID NO: 2938373 - RNA, 21 nt, Human
acaugcuacacacugcauguu

SEQ ID NO: 2938374 - RNA, 20 nt, Human
ucaacugcaucaagauguga

SEQ ID NO: 2938375 - RNA, 14 nt, Human
ucaaccagcagaug

SEQ ID NO: 2938376 - RNA, 17 nt, Human
ucaacauuucucauguu

SEQ ID NO: 2938377 - RNA, 13 nt, Human
ucaaauuucuaaa

SEQ ID NO: 2938378 - RNA, 23 nt, Human
acauguaauuaaguacuauguau

SEQ ID NO: 2938379 - RNA, 11 nt, Human
acauucccugc

SEQ ID NO: 2938380 - RNA, 15 nt, Human
acauguccaagaagc

SEQ ID NO: 2938381 - RNA, 14 nt, Human
acauuccugaacag

SEQ ID NO: 2938382 - RNA, 15 nt, Human
acauuccugaacagg

SEQ ID NO: 2938383 - RNA, 14 nt, Human
acauuccugaugcu

SEQ ID NO: 2938384 - RNA, 15 nt, Human
ucaaauugugugaaa

SEQ ID NO: 2938385 - RNA, 18 nt, Human
ucaaauugugugaaaggu

SEQ ID NO: 2938386 - RNA, 17 nt, Human
acauugacuauuuuugu

SEQ ID NO: 2938387 - RNA, 14 nt, Human
acauugacuauuuu

SEQ ID NO: 2938388 - RNA, 18 nt, Human
acauuuuauuuuauuaug

SEQ ID NO: 2938389 - RNA, 14 nt, Human
acauuuuauuuuau

SEQ ID NO: 2938390 - RNA, 19 nt, Human
acauuuuauuuuauuaugc

SEQ ID NO: 2938391 - RNA, 20 nt, Human
acauuuuauuuuauuaugca

SEQ ID NO: 2938392 - RNA, 23 nt, Human
accaaaaaucucaauauuucaga

SEQ ID NO: 2938393 - RNA, 21 nt, Human
acauuuuuuaaaugcaccugg

SEQ ID NO: 2938394 - RNA, 17 nt, Human
acauuuuuuaaaugcac

SEQ ID NO: 2938395 - RNA, 14 nt, Human
acauuuuuuaaaug

SEQ ID NO: 2938396 - RNA, 16 nt, Human
acauuuuuuaaaugca

SEQ ID NO: 2938397 - RNA, 21 nt, Human
acauuuuuaagugcugcauuu

SEQ ID NO: 2938398 - RNA, 22 nt, Human
acauuuuuaagugcugcauuua

SEQ ID NO: 2938399 - RNA, 23 nt, Human
acauuuuuaagugcugcauuuaa

SEQ ID NO: 2938400 - RNA, 19 nt, Human
acauuuuuaagugcugcau

SEQ ID NO: 2938401 - RNA, 19 nt, Human
ucaaucuggauucauauuu

SEQ ID NO: 2938402 - RNA, 19 nt, Human
ucaauauuucagauaauca

SEQ ID NO: 2938403 - RNA, 15 nt, Human
ucaauauuucagaua

SEQ ID NO: 2938404 - RNA, 13 nt, Human
acauugaaaucua

SEQ ID NO: 2938405 - RNA, 17 nt, Human
acauugaaaucuaggaa

SEQ ID NO: 2938406 - RNA, 19 nt, Human
acauugaaaucuaggaaaa

SEQ ID NO: 2938407 - RNA, 20 nt, Human
acauugaaaucuaggaaaau

SEQ ID NO: 2938408 - RNA, 23 nt, Human
acauugaaaucuaggaaaauuau

SEQ ID NO: 2938409 - RNA, 23 nt, Human
ucaaugaaugaaugaauggcuaa

SEQ ID NO: 2938410 - RNA, 22 nt, Human
ucaaguccucuuuucugagagg

SEQ ID NO: 2938411 - RNA, 22 nt, Human
ucaauaucuuuuuuuuaauaaa

SEQ ID NO: 2938412 - RNA, 10 nt, Human
ucagugccuu

SEQ ID NO: 2938413 - RNA, 9 nt, Human
ucagugccu

SEQ ID NO: 2938414 - RNA, 15 nt, Human
ucagugccuuaugga

SEQ ID NO: 2938415 - RNA, 14 nt, Human
ucagugccuuaugg

SEQ ID NO: 2938416 - RNA, 12 nt, Human
ucagugccuuau

SEQ ID NO: 2938417 - RNA, 11 nt, Human
ucagugccuua

SEQ ID NO: 2938418 - RNA, 19 nt, Human
accgaaaacguggcugcuu

SEQ ID NO: 2938419 - RNA, 17 nt, Human
accgaaaacguggcugc

SEQ ID NO: 2938420 - RNA, 12 nt, Human
ucagugccacua

SEQ ID NO: 2938421 - RNA, 16 nt, Human
ucagugccaaaaacaa

SEQ ID NO: 2938422 - RNA, 12 nt, Human
ucaguggcagcu

SEQ ID NO: 2938423 - RNA, 11 nt, Human
ucaguggcagc

SEQ ID NO: 2938424 - RNA, 18 nt, Human
ucagugccuuauggaaca

SEQ ID NO: 2938425 - RNA, 16 nt, Human
ucagugccuuauggaa

SEQ ID NO: 2938426 - RNA, 15 nt, Human
ucaguuuuugugaaa

SEQ ID NO: 2938427 - RNA, 17 nt, Human
ucaguuuuugugaaaag

SEQ ID NO: 2938428 - RNA, 19 nt, Human
accgagggggcugcuccca

SEQ ID NO: 2938429 - RNA, 20 nt, Human
accgagggggcugcucccac

SEQ ID NO: 2938430 - RNA, 15 nt, Human
ucauauuuucaugcu

SEQ ID NO: 2938431 - RNA, 15 nt, Human
ucauauggauaaaua

SEQ ID NO: 2938432 - RNA, 15 nt, Human
ucauauuuacuucuu

SEQ ID NO: 2938433 - RNA, 23 nt, Human
ucauauuuacuucuuauacauuu

SEQ ID NO: 2938434 - RNA, 15 nt, Human
ucauaguaugguggc

SEQ ID NO: 2938435 - RNA, 18 nt, Human
ucauaguaugguggcugg

SEQ ID NO: 2938436 - RNA, 19 nt, Human
ucauaguaugguggcuggg

SEQ ID NO: 2938437 - RNA, 14 nt, Human
ucauaaccuagccu

SEQ ID NO: 2938438 - RNA, 18 nt, Human
ucauauaagauucauauu

SEQ ID NO: 2938439 - RNA, 21 nt, Human
ucauaguaugguggcuggguu

SEQ ID NO: 2938440 - RNA, 17 nt, Human
ucauguuuaugagaaac

SEQ ID NO: 2938441 - RNA, 15 nt, Human
ucaugaaagauucaa

SEQ ID NO: 2938442 - RNA, 16 nt, Human
ucaugaaagauucaau

SEQ ID NO: 2938443 - RNA, 17 nt, Human
ucaugaaagauucaaug

SEQ ID NO: 2938444 - RNA, 16 nt, Human
accgcagacaggacca

SEQ ID NO: 2938445 - RNA, 12 nt, Human
accgcagacagg

SEQ ID NO: 2938446 - RNA, 20 nt, Human
accucccacaaaggagagcu

SEQ ID NO: 2938447 - RNA, 16 nt, Human
ucaggguuggccccug

SEQ ID NO: 2938448 - RNA, 19 nt, Human
ucagggucccugguggcag

SEQ ID NO: 2938449 - RNA, 23 nt, Human
ucaggccaggcccucugcccacu

SEQ ID NO: 2938450 - RNA, 20 nt, Human
ucaggccaggcccucugccc

SEQ ID NO: 2938451 - RNA, 22 nt, Human
ucaggccaggcccucugcccac

SEQ ID NO: 2938452 - RNA, 21 nt, Human
ucaggccaggcccucugccca

SEQ ID NO: 2938453 - RNA, 14 nt, Human
ucagcuccagcuca

SEQ ID NO: 2938454 - RNA, 21 nt, Human
ucagcuuguaaauagcucagg

SEQ ID NO: 2938455 - RNA, 22 nt, Human
ucagcuuguaaauagcucaggu

SEQ ID NO: 2938456 - RNA, 23 nt, Human
ucagguaacaggcagauacagga

SEQ ID NO: 2938457 - RNA, 21 nt, Human
ucagguaacaggcagauacag

SEQ ID NO: 2938458 - RNA, 22 nt, Human
ucagguaacaggcagauacagg

SEQ ID NO: 2938459 - RNA, 14 nt, Human
acccggccccugcu

SEQ ID NO: 2938460 - RNA, 15 nt, Human
acccggccccugcug

SEQ ID NO: 2938461 - RNA, 16 nt, Human
acccggccccugcugg

SEQ ID NO: 2938462 - RNA, 22 nt, Human
acccggccccugcugguucagg

SEQ ID NO: 2938463 - RNA, 17 nt, Human
acccggccccugcuggu

SEQ ID NO: 2938464 - RNA, 20 nt, Human
acccggccccugcugguuca

SEQ ID NO: 2938465 - RNA, 15 nt, Human
acccgggaggcagag

SEQ ID NO: 2938466 - RNA, 17 nt, Human
acccgggaggcagaggu

SEQ ID NO: 2938467 - RNA, 13 nt, Human
acccgggaagggg

SEQ ID NO: 2938468 - RNA, 12 nt, Human
acccgggaaggg

SEQ ID NO: 2938469 - RNA, 14 nt, Human
acccgucuccagcu

SEQ ID NO: 2938470 - RNA, 16 nt, Human
acccgucuccagcugc

SEQ ID NO: 2938471 - RNA, 14 nt, Human
acccucucaaacua

SEQ ID NO: 2938472 - RNA, 18 nt, Human
acccugaaagcccugagc

SEQ ID NO: 2938473 - RNA, 16 nt, Human
acccugaaagcccuga

SEQ ID NO: 2938474 - RNA, 14 nt, Human
acccugaggcccag

SEQ ID NO: 2938475 - RNA, 13 nt, Human
acccugaggccca

SEQ ID NO: 2938476 - RNA, 22 nt, Human
acccugcccugugggcccccaa

SEQ ID NO: 2938477 - RNA, 17 nt, Human
acccugcccugugggcc

SEQ ID NO: 2938478 - RNA, 15 nt, Human
acccugcccuguggg

SEQ ID NO: 2938479 - RNA, 16 nt, Human
acccugaggcccagag

SEQ ID NO: 2938480 - RNA, 15 nt, Human
acccugaggcccaga

SEQ ID NO: 2938481 - RNA, 15 nt, Human
accgaaaacguggcu

SEQ ID NO: 2938482 - RNA, 17 nt, Human
acccuugccgucuaccu

SEQ ID NO: 2938483 - RNA, 23 nt, Human
acccuuguggucccaccccacac

SEQ ID NO: 2938484 - RNA, 20 nt, Human
acccuuguggucccacccca

SEQ ID NO: 2938485 - RNA, 15 nt, Human
accccaucaucccuu

SEQ ID NO: 2938486 - RNA, 18 nt, Human
accccaucucuacaaaaa

SEQ ID NO: 2938487 - RNA, 23 nt, Human
ucagcuaaagaaguuugaacauu

SEQ ID NO: 2938488 - RNA, 15 nt, Human
ucagcuaaagaaguu

SEQ ID NO: 2938489 - RNA, 18 nt, Human
ucagcuaaagaaguuuga

SEQ ID NO: 2938490 - RNA, 12 nt, Human
ucagcuccagcu

SEQ ID NO: 2938491 - RNA, 19 nt, Human
ucagcggggacagcuccuu

SEQ ID NO: 2938492 - RNA, 20 nt, Human
ucagcggggacagcuccuuc

SEQ ID NO: 2938493 - RNA, 21 nt, Human
ucagcggggacagcuccuucu

SEQ ID NO: 2938494 - RNA, 23 nt, Human
ucagcggggacagcuccuucugu

SEQ ID NO: 2938495 - RNA, 18 nt, Human
ucagcggggacagcuccu

SEQ ID NO: 2938496 - RNA, 17 nt, Human
accccacacacgccaga

SEQ ID NO: 2938497 - RNA, 22 nt, Human
accccagccccaaaacucuccu

SEQ ID NO: 2938498 - RNA, 20 nt, Human
accccagcaauuaugaaaau

SEQ ID NO: 2938499 - RNA, 13 nt, Human
accccagccccaa

SEQ ID NO: 2938500 - RNA, 12 nt, Human
acccaggaggcg

SEQ ID NO: 2938501 - RNA, 19 nt, Human
acccaggagccccgaggcc

SEQ ID NO: 2938502 - RNA, 23 nt, Human
acccaggagccccgaggccuucu

SEQ ID NO: 2938503 - RNA, 14 nt, Human
ucagcccucagaau

SEQ ID NO: 2938504 - RNA, 12 nt, Human
ucagauuugaac

SEQ ID NO: 2938505 - RNA, 21 nt, Human
ucagauuugaacucuucaauc

SEQ ID NO: 2938506 - RNA, 22 nt, Human
accauaagcuacugccauccug

SEQ ID NO: 2938507 - RNA, 17 nt, Human
accauaagcuacugcca

SEQ ID NO: 2938508 - RNA, 18 nt, Human
accauaagcuacugccau

SEQ ID NO: 2938509 - RNA, 16 nt, Human
accauaagcuacugcc

SEQ ID NO: 2938510 - RNA, 18 nt, Human
accaguguuguggauuua

SEQ ID NO: 2938511 - RNA, 15 nt, Human
ucagcaaaagaugcu

SEQ ID NO: 2938512 - RNA, 21 nt, Human
acucuuaagaagacugcauua

SEQ ID NO: 2938513 - RNA, 16 nt, Human
acucuuauaucuauau

SEQ ID NO: 2938514 - RNA, 17 nt, Human
acucuuauaucuauauu

SEQ ID NO: 2938515 - RNA, 18 nt, Human
acucuuauaucuauauuu

SEQ ID NO: 2938516 - RNA, 14 nt, Human
acucuugaccucag

SEQ ID NO: 2938517 - RNA, 19 nt, Human
acucuuauaucuauauuuu

SEQ ID NO: 2938518 - RNA, 15 nt, Human
acucuugaccucagg

SEQ ID NO: 2938519 - RNA, 16 nt, Human
acucuugaccucaggu

SEQ ID NO: 2938520 - RNA, 23 nt, Human
uccucauacccacccccacccaa

SEQ ID NO: 2938521 - RNA, 22 nt, Human
uccucauaguaugguggcuggg

SEQ ID NO: 2938522 - RNA, 17 nt, Human
acucugccacuuuauuu

SEQ ID NO: 2938523 - RNA, 15 nt, Human
acucuggcagcucag

SEQ ID NO: 2938524 - RNA, 13 nt, Human
acucuggcagcuc

SEQ ID NO: 2938525 - RNA, 23 nt, Human
acucuccuuggugucgggcauga

SEQ ID NO: 2938526 - RNA, 16 nt, Human
acucuccuuggugucg

SEQ ID NO: 2938527 - RNA, 22 nt, Human
acucugagugcaaacuucagag

SEQ ID NO: 2938528 - RNA, 22 nt, Human
acucugagacucgcgacaaugc

SEQ ID NO: 2938529 - RNA, 11 nt, Human
acucugagacu

SEQ ID NO: 2938530 - RNA, 12 nt, Human
acucuccucugc

SEQ ID NO: 2938531 - RNA, 14 nt, Human
acucuccucugcug

SEQ ID NO: 2938532 - RNA, 13 nt, Human
acucuccucugcu

SEQ ID NO: 2938533 - RNA, 21 nt, Human
acucuccucugcugcuggcug

SEQ ID NO: 2938534 - RNA, 16 nt, Human
acucuccucugcugcu

SEQ ID NO: 2938535 - RNA, 15 nt, Human
acucuccuugguguc

SEQ ID NO: 2938536 - RNA, 18 nt, Human
acucuccuggaaauauua

SEQ ID NO: 2938537 - RNA, 17 nt, Human
acucuccuccagaguca

SEQ ID NO: 2938538 - RNA, 14 nt, Human
acucuccuccagag

SEQ ID NO: 2938539 - RNA, 24 nt, Human
acuccuugaaaacacuguucucug

SEQ ID NO: 2938540 - RNA, 23 nt, Human
acuccuugaaaacacuguucucu

SEQ ID NO: 2938541 - RNA, 18 nt, Human
ucccuuugacgccauccc

SEQ ID NO: 2938542 - RNA, 16 nt, Human
ucccuuugacgccauc

SEQ ID NO: 2938543 - RNA, 20 nt, Human
ucccuuggauuguccccgac

SEQ ID NO: 2938544 - RNA, 19 nt, Human
ucccuuggauuguccccga

SEQ ID NO: 2938545 - RNA, 22 nt, Human
ucccugguggcagcucaccucu

SEQ ID NO: 2938546 - RNA, 19 nt, Human
ucccuuuuuuggcugcuga

SEQ ID NO: 2938547 - RNA, 17 nt, Human
ucccuuuuuuggcugcu

SEQ ID NO: 2938548 - RNA, 19 nt, Human
ucccuuugacgccauccca

SEQ ID NO: 2938549 - RNA, 22 nt, Human
ucccuuuuuuggcugcugaagg

SEQ ID NO: 2938550 - RNA, 20 nt, Human
ucccuuuuuuggcugcugaa

SEQ ID NO: 2938551 - RNA, 23 nt, Human
ucccuuuuuuggcugcugaaggc

SEQ ID NO: 2938552 - RNA, 12 nt, Human
acuccuggccuc

SEQ ID NO: 2938553 - RNA, 13 nt, Human
uccuaggcauuug

SEQ ID NO: 2938554 - RNA, 13 nt, Human
acuccuggccuca

SEQ ID NO: 2938555 - RNA, 14 nt, Human
acuccuggccucaa

SEQ ID NO: 2938556 - RNA, 20 nt, Human
uccuaggacccgucuccagc

SEQ ID NO: 2938557 - RNA, 18 nt, Human
uccuaggagguaaugacc

SEQ ID NO: 2938558 - RNA, 20 nt, Human
uccuaggagguaaugaccau

SEQ ID NO: 2938559 - RNA, 15 nt, Human
uccuacucuguguca

SEQ ID NO: 2938560 - RNA, 12 nt, Human
uccuacucugug

SEQ ID NO: 2938561 - RNA, 13 nt, Human
uccuacucugugu

SEQ ID NO: 2938562 - RNA, 14 nt, Human
uccuacucuguguc

SEQ ID NO: 2938563 - RNA, 14 nt, Human
acuccugcaggcag

SEQ ID NO: 2938564 - RNA, 12 nt, Human
acuccugcaggc

SEQ ID NO: 2938565 - RNA, 22 nt, Human
acuccugcaggcagccaggcca

SEQ ID NO: 2938566 - RNA, 16 nt, Human
acuccugcaggcagcc

SEQ ID NO: 2938567 - RNA, 15 nt, Human
acuccugcaggcagc

SEQ ID NO: 2938568 - RNA, 11 nt, Human
acuccuggccu

SEQ ID NO: 2938569 - RNA, 17 nt, Human
ucccugguggcagcuca

SEQ ID NO: 2938570 - RNA, 16 nt, Human
ucccugguggcagcuc

SEQ ID NO: 2938571 - RNA, 21 nt, Human
ucccugguggcagcucaccuc

SEQ ID NO: 2938572 - RNA, 20 nt, Human
ucccugguggcagcucaccu

SEQ ID NO: 2938573 - RNA, 19 nt, Human
ucccugguggcagcucacc

SEQ ID NO: 2938574 - RNA, 18 nt, Human
ucccugguggcagcucac

SEQ ID NO: 2938575 - RNA, 13 nt, Human
acucaccccagcc

SEQ ID NO: 2938576 - RNA, 16 nt, Human
acucaccccagcccca

SEQ ID NO: 2938577 - RNA, 15 nt, Human
acucaccccagcccc

SEQ ID NO: 2938578 - RNA, 14 nt, Human
acucaccccagccc

SEQ ID NO: 2938579 - RNA, 19 nt, Human
acuccagugagacagcucu

SEQ ID NO: 2938580 - RNA, 15 nt, Human
acugagcauaagucc

SEQ ID NO: 2938581 - RNA, 13 nt, Human
acugauaaagaug

SEQ ID NO: 2938582 - RNA, 21 nt, Human
acugauaaagaugagugagca

SEQ ID NO: 2938583 - RNA, 14 nt, Human
acugcaccgggcca

SEQ ID NO: 2938584 - RNA, 16 nt, Human
acugcaccgggccaca

SEQ ID NO: 2938585 - RNA, 20 nt, Human
acugcacuauagccuaggug

SEQ ID NO: 2938586 - RNA, 19 nt, Human
uccugaugcuucuucagag

SEQ ID NO: 2938587 - RNA, 21 nt, Human
uccugaugcuucuucagagac

SEQ ID NO: 2938588 - RNA, 20 nt, Human
uccugaugcuucuucagaga

SEQ ID NO: 2938589 - RNA, 21 nt, Human
acugcacuauagccuagguga

SEQ ID NO: 2938590 - RNA, 14 nt, Human
acugcacuccagcc

SEQ ID NO: 2938591 - RNA, 17 nt, Human
acugcacuccagccugg

SEQ ID NO: 2938592 - RNA, 18 nt, Human
acugcacuccagccuggg

SEQ ID NO: 2938593 - RNA, 20 nt, Human
acugcacuccagccugggug

SEQ ID NO: 2938594 - RNA, 19 nt, Human
acugcacuccagccugggu

SEQ ID NO: 2938595 - RNA, 21 nt, Human
uccugccucgaacuggcugca

SEQ ID NO: 2938596 - RNA, 14 nt, Human
uccugcaggcagcc

SEQ ID NO: 2938597 - RNA, 13 nt, Human
uccugcaggcagc

SEQ ID NO: 2938598 - RNA, 12 nt, Human
uccugcaggcag

SEQ ID NO: 2938599 - RNA, 21 nt, Human
uccugcugcaguugccaguca

SEQ ID NO: 2938600 - RNA, 15 nt, Human
uccugggagcuuuug

SEQ ID NO: 2938601 - RNA, 12 nt, Human
uccugggaguga

SEQ ID NO: 2938602 - RNA, 14 nt, Human
uccugggagugagc

SEQ ID NO: 2938603 - RNA, 17 nt, Human
uccugggagugagcugg

SEQ ID NO: 2938604 - RNA, 22 nt, Human
uccuggaauaucuccgucaacu

SEQ ID NO: 2938605 - RNA, 16 nt, Human
uccuggaaaucagggu

SEQ ID NO: 2938606 - RNA, 15 nt, Human
uccuggaaauauuaa

SEQ ID NO: 2938607 - RNA, 21 nt, Human
acugaacaguaacauagcugu

SEQ ID NO: 2938608 - RNA, 15 nt, Human
acugaacaguaacau

SEQ ID NO: 2938609 - RNA, 19 nt, Human
uccucuuuccaucuacccu

SEQ ID NO: 2938610 - RNA, 21 nt, Human
uccucuuuggucuacacugug

SEQ ID NO: 2938611 - RNA, 19 nt, Human
uccucuuuggucuacacug

SEQ ID NO: 2938612 - RNA, 11 nt, Human
uccucccuccc

SEQ ID NO: 2938613 - RNA, 14 nt, Human
uccucccucccucu

SEQ ID NO: 2938614 - RNA, 11 nt, Human
uccucuuucca

SEQ ID NO: 2938615 - RNA, 12 nt, Human
uccucuuuccau

SEQ ID NO: 2938616 - RNA, 22 nt, Human
uccugaaaacccuugccaugug

SEQ ID NO: 2938617 - RNA, 22 nt, Human
uccucuuuggucuacacugugc

SEQ ID NO: 2938618 - RNA, 13 nt, Human
acugacucuuaag

SEQ ID NO: 2938619 - RNA, 14 nt, Human
acugacucuuaaga

SEQ ID NO: 2938620 - RNA, 15 nt, Human
acugacucuuaagaa

SEQ ID NO: 2938621 - RNA, 16 nt, Human
acugacucuuaagaag

SEQ ID NO: 2938622 - RNA, 22 nt, Human
acugacuucuaaguaaaaccac

SEQ ID NO: 2938623 - RNA, 16 nt, Human
acugacuucuaaguaa

SEQ ID NO: 2938624 - RNA, 15 nt, Human
acugacuucuaagua

SEQ ID NO: 2938625 - RNA, 13 nt, Human
acugacuucuaag

SEQ ID NO: 2938626 - RNA, 17 nt, Human
acugacucuuaagaaga

SEQ ID NO: 2938627 - RNA, 18 nt, Human
acugacucuuaagaagac

SEQ ID NO: 2938628 - RNA, 20 nt, Human
acugacucuuaagaagacug

SEQ ID NO: 2938629 - RNA, 21 nt, Human
acugagacagcccgggcucug

SEQ ID NO: 2938630 - RNA, 18 nt, Human
acugagacagcccgggcu

SEQ ID NO: 2938631 - RNA, 15 nt, Human
acugagacagcccgg

SEQ ID NO: 2938632 - RNA, 22 nt, Human
acugagaugugaacacaucagc

SEQ ID NO: 2938633 - RNA, 17 nt, Human
acugagaugugaacaca

SEQ ID NO: 2938634 - RNA, 18 nt, Human
acugagagugaacaaauu

SEQ ID NO: 2938635 - RNA, 23 nt, Human
acugagacagcccgggcucugcc

SEQ ID NO: 2938636 - RNA, 22 nt, Human
acugagacagcccgggcucugc

SEQ ID NO: 2938637 - RNA, 20 nt, Human
uccacuggguguaaacacau

SEQ ID NO: 2938638 - RNA, 17 nt, Human
uccacuggguguaaaca

SEQ ID NO: 2938639 - RNA, 21 nt, Human
uccacugugccaugugccagg

SEQ ID NO: 2938640 - RNA, 22 nt, Human
uccacugguucuucuuggucuc

SEQ ID NO: 2938641 - RNA, 13 nt, Human
accuuuuuuauac

SEQ ID NO: 2938642 - RNA, 20 nt, Human
accuuuuggucuggagggaa

SEQ ID NO: 2938643 - RNA, 18 nt, Human
accuuuguccccaccgca

SEQ ID NO: 2938644 - RNA, 17 nt, Human
accuuuguccccaccgc

SEQ ID NO: 2938645 - RNA, 20 nt, Human
accuugaacuggguacuugu

SEQ ID NO: 2938646 - RNA, 19 nt, Human
accuugaaaacuuuaugcu

SEQ ID NO: 2938647 - RNA, 13 nt, Human
uccagacacaugu

SEQ ID NO: 2938648 - RNA, 15 nt, Human
uccagaauuucccaa

SEQ ID NO: 2938649 - RNA, 14 nt, Human
uccagaauuuccca

SEQ ID NO: 2938650 - RNA, 18 nt, Human
acgaauauugcugauggu

SEQ ID NO: 2938651 - RNA, 15 nt, Human
acgaauauugcugau

SEQ ID NO: 2938652 - RNA, 13 nt, Human
acgaaaaaauggu

SEQ ID NO: 2938653 - RNA, 13 nt, Human
acgaaagaaggca

SEQ ID NO: 2938654 - RNA, 23 nt, Human
uccaggcugggagagccuuccag

SEQ ID NO: 2938655 - RNA, 10 nt, Human
uccaggcucc

SEQ ID NO: 2938656 - RNA, 12 nt, Human
uccaggcuccuu

SEQ ID NO: 2938657 - RNA, 22 nt, Human
uccaggcuccuuuagcgcccag

SEQ ID NO: 2938658 - RNA, 21 nt, Human
uccaggcugggagagccuucc

SEQ ID NO: 2938659 - RNA, 20 nt, Human
uccaggcugggagagccuuc

SEQ ID NO: 2938660 - RNA, 15 nt, Human
uccaguaucuugaag

SEQ ID NO: 2938661 - RNA, 14 nt, Human
uccaguaucuugaa

SEQ ID NO: 2938662 - RNA, 18 nt, Human
acggcuuuuacuuaaacc

SEQ ID NO: 2938663 - RNA, 16 nt, Human
acggcucacugcagcc

SEQ ID NO: 2938664 - RNA, 15 nt, Human
acggcucacugcagc

SEQ ID NO: 2938665 - RNA, 17 nt, Human
acggcucacugcagccu

SEQ ID NO: 2938666 - RNA, 18 nt, Human
acggcucacugcagccuc

SEQ ID NO: 2938667 - RNA, 12 nt, Human
acggccaggcca

SEQ ID NO: 2938668 - RNA, 23 nt, Human
uccagucauuauguuaauauuuc

SEQ ID NO: 2938669 - RNA, 21 nt, Human
uccagucauuauguuaauauu

SEQ ID NO: 2938670 - RNA, 15 nt, Human
uccagucauuauguu

SEQ ID NO: 2938671 - RNA, 14 nt, Human
uccagucauuaugu

SEQ ID NO: 2938672 - RNA, 18 nt, Human
uccaguaucuugaagacu

SEQ ID NO: 2938673 - RNA, 16 nt, Human
uccaguaucuugaaga

SEQ ID NO: 2938674 - RNA, 23 nt, Human
uccagugaggcucugcccuuggu

SEQ ID NO: 2938675 - RNA, 22 nt, Human
uccagugaggcucugcccuugg

SEQ ID NO: 2938676 - RNA, 16 nt, Human
uccagugaggcucugc

SEQ ID NO: 2938677 - RNA, 18 nt, Human
uccagugagacagcucug

SEQ ID NO: 2938678 - RNA, 15 nt, Human
uccagugaggcucug

SEQ ID NO: 2938679 - RNA, 21 nt, Human
acgcuacccgggaagggggcu

SEQ ID NO: 2938680 - RNA, 14 nt, Human
acgaauauugcuga

SEQ ID NO: 2938681 - RNA, 21 nt, Human
acgaauauugcugauggugca

SEQ ID NO: 2938682 - RNA, 23 nt, Human
acggagucccaccuuggcugcag

SEQ ID NO: 2938683 - RNA, 17 nt, Human
acgcuggagugcaguga

SEQ ID NO: 2938684 - RNA, 20 nt, Human
acgcuggaccuugaacuggg

SEQ ID NO: 2938685 - RNA, 23 nt, Human
acgcuggaccuugaacuggguac

SEQ ID NO: 2938686 - RNA, 15 nt, Human
acgcuggagugcagu

SEQ ID NO: 2938687 - RNA, 16 nt, Human
acgcuggagugcagug

SEQ ID NO: 2938688 - RNA, 13 nt, Human
acgcuggaccuug

SEQ ID NO: 2938689 - RNA, 11 nt, Human
acgcucucugg

SEQ ID NO: 2938690 - RNA, 16 nt, Human
ucccccagccccaucc

SEQ ID NO: 2938691 - RNA, 15 nt, Human
ucccccagccccauc

SEQ ID NO: 2938692 - RNA, 13 nt, Human
ucccccagcccca

SEQ ID NO: 2938693 - RNA, 11 nt, Human
ucccccagccc

SEQ ID NO: 2938694 - RNA, 21 nt, Human
uccccaggaggccagccuuga

SEQ ID NO: 2938695 - RNA, 20 nt, Human
uccccaggaggccagccuug

SEQ ID NO: 2938696 - RNA, 17 nt, Human
uccccaggaggccagcc

SEQ ID NO: 2938697 - RNA, 22 nt, Human
ucccagcuacucgggaggcuga

SEQ ID NO: 2938698 - RNA, 23 nt, Human
ucccagcuacucgggaggcugag

SEQ ID NO: 2938699 - RNA, 12 nt, Human
uccccacccuga

SEQ ID NO: 2938700 - RNA, 18 nt, Human
uccccaggaggccagccu

SEQ ID NO: 2938701 - RNA, 16 nt, Human
uccccaccgcagacag

SEQ ID NO: 2938702 - RNA, 15 nt, Human
uccccaccgcagaca

SEQ ID NO: 2938703 - RNA, 23 nt, Human
uccccacccugaaagcccugagc

SEQ ID NO: 2938704 - RNA, 14 nt, Human
acuauguugcccag

SEQ ID NO: 2938705 - RNA, 22 nt, Human
acuauggcccuggccuagcaua

SEQ ID NO: 2938706 - RNA, 15 nt, Human
acuauguugcccagg

SEQ ID NO: 2938707 - RNA, 16 nt, Human
acuauguugcccaggc

SEQ ID NO: 2938708 - RNA, 16 nt, Human
acucaaugcacugaca

SEQ ID NO: 2938709 - RNA, 20 nt, Human
acuauagccuaggugacaga

SEQ ID NO: 2938710 - RNA, 22 nt, Human
acuauagccuaggugacagagu

SEQ ID NO: 2938711 - RNA, 18 nt, Human
acuauagccuaggugaca

SEQ ID NO: 2938712 - RNA, 17 nt, Human
acuauauuguuugcuaa

SEQ ID NO: 2938713 - RNA, 22 nt, Human
acuauauuguuugcuaagcauu

SEQ ID NO: 2938714 - RNA, 17 nt, Human
acuaucacugguuuggu

SEQ ID NO: 2938715 - RNA, 15 nt, Human
acuaucucauuucca

SEQ ID NO: 2938716 - RNA, 16 nt, Human
acuaucuaaauguuga

SEQ ID NO: 2938717 - RNA, 21 nt, Human
acuaucuaaauguugaaagau

SEQ ID NO: 2938718 - RNA, 16 nt, Human
acuaucucauuuccaa

SEQ ID NO: 2938719 - RNA, 17 nt, Human
acuaucucauuuccaag

SEQ ID NO: 2938720 - RNA, 18 nt, Human
ucccagauacuugggggg

SEQ ID NO: 2938721 - RNA, 16 nt, Human
ucccagauacuugggg

SEQ ID NO: 2938722 - RNA, 22 nt, Human
acguuucuaaaggcuaccuuug

SEQ ID NO: 2938723 - RNA, 15 nt, Human
acuaauuuuaaaaug

SEQ ID NO: 2938724 - RNA, 13 nt, Human
acguugugcauuu

SEQ ID NO: 2938725 - RNA, 15 nt, Human
acguuucuaaaggcu

SEQ ID NO: 2938726 - RNA, 16 nt, Human
acguuucuaaaggcua

SEQ ID NO: 2938727 - RNA, 14 nt, Human
acguugugcauuug

SEQ ID NO: 2938728 - RNA, 15 nt, Human
acguugugcauuugg

SEQ ID NO: 2938729 - RNA, 18 nt, Human
acguggcugcuucaagga

SEQ ID NO: 2938730 - RNA, 17 nt, Human
acguggcugcuucaagg

SEQ ID NO: 2938731 - RNA, 21 nt, Human
acguggcugcuucaaggaucc

SEQ ID NO: 2938732 - RNA, 19 nt, Human
acguggcugcuucaaggau

SEQ ID NO: 2938733 - RNA, 12 nt, Human
uccauccugagg

SEQ ID NO: 2938734 - RNA, 15 nt, Human
uccauccugaggcuc

SEQ ID NO: 2938735 - RNA, 11 nt, Human
uccauccugag

SEQ ID NO: 2938736 - RNA, 15 nt, Human
ucuccuccagaguca

SEQ ID NO: 2938737 - RNA, 16 nt, Human
ucuccucugcugcugg

SEQ ID NO: 2938738 - RNA, 15 nt, Human
ucuccucugcugcug

SEQ ID NO: 2938739 - RNA, 18 nt, Human
ucuccucugcugcuggcu

SEQ ID NO: 2938740 - RNA, 17 nt, Human
ucuccucugcugcuggc

SEQ ID NO: 2938741 - RNA, 14 nt, Human
acuuucugaaauaa

SEQ ID NO: 2938742 - RNA, 20 nt, Human
acuuucugaaauaacauggc

SEQ ID NO: 2938743 - RNA, 12 nt, Human
acuuuaccuuuu

SEQ ID NO: 2938744 - RNA, 19 nt, Human
ucuccaagcaggacaugga

SEQ ID NO: 2938745 - RNA, 18 nt, Human
ucuccaagcaggacaugg

SEQ ID NO: 2938746 - RNA, 12 nt, Human
ucuccacccugc

SEQ ID NO: 2938747 - RNA, 23 nt, Human
ucuccccagcaagugagagcugg

SEQ ID NO: 2938748 - RNA, 21 nt, Human
ucucccuuggauuguccccga

SEQ ID NO: 2938749 - RNA, 17 nt, Human
ucuccgaccagacaccu

SEQ ID NO: 2938750 - RNA, 23 nt, Human
ucuccgaccagacaccuugacag

SEQ ID NO: 2938751 - RNA, 17 nt, Human
agaaaaaauauuuuccc

SEQ ID NO: 2938752 - RNA, 15 nt, Human
ucuccuucaccuuug

SEQ ID NO: 2938753 - RNA, 14 nt, Human
ucuccuucaccuuu

SEQ ID NO: 2938754 - RNA, 16 nt, Human
ucuccuucaccuuugu

SEQ ID NO: 2938755 - RNA, 13 nt, Human
ucuccuuguguua

SEQ ID NO: 2938756 - RNA, 21 nt, Human
ucuccuuguguuacuaaguuu

SEQ ID NO: 2938757 - RNA, 22 nt, Human
acuuuuuauauucucagcagag

SEQ ID NO: 2938758 - RNA, 12 nt, Human
acuuuuuauauu

SEQ ID NO: 2938759 - RNA, 15 nt, Human
acuuuuuauauucuc

SEQ ID NO: 2938760 - RNA, 16 nt, Human
acuuuuuauauucuca

SEQ ID NO: 2938761 - RNA, 15 nt, Human
acuuuuguucuuggu

SEQ ID NO: 2938762 - RNA, 23 nt, Human
acuuuuguucuugguuuguaaau

SEQ ID NO: 2938763 - RNA, 22 nt, Human
acuuugguuauuuuacuuuuug

SEQ ID NO: 2938764 - RNA, 23 nt, Human
acuuugguuauuuuacuuuuugg

SEQ ID NO: 2938765 - RNA, 18 nt, Human
acuuuguguucaccuugu

SEQ ID NO: 2938766 - RNA, 20 nt, Human
acuuuguuaguuucuccaag

SEQ ID NO: 2938767 - RNA, 14 nt, Human
acuuuguucuggcu

SEQ ID NO: 2938768 - RNA, 21 nt, Human
acuuuguuaguuucuccaagc

SEQ ID NO: 2938769 - RNA, 12 nt, Human
acuuuuguucuu

SEQ ID NO: 2938770 - RNA, 13 nt, Human
acuuuuguucuug

SEQ ID NO: 2938771 - RNA, 10 nt, Human
acuuugguua

SEQ ID NO: 2938772 - RNA, 13 nt, Human
acuuugguuauuu

SEQ ID NO: 2938773 - RNA, 21 nt, Human
acuuugguuauuuuacuuuuu

SEQ ID NO: 2938774 - RNA, 12 nt, Human
acuuugaccucu

SEQ ID NO: 2938775 - RNA, 13 nt, Human
acuuugaccucug

SEQ ID NO: 2938776 - RNA, 20 nt, Human
ucucacuauguugcccaggc

SEQ ID NO: 2938777 - RNA, 21 nt, Human
ucucacuauguugcccaggca

SEQ ID NO: 2938778 - RNA, 22 nt, Human
ucucacuauguugcccaggcag

SEQ ID NO: 2938779 - RNA, 23 nt, Human
ucucacuauguugcccaggcagg

SEQ ID NO: 2938780 - RNA, 23 nt, Human
acuugcagacucuacagaggcca

SEQ ID NO: 2938781 - RNA, 19 nt, Human
acuugcagacucuacagag

SEQ ID NO: 2938782 - RNA, 22 nt, Human
acuugcagacucuacagaggcc

SEQ ID NO: 2938783 - RNA, 15 nt, Human
acuugugaauaaaga

SEQ ID NO: 2938784 - RNA, 21 nt, Human
acuugucuuuggacccugagg

SEQ ID NO: 2938785 - RNA, 18 nt, Human
acuugucuuuggacccug

SEQ ID NO: 2938786 - RNA, 20 nt, Human
acuugucuuuggacccugag

SEQ ID NO: 2938787 - RNA, 19 nt, Human
acuuguggacacagcucuu

SEQ ID NO: 2938788 - RNA, 22 nt, Human
acuuguggacacagcucuucuc

SEQ ID NO: 2938789 - RNA, 15 nt, Human
acuugucaauaaaau

SEQ ID NO: 2938790 - RNA, 21 nt, Human
ucucaggccagcugcuugggc

SEQ ID NO: 2938791 - RNA, 18 nt, Human
ucucaggccagcugcuug

SEQ ID NO: 2938792 - RNA, 17 nt, Human
ucucaggccagcugcuu

SEQ ID NO: 2938793 - RNA, 16 nt, Human
ucucauuugucacaca

SEQ ID NO: 2938794 - RNA, 16 nt, Human
ucuccaagcaggacau

SEQ ID NO: 2938795 - RNA, 15 nt, Human
ucuccaagcaggaca

SEQ ID NO: 2938796 - RNA, 14 nt, Human
ucucauuugucaca

SEQ ID NO: 2938797 - RNA, 15 nt, Human
ucucauuuccaagca

SEQ ID NO: 2938798 - RNA, 10 nt, Human
ucucaggcca

SEQ ID NO: 2938799 - RNA, 12 nt, Human
ucucaggccaaa

SEQ ID NO: 2938800 - RNA, 13 nt, Human
ucucaggccagcu

SEQ ID NO: 2938801 - RNA, 12 nt, Human
ucucaggccagc

SEQ ID NO: 2938802 - RNA, 12 nt, Human
ucucaggaaauc

SEQ ID NO: 2938803 - RNA, 12 nt, Human
ucucagcagagu

SEQ ID NO: 2938804 - RNA, 13 nt, Human
ucucagcagagug

SEQ ID NO: 2938805 - RNA, 14 nt, Human
ucucagcagagugc

SEQ ID NO: 2938806 - RNA, 23 nt, Human
ucucaggaaaucaaauaugcaaa

SEQ ID NO: 2938807 - RNA, 21 nt, Human
ucucaggaaaucaaauaugca

SEQ ID NO: 2938808 - RNA, 14 nt, Human
ucucaggaaaucaa

SEQ ID NO: 2938809 - RNA, 15 nt, Human
ucuauuuauuuguga

SEQ ID NO: 2938810 - RNA, 14 nt, Human
ucuauuuauuuauu

SEQ ID NO: 2938811 - RNA, 13 nt, Human
ucuauuuauuuau

SEQ ID NO: 2938812 - RNA, 17 nt, Human
ucucacuauguugccca

SEQ ID NO: 2938813 - RNA, 19 nt, Human
ucucacuauguugcccagg

SEQ ID NO: 2938814 - RNA, 16 nt, Human
ucucacuauguugccc

SEQ ID NO: 2938815 - RNA, 16 nt, Human
ucuauguuaauauuuu

SEQ ID NO: 2938816 - RNA, 14 nt, Human
ucuauguuaauauu

SEQ ID NO: 2938817 - RNA, 23 nt, Human
ucuaugggacucaaugcacugac

SEQ ID NO: 2938818 - RNA, 13 nt, Human
ucuagauacugua

SEQ ID NO: 2938819 - RNA, 18 nt, Human
ucuagcauggcugccaau

SEQ ID NO: 2938820 - RNA, 16 nt, Human
acuucaucccucuggg

SEQ ID NO: 2938821 - RNA, 22 nt, Human
ucuauaacaaaggauacuuauu

SEQ ID NO: 2938822 - RNA, 23 nt, Human
ucuauaacaaaggauacuuauuu

SEQ ID NO: 2938823 - RNA, 13 nt, Human
ucuauaaaccgaa

SEQ ID NO: 2938824 - RNA, 23 nt, Human
ucuaguuguuugauucagacagc

SEQ ID NO: 2938825 - RNA, 21 nt, Human
ucuaguuugauuaaauucuug

SEQ ID NO: 2938826 - RNA, 17 nt, Human
ucuaggaaauauuuauu

SEQ ID NO: 2938827 - RNA, 16 nt, Human
ucuaggaaauauuuau

SEQ ID NO: 2938828 - RNA, 13 nt, Human
ucuagccagagga

SEQ ID NO: 2938829 - RNA, 12 nt, Human
ucuaggaagacu

SEQ ID NO: 2938830 - RNA, 22 nt, Human
ucuaguuguuugauucagacag

SEQ ID NO: 2938831 - RNA, 20 nt, Human
acuuaaauaaugugaaacug

SEQ ID NO: 2938832 - RNA, 11 nt, Human
acuuaagacuu

SEQ ID NO: 2938833 - RNA, 13 nt, Human
acuuaagcacacu

SEQ ID NO: 2938834 - RNA, 17 nt, Human
acuuaaucuaaauggaa

SEQ ID NO: 2938835 - RNA, 19 nt, Human
acuuaaucuaaauggaacc

SEQ ID NO: 2938836 - RNA, 16 nt, Human
acuuaaugagacuuua

SEQ ID NO: 2938837 - RNA, 16 nt, Human
acuuaaugaaaacaau

SEQ ID NO: 2938838 - RNA, 18 nt, Human
acuuaaugaaaacaaugc

SEQ ID NO: 2938839 - RNA, 15 nt, Human
acuuaaugaaaacaa

SEQ ID NO: 2938840 - RNA, 22 nt, Human
acuuaaucuaaauggaaccacu

SEQ ID NO: 2938841 - RNA, 16 nt, Human
acuuacacuuuaugca

SEQ ID NO: 2938842 - RNA, 15 nt, Human
acuuagguguggggg

SEQ ID NO: 2938843 - RNA, 22 nt, Human
acuuacuguacaugaaaacaca

SEQ ID NO: 2938844 - RNA, 19 nt, Human
acuuaaugagacuuuaaaa

SEQ ID NO: 2938845 - RNA, 17 nt, Human
acuuacacuuuaugcac

SEQ ID NO: 2938846 - RNA, 21 nt, Human
acuuacuguacaugaaaacac

SEQ ID NO: 2938847 - RNA, 16 nt, Human
acuuacuguacaugaa

SEQ ID NO: 2938848 - RNA, 18 nt, Human
acuguucucugcccucca

SEQ ID NO: 2938849 - RNA, 17 nt, Human
acuguucucugcccucc

SEQ ID NO: 2938850 - RNA, 16 nt, Human
acuguucucugcccuc

SEQ ID NO: 2938851 - RNA, 21 nt, Human
ucuacccuggcacuauaaugu

SEQ ID NO: 2938852 - RNA, 20 nt, Human
ucuacccagcgagcccuggu

SEQ ID NO: 2938853 - RNA, 14 nt, Human
ucuacccaggugcu

SEQ ID NO: 2938854 - RNA, 19 nt, Human
ucuacccuggcacuauaau

SEQ ID NO: 2938855 - RNA, 14 nt, Human
ucuacccuggcacu

SEQ ID NO: 2938856 - RNA, 21 nt, Human
ucuacagaggccaugggccuc

SEQ ID NO: 2938857 - RNA, 19 nt, Human
ucuacccagcgagcccugg

SEQ ID NO: 2938858 - RNA, 19 nt, Human
ucuaaguaaaaccacagca

SEQ ID NO: 2938859 - RNA, 15 nt, Human
ucuaaguaaaaccac

SEQ ID NO: 2938860 - RNA, 14 nt, Human
ucuaaguaaaacca

SEQ ID NO: 2938861 - RNA, 18 nt, Human
uccugggagugagcuggu

SEQ ID NO: 2938862 - RNA, 13 nt, Human
uccugggcagcug

SEQ ID NO: 2938863 - RNA, 12 nt, Human
uccugggcagcu

SEQ ID NO: 2938864 - RNA, 21 nt, Human
agaauguuuucaaauguucuc

SEQ ID NO: 2938865 - RNA, 15 nt, Human
agaauguuuucaaau

SEQ ID NO: 2938866 - RNA, 15 nt, Human
agaauuaacacauga

SEQ ID NO: 2938867 - RNA, 23 nt, Human
agaaguuucugccgcagcccugc

SEQ ID NO: 2938868 - RNA, 22 nt, Human
agaaguuucugccgcagcccug

SEQ ID NO: 2938869 - RNA, 21 nt, Human
agaaguuucugccgcagcccu

SEQ ID NO: 2938870 - RNA, 19 nt, Human
agaaggcauggacuucugg

SEQ ID NO: 2938871 - RNA, 13 nt, Human
ucuguuuagauaa

SEQ ID NO: 2938872 - RNA, 22 nt, Human
ucuguucuuuccaaaguacacu

SEQ ID NO: 2938873 - RNA, 17 nt, Human
ucugugaugacauuccc

SEQ ID NO: 2938874 - RNA, 13 nt, Human
ucuguucuuucca

SEQ ID NO: 2938875 - RNA, 12 nt, Human
ucuguuggccag

SEQ ID NO: 2938876 - RNA, 17 nt, Human
ucuguuggccaguguga

SEQ ID NO: 2938877 - RNA, 22 nt, Human
ucugugaaaggaaagagggagg

SEQ ID NO: 2938878 - RNA, 14 nt, Human
ucugugagaugcua

SEQ ID NO: 2938879 - RNA, 23 nt, Human
ucugugagaugcuagaacucccu

SEQ ID NO: 2938880 - RNA, 17 nt, Human
ucugugagaugcuagaa

SEQ ID NO: 2938881 - RNA, 22 nt, Human
ucugugagaugcuagaacuccc

SEQ ID NO: 2938882 - RNA, 17 nt, Human
agacaccuugacagggc

SEQ ID NO: 2938883 - RNA, 18 nt, Human
agacaccuugacagggca

SEQ ID NO: 2938884 - RNA, 20 nt, Human
agacacauguccaagaagcc

SEQ ID NO: 2938885 - RNA, 16 nt, Human
agacacauguccaaga

SEQ ID NO: 2938886 - RNA, 14 nt, Human
agacacaugccagg

SEQ ID NO: 2938887 - RNA, 21 nt, Human
agacacaugccagggccaugu

SEQ ID NO: 2938888 - RNA, 13 nt, Human
agacagagaccug

SEQ ID NO: 2938889 - RNA, 24 nt, Human
agacagagccccacccucagaugc

SEQ ID NO: 2938890 - RNA, 16 nt, Human
agacaggaccagggau

SEQ ID NO: 2938891 - RNA, 22 nt, Human
agacagagccccacccucagau

SEQ ID NO: 2938892 - RNA, 16 nt, Human
agaauugauugggcac

SEQ ID NO: 2938893 - RNA, 22 nt, Human
agaauugauugggcacaucauu

SEQ ID NO: 2938894 - RNA, 23 nt, Human
agaauugauugggcacaucauuu

SEQ ID NO: 2938895 - RNA, 15 nt, Human
agaauugacauugaa

SEQ ID NO: 2938896 - RNA, 16 nt, Human
agaauugacauugaaa

SEQ ID NO: 2938897 - RNA, 17 nt, Human
agaauugacauugaaau

SEQ ID NO: 2938898 - RNA, 18 nt, Human
agaauugacauugaaauc

SEQ ID NO: 2938899 - RNA, 19 nt, Human
agaauugacauugaaaucu

SEQ ID NO: 2938900 - RNA, 22 nt, Human
agaauuugauaugugaacaguu

SEQ ID NO: 2938901 - RNA, 21 nt, Human
agaauuugauaugugaacagu

SEQ ID NO: 2938902 - RNA, 24 nt, Human
agaauugauugggcacaucauuuc

SEQ ID NO: 2938903 - RNA, 16 nt, Human
agacacaggcccggcu

SEQ ID NO: 2938904 - RNA, 12 nt, Human
agacacaggccc

SEQ ID NO: 2938905 - RNA, 13 nt, Human
agacacaggcccg

SEQ ID NO: 2938906 - RNA, 12 nt, Human
agacacacauga

SEQ ID NO: 2938907 - RNA, 22 nt, Human
ucugagugcaaacuucagaguu

SEQ ID NO: 2938908 - RNA, 23 nt, Human
ucugagugcaaacuucagaguuc

SEQ ID NO: 2938909 - RNA, 17 nt, Human
ucugaucauccacugug

SEQ ID NO: 2938910 - RNA, 21 nt, Human
ucugaucauccacugugccau

SEQ ID NO: 2938911 - RNA, 14 nt, Human
ucugagugcaaacu

SEQ ID NO: 2938912 - RNA, 21 nt, Human
ucugagacucgcgacaaugca

SEQ ID NO: 2938913 - RNA, 14 nt, Human
agaaauguacagca

SEQ ID NO: 2938914 - RNA, 15 nt, Human
agaaauguacagcaa

SEQ ID NO: 2938915 - RNA, 17 nt, Human
ucugcacuccccugcug

SEQ ID NO: 2938916 - RNA, 16 nt, Human
ucugcacuccccugcu

SEQ ID NO: 2938917 - RNA, 15 nt, Human
ucugcacuccccugc

SEQ ID NO: 2938918 - RNA, 14 nt, Human
ucugcacuccccug

SEQ ID NO: 2938919 - RNA, 17 nt, Human
ucugcagcaauaaagca

SEQ ID NO: 2938920 - RNA, 18 nt, Human
ucugcagauaaacaguag

SEQ ID NO: 2938921 - RNA, 15 nt, Human
ucugcagauaaacag

SEQ ID NO: 2938922 - RNA, 15 nt, Human
ucugacacacagcuc

SEQ ID NO: 2938923 - RNA, 12 nt, Human
ucugacacacag

SEQ ID NO: 2938924 - RNA, 13 nt, Human
ucugacacacagc

SEQ ID NO: 2938925 - RNA, 14 nt, Human
ucugacacacagcu

SEQ ID NO: 2938926 - RNA, 21 nt, Human
ucugaaggacauugcggacag

SEQ ID NO: 2938927 - RNA, 14 nt, Human
agaaaugaaagcag

SEQ ID NO: 2938928 - RNA, 15 nt, Human
ucugccgcagcccug

SEQ ID NO: 2938929 - RNA, 14 nt, Human
ucugccgcagcccu

SEQ ID NO: 2938930 - RNA, 19 nt, Human
ucugcccuccaagaccuuc

SEQ ID NO: 2938931 - RNA, 18 nt, Human
ucugcccuccaagaccuu

SEQ ID NO: 2938932 - RNA, 21 nt, Human
ucugcccacucccugcaaccu

SEQ ID NO: 2938933 - RNA, 18 nt, Human
ucugcccacucccugcaa

SEQ ID NO: 2938934 - RNA, 18 nt, Human
ucugcgggggcagugcuc

SEQ ID NO: 2938935 - RNA, 20 nt, Human
ucugcgggggcagugcucac

SEQ ID NO: 2938936 - RNA, 22 nt, Human
ucugcggagcacacuggcucac

SEQ ID NO: 2938937 - RNA, 21 nt, Human
ucugcggagcacacuggcuca

SEQ ID NO: 2938938 - RNA, 14 nt, Human
ucugcggagcacac

SEQ ID NO: 2938939 - RNA, 21 nt, Human
ucugccugcccaggccccugc

SEQ ID NO: 2938940 - RNA, 22 nt, Human
ucugccugcccaggccccugcc

SEQ ID NO: 2938941 - RNA, 22 nt, Human
ucugccgcagcccugcagaggg

SEQ ID NO: 2938942 - RNA, 17 nt, Human
ucugcucacauaucugu

SEQ ID NO: 2938943 - RNA, 19 nt, Human
ucugcucacauaucuguca

SEQ ID NO: 2938944 - RNA, 20 nt, Human
ucugcucacauaucugucau

SEQ ID NO: 2938945 - RNA, 13 nt, Human
ucugcuucagccu

SEQ ID NO: 2938946 - RNA, 14 nt, Human
ucugcuucagccuc

SEQ ID NO: 2938947 - RNA, 15 nt, Human
ucugcuucagccucc

SEQ ID NO: 2938948 - RNA, 14 nt, Human
ucugcuugccaucc

SEQ ID NO: 2938949 - RNA, 23 nt, Human
ucugcuugccaucccucccucca

SEQ ID NO: 2938950 - RNA, 17 nt, Human
ucugcuugccaucccuc

SEQ ID NO: 2938951 - RNA, 20 nt, Human
ucugcuugccaucccucccu

SEQ ID NO: 2938952 - RNA, 16 nt, Human
ucugcuugccaucccu

SEQ ID NO: 2938953 - RNA, 18 nt, Human
agaagauuuugaaauuuu

SEQ ID NO: 2938954 - RNA, 17 nt, Human
ucugcccacucccugca

SEQ ID NO: 2938955 - RNA, 16 nt, Human
ucugcccacucccugc

SEQ ID NO: 2938956 - RNA, 22 nt, Human
agaagcccaggaaaggcuccag

SEQ ID NO: 2938957 - RNA, 21 nt, Human
agaagcccaggaaaggcucca

SEQ ID NO: 2938958 - RNA, 20 nt, Human
agaagcccaggaaaggcucc

SEQ ID NO: 2938959 - RNA, 18 nt, Human
agaagcccaggaaaggcu

SEQ ID NO: 2938960 - RNA, 16 nt, Human
agaagcccaggaaagg

SEQ ID NO: 2938961 - RNA, 12 nt, Human
agaagcccagga

SEQ ID NO: 2938962 - RNA, 18 nt, Human
agaagaugguaccaccag

SEQ ID NO: 2938963 - RNA, 14 nt, Human
agaagaacugaaau

SEQ ID NO: 2938964 - RNA, 13 nt, Human
agaagaacugaaa

SEQ ID NO: 2938965 - RNA, 17 nt, Human
agauuucacucuccuug

SEQ ID NO: 2938966 - RNA, 19 nt, Human
agauuucacucuccuuggu

SEQ ID NO: 2938967 - RNA, 21 nt, Human
agauugugccccugcacucca

SEQ ID NO: 2938968 - RNA, 13 nt, Human
agauucauauuua

SEQ ID NO: 2938969 - RNA, 16 nt, Human
agauucauauuuacuu

SEQ ID NO: 2938970 - RNA, 12 nt, Human
ugacuuacugua

SEQ ID NO: 2938971 - RNA, 20 nt, Human
ugacuuacuguacaugaaaa

SEQ ID NO: 2938972 - RNA, 23 nt, Human
ugacuauuuuuguuuuuauuaaa

SEQ ID NO: 2938973 - RNA, 18 nt, Human
ugacuauuuuuguuuuua

SEQ ID NO: 2938974 - RNA, 22 nt, Human
ugacuauuuuuguuuuuauuaa

SEQ ID NO: 2938975 - RNA, 11 nt, Human
ugacuguuuuu

SEQ ID NO: 2938976 - RNA, 21 nt, Human
ugacuguuuucucuugagagg

SEQ ID NO: 2938977 - RNA, 16 nt, Human
ugacuauaaccuuguu

SEQ ID NO: 2938978 - RNA, 12 nt, Human
ugaccuuucaau

SEQ ID NO: 2938979 - RNA, 19 nt, Human
ugacuauucugagaugacu

SEQ ID NO: 2938980 - RNA, 21 nt, Human
ugacuauucugagaugacuau

SEQ ID NO: 2938981 - RNA, 22 nt, Human
ugacuauucugagaugacuauu

SEQ ID NO: 2938982 - RNA, 15 nt, Human
ugaccuuuaagagaa

SEQ ID NO: 2938983 - RNA, 22 nt, Human
agaugugaacacaucagcuugc

SEQ ID NO: 2938984 - RNA, 17 nt, Human
agaugugaacacaucag

SEQ ID NO: 2938985 - RNA, 22 nt, Human
agauguauguacuucaugcugu

SEQ ID NO: 2938986 - RNA, 23 nt, Human
agauguaugcacacacauauauu

SEQ ID NO: 2938987 - RNA, 14 nt, Human
agauguaugcacac

SEQ ID NO: 2938988 - RNA, 18 nt, Human
agauguaugcacacacau

SEQ ID NO: 2938989 - RNA, 20 nt, Human
agauguaugcacacacauau

SEQ ID NO: 2938990 - RNA, 21 nt, Human
ugacagggcacaccgggcacu

SEQ ID NO: 2938991 - RNA, 22 nt, Human
ugacagggcacaccgggcacuc

SEQ ID NO: 2938992 - RNA, 17 nt, Human
ugacaggcaaugcuggc

SEQ ID NO: 2938993 - RNA, 19 nt, Human
ugacaggcaaugcuggcug

SEQ ID NO: 2938994 - RNA, 13 nt, Human
ugacauucccugc

SEQ ID NO: 2938995 - RNA, 13 nt, Human
ugacauguuuuau

SEQ ID NO: 2938996 - RNA, 16 nt, Human
ugacacgaauauugcu

SEQ ID NO: 2938997 - RNA, 19 nt, Human
ugacacgaauauugcugau

SEQ ID NO: 2938998 - RNA, 14 nt, Human
ugacagauugaauu

SEQ ID NO: 2938999 - RNA, 22 nt, Human
ugacagagugagacucugucuc

SEQ ID NO: 2939000 - RNA, 15 nt, Human
ugacacuuaaaaaug

SEQ ID NO: 2939001 - RNA, 13 nt, Human
agaugcacaugag

SEQ ID NO: 2939002 - RNA, 16 nt, Human
agaugcacaugagcug

SEQ ID NO: 2939003 - RNA, 20 nt, Human
agaugcaguucugaagaaga

SEQ ID NO: 2939004 - RNA, 21 nt, Human
agaugcaguucugaagaagau

SEQ ID NO: 2939005 - RNA, 19 nt, Human
agaugcuagaacucccuuu

SEQ ID NO: 2939006 - RNA, 13 nt, Human
agauguaugcaca

SEQ ID NO: 2939007 - RNA, 21 nt, Human
agaugcuagaacucccuuuca

SEQ ID NO: 2939008 - RNA, 15 nt, Human
agaugcuagaacucc

SEQ ID NO: 2939009 - RNA, 18 nt, Human
agaucucuaacuucacca

SEQ ID NO: 2939010 - RNA, 13 nt, Human
agauccuggaaau

SEQ ID NO: 2939011 - RNA, 17 nt, Human
agcaagugagagcuggg

SEQ ID NO: 2939012 - RNA, 21 nt, Human
agcacagcuucauuuccugug

SEQ ID NO: 2939013 - RNA, 16 nt, Human
agcacaugccucucuc

SEQ ID NO: 2939014 - RNA, 18 nt, Human
agcacaugccucucucag

SEQ ID NO: 2939015 - RNA, 22 nt, Human
agcacaugccucucucaggcca

SEQ ID NO: 2939016 - RNA, 21 nt, Human
agcacaugccucucucaggcc

SEQ ID NO: 2939017 - RNA, 20 nt, Human
agcacaugccucucucaggc

SEQ ID NO: 2939018 - RNA, 19 nt, Human
agcacaugccucucucagg

SEQ ID NO: 2939019 - RNA, 23 nt, Human
agcacaugccucucucaggccaa

SEQ ID NO: 2939020 - RNA, 16 nt, Human
agcaccaucucuccuc

SEQ ID NO: 2939021 - RNA, 13 nt, Human
agcaccuccugcc

SEQ ID NO: 2939022 - RNA, 14 nt, Human
agcaccuccugccu

SEQ ID NO: 2939023 - RNA, 16 nt, Human
agcaccuccugccucg

SEQ ID NO: 2939024 - RNA, 12 nt, Human
ugagccacugca

SEQ ID NO: 2939025 - RNA, 13 nt, Human
ugagccacugcac

SEQ ID NO: 2939026 - RNA, 21 nt, Human
ugagccagauuucacucuccu

SEQ ID NO: 2939027 - RNA, 20 nt, Human
ugagccagauuucacucucc

SEQ ID NO: 2939028 - RNA, 14 nt, Human
ugagccacugcacc

SEQ ID NO: 2939029 - RNA, 19 nt, Human
ugagccagauuucacucuc

SEQ ID NO: 2939030 - RNA, 18 nt, Human
ugagccagauuucacucu

SEQ ID NO: 2939031 - RNA, 16 nt, Human
agcaagugagacccug

SEQ ID NO: 2939032 - RNA, 15 nt, Human
agcaagugagagcug

SEQ ID NO: 2939033 - RNA, 16 nt, Human
agcaagugagagcugg

SEQ ID NO: 2939034 - RNA, 22 nt, Human
agcaagggugaugggaaagcau

SEQ ID NO: 2939035 - RNA, 20 nt, Human
agcaagggugaugggaaagc

SEQ ID NO: 2939036 - RNA, 14 nt, Human
agcaaggagauuua

SEQ ID NO: 2939037 - RNA, 17 nt, Human
agcaaggagauuuacaa

SEQ ID NO: 2939038 - RNA, 19 nt, Human
agcaaggagauuuacaacu

SEQ ID NO: 2939039 - RNA, 16 nt, Human
agcaagggugauggga

SEQ ID NO: 2939040 - RNA, 16 nt, Human
agauuuuccugaaaac

SEQ ID NO: 2939041 - RNA, 20 nt, Human
ugagaagcagaggaaggaga

SEQ ID NO: 2939042 - RNA, 15 nt, Human
agauuuuccugaaaa

SEQ ID NO: 2939043 - RNA, 14 nt, Human
agauuuuccugaaa

SEQ ID NO: 2939044 - RNA, 11 nt, Human
ugagacagagu

SEQ ID NO: 2939045 - RNA, 21 nt, Human
ugagacagaguuuucacucuu

SEQ ID NO: 2939046 - RNA, 13 nt, Human
ugagacagcccgg

SEQ ID NO: 2939047 - RNA, 20 nt, Human
ugagacuuuaaaagcauuuu

SEQ ID NO: 2939048 - RNA, 14 nt, Human
ugagacuuuaaaag

SEQ ID NO: 2939049 - RNA, 18 nt, Human
ugagacuuuaaaagcauu

SEQ ID NO: 2939050 - RNA, 12 nt, Human
ugagacuuuaaa

SEQ ID NO: 2939051 - RNA, 13 nt, Human
ugagacuuuaaaa

SEQ ID NO: 2939052 - RNA, 22 nt, Human
ugagacuggggccacuacauuu

SEQ ID NO: 2939053 - RNA, 23 nt, Human
ugagacuggggccacuacauuug

SEQ ID NO: 2939054 - RNA, 16 nt, Human
ugagagacacacugaa

SEQ ID NO: 2939055 - RNA, 17 nt, Human
ugagagacacacugaag

SEQ ID NO: 2939056 - RNA, 19 nt, Human
ugagagacacacugaagaa

SEQ ID NO: 2939057 - RNA, 20 nt, Human
ugagagacacacugaagaag

SEQ ID NO: 2939058 - RNA, 20 nt, Human
ugagacucugucucaaaaaa

SEQ ID NO: 2939059 - RNA, 20 nt, Human
ugagacucugucucagucca

SEQ ID NO: 2939060 - RNA, 12 nt, Human
ugagacagcucu

SEQ ID NO: 2939061 - RNA, 22 nt, Human
ugagacagcccgggcucugccu

SEQ ID NO: 2939062 - RNA, 20 nt, Human
ugagacagcccgggcucugc

SEQ ID NO: 2939063 - RNA, 19 nt, Human
ugagacagcccgggcucug

SEQ ID NO: 2939064 - RNA, 18 nt, Human
ugagacagcccgggcucu

SEQ ID NO: 2939065 - RNA, 17 nt, Human
ugagacagcccgggcuc

SEQ ID NO: 2939066 - RNA, 24 nt, Human
ugagaugugaacacaucagcuugc

SEQ ID NO: 2939067 - RNA, 19 nt, Human
ugagaugugaacacaucag

SEQ ID NO: 2939068 - RNA, 18 nt, Human
ugagaugugaacacauca

SEQ ID NO: 2939069 - RNA, 23 nt, Human
ugagaggacuuuucuuuguggcu

SEQ ID NO: 2939070 - RNA, 17 nt, Human
ugagaggaaaucaccga

SEQ ID NO: 2939071 - RNA, 13 nt, Human
ugagaugugaaca

SEQ ID NO: 2939072 - RNA, 14 nt, Human
ugagagcugggugu

SEQ ID NO: 2939073 - RNA, 10 nt, Human
ugagaggaaa

SEQ ID NO: 2939074 - RNA, 16 nt, Human
ugagagcugcaugugu

SEQ ID NO: 2939075 - RNA, 14 nt, Human
ugagaggaaaucac

SEQ ID NO: 2939076 - RNA, 13 nt, Human
ugagaggaaauca

SEQ ID NO: 2939077 - RNA, 12 nt, Human
ugagaggaaauc

SEQ ID NO: 2939078 - RNA, 11 nt, Human
ugagaggaaau

SEQ ID NO: 2939079 - RNA, 23 nt, Human
ugagagcaguuugguuucuagca

SEQ ID NO: 2939080 - RNA, 21 nt, Human
ugagagcaguuugguuucuag

SEQ ID NO: 2939081 - RNA, 21 nt, Human
ugagagacacacugaagaagc

SEQ ID NO: 2939082 - RNA, 22 nt, Human
ugagagacacacugaagaagca

SEQ ID NO: 2939083 - RNA, 14 nt, Human
ugaaaacacauuuu

SEQ ID NO: 2939084 - RNA, 12 nt, Human
ugaaaacacauu

SEQ ID NO: 2939085 - RNA, 13 nt, Human
ugaaaacacauuu

SEQ ID NO: 2939086 - RNA, 17 nt, Human
ugaaaauaaucucugau

SEQ ID NO: 2939087 - RNA, 17 nt, Human
ugaaaauauuuguauca

SEQ ID NO: 2939088 - RNA, 18 nt, Human
ugaaaauaaucucugauu

SEQ ID NO: 2939089 - RNA, 22 nt, Human
ugaaaauaaucucugauucccu

SEQ ID NO: 2939090 - RNA, 15 nt, Human
ugaaaacacauuuuu

SEQ ID NO: 2939091 - RNA, 17 nt, Human
ugaaaacacauuuuucu

SEQ ID NO: 2939092 - RNA, 19 nt, Human
ugaaaacacauuuuucuua

SEQ ID NO: 2939093 - RNA, 20 nt, Human
ugaaaaucuuauaauuuaaa

SEQ ID NO: 2939094 - RNA, 22 nt, Human
ugaaaauauuuguaucacaaau

SEQ ID NO: 2939095 - RNA, 21 nt, Human
ugaaaauauuuguaucacaaa

SEQ ID NO: 2939096 - RNA, 22 nt, Human
ugaaacugagaugugaacacau

SEQ ID NO: 2939097 - RNA, 13 nt, Human
ugaaagaaaauaa

SEQ ID NO: 2939098 - RNA, 17 nt, Human
ugaaacuggauuaaacu

SEQ ID NO: 2939099 - RNA, 18 nt, Human
ugaaacuggauuaaacuu

SEQ ID NO: 2939100 - RNA, 11 nt, Human
agagacuccug

SEQ ID NO: 2939101 - RNA, 12 nt, Human
agagacuccugc

SEQ ID NO: 2939102 - RNA, 14 nt, Human
agagacuccugcag

SEQ ID NO: 2939103 - RNA, 13 nt, Human
agagacuccugca

SEQ ID NO: 2939104 - RNA, 23 nt, Human
agagaccaucccugaaggccccg

SEQ ID NO: 2939105 - RNA, 22 nt, Human
agagaccaucccugaaggcccc

SEQ ID NO: 2939106 - RNA, 18 nt, Human
agagaccaucccugaagg

SEQ ID NO: 2939107 - RNA, 18 nt, Human
ugaaagaggaaugaagua

SEQ ID NO: 2939108 - RNA, 21 nt, Human
agagaccaucccugaaggccc

SEQ ID NO: 2939109 - RNA, 19 nt, Human
agagaccaucccugaaggc

SEQ ID NO: 2939110 - RNA, 17 nt, Human
ugaaagaggaaugaagu

SEQ ID NO: 2939111 - RNA, 22 nt, Human
ugaaagacuguacaaaguagaa

SEQ ID NO: 2939112 - RNA, 18 nt, Human
ugaaagacuguacaaagu

SEQ ID NO: 2939113 - RNA, 19 nt, Human
ugaaagacuguacaaagua

SEQ ID NO: 2939114 - RNA, 16 nt, Human
ugaaagacuguacaaa

SEQ ID NO: 2939115 - RNA, 12 nt, Human
ugaaacuuuugg

SEQ ID NO: 2939116 - RNA, 22 nt, Human
ugaaagaaaauaccaaggaaca

SEQ ID NO: 2939117 - RNA, 16 nt, Human
agacucccaugaggga

SEQ ID NO: 2939118 - RNA, 14 nt, Human
agacuccauaguuu

SEQ ID NO: 2939119 - RNA, 16 nt, Human
agacuccauaguuugg

SEQ ID NO: 2939120 - RNA, 13 nt, Human
agacuccugcagg

SEQ ID NO: 2939121 - RNA, 23 nt, Human
agacuggcgugaacccaggaggc

SEQ ID NO: 2939122 - RNA, 17 nt, Human
agacuggcgugaaccca

SEQ ID NO: 2939123 - RNA, 18 nt, Human
agacuggcgugaacccag

SEQ ID NO: 2939124 - RNA, 22 nt, Human
agacuggcgugaacccaggagg

SEQ ID NO: 2939125 - RNA, 23 nt, Human
agacuggcacaguuuucugagaa

SEQ ID NO: 2939126 - RNA, 18 nt, Human
agacuggcacaguuuucu

SEQ ID NO: 2939127 - RNA, 21 nt, Human
agacuggcacaguuuucugag

SEQ ID NO: 2939128 - RNA, 20 nt, Human
agacuggcacaguuuucuga

SEQ ID NO: 2939129 - RNA, 18 nt, Human
ucuuuaaugucacaggca

SEQ ID NO: 2939130 - RNA, 19 nt, Human
ucuuuaaugucacaggcag

SEQ ID NO: 2939131 - RNA, 15 nt, Human
ucuuuaaugucacag

SEQ ID NO: 2939132 - RNA, 20 nt, Human
agacaggcaagcaccuccug

SEQ ID NO: 2939133 - RNA, 12 nt, Human
ucuuuccugagg

SEQ ID NO: 2939134 - RNA, 22 nt, Human
agacuccaaagaaauguaaggg

SEQ ID NO: 2939135 - RNA, 17 nt, Human
agacuuugguuauuuua

SEQ ID NO: 2939136 - RNA, 23 nt, Human
agacuuugguuauuuuacuuuuu

SEQ ID NO: 2939137 - RNA, 15 nt, Human
agagacacaagccuu

SEQ ID NO: 2939138 - RNA, 19 nt, Human
agagacacaagccuucggc

SEQ ID NO: 2939139 - RNA, 16 nt, Human
agagacacaagccuuc

SEQ ID NO: 2939140 - RNA, 19 nt, Human
agacuuuggaaagaguagg

SEQ ID NO: 2939141 - RNA, 15 nt, Human
agacuuuuccaaccc

SEQ ID NO: 2939142 - RNA, 15 nt, Human
agacuuuggaaagac

SEQ ID NO: 2939143 - RNA, 15 nt, Human
agacuuuggaaagag

SEQ ID NO: 2939144 - RNA, 17 nt, Human
agacuuuggaaagacuu

SEQ ID NO: 2939145 - RNA, 14 nt, Human
agacuggggccacu

SEQ ID NO: 2939146 - RNA, 20 nt, Human
agacugguuccauggccucu

SEQ ID NO: 2939147 - RNA, 14 nt, Human
ucuuuguggcuucc

SEQ ID NO: 2939148 - RNA, 14 nt, Human
agagacagaaagca

SEQ ID NO: 2939149 - RNA, 16 nt, Human
agagacacacugaaga

SEQ ID NO: 2939150 - RNA, 20 nt, Human
ucuuuguacagacaacaaac

SEQ ID NO: 2939151 - RNA, 15 nt, Human
ucuuuguacagacaa

SEQ ID NO: 2939152 - RNA, 14 nt, Human
ucuuuguacagaca

SEQ ID NO: 2939153 - RNA, 17 nt, Human
ugaaguacucauacaug

SEQ ID NO: 2939154 - RNA, 13 nt, Human
ugaagucacacag

SEQ ID NO: 2939155 - RNA, 12 nt, Human
ugaauaauacag

SEQ ID NO: 2939156 - RNA, 21 nt, Human
ugaauaaccugaggauucuau

SEQ ID NO: 2939157 - RNA, 13 nt, Human
ugaauaauacagu

SEQ ID NO: 2939158 - RNA, 19 nt, Human
ugaaguaaaauguggcagg

SEQ ID NO: 2939159 - RNA, 18 nt, Human
ugaaguaaaauguggcag

SEQ ID NO: 2939160 - RNA, 15 nt, Human
ugaaguaauaugcac

SEQ ID NO: 2939161 - RNA, 16 nt, Human
ugaaguaauaugcaca

SEQ ID NO: 2939162 - RNA, 20 nt, Human
ugaaguaauaugcacacauu

SEQ ID NO: 2939163 - RNA, 21 nt, Human
ugaaguaauaugcacacauuu

SEQ ID NO: 2939164 - RNA, 22 nt, Human
ugaaguaauaugcacacauuuu

SEQ ID NO: 2939165 - RNA, 17 nt, Human
ugaagauuuaccacuug

SEQ ID NO: 2939166 - RNA, 20 nt, Human
ugaagauuuaccacuugugu

SEQ ID NO: 2939167 - RNA, 20 nt, Human
agagguucaaagauauuuug

SEQ ID NO: 2939168 - RNA, 16 nt, Human
agagguucaaagauau

SEQ ID NO: 2939169 - RNA, 19 nt, Human
agagguucaaagauauuuu

SEQ ID NO: 2939170 - RNA, 15 nt, Human
agagggagguaagga

SEQ ID NO: 2939171 - RNA, 15 nt, Human
agagggagugacaga

SEQ ID NO: 2939172 - RNA, 20 nt, Human
agagggagugacagaggcag

SEQ ID NO: 2939173 - RNA, 13 nt, Human
agagguucaaaga

SEQ ID NO: 2939174 - RNA, 22 nt, Human
agaggcugccucucccaucacu

SEQ ID NO: 2939175 - RNA, 21 nt, Human
agaggcagccccauucugccu

SEQ ID NO: 2939176 - RNA, 22 nt, Human
agaggcagccccauucugccug

SEQ ID NO: 2939177 - RNA, 21 nt, Human
agaggcagggucucacucugu

SEQ ID NO: 2939178 - RNA, 23 nt, Human
agaggcagccccauucugccugc

SEQ ID NO: 2939179 - RNA, 18 nt, Human
agagcuguucacagccag

SEQ ID NO: 2939180 - RNA, 22 nt, Human
ugaagaagcaccaaucaugaau

SEQ ID NO: 2939181 - RNA, 13 nt, Human
ugaagacagagcu

SEQ ID NO: 2939182 - RNA, 22 nt, Human
ugaagacaaugacuuacuguac

SEQ ID NO: 2939183 - RNA, 23 nt, Human
ugaagacaaugacuuacuguaca

SEQ ID NO: 2939184 - RNA, 21 nt, Human
ugaagacaaugacuuacugua

SEQ ID NO: 2939185 - RNA, 22 nt, Human
ugaaccaccacacccagcccac

SEQ ID NO: 2939186 - RNA, 21 nt, Human
ugaaccaccacacccagccca

SEQ ID NO: 2939187 - RNA, 13 nt, Human
ugaacaaauuuac

SEQ ID NO: 2939188 - RNA, 22 nt, Human
ugaacccauauuuguacaccaa

SEQ ID NO: 2939189 - RNA, 18 nt, Human
ugaacccgggaggcagag

SEQ ID NO: 2939190 - RNA, 15 nt, Human
ugaaauuuccuggga

SEQ ID NO: 2939191 - RNA, 19 nt, Human
ugaaauuuuuauuaaauua

SEQ ID NO: 2939192 - RNA, 21 nt, Human
ugaaauuuccugggagcuuuu

SEQ ID NO: 2939193 - RNA, 20 nt, Human
ugaaauuuuuauuaaauuau

SEQ ID NO: 2939194 - RNA, 13 nt, Human
ugaaauaaacguc

SEQ ID NO: 2939195 - RNA, 18 nt, Human
ugaaauaaacgucuuaaa

SEQ ID NO: 2939196 - RNA, 22 nt, Human
ugaaauaaacgucuuaaauauu

SEQ ID NO: 2939197 - RNA, 23 nt, Human
ugaaauaaacgucuuaaauauuc

SEQ ID NO: 2939198 - RNA, 17 nt, Human
ugaaauaacauggccuu

SEQ ID NO: 2939199 - RNA, 16 nt, Human
ugaaauaacauggccu

SEQ ID NO: 2939200 - RNA, 16 nt, Human
agagauugugguuuca

SEQ ID NO: 2939201 - RNA, 15 nt, Human
agagcugcccucucc

SEQ ID NO: 2939202 - RNA, 19 nt, Human
agagcugcccucuccuggg

SEQ ID NO: 2939203 - RNA, 20 nt, Human
agagcugcccucuccugggc

SEQ ID NO: 2939204 - RNA, 16 nt, Human
agagcugcccucuccu

SEQ ID NO: 2939205 - RNA, 17 nt, Human
agagcugcccucuccug

SEQ ID NO: 2939206 - RNA, 18 nt, Human
agagcugcccucuccugg

SEQ ID NO: 2939207 - RNA, 20 nt, Human
uguacaugaaaacacauuuu

SEQ ID NO: 2939208 - RNA, 19 nt, Human
uguacaugaaaacacauuu

SEQ ID NO: 2939209 - RNA, 17 nt, Human
uguacaugaaaacacau

SEQ ID NO: 2939210 - RNA, 18 nt, Human
uguacaugaaaacacauu

SEQ ID NO: 2939211 - RNA, 17 nt, Human
uguagacaguuggguuu

SEQ ID NO: 2939212 - RNA, 21 nt, Human
uguagaagucacauuccugaa

SEQ ID NO: 2939213 - RNA, 17 nt, Human
uguaauuugugauacaa

SEQ ID NO: 2939214 - RNA, 21 nt, Human
uguaauuugugauacaaugcu

SEQ ID NO: 2939215 - RNA, 16 nt, Human
uguaauuugugauaca

SEQ ID NO: 2939216 - RNA, 18 nt, Human
uguaaggaaugauuaauu

SEQ ID NO: 2939217 - RNA, 19 nt, Human
uguacaaaguagaagucuu

SEQ ID NO: 2939218 - RNA, 23 nt, Human
uguacaaaguagaagucuuagau

SEQ ID NO: 2939219 - RNA, 14 nt, Human
agguggggcagcuu

SEQ ID NO: 2939220 - RNA, 23 nt, Human
agguggggucacucuggcagcuc

SEQ ID NO: 2939221 - RNA, 13 nt, Human
agguggggcagcu

SEQ ID NO: 2939222 - RNA, 23 nt, Human
aggugugaaccaccacacccagc

SEQ ID NO: 2939223 - RNA, 18 nt, Human
aggugugacugaauuucu

SEQ ID NO: 2939224 - RNA, 22 nt, Human
aggugugaaccaccacacccag

SEQ ID NO: 2939225 - RNA, 20 nt, Human
aggugugacugaauuucuuu

SEQ ID NO: 2939226 - RNA, 14 nt, Human
aggugugagucacc

SEQ ID NO: 2939227 - RNA, 20 nt, Human
aggugugagucaccaagccc

SEQ ID NO: 2939228 - RNA, 12 nt, Human
agguugugaaug

SEQ ID NO: 2939229 - RNA, 13 nt, Human
uguaaggaaugau

SEQ ID NO: 2939230 - RNA, 15 nt, Human
uguaaggaaugauua

SEQ ID NO: 2939231 - RNA, 14 nt, Human
uguaaggaaugauu

SEQ ID NO: 2939232 - RNA, 17 nt, Human
uguaagaaaauaucacu

SEQ ID NO: 2939233 - RNA, 18 nt, Human
uguaagaaaauaucacuu

SEQ ID NO: 2939234 - RNA, 22 nt, Human
uguaagcucuacugaggugcua

SEQ ID NO: 2939235 - RNA, 13 nt, Human
ugguuuucuguuc

SEQ ID NO: 2939236 - RNA, 15 nt, Human
ugguuuucuguucuu

SEQ ID NO: 2939237 - RNA, 21 nt, Human
aggugauccacccaccucagc

SEQ ID NO: 2939238 - RNA, 23 nt, Human
aggugauccacccaccucagccu

SEQ ID NO: 2939239 - RNA, 12 nt, Human
ugguuuucuguu

SEQ ID NO: 2939240 - RNA, 15 nt, Human
ugguuuguucccugu

SEQ ID NO: 2939241 - RNA, 21 nt, Human
ugguuuguaaauuaacuuuua

SEQ ID NO: 2939242 - RNA, 14 nt, Human
ugguuucagaaaug

SEQ ID NO: 2939243 - RNA, 15 nt, Human
ugguuucagaaaugu

SEQ ID NO: 2939244 - RNA, 15 nt, Human
ugguuucuagcauga

SEQ ID NO: 2939245 - RNA, 16 nt, Human
ugguuauuuuacuuuu

SEQ ID NO: 2939246 - RNA, 15 nt, Human
ugguuauuuuacuuu

SEQ ID NO: 2939247 - RNA, 18 nt, Human
ugguuauuuuacuuuuug

SEQ ID NO: 2939248 - RNA, 17 nt, Human
ugguguuuccuggcacu

SEQ ID NO: 2939249 - RNA, 15 nt, Human
ugguguuuccuggca

SEQ ID NO: 2939250 - RNA, 20 nt, Human
ugguucaggguuggccccug

SEQ ID NO: 2939251 - RNA, 22 nt, Human
ugguucaggguuggccccugcc

SEQ ID NO: 2939252 - RNA, 23 nt, Human
ugguucaggguuggccccugccc

SEQ ID NO: 2939253 - RNA, 12 nt, Human
ugguggcagcug

SEQ ID NO: 2939254 - RNA, 23 nt, Human
uggugugaccacugcagaagaca

SEQ ID NO: 2939255 - RNA, 23 nt, Human
ugguggcagcucaccucucccuu

SEQ ID NO: 2939256 - RNA, 20 nt, Human
ugguggcagcucaccucucc

SEQ ID NO: 2939257 - RNA, 19 nt, Human
ugguggcagcucaccucuc

SEQ ID NO: 2939258 - RNA, 16 nt, Human
ugguggcagcucaccu

SEQ ID NO: 2939259 - RNA, 12 nt, Human
ugguggcagcuc

SEQ ID NO: 2939260 - RNA, 15 nt, Human
ugguggcagagugga

SEQ ID NO: 2939261 - RNA, 22 nt, Human
agggugaugggaaagcauugua

SEQ ID NO: 2939262 - RNA, 21 nt, Human
agggugaugggaaagcauugu

SEQ ID NO: 2939263 - RNA, 14 nt, Human
uggguggaugccug

SEQ ID NO: 2939264 - RNA, 23 nt, Human
uggguggaugccugguggcagcu

SEQ ID NO: 2939265 - RNA, 20 nt, Human
uggucaccaaaucagcugcu

SEQ ID NO: 2939266 - RNA, 23 nt, Human
uggucaccaaaucagcugcuacu

SEQ ID NO: 2939267 - RNA, 21 nt, Human
uggucaccaaaucagcugcua

SEQ ID NO: 2939268 - RNA, 16 nt, Human
ugguccauagagagca

SEQ ID NO: 2939269 - RNA, 15 nt, Human
ugguccauagagagc

SEQ ID NO: 2939270 - RNA, 16 nt, Human
aggguaucaggugcug

SEQ ID NO: 2939271 - RNA, 19 nt, Human
aggguacuaaggaaucuuu

SEQ ID NO: 2939272 - RNA, 21 nt, Human
aggggcuuaauuauugauguu

SEQ ID NO: 2939273 - RNA, 13 nt, Human
agggggcugggac

SEQ ID NO: 2939274 - RNA, 16 nt, Human
aggggaauugaggaca

SEQ ID NO: 2939275 - RNA, 18 nt, Human
aggucuugaacuccuggc

SEQ ID NO: 2939276 - RNA, 22 nt, Human
aggucuugaacuccuggccuca

SEQ ID NO: 2939277 - RNA, 20 nt, Human
aggucuugaacuccuggccu

SEQ ID NO: 2939278 - RNA, 21 nt, Human
aggucuugaacuccuggccuc

SEQ ID NO: 2939279 - RNA, 22 nt, Human
aggucauuuuuuuuaagaaaaa

SEQ ID NO: 2939280 - RNA, 23 nt, Human
aggucauuuuuuuuaagaaaaag

SEQ ID NO: 2939281 - RNA, 15 nt, Human
aggucagugcaaaua

SEQ ID NO: 2939282 - RNA, 21 nt, Human
aggucaaggcugcagugagcc

SEQ ID NO: 2939283 - RNA, 17 nt, Human
agguaugcaaucaaauc

SEQ ID NO: 2939284 - RNA, 17 nt, Human
aggguugggcugguguc

SEQ ID NO: 2939285 - RNA, 14 nt, Human
aggguuuaaagaug

SEQ ID NO: 2939286 - RNA, 20 nt, Human
aggguuuauguuuaggaugu

SEQ ID NO: 2939287 - RNA, 13 nt, Human
aggguuggccccu

SEQ ID NO: 2939288 - RNA, 14 nt, Human
aggguuggccccug

SEQ ID NO: 2939289 - RNA, 13 nt, Human
aggguugggcugg

SEQ ID NO: 2939290 - RNA, 15 nt, Human
aggguugggcuggug

SEQ ID NO: 2939291 - RNA, 19 nt, Human
uggugaacagaacaaaagg

SEQ ID NO: 2939292 - RNA, 17 nt, Human
aggguggugaccucugc

SEQ ID NO: 2939293 - RNA, 18 nt, Human
aggguggugaccucugcc

SEQ ID NO: 2939294 - RNA, 19 nt, Human
aggguggugaccucugccu

SEQ ID NO: 2939295 - RNA, 17 nt, Human
aggguuaugauuaagua

SEQ ID NO: 2939296 - RNA, 18 nt, Human
uggucugacccacugcuu

SEQ ID NO: 2939297 - RNA, 12 nt, Human
uggucuguguga

SEQ ID NO: 2939298 - RNA, 22 nt, Human
uggucugugagaugcuagaacu

SEQ ID NO: 2939299 - RNA, 16 nt, Human
uggucuuauuuguaaa

SEQ ID NO: 2939300 - RNA, 19 nt, Human
ugguccauagagagcaaga

SEQ ID NO: 2939301 - RNA, 22 nt, Human
ugguccaugggccauaugaaaa

SEQ ID NO: 2939302 - RNA, 14 nt, Human
ugugaagagaacca

SEQ ID NO: 2939303 - RNA, 14 nt, Human
ugugaagcaaaauu

SEQ ID NO: 2939304 - RNA, 19 nt, Human
ugugagcacaaagguagcu

SEQ ID NO: 2939305 - RNA, 22 nt, Human
ugugagaugcuagaacucccuu

SEQ ID NO: 2939306 - RNA, 14 nt, Human
agucuucuauuuau

SEQ ID NO: 2939307 - RNA, 23 nt, Human
agugaaaaaggaggaagagaaaa

SEQ ID NO: 2939308 - RNA, 20 nt, Human
agugaaaaaggaggaagaga

SEQ ID NO: 2939309 - RNA, 17 nt, Human
agugaaaaaggaggaag

SEQ ID NO: 2939310 - RNA, 11 nt, Human
agugaaaaagg

SEQ ID NO: 2939311 - RNA, 19 nt, Human
ugugauuuuugguauuuga

SEQ ID NO: 2939312 - RNA, 21 nt, Human
ugugauuuuugguauuugaaa

SEQ ID NO: 2939313 - RNA, 20 nt, Human
ugugauuuuugguauuugaa

SEQ ID NO: 2939314 - RNA, 17 nt, Human
ugugauggggcccugcc

SEQ ID NO: 2939315 - RNA, 16 nt, Human
agugagccgagauugu

SEQ ID NO: 2939316 - RNA, 16 nt, Human
ugugauggggcccugc

SEQ ID NO: 2939317 - RNA, 15 nt, Human
ugugauggggcccug

SEQ ID NO: 2939318 - RNA, 14 nt, Human
agugagagcugggu

SEQ ID NO: 2939319 - RNA, 21 nt, Human
agugagcagucaggaaagaga

SEQ ID NO: 2939320 - RNA, 13 nt, Human
agugagacucugu

SEQ ID NO: 2939321 - RNA, 21 nt, Human
agugagacccugucucaaaaa

SEQ ID NO: 2939322 - RNA, 17 nt, Human
agugagacccugucuca

SEQ ID NO: 2939323 - RNA, 22 nt, Human
agugagacuggggccacuacau

SEQ ID NO: 2939324 - RNA, 22 nt, Human
agugagacucugucucaaaaaa

SEQ ID NO: 2939325 - RNA, 16 nt, Human
agugagacucugucuc

SEQ ID NO: 2939326 - RNA, 17 nt, Human
agugagacucugucuca

SEQ ID NO: 2939327 - RNA, 17 nt, Human
agugaaagaaaauaaca

SEQ ID NO: 2939328 - RNA, 16 nt, Human
agugaaagaggcagcu

SEQ ID NO: 2939329 - RNA, 14 nt, Human
agugagacagcucu

SEQ ID NO: 2939330 - RNA, 22 nt, Human
agugaaagaggcagcuugaaac

SEQ ID NO: 2939331 - RNA, 14 nt, Human
ugucuucacaacag

SEQ ID NO: 2939332 - RNA, 15 nt, Human
ugucuugcaauggca

SEQ ID NO: 2939333 - RNA, 17 nt, Human
ugucuugcaauggcagc

SEQ ID NO: 2939334 - RNA, 18 nt, Human
ugucuugcaauggcagcc

SEQ ID NO: 2939335 - RNA, 20 nt, Human
ugucuugcaauggcagccuu

SEQ ID NO: 2939336 - RNA, 21 nt, Human
ugucuugcaauggcagccuug

SEQ ID NO: 2939337 - RNA, 16 nt, Human
ugugaaccaccacacc

SEQ ID NO: 2939338 - RNA, 22 nt, Human
ugugaaccaccacacccagccc

SEQ ID NO: 2939339 - RNA, 23 nt, Human
ugugaaccaccacacccagccca

SEQ ID NO: 2939340 - RNA, 22 nt, Human
ugugaacaguuguguuugaagc

SEQ ID NO: 2939341 - RNA, 15 nt, Human
ugugaaccaccacac

SEQ ID NO: 2939342 - RNA, 21 nt, Human
ugucucuugguccugcugcag

SEQ ID NO: 2939343 - RNA, 20 nt, Human
ugucucuugguccugcugca

SEQ ID NO: 2939344 - RNA, 19 nt, Human
ugucucuugguccugcugc

SEQ ID NO: 2939345 - RNA, 18 nt, Human
ugucucuugguccugcug

SEQ ID NO: 2939346 - RNA, 22 nt, Human
ugucucuuuaaugucacaggca

SEQ ID NO: 2939347 - RNA, 21 nt, Human
ugucucuuuaaugucacaggc

SEQ ID NO: 2939348 - RNA, 22 nt, Human
ugucucuugguccugcugcagu

SEQ ID NO: 2939349 - RNA, 12 nt, Human
ugucuuaauuaa

SEQ ID NO: 2939350 - RNA, 14 nt, Human
ugucuuaauuaaaa

SEQ ID NO: 2939351 - RNA, 15 nt, Human
ugucuccucucucug

SEQ ID NO: 2939352 - RNA, 22 nt, Human
aguccccucuccuccacauuug

SEQ ID NO: 2939353 - RNA, 16 nt, Human
agucccugccaaugga

SEQ ID NO: 2939354 - RNA, 14 nt, Human
agucccugccaaug

SEQ ID NO: 2939355 - RNA, 13 nt, Human
agucccugccaau

SEQ ID NO: 2939356 - RNA, 23 nt, Human
aguccccuguuuguuucugaaag

SEQ ID NO: 2939357 - RNA, 13 nt, Human
ugucucugagagu

SEQ ID NO: 2939358 - RNA, 17 nt, Human
ugucucuacuaaaaaua

SEQ ID NO: 2939359 - RNA, 23 nt, Human
agguuuggacaaaauggaauacu

SEQ ID NO: 2939360 - RNA, 12 nt, Human
uguagagccagg

SEQ ID NO: 2939361 - RNA, 15 nt, Human
uguagagccaggguc

SEQ ID NO: 2939362 - RNA, 15 nt, Human
uguaucccaugagcc

SEQ ID NO: 2939363 - RNA, 14 nt, Human
uguauguguaagua

SEQ ID NO: 2939364 - RNA, 16 nt, Human
uguauguguaauaaau

SEQ ID NO: 2939365 - RNA, 17 nt, Human
uguauguguaauaaaua

SEQ ID NO: 2939366 - RNA, 15 nt, Human
ugucaaaguggugag

SEQ ID NO: 2939367 - RNA, 14 nt, Human
ugucaaagugguga

SEQ ID NO: 2939368 - RNA, 20 nt, Human
ugucaaccccaaguuaguuc

SEQ ID NO: 2939369 - RNA, 19 nt, Human
ugucaaaguggugagaggc

SEQ ID NO: 2939370 - RNA, 16 nt, Human
ugucaaaguggugaga

SEQ ID NO: 2939371 - RNA, 13 nt, Human
aguagcugggacu

SEQ ID NO: 2939372 - RNA, 14 nt, Human
aguagcugggacua

SEQ ID NO: 2939373 - RNA, 15 nt, Human
aguauuguccagguc

SEQ ID NO: 2939374 - RNA, 16 nt, Human
aguauuguccaggucu

SEQ ID NO: 2939375 - RNA, 20 nt, Human
agucacauuccaagccucau

SEQ ID NO: 2939376 - RNA, 16 nt, Human
agucacugagacagcc

SEQ ID NO: 2939377 - RNA, 15 nt, Human
agucacugagacagc

SEQ ID NO: 2939378 - RNA, 17 nt, Human
agucacugagacagccc

SEQ ID NO: 2939379 - RNA, 15 nt, Human
ugucagcauagaagu

SEQ ID NO: 2939380 - RNA, 15 nt, Human
aguauuauaccuuuu

SEQ ID NO: 2939381 - RNA, 14 nt, Human
aguauuauaccuuu

SEQ ID NO: 2939382 - RNA, 22 nt, Human
aguagcugggacuacaggcacc

SEQ ID NO: 2939383 - RNA, 19 nt, Human
aguagcugggacuacaggc

SEQ ID NO: 2939384 - RNA, 21 nt, Human
aguagcugggacuacaggcac

SEQ ID NO: 2939385 - RNA, 21 nt, Human
aguauuagaauaccacaggaa

SEQ ID NO: 2939386 - RNA, 18 nt, Human
aguauguuagugcaaauu

SEQ ID NO: 2939387 - RNA, 21 nt, Human
aguauguuagugcaaauuguc

SEQ ID NO: 2939388 - RNA, 21 nt, Human
aguccccucuccuccacauuu

SEQ ID NO: 2939389 - RNA, 19 nt, Human
aguccccuguuuguuucug

SEQ ID NO: 2939390 - RNA, 14 nt, Human
aguccccuguuugu

SEQ ID NO: 2939391 - RNA, 21 nt, Human
agucccaccuuggcugcaggg

SEQ ID NO: 2939392 - RNA, 23 nt, Human
agucccaccuuggcugcagggag

SEQ ID NO: 2939393 - RNA, 20 nt, Human
agucccaccuuggcugcagg

SEQ ID NO: 2939394 - RNA, 15 nt, Human
agucagucauucaga

SEQ ID NO: 2939395 - RNA, 21 nt, Human
agucagucauucagauaugau

SEQ ID NO: 2939396 - RNA, 19 nt, Human
agucagggguucccuuuuu

SEQ ID NO: 2939397 - RNA, 12 nt, Human
ugucccuuuucc

SEQ ID NO: 2939398 - RNA, 14 nt, Human
ugucccugcacuug

SEQ ID NO: 2939399 - RNA, 20 nt, Human
ugucagcuaaagaaguuuga

SEQ ID NO: 2939400 - RNA, 16 nt, Human
ugucagccauuccugu

SEQ ID NO: 2939401 - RNA, 23 nt, Human
ugucagcuccccucggagaagag

SEQ ID NO: 2939402 - RNA, 21 nt, Human
ugucagcuccccucggagaag

SEQ ID NO: 2939403 - RNA, 20 nt, Human
ugucagcuccccucggagaa

SEQ ID NO: 2939404 - RNA, 18 nt, Human
uuagcaggaagcugugag

SEQ ID NO: 2939405 - RNA, 23 nt, Human
uuagaugcaguucugaagaagau

SEQ ID NO: 2939406 - RNA, 22 nt, Human
uuagaugcaguucugaagaaga

SEQ ID NO: 2939407 - RNA, 19 nt, Human
auaauacaguaucucaggg

SEQ ID NO: 2939408 - RNA, 21 nt, Human
auaaucuuucacaggggacag

SEQ ID NO: 2939409 - RNA, 14 nt, Human
auaauucuacuuug

SEQ ID NO: 2939410 - RNA, 14 nt, Human
auaaugaauacuuu

SEQ ID NO: 2939411 - RNA, 23 nt, Human
auaagaaccuuuugagugccuua

SEQ ID NO: 2939412 - RNA, 17 nt, Human
auaaguuaacuuccaau

SEQ ID NO: 2939413 - RNA, 22 nt, Human
auaagaaccuuuugagugccuu

SEQ ID NO: 2939414 - RNA, 22 nt, Human
auaaguuaacuuccaauuuaca

SEQ ID NO: 2939415 - RNA, 23 nt, Human
auaauacaccacuacauucuguu

SEQ ID NO: 2939416 - RNA, 21 nt, Human
auaauacaccacuacauucug

SEQ ID NO: 2939417 - RNA, 19 nt, Human
auaaaugugccuucauuuu

SEQ ID NO: 2939418 - RNA, 20 nt, Human
auaaccaguguuguggauuu

SEQ ID NO: 2939419 - RNA, 12 nt, Human
auaacuggaaac

SEQ ID NO: 2939420 - RNA, 16 nt, Human
auaacuggaacacucu

SEQ ID NO: 2939421 - RNA, 18 nt, Human
auaacuggaacacucuau

SEQ ID NO: 2939422 - RNA, 23 nt, Human
uuaccauuuugggguacccacug

SEQ ID NO: 2939423 - RNA, 22 nt, Human
uuacaggaaguacuggagaaaa

SEQ ID NO: 2939424 - RNA, 18 nt, Human
uuacaggaaguacuggag

SEQ ID NO: 2939425 - RNA, 21 nt, Human
auaacuggaacacucuauaac

SEQ ID NO: 2939426 - RNA, 23 nt, Human
auaacuggaacacucuauaacaa

SEQ ID NO: 2939427 - RNA, 16 nt, Human
uuacaggaaguacugg

SEQ ID NO: 2939428 - RNA, 15 nt, Human
uuacaggaaguacug

SEQ ID NO: 2939429 - RNA, 17 nt, Human
aguuuucugagaaagac

SEQ ID NO: 2939430 - RNA, 14 nt, Human
aguuuucugagaaa

SEQ ID NO: 2939431 - RNA, 13 nt, Human
aguuuucugagaa

SEQ ID NO: 2939432 - RNA, 12 nt, Human
aguuuucugaga

SEQ ID NO: 2939433 - RNA, 16 nt, Human
auaaaccgaacugaug

SEQ ID NO: 2939434 - RNA, 13 nt, Human
auaaacuuuaccu

SEQ ID NO: 2939435 - RNA, 15 nt, Human
auaaacuuuaccuuu

SEQ ID NO: 2939436 - RNA, 18 nt, Human
auaaacgucuuaaauauu

SEQ ID NO: 2939437 - RNA, 15 nt, Human
auaaacgucuuaaau

SEQ ID NO: 2939438 - RNA, 16 nt, Human
auaaacgucuuaaaua

SEQ ID NO: 2939439 - RNA, 15 nt, Human
auaaacucauuucua

SEQ ID NO: 2939440 - RNA, 16 nt, Human
uuagcccugaacauuu

SEQ ID NO: 2939441 - RNA, 21 nt, Human
uuagccguggugauuuagcag

SEQ ID NO: 2939442 - RNA, 15 nt, Human
uuagcccugaacauu

SEQ ID NO: 2939443 - RNA, 21 nt, Human
uuauaacuuaaugaaaacaau

SEQ ID NO: 2939444 - RNA, 17 nt, Human
uuauaacuuuuuauauu

SEQ ID NO: 2939445 - RNA, 15 nt, Human
uuauaacuuaaugaa

SEQ ID NO: 2939446 - RNA, 14 nt, Human
uuauaacuuuuuau

SEQ ID NO: 2939447 - RNA, 16 nt, Human
uuauaacuuuuuauau

SEQ ID NO: 2939448 - RNA, 21 nt, Human
auaauuuuuauauuugaaaua

SEQ ID NO: 2939449 - RNA, 22 nt, Human
auaauuuuuauauuugaaauau

SEQ ID NO: 2939450 - RNA, 22 nt, Human
auacaaaaaaaaaaaaaaauua

SEQ ID NO: 2939451 - RNA, 12 nt, Human
auacaaaagcau

SEQ ID NO: 2939452 - RNA, 13 nt, Human
auacaaaagcaug

SEQ ID NO: 2939453 - RNA, 15 nt, Human
auacaaaagcaugug

SEQ ID NO: 2939454 - RNA, 14 nt, Human
auaauuuuuauauu

SEQ ID NO: 2939455 - RNA, 16 nt, Human
auaauuuuuauauuug

SEQ ID NO: 2939456 - RNA, 19 nt, Human
auaauuuuuauauuugaaa

SEQ ID NO: 2939457 - RNA, 13 nt, Human
auaauuuugugaa

SEQ ID NO: 2939458 - RNA, 14 nt, Human
auaauuuugugaag

SEQ ID NO: 2939459 - RNA, 15 nt, Human
auaauuuugugaagc

SEQ ID NO: 2939460 - RNA, 20 nt, Human
auaauuuugugaagcaaaau

SEQ ID NO: 2939461 - RNA, 19 nt, Human
uuauauagcaagacauuau

SEQ ID NO: 2939462 - RNA, 22 nt, Human
uuauauauauuuuuuucugaaa

SEQ ID NO: 2939463 - RNA, 13 nt, Human
uuauauagcaaga

SEQ ID NO: 2939464 - RNA, 18 nt, Human
uuauauaagcuuguauuc

SEQ ID NO: 2939465 - RNA, 13 nt, Human
auacuacaguuug

SEQ ID NO: 2939466 - RNA, 15 nt, Human
auacuacaguuuguu

SEQ ID NO: 2939467 - RNA, 16 nt, Human
auacuacaguuuguua

SEQ ID NO: 2939468 - RNA, 20 nt, Human
auacuacaguuuguuaguau

SEQ ID NO: 2939469 - RNA, 21 nt, Human
auacuaaccagcagaaaugcc

SEQ ID NO: 2939470 - RNA, 17 nt, Human
auaccagccaguaaaug

SEQ ID NO: 2939471 - RNA, 19 nt, Human
auaccagccaguaaauggg

SEQ ID NO: 2939472 - RNA, 15 nt, Human
uuaucagaacuaugu

SEQ ID NO: 2939473 - RNA, 14 nt, Human
auacaggaaaagcu

SEQ ID NO: 2939474 - RNA, 19 nt, Human
auacaggaaaagcugcuga

SEQ ID NO: 2939475 - RNA, 20 nt, Human
auacaggaaaagcugcugac

SEQ ID NO: 2939476 - RNA, 21 nt, Human
auacaguucggugagcuacaa

SEQ ID NO: 2939477 - RNA, 16 nt, Human
auacauuugauaaagu

SEQ ID NO: 2939478 - RNA, 20 nt, Human
auacaucccuuaccugggaa

SEQ ID NO: 2939479 - RNA, 20 nt, Human
aguucggugagcuacaaaug

SEQ ID NO: 2939480 - RNA, 21 nt, Human
aguuauuuuuauuuauuuaaa

SEQ ID NO: 2939481 - RNA, 14 nt, Human
aguucagagcugcc

SEQ ID NO: 2939482 - RNA, 15 nt, Human
aguucagagcugccc

SEQ ID NO: 2939483 - RNA, 16 nt, Human
aguucagagcugcccu

SEQ ID NO: 2939484 - RNA, 17 nt, Human
aguucagagcugcccuc

SEQ ID NO: 2939485 - RNA, 18 nt, Human
aguucagagcugcccucu

SEQ ID NO: 2939486 - RNA, 16 nt, Human
uguugggccaggagcc

SEQ ID NO: 2939487 - RNA, 13 nt, Human
uguugggccagga

SEQ ID NO: 2939488 - RNA, 13 nt, Human
uguugucagcuga

SEQ ID NO: 2939489 - RNA, 18 nt, Human
aguuacccaaauuaagag

SEQ ID NO: 2939490 - RNA, 17 nt, Human
aguuacccaaauuaaga

SEQ ID NO: 2939491 - RNA, 18 nt, Human
uguucuuuccaaaguaca

SEQ ID NO: 2939492 - RNA, 19 nt, Human
aguuauugaagcagagugg

SEQ ID NO: 2939493 - RNA, 23 nt, Human
aguuauugaagcagaguggcagu

SEQ ID NO: 2939494 - RNA, 16 nt, Human
aguuauugaagcagag

SEQ ID NO: 2939495 - RNA, 17 nt, Human
aguuauugaagcagagu

SEQ ID NO: 2939496 - RNA, 18 nt, Human
aguuauugaagcagagug

SEQ ID NO: 2939497 - RNA, 14 nt, Human
aguuauugaagcag

SEQ ID NO: 2939498 - RNA, 21 nt, Human
aguuauuaagagguaagacuu

SEQ ID NO: 2939499 - RNA, 20 nt, Human
aguuauuauauuuacaaaug

SEQ ID NO: 2939500 - RNA, 19 nt, Human
aguuauggcuauaggugcu

SEQ ID NO: 2939501 - RNA, 19 nt, Human
agugggugaauaauacagu

SEQ ID NO: 2939502 - RNA, 21 nt, Human
agugguuccuaauccucuagg

SEQ ID NO: 2939503 - RNA, 21 nt, Human
aguguacauggaauaacaugu

SEQ ID NO: 2939504 - RNA, 22 nt, Human
aguguacauggaauaacaugua

SEQ ID NO: 2939505 - RNA, 18 nt, Human
agugggugaauaauacag

SEQ ID NO: 2939506 - RNA, 13 nt, Human
agugggugaauaa

SEQ ID NO: 2939507 - RNA, 23 nt, Human
aguggcagucuucaguuugcaga

SEQ ID NO: 2939508 - RNA, 20 nt, Human
agugggggaguggccacaga

SEQ ID NO: 2939509 - RNA, 19 nt, Human
agugggggaguggccacag

SEQ ID NO: 2939510 - RNA, 11 nt, Human
aguggcagcug

SEQ ID NO: 2939511 - RNA, 12 nt, Human
aguggcagcugc

SEQ ID NO: 2939512 - RNA, 13 nt, Human
aguggcagcugcu

SEQ ID NO: 2939513 - RNA, 14 nt, Human
aguggcagcugcuu

SEQ ID NO: 2939514 - RNA, 20 nt, Human
aguggcagcugcuuuugucu

SEQ ID NO: 2939515 - RNA, 23 nt, Human
aguguacauggaauaacauguaa

SEQ ID NO: 2939516 - RNA, 19 nt, Human
uguucuugguuuguaaauu

SEQ ID NO: 2939517 - RNA, 13 nt, Human
uguucuuuccaaa

SEQ ID NO: 2939518 - RNA, 14 nt, Human
uguucuuuccaaag

SEQ ID NO: 2939519 - RNA, 17 nt, Human
uguucuugguuuguaaa

SEQ ID NO: 2939520 - RNA, 18 nt, Human
uguucuugguuuguaaau

SEQ ID NO: 2939521 - RNA, 14 nt, Human
uguucugggacaca

SEQ ID NO: 2939522 - RNA, 15 nt, Human
uguucugggacacag

SEQ ID NO: 2939523 - RNA, 14 nt, Human
uguucuuaauucuu

SEQ ID NO: 2939524 - RNA, 16 nt, Human
uguucuuaauucuuag

SEQ ID NO: 2939525 - RNA, 12 nt, Human
uguucugggaca

SEQ ID NO: 2939526 - RNA, 13 nt, Human
uguucugggacac

SEQ ID NO: 2939527 - RNA, 19 nt, Human
aguugcaaggcaaauguuu

SEQ ID NO: 2939528 - RNA, 20 nt, Human
aguugcaaggcaaauguuua

SEQ ID NO: 2939529 - RNA, 23 nt, Human
aguugauucagcucugcaagaau

SEQ ID NO: 2939530 - RNA, 18 nt, Human
aguugauucagcucugca

SEQ ID NO: 2939531 - RNA, 17 nt, Human
aguugauucagcucugc

SEQ ID NO: 2939532 - RNA, 15 nt, Human
aguugauucagcucu

SEQ ID NO: 2939533 - RNA, 14 nt, Human
aguugauucagcuc

SEQ ID NO: 2939534 - RNA, 13 nt, Human
aguugauucagcu

SEQ ID NO: 2939535 - RNA, 21 nt, Human
aguugauaugccuuuucccaa

SEQ ID NO: 2939536 - RNA, 23 nt, Human
aguugauagcacagacccugccc

SEQ ID NO: 2939537 - RNA, 22 nt, Human
aguugauagcacagacccugcc

SEQ ID NO: 2939538 - RNA, 22 nt, Human
aguucuugccuuggcugcaguu

SEQ ID NO: 2939539 - RNA, 14 nt, Human
aguugauagcacag

SEQ ID NO: 2939540 - RNA, 21 nt, Human
aguugauagcacagacccugc

SEQ ID NO: 2939541 - RNA, 20 nt, Human
aguugauagcacagacccug

SEQ ID NO: 2939542 - RNA, 19 nt, Human
aguugauagcacagacccu

SEQ ID NO: 2939543 - RNA, 15 nt, Human
aguugauagcacaga

SEQ ID NO: 2939544 - RNA, 15 nt, Human
aguucugaagaagau

SEQ ID NO: 2939545 - RNA, 13 nt, Human
aguucugaagaag

SEQ ID NO: 2939546 - RNA, 14 nt, Human
aguucugaagaaga

SEQ ID NO: 2939547 - RNA, 14 nt, Human
uguuuuaggagcau

SEQ ID NO: 2939548 - RNA, 13 nt, Human
uguuuuauaauuu

SEQ ID NO: 2939549 - RNA, 20 nt, Human
uguuuuauaauuuugugaag

SEQ ID NO: 2939550 - RNA, 21 nt, Human
uguuuuauauagcaagacauu

SEQ ID NO: 2939551 - RNA, 17 nt, Human
uguuuuauauagcaaga

SEQ ID NO: 2939552 - RNA, 15 nt, Human
uguuuucaguguaca

SEQ ID NO: 2939553 - RNA, 21 nt, Human
uguuuucaauuuuaaacauau

SEQ ID NO: 2939554 - RNA, 18 nt, Human
uguuuucaauuuuaaaca

SEQ ID NO: 2939555 - RNA, 14 nt, Human
uguuuucaaauguu

SEQ ID NO: 2939556 - RNA, 13 nt, Human
uguuuucaaaugu

SEQ ID NO: 2939557 - RNA, 17 nt, Human
uguuuucaguguacaug

SEQ ID NO: 2939558 - RNA, 15 nt, Human
uguuuucucuugaga

SEQ ID NO: 2939559 - RNA, 12 nt, Human
aguucucuccuu

SEQ ID NO: 2939560 - RNA, 13 nt, Human
aguucucuccuuc

SEQ ID NO: 2939561 - RNA, 16 nt, Human
aguucucuccuucuuc

SEQ ID NO: 2939562 - RNA, 15 nt, Human
uguuuggggaugaga

SEQ ID NO: 2939563 - RNA, 19 nt, Human
uguuugcuaagcauuccaa

SEQ ID NO: 2939564 - RNA, 14 nt, Human
uguugucagcugaa

SEQ ID NO: 2939565 - RNA, 14 nt, Human
uguuugccucugcc

SEQ ID NO: 2939566 - RNA, 16 nt, Human
uguuugccucugccuc

SEQ ID NO: 2939567 - RNA, 15 nt, Human
uguuugcuaagcauu

SEQ ID NO: 2939568 - RNA, 12 nt, Human
aguuuggccaga

SEQ ID NO: 2939569 - RNA, 21 nt, Human
aguuucuccaagcaggacaug

SEQ ID NO: 2939570 - RNA, 15 nt, Human
aguuucuccaagcag

SEQ ID NO: 2939571 - RNA, 13 nt, Human
aguuucuccaagc

SEQ ID NO: 2939572 - RNA, 16 nt, Human
uuaaauucuugcaaag

SEQ ID NO: 2939573 - RNA, 13 nt, Human
uuaaauucuugca

SEQ ID NO: 2939574 - RNA, 22 nt, Human
aguuuucacucuuauugcccac

SEQ ID NO: 2939575 - RNA, 16 nt, Human
aguuugguuucuagca

SEQ ID NO: 2939576 - RNA, 14 nt, Human
aguuuggccagaag

SEQ ID NO: 2939577 - RNA, 13 nt, Human
aguuuggccagaa

SEQ ID NO: 2939578 - RNA, 18 nt, Human
uuaaaaaguggaaaaaua

SEQ ID NO: 2939579 - RNA, 17 nt, Human
uuaaaacaacacucaca

SEQ ID NO: 2939580 - RNA, 20 nt, Human
uuaaaaaugguuuaaauggu

SEQ ID NO: 2939581 - RNA, 22 nt, Human
aguugcauagguuuaauaauuu

SEQ ID NO: 2939582 - RNA, 20 nt, Human
aguugccagucaccccggcc

SEQ ID NO: 2939583 - RNA, 15 nt, Human
uuaaaaaagaaacau

SEQ ID NO: 2939584 - RNA, 18 nt, Human
uuaaaaaagaaacauuug

SEQ ID NO: 2939585 - RNA, 13 nt, Human
uuaaauaaaucau

SEQ ID NO: 2939586 - RNA, 15 nt, Human
uuaaauaaaucauaa

SEQ ID NO: 2939587 - RNA, 19 nt, Human
uuaaauaaugugaaacugg

SEQ ID NO: 2939588 - RNA, 22 nt, Human
uuaaauaaugugaaacuggauu

SEQ ID NO: 2939589 - RNA, 20 nt, Human
uuaaauaaugugaaacugga

SEQ ID NO: 2939590 - RNA, 21 nt, Human
uuaaauaaugugaaacuggau

SEQ ID NO: 2939591 - RNA, 17 nt, Human
uuaaaccgccaaggcug

SEQ ID NO: 2939592 - RNA, 14 nt, Human
agcuaggugacaua

SEQ ID NO: 2939593 - RNA, 19 nt, Human
agcuaggugacauauacau

SEQ ID NO: 2939594 - RNA, 20 nt, Human
agcuaggugacauauacaua

SEQ ID NO: 2939595 - RNA, 21 nt, Human
agcuaggccuggccagaugca

SEQ ID NO: 2939596 - RNA, 19 nt, Human
agcuauggugucauaggcu

SEQ ID NO: 2939597 - RNA, 19 nt, Human
agcuauucaguaauaacuc

SEQ ID NO: 2939598 - RNA, 13 nt, Human
agcucagggccug

SEQ ID NO: 2939599 - RNA, 12 nt, Human
agcucagggccu

SEQ ID NO: 2939600 - RNA, 19 nt, Human
agcucagggccuggcucag

SEQ ID NO: 2939601 - RNA, 18 nt, Human
agcucagggccuggcuca

SEQ ID NO: 2939602 - RNA, 20 nt, Human
agcucagggccuggcucagg

SEQ ID NO: 2939603 - RNA, 15 nt, Human
agcuccaagaauuuc

SEQ ID NO: 2939604 - RNA, 15 nt, Human
agcuccaagcuccca

SEQ ID NO: 2939605 - RNA, 18 nt, Human
agcuccaagaauuucuag

SEQ ID NO: 2939606 - RNA, 16 nt, Human
agcuccaagcucccag

SEQ ID NO: 2939607 - RNA, 22 nt, Human
ugccauuuaaagcuuauuaaaa

SEQ ID NO: 2939608 - RNA, 20 nt, Human
ugcccaaagaugcagccggu

SEQ ID NO: 2939609 - RNA, 17 nt, Human
ugcccaaagaugcagcc

SEQ ID NO: 2939610 - RNA, 17 nt, Human
ugcccagccccuucuga

SEQ ID NO: 2939611 - RNA, 16 nt, Human
ugcccagccccuucug

SEQ ID NO: 2939612 - RNA, 12 nt, Human
ugcccagccccu

SEQ ID NO: 2939613 - RNA, 13 nt, Human
ugcccagccccuu

SEQ ID NO: 2939614 - RNA, 14 nt, Human
ugcccaggccccug

SEQ ID NO: 2939615 - RNA, 15 nt, Human
ugcccaggccccugc

SEQ ID NO: 2939616 - RNA, 17 nt, Human
ugcccaggccccugcca

SEQ ID NO: 2939617 - RNA, 18 nt, Human
ugcccaggccccugccac

SEQ ID NO: 2939618 - RNA, 23 nt, Human
ugccccgaacauguuuuucuucu

SEQ ID NO: 2939619 - RNA, 20 nt, Human
ugcccuaaaguguauuuuuu

SEQ ID NO: 2939620 - RNA, 16 nt, Human
ugccccauucaacauc

SEQ ID NO: 2939621 - RNA, 18 nt, Human
ugccagcuuaucucaggg

SEQ ID NO: 2939622 - RNA, 13 nt, Human
agcggcuggcagc

SEQ ID NO: 2939623 - RNA, 16 nt, Human
ugccagugccugggug

SEQ ID NO: 2939624 - RNA, 12 nt, Human
ugccagugccug

SEQ ID NO: 2939625 - RNA, 15 nt, Human
ugccagugccugggu

SEQ ID NO: 2939626 - RNA, 22 nt, Human
agcggggacagcuccuucuguc

SEQ ID NO: 2939627 - RNA, 23 nt, Human
agcggcuggcagcccaccccuca

SEQ ID NO: 2939628 - RNA, 19 nt, Human
agcggggacagcuccuucu

SEQ ID NO: 2939629 - RNA, 20 nt, Human
agcggggacagcuccuucug

SEQ ID NO: 2939630 - RNA, 20 nt, Human
ugcauuugaggucuguucuu

SEQ ID NO: 2939631 - RNA, 21 nt, Human
ugcauuugaggucuguucuuu

SEQ ID NO: 2939632 - RNA, 17 nt, Human
ugccagccacugugaua

SEQ ID NO: 2939633 - RNA, 19 nt, Human
ugcauuugaggucuguucu

SEQ ID NO: 2939634 - RNA, 18 nt, Human
ugcauuugaggucuguuc

SEQ ID NO: 2939635 - RNA, 20 nt, Human
ugcauuuaaaagauacaguu

SEQ ID NO: 2939636 - RNA, 22 nt, Human
agcgauucuucugcuucagccu

SEQ ID NO: 2939637 - RNA, 23 nt, Human
agccuugaccauucuccaccugc

SEQ ID NO: 2939638 - RNA, 22 nt, Human
agccuugaccauucuccaccug

SEQ ID NO: 2939639 - RNA, 13 nt, Human
agccuugaacuuu

SEQ ID NO: 2939640 - RNA, 16 nt, Human
agccuugaacuuugac

SEQ ID NO: 2939641 - RNA, 22 nt, Human
agccuugaacuuugaccucugc

SEQ ID NO: 2939642 - RNA, 15 nt, Human
agccuugaacuuuga

SEQ ID NO: 2939643 - RNA, 20 nt, Human
ugcagcucuccccuucucug

SEQ ID NO: 2939644 - RNA, 22 nt, Human
ugcagcucuccccuucucugua

SEQ ID NO: 2939645 - RNA, 18 nt, Human
agccuuccagggguggga

SEQ ID NO: 2939646 - RNA, 13 nt, Human
agcuccagcucac

SEQ ID NO: 2939647 - RNA, 17 nt, Human
agcuccagcucaccagc

SEQ ID NO: 2939648 - RNA, 19 nt, Human
agcuccaagcucccaggca

SEQ ID NO: 2939649 - RNA, 18 nt, Human
agcuccaagcucccaggc

SEQ ID NO: 2939650 - RNA, 17 nt, Human
agcuccaagcucccagg

SEQ ID NO: 2939651 - RNA, 22 nt, Human
ugcccucuccugggcagcugcc

SEQ ID NO: 2939652 - RNA, 23 nt, Human
ugcccucuccugggcagcugccu

SEQ ID NO: 2939653 - RNA, 16 nt, Human
ugcccucuccugggca

SEQ ID NO: 2939654 - RNA, 17 nt, Human
ugcccucuccugggcag

SEQ ID NO: 2939655 - RNA, 18 nt, Human
ugcccucuccugggcagc

SEQ ID NO: 2939656 - RNA, 20 nt, Human
ugcccucuccugggcagcug

SEQ ID NO: 2939657 - RNA, 13 nt, Human
ugcccucuccugg

SEQ ID NO: 2939658 - RNA, 14 nt, Human
ugcccucuccuggg

SEQ ID NO: 2939659 - RNA, 15 nt, Human
ugcccucuccugggc

SEQ ID NO: 2939660 - RNA, 12 nt, Human
ugcccucuccug

SEQ ID NO: 2939661 - RNA, 22 nt, Human
agcuccuucuguccuacucugu

SEQ ID NO: 2939662 - RNA, 23 nt, Human
agcuccuucuguccuacucugug

SEQ ID NO: 2939663 - RNA, 21 nt, Human
agcuccagcucaccagcccca

SEQ ID NO: 2939664 - RNA, 18 nt, Human
agcuccagcucaccagcc

SEQ ID NO: 2939665 - RNA, 19 nt, Human
agcuccagcucaccagccc

SEQ ID NO: 2939666 - RNA, 23 nt, Human
agcucugcccauccugccccuga

SEQ ID NO: 2939667 - RNA, 17 nt, Human
ugccugcccaggccccu

SEQ ID NO: 2939668 - RNA, 18 nt, Human
ugccugcccaggccccug

SEQ ID NO: 2939669 - RNA, 19 nt, Human
ugccugcccaggccccugc

SEQ ID NO: 2939670 - RNA, 14 nt, Human
ugccucugacacac

SEQ ID NO: 2939671 - RNA, 16 nt, Human
ugccucugacacacag

SEQ ID NO: 2939672 - RNA, 11 nt, Human
ugccucugccu

SEQ ID NO: 2939673 - RNA, 15 nt, Human
agcugggacuacagg

SEQ ID NO: 2939674 - RNA, 23 nt, Human
agcugcuuuugucuaugggacuc

SEQ ID NO: 2939675 - RNA, 24 nt, Human
agcugcuuuugucuaugggacuca

SEQ ID NO: 2939676 - RNA, 13 nt, Human
agcugccuguuca

SEQ ID NO: 2939677 - RNA, 22 nt, Human
agcugcuuuugucuaugggacu

SEQ ID NO: 2939678 - RNA, 16 nt, Human
agcugcccucuccugg

SEQ ID NO: 2939679 - RNA, 10 nt, Human
agcugccugu

SEQ ID NO: 2939680 - RNA, 21 nt, Human
agcugcccucuccugggcagc

SEQ ID NO: 2939681 - RNA, 19 nt, Human
agcugcccucuccugggca

SEQ ID NO: 2939682 - RNA, 20 nt, Human
agcugcccucuccugggcag

SEQ ID NO: 2939683 - RNA, 17 nt, Human
agcugcccucuccuggg

SEQ ID NO: 2939684 - RNA, 18 nt, Human
agcugcccucuccugggc

SEQ ID NO: 2939685 - RNA, 22 nt, Human
ugcccuuaccugccaggaagcc

SEQ ID NO: 2939686 - RNA, 18 nt, Human
ugcccugugggcccccaa

SEQ ID NO: 2939687 - RNA, 15 nt, Human
ugcccugugggcccc

SEQ ID NO: 2939688 - RNA, 15 nt, Human
agcucuucuccaggc

SEQ ID NO: 2939689 - RNA, 16 nt, Human
agcucuucuccaggcu

SEQ ID NO: 2939690 - RNA, 23 nt, Human
ugcccugugaguacuacaguccu

SEQ ID NO: 2939691 - RNA, 19 nt, Human
ugcccuuaccugccaggaa

SEQ ID NO: 2939692 - RNA, 20 nt, Human
ugccgcagcccugcagaggg

SEQ ID NO: 2939693 - RNA, 15 nt, Human
ugccucaccccuugc

SEQ ID NO: 2939694 - RNA, 11 nt, Human
ugccuccccuc

SEQ ID NO: 2939695 - RNA, 12 nt, Human
ugccuccccucc

SEQ ID NO: 2939696 - RNA, 13 nt, Human
ugccuccccuccu

SEQ ID NO: 2939697 - RNA, 14 nt, Human
ugccuccccuccuc

SEQ ID NO: 2939698 - RNA, 15 nt, Human
ugccuccccuccucu

SEQ ID NO: 2939699 - RNA, 16 nt, Human
ugccuccccuccucug

SEQ ID NO: 2939700 - RNA, 16 nt, Human
ugccucucucaggcca

SEQ ID NO: 2939701 - RNA, 17 nt, Human
ugccucucucaggccaa

SEQ ID NO: 2939702 - RNA, 22 nt, Human
ugccucccaucacccgcuaaga

SEQ ID NO: 2939703 - RNA, 18 nt, Human
ugccucagaaaacaagga

SEQ ID NO: 2939704 - RNA, 21 nt, Human
ugcaaaccaucauugaaaucu

SEQ ID NO: 2939705 - RNA, 21 nt, Human
agcccaggccuccuacagcuu

SEQ ID NO: 2939706 - RNA, 17 nt, Human
agccccaaaacucuccu

SEQ ID NO: 2939707 - RNA, 16 nt, Human
agccccaaaacucucc

SEQ ID NO: 2939708 - RNA, 20 nt, Human
agccccauucugccugccca

SEQ ID NO: 2939709 - RNA, 18 nt, Human
agccccaaaacucuccuc

SEQ ID NO: 2939710 - RNA, 21 nt, Human
agccccauucugccugcccag

SEQ ID NO: 2939711 - RNA, 22 nt, Human
agccccauucugccugcccagg

SEQ ID NO: 2939712 - RNA, 14 nt, Human
agcccugguggcag

SEQ ID NO: 2939713 - RNA, 15 nt, Human
agcccugguggcagu

SEQ ID NO: 2939714 - RNA, 16 nt, Human
agcccugguggcagug

SEQ ID NO: 2939715 - RNA, 21 nt, Human
ugcacacaccagagcccaccu

SEQ ID NO: 2939716 - RNA, 17 nt, Human
ugcacacaccagagccc

SEQ ID NO: 2939717 - RNA, 18 nt, Human
ugcacacaccagagccca

SEQ ID NO: 2939718 - RNA, 22 nt, Human
ugcagccucaaccuccugggcu

SEQ ID NO: 2939719 - RNA, 20 nt, Human
ugcagccucaaccuccuggg

SEQ ID NO: 2939720 - RNA, 21 nt, Human
ugcagccucaaccuccugggc

SEQ ID NO: 2939721 - RNA, 23 nt, Human
agccucugaaaaccaauguucuc

SEQ ID NO: 2939722 - RNA, 22 nt, Human
agccucacagcagugagacugg

SEQ ID NO: 2939723 - RNA, 18 nt, Human
agccucacaguccuuacc

SEQ ID NO: 2939724 - RNA, 17 nt, Human
agccucacaguccuuac

SEQ ID NO: 2939725 - RNA, 14 nt, Human
agccucacagcagu

SEQ ID NO: 2939726 - RNA, 18 nt, Human
agccucacagcagugaga

SEQ ID NO: 2939727 - RNA, 20 nt, Human
agccucaaccuccugggcua

SEQ ID NO: 2939728 - RNA, 19 nt, Human
agccucaaccuccugggcu

SEQ ID NO: 2939729 - RNA, 18 nt, Human
agccgagaucacgccacu

SEQ ID NO: 2939730 - RNA, 21 nt, Human
agcccuuagcagggaaacagc

SEQ ID NO: 2939731 - RNA, 17 nt, Human
agccgagaucacgccac

SEQ ID NO: 2939732 - RNA, 21 nt, Human
agccgagauagccaaggccaa

SEQ ID NO: 2939733 - RNA, 20 nt, Human
agccgagauagccaaggcca

SEQ ID NO: 2939734 - RNA, 16 nt, Human
ugcagacucuacagag

SEQ ID NO: 2939735 - RNA, 17 nt, Human
ugcagacucuacagagg

SEQ ID NO: 2939736 - RNA, 16 nt, Human
agcccuuagcagggaa

SEQ ID NO: 2939737 - RNA, 18 nt, Human
agcccugucuccucucuc

SEQ ID NO: 2939738 - RNA, 11 nt, Human
agcccugucuc

SEQ ID NO: 2939739 - RNA, 19 nt, Human
ugcacuccccugcugggug

SEQ ID NO: 2939740 - RNA, 17 nt, Human
ugcacuccccugcuggg

SEQ ID NO: 2939741 - RNA, 16 nt, Human
ugcacuccccugcugg

SEQ ID NO: 2939742 - RNA, 11 nt, Human
ugcacacauuu

SEQ ID NO: 2939743 - RNA, 12 nt, Human
ugcacacauuuu

SEQ ID NO: 2939744 - RNA, 13 nt, Human
ugcacacauuuuu

SEQ ID NO: 2939745 - RNA, 15 nt, Human
ugcacacauuuuuua

SEQ ID NO: 2939746 - RNA, 22 nt, Human
ugcagacaggcaagcaccuccu

SEQ ID NO: 2939747 - RNA, 15 nt, Human
ugcagaagacaguau

SEQ ID NO: 2939748 - RNA, 14 nt, Human
ugcagaagacagua

SEQ ID NO: 2939749 - RNA, 15 nt, Human
ugauucccugauuua

SEQ ID NO: 2939750 - RNA, 16 nt, Human
ugauucccugauuuaa

SEQ ID NO: 2939751 - RNA, 22 nt, Human
ugauucccaagcucugcuccuc

SEQ ID NO: 2939752 - RNA, 23 nt, Human
ugauucccaagcucugcuccucu

SEQ ID NO: 2939753 - RNA, 21 nt, Human
ugauucauaaugacuuaagca

SEQ ID NO: 2939754 - RNA, 16 nt, Human
ugauucauaaugacuu

SEQ ID NO: 2939755 - RNA, 15 nt, Human
ugauucauaaugacu

SEQ ID NO: 2939756 - RNA, 14 nt, Human
agcccaggaaaggc

SEQ ID NO: 2939757 - RNA, 18 nt, Human
ugauuuccguuaaaauac

SEQ ID NO: 2939758 - RNA, 22 nt, Human
ugauuuccguuaaaauaccagc

SEQ ID NO: 2939759 - RNA, 17 nt, Human
ugauuuagcaggaagcu

SEQ ID NO: 2939760 - RNA, 20 nt, Human
ugauuuagcaggaagcugug

SEQ ID NO: 2939761 - RNA, 17 nt, Human
ugauuuggggauauuuu

SEQ ID NO: 2939762 - RNA, 21 nt, Human
agccaguaaaugggggugcau

SEQ ID NO: 2939763 - RNA, 13 nt, Human
agccaguaaaugg

SEQ ID NO: 2939764 - RNA, 13 nt, Human
agcccacuucugc

SEQ ID NO: 2939765 - RNA, 14 nt, Human
agcccacuucugcc

SEQ ID NO: 2939766 - RNA, 15 nt, Human
agcccacuucugcca

SEQ ID NO: 2939767 - RNA, 18 nt, Human
agccacugcaccgggcca

SEQ ID NO: 2939768 - RNA, 19 nt, Human
agccacugcaccgggccac

SEQ ID NO: 2939769 - RNA, 15 nt, Human
agccagcaguucaga

SEQ ID NO: 2939770 - RNA, 17 nt, Human
agccagcaguucagagc

SEQ ID NO: 2939771 - RNA, 19 nt, Human
agccagcaguucagagcug

SEQ ID NO: 2939772 - RNA, 11 nt, Human
agccagaggag

SEQ ID NO: 2939773 - RNA, 10 nt, Human
agccagagga

SEQ ID NO: 2939774 - RNA, 22 nt, Human
agccagcaguucagagcugccc

SEQ ID NO: 2939775 - RNA, 20 nt, Human
agccagcaguucagagcugc

SEQ ID NO: 2939776 - RNA, 21 nt, Human
agccagcaguucagagcugcc

SEQ ID NO: 2939777 - RNA, 13 nt, Human
ugauggugcaaug

SEQ ID NO: 2939778 - RNA, 15 nt, Human
ugauggugcaaugac

SEQ ID NO: 2939779 - RNA, 19 nt, Human
ugauuaaauucuugcaaag

SEQ ID NO: 2939780 - RNA, 20 nt, Human
ugauuaaauucuugcaaagu

SEQ ID NO: 2939781 - RNA, 18 nt, Human
ugauuaaguaaugauaac

SEQ ID NO: 2939782 - RNA, 19 nt, Human
ugauuaaccacuucagcug

SEQ ID NO: 2939783 - RNA, 16 nt, Human
agccacugcaccgggc

SEQ ID NO: 2939784 - RNA, 23 nt, Human
ugauuaaguaaugauaacuggaa

SEQ ID NO: 2939785 - RNA, 22 nt, Human
ugauccucccaccucagccucc

SEQ ID NO: 2939786 - RNA, 16 nt, Human
ugauccucccaccuca

SEQ ID NO: 2939787 - RNA, 21 nt, Human
ugauccucccaccucagccuc

SEQ ID NO: 2939788 - RNA, 15 nt, Human
ugauccucccaccuc

SEQ ID NO: 2939789 - RNA, 16 nt, Human
ugauccuaguuccacc

SEQ ID NO: 2939790 - RNA, 18 nt, Human
ugaugacauucccugcua

SEQ ID NO: 2939791 - RNA, 15 nt, Human
ugaugacauucccug

SEQ ID NO: 2939792 - RNA, 13 nt, Human
ugaugacuguuuu

SEQ ID NO: 2939793 - RNA, 11 nt, Human
ugaugaagaag

SEQ ID NO: 2939794 - RNA, 12 nt, Human
ugaugaagaagu

SEQ ID NO: 2939795 - RNA, 23 nt, Human
ugaugcuucuucagagacuccug

SEQ ID NO: 2939796 - RNA, 14 nt, Human
ugaugggaaagcau

SEQ ID NO: 2939797 - RNA, 16 nt, Human
ugaugagaggaaauca

SEQ ID NO: 2939798 - RNA, 15 nt, Human
ugaugagaggaaauc

SEQ ID NO: 2939799 - RNA, 14 nt, Human
ugaugagaggaaau

SEQ ID NO: 2939800 - RNA, 13 nt, Human
ugaugagaggaaa

SEQ ID NO: 2939801 - RNA, 19 nt, Human
ugaugggaaagcauuguaa

SEQ ID NO: 2939802 - RNA, 19 nt, Human
ugauggggcccugccuccu

SEQ ID NO: 2939803 - RNA, 16 nt, Human
ugauggggcccugccu

SEQ ID NO: 2939804 - RNA, 15 nt, Human
ugauggggcccugcc

SEQ ID NO: 2939805 - RNA, 14 nt, Human
ugauggggcccugc

SEQ ID NO: 2939806 - RNA, 18 nt, Human
uggacacagcucuucucc

SEQ ID NO: 2939807 - RNA, 15 nt, Human
uggacacagcucuuc

SEQ ID NO: 2939808 - RNA, 16 nt, Human
uggacacagcucuucu

SEQ ID NO: 2939809 - RNA, 13 nt, Human
uggacccugaggc

SEQ ID NO: 2939810 - RNA, 12 nt, Human
uggacccugagg

SEQ ID NO: 2939811 - RNA, 14 nt, Human
uggacccugaggcc

SEQ ID NO: 2939812 - RNA, 19 nt, Human
aggauuuugauccaagcug

SEQ ID NO: 2939813 - RNA, 19 nt, Human
aggaugcccaaagaugcag

SEQ ID NO: 2939814 - RNA, 14 nt, Human
aggaugcccaaaga

SEQ ID NO: 2939815 - RNA, 20 nt, Human
aggaugaucuaggaagacuu

SEQ ID NO: 2939816 - RNA, 14 nt, Human
aggcaaauguuuau

SEQ ID NO: 2939817 - RNA, 17 nt, Human
aggcaacucaucuuagg

SEQ ID NO: 2939818 - RNA, 22 nt, Human
uggaauuucucccagucauuua

SEQ ID NO: 2939819 - RNA, 18 nt, Human
uggaauuggagcucgugg

SEQ ID NO: 2939820 - RNA, 22 nt, Human
uggaaauuagguugaaacauau

SEQ ID NO: 2939821 - RNA, 20 nt, Human
uggaaauauuaagaaagacu

SEQ ID NO: 2939822 - RNA, 23 nt, Human
uggaaaugggcagagcagagacc

SEQ ID NO: 2939823 - RNA, 19 nt, Human
uggaaauuagguugaaaca

SEQ ID NO: 2939824 - RNA, 20 nt, Human
uggaaauuagguugaaacau

SEQ ID NO: 2939825 - RNA, 21 nt, Human
uggaaauuagguugaaacaua

SEQ ID NO: 2939826 - RNA, 17 nt, Human
aggaugaucuaggaaga

SEQ ID NO: 2939827 - RNA, 16 nt, Human
aggaugaucuaggaag

SEQ ID NO: 2939828 - RNA, 18 nt, Human
aggauccugagccagauu

SEQ ID NO: 2939829 - RNA, 17 nt, Human
aggauccugagccagau

SEQ ID NO: 2939830 - RNA, 22 nt, Human
aggaucucuugagccugggagg

SEQ ID NO: 2939831 - RNA, 21 nt, Human
aggaucucuugagccugggag

SEQ ID NO: 2939832 - RNA, 21 nt, Human
aggauacaaaagcaugugaga

SEQ ID NO: 2939833 - RNA, 16 nt, Human
aggauccugagccaga

SEQ ID NO: 2939834 - RNA, 15 nt, Human
aggauccugagccag

SEQ ID NO: 2939835 - RNA, 14 nt, Human
aggaguuuggccag

SEQ ID NO: 2939836 - RNA, 18 nt, Human
aggaguuuggccagaagu

SEQ ID NO: 2939837 - RNA, 17 nt, Human
aggaguuuggccagaag

SEQ ID NO: 2939838 - RNA, 16 nt, Human
aggaguuuggccagaa

SEQ ID NO: 2939839 - RNA, 15 nt, Human
aggaguuuggccaga

SEQ ID NO: 2939840 - RNA, 19 nt, Human
ugcuugggcuucauccucc

SEQ ID NO: 2939841 - RNA, 12 nt, Human
uggaaaggaaug

SEQ ID NO: 2939842 - RNA, 15 nt, Human
uggaaaggaaugcaa

SEQ ID NO: 2939843 - RNA, 21 nt, Human
uggaaaggaaugcaaagauga

SEQ ID NO: 2939844 - RNA, 22 nt, Human
uggaaaggaaugcaaagaugaa

SEQ ID NO: 2939845 - RNA, 15 nt, Human
uggaaauauuaagaa

SEQ ID NO: 2939846 - RNA, 21 nt, Human
ugcuuggaggaaggaaaccca

SEQ ID NO: 2939847 - RNA, 12 nt, Human
ugcuuggcccag

SEQ ID NO: 2939848 - RNA, 16 nt, Human
ugcuuggcccaggagu

SEQ ID NO: 2939849 - RNA, 15 nt, Human
ugcuuggcccaggag

SEQ ID NO: 2939850 - RNA, 23 nt, Human
ugcuuggcccaggaguuuggcca

SEQ ID NO: 2939851 - RNA, 18 nt, Human
ugcuuggcccaggaguuu

SEQ ID NO: 2939852 - RNA, 18 nt, Human
ugcuugcugcugauuuaa

SEQ ID NO: 2939853 - RNA, 16 nt, Human
ugcuugggcuucaucc

SEQ ID NO: 2939854 - RNA, 12 nt, Human
ugcuugggcuuc

SEQ ID NO: 2939855 - RNA, 15 nt, Human
ugcuugccaucccuc

SEQ ID NO: 2939856 - RNA, 16 nt, Human
ugcuugccaucccucc

SEQ ID NO: 2939857 - RNA, 14 nt, Human
aggagcagccacau

SEQ ID NO: 2939858 - RNA, 22 nt, Human
aggagccccgaggccuucucug

SEQ ID NO: 2939859 - RNA, 17 nt, Human
aggagauuggaaggaac

SEQ ID NO: 2939860 - RNA, 23 nt, Human
aggacuuuucuuuguggcuuccu

SEQ ID NO: 2939861 - RNA, 11 nt, Human
aggagaaacug

SEQ ID NO: 2939862 - RNA, 19 nt, Human
aggacugaauuaugaaacu

SEQ ID NO: 2939863 - RNA, 20 nt, Human
aggacugaauuaugaaacuu

SEQ ID NO: 2939864 - RNA, 19 nt, Human
aggacauugcggacagcca

SEQ ID NO: 2939865 - RNA, 23 nt, Human
aggacauugcggacagccacggc

SEQ ID NO: 2939866 - RNA, 15 nt, Human
aggacauugcggaca

SEQ ID NO: 2939867 - RNA, 17 nt, Human
aggacauugcggacagc

SEQ ID NO: 2939868 - RNA, 18 nt, Human
aggacauugcggacagcc

SEQ ID NO: 2939869 - RNA, 15 nt, Human
ugcuguacauacuuu

SEQ ID NO: 2939870 - RNA, 17 nt, Human
ugcuguacauacuuuuu

SEQ ID NO: 2939871 - RNA, 22 nt, Human
ugcuguacauacuuuuuggguu

SEQ ID NO: 2939872 - RNA, 11 nt, Human
ugcuguacaua

SEQ ID NO: 2939873 - RNA, 18 nt, Human
ugcuguaacuuucugaaa

SEQ ID NO: 2939874 - RNA, 23 nt, Human
ugcuguauuuuaaaagaaugauu

SEQ ID NO: 2939875 - RNA, 16 nt, Human
ugcuggcugguuagag

SEQ ID NO: 2939876 - RNA, 12 nt, Human
ugcugcccugug

SEQ ID NO: 2939877 - RNA, 14 nt, Human
ugcugcccugugag

SEQ ID NO: 2939878 - RNA, 13 nt, Human
ugcugcccuguga

SEQ ID NO: 2939879 - RNA, 15 nt, Human
ugcugcccugugagu

SEQ ID NO: 2939880 - RNA, 13 nt, Human
ugcuggagcucug

SEQ ID NO: 2939881 - RNA, 14 nt, Human
ugcuggagcucugc

SEQ ID NO: 2939882 - RNA, 13 nt, Human
ugcuuauacacuu

SEQ ID NO: 2939883 - RNA, 12 nt, Human
ugcuucaaggau

SEQ ID NO: 2939884 - RNA, 13 nt, Human
ugcuucagccucc

SEQ ID NO: 2939885 - RNA, 14 nt, Human
ugcuucagccuccc

SEQ ID NO: 2939886 - RNA, 19 nt, Human
ugcuucaaggauccugagc

SEQ ID NO: 2939887 - RNA, 18 nt, Human
ugcuucaaggauccugag

SEQ ID NO: 2939888 - RNA, 16 nt, Human
ugcuucaaggauccug

SEQ ID NO: 2939889 - RNA, 22 nt, Human
aggacagggaggugaccccagg

SEQ ID NO: 2939890 - RNA, 23 nt, Human
aggacagcccuucuuuccacaga

SEQ ID NO: 2939891 - RNA, 23 nt, Human
aggacacuaaccacgcuggaccu

SEQ ID NO: 2939892 - RNA, 19 nt, Human
aggacacuaaccacgcugg

SEQ ID NO: 2939893 - RNA, 14 nt, Human
aggacacugauaug

SEQ ID NO: 2939894 - RNA, 21 nt, Human
ugcucugcugacagacacagg

SEQ ID NO: 2939895 - RNA, 22 nt, Human
ugcucugcugacagacacaggc

SEQ ID NO: 2939896 - RNA, 16 nt, Human
ugcucugcugacagac

SEQ ID NO: 2939897 - RNA, 14 nt, Human
ugcugagucugaag

SEQ ID NO: 2939898 - RNA, 15 nt, Human
ugcugagucugaagg

SEQ ID NO: 2939899 - RNA, 13 nt, Human
ugcuccagccugg

SEQ ID NO: 2939900 - RNA, 19 nt, Human
ugcuccagcuguucagcug

SEQ ID NO: 2939901 - RNA, 16 nt, Human
ugcuccagcuguucag

SEQ ID NO: 2939902 - RNA, 18 nt, Human
ugcucccaccuggcucug

SEQ ID NO: 2939903 - RNA, 17 nt, Human
ugcucccaccuggcucu

SEQ ID NO: 2939904 - RNA, 19 nt, Human
agcugggacuacaggcacc

SEQ ID NO: 2939905 - RNA, 16 nt, Human
agcugggacuacaggc

SEQ ID NO: 2939906 - RNA, 18 nt, Human
agcugggacuacaggcac

SEQ ID NO: 2939907 - RNA, 22 nt, Human
aggaagcacaugccucucucag

SEQ ID NO: 2939908 - RNA, 15 nt, Human
aggaagccagcaggc

SEQ ID NO: 2939909 - RNA, 14 nt, Human
aggaagccagcagg

SEQ ID NO: 2939910 - RNA, 24 nt, Human
aggaagcacaugccucucucaggc

SEQ ID NO: 2939911 - RNA, 23 nt, Human
aggaagcacaugccucucucagg

SEQ ID NO: 2939912 - RNA, 14 nt, Human
aggaagacuuugga

SEQ ID NO: 2939913 - RNA, 13 nt, Human
aggaagacuuugg

SEQ ID NO: 2939914 - RNA, 19 nt, Human
aggaagacuucaucccucu

SEQ ID NO: 2939915 - RNA, 13 nt, Human
aggaagacuucau

SEQ ID NO: 2939916 - RNA, 23 nt, Human
ugcugagucugaaggcuggguuc

SEQ ID NO: 2939917 - RNA, 22 nt, Human
ugcugagucugaaggcuggguu

SEQ ID NO: 2939918 - RNA, 21 nt, Human
ugcugagucugaaggcugggu

SEQ ID NO: 2939919 - RNA, 18 nt, Human
ugcugagucugaaggcug

SEQ ID NO: 2939920 - RNA, 17 nt, Human
ugcugagucugaaggcu

SEQ ID NO: 2939921 - RNA, 16 nt, Human
ugcugagucugaaggc

SEQ ID NO: 2939922 - RNA, 15 nt, Human
aggaaggagaggaga

SEQ ID NO: 2939923 - RNA, 19 nt, Human
aggaaggaaacccagcucu

SEQ ID NO: 2939924 - RNA, 18 nt, Human
aggaagcugugagagcag

SEQ ID NO: 2939925 - RNA, 17 nt, Human
aggaagcuuacaugccu

SEQ ID NO: 2939926 - RNA, 18 nt, Human
aggaaggaaacccagcuc

SEQ ID NO: 2939927 - RNA, 13 nt, Human
aggaagccagcag

SEQ ID NO: 2939928 - RNA, 17 nt, Human
aggaagccagcaggcuc

SEQ ID NO: 2939929 - RNA, 23 nt, Human
aggaauugacccacaagaaauga

SEQ ID NO: 2939930 - RNA, 11 nt, Human
aggaauuuaaa

SEQ ID NO: 2939931 - RNA, 20 nt, Human
ugggaaagggauuuucagcc

SEQ ID NO: 2939932 - RNA, 16 nt, Human
ugggaaaggggaaguu

SEQ ID NO: 2939933 - RNA, 21 nt, Human
ugggaaagcauuguaaaugug

SEQ ID NO: 2939934 - RNA, 23 nt, Human
uggcuucacggaagagccuugcg

SEQ ID NO: 2939935 - RNA, 22 nt, Human
uggcuucacggaagagccuugc

SEQ ID NO: 2939936 - RNA, 13 nt, Human
uggcuguuggcug

SEQ ID NO: 2939937 - RNA, 14 nt, Human
uggcugugucuccc

SEQ ID NO: 2939938 - RNA, 15 nt, Human
uggcuguuggcuggg

SEQ ID NO: 2939939 - RNA, 17 nt, Human
uggcuuaaaacaacacu

SEQ ID NO: 2939940 - RNA, 22 nt, Human
uggcuauuagagaucaaccccu

SEQ ID NO: 2939941 - RNA, 19 nt, Human
uggcuaugcauuugaaaau

SEQ ID NO: 2939942 - RNA, 15 nt, Human
uggcuaugcauuuga

SEQ ID NO: 2939943 - RNA, 17 nt, Human
uggcuaugcauuugaaa

SEQ ID NO: 2939944 - RNA, 14 nt, Human
uggcuaugcauuug

SEQ ID NO: 2939945 - RNA, 19 nt, Human
aggcuggcuuucagaguag

SEQ ID NO: 2939946 - RNA, 14 nt, Human
aggcugggagagcc

SEQ ID NO: 2939947 - RNA, 22 nt, Human
uggcuagagguucaaagauauu

SEQ ID NO: 2939948 - RNA, 17 nt, Human
aggcuggcuuucagagu

SEQ ID NO: 2939949 - RNA, 18 nt, Human
aggcuggcgugcaguggu

SEQ ID NO: 2939950 - RNA, 20 nt, Human
aggcuggcgugcaguggugc

SEQ ID NO: 2939951 - RNA, 12 nt, Human
uggcugcaaagg

SEQ ID NO: 2939952 - RNA, 18 nt, Human
uggcucaaguccucuuuu

SEQ ID NO: 2939953 - RNA, 19 nt, Human
uggcucuuccaggcuggga

SEQ ID NO: 2939954 - RNA, 21 nt, Human
uggcucuuccaggcugggaga

SEQ ID NO: 2939955 - RNA, 20 nt, Human
uggcucuuccaggcugggag

SEQ ID NO: 2939956 - RNA, 15 nt, Human
uggcugcagggaguc

SEQ ID NO: 2939957 - RNA, 13 nt, Human
uggcugcagggag

SEQ ID NO: 2939958 - RNA, 14 nt, Human
uggcugcagggagu

SEQ ID NO: 2939959 - RNA, 20 nt, Human
uggcugccaaugggagcuca

SEQ ID NO: 2939960 - RNA, 18 nt, Human
uggcugccaaugggagcu

SEQ ID NO: 2939961 - RNA, 13 nt, Human
aggcuggcgugca

SEQ ID NO: 2939962 - RNA, 17 nt, Human
aggcuggcgugcagugg

SEQ ID NO: 2939963 - RNA, 16 nt, Human
aggcucugcccuuggu

SEQ ID NO: 2939964 - RNA, 21 nt, Human
aggcucucaggccagcugcuu

SEQ ID NO: 2939965 - RNA, 11 nt, Human
aggcucugccc

SEQ ID NO: 2939966 - RNA, 12 nt, Human
aggcucugcccu

SEQ ID NO: 2939967 - RNA, 13 nt, Human
aggcucugcccuu

SEQ ID NO: 2939968 - RNA, 15 nt, Human
aggcucugcccuugg

SEQ ID NO: 2939969 - RNA, 14 nt, Human
aggcucugcccuug

SEQ ID NO: 2939970 - RNA, 20 nt, Human
aggcucucaggccagcugcu

SEQ ID NO: 2939971 - RNA, 19 nt, Human
aggcucucaggccagcugc

SEQ ID NO: 2939972 - RNA, 18 nt, Human
aggcucucaggccagcug

SEQ ID NO: 2939973 - RNA, 16 nt, Human
aggcucucaggccagc

SEQ ID NO: 2939974 - RNA, 15 nt, Human
aggcucucaggccag

SEQ ID NO: 2939975 - RNA, 14 nt, Human
aggcucucaggcca

SEQ ID NO: 2939976 - RNA, 12 nt, Human
aggcucucaggc

SEQ ID NO: 2939977 - RNA, 11 nt, Human
aggcucucagg

SEQ ID NO: 2939978 - RNA, 21 nt, Human
aggcucgagcaugccuggaug

SEQ ID NO: 2939979 - RNA, 19 nt, Human
aggcucgagcaugccugga

SEQ ID NO: 2939980 - RNA, 18 nt, Human
aggcucgagcaugccugg

SEQ ID NO: 2939981 - RNA, 17 nt, Human
aggcucgagcaugccug

SEQ ID NO: 2939982 - RNA, 15 nt, Human
aggcucgagcaugcc

SEQ ID NO: 2939983 - RNA, 19 nt, Human
aggcuccuuuagcgcccag

SEQ ID NO: 2939984 - RNA, 12 nt, Human
aggcucgagcau

SEQ ID NO: 2939985 - RNA, 21 nt, Human
uggccccugcccggcugcgga

SEQ ID NO: 2939986 - RNA, 20 nt, Human
uggccccugcccggcugcgg

SEQ ID NO: 2939987 - RNA, 22 nt, Human
aggccuggccagaugcaccagc

SEQ ID NO: 2939988 - RNA, 23 nt, Human
aggccuggccagaugcaccagcc

SEQ ID NO: 2939989 - RNA, 23 nt, Human
aggccugggggcugggcagagga

SEQ ID NO: 2939990 - RNA, 15 nt, Human
aggccuggccagaug

SEQ ID NO: 2939991 - RNA, 16 nt, Human
aggccuggccagaugc

SEQ ID NO: 2939992 - RNA, 17 nt, Human
aggccuggccagaugca

SEQ ID NO: 2939993 - RNA, 21 nt, Human
aggccuggccagaugcaccag

SEQ ID NO: 2939994 - RNA, 13 nt, Human
uggccucugcacu

SEQ ID NO: 2939995 - RNA, 17 nt, Human
uggccucugcacucccc

SEQ ID NO: 2939996 - RNA, 15 nt, Human
uggccucugcacucc

SEQ ID NO: 2939997 - RNA, 14 nt, Human
uggccucugcacuc

SEQ ID NO: 2939998 - RNA, 15 nt, Human
uggccaggcuggucu

SEQ ID NO: 2939999 - RNA, 17 nt, Human
uggccaggcuggucuca

SEQ ID NO: 2940000 - RNA, 15 nt, Human
uggcaugggaaugaa

SEQ ID NO: 2940001 - RNA, 12 nt, Human
uggcaugggaau

SEQ ID NO: 2940002 - RNA, 15 nt, Human
aggcccucugcccac

SEQ ID NO: 2940003 - RNA, 14 nt, Human
aggcccucugccca

SEQ ID NO: 2940004 - RNA, 13 nt, Human
aggcccucugccc

SEQ ID NO: 2940005 - RNA, 12 nt, Human
uggcagccccug

SEQ ID NO: 2940006 - RNA, 20 nt, Human
aggccacaagacccuugugg

SEQ ID NO: 2940007 - RNA, 12 nt, Human
aggccagagaca

SEQ ID NO: 2940008 - RNA, 22 nt, Human
uggcagaguugaagacagagcu

SEQ ID NO: 2940009 - RNA, 15 nt, Human
uggcacccggccccu

SEQ ID NO: 2940010 - RNA, 16 nt, Human
uggcacccggccccug

SEQ ID NO: 2940011 - RNA, 21 nt, Human
uggcagaguugaagacagagc

SEQ ID NO: 2940012 - RNA, 12 nt, Human
uggauguucuga

SEQ ID NO: 2940013 - RNA, 20 nt, Human
uggcacaguuuucugagaaa

SEQ ID NO: 2940014 - RNA, 22 nt, Human
uggauuaaacuuaaucuaaaug

SEQ ID NO: 2940015 - RNA, 22 nt, Human
uggcacaguuuucugagaaaga

SEQ ID NO: 2940016 - RNA, 20 nt, Human
uggcacaucagcacgauuuc

SEQ ID NO: 2940017 - RNA, 18 nt, Human
uggcaccagcagccugga

SEQ ID NO: 2940018 - RNA, 22 nt, Human
uggaguuauugaagcagagugg

SEQ ID NO: 2940019 - RNA, 15 nt, Human
aggccacaagacccu

SEQ ID NO: 2940020 - RNA, 15 nt, Human
uggaugccugguggc

SEQ ID NO: 2940021 - RNA, 20 nt, Human
uggaguucaucuugaauugu

SEQ ID NO: 2940022 - RNA, 17 nt, Human
uggaguucaucuugaau

SEQ ID NO: 2940023 - RNA, 16 nt, Human
uggaguucaucuugaa

SEQ ID NO: 2940024 - RNA, 18 nt, Human
uggaugccugguggcagc

SEQ ID NO: 2940025 - RNA, 19 nt, Human
uggaugccugguggcagcu

SEQ ID NO: 2940026 - RNA, 18 nt, Human
aggccaaggugggaggau

SEQ ID NO: 2940027 - RNA, 20 nt, Human
aggccaaaggaagcacaugc

SEQ ID NO: 2940028 - RNA, 23 nt, Human
aggccaaaggaagcacaugccuc

SEQ ID NO: 2940029 - RNA, 20 nt, Human
aggccaaacucaccugcccc

SEQ ID NO: 2940030 - RNA, 14 nt, Human
aggccaaaggaagc

SEQ ID NO: 2940031 - RNA, 18 nt, Human
aggcauuuguuugaacug

SEQ ID NO: 2940032 - RNA, 16 nt, Human
aggccaaacucaccug

SEQ ID NO: 2940033 - RNA, 18 nt, Human
uggacgagaaaacaauaa

SEQ ID NO: 2940034 - RNA, 18 nt, Human
auccuggcccagggcauc

SEQ ID NO: 2940035 - RNA, 21 nt, Human
auccuggcccagggcaucugg

SEQ ID NO: 2940036 - RNA, 23 nt, Human
auccuggacugagggggccugga

SEQ ID NO: 2940037 - RNA, 17 nt, Human
auccuggcccagggcau

SEQ ID NO: 2940038 - RNA, 22 nt, Human
auccuggcacccggccccugcu

SEQ ID NO: 2940039 - RNA, 23 nt, Human
auccuggcacccggccccugcug

SEQ ID NO: 2940040 - RNA, 16 nt, Human
auccuggacugagggg

SEQ ID NO: 2940041 - RNA, 15 nt, Human
auccuggaguucugg

SEQ ID NO: 2940042 - RNA, 17 nt, Human
auccuggcacccggccc

SEQ ID NO: 2940043 - RNA, 19 nt, Human
auccuggcacccggccccu

SEQ ID NO: 2940044 - RNA, 20 nt, Human
auccuggcacccggccccug

SEQ ID NO: 2940045 - RNA, 21 nt, Human
auccuggcacccggccccugc

SEQ ID NO: 2940046 - RNA, 11 nt, Human
auccugagcca

SEQ ID NO: 2940047 - RNA, 13 nt, Human
auccugagccaga

SEQ ID NO: 2940048 - RNA, 12 nt, Human
auccugagccag

SEQ ID NO: 2940049 - RNA, 17 nt, Human
auccucuuugagugaag

SEQ ID NO: 2940050 - RNA, 20 nt, Human
uucuuuugccguuauuaaaa

SEQ ID NO: 2940051 - RNA, 13 nt, Human
auccucuguugau

SEQ ID NO: 2940052 - RNA, 20 nt, Human
auccucuguacagagcccac

SEQ ID NO: 2940053 - RNA, 18 nt, Human
auccucuguacagagccc

SEQ ID NO: 2940054 - RNA, 13 nt, Human
auccugccccuga

SEQ ID NO: 2940055 - RNA, 22 nt, Human
auccugaggcuccacuuggucu

SEQ ID NO: 2940056 - RNA, 16 nt, Human
auccugcaauuccacu

SEQ ID NO: 2940057 - RNA, 11 nt, Human
auccugaggcu

SEQ ID NO: 2940058 - RNA, 13 nt, Human
auccugaggcucc

SEQ ID NO: 2940059 - RNA, 16 nt, Human
auccugaggcuccacu

SEQ ID NO: 2940060 - RNA, 18 nt, Human
auccugaggcuccacuug

SEQ ID NO: 2940061 - RNA, 21 nt, Human
auccugagccagauuucacuc

SEQ ID NO: 2940062 - RNA, 17 nt, Human
auccugagccagauuuc

SEQ ID NO: 2940063 - RNA, 15 nt, Human
auccugagccagauu

SEQ ID NO: 2940064 - RNA, 14 nt, Human
auccugagccagau

SEQ ID NO: 2940065 - RNA, 15 nt, Human
aucuaaauguugaaa

SEQ ID NO: 2940066 - RNA, 19 nt, Human
aucuaaauggaaccacucu

SEQ ID NO: 2940067 - RNA, 14 nt, Human
aucgugacaacacu

SEQ ID NO: 2940068 - RNA, 15 nt, Human
aucgugacaacacuu

SEQ ID NO: 2940069 - RNA, 18 nt, Human
aucgucacugcuuaacuu

SEQ ID NO: 2940070 - RNA, 14 nt, Human
aucgucacugcuua

SEQ ID NO: 2940071 - RNA, 15 nt, Human
uugaagguagaaugu

SEQ ID NO: 2940072 - RNA, 19 nt, Human
uugaagguagaauguuuuc

SEQ ID NO: 2940073 - RNA, 16 nt, Human
uugaagguagaauguu

SEQ ID NO: 2940074 - RNA, 14 nt, Human
uugaaguaaaaugu

SEQ ID NO: 2940075 - RNA, 16 nt, Human
uugaaggaugcugucu

SEQ ID NO: 2940076 - RNA, 14 nt, Human
uugaaggaugcugu

SEQ ID NO: 2940077 - RNA, 17 nt, Human
uugacacuuaaaaaugg

SEQ ID NO: 2940078 - RNA, 24 nt, Human
uugaccauucuccaccugccaggg

SEQ ID NO: 2940079 - RNA, 17 nt, Human
uugaccauucuccaccu

SEQ ID NO: 2940080 - RNA, 19 nt, Human
uugaccauucuccaccugc

SEQ ID NO: 2940081 - RNA, 18 nt, Human
uugaccauucuccaccug

SEQ ID NO: 2940082 - RNA, 19 nt, Human
uugacagggcacaccgggc

SEQ ID NO: 2940083 - RNA, 19 nt, Human
uugacacuuaaaaaugguu

SEQ ID NO: 2940084 - RNA, 12 nt, Human
uugauaaaguaa

SEQ ID NO: 2940085 - RNA, 15 nt, Human
uugaggucuguucuu

SEQ ID NO: 2940086 - RNA, 16 nt, Human
uugaggucuguucuuu

SEQ ID NO: 2940087 - RNA, 17 nt, Human
uucuguuuuauaauuuu

SEQ ID NO: 2940088 - RNA, 16 nt, Human
uucuguuuuauaauuu

SEQ ID NO: 2940089 - RNA, 21 nt, Human
uucuguuggccagugugacaa

SEQ ID NO: 2940090 - RNA, 13 nt, Human
uucuguuuagaua

SEQ ID NO: 2940091 - RNA, 18 nt, Human
uucuguuuagauaauaca

SEQ ID NO: 2940092 - RNA, 22 nt, Human
uucuucuccacuuucuagccag

SEQ ID NO: 2940093 - RNA, 12 nt, Human
uucuuucuggcu

SEQ ID NO: 2940094 - RNA, 17 nt, Human
uucuuucuggcuaugca

SEQ ID NO: 2940095 - RNA, 20 nt, Human
uucuuucuggcuaugcauuu

SEQ ID NO: 2940096 - RNA, 16 nt, Human
auccaauugcugcuug

SEQ ID NO: 2940097 - RNA, 15 nt, Human
uucugccugcccagg

SEQ ID NO: 2940098 - RNA, 16 nt, Human
uucugccugcccaggc

SEQ ID NO: 2940099 - RNA, 17 nt, Human
auccagguucagcuugu

SEQ ID NO: 2940100 - RNA, 14 nt, Human
auccaguaucuuga

SEQ ID NO: 2940101 - RNA, 11 nt, Human
aucccagcccc

SEQ ID NO: 2940102 - RNA, 13 nt, Human
aucccaugagccu

SEQ ID NO: 2940103 - RNA, 16 nt, Human
aucccaugagccucag

SEQ ID NO: 2940104 - RNA, 22 nt, Human
aucccugaaggccccgcccagg

SEQ ID NO: 2940105 - RNA, 20 nt, Human
aucccucccuccaccucccu

SEQ ID NO: 2940106 - RNA, 17 nt, Human
aucccugaaggccccgc

SEQ ID NO: 2940107 - RNA, 17 nt, Human
aucccaugagccucagc

SEQ ID NO: 2940108 - RNA, 18 nt, Human
aucccaugagccucagca

SEQ ID NO: 2940109 - RNA, 14 nt, Human
aucccucccuccac

SEQ ID NO: 2940110 - RNA, 16 nt, Human
aucccucccuccaccu

SEQ ID NO: 2940111 - RNA, 17 nt, Human
aucccucccuccaccuc

SEQ ID NO: 2940112 - RNA, 18 nt, Human
aucccucccuccaccucc

SEQ ID NO: 2940113 - RNA, 14 nt, Human
aucaggugcugcca

SEQ ID NO: 2940114 - RNA, 19 nt, Human
aucagucugauucccaagc

SEQ ID NO: 2940115 - RNA, 14 nt, Human
aucacuuccaugac

SEQ ID NO: 2940116 - RNA, 17 nt, Human
aucaggugcugccaucc

SEQ ID NO: 2940117 - RNA, 19 nt, Human
aucaggugcugccauccag

SEQ ID NO: 2940118 - RNA, 15 nt, Human
aucaggugcugccau

SEQ ID NO: 2940119 - RNA, 23 nt, Human
aucacuugaacccgggaggcaga

SEQ ID NO: 2940120 - RNA, 23 nt, Human
aucauaguggcuuaaaacaacac

SEQ ID NO: 2940121 - RNA, 15 nt, Human
aucauaaaacuugau

SEQ ID NO: 2940122 - RNA, 16 nt, Human
aucauuaggugugacu

SEQ ID NO: 2940123 - RNA, 21 nt, Human
aucauccacugugccaugugc

SEQ ID NO: 2940124 - RNA, 23 nt, Human
aucauccacugugccaugugcca

SEQ ID NO: 2940125 - RNA, 20 nt, Human
uucucuaguuugauuaaauu

SEQ ID NO: 2940126 - RNA, 21 nt, Human
uucucuaguuugauuaaauuc

SEQ ID NO: 2940127 - RNA, 14 nt, Human
uucucucaucuguu

SEQ ID NO: 2940128 - RNA, 19 nt, Human
uucugcagccacuauuguu

SEQ ID NO: 2940129 - RNA, 12 nt, Human
aucauugaaauc

SEQ ID NO: 2940130 - RNA, 13 nt, Human
aucauugaaaucu

SEQ ID NO: 2940131 - RNA, 14 nt, Human
auauuguuugcuaa

SEQ ID NO: 2940132 - RNA, 13 nt, Human
auauuguuuucag

SEQ ID NO: 2940133 - RNA, 13 nt, Human
auauuuaaucuuu

SEQ ID NO: 2940134 - RNA, 13 nt, Human
auauuuacaaaug

SEQ ID NO: 2940135 - RNA, 15 nt, Human
auauugauaugcuua

SEQ ID NO: 2940136 - RNA, 18 nt, Human
auauucucacagcuccaa

SEQ ID NO: 2940137 - RNA, 20 nt, Human
auauugguugggaugacuug

SEQ ID NO: 2940138 - RNA, 19 nt, Human
auauugguugggaugacuu

SEQ ID NO: 2940139 - RNA, 22 nt, Human
auauugcugauggugcaaugac

SEQ ID NO: 2940140 - RNA, 16 nt, Human
uuccagugaggcucug

SEQ ID NO: 2940141 - RNA, 15 nt, Human
uuccagugaggcucu

SEQ ID NO: 2940142 - RNA, 17 nt, Human
auauuaccacagacaua

SEQ ID NO: 2940143 - RNA, 16 nt, Human
auauuaagaaagacua

SEQ ID NO: 2940144 - RNA, 15 nt, Human
auauuaagaaagacu

SEQ ID NO: 2940145 - RNA, 17 nt, Human
auauuaagaaagacuau

SEQ ID NO: 2940146 - RNA, 22 nt, Human
auauuaagaaagacuaucuaaa

SEQ ID NO: 2940147 - RNA, 22 nt, Human
uuccuguuuuuauuauuaacaa

SEQ ID NO: 2940148 - RNA, 22 nt, Human
uuccuggcacugcuuccaguga

SEQ ID NO: 2940149 - RNA, 20 nt, Human
uuccuggcacugcuuccagu

SEQ ID NO: 2940150 - RNA, 12 nt, Human
uuccugaacagg

SEQ ID NO: 2940151 - RNA, 19 nt, Human
uuccuggcacugcuuccag

SEQ ID NO: 2940152 - RNA, 22 nt, Human
uuccucuuuuuauuuaguuccu

SEQ ID NO: 2940153 - RNA, 15 nt, Human
aucaaauaugcaaag

SEQ ID NO: 2940154 - RNA, 15 nt, Human
auauuuuuuaaaaua

SEQ ID NO: 2940155 - RNA, 17 nt, Human
auauuuuuuaaaauaag

SEQ ID NO: 2940156 - RNA, 21 nt, Human
aucaacugcaucaagauguga

SEQ ID NO: 2940157 - RNA, 16 nt, Human
aucaaggguacacugc

SEQ ID NO: 2940158 - RNA, 23 nt, Human
auauuuuuuaaaauaagucugau

SEQ ID NO: 2940159 - RNA, 18 nt, Human
aucaaauaugcaaagcac

SEQ ID NO: 2940160 - RNA, 17 nt, Human
aucaaauaugcaaagca

SEQ ID NO: 2940161 - RNA, 16 nt, Human
aucaaauaugcaaagc

SEQ ID NO: 2940162 - RNA, 21 nt, Human
aucaaggguacacugccuucu

SEQ ID NO: 2940163 - RNA, 13 nt, Human
aucaauuuaaaaa

SEQ ID NO: 2940164 - RNA, 14 nt, Human
aucacgccacugca

SEQ ID NO: 2940165 - RNA, 15 nt, Human
aucacgccacugcac

SEQ ID NO: 2940166 - RNA, 17 nt, Human
aucacgccacugcacua

SEQ ID NO: 2940167 - RNA, 14 nt, Human
aucaauuuuucuua

SEQ ID NO: 2940168 - RNA, 14 nt, Human
uucaggguuggccc

SEQ ID NO: 2940169 - RNA, 16 nt, Human
uucaggguuggccccu

SEQ ID NO: 2940170 - RNA, 17 nt, Human
uucaggguuggccccug

SEQ ID NO: 2940171 - RNA, 19 nt, Human
uucaggguuggccccugcc

SEQ ID NO: 2940172 - RNA, 22 nt, Human
uucaggguuggccccugcccgg

SEQ ID NO: 2940173 - RNA, 15 nt, Human
uucagguaacaggca

SEQ ID NO: 2940174 - RNA, 16 nt, Human
uucagguaacaggcag

SEQ ID NO: 2940175 - RNA, 17 nt, Human
uucagcgguuuauauaa

SEQ ID NO: 2940176 - RNA, 16 nt, Human
uucagaaauguguuau

SEQ ID NO: 2940177 - RNA, 16 nt, Human
uucagauaugauucaa

SEQ ID NO: 2940178 - RNA, 17 nt, Human
uucagauaugauucaaa

SEQ ID NO: 2940179 - RNA, 18 nt, Human
uucagauaugauucaaau

SEQ ID NO: 2940180 - RNA, 19 nt, Human
uucagauaugauucaaaug

SEQ ID NO: 2940181 - RNA, 15 nt, Human
uucaucaaugaauga

SEQ ID NO: 2940182 - RNA, 13 nt, Human
auauaugcuaagu

SEQ ID NO: 2940183 - RNA, 21 nt, Human
auauauguuuuaagaggcagg

SEQ ID NO: 2940184 - RNA, 22 nt, Human
auauauguuuuaagaggcaggg

SEQ ID NO: 2940185 - RNA, 17 nt, Human
uucagguaacaggcaga

SEQ ID NO: 2940186 - RNA, 14 nt, Human
uucaguaagccgug

SEQ ID NO: 2940187 - RNA, 21 nt, Human
uuccacaagagcccaggccuc

SEQ ID NO: 2940188 - RNA, 17 nt, Human
uuccaggcugggagagc

SEQ ID NO: 2940189 - RNA, 15 nt, Human
uuccaggcugggaga

SEQ ID NO: 2940190 - RNA, 13 nt, Human
uuccaggcuggga

SEQ ID NO: 2940191 - RNA, 16 nt, Human
uuccaguaaugagcuu

SEQ ID NO: 2940192 - RNA, 17 nt, Human
uuccagguuuaagcugu

SEQ ID NO: 2940193 - RNA, 18 nt, Human
uuccagguuuaagcuguu

SEQ ID NO: 2940194 - RNA, 22 nt, Human
uuccaauuuacauacucugcuu

SEQ ID NO: 2940195 - RNA, 19 nt, Human
uucauucuuuuugaaaugu

SEQ ID NO: 2940196 - RNA, 14 nt, Human
uucauuaguuuuga

SEQ ID NO: 2940197 - RNA, 19 nt, Human
uucauuaguuuugaagauu

SEQ ID NO: 2940198 - RNA, 14 nt, Human
uucauuaucucaaa

SEQ ID NO: 2940199 - RNA, 14 nt, Human
auaugcaaagcacu

SEQ ID NO: 2940200 - RNA, 13 nt, Human
auaugcaaagcac

SEQ ID NO: 2940201 - RNA, 20 nt, Human
uucaugcuguucaugaaaga

SEQ ID NO: 2940202 - RNA, 22 nt, Human
uucaugcuguucaugaaagauu

SEQ ID NO: 2940203 - RNA, 16 nt, Human
auauguagauguaugc

SEQ ID NO: 2940204 - RNA, 18 nt, Human
auauguagauguaugcac

SEQ ID NO: 2940205 - RNA, 20 nt, Human
auauguagauguaugcacac

SEQ ID NO: 2940206 - RNA, 23 nt, Human
auauguagauguaugcacacaca

SEQ ID NO: 2940207 - RNA, 21 nt, Human
auauguggaguucaucuugaa

SEQ ID NO: 2940208 - RNA, 20 nt, Human
auauguggaguucaucuuga

SEQ ID NO: 2940209 - RNA, 16 nt, Human
auauggguaguauuuu

SEQ ID NO: 2940210 - RNA, 23 nt, Human
auauguaccuaacgaaguauccu

SEQ ID NO: 2940211 - RNA, 22 nt, Human
uuucgcaggauucuuccucccu

SEQ ID NO: 2940212 - RNA, 18 nt, Human
uuucgcaggauucuuccu

SEQ ID NO: 2940213 - RNA, 23 nt, Human
uuuccuucauucaacccaccugc

SEQ ID NO: 2940214 - RNA, 21 nt, Human
uuuccuucagugccuuaugga

SEQ ID NO: 2940215 - RNA, 18 nt, Human
uuuccuucagugccuuau

SEQ ID NO: 2940216 - RNA, 22 nt, Human
uuuccuucagugccuuauggaa

SEQ ID NO: 2940217 - RNA, 21 nt, Human
uuuccuucauucaacccaccu

SEQ ID NO: 2940218 - RNA, 22 nt, Human
augggccaccgccuugcccagc

SEQ ID NO: 2940219 - RNA, 17 nt, Human
augggccuccugugugu

SEQ ID NO: 2940220 - RNA, 12 nt, Human
uuuccugugucu

SEQ ID NO: 2940221 - RNA, 15 nt, Human
uuuccuucagugccu

SEQ ID NO: 2940222 - RNA, 12 nt, Human
uuuccuucagug

SEQ ID NO: 2940223 - RNA, 11 nt, Human
uuuccuucagu

SEQ ID NO: 2940224 - RNA, 20 nt, Human
uuuccuucaagaaugcagua

SEQ ID NO: 2940225 - RNA, 13 nt, Human
augggagcucaug

SEQ ID NO: 2940226 - RNA, 18 nt, Human
augggcaacccccagccu

SEQ ID NO: 2940227 - RNA, 19 nt, Human
augggcaacccccagccug

SEQ ID NO: 2940228 - RNA, 21 nt, Human
augggcaacccccagccugcu

SEQ ID NO: 2940229 - RNA, 17 nt, Human
augggccaccgccuugc

SEQ ID NO: 2940230 - RNA, 18 nt, Human
augggccaccgccuugcc

SEQ ID NO: 2940231 - RNA, 15 nt, Human
augggccuccugugu

SEQ ID NO: 2940232 - RNA, 15 nt, Human
augggcagagcagag

SEQ ID NO: 2940233 - RNA, 14 nt, Human
augggcagagcaga

SEQ ID NO: 2940234 - RNA, 13 nt, Human
augggcagagcag

SEQ ID NO: 2940235 - RNA, 21 nt, Human
auggacccaauauuuaccaga

SEQ ID NO: 2940236 - RNA, 19 nt, Human
auggacaugaucuucuuua

SEQ ID NO: 2940237 - RNA, 17 nt, Human
auggaauuucucccagu

SEQ ID NO: 2940238 - RNA, 21 nt, Human
auggcuauaggugcuacaaaa

SEQ ID NO: 2940239 - RNA, 22 nt, Human
augggacauuugcucauggaau

SEQ ID NO: 2940240 - RNA, 21 nt, Human
augggacauuugcucauggaa

SEQ ID NO: 2940241 - RNA, 19 nt, Human
auggcuauaggugcuacaa

SEQ ID NO: 2940242 - RNA, 16 nt, Human
auggcuauaggugcua

SEQ ID NO: 2940243 - RNA, 18 nt, Human
auggccucuucagaucuc

SEQ ID NO: 2940244 - RNA, 22 nt, Human
uuucuaggacugaauuaugaaa

SEQ ID NO: 2940245 - RNA, 21 nt, Human
uuucuaggacugaauuaugaa

SEQ ID NO: 2940246 - RNA, 17 nt, Human
uuucuaggacugaauua

SEQ ID NO: 2940247 - RNA, 15 nt, Human
uuucuaugacacaug

SEQ ID NO: 2940248 - RNA, 21 nt, Human
uuucuaugacacaugcaaggu

SEQ ID NO: 2940249 - RNA, 13 nt, Human
uuucuaugaaaua

SEQ ID NO: 2940250 - RNA, 14 nt, Human
uuucuaugaaauau

SEQ ID NO: 2940251 - RNA, 20 nt, Human
uuucuaugaaauauuauguu

SEQ ID NO: 2940252 - RNA, 18 nt, Human
uuucucacagaagaugaa

SEQ ID NO: 2940253 - RNA, 22 nt, Human
uuucucacagaagaugaagcac

SEQ ID NO: 2940254 - RNA, 16 nt, Human
uuucugccgcagcccu

SEQ ID NO: 2940255 - RNA, 14 nt, Human
uuucugccgcagcc

SEQ ID NO: 2940256 - RNA, 15 nt, Human
uuucucauguugaaa

SEQ ID NO: 2940257 - RNA, 13 nt, Human
uuucucauguuga

SEQ ID NO: 2940258 - RNA, 14 nt, Human
uuucugcaucagcu

SEQ ID NO: 2940259 - RNA, 13 nt, Human
uuucuuuguggcu

SEQ ID NO: 2940260 - RNA, 23 nt, Human
uuugaaacacugguuuuaaauau

SEQ ID NO: 2940261 - RNA, 13 nt, Human
auggggcccugcc

SEQ ID NO: 2940262 - RNA, 14 nt, Human
auggggcccugccu

SEQ ID NO: 2940263 - RNA, 23 nt, Human
augggcuggguucuacccaggug

SEQ ID NO: 2940264 - RNA, 14 nt, Human
uuugaaauauugac

SEQ ID NO: 2940265 - RNA, 14 nt, Human
uuuaccuuuuuuau

SEQ ID NO: 2940266 - RNA, 19 nt, Human
uuuaccuuuuuuauacaua

SEQ ID NO: 2940267 - RNA, 20 nt, Human
uuuaccuuuuuuauacauaa

SEQ ID NO: 2940268 - RNA, 17 nt, Human
augcuacacacugcaug

SEQ ID NO: 2940269 - RNA, 18 nt, Human
augcuacacacugcaugu

SEQ ID NO: 2940270 - RNA, 18 nt, Human
uuuacuaauagacaauuu

SEQ ID NO: 2940271 - RNA, 14 nt, Human
uuuacuaauagaca

SEQ ID NO: 2940272 - RNA, 17 nt, Human
uuuacuaauagacaauu

SEQ ID NO: 2940273 - RNA, 21 nt, Human
uuuaccuuuuuuauacauaaa

SEQ ID NO: 2940274 - RNA, 24 nt, Human
uuuaaagcuuauuaaaacucauuu

SEQ ID NO: 2940275 - RNA, 16 nt, Human
uuuaaagcuuccauug

SEQ ID NO: 2940276 - RNA, 23 nt, Human
augccuaccaauauuuaaucuuu

SEQ ID NO: 2940277 - RNA, 17 nt, Human
augccuaccaauauuua

SEQ ID NO: 2940278 - RNA, 16 nt, Human
augccuaccaauauuu

SEQ ID NO: 2940279 - RNA, 14 nt, Human
augcgcuguggcca

SEQ ID NO: 2940280 - RNA, 13 nt, Human
augcuaagugaaa

SEQ ID NO: 2940281 - RNA, 16 nt, Human
uuuagcccugaacauu

SEQ ID NO: 2940282 - RNA, 18 nt, Human
uuuauauagcaagacauu

SEQ ID NO: 2940283 - RNA, 22 nt, Human
uuuauauagcaagacauuauau

SEQ ID NO: 2940284 - RNA, 15 nt, Human
uuuagauaauacacc

SEQ ID NO: 2940285 - RNA, 17 nt, Human
uuuagaugaaugucagu

SEQ ID NO: 2940286 - RNA, 18 nt, Human
uuuagaguugauacuaca

SEQ ID NO: 2940287 - RNA, 13 nt, Human
uuuagauaauaca

SEQ ID NO: 2940288 - RNA, 17 nt, Human
uuuauaugcuucuguuu

SEQ ID NO: 2940289 - RNA, 19 nt, Human
uuuauuaaaugcccagccc

SEQ ID NO: 2940290 - RNA, 16 nt, Human
uuuauuacuguaagaa

SEQ ID NO: 2940291 - RNA, 23 nt, Human
augcugucuacacuaagagagaa

SEQ ID NO: 2940292 - RNA, 14 nt, Human
augcuguauuuuaa

SEQ ID NO: 2940293 - RNA, 19 nt, Human
augcugugcccuaaagugu

SEQ ID NO: 2940294 - RNA, 22 nt, Human
augcuggcuguuggcugggggc

SEQ ID NO: 2940295 - RNA, 19 nt, Human
uuuauuacuguaagaaaau

SEQ ID NO: 2940296 - RNA, 17 nt, Human
auggaacacucugagac

SEQ ID NO: 2940297 - RNA, 18 nt, Human
auggaacacucugagacu

SEQ ID NO: 2940298 - RNA, 21 nt, Human
auggaaguacuauaauuuacc

SEQ ID NO: 2940299 - RNA, 16 nt, Human
auggaacauaaaauac

SEQ ID NO: 2940300 - RNA, 16 nt, Human
uuuauuuuaauaaugu

SEQ ID NO: 2940301 - RNA, 14 nt, Human
auggaauaacaugu

SEQ ID NO: 2940302 - RNA, 15 nt, Human
auggaauaacaugua

SEQ ID NO: 2940303 - RNA, 14 nt, Human
uuucacucuccuug

SEQ ID NO: 2940304 - RNA, 24 nt, Human
uuucacucuuauugcccacgcugg

SEQ ID NO: 2940305 - RNA, 15 nt, Human
uuucacucuccuugg

SEQ ID NO: 2940306 - RNA, 19 nt, Human
uuuccagguuuaagcuguu

SEQ ID NO: 2940307 - RNA, 23 nt, Human
auggaauuggagcucgugggaca

SEQ ID NO: 2940308 - RNA, 18 nt, Human
uugugaagcaaaauuuuu

SEQ ID NO: 2940309 - RNA, 22 nt, Human
uugugaaggcaggggaauguau

SEQ ID NO: 2940310 - RNA, 14 nt, Human
uugugaauaaagag

SEQ ID NO: 2940311 - RNA, 22 nt, Human
uuguucccugugucauuucaaa

SEQ ID NO: 2940312 - RNA, 18 nt, Human
augaucacggcucacugc

SEQ ID NO: 2940313 - RNA, 19 nt, Human
augaucacggcucacugca

SEQ ID NO: 2940314 - RNA, 15 nt, Human
augaucacggcucac

SEQ ID NO: 2940315 - RNA, 23 nt, Human
augaucacggcucacugcagccu

SEQ ID NO: 2940316 - RNA, 16 nt, Human
augauccuaggcauuu

SEQ ID NO: 2940317 - RNA, 14 nt, Human
augaucuucuuuau

SEQ ID NO: 2940318 - RNA, 22 nt, Human
augcaaggucauuuuuuuuaag

SEQ ID NO: 2940319 - RNA, 16 nt, Human
augcaccuggaauaua

SEQ ID NO: 2940320 - RNA, 14 nt, Human
augcaccuggaaua

SEQ ID NO: 2940321 - RNA, 14 nt, Human
augcaaggucauuu

SEQ ID NO: 2940322 - RNA, 16 nt, Human
augcaaggucauuuuu

SEQ ID NO: 2940323 - RNA, 22 nt, Human
augcaaaccaucauugaaaucu

SEQ ID NO: 2940324 - RNA, 21 nt, Human
augcaaaccaucauugaaauc

SEQ ID NO: 2940325 - RNA, 20 nt, Human
augcaaaccaucauugaaau

SEQ ID NO: 2940326 - RNA, 19 nt, Human
augcaaaccaucauugaaa

SEQ ID NO: 2940327 - RNA, 18 nt, Human
augcaaaccaucauugaa

SEQ ID NO: 2940328 - RNA, 16 nt, Human
augcaaaccaucauug

SEQ ID NO: 2940329 - RNA, 15 nt, Human
augaucuucuuuaua

SEQ ID NO: 2940330 - RNA, 18 nt, Human
augaucuucuuuauaauu

SEQ ID NO: 2940331 - RNA, 19 nt, Human
augcaccuggaauauauaa

SEQ ID NO: 2940332 - RNA, 16 nt, Human
uuguuuuuauuaaaag

SEQ ID NO: 2940333 - RNA, 20 nt, Human
uuuaaaaaagaaacauuugg

SEQ ID NO: 2940334 - RNA, 15 nt, Human
augagcaucaggcca

SEQ ID NO: 2940335 - RNA, 17 nt, Human
augagcaucaggccagg

SEQ ID NO: 2940336 - RNA, 16 nt, Human
augagcaucaggccag

SEQ ID NO: 2940337 - RNA, 21 nt, Human
augagcaucaggccaggcccu

SEQ ID NO: 2940338 - RNA, 20 nt, Human
augagcaucaggccaggccc

SEQ ID NO: 2940339 - RNA, 19 nt, Human
augagcaucaggccaggcc

SEQ ID NO: 2940340 - RNA, 18 nt, Human
augagcaucaggccaggc

SEQ ID NO: 2940341 - RNA, 15 nt, Human
augagccgcccaagg

SEQ ID NO: 2940342 - RNA, 22 nt, Human
augagcaucaggccaggcccuc

SEQ ID NO: 2940343 - RNA, 16 nt, Human
augagccgcccaaggc

SEQ ID NO: 2940344 - RNA, 18 nt, Human
augagccgcccaaggccu

SEQ ID NO: 2940345 - RNA, 19 nt, Human
augagccgcccaaggccuu

SEQ ID NO: 2940346 - RNA, 21 nt, Human
augagccgcccaaggccuucc

SEQ ID NO: 2940347 - RNA, 22 nt, Human
augagccgcccaaggccuuccc

SEQ ID NO: 2940348 - RNA, 12 nt, Human
augagccucagc

SEQ ID NO: 2940349 - RNA, 15 nt, Human
augagccucagcauc

SEQ ID NO: 2940350 - RNA, 16 nt, Human
augagccucagcaucc

SEQ ID NO: 2940351 - RNA, 16 nt, Human
augagaggaaaucacc

SEQ ID NO: 2940352 - RNA, 15 nt, Human
augagaggaaaucac

SEQ ID NO: 2940353 - RNA, 14 nt, Human
augagaggaaauca

SEQ ID NO: 2940354 - RNA, 13 nt, Human
augagaggaaauc

SEQ ID NO: 2940355 - RNA, 12 nt, Human
augagaggaaau

SEQ ID NO: 2940356 - RNA, 21 nt, Human
uugucggccccaccagugccu

SEQ ID NO: 2940357 - RNA, 22 nt, Human
augaggucagagccugcaguua

SEQ ID NO: 2940358 - RNA, 17 nt, Human
augagccucagcauccu

SEQ ID NO: 2940359 - RNA, 18 nt, Human
augagccucagcauccug

SEQ ID NO: 2940360 - RNA, 15 nt, Human
augauaaaacacaaa

SEQ ID NO: 2940361 - RNA, 18 nt, Human
uugucacacacuuuggcu

SEQ ID NO: 2940362 - RNA, 14 nt, Human
augauaacuggaaa

SEQ ID NO: 2940363 - RNA, 13 nt, Human
uuguauaaaauaa

SEQ ID NO: 2940364 - RNA, 19 nt, Human
uuguauaaaauaauuuuua

SEQ ID NO: 2940365 - RNA, 20 nt, Human
uuguaaggaaugauuaauua

SEQ ID NO: 2940366 - RNA, 23 nt, Human
uuguaguguuggagaagaacuga

SEQ ID NO: 2940367 - RNA, 23 nt, Human
augaauuaguuuuauaugcuucu

SEQ ID NO: 2940368 - RNA, 22 nt, Human
augaauuacauuuguauaaaau

SEQ ID NO: 2940369 - RNA, 21 nt, Human
augaauuaguuuuauaugcuu

SEQ ID NO: 2940370 - RNA, 20 nt, Human
augacacgaauauugcugau

SEQ ID NO: 2940371 - RNA, 19 nt, Human
augacacgaauauugcuga

SEQ ID NO: 2940372 - RNA, 22 nt, Human
uugggguacccacugcucuggu

SEQ ID NO: 2940373 - RNA, 19 nt, Human
uugguuaggcauuguggga

SEQ ID NO: 2940374 - RNA, 21 nt, Human
uuguaacuguuuagaugaaug

SEQ ID NO: 2940375 - RNA, 22 nt, Human
uuguaacuguuuagaugaaugu

SEQ ID NO: 2940376 - RNA, 14 nt, Human
uuguaaggaaugau

SEQ ID NO: 2940377 - RNA, 23 nt, Human
uugggcacuauuuauuuacaaau

SEQ ID NO: 2940378 - RNA, 16 nt, Human
uugggcacuauuuauu

SEQ ID NO: 2940379 - RNA, 17 nt, Human
uugggguacccacugcu

SEQ ID NO: 2940380 - RNA, 19 nt, Human
uuggggaagaacgaagcca

SEQ ID NO: 2940381 - RNA, 13 nt, Human
augaaccacaucu

SEQ ID NO: 2940382 - RNA, 20 nt, Human
augaaccacaucuugcucug

SEQ ID NO: 2940383 - RNA, 17 nt, Human
augaauuacauuuguau

SEQ ID NO: 2940384 - RNA, 18 nt, Human
augaauuacauuuguaua

SEQ ID NO: 2940385 - RNA, 19 nt, Human
augaauuacauuuguauaa

SEQ ID NO: 2940386 - RNA, 23 nt, Human
uuggccugucuuuggauuguuaa

SEQ ID NO: 2940387 - RNA, 18 nt, Human
uuggaaagaguaggaaga

SEQ ID NO: 2940388 - RNA, 21 nt, Human
uuggcuagagguucaaagaua

SEQ ID NO: 2940389 - RNA, 22 nt, Human
uuggcuaggaccccuccaugug

SEQ ID NO: 2940390 - RNA, 22 nt, Human
uuggcuagagguucaaagauau

SEQ ID NO: 2940391 - RNA, 13 nt, Human
uuggcugcaggga

SEQ ID NO: 2940392 - RNA, 14 nt, Human
uuggcugcagggag

SEQ ID NO: 2940393 - RNA, 15 nt, Human
uuggcugcugaaggc

SEQ ID NO: 2940394 - RNA, 11 nt, Human
uuggcugcuga

SEQ ID NO: 2940395 - RNA, 13 nt, Human
aucuuuuaugauu

SEQ ID NO: 2940396 - RNA, 20 nt, Human
augaaagacuguacaaagua

SEQ ID NO: 2940397 - RNA, 21 nt, Human
augaaauauuauguuaaaacu

SEQ ID NO: 2940398 - RNA, 20 nt, Human
augaaauauuauguuaaaac

SEQ ID NO: 2940399 - RNA, 17 nt, Human
uuggaaagaguaggaag

SEQ ID NO: 2940400 - RNA, 18 nt, Human
uugcugauggugcaauga

SEQ ID NO: 2940401 - RNA, 17 nt, Human
uugcugauggugcaaug

SEQ ID NO: 2940402 - RNA, 20 nt, Human
uugcuaagugaggaugaaaa

SEQ ID NO: 2940403 - RNA, 19 nt, Human
uugcugaauacagaggcaa

SEQ ID NO: 2940404 - RNA, 11 nt, Human
uugcucaugga

SEQ ID NO: 2940405 - RNA, 12 nt, Human
uugcucauggaa

SEQ ID NO: 2940406 - RNA, 22 nt, Human
auuuauuaaaugcccagccccu

SEQ ID NO: 2940407 - RNA, 18 nt, Human
auuuaguauuuuguuuca

SEQ ID NO: 2940408 - RNA, 13 nt, Human
auuuagauguaua

SEQ ID NO: 2940409 - RNA, 12 nt, Human
auuuaacagaaa

SEQ ID NO: 2940410 - RNA, 14 nt, Human
auuuaacagaaaug

SEQ ID NO: 2940411 - RNA, 13 nt, Human
auuuacuuaagac

SEQ ID NO: 2940412 - RNA, 17 nt, Human
auuuacuucuuauacau

SEQ ID NO: 2940413 - RNA, 14 nt, Human
auuuacuucuuaua

SEQ ID NO: 2940414 - RNA, 16 nt, Human
auuuacuucuuauaca

SEQ ID NO: 2940415 - RNA, 15 nt, Human
auuuagaaauauaau

SEQ ID NO: 2940416 - RNA, 19 nt, Human
auuuacuuaagacuuaaug

SEQ ID NO: 2940417 - RNA, 14 nt, Human
auuuauucugcuca

SEQ ID NO: 2940418 - RNA, 23 nt, Human
auuucaaacagucucccuuccua

SEQ ID NO: 2940419 - RNA, 19 nt, Human
auuuauuuuaauaauguuu

SEQ ID NO: 2940420 - RNA, 20 nt, Human
auuuauuuuaauaauguuuc

SEQ ID NO: 2940421 - RNA, 12 nt, Human
auuucaagaagu

SEQ ID NO: 2940422 - RNA, 12 nt, Human
auuucauuucuu

SEQ ID NO: 2940423 - RNA, 17 nt, Human
auuuccagccaaagccu

SEQ ID NO: 2940424 - RNA, 15 nt, Human
auuuccguuaaaaua

SEQ ID NO: 2940425 - RNA, 16 nt, Human
auuuccguuaaaauac

SEQ ID NO: 2940426 - RNA, 14 nt, Human
auuugaaaauuuug

SEQ ID NO: 2940427 - RNA, 14 nt, Human
auuugaaauauuga

SEQ ID NO: 2940428 - RNA, 14 nt, Human
auuuauucauuagu

SEQ ID NO: 2940429 - RNA, 13 nt, Human
auuuauuuacaaa

SEQ ID NO: 2940430 - RNA, 15 nt, Human
auuuauuuacaaaug

SEQ ID NO: 2940431 - RNA, 16 nt, Human
auuuauuuacaaaugu

SEQ ID NO: 2940432 - RNA, 13 nt, Human
auuuauucugcuc

SEQ ID NO: 2940433 - RNA, 18 nt, Human
auuuauuuacaaauguuu

SEQ ID NO: 2940434 - RNA, 14 nt, Human
auuuauuuauucau

SEQ ID NO: 2940435 - RNA, 17 nt, Human
auuuauuuuaauaaugu

SEQ ID NO: 2940436 - RNA, 17 nt, Human
auugaaaucuaggaaaa

SEQ ID NO: 2940437 - RNA, 15 nt, Human
auugacauugaaauc

SEQ ID NO: 2940438 - RNA, 17 nt, Human
auugacauugaaaucua

SEQ ID NO: 2940439 - RNA, 18 nt, Human
auugacauugaaaucuag

SEQ ID NO: 2940440 - RNA, 22 nt, Human
auugacauugaaaucuaggaaa

SEQ ID NO: 2940441 - RNA, 18 nt, Human
auugacccacaagaaaug

SEQ ID NO: 2940442 - RNA, 16 nt, Human
auucuuuuugaaaugu

SEQ ID NO: 2940443 - RNA, 15 nt, Human
auugaaaaaccauuu

SEQ ID NO: 2940444 - RNA, 20 nt, Human
auuggggcucccagccaggc

SEQ ID NO: 2940445 - RNA, 21 nt, Human
auuggggcucccagccaggcc

SEQ ID NO: 2940446 - RNA, 22 nt, Human
auuggggcucccagccaggccc

SEQ ID NO: 2940447 - RNA, 23 nt, Human
auuggggcucccagccaggcccu

SEQ ID NO: 2940448 - RNA, 17 nt, Human
auugggcacaucauuuc

SEQ ID NO: 2940449 - RNA, 18 nt, Human
auugggcacaucauuuca

SEQ ID NO: 2940450 - RNA, 19 nt, Human
auugggcacaucauuucaa

SEQ ID NO: 2940451 - RNA, 21 nt, Human
auugggcacaucauuucaaga

SEQ ID NO: 2940452 - RNA, 23 nt, Human
auugggcacaucauuucaagaag

SEQ ID NO: 2940453 - RNA, 21 nt, Human
auugggcacuauuuauuuaca

SEQ ID NO: 2940454 - RNA, 13 nt, Human
auucuuauuuaau

SEQ ID NO: 2940455 - RNA, 14 nt, Human
auucuuauuuaaug

SEQ ID NO: 2940456 - RNA, 18 nt, Human
auucuuauuuaaugaaag

SEQ ID NO: 2940457 - RNA, 13 nt, Human
auucuucuccacu

SEQ ID NO: 2940458 - RNA, 13 nt, Human
auucuuccucccu

SEQ ID NO: 2940459 - RNA, 22 nt, Human
auucuuccucccucccucuuuc

SEQ ID NO: 2940460 - RNA, 15 nt, Human
auuguauuacaaauc

SEQ ID NO: 2940461 - RNA, 20 nt, Human
auuguccccgacccuugccg

SEQ ID NO: 2940462 - RNA, 19 nt, Human
auuguccccgacccuugcc

SEQ ID NO: 2940463 - RNA, 17 nt, Human
auuguccccgacccuug

SEQ ID NO: 2940464 - RNA, 14 nt, Human
auugugucucuugg

SEQ ID NO: 2940465 - RNA, 18 nt, Human
auugugucucuugguccu

SEQ ID NO: 2940466 - RNA, 12 nt, Human
auuugugagacu

SEQ ID NO: 2940467 - RNA, 14 nt, Human
auuugugagacugu

SEQ ID NO: 2940468 - RNA, 14 nt, Human
auuugugauacaau

SEQ ID NO: 2940469 - RNA, 21 nt, Human
auuuguuuugccaauuugcac

SEQ ID NO: 2940470 - RNA, 23 nt, Human
auuuguuuugccaauuugcacau

SEQ ID NO: 2940471 - RNA, 17 nt, Human
auuuuaaaagaaugauu

SEQ ID NO: 2940472 - RNA, 23 nt, Human
auuugaagguagaauguuuucaa

SEQ ID NO: 2940473 - RNA, 18 nt, Human
auuugaagguagaauguu

SEQ ID NO: 2940474 - RNA, 19 nt, Human
auuuguauaaaauaauuuu

SEQ ID NO: 2940475 - RNA, 15 nt, Human
auuuguauaaaauaa

SEQ ID NO: 2940476 - RNA, 18 nt, Human
auuuguauaaaauaauuu

SEQ ID NO: 2940477 - RNA, 17 nt, Human
auuuuacuuuuuggaaa

SEQ ID NO: 2940478 - RNA, 14 nt, Human
auuuuacuuuuugg

SEQ ID NO: 2940479 - RNA, 21 nt, Human
auuuuacuuuaaaaggagcca

SEQ ID NO: 2940480 - RNA, 13 nt, Human
auuuuacauaaau

SEQ ID NO: 2940481 - RNA, 16 nt, Human
auuuuacauaaauuua

SEQ ID NO: 2940482 - RNA, 17 nt, Human
auuuuacauaaauuuag

SEQ ID NO: 2940483 - RNA, 15 nt, Human
auuuuaauucaguug

SEQ ID NO: 2940484 - RNA, 21 nt, Human
auuuuaaacauauccaaguuu

SEQ ID NO: 2940485 - RNA, 21 nt, Human
auuuuaaacaaaauagaaagu

SEQ ID NO: 2940486 - RNA, 15 nt, Human
auuuuaaacaaaaua

SEQ ID NO: 2940487 - RNA, 18 nt, Human
auuuuaaaagaaugauua

SEQ ID NO: 2940488 - RNA, 22 nt, Human
auuuuaaaagaaugauuaugaa

SEQ ID NO: 2940489 - RNA, 22 nt, Human
auuuucaguuauuauauuuaca

SEQ ID NO: 2940490 - RNA, 20 nt, Human
uuuucauuuaggugaggaag

SEQ ID NO: 2940491 - RNA, 14 nt, Human
uuuucucuaggaaa

SEQ ID NO: 2940492 - RNA, 18 nt, Human
uuuucugagaaagacuau

SEQ ID NO: 2940493 - RNA, 15 nt, Human
uuuucugagaaagac

SEQ ID NO: 2940494 - RNA, 14 nt, Human
uuuucaguguacau

SEQ ID NO: 2940495 - RNA, 11 nt, Human
uuuuauuuuau

SEQ ID NO: 2940496 - RNA, 13 nt, Human
uuuuauuaugcau

SEQ ID NO: 2940497 - RNA, 16 nt, Human
auuaaacaugcuguac

SEQ ID NO: 2940498 - RNA, 15 nt, Human
auuaaaaaucucaaa

SEQ ID NO: 2940499 - RNA, 19 nt, Human
auuaaaaaucucaaauuuc

SEQ ID NO: 2940500 - RNA, 23 nt, Human
auuaaaacacaacaucuuuuucu

SEQ ID NO: 2940501 - RNA, 20 nt, Human
auuaaaaaucucaaauuucu

SEQ ID NO: 2940502 - RNA, 22 nt, Human
auuaaaaaucucaaauuucuaa

SEQ ID NO: 2940503 - RNA, 15 nt, Human
auguuuucaggcuag

SEQ ID NO: 2940504 - RNA, 17 nt, Human
auguuuucaggcuagau

SEQ ID NO: 2940505 - RNA, 21 nt, Human
auguuuucaggcuagauguau

SEQ ID NO: 2940506 - RNA, 19 nt, Human
augugcuaguaauuggaaa

SEQ ID NO: 2940507 - RNA, 22 nt, Human
augugccagguuuuuggucuga

SEQ ID NO: 2940508 - RNA, 16 nt, Human
uuuuaauaauguuuca

SEQ ID NO: 2940509 - RNA, 20 nt, Human
auggggcccugccuccuuug

SEQ ID NO: 2940510 - RNA, 12 nt, Human
uuuuaauaaugu

SEQ ID NO: 2940511 - RNA, 13 nt, Human
uuuuaauaauguu

SEQ ID NO: 2940512 - RNA, 14 nt, Human
uuuuaauaauguuu

SEQ ID NO: 2940513 - RNA, 24 nt, Human
auguggaguucaucuugaauugua

SEQ ID NO: 2940514 - RNA, 20 nt, Human
auguggaguucaucuugaau

SEQ ID NO: 2940515 - RNA, 22 nt, Human
auguuaauauuuuagguguaaa

SEQ ID NO: 2940516 - RNA, 13 nt, Human
auguuaauauuuu

SEQ ID NO: 2940517 - RNA, 13 nt, Human
auguuaauauuuc

SEQ ID NO: 2940518 - RNA, 14 nt, Human
auguguucuauuca

SEQ ID NO: 2940519 - RNA, 20 nt, Human
auguugcccaggcaggucuu

SEQ ID NO: 2940520 - RNA, 16 nt, Human
auguugcccaggcagg

SEQ ID NO: 2940521 - RNA, 17 nt, Human
auguugcccaggcaggu

SEQ ID NO: 2940522 - RNA, 12 nt, Human
auguugcccagg

SEQ ID NO: 2940523 - RNA, 18 nt, Human
auguucaucaaugaauga

SEQ ID NO: 2940524 - RNA, 17 nt, Human
uuuugagugccuuacac

SEQ ID NO: 2940525 - RNA, 17 nt, Human
uuuugauccaagcuggu

SEQ ID NO: 2940526 - RNA, 18 nt, Human
uuuugcaaauaaguguau

SEQ ID NO: 2940527 - RNA, 18 nt, Human
uuuugcauauugcauacu

SEQ ID NO: 2940528 - RNA, 15 nt, Human
uuuugcauauugcau

SEQ ID NO: 2940529 - RNA, 18 nt, Human
uuuugccaauuugcacau

SEQ ID NO: 2940530 - RNA, 19 nt, Human
uuuugccaauuugcacauu

SEQ ID NO: 2940531 - RNA, 16 nt, Human
uuuugccaauuugcac

SEQ ID NO: 2940532 - RNA, 23 nt, Human
uuuugccauguuggccaggcugg

SEQ ID NO: 2940533 - RNA, 17 nt, Human
uuuugugcauuaucuag

SEQ ID NO: 2940534 - RNA, 20 nt, Human
uuuugugcauuaucuagaua

SEQ ID NO: 2940535 - RNA, 15 nt, Human
uuuuguuccacaagu

SEQ ID NO: 2940536 - RNA, 21 nt, Human
uuuuguuccacaaguuaaaua

SEQ ID NO: 2940537 - RNA, 22 nt, Human
uuuuuagacagagucucacugu

SEQ ID NO: 2940538 - RNA, 11 nt, Human
uuuuuacuaau

SEQ ID NO: 2940539 - RNA, 12 nt, Human
uuuuuauggcuu

SEQ ID NO: 2940540 - RNA, 20 nt, Human
uuuuuaucgucacugcuuaa

SEQ ID NO: 2940541 - RNA, 19 nt, Human
uuuuuauauuugaaauauu

SEQ ID NO: 2940542 - RNA, 17 nt, Human
uuuuuauauuugaaaua

SEQ ID NO: 2940543 - RNA, 16 nt, Human
auuacauuuguauaaa

SEQ ID NO: 2940544 - RNA, 12 nt, Human
auuaccagggac

SEQ ID NO: 2940545 - RNA, 17 nt, Human
auuacauuuguauaaaa

SEQ ID NO: 2940546 - RNA, 18 nt, Human
auuacauuuguauaaaau

SEQ ID NO: 2940547 - RNA, 21 nt, Human
auuacaguggggaaugaagau

SEQ ID NO: 2940548 - RNA, 14 nt, Human
auuaaguacuaugu

SEQ ID NO: 2940549 - RNA, 22 nt, Human
uuuuuauggcuuuugugcauua

SEQ ID NO: 2940550 - RNA, 20 nt, Human
uuuuuauggcuuuugugcau

SEQ ID NO: 2940551 - RNA, 21 nt, Human
uuuuuauggcuuuugugcauu

SEQ ID NO: 2940552 - RNA, 21 nt, Human
auuaaguaaugauaacuggaa

SEQ ID NO: 2940553 - RNA, 23 nt, Human
auuaaguaaugauaacuggaaac

SEQ ID NO: 2940554 - RNA, 19 nt, Human
uuuuuguagagccaggguc

SEQ ID NO: 2940555 - RNA, 20 nt, Human
uuuuuguagagccagggucu

SEQ ID NO: 2940556 - RNA, 19 nt, Human
uuuuugugaaaagcuccau

SEQ ID NO: 2940557 - RNA, 17 nt, Human
auucccugauuuaauau

SEQ ID NO: 2940558 - RNA, 16 nt, Human
auucccaagcucugcu

SEQ ID NO: 2940559 - RNA, 14 nt, Human
auucccaagcucug

SEQ ID NO: 2940560 - RNA, 15 nt, Human
auucccaagcucugc

SEQ ID NO: 2940561 - RNA, 17 nt, Human
auuauauagcaguaaaa

SEQ ID NO: 2940562 - RNA, 14 nt, Human
auucaggaagcuca

SEQ ID NO: 2940563 - RNA, 15 nt, Human
auucaguaauaacuc

SEQ ID NO: 2940564 - RNA, 19 nt, Human
auucaguaauaacucuacc

SEQ ID NO: 2940565 - RNA, 18 nt, Human
auucagauaugauucaaa

SEQ ID NO: 2940566 - RNA, 20 nt, Human
auucaggaagcucagggccu

SEQ ID NO: 2940567 - RNA, 19 nt, Human
auucaggaagcucagggcc

SEQ ID NO: 2940568 - RNA, 17 nt, Human
auucaggaagcucaggg

SEQ ID NO: 2940569 - RNA, 18 nt, Human
auucuauguuaauauuuu

SEQ ID NO: 2940570 - RNA, 15 nt, Human
auucuauguuaauau

SEQ ID NO: 2940571 - RNA, 12 nt, Human
auucuauaauuu

SEQ ID NO: 2940572 - RNA, 20 nt, Human
auucuccaccugccagggac

SEQ ID NO: 2940573 - RNA, 19 nt, Human
auucuccaccugccaggga

SEQ ID NO: 2940574 - RNA, 16 nt, Human
auucuccuuguguuac

SEQ ID NO: 2940575 - RNA, 20 nt, Human
auucuccugccucagccucc

SEQ ID NO: 2940576 - RNA, 19 nt, Human
auucuccugccucagccuc

SEQ ID NO: 2940577 - RNA, 15 nt, Human
auucuccugccucag

SEQ ID NO: 2940578 - RNA, 17 nt, Human
auucuccugccucagcc

SEQ ID NO: 2940579 - RNA, 11 nt, Human
auucuccugcc

SEQ ID NO: 2940580 - RNA, 14 nt, Human
auucuccugccuca

SEQ ID NO: 2940581 - RNA, 13 nt, Human
auucuccugccuc

SEQ ID NO: 2940582 - RNA, 21 nt, Human
auucuccaccugccagggaca

SEQ ID NO: 2940583 - RNA, 20 nt, Human
auucagauaugauucaaaug

SEQ ID NO: 2940584 - RNA, 14 nt, Human
aaaaacacaaaagu

SEQ ID NO: 2940585 - RNA, 14 nt, Human
aaaacaaggaugaa

SEQ ID NO: 2940586 - RNA, 13 nt, Human
aaaaauuuacuuu

SEQ ID NO: 2940587 - RNA, 18 nt, Human
aaaaauuuacuuuaaacu

SEQ ID NO: 2940588 - RNA, 19 nt, Human
aaaaauuuacuuuaaacua

SEQ ID NO: 2940589 - RNA, 17 nt, Human
aaaacaaggaugaauua

SEQ ID NO: 2940590 - RNA, 18 nt, Human
aaaacacagcaaggguga

SEQ ID NO: 2940591 - RNA, 12 nt, Human
aaaacacauuuu

SEQ ID NO: 2940592 - RNA, 13 nt, Human
aaaacacagcaag

SEQ ID NO: 2940593 - RNA, 12 nt, Human
aaaacacagcaa

SEQ ID NO: 2940594 - RNA, 15 nt, Human
aaaaacugauuuuuu

SEQ ID NO: 2940595 - RNA, 14 nt, Human
aaaaacauggccuu

SEQ ID NO: 2940596 - RNA, 13 nt, Human
aaaaacugauuuu

SEQ ID NO: 2940597 - RNA, 12 nt, Human
aaaaagaggcua

SEQ ID NO: 2940598 - RNA, 16 nt, Human
aagauuuaccacuugu

SEQ ID NO: 2940599 - RNA, 13 nt, Human
aagaaauuugugg

SEQ ID NO: 2940600 - RNA, 14 nt, Human
aagcagaggaagga

SEQ ID NO: 2940601 - RNA, 23 nt, Human
aagcagaccauuggggcucccag

SEQ ID NO: 2940602 - RNA, 22 nt, Human
aagcagaccauuggggcuccca

SEQ ID NO: 2940603 - RNA, 13 nt, Human
aagccagauuuuc

SEQ ID NO: 2940604 - RNA, 18 nt, Human
aagccauaauuguucuua

SEQ ID NO: 2940605 - RNA, 16 nt, Human
aaggcaaggcugucaa

SEQ ID NO: 2940606 - RNA, 18 nt, Human
aaggcaaggcugucaauu

SEQ ID NO: 2940607 - RNA, 17 nt, Human
aaggcaaggcugucaau

SEQ ID NO: 2940608 - RNA, 11 nt, Human
aagcugggcag

SEQ ID NO: 2940609 - RNA, 13 nt, Human
aagcugggcaggu

SEQ ID NO: 2940610 - RNA, 18 nt, Human
aaggacauugcggacagc

SEQ ID NO: 2940611 - RNA, 20 nt, Human
aagcugcacccucaggcagg

SEQ ID NO: 2940612 - RNA, 21 nt, Human
aagcugcacccucaggcaggu

SEQ ID NO: 2940613 - RNA, 22 nt, Human
aagcugcacccucaggcaggug

SEQ ID NO: 2940614 - RNA, 12 nt, Human
aagcguggugga

SEQ ID NO: 2940615 - RNA, 16 nt, Human
aauaaugugaaacugg

SEQ ID NO: 2940616 - RNA, 21 nt, Human
aauaauccuaaacauaugaau

SEQ ID NO: 2940617 - RNA, 22 nt, Human
aaguuguaggcauaaagucagg

SEQ ID NO: 2940618 - RNA, 14 nt, Human
aauaaaauggguuu

SEQ ID NO: 2940619 - RNA, 14 nt, Human
aauaaguguauuuu

SEQ ID NO: 2940620 - RNA, 17 nt, Human
aauaaacgucuuaaaua

SEQ ID NO: 2940621 - RNA, 16 nt, Human
aauaaacgucuuaaau

SEQ ID NO: 2940622 - RNA, 19 nt, Human
aauaaaauggguuuuacug

SEQ ID NO: 2940623 - RNA, 22 nt, Human
aagugcugggauuacaggugug

SEQ ID NO: 2940624 - RNA, 20 nt, Human
aagguuaauguucaucaucc

SEQ ID NO: 2940625 - RNA, 15 nt, Human
aagguuaauaaagua

SEQ ID NO: 2940626 - RNA, 16 nt, Human
aagguuaauaaaguaa

SEQ ID NO: 2940627 - RNA, 11 nt, Human
aaggugggagg

SEQ ID NO: 2940628 - RNA, 21 nt, Human
aaguaucaaguauagaaaauc

SEQ ID NO: 2940629 - RNA, 17 nt, Human
aaguaucaaguauagaa

SEQ ID NO: 2940630 - RNA, 18 nt, Human
aaguaucaaguauagaaa

SEQ ID NO: 2940631 - RNA, 19 nt, Human
aaguaucaaguauagaaaa

SEQ ID NO: 2940632 - RNA, 11 nt, Human
aaguacuucuu

SEQ ID NO: 2940633 - RNA, 16 nt, Human
aaguaucccuacugua

SEQ ID NO: 2940634 - RNA, 21 nt, Human
aaguccccucuccuccacauu

SEQ ID NO: 2940635 - RNA, 20 nt, Human
aaguccccucuccuccacau

SEQ ID NO: 2940636 - RNA, 16 nt, Human
aagucuuagauguaua

SEQ ID NO: 2940637 - RNA, 16 nt, Human
aaugguagcauuuuaa

SEQ ID NO: 2940638 - RNA, 19 nt, Human
aaugguagcauuuuaaaca

SEQ ID NO: 2940639 - RNA, 21 nt, Human
aaugguagcauuuuaaacaaa

SEQ ID NO: 2940640 - RNA, 14 nt, Human
aaugguagcauuuu

SEQ ID NO: 2940641 - RNA, 14 nt, Human
aaugguaguuuuac

SEQ ID NO: 2940642 - RNA, 13 nt, Human
aaugggcagagca

SEQ ID NO: 2940643 - RNA, 15 nt, Human
aaugggcagagcaga

SEQ ID NO: 2940644 - RNA, 22 nt, Human
aaugucaguuguuauuuauuga

SEQ ID NO: 2940645 - RNA, 20 nt, Human
aaugucucuuuaaugucaca

SEQ ID NO: 2940646 - RNA, 18 nt, Human
aaugucaguucugauaug

SEQ ID NO: 2940647 - RNA, 23 nt, Human
aaugucaguucugauauggaagc

SEQ ID NO: 2940648 - RNA, 20 nt, Human
aaugucaguuguuauuuauu

SEQ ID NO: 2940649 - RNA, 19 nt, Human
aaugucaguuguuauuuau

SEQ ID NO: 2940650 - RNA, 22 nt, Human
aaugucuaguuguaacaccaug

SEQ ID NO: 2940651 - RNA, 21 nt, Human
aaugucagugugacugaucuc

SEQ ID NO: 2940652 - RNA, 17 nt, Human
aaugucagugugacuga

SEQ ID NO: 2940653 - RNA, 13 nt, Human
aaugucaguguga

SEQ ID NO: 2940654 - RNA, 16 nt, Human
aaugucagugugacug

SEQ ID NO: 2940655 - RNA, 15 nt, Human
aaugucagugugacu

SEQ ID NO: 2940656 - RNA, 18 nt, Human
aauuaaaacacaacaucu

SEQ ID NO: 2940657 - RNA, 19 nt, Human
aauguuugccucugccucu

SEQ ID NO: 2940658 - RNA, 18 nt, Human
aauguuugccucugccuc

SEQ ID NO: 2940659 - RNA, 14 nt, Human
aauuaguuuuauau

SEQ ID NO: 2940660 - RNA, 17 nt, Human
aauuaguuuuauaugcu

SEQ ID NO: 2940661 - RNA, 20 nt, Human
aauuaguuuuauaugcuucu

SEQ ID NO: 2940662 - RNA, 18 nt, Human
aauuaguggcacuugcuu

SEQ ID NO: 2940663 - RNA, 18 nt, Human
aauauaggaacuuaaaua

SEQ ID NO: 2940664 - RNA, 20 nt, Human
aauauaggaacuuaaauaau

SEQ ID NO: 2940665 - RNA, 21 nt, Human
aauauaggaacuuaaauaaug

SEQ ID NO: 2940666 - RNA, 16 nt, Human
aauauuauguuaaaac

SEQ ID NO: 2940667 - RNA, 19 nt, Human
aaucacacugucuucugau

SEQ ID NO: 2940668 - RNA, 15 nt, Human
aaucaagaaacuuaa

SEQ ID NO: 2940669 - RNA, 13 nt, Human
aaucacaauacau

SEQ ID NO: 2940670 - RNA, 19 nt, Human
aaugaugccaugaggaaca

SEQ ID NO: 2940671 - RNA, 14 nt, Human
aaucuccaaaauaa

SEQ ID NO: 2940672 - RNA, 13 nt, Human
aaucuccaaaaua

SEQ ID NO: 2940673 - RNA, 13 nt, Human
aauccauacauuu

SEQ ID NO: 2940674 - RNA, 22 nt, Human
aaucugcuuuuuaaagaaugcu

SEQ ID NO: 2940675 - RNA, 16 nt, Human
aaugaaccacaucuug

SEQ ID NO: 2940676 - RNA, 17 nt, Human
aaugaaccacaucuugc

SEQ ID NO: 2940677 - RNA, 23 nt, Human
aaugaaccacaucuugcucugcu

SEQ ID NO: 2940678 - RNA, 21 nt, Human
aaugaugauccuaggcauuug

SEQ ID NO: 2940679 - RNA, 17 nt, Human
aaugaagauacugaaau

SEQ ID NO: 2940680 - RNA, 20 nt, Human
aaugauaacuggaaacuuca

SEQ ID NO: 2940681 - RNA, 17 nt, Human
aaugauaacuggaaacu

SEQ ID NO: 2940682 - RNA, 12 nt, Human
aaugaagauacu

SEQ ID NO: 2940683 - RNA, 15 nt, Human
aacugaacuucagag

SEQ ID NO: 2940684 - RNA, 15 nt, Human
aacucaccugccccu

SEQ ID NO: 2940685 - RNA, 16 nt, Human
aacucaccugccccuc

SEQ ID NO: 2940686 - RNA, 20 nt, Human
aacucaccuggcaucuuaca

SEQ ID NO: 2940687 - RNA, 12 nt, Human
aacucaccccag

SEQ ID NO: 2940688 - RNA, 19 nt, Human
aacuuauggggccaaaaua

SEQ ID NO: 2940689 - RNA, 17 nt, Human
aacuuaaauaaugugaa

SEQ ID NO: 2940690 - RNA, 19 nt, Human
aacugauuuuuuuuuccuu

SEQ ID NO: 2940691 - RNA, 17 nt, Human
aacugauuuuuuuuucc

SEQ ID NO: 2940692 - RNA, 16 nt, Human
aacugaucauguuuau

SEQ ID NO: 2940693 - RNA, 18 nt, Human
aacugaucauguuuauga

SEQ ID NO: 2940694 - RNA, 20 nt, Human
aacugaucauguuuaugaga

SEQ ID NO: 2940695 - RNA, 23 nt, Human
aacugaucauguuuaugagaaac

SEQ ID NO: 2940696 - RNA, 23 nt, Human
aacugacacaugcugaacaucac

SEQ ID NO: 2940697 - RNA, 13 nt, Human
aacuucacauauu

SEQ ID NO: 2940698 - RNA, 12 nt, Human
aacuuuuauaaa

SEQ ID NO: 2940699 - RNA, 15 nt, Human
aacuuuuauaaacuu

SEQ ID NO: 2940700 - RNA, 19 nt, Human
aacuuugaccucugcagca

SEQ ID NO: 2940701 - RNA, 20 nt, Human
aacuuugaccucugcagcaa

SEQ ID NO: 2940702 - RNA, 13 nt, Human
aacuuugaccucu

SEQ ID NO: 2940703 - RNA, 14 nt, Human
aacuuugaccucug

SEQ ID NO: 2940704 - RNA, 17 nt, Human
aacuuugaccucugcag

SEQ ID NO: 2940705 - RNA, 16 nt, Human
aacuuuuauaaacuuu

SEQ ID NO: 2940706 - RNA, 19 nt, Human
aacuuuuauaaacuuuacc

SEQ ID NO: 2940707 - RNA, 16 nt, Human
aacuuuuuauauucuc

SEQ ID NO: 2940708 - RNA, 14 nt, Human
aagaaauguaaggg

SEQ ID NO: 2940709 - RNA, 13 nt, Human
aagaaauguaagg

SEQ ID NO: 2940710 - RNA, 19 nt, Human
aacacauuuuucuuaggga

SEQ ID NO: 2940711 - RNA, 15 nt, Human
aacacgagcaggcua

SEQ ID NO: 2940712 - RNA, 19 nt, Human
aacaaaggauacuuauuua

SEQ ID NO: 2940713 - RNA, 15 nt, Human
aacaaaggauacuua

SEQ ID NO: 2940714 - RNA, 14 nt, Human
aacaacgaaagaag

SEQ ID NO: 2940715 - RNA, 15 nt, Human
aacaaaauagaaagu

SEQ ID NO: 2940716 - RNA, 22 nt, Human
aaccacucuaucaaguauuaua

SEQ ID NO: 2940717 - RNA, 23 nt, Human
aacauguaauuaaguacuaugua

SEQ ID NO: 2940718 - RNA, 14 nt, Human
aacauguaauuaag

SEQ ID NO: 2940719 - RNA, 21 nt, Human
aacauguaauuaaguacuaug

SEQ ID NO: 2940720 - RNA, 14 nt, Human
aacccuggugacca

SEQ ID NO: 2940721 - RNA, 14 nt, Human
aaacagaugaaaag

SEQ ID NO: 2940722 - RNA, 17 nt, Human
aaacagaugaaaagccu

SEQ ID NO: 2940723 - RNA, 22 nt, Human
aaacacuguucucugcccucca

SEQ ID NO: 2940724 - RNA, 19 nt, Human
aaacacuguucucugcccu

SEQ ID NO: 2940725 - RNA, 13 nt, Human
aaaacacauuuuu

SEQ ID NO: 2940726 - RNA, 15 nt, Human
aaaacacauuuuucu

SEQ ID NO: 2940727 - RNA, 13 nt, Human
aaaauucagugga

SEQ ID NO: 2940728 - RNA, 18 nt, Human
aaacacuguucucugccc

SEQ ID NO: 2940729 - RNA, 11 nt, Human
aaagagguuuu

SEQ ID NO: 2940730 - RNA, 17 nt, Human
aaacugacucuuaagaa

SEQ ID NO: 2940731 - RNA, 15 nt, Human
aaacugccagcaacg

SEQ ID NO: 2940732 - RNA, 14 nt, Human
aaacugccagcaac

SEQ ID NO: 2940733 - RNA, 16 nt, Human
aaacugacucuuaaga

SEQ ID NO: 2940734 - RNA, 19 nt, Human
aaacugccagcaacgcagg

SEQ ID NO: 2940735 - RNA, 19 nt, Human
aaagaugaaggucuguuuu

SEQ ID NO: 2940736 - RNA, 18 nt, Human
aaagaugaaggucuguuu

SEQ ID NO: 2940737 - RNA, 17 nt, Human
aaagaugaaaauauuug

SEQ ID NO: 2940738 - RNA, 16 nt, Human
aaagaugaaaauauuu

SEQ ID NO: 2940739 - RNA, 13 nt, Human
aaagaugaaaaua

SEQ ID NO: 2940740 - RNA, 14 nt, Human
aaagugcugggauu

SEQ ID NO: 2940741 - RNA, 11 nt, Human
aaagugcuggg

SEQ ID NO: 2940742 - RNA, 17 nt, Human
aaauaaacgucuuaaau

SEQ ID NO: 2940743 - RNA, 12 nt, Human
aaauaacaauga

SEQ ID NO: 2940744 - RNA, 22 nt, Human
aaauagaaaguugcaaggcaaa

SEQ ID NO: 2940745 - RNA, 16 nt, Human
aaauagaaaguugcaa

SEQ ID NO: 2940746 - RNA, 20 nt, Human
aaauagaauugacauugaaa

SEQ ID NO: 2940747 - RNA, 18 nt, Human
aaauggaagacagcucuu

SEQ ID NO: 2940748 - RNA, 16 nt, Human
aaauggaaaugggcag

SEQ ID NO: 2940749 - RNA, 20 nt, Human
aaauggacguguuaugacuc

SEQ ID NO: 2940750 - RNA, 22 nt, Human
aaauggacguguuaugacucca

SEQ ID NO: 2940751 - RNA, 21 nt, Human
aaauggacguguuaugacucc

SEQ ID NO: 2940752 - RNA, 16 nt, Human
aaaucuucauggaauu

SEQ ID NO: 2940753 - RNA, 20 nt, Human
aaaucuucauggaauucaca

SEQ ID NO: 2940754 - RNA, 22 nt, Human
aaaucuucauggaauucacaaa

SEQ ID NO: 2940755 - RNA, 16 nt, Human
aaaucaaauaugcaaa

SEQ ID NO: 2940756 - RNA, 19 nt, Human
aaaucaaauaugcaaagca

SEQ ID NO: 2940757 - RNA, 18 nt, Human
aaaucaaauaugcaaagc

SEQ ID NO: 2940758 - RNA, 13 nt, Human
acaaagacugagu

SEQ ID NO: 2940759 - RNA, 13 nt, Human
acaacuauauugu

SEQ ID NO: 2940760 - RNA, 21 nt, Human
acaaaccuguuucugcagcca

SEQ ID NO: 2940761 - RNA, 15 nt, Human
acaaacgggcucagc

SEQ ID NO: 2940762 - RNA, 20 nt, Human
acaaaauggaauacucuuau

SEQ ID NO: 2940763 - RNA, 20 nt, Human
acaaaauguaggguuauaau

SEQ ID NO: 2940764 - RNA, 15 nt, Human
acaaaauggaauacu

SEQ ID NO: 2940765 - RNA, 19 nt, Human
acaaaauggaauacucuua

SEQ ID NO: 2940766 - RNA, 20 nt, Human
acaagucagucauucagaua

SEQ ID NO: 2940767 - RNA, 15 nt, Human
acacggacacucaaa

SEQ ID NO: 2940768 - RNA, 14 nt, Human
acacuaaccacgcu

SEQ ID NO: 2940769 - RNA, 15 nt, Human
acacuaaccacgcug

SEQ ID NO: 2940770 - RNA, 11 nt, Human
acacagcucug

SEQ ID NO: 2940771 - RNA, 12 nt, Human
acacagcucugu

SEQ ID NO: 2940772 - RNA, 21 nt, Human
acaccacuacauucuguuaau

SEQ ID NO: 2940773 - RNA, 12 nt, Human
acaccagagccc

SEQ ID NO: 2940774 - RNA, 16 nt, Human
acaauuuauuauggca

SEQ ID NO: 2940775 - RNA, 15 nt, Human
acaauuuauuauggc

SEQ ID NO: 2940776 - RNA, 13 nt, Human
acacaaagcuuuu

SEQ ID NO: 2940777 - RNA, 18 nt, Human
acacaaagcuuuugcaua

SEQ ID NO: 2940778 - RNA, 18 nt, Human
acacaaacgggcucagca

SEQ ID NO: 2940779 - RNA, 20 nt, Human
acaggugugaaccaccacac

SEQ ID NO: 2940780 - RNA, 23 nt, Human
acaggugugaaccaccacaccca

SEQ ID NO: 2940781 - RNA, 18 nt, Human
acaggcaagcaccuccug

SEQ ID NO: 2940782 - RNA, 15 nt, Human
acaggcaagcaccuc

SEQ ID NO: 2940783 - RNA, 16 nt, Human
acaggcaagcaccucc

SEQ ID NO: 2940784 - RNA, 12 nt, Human
acagcuccuucu

SEQ ID NO: 2940785 - RNA, 13 nt, Human
acagcuccuucug

SEQ ID NO: 2940786 - RNA, 14 nt, Human
acagcuccuucugu

SEQ ID NO: 2940787 - RNA, 23 nt, Human
acagcugccugggaucccucauc

SEQ ID NO: 2940788 - RNA, 13 nt, Human
acagcugccuggg

SEQ ID NO: 2940789 - RNA, 14 nt, Human
acagcugccuggga

SEQ ID NO: 2940790 - RNA, 20 nt, Human
acagcucugcauacucauua

SEQ ID NO: 2940791 - RNA, 18 nt, Human
acacuguccuauuauauu

SEQ ID NO: 2940792 - RNA, 21 nt, Human
acagaggggguggccucccaa

SEQ ID NO: 2940793 - RNA, 22 nt, Human
acagaggggguggccucccaac

SEQ ID NO: 2940794 - RNA, 12 nt, Human
acagagucucac

SEQ ID NO: 2940795 - RNA, 14 nt, Human
acagagucucacug

SEQ ID NO: 2940796 - RNA, 16 nt, Human
acagcaggcugccagu

SEQ ID NO: 2940797 - RNA, 18 nt, Human
acagcaggcugccagugc

SEQ ID NO: 2940798 - RNA, 20 nt, Human
acagcaggcugccagugccu

SEQ ID NO: 2940799 - RNA, 15 nt, Human
acagcaggcugccag

SEQ ID NO: 2940800 - RNA, 17 nt, Human
acagagucucacuguug

SEQ ID NO: 2940801 - RNA, 19 nt, Human
acagagucucacuguugcc

SEQ ID NO: 2940802 - RNA, 14 nt, Human
acagcagugagacu

SEQ ID NO: 2940803 - RNA, 21 nt, Human
acagcagugagacuggggcca

SEQ ID NO: 2940804 - RNA, 18 nt, Human
acagcaguugaaaagacu

SEQ ID NO: 2940805 - RNA, 15 nt, Human
acagcaguugaaaag

SEQ ID NO: 2940806 - RNA, 15 nt, Human
acagccaugauucuu

SEQ ID NO: 2940807 - RNA, 19 nt, Human
acagccacggccaggccag

SEQ ID NO: 2940808 - RNA, 16 nt, Human
acagccagacuggcac

SEQ ID NO: 2940809 - RNA, 15 nt, Human
acagccagacuggca

SEQ ID NO: 2940810 - RNA, 13 nt, Human
acagccagacugg

SEQ ID NO: 2940811 - RNA, 13 nt, Human
acauuaaagguac

SEQ ID NO: 2940812 - RNA, 12 nt, Human
acauuaaaugac

SEQ ID NO: 2940813 - RNA, 11 nt, Human
acauuaaauga

SEQ ID NO: 2940814 - RNA, 15 nt, Human
acauuaaaugacucu

SEQ ID NO: 2940815 - RNA, 23 nt, Human
acaugcacagcuaacauggaagu

SEQ ID NO: 2940816 - RNA, 20 nt, Human
acaugcacagcuaacaugga

SEQ ID NO: 2940817 - RNA, 19 nt, Human
acaugcaaggucauuuuuu

SEQ ID NO: 2940818 - RNA, 18 nt, Human
acaugcaaggucauuuuu

SEQ ID NO: 2940819 - RNA, 21 nt, Human
acauguuuuucuucucccuca

SEQ ID NO: 2940820 - RNA, 13 nt, Human
acauguuacaaca

SEQ ID NO: 2940821 - RNA, 22 nt, Human
acaucagcacgauuucuguuua

SEQ ID NO: 2940822 - RNA, 20 nt, Human
acaucagcacgauuucuguu

SEQ ID NO: 2940823 - RNA, 21 nt, Human
acaucagcacgauuucuguuu

SEQ ID NO: 2940824 - RNA, 19 nt, Human
acaucagcacgauuucugu

SEQ ID NO: 2940825 - RNA, 23 nt, Human
acauaaacaagaccacguuucua

SEQ ID NO: 2940826 - RNA, 17 nt, Human
accagcagccuggaccc

SEQ ID NO: 2940827 - RNA, 14 nt, Human
accagcagccugga

SEQ ID NO: 2940828 - RNA, 13 nt, Human
accagcagccugg

SEQ ID NO: 2940829 - RNA, 15 nt, Human
accacguuucuaaag

SEQ ID NO: 2940830 - RNA, 19 nt, Human
accacguuucuaaaggcua

SEQ ID NO: 2940831 - RNA, 14 nt, Human
accacuacauucug

SEQ ID NO: 2940832 - RNA, 18 nt, Human
acauuuggguuacuauuu

SEQ ID NO: 2940833 - RNA, 21 nt, Human
acauuuggguuacuauuucuu

SEQ ID NO: 2940834 - RNA, 14 nt, Human
acauuuguauaaaa

SEQ ID NO: 2940835 - RNA, 18 nt, Human
acauuugcucauggaauu

SEQ ID NO: 2940836 - RNA, 16 nt, Human
acauuugcucauggaa

SEQ ID NO: 2940837 - RNA, 20 nt, Human
accccucaacaccucugcac

SEQ ID NO: 2940838 - RNA, 22 nt, Human
accaucccugaaggccccgccc

SEQ ID NO: 2940839 - RNA, 21 nt, Human
accaucccugaaggccccgcc

SEQ ID NO: 2940840 - RNA, 16 nt, Human
accaucaugucuggcu

SEQ ID NO: 2940841 - RNA, 17 nt, Human
accaucaugucuggcua

SEQ ID NO: 2940842 - RNA, 16 nt, Human
accaucccugaaggcc

SEQ ID NO: 2940843 - RNA, 18 nt, Human
accaucccugaaggcccc

SEQ ID NO: 2940844 - RNA, 14 nt, Human
accaucaugucugg

SEQ ID NO: 2940845 - RNA, 15 nt, Human
accccggccaccugc

SEQ ID NO: 2940846 - RNA, 16 nt, Human
acccaugcugcccugu

SEQ ID NO: 2940847 - RNA, 19 nt, Human
acccaugcugcccugugag

SEQ ID NO: 2940848 - RNA, 18 nt, Human
acccaugcugcccuguga

SEQ ID NO: 2940849 - RNA, 17 nt, Human
acccaugcugcccugug

SEQ ID NO: 2940850 - RNA, 16 nt, Human
acccaaguccaagcau

SEQ ID NO: 2940851 - RNA, 16 nt, Human
acccaagggccuggcc

SEQ ID NO: 2940852 - RNA, 13 nt, Human
acccaagggccug

SEQ ID NO: 2940853 - RNA, 14 nt, Human
acccaucuuaaaaa

SEQ ID NO: 2940854 - RNA, 15 nt, Human
acccacaagaaauga

SEQ ID NO: 2940855 - RNA, 13 nt, Human
acuguuucaaacu

SEQ ID NO: 2940856 - RNA, 14 nt, Human
acuguuuagaugaa

SEQ ID NO: 2940857 - RNA, 23 nt, Human
acuuauuguagcauccuggaaua

SEQ ID NO: 2940858 - RNA, 20 nt, Human
acuuauuguagcauccugga

SEQ ID NO: 2940859 - RNA, 18 nt, Human
acuuauuuaaauagauga

SEQ ID NO: 2940860 - RNA, 13 nt, Human
acuuauuuaaaua

SEQ ID NO: 2940861 - RNA, 19 nt, Human
acuucacauauugauuucc

SEQ ID NO: 2940862 - RNA, 18 nt, Human
acuucugccauauucugu

SEQ ID NO: 2940863 - RNA, 14 nt, Human
acuuggucugugag

SEQ ID NO: 2940864 - RNA, 13 nt, Human
acuuggucuguga

SEQ ID NO: 2940865 - RNA, 15 nt, Human
acuuggucugugaga

SEQ ID NO: 2940866 - RNA, 18 nt, Human
acuuguaaaggaauuuaa

SEQ ID NO: 2940867 - RNA, 20 nt, Human
acuuguaaaggaauuuaaaa

SEQ ID NO: 2940868 - RNA, 19 nt, Human
acuuguaaaggaauuuaaa

SEQ ID NO: 2940869 - RNA, 17 nt, Human
acuggguguaaacacau

SEQ ID NO: 2940870 - RNA, 16 nt, Human
acuggguguaaacaca

SEQ ID NO: 2940871 - RNA, 14 nt, Human
acuggagaaaaugg

SEQ ID NO: 2940872 - RNA, 15 nt, Human
acuggaagcacagcu

SEQ ID NO: 2940873 - RNA, 14 nt, Human
acuggaagcacagc

SEQ ID NO: 2940874 - RNA, 12 nt, Human
acuggaacucuc

SEQ ID NO: 2940875 - RNA, 12 nt, Human
acugucuucagu

SEQ ID NO: 2940876 - RNA, 20 nt, Human
agaaaggaggggauagagag

SEQ ID NO: 2940877 - RNA, 23 nt, Human
agaaaggaggggauagagagaga

SEQ ID NO: 2940878 - RNA, 15 nt, Human
agaaauaaaguuucu

SEQ ID NO: 2940879 - RNA, 18 nt, Human
agaaauaaaguuucuguu

SEQ ID NO: 2940880 - RNA, 23 nt, Human
acuuuguucuggcucuuccaggc

SEQ ID NO: 2940881 - RNA, 23 nt, Human
acuuuccuucauucaacccaccu

SEQ ID NO: 2940882 - RNA, 23 nt, Human
agaaaauggaagacagcucuuau

SEQ ID NO: 2940883 - RNA, 20 nt, Human
agaaaauggacguguuauga

SEQ ID NO: 2940884 - RNA, 15 nt, Human
agaaaauggacgugu

SEQ ID NO: 2940885 - RNA, 23 nt, Human
agaaaauggacguguuaugacuc

SEQ ID NO: 2940886 - RNA, 22 nt, Human
agaaaauggacguguuaugacu

SEQ ID NO: 2940887 - RNA, 15 nt, Human
agaaaaguuuauaaa

SEQ ID NO: 2940888 - RNA, 18 nt, Human
agaaaaguugaauuuuac

SEQ ID NO: 2940889 - RNA, 21 nt, Human
agaaaaguugaauuuuacaug

SEQ ID NO: 2940890 - RNA, 20 nt, Human
acuuuuccguuucagcggaa

SEQ ID NO: 2940891 - RNA, 15 nt, Human
acuuuuauaaacuuu

SEQ ID NO: 2940892 - RNA, 19 nt, Human
acuuuuauaaacuuuaccu

SEQ ID NO: 2940893 - RNA, 22 nt, Human
acuuuuauaaacuuuaccuuuu

SEQ ID NO: 2940894 - RNA, 18 nt, Human
acucuuaaaacccaagug

SEQ ID NO: 2940895 - RNA, 11 nt, Human
acucuuaaaac

SEQ ID NO: 2940896 - RNA, 16 nt, Human
acucugugucaggugg

SEQ ID NO: 2940897 - RNA, 14 nt, Human
acucuaucaaguau

SEQ ID NO: 2940898 - RNA, 22 nt, Human
acucuauaacaaaggauacuua

SEQ ID NO: 2940899 - RNA, 16 nt, Human
acucuaucaaguauua

SEQ ID NO: 2940900 - RNA, 18 nt, Human
acucuacccucuuagaaa

SEQ ID NO: 2940901 - RNA, 13 nt, Human
acucuacccucuu

SEQ ID NO: 2940902 - RNA, 21 nt, Human
acucuacccucuuagaaaaac

SEQ ID NO: 2940903 - RNA, 16 nt, Human
acucuaccugcacacu

SEQ ID NO: 2940904 - RNA, 12 nt, Human
acucccuuucaa

SEQ ID NO: 2940905 - RNA, 13 nt, Human
acucccuuucaac

SEQ ID NO: 2940906 - RNA, 18 nt, Human
acucaaaagcugggcagg

SEQ ID NO: 2940907 - RNA, 11 nt, Human
acuauaaugua

SEQ ID NO: 2940908 - RNA, 16 nt, Human
acucaaacucuuaaaa

SEQ ID NO: 2940909 - RNA, 17 nt, Human
acucaaacucuuaaaac

SEQ ID NO: 2940910 - RNA, 14 nt, Human
acucccccaggugg

SEQ ID NO: 2940911 - RNA, 17 nt, Human
acuccccugcugggugu

SEQ ID NO: 2940912 - RNA, 13 nt, Human
acuccccugcugg

SEQ ID NO: 2940913 - RNA, 14 nt, Human
acuagcuauggugu

SEQ ID NO: 2940914 - RNA, 12 nt, Human
acgauuucuguu

SEQ ID NO: 2940915 - RNA, 13 nt, Human
acgauuucuguuu

SEQ ID NO: 2940916 - RNA, 18 nt, Human
acgccacugcacuauagc

SEQ ID NO: 2940917 - RNA, 14 nt, Human
acgauuucuguuua

SEQ ID NO: 2940918 - RNA, 17 nt, Human
acgauuucuguuuagau

SEQ ID NO: 2940919 - RNA, 15 nt, Human
acuaaguuuuuaugg

SEQ ID NO: 2940920 - RNA, 22 nt, Human
acuaaguuuuuauggcuuuugu

SEQ ID NO: 2940921 - RNA, 18 nt, Human
acgcugugcugcccugcc

SEQ ID NO: 2940922 - RNA, 16 nt, Human
acgugcacgcacacug

SEQ ID NO: 2940923 - RNA, 17 nt, Human
acgcugugcugcccugc

SEQ ID NO: 2940924 - RNA, 16 nt, Human
acgcugugcugcccug

SEQ ID NO: 2940925 - RNA, 15 nt, Human
acgcugugcugcccu

SEQ ID NO: 2940926 - RNA, 15 nt, Human
acuaagagagaauga

SEQ ID NO: 2940927 - RNA, 16 nt, Human
acuaagagagaaugag

SEQ ID NO: 2940928 - RNA, 11 nt, Human
acguggcugcu

SEQ ID NO: 2940929 - RNA, 15 nt, Human
acguggcugcuucaa

SEQ ID NO: 2940930 - RNA, 14 nt, Human
acguggcugcuuca

SEQ ID NO: 2940931 - RNA, 13 nt, Human
acguggcugcuuc

SEQ ID NO: 2940932 - RNA, 20 nt, Human
accugccccucaacucuccu

SEQ ID NO: 2940933 - RNA, 23 nt, Human
accugccccucaacucuccucca

SEQ ID NO: 2940934 - RNA, 21 nt, Human
accucugcacaagcugcaccc

SEQ ID NO: 2940935 - RNA, 18 nt, Human
accucugcacaagcugca

SEQ ID NO: 2940936 - RNA, 16 nt, Human
accucugcacaagcug

SEQ ID NO: 2940937 - RNA, 23 nt, Human
accuuucaauaggaaaaacugau

SEQ ID NO: 2940938 - RNA, 21 nt, Human
accuuucaauaggaaaaacug

SEQ ID NO: 2940939 - RNA, 17 nt, Human
accuuucaauaggaaaa

SEQ ID NO: 2940940 - RNA, 14 nt, Human
accuuggcugcagg

SEQ ID NO: 2940941 - RNA, 16 nt, Human
accuuucaauaggaaa

SEQ ID NO: 2940942 - RNA, 12 nt, Human
accuuggcucaa

SEQ ID NO: 2940943 - RNA, 14 nt, Human
accuuggcucaagu

SEQ ID NO: 2940944 - RNA, 12 nt, Human
accuuggcugca

SEQ ID NO: 2940945 - RNA, 21 nt, Human
auaacagaagaaaauagaauu

SEQ ID NO: 2940946 - RNA, 14 nt, Human
auaacagaagaaaa

SEQ ID NO: 2940947 - RNA, 17 nt, Human
auaacagaagaaaauag

SEQ ID NO: 2940948 - RNA, 22 nt, Human
auaaguccucuagugaauguag

SEQ ID NO: 2940949 - RNA, 11 nt, Human
auaagucugau

SEQ ID NO: 2940950 - RNA, 13 nt, Human
auaagucugauuu

SEQ ID NO: 2940951 - RNA, 14 nt, Human
auaagucugauuua

SEQ ID NO: 2940952 - RNA, 13 nt, Human
auaaguguauuuu

SEQ ID NO: 2940953 - RNA, 21 nt, Human
auaaguguauuuugaaauugu

SEQ ID NO: 2940954 - RNA, 19 nt, Human
auaaugugaaacuggauua

SEQ ID NO: 2940955 - RNA, 21 nt, Human
auaaugugaaacuggauuaaa

SEQ ID NO: 2940956 - RNA, 18 nt, Human
auaaugugaaacuggauu

SEQ ID NO: 2940957 - RNA, 13 nt, Human
auacuuauuuaaa

SEQ ID NO: 2940958 - RNA, 22 nt, Human
auacuuacauguguguauaugu

SEQ ID NO: 2940959 - RNA, 12 nt, Human
auaccugucccc

SEQ ID NO: 2940960 - RNA, 14 nt, Human
auaauuacuauguc

SEQ ID NO: 2940961 - RNA, 13 nt, Human
auauucaggaagc

SEQ ID NO: 2940962 - RNA, 16 nt, Human
auauucaggaagcuca

SEQ ID NO: 2940963 - RNA, 14 nt, Human
auauucaggaagcu

SEQ ID NO: 2940964 - RNA, 18 nt, Human
auauuuauuuuaauaaug

SEQ ID NO: 2940965 - RNA, 14 nt, Human
auauuuauuacugu

SEQ ID NO: 2940966 - RNA, 19 nt, Human
auauuuauuacuguaagaa

SEQ ID NO: 2940967 - RNA, 19 nt, Human
auauccuaggagguaauga

SEQ ID NO: 2940968 - RNA, 22 nt, Human
auaugccugggcagaaggaaga

SEQ ID NO: 2940969 - RNA, 23 nt, Human
auaugcuucuguuuuauaauuuu

SEQ ID NO: 2940970 - RNA, 19 nt, Human
auaugcuuauacacuuaca

SEQ ID NO: 2940971 - RNA, 14 nt, Human
auaugcuuauacac

SEQ ID NO: 2940972 - RNA, 16 nt, Human
auaugcuuauacacuu

SEQ ID NO: 2940973 - RNA, 23 nt, Human
auauccuaauaaaaaggugacca

SEQ ID NO: 2940974 - RNA, 19 nt, Human
auaucccuuggacauuuua

SEQ ID NO: 2940975 - RNA, 11 nt, Human
auaucacuucc

SEQ ID NO: 2940976 - RNA, 18 nt, Human
auaucacuugucaauaaa

SEQ ID NO: 2940977 - RNA, 15 nt, Human
auaucaauuuaaaaa

SEQ ID NO: 2940978 - RNA, 17 nt, Human
auauagcaagacauuau

SEQ ID NO: 2940979 - RNA, 23 nt, Human
auauagcuaggugacauauacau

SEQ ID NO: 2940980 - RNA, 15 nt, Human
auauacauacuuaca

SEQ ID NO: 2940981 - RNA, 22 nt, Human
auauacauacuuacaugugugu

SEQ ID NO: 2940982 - RNA, 16 nt, Human
auauaggaacuuaaau

SEQ ID NO: 2940983 - RNA, 22 nt, Human
auacuuauuuaaauagaugaca

SEQ ID NO: 2940984 - RNA, 15 nt, Human
auacuuauuuaaaua

SEQ ID NO: 2940985 - RNA, 21 nt, Human
auacuuauuuaaauagaugac

SEQ ID NO: 2940986 - RNA, 15 nt, Human
auaguaugguggcug

SEQ ID NO: 2940987 - RNA, 22 nt, Human
auauaauuccuguuuuuauuau

SEQ ID NO: 2940988 - RNA, 16 nt, Human
auauaauuccuguuuu

SEQ ID NO: 2940989 - RNA, 16 nt, Human
auaguaugguggcugg

SEQ ID NO: 2940990 - RNA, 23 nt, Human
agugugacaaggauugcuacugu

SEQ ID NO: 2940991 - RNA, 21 nt, Human
agugucuuaauuaaaagaaua

SEQ ID NO: 2940992 - RNA, 18 nt, Human
agugauuaccagggacug

SEQ ID NO: 2940993 - RNA, 15 nt, Human
agugauuaccaggga

SEQ ID NO: 2940994 - RNA, 18 nt, Human
aguuacagacaaagcgug

SEQ ID NO: 2940995 - RNA, 17 nt, Human
aguuacagacaaagcgu

SEQ ID NO: 2940996 - RNA, 19 nt, Human
aguuguaccgcaaugugac

SEQ ID NO: 2940997 - RNA, 18 nt, Human
aguuguaccgcaauguga

SEQ ID NO: 2940998 - RNA, 15 nt, Human
aguugaauuuuacau

SEQ ID NO: 2940999 - RNA, 13 nt, Human
aguuguuacauuu

SEQ ID NO: 2941000 - RNA, 15 nt, Human
aguuguuacauuuuu

SEQ ID NO: 2941001 - RNA, 16 nt, Human
aguuguuacauuuuua

SEQ ID NO: 2941002 - RNA, 13 nt, Human
aguccugcccgcc

SEQ ID NO: 2941003 - RNA, 13 nt, Human
agugauccuccca

SEQ ID NO: 2941004 - RNA, 12 nt, Human
agucauuauguu

SEQ ID NO: 2941005 - RNA, 18 nt, Human
agucauuauguuaauauu

SEQ ID NO: 2941006 - RNA, 23 nt, Human
agucauucagauaugauucaaau

SEQ ID NO: 2941007 - RNA, 15 nt, Human
agucauucagauaug

SEQ ID NO: 2941008 - RNA, 20 nt, Human
agucauucagauaugauuca

SEQ ID NO: 2941009 - RNA, 21 nt, Human
aguccaagcauuuagauguau

SEQ ID NO: 2941010 - RNA, 16 nt, Human
aguccaagcauuuaga

SEQ ID NO: 2941011 - RNA, 11 nt, Human
aguccaagcau

SEQ ID NO: 2941012 - RNA, 13 nt, Human
agucauucuuuaa

SEQ ID NO: 2941013 - RNA, 14 nt, Human
agucauucuucccu

SEQ ID NO: 2941014 - RNA, 16 nt, Human
agucaaggcuuagacc

SEQ ID NO: 2941015 - RNA, 16 nt, Human
agucaagugaaaaagg

SEQ ID NO: 2941016 - RNA, 14 nt, Human
agucaaggcuuaga

SEQ ID NO: 2941017 - RNA, 15 nt, Human
agucaaauuguguga

SEQ ID NO: 2941018 - RNA, 17 nt, Human
agucaaauugugugaaa

SEQ ID NO: 2941019 - RNA, 13 nt, Human
agucaaauugugu

SEQ ID NO: 2941020 - RNA, 20 nt, Human
agucaagugaaaaaggagga

SEQ ID NO: 2941021 - RNA, 17 nt, Human
aucuucuuuauaauucu

SEQ ID NO: 2941022 - RNA, 17 nt, Human
aucuugaagacuuuucu

SEQ ID NO: 2941023 - RNA, 22 nt, Human
aucucucgugauugauaagaac

SEQ ID NO: 2941024 - RNA, 22 nt, Human
aucuucauggaauucacaaagu

SEQ ID NO: 2941025 - RNA, 23 nt, Human
aucuucauggaauucacaaagua

SEQ ID NO: 2941026 - RNA, 23 nt, Human
aucuucuauauaauuccuguuuu

SEQ ID NO: 2941027 - RNA, 19 nt, Human
aucuuccaacucaaacucu

SEQ ID NO: 2941028 - RNA, 22 nt, Human
aucuuauaauuuaaaauaugcu

SEQ ID NO: 2941029 - RNA, 19 nt, Human
augaaaauaaucucugauu

SEQ ID NO: 2941030 - RNA, 17 nt, Human
augaaaauaaucucuga

SEQ ID NO: 2941031 - RNA, 17 nt, Human
augaaaagccucuguuu

SEQ ID NO: 2941032 - RNA, 12 nt, Human
augacccagugg

SEQ ID NO: 2941033 - RNA, 18 nt, Human
augacuauucaguggcua

SEQ ID NO: 2941034 - RNA, 16 nt, Human
augacuccagaauuuc

SEQ ID NO: 2941035 - RNA, 12 nt, Human
augacuccagaa

SEQ ID NO: 2941036 - RNA, 17 nt, Human
augacuccagaauuucc

SEQ ID NO: 2941037 - RNA, 12 nt, Human
augagccuggca

SEQ ID NO: 2941038 - RNA, 18 nt, Human
augacucuucccucaaau

SEQ ID NO: 2941039 - RNA, 14 nt, Human
augagccuggcaag

SEQ ID NO: 2941040 - RNA, 13 nt, Human
augagccuggcaa

SEQ ID NO: 2941041 - RNA, 13 nt, Human
aucgaugcagugc

SEQ ID NO: 2941042 - RNA, 14 nt, Human
auccuccucagauc

SEQ ID NO: 2941043 - RNA, 11 nt, Human
auccuccucag

SEQ ID NO: 2941044 - RNA, 22 nt, Human
auccuccaggugcacaagcucc

SEQ ID NO: 2941045 - RNA, 19 nt, Human
auccuccaggugcacaagc

SEQ ID NO: 2941046 - RNA, 14 nt, Human
auccuccaggugca

SEQ ID NO: 2941047 - RNA, 13 nt, Human
auccuccaggugc

SEQ ID NO: 2941048 - RNA, 15 nt, Human
aucccuacuguaauu

SEQ ID NO: 2941049 - RNA, 22 nt, Human
auccucauacccacccccaccc

SEQ ID NO: 2941050 - RNA, 19 nt, Human
auccucauacccaccccca

SEQ ID NO: 2941051 - RNA, 18 nt, Human
auccucauacccaccccc

SEQ ID NO: 2941052 - RNA, 18 nt, Human
auccacccaccucagccu

SEQ ID NO: 2941053 - RNA, 20 nt, Human
auccacccaccucagccucc

SEQ ID NO: 2941054 - RNA, 16 nt, Human
auccacccaccucagc

SEQ ID NO: 2941055 - RNA, 12 nt, Human
aucagcugcuac

SEQ ID NO: 2941056 - RNA, 21 nt, Human
aucagccugggcaaugugaua

SEQ ID NO: 2941057 - RNA, 20 nt, Human
aucagccugggcaaugugau

SEQ ID NO: 2941058 - RNA, 11 nt, Human
aucagccuggg

SEQ ID NO: 2941059 - RNA, 19 nt, Human
aucauggagguuugaagau

SEQ ID NO: 2941060 - RNA, 17 nt, Human
aucagcugcugaaacaa

SEQ ID NO: 2941061 - RNA, 20 nt, Human
aucagccugcuccagcuguu

SEQ ID NO: 2941062 - RNA, 13 nt, Human
aucagcugcuacu

SEQ ID NO: 2941063 - RNA, 23 nt, Human
aucagcugcuacuacuccuguag

SEQ ID NO: 2941064 - RNA, 13 nt, Human
auguguaauaaau

SEQ ID NO: 2941065 - RNA, 17 nt, Human
auguguaauaaauaugu

SEQ ID NO: 2941066 - RNA, 22 nt, Human
auguguaauaaauauguuucac

SEQ ID NO: 2941067 - RNA, 14 nt, Human
auguguaaguauuc

SEQ ID NO: 2941068 - RNA, 20 nt, Human
augugggcuaguugggcuuc

SEQ ID NO: 2941069 - RNA, 18 nt, Human
auguucucugaggacacu

SEQ ID NO: 2941070 - RNA, 20 nt, Human
auguucuuucacccuuuucu

SEQ ID NO: 2941071 - RNA, 15 nt, Human
auguucuuaauucuu

SEQ ID NO: 2941072 - RNA, 20 nt, Human
auguucuuaguggauguucu

SEQ ID NO: 2941073 - RNA, 22 nt, Human
auguucugacccugcuucaaau

SEQ ID NO: 2941074 - RNA, 14 nt, Human
auguucuuaauucu

SEQ ID NO: 2941075 - RNA, 16 nt, Human
auguuuuaagaggcag

SEQ ID NO: 2941076 - RNA, 18 nt, Human
auguuuuaagaggcaggg

SEQ ID NO: 2941077 - RNA, 17 nt, Human
auuaaaugacucuuccc

SEQ ID NO: 2941078 - RNA, 15 nt, Human
auuaaaugcccagcc

SEQ ID NO: 2941079 - RNA, 14 nt, Human
auuaaaugcccagc

SEQ ID NO: 2941080 - RNA, 21 nt, Human
auuaaaugacucuucccucaa

SEQ ID NO: 2941081 - RNA, 11 nt, Human
auuaaauuaug

SEQ ID NO: 2941082 - RNA, 16 nt, Human
auuaaaugcccagccc

SEQ ID NO: 2941083 - RNA, 13 nt, Human
auuaaauucuugc

SEQ ID NO: 2941084 - RNA, 21 nt, Human
augucagacacagauuggcca

SEQ ID NO: 2941085 - RNA, 15 nt, Human
augucacuucuggau

SEQ ID NO: 2941086 - RNA, 18 nt, Human
augucacuucuggauaua

SEQ ID NO: 2941087 - RNA, 13 nt, Human
augucagacacag

SEQ ID NO: 2941088 - RNA, 15 nt, Human
augucagacacagau

SEQ ID NO: 2941089 - RNA, 20 nt, Human
augucagacacagauuggcc

SEQ ID NO: 2941090 - RNA, 15 nt, Human
augucacaggcaggu

SEQ ID NO: 2941091 - RNA, 14 nt, Human
augucacaggcagg

SEQ ID NO: 2941092 - RNA, 16 nt, Human
augucacaggcagguc

SEQ ID NO: 2941093 - RNA, 15 nt, Human
auggucggaaaacau

SEQ ID NO: 2941094 - RNA, 16 nt, Human
auguaaguaaacgguc

SEQ ID NO: 2941095 - RNA, 20 nt, Human
auguaagggaaacugccagc

SEQ ID NO: 2941096 - RNA, 17 nt, Human
auguaagcucuacugag

SEQ ID NO: 2941097 - RNA, 22 nt, Human
auguaagggaaacugccagcaa

SEQ ID NO: 2941098 - RNA, 21 nt, Human
auguaagggaaacugccagca

SEQ ID NO: 2941099 - RNA, 15 nt, Human
augggaaugaauguc

SEQ ID NO: 2941100 - RNA, 23 nt, Human
auggcugccaaugggagcucaug

SEQ ID NO: 2941101 - RNA, 22 nt, Human
augcuucuucagagacuccugc

SEQ ID NO: 2941102 - RNA, 23 nt, Human
augcuugcugcugauuuaaacac

SEQ ID NO: 2941103 - RNA, 16 nt, Human
augcuugcugcugauu

SEQ ID NO: 2941104 - RNA, 22 nt, Human
augcuugcugcugauuuaaaca

SEQ ID NO: 2941105 - RNA, 20 nt, Human
auggaaaugggcagagcaga

SEQ ID NO: 2941106 - RNA, 19 nt, Human
auggaaaugggcagagcag

SEQ ID NO: 2941107 - RNA, 21 nt, Human
augcacagcuaacauggaagu

SEQ ID NO: 2941108 - RNA, 14 nt, Human
augcacagcuaaca

SEQ ID NO: 2941109 - RNA, 23 nt, Human
augcacagaguuguuacauuuuu

SEQ ID NO: 2941110 - RNA, 17 nt, Human
augcacacauuuuuuaa

SEQ ID NO: 2941111 - RNA, 19 nt, Human
augcacacauuuuuuaaau

SEQ ID NO: 2941112 - RNA, 22 nt, Human
augcacacauuuuuuaaaugca

SEQ ID NO: 2941113 - RNA, 20 nt, Human
augcaugaaguaauaugcac

SEQ ID NO: 2941114 - RNA, 23 nt, Human
augcaugaaguaauaugcacaca

SEQ ID NO: 2941115 - RNA, 18 nt, Human
augcauuugaaaauuuug

SEQ ID NO: 2941116 - RNA, 10 nt, Human
augcauuuga

SEQ ID NO: 2941117 - RNA, 12 nt, Human
augcauuugaaa

SEQ ID NO: 2941118 - RNA, 15 nt, Human
augccugguggcagc

SEQ ID NO: 2941119 - RNA, 16 nt, Human
augccugguggcagcu

SEQ ID NO: 2941120 - RNA, 17 nt, Human
augccugguggcagcug

SEQ ID NO: 2941121 - RNA, 17 nt, Human
augccugggcagaagga

SEQ ID NO: 2941122 - RNA, 23 nt, Human
augccuggauggggcugcaccgg

SEQ ID NO: 2941123 - RNA, 21 nt, Human
augccuggauggggcugcacc

SEQ ID NO: 2941124 - RNA, 15 nt, Human
aggaaaaacugauuu

SEQ ID NO: 2941125 - RNA, 13 nt, Human
aggaaaaacugau

SEQ ID NO: 2941126 - RNA, 18 nt, Human
agcuucacuguaaaauaa

SEQ ID NO: 2941127 - RNA, 17 nt, Human
agcugggugucaagagg

SEQ ID NO: 2941128 - RNA, 22 nt, Human
agcugggugucaagagggucug

SEQ ID NO: 2941129 - RNA, 21 nt, Human
agcuggucccacucaguccau

SEQ ID NO: 2941130 - RNA, 19 nt, Human
agcuggucccacucagucc

SEQ ID NO: 2941131 - RNA, 17 nt, Human
aggaggggauagagaga

SEQ ID NO: 2941132 - RNA, 18 nt, Human
aggauguucugggacaca

SEQ ID NO: 2941133 - RNA, 20 nt, Human
aggauguucugggacacagu

SEQ ID NO: 2941134 - RNA, 14 nt, Human
aggauguugaaaaa

SEQ ID NO: 2941135 - RNA, 12 nt, Human
aggauucuuccu

SEQ ID NO: 2941136 - RNA, 18 nt, Human
aggagaggggcacagggu

SEQ ID NO: 2941137 - RNA, 16 nt, Human
aggagaggggcacagg

SEQ ID NO: 2941138 - RNA, 14 nt, Human
aggagaggggcaca

SEQ ID NO: 2941139 - RNA, 15 nt, Human
aggagagcuagcagc

SEQ ID NO: 2941140 - RNA, 20 nt, Human
aggaccucaggugagaagca

SEQ ID NO: 2941141 - RNA, 14 nt, Human
aggaccucagguga

SEQ ID NO: 2941142 - RNA, 20 nt, Human
aggaccccuccaugugggcu

SEQ ID NO: 2941143 - RNA, 15 nt, Human
agguucaaagauauu

SEQ ID NO: 2941144 - RNA, 17 nt, Human
agguucaaagauauuuu

SEQ ID NO: 2941145 - RNA, 14 nt, Human
agguuaauguucau

SEQ ID NO: 2941146 - RNA, 15 nt, Human
agguuaauaaaguaa

SEQ ID NO: 2941147 - RNA, 13 nt, Human
agguucagcuugu

SEQ ID NO: 2941148 - RNA, 17 nt, Human
aggugcugccauccagg

SEQ ID NO: 2941149 - RNA, 16 nt, Human
aggugcugccauccag

SEQ ID NO: 2941150 - RNA, 14 nt, Human
aggucgaggcagga

SEQ ID NO: 2941151 - RNA, 17 nt, Human
agguacacuugugaaua

SEQ ID NO: 2941152 - RNA, 16 nt, Human
agguacacuugugaau

SEQ ID NO: 2941153 - RNA, 17 nt, Human
agguaaggaauaccugu

SEQ ID NO: 2941154 - RNA, 17 nt, Human
agggcacaccgggcacu

SEQ ID NO: 2941155 - RNA, 20 nt, Human
agggcacaccgggcacucag

SEQ ID NO: 2941156 - RNA, 21 nt, Human
agggcacaccgggcacucaga

SEQ ID NO: 2941157 - RNA, 22 nt, Human
agggcacagaaaauggaagaca

SEQ ID NO: 2941158 - RNA, 17 nt, Human
agggccuggccugagcu

SEQ ID NO: 2941159 - RNA, 16 nt, Human
agggccuggccugagc

SEQ ID NO: 2941160 - RNA, 15 nt, Human
agggccuggccugag

SEQ ID NO: 2941161 - RNA, 19 nt, Human
agggcgggaggauguucug

SEQ ID NO: 2941162 - RNA, 16 nt, Human
aggggauagagagaga

SEQ ID NO: 2941163 - RNA, 21 nt, Human
aggggauagagagagaccacu

SEQ ID NO: 2941164 - RNA, 15 nt, Human
aggggcacagggucu

SEQ ID NO: 2941165 - RNA, 23 nt, Human
aggcuagugugguguuuccuggc

SEQ ID NO: 2941166 - RNA, 19 nt, Human
aggcugccagugccugggu

SEQ ID NO: 2941167 - RNA, 20 nt, Human
aggcugccagugccugggug

SEQ ID NO: 2941168 - RNA, 14 nt, Human
aggcugccagugcc

SEQ ID NO: 2941169 - RNA, 15 nt, Human
aggcugccagugccu

SEQ ID NO: 2941170 - RNA, 16 nt, Human
aggcugccagugccug

SEQ ID NO: 2941171 - RNA, 18 nt, Human
aggcugccucucccauca

SEQ ID NO: 2941172 - RNA, 17 nt, Human
agggacgcuacccggga

SEQ ID NO: 2941173 - RNA, 21 nt, Human
agggacgcuacccgggaaggg

SEQ ID NO: 2941174 - RNA, 20 nt, Human
agggacagaggggguggccu

SEQ ID NO: 2941175 - RNA, 13 nt, Human
agggacagagggg

SEQ ID NO: 2941176 - RNA, 12 nt, Human
agggacagaggg

SEQ ID NO: 2941177 - RNA, 21 nt, Human
agauaggucagugcaaauacu

SEQ ID NO: 2941178 - RNA, 16 nt, Human
agauagccaaggccaa

SEQ ID NO: 2941179 - RNA, 15 nt, Human
agauagccaaggcca

SEQ ID NO: 2941180 - RNA, 13 nt, Human
agaggagaggggc

SEQ ID NO: 2941181 - RNA, 22 nt, Human
agaggggaacagacuggaagca

SEQ ID NO: 2941182 - RNA, 16 nt, Human
agaggggaagagacuu

SEQ ID NO: 2941183 - RNA, 13 nt, Human
agauagccaaggc

SEQ ID NO: 2941184 - RNA, 22 nt, Human
agauacuuggggggcugaggug

SEQ ID NO: 2941185 - RNA, 23 nt, Human
agaggguggugaccucugccuga

SEQ ID NO: 2941186 - RNA, 18 nt, Human
agagguacacuugugaau

SEQ ID NO: 2941187 - RNA, 17 nt, Human
agagguacacuugugaa

SEQ ID NO: 2941188 - RNA, 16 nt, Human
agagguacacuuguga

SEQ ID NO: 2941189 - RNA, 13 nt, Human
agacaaugacuua

SEQ ID NO: 2941190 - RNA, 17 nt, Human
agacaaugacuuacugu

SEQ ID NO: 2941191 - RNA, 21 nt, Human
agacaauuuauuauggcacau

SEQ ID NO: 2941192 - RNA, 19 nt, Human
agacaaugacuuacuguac

SEQ ID NO: 2941193 - RNA, 15 nt, Human
agacaauuuauuaug

SEQ ID NO: 2941194 - RNA, 13 nt, Human
agaccaucccuga

SEQ ID NO: 2941195 - RNA, 21 nt, Human
agaccaucccugaaggccccg

SEQ ID NO: 2941196 - RNA, 18 nt, Human
agaccaucccugaaggcc

SEQ ID NO: 2941197 - RNA, 17 nt, Human
agaccaucccugaaggc

SEQ ID NO: 2941198 - RNA, 14 nt, Human
agaccaucccugaa

SEQ ID NO: 2941199 - RNA, 16 nt, Human
agacagcccgggcucu

SEQ ID NO: 2941200 - RNA, 17 nt, Human
agacagcccgggcucug

SEQ ID NO: 2941201 - RNA, 20 nt, Human
agacagcccgggcucugccu

SEQ ID NO: 2941202 - RNA, 18 nt, Human
agacagcccgggcucugc

SEQ ID NO: 2941203 - RNA, 18 nt, Human
agacgggggcagagaggg

SEQ ID NO: 2941204 - RNA, 19 nt, Human
agacggagucccaccuugg

SEQ ID NO: 2941205 - RNA, 23 nt, Human
agacugaguacguugugcauuug

SEQ ID NO: 2941206 - RNA, 13 nt, Human
agagccccacagc

SEQ ID NO: 2941207 - RNA, 15 nt, Human
agagccccacagccc

SEQ ID NO: 2941208 - RNA, 23 nt, Human
agagaggguggugaccucugccu

SEQ ID NO: 2941209 - RNA, 21 nt, Human
agagaagagauugugguuuca

SEQ ID NO: 2941210 - RNA, 10 nt, Human
agagaagaga

SEQ ID NO: 2941211 - RNA, 17 nt, Human
agacugcauuauauuua

SEQ ID NO: 2941212 - RNA, 18 nt, Human
agccauuugucccaagug

SEQ ID NO: 2941213 - RNA, 17 nt, Human
agccauuugucccaagu

SEQ ID NO: 2941214 - RNA, 14 nt, Human
agccauuuguccca

SEQ ID NO: 2941215 - RNA, 15 nt, Human
agccagauuuuccug

SEQ ID NO: 2941216 - RNA, 19 nt, Human
agccagauuuuccugaaaa

SEQ ID NO: 2941217 - RNA, 20 nt, Human
agccagaggagagaggaccc

SEQ ID NO: 2941218 - RNA, 20 nt, Human
agccaaggccaaaggaagca

SEQ ID NO: 2941219 - RNA, 22 nt, Human
agccaaggccaaaggaagcaca

SEQ ID NO: 2941220 - RNA, 23 nt, Human
agccaaggccaaaggaagcacau

SEQ ID NO: 2941221 - RNA, 18 nt, Human
agccaaagcuaggccugg

SEQ ID NO: 2941222 - RNA, 19 nt, Human
agccaaagcuaggccuggc

SEQ ID NO: 2941223 - RNA, 20 nt, Human
agccaaagcuaggccuggcc

SEQ ID NO: 2941224 - RNA, 23 nt, Human
agccaaagcuaggccuggccaga

SEQ ID NO: 2941225 - RNA, 12 nt, Human
agcaugaagaca

SEQ ID NO: 2941226 - RNA, 12 nt, Human
agcaugccugga

SEQ ID NO: 2941227 - RNA, 19 nt, Human
agcaguucagagcugcccu

SEQ ID NO: 2941228 - RNA, 21 nt, Human
agcagccacauuccugaugcu

SEQ ID NO: 2941229 - RNA, 19 nt, Human
agcacuaaggugugcucug

SEQ ID NO: 2941230 - RNA, 20 nt, Human
agcagcccucaauugugaaa

SEQ ID NO: 2941231 - RNA, 21 nt, Human
agcaguugaaaagacuccaaa

SEQ ID NO: 2941232 - RNA, 23 nt, Human
agcaguugaaaagacuccaaaga

SEQ ID NO: 2941233 - RNA, 16 nt, Human
agcaguucagagcugc

SEQ ID NO: 2941234 - RNA, 15 nt, Human
agcaguucagagcug

SEQ ID NO: 2941235 - RNA, 17 nt, Human
agcaguucagagcugcc

SEQ ID NO: 2941236 - RNA, 18 nt, Human
agcaguucagagcugccc

SEQ ID NO: 2941237 - RNA, 18 nt, Human
agauguacgacuugcaua

SEQ ID NO: 2941238 - RNA, 20 nt, Human
agauguagacaguuggguuu

SEQ ID NO: 2941239 - RNA, 21 nt, Human
agaugggagaaucacuugaac

SEQ ID NO: 2941240 - RNA, 14 nt, Human
agauguagaggaga

SEQ ID NO: 2941241 - RNA, 16 nt, Human
agccccagugcccaca

SEQ ID NO: 2941242 - RNA, 11 nt, Human
agccccauccu

SEQ ID NO: 2941243 - RNA, 20 nt, Human
agccccaucccaaacccuuc

SEQ ID NO: 2941244 - RNA, 18 nt, Human
agcccugaacauuucaug

SEQ ID NO: 2941245 - RNA, 15 nt, Human
agcccugagcuuucu

SEQ ID NO: 2941246 - RNA, 19 nt, Human
agccgagaucacgccacug

SEQ ID NO: 2941247 - RNA, 20 nt, Human
agccgagaucacgccacugc

SEQ ID NO: 2941248 - RNA, 19 nt, Human
agccccacccucagaugca

SEQ ID NO: 2941249 - RNA, 22 nt, Human
agccucccgaguagcugggacu

SEQ ID NO: 2941250 - RNA, 17 nt, Human
agccucccaaagugcug

SEQ ID NO: 2941251 - RNA, 20 nt, Human
agccucccaaagugcuggga

SEQ ID NO: 2941252 - RNA, 18 nt, Human
agccucccgaauagcugg

SEQ ID NO: 2941253 - RNA, 19 nt, Human
agccucccgaauagcuggg

SEQ ID NO: 2941254 - RNA, 20 nt, Human
agccucccgaauagcuggga

SEQ ID NO: 2941255 - RNA, 22 nt, Human
agccucccgaauagcugggacu

SEQ ID NO: 2941256 - RNA, 17 nt, Human
agccucccgaguagcug

SEQ ID NO: 2941257 - RNA, 21 nt, Human
agccgagaucacgccacugca

SEQ ID NO: 2941258 - RNA, 19 nt, Human
agccgagauugcaccacug

SEQ ID NO: 2941259 - RNA, 20 nt, Human
agccgagauugcaccacugc

SEQ ID NO: 2941260 - RNA, 22 nt, Human
agccgcuggggccaguuggucc

SEQ ID NO: 2941261 - RNA, 14 nt, Human
agccgcuggggcca

SEQ ID NO: 2941262 - RNA, 18 nt, Human
agccucccaaagugcugg

SEQ ID NO: 2941263 - RNA, 19 nt, Human
agccucccaaagugcuggg

SEQ ID NO: 2941264 - RNA, 21 nt, Human
agccgggcgugguggugagug

SEQ ID NO: 2941265 - RNA, 17 nt, Human
caauauucgcuguguca

SEQ ID NO: 2941266 - RNA, 16 nt, Human
caaucuggauucauau

SEQ ID NO: 2941267 - RNA, 20 nt, Human
caaucuggauucauauuuaa

SEQ ID NO: 2941268 - RNA, 23 nt, Human
caaugaccuuucaauaggaaaaa

SEQ ID NO: 2941269 - RNA, 23 nt, Human
caaucugugaugacauucccugc

SEQ ID NO: 2941270 - RNA, 17 nt, Human
caaugacuuacuguaca

SEQ ID NO: 2941271 - RNA, 18 nt, Human
caaugacuuacuguacau

SEQ ID NO: 2941272 - RNA, 15 nt, Human
caaugacuuacugua

SEQ ID NO: 2941273 - RNA, 21 nt, Human
caaugaccuuucaauaggaaa

SEQ ID NO: 2941274 - RNA, 16 nt, Human
caaguuaguucaaucu

SEQ ID NO: 2941275 - RNA, 13 nt, Human
caauaggaaaaac

SEQ ID NO: 2941276 - RNA, 12 nt, Human
caauaggaaaaa

SEQ ID NO: 2941277 - RNA, 23 nt, Human
caauacaucccuuaccugggaaa

SEQ ID NO: 2941278 - RNA, 17 nt, Human
caaugugauaaaacccc

SEQ ID NO: 2941279 - RNA, 15 nt, Human
caaugugauaaaacc

SEQ ID NO: 2941280 - RNA, 14 nt, Human
caauuugcacauua

SEQ ID NO: 2941281 - RNA, 15 nt, Human
caauuugcacauuaa

SEQ ID NO: 2941282 - RNA, 22 nt, Human
caauuugcacauuaaaugacuc

SEQ ID NO: 2941283 - RNA, 23 nt, Human
caauucucauuugucacacacuu

SEQ ID NO: 2941284 - RNA, 16 nt, Human
caauuacaggaaguac

SEQ ID NO: 2941285 - RNA, 19 nt, Human
caaugagaucauugugaag

SEQ ID NO: 2941286 - RNA, 17 nt, Human
caaugcacuuuguucug

SEQ ID NO: 2941287 - RNA, 22 nt, Human
caaugcacuuuguucuggcucu

SEQ ID NO: 2941288 - RNA, 21 nt, Human
caaugcacuuuguucuggcuc

SEQ ID NO: 2941289 - RNA, 20 nt, Human
caaugcacuuuguucuggcu

SEQ ID NO: 2941290 - RNA, 22 nt, Human
caaugugacuuaaugccacuaa

SEQ ID NO: 2941291 - RNA, 14 nt, Human
caauaggaaaaacu

SEQ ID NO: 2941292 - RNA, 18 nt, Human
caagacgcugugcugccc

SEQ ID NO: 2941293 - RNA, 18 nt, Human
caagacucccaugaggga

SEQ ID NO: 2941294 - RNA, 23 nt, Human
caagacgcugugcugcccugccc

SEQ ID NO: 2941295 - RNA, 14 nt, Human
caagacucccauga

SEQ ID NO: 2941296 - RNA, 15 nt, Human
caagagcccaggccu

SEQ ID NO: 2941297 - RNA, 14 nt, Human
caagagcccaggcc

SEQ ID NO: 2941298 - RNA, 13 nt, Human
caagagcccaggc

SEQ ID NO: 2941299 - RNA, 18 nt, Human
caagacucuuuggacacu

SEQ ID NO: 2941300 - RNA, 16 nt, Human
caagagcccaggccuc

SEQ ID NO: 2941301 - RNA, 15 nt, Human
caagcaccuccugcc

SEQ ID NO: 2941302 - RNA, 16 nt, Human
caagcaccuccugccu

SEQ ID NO: 2941303 - RNA, 17 nt, Human
caagcaccuccugccuc

SEQ ID NO: 2941304 - RNA, 20 nt, Human
caagaacuuuccaggaaggc

SEQ ID NO: 2941305 - RNA, 16 nt, Human
caagaccuucuccuuc

SEQ ID NO: 2941306 - RNA, 14 nt, Human
caagaccuucuccu

SEQ ID NO: 2941307 - RNA, 17 nt, Human
caagacgcugugcugcc

SEQ ID NO: 2941308 - RNA, 16 nt, Human
caagacgcugugcugc

SEQ ID NO: 2941309 - RNA, 18 nt, Human
caagaccuucuccuucac

SEQ ID NO: 2941310 - RNA, 17 nt, Human
caagaccuucuccuuca

SEQ ID NO: 2941311 - RNA, 14 nt, Human
caacgucugugcca

SEQ ID NO: 2941312 - RNA, 13 nt, Human
caacgucugugcc

SEQ ID NO: 2941313 - RNA, 15 nt, Human
caaccuccugggcua

SEQ ID NO: 2941314 - RNA, 14 nt, Human
caaccuccugggcu

SEQ ID NO: 2941315 - RNA, 22 nt, Human
caaccccuucgcuccugugucu

SEQ ID NO: 2941316 - RNA, 22 nt, Human
caacacucacauuuauucugcu

SEQ ID NO: 2941317 - RNA, 18 nt, Human
caacacucauugaccuga

SEQ ID NO: 2941318 - RNA, 22 nt, Human
caacacucauugaccugaggcc

SEQ ID NO: 2941319 - RNA, 20 nt, Human
caacacucauugaccugagg

SEQ ID NO: 2941320 - RNA, 14 nt, Human
caaguuaaauaaau

SEQ ID NO: 2941321 - RNA, 18 nt, Human
caagugagagcugggugu

SEQ ID NO: 2941322 - RNA, 21 nt, Human
caaguccucuuuucugagagg

SEQ ID NO: 2941323 - RNA, 14 nt, Human
caagugagagcugg

SEQ ID NO: 2941324 - RNA, 15 nt, Human
caagugagagcuggg

SEQ ID NO: 2941325 - RNA, 17 nt, Human
caagugagagcugggug

SEQ ID NO: 2941326 - RNA, 14 nt, Human
caaggucauuuuuu

SEQ ID NO: 2941327 - RNA, 20 nt, Human
caaggucauuuuuuuuaaga

SEQ ID NO: 2941328 - RNA, 14 nt, Human
caaguccucuuuuc

SEQ ID NO: 2941329 - RNA, 14 nt, Human
caaggcuuagaccc

SEQ ID NO: 2941330 - RNA, 17 nt, Human
caaggggcccaaauucu

SEQ ID NO: 2941331 - RNA, 15 nt, Human
caaggcuuagacccu

SEQ ID NO: 2941332 - RNA, 18 nt, Human
caaggggcccaaauucuu

SEQ ID NO: 2941333 - RNA, 23 nt, Human
caaggcugucaauuacaggaagu

SEQ ID NO: 2941334 - RNA, 21 nt, Human
caaggcugucaauuacaggaa

SEQ ID NO: 2941335 - RNA, 15 nt, Human
caaggcugugcaucu

SEQ ID NO: 2941336 - RNA, 15 nt, Human
caaggcugcagugag

SEQ ID NO: 2941337 - RNA, 12 nt, Human
caaggcugcagu

SEQ ID NO: 2941338 - RNA, 18 nt, Human
caaggcuuagacccucau

SEQ ID NO: 2941339 - RNA, 20 nt, Human
caagcgauucuucugcuuca

SEQ ID NO: 2941340 - RNA, 22 nt, Human
caagcgauucuucugcuucagc

SEQ ID NO: 2941341 - RNA, 19 nt, Human
caagcgauucuucugcuuc

SEQ ID NO: 2941342 - RNA, 18 nt, Human
caagcaggacauggacaa

SEQ ID NO: 2941343 - RNA, 14 nt, Human
caagcaggacaugg

SEQ ID NO: 2941344 - RNA, 22 nt, Human
caagccaccaacauacucccau

SEQ ID NO: 2941345 - RNA, 21 nt, Human
caagccagauuuuccugaaaa

SEQ ID NO: 2941346 - RNA, 17 nt, Human
caagcuggucccacuca

SEQ ID NO: 2941347 - RNA, 19 nt, Human
caagcuggucccacucagu

SEQ ID NO: 2941348 - RNA, 17 nt, Human
caaggcugauuaaacca

SEQ ID NO: 2941349 - RNA, 21 nt, Human
caaauacgugggcauucaaau

SEQ ID NO: 2941350 - RNA, 22 nt, Human
caaauacgugggcauucaaaug

SEQ ID NO: 2941351 - RNA, 20 nt, Human
caaauacgugggcauucaaa

SEQ ID NO: 2941352 - RNA, 23 nt, Human
caaagugcugggauuacaggugu

SEQ ID NO: 2941353 - RNA, 19 nt, Human
caaagugcugggauuacag

SEQ ID NO: 2941354 - RNA, 19 nt, Human
caaaggguaucaggugcug

SEQ ID NO: 2941355 - RNA, 21 nt, Human
caaauaugcaaagcacugacu

SEQ ID NO: 2941356 - RNA, 19 nt, Human
caaauaugcaaagcacuga

SEQ ID NO: 2941357 - RNA, 15 nt, Human
caaaugucuauaaac

SEQ ID NO: 2941358 - RNA, 14 nt, Human
caaaugucuauaaa

SEQ ID NO: 2941359 - RNA, 11 nt, Human
caaauuucuaa

SEQ ID NO: 2941360 - RNA, 12 nt, Human
caaauuucuaaa

SEQ ID NO: 2941361 - RNA, 14 nt, Human
caaauuucuaaauc

SEQ ID NO: 2941362 - RNA, 16 nt, Human
caaaauuuuuucucua

SEQ ID NO: 2941363 - RNA, 21 nt, Human
caaaauuuuuucucuaggaaa

SEQ ID NO: 2941364 - RNA, 22 nt, Human
caaaauuuuuucucuaggaaau

SEQ ID NO: 2941365 - RNA, 15 nt, Human
caaacacauacagga

SEQ ID NO: 2941366 - RNA, 14 nt, Human
caaacuaacaggcu

SEQ ID NO: 2941367 - RNA, 20 nt, Human
caaacccuucagugccaaaa

SEQ ID NO: 2941368 - RNA, 14 nt, Human
caaacccuucagug

SEQ ID NO: 2941369 - RNA, 12 nt, Human
caaaauaaaacu

SEQ ID NO: 2941370 - RNA, 15 nt, Human
caaaauguaggguua

SEQ ID NO: 2941371 - RNA, 22 nt, Human
caaagccaaagcuaggccuggc

SEQ ID NO: 2941372 - RNA, 18 nt, Human
caaagccuccuccagccg

SEQ ID NO: 2941373 - RNA, 17 nt, Human
caaagccuccuccagcc

SEQ ID NO: 2941374 - RNA, 16 nt, Human
caaacuaacaggcuua

SEQ ID NO: 2941375 - RNA, 20 nt, Human
caaacuaacaggcuuaguga

SEQ ID NO: 2941376 - RNA, 17 nt, Human
caaacucaccugccccu

SEQ ID NO: 2941377 - RNA, 13 nt, Human
caaaggaagcaca

SEQ ID NO: 2941378 - RNA, 12 nt, Human
caaaggaagcac

SEQ ID NO: 2941379 - RNA, 13 nt, Human
caaagcuaggccu

SEQ ID NO: 2941380 - RNA, 14 nt, Human
caaagcuaggccug

SEQ ID NO: 2941381 - RNA, 19 nt, Human
caaagcuaggccuggccag

SEQ ID NO: 2941382 - RNA, 14 nt, Human
caaaggaagcacau

SEQ ID NO: 2941383 - RNA, 16 nt, Human
caaaggguaucaggug

SEQ ID NO: 2941384 - RNA, 18 nt, Human
caaaggguaucaggugcu

SEQ ID NO: 2941385 - RNA, 13 nt, Human
caaaaaggcagga

SEQ ID NO: 2941386 - RNA, 14 nt, Human
caaaaacacagcaa

SEQ ID NO: 2941387 - RNA, 13 nt, Human
caaaaacacagca

SEQ ID NO: 2941388 - RNA, 20 nt, Human
caaaaacauggccuuugcuu

SEQ ID NO: 2941389 - RNA, 17 nt, Human
caaaaacacagcaaggg

SEQ ID NO: 2941390 - RNA, 15 nt, Human
caaaaacacagcaag

SEQ ID NO: 2941391 - RNA, 22 nt, Human
auuuugggguacccacugcucu

SEQ ID NO: 2941392 - RNA, 23 nt, Human
auuuugggguacccacugcucug

SEQ ID NO: 2941393 - RNA, 16 nt, Human
caaaaaaugcuugcuu

SEQ ID NO: 2941394 - RNA, 21 nt, Human
auuuugggguacccacugcuc

SEQ ID NO: 2941395 - RNA, 13 nt, Human
auuuuccugaaaa

SEQ ID NO: 2941396 - RNA, 19 nt, Human
caaaaaucucaauauuuca

SEQ ID NO: 2941397 - RNA, 22 nt, Human
caaaacucuccucugcugcugg

SEQ ID NO: 2941398 - RNA, 21 nt, Human
caaaacucuccucugcugcug

SEQ ID NO: 2941399 - RNA, 20 nt, Human
caaaacucuccucugcugcu

SEQ ID NO: 2941400 - RNA, 17 nt, Human
caaaauaaaaaugaggu

SEQ ID NO: 2941401 - RNA, 23 nt, Human
caaaacuucagacauagaauuaa

SEQ ID NO: 2941402 - RNA, 15 nt, Human
cacaguucucuccuu

SEQ ID NO: 2941403 - RNA, 14 nt, Human
cacaguucucuccu

SEQ ID NO: 2941404 - RNA, 23 nt, Human
cacaguguguggucaacauuucu

SEQ ID NO: 2941405 - RNA, 21 nt, Human
cacaguguguggucaacauuu

SEQ ID NO: 2941406 - RNA, 19 nt, Human
cacagugaucaaguuauuu

SEQ ID NO: 2941407 - RNA, 22 nt, Human
cacagugagucgaggacaggga

SEQ ID NO: 2941408 - RNA, 21 nt, Human
cacagugagucgaggacaggg

SEQ ID NO: 2941409 - RNA, 22 nt, Human
cacaguccuuaccagcagagca

SEQ ID NO: 2941410 - RNA, 21 nt, Human
cacaguccuuaccagcagagc

SEQ ID NO: 2941411 - RNA, 15 nt, Human
cacaguccuuaccag

SEQ ID NO: 2941412 - RNA, 13 nt, Human
cacaguccuuacc

SEQ ID NO: 2941413 - RNA, 11 nt, Human
cacaggcaggu

SEQ ID NO: 2941414 - RNA, 14 nt, Human
cacaggcaggucca

SEQ ID NO: 2941415 - RNA, 15 nt, Human
cacaggcagguccag

SEQ ID NO: 2941416 - RNA, 12 nt, Human
caauuuuaaaca

SEQ ID NO: 2941417 - RNA, 23 nt, Human
cacagcugggguggggaccucag

SEQ ID NO: 2941418 - RNA, 22 nt, Human
cacagcugggguggggaccuca

SEQ ID NO: 2941419 - RNA, 21 nt, Human
cacagcuucauuuccuguguc

SEQ ID NO: 2941420 - RNA, 22 nt, Human
cacagcuucauuuccugugucu

SEQ ID NO: 2941421 - RNA, 14 nt, Human
cacauaucugucau

SEQ ID NO: 2941422 - RNA, 15 nt, Human
cacaguuuucugaga

SEQ ID NO: 2941423 - RNA, 19 nt, Human
cacaguuuucugagaaaga

SEQ ID NO: 2941424 - RNA, 17 nt, Human
cacaguuuucugagaaa

SEQ ID NO: 2941425 - RNA, 16 nt, Human
cacaguuuucugagaa

SEQ ID NO: 2941426 - RNA, 22 nt, Human
cacuguggguagacacacauga

SEQ ID NO: 2941427 - RNA, 24 nt, Human
cacuguggguagacacacaugaag

SEQ ID NO: 2941428 - RNA, 22 nt, Human
cacuguucucugcccuccaaga

SEQ ID NO: 2941429 - RNA, 21 nt, Human
cacuguucucugcccuccaag

SEQ ID NO: 2941430 - RNA, 19 nt, Human
cacuguucucugcccucca

SEQ ID NO: 2941431 - RNA, 17 nt, Human
cacuguucucugcccuc

SEQ ID NO: 2941432 - RNA, 16 nt, Human
cacuguucucugcccu

SEQ ID NO: 2941433 - RNA, 15 nt, Human
cacuguucucugccc

SEQ ID NO: 2941434 - RNA, 14 nt, Human
cacuguucucugcc

SEQ ID NO: 2941435 - RNA, 13 nt, Human
cacuguucucugc

SEQ ID NO: 2941436 - RNA, 15 nt, Human
cacugugcugagucu

SEQ ID NO: 2941437 - RNA, 13 nt, Human
cacugugcugagu

SEQ ID NO: 2941438 - RNA, 18 nt, Human
cacugugccaugugccag

SEQ ID NO: 2941439 - RNA, 15 nt, Human
cacugugccaugugc

SEQ ID NO: 2941440 - RNA, 16 nt, Human
cacugugccaugugcc

SEQ ID NO: 2941441 - RNA, 19 nt, Human
cacuguggguagacacaca

SEQ ID NO: 2941442 - RNA, 22 nt, Human
cacugugcugagucugaaggcu

SEQ ID NO: 2941443 - RNA, 21 nt, Human
cacugugcugagucugaaggc

SEQ ID NO: 2941444 - RNA, 20 nt, Human
cacugugcugagucugaagg

SEQ ID NO: 2941445 - RNA, 17 nt, Human
cacugugcugagucuga

SEQ ID NO: 2941446 - RNA, 14 nt, Human
cacugucaagauga

SEQ ID NO: 2941447 - RNA, 16 nt, Human
cacuguccuauuauau

SEQ ID NO: 2941448 - RNA, 13 nt, Human
cacugugaagaga

SEQ ID NO: 2941449 - RNA, 14 nt, Human
cacugugccaugug

SEQ ID NO: 2941450 - RNA, 12 nt, Human
cacugguuuuaa

SEQ ID NO: 2941451 - RNA, 13 nt, Human
cacugguuuuaaa

SEQ ID NO: 2941452 - RNA, 15 nt, Human
cacugguuuuaaaua

SEQ ID NO: 2941453 - RNA, 16 nt, Human
cacugguuuuaaauau

SEQ ID NO: 2941454 - RNA, 18 nt, Human
cacugguuuguucccugu

SEQ ID NO: 2941455 - RNA, 13 nt, Human
cacuggcucaccc

SEQ ID NO: 2941456 - RNA, 14 nt, Human
cacuggcucaccca

SEQ ID NO: 2941457 - RNA, 15 nt, Human
cacuggcucacccag

SEQ ID NO: 2941458 - RNA, 17 nt, Human
cacuggcucacccaguc

SEQ ID NO: 2941459 - RNA, 18 nt, Human
cacuggcucacccagucc

SEQ ID NO: 2941460 - RNA, 14 nt, Human
cacuguacacauaa

SEQ ID NO: 2941461 - RNA, 16 nt, Human
cacuucccuacaugga

SEQ ID NO: 2941462 - RNA, 23 nt, Human
cacuucgggaggucgaggcagga

SEQ ID NO: 2941463 - RNA, 21 nt, Human
cacuucgggaggucgaggcag

SEQ ID NO: 2941464 - RNA, 22 nt, Human
cacuucugccauauucuguugg

SEQ ID NO: 2941465 - RNA, 22 nt, Human
cacuucuggauauagcuaggug

SEQ ID NO: 2941466 - RNA, 23 nt, Human
cacuucuggauauagcuagguga

SEQ ID NO: 2941467 - RNA, 21 nt, Human
cacuucagcugacuuuucugu

SEQ ID NO: 2941468 - RNA, 12 nt, Human
cacuucagcuga

SEQ ID NO: 2941469 - RNA, 20 nt, Human
cacuucacgcccuuggccau

SEQ ID NO: 2941470 - RNA, 21 nt, Human
cacuucacgcccuuggccaug

SEQ ID NO: 2941471 - RNA, 17 nt, Human
cacuucacgcccuuggc

SEQ ID NO: 2941472 - RNA, 19 nt, Human
cacuucacgcccuuggcca

SEQ ID NO: 2941473 - RNA, 24 nt, Human
cacuugcagacucuacagaggcca

SEQ ID NO: 2941474 - RNA, 14 nt, Human
cacuugcagacucu

SEQ ID NO: 2941475 - RNA, 18 nt, Human
cacuugcagacucuacag

SEQ ID NO: 2941476 - RNA, 19 nt, Human
cacuugcagacucuacaga

SEQ ID NO: 2941477 - RNA, 22 nt, Human
cacuugcagacucuacagaggc

SEQ ID NO: 2941478 - RNA, 15 nt, Human
cacuuggucugugag

SEQ ID NO: 2941479 - RNA, 18 nt, Human
cacuuucuagccagagga

SEQ ID NO: 2941480 - RNA, 20 nt, Human
cacuuucuagccagaggaga

SEQ ID NO: 2941481 - RNA, 19 nt, Human
cacuuucuagccagaggag

SEQ ID NO: 2941482 - RNA, 20 nt, Human
cacuugagaauuacccuuuu

SEQ ID NO: 2941483 - RNA, 19 nt, Human
cacuugacaucaacugcau

SEQ ID NO: 2941484 - RNA, 17 nt, Human
cacuugagaauuacccu

SEQ ID NO: 2941485 - RNA, 13 nt, Human
cacuugaguccag

SEQ ID NO: 2941486 - RNA, 13 nt, Human
cacuugcagacuc

SEQ ID NO: 2941487 - RNA, 20 nt, Human
cacuugaacccgggaggcag

SEQ ID NO: 2941488 - RNA, 21 nt, Human
cacuugaacccgggaggcaga

SEQ ID NO: 2941489 - RNA, 23 nt, Human
cacuugaacccgggaggcagagg

SEQ ID NO: 2941490 - RNA, 16 nt, Human
cacuugacaucaacug

SEQ ID NO: 2941491 - RNA, 22 nt, Human
cacuggcaaacagggccucugc

SEQ ID NO: 2941492 - RNA, 20 nt, Human
cacuggcaaacagggccucu

SEQ ID NO: 2941493 - RNA, 21 nt, Human
cacuggcaaacagggccucug

SEQ ID NO: 2941494 - RNA, 17 nt, Human
cacuggcaaacagggcc

SEQ ID NO: 2941495 - RNA, 18 nt, Human
cacuggcaaacagggccu

SEQ ID NO: 2941496 - RNA, 19 nt, Human
cacuggcaaacagggccuc

SEQ ID NO: 2941497 - RNA, 21 nt, Human
cacugcuuuuggucuguguga

SEQ ID NO: 2941498 - RNA, 17 nt, Human
cacuggaacacuaauga

SEQ ID NO: 2941499 - RNA, 16 nt, Human
cacugcuuccagugag

SEQ ID NO: 2941500 - RNA, 15 nt, Human
cacugcuuccaguga

SEQ ID NO: 2941501 - RNA, 14 nt, Human
cacugcuuccagug

SEQ ID NO: 2941502 - RNA, 13 nt, Human
cacugcuuaacuu

SEQ ID NO: 2941503 - RNA, 20 nt, Human
cacugcuuuuggucugugug

SEQ ID NO: 2941504 - RNA, 22 nt, Human
cacugcuuccagugaggcucug

SEQ ID NO: 2941505 - RNA, 21 nt, Human
cacugcuuccagugaggcucu

SEQ ID NO: 2941506 - RNA, 20 nt, Human
cacugcuuccagugaggcuc

SEQ ID NO: 2941507 - RNA, 19 nt, Human
cacugcuuccagugaggcu

SEQ ID NO: 2941508 - RNA, 18 nt, Human
cacugcuuccagugaggc

SEQ ID NO: 2941509 - RNA, 14 nt, Human
cacugcaccgggcc

SEQ ID NO: 2941510 - RNA, 15 nt, Human
cacugcaccgggcca

SEQ ID NO: 2941511 - RNA, 16 nt, Human
cacugcaccgggccac

SEQ ID NO: 2941512 - RNA, 18 nt, Human
cacugcaccgggccacag

SEQ ID NO: 2941513 - RNA, 19 nt, Human
cacugcaccgggccacaga

SEQ ID NO: 2941514 - RNA, 18 nt, Human
cacugcacuauagccuag

SEQ ID NO: 2941515 - RNA, 12 nt, Human
cacugcucuggu

SEQ ID NO: 2941516 - RNA, 20 nt, Human
cacugccuucucaacuccaa

SEQ ID NO: 2941517 - RNA, 23 nt, Human
cacugagacagcccgggcucugc

SEQ ID NO: 2941518 - RNA, 14 nt, Human
cacugaugggcaac

SEQ ID NO: 2941519 - RNA, 18 nt, Human
cacugaugggcaaccccc

SEQ ID NO: 2941520 - RNA, 24 nt, Human
cacugaugggcaacccccagccug

SEQ ID NO: 2941521 - RNA, 14 nt, Human
cacugcaaccuccg

SEQ ID NO: 2941522 - RNA, 16 nt, Human
cacugcaaccuccgcc

SEQ ID NO: 2941523 - RNA, 23 nt, Human
cacugcaaccuccgccucuuggg

SEQ ID NO: 2941524 - RNA, 13 nt, Human
cacugcaaccucc

SEQ ID NO: 2941525 - RNA, 23 nt, Human
cacucuggcagcucagagagggu

SEQ ID NO: 2941526 - RNA, 21 nt, Human
cacucuggcagcucagagagg

SEQ ID NO: 2941527 - RNA, 20 nt, Human
cacucuggcagcucagagag

SEQ ID NO: 2941528 - RNA, 19 nt, Human
cacucuggcagcucagaga

SEQ ID NO: 2941529 - RNA, 17 nt, Human
cacucuggcagcucaga

SEQ ID NO: 2941530 - RNA, 16 nt, Human
cacucuggcagcucag

SEQ ID NO: 2941531 - RNA, 15 nt, Human
cacucuggcagcuca

SEQ ID NO: 2941532 - RNA, 15 nt, Human
cacucugucgcccag

SEQ ID NO: 2941533 - RNA, 16 nt, Human
cacucugucgcccagu

SEQ ID NO: 2941534 - RNA, 19 nt, Human
cacucugucgcccagucug

SEQ ID NO: 2941535 - RNA, 23 nt, Human
cacugacauuguuggccaaagcc

SEQ ID NO: 2941536 - RNA, 20 nt, Human
cacugacuucuaaguaaaac

SEQ ID NO: 2941537 - RNA, 16 nt, Human
cacugacuucuaagua

SEQ ID NO: 2941538 - RNA, 15 nt, Human
cacugacuucuaagu

SEQ ID NO: 2941539 - RNA, 14 nt, Human
cacugacuucuaag

SEQ ID NO: 2941540 - RNA, 21 nt, Human
cacugacuucuaaguaaaacc

SEQ ID NO: 2941541 - RNA, 13 nt, Human
cacugagacagcc

SEQ ID NO: 2941542 - RNA, 12 nt, Human
cacugagacagc

SEQ ID NO: 2941543 - RNA, 22 nt, Human
cacugagacagcccgggcucug

SEQ ID NO: 2941544 - RNA, 19 nt, Human
cacugagacagcccgggcu

SEQ ID NO: 2941545 - RNA, 17 nt, Human
cacugagacagcccggg

SEQ ID NO: 2941546 - RNA, 14 nt, Human
cacugagacagccc

SEQ ID NO: 2941547 - RNA, 18 nt, Human
cacuccggcccuccagag

SEQ ID NO: 2941548 - RNA, 20 nt, Human
cacuccggcccuccagagcc

SEQ ID NO: 2941549 - RNA, 21 nt, Human
cacuccggcccuccagagccc

SEQ ID NO: 2941550 - RNA, 17 nt, Human
cacuccggcccuccaga

SEQ ID NO: 2941551 - RNA, 17 nt, Human
cacucccugcaaccuga

SEQ ID NO: 2941552 - RNA, 21 nt, Human
cacuccuucacagaugggugc

SEQ ID NO: 2941553 - RNA, 14 nt, Human
cacuccuucacaga

SEQ ID NO: 2941554 - RNA, 15 nt, Human
cacuccccugcuggg

SEQ ID NO: 2941555 - RNA, 12 nt, Human
cacucccugcaa

SEQ ID NO: 2941556 - RNA, 16 nt, Human
cacucccugcaaccug

SEQ ID NO: 2941557 - RNA, 13 nt, Human
cacucccugcaac

SEQ ID NO: 2941558 - RNA, 22 nt, Human
cacucauugaccugaggcccuu

SEQ ID NO: 2941559 - RNA, 20 nt, Human
cacucauugaccugaggccc

SEQ ID NO: 2941560 - RNA, 19 nt, Human
cacucauugaccugaggcc

SEQ ID NO: 2941561 - RNA, 18 nt, Human
cacucauugaccugaggc

SEQ ID NO: 2941562 - RNA, 15 nt, Human
cacucauugaccuga

SEQ ID NO: 2941563 - RNA, 16 nt, Human
cacucaguccauagca

SEQ ID NO: 2941564 - RNA, 14 nt, Human
cacucuggcagcuc

SEQ ID NO: 2941565 - RNA, 13 nt, Human
cacucuggcagcu

SEQ ID NO: 2941566 - RNA, 12 nt, Human
cacucuggcagc

SEQ ID NO: 2941567 - RNA, 12 nt, Human
cacucuccuugg

SEQ ID NO: 2941568 - RNA, 23 nt, Human
cacucugagacucgcgacaaugc

SEQ ID NO: 2941569 - RNA, 12 nt, Human
cacucugagacu

SEQ ID NO: 2941570 - RNA, 13 nt, Human
cacucuauaacaa

SEQ ID NO: 2941571 - RNA, 15 nt, Human
cacuauguugcccag

SEQ ID NO: 2941572 - RNA, 16 nt, Human
cacuauguugcccagg

SEQ ID NO: 2941573 - RNA, 17 nt, Human
cacuauguugcccaggc

SEQ ID NO: 2941574 - RNA, 18 nt, Human
cacuauguugcccaggca

SEQ ID NO: 2941575 - RNA, 19 nt, Human
cacuauguugcccaggcag

SEQ ID NO: 2941576 - RNA, 14 nt, Human
cacuauagccuagg

SEQ ID NO: 2941577 - RNA, 18 nt, Human
cacuauaauguaagcucu

SEQ ID NO: 2941578 - RNA, 21 nt, Human
cacuauagccuaggugacaga

SEQ ID NO: 2941579 - RNA, 14 nt, Human
cacuauaauguaag

SEQ ID NO: 2941580 - RNA, 14 nt, Human
cacuaguauuucua

SEQ ID NO: 2941581 - RNA, 19 nt, Human
cacuaguauuucuaugaaa

SEQ ID NO: 2941582 - RNA, 17 nt, Human
cacuaaggugugcucug

SEQ ID NO: 2941583 - RNA, 18 nt, Human
cacuaaggugugcucuga

SEQ ID NO: 2941584 - RNA, 18 nt, Human
cacuaaccacgcuggacc

SEQ ID NO: 2941585 - RNA, 17 nt, Human
cacuaagagagaaugag

SEQ ID NO: 2941586 - RNA, 14 nt, Human
cacuaaccacgcug

SEQ ID NO: 2941587 - RNA, 15 nt, Human
cacuaaccacgcugg

SEQ ID NO: 2941588 - RNA, 16 nt, Human
cacuaaccacgcugga

SEQ ID NO: 2941589 - RNA, 21 nt, Human
cacuaaauugacacuuaaaaa

SEQ ID NO: 2941590 - RNA, 12 nt, Human
cacucagaagac

SEQ ID NO: 2941591 - RNA, 16 nt, Human
cacucagaagacacug

SEQ ID NO: 2941592 - RNA, 17 nt, Human
cacucagaagacacuga

SEQ ID NO: 2941593 - RNA, 19 nt, Human
cacucacauuuauucugcu

SEQ ID NO: 2941594 - RNA, 20 nt, Human
cacucacauuuauucugcuc

SEQ ID NO: 2941595 - RNA, 22 nt, Human
cacucagaagacacugaugggc

SEQ ID NO: 2941596 - RNA, 18 nt, Human
cacucagaagacacugau

SEQ ID NO: 2941597 - RNA, 19 nt, Human
cacucagaagacacugaug

SEQ ID NO: 2941598 - RNA, 18 nt, Human
cacuauuuauuuacaaau

SEQ ID NO: 2941599 - RNA, 22 nt, Human
cacuauuuauuuacaaauguuu

SEQ ID NO: 2941600 - RNA, 20 nt, Human
cacuauguugcccaggcagg

SEQ ID NO: 2941601 - RNA, 21 nt, Human
cacuauguugcccaggcaggu

SEQ ID NO: 2941602 - RNA, 19 nt, Human
cacucaaaagcugggcagg

SEQ ID NO: 2941603 - RNA, 18 nt, Human
cacucaaaagcugggcag

SEQ ID NO: 2941604 - RNA, 17 nt, Human
cacucaaaagcugggca

SEQ ID NO: 2941605 - RNA, 15 nt, Human
cacucaaaagcuggg

SEQ ID NO: 2941606 - RNA, 16 nt, Human
cacucaaaucaagaaa

SEQ ID NO: 2941607 - RNA, 20 nt, Human
cacucaaaagcugggcaggu

SEQ ID NO: 2941608 - RNA, 18 nt, Human
caccuugacagggcacac

SEQ ID NO: 2941609 - RNA, 15 nt, Human
caccuugacagggca

SEQ ID NO: 2941610 - RNA, 16 nt, Human
caccuugacagggcac

SEQ ID NO: 2941611 - RNA, 13 nt, Human
caccuugacaggg

SEQ ID NO: 2941612 - RNA, 17 nt, Human
cacgacugcccggcagg

SEQ ID NO: 2941613 - RNA, 16 nt, Human
cacgacugcccggcag

SEQ ID NO: 2941614 - RNA, 22 nt, Human
cacgaauauugcugauggugca

SEQ ID NO: 2941615 - RNA, 19 nt, Human
cacgaauauugcugauggu

SEQ ID NO: 2941616 - RNA, 16 nt, Human
cacgaauauugcugau

SEQ ID NO: 2941617 - RNA, 23 nt, Human
caccuuagacagucccugccaau

SEQ ID NO: 2941618 - RNA, 21 nt, Human
caccuuagacagucccugcca

SEQ ID NO: 2941619 - RNA, 19 nt, Human
caccuuagacagucccugc

SEQ ID NO: 2941620 - RNA, 18 nt, Human
caccuuagacagucccug

SEQ ID NO: 2941621 - RNA, 16 nt, Human
caccuuagacaguccc

SEQ ID NO: 2941622 - RNA, 14 nt, Human
caccuuagacaguc

SEQ ID NO: 2941623 - RNA, 18 nt, Human
cacgcccccacuggugac

SEQ ID NO: 2941624 - RNA, 17 nt, Human
cacgcccccacugguga

SEQ ID NO: 2941625 - RNA, 23 nt, Human
cacgccagauucuuuccugaggc

SEQ ID NO: 2941626 - RNA, 15 nt, Human
cacgcccccacuggu

SEQ ID NO: 2941627 - RNA, 13 nt, Human
cacgcccccacug

SEQ ID NO: 2941628 - RNA, 13 nt, Human
cacgccacugcac

SEQ ID NO: 2941629 - RNA, 15 nt, Human
cacgccacugcacua

SEQ ID NO: 2941630 - RNA, 19 nt, Human
cacgccagauucuuuccug

SEQ ID NO: 2941631 - RNA, 22 nt, Human
cacgccagauucuuuccugagg

SEQ ID NO: 2941632 - RNA, 20 nt, Human
cacgccagauucuuuccuga

SEQ ID NO: 2941633 - RNA, 16 nt, Human
cacgauuucuguuuag

SEQ ID NO: 2941634 - RNA, 12 nt, Human
cacgauuucugu

SEQ ID NO: 2941635 - RNA, 14 nt, Human
cacgauuucuguuu

SEQ ID NO: 2941636 - RNA, 17 nt, Human
cacgcacuucgggaggu

SEQ ID NO: 2941637 - RNA, 15 nt, Human
cacgcacacugucug

SEQ ID NO: 2941638 - RNA, 22 nt, Human
cacgagcaggcuacugucagcu

SEQ ID NO: 2941639 - RNA, 17 nt, Human
cacgagcaggcuacugu

SEQ ID NO: 2941640 - RNA, 20 nt, Human
cacgagcaggcuacugucag

SEQ ID NO: 2941641 - RNA, 19 nt, Human
cacgagcaggcuacuguca

SEQ ID NO: 2941642 - RNA, 20 nt, Human
cacgccuguaauccuagcac

SEQ ID NO: 2941643 - RNA, 19 nt, Human
cacgccuguaauccuagca

SEQ ID NO: 2941644 - RNA, 15 nt, Human
cacgcgugcacacac

SEQ ID NO: 2941645 - RNA, 16 nt, Human
cacgcgugcacacacc

SEQ ID NO: 2941646 - RNA, 21 nt, Human
cacgcgugcacacaccagagc

SEQ ID NO: 2941647 - RNA, 23 nt, Human
cacgcgugcacacaccagagccc

SEQ ID NO: 2941648 - RNA, 15 nt, Human
cacggcucacugcag

SEQ ID NO: 2941649 - RNA, 20 nt, Human
cacgcuggaccuugaacugg

SEQ ID NO: 2941650 - RNA, 17 nt, Human
cacgcuggaccuugaac

SEQ ID NO: 2941651 - RNA, 16 nt, Human
cacggcucacugcagc

SEQ ID NO: 2941652 - RNA, 17 nt, Human
cacggcucacugcagcc

SEQ ID NO: 2941653 - RNA, 19 nt, Human
cacggcucacugcagccuc

SEQ ID NO: 2941654 - RNA, 20 nt, Human
cacggcucacugcagccuca

SEQ ID NO: 2941655 - RNA, 18 nt, Human
cacguacacacacauaca

SEQ ID NO: 2941656 - RNA, 19 nt, Human
cacguacacacacauacac

SEQ ID NO: 2941657 - RNA, 14 nt, Human
cacguacacacaca

SEQ ID NO: 2941658 - RNA, 23 nt, Human
cacguuucuaaaggcuaccuuug

SEQ ID NO: 2941659 - RNA, 12 nt, Human
cacguuucuaaa

SEQ ID NO: 2941660 - RNA, 14 nt, Human
cacguuucuaaagg

SEQ ID NO: 2941661 - RNA, 13 nt, Human
cacuaaacaaaga

SEQ ID NO: 2941662 - RNA, 19 nt, Human
cacgugguccuaaucuucu

SEQ ID NO: 2941663 - RNA, 16 nt, Human
cacgugguccuaaucu

SEQ ID NO: 2941664 - RNA, 22 nt, Human
cacguucuuacuaguuucccuu

SEQ ID NO: 2941665 - RNA, 20 nt, Human
caccugcggugcuaucuccc

SEQ ID NO: 2941666 - RNA, 23 nt, Human
caccugcggugcuaucuccccca

SEQ ID NO: 2941667 - RNA, 20 nt, Human
caccuggaauauauaaccag

SEQ ID NO: 2941668 - RNA, 19 nt, Human
caccucugcacaagcugca

SEQ ID NO: 2941669 - RNA, 18 nt, Human
caccucugcacaagcugc

SEQ ID NO: 2941670 - RNA, 19 nt, Human
caccucucucacuccuuga

SEQ ID NO: 2941671 - RNA, 18 nt, Human
caccucucucacuccuug

SEQ ID NO: 2941672 - RNA, 17 nt, Human
caccucucucacuccuu

SEQ ID NO: 2941673 - RNA, 15 nt, Human
caccucucucacucc

SEQ ID NO: 2941674 - RNA, 14 nt, Human
caccugaagacuca

SEQ ID NO: 2941675 - RNA, 15 nt, Human
caccugaagacucau

SEQ ID NO: 2941676 - RNA, 23 nt, Human
caccugaagacucauucuucugu

SEQ ID NO: 2941677 - RNA, 15 nt, Human
caccuguagucccag

SEQ ID NO: 2941678 - RNA, 13 nt, Human
caccuggcucugu

SEQ ID NO: 2941679 - RNA, 14 nt, Human
caccuggcucugug

SEQ ID NO: 2941680 - RNA, 15 nt, Human
caccuggcucugugg

SEQ ID NO: 2941681 - RNA, 23 nt, Human
caccuggcucuguggcgagccau

SEQ ID NO: 2941682 - RNA, 23 nt, Human
caccuggccucugcacuccccug

SEQ ID NO: 2941683 - RNA, 12 nt, Human
caccuggcucug

SEQ ID NO: 2941684 - RNA, 20 nt, Human
caccuggccucugcacuccc

SEQ ID NO: 2941685 - RNA, 19 nt, Human
caccuggccucugcacucc

SEQ ID NO: 2941686 - RNA, 18 nt, Human
caccuggccucugcacuc

SEQ ID NO: 2941687 - RNA, 17 nt, Human
caccuggccucugcacu

SEQ ID NO: 2941688 - RNA, 15 nt, Human
caccuggccucugca

SEQ ID NO: 2941689 - RNA, 14 nt, Human
caccuggccucugc

SEQ ID NO: 2941690 - RNA, 13 nt, Human
caccuggccucug

SEQ ID NO: 2941691 - RNA, 12 nt, Human
caccuggccucu

SEQ ID NO: 2941692 - RNA, 18 nt, Human
caccgccuugcccagccu

SEQ ID NO: 2941693 - RNA, 23 nt, Human
caccgccuugcccagccuggaug

SEQ ID NO: 2941694 - RNA, 15 nt, Human
caccgccuugcccag

SEQ ID NO: 2941695 - RNA, 17 nt, Human
caccgccuugcccagcc

SEQ ID NO: 2941696 - RNA, 21 nt, Human
caccgcagacaggaccaggga

SEQ ID NO: 2941697 - RNA, 14 nt, Human
caccgggcacucag

SEQ ID NO: 2941698 - RNA, 20 nt, Human
caccggcuggccuggccccu

SEQ ID NO: 2941699 - RNA, 18 nt, Human
caccggcuggccuggccc

SEQ ID NO: 2941700 - RNA, 17 nt, Human
caccggcuggccuggcc

SEQ ID NO: 2941701 - RNA, 14 nt, Human
caccggcuggccug

SEQ ID NO: 2941702 - RNA, 16 nt, Human
caccggcuggccuggc

SEQ ID NO: 2941703 - RNA, 15 nt, Human
caccggcuggccugg

SEQ ID NO: 2941704 - RNA, 15 nt, Human
caccgggcacucaga

SEQ ID NO: 2941705 - RNA, 22 nt, Human
caccgggcacucagaagacacu

SEQ ID NO: 2941706 - RNA, 15 nt, Human
caccgggccacagag

SEQ ID NO: 2941707 - RNA, 18 nt, Human
caccgggccacagagaaa

SEQ ID NO: 2941708 - RNA, 11 nt, Human
caccucaugga

SEQ ID NO: 2941709 - RNA, 12 nt, Human
caccucauggaa

SEQ ID NO: 2941710 - RNA, 14 nt, Human
caccucauggaauu

SEQ ID NO: 2941711 - RNA, 10 nt, Human
caccucccug

SEQ ID NO: 2941712 - RNA, 22 nt, Human
caccucuaucccggcuuuggug

SEQ ID NO: 2941713 - RNA, 17 nt, Human
caccucucccuuggauu

SEQ ID NO: 2941714 - RNA, 14 nt, Human
caccucucccuugg

SEQ ID NO: 2941715 - RNA, 13 nt, Human
caccucucccuug

SEQ ID NO: 2941716 - RNA, 14 nt, Human
caccuccugccucg

SEQ ID NO: 2941717 - RNA, 13 nt, Human
caccuccugccuc

SEQ ID NO: 2941718 - RNA, 11 nt, Human
caccuccugcc

SEQ ID NO: 2941719 - RNA, 16 nt, Human
caccuccuaaaacaac

SEQ ID NO: 2941720 - RNA, 14 nt, Human
caccucccugcaau

SEQ ID NO: 2941721 - RNA, 13 nt, Human
caccucccugcaa

SEQ ID NO: 2941722 - RNA, 13 nt, Human
caccgcagacagg

SEQ ID NO: 2941723 - RNA, 12 nt, Human
caccgcagacag

SEQ ID NO: 2941724 - RNA, 18 nt, Human
caccgcagacaggaccag

SEQ ID NO: 2941725 - RNA, 17 nt, Human
caccgcagacaggacca

SEQ ID NO: 2941726 - RNA, 15 nt, Human
caccgcagacaggac

SEQ ID NO: 2941727 - RNA, 14 nt, Human
caccgcagacagga

SEQ ID NO: 2941728 - RNA, 22 nt, Human
caccgaaaacguggcugcuuca

SEQ ID NO: 2941729 - RNA, 21 nt, Human
caccgaaaacguggcugcuuc

SEQ ID NO: 2941730 - RNA, 19 nt, Human
caccgaaaacguggcugcu

SEQ ID NO: 2941731 - RNA, 18 nt, Human
caccgaaaacguggcugc

SEQ ID NO: 2941732 - RNA, 15 nt, Human
caccgaaaacguggc

SEQ ID NO: 2941733 - RNA, 23 nt, Human
cacccugugauggggcccugccu

SEQ ID NO: 2941734 - RNA, 22 nt, Human
cacccugugauggggcccugcc

SEQ ID NO: 2941735 - RNA, 21 nt, Human
cacccugugauggggcccugc

SEQ ID NO: 2941736 - RNA, 20 nt, Human
cacccugugauggggcccug

SEQ ID NO: 2941737 - RNA, 18 nt, Human
cacccugugauggggccc

SEQ ID NO: 2941738 - RNA, 15 nt, Human
cacccugugaugggg

SEQ ID NO: 2941739 - RNA, 12 nt, Human
cacccugugaug

SEQ ID NO: 2941740 - RNA, 11 nt, Human
cacccugugau

SEQ ID NO: 2941741 - RNA, 13 nt, Human
cacauauugauuu

SEQ ID NO: 2941742 - RNA, 20 nt, Human
caccccucaacaccucugca

SEQ ID NO: 2941743 - RNA, 12 nt, Human
cacccggccccu

SEQ ID NO: 2941744 - RNA, 19 nt, Human
cacccgcuaagagggaggg

SEQ ID NO: 2941745 - RNA, 13 nt, Human
cacccggccccug

SEQ ID NO: 2941746 - RNA, 14 nt, Human
cacccggccccugc

SEQ ID NO: 2941747 - RNA, 16 nt, Human
cacccggccccugcug

SEQ ID NO: 2941748 - RNA, 17 nt, Human
cacccggccccugcugg

SEQ ID NO: 2941749 - RNA, 18 nt, Human
cacccggccccugcuggu

SEQ ID NO: 2941750 - RNA, 21 nt, Human
cacccggccccugcugguuca

SEQ ID NO: 2941751 - RNA, 20 nt, Human
cacccucagaugcacaugag

SEQ ID NO: 2941752 - RNA, 20 nt, Human
cacauauugauuuccguuaa

SEQ ID NO: 2941753 - RNA, 16 nt, Human
cacgccagauucuuuc

SEQ ID NO: 2941754 - RNA, 20 nt, Human
cagacaguuaagagaaauga

SEQ ID NO: 2941755 - RNA, 19 nt, Human
cagacaccuugacagggca

SEQ ID NO: 2941756 - RNA, 20 nt, Human
cagacaccuugacagggcac

SEQ ID NO: 2941757 - RNA, 22 nt, Human
cagacaccuugacagggcacac

SEQ ID NO: 2941758 - RNA, 19 nt, Human
cagacauacuaaccagcag

SEQ ID NO: 2941759 - RNA, 17 nt, Human
cagacauagaauuaaca

SEQ ID NO: 2941760 - RNA, 19 nt, Human
cagacauagaauuaacaca

SEQ ID NO: 2941761 - RNA, 13 nt, Human
cagacacaggccc

SEQ ID NO: 2941762 - RNA, 14 nt, Human
cagacacaggcccg

SEQ ID NO: 2941763 - RNA, 15 nt, Human
cagacacaggcccgg

SEQ ID NO: 2941764 - RNA, 17 nt, Human
cagacacaggcccggcu

SEQ ID NO: 2941765 - RNA, 18 nt, Human
cagacacaggcccggcuc

SEQ ID NO: 2941766 - RNA, 21 nt, Human
cagacacaggcccggcuccag

SEQ ID NO: 2941767 - RNA, 22 nt, Human
cagacacaggcccggcuccagg

SEQ ID NO: 2941768 - RNA, 23 nt, Human
cagacacaggcccggcuccaggc

SEQ ID NO: 2941769 - RNA, 23 nt, Human
cagacacauguccaagaagccca

SEQ ID NO: 2941770 - RNA, 22 nt, Human
cagacacauguccaagaagccc

SEQ ID NO: 2941771 - RNA, 21 nt, Human
cagacacauguccaagaagcc

SEQ ID NO: 2941772 - RNA, 17 nt, Human
cagacacauguccaaga

SEQ ID NO: 2941773 - RNA, 14 nt, Human
cagacacaugucca

SEQ ID NO: 2941774 - RNA, 22 nt, Human
cagacaaagcgugguggacaug

SEQ ID NO: 2941775 - RNA, 20 nt, Human
cagacaacaaaccuguuucu

SEQ ID NO: 2941776 - RNA, 12 nt, Human
cagacaaagcgu

SEQ ID NO: 2941777 - RNA, 24 nt, Human
cagaauuucccaaagcagugcaug

SEQ ID NO: 2941778 - RNA, 20 nt, Human
cagaauuucccaaagcagug

SEQ ID NO: 2941779 - RNA, 19 nt, Human
cagaauuucccaaagcagu

SEQ ID NO: 2941780 - RNA, 18 nt, Human
cagaauuucccaaagcag

SEQ ID NO: 2941781 - RNA, 17 nt, Human
cagaauuucccaaagca

SEQ ID NO: 2941782 - RNA, 11 nt, Human
cagaauucuca

SEQ ID NO: 2941783 - RNA, 15 nt, Human
cagaauucucuaguu

SEQ ID NO: 2941784 - RNA, 18 nt, Human
cagaauucucuaguuuga

SEQ ID NO: 2941785 - RNA, 14 nt, Human
cagaauuucccaaa

SEQ ID NO: 2941786 - RNA, 16 nt, Human
cagacccggcugcgug

SEQ ID NO: 2941787 - RNA, 12 nt, Human
cagacccugccc

SEQ ID NO: 2941788 - RNA, 14 nt, Human
cagacccugcccug

SEQ ID NO: 2941789 - RNA, 13 nt, Human
cagacccugcccu

SEQ ID NO: 2941790 - RNA, 12 nt, Human
cagacccggcug

SEQ ID NO: 2941791 - RNA, 14 nt, Human
cagacccggcugcg

SEQ ID NO: 2941792 - RNA, 21 nt, Human
cagacccugcccugugggccc

SEQ ID NO: 2941793 - RNA, 17 nt, Human
cagacccugcccugugg

SEQ ID NO: 2941794 - RNA, 16 nt, Human
cagacccugcccugug

SEQ ID NO: 2941795 - RNA, 15 nt, Human
cagacccugcccugu

SEQ ID NO: 2941796 - RNA, 22 nt, Human
cagacccugcccugugggcccc

SEQ ID NO: 2941797 - RNA, 22 nt, Human
cagaccauuggggcucccagcc

SEQ ID NO: 2941798 - RNA, 23 nt, Human
cagaccauuggggcucccagcca

SEQ ID NO: 2941799 - RNA, 20 nt, Human
cagaccauuggggcucccag

SEQ ID NO: 2941800 - RNA, 21 nt, Human
cagaccauuggggcucccagc

SEQ ID NO: 2941801 - RNA, 19 nt, Human
cagaccauuggggcuccca

SEQ ID NO: 2941802 - RNA, 20 nt, Human
cagaccacaaaacuuuucua

SEQ ID NO: 2941803 - RNA, 14 nt, Human
cagaccacaaaacu

SEQ ID NO: 2941804 - RNA, 19 nt, Human
cagagaaaguacuucucca

SEQ ID NO: 2941805 - RNA, 23 nt, Human
cagagaaaguacuucuccacccu

SEQ ID NO: 2941806 - RNA, 18 nt, Human
cagaaaccuuccugcuga

SEQ ID NO: 2941807 - RNA, 18 nt, Human
cagaaagcagaacaguga

SEQ ID NO: 2941808 - RNA, 19 nt, Human
cagaaagcagaacagugau

SEQ ID NO: 2941809 - RNA, 18 nt, Human
cagaacagugauuaccag

SEQ ID NO: 2941810 - RNA, 23 nt, Human
cagaacagugauuaccagggacu

SEQ ID NO: 2941811 - RNA, 23 nt, Human
cagaaaauggaagacagcucuua

SEQ ID NO: 2941812 - RNA, 22 nt, Human
cagaaaauggaagacagcucuu

SEQ ID NO: 2941813 - RNA, 21 nt, Human
cagaaaauggaagacagcucu

SEQ ID NO: 2941814 - RNA, 20 nt, Human
cagaaaauggaagacagcuc

SEQ ID NO: 2941815 - RNA, 16 nt, Human
cagaaaauggaagaca

SEQ ID NO: 2941816 - RNA, 17 nt, Human
cagaaaaguugaauuuu

SEQ ID NO: 2941817 - RNA, 20 nt, Human
cagaaaaguugaauuuuaca

SEQ ID NO: 2941818 - RNA, 22 nt, Human
cagaaaaguugaauuuuacaug

SEQ ID NO: 2941819 - RNA, 22 nt, Human
cacuuuuguucuugguuuguaa

SEQ ID NO: 2941820 - RNA, 14 nt, Human
cacuuuuguucuug

SEQ ID NO: 2941821 - RNA, 16 nt, Human
cacuuugggaggccaa

SEQ ID NO: 2941822 - RNA, 13 nt, Human
cacuuugggaggc

SEQ ID NO: 2941823 - RNA, 12 nt, Human
cacuuugggagg

SEQ ID NO: 2941824 - RNA, 23 nt, Human
cacuuuguucuggcucuuccagg

SEQ ID NO: 2941825 - RNA, 16 nt, Human
cacuuuguucuggcuc

SEQ ID NO: 2941826 - RNA, 14 nt, Human
cacuuuguucuggc

SEQ ID NO: 2941827 - RNA, 13 nt, Human
cacuuuguucugg

SEQ ID NO: 2941828 - RNA, 13 nt, Human
cacuuuggcccag

SEQ ID NO: 2941829 - RNA, 16 nt, Human
cacuuuggcccagggu

SEQ ID NO: 2941830 - RNA, 22 nt, Human
cacuuucuagccagaggagaga

SEQ ID NO: 2941831 - RNA, 19 nt, Human
cagaaggaagacuucaucc

SEQ ID NO: 2941832 - RNA, 18 nt, Human
cagaaggaagacuucauc

SEQ ID NO: 2941833 - RNA, 17 nt, Human
cagaaggaagacuucau

SEQ ID NO: 2941834 - RNA, 16 nt, Human
cagaaggaagacuuca

SEQ ID NO: 2941835 - RNA, 21 nt, Human
cagaaucgcuccaccuugcag

SEQ ID NO: 2941836 - RNA, 23 nt, Human
cagaaucgcuccaccuugcagcu

SEQ ID NO: 2941837 - RNA, 17 nt, Human
cagaaucucaaauaacu

SEQ ID NO: 2941838 - RNA, 18 nt, Human
cagaaucucaaauaacua

SEQ ID NO: 2941839 - RNA, 17 nt, Human
cagaagucaaggcuuag

SEQ ID NO: 2941840 - RNA, 16 nt, Human
cagaagucaaggcuua

SEQ ID NO: 2941841 - RNA, 18 nt, Human
cagaagucaaggcuuaga

SEQ ID NO: 2941842 - RNA, 17 nt, Human
cagaacuauguuuuugu

SEQ ID NO: 2941843 - RNA, 13 nt, Human
cagaagaaaauag

SEQ ID NO: 2941844 - RNA, 19 nt, Human
cagaagaaaauagaauuga

SEQ ID NO: 2941845 - RNA, 22 nt, Human
cagaagaaaauagaauugacau

SEQ ID NO: 2941846 - RNA, 21 nt, Human
cagaagacacugaugggcaac

SEQ ID NO: 2941847 - RNA, 19 nt, Human
cagaagcaacccaaauguu

SEQ ID NO: 2941848 - RNA, 20 nt, Human
cagaagcaacccaaauguuc

SEQ ID NO: 2941849 - RNA, 16 nt, Human
cagacaacaaaccugu

SEQ ID NO: 2941850 - RNA, 14 nt, Human
cagauaaacaguag

SEQ ID NO: 2941851 - RNA, 23 nt, Human
cagauaaauaguuuaugauucca

SEQ ID NO: 2941852 - RNA, 19 nt, Human
cagaguuguuacauuuuua

SEQ ID NO: 2941853 - RNA, 15 nt, Human
cagaguuguuacauu

SEQ ID NO: 2941854 - RNA, 18 nt, Human
cagaguuguuacauuuuu

SEQ ID NO: 2941855 - RNA, 14 nt, Human
cagauaaucacaau

SEQ ID NO: 2941856 - RNA, 22 nt, Human
cagaguugaagacagagcuaca

SEQ ID NO: 2941857 - RNA, 14 nt, Human
cagaguuguuacau

SEQ ID NO: 2941858 - RNA, 20 nt, Human
cagaguugaagacagagcua

SEQ ID NO: 2941859 - RNA, 19 nt, Human
cagaguugaagacagagcu

SEQ ID NO: 2941860 - RNA, 18 nt, Human
cagaguugaagacagagc

SEQ ID NO: 2941861 - RNA, 17 nt, Human
cagaguugaagacagag

SEQ ID NO: 2941862 - RNA, 14 nt, Human
cagaguugaagaca

SEQ ID NO: 2941863 - RNA, 16 nt, Human
cagaguugaagacaga

SEQ ID NO: 2941864 - RNA, 15 nt, Human
cagaguugaagacag

SEQ ID NO: 2941865 - RNA, 17 nt, Human
cagaugcaccagcccuu

SEQ ID NO: 2941866 - RNA, 22 nt, Human
cagaugcaccagcccuuagcag

SEQ ID NO: 2941867 - RNA, 14 nt, Human
cagaugcaccagcc

SEQ ID NO: 2941868 - RNA, 16 nt, Human
cagaugcaccagcccu

SEQ ID NO: 2941869 - RNA, 13 nt, Human
cagaugcaccagc

SEQ ID NO: 2941870 - RNA, 17 nt, Human
cagaugcacaugagcug

SEQ ID NO: 2941871 - RNA, 20 nt, Human
cagauacaggaaaagcugcu

SEQ ID NO: 2941872 - RNA, 21 nt, Human
cagauacaggaaaagcugcug

SEQ ID NO: 2941873 - RNA, 22 nt, Human
cagauacaggaaaagcugcuga

SEQ ID NO: 2941874 - RNA, 13 nt, Human
cagauccuggaaa

SEQ ID NO: 2941875 - RNA, 20 nt, Human
cagaucucuaacuucaccau

SEQ ID NO: 2941876 - RNA, 14 nt, Human
cagauccuggaaau

SEQ ID NO: 2941877 - RNA, 20 nt, Human
cagaggccaugggccuccug

SEQ ID NO: 2941878 - RNA, 21 nt, Human
cagaggccaugggccuccugu

SEQ ID NO: 2941879 - RNA, 23 nt, Human
cagaggcagccccauucugccug

SEQ ID NO: 2941880 - RNA, 19 nt, Human
cagaggccaugggccuccu

SEQ ID NO: 2941881 - RNA, 16 nt, Human
cagaggccaugggccu

SEQ ID NO: 2941882 - RNA, 12 nt, Human
cagaggcagccc

SEQ ID NO: 2941883 - RNA, 13 nt, Human
cagaggcagcccc

SEQ ID NO: 2941884 - RNA, 14 nt, Human
cagaggcagcccca

SEQ ID NO: 2941885 - RNA, 15 nt, Human
cagaggcagccccau

SEQ ID NO: 2941886 - RNA, 18 nt, Human
cagaggcagccccauucu

SEQ ID NO: 2941887 - RNA, 19 nt, Human
cagaggcagccccauucug

SEQ ID NO: 2941888 - RNA, 20 nt, Human
cagaggcagccccauucugc

SEQ ID NO: 2941889 - RNA, 22 nt, Human
cagaggcagccccauucugccu

SEQ ID NO: 2941890 - RNA, 23 nt, Human
cagaggcugccucucccaucacu

SEQ ID NO: 2941891 - RNA, 14 nt, Human
cagagggagugaca

SEQ ID NO: 2941892 - RNA, 16 nt, Human
cagagggagugacaga

SEQ ID NO: 2941893 - RNA, 18 nt, Human
cagagggagugacagagg

SEQ ID NO: 2941894 - RNA, 19 nt, Human
cagagggagugacagaggc

SEQ ID NO: 2941895 - RNA, 13 nt, Human
cagaggcugccuc

SEQ ID NO: 2941896 - RNA, 13 nt, Human
cagagucucacug

SEQ ID NO: 2941897 - RNA, 17 nt, Human
cagagucucacuguugc

SEQ ID NO: 2941898 - RNA, 19 nt, Human
cagagucucacuguugccc

SEQ ID NO: 2941899 - RNA, 20 nt, Human
cagagucucacuguugccca

SEQ ID NO: 2941900 - RNA, 21 nt, Human
cagagucucacuguugcccag

SEQ ID NO: 2941901 - RNA, 19 nt, Human
cagagggccugcaagggag

SEQ ID NO: 2941902 - RNA, 15 nt, Human
cagagggccugcaag

SEQ ID NO: 2941903 - RNA, 20 nt, Human
cagagggagugacagaggca

SEQ ID NO: 2941904 - RNA, 21 nt, Human
cagagggagugacagaggcag

SEQ ID NO: 2941905 - RNA, 22 nt, Human
cagagggagugacagaggcagc

SEQ ID NO: 2941906 - RNA, 23 nt, Human
cagagggagugacagaggcagcc

SEQ ID NO: 2941907 - RNA, 20 nt, Human
cagaguggaauaagacagag

SEQ ID NO: 2941908 - RNA, 12 nt, Human
cagaguggcagu

SEQ ID NO: 2941909 - RNA, 17 nt, Human
cagaguggaauaagaca

SEQ ID NO: 2941910 - RNA, 18 nt, Human
cagaguggaauaagacag

SEQ ID NO: 2941911 - RNA, 21 nt, Human
cagagugcuuuaccaauugaa

SEQ ID NO: 2941912 - RNA, 19 nt, Human
cagagugagacucugucuc

SEQ ID NO: 2941913 - RNA, 20 nt, Human
cagagugagacucugucuca

SEQ ID NO: 2941914 - RNA, 22 nt, Human
cagagucucacuguugcccagg

SEQ ID NO: 2941915 - RNA, 23 nt, Human
cagagucucacuguugcccaggc

SEQ ID NO: 2941916 - RNA, 16 nt, Human
cagagugagacucugu

SEQ ID NO: 2941917 - RNA, 17 nt, Human
cagagugagacucuguc

SEQ ID NO: 2941918 - RNA, 18 nt, Human
cagagugagacucugucu

SEQ ID NO: 2941919 - RNA, 19 nt, Human
cagagaaugaaagggccca

SEQ ID NO: 2941920 - RNA, 15 nt, Human
cagagaauucucuua

SEQ ID NO: 2941921 - RNA, 20 nt, Human
cagagaaugaaagggcccag

SEQ ID NO: 2941922 - RNA, 21 nt, Human
cagagaaugaaagggcccaga

SEQ ID NO: 2941923 - RNA, 21 nt, Human
cagagaagauucuuguauuua

SEQ ID NO: 2941924 - RNA, 13 nt, Human
cagagaccauccc

SEQ ID NO: 2941925 - RNA, 16 nt, Human
cagagaccaucccuga

SEQ ID NO: 2941926 - RNA, 14 nt, Human
cagagaccaucccu

SEQ ID NO: 2941927 - RNA, 15 nt, Human
cagagacacaagccu

SEQ ID NO: 2941928 - RNA, 14 nt, Human
cagagacacaagcc

SEQ ID NO: 2941929 - RNA, 17 nt, Human
cagagacacaagccuuc

SEQ ID NO: 2941930 - RNA, 16 nt, Human
cagagacacaagccuu

SEQ ID NO: 2941931 - RNA, 16 nt, Human
cagagcaccuuagaca

SEQ ID NO: 2941932 - RNA, 20 nt, Human
cagagcaagugagacccugu

SEQ ID NO: 2941933 - RNA, 14 nt, Human
cagagcaagugaga

SEQ ID NO: 2941934 - RNA, 21 nt, Human
cagagaccaucccugaaggcc

SEQ ID NO: 2941935 - RNA, 20 nt, Human
cagagaccaucccugaaggc

SEQ ID NO: 2941936 - RNA, 19 nt, Human
cagagaccaucccugaagg

SEQ ID NO: 2941937 - RNA, 18 nt, Human
cagagaccaucccugaag

SEQ ID NO: 2941938 - RNA, 17 nt, Human
cagagaccaucccugaa

SEQ ID NO: 2941939 - RNA, 13 nt, Human
cagagacuccugc

SEQ ID NO: 2941940 - RNA, 15 nt, Human
cagagacuccugcag

SEQ ID NO: 2941941 - RNA, 14 nt, Human
cagagacuccugca

SEQ ID NO: 2941942 - RNA, 19 nt, Human
cagagacuccugcaggcag

SEQ ID NO: 2941943 - RNA, 18 nt, Human
cagagacuccugcaggca

SEQ ID NO: 2941944 - RNA, 17 nt, Human
cagagacuccugcaggc

SEQ ID NO: 2941945 - RNA, 16 nt, Human
cagagacuccugcagg

SEQ ID NO: 2941946 - RNA, 23 nt, Human
cagagcaccuuagacagucccug

SEQ ID NO: 2941947 - RNA, 12 nt, Human
cagagcagagac

SEQ ID NO: 2941948 - RNA, 11 nt, Human
cagagcagaga

SEQ ID NO: 2941949 - RNA, 22 nt, Human
cagagcaccuuagacagucccu

SEQ ID NO: 2941950 - RNA, 21 nt, Human
cagagcaccuuagacaguccc

SEQ ID NO: 2941951 - RNA, 19 nt, Human
cagagcaccuuagacaguc

SEQ ID NO: 2941952 - RNA, 18 nt, Human
cagagcaccuuagacagu

SEQ ID NO: 2941953 - RNA, 21 nt, Human
cagagcagagaccaucccuga

SEQ ID NO: 2941954 - RNA, 19 nt, Human
cagagcagagaccaucccu

SEQ ID NO: 2941955 - RNA, 18 nt, Human
cagagcagagaccauccc

SEQ ID NO: 2941956 - RNA, 17 nt, Human
cagagcagagaccaucc

SEQ ID NO: 2941957 - RNA, 15 nt, Human
cagagcagagaccau

SEQ ID NO: 2941958 - RNA, 14 nt, Human
cagagcagagacca

SEQ ID NO: 2941959 - RNA, 13 nt, Human
cagagcagagacc

SEQ ID NO: 2941960 - RNA, 15 nt, Human
cagagcccaccuugg

SEQ ID NO: 2941961 - RNA, 17 nt, Human
cagagcccaccuuggcu

SEQ ID NO: 2941962 - RNA, 19 nt, Human
cagagcccaccuuggcuca

SEQ ID NO: 2941963 - RNA, 20 nt, Human
cagagcccaccuuggcucaa

SEQ ID NO: 2941964 - RNA, 16 nt, Human
cagagcccacgccccc

SEQ ID NO: 2941965 - RNA, 13 nt, Human
cagaggagagagg

SEQ ID NO: 2941966 - RNA, 19 nt, Human
cagaggagagaggaccccc

SEQ ID NO: 2941967 - RNA, 15 nt, Human
cagaggagagaggac

SEQ ID NO: 2941968 - RNA, 11 nt, Human
cagaggcagcc

SEQ ID NO: 2941969 - RNA, 20 nt, Human
cagaggagagaggacccccu

SEQ ID NO: 2941970 - RNA, 13 nt, Human
cagaggaaggaga

SEQ ID NO: 2941971 - RNA, 13 nt, Human
cagagccugcagu

SEQ ID NO: 2941972 - RNA, 20 nt, Human
cagaggaaagcaaaggagau

SEQ ID NO: 2941973 - RNA, 12 nt, Human
cagagccugcag

SEQ ID NO: 2941974 - RNA, 20 nt, Human
cagagccccacccucagaug

SEQ ID NO: 2941975 - RNA, 21 nt, Human
cagagcccacgcccccacugg

SEQ ID NO: 2941976 - RNA, 20 nt, Human
cagagcccacgcccccacug

SEQ ID NO: 2941977 - RNA, 19 nt, Human
cagagcccacgcccccacu

SEQ ID NO: 2941978 - RNA, 17 nt, Human
cagagcccacgccccca

SEQ ID NO: 2941979 - RNA, 23 nt, Human
cagagcccacgcccccacuggug

SEQ ID NO: 2941980 - RNA, 15 nt, Human
cagagccccacagcc

SEQ ID NO: 2941981 - RNA, 16 nt, Human
cagagccccacagccc

SEQ ID NO: 2941982 - RNA, 22 nt, Human
cagagccccacagccccaucug

SEQ ID NO: 2941983 - RNA, 13 nt, Human
cagagccccacag

SEQ ID NO: 2941984 - RNA, 16 nt, Human
caggaaguagaggagg

SEQ ID NO: 2941985 - RNA, 15 nt, Human
caggaaguagaggag

SEQ ID NO: 2941986 - RNA, 20 nt, Human
caggaaguacuggagaaaau

SEQ ID NO: 2941987 - RNA, 18 nt, Human
caggaaguacuggagaaa

SEQ ID NO: 2941988 - RNA, 17 nt, Human
caggaaguacuggagaa

SEQ ID NO: 2941989 - RNA, 12 nt, Human
caggaaguacug

SEQ ID NO: 2941990 - RNA, 16 nt, Human
caggaaguacuggaga

SEQ ID NO: 2941991 - RNA, 14 nt, Human
caggaaguacugga

SEQ ID NO: 2941992 - RNA, 15 nt, Human
caggaaggcuaaagg

SEQ ID NO: 2941993 - RNA, 14 nt, Human
caggacgagaugac

SEQ ID NO: 2941994 - RNA, 22 nt, Human
caggaagccagcaggcucucag

SEQ ID NO: 2941995 - RNA, 21 nt, Human
caggaagccagcaggcucuca

SEQ ID NO: 2941996 - RNA, 19 nt, Human
caggaagccagcaggcucu

SEQ ID NO: 2941997 - RNA, 18 nt, Human
caggaagccagcaggcuc

SEQ ID NO: 2941998 - RNA, 17 nt, Human
caggaagccagcaggcu

SEQ ID NO: 2941999 - RNA, 16 nt, Human
caggaagccagcaggc

SEQ ID NO: 2942000 - RNA, 14 nt, Human
caggaagccagcag

SEQ ID NO: 2942001 - RNA, 13 nt, Human
caggaagcucagg

SEQ ID NO: 2942002 - RNA, 15 nt, Human
caggaagcucagggc

SEQ ID NO: 2942003 - RNA, 14 nt, Human
caggaagcucaggg

SEQ ID NO: 2942004 - RNA, 19 nt, Human
caggaagcucagggccugg

SEQ ID NO: 2942005 - RNA, 18 nt, Human
caggaagcucagggccug

SEQ ID NO: 2942006 - RNA, 17 nt, Human
caggaagcucagggccu

SEQ ID NO: 2942007 - RNA, 16 nt, Human
caggaagcucagggcc

SEQ ID NO: 2942008 - RNA, 23 nt, Human
caggaagcucagggccuggcuca

SEQ ID NO: 2942009 - RNA, 21 nt, Human
caggaagcucagggccuggcu

SEQ ID NO: 2942010 - RNA, 20 nt, Human
caggaagcucagggccuggc

SEQ ID NO: 2942011 - RNA, 14 nt, Human
caggaagcugugag

SEQ ID NO: 2942012 - RNA, 13 nt, Human
caggaagcuguga

SEQ ID NO: 2942013 - RNA, 22 nt, Human
caggaagcugugagagcaguuu

SEQ ID NO: 2942014 - RNA, 23 nt, Human
cagcuuuguuuguugucagcuga

SEQ ID NO: 2942015 - RNA, 22 nt, Human
cagcuuuguuuguugucagcug

SEQ ID NO: 2942016 - RNA, 21 nt, Human
cagcuuuguuuguugucagcu

SEQ ID NO: 2942017 - RNA, 12 nt, Human
cagcuuuguuug

SEQ ID NO: 2942018 - RNA, 18 nt, Human
caggaaccacaagacugc

SEQ ID NO: 2942019 - RNA, 18 nt, Human
cagcuuguaaauagcuca

SEQ ID NO: 2942020 - RNA, 19 nt, Human
cagcuuguaaauagcucag

SEQ ID NO: 2942021 - RNA, 20 nt, Human
cagcuuguaaauagcucagg

SEQ ID NO: 2942022 - RNA, 21 nt, Human
cagcuuguaaauagcucaggu

SEQ ID NO: 2942023 - RNA, 22 nt, Human
cagcuuguaaauagcucaggug

SEQ ID NO: 2942024 - RNA, 23 nt, Human
cagcuuuccucaaaacuucagac

SEQ ID NO: 2942025 - RNA, 14 nt, Human
cagcuugaggguug

SEQ ID NO: 2942026 - RNA, 15 nt, Human
cagcuugaggguugg

SEQ ID NO: 2942027 - RNA, 21 nt, Human
cagcuugaccgugaggccaga

SEQ ID NO: 2942028 - RNA, 20 nt, Human
cagcuugaccgugaggccag

SEQ ID NO: 2942029 - RNA, 19 nt, Human
cagcuugaccgugaggcca

SEQ ID NO: 2942030 - RNA, 18 nt, Human
cagcuugaccgugaggcc

SEQ ID NO: 2942031 - RNA, 18 nt, Human
cagcuugaggguugggcu

SEQ ID NO: 2942032 - RNA, 19 nt, Human
cagcuugaggguugggcug

SEQ ID NO: 2942033 - RNA, 20 nt, Human
cagcuugaggguugggcugg

SEQ ID NO: 2942034 - RNA, 21 nt, Human
cagcuugaggguugggcuggu

SEQ ID NO: 2942035 - RNA, 19 nt, Human
cagcuucauuuccuguguc

SEQ ID NO: 2942036 - RNA, 20 nt, Human
cagcuucauuuccugugucu

SEQ ID NO: 2942037 - RNA, 21 nt, Human
cagcuucauuuccugugucuu

SEQ ID NO: 2942038 - RNA, 18 nt, Human
cagcuugaaacugagaug

SEQ ID NO: 2942039 - RNA, 13 nt, Human
cagcucuggucca

SEQ ID NO: 2942040 - RNA, 10 nt, Human
cagcucuggu

SEQ ID NO: 2942041 - RNA, 21 nt, Human
cagcucugguccauagagagc

SEQ ID NO: 2942042 - RNA, 18 nt, Human
cagcucugguccauagag

SEQ ID NO: 2942043 - RNA, 17 nt, Human
cagcucugguccauaga

SEQ ID NO: 2942044 - RNA, 16 nt, Human
cagcucugguccauag

SEQ ID NO: 2942045 - RNA, 12 nt, Human
cagcucuguccu

SEQ ID NO: 2942046 - RNA, 13 nt, Human
cagcucuguccug

SEQ ID NO: 2942047 - RNA, 23 nt, Human
cagcucugguccauagagagcaa

SEQ ID NO: 2942048 - RNA, 22 nt, Human
cagcucugguccauagagagca

SEQ ID NO: 2942049 - RNA, 14 nt, Human
cagcucuguccugg

SEQ ID NO: 2942050 - RNA, 16 nt, Human
cagcucuguccuggga

SEQ ID NO: 2942051 - RNA, 17 nt, Human
cagcucuguccugggag

SEQ ID NO: 2942052 - RNA, 18 nt, Human
cagcucuguccugggagu

SEQ ID NO: 2942053 - RNA, 23 nt, Human
cagcucuguccugggagugagcu

SEQ ID NO: 2942054 - RNA, 21 nt, Human
cagcucuuauauugccauuuc

SEQ ID NO: 2942055 - RNA, 10 nt, Human
cagcucuuau

SEQ ID NO: 2942056 - RNA, 13 nt, Human
cagcucuucucca

SEQ ID NO: 2942057 - RNA, 14 nt, Human
cagcucuucuccag

SEQ ID NO: 2942058 - RNA, 15 nt, Human
cagcucuucuccagg

SEQ ID NO: 2942059 - RNA, 16 nt, Human
cagcucuucuccaggc

SEQ ID NO: 2942060 - RNA, 17 nt, Human
cagcucuucuccaggcu

SEQ ID NO: 2942061 - RNA, 18 nt, Human
cagcucuucuccaggcug

SEQ ID NO: 2942062 - RNA, 19 nt, Human
cagcucuucuccaggcugu

SEQ ID NO: 2942063 - RNA, 23 nt, Human
cagcucuucuccaggcuguaucc

SEQ ID NO: 2942064 - RNA, 20 nt, Human
cagcucagagagggugggag

SEQ ID NO: 2942065 - RNA, 19 nt, Human
cagcucagagaggguggga

SEQ ID NO: 2942066 - RNA, 17 nt, Human
cagcucagagagggugg

SEQ ID NO: 2942067 - RNA, 13 nt, Human
cagcucagagagg

SEQ ID NO: 2942068 - RNA, 16 nt, Human
cagcuccuucuguccu

SEQ ID NO: 2942069 - RNA, 17 nt, Human
cagcuccuucuguccua

SEQ ID NO: 2942070 - RNA, 21 nt, Human
cagcuccuucuguccuacucu

SEQ ID NO: 2942071 - RNA, 23 nt, Human
cagcuccuucuguccuacucugu

SEQ ID NO: 2942072 - RNA, 16 nt, Human
cagcucuccccuucuc

SEQ ID NO: 2942073 - RNA, 16 nt, Human
cagcucugcaagaauu

SEQ ID NO: 2942074 - RNA, 15 nt, Human
cagcucugcaagaau

SEQ ID NO: 2942075 - RNA, 20 nt, Human
cagcucugcauacucauuag

SEQ ID NO: 2942076 - RNA, 21 nt, Human
cagcucugcaagaauugaagc

SEQ ID NO: 2942077 - RNA, 18 nt, Human
cagcugcgguccacccag

SEQ ID NO: 2942078 - RNA, 15 nt, Human
cagcugccugggauc

SEQ ID NO: 2942079 - RNA, 19 nt, Human
cagcugcgguccacccagg

SEQ ID NO: 2942080 - RNA, 20 nt, Human
cagcugcgguccacccagga

SEQ ID NO: 2942081 - RNA, 21 nt, Human
cagcugcgguccacccaggag

SEQ ID NO: 2942082 - RNA, 22 nt, Human
cagcugcgguccacccaggagc

SEQ ID NO: 2942083 - RNA, 23 nt, Human
cagcugcgguccacccaggagcc

SEQ ID NO: 2942084 - RNA, 24 nt, Human
cagcugcgguccacccaggagccc

SEQ ID NO: 2942085 - RNA, 23 nt, Human
cagcugccugggaucccucaucc

SEQ ID NO: 2942086 - RNA, 18 nt, Human
cagcugccugggaucccu

SEQ ID NO: 2942087 - RNA, 17 nt, Human
cagcugcuacuacuccu

SEQ ID NO: 2942088 - RNA, 21 nt, Human
cagcugcugagauccuggacu

SEQ ID NO: 2942089 - RNA, 12 nt, Human
cagcugcugaga

SEQ ID NO: 2942090 - RNA, 19 nt, Human
cagcugcugagauccugga

SEQ ID NO: 2942091 - RNA, 21 nt, Human
cagcugcugaaacaacaaaua

SEQ ID NO: 2942092 - RNA, 20 nt, Human
cagcugcugaaacaacaaau

SEQ ID NO: 2942093 - RNA, 22 nt, Human
cagcugcuugggcuucauccuc

SEQ ID NO: 2942094 - RNA, 21 nt, Human
cagcugcuugggcuucauccu

SEQ ID NO: 2942095 - RNA, 19 nt, Human
cagcugcuugggcuucauc

SEQ ID NO: 2942096 - RNA, 18 nt, Human
cagcugcuugggcuucau

SEQ ID NO: 2942097 - RNA, 16 nt, Human
cagcugcuugggcuuc

SEQ ID NO: 2942098 - RNA, 15 nt, Human
cagcugcuugggcuu

SEQ ID NO: 2942099 - RNA, 14 nt, Human
cagcugcuugggcu

SEQ ID NO: 2942100 - RNA, 13 nt, Human
cagcugcuugggc

SEQ ID NO: 2942101 - RNA, 23 nt, Human
cagcugcuuuugucuaugggacu

SEQ ID NO: 2942102 - RNA, 22 nt, Human
cagcugcuuuugucuaugggac

SEQ ID NO: 2942103 - RNA, 23 nt, Human
cagcugggguggggaccucaggc

SEQ ID NO: 2942104 - RNA, 22 nt, Human
cagcugggguggggaccucagg

SEQ ID NO: 2942105 - RNA, 21 nt, Human
cagcugggguggggaccucag

SEQ ID NO: 2942106 - RNA, 18 nt, Human
cagcuguaugauucccag

SEQ ID NO: 2942107 - RNA, 18 nt, Human
cagcugguugagguuuca

SEQ ID NO: 2942108 - RNA, 22 nt, Human
caggaagcucagggccuggcuc

SEQ ID NO: 2942109 - RNA, 20 nt, Human
cagccugcuccagcuguuca

SEQ ID NO: 2942110 - RNA, 23 nt, Human
cagccucccgaauagcugggacu

SEQ ID NO: 2942111 - RNA, 19 nt, Human
cagccucccgaguagcugg

SEQ ID NO: 2942112 - RNA, 20 nt, Human
cagccucccgaguagcuggg

SEQ ID NO: 2942113 - RNA, 21 nt, Human
cagccucccgaguagcuggga

SEQ ID NO: 2942114 - RNA, 22 nt, Human
cagccucccgaguagcugggac

SEQ ID NO: 2942115 - RNA, 23 nt, Human
cagccucccgaguagcugggacu

SEQ ID NO: 2942116 - RNA, 12 nt, Human
cagccuggaugc

SEQ ID NO: 2942117 - RNA, 15 nt, Human
cagccuggaugccau

SEQ ID NO: 2942118 - RNA, 16 nt, Human
cagccuggaugccauc

SEQ ID NO: 2942119 - RNA, 11 nt, Human
cagccuggaug

SEQ ID NO: 2942120 - RNA, 17 nt, Human
cagccuggaugccaucc

SEQ ID NO: 2942121 - RNA, 21 nt, Human
cagccuggaugccauccaagu

SEQ ID NO: 2942122 - RNA, 19 nt, Human
cagccuggacccuguggau

SEQ ID NO: 2942123 - RNA, 15 nt, Human
cagccuggacccugu

SEQ ID NO: 2942124 - RNA, 19 nt, Human
cagccugggcaacagagca

SEQ ID NO: 2942125 - RNA, 20 nt, Human
cagccugggcaacagagcaa

SEQ ID NO: 2942126 - RNA, 19 nt, Human
cagccugggcaaugugaua

SEQ ID NO: 2942127 - RNA, 16 nt, Human
cagccugggcaaugug

SEQ ID NO: 2942128 - RNA, 24 nt, Human
cagccuugaccauucuccaccugc

SEQ ID NO: 2942129 - RNA, 23 nt, Human
cagccuugaccauucuccaccug

SEQ ID NO: 2942130 - RNA, 22 nt, Human
cagccuugaccauucuccaccu

SEQ ID NO: 2942131 - RNA, 17 nt, Human
cagccuugaccauucuc

SEQ ID NO: 2942132 - RNA, 21 nt, Human
cagccuugaccauucuccacc

SEQ ID NO: 2942133 - RNA, 20 nt, Human
cagccuugaccauucuccac

SEQ ID NO: 2942134 - RNA, 12 nt, Human
cagcucagagag

SEQ ID NO: 2942135 - RNA, 20 nt, Human
cagcucaccucucccuugga

SEQ ID NO: 2942136 - RNA, 19 nt, Human
cagcucaccucucccuugg

SEQ ID NO: 2942137 - RNA, 22 nt, Human
cagcucaccagccccagugccc

SEQ ID NO: 2942138 - RNA, 20 nt, Human
cagcucaccagccccagugc

SEQ ID NO: 2942139 - RNA, 21 nt, Human
cagcucaccagccccagugcc

SEQ ID NO: 2942140 - RNA, 17 nt, Human
cagcucaccucucccuu

SEQ ID NO: 2942141 - RNA, 16 nt, Human
cagcucaccucucccu

SEQ ID NO: 2942142 - RNA, 15 nt, Human
cagcucaccucuccc

SEQ ID NO: 2942143 - RNA, 13 nt, Human
cagcucaccucuc

SEQ ID NO: 2942144 - RNA, 13 nt, Human
cagcucaccagcc

SEQ ID NO: 2942145 - RNA, 15 nt, Human
cagcucaccagcccc

SEQ ID NO: 2942146 - RNA, 16 nt, Human
cagcucaccagcccca

SEQ ID NO: 2942147 - RNA, 17 nt, Human
cagcucaccagccccag

SEQ ID NO: 2942148 - RNA, 19 nt, Human
cagcucaccagccccagug

SEQ ID NO: 2942149 - RNA, 21 nt, Human
cagcgagcccugguggcagug

SEQ ID NO: 2942150 - RNA, 18 nt, Human
cagcuaacauggaaguac

SEQ ID NO: 2942151 - RNA, 19 nt, Human
cagcuaacauggaaguacu

SEQ ID NO: 2942152 - RNA, 13 nt, Human
cagcgagcccugg

SEQ ID NO: 2942153 - RNA, 16 nt, Human
cagcgagcccuggugg

SEQ ID NO: 2942154 - RNA, 17 nt, Human
cagcgagcccugguggc

SEQ ID NO: 2942155 - RNA, 19 nt, Human
cagcgagcccugguggcag

SEQ ID NO: 2942156 - RNA, 20 nt, Human
cagcgagcccugguggcagu

SEQ ID NO: 2942157 - RNA, 20 nt, Human
cagcuaacauggaaguacua

SEQ ID NO: 2942158 - RNA, 15 nt, Human
cagcuaaugggacac

SEQ ID NO: 2942159 - RNA, 16 nt, Human
cagcuaaugggacacu

SEQ ID NO: 2942160 - RNA, 19 nt, Human
cagcuacucgggaggcuga

SEQ ID NO: 2942161 - RNA, 17 nt, Human
cagcuacucgggaggcu

SEQ ID NO: 2942162 - RNA, 23 nt, Human
cagcuacucgggaggcugaggca

SEQ ID NO: 2942163 - RNA, 24 nt, Human
cagcuacucgggaggcugaggcag

SEQ ID NO: 2942164 - RNA, 19 nt, Human
cagcuacuugggaggcuga

SEQ ID NO: 2942165 - RNA, 13 nt, Human
cagccccagugcc

SEQ ID NO: 2942166 - RNA, 14 nt, Human
cagccccagugccc

SEQ ID NO: 2942167 - RNA, 15 nt, Human
cagccccagugccca

SEQ ID NO: 2942168 - RNA, 16 nt, Human
cagccccagugcccac

SEQ ID NO: 2942169 - RNA, 17 nt, Human
cagccccagugcccaca

SEQ ID NO: 2942170 - RNA, 18 nt, Human
cagccccagugcccacag

SEQ ID NO: 2942171 - RNA, 21 nt, Human
cagccccaucccaaacccuuc

SEQ ID NO: 2942172 - RNA, 11 nt, Human
cagccccaucc

SEQ ID NO: 2942173 - RNA, 21 nt, Human
cagccccuguucuggcagagu

SEQ ID NO: 2942174 - RNA, 22 nt, Human
cagccccuggaugcagccucac

SEQ ID NO: 2942175 - RNA, 20 nt, Human
cagccccuguucuggcagag

SEQ ID NO: 2942176 - RNA, 16 nt, Human
cagccccauucugccu

SEQ ID NO: 2942177 - RNA, 17 nt, Human
cagccccauucugccug

SEQ ID NO: 2942178 - RNA, 18 nt, Human
cagccccauucugccugc

SEQ ID NO: 2942179 - RNA, 23 nt, Human
cagccccuggaugcagccucaca

SEQ ID NO: 2942180 - RNA, 13 nt, Human
cagccccauucug

SEQ ID NO: 2942181 - RNA, 14 nt, Human
cagccccauucugc

SEQ ID NO: 2942182 - RNA, 22 nt, Human
cagccccauccucuguacagag

SEQ ID NO: 2942183 - RNA, 16 nt, Human
cagccccauccucugu

SEQ ID NO: 2942184 - RNA, 14 nt, Human
cagccccauccucu

SEQ ID NO: 2942185 - RNA, 13 nt, Human
cagccccauccuc

SEQ ID NO: 2942186 - RNA, 12 nt, Human
cagccccauccu

SEQ ID NO: 2942187 - RNA, 22 nt, Human
cagccccaucccaaacccuuca

SEQ ID NO: 2942188 - RNA, 16 nt, Human
cagcccgggcucugcc

SEQ ID NO: 2942189 - RNA, 15 nt, Human
cagcccgggcucugc

SEQ ID NO: 2942190 - RNA, 14 nt, Human
cagcccgggcucug

SEQ ID NO: 2942191 - RNA, 13 nt, Human
cagcccgggcucu

SEQ ID NO: 2942192 - RNA, 24 nt, Human
cagccccuucugacccaugcugcc

SEQ ID NO: 2942193 - RNA, 23 nt, Human
cagccccuucugacccaugcugc

SEQ ID NO: 2942194 - RNA, 22 nt, Human
cagccccuucugacccaugcug

SEQ ID NO: 2942195 - RNA, 21 nt, Human
cagccccuucugacccaugcu

SEQ ID NO: 2942196 - RNA, 19 nt, Human
cagccccuucugacccaug

SEQ ID NO: 2942197 - RNA, 17 nt, Human
cagccccuucugaccca

SEQ ID NO: 2942198 - RNA, 16 nt, Human
cagccccuucugaccc

SEQ ID NO: 2942199 - RNA, 22 nt, Human
cagcccgggcucugccucccau

SEQ ID NO: 2942200 - RNA, 21 nt, Human
cagcccgggcucugccuccca

SEQ ID NO: 2942201 - RNA, 20 nt, Human
cagcccgggcucugccuccc

SEQ ID NO: 2942202 - RNA, 19 nt, Human
cagcccgggcucugccucc

SEQ ID NO: 2942203 - RNA, 18 nt, Human
cagcccgggcucugccuc

SEQ ID NO: 2942204 - RNA, 17 nt, Human
cagcccgggcucugccu

SEQ ID NO: 2942205 - RNA, 18 nt, Human
cagcccucaauugugaaa

SEQ ID NO: 2942206 - RNA, 13 nt, Human
cagcccucagaau

SEQ ID NO: 2942207 - RNA, 16 nt, Human
cagcccugcagagggc

SEQ ID NO: 2942208 - RNA, 15 nt, Human
cagcccugcagaggg

SEQ ID NO: 2942209 - RNA, 14 nt, Human
cagcccugcagagg

SEQ ID NO: 2942210 - RNA, 13 nt, Human
cagcccugcagag

SEQ ID NO: 2942211 - RNA, 20 nt, Human
cagcccugcagagggcacag

SEQ ID NO: 2942212 - RNA, 18 nt, Human
cagcccugcagagggcac

SEQ ID NO: 2942213 - RNA, 21 nt, Human
cagccguguaaccauggaccc

SEQ ID NO: 2942214 - RNA, 19 nt, Human
cagccucccaaagugcugg

SEQ ID NO: 2942215 - RNA, 20 nt, Human
cagccucccaaagugcuggg

SEQ ID NO: 2942216 - RNA, 21 nt, Human
cagccucccaaagugcuggga

SEQ ID NO: 2942217 - RNA, 23 nt, Human
cagccucccaaagugcugggauu

SEQ ID NO: 2942218 - RNA, 20 nt, Human
cagccucccgaauagcuggg

SEQ ID NO: 2942219 - RNA, 21 nt, Human
cagccucccgaauagcuggga

SEQ ID NO: 2942220 - RNA, 22 nt, Human
cagccucccgaauagcugggac

SEQ ID NO: 2942221 - RNA, 20 nt, Human
cagccucacaguccuuacca

SEQ ID NO: 2942222 - RNA, 15 nt, Human
cagccucacaguccu

SEQ ID NO: 2942223 - RNA, 14 nt, Human
cagccucacagucc

SEQ ID NO: 2942224 - RNA, 19 nt, Human
cagccucaaccuccugggc

SEQ ID NO: 2942225 - RNA, 20 nt, Human
cagccucaaccuccugggcu

SEQ ID NO: 2942226 - RNA, 21 nt, Human
cagccucaaccuccugggcua

SEQ ID NO: 2942227 - RNA, 17 nt, Human
cagccucaaccuccugg

SEQ ID NO: 2942228 - RNA, 18 nt, Human
cagccucaaccuccuggg

SEQ ID NO: 2942229 - RNA, 16 nt, Human
cagccuaguugaucag

SEQ ID NO: 2942230 - RNA, 14 nt, Human
cagauucuuuccug

SEQ ID NO: 2942231 - RNA, 14 nt, Human
cagauuuuccugaa

SEQ ID NO: 2942232 - RNA, 15 nt, Human
cagauuuuccugaaa

SEQ ID NO: 2942233 - RNA, 18 nt, Human
cagcaaaagaugcuucuc

SEQ ID NO: 2942234 - RNA, 23 nt, Human
cagcaacacaaagcuuuugcaua

SEQ ID NO: 2942235 - RNA, 15 nt, Human
cagcaacacaaagcu

SEQ ID NO: 2942236 - RNA, 23 nt, Human
cagcaacgcaggcccccaggugc

SEQ ID NO: 2942237 - RNA, 18 nt, Human
cagaugggugcuuggagg

SEQ ID NO: 2942238 - RNA, 23 nt, Human
cagaugggugcuuggaggaagga

SEQ ID NO: 2942239 - RNA, 20 nt, Human
cagcacuuugggaggcugag

SEQ ID NO: 2942240 - RNA, 18 nt, Human
cagcacuuugggaggcug

SEQ ID NO: 2942241 - RNA, 17 nt, Human
cagcacuuugggaggcu

SEQ ID NO: 2942242 - RNA, 15 nt, Human
cagcagaaaugccuu

SEQ ID NO: 2942243 - RNA, 17 nt, Human
cagcagaaaugccuuac

SEQ ID NO: 2942244 - RNA, 12 nt, Human
cagcagacacau

SEQ ID NO: 2942245 - RNA, 19 nt, Human
cagcagaaaugccuuaccc

SEQ ID NO: 2942246 - RNA, 22 nt, Human
cagcagaaaugccuuacccuca

SEQ ID NO: 2942247 - RNA, 13 nt, Human
cagcagagcaccu

SEQ ID NO: 2942248 - RNA, 11 nt, Human
cagcagagcac

SEQ ID NO: 2942249 - RNA, 11 nt, Human
cagcagagugc

SEQ ID NO: 2942250 - RNA, 15 nt, Human
cagcagagugcuuua

SEQ ID NO: 2942251 - RNA, 9 nt, Human
cagcagagu

SEQ ID NO: 2942252 - RNA, 10 nt, Human
cagcagagug

SEQ ID NO: 2942253 - RNA, 19 nt, Human
cagcacaaggaaauaaaau

SEQ ID NO: 2942254 - RNA, 19 nt, Human
cagcaauuaugaaaauaau

SEQ ID NO: 2942255 - RNA, 16 nt, Human
cagcaauuaugaaaau

SEQ ID NO: 2942256 - RNA, 22 nt, Human
cagcaauaaagcagcguuucua

SEQ ID NO: 2942257 - RNA, 19 nt, Human
cagcaagugagagcugggu

SEQ ID NO: 2942258 - RNA, 21 nt, Human
cagcaagugagagcugggugu

SEQ ID NO: 2942259 - RNA, 13 nt, Human
cagcaauaaagca

SEQ ID NO: 2942260 - RNA, 21 nt, Human
cagcaauaaagcagcguuucu

SEQ ID NO: 2942261 - RNA, 17 nt, Human
cagcaaggagauuuaca

SEQ ID NO: 2942262 - RNA, 18 nt, Human
cagcaaggagauuuacaa

SEQ ID NO: 2942263 - RNA, 19 nt, Human
cagcaagggugaugggaaa

SEQ ID NO: 2942264 - RNA, 14 nt, Human
cagcaagugagagc

SEQ ID NO: 2942265 - RNA, 15 nt, Human
cagcaagugagagcu

SEQ ID NO: 2942266 - RNA, 16 nt, Human
cagcaagugagagcug

SEQ ID NO: 2942267 - RNA, 17 nt, Human
cagcaagugagagcugg

SEQ ID NO: 2942268 - RNA, 12 nt, Human
cagcaagugaga

SEQ ID NO: 2942269 - RNA, 23 nt, Human
cagcaagggugaugggaaagcau

SEQ ID NO: 2942270 - RNA, 22 nt, Human
cagcaagggugaugggaaagca

SEQ ID NO: 2942271 - RNA, 21 nt, Human
cagccaaagccuccuccagcc

SEQ ID NO: 2942272 - RNA, 18 nt, Human
cagccaaagccuccucca

SEQ ID NO: 2942273 - RNA, 16 nt, Human
cagccaaagccuccuc

SEQ ID NO: 2942274 - RNA, 15 nt, Human
cagccaaagccuccu

SEQ ID NO: 2942275 - RNA, 21 nt, Human
cagcauccuggcacccggccc

SEQ ID NO: 2942276 - RNA, 19 nt, Human
cagcauccuggcacccggc

SEQ ID NO: 2942277 - RNA, 20 nt, Human
cagcauccuggcacccggcc

SEQ ID NO: 2942278 - RNA, 14 nt, Human
cagcauccuggcac

SEQ ID NO: 2942279 - RNA, 15 nt, Human
cagcauccuggcacc

SEQ ID NO: 2942280 - RNA, 16 nt, Human
cagcauccuggcaccc

SEQ ID NO: 2942281 - RNA, 17 nt, Human
cagcauccuggcacccg

SEQ ID NO: 2942282 - RNA, 20 nt, Human
cagcagggagggcuucugcc

SEQ ID NO: 2942283 - RNA, 20 nt, Human
cagcaggcugccagugccug

SEQ ID NO: 2942284 - RNA, 19 nt, Human
cagcaggcucucaggccag

SEQ ID NO: 2942285 - RNA, 18 nt, Human
cagcaggcucucaggcca

SEQ ID NO: 2942286 - RNA, 17 nt, Human
cagcaggcucucaggcc

SEQ ID NO: 2942287 - RNA, 16 nt, Human
cagcaggcucucaggc

SEQ ID NO: 2942288 - RNA, 22 nt, Human
cagcaggcucucaggccagcug

SEQ ID NO: 2942289 - RNA, 20 nt, Human
cagcaggcucucaggccagc

SEQ ID NO: 2942290 - RNA, 18 nt, Human
cagcagggagggcuucug

SEQ ID NO: 2942291 - RNA, 13 nt, Human
cagcaggcugcca

SEQ ID NO: 2942292 - RNA, 14 nt, Human
cagcaggcugccag

SEQ ID NO: 2942293 - RNA, 15 nt, Human
cagcaggcugccagu

SEQ ID NO: 2942294 - RNA, 18 nt, Human
cagcaggcugccagugcc

SEQ ID NO: 2942295 - RNA, 19 nt, Human
cagcaggcugccagugccu

SEQ ID NO: 2942296 - RNA, 12 nt, Human
cagcaggcucuc

SEQ ID NO: 2942297 - RNA, 15 nt, Human
cagcaggcucucagg

SEQ ID NO: 2942298 - RNA, 14 nt, Human
cagcaggcucucag

SEQ ID NO: 2942299 - RNA, 22 nt, Human
cagcagccuggacccuguggau

SEQ ID NO: 2942300 - RNA, 19 nt, Human
cagcagccuggacccugug

SEQ ID NO: 2942301 - RNA, 18 nt, Human
cagcagccuggacccugu

SEQ ID NO: 2942302 - RNA, 15 nt, Human
cagcagccuggaccc

SEQ ID NO: 2942303 - RNA, 14 nt, Human
cagcagccuggacc

SEQ ID NO: 2942304 - RNA, 12 nt, Human
cagcagccugga

SEQ ID NO: 2942305 - RNA, 14 nt, Human
cagccacauuccug

SEQ ID NO: 2942306 - RNA, 19 nt, Human
cagccacauuccugaugcu

SEQ ID NO: 2942307 - RNA, 17 nt, Human
cagccacauuccugaug

SEQ ID NO: 2942308 - RNA, 15 nt, Human
cagccacauuccuga

SEQ ID NO: 2942309 - RNA, 23 nt, Human
cagccacggccaggccagaggga

SEQ ID NO: 2942310 - RNA, 22 nt, Human
cagccaguaaaugggggugcau

SEQ ID NO: 2942311 - RNA, 13 nt, Human
cagccaguaaaug

SEQ ID NO: 2942312 - RNA, 14 nt, Human
cagccacggccagg

SEQ ID NO: 2942313 - RNA, 15 nt, Human
cagccacggccaggc

SEQ ID NO: 2942314 - RNA, 16 nt, Human
cagccacggccaggcc

SEQ ID NO: 2942315 - RNA, 17 nt, Human
cagccacggccaggcca

SEQ ID NO: 2942316 - RNA, 18 nt, Human
cagccacggccaggccag

SEQ ID NO: 2942317 - RNA, 19 nt, Human
cagccacggccaggccaga

SEQ ID NO: 2942318 - RNA, 21 nt, Human
cagccacggccaggccagagg

SEQ ID NO: 2942319 - RNA, 22 nt, Human
cagccacggccaggccagaggg

SEQ ID NO: 2942320 - RNA, 15 nt, Human
cagcccacuucugcc

SEQ ID NO: 2942321 - RNA, 15 nt, Human
cagcccaccccucaa

SEQ ID NO: 2942322 - RNA, 18 nt, Human
cagcccacuucugccaua

SEQ ID NO: 2942323 - RNA, 22 nt, Human
cagccccaaaacucuccucugc

SEQ ID NO: 2942324 - RNA, 21 nt, Human
cagccccaaaacucuccucug

SEQ ID NO: 2942325 - RNA, 20 nt, Human
cagccccaaaacucuccucu

SEQ ID NO: 2942326 - RNA, 14 nt, Human
cagcucaccagccc

SEQ ID NO: 2942327 - RNA, 12 nt, Human
cagggccucugc

SEQ ID NO: 2942328 - RNA, 13 nt, Human
cagggccucugcg

SEQ ID NO: 2942329 - RNA, 14 nt, Human
cagggccucugcgg

SEQ ID NO: 2942330 - RNA, 15 nt, Human
cagggccucugcgga

SEQ ID NO: 2942331 - RNA, 17 nt, Human
cagggccucugcggagc

SEQ ID NO: 2942332 - RNA, 20 nt, Human
cagggccaugucagacacag

SEQ ID NO: 2942333 - RNA, 21 nt, Human
cagggccaugucagacacaga

SEQ ID NO: 2942334 - RNA, 17 nt, Human
cagggccaugucagaca

SEQ ID NO: 2942335 - RNA, 14 nt, Human
cagggcaucuggga

SEQ ID NO: 2942336 - RNA, 17 nt, Human
cagggcauggcugggaa

SEQ ID NO: 2942337 - RNA, 22 nt, Human
cagggcacaccgggcacucaga

SEQ ID NO: 2942338 - RNA, 23 nt, Human
cagggcacaccgggcacucagaa

SEQ ID NO: 2942339 - RNA, 15 nt, Human
cagggcacaccgggc

SEQ ID NO: 2942340 - RNA, 17 nt, Human
cagggcacaccgggcac

SEQ ID NO: 2942341 - RNA, 19 nt, Human
cagggcacaccgggcacuc

SEQ ID NO: 2942342 - RNA, 21 nt, Human
cagggcacaccgggcacucag

SEQ ID NO: 2942343 - RNA, 14 nt, Human
cagggcacaccggg

SEQ ID NO: 2942344 - RNA, 23 nt, Human
cagggacagaggggguggccucc

SEQ ID NO: 2942345 - RNA, 18 nt, Human
cagggacaggauaagagg

SEQ ID NO: 2942346 - RNA, 19 nt, Human
caggggaggguagagcgga

SEQ ID NO: 2942347 - RNA, 19 nt, Human
cagggccuggcucaggugg

SEQ ID NO: 2942348 - RNA, 16 nt, Human
cagggccuggcucagg

SEQ ID NO: 2942349 - RNA, 21 nt, Human
cagggccucugcggagcacac

SEQ ID NO: 2942350 - RNA, 13 nt, Human
cagggccuggcuc

SEQ ID NO: 2942351 - RNA, 15 nt, Human
cagggccuggcucag

SEQ ID NO: 2942352 - RNA, 14 nt, Human
cagggccuggcuca

SEQ ID NO: 2942353 - RNA, 11 nt, Human
caggggacagg

SEQ ID NO: 2942354 - RNA, 16 nt, Human
caggggacaggauggu

SEQ ID NO: 2942355 - RNA, 13 nt, Human
cagggacagaggg

SEQ ID NO: 2942356 - RNA, 20 nt, Human
cagggacagaggggguggcc

SEQ ID NO: 2942357 - RNA, 14 nt, Human
cagggacagagggg

SEQ ID NO: 2942358 - RNA, 16 nt, Human
cagggaaacagcuaau

SEQ ID NO: 2942359 - RNA, 22 nt, Human
cagggaaacagcuaaugggaca

SEQ ID NO: 2942360 - RNA, 12 nt, Human
caggcugccagu

SEQ ID NO: 2942361 - RNA, 21 nt, Human
caggcugccagugccugggug

SEQ ID NO: 2942362 - RNA, 19 nt, Human
caggcugccagugccuggg

SEQ ID NO: 2942363 - RNA, 20 nt, Human
caggcugccagugccugggu

SEQ ID NO: 2942364 - RNA, 14 nt, Human
caggcugccagugc

SEQ ID NO: 2942365 - RNA, 16 nt, Human
caggcugccagugccu

SEQ ID NO: 2942366 - RNA, 17 nt, Human
caggcugccagugccug

SEQ ID NO: 2942367 - RNA, 16 nt, Human
caggcuggaguuauug

SEQ ID NO: 2942368 - RNA, 13 nt, Human
caggcuggaguua

SEQ ID NO: 2942369 - RNA, 23 nt, Human
caggcugggcuucaguggcagcu

SEQ ID NO: 2942370 - RNA, 23 nt, Human
caggcuuagucacugagacagcc

SEQ ID NO: 2942371 - RNA, 22 nt, Human
caggcuuagucacugagacagc

SEQ ID NO: 2942372 - RNA, 12 nt, Human
caggcuggucuc

SEQ ID NO: 2942373 - RNA, 19 nt, Human
caggcuggucucaaacucu

SEQ ID NO: 2942374 - RNA, 14 nt, Human
caggcuguauccca

SEQ ID NO: 2942375 - RNA, 20 nt, Human
caggcuguaucccaugagcc

SEQ ID NO: 2942376 - RNA, 21 nt, Human
caggcuguaucccaugagccu

SEQ ID NO: 2942377 - RNA, 22 nt, Human
caggcuguaucccaugagccuc

SEQ ID NO: 2942378 - RNA, 23 nt, Human
caggcuguaucccaugagccuca

SEQ ID NO: 2942379 - RNA, 21 nt, Human
caggcuuagucacugagacag

SEQ ID NO: 2942380 - RNA, 20 nt, Human
caggcuuagucacugagaca

SEQ ID NO: 2942381 - RNA, 17 nt, Human
caggcuuagucacugag

SEQ ID NO: 2942382 - RNA, 16 nt, Human
caggcuuagucacuga

SEQ ID NO: 2942383 - RNA, 20 nt, Human
caggcccuugucggccccac

SEQ ID NO: 2942384 - RNA, 22 nt, Human
caggcccucugcccacucccug

SEQ ID NO: 2942385 - RNA, 21 nt, Human
caggcccucugcccacucccu

SEQ ID NO: 2942386 - RNA, 20 nt, Human
caggcccucugcccacuccc

SEQ ID NO: 2942387 - RNA, 19 nt, Human
caggcccucugcccacucc

SEQ ID NO: 2942388 - RNA, 17 nt, Human
caggcccucugcccacu

SEQ ID NO: 2942389 - RNA, 16 nt, Human
caggcccucugcccac

SEQ ID NO: 2942390 - RNA, 22 nt, Human
caggcccggcuccaggcuccuu

SEQ ID NO: 2942391 - RNA, 20 nt, Human
caggcccggcuccaggcucc

SEQ ID NO: 2942392 - RNA, 21 nt, Human
caggcccggcuccaggcuccu

SEQ ID NO: 2942393 - RNA, 15 nt, Human
caggcccucugccca

SEQ ID NO: 2942394 - RNA, 14 nt, Human
caggcccucugccc

SEQ ID NO: 2942395 - RNA, 13 nt, Human
caggcccucugcc

SEQ ID NO: 2942396 - RNA, 17 nt, Human
caggcccggcuccaggc

SEQ ID NO: 2942397 - RNA, 16 nt, Human
caggcccggcuccagg

SEQ ID NO: 2942398 - RNA, 18 nt, Human
caggcccggcuccaggcu

SEQ ID NO: 2942399 - RNA, 19 nt, Human
caggcccggcuccaggcuc

SEQ ID NO: 2942400 - RNA, 23 nt, Human
caggcucucaggccagcugcuug

SEQ ID NO: 2942401 - RNA, 21 nt, Human
caggcucucaggccagcugcu

SEQ ID NO: 2942402 - RNA, 20 nt, Human
caggcucucaggccagcugc

SEQ ID NO: 2942403 - RNA, 19 nt, Human
caggcucucaggccagcug

SEQ ID NO: 2942404 - RNA, 18 nt, Human
caggcucucaggccagcu

SEQ ID NO: 2942405 - RNA, 17 nt, Human
caggcucucaggccagc

SEQ ID NO: 2942406 - RNA, 21 nt, Human
caggcuccuuuagcgcccagu

SEQ ID NO: 2942407 - RNA, 12 nt, Human
caggcucucagg

SEQ ID NO: 2942408 - RNA, 20 nt, Human
caggcucgggcuccccagcc

SEQ ID NO: 2942409 - RNA, 16 nt, Human
caggcucucaggccag

SEQ ID NO: 2942410 - RNA, 15 nt, Human
caggcucucaggcca

SEQ ID NO: 2942411 - RNA, 14 nt, Human
caggcucucaggcc

SEQ ID NO: 2942412 - RNA, 13 nt, Human
caggcucucaggc

SEQ ID NO: 2942413 - RNA, 14 nt, Human
caggcuccuuuagc

SEQ ID NO: 2942414 - RNA, 19 nt, Human
caggcuccuuuagcgccca

SEQ ID NO: 2942415 - RNA, 20 nt, Human
caggcuccuuuagcgcccag

SEQ ID NO: 2942416 - RNA, 14 nt, Human
caggcuacugucag

SEQ ID NO: 2942417 - RNA, 13 nt, Human
caggcuagaugua

SEQ ID NO: 2942418 - RNA, 19 nt, Human
caggcuagauguauguacu

SEQ ID NO: 2942419 - RNA, 23 nt, Human
caggagaucgagaccauccuggc

SEQ ID NO: 2942420 - RNA, 23 nt, Human
caggagacuggcgugaacccagg

SEQ ID NO: 2942421 - RNA, 22 nt, Human
caggagacuggcgugaacccag

SEQ ID NO: 2942422 - RNA, 23 nt, Human
caggagccccgaggccuucucug

SEQ ID NO: 2942423 - RNA, 20 nt, Human
caggagccccgaggccuucu

SEQ ID NO: 2942424 - RNA, 22 nt, Human
caggagccccgaggccuucucu

SEQ ID NO: 2942425 - RNA, 15 nt, Human
caggagccccgaggc

SEQ ID NO: 2942426 - RNA, 16 nt, Human
caggagccccgaggcc

SEQ ID NO: 2942427 - RNA, 18 nt, Human
caggagccccgaggccuu

SEQ ID NO: 2942428 - RNA, 19 nt, Human
caggagcagccacauuccu

SEQ ID NO: 2942429 - RNA, 14 nt, Human
caggagcagccaca

SEQ ID NO: 2942430 - RNA, 13 nt, Human
caggagcagccac

SEQ ID NO: 2942431 - RNA, 12 nt, Human
caggagcagcca

SEQ ID NO: 2942432 - RNA, 20 nt, Human
caggagccuccugcccuuac

SEQ ID NO: 2942433 - RNA, 17 nt, Human
caggagccuccugcccu

SEQ ID NO: 2942434 - RNA, 14 nt, Human
caggagccuccugc

SEQ ID NO: 2942435 - RNA, 12 nt, Human
caggagugagca

SEQ ID NO: 2942436 - RNA, 21 nt, Human
caggaguuugagaccaaccug

SEQ ID NO: 2942437 - RNA, 14 nt, Human
caggaguuuggcca

SEQ ID NO: 2942438 - RNA, 13 nt, Human
caggaguuuggcc

SEQ ID NO: 2942439 - RNA, 23 nt, Human
caggaguuugagaccaaccuggg

SEQ ID NO: 2942440 - RNA, 22 nt, Human
caggaguuugagaccaaccugg

SEQ ID NO: 2942441 - RNA, 17 nt, Human
caggaguuuggccagaa

SEQ ID NO: 2942442 - RNA, 16 nt, Human
caggaguuuggccaga

SEQ ID NO: 2942443 - RNA, 15 nt, Human
caggaguuuggccag

SEQ ID NO: 2942444 - RNA, 14 nt, Human
caggaucagucuga

SEQ ID NO: 2942445 - RNA, 13 nt, Human
caggaucagucug

SEQ ID NO: 2942446 - RNA, 21 nt, Human
caggauauucucacagcucca

SEQ ID NO: 2942447 - RNA, 23 nt, Human
caggauggccgggcgcgguggcu

SEQ ID NO: 2942448 - RNA, 17 nt, Human
caggauucuuccucccu

SEQ ID NO: 2942449 - RNA, 18 nt, Human
caggauucuuccucccuc

SEQ ID NO: 2942450 - RNA, 21 nt, Human
caggaugguucccuugaugaa

SEQ ID NO: 2942451 - RNA, 23 nt, Human
caggaugguucccuugaugaaga

SEQ ID NO: 2942452 - RNA, 17 nt, Human
caggcaugguggcccac

SEQ ID NO: 2942453 - RNA, 23 nt, Human
caggcaggucuugaacuccuggc

SEQ ID NO: 2942454 - RNA, 15 nt, Human
caggcaggugggaug

SEQ ID NO: 2942455 - RNA, 13 nt, Human
caggcaggucuug

SEQ ID NO: 2942456 - RNA, 22 nt, Human
caggcaggucuugaacuccugg

SEQ ID NO: 2942457 - RNA, 14 nt, Human
caggcagguccagg

SEQ ID NO: 2942458 - RNA, 15 nt, Human
caggcagguccaggg

SEQ ID NO: 2942459 - RNA, 19 nt, Human
caggcagguccaggguuug

SEQ ID NO: 2942460 - RNA, 12 nt, Human
caggcaggucuu

SEQ ID NO: 2942461 - RNA, 24 nt, Human
caggcauuccccaggaggccagcc

SEQ ID NO: 2942462 - RNA, 23 nt, Human
caggcauuccccaggaggccagc

SEQ ID NO: 2942463 - RNA, 22 nt, Human
caggcauuccccaggaggccag

SEQ ID NO: 2942464 - RNA, 21 nt, Human
caggcauuccccaggaggcca

SEQ ID NO: 2942465 - RNA, 20 nt, Human
caggcauuccccaggaggcc

SEQ ID NO: 2942466 - RNA, 19 nt, Human
caggcauuccccaggaggc

SEQ ID NO: 2942467 - RNA, 18 nt, Human
caggcauuccccaggagg

SEQ ID NO: 2942468 - RNA, 15 nt, Human
caggcauguucucug

SEQ ID NO: 2942469 - RNA, 18 nt, Human
caggcauguucucugagg

SEQ ID NO: 2942470 - RNA, 19 nt, Human
caggcauguucucugagga

SEQ ID NO: 2942471 - RNA, 20 nt, Human
caggcauguucucugaggac

SEQ ID NO: 2942472 - RNA, 17 nt, Human
caggcauuccccaggag

SEQ ID NO: 2942473 - RNA, 16 nt, Human
caggcauuccccagga

SEQ ID NO: 2942474 - RNA, 15 nt, Human
caggcauuccccagg

SEQ ID NO: 2942475 - RNA, 13 nt, Human
caggcauucccca

SEQ ID NO: 2942476 - RNA, 17 nt, Human
caggcagccaggccaca

SEQ ID NO: 2942477 - RNA, 16 nt, Human
caggcagccaggccac

SEQ ID NO: 2942478 - RNA, 13 nt, Human
caggcagguccag

SEQ ID NO: 2942479 - RNA, 14 nt, Human
caggcaagcaccuc

SEQ ID NO: 2942480 - RNA, 15 nt, Human
caggcaagcaccucc

SEQ ID NO: 2942481 - RNA, 16 nt, Human
caggcaagcaccuccu

SEQ ID NO: 2942482 - RNA, 21 nt, Human
caggcaagcaccuccugccuc

SEQ ID NO: 2942483 - RNA, 15 nt, Human
caggcagccaggcca

SEQ ID NO: 2942484 - RNA, 14 nt, Human
caggcagccaggcc

SEQ ID NO: 2942485 - RNA, 20 nt, Human
caggauucuuccucccuccc

SEQ ID NO: 2942486 - RNA, 16 nt, Human
caggauuuuaaucuuu

SEQ ID NO: 2942487 - RNA, 13 nt, Human
caggcccggcucc

SEQ ID NO: 2942488 - RNA, 14 nt, Human
caggcccggcucca

SEQ ID NO: 2942489 - RNA, 15 nt, Human
caggcccggcuccag

SEQ ID NO: 2942490 - RNA, 15 nt, Human
caggccccugccacc

SEQ ID NO: 2942491 - RNA, 17 nt, Human
caggccccugccacccu

SEQ ID NO: 2942492 - RNA, 19 nt, Human
caggccccugccacccugg

SEQ ID NO: 2942493 - RNA, 20 nt, Human
caggccccugccacccuggg

SEQ ID NO: 2942494 - RNA, 23 nt, Human
caggccaaacucaccugccccuc

SEQ ID NO: 2942495 - RNA, 18 nt, Human
caggccaaacucaccugc

SEQ ID NO: 2942496 - RNA, 13 nt, Human
caggccacaagac

SEQ ID NO: 2942497 - RNA, 18 nt, Human
caggccacaagacccuug

SEQ ID NO: 2942498 - RNA, 17 nt, Human
caggccacaagacccuu

SEQ ID NO: 2942499 - RNA, 20 nt, Human
caggccacaagacccuugug

SEQ ID NO: 2942500 - RNA, 22 nt, Human
caggccaggcccucugcccacu

SEQ ID NO: 2942501 - RNA, 21 nt, Human
caggccaggcccucugcccac

SEQ ID NO: 2942502 - RNA, 13 nt, Human
caggccccugcca

SEQ ID NO: 2942503 - RNA, 20 nt, Human
caggcccccaggugccaguu

SEQ ID NO: 2942504 - RNA, 19 nt, Human
caggcccccaggugccagu

SEQ ID NO: 2942505 - RNA, 14 nt, Human
caggcccccaggug

SEQ ID NO: 2942506 - RNA, 17 nt, Human
caguccucccaucucac

SEQ ID NO: 2942507 - RNA, 16 nt, Human
caguccucccaucuca

SEQ ID NO: 2942508 - RNA, 14 nt, Human
caguccugcccgcc

SEQ ID NO: 2942509 - RNA, 18 nt, Human
cagucuggaaugcagugg

SEQ ID NO: 2942510 - RNA, 21 nt, Human
caguccuuaccagcagagcac

SEQ ID NO: 2942511 - RNA, 20 nt, Human
caguccuuaccagcagagca

SEQ ID NO: 2942512 - RNA, 19 nt, Human
caguccuuaccagcagagc

SEQ ID NO: 2942513 - RNA, 15 nt, Human
caguccugcccgcca

SEQ ID NO: 2942514 - RNA, 18 nt, Human
caguccuuaccagcagag

SEQ ID NO: 2942515 - RNA, 15 nt, Human
caguccuuaccagca

SEQ ID NO: 2942516 - RNA, 19 nt, Human
cagucuggaaugcaguggu

SEQ ID NO: 2942517 - RNA, 20 nt, Human
cagugaaagaaaauaacaau

SEQ ID NO: 2942518 - RNA, 16 nt, Human
cagugaaagaaaauaa

SEQ ID NO: 2942519 - RNA, 24 nt, Human
cagugagccgagauugcaccacug

SEQ ID NO: 2942520 - RNA, 12 nt, Human
cagugaggcucu

SEQ ID NO: 2942521 - RNA, 16 nt, Human
cagugaggcucugccc

SEQ ID NO: 2942522 - RNA, 15 nt, Human
cagugaggcucugcc

SEQ ID NO: 2942523 - RNA, 14 nt, Human
cagugaggcucugc

SEQ ID NO: 2942524 - RNA, 13 nt, Human
cagugaggcucug

SEQ ID NO: 2942525 - RNA, 21 nt, Human
cagugaggcucugcccuuggu

SEQ ID NO: 2942526 - RNA, 17 nt, Human
cagugagucgaggacag

SEQ ID NO: 2942527 - RNA, 18 nt, Human
cagugagucgaggacagg

SEQ ID NO: 2942528 - RNA, 20 nt, Human
cagugaggcucugcccuugg

SEQ ID NO: 2942529 - RNA, 19 nt, Human
cagugaggcucugcccuug

SEQ ID NO: 2942530 - RNA, 18 nt, Human
cagugaggcucugcccuu

SEQ ID NO: 2942531 - RNA, 17 nt, Human
cagugaggcucugcccu

SEQ ID NO: 2942532 - RNA, 15 nt, Human
cagugagacagcucu

SEQ ID NO: 2942533 - RNA, 22 nt, Human
cagugccuggguggaugggcca

SEQ ID NO: 2942534 - RNA, 13 nt, Human
cagugccuuaugg

SEQ ID NO: 2942535 - RNA, 11 nt, Human
cagugccuuau

SEQ ID NO: 2942536 - RNA, 18 nt, Human
cagugccgagaaggaagc

SEQ ID NO: 2942537 - RNA, 15 nt, Human
cagugccgagaagga

SEQ ID NO: 2942538 - RNA, 12 nt, Human
cagugccucucc

SEQ ID NO: 2942539 - RNA, 20 nt, Human
cagugccucucccugcugcu

SEQ ID NO: 2942540 - RNA, 21 nt, Human
cagugccucucccugcugcuc

SEQ ID NO: 2942541 - RNA, 22 nt, Human
cagugccucucccugcugcucc

SEQ ID NO: 2942542 - RNA, 22 nt, Human
cagugccuuauggaacacucug

SEQ ID NO: 2942543 - RNA, 21 nt, Human
cagugccuuauggaacacucu

SEQ ID NO: 2942544 - RNA, 20 nt, Human
cagugccuuauggaacacuc

SEQ ID NO: 2942545 - RNA, 19 nt, Human
cagugccuuauggaacacu

SEQ ID NO: 2942546 - RNA, 18 nt, Human
cagugccuuauggaacac

SEQ ID NO: 2942547 - RNA, 17 nt, Human
cagugccuuauggaaca

SEQ ID NO: 2942548 - RNA, 16 nt, Human
cagugccuuauggaac

SEQ ID NO: 2942549 - RNA, 15 nt, Human
cagugccuuauggaa

SEQ ID NO: 2942550 - RNA, 19 nt, Human
cagugagucgaggacaggg

SEQ ID NO: 2942551 - RNA, 20 nt, Human
cagugagucgaggacaggga

SEQ ID NO: 2942552 - RNA, 22 nt, Human
cagugagucgaggacagggagg

SEQ ID NO: 2942553 - RNA, 23 nt, Human
cagugagucgaggacagggaggu

SEQ ID NO: 2942554 - RNA, 18 nt, Human
cagugauuaccagggacu

SEQ ID NO: 2942555 - RNA, 17 nt, Human
cagugauuaccagggac

SEQ ID NO: 2942556 - RNA, 13 nt, Human
cagugcucaccca

SEQ ID NO: 2942557 - RNA, 12 nt, Human
cagugcucaccc

SEQ ID NO: 2942558 - RNA, 17 nt, Human
cagugcucacccacacc

SEQ ID NO: 2942559 - RNA, 18 nt, Human
cagugcucacccacacca

SEQ ID NO: 2942560 - RNA, 23 nt, Human
cagugccuuauggaacacucuga

SEQ ID NO: 2942561 - RNA, 17 nt, Human
cagucauucagauauga

SEQ ID NO: 2942562 - RNA, 20 nt, Human
cagucauucagauaugauuc

SEQ ID NO: 2942563 - RNA, 19 nt, Human
cagucauuauguuaauauu

SEQ ID NO: 2942564 - RNA, 16 nt, Human
caguccauagcagaga

SEQ ID NO: 2942565 - RNA, 13 nt, Human
caguccaugaaga

SEQ ID NO: 2942566 - RNA, 14 nt, Human
caguccauugaaag

SEQ ID NO: 2942567 - RNA, 18 nt, Human
caguauuacuucugcuac

SEQ ID NO: 2942568 - RNA, 16 nt, Human
caguauuacuucugcu

SEQ ID NO: 2942569 - RNA, 23 nt, Human
cagucagggaaggugccucugga

SEQ ID NO: 2942570 - RNA, 22 nt, Human
cagucaggaaagagaacuucca

SEQ ID NO: 2942571 - RNA, 15 nt, Human
cagucaggaaagaga

SEQ ID NO: 2942572 - RNA, 18 nt, Human
cagucaggaaagagaacu

SEQ ID NO: 2942573 - RNA, 12 nt, Human
caguagugauag

SEQ ID NO: 2942574 - RNA, 22 nt, Human
caguauagaauaggcacuuuaa

SEQ ID NO: 2942575 - RNA, 12 nt, Human
caguauagaaua

SEQ ID NO: 2942576 - RNA, 18 nt, Human
caguauagaauaggcacu

SEQ ID NO: 2942577 - RNA, 13 nt, Human
caguaucucaggg

SEQ ID NO: 2942578 - RNA, 21 nt, Human
caguaucuugaagacuuuucu

SEQ ID NO: 2942579 - RNA, 12 nt, Human
caguauggcagc

SEQ ID NO: 2942580 - RNA, 18 nt, Human
caguaucuugaagacuuu

SEQ ID NO: 2942581 - RNA, 12 nt, Human
caguaucuugaa

SEQ ID NO: 2942582 - RNA, 15 nt, Human
caguaucucagggcc

SEQ ID NO: 2942583 - RNA, 17 nt, Human
cagucccugccaaugga

SEQ ID NO: 2942584 - RNA, 15 nt, Human
caguccucccaucuc

SEQ ID NO: 2942585 - RNA, 14 nt, Human
caguccucccaucu

SEQ ID NO: 2942586 - RNA, 13 nt, Human
caguccucccauc

SEQ ID NO: 2942587 - RNA, 12 nt, Human
caguccucccau

SEQ ID NO: 2942588 - RNA, 12 nt, Human
cagucccugcca

SEQ ID NO: 2942589 - RNA, 16 nt, Human
cagucccugccaaugg

SEQ ID NO: 2942590 - RNA, 15 nt, Human
cagucccugccaaug

SEQ ID NO: 2942591 - RNA, 14 nt, Human
cagucccugccaau

SEQ ID NO: 2942592 - RNA, 13 nt, Human
cagucccugccaa

SEQ ID NO: 2942593 - RNA, 13 nt, Human
cagguucagcuug

SEQ ID NO: 2942594 - RNA, 12 nt, Human
cagguucagcuu

SEQ ID NO: 2942595 - RNA, 20 nt, Human
caguaaaugggggugcauuu

SEQ ID NO: 2942596 - RNA, 21 nt, Human
caguaaaugggggugcauuug

SEQ ID NO: 2942597 - RNA, 13 nt, Human
caguaacauagcu

SEQ ID NO: 2942598 - RNA, 22 nt, Human
caguaaaugggggugcauuuga

SEQ ID NO: 2942599 - RNA, 21 nt, Human
caguaaugagcuuaagaaauu

SEQ ID NO: 2942600 - RNA, 12 nt, Human
caguaauaacuc

SEQ ID NO: 2942601 - RNA, 13 nt, Human
caguaauaacucu

SEQ ID NO: 2942602 - RNA, 21 nt, Human
caguaauaaaugaaugucacu

SEQ ID NO: 2942603 - RNA, 17 nt, Human
caguaauaaaugaaugu

SEQ ID NO: 2942604 - RNA, 18 nt, Human
caguacuaacauuuauuu

SEQ ID NO: 2942605 - RNA, 22 nt, Human
caggugugagucaccaagccca

SEQ ID NO: 2942606 - RNA, 23 nt, Human
caggugugagucaccaagcccag

SEQ ID NO: 2942607 - RNA, 16 nt, Human
caggugugaaccacca

SEQ ID NO: 2942608 - RNA, 19 nt, Human
caggugugaaccaccacac

SEQ ID NO: 2942609 - RNA, 22 nt, Human
caggugugaaccaccacaccca

SEQ ID NO: 2942610 - RNA, 23 nt, Human
caggugugaaccaccacacccag

SEQ ID NO: 2942611 - RNA, 20 nt, Human
caggugugagucaccaagcc

SEQ ID NO: 2942612 - RNA, 21 nt, Human
caggugugagucaccaagccc

SEQ ID NO: 2942613 - RNA, 16 nt, Human
caggugugagucacca

SEQ ID NO: 2942614 - RNA, 15 nt, Human
caggugucccugcac

SEQ ID NO: 2942615 - RNA, 16 nt, Human
caggugucccugcacu

SEQ ID NO: 2942616 - RNA, 18 nt, Human
caggugucccugcacuug

SEQ ID NO: 2942617 - RNA, 19 nt, Human
caggugucccugcacuugc

SEQ ID NO: 2942618 - RNA, 12 nt, Human
caggugugaacc

SEQ ID NO: 2942619 - RNA, 20 nt, Human
caggugguuauggagagggu

SEQ ID NO: 2942620 - RNA, 11 nt, Human
caggugucccu

SEQ ID NO: 2942621 - RNA, 14 nt, Human
caggugucccugca

SEQ ID NO: 2942622 - RNA, 18 nt, Human
caggugguuauggagagg

SEQ ID NO: 2942623 - RNA, 23 nt, Human
cagguggggucacucuggcagcu

SEQ ID NO: 2942624 - RNA, 22 nt, Human
cagguggggucacucuggcagc

SEQ ID NO: 2942625 - RNA, 21 nt, Human
cagguggggucacucuggcag

SEQ ID NO: 2942626 - RNA, 20 nt, Human
cagguggggucacucuggca

SEQ ID NO: 2942627 - RNA, 19 nt, Human
cagguggggucacucuggc

SEQ ID NO: 2942628 - RNA, 13 nt, Human
cagguggggcagc

SEQ ID NO: 2942629 - RNA, 14 nt, Human
cagguggggcagcu

SEQ ID NO: 2942630 - RNA, 15 nt, Human
cagguggggcagcuu

SEQ ID NO: 2942631 - RNA, 16 nt, Human
cagguggggcagcuug

SEQ ID NO: 2942632 - RNA, 17 nt, Human
cagguggggcagcuuga

SEQ ID NO: 2942633 - RNA, 18 nt, Human
cagguggggucacucugg

SEQ ID NO: 2942634 - RNA, 20 nt, Human
cagguaacaggcagauacag

SEQ ID NO: 2942635 - RNA, 21 nt, Human
cagguaacaggcagauacagg

SEQ ID NO: 2942636 - RNA, 21 nt, Human
caggugagaagcagaggaagg

SEQ ID NO: 2942637 - RNA, 20 nt, Human
caggugagaagcagaggaag

SEQ ID NO: 2942638 - RNA, 13 nt, Human
caggugagaagca

SEQ ID NO: 2942639 - RNA, 18 nt, Human
caggucuugaacuccugg

SEQ ID NO: 2942640 - RNA, 19 nt, Human
caggucuugaacuccuggc

SEQ ID NO: 2942641 - RNA, 20 nt, Human
caggucuugaacuccuggcc

SEQ ID NO: 2942642 - RNA, 21 nt, Human
caggucuugaacuccuggccu

SEQ ID NO: 2942643 - RNA, 22 nt, Human
caggucuugaacuccuggccuc

SEQ ID NO: 2942644 - RNA, 23 nt, Human
caggucuugaacuccuggccuca

SEQ ID NO: 2942645 - RNA, 21 nt, Human
caggggugggacacccuguga

SEQ ID NO: 2942646 - RNA, 20 nt, Human
caggggugggacacccugug

SEQ ID NO: 2942647 - RNA, 15 nt, Human
caggggugggacacc

SEQ ID NO: 2942648 - RNA, 14 nt, Human
caggggugggacac

SEQ ID NO: 2942649 - RNA, 21 nt, Human
caggguauuccagagugggga

SEQ ID NO: 2942650 - RNA, 20 nt, Human
caggguauuccagagugggg

SEQ ID NO: 2942651 - RNA, 12 nt, Human
cagggucccugg

SEQ ID NO: 2942652 - RNA, 14 nt, Human
cagggucccuggug

SEQ ID NO: 2942653 - RNA, 22 nt, Human
cagggucccugguggcagcuca

SEQ ID NO: 2942654 - RNA, 19 nt, Human
cagggucccugguggcagc

SEQ ID NO: 2942655 - RNA, 18 nt, Human
cagggucccugguggcag

SEQ ID NO: 2942656 - RNA, 15 nt, Human
cagggucccuggugg

SEQ ID NO: 2942657 - RNA, 14 nt, Human
cagguaacaggcag

SEQ ID NO: 2942658 - RNA, 15 nt, Human
cagguaacaggcaga

SEQ ID NO: 2942659 - RNA, 16 nt, Human
cagguaacaggcagau

SEQ ID NO: 2942660 - RNA, 17 nt, Human
cagguaacaggcagaua

SEQ ID NO: 2942661 - RNA, 16 nt, Human
caggguuuugccaugu

SEQ ID NO: 2942662 - RNA, 16 nt, Human
cagggucucacucugu

SEQ ID NO: 2942663 - RNA, 21 nt, Human
cagggucucacuauguugccc

SEQ ID NO: 2942664 - RNA, 22 nt, Human
cagggucucacuauguugccca

SEQ ID NO: 2942665 - RNA, 23 nt, Human
cagggucucacuauguugcccag

SEQ ID NO: 2942666 - RNA, 15 nt, Human
cagggucucacucug

SEQ ID NO: 2942667 - RNA, 18 nt, Human
caggguccuguagcccua

SEQ ID NO: 2942668 - RNA, 23 nt, Human
cagggucccugguggcagcucac

SEQ ID NO: 2942669 - RNA, 22 nt, Human
cauuccaacuaucucauuucca

SEQ ID NO: 2942670 - RNA, 21 nt, Human
cauucagauaugauucaaaug

SEQ ID NO: 2942671 - RNA, 13 nt, Human
cauuccccaggag

SEQ ID NO: 2942672 - RNA, 17 nt, Human
cauuccccaggaggcca

SEQ ID NO: 2942673 - RNA, 15 nt, Human
cauuccccaggaggc

SEQ ID NO: 2942674 - RNA, 20 nt, Human
cauuccccaggaggccagcc

SEQ ID NO: 2942675 - RNA, 19 nt, Human
cauuccccaggaggccagc

SEQ ID NO: 2942676 - RNA, 18 nt, Human
cauuccccaggaggccag

SEQ ID NO: 2942677 - RNA, 20 nt, Human
cauucaaauguauuacagug

SEQ ID NO: 2942678 - RNA, 13 nt, Human
cauucuggaauaa

SEQ ID NO: 2942679 - RNA, 17 nt, Human
cauucuguuaaucauua

SEQ ID NO: 2942680 - RNA, 12 nt, Human
cauucugccugc

SEQ ID NO: 2942681 - RNA, 13 nt, Human
cauucugccugcc

SEQ ID NO: 2942682 - RNA, 15 nt, Human
cauucugccugccca

SEQ ID NO: 2942683 - RNA, 16 nt, Human
cauucugccugcccag

SEQ ID NO: 2942684 - RNA, 17 nt, Human
cauucugccugcccagg

SEQ ID NO: 2942685 - RNA, 18 nt, Human
cauucugccugcccaggc

SEQ ID NO: 2942686 - RNA, 19 nt, Human
cauucugccugcccaggcc

SEQ ID NO: 2942687 - RNA, 20 nt, Human
cauucugccugcccaggccc

SEQ ID NO: 2942688 - RNA, 23 nt, Human
cauuccugaugcuucuucagaga

SEQ ID NO: 2942689 - RNA, 14 nt, Human
cauuccugaacagg

SEQ ID NO: 2942690 - RNA, 22 nt, Human
cauuccugaugcuucuucagag

SEQ ID NO: 2942691 - RNA, 19 nt, Human
cauuccugaugcuucuuca

SEQ ID NO: 2942692 - RNA, 16 nt, Human
cauuccugaugcuucu

SEQ ID NO: 2942693 - RNA, 14 nt, Human
cauuccugaugcuu

SEQ ID NO: 2942694 - RNA, 23 nt, Human
cauucuucuguacgucugacagg

SEQ ID NO: 2942695 - RNA, 16 nt, Human
cauucuuggcccagga

SEQ ID NO: 2942696 - RNA, 13 nt, Human
cauucuuggccca

SEQ ID NO: 2942697 - RNA, 13 nt, Human
cauuugcugaaua

SEQ ID NO: 2942698 - RNA, 22 nt, Human
cauuuuauuuuauuaugcauga

SEQ ID NO: 2942699 - RNA, 23 nt, Human
cauuuuauuuuauuaugcaugaa

SEQ ID NO: 2942700 - RNA, 19 nt, Human
cauuuuacacacuguacac

SEQ ID NO: 2942701 - RNA, 17 nt, Human
cauuuuuaguagagaca

SEQ ID NO: 2942702 - RNA, 21 nt, Human
cauuuuuaagugcugcauuua

SEQ ID NO: 2942703 - RNA, 16 nt, Human
ccaaacccuucagugc

SEQ ID NO: 2942704 - RNA, 17 nt, Human
cauuugaaaauuuugau

SEQ ID NO: 2942705 - RNA, 19 nt, Human
cauuugaaaauuuugaugu

SEQ ID NO: 2942706 - RNA, 13 nt, Human
cauucuuuuugaa

SEQ ID NO: 2942707 - RNA, 16 nt, Human
cauucuuuuugaaaug

SEQ ID NO: 2942708 - RNA, 14 nt, Human
cauucuuuuugaaa

SEQ ID NO: 2942709 - RNA, 18 nt, Human
cauugaccugaggcccuu

SEQ ID NO: 2942710 - RNA, 14 nt, Human
cauugaccugaggc

SEQ ID NO: 2942711 - RNA, 17 nt, Human
cauugaccugaggcccu

SEQ ID NO: 2942712 - RNA, 15 nt, Human
cauugaccugaggcc

SEQ ID NO: 2942713 - RNA, 15 nt, Human
cauuuaaaaaaaauc

SEQ ID NO: 2942714 - RNA, 13 nt, Human
cauugugggaagg

SEQ ID NO: 2942715 - RNA, 15 nt, Human
cauugugggaagggg

SEQ ID NO: 2942716 - RNA, 21 nt, Human
cauuguaaaugugcuuuuaaa

SEQ ID NO: 2942717 - RNA, 20 nt, Human
caugugcuaguaauuggaaa

SEQ ID NO: 2942718 - RNA, 22 nt, Human
caugugccagguuuuuggucug

SEQ ID NO: 2942719 - RNA, 14 nt, Human
caugugcacaugca

SEQ ID NO: 2942720 - RNA, 15 nt, Human
caugugaugagagga

SEQ ID NO: 2942721 - RNA, 17 nt, Human
caugugaugagaggaaa

SEQ ID NO: 2942722 - RNA, 16 nt, Human
caugugaugagaggaa

SEQ ID NO: 2942723 - RNA, 20 nt, Human
caugugaugagaggaaauca

SEQ ID NO: 2942724 - RNA, 18 nt, Human
caugugaugagaggaaau

SEQ ID NO: 2942725 - RNA, 21 nt, Human
caugugaugagaggaaaucac

SEQ ID NO: 2942726 - RNA, 12 nt, Human
caugucuggcua

SEQ ID NO: 2942727 - RNA, 18 nt, Human
caugguuuggagcugauc

SEQ ID NO: 2942728 - RNA, 14 nt, Human
caugguuuggagcu

SEQ ID NO: 2942729 - RNA, 15 nt, Human
caugguuuggagcug

SEQ ID NO: 2942730 - RNA, 16 nt, Human
caugguuuggagcuga

SEQ ID NO: 2942731 - RNA, 23 nt, Human
cauggucggaaaacaugcuacac

SEQ ID NO: 2942732 - RNA, 17 nt, Human
cauggucggaaaacaug

SEQ ID NO: 2942733 - RNA, 19 nt, Human
cauggucggaaaacaugcu

SEQ ID NO: 2942734 - RNA, 12 nt, Human
cauguuugugau

SEQ ID NO: 2942735 - RNA, 14 nt, Human
cauguuugugauug

SEQ ID NO: 2942736 - RNA, 19 nt, Human
cauguuuuucuucucccuc

SEQ ID NO: 2942737 - RNA, 20 nt, Human
cauguuuuucuucucccuca

SEQ ID NO: 2942738 - RNA, 19 nt, Human
cauggaauucacaaaguaa

SEQ ID NO: 2942739 - RNA, 20 nt, Human
cauggaauuggagcucgugg

SEQ ID NO: 2942740 - RNA, 16 nt, Human
caugcuguucaugaaa

SEQ ID NO: 2942741 - RNA, 18 nt, Human
caugcuguucaugaaaga

SEQ ID NO: 2942742 - RNA, 15 nt, Human
cauggacuuccacug

SEQ ID NO: 2942743 - RNA, 15 nt, Human
caugcugucccuuac

SEQ ID NO: 2942744 - RNA, 13 nt, Human
caugcugucccuu

SEQ ID NO: 2942745 - RNA, 15 nt, Human
caugcuguucaugaa

SEQ ID NO: 2942746 - RNA, 16 nt, Human
caugcuguacauacuu

SEQ ID NO: 2942747 - RNA, 19 nt, Human
caugcuguacauacuuuuu

SEQ ID NO: 2942748 - RNA, 21 nt, Human
caugcuguacauacuuuuugg

SEQ ID NO: 2942749 - RNA, 13 nt, Human
caugcuguacaua

SEQ ID NO: 2942750 - RNA, 18 nt, Human
caugggccuccugugugu

SEQ ID NO: 2942751 - RNA, 23 nt, Human
caugggacagggaggacgcucuc

SEQ ID NO: 2942752 - RNA, 12 nt, Human
caucacccgcua

SEQ ID NO: 2942753 - RNA, 20 nt, Human
caucaccaacgucugugcca

SEQ ID NO: 2942754 - RNA, 13 nt, Human
caucaugucuggc

SEQ ID NO: 2942755 - RNA, 14 nt, Human
caucaugucuggcu

SEQ ID NO: 2942756 - RNA, 15 nt, Human
caucaugucuggcua

SEQ ID NO: 2942757 - RNA, 16 nt, Human
caucauccuaagcuau

SEQ ID NO: 2942758 - RNA, 11 nt, Human
caucaucccuu

SEQ ID NO: 2942759 - RNA, 22 nt, Human
caucccugaaggccccgcccag

SEQ ID NO: 2942760 - RNA, 15 nt, Human
caucccucuggggcu

SEQ ID NO: 2942761 - RNA, 22 nt, Human
caucccucccuccaccucccug

SEQ ID NO: 2942762 - RNA, 23 nt, Human
caucccucccuccaccucccugc

SEQ ID NO: 2942763 - RNA, 17 nt, Human
caucccuuucccuuggu

SEQ ID NO: 2942764 - RNA, 14 nt, Human
caucccuuucccuu

SEQ ID NO: 2942765 - RNA, 18 nt, Human
caucccuuaccugggaaa

SEQ ID NO: 2942766 - RNA, 14 nt, Human
cauccacugugcca

SEQ ID NO: 2942767 - RNA, 17 nt, Human
cauccacugugccaugu

SEQ ID NO: 2942768 - RNA, 23 nt, Human
cauccacugugccaugugccagg

SEQ ID NO: 2942769 - RNA, 17 nt, Human
cauccagguucagcuug

SEQ ID NO: 2942770 - RNA, 20 nt, Human
caucccucccuccaccuccc

SEQ ID NO: 2942771 - RNA, 14 nt, Human
caucaacaucuugg

SEQ ID NO: 2942772 - RNA, 17 nt, Human
cauauuuaauuugaagg

SEQ ID NO: 2942773 - RNA, 23 nt, Human
cauaucucuuaucuuacgaaaaa

SEQ ID NO: 2942774 - RNA, 20 nt, Human
cauaucucuuaucuuacgaa

SEQ ID NO: 2942775 - RNA, 22 nt, Human
cauauucuguuggccaguguga

SEQ ID NO: 2942776 - RNA, 17 nt, Human
cauauugauuuccguua

SEQ ID NO: 2942777 - RNA, 22 nt, Human
cauauugcauacuauuaaacau

SEQ ID NO: 2942778 - RNA, 21 nt, Human
cauauugauuuccguuaaaau

SEQ ID NO: 2942779 - RNA, 19 nt, Human
cauauugcauacuauuaaa

SEQ ID NO: 2942780 - RNA, 21 nt, Human
cauauugcauacuauuaaaca

SEQ ID NO: 2942781 - RNA, 16 nt, Human
cauaguaugguggcug

SEQ ID NO: 2942782 - RNA, 15 nt, Human
cauaguaugguggcu

SEQ ID NO: 2942783 - RNA, 12 nt, Human
cagugcuuggcc

SEQ ID NO: 2942784 - RNA, 19 nt, Human
cagugcucacccacaccau

SEQ ID NO: 2942785 - RNA, 23 nt, Human
cauauauauguuuuaagaggcag

SEQ ID NO: 2942786 - RNA, 15 nt, Human
cauauauaacaaugc

SEQ ID NO: 2942787 - RNA, 13 nt, Human
cauauauaacaau

SEQ ID NO: 2942788 - RNA, 23 nt, Human
cauauaagauucauauuuacuuc

SEQ ID NO: 2942789 - RNA, 13 nt, Human
caugagcaucagg

SEQ ID NO: 2942790 - RNA, 18 nt, Human
caugaagauguagaggag

SEQ ID NO: 2942791 - RNA, 19 nt, Human
caugaagauguagaggaga

SEQ ID NO: 2942792 - RNA, 16 nt, Human
caugagccgcccaagg

SEQ ID NO: 2942793 - RNA, 17 nt, Human
caugagccgcccaaggc

SEQ ID NO: 2942794 - RNA, 19 nt, Human
caugagccgcccaaggccu

SEQ ID NO: 2942795 - RNA, 21 nt, Human
caugagccgcccaaggccuuc

SEQ ID NO: 2942796 - RNA, 22 nt, Human
caugagccgcccaaggccuucc

SEQ ID NO: 2942797 - RNA, 12 nt, Human
caugagccucag

SEQ ID NO: 2942798 - RNA, 15 nt, Human
caugagccucagcau

SEQ ID NO: 2942799 - RNA, 17 nt, Human
caugagccucagcaucc

SEQ ID NO: 2942800 - RNA, 18 nt, Human
caugagccucagcauccu

SEQ ID NO: 2942801 - RNA, 19 nt, Human
caugagccucagcauccug

SEQ ID NO: 2942802 - RNA, 20 nt, Human
caugagccucagcauccugg

SEQ ID NO: 2942803 - RNA, 21 nt, Human
caugagccucagcauccuggc

SEQ ID NO: 2942804 - RNA, 23 nt, Human
caugagcaucaggccaggcccuc

SEQ ID NO: 2942805 - RNA, 22 nt, Human
caugagcaucaggccaggcccu

SEQ ID NO: 2942806 - RNA, 21 nt, Human
caugagcaucaggccaggccc

SEQ ID NO: 2942807 - RNA, 20 nt, Human
caugagcaucaggccaggcc

SEQ ID NO: 2942808 - RNA, 18 nt, Human
caugagcaucaggccagg

SEQ ID NO: 2942809 - RNA, 17 nt, Human
caugagcaucaggccag

SEQ ID NO: 2942810 - RNA, 16 nt, Human
caugagcaucaggcca

SEQ ID NO: 2942811 - RNA, 15 nt, Human
caugagcaucaggcc

SEQ ID NO: 2942812 - RNA, 23 nt, Human
caugaguccccuguuuguuucug

SEQ ID NO: 2942813 - RNA, 15 nt, Human
caugaguccccuguu

SEQ ID NO: 2942814 - RNA, 14 nt, Human
caugaguccccugu

SEQ ID NO: 2942815 - RNA, 19 nt, Human
caugagguacugagaguga

SEQ ID NO: 2942816 - RNA, 13 nt, Human
caugaguccccug

SEQ ID NO: 2942817 - RNA, 22 nt, Human
caugagccucagcauccuggca

SEQ ID NO: 2942818 - RNA, 23 nt, Human
caugagccucagcauccuggcac

SEQ ID NO: 2942819 - RNA, 21 nt, Human
caugaggaacaaggcaaggcu

SEQ ID NO: 2942820 - RNA, 20 nt, Human
caugaggaacaaggcaaggc

SEQ ID NO: 2942821 - RNA, 17 nt, Human
caugaggaacaaggcaa

SEQ ID NO: 2942822 - RNA, 16 nt, Human
caugaggaacaaggca

SEQ ID NO: 2942823 - RNA, 23 nt, Human
caugaggaacaaggcaaggcugu

SEQ ID NO: 2942824 - RNA, 16 nt, Human
caugagguacugagag

SEQ ID NO: 2942825 - RNA, 18 nt, Human
caugagggagaugccaug

SEQ ID NO: 2942826 - RNA, 13 nt, Human
caugaaaacacau

SEQ ID NO: 2942827 - RNA, 14 nt, Human
caugaaaacacauu

SEQ ID NO: 2942828 - RNA, 15 nt, Human
caugaaaacacauuu

SEQ ID NO: 2942829 - RNA, 16 nt, Human
caugaaaacacauuuu

SEQ ID NO: 2942830 - RNA, 17 nt, Human
caugaaaacacauuuuu

SEQ ID NO: 2942831 - RNA, 12 nt, Human
caugaagacaga

SEQ ID NO: 2942832 - RNA, 17 nt, Human
caugaaagacuucucua

SEQ ID NO: 2942833 - RNA, 14 nt, Human
caugaaagauucaa

SEQ ID NO: 2942834 - RNA, 19 nt, Human
caugaaaacacauuuuucu

SEQ ID NO: 2942835 - RNA, 21 nt, Human
caugaaaacacauuuuucuua

SEQ ID NO: 2942836 - RNA, 16 nt, Human
caucucuacaaaaagc

SEQ ID NO: 2942837 - RNA, 15 nt, Human
caucucuccuccuuu

SEQ ID NO: 2942838 - RNA, 21 nt, Human
caucuugaauuguaaggaaug

SEQ ID NO: 2942839 - RNA, 16 nt, Human
caucuugaauuguaag

SEQ ID NO: 2942840 - RNA, 15 nt, Human
caucuugcucugcug

SEQ ID NO: 2942841 - RNA, 19 nt, Human
caucuugcucugcugacag

SEQ ID NO: 2942842 - RNA, 16 nt, Human
caucuugcucugcuga

SEQ ID NO: 2942843 - RNA, 17 nt, Human
caucuugcucugcugac

SEQ ID NO: 2942844 - RNA, 15 nt, Human
ccagguucagcuugu

SEQ ID NO: 2942845 - RNA, 24 nt, Human
ccaggugcacaagcuccaagcucc

SEQ ID NO: 2942846 - RNA, 17 nt, Human
ccagguuuuuggucuga

SEQ ID NO: 2942847 - RNA, 19 nt, Human
ccagucuggaaugcagugg

SEQ ID NO: 2942848 - RNA, 20 nt, Human
ccagucuggaaugcaguggu

SEQ ID NO: 2942849 - RNA, 13 nt, Human
ccagugaggcucu

SEQ ID NO: 2942850 - RNA, 18 nt, Human
ccagucuggaaugcagug

SEQ ID NO: 2942851 - RNA, 16 nt, Human
ccagggccaugucaga

SEQ ID NO: 2942852 - RNA, 18 nt, Human
ccaggugcacaagcucca

SEQ ID NO: 2942853 - RNA, 20 nt, Human
ccaggugcacaagcuccaag

SEQ ID NO: 2942854 - RNA, 19 nt, Human
ccaggugcacaagcuccaa

SEQ ID NO: 2942855 - RNA, 21 nt, Human
ccagggacagaggggguggcc

SEQ ID NO: 2942856 - RNA, 15 nt, Human
ccagggacagagggg

SEQ ID NO: 2942857 - RNA, 14 nt, Human
ccagggacagaggg

SEQ ID NO: 2942858 - RNA, 20 nt, Human
ccaggcuuagucacugagac

SEQ ID NO: 2942859 - RNA, 22 nt, Human
ccagggacagaggggguggccu

SEQ ID NO: 2942860 - RNA, 19 nt, Human
ccaggagccuccugcccuu

SEQ ID NO: 2942861 - RNA, 20 nt, Human
ccaggagccccgaggccuuc

SEQ ID NO: 2942862 - RNA, 12 nt, Human
ccaggagccucc

SEQ ID NO: 2942863 - RNA, 16 nt, Human
ccaggagccccgaggc

SEQ ID NO: 2942864 - RNA, 19 nt, Human
ccaggagccccgaggccuu

SEQ ID NO: 2942865 - RNA, 21 nt, Human
ccaggcauuccccaggaggcc

SEQ ID NO: 2942866 - RNA, 19 nt, Human
ccaggcauuccccaggagg

SEQ ID NO: 2942867 - RNA, 18 nt, Human
ccaggcauuccccaggag

SEQ ID NO: 2942868 - RNA, 17 nt, Human
ccaggcauuccccagga

SEQ ID NO: 2942869 - RNA, 23 nt, Human
ccaggcccucugcccacucccug

SEQ ID NO: 2942870 - RNA, 22 nt, Human
ccaggcccucugcccacucccu

SEQ ID NO: 2942871 - RNA, 21 nt, Human
ccaggcccucugcccacuccc

SEQ ID NO: 2942872 - RNA, 20 nt, Human
ccaggcccucugcccacucc

SEQ ID NO: 2942873 - RNA, 24 nt, Human
ccaggcuguaucccaugagccuca

SEQ ID NO: 2942874 - RNA, 17 nt, Human
ccaggcuuagucacuga

SEQ ID NO: 2942875 - RNA, 23 nt, Human
ccagugcccacaggaucagucug

SEQ ID NO: 2942876 - RNA, 16 nt, Human
ccagugaggcucugcc

SEQ ID NO: 2942877 - RNA, 15 nt, Human
ccagugaggcucugc

SEQ ID NO: 2942878 - RNA, 14 nt, Human
ccagugaggcucug

SEQ ID NO: 2942879 - RNA, 22 nt, Human
ccagugguuccuaauccucuag

SEQ ID NO: 2942880 - RNA, 20 nt, Human
ccagugccgagaaggaagcc

SEQ ID NO: 2942881 - RNA, 11 nt, Human
ccagugccucu

SEQ ID NO: 2942882 - RNA, 19 nt, Human
ccaguguuuuaggagcaug

SEQ ID NO: 2942883 - RNA, 22 nt, Human
ccaguguuguggauuuaacaga

SEQ ID NO: 2942884 - RNA, 23 nt, Human
ccauauucuguuggccaguguga

SEQ ID NO: 2942885 - RNA, 21 nt, Human
ccaguuauggcuauaggugcu

SEQ ID NO: 2942886 - RNA, 14 nt, Human
ccaguuauggcuau

SEQ ID NO: 2942887 - RNA, 13 nt, Human
ccaucuacccucc

SEQ ID NO: 2942888 - RNA, 13 nt, Human
cccaaagugcugg

SEQ ID NO: 2942889 - RNA, 15 nt, Human
cccaaagugcuggga

SEQ ID NO: 2942890 - RNA, 18 nt, Human
cccaaaacucuccucugc

SEQ ID NO: 2942891 - RNA, 16 nt, Human
cccaaaacucuccucu

SEQ ID NO: 2942892 - RNA, 13 nt, Human
ccauuugucccaa

SEQ ID NO: 2942893 - RNA, 15 nt, Human
ccauuugucccaagu

SEQ ID NO: 2942894 - RNA, 17 nt, Human
ccauuugucccaagugc

SEQ ID NO: 2942895 - RNA, 14 nt, Human
ccauuuguguuuau

SEQ ID NO: 2942896 - RNA, 20 nt, Human
ccauucuccaccugccaggg

SEQ ID NO: 2942897 - RNA, 19 nt, Human
ccauucuccaccugccagg

SEQ ID NO: 2942898 - RNA, 23 nt, Human
cccaaggccuuccccuggcacug

SEQ ID NO: 2942899 - RNA, 22 nt, Human
cccaaauggaaaugggcagagc

SEQ ID NO: 2942900 - RNA, 18 nt, Human
cccaaauggaaaugggca

SEQ ID NO: 2942901 - RNA, 16 nt, Human
cccaaagugcugggau

SEQ ID NO: 2942902 - RNA, 22 nt, Human
ccaucugcgggggcagugcuca

SEQ ID NO: 2942903 - RNA, 20 nt, Human
ccaucugcgggggcagugcu

SEQ ID NO: 2942904 - RNA, 21 nt, Human
ccaucugcgggggcagugcuc

SEQ ID NO: 2942905 - RNA, 19 nt, Human
ccauauucuguuggccagu

SEQ ID NO: 2942906 - RNA, 18 nt, Human
ccauucuccaccugccag

SEQ ID NO: 2942907 - RNA, 17 nt, Human
ccauguuggccaggcug

SEQ ID NO: 2942908 - RNA, 16 nt, Human
ccauguuggccaggcu

SEQ ID NO: 2942909 - RNA, 16 nt, Human
ccaugggacagggagg

SEQ ID NO: 2942910 - RNA, 19 nt, Human
ccaugggacagggaggacg

SEQ ID NO: 2942911 - RNA, 18 nt, Human
ccagauucuuuccugagg

SEQ ID NO: 2942912 - RNA, 22 nt, Human
ccagauucuuuccugaggcugg

SEQ ID NO: 2942913 - RNA, 21 nt, Human
ccagauucuuuccugaggcug

SEQ ID NO: 2942914 - RNA, 20 nt, Human
ccagauucuuuccugaggcu

SEQ ID NO: 2942915 - RNA, 19 nt, Human
ccagauucuuuccugaggc

SEQ ID NO: 2942916 - RNA, 13 nt, Human
ccagagggccugc

SEQ ID NO: 2942917 - RNA, 22 nt, Human
ccagagggagugacagaggcag

SEQ ID NO: 2942918 - RNA, 23 nt, Human
ccagagggagugacagaggcagc

SEQ ID NO: 2942919 - RNA, 23 nt, Human
ccagaugcaccagcccuuagcag

SEQ ID NO: 2942920 - RNA, 16 nt, Human
ccagagggccugcaag

SEQ ID NO: 2942921 - RNA, 15 nt, Human
ccagagggccugcaa

SEQ ID NO: 2942922 - RNA, 19 nt, Human
ccagauugcaacaggcugg

SEQ ID NO: 2942923 - RNA, 20 nt, Human
ccagauugcaacaggcuggg

SEQ ID NO: 2942924 - RNA, 23 nt, Human
ccagauucuuuccugaggcuggg

SEQ ID NO: 2942925 - RNA, 18 nt, Human
ccagauugcaacaggcug

SEQ ID NO: 2942926 - RNA, 21 nt, Human
ccagauugcaacaggcugggc

SEQ ID NO: 2942927 - RNA, 12 nt, Human
ccagauuucacu

SEQ ID NO: 2942928 - RNA, 17 nt, Human
ccagacaccuugacagg

SEQ ID NO: 2942929 - RNA, 19 nt, Human
ccagacaccuugacagggc

SEQ ID NO: 2942930 - RNA, 21 nt, Human
ccagagaggguggugaccucu

SEQ ID NO: 2942931 - RNA, 23 nt, Human
ccagagaggguggugaccucugc

SEQ ID NO: 2942932 - RNA, 14 nt, Human
ccagagaggguggu

SEQ ID NO: 2942933 - RNA, 11 nt, Human
ccagagcugcc

SEQ ID NO: 2942934 - RNA, 13 nt, Human
ccagagcugccac

SEQ ID NO: 2942935 - RNA, 12 nt, Human
ccagagcugcca

SEQ ID NO: 2942936 - RNA, 19 nt, Human
ccagagcugccaccugccu

SEQ ID NO: 2942937 - RNA, 16 nt, Human
ccagagcugccaccug

SEQ ID NO: 2942938 - RNA, 15 nt, Human
ccagagcugccaccu

SEQ ID NO: 2942939 - RNA, 14 nt, Human
ccagagcugccacc

SEQ ID NO: 2942940 - RNA, 16 nt, Human
ccagagggagugacag

SEQ ID NO: 2942941 - RNA, 17 nt, Human
ccagagggagugacaga

SEQ ID NO: 2942942 - RNA, 18 nt, Human
ccagagggagugacagag

SEQ ID NO: 2942943 - RNA, 19 nt, Human
ccagagggagugacagagg

SEQ ID NO: 2942944 - RNA, 20 nt, Human
ccagagggagugacagaggc

SEQ ID NO: 2942945 - RNA, 21 nt, Human
ccagagggagugacagaggca

SEQ ID NO: 2942946 - RNA, 21 nt, Human
ccagaggagagaggacccccu

SEQ ID NO: 2942947 - RNA, 22 nt, Human
ccagaggagagaggacccccug

SEQ ID NO: 2942948 - RNA, 15 nt, Human
ccagcaagugagagc

SEQ ID NO: 2942949 - RNA, 14 nt, Human
ccagauuucacucu

SEQ ID NO: 2942950 - RNA, 16 nt, Human
ccagcaagugagagcu

SEQ ID NO: 2942951 - RNA, 20 nt, Human
ccagcaagugagagcugggu

SEQ ID NO: 2942952 - RNA, 21 nt, Human
ccagcaagugagagcugggug

SEQ ID NO: 2942953 - RNA, 22 nt, Human
ccagcaagugagagcugggugu

SEQ ID NO: 2942954 - RNA, 15 nt, Human
ccagcaauuaugaaa

SEQ ID NO: 2942955 - RNA, 13 nt, Human
ccagccccagugc

SEQ ID NO: 2942956 - RNA, 15 nt, Human
ccagccccagugccc

SEQ ID NO: 2942957 - RNA, 23 nt, Human
ccagccccaaaacucuccucugc

SEQ ID NO: 2942958 - RNA, 16 nt, Human
ccagccccagugccca

SEQ ID NO: 2942959 - RNA, 16 nt, Human
ccagcccuuagcaggg

SEQ ID NO: 2942960 - RNA, 17 nt, Human
ccagcccuuagcaggga

SEQ ID NO: 2942961 - RNA, 23 nt, Human
ccagccgagauagccaaggccaa

SEQ ID NO: 2942962 - RNA, 14 nt, Human
ccagccgccaugcu

SEQ ID NO: 2942963 - RNA, 19 nt, Human
ccagccgccaugcuccugg

SEQ ID NO: 2942964 - RNA, 18 nt, Human
ccagccgccaugcuccug

SEQ ID NO: 2942965 - RNA, 15 nt, Human
ccagccaaagccucc

SEQ ID NO: 2942966 - RNA, 19 nt, Human
ccagccaaagccuccucca

SEQ ID NO: 2942967 - RNA, 18 nt, Human
ccagccaaagccuccucc

SEQ ID NO: 2942968 - RNA, 22 nt, Human
ccagccagcaguucagagcugc

SEQ ID NO: 2942969 - RNA, 13 nt, Human
ccagccaggcccu

SEQ ID NO: 2942970 - RNA, 23 nt, Human
ccagcaguucagagcugcccucu

SEQ ID NO: 2942971 - RNA, 13 nt, Human
ccagcaguucaga

SEQ ID NO: 2942972 - RNA, 18 nt, Human
ccagcaguucagagcugc

SEQ ID NO: 2942973 - RNA, 19 nt, Human
ccagcaguucagagcugcc

SEQ ID NO: 2942974 - RNA, 20 nt, Human
ccagcaguucagagcugccc

SEQ ID NO: 2942975 - RNA, 21 nt, Human
ccagcaguucagagcugcccu

SEQ ID NO: 2942976 - RNA, 22 nt, Human
ccagcaguucagagcugcccuc

SEQ ID NO: 2942977 - RNA, 13 nt, Human
ccacacccagccc

SEQ ID NO: 2942978 - RNA, 14 nt, Human
ccacacccagccca

SEQ ID NO: 2942979 - RNA, 12 nt, Human
ccacacccagcc

SEQ ID NO: 2942980 - RNA, 23 nt, Human
ccacaccauaagcuacugccauc

SEQ ID NO: 2942981 - RNA, 18 nt, Human
ccaccaacauacucccau

SEQ ID NO: 2942982 - RNA, 14 nt, Human
ccaccaacauacuc

SEQ ID NO: 2942983 - RNA, 16 nt, Human
ccacaucuugcucugc

SEQ ID NO: 2942984 - RNA, 20 nt, Human
ccacaucuugcucugcugac

SEQ ID NO: 2942985 - RNA, 22 nt, Human
ccacaucuugcucugcugacag

SEQ ID NO: 2942986 - RNA, 23 nt, Human
ccacaucuugcucugcugacaga

SEQ ID NO: 2942987 - RNA, 14 nt, Human
ccacaucuugcucu

SEQ ID NO: 2942988 - RNA, 14 nt, Human
ccaccacacccagc

SEQ ID NO: 2942989 - RNA, 16 nt, Human
ccaccacacccagccc

SEQ ID NO: 2942990 - RNA, 20 nt, Human
ccaccaacauacucccaucu

SEQ ID NO: 2942991 - RNA, 16 nt, Human
ccacccaagggccugg

SEQ ID NO: 2942992 - RNA, 19 nt, Human
ccacccaagggccuggccu

SEQ ID NO: 2942993 - RNA, 17 nt, Human
ccacccaagggccuggc

SEQ ID NO: 2942994 - RNA, 16 nt, Human
ccacccaccucagccu

SEQ ID NO: 2942995 - RNA, 14 nt, Human
ccacccaccucagc

SEQ ID NO: 2942996 - RNA, 15 nt, Human
ccacccaccucagcc

SEQ ID NO: 2942997 - RNA, 13 nt, Human
ccacccaccucag

SEQ ID NO: 2942998 - RNA, 22 nt, Human
ccacccaagggccuggccugag

SEQ ID NO: 2942999 - RNA, 21 nt, Human
ccacccaagggccuggccuga

SEQ ID NO: 2943000 - RNA, 20 nt, Human
ccacccaagggccuggccug

SEQ ID NO: 2943001 - RNA, 13 nt, Human
ccacguuucuaaa

SEQ ID NO: 2943002 - RNA, 18 nt, Human
ccacugcacuccagccug

SEQ ID NO: 2943003 - RNA, 15 nt, Human
ccacucccugcaacc

SEQ ID NO: 2943004 - RNA, 19 nt, Human
ccacugcacuccagccugg

SEQ ID NO: 2943005 - RNA, 20 nt, Human
ccacugcacuccagccuggg

SEQ ID NO: 2943006 - RNA, 16 nt, Human
ccacugcgaccacaag

SEQ ID NO: 2943007 - RNA, 18 nt, Human
ccacucaguccauagcag

SEQ ID NO: 2943008 - RNA, 13 nt, Human
ccacucccugcaa

SEQ ID NO: 2943009 - RNA, 12 nt, Human
ccacucccugca

SEQ ID NO: 2943010 - RNA, 23 nt, Human
ccacuacggaauaguuggcuagg

SEQ ID NO: 2943011 - RNA, 22 nt, Human
ccacuacggaauaguuggcuag

SEQ ID NO: 2943012 - RNA, 18 nt, Human
ccacuacauucuguuaau

SEQ ID NO: 2943013 - RNA, 12 nt, Human
ccaccucagccu

SEQ ID NO: 2943014 - RNA, 18 nt, Human
ccacccugaaagcccuga

SEQ ID NO: 2943015 - RNA, 17 nt, Human
ccacccugaaagcccug

SEQ ID NO: 2943016 - RNA, 16 nt, Human
ccacccugaaagcccu

SEQ ID NO: 2943017 - RNA, 13 nt, Human
ccaccucagccuc

SEQ ID NO: 2943018 - RNA, 14 nt, Human
ccaccucagccucc

SEQ ID NO: 2943019 - RNA, 15 nt, Human
ccaccucagccuccc

SEQ ID NO: 2943020 - RNA, 12 nt, Human
ccacccaggagc

SEQ ID NO: 2943021 - RNA, 14 nt, Human
ccacccaggagccc

SEQ ID NO: 2943022 - RNA, 15 nt, Human
ccacggccaggccag

SEQ ID NO: 2943023 - RNA, 12 nt, Human
ccacggccaggc

SEQ ID NO: 2943024 - RNA, 13 nt, Human
ccacggccaggcc

SEQ ID NO: 2943025 - RNA, 14 nt, Human
ccacggccaggcca

SEQ ID NO: 2943026 - RNA, 16 nt, Human
ccaccuggccucugca

SEQ ID NO: 2943027 - RNA, 15 nt, Human
ccaccuggccucugc

SEQ ID NO: 2943028 - RNA, 22 nt, Human
ccaccugcggugcuaucucccc

SEQ ID NO: 2943029 - RNA, 14 nt, Human
ccaccuggccucug

SEQ ID NO: 2943030 - RNA, 17 nt, Human
ccaccuggccucugcac

SEQ ID NO: 2943031 - RNA, 16 nt, Human
ccaccugccagggaca

SEQ ID NO: 2943032 - RNA, 20 nt, Human
ccaccugccuguugggccag

SEQ ID NO: 2943033 - RNA, 17 nt, Human
ccaccugccuguugggc

SEQ ID NO: 2943034 - RNA, 17 nt, Human
ccaccucccacaaagga

SEQ ID NO: 2943035 - RNA, 14 nt, Human
ccuuagacaguccc

SEQ ID NO: 2943036 - RNA, 17 nt, Human
ccuucacagaugggugc

SEQ ID NO: 2943037 - RNA, 20 nt, Human
ccuucaccuuuguccccacc

SEQ ID NO: 2943038 - RNA, 19 nt, Human
ccuucaccuuuguccccac

SEQ ID NO: 2943039 - RNA, 21 nt, Human
ccuucaccuuuguccccaccg

SEQ ID NO: 2943040 - RNA, 10 nt, Human
ccuucagugc

SEQ ID NO: 2943041 - RNA, 11 nt, Human
ccuucagugcc

SEQ ID NO: 2943042 - RNA, 14 nt, Human
ccuucagugccaaa

SEQ ID NO: 2943043 - RNA, 19 nt, Human
ccuucauuuggcauucccc

SEQ ID NO: 2943044 - RNA, 22 nt, Human
ccuucauuuggcauuccccacu

SEQ ID NO: 2943045 - RNA, 14 nt, Human
ccuucggccuccau

SEQ ID NO: 2943046 - RNA, 19 nt, Human
ccuucggccuccauccuga

SEQ ID NO: 2943047 - RNA, 20 nt, Human
ccuucggccuccauccugag

SEQ ID NO: 2943048 - RNA, 15 nt, Human
ccuucggcgccuuaa

SEQ ID NO: 2943049 - RNA, 19 nt, Human
ccuucuccuucaccuuugu

SEQ ID NO: 2943050 - RNA, 15 nt, Human
ccuucuccuucaccu

SEQ ID NO: 2943051 - RNA, 23 nt, Human
ccuucuucccaauagcaaggcug

SEQ ID NO: 2943052 - RNA, 20 nt, Human
ccuugaguugauucagcucu

SEQ ID NO: 2943053 - RNA, 23 nt, Human
ccuugaccauucuccaccugcca

SEQ ID NO: 2943054 - RNA, 22 nt, Human
ccuugaccauucuccaccugcc

SEQ ID NO: 2943055 - RNA, 13 nt, Human
ccuugacucuuuc

SEQ ID NO: 2943056 - RNA, 19 nt, Human
ccuugaacuuugaccucug

SEQ ID NO: 2943057 - RNA, 20 nt, Human
ccuugaaaacuuuaugcuaa

SEQ ID NO: 2943058 - RNA, 13 nt, Human
ccuuguuuaaugg

SEQ ID NO: 2943059 - RNA, 21 nt, Human
ccuugucggccccaccagugc

SEQ ID NO: 2943060 - RNA, 15 nt, Human
ccuugucggccccac

SEQ ID NO: 2943061 - RNA, 18 nt, Human
ccuuugacgccaucccag

SEQ ID NO: 2943062 - RNA, 17 nt, Human
ccuuugacgccauccca

SEQ ID NO: 2943063 - RNA, 16 nt, Human
ccuuugacgccauccc

SEQ ID NO: 2943064 - RNA, 14 nt, Human
ccuugaugaagaag

SEQ ID NO: 2943065 - RNA, 21 nt, Human
ccuuggugucgggcaugacac

SEQ ID NO: 2943066 - RNA, 22 nt, Human
ccuuggugucgggcaugacacg

SEQ ID NO: 2943067 - RNA, 22 nt, Human
ccuugguuaggcauugugggaa

SEQ ID NO: 2943068 - RNA, 21 nt, Human
ccuugguuaggcauuguggga

SEQ ID NO: 2943069 - RNA, 19 nt, Human
ccuuggggcugaugcaguu

SEQ ID NO: 2943070 - RNA, 23 nt, Human
ccuguugggccaggagccuccug

SEQ ID NO: 2943071 - RNA, 21 nt, Human
ccuguuaaaagaugaaaauau

SEQ ID NO: 2943072 - RNA, 20 nt, Human
ccuguuaaaagaugaaaaua

SEQ ID NO: 2943073 - RNA, 16 nt, Human
ccuguuucugcagcca

SEQ ID NO: 2943074 - RNA, 18 nt, Human
ccuguuuguuucugaaag

SEQ ID NO: 2943075 - RNA, 14 nt, Human
ccuguuuguuucug

SEQ ID NO: 2943076 - RNA, 17 nt, Human
ccugugucuugcaaugg

SEQ ID NO: 2943077 - RNA, 19 nt, Human
ccugugucuugcaauggca

SEQ ID NO: 2943078 - RNA, 21 nt, Human
ccugugucuugcaauggcagc

SEQ ID NO: 2943079 - RNA, 22 nt, Human
ccugugucuugcaauggcagcc

SEQ ID NO: 2943080 - RNA, 20 nt, Human
ccugugugugcgccuacagg

SEQ ID NO: 2943081 - RNA, 21 nt, Human
ccugugugugcgccuacagga

SEQ ID NO: 2943082 - RNA, 17 nt, Human
ccuuagaagucacacag

SEQ ID NO: 2943083 - RNA, 18 nt, Human
ccuuagaagucacacagu

SEQ ID NO: 2943084 - RNA, 19 nt, Human
ccuuaccugccaggaagcc

SEQ ID NO: 2943085 - RNA, 15 nt, Human
ccuuacccucauguu

SEQ ID NO: 2943086 - RNA, 20 nt, Human
ccuuaccagcagagcaccuu

SEQ ID NO: 2943087 - RNA, 13 nt, Human
ccuuaccagcaga

SEQ ID NO: 2943088 - RNA, 14 nt, Human
ccuguuuuuauuau

SEQ ID NO: 2943089 - RNA, 15 nt, Human
ccuguuuuuauuauu

SEQ ID NO: 2943090 - RNA, 20 nt, Human
ccuuacacaaugguuuucuu

SEQ ID NO: 2943091 - RNA, 14 nt, Human
ccuuacacaauggu

SEQ ID NO: 2943092 - RNA, 22 nt, Human
ccuuugacgccaucccagcccc

SEQ ID NO: 2943093 - RNA, 21 nt, Human
ccuuugacgccaucccagccc

SEQ ID NO: 2943094 - RNA, 20 nt, Human
ccuuugacgccaucccagcc

SEQ ID NO: 2943095 - RNA, 20 nt, Human
cgaaaacguggcugcuucaa

SEQ ID NO: 2943096 - RNA, 15 nt, Human
cgaaaacguggcugc

SEQ ID NO: 2943097 - RNA, 19 nt, Human
cgaaaacguggcugcuuca

SEQ ID NO: 2943098 - RNA, 18 nt, Human
cgaaaacguggcugcuuc

SEQ ID NO: 2943099 - RNA, 12 nt, Human
cgaaagaaggca

SEQ ID NO: 2943100 - RNA, 19 nt, Human
cgaaagaaggcauggacuu

SEQ ID NO: 2943101 - RNA, 23 nt, Human
cgaaagaaggcauggacuucugg

SEQ ID NO: 2943102 - RNA, 21 nt, Human
cgaaagaacaguccauugaaa

SEQ ID NO: 2943103 - RNA, 12 nt, Human
cgaaagaacagu

SEQ ID NO: 2943104 - RNA, 19 nt, Human
cgaaagggacuuggaagcu

SEQ ID NO: 2943105 - RNA, 20 nt, Human
cgaaaggaugaaagugacca

SEQ ID NO: 2943106 - RNA, 22 nt, Human
cgaaagggacuuggaagcuccg

SEQ ID NO: 2943107 - RNA, 12 nt, Human
cgaacuggcugc

SEQ ID NO: 2943108 - RNA, 14 nt, Human
cgaacuggcugcaa

SEQ ID NO: 2943109 - RNA, 17 nt, Human
cgacuugcauaccugcu

SEQ ID NO: 2943110 - RNA, 13 nt, Human
cgaauagcuggga

SEQ ID NO: 2943111 - RNA, 14 nt, Human
cgaauagcugggac

SEQ ID NO: 2943112 - RNA, 17 nt, Human
cgagaucacgccacugc

SEQ ID NO: 2943113 - RNA, 18 nt, Human
cgagauagccaaggccaa

SEQ ID NO: 2943114 - RNA, 20 nt, Human
cgagauugcaccacugcacu

SEQ ID NO: 2943115 - RNA, 18 nt, Human
cgagaucacgccacugca

SEQ ID NO: 2943116 - RNA, 20 nt, Human
cgagaucacgccacugcacu

SEQ ID NO: 2943117 - RNA, 18 nt, Human
cgagcaggcuacugucag

SEQ ID NO: 2943118 - RNA, 20 nt, Human
cgagcaggcuucuucccccc

SEQ ID NO: 2943119 - RNA, 17 nt, Human
cgagcaugccuggaugg

SEQ ID NO: 2943120 - RNA, 16 nt, Human
cgagcaugccuggaug

SEQ ID NO: 2943121 - RNA, 13 nt, Human
cgagcaugccugg

SEQ ID NO: 2943122 - RNA, 14 nt, Human
cgagcaugccugga

SEQ ID NO: 2943123 - RNA, 22 nt, Human
cgagccauuugucccaagugcc

SEQ ID NO: 2943124 - RNA, 23 nt, Human
cgagccauuugucccaagugcca

SEQ ID NO: 2943125 - RNA, 15 nt, Human
cgagcccugguggca

SEQ ID NO: 2943126 - RNA, 16 nt, Human
cgagcccugguggcag

SEQ ID NO: 2943127 - RNA, 18 nt, Human
cgagcaugccuggauggg

SEQ ID NO: 2943128 - RNA, 16 nt, Human
cgagccauuuguccca

SEQ ID NO: 2943129 - RNA, 19 nt, Human
cgagccauuugucccaagu

SEQ ID NO: 2943130 - RNA, 20 nt, Human
cgagccauuugucccaagug

SEQ ID NO: 2943131 - RNA, 21 nt, Human
cgagccauuugucccaagugc

SEQ ID NO: 2943132 - RNA, 20 nt, Human
cgauuucuguuuagauaaua

SEQ ID NO: 2943133 - RNA, 14 nt, Human
cgcagcccugcaga

SEQ ID NO: 2943134 - RNA, 16 nt, Human
cgcagacaggaccagg

SEQ ID NO: 2943135 - RNA, 15 nt, Human
cgcagacaggaccag

SEQ ID NO: 2943136 - RNA, 22 nt, Human
cgccaggggaaaaucagccugc

SEQ ID NO: 2943137 - RNA, 21 nt, Human
cgccagauucuuuccugaggc

SEQ ID NO: 2943138 - RNA, 20 nt, Human
cgccagauucuuuccugagg

SEQ ID NO: 2943139 - RNA, 19 nt, Human
cgccagauucuuuccugag

SEQ ID NO: 2943140 - RNA, 17 nt, Human
cgccagauucuuuccug

SEQ ID NO: 2943141 - RNA, 17 nt, Human
cgccaugcuccuggccc

SEQ ID NO: 2943142 - RNA, 22 nt, Human
ccuggcacccggccccugcugg

SEQ ID NO: 2943143 - RNA, 23 nt, Human
ccuggcacccggccccugcuggu

SEQ ID NO: 2943144 - RNA, 13 nt, Human
ccuggcagccccu

SEQ ID NO: 2943145 - RNA, 12 nt, Human
ccuggcagcccc

SEQ ID NO: 2943146 - RNA, 18 nt, Human
ccuggaauauauaaccag

SEQ ID NO: 2943147 - RNA, 15 nt, Human
ccuggccagaugcac

SEQ ID NO: 2943148 - RNA, 22 nt, Human
ccugggcagcugccuccccucc

SEQ ID NO: 2943149 - RNA, 17 nt, Human
ccugcggugcuaucucc

SEQ ID NO: 2943150 - RNA, 16 nt, Human
ccugcggugcuaucuc

SEQ ID NO: 2943151 - RNA, 22 nt, Human
ccugccccucaacucuccucca

SEQ ID NO: 2943152 - RNA, 23 nt, Human
ccugccuguugggccaggagccu

SEQ ID NO: 2943153 - RNA, 21 nt, Human
ccugcucuccgaccagacacc

SEQ ID NO: 2943154 - RNA, 22 nt, Human
ccugcggugcuaucucccccag

SEQ ID NO: 2943155 - RNA, 20 nt, Human
ccugcugagccucacagcag

SEQ ID NO: 2943156 - RNA, 22 nt, Human
ccugcucuccgaccagacaccu

SEQ ID NO: 2943157 - RNA, 14 nt, Human
ccugcuucaaauau

SEQ ID NO: 2943158 - RNA, 23 nt, Human
ccuggaaaucaggguuaguauug

SEQ ID NO: 2943159 - RNA, 23 nt, Human
ccugacaacacucauugaccuga

SEQ ID NO: 2943160 - RNA, 16 nt, Human
ccugagcuuucugcua

SEQ ID NO: 2943161 - RNA, 21 nt, Human
ccugaggcccagagggccugc

SEQ ID NO: 2943162 - RNA, 20 nt, Human
ccugagccagauuucacucu

SEQ ID NO: 2943163 - RNA, 11 nt, Human
ccugagcccca

SEQ ID NO: 2943164 - RNA, 14 nt, Human
ccugagcuuucugc

SEQ ID NO: 2943165 - RNA, 16 nt, Human
ccugccagggacagag

SEQ ID NO: 2943166 - RNA, 15 nt, Human
ccugccagggacaga

SEQ ID NO: 2943167 - RNA, 14 nt, Human
ccugccagggacag

SEQ ID NO: 2943168 - RNA, 13 nt, Human
ccugccagggaca

SEQ ID NO: 2943169 - RNA, 12 nt, Human
ccugccagggac

SEQ ID NO: 2943170 - RNA, 22 nt, Human
ccugccaggaagccagcaggcu

SEQ ID NO: 2943171 - RNA, 21 nt, Human
ccugccaggaagccagcaggc

SEQ ID NO: 2943172 - RNA, 19 nt, Human
ccugccaggaagccagcag

SEQ ID NO: 2943173 - RNA, 18 nt, Human
ccugccaggaagccagca

SEQ ID NO: 2943174 - RNA, 11 nt, Human
ccugccaggga

SEQ ID NO: 2943175 - RNA, 16 nt, Human
ccugccaggcauggug

SEQ ID NO: 2943176 - RNA, 23 nt, Human
ccugccaggaagccagcaggcuc

SEQ ID NO: 2943177 - RNA, 15 nt, Human
ccugccaggcauggu

SEQ ID NO: 2943178 - RNA, 17 nt, Human
ccugccaggaagccagc

SEQ ID NO: 2943179 - RNA, 15 nt, Human
ccugccaggaagcca

SEQ ID NO: 2943180 - RNA, 14 nt, Human
ccugccaggaagcc

SEQ ID NO: 2943181 - RNA, 13 nt, Human
ccugccaggaagc

SEQ ID NO: 2943182 - RNA, 14 nt, Human
ccugaggcccuucu

SEQ ID NO: 2943183 - RNA, 15 nt, Human
ccugauugugucucu

SEQ ID NO: 2943184 - RNA, 22 nt, Human
ccugaugcuucuucagagacuc

SEQ ID NO: 2943185 - RNA, 21 nt, Human
ccugaugcuucuucagagacu

SEQ ID NO: 2943186 - RNA, 20 nt, Human
ccugaugcuucuucagagac

SEQ ID NO: 2943187 - RNA, 19 nt, Human
ccugaugcuucuucagaga

SEQ ID NO: 2943188 - RNA, 12 nt, Human
ccugaggcccuu

SEQ ID NO: 2943189 - RNA, 11 nt, Human
ccugaggcccu

SEQ ID NO: 2943190 - RNA, 19 nt, Human
ccugauugugucucuuggu

SEQ ID NO: 2943191 - RNA, 17 nt, Human
ccugauugugucucuug

SEQ ID NO: 2943192 - RNA, 21 nt, Human
ccugcaaccugauugugucuc

SEQ ID NO: 2943193 - RNA, 22 nt, Human
ccugcaaccugauugugucucu

SEQ ID NO: 2943194 - RNA, 14 nt, Human
ccugcaagaacaag

SEQ ID NO: 2943195 - RNA, 16 nt, Human
ccugcaauaaaauggg

SEQ ID NO: 2943196 - RNA, 21 nt, Human
ccgcuaagagggagggagggc

SEQ ID NO: 2943197 - RNA, 23 nt, Human
ccgcuaagagggagggagggcuc

SEQ ID NO: 2943198 - RNA, 15 nt, Human
ccgccuugcccagcc

SEQ ID NO: 2943199 - RNA, 16 nt, Human
ccgccuugcccagccu

SEQ ID NO: 2943200 - RNA, 17 nt, Human
ccgccuugcccagccug

SEQ ID NO: 2943201 - RNA, 22 nt, Human
ccgccuugcccagccuggaugc

SEQ ID NO: 2943202 - RNA, 19 nt, Human
ccgcacugggcuuggggac

SEQ ID NO: 2943203 - RNA, 14 nt, Human
ccgcacugggcuug

SEQ ID NO: 2943204 - RNA, 20 nt, Human
ccgaguagcugggacuacag

SEQ ID NO: 2943205 - RNA, 17 nt, Human
ccgaguagcugggacua

SEQ ID NO: 2943206 - RNA, 20 nt, Human
cccugguggcagcucaccuc

SEQ ID NO: 2943207 - RNA, 14 nt, Human
ccgaggccuucucu

SEQ ID NO: 2943208 - RNA, 12 nt, Human
ccgcuuucuacc

SEQ ID NO: 2943209 - RNA, 20 nt, Human
ccgggaagggggcugggaca

SEQ ID NO: 2943210 - RNA, 19 nt, Human
ccgcuuucuacccagcgag

SEQ ID NO: 2943211 - RNA, 15 nt, Human
ccggcuggccuggcc

SEQ ID NO: 2943212 - RNA, 18 nt, Human
ccggcuggccuggccccu

SEQ ID NO: 2943213 - RNA, 17 nt, Human
ccggcuggccuggcccc

SEQ ID NO: 2943214 - RNA, 22 nt, Human
ccgggcucugccucccaucacc

SEQ ID NO: 2943215 - RNA, 16 nt, Human
ccgggcguggugguga

SEQ ID NO: 2943216 - RNA, 20 nt, Human
ccgggcgcgguggcucacgc

SEQ ID NO: 2943217 - RNA, 22 nt, Human
ccuauauuguuuucaguguaca

SEQ ID NO: 2943218 - RNA, 18 nt, Human
ccuauauuguuuucagug

SEQ ID NO: 2943219 - RNA, 23 nt, Human
ccuaguuccaccaucaagccacc

SEQ ID NO: 2943220 - RNA, 21 nt, Human
ccuaguuccaccaucaagcca

SEQ ID NO: 2943221 - RNA, 13 nt, Human
ccuaguuccacca

SEQ ID NO: 2943222 - RNA, 16 nt, Human
ccuaaaauuauggaaa

SEQ ID NO: 2943223 - RNA, 15 nt, Human
ccuaaaauucagugg

SEQ ID NO: 2943224 - RNA, 14 nt, Human
ccuaaaguguauuu

SEQ ID NO: 2943225 - RNA, 19 nt, Human
ccucagucuggcccuuccu

SEQ ID NO: 2943226 - RNA, 11 nt, Human
ccucagugcca

SEQ ID NO: 2943227 - RNA, 12 nt, Human
ccucauacccac

SEQ ID NO: 2943228 - RNA, 20 nt, Human
ccucagucuggcccuuccuu

SEQ ID NO: 2943229 - RNA, 20 nt, Human
ccucauaguaugguggcugg

SEQ ID NO: 2943230 - RNA, 13 nt, Human
ccucauacccacc

SEQ ID NO: 2943231 - RNA, 21 nt, Human
ccucauaguaugguggcuggg

SEQ ID NO: 2943232 - RNA, 22 nt, Human
ccucauaguaugguggcugggu

SEQ ID NO: 2943233 - RNA, 14 nt, Human
ccucaucaccaacg

SEQ ID NO: 2943234 - RNA, 13 nt, Human
ccucaucaccaac

SEQ ID NO: 2943235 - RNA, 15 nt, Human
ccuccacauuuguuu

SEQ ID NO: 2943236 - RNA, 20 nt, Human
ccucauccucauacccaccc

SEQ ID NO: 2943237 - RNA, 13 nt, Human
ccucauccucaua

SEQ ID NO: 2943238 - RNA, 16 nt, Human
ccucccaaagugcugg

SEQ ID NO: 2943239 - RNA, 23 nt, Human
ccuccaugugggcuaguugggcu

SEQ ID NO: 2943240 - RNA, 15 nt, Human
ccucccaaagugcug

SEQ ID NO: 2943241 - RNA, 14 nt, Human
ccuccauccugagg

SEQ ID NO: 2943242 - RNA, 22 nt, Human
ccuccaggugcacaagcuccaa

SEQ ID NO: 2943243 - RNA, 21 nt, Human
ccuccaggugcacaagcucca

SEQ ID NO: 2943244 - RNA, 19 nt, Human
ccuccaggugcacaagcuc

SEQ ID NO: 2943245 - RNA, 13 nt, Human
ccuccagagcccc

SEQ ID NO: 2943246 - RNA, 12 nt, Human
ccuccagagccc

SEQ ID NO: 2943247 - RNA, 15 nt, Human
ccuccagagccccac

SEQ ID NO: 2943248 - RNA, 18 nt, Human
ccuccagagccccacagc

SEQ ID NO: 2943249 - RNA, 19 nt, Human
ccuccagagccccacagcc

SEQ ID NO: 2943250 - RNA, 20 nt, Human
ccuccagagccccacagccc

SEQ ID NO: 2943251 - RNA, 17 nt, Human
ccuccaccucccugcaa

SEQ ID NO: 2943252 - RNA, 22 nt, Human
ccuccaccucccugcaauaaaa

SEQ ID NO: 2943253 - RNA, 13 nt, Human
ccuccaccucccu

SEQ ID NO: 2943254 - RNA, 14 nt, Human
ccuccaccucccug

SEQ ID NO: 2943255 - RNA, 15 nt, Human
ccuccaccucccugc

SEQ ID NO: 2943256 - RNA, 23 nt, Human
ccuccugccucgaacuggcugca

SEQ ID NO: 2943257 - RNA, 14 nt, Human
ccuccugggcuaag

SEQ ID NO: 2943258 - RNA, 18 nt, Human
ccuccucugcuugccauc

SEQ ID NO: 2943259 - RNA, 16 nt, Human
ccuccucugcuugcca

SEQ ID NO: 2943260 - RNA, 13 nt, Human
ccuccucugcuug

SEQ ID NO: 2943261 - RNA, 19 nt, Human
ccucccgaguagcugggac

SEQ ID NO: 2943262 - RNA, 20 nt, Human
ccucccgaguagcugggacu

SEQ ID NO: 2943263 - RNA, 21 nt, Human
ccucccgaguagcugggacua

SEQ ID NO: 2943264 - RNA, 14 nt, Human
ccuccucagaucuu

SEQ ID NO: 2943265 - RNA, 20 nt, Human
ccucccuccaccucccugca

SEQ ID NO: 2943266 - RNA, 17 nt, Human
ccucccuccaccucccu

SEQ ID NO: 2943267 - RNA, 10 nt, Human
ccucccuccc

SEQ ID NO: 2943268 - RNA, 18 nt, Human
ccucuaucccggcuuugg

SEQ ID NO: 2943269 - RNA, 21 nt, Human
ccucuagugaauguaggcugg

SEQ ID NO: 2943270 - RNA, 16 nt, Human
ccucuaggaggucucu

SEQ ID NO: 2943271 - RNA, 14 nt, Human
ccucgguguggaga

SEQ ID NO: 2943272 - RNA, 16 nt, Human
ccucggugccuuccuc

SEQ ID NO: 2943273 - RNA, 18 nt, Human
ccucgguguggagaagcg

SEQ ID NO: 2943274 - RNA, 17 nt, Human
ccucccgaauagcuggg

SEQ ID NO: 2943275 - RNA, 17 nt, Human
cccaccuggccucugca

SEQ ID NO: 2943276 - RNA, 21 nt, Human
cccaccuggccucugcacucc

SEQ ID NO: 2943277 - RNA, 19 nt, Human
cccaccuggccucugcacu

SEQ ID NO: 2943278 - RNA, 16 nt, Human
cccaccuggccucugc

SEQ ID NO: 2943279 - RNA, 14 nt, Human
cccaccuggcucug

SEQ ID NO: 2943280 - RNA, 21 nt, Human
cccacgacugcccggcagggu

SEQ ID NO: 2943281 - RNA, 20 nt, Human
cccacgacugcccggcaggg

SEQ ID NO: 2943282 - RNA, 12 nt, Human
cccacuucugcc

SEQ ID NO: 2943283 - RNA, 23 nt, Human
cccacuugagaauuacccuuuug

SEQ ID NO: 2943284 - RNA, 14 nt, Human
cccacgcuggagug

SEQ ID NO: 2943285 - RNA, 19 nt, Human
cccacgcuggagugcagug

SEQ ID NO: 2943286 - RNA, 20 nt, Human
cccacgcuggagugcaguga

SEQ ID NO: 2943287 - RNA, 21 nt, Human
cccacgcuggagugcagugag

SEQ ID NO: 2943288 - RNA, 13 nt, Human
cccaccagugccu

SEQ ID NO: 2943289 - RNA, 14 nt, Human
cccaccagugccuc

SEQ ID NO: 2943290 - RNA, 19 nt, Human
cccaccgcagacaggacca

SEQ ID NO: 2943291 - RNA, 20 nt, Human
cccaccgcagacaggaccag

SEQ ID NO: 2943292 - RNA, 23 nt, Human
cccaccagugccucucccugcug

SEQ ID NO: 2943293 - RNA, 15 nt, Human
cccaccagugccucu

SEQ ID NO: 2943294 - RNA, 16 nt, Human
cccaccagugccucuc

SEQ ID NO: 2943295 - RNA, 17 nt, Human
cccaccucagccucccg

SEQ ID NO: 2943296 - RNA, 22 nt, Human
cccaccucucucacuccuugaa

SEQ ID NO: 2943297 - RNA, 20 nt, Human
cccacaagaaaugaaagcag

SEQ ID NO: 2943298 - RNA, 13 nt, Human
cccacaagaaaug

SEQ ID NO: 2943299 - RNA, 21 nt, Human
cccacaaaggagagcuagcag

SEQ ID NO: 2943300 - RNA, 20 nt, Human
cccaaugcacuuuguucugg

SEQ ID NO: 2943301 - RNA, 16 nt, Human
cccaaugcacuuuguu

SEQ ID NO: 2943302 - RNA, 18 nt, Human
cccuccagagccccacag

SEQ ID NO: 2943303 - RNA, 15 nt, Human
cccugguggcagcuc

SEQ ID NO: 2943304 - RNA, 17 nt, Human
cccugguggcagcucac

SEQ ID NO: 2943305 - RNA, 16 nt, Human
cccugguggcagcuca

SEQ ID NO: 2943306 - RNA, 22 nt, Human
cccugcuggguguggcgcagca

SEQ ID NO: 2943307 - RNA, 17 nt, Human
cccugcccaccuggccu

SEQ ID NO: 2943308 - RNA, 14 nt, Human
cccugcccaccugg

SEQ ID NO: 2943309 - RNA, 13 nt, Human
cccugcccaccug

SEQ ID NO: 2943310 - RNA, 21 nt, Human
cccugcuggguguggcgcagc

SEQ ID NO: 2943311 - RNA, 16 nt, Human
cccugcuggguguggc

SEQ ID NO: 2943312 - RNA, 18 nt, Human
cccugcccaccuggccuc

SEQ ID NO: 2943313 - RNA, 13 nt, Human
cccugcacagcag

SEQ ID NO: 2943314 - RNA, 22 nt, Human
cccugcacagcaggcugccagu

SEQ ID NO: 2943315 - RNA, 14 nt, Human
cccugcacagcagg

SEQ ID NO: 2943316 - RNA, 15 nt, Human
cccugcacagcaggc

SEQ ID NO: 2943317 - RNA, 20 nt, Human
cccugcacagcaggcugcca

SEQ ID NO: 2943318 - RNA, 21 nt, Human
cccugcacagcaggcugccag

SEQ ID NO: 2943319 - RNA, 12 nt, Human
cccugcacuugc

SEQ ID NO: 2943320 - RNA, 19 nt, Human
cccugcacuugcagacucu

SEQ ID NO: 2943321 - RNA, 15 nt, Human
cccugaaagcccuga

SEQ ID NO: 2943322 - RNA, 13 nt, Human
cccugaggcccag

SEQ ID NO: 2943323 - RNA, 16 nt, Human
cccucuggggcuguuc

SEQ ID NO: 2943324 - RNA, 23 nt, Human
cccugaggcccagagggccugca

SEQ ID NO: 2943325 - RNA, 20 nt, Human
cccugaggcccagagggccu

SEQ ID NO: 2943326 - RNA, 19 nt, Human
cccugaggcccagagggcc

SEQ ID NO: 2943327 - RNA, 18 nt, Human
cccugaggcccagagggc

SEQ ID NO: 2943328 - RNA, 17 nt, Human
cccugaggcccagaggg

SEQ ID NO: 2943329 - RNA, 16 nt, Human
cccugaggcccagagg

SEQ ID NO: 2943330 - RNA, 15 nt, Human
cccugaggcccagag

SEQ ID NO: 2943331 - RNA, 14 nt, Human
cccugaggcccaga

SEQ ID NO: 2943332 - RNA, 14 nt, Human
cccuccaccucccu

SEQ ID NO: 2943333 - RNA, 12 nt, Human
cccuccaccucc

SEQ ID NO: 2943334 - RNA, 13 nt, Human
cccuccagagccc

SEQ ID NO: 2943335 - RNA, 19 nt, Human
cccuccaccucccugcaau

SEQ ID NO: 2943336 - RNA, 15 nt, Human
cccuccaccucccug

SEQ ID NO: 2943337 - RNA, 17 nt, Human
cccuccaccucccugca

SEQ ID NO: 2943338 - RNA, 12 nt, Human
cccucuggggcu

SEQ ID NO: 2943339 - RNA, 14 nt, Human
cccucuccugggca

SEQ ID NO: 2943340 - RNA, 11 nt, Human
cccucuccugg

SEQ ID NO: 2943341 - RNA, 12 nt, Human
cccucuccuggg

SEQ ID NO: 2943342 - RNA, 13 nt, Human
cccucuccugggc

SEQ ID NO: 2943343 - RNA, 12 nt, Human
cccgggcucugc

SEQ ID NO: 2943344 - RNA, 15 nt, Human
cccgggcucugccuc

SEQ ID NO: 2943345 - RNA, 14 nt, Human
cccgggcucugccu

SEQ ID NO: 2943346 - RNA, 22 nt, Human
cccgaguagcugggacuacagg

SEQ ID NO: 2943347 - RNA, 20 nt, Human
cccgcugucagccauuccug

SEQ ID NO: 2943348 - RNA, 19 nt, Human
cccgcugucagccauuccu

SEQ ID NO: 2943349 - RNA, 14 nt, Human
cccagagggccugc

SEQ ID NO: 2943350 - RNA, 21 nt, Human
cccgaggccuucucugaagga

SEQ ID NO: 2943351 - RNA, 15 nt, Human
cccagagggccugca

SEQ ID NO: 2943352 - RNA, 13 nt, Human
cccgaguagcugg

SEQ ID NO: 2943353 - RNA, 14 nt, Human
cccgaguagcuggg

SEQ ID NO: 2943354 - RNA, 15 nt, Human
cccgaguagcuggga

SEQ ID NO: 2943355 - RNA, 16 nt, Human
cccgaguagcugggac

SEQ ID NO: 2943356 - RNA, 17 nt, Human
cccgaguagcugggacu

SEQ ID NO: 2943357 - RNA, 18 nt, Human
cccgaguagcugggacua

SEQ ID NO: 2943358 - RNA, 21 nt, Human
cccgaguagcugggacuacag

SEQ ID NO: 2943359 - RNA, 12 nt, Human
cccuaaucuucc

SEQ ID NO: 2943360 - RNA, 20 nt, Human
cccuacaguugaaaaacagc

SEQ ID NO: 2943361 - RNA, 16 nt, Human
cccgggcucugccucc

SEQ ID NO: 2943362 - RNA, 13 nt, Human
cccgucuccagcu

SEQ ID NO: 2943363 - RNA, 16 nt, Human
cccgucuccagcugcu

SEQ ID NO: 2943364 - RNA, 17 nt, Human
cccgucuccagcugcug

SEQ ID NO: 2943365 - RNA, 15 nt, Human
cccgugggguuccuc

SEQ ID NO: 2943366 - RNA, 19 nt, Human
cuucggccuccauccugag

SEQ ID NO: 2943367 - RNA, 20 nt, Human
cuucggccuccauccugagg

SEQ ID NO: 2943368 - RNA, 19 nt, Human
cuucgggaggucgaggcag

SEQ ID NO: 2943369 - RNA, 16 nt, Human
cuucucacugccaugc

SEQ ID NO: 2943370 - RNA, 21 nt, Human
cuucucacugccaugccagcu

SEQ ID NO: 2943371 - RNA, 16 nt, Human
cuucgcuccugugucu

SEQ ID NO: 2943372 - RNA, 17 nt, Human
cuucgcuccugugucuu

SEQ ID NO: 2943373 - RNA, 20 nt, Human
cuuccuuggacucauuuuaa

SEQ ID NO: 2943374 - RNA, 16 nt, Human
cuuccacuugaguguc

SEQ ID NO: 2943375 - RNA, 24 nt, Human
cuucagagacuccugcaggcagcc

SEQ ID NO: 2943376 - RNA, 14 nt, Human
cuucacauauugau

SEQ ID NO: 2943377 - RNA, 23 nt, Human
cuucacauauugauuuccguuaa

SEQ ID NO: 2943378 - RNA, 23 nt, Human
cuucaaggauccugagccagauu

SEQ ID NO: 2943379 - RNA, 22 nt, Human
cuucaaggauccugagccagau

SEQ ID NO: 2943380 - RNA, 21 nt, Human
cuucaaggauccugagccaga

SEQ ID NO: 2943381 - RNA, 14 nt, Human
cuucacaacagauu

SEQ ID NO: 2943382 - RNA, 12 nt, Human
cuucacaacaga

SEQ ID NO: 2943383 - RNA, 14 nt, Human
cuucaagaaugcag

SEQ ID NO: 2943384 - RNA, 20 nt, Human
cuucaaggauccugagccag

SEQ ID NO: 2943385 - RNA, 19 nt, Human
cuucaaggauccugagcca

SEQ ID NO: 2943386 - RNA, 18 nt, Human
cuucaaggauccugagcc

SEQ ID NO: 2943387 - RNA, 17 nt, Human
cuucaaggauccugagc

SEQ ID NO: 2943388 - RNA, 17 nt, Human
cuucaaauccuugaaga

SEQ ID NO: 2943389 - RNA, 15 nt, Human
cuucaaauauuuccc

SEQ ID NO: 2943390 - RNA, 22 nt, Human
cuuagucacugagacagcccgg

SEQ ID NO: 2943391 - RNA, 20 nt, Human
cuuagucacugagacagccc

SEQ ID NO: 2943392 - RNA, 21 nt, Human
cuuagucacugagacagcccg

SEQ ID NO: 2943393 - RNA, 13 nt, Human
cuuccacaagagc

SEQ ID NO: 2943394 - RNA, 15 nt, Human
cuuccacaagagccc

SEQ ID NO: 2943395 - RNA, 14 nt, Human
cuuccacaagagcc

SEQ ID NO: 2943396 - RNA, 14 nt, Human
cuucagugccaaaa

SEQ ID NO: 2943397 - RNA, 19 nt, Human
cuucagcugacuuuucugu

SEQ ID NO: 2943398 - RNA, 15 nt, Human
cuucagcugacuuuu

SEQ ID NO: 2943399 - RNA, 14 nt, Human
cuucaguaagccgu

SEQ ID NO: 2943400 - RNA, 14 nt, Human
cuucagccucccga

SEQ ID NO: 2943401 - RNA, 16 nt, Human
cuucagccucccgagu

SEQ ID NO: 2943402 - RNA, 20 nt, Human
cuucagccucccgaguagcu

SEQ ID NO: 2943403 - RNA, 15 nt, Human
cuucagccugaaaga

SEQ ID NO: 2943404 - RNA, 14 nt, Human
cuguuuuauaauuu

SEQ ID NO: 2943405 - RNA, 15 nt, Human
cuguuuuauaauuuu

SEQ ID NO: 2943406 - RNA, 18 nt, Human
cuguuuuuauuauuaaca

SEQ ID NO: 2943407 - RNA, 17 nt, Human
cuuaaaaaguggaaaaa

SEQ ID NO: 2943408 - RNA, 16 nt, Human
cuuaaaaaguggaaaa

SEQ ID NO: 2943409 - RNA, 14 nt, Human
cuuaaaaacaacga

SEQ ID NO: 2943410 - RNA, 12 nt, Human
cuuaaaaacaac

SEQ ID NO: 2943411 - RNA, 20 nt, Human
cuguuuuuauuauuaacaaa

SEQ ID NO: 2943412 - RNA, 17 nt, Human
cuguugcccaggcuggc

SEQ ID NO: 2943413 - RNA, 14 nt, Human
cuguuuagauaaua

SEQ ID NO: 2943414 - RNA, 17 nt, Human
cuguuuagauaauacac

SEQ ID NO: 2943415 - RNA, 15 nt, Human
cuguuucaaacuuua

SEQ ID NO: 2943416 - RNA, 17 nt, Human
cuguuucaaacuuuacu

SEQ ID NO: 2943417 - RNA, 18 nt, Human
cuguuuagauaauacacc

SEQ ID NO: 2943418 - RNA, 19 nt, Human
cuguuugcuaagugaggau

SEQ ID NO: 2943419 - RNA, 17 nt, Human
cuguuugcuaagugagg

SEQ ID NO: 2943420 - RNA, 16 nt, Human
cuguuaauaguucagg

SEQ ID NO: 2943421 - RNA, 15 nt, Human
cuguucuuuccaaag

SEQ ID NO: 2943422 - RNA, 16 nt, Human
cuguucuuuccaaagu

SEQ ID NO: 2943423 - RNA, 19 nt, Human
cuguucuuuccaaaguaca

SEQ ID NO: 2943424 - RNA, 21 nt, Human
cuguucuuuccaaaguacacu

SEQ ID NO: 2943425 - RNA, 13 nt, Human
cuguucuuucugg

SEQ ID NO: 2943426 - RNA, 14 nt, Human
cuguucuuucuggc

SEQ ID NO: 2943427 - RNA, 21 nt, Human
cuguucuuucuggcuaugcau

SEQ ID NO: 2943428 - RNA, 12 nt, Human
cuguugcccagg

SEQ ID NO: 2943429 - RNA, 13 nt, Human
cuguugcccaggc

SEQ ID NO: 2943430 - RNA, 14 nt, Human
cuguugcccaggcu

SEQ ID NO: 2943431 - RNA, 15 nt, Human
cuguugcccaggcug

SEQ ID NO: 2943432 - RNA, 16 nt, Human
cuguugcccaggcugg

SEQ ID NO: 2943433 - RNA, 23 nt, Human
cuguucuuucuggcuaugcauuu

SEQ ID NO: 2943434 - RNA, 23 nt, Human
cuuaagaagacugcauuauauuu

SEQ ID NO: 2943435 - RNA, 21 nt, Human
cuuaagaagacugcauuauau

SEQ ID NO: 2943436 - RNA, 15 nt, Human
cuuaagacuuaauga

SEQ ID NO: 2943437 - RNA, 17 nt, Human
cuuaagacuuaaugaga

SEQ ID NO: 2943438 - RNA, 16 nt, Human
cuuaauuauugauguu

SEQ ID NO: 2943439 - RNA, 20 nt, Human
cuuaauucuuagcucauucu

SEQ ID NO: 2943440 - RNA, 10 nt, Human
cuuaauuauu

SEQ ID NO: 2943441 - RNA, 20 nt, Human
cuuaauuaaaagaauauuuu

SEQ ID NO: 2943442 - RNA, 19 nt, Human
cuuaauuaaaagaauauuu

SEQ ID NO: 2943443 - RNA, 15 nt, Human
cuuaaugaaaacaau

SEQ ID NO: 2943444 - RNA, 19 nt, Human
cuuaaugagacuuuaaaag

SEQ ID NO: 2943445 - RNA, 17 nt, Human
cuuaauuaaaagaauau

SEQ ID NO: 2943446 - RNA, 16 nt, Human
cuuaauuaaaagaaua

SEQ ID NO: 2943447 - RNA, 20 nt, Human
cuuaccugccaggaagccag

SEQ ID NO: 2943448 - RNA, 13 nt, Human
cuuaccugccagg

SEQ ID NO: 2943449 - RNA, 23 nt, Human
cuuagaaauaacagaagaaaaua

SEQ ID NO: 2943450 - RNA, 21 nt, Human
cuuagaaauaacagaagaaaa

SEQ ID NO: 2943451 - RNA, 20 nt, Human
cuuagaaaaaccaccaccau

SEQ ID NO: 2943452 - RNA, 17 nt, Human
cuuagaagucacacagu

SEQ ID NO: 2943453 - RNA, 20 nt, Human
cuuagaagucacacaguauu

SEQ ID NO: 2943454 - RNA, 21 nt, Human
cuuagguuggcaaaaaggcag

SEQ ID NO: 2943455 - RNA, 23 nt, Human
cuuagguuggcaaaaaggcagga

SEQ ID NO: 2943456 - RNA, 19 nt, Human
cuuagaauuaguggcacuu

SEQ ID NO: 2943457 - RNA, 22 nt, Human
cuuagacccucaugcugccaau

SEQ ID NO: 2943458 - RNA, 21 nt, Human
cuuagacccucaugcugccaa

SEQ ID NO: 2943459 - RNA, 20 nt, Human
cuuagacccucaugcugcca

SEQ ID NO: 2943460 - RNA, 19 nt, Human
cuuagacccucaugcugcc

SEQ ID NO: 2943461 - RNA, 23 nt, Human
cuuagacccucaugcugccaaua

SEQ ID NO: 2943462 - RNA, 15 nt, Human
cuguguuguacagcu

SEQ ID NO: 2943463 - RNA, 19 nt, Human
cuguuaaaagaugaaaaua

SEQ ID NO: 2943464 - RNA, 16 nt, Human
cuguuaaaagaugaaa

SEQ ID NO: 2943465 - RNA, 15 nt, Human
cuguuaaaagaugaa

SEQ ID NO: 2943466 - RNA, 20 nt, Human
cugugucuuuuuucacuaca

SEQ ID NO: 2943467 - RNA, 21 nt, Human
cuguggguuucuaaagcugcc

SEQ ID NO: 2943468 - RNA, 22 nt, Human
cuguggguuucuaaagcugcca

SEQ ID NO: 2943469 - RNA, 22 nt, Human
cugugaaaggaaagagggaggu

SEQ ID NO: 2943470 - RNA, 16 nt, Human
cugugaaaggaaagag

SEQ ID NO: 2943471 - RNA, 22 nt, Human
cugugauuuuugguauuugaaa

SEQ ID NO: 2943472 - RNA, 23 nt, Human
cugugauggggcccugccuccuu

SEQ ID NO: 2943473 - RNA, 21 nt, Human
cugugauggggcccugccucc

SEQ ID NO: 2943474 - RNA, 16 nt, Human
cugugauggggcccug

SEQ ID NO: 2943475 - RNA, 15 nt, Human
cugugauggggcccu

SEQ ID NO: 2943476 - RNA, 15 nt, Human
cugugccaugugcca

SEQ ID NO: 2943477 - RNA, 22 nt, Human
cugugccauuuuguauuuuacu

SEQ ID NO: 2943478 - RNA, 19 nt, Human
cugugcccuaaaguguauu

SEQ ID NO: 2943479 - RNA, 14 nt, Human
cugugccaugugcc

SEQ ID NO: 2943480 - RNA, 21 nt, Human
cugucauuugagcagggcuca

SEQ ID NO: 2943481 - RNA, 22 nt, Human
cugucauuugagcagggcucag

SEQ ID NO: 2943482 - RNA, 20 nt, Human
cugucauuugagcagggcuc

SEQ ID NO: 2943483 - RNA, 18 nt, Human
cugucaauuacaggaagu

SEQ ID NO: 2943484 - RNA, 23 nt, Human
cugucauuugagcagggcucagc

SEQ ID NO: 2943485 - RNA, 14 nt, Human
cugucuuuuaaacu

SEQ ID NO: 2943486 - RNA, 15 nt, Human
cugucuuuuaaacuc

SEQ ID NO: 2943487 - RNA, 15 nt, Human
cugugaaaggaaaga

SEQ ID NO: 2943488 - RNA, 18 nt, Human
cugucuucaguaagccgu

SEQ ID NO: 2943489 - RNA, 18 nt, Human
cugucuucacaacagauu

SEQ ID NO: 2943490 - RNA, 20 nt, Human
cuguauuuuguuuuugucuu

SEQ ID NO: 2943491 - RNA, 13 nt, Human
cugucaauuacag

SEQ ID NO: 2943492 - RNA, 16 nt, Human
cugucaauuacaggaa

SEQ ID NO: 2943493 - RNA, 15 nt, Human
cugucaauuacagga

SEQ ID NO: 2943494 - RNA, 21 nt, Human
cuguaucccaugagccucagc

SEQ ID NO: 2943495 - RNA, 22 nt, Human
cuguaucccaugagccucagca

SEQ ID NO: 2943496 - RNA, 20 nt, Human
cuguaucccaugagccucag

SEQ ID NO: 2943497 - RNA, 19 nt, Human
cuguaucccaugagccuca

SEQ ID NO: 2943498 - RNA, 19 nt, Human
cuguacgucugacaggcaa

SEQ ID NO: 2943499 - RNA, 20 nt, Human
cuguacgucugacaggcaau

SEQ ID NO: 2943500 - RNA, 17 nt, Human
cuguacaugaaaacaca

SEQ ID NO: 2943501 - RNA, 20 nt, Human
cuguacaugaaaacacauuu

SEQ ID NO: 2943502 - RNA, 21 nt, Human
cuguacaugaaaacacauuuu

SEQ ID NO: 2943503 - RNA, 14 nt, Human
cuguacgucugaca

SEQ ID NO: 2943504 - RNA, 15 nt, Human
cuguacgucugacag

SEQ ID NO: 2943505 - RNA, 16 nt, Human
cuguacgucugacagg

SEQ ID NO: 2943506 - RNA, 18 nt, Human
cuguacgucugacaggca

SEQ ID NO: 2943507 - RNA, 14 nt, Human
cuguaauuugugau

SEQ ID NO: 2943508 - RNA, 15 nt, Human
cuguaauuugugaua

SEQ ID NO: 2943509 - RNA, 22 nt, Human
cuguacagagcccacgccccca

SEQ ID NO: 2943510 - RNA, 18 nt, Human
cuguacagagcccacgcc

SEQ ID NO: 2943511 - RNA, 15 nt, Human
cuguacagagcccac

SEQ ID NO: 2943512 - RNA, 14 nt, Human
cuguacagagccca

SEQ ID NO: 2943513 - RNA, 19 nt, Human
cuguaauccuagcacuuug

SEQ ID NO: 2943514 - RNA, 22 nt, Human
cugguuagagguucccuuugac

SEQ ID NO: 2943515 - RNA, 21 nt, Human
cugguuagagguucccuuuga

SEQ ID NO: 2943516 - RNA, 16 nt, Human
cugguggcagcucacc

SEQ ID NO: 2943517 - RNA, 18 nt, Human
cugguggcagcucaccuc

SEQ ID NO: 2943518 - RNA, 17 nt, Human
cugguggcagcucaccu

SEQ ID NO: 2943519 - RNA, 15 nt, Human
cugguggcagcugcg

SEQ ID NO: 2943520 - RNA, 20 nt, Human
cugguggcagcucaccucuc

SEQ ID NO: 2943521 - RNA, 14 nt, Human
cugguggcaguggg

SEQ ID NO: 2943522 - RNA, 18 nt, Human
cugguggcagugggagcu

SEQ ID NO: 2943523 - RNA, 19 nt, Human
cugggccucggaccccacu

SEQ ID NO: 2943524 - RNA, 17 nt, Human
cugggccucggacccca

SEQ ID NO: 2943525 - RNA, 17 nt, Human
cugggauuggcugugaa

SEQ ID NO: 2943526 - RNA, 21 nt, Human
cugggauuggcugugaacuga

SEQ ID NO: 2943527 - RNA, 15 nt, Human
cugggcaacagagca

SEQ ID NO: 2943528 - RNA, 18 nt, Human
cugggcaacagagcaaga

SEQ ID NO: 2943529 - RNA, 14 nt, Human
cugggauuggcugu

SEQ ID NO: 2943530 - RNA, 19 nt, Human
cugggcaacagagcaagac

SEQ ID NO: 2943531 - RNA, 21 nt, Human
cugggauuacaagcgugagcc

SEQ ID NO: 2943532 - RNA, 14 nt, Human
cugggggcugggca

SEQ ID NO: 2943533 - RNA, 18 nt, Human
cugggggcugggcagagg

SEQ ID NO: 2943534 - RNA, 15 nt, Human
cugggcuucaguggc

SEQ ID NO: 2943535 - RNA, 22 nt, Human
cugggcuuggggaccagagcug

SEQ ID NO: 2943536 - RNA, 18 nt, Human
cugggcuugucuguagau

SEQ ID NO: 2943537 - RNA, 23 nt, Human
cugggguggguggggcagugcuu

SEQ ID NO: 2943538 - RNA, 21 nt, Human
gaacuagaguuuagcuggaaa

SEQ ID NO: 2943539 - RNA, 22 nt, Human
gaacuagaguuuagcuggaaaa

SEQ ID NO: 2943540 - RNA, 16 nt, Human
gaaccaccacacccag

SEQ ID NO: 2943541 - RNA, 17 nt, Human
gaaccaccacacccagc

SEQ ID NO: 2943542 - RNA, 15 nt, Human
gaacagacuggaagc

SEQ ID NO: 2943543 - RNA, 16 nt, Human
gaacagacuggaagca

SEQ ID NO: 2943544 - RNA, 20 nt, Human
gaaccacaucuugcucugcu

SEQ ID NO: 2943545 - RNA, 21 nt, Human
gaaccacaucuugcucugcug

SEQ ID NO: 2943546 - RNA, 15 nt, Human
gaagaaaauagaauu

SEQ ID NO: 2943547 - RNA, 21 nt, Human
gaagaaaauagaauugacauu

SEQ ID NO: 2943548 - RNA, 14 nt, Human
gaagaaaauaauua

SEQ ID NO: 2943549 - RNA, 21 nt, Human
gaagaagcaccaaucaugaau

SEQ ID NO: 2943550 - RNA, 13 nt, Human
gaacuuggcgcug

SEQ ID NO: 2943551 - RNA, 16 nt, Human
gaacuuggcgcugccc

SEQ ID NO: 2943552 - RNA, 15 nt, Human
gaacuuggcgcugcc

SEQ ID NO: 2943553 - RNA, 21 nt, Human
gaacuuguaaaggaauuuaaa

SEQ ID NO: 2943554 - RNA, 12 nt, Human
gaacuugguucc

SEQ ID NO: 2943555 - RNA, 23 nt, Human
gaacuugguucccauuugcuccu

SEQ ID NO: 2943556 - RNA, 22 nt, Human
gaacuuccagauccuggaaauc

SEQ ID NO: 2943557 - RNA, 22 nt, Human
gaacuggguacuuguggacaca

SEQ ID NO: 2943558 - RNA, 14 nt, Human
gaacucccuuucaa

SEQ ID NO: 2943559 - RNA, 17 nt, Human
gaaauuuguuauaauga

SEQ ID NO: 2943560 - RNA, 18 nt, Human
gaaauuguauuacaaauc

SEQ ID NO: 2943561 - RNA, 14 nt, Human
gaaaugggcagagc

SEQ ID NO: 2943562 - RNA, 20 nt, Human
gaaaugggcagagcagagac

SEQ ID NO: 2943563 - RNA, 13 nt, Human
gaaauauuauguu

SEQ ID NO: 2943564 - RNA, 16 nt, Human
gaaauauuauguuaaa

SEQ ID NO: 2943565 - RNA, 20 nt, Human
gaaauaacagaagaaaauag

SEQ ID NO: 2943566 - RNA, 22 nt, Human
gaaauaacagaagaaaauagaa

SEQ ID NO: 2943567 - RNA, 17 nt, Human
gaaauaacagaagaaaa

SEQ ID NO: 2943568 - RNA, 18 nt, Human
gaaauaacagaagaaaau

SEQ ID NO: 2943569 - RNA, 19 nt, Human
gaaauaacagaagaaaaua

SEQ ID NO: 2943570 - RNA, 20 nt, Human
gaaauaucugaaaauguaug

SEQ ID NO: 2943571 - RNA, 13 nt, Human
gaaauauaauuga

SEQ ID NO: 2943572 - RNA, 21 nt, Human
gaaauaucugaaaauguaugu

SEQ ID NO: 2943573 - RNA, 21 nt, Human
gaagccuuggggcugaugcag

SEQ ID NO: 2943574 - RNA, 21 nt, Human
gaagccgcuggggccaguugg

SEQ ID NO: 2943575 - RNA, 22 nt, Human
gaagcccaggaaaggcuccagg

SEQ ID NO: 2943576 - RNA, 21 nt, Human
gaagcccaggaaaggcuccag

SEQ ID NO: 2943577 - RNA, 20 nt, Human
gaagcccaggaaaggcucca

SEQ ID NO: 2943578 - RNA, 23 nt, Human
gaagccagcaggcucucaggcca

SEQ ID NO: 2943579 - RNA, 19 nt, Human
gaagacucauucuucugua

SEQ ID NO: 2943580 - RNA, 21 nt, Human
gaagacucauucuucuguacg

SEQ ID NO: 2943581 - RNA, 16 nt, Human
gaagccagcaggcucu

SEQ ID NO: 2943582 - RNA, 15 nt, Human
gaagccagcaggcuc

SEQ ID NO: 2943583 - RNA, 15 nt, Human
gaagguagaauguuu

SEQ ID NO: 2943584 - RNA, 17 nt, Human
gaagguagaauguuuuc

SEQ ID NO: 2943585 - RNA, 16 nt, Human
gaagguagaauguuuu

SEQ ID NO: 2943586 - RNA, 20 nt, Human
gaagguagaauguuuucaaa

SEQ ID NO: 2943587 - RNA, 16 nt, Human
gaaggccccgcccagg

SEQ ID NO: 2943588 - RNA, 15 nt, Human
gaaggccccgcccag

SEQ ID NO: 2943589 - RNA, 14 nt, Human
gaaggccccgccca

SEQ ID NO: 2943590 - RNA, 18 nt, Human
gaaggaaacccagcucug

SEQ ID NO: 2943591 - RNA, 17 nt, Human
gaaggaaacccagcucu

SEQ ID NO: 2943592 - RNA, 14 nt, Human
gaaggaaacccagc

SEQ ID NO: 2943593 - RNA, 12 nt, Human
gaaggauacaaa

SEQ ID NO: 2943594 - RNA, 19 nt, Human
gaaggauacaaaagcaugu

SEQ ID NO: 2943595 - RNA, 21 nt, Human
gaaggauacaaaagcauguga

SEQ ID NO: 2943596 - RNA, 14 nt, Human
gaauacuuuauaaa

SEQ ID NO: 2943597 - RNA, 14 nt, Human
gaauaacauguaau

SEQ ID NO: 2943598 - RNA, 20 nt, Human
gaauaauccuaaacauauga

SEQ ID NO: 2943599 - RNA, 17 nt, Human
gaaguaaaauguggcag

SEQ ID NO: 2943600 - RNA, 18 nt, Human
gaaguaaaauguggcagg

SEQ ID NO: 2943601 - RNA, 12 nt, Human
gaaguuucugcc

SEQ ID NO: 2943602 - RNA, 15 nt, Human
gaauagcugggacua

SEQ ID NO: 2943603 - RNA, 14 nt, Human
gaauagcugggacu

SEQ ID NO: 2943604 - RNA, 19 nt, Human
gaaugaaagggcccagaga

SEQ ID NO: 2943605 - RNA, 14 nt, Human
gaaugaaagggccc

SEQ ID NO: 2943606 - RNA, 16 nt, Human
gaaucucaaauaacua

SEQ ID NO: 2943607 - RNA, 20 nt, Human
cuuuguuuguugucagcuga

SEQ ID NO: 2943608 - RNA, 18 nt, Human
cuuuguuuguugucagcu

SEQ ID NO: 2943609 - RNA, 22 nt, Human
cuuuucauaaccuagccuuaga

SEQ ID NO: 2943610 - RNA, 20 nt, Human
cuuuucauaaccuagccuua

SEQ ID NO: 2943611 - RNA, 16 nt, Human
cuuuucuuucagccaa

SEQ ID NO: 2943612 - RNA, 23 nt, Human
cuuuucuugcaugaggcuagugu

SEQ ID NO: 2943613 - RNA, 18 nt, Human
cuuuucuugcaugaggcu

SEQ ID NO: 2943614 - RNA, 23 nt, Human
cuuuucuguccgagcuuugaaaa

SEQ ID NO: 2943615 - RNA, 18 nt, Human
cuuuucuguccgagcuuu

SEQ ID NO: 2943616 - RNA, 14 nt, Human
cuuugugauuuuug

SEQ ID NO: 2943617 - RNA, 22 nt, Human
cuuuguccccaccgcagacagg

SEQ ID NO: 2943618 - RNA, 18 nt, Human
cuuuguccccaccgcaga

SEQ ID NO: 2943619 - RNA, 13 nt, Human
cuuugggaggcca

SEQ ID NO: 2943620 - RNA, 15 nt, Human
cuuuguucuggcucu

SEQ ID NO: 2943621 - RNA, 14 nt, Human
cuuuguucuggcuc

SEQ ID NO: 2943622 - RNA, 19 nt, Human
cuuugugauuuuuguaauu

SEQ ID NO: 2943623 - RNA, 17 nt, Human
cuuugugauuuuuguaa

SEQ ID NO: 2943624 - RNA, 18 nt, Human
cuuugugauuuuuguaau

SEQ ID NO: 2943625 - RNA, 16 nt, Human
cuuucccaucuuccaa

SEQ ID NO: 2943626 - RNA, 16 nt, Human
cuuuggacccugaggc

SEQ ID NO: 2943627 - RNA, 15 nt, Human
cuuuggacccugagg

SEQ ID NO: 2943628 - RNA, 18 nt, Human
cuuuggacccugaggccc

SEQ ID NO: 2943629 - RNA, 17 nt, Human
cuuuggacccugaggcc

SEQ ID NO: 2943630 - RNA, 19 nt, Human
cuuuggacccugaggccca

SEQ ID NO: 2943631 - RNA, 23 nt, Human
gaaaaaggaugcacagaguuguu

SEQ ID NO: 2943632 - RNA, 17 nt, Human
gaaaaaggaugcacaga

SEQ ID NO: 2943633 - RNA, 22 nt, Human
cuuuuuucucugauacagaaaa

SEQ ID NO: 2943634 - RNA, 15 nt, Human
cuuuuuuggcugcug

SEQ ID NO: 2943635 - RNA, 14 nt, Human
cuuuuuuggcugcu

SEQ ID NO: 2943636 - RNA, 15 nt, Human
cuuuuuucacuacau

SEQ ID NO: 2943637 - RNA, 20 nt, Human
cuuuuuucucugauacagaa

SEQ ID NO: 2943638 - RNA, 21 nt, Human
cuuuugagugccuuacacaau

SEQ ID NO: 2943639 - RNA, 16 nt, Human
cuuuugagcauuuaga

SEQ ID NO: 2943640 - RNA, 14 nt, Human
gaaaacguggcugc

SEQ ID NO: 2943641 - RNA, 18 nt, Human
gaaaacguggcugcuuca

SEQ ID NO: 2943642 - RNA, 16 nt, Human
gaaaacguggcugcuu

SEQ ID NO: 2943643 - RNA, 15 nt, Human
gaaaacguggcugcu

SEQ ID NO: 2943644 - RNA, 12 nt, Human
gaaaacaugcua

SEQ ID NO: 2943645 - RNA, 14 nt, Human
gaaaacaugcuaca

SEQ ID NO: 2943646 - RNA, 15 nt, Human
gaaaacaugcuacac

SEQ ID NO: 2943647 - RNA, 12 nt, Human
gaaaacaaugca

SEQ ID NO: 2943648 - RNA, 13 nt, Human
gaaaacacauuuu

SEQ ID NO: 2943649 - RNA, 22 nt, Human
gaaaacaauaacgauaaaagac

SEQ ID NO: 2943650 - RNA, 14 nt, Human
gaaaaucagccugc

SEQ ID NO: 2943651 - RNA, 12 nt, Human
gaaaauaucacu

SEQ ID NO: 2943652 - RNA, 19 nt, Human
gaaaaucuuauaauuuaaa

SEQ ID NO: 2943653 - RNA, 18 nt, Human
gaaaaucagccugcucca

SEQ ID NO: 2943654 - RNA, 16 nt, Human
gaaaaucagccugcuc

SEQ ID NO: 2943655 - RNA, 13 nt, Human
gaaaagcugcuga

SEQ ID NO: 2943656 - RNA, 17 nt, Human
gaaaagcugcugacagu

SEQ ID NO: 2943657 - RNA, 19 nt, Human
gaaaauaacgauaaaagac

SEQ ID NO: 2943658 - RNA, 22 nt, Human
gaaacacugguuuuaaauauuu

SEQ ID NO: 2943659 - RNA, 18 nt, Human
gaaacagaugaaaagccu

SEQ ID NO: 2943660 - RNA, 18 nt, Human
gaaacagcuaaugggaca

SEQ ID NO: 2943661 - RNA, 13 nt, Human
gaaacacugguuu

SEQ ID NO: 2943662 - RNA, 20 nt, Human
gaaaaucuuauaauuuaaaa

SEQ ID NO: 2943663 - RNA, 18 nt, Human
cuuuaaagggauggcaag

SEQ ID NO: 2943664 - RNA, 19 nt, Human
cuuuaaacuacauuagguu

SEQ ID NO: 2943665 - RNA, 16 nt, Human
cuuguuuaaugguagu

SEQ ID NO: 2943666 - RNA, 21 nt, Human
cuuguguguuuauugucaaag

SEQ ID NO: 2943667 - RNA, 20 nt, Human
cuuguguguuuauugucaaa

SEQ ID NO: 2943668 - RNA, 13 nt, Human
cuuuccacagaag

SEQ ID NO: 2943669 - RNA, 22 nt, Human
cuuuccaaaugcccagcuuaaa

SEQ ID NO: 2943670 - RNA, 19 nt, Human
cuuuccaaaugcccagcuu

SEQ ID NO: 2943671 - RNA, 18 nt, Human
cuuuccaaaugcccagcu

SEQ ID NO: 2943672 - RNA, 21 nt, Human
cuuuauuuucuauaauuuaaa

SEQ ID NO: 2943673 - RNA, 20 nt, Human
cuugcuucaaccccaugaga

SEQ ID NO: 2943674 - RNA, 16 nt, Human
cuugcucugcugacag

SEQ ID NO: 2943675 - RNA, 17 nt, Human
cuugcucugcugacaga

SEQ ID NO: 2943676 - RNA, 13 nt, Human
cuuggaagcuccg

SEQ ID NO: 2943677 - RNA, 13 nt, Human
cuuggaggaagga

SEQ ID NO: 2943678 - RNA, 16 nt, Human
cuuggaaaugggagac

SEQ ID NO: 2943679 - RNA, 17 nt, Human
cuucuccacccugcucu

SEQ ID NO: 2943680 - RNA, 18 nt, Human
cuucuccacccugcucuc

SEQ ID NO: 2943681 - RNA, 16 nt, Human
cuucuccacccugcuc

SEQ ID NO: 2943682 - RNA, 21 nt, Human
cuucuccacccugcucuccga

SEQ ID NO: 2943683 - RNA, 21 nt, Human
cuugccaucccucccuccacc

SEQ ID NO: 2943684 - RNA, 13 nt, Human
cuugcucugcuga

SEQ ID NO: 2943685 - RNA, 14 nt, Human
cuugcucugcugac

SEQ ID NO: 2943686 - RNA, 15 nt, Human
cuugcccagccugga

SEQ ID NO: 2943687 - RNA, 13 nt, Human
cuugcccagccug

SEQ ID NO: 2943688 - RNA, 17 nt, Human
cuugcccagccuggaug

SEQ ID NO: 2943689 - RNA, 16 nt, Human
cuugcccagccuggau

SEQ ID NO: 2943690 - RNA, 22 nt, Human
cuugccaucccucccuccaccu

SEQ ID NO: 2943691 - RNA, 16 nt, Human
cuuggcugcagggagu

SEQ ID NO: 2943692 - RNA, 22 nt, Human
cuuggaggaaggaaacccagcu

SEQ ID NO: 2943693 - RNA, 23 nt, Human
cuuggagggcaugaagacagaua

SEQ ID NO: 2943694 - RNA, 12 nt, Human
cuuggagggcau

SEQ ID NO: 2943695 - RNA, 14 nt, Human
cuuggcugcaggga

SEQ ID NO: 2943696 - RNA, 17 nt, Human
cuuggcugcagggaguc

SEQ ID NO: 2943697 - RNA, 13 nt, Human
cuugggcuucauc

SEQ ID NO: 2943698 - RNA, 14 nt, Human
cuugggccacugug

SEQ ID NO: 2943699 - RNA, 21 nt, Human
cuuggggaccagagcugccac

SEQ ID NO: 2943700 - RNA, 20 nt, Human
cuuggggaccagagcugcca

SEQ ID NO: 2943701 - RNA, 22 nt, Human
cuugggcuucauccuccucaga

SEQ ID NO: 2943702 - RNA, 22 nt, Human
cuuggggaccagagcugccacc

SEQ ID NO: 2943703 - RNA, 15 nt, Human
cuuggggggcugagg

SEQ ID NO: 2943704 - RNA, 19 nt, Human
cuuguaaaggaauuuaaaa

SEQ ID NO: 2943705 - RNA, 16 nt, Human
cuuggggggcugaggu

SEQ ID NO: 2943706 - RNA, 18 nt, Human
cuuguaaaggaauuuaaa

SEQ ID NO: 2943707 - RNA, 18 nt, Human
cuccucagaucuucugug

SEQ ID NO: 2943708 - RNA, 20 nt, Human
cucccuuggauuguccccga

SEQ ID NO: 2943709 - RNA, 15 nt, Human
cuccuccagagucag

SEQ ID NO: 2943710 - RNA, 13 nt, Human
cuccuccagaguc

SEQ ID NO: 2943711 - RNA, 15 nt, Human
cuccuccagccgcca

SEQ ID NO: 2943712 - RNA, 18 nt, Human
cucccgaguagcugggac

SEQ ID NO: 2943713 - RNA, 19 nt, Human
cucccgaguagcugggacu

SEQ ID NO: 2943714 - RNA, 20 nt, Human
cucccgaguagcugggacua

SEQ ID NO: 2943715 - RNA, 13 nt, Human
cuccccuccucug

SEQ ID NO: 2943716 - RNA, 21 nt, Human
cuccccagcaagugagagcug

SEQ ID NO: 2943717 - RNA, 11 nt, Human
cuccccuccuc

SEQ ID NO: 2943718 - RNA, 22 nt, Human
cuccccagcaagugagagcugg

SEQ ID NO: 2943719 - RNA, 23 nt, Human
cuccccagcaagugagagcuggg

SEQ ID NO: 2943720 - RNA, 13 nt, Human
cuccauccugagg

SEQ ID NO: 2943721 - RNA, 20 nt, Human
cuccccuccucugcuugcca

SEQ ID NO: 2943722 - RNA, 22 nt, Human
cucgagcaugccuggauggggc

SEQ ID NO: 2943723 - RNA, 19 nt, Human
cucgagcaugccuggaugg

SEQ ID NO: 2943724 - RNA, 16 nt, Human
cucgagcaugccugga

SEQ ID NO: 2943725 - RNA, 15 nt, Human
cucgagcaugccugg

SEQ ID NO: 2943726 - RNA, 13 nt, Human
cucgagcaugccu

SEQ ID NO: 2943727 - RNA, 23 nt, Human
cuccuuggugucgggcaugacac

SEQ ID NO: 2943728 - RNA, 22 nt, Human
cuccugccucgaacuggcugca

SEQ ID NO: 2943729 - RNA, 18 nt, Human
cuccugccucgaacuggc

SEQ ID NO: 2943730 - RNA, 20 nt, Human
cuccugccucgaacuggcug

SEQ ID NO: 2943731 - RNA, 21 nt, Human
cuccugccucgaacuggcugc

SEQ ID NO: 2943732 - RNA, 17 nt, Human
cuccugccucagccucc

SEQ ID NO: 2943733 - RNA, 16 nt, Human
cuccugccucagccuc

SEQ ID NO: 2943734 - RNA, 12 nt, Human
cuccugccucag

SEQ ID NO: 2943735 - RNA, 11 nt, Human
cuccugccuca

SEQ ID NO: 2943736 - RNA, 13 nt, Human
cuccucuccccag

SEQ ID NO: 2943737 - RNA, 15 nt, Human
cuccucuccccagca

SEQ ID NO: 2943738 - RNA, 14 nt, Human
cuccuggaaauauu

SEQ ID NO: 2943739 - RNA, 21 nt, Human
cuccugugugugcgccuacag

SEQ ID NO: 2943740 - RNA, 23 nt, Human
cuccugugugugcgccuacagga

SEQ ID NO: 2943741 - RNA, 24 nt, Human
cuccugugugugcgccuacaggag

SEQ ID NO: 2943742 - RNA, 21 nt, Human
cucauaguaugguggcugggu

SEQ ID NO: 2943743 - RNA, 15 nt, Human
cucauacccaccccc

SEQ ID NO: 2943744 - RNA, 14 nt, Human
cucauacucaccuc

SEQ ID NO: 2943745 - RNA, 22 nt, Human
cucauacucaccucaccccacu

SEQ ID NO: 2943746 - RNA, 20 nt, Human
cucaggugauccacccaccu

SEQ ID NO: 2943747 - RNA, 18 nt, Human
cucaggugauccacccac

SEQ ID NO: 2943748 - RNA, 19 nt, Human
cucaggugauccacccacc

SEQ ID NO: 2943749 - RNA, 21 nt, Human
cucauacccacccccacccaa

SEQ ID NO: 2943750 - RNA, 19 nt, Human
cucauacccacccccaccc

SEQ ID NO: 2943751 - RNA, 18 nt, Human
cucauacccacccccacc

SEQ ID NO: 2943752 - RNA, 16 nt, Human
cucauacccaccccca

SEQ ID NO: 2943753 - RNA, 22 nt, Human
cucaucaccaacgucugugcca

SEQ ID NO: 2943754 - RNA, 23 nt, Human
cucauaguaugguggcuggguug

SEQ ID NO: 2943755 - RNA, 21 nt, Human
cucaucaccaacgucugugcc

SEQ ID NO: 2943756 - RNA, 15 nt, Human
cucauccucauaccc

SEQ ID NO: 2943757 - RNA, 15 nt, Human
cucagcauccuggca

SEQ ID NO: 2943758 - RNA, 18 nt, Human
cucagcauccuggcaccc

SEQ ID NO: 2943759 - RNA, 23 nt, Human
cucaggaguuugagaccaaccug

SEQ ID NO: 2943760 - RNA, 18 nt, Human
cucaggaguuugagacca

SEQ ID NO: 2943761 - RNA, 13 nt, Human
cucagggccuggc

SEQ ID NO: 2943762 - RNA, 15 nt, Human
cucagggccuggcuc

SEQ ID NO: 2943763 - RNA, 14 nt, Human
cucagggccuggcu

SEQ ID NO: 2943764 - RNA, 16 nt, Human
cucagggccuggcuca

SEQ ID NO: 2943765 - RNA, 15 nt, Human
cucagggccuggucg

SEQ ID NO: 2943766 - RNA, 17 nt, Human
cucagggucccuggugg

SEQ ID NO: 2943767 - RNA, 16 nt, Human
cucagggucccuggug

SEQ ID NO: 2943768 - RNA, 15 nt, Human
cucagggucccuggu

SEQ ID NO: 2943769 - RNA, 20 nt, Human
cucaggugagaagcagagga

SEQ ID NO: 2943770 - RNA, 19 nt, Human
cucaggugagaagcagagg

SEQ ID NO: 2943771 - RNA, 14 nt, Human
cucaggugagaagc

SEQ ID NO: 2943772 - RNA, 16 nt, Human
cucaggugagaagcag

SEQ ID NO: 2943773 - RNA, 17 nt, Human
cucauguugaaacuuua

SEQ ID NO: 2943774 - RNA, 17 nt, Human
cucauuugucacacacu

SEQ ID NO: 2943775 - RNA, 14 nt, Human
cucauuucuagcag

SEQ ID NO: 2943776 - RNA, 21 nt, Human
cucauuuccaagcaaguauua

SEQ ID NO: 2943777 - RNA, 15 nt, Human
cuccaaaauaaaacu

SEQ ID NO: 2943778 - RNA, 16 nt, Human
cuccaaaauaaaacuu

SEQ ID NO: 2943779 - RNA, 21 nt, Human
cuccaaacugacucuuaagaa

SEQ ID NO: 2943780 - RNA, 12 nt, Human
cuccaaagaaau

SEQ ID NO: 2943781 - RNA, 13 nt, Human
cuccaaagaaaug

SEQ ID NO: 2943782 - RNA, 13 nt, Human
cuccacccugcuc

SEQ ID NO: 2943783 - RNA, 15 nt, Human
cuccacauuuguuuu

SEQ ID NO: 2943784 - RNA, 13 nt, Human
cuccacauuuguu

SEQ ID NO: 2943785 - RNA, 15 nt, Human
cuccacccugcucuc

SEQ ID NO: 2943786 - RNA, 23 nt, Human
cuccaccucccugcaauaaaaug

SEQ ID NO: 2943787 - RNA, 12 nt, Human
cuccagccuggg

SEQ ID NO: 2943788 - RNA, 17 nt, Human
cuccagccccuggaugc

SEQ ID NO: 2943789 - RNA, 16 nt, Human
cuccagccccuggaug

SEQ ID NO: 2943790 - RNA, 20 nt, Human
cuccagccccuggaugcagc

SEQ ID NO: 2943791 - RNA, 14 nt, Human
cuccaccugccagg

SEQ ID NO: 2943792 - RNA, 13 nt, Human
cuccaccugccag

SEQ ID NO: 2943793 - RNA, 12 nt, Human
cuccaccugcca

SEQ ID NO: 2943794 - RNA, 17 nt, Human
cuccaccuugcagcucu

SEQ ID NO: 2943795 - RNA, 15 nt, Human
cuccagccccuggau

SEQ ID NO: 2943796 - RNA, 13 nt, Human
cuccaggagcagc

SEQ ID NO: 2943797 - RNA, 11 nt, Human
cuccaggagca

SEQ ID NO: 2943798 - RNA, 17 nt, Human
cuccaggagcagccaca

SEQ ID NO: 2943799 - RNA, 16 nt, Human
cuccaggagcagccac

SEQ ID NO: 2943800 - RNA, 15 nt, Human
cuccaggagcagcca

SEQ ID NO: 2943801 - RNA, 14 nt, Human
cuccaggagcagcc

SEQ ID NO: 2943802 - RNA, 19 nt, Human
cuccaggcagcagacacau

SEQ ID NO: 2943803 - RNA, 23 nt, Human
cuccaggagcagccacauuccug

SEQ ID NO: 2943804 - RNA, 18 nt, Human
cuccaggagcagccacau

SEQ ID NO: 2943805 - RNA, 12 nt, Human
cuccauccugag

SEQ ID NO: 2943806 - RNA, 11 nt, Human
cuccauccuga

SEQ ID NO: 2943807 - RNA, 23 nt, Human
cuauucaaacagucucaggaaau

SEQ ID NO: 2943808 - RNA, 16 nt, Human
cuauucaaacagucuc

SEQ ID NO: 2943809 - RNA, 18 nt, Human
cuauucaaacagucucag

SEQ ID NO: 2943810 - RNA, 15 nt, Human
cuauuagagaagaga

SEQ ID NO: 2943811 - RNA, 22 nt, Human
cuaugggguaaaagggguaggg

SEQ ID NO: 2943812 - RNA, 18 nt, Human
cuaugggacucaaugcac

SEQ ID NO: 2943813 - RNA, 22 nt, Human
cuaugggacucaaugcacugac

SEQ ID NO: 2943814 - RNA, 23 nt, Human
cuaugggacucaaugcacugaca

SEQ ID NO: 2943815 - RNA, 22 nt, Human
cuaugcuguucacuggacacuu

SEQ ID NO: 2943816 - RNA, 16 nt, Human
cuauaauguaagcucu

SEQ ID NO: 2943817 - RNA, 19 nt, Human
cuauaauuuccauuuacuu

SEQ ID NO: 2943818 - RNA, 22 nt, Human
cuauaauuuaccugaagucuuu

SEQ ID NO: 2943819 - RNA, 13 nt, Human
cuauaauuuaaau

SEQ ID NO: 2943820 - RNA, 21 nt, Human
cuauaauguaagcucuacuga

SEQ ID NO: 2943821 - RNA, 17 nt, Human
cuauauuuuacauaaau

SEQ ID NO: 2943822 - RNA, 17 nt, Human
cuauagccuaggugaca

SEQ ID NO: 2943823 - RNA, 20 nt, Human
cuauaggugcuacaaaaaca

SEQ ID NO: 2943824 - RNA, 22 nt, Human
cuauaggugcuacaaaaacaca

SEQ ID NO: 2943825 - RNA, 21 nt, Human
cuauaggugcuacaaaaacac

SEQ ID NO: 2943826 - RNA, 15 nt, Human
cuauaggugcuacaa

SEQ ID NO: 2943827 - RNA, 23 nt, Human
cgcccaguuggguggaugccugg

SEQ ID NO: 2943828 - RNA, 22 nt, Human
cgcccaguuggguggaugccug

SEQ ID NO: 2943829 - RNA, 17 nt, Human
cgccaucccagccccaa

SEQ ID NO: 2943830 - RNA, 20 nt, Human
cgccaucccagccccaauga

SEQ ID NO: 2943831 - RNA, 15 nt, Human
cgccaugcuccuggc

SEQ ID NO: 2943832 - RNA, 16 nt, Human
cuaggugacauauaca

SEQ ID NO: 2943833 - RNA, 15 nt, Human
cuaggugacauauac

SEQ ID NO: 2943834 - RNA, 24 nt, Human
cuaggugacagagugagacucugu

SEQ ID NO: 2943835 - RNA, 14 nt, Human
cuaggugacagagu

SEQ ID NO: 2943836 - RNA, 18 nt, Human
cuaggugacagagugaga

SEQ ID NO: 2943837 - RNA, 16 nt, Human
cuaguaauuggaaagg

SEQ ID NO: 2943838 - RNA, 20 nt, Human
cuagugaaacucguuaauuu

SEQ ID NO: 2943839 - RNA, 19 nt, Human
cuagugaaagaggcagcuu

SEQ ID NO: 2943840 - RNA, 18 nt, Human
cuagugaaagaggcagcu

SEQ ID NO: 2943841 - RNA, 21 nt, Human
cuagugaauguaggcuggcuu

SEQ ID NO: 2943842 - RNA, 19 nt, Human
cuagugaauguaggcuggc

SEQ ID NO: 2943843 - RNA, 21 nt, Human
cuagugagcagucaggaaaga

SEQ ID NO: 2943844 - RNA, 15 nt, Human
cucacaguccuuacc

SEQ ID NO: 2943845 - RNA, 24 nt, Human
cucacacaugagcaucaggccagg

SEQ ID NO: 2943846 - RNA, 22 nt, Human
cucacacaugagcaucaggcca

SEQ ID NO: 2943847 - RNA, 21 nt, Human
cucaaguccucuuuucugaga

SEQ ID NO: 2943848 - RNA, 14 nt, Human
cucaaguccucuuu

SEQ ID NO: 2943849 - RNA, 17 nt, Human
cucaagugauucuccug

SEQ ID NO: 2943850 - RNA, 15 nt, Human
cucaagucuggcaga

SEQ ID NO: 2943851 - RNA, 13 nt, Human
cucaccagcccca

SEQ ID NO: 2943852 - RNA, 14 nt, Human
cucaccagccccag

SEQ ID NO: 2943853 - RNA, 15 nt, Human
cucaccagccccagu

SEQ ID NO: 2943854 - RNA, 17 nt, Human
cucaccagccccagugc

SEQ ID NO: 2943855 - RNA, 18 nt, Human
cucaccagccccagugcc

SEQ ID NO: 2943856 - RNA, 15 nt, Human
cucacauuuauucug

SEQ ID NO: 2943857 - RNA, 19 nt, Human
cucacauuuauucugcuca

SEQ ID NO: 2943858 - RNA, 22 nt, Human
cucacauuuauucugcucacau

SEQ ID NO: 2943859 - RNA, 13 nt, Human
cucacauuuauau

SEQ ID NO: 2943860 - RNA, 22 nt, Human
cucacaguccuuaccagcagag

SEQ ID NO: 2943861 - RNA, 19 nt, Human
cucacaguccuuaccagca

SEQ ID NO: 2943862 - RNA, 17 nt, Human
cucacaguccuuaccag

SEQ ID NO: 2943863 - RNA, 17 nt, Human
cuauuccugagagcugc

SEQ ID NO: 2943864 - RNA, 13 nt, Human
cuauuccugagag

SEQ ID NO: 2943865 - RNA, 21 nt, Human
cucaacaccucugcacaagcu

SEQ ID NO: 2943866 - RNA, 13 nt, Human
cucaaccuccugg

SEQ ID NO: 2943867 - RNA, 15 nt, Human
cucaaccuccugggc

SEQ ID NO: 2943868 - RNA, 17 nt, Human
cucaaccuccugggcua

SEQ ID NO: 2943869 - RNA, 23 nt, Human
cucaaauacgugggcauucaaau

SEQ ID NO: 2943870 - RNA, 23 nt, Human
cucacuauguugcccaggcaggu

SEQ ID NO: 2943871 - RNA, 21 nt, Human
cucacuauguugcccaggcag

SEQ ID NO: 2943872 - RNA, 22 nt, Human
cucacuauguugcccaggcagg

SEQ ID NO: 2943873 - RNA, 13 nt, Human
cucacccacacca

SEQ ID NO: 2943874 - RNA, 12 nt, Human
cucacccagucc

SEQ ID NO: 2943875 - RNA, 15 nt, Human
cucaccccagcccca

SEQ ID NO: 2943876 - RNA, 15 nt, Human
cucacccaguccugc

SEQ ID NO: 2943877 - RNA, 19 nt, Human
cucacuauguugcccaggc

SEQ ID NO: 2943878 - RNA, 20 nt, Human
cucacuauguugcccaggca

SEQ ID NO: 2943879 - RNA, 11 nt, Human
cucacucuguc

SEQ ID NO: 2943880 - RNA, 12 nt, Human
cucacucugucg

SEQ ID NO: 2943881 - RNA, 13 nt, Human
cucacuccuugaa

SEQ ID NO: 2943882 - RNA, 13 nt, Human
cucacugcagccu

SEQ ID NO: 2943883 - RNA, 12 nt, Human
cucacugcagcc

SEQ ID NO: 2943884 - RNA, 22 nt, Human
cucacucugucgcccagucugg

SEQ ID NO: 2943885 - RNA, 13 nt, Human
cucacucugucgc

SEQ ID NO: 2943886 - RNA, 21 nt, Human
cucacucugucgcccagucug

SEQ ID NO: 2943887 - RNA, 20 nt, Human
cucacuguugcccaggcugg

SEQ ID NO: 2943888 - RNA, 22 nt, Human
cucacugccaugccagcuuauc

SEQ ID NO: 2943889 - RNA, 19 nt, Human
cucacugccaugccagcuu

SEQ ID NO: 2943890 - RNA, 21 nt, Human
cucacuguugcccaggcuggc

SEQ ID NO: 2943891 - RNA, 22 nt, Human
cucacuguugcccaggcuggcg

SEQ ID NO: 2943892 - RNA, 14 nt, Human
cucagagagggugg

SEQ ID NO: 2943893 - RNA, 16 nt, Human
cucagcagagugcuuu

SEQ ID NO: 2943894 - RNA, 16 nt, Human
cucagcauccuggcac

SEQ ID NO: 2943895 - RNA, 17 nt, Human
cucagcauccuggcacc

SEQ ID NO: 2943896 - RNA, 11 nt, Human
cucagcagagu

SEQ ID NO: 2943897 - RNA, 12 nt, Human
cucagcagagug

SEQ ID NO: 2943898 - RNA, 13 nt, Human
cucagcagagugc

SEQ ID NO: 2943899 - RNA, 15 nt, Human
cucagaucuucugug

SEQ ID NO: 2943900 - RNA, 21 nt, Human
cucagcaaaagaugcuucuca

SEQ ID NO: 2943901 - RNA, 22 nt, Human
cugauacagaaaaguugaauuu

SEQ ID NO: 2943902 - RNA, 16 nt, Human
cugauauggaagcacc

SEQ ID NO: 2943903 - RNA, 14 nt, Human
cugauggugcaaug

SEQ ID NO: 2943904 - RNA, 16 nt, Human
cugauggugcaaugac

SEQ ID NO: 2943905 - RNA, 15 nt, Human
cugauggugcaauga

SEQ ID NO: 2943906 - RNA, 21 nt, Human
cugauccuaguuccaccauca

SEQ ID NO: 2943907 - RNA, 20 nt, Human
cugauccuaguuccaccauc

SEQ ID NO: 2943908 - RNA, 17 nt, Human
cugagucugaaggcugg

SEQ ID NO: 2943909 - RNA, 19 nt, Human
cugagucugaaggcugggu

SEQ ID NO: 2943910 - RNA, 18 nt, Human
cugagucugaaggcuggg

SEQ ID NO: 2943911 - RNA, 17 nt, Human
cugaguguacagagugg

SEQ ID NO: 2943912 - RNA, 13 nt, Human
cugaggcugggcu

SEQ ID NO: 2943913 - RNA, 22 nt, Human
cugaggcugggcucccuuccca

SEQ ID NO: 2943914 - RNA, 17 nt, Human
cugaggcugggcucccu

SEQ ID NO: 2943915 - RNA, 16 nt, Human
cugaggcugggcuccc

SEQ ID NO: 2943916 - RNA, 15 nt, Human
cugaggcugggcucc

SEQ ID NO: 2943917 - RNA, 24 nt, Human
cugaggcccuucucuccagccccu

SEQ ID NO: 2943918 - RNA, 15 nt, Human
cugaggcuccacuug

SEQ ID NO: 2943919 - RNA, 21 nt, Human
cugaggcuccacuuggucugu

SEQ ID NO: 2943920 - RNA, 23 nt, Human
cugauuuuuuuuuccuucagugc

SEQ ID NO: 2943921 - RNA, 22 nt, Human
cugauuuuuuuuuccuucagug

SEQ ID NO: 2943922 - RNA, 21 nt, Human
cugauuuuuuuuuccuucagu

SEQ ID NO: 2943923 - RNA, 20 nt, Human
cugauuuuuuuuuccuucag

SEQ ID NO: 2943924 - RNA, 19 nt, Human
cugauuuuuuuuuccuuca

SEQ ID NO: 2943925 - RNA, 18 nt, Human
cugauuuuuuuuuccuuc

SEQ ID NO: 2943926 - RNA, 16 nt, Human
cugauuuuuuuuuccu

SEQ ID NO: 2943927 - RNA, 17 nt, Human
cugauugugucucuugg

SEQ ID NO: 2943928 - RNA, 21 nt, Human
cugauggugcaaugaccuuuc

SEQ ID NO: 2943929 - RNA, 20 nt, Human
cugauggugcaaugaccuuu

SEQ ID NO: 2943930 - RNA, 19 nt, Human
cugauggugcaaugaccuu

SEQ ID NO: 2943931 - RNA, 17 nt, Human
cugauggugcaaugacc

SEQ ID NO: 2943932 - RNA, 16 nt, Human
cugauuuaauaugcaa

SEQ ID NO: 2943933 - RNA, 22 nt, Human
cugauuuaaacacauuaaaggu

SEQ ID NO: 2943934 - RNA, 21 nt, Human
cugauugugucucuugguccu

SEQ ID NO: 2943935 - RNA, 12 nt, Human
cugcaccgggcc

SEQ ID NO: 2943936 - RNA, 23 nt, Human
cugcaccggcuggccuggccccu

SEQ ID NO: 2943937 - RNA, 15 nt, Human
cugcacuccccugcu

SEQ ID NO: 2943938 - RNA, 14 nt, Human
cugcacuccccugc

SEQ ID NO: 2943939 - RNA, 22 nt, Human
cugcaccggcuggccuggcccc

SEQ ID NO: 2943940 - RNA, 20 nt, Human
cugcaccggcuggccuggcc

SEQ ID NO: 2943941 - RNA, 14 nt, Human
cugcacccucaggc

SEQ ID NO: 2943942 - RNA, 13 nt, Human
cugcacccucagg

SEQ ID NO: 2943943 - RNA, 18 nt, Human
cugcacuugcagacucua

SEQ ID NO: 2943944 - RNA, 17 nt, Human
cugcacuccccugcugg

SEQ ID NO: 2943945 - RNA, 16 nt, Human
cugcacuccccugcug

SEQ ID NO: 2943946 - RNA, 19 nt, Human
cugcacagcaggcugccag

SEQ ID NO: 2943947 - RNA, 18 nt, Human
cugcacagcaggcugcca

SEQ ID NO: 2943948 - RNA, 18 nt, Human
cugcacaagcugcacccu

SEQ ID NO: 2943949 - RNA, 22 nt, Human
cugcacaagcugcacccucagg

SEQ ID NO: 2943950 - RNA, 22 nt, Human
cugcaauaaaauggguuuuacu

SEQ ID NO: 2943951 - RNA, 18 nt, Human
cugcaauaaggggagagu

SEQ ID NO: 2943952 - RNA, 15 nt, Human
cugcaauaaaauggg

SEQ ID NO: 2943953 - RNA, 19 nt, Human
cugcggagcacacuggcuc

SEQ ID NO: 2943954 - RNA, 20 nt, Human
cugcggagcacacuggcuca

SEQ ID NO: 2943955 - RNA, 19 nt, Human
cugcgguccacccaggagc

SEQ ID NO: 2943956 - RNA, 20 nt, Human
cugcgguccacccaggagcc

SEQ ID NO: 2943957 - RNA, 17 nt, Human
cugcgguccacccagga

SEQ ID NO: 2943958 - RNA, 18 nt, Human
cugcgguccacccaggag

SEQ ID NO: 2943959 - RNA, 21 nt, Human
cugccugcccaggccccugcc

SEQ ID NO: 2943960 - RNA, 22 nt, Human
cugccugcccaggccccugcca

SEQ ID NO: 2943961 - RNA, 17 nt, Human
cugccucugacacacag

SEQ ID NO: 2943962 - RNA, 15 nt, Human
cugccucugacacac

SEQ ID NO: 2943963 - RNA, 18 nt, Human
cugccucugacacacagc

SEQ ID NO: 2943964 - RNA, 21 nt, Human
cugccucugacacacagcucu

SEQ ID NO: 2943965 - RNA, 14 nt, Human
cugccccugcacag

SEQ ID NO: 2943966 - RNA, 15 nt, Human
cugccccugcacagc

SEQ ID NO: 2943967 - RNA, 19 nt, Human
cugccccugcacagcaggc

SEQ ID NO: 2943968 - RNA, 13 nt, Human
cugccgcagcccu

SEQ ID NO: 2943969 - RNA, 12 nt, Human
cugccgcagccc

SEQ ID NO: 2943970 - RNA, 23 nt, Human
cugccgcagcccugcagagggca

SEQ ID NO: 2943971 - RNA, 22 nt, Human
cugccgcagcccugcagagggc

SEQ ID NO: 2943972 - RNA, 21 nt, Human
cugccgcagcccugcagaggg

SEQ ID NO: 2943973 - RNA, 20 nt, Human
cugccgcagcccugcagagg

SEQ ID NO: 2943974 - RNA, 19 nt, Human
cugccgcagcccugcagag

SEQ ID NO: 2943975 - RNA, 19 nt, Human
cugccucagccucccaaag

SEQ ID NO: 2943976 - RNA, 15 nt, Human
cugccucagccuccc

SEQ ID NO: 2943977 - RNA, 13 nt, Human
cugccaggcaugg

SEQ ID NO: 2943978 - RNA, 11 nt, Human
cugccaggcau

SEQ ID NO: 2943979 - RNA, 14 nt, Human
cugccaugccagcu

SEQ ID NO: 2943980 - RNA, 13 nt, Human
cugcccaccuggc

SEQ ID NO: 2943981 - RNA, 15 nt, Human
cugcccaccuggccu

SEQ ID NO: 2943982 - RNA, 14 nt, Human
cugcccaccuggcc

SEQ ID NO: 2943983 - RNA, 18 nt, Human
cugcccacucccugcaac

SEQ ID NO: 2943984 - RNA, 16 nt, Human
cugcccacucccugca

SEQ ID NO: 2943985 - RNA, 15 nt, Human
cugcccacucccugc

SEQ ID NO: 2943986 - RNA, 14 nt, Human
cugcccacucccug

SEQ ID NO: 2943987 - RNA, 22 nt, Human
cugcccaccuggccucugcacu

SEQ ID NO: 2943988 - RNA, 20 nt, Human
cugcccaccuggccucugca

SEQ ID NO: 2943989 - RNA, 19 nt, Human
cugcccaccuggccucugc

SEQ ID NO: 2943990 - RNA, 18 nt, Human
cugcccaccuggccucug

SEQ ID NO: 2943991 - RNA, 17 nt, Human
cugcccaccuggccucu

SEQ ID NO: 2943992 - RNA, 22 nt, Human
cugcaugcgggcuuccuccugg

SEQ ID NO: 2943993 - RNA, 18 nt, Human
cugcaugcgggcuuccuc

SEQ ID NO: 2943994 - RNA, 19 nt, Human
cugccaaugggagcucaug

SEQ ID NO: 2943995 - RNA, 18 nt, Human
cugccaaugggagcucau

SEQ ID NO: 2943996 - RNA, 22 nt, Human
cugcaucguuucaucuuccaac

SEQ ID NO: 2943997 - RNA, 16 nt, Human
cugcaucguuucaucu

SEQ ID NO: 2943998 - RNA, 23 nt, Human
cugcacuugcagacucuacagag

SEQ ID NO: 2943999 - RNA, 19 nt, Human
cugcaguugccagucaccc

SEQ ID NO: 2944000 - RNA, 20 nt, Human
cugcaucagcugcugaaaca

SEQ ID NO: 2944001 - RNA, 17 nt, Human
cugcaguugccagucac

SEQ ID NO: 2944002 - RNA, 22 nt, Human
cugcaguugccagucaccccgg

SEQ ID NO: 2944003 - RNA, 21 nt, Human
cugcaguugccagucaccccg

SEQ ID NO: 2944004 - RNA, 17 nt, Human
cugaaguucagcugcau

SEQ ID NO: 2944005 - RNA, 20 nt, Human
cugaagucuuuguacagaca

SEQ ID NO: 2944006 - RNA, 17 nt, Human
cugaagucuuuguacag

SEQ ID NO: 2944007 - RNA, 22 nt, Human
cugaagucccagauacuugggg

SEQ ID NO: 2944008 - RNA, 16 nt, Human
cugaagucacacagug

SEQ ID NO: 2944009 - RNA, 21 nt, Human
cugaagucacacagugagucg

SEQ ID NO: 2944010 - RNA, 18 nt, Human
cugaagucacacagugag

SEQ ID NO: 2944011 - RNA, 19 nt, Human
cugaagucacacagugagu

SEQ ID NO: 2944012 - RNA, 17 nt, Human
cugaagucacacaguga

SEQ ID NO: 2944013 - RNA, 18 nt, Human
cugaauggacuuugcaca

SEQ ID NO: 2944014 - RNA, 19 nt, Human
cugaaugguuuucaaaaua

SEQ ID NO: 2944015 - RNA, 20 nt, Human
cugaaugguuuucaaaauaa

SEQ ID NO: 2944016 - RNA, 12 nt, Human
cugaauuucuuu

SEQ ID NO: 2944017 - RNA, 14 nt, Human
cugaauuaugaaac

SEQ ID NO: 2944018 - RNA, 15 nt, Human
cugaauuaugaaacu

SEQ ID NO: 2944019 - RNA, 13 nt, Human
cugaauuaugaaa

SEQ ID NO: 2944020 - RNA, 21 nt, Human
cugaacaaacuaucagaggaa

SEQ ID NO: 2944021 - RNA, 20 nt, Human
cugaaauaaacgucuuaaau

SEQ ID NO: 2944022 - RNA, 13 nt, Human
cugaaaugucagu

SEQ ID NO: 2944023 - RNA, 20 nt, Human
cugaaaugucaguucugaua

SEQ ID NO: 2944024 - RNA, 18 nt, Human
cugaaaugucaguucuga

SEQ ID NO: 2944025 - RNA, 19 nt, Human
cugaaaugucaguucugau

SEQ ID NO: 2944026 - RNA, 16 nt, Human
cucuucuccaggcugu

SEQ ID NO: 2944027 - RNA, 23 nt, Human
cucuuuggucuacacugugcuga

SEQ ID NO: 2944028 - RNA, 22 nt, Human
cucuuuggucuacacugugcug

SEQ ID NO: 2944029 - RNA, 14 nt, Human
cucuuuucaaaaca

SEQ ID NO: 2944030 - RNA, 23 nt, Human
cugaaagggacgcuacccgggaa

SEQ ID NO: 2944031 - RNA, 19 nt, Human
cugagcauaaguccucuag

SEQ ID NO: 2944032 - RNA, 14 nt, Human
cugagccagauuuc

SEQ ID NO: 2944033 - RNA, 13 nt, Human
cugagccagauuu

SEQ ID NO: 2944034 - RNA, 16 nt, Human
cugagcaggauuuuaa

SEQ ID NO: 2944035 - RNA, 21 nt, Human
cugagaugugaacacaucagc

SEQ ID NO: 2944036 - RNA, 20 nt, Human
cugagaaagacuauucaaac

SEQ ID NO: 2944037 - RNA, 19 nt, Human
cugagaaagacuauucaaa

SEQ ID NO: 2944038 - RNA, 19 nt, Human
cugagacagcccgggcucu

SEQ ID NO: 2944039 - RNA, 20 nt, Human
cugagacagcccgggcucug

SEQ ID NO: 2944040 - RNA, 20 nt, Human
cugagaugugaacacaucag

SEQ ID NO: 2944041 - RNA, 16 nt, Human
cugagaugugaacaca

SEQ ID NO: 2944042 - RNA, 22 nt, Human
cugagacagcccgggcucugcc

SEQ ID NO: 2944043 - RNA, 21 nt, Human
cugagacagcccgggcucugc

SEQ ID NO: 2944044 - RNA, 16 nt, Human
cugacagacacaggcc

SEQ ID NO: 2944045 - RNA, 16 nt, Human
cugaauuaugaaacuu

SEQ ID NO: 2944046 - RNA, 14 nt, Human
cugaauuucuuuug

SEQ ID NO: 2944047 - RNA, 17 nt, Human
cugacagacacaggccc

SEQ ID NO: 2944048 - RNA, 18 nt, Human
cugacagacacaggcccg

SEQ ID NO: 2944049 - RNA, 23 nt, Human
cugacgacuugagugcucaguag

SEQ ID NO: 2944050 - RNA, 18 nt, Human
cugagaaagacuauucaa

SEQ ID NO: 2944051 - RNA, 15 nt, Human
cugagaaagacuauu

SEQ ID NO: 2944052 - RNA, 13 nt, Human
cugagaaagacua

SEQ ID NO: 2944053 - RNA, 12 nt, Human
cugagaaagacu

SEQ ID NO: 2944054 - RNA, 14 nt, Human
cucuguccugggag

SEQ ID NO: 2944055 - RNA, 13 nt, Human
cucuguccuggga

SEQ ID NO: 2944056 - RNA, 15 nt, Human
cucuguccugggagu

SEQ ID NO: 2944057 - RNA, 22 nt, Human
cucuguccugggagugagcugg

SEQ ID NO: 2944058 - RNA, 18 nt, Human
cucugucgcccagucugg

SEQ ID NO: 2944059 - RNA, 19 nt, Human
cucugucgcccagucugga

SEQ ID NO: 2944060 - RNA, 17 nt, Human
cucugucgcccagucug

SEQ ID NO: 2944061 - RNA, 13 nt, Human
cucugucgcccag

SEQ ID NO: 2944062 - RNA, 16 nt, Human
cucugccucugacaca

SEQ ID NO: 2944063 - RNA, 21 nt, Human
cucugccucccaucacccgcu

SEQ ID NO: 2944064 - RNA, 19 nt, Human
cucugccucugacacacag

SEQ ID NO: 2944065 - RNA, 20 nt, Human
cucugccucugacacacagc

SEQ ID NO: 2944066 - RNA, 20 nt, Human
cucuggcagcucagagaggg

SEQ ID NO: 2944067 - RNA, 23 nt, Human
cucuggcagcucagagagggugg

SEQ ID NO: 2944068 - RNA, 21 nt, Human
cucuggccuucggccuccauc

SEQ ID NO: 2944069 - RNA, 22 nt, Human
cucuggccuucggccuccaucc

SEQ ID NO: 2944070 - RNA, 19 nt, Human
cucuuaagaagacugcauu

SEQ ID NO: 2944071 - RNA, 13 nt, Human
cucuuaagaagac

SEQ ID NO: 2944072 - RNA, 19 nt, Human
cucugugucagguggggca

SEQ ID NO: 2944073 - RNA, 20 nt, Human
cucugugucagguggggcag

SEQ ID NO: 2944074 - RNA, 21 nt, Human
cucugugucagguggggcagc

SEQ ID NO: 2944075 - RNA, 22 nt, Human
cucugugucagguggggcagcu

SEQ ID NO: 2944076 - RNA, 23 nt, Human
cucugugucagguggggcagcuu

SEQ ID NO: 2944077 - RNA, 15 nt, Human
cucuucuccaggcug

SEQ ID NO: 2944078 - RNA, 13 nt, Human
cucuucuccaggc

SEQ ID NO: 2944079 - RNA, 22 nt, Human
cucugaaggacauugcggacag

SEQ ID NO: 2944080 - RNA, 19 nt, Human
cucugaaggguaauuauau

SEQ ID NO: 2944081 - RNA, 14 nt, Human
cucugacacacagc

SEQ ID NO: 2944082 - RNA, 15 nt, Human
cucugacacacagcu

SEQ ID NO: 2944083 - RNA, 16 nt, Human
cucugacacacagcuc

SEQ ID NO: 2944084 - RNA, 17 nt, Human
cucugacacacagcucu

SEQ ID NO: 2944085 - RNA, 18 nt, Human
cucugacacacagcucug

SEQ ID NO: 2944086 - RNA, 19 nt, Human
cucugacacacagcucugu

SEQ ID NO: 2944087 - RNA, 23 nt, Human
cucugacagaagaaccccagggu

SEQ ID NO: 2944088 - RNA, 21 nt, Human
cucugagacucgcgacaaugc

SEQ ID NO: 2944089 - RNA, 23 nt, Human
cucugagacucgcgacaaugcaa

SEQ ID NO: 2944090 - RNA, 20 nt, Human
cucugagacucgcgacaaug

SEQ ID NO: 2944091 - RNA, 16 nt, Human
cucugaggacacuaac

SEQ ID NO: 2944092 - RNA, 12 nt, Human
cucugaggacac

SEQ ID NO: 2944093 - RNA, 14 nt, Human
cucugaggacacua

SEQ ID NO: 2944094 - RNA, 15 nt, Human
cucugauacagaaaa

SEQ ID NO: 2944095 - RNA, 13 nt, Human
cucugcacaagcu

SEQ ID NO: 2944096 - RNA, 10 nt, Human
cucugcacaa

SEQ ID NO: 2944097 - RNA, 15 nt, Human
cucugcacaagcugc

SEQ ID NO: 2944098 - RNA, 14 nt, Human
cucugcacaagcug

SEQ ID NO: 2944099 - RNA, 12 nt, Human
cucugcccuugg

SEQ ID NO: 2944100 - RNA, 17 nt, Human
cucugccucccaucacc

SEQ ID NO: 2944101 - RNA, 16 nt, Human
cucugccucccaucac

SEQ ID NO: 2944102 - RNA, 14 nt, Human
cucugccucccauc

SEQ ID NO: 2944103 - RNA, 13 nt, Human
cucugccucccau

SEQ ID NO: 2944104 - RNA, 20 nt, Human
cucugcccacucccugcaac

SEQ ID NO: 2944105 - RNA, 18 nt, Human
cucugcccacucccugca

SEQ ID NO: 2944106 - RNA, 17 nt, Human
cucugcccacucccugc

SEQ ID NO: 2944107 - RNA, 16 nt, Human
cucugcccacucccug

SEQ ID NO: 2944108 - RNA, 15 nt, Human
cucugcccacucccu

SEQ ID NO: 2944109 - RNA, 13 nt, Human
cucugcccacucc

SEQ ID NO: 2944110 - RNA, 22 nt, Human
gagccacugcaccgggccacag

SEQ ID NO: 2944111 - RNA, 15 nt, Human
gagccauuuguccca

SEQ ID NO: 2944112 - RNA, 16 nt, Human
gagccauuugucccaa

SEQ ID NO: 2944113 - RNA, 17 nt, Human
gagccauuugucccaag

SEQ ID NO: 2944114 - RNA, 23 nt, Human
gagccauuugucccaagugccaa

SEQ ID NO: 2944115 - RNA, 18 nt, Human
gagccauuugucccaagu

SEQ ID NO: 2944116 - RNA, 19 nt, Human
gagccauuugucccaagug

SEQ ID NO: 2944117 - RNA, 20 nt, Human
gagccauuugucccaagugc

SEQ ID NO: 2944118 - RNA, 22 nt, Human
gagccauuugucccaagugcca

SEQ ID NO: 2944119 - RNA, 11 nt, Human
gagcccacgcc

SEQ ID NO: 2944120 - RNA, 14 nt, Human
gagcccaggccucc

SEQ ID NO: 2944121 - RNA, 13 nt, Human
gagcccaggccuc

SEQ ID NO: 2944122 - RNA, 12 nt, Human
gagcccaggccu

SEQ ID NO: 2944123 - RNA, 16 nt, Human
gagcccacgcccccac

SEQ ID NO: 2944124 - RNA, 15 nt, Human
gagcccacgccccca

SEQ ID NO: 2944125 - RNA, 12 nt, Human
gagcccacgccc

SEQ ID NO: 2944126 - RNA, 18 nt, Human
gagcagccacauuccuga

SEQ ID NO: 2944127 - RNA, 21 nt, Human
gagcaggcuacugucagcucc

SEQ ID NO: 2944128 - RNA, 14 nt, Human
gagaucgagaccau

SEQ ID NO: 2944129 - RNA, 13 nt, Human
gagauccuggacu

SEQ ID NO: 2944130 - RNA, 13 nt, Human
gagaucagccugg

SEQ ID NO: 2944131 - RNA, 16 nt, Human
gagaucagccugggca

SEQ ID NO: 2944132 - RNA, 14 nt, Human
gagaucagccuggg

SEQ ID NO: 2944133 - RNA, 20 nt, Human
gagaucaaccccuucgcucc

SEQ ID NO: 2944134 - RNA, 19 nt, Human
gagcaaaaucgaugcagug

SEQ ID NO: 2944135 - RNA, 23 nt, Human
gagcaagacgcugugcugcccug

SEQ ID NO: 2944136 - RNA, 22 nt, Human
gagcaagacgcugugcugcccu

SEQ ID NO: 2944137 - RNA, 18 nt, Human
gagcaagacgcugugcug

SEQ ID NO: 2944138 - RNA, 21 nt, Human
gagcaagacgcugugcugccc

SEQ ID NO: 2944139 - RNA, 17 nt, Human
gagcaccuuagacaguc

SEQ ID NO: 2944140 - RNA, 19 nt, Human
gagcaccuuagacaguccc

SEQ ID NO: 2944141 - RNA, 15 nt, Human
gagcacacuggcuca

SEQ ID NO: 2944142 - RNA, 20 nt, Human
gagccucagcauccuggcac

SEQ ID NO: 2944143 - RNA, 21 nt, Human
gagccucagcauccuggcacc

SEQ ID NO: 2944144 - RNA, 14 nt, Human
gagccuccugcccu

SEQ ID NO: 2944145 - RNA, 15 nt, Human
gagcccugguggcag

SEQ ID NO: 2944146 - RNA, 16 nt, Human
gagcccugguggcagu

SEQ ID NO: 2944147 - RNA, 19 nt, Human
gagccucagcauccuggca

SEQ ID NO: 2944148 - RNA, 17 nt, Human
gagcccugguggcagug

SEQ ID NO: 2944149 - RNA, 22 nt, Human
gagccuccugcccuuaccugcc

SEQ ID NO: 2944150 - RNA, 20 nt, Human
gagccuccugcccuuaccug

SEQ ID NO: 2944151 - RNA, 15 nt, Human
gagccuggcaagaau

SEQ ID NO: 2944152 - RNA, 10 nt, Human
gagccuggca

SEQ ID NO: 2944153 - RNA, 21 nt, Human
gagccugggaggucaaggcug

SEQ ID NO: 2944154 - RNA, 13 nt, Human
gagccugggaggu

SEQ ID NO: 2944155 - RNA, 13 nt, Human
gagcuacaaaugc

SEQ ID NO: 2944156 - RNA, 12 nt, Human
gagcuacaaaug

SEQ ID NO: 2944157 - RNA, 23 nt, Human
gagcuacacaggggaaaagagga

SEQ ID NO: 2944158 - RNA, 14 nt, Human
gagcuacaaaugca

SEQ ID NO: 2944159 - RNA, 15 nt, Human
gagcugcccucuccu

SEQ ID NO: 2944160 - RNA, 16 nt, Human
gagcugcccucuccug

SEQ ID NO: 2944161 - RNA, 13 nt, Human
gagcugccaccug

SEQ ID NO: 2944162 - RNA, 14 nt, Human
gagcugcccucucc

SEQ ID NO: 2944163 - RNA, 16 nt, Human
gagcugccaccugccu

SEQ ID NO: 2944164 - RNA, 15 nt, Human
gagcugccaccugcc

SEQ ID NO: 2944165 - RNA, 12 nt, Human
gaggggccucuu

SEQ ID NO: 2944166 - RNA, 22 nt, Human
gaggggccucuuaugggcuggg

SEQ ID NO: 2944167 - RNA, 23 nt, Human
gagggcacagaaaauggaagaca

SEQ ID NO: 2944168 - RNA, 22 nt, Human
gagggcacagaaaauggaagac

SEQ ID NO: 2944169 - RNA, 14 nt, Human
gagggcacagaaaa

SEQ ID NO: 2944170 - RNA, 13 nt, Human
gagggagugacag

SEQ ID NO: 2944171 - RNA, 14 nt, Human
gagggagguaagga

SEQ ID NO: 2944172 - RNA, 14 nt, Human
gagggagugacaga

SEQ ID NO: 2944173 - RNA, 14 nt, Human
gagggagggagggc

SEQ ID NO: 2944174 - RNA, 15 nt, Human
gagggagggcuccag

SEQ ID NO: 2944175 - RNA, 15 nt, Human
gagggagggagggcu

SEQ ID NO: 2944176 - RNA, 15 nt, Human
gaggcugggcucccu

SEQ ID NO: 2944177 - RNA, 14 nt, Human
gaggcugggcuccc

SEQ ID NO: 2944178 - RNA, 13 nt, Human
gaggcugggcucc

SEQ ID NO: 2944179 - RNA, 14 nt, Human
gaggccuucucuga

SEQ ID NO: 2944180 - RNA, 22 nt, Human
gaggcccuucucuccagccccu

SEQ ID NO: 2944181 - RNA, 24 nt, Human
gaggcccuucucuccagccccugg

SEQ ID NO: 2944182 - RNA, 23 nt, Human
gaggcccuucucuccagccccug

SEQ ID NO: 2944183 - RNA, 14 nt, Human
gaggcccuucucuc

SEQ ID NO: 2944184 - RNA, 13 nt, Human
gaggacagggagg

SEQ ID NO: 2944185 - RNA, 22 nt, Human
gaggacagggaggugaccccag

SEQ ID NO: 2944186 - RNA, 23 nt, Human
gaggacagggaggugaccccagg

SEQ ID NO: 2944187 - RNA, 14 nt, Human
gaggaauccagacc

SEQ ID NO: 2944188 - RNA, 22 nt, Human
gaggaaggaaacccagcucugg

SEQ ID NO: 2944189 - RNA, 15 nt, Human
gaggaauccagaccc

SEQ ID NO: 2944190 - RNA, 16 nt, Human
gaggauugcuugagcu

SEQ ID NO: 2944191 - RNA, 17 nt, Human
gaggauguucugggaca

SEQ ID NO: 2944192 - RNA, 20 nt, Human
gaggauguucugggacacag

SEQ ID NO: 2944193 - RNA, 12 nt, Human
gaggauguucug

SEQ ID NO: 2944194 - RNA, 23 nt, Human
gaggaguuugggguaugggagag

SEQ ID NO: 2944195 - RNA, 12 nt, Human
gaggccagccuu

SEQ ID NO: 2944196 - RNA, 13 nt, Human
gaggccagccuug

SEQ ID NO: 2944197 - RNA, 23 nt, Human
gaggcagccccauucugccugcc

SEQ ID NO: 2944198 - RNA, 16 nt, Human
gaggcaggagacuggc

SEQ ID NO: 2944199 - RNA, 21 nt, Human
gaggcagccccauucugccug

SEQ ID NO: 2944200 - RNA, 22 nt, Human
gaggcagccccauucugccugc

SEQ ID NO: 2944201 - RNA, 13 nt, Human
gaggcagccccau

SEQ ID NO: 2944202 - RNA, 19 nt, Human
gaggcagagguugcaguga

SEQ ID NO: 2944203 - RNA, 22 nt, Human
gaugggcaacccccagccugcu

SEQ ID NO: 2944204 - RNA, 16 nt, Human
gaugggaaagcauugu

SEQ ID NO: 2944205 - RNA, 22 nt, Human
gaugcuagaacucccuuucaac

SEQ ID NO: 2944206 - RNA, 15 nt, Human
gaugacuguuuuuaa

SEQ ID NO: 2944207 - RNA, 22 nt, Human
gaugagaaagguugaagcacca

SEQ ID NO: 2944208 - RNA, 11 nt, Human
gaugagaaagg

SEQ ID NO: 2944209 - RNA, 18 nt, Human
gaugcaguucugaagaag

SEQ ID NO: 2944210 - RNA, 15 nt, Human
gaucacgaggucagg

SEQ ID NO: 2944211 - RNA, 23 nt, Human
gaucaaccccuucgcuccugugu

SEQ ID NO: 2944212 - RNA, 13 nt, Human
gaucacgccacug

SEQ ID NO: 2944213 - RNA, 14 nt, Human
gaucacgccacugc

SEQ ID NO: 2944214 - RNA, 15 nt, Human
gaucacgccacugca

SEQ ID NO: 2944215 - RNA, 18 nt, Human
gauccuaguuccaccauc

SEQ ID NO: 2944216 - RNA, 18 nt, Human
gauccuaggcauuugcug

SEQ ID NO: 2944217 - RNA, 11 nt, Human
gauccuccagg

SEQ ID NO: 2944218 - RNA, 19 nt, Human
gauccucccaccucagccu

SEQ ID NO: 2944219 - RNA, 12 nt, Human
gauccuccaggu

SEQ ID NO: 2944220 - RNA, 20 nt, Human
gauccucccaccucagccuc

SEQ ID NO: 2944221 - RNA, 21 nt, Human
gauccucccaccucagccucc

SEQ ID NO: 2944222 - RNA, 19 nt, Human
gauccugagccagauuuca

SEQ ID NO: 2944223 - RNA, 15 nt, Human
gauccugagccagau

SEQ ID NO: 2944224 - RNA, 14 nt, Human
gauccugagccaga

SEQ ID NO: 2944225 - RNA, 13 nt, Human
gauccugagccag

SEQ ID NO: 2944226 - RNA, 16 nt, Human
gaucgagaccauccug

SEQ ID NO: 2944227 - RNA, 19 nt, Human
gaucgagaccauccuggcu

SEQ ID NO: 2944228 - RNA, 18 nt, Human
gauccucccaccucagcc

SEQ ID NO: 2944229 - RNA, 15 nt, Human
gaugaaaaaauaaca

SEQ ID NO: 2944230 - RNA, 16 nt, Human
gaucuuugcagacagg

SEQ ID NO: 2944231 - RNA, 14 nt, Human
gaucuuuaaaauac

SEQ ID NO: 2944232 - RNA, 13 nt, Human
gaucuuuaaaaua

SEQ ID NO: 2944233 - RNA, 15 nt, Human
gauucccugauuuaa

SEQ ID NO: 2944234 - RNA, 22 nt, Human
gauucccaagcucugcuccucu

SEQ ID NO: 2944235 - RNA, 19 nt, Human
gauucaccuccuaaaacaa

SEQ ID NO: 2944236 - RNA, 12 nt, Human
gauucagacagc

SEQ ID NO: 2944237 - RNA, 17 nt, Human
gauucuauguuaauauu

SEQ ID NO: 2944238 - RNA, 20 nt, Human
gauucuauguuaauauuuua

SEQ ID NO: 2944239 - RNA, 18 nt, Human
gauugcuugagcucagga

SEQ ID NO: 2944240 - RNA, 23 nt, Human
gauugacgggacuguugguauug

SEQ ID NO: 2944241 - RNA, 15 nt, Human
gauuguccccgaccc

SEQ ID NO: 2944242 - RNA, 20 nt, Human
gauuguccccgacccuugcc

SEQ ID NO: 2944243 - RNA, 13 nt, Human
gauugugccccug

SEQ ID NO: 2944244 - RNA, 18 nt, Human
gauugugccuaauguguu

SEQ ID NO: 2944245 - RNA, 19 nt, Human
gauucaacagguuuuccug

SEQ ID NO: 2944246 - RNA, 18 nt, Human
gauuaaccacuucagcug

SEQ ID NO: 2944247 - RNA, 21 nt, Human
gauuaaccacuucagcugacu

SEQ ID NO: 2944248 - RNA, 19 nt, Human
gauuaaccacuucagcuga

SEQ ID NO: 2944249 - RNA, 21 nt, Human
gauguucuuucacccuuuucu

SEQ ID NO: 2944250 - RNA, 21 nt, Human
gauguuuuaaggaugcuugua

SEQ ID NO: 2944251 - RNA, 14 nt, Human
gauguuuuccauga

SEQ ID NO: 2944252 - RNA, 23 nt, Human
gauguuuuccaugaguccccugu

SEQ ID NO: 2944253 - RNA, 15 nt, Human
gauguuuuccaugag

SEQ ID NO: 2944254 - RNA, 12 nt, Human
gauuaaauucuu

SEQ ID NO: 2944255 - RNA, 19 nt, Human
gauuaaauucuugcaaagu

SEQ ID NO: 2944256 - RNA, 14 nt, Human
gauguucugggaca

SEQ ID NO: 2944257 - RNA, 16 nt, Human
gauguucugggacaca

SEQ ID NO: 2944258 - RNA, 18 nt, Human
gaugggccaccgccuugc

SEQ ID NO: 2944259 - RNA, 20 nt, Human
gauggugcaaugaccuuuca

SEQ ID NO: 2944260 - RNA, 23 nt, Human
gauggugcaaugaccuuucaaua

SEQ ID NO: 2944261 - RNA, 17 nt, Human
gaguuauugaagcagag

SEQ ID NO: 2944262 - RNA, 18 nt, Human
gaguuauugaagcagagu

SEQ ID NO: 2944263 - RNA, 23 nt, Human
gaguucaucuugaauuguaagga

SEQ ID NO: 2944264 - RNA, 17 nt, Human
gagugugccugaagucc

SEQ ID NO: 2944265 - RNA, 13 nt, Human
gaguucugguucc

SEQ ID NO: 2944266 - RNA, 14 nt, Human
gaguugaagacaga

SEQ ID NO: 2944267 - RNA, 21 nt, Human
gaguugaaaaucuuauaauuu

SEQ ID NO: 2944268 - RNA, 19 nt, Human
gagugucuuaauuaaaaga

SEQ ID NO: 2944269 - RNA, 12 nt, Human
gagugggcccaa

SEQ ID NO: 2944270 - RNA, 23 nt, Human
gagugggggaucacagccucuga

SEQ ID NO: 2944271 - RNA, 22 nt, Human
gagugaacaaauuuacagagac

SEQ ID NO: 2944272 - RNA, 19 nt, Human
gagugaacaaauuuacaga

SEQ ID NO: 2944273 - RNA, 23 nt, Human
gauauaugcucugcauguuacau

SEQ ID NO: 2944274 - RNA, 21 nt, Human
gaucaaccccuucgcuccugu

SEQ ID NO: 2944275 - RNA, 22 nt, Human
gaucaaccccuucgcuccugug

SEQ ID NO: 2944276 - RNA, 13 nt, Human
gauagccaaggcc

SEQ ID NO: 2944277 - RNA, 13 nt, Human
gauagcagggcau

SEQ ID NO: 2944278 - RNA, 19 nt, Human
gauagcacagacccugccc

SEQ ID NO: 2944279 - RNA, 12 nt, Human
gauagccaaggc

SEQ ID NO: 2944280 - RNA, 16 nt, Human
gauagcacagacccug

SEQ ID NO: 2944281 - RNA, 13 nt, Human
gauacaaugcugu

SEQ ID NO: 2944282 - RNA, 18 nt, Human
gauacaaugcugugcccu

SEQ ID NO: 2944283 - RNA, 18 nt, Human
gauagcacagacccugcc

SEQ ID NO: 2944284 - RNA, 17 nt, Human
gauagcacagacccugc

SEQ ID NO: 2944285 - RNA, 17 nt, Human
gauacaaaagcauguga

SEQ ID NO: 2944286 - RNA, 12 nt, Human
gaguagcuggga

SEQ ID NO: 2944287 - RNA, 14 nt, Human
gaguagcugggacu

SEQ ID NO: 2944288 - RNA, 23 nt, Human
gaguccccuguuuguuucugaaa

SEQ ID NO: 2944289 - RNA, 14 nt, Human
gaguccccuguuug

SEQ ID NO: 2944290 - RNA, 12 nt, Human
gaguccccuguu

SEQ ID NO: 2944291 - RNA, 17 nt, Human
gagucgaggacagggag

SEQ ID NO: 2944292 - RNA, 19 nt, Human
gagucucacuguugcccag

SEQ ID NO: 2944293 - RNA, 20 nt, Human
gagucucacuguugcccagg

SEQ ID NO: 2944294 - RNA, 21 nt, Human
gagucucacuguugcccaggc

SEQ ID NO: 2944295 - RNA, 21 nt, Human
gagucugaaggcuggguucug

SEQ ID NO: 2944296 - RNA, 22 nt, Human
gagucucacuguugcccaggcu

SEQ ID NO: 2944297 - RNA, 23 nt, Human
gagucucacuguugcccaggcug

SEQ ID NO: 2944298 - RNA, 22 nt, Human
gaggggggaggugggauccucc

SEQ ID NO: 2944299 - RNA, 15 nt, Human
gaggggguggccucc

SEQ ID NO: 2944300 - RNA, 15 nt, Human
gaggggggagguggg

SEQ ID NO: 2944301 - RNA, 18 nt, Human
gaggugggauccuccagg

SEQ ID NO: 2944302 - RNA, 22 nt, Human
gaggugggauccuccaggugca

SEQ ID NO: 2944303 - RNA, 21 nt, Human
gaggugggauccuccaggugc

SEQ ID NO: 2944304 - RNA, 19 nt, Human
gaguacuacaguccuccca

SEQ ID NO: 2944305 - RNA, 18 nt, Human
gaguacuacaguccuccc

SEQ ID NO: 2944306 - RNA, 17 nt, Human
gaguacguugugcauuu

SEQ ID NO: 2944307 - RNA, 18 nt, Human
gaguacguugugcauuug

SEQ ID NO: 2944308 - RNA, 15 nt, Human
gaguacuacaguccu

SEQ ID NO: 2944309 - RNA, 20 nt, Human
gaguacguugugcauuuggu

SEQ ID NO: 2944310 - RNA, 19 nt, Human
gagguuuuaaaaaaauccc

SEQ ID NO: 2944311 - RNA, 16 nt, Human
gaguacguugugcauu

SEQ ID NO: 2944312 - RNA, 16 nt, Human
gagguuaaaaagaaaa

SEQ ID NO: 2944313 - RNA, 19 nt, Human
gagguucaaagauauuuug

SEQ ID NO: 2944314 - RNA, 14 nt, Human
gagguucccuuuga

SEQ ID NO: 2944315 - RNA, 17 nt, Human
gccagguuuuuggucug

SEQ ID NO: 2944316 - RNA, 20 nt, Human
gccagucaccccggccaccu

SEQ ID NO: 2944317 - RNA, 18 nt, Human
gccagucaccccggccac

SEQ ID NO: 2944318 - RNA, 17 nt, Human
gccagucaccccggcca

SEQ ID NO: 2944319 - RNA, 21 nt, Human
gccagggccaugucagacaca

SEQ ID NO: 2944320 - RNA, 21 nt, Human
gccagauuucacucuccuugg

SEQ ID NO: 2944321 - RNA, 18 nt, Human
gccagauuucacucuccu

SEQ ID NO: 2944322 - RNA, 16 nt, Human
gccagauuucacucuc

SEQ ID NO: 2944323 - RNA, 13 nt, Human
gccagggacagag

SEQ ID NO: 2944324 - RNA, 18 nt, Human
gccagggacagagggggu

SEQ ID NO: 2944325 - RNA, 16 nt, Human
gccagggacagagggg

SEQ ID NO: 2944326 - RNA, 23 nt, Human
gccagggacagaggggguggccu

SEQ ID NO: 2944327 - RNA, 14 nt, Human
gccagugccugggu

SEQ ID NO: 2944328 - RNA, 13 nt, Human
gccagugccuggg

SEQ ID NO: 2944329 - RNA, 12 nt, Human
gccagugccugg

SEQ ID NO: 2944330 - RNA, 19 nt, Human
gccaugccagcuuaucuca

SEQ ID NO: 2944331 - RNA, 18 nt, Human
gccaugccagcuuaucuc

SEQ ID NO: 2944332 - RNA, 13 nt, Human
gccaugccagcuu

SEQ ID NO: 2944333 - RNA, 18 nt, Human
gccaugaggaacaaggca

SEQ ID NO: 2944334 - RNA, 19 nt, Human
gccaugagccgcccaaggc

SEQ ID NO: 2944335 - RNA, 21 nt, Human
gccaugagccgcccaaggccu

SEQ ID NO: 2944336 - RNA, 18 nt, Human
gccaugagccgcccaagg

SEQ ID NO: 2944337 - RNA, 16 nt, Human
gccauuuguguuuaua

SEQ ID NO: 2944338 - RNA, 23 nt, Human
gccaugggacagggaggacgcuc

SEQ ID NO: 2944339 - RNA, 22 nt, Human
gccaugggacagggaggacgcu

SEQ ID NO: 2944340 - RNA, 14 nt, Human
gcccagccuggaug

SEQ ID NO: 2944341 - RNA, 16 nt, Human
gcccagccuggaugcc

SEQ ID NO: 2944342 - RNA, 24 nt, Human
gcccagccccuucugacccaugcu

SEQ ID NO: 2944343 - RNA, 20 nt, Human
gcccagccccuucugaccca

SEQ ID NO: 2944344 - RNA, 17 nt, Human
gcccagccccuucugac

SEQ ID NO: 2944345 - RNA, 16 nt, Human
gcccagccccuucuga

SEQ ID NO: 2944346 - RNA, 14 nt, Human
gcccagccccuucu

SEQ ID NO: 2944347 - RNA, 13 nt, Human
gcccagccccuuc

SEQ ID NO: 2944348 - RNA, 15 nt, Human
gcccaguugggugga

SEQ ID NO: 2944349 - RNA, 19 nt, Human
gcccagucuggaaugcagu

SEQ ID NO: 2944350 - RNA, 23 nt, Human
gcccaggcuuagucacugagaca

SEQ ID NO: 2944351 - RNA, 21 nt, Human
gcccaggcuuagucacugaga

SEQ ID NO: 2944352 - RNA, 19 nt, Human
gcccaggcuuagucacuga

SEQ ID NO: 2944353 - RNA, 22 nt, Human
gcccaggcuggcgugcaguggu

SEQ ID NO: 2944354 - RNA, 19 nt, Human
gcccaggcuggcgugcagu

SEQ ID NO: 2944355 - RNA, 20 nt, Human
gcccaggcuggcgugcagug

SEQ ID NO: 2944356 - RNA, 21 nt, Human
gcccaggaaaggcuccaggag

SEQ ID NO: 2944357 - RNA, 20 nt, Human
gcccaggaaaggcuccagga

SEQ ID NO: 2944358 - RNA, 19 nt, Human
gcccaggaaaggcuccagg

SEQ ID NO: 2944359 - RNA, 18 nt, Human
gcccaggaaaggcuccag

SEQ ID NO: 2944360 - RNA, 21 nt, Human
gcccaaugcacuuuguucugg

SEQ ID NO: 2944361 - RNA, 12 nt, Human
gcccagagggcc

SEQ ID NO: 2944362 - RNA, 19 nt, Human
gcccagagggccugcaagg

SEQ ID NO: 2944363 - RNA, 18 nt, Human
gcccagagggccugcaag

SEQ ID NO: 2944364 - RNA, 15 nt, Human
gcccagagggccugc

SEQ ID NO: 2944365 - RNA, 14 nt, Human
gcccagagggccug

SEQ ID NO: 2944366 - RNA, 9 nt, Human
gcccagccc

SEQ ID NO: 2944367 - RNA, 12 nt, Human
gcccagccccuu

SEQ ID NO: 2944368 - RNA, 11 nt, Human
gcccagccccu

SEQ ID NO: 2944369 - RNA, 22 nt, Human
gcccagagggccugcaagggag

SEQ ID NO: 2944370 - RNA, 21 nt, Human
gcccagagggccugcaaggga

SEQ ID NO: 2944371 - RNA, 20 nt, Human
gcccagagggccugcaaggg

SEQ ID NO: 2944372 - RNA, 23 nt, Human
gccaauauccuaauaaaaaggug

SEQ ID NO: 2944373 - RNA, 22 nt, Human
gccaauauccuaauaaaaaggu

SEQ ID NO: 2944374 - RNA, 20 nt, Human
gccaauauccuaauaaaaag

SEQ ID NO: 2944375 - RNA, 19 nt, Human
gccaauauccuaauaaaaa

SEQ ID NO: 2944376 - RNA, 18 nt, Human
gccaauauccuaauaaaa

SEQ ID NO: 2944377 - RNA, 21 nt, Human
gccaaugcuacaguaauaaau

SEQ ID NO: 2944378 - RNA, 13 nt, Human
gccaauauccuaa

SEQ ID NO: 2944379 - RNA, 17 nt, Human
gccaauauccuaauaaa

SEQ ID NO: 2944380 - RNA, 16 nt, Human
gccaauauccuaauaa

SEQ ID NO: 2944381 - RNA, 15 nt, Human
gccaauauccuaaua

SEQ ID NO: 2944382 - RNA, 14 nt, Human
gccaauauccuaau

SEQ ID NO: 2944383 - RNA, 15 nt, Human
gccaaggugggagga

SEQ ID NO: 2944384 - RNA, 14 nt, Human
gccaaggugggagg

SEQ ID NO: 2944385 - RNA, 23 nt, Human
gccaaggugggaggauugcuuga

SEQ ID NO: 2944386 - RNA, 21 nt, Human
gccaaggcugggggaagaagc

SEQ ID NO: 2944387 - RNA, 19 nt, Human
gcauuugaggucuguucuu

SEQ ID NO: 2944388 - RNA, 20 nt, Human
gcauuugaggucuguucuuu

SEQ ID NO: 2944389 - RNA, 22 nt, Human
gcauuuggugguuucagaaaug

SEQ ID NO: 2944390 - RNA, 23 nt, Human
gcauuuggugguuucagaaaugu

SEQ ID NO: 2944391 - RNA, 12 nt, Human
gccaauuugcac

SEQ ID NO: 2944392 - RNA, 22 nt, Human
gccacaagacccuugugguccc

SEQ ID NO: 2944393 - RNA, 16 nt, Human
gccacaagacccuugu

SEQ ID NO: 2944394 - RNA, 23 nt, Human
gccacagagaaaguacuucucca

SEQ ID NO: 2944395 - RNA, 19 nt, Human
gccacaccucuaucccggc

SEQ ID NO: 2944396 - RNA, 13 nt, Human
gccacagagaaag

SEQ ID NO: 2944397 - RNA, 14 nt, Human
gccacagagaaagu

SEQ ID NO: 2944398 - RNA, 20 nt, Human
gccacagagaaaguacuucu

SEQ ID NO: 2944399 - RNA, 18 nt, Human
gccacggccaggccagag

SEQ ID NO: 2944400 - RNA, 17 nt, Human
gccacggccaggccaga

SEQ ID NO: 2944401 - RNA, 19 nt, Human
gccacggccaggccagagg

SEQ ID NO: 2944402 - RNA, 22 nt, Human
gccaccugcggugcuaucuccc

SEQ ID NO: 2944403 - RNA, 20 nt, Human
gccaccugcggugcuaucuc

SEQ ID NO: 2944404 - RNA, 14 nt, Human
gccaccugcggugc

SEQ ID NO: 2944405 - RNA, 16 nt, Human
gccaccgccuugccca

SEQ ID NO: 2944406 - RNA, 20 nt, Human
gccaccgccuugcccagccu

SEQ ID NO: 2944407 - RNA, 13 nt, Human
gccaccgccuugc

SEQ ID NO: 2944408 - RNA, 17 nt, Human
gccaccugccuguuggg

SEQ ID NO: 2944409 - RNA, 21 nt, Human
gccagagggagugacagaggc

SEQ ID NO: 2944410 - RNA, 22 nt, Human
gccagagggagugacagaggca

SEQ ID NO: 2944411 - RNA, 22 nt, Human
gccagaggagagaggacccccu

SEQ ID NO: 2944412 - RNA, 19 nt, Human
gccagaggagagaggaccc

SEQ ID NO: 2944413 - RNA, 17 nt, Human
gccagaggagagaggac

SEQ ID NO: 2944414 - RNA, 15 nt, Human
gccagaggagagagg

SEQ ID NO: 2944415 - RNA, 13 nt, Human
gccagaggagaga

SEQ ID NO: 2944416 - RNA, 12 nt, Human
gccagaggagag

SEQ ID NO: 2944417 - RNA, 23 nt, Human
gccagagggagugacagaggcag

SEQ ID NO: 2944418 - RNA, 16 nt, Human
gccagaugcaccagcc

SEQ ID NO: 2944419 - RNA, 17 nt, Human
gccagaugcaccagccc

SEQ ID NO: 2944420 - RNA, 18 nt, Human
gccagaugcaccagcccu

SEQ ID NO: 2944421 - RNA, 10 nt, Human
gccagaggag

SEQ ID NO: 2944422 - RNA, 20 nt, Human
gccagagacacaagccuucg

SEQ ID NO: 2944423 - RNA, 19 nt, Human
gccagacuggcacaguuuu

SEQ ID NO: 2944424 - RNA, 16 nt, Human
gccagagacacaagcc

SEQ ID NO: 2944425 - RNA, 19 nt, Human
gccagagacacaagccuuc

SEQ ID NO: 2944426 - RNA, 17 nt, Human
gccagagacacaagccu

SEQ ID NO: 2944427 - RNA, 23 nt, Human
gccacuacauuugcuccauccuc

SEQ ID NO: 2944428 - RNA, 18 nt, Human
gccagacuggcacaguuu

SEQ ID NO: 2944429 - RNA, 15 nt, Human
gccagacuggcacag

SEQ ID NO: 2944430 - RNA, 18 nt, Human
gcauuugaggucuguucu

SEQ ID NO: 2944431 - RNA, 22 nt, Human
gcauuccccaggaggccagccu

SEQ ID NO: 2944432 - RNA, 21 nt, Human
gcauuccccaggaggccagcc

SEQ ID NO: 2944433 - RNA, 20 nt, Human
gcauuccccaggaggccagc

SEQ ID NO: 2944434 - RNA, 19 nt, Human
gcauuccccaggaggccag

SEQ ID NO: 2944435 - RNA, 18 nt, Human
gcauuccccaggaggcca

SEQ ID NO: 2944436 - RNA, 17 nt, Human
gcauuccccaggaggcc

SEQ ID NO: 2944437 - RNA, 16 nt, Human
gcauuccccaggaggc

SEQ ID NO: 2944438 - RNA, 15 nt, Human
gcauuccccaggagg

SEQ ID NO: 2944439 - RNA, 14 nt, Human
gcauuccccaggag

SEQ ID NO: 2944440 - RNA, 12 nt, Human
gcauuccccagg

SEQ ID NO: 2944441 - RNA, 19 nt, Human
gcauuaucuagauacugua

SEQ ID NO: 2944442 - RNA, 22 nt, Human
gcauuaucuagauacuguauca

SEQ ID NO: 2944443 - RNA, 24 nt, Human
gcauuaucuagauacuguaucaug

SEQ ID NO: 2944444 - RNA, 14 nt, Human
gcaugccuggaugg

SEQ ID NO: 2944445 - RNA, 13 nt, Human
gcauguuacauaa

SEQ ID NO: 2944446 - RNA, 20 nt, Human
gcaugaaguaauaugcacac

SEQ ID NO: 2944447 - RNA, 21 nt, Human
gcaugaaguaauaugcacaca

SEQ ID NO: 2944448 - RNA, 22 nt, Human
gcaugaaguaauaugcacacau

SEQ ID NO: 2944449 - RNA, 22 nt, Human
gcaugacacgaauauugcugau

SEQ ID NO: 2944450 - RNA, 21 nt, Human
gcaugacacgaauauugcuga

SEQ ID NO: 2944451 - RNA, 20 nt, Human
gcaugacacgaauauugcug

SEQ ID NO: 2944452 - RNA, 20 nt, Human
gcaucuagcaugucgucaaa

SEQ ID NO: 2944453 - RNA, 23 nt, Human
gcaucaggccaggcccucugccc

SEQ ID NO: 2944454 - RNA, 18 nt, Human
gcaucaggccaggcccuc

SEQ ID NO: 2944455 - RNA, 22 nt, Human
gcauacugccuuguuuaauggu

SEQ ID NO: 2944456 - RNA, 22 nt, Human
gcaucagcugcugaaacaacaa

SEQ ID NO: 2944457 - RNA, 23 nt, Human
gcaucagcugcugaaacaacaaa

SEQ ID NO: 2944458 - RNA, 12 nt, Human
gcaucaggccag

SEQ ID NO: 2944459 - RNA, 17 nt, Human
gcaggcagccaggccac

SEQ ID NO: 2944460 - RNA, 18 nt, Human
gcaggcagccaggccaca

SEQ ID NO: 2944461 - RNA, 16 nt, Human
gcagggucucacucug

SEQ ID NO: 2944462 - RNA, 19 nt, Human
gcaggguccuagaaauucc

SEQ ID NO: 2944463 - RNA, 22 nt, Human
gcaggggaggguagagcggaga

SEQ ID NO: 2944464 - RNA, 11 nt, Human
gcagugggagc

SEQ ID NO: 2944465 - RNA, 18 nt, Human
gcaguggugcgaucuggg

SEQ ID NO: 2944466 - RNA, 19 nt, Human
gcaguggugcgaucugggu

SEQ ID NO: 2944467 - RNA, 22 nt, Human
gcaguggugcgaucuggguuca

SEQ ID NO: 2944468 - RNA, 19 nt, Human
gcaguggugguuuucuguu

SEQ ID NO: 2944469 - RNA, 20 nt, Human
gcaguggugcgaucuggguu

SEQ ID NO: 2944470 - RNA, 21 nt, Human
gcaguggugcgaucuggguuc

SEQ ID NO: 2944471 - RNA, 19 nt, Human
gcaguucagagcugcccuc

SEQ ID NO: 2944472 - RNA, 20 nt, Human
gcaguucagagcugcccucu

SEQ ID NO: 2944473 - RNA, 22 nt, Human
gcaguucagagcugcccucucc

SEQ ID NO: 2944474 - RNA, 23 nt, Human
gcaguucagagcugcccucuccu

SEQ ID NO: 2944475 - RNA, 20 nt, Human
gcaguggugguuuucuguuc

SEQ ID NO: 2944476 - RNA, 21 nt, Human
gcaguggugguuuucuguucu

SEQ ID NO: 2944477 - RNA, 15 nt, Human
gcaguugaaaagacu

SEQ ID NO: 2944478 - RNA, 19 nt, Human
gcaguugaaaagacuccaa

SEQ ID NO: 2944479 - RNA, 16 nt, Human
gcaguugaaaagacuc

SEQ ID NO: 2944480 - RNA, 21 nt, Human
gcaguugaaaagacuccaaag

SEQ ID NO: 2944481 - RNA, 19 nt, Human
gcauacguacacauuuuau

SEQ ID NO: 2944482 - RNA, 13 nt, Human
gcauacuauuaaa

SEQ ID NO: 2944483 - RNA, 18 nt, Human
gcauacguacacauuuua

SEQ ID NO: 2944484 - RNA, 14 nt, Human
gcauacuauuaaac

SEQ ID NO: 2944485 - RNA, 17 nt, Human
gcauacuauuaaacaug

SEQ ID NO: 2944486 - RNA, 21 nt, Human
gcauacuauuaaacaugcugu

SEQ ID NO: 2944487 - RNA, 19 nt, Human
gcacuaaggugugcucuga

SEQ ID NO: 2944488 - RNA, 20 nt, Human
gcacuaaggugugcucugau

SEQ ID NO: 2944489 - RNA, 14 nt, Human
gcacgugugugcac

SEQ ID NO: 2944490 - RNA, 16 nt, Human
gcacgcacacugucug

SEQ ID NO: 2944491 - RNA, 15 nt, Human
gcacgcacacugucu

SEQ ID NO: 2944492 - RNA, 19 nt, Human
gcacccucaggcagguggg

SEQ ID NO: 2944493 - RNA, 16 nt, Human
gcacccucaggcaggu

SEQ ID NO: 2944494 - RNA, 20 nt, Human
gcacuauaauguaagcucua

SEQ ID NO: 2944495 - RNA, 14 nt, Human
gcacuauaauguaa

SEQ ID NO: 2944496 - RNA, 15 nt, Human
gcacuauaauguaag

SEQ ID NO: 2944497 - RNA, 15 nt, Human
gcacugcuuccagug

SEQ ID NO: 2944498 - RNA, 14 nt, Human
gcacugcuuccagu

SEQ ID NO: 2944499 - RNA, 13 nt, Human
gcacugcuuccag

SEQ ID NO: 2944500 - RNA, 12 nt, Human
gcacugcuucca

SEQ ID NO: 2944501 - RNA, 12 nt, Human
gcacugggcuug

SEQ ID NO: 2944502 - RNA, 19 nt, Human
gcacuguuuuauuuuaauu

SEQ ID NO: 2944503 - RNA, 19 nt, Human
gcacuguggguagacacac

SEQ ID NO: 2944504 - RNA, 13 nt, Human
gcaccagcagccu

SEQ ID NO: 2944505 - RNA, 15 nt, Human
gcaccaucucuccuc

SEQ ID NO: 2944506 - RNA, 14 nt, Human
gcaccaucucuccu

SEQ ID NO: 2944507 - RNA, 17 nt, Human
gcaccaucucuccuccu

SEQ ID NO: 2944508 - RNA, 23 nt, Human
gcacagcuucauuuccugugucu

SEQ ID NO: 2944509 - RNA, 21 nt, Human
gcacagcuucauuuccugugu

SEQ ID NO: 2944510 - RNA, 12 nt, Human
gcacagcaggcu

SEQ ID NO: 2944511 - RNA, 20 nt, Human
gauugugucucuugguccug

SEQ ID NO: 2944512 - RNA, 15 nt, Human
gcacagccucuuaga

SEQ ID NO: 2944513 - RNA, 17 nt, Human
gcacagcaggcugccag

SEQ ID NO: 2944514 - RNA, 23 nt, Human
gcacagcaggcugccagugccug

SEQ ID NO: 2944515 - RNA, 18 nt, Human
gcacagcaggcugccagu

SEQ ID NO: 2944516 - RNA, 22 nt, Human
gcacagcaggcugccagugccu

SEQ ID NO: 2944517 - RNA, 17 nt, Human
gcagccucacaguccuu

SEQ ID NO: 2944518 - RNA, 15 nt, Human
gcagccucacagucc

SEQ ID NO: 2944519 - RNA, 19 nt, Human
gcagccucacaguccuuac

SEQ ID NO: 2944520 - RNA, 19 nt, Human
gcagcagggagggcuucug

SEQ ID NO: 2944521 - RNA, 18 nt, Human
gcagcagggagggcuucu

SEQ ID NO: 2944522 - RNA, 16 nt, Human
gcagcucaccucuccc

SEQ ID NO: 2944523 - RNA, 14 nt, Human
gcagcucagagagg

SEQ ID NO: 2944524 - RNA, 21 nt, Human
gcagcucaccucucccuugga

SEQ ID NO: 2944525 - RNA, 20 nt, Human
gcagcucaccucucccuugg

SEQ ID NO: 2944526 - RNA, 17 nt, Human
gcagcucaccucucccu

SEQ ID NO: 2944527 - RNA, 19 nt, Human
gcagcucagagaggguggg

SEQ ID NO: 2944528 - RNA, 18 nt, Human
gcagcucagagagggugg

SEQ ID NO: 2944529 - RNA, 16 nt, Human
gcaggaagcugugaga

SEQ ID NO: 2944530 - RNA, 22 nt, Human
gcacuucgggaggucgaggcag

SEQ ID NO: 2944531 - RNA, 14 nt, Human
gcacuugcagacuc

SEQ ID NO: 2944532 - RNA, 16 nt, Human
gcacuugcagacucua

SEQ ID NO: 2944533 - RNA, 17 nt, Human
gcagacucuacagaggc

SEQ ID NO: 2944534 - RNA, 18 nt, Human
gcagacucuacagaggcc

SEQ ID NO: 2944535 - RNA, 19 nt, Human
gcagacucuacagaggcca

SEQ ID NO: 2944536 - RNA, 22 nt, Human
gcagacucuacagaggccaugg

SEQ ID NO: 2944537 - RNA, 19 nt, Human
gcagagaccaucccugaag

SEQ ID NO: 2944538 - RNA, 21 nt, Human
gcagagaccaucccugaaggc

SEQ ID NO: 2944539 - RNA, 20 nt, Human
gcagagaccaucccugaagg

SEQ ID NO: 2944540 - RNA, 22 nt, Human
gcagagaccaucccugaaggcc

SEQ ID NO: 2944541 - RNA, 18 nt, Human
gcagauggagaccccuug

SEQ ID NO: 2944542 - RNA, 17 nt, Human
gcagcagacacaugcca

SEQ ID NO: 2944543 - RNA, 13 nt, Human
gcagcagacacau

SEQ ID NO: 2944544 - RNA, 22 nt, Human
gcagaguaggggucugucuuuu

SEQ ID NO: 2944545 - RNA, 23 nt, Human
gcagagguugcagugagccgaga

SEQ ID NO: 2944546 - RNA, 18 nt, Human
gcagagguugcagugagc

SEQ ID NO: 2944547 - RNA, 18 nt, Human
gcuugcccuguuaaaaga

SEQ ID NO: 2944548 - RNA, 21 nt, Human
gcuucauccuccucagaucuu

SEQ ID NO: 2944549 - RNA, 19 nt, Human
gcuucaguggcagcugcuu

SEQ ID NO: 2944550 - RNA, 20 nt, Human
gcuucaguggcagcugcuuu

SEQ ID NO: 2944551 - RNA, 20 nt, Human
gcuuauacacuuacacuuua

SEQ ID NO: 2944552 - RNA, 21 nt, Human
gcuuagacccucaugcugcca

SEQ ID NO: 2944553 - RNA, 16 nt, Human
gcuuagacccucaugc

SEQ ID NO: 2944554 - RNA, 12 nt, Human
gcuuagaaauaa

SEQ ID NO: 2944555 - RNA, 19 nt, Human
gcuuagaaauaacagaaga

SEQ ID NO: 2944556 - RNA, 17 nt, Human
gcuucucacugccaugc

SEQ ID NO: 2944557 - RNA, 22 nt, Human
gcuucucacugccaugccagcu

SEQ ID NO: 2944558 - RNA, 18 nt, Human
gcuucauuuccugugucu

SEQ ID NO: 2944559 - RNA, 19 nt, Human
gcuucuguuuuauaauuuu

SEQ ID NO: 2944560 - RNA, 15 nt, Human
gcugugucucccuuc

SEQ ID NO: 2944561 - RNA, 22 nt, Human
gcuuacaugccuaccaauauuu

SEQ ID NO: 2944562 - RNA, 16 nt, Human
gcugucccuuuuccuu

SEQ ID NO: 2944563 - RNA, 23 nt, Human
gcugucccuuacgugaguccugg

SEQ ID NO: 2944564 - RNA, 17 nt, Human
gcugucagccauuccug

SEQ ID NO: 2944565 - RNA, 14 nt, Human
gcuggugucaccug

SEQ ID NO: 2944566 - RNA, 15 nt, Human
gcuggugucaccuga

SEQ ID NO: 2944567 - RNA, 21 nt, Human
gcugggcucccuucccaccuc

SEQ ID NO: 2944568 - RNA, 19 nt, Human
gcugggaugauuggagggg

SEQ ID NO: 2944569 - RNA, 15 nt, Human
gcuggccuggccccu

SEQ ID NO: 2944570 - RNA, 14 nt, Human
gcuggccuggcccc

SEQ ID NO: 2944571 - RNA, 12 nt, Human
gcuggccuggcc

SEQ ID NO: 2944572 - RNA, 13 nt, Human
gcuggccuggccc

SEQ ID NO: 2944573 - RNA, 21 nt, Human
gcugggcuucaguggcagcug

SEQ ID NO: 2944574 - RNA, 22 nt, Human
gcugggcuucaguggcagcugc

SEQ ID NO: 2944575 - RNA, 20 nt, Human
gcugggcuucaguggcagcu

SEQ ID NO: 2944576 - RNA, 14 nt, Human
gcugggggccucag

SEQ ID NO: 2944577 - RNA, 15 nt, Human
gcugggggccucagu

SEQ ID NO: 2944578 - RNA, 18 nt, Human
gcugggggccucagugcc

SEQ ID NO: 2944579 - RNA, 13 nt, Human
gcugggggccuca

SEQ ID NO: 2944580 - RNA, 23 nt, Human
gcuggucccagccagcaguucag

SEQ ID NO: 2944581 - RNA, 19 nt, Human
gcugauuuaaacacauuaa

SEQ ID NO: 2944582 - RNA, 22 nt, Human
gcugcaaaggguaucaggugcu

SEQ ID NO: 2944583 - RNA, 23 nt, Human
gcugcaaaggguaucaggugcug

SEQ ID NO: 2944584 - RNA, 15 nt, Human
gcugaucgcuucucc

SEQ ID NO: 2944585 - RNA, 21 nt, Human
gcugauuaaaccaaggcuaga

SEQ ID NO: 2944586 - RNA, 14 nt, Human
gcugcaguugccag

SEQ ID NO: 2944587 - RNA, 13 nt, Human
gcugcaguugcca

SEQ ID NO: 2944588 - RNA, 19 nt, Human
gcugcauuuaaaagauaca

SEQ ID NO: 2944589 - RNA, 17 nt, Human
gcugcaguugccaguca

SEQ ID NO: 2944590 - RNA, 17 nt, Human
gcugcauuuaaaagaua

SEQ ID NO: 2944591 - RNA, 18 nt, Human
gcugcauuuaaaagauac

SEQ ID NO: 2944592 - RNA, 20 nt, Human
gcugccaaugggagcucaug

SEQ ID NO: 2944593 - RNA, 12 nt, Human
gcugccaccugc

SEQ ID NO: 2944594 - RNA, 13 nt, Human
gcugccaccugcc

SEQ ID NO: 2944595 - RNA, 12 nt, Human
gcugcccucucc

SEQ ID NO: 2944596 - RNA, 20 nt, Human
gcucucaggccagcugcuug

SEQ ID NO: 2944597 - RNA, 21 nt, Human
gcucucaggccagcugcuugg

SEQ ID NO: 2944598 - RNA, 17 nt, Human
gcugacagacacaggcc

SEQ ID NO: 2944599 - RNA, 18 nt, Human
gcugacagacacaggccc

SEQ ID NO: 2944600 - RNA, 19 nt, Human
gcugacagacacaggcccg

SEQ ID NO: 2944601 - RNA, 14 nt, Human
gcugaccuugcuga

SEQ ID NO: 2944602 - RNA, 22 nt, Human
gcugacuguuuucucuugagag

SEQ ID NO: 2944603 - RNA, 22 nt, Human
gcugcuuuugucuaugggacuc

SEQ ID NO: 2944604 - RNA, 23 nt, Human
gcuggaaaaguauguuagugcaa

SEQ ID NO: 2944605 - RNA, 21 nt, Human
gcuggaaaaguauguuagugc

SEQ ID NO: 2944606 - RNA, 15 nt, Human
gcuggaccuugaacu

SEQ ID NO: 2944607 - RNA, 22 nt, Human
gcugcgguccacccaggagccc

SEQ ID NO: 2944608 - RNA, 21 nt, Human
gcugcgguccacccaggagcc

SEQ ID NO: 2944609 - RNA, 14 nt, Human
gcugcgguccaccc

SEQ ID NO: 2944610 - RNA, 15 nt, Human
gcugcgguccaccca

SEQ ID NO: 2944611 - RNA, 20 nt, Human
gcugccuguucagcuccagc

SEQ ID NO: 2944612 - RNA, 22 nt, Human
gcugccuguucagcuccagcuc

SEQ ID NO: 2944613 - RNA, 18 nt, Human
gcugccuguucagcucca

SEQ ID NO: 2944614 - RNA, 19 nt, Human
gcugccuguucagcuccag

SEQ ID NO: 2944615 - RNA, 24 nt, Human
gcugcccugcccaccuggccucug

SEQ ID NO: 2944616 - RNA, 23 nt, Human
gcugcccugcccaccuggccucu

SEQ ID NO: 2944617 - RNA, 22 nt, Human
gcugcccugcccaccuggccuc

SEQ ID NO: 2944618 - RNA, 21 nt, Human
gcugcccugcccaccuggccu

SEQ ID NO: 2944619 - RNA, 20 nt, Human
gcugcccugcccaccuggcc

SEQ ID NO: 2944620 - RNA, 18 nt, Human
gcugcccugcccaccugg

SEQ ID NO: 2944621 - RNA, 16 nt, Human
gcugcccugcccaccu

SEQ ID NO: 2944622 - RNA, 23 nt, Human
gcugcccucuccugggcagcugc

SEQ ID NO: 2944623 - RNA, 12 nt, Human
gcugcccugccc

SEQ ID NO: 2944624 - RNA, 14 nt, Human
gcugcccugcccac

SEQ ID NO: 2944625 - RNA, 13 nt, Human
gcugcccugccca

SEQ ID NO: 2944626 - RNA, 13 nt, Human
gcugcccucuccu

SEQ ID NO: 2944627 - RNA, 14 nt, Human
gcugcccucuccug

SEQ ID NO: 2944628 - RNA, 15 nt, Human
gcugcccucuccugg

SEQ ID NO: 2944629 - RNA, 16 nt, Human
gcugcccucuccuggg

SEQ ID NO: 2944630 - RNA, 17 nt, Human
gcugcccucuccugggc

SEQ ID NO: 2944631 - RNA, 18 nt, Human
gcugcccucuccugggca

SEQ ID NO: 2944632 - RNA, 20 nt, Human
gcugcccucuccugggcagc

SEQ ID NO: 2944633 - RNA, 22 nt, Human
gcugcccucuccugggcagcug

SEQ ID NO: 2944634 - RNA, 15 nt, Human
gcggggacagcuccu

SEQ ID NO: 2944635 - RNA, 17 nt, Human
gcggggacagcuccuuc

SEQ ID NO: 2944636 - RNA, 19 nt, Human
gcggugagaggggaacaga

SEQ ID NO: 2944637 - RNA, 13 nt, Human
gcgguccacccag

SEQ ID NO: 2944638 - RNA, 14 nt, Human
gcgguccacccagg

SEQ ID NO: 2944639 - RNA, 21 nt, Human
gcgcugccccuggcagccccu

SEQ ID NO: 2944640 - RNA, 18 nt, Human
gcgcugccccuggcagcc

SEQ ID NO: 2944641 - RNA, 16 nt, Human
gcggagaaaggaaggg

SEQ ID NO: 2944642 - RNA, 19 nt, Human
gcggagacggagucccacc

SEQ ID NO: 2944643 - RNA, 14 nt, Human
gcggggacagcucc

SEQ ID NO: 2944644 - RNA, 21 nt, Human
gcgccuuaaggauguucuagc

SEQ ID NO: 2944645 - RNA, 23 nt, Human
gcgcccaguuggguggaugccug

SEQ ID NO: 2944646 - RNA, 21 nt, Human
gcgacaaugcaaaccaucauu

SEQ ID NO: 2944647 - RNA, 20 nt, Human
gcgacaaugcaaaccaucau

SEQ ID NO: 2944648 - RNA, 13 nt, Human
gcgacaaugcaaa

SEQ ID NO: 2944649 - RNA, 12 nt, Human
gcgacaaugcaa

SEQ ID NO: 2944650 - RNA, 15 nt, Human
gccuuacacaauggu

SEQ ID NO: 2944651 - RNA, 16 nt, Human
gccuuacacaaugguu

SEQ ID NO: 2944652 - RNA, 15 nt, Human
gccuuguuuaauggu

SEQ ID NO: 2944653 - RNA, 23 nt, Human
gccuuguuuaaugguaguuuuac

SEQ ID NO: 2944654 - RNA, 18 nt, Human
gccuuggggcugaugcag

SEQ ID NO: 2944655 - RNA, 14 nt, Human
gccuggccccucag

SEQ ID NO: 2944656 - RNA, 13 nt, Human
gccuggccccuca

SEQ ID NO: 2944657 - RNA, 20 nt, Human
gccuggccagaugcaccagc

SEQ ID NO: 2944658 - RNA, 16 nt, Human
gccuggccagaugcac

SEQ ID NO: 2944659 - RNA, 21 nt, Human
gccuggccagaugcaccagcc

SEQ ID NO: 2944660 - RNA, 20 nt, Human
gccuguaauccuagcacuuu

SEQ ID NO: 2944661 - RNA, 15 nt, Human
gccuguaauccuagc

SEQ ID NO: 2944662 - RNA, 18 nt, Human
gccuggauggggcugcac

SEQ ID NO: 2944663 - RNA, 16 nt, Human
gccuggauggggcugc

SEQ ID NO: 2944664 - RNA, 20 nt, Human
gccuggauggggcugcaccg

SEQ ID NO: 2944665 - RNA, 12 nt, Human
gccugagcuggg

SEQ ID NO: 2944666 - RNA, 19 nt, Human
gcccaguuggguggaugcc

SEQ ID NO: 2944667 - RNA, 21 nt, Human
gcccaguuggguggaugccug

SEQ ID NO: 2944668 - RNA, 15 nt, Human
gccugaagucacaca

SEQ ID NO: 2944669 - RNA, 16 nt, Human
gccugaagucacacag

SEQ ID NO: 2944670 - RNA, 17 nt, Human
gccugaagucacacagu

SEQ ID NO: 2944671 - RNA, 18 nt, Human
gccugaagucacacagug

SEQ ID NO: 2944672 - RNA, 17 nt, Human
gccugagcgacagugag

SEQ ID NO: 2944673 - RNA, 20 nt, Human
gccugagcgacagugagacu

SEQ ID NO: 2944674 - RNA, 16 nt, Human
gcucagcggggacagc

SEQ ID NO: 2944675 - RNA, 17 nt, Human
gcucagcggggacagcu

SEQ ID NO: 2944676 - RNA, 18 nt, Human
gcucagcggggacagcuc

SEQ ID NO: 2944677 - RNA, 23 nt, Human
gcucagcggggacagcuccuucu

SEQ ID NO: 2944678 - RNA, 18 nt, Human
gcucaccucucccuugga

SEQ ID NO: 2944679 - RNA, 17 nt, Human
gcucaccucucccuugg

SEQ ID NO: 2944680 - RNA, 16 nt, Human
gcucaccucucccuug

SEQ ID NO: 2944681 - RNA, 14 nt, Human
gcucaccucucccu

SEQ ID NO: 2944682 - RNA, 16 nt, Human
gcucacauaucuguca

SEQ ID NO: 2944683 - RNA, 12 nt, Human
gcucaccagccc

SEQ ID NO: 2944684 - RNA, 13 nt, Human
gcucaccagcccc

SEQ ID NO: 2944685 - RNA, 14 nt, Human
gcucaccagcccca

SEQ ID NO: 2944686 - RNA, 15 nt, Human
gcucaccagccccag

SEQ ID NO: 2944687 - RNA, 14 nt, Human
gcuaucucccccag

SEQ ID NO: 2944688 - RNA, 18 nt, Human
gcucaaguccucuuuucu

SEQ ID NO: 2944689 - RNA, 13 nt, Human
gcuaucuccccca

SEQ ID NO: 2944690 - RNA, 23 nt, Human
gcucaauagauugcucaaaucag

SEQ ID NO: 2944691 - RNA, 19 nt, Human
gcucaaguccucuuuucug

SEQ ID NO: 2944692 - RNA, 22 nt, Human
gcucaaguccucuuuucugaga

SEQ ID NO: 2944693 - RNA, 21 nt, Human
gcuaguugggcuuccucauag

SEQ ID NO: 2944694 - RNA, 14 nt, Human
gcuagauguaugua

SEQ ID NO: 2944695 - RNA, 13 nt, Human
gcuagauguaugu

SEQ ID NO: 2944696 - RNA, 22 nt, Human
gcggugcuaucucccccagccc

SEQ ID NO: 2944697 - RNA, 19 nt, Human
gcggugcuaucucccccag

SEQ ID NO: 2944698 - RNA, 19 nt, Human
gcuauaggugcuacaaaaa

SEQ ID NO: 2944699 - RNA, 21 nt, Human
gcuauaggugcuacaaaaaca

SEQ ID NO: 2944700 - RNA, 12 nt, Human
gcuccugugucu

SEQ ID NO: 2944701 - RNA, 13 nt, Human
gcuccugugucuu

SEQ ID NO: 2944702 - RNA, 13 nt, Human
gcuccuucugucc

SEQ ID NO: 2944703 - RNA, 17 nt, Human
gcuccuuuagcgcccag

SEQ ID NO: 2944704 - RNA, 17 nt, Human
gcucgagcaugccugga

SEQ ID NO: 2944705 - RNA, 21 nt, Human
gcucgagcaugccuggauggg

SEQ ID NO: 2944706 - RNA, 19 nt, Human
gcucgagcaugccuggaug

SEQ ID NO: 2944707 - RNA, 21 nt, Human
gcuccuaggacccgucuccag

SEQ ID NO: 2944708 - RNA, 22 nt, Human
gcuccuaggacccgucuccagc

SEQ ID NO: 2944709 - RNA, 24 nt, Human
gcuccgcuuucuacccagcgagcc

SEQ ID NO: 2944710 - RNA, 20 nt, Human
gcuccagcuguucagcuggu

SEQ ID NO: 2944711 - RNA, 21 nt, Human
gcuccagcuguucagcugguu

SEQ ID NO: 2944712 - RNA, 11 nt, Human
gcuccaggagc

SEQ ID NO: 2944713 - RNA, 14 nt, Human
gcuccaggagcagc

SEQ ID NO: 2944714 - RNA, 12 nt, Human
gcuccaggagca

SEQ ID NO: 2944715 - RNA, 12 nt, Human
gcuccaggcucc

SEQ ID NO: 2944716 - RNA, 24 nt, Human
gcuccaggcuccuuuagcgcccag

SEQ ID NO: 2944717 - RNA, 18 nt, Human
gcuccaggagcagccaca

SEQ ID NO: 2944718 - RNA, 17 nt, Human
gcuccaggagcagccac

SEQ ID NO: 2944719 - RNA, 16 nt, Human
gcuccaggagcagcca

SEQ ID NO: 2944720 - RNA, 15 nt, Human
gcuccaggagcagcc

SEQ ID NO: 2944721 - RNA, 20 nt, Human
gcucccuucccaccucucuc

SEQ ID NO: 2944722 - RNA, 18 nt, Human
gcuccgcuuucuacccag

SEQ ID NO: 2944723 - RNA, 21 nt, Human
gcuccgcuuucuacccagcga

SEQ ID NO: 2944724 - RNA, 22 nt, Human
gcuccgcuuucuacccagcgag

SEQ ID NO: 2944725 - RNA, 23 nt, Human
gcuccgcuuucuacccagcgagc

SEQ ID NO: 2944726 - RNA, 20 nt, Human
gcuccauuuuuagugaaaua

SEQ ID NO: 2944727 - RNA, 15 nt, Human
ggagccuccugcccu

SEQ ID NO: 2944728 - RNA, 14 nt, Human
ggagcuagaauuug

SEQ ID NO: 2944729 - RNA, 16 nt, Human
ggagcacacuggcuca

SEQ ID NO: 2944730 - RNA, 14 nt, Human
ggagccuccugccc

SEQ ID NO: 2944731 - RNA, 23 nt, Human
ggagcccugucuccucucucugu

SEQ ID NO: 2944732 - RNA, 18 nt, Human
ggagcccugucuccucuc

SEQ ID NO: 2944733 - RNA, 17 nt, Human
ggagggagggcuccaga

SEQ ID NO: 2944734 - RNA, 16 nt, Human
ggagggagggcuccag

SEQ ID NO: 2944735 - RNA, 13 nt, Human
ggagggagggcuc

SEQ ID NO: 2944736 - RNA, 18 nt, Human
ggaggauguucugggaca

SEQ ID NO: 2944737 - RNA, 21 nt, Human
ggaggauguucugggacacag

SEQ ID NO: 2944738 - RNA, 16 nt, Human
ggaggacgcucucugg

SEQ ID NO: 2944739 - RNA, 21 nt, Human
ggagucccaccuuggcugcag

SEQ ID NO: 2944740 - RNA, 22 nt, Human
ggagucccaccuuggcugcagg

SEQ ID NO: 2944741 - RNA, 19 nt, Human
ggaggggagcaugggaagu

SEQ ID NO: 2944742 - RNA, 18 nt, Human
ggaccuugaacuggguac

SEQ ID NO: 2944743 - RNA, 17 nt, Human
ggacugaauuaugaaac

SEQ ID NO: 2944744 - RNA, 19 nt, Human
ggacugaauuaugaaacuu

SEQ ID NO: 2944745 - RNA, 19 nt, Human
ggacgcucucuggccuucg

SEQ ID NO: 2944746 - RNA, 15 nt, Human
ggacgcucucuggcc

SEQ ID NO: 2944747 - RNA, 16 nt, Human
ggacgcucucuggccu

SEQ ID NO: 2944748 - RNA, 20 nt, Human
ggagaagucuucuauuuauu

SEQ ID NO: 2944749 - RNA, 19 nt, Human
ggagaagucuucuauuuau

SEQ ID NO: 2944750 - RNA, 23 nt, Human
ggagaagagcuguucacagccag

SEQ ID NO: 2944751 - RNA, 20 nt, Human
ggacugagggggccuggaug

SEQ ID NO: 2944752 - RNA, 15 nt, Human
ggagaagagcuguuc

SEQ ID NO: 2944753 - RNA, 11 nt, Human
ggagaagaacu

SEQ ID NO: 2944754 - RNA, 14 nt, Human
ggagaagaacugaa

SEQ ID NO: 2944755 - RNA, 22 nt, Human
ggacacucaaaagcugggcagg

SEQ ID NO: 2944756 - RNA, 16 nt, Human
ggacagaggggguggc

SEQ ID NO: 2944757 - RNA, 22 nt, Human
ggacagccacggccaggccaga

SEQ ID NO: 2944758 - RNA, 20 nt, Human
ggacagaggggguggccucc

SEQ ID NO: 2944759 - RNA, 11 nt, Human
ggacagcuccu

SEQ ID NO: 2944760 - RNA, 15 nt, Human
ggacagcuccuucug

SEQ ID NO: 2944761 - RNA, 16 nt, Human
ggacagcuccuucugu

SEQ ID NO: 2944762 - RNA, 16 nt, Human
ggacauuugcucaugg

SEQ ID NO: 2944763 - RNA, 17 nt, Human
ggacauuugcucaugga

SEQ ID NO: 2944764 - RNA, 20 nt, Human
ggacauuugcucauggaauu

SEQ ID NO: 2944765 - RNA, 14 nt, Human
ggaccagagcugcc

SEQ ID NO: 2944766 - RNA, 19 nt, Human
ggaccagagcugccaccug

SEQ ID NO: 2944767 - RNA, 15 nt, Human
ggacauuuuaugucu

SEQ ID NO: 2944768 - RNA, 20 nt, Human
ggccaccgccuugcccagcc

SEQ ID NO: 2944769 - RNA, 20 nt, Human
ggcauguucucugaggacac

SEQ ID NO: 2944770 - RNA, 22 nt, Human
ggccacagaaaauucuucucca

SEQ ID NO: 2944771 - RNA, 21 nt, Human
ggccagaaaccuuccugcuga

SEQ ID NO: 2944772 - RNA, 20 nt, Human
ggccacugugaagagaacca

SEQ ID NO: 2944773 - RNA, 11 nt, Human
ggccaggagcc

SEQ ID NO: 2944774 - RNA, 14 nt, Human
ggccaggcccucug

SEQ ID NO: 2944775 - RNA, 13 nt, Human
ggccaggagccuc

SEQ ID NO: 2944776 - RNA, 17 nt, Human
ggccaggcccucugccc

SEQ ID NO: 2944777 - RNA, 16 nt, Human
ggccaggcccucugcc

SEQ ID NO: 2944778 - RNA, 15 nt, Human
ggccaggcccucugc

SEQ ID NO: 2944779 - RNA, 12 nt, Human
ggcccagagagg

SEQ ID NO: 2944780 - RNA, 23 nt, Human
ggcaugugaugagaggaaaucac

SEQ ID NO: 2944781 - RNA, 18 nt, Human
ggcaugugaugagaggaa

SEQ ID NO: 2944782 - RNA, 22 nt, Human
ggcaugacacgaauauugcuga

SEQ ID NO: 2944783 - RNA, 23 nt, Human
ggcagugcuuggcccaggaguuu

SEQ ID NO: 2944784 - RNA, 22 nt, Human
ggcagugcuuggcccaggaguu

SEQ ID NO: 2944785 - RNA, 21 nt, Human
ggcagugcuuggcccaggagu

SEQ ID NO: 2944786 - RNA, 20 nt, Human
ggcagugcuuggcccaggag

SEQ ID NO: 2944787 - RNA, 19 nt, Human
ggcagugcuuggcccagga

SEQ ID NO: 2944788 - RNA, 18 nt, Human
ggcagugcuuggcccagg

SEQ ID NO: 2944789 - RNA, 17 nt, Human
ggcagugcuuggcccag

SEQ ID NO: 2944790 - RNA, 17 nt, Human
ggcagggucucacucug

SEQ ID NO: 2944791 - RNA, 18 nt, Human
ggcagggucucacucugu

SEQ ID NO: 2944792 - RNA, 17 nt, Human
ggcagguuggugggggc

SEQ ID NO: 2944793 - RNA, 23 nt, Human
ggcagcugcgguccacccaggag

SEQ ID NO: 2944794 - RNA, 24 nt, Human
ggcagcugcgguccacccaggagc

SEQ ID NO: 2944795 - RNA, 12 nt, Human
ggcaggguccua

SEQ ID NO: 2944796 - RNA, 21 nt, Human
ggcagcugcgguccacccagg

SEQ ID NO: 2944797 - RNA, 12 nt, Human
ggcagcugccuc

SEQ ID NO: 2944798 - RNA, 13 nt, Human
ggcagcugccucc

SEQ ID NO: 2944799 - RNA, 11 nt, Human
ggcagcugccu

SEQ ID NO: 2944800 - RNA, 17 nt, Human
ggcagaguugaagacag

SEQ ID NO: 2944801 - RNA, 21 nt, Human
ggcagaguugaagacagagcu

SEQ ID NO: 2944802 - RNA, 19 nt, Human
ggcagaguugaagacagag

SEQ ID NO: 2944803 - RNA, 15 nt, Human
ggaugccauccaagu

SEQ ID NO: 2944804 - RNA, 18 nt, Human
ggaugcccaaagaugcag

SEQ ID NO: 2944805 - RNA, 19 nt, Human
ggaugcccaaagaugcagc

SEQ ID NO: 2944806 - RNA, 13 nt, Human
ggaugccuggugg

SEQ ID NO: 2944807 - RNA, 17 nt, Human
ggaugccugguggcagc

SEQ ID NO: 2944808 - RNA, 16 nt, Human
ggaugaucuaggaaga

SEQ ID NO: 2944809 - RNA, 22 nt, Human
ggaugaucuaggaagacuuugg

SEQ ID NO: 2944810 - RNA, 18 nt, Human
ggaugaucuaggaagacu

SEQ ID NO: 2944811 - RNA, 23 nt, Human
ggagucccaccuuggcugcaggg

SEQ ID NO: 2944812 - RNA, 18 nt, Human
ggaugccugguggcagcu

SEQ ID NO: 2944813 - RNA, 19 nt, Human
ggaugccugguggcagcug

SEQ ID NO: 2944814 - RNA, 20 nt, Human
ggaugccugguggcagcugc

SEQ ID NO: 2944815 - RNA, 21 nt, Human
ggaugccugguggcagcugcg

SEQ ID NO: 2944816 - RNA, 17 nt, Human
ggauuagggagagaaga

SEQ ID NO: 2944817 - RNA, 18 nt, Human
ggcacccggccccugcug

SEQ ID NO: 2944818 - RNA, 19 nt, Human
ggcacccggccccugcugg

SEQ ID NO: 2944819 - RNA, 20 nt, Human
ggcacccggccccugcuggu

SEQ ID NO: 2944820 - RNA, 17 nt, Human
ggcacccggccccugcu

SEQ ID NO: 2944821 - RNA, 18 nt, Human
ggcacuauuuauuuacaa

SEQ ID NO: 2944822 - RNA, 19 nt, Human
ggcacuauuuauuuacaaa

SEQ ID NO: 2944823 - RNA, 18 nt, Human
ggcacucagaagacacug

SEQ ID NO: 2944824 - RNA, 19 nt, Human
ggcacucagaagacacuga

SEQ ID NO: 2944825 - RNA, 22 nt, Human
ggcagagcagagaccaucccug

SEQ ID NO: 2944826 - RNA, 21 nt, Human
ggcagagguugcagugagccg

SEQ ID NO: 2944827 - RNA, 18 nt, Human
ggcaagcaccuccugccu

SEQ ID NO: 2944828 - RNA, 19 nt, Human
ggcaagcaccuccugccuc

SEQ ID NO: 2944829 - RNA, 17 nt, Human
ggcaccagcagccugga

SEQ ID NO: 2944830 - RNA, 17 nt, Human
ggcaagcaccuccugcc

SEQ ID NO: 2944831 - RNA, 19 nt, Human
ggauugaaggaugcugucu

SEQ ID NO: 2944832 - RNA, 21 nt, Human
ggauucuuccucccucccucu

SEQ ID NO: 2944833 - RNA, 16 nt, Human
ggauucuuccucccuc

SEQ ID NO: 2944834 - RNA, 16 nt, Human
ggcugggggaagaagc

SEQ ID NO: 2944835 - RNA, 14 nt, Human
ggcugggggccuca

SEQ ID NO: 2944836 - RNA, 11 nt, Human
ggcugggcuuc

SEQ ID NO: 2944837 - RNA, 21 nt, Human
ggcugggcuucaguggcagcu

SEQ ID NO: 2944838 - RNA, 22 nt, Human
ggcugggcuucaguggcagcug

SEQ ID NO: 2944839 - RNA, 18 nt, Human
ggcugggcuucaguggca

SEQ ID NO: 2944840 - RNA, 23 nt, Human
ggcuggaguuauugaagcagagu

SEQ ID NO: 2944841 - RNA, 15 nt, Human
ggcuggaguuauuga

SEQ ID NO: 2944842 - RNA, 18 nt, Human
ggcugggcucccuuccca

SEQ ID NO: 2944843 - RNA, 21 nt, Human
ggcugggcucccuucccaccu

SEQ ID NO: 2944844 - RNA, 20 nt, Human
ggcugggcucccuucccacc

SEQ ID NO: 2944845 - RNA, 20 nt, Human
ggcugaggcaggagacuggc

SEQ ID NO: 2944846 - RNA, 19 nt, Human
ggcugcuucaaggauccug

SEQ ID NO: 2944847 - RNA, 15 nt, Human
ggcugcuucaaggau

SEQ ID NO: 2944848 - RNA, 21 nt, Human
ggcugcuucaaggauccugag

SEQ ID NO: 2944849 - RNA, 20 nt, Human
ggcugcuucaaggauccuga

SEQ ID NO: 2944850 - RNA, 18 nt, Human
ggcuggagcuagaauuug

SEQ ID NO: 2944851 - RNA, 14 nt, Human
ggcuguuggcuggg

SEQ ID NO: 2944852 - RNA, 15 nt, Human
ggcuguuggcugggg

SEQ ID NO: 2944853 - RNA, 16 nt, Human
ggcuguuggcuggggg

SEQ ID NO: 2944854 - RNA, 20 nt, Human
ggcuguuggcugggggccuc

SEQ ID NO: 2944855 - RNA, 20 nt, Human
ggcuuagacccucaugcugc

SEQ ID NO: 2944856 - RNA, 18 nt, Human
ggcuuggggaccagagcu

SEQ ID NO: 2944857 - RNA, 17 nt, Human
ggcuuggggaccagagc

SEQ ID NO: 2944858 - RNA, 21 nt, Human
ggcuucacggaagagccuugc

SEQ ID NO: 2944859 - RNA, 23 nt, Human
ggcuuagacccucaugcugccaa

SEQ ID NO: 2944860 - RNA, 22 nt, Human
ggcuuagacccucaugcugcca

SEQ ID NO: 2944861 - RNA, 14 nt, Human
ggcuuagucacuga

SEQ ID NO: 2944862 - RNA, 15 nt, Human
ggcuuagucacugag

SEQ ID NO: 2944863 - RNA, 20 nt, Human
ggcuucacggaagagccuug

SEQ ID NO: 2944864 - RNA, 13 nt, Human
gggagcugccugu

SEQ ID NO: 2944865 - RNA, 21 nt, Human
gggagcugccuguucagcucc

SEQ ID NO: 2944866 - RNA, 22 nt, Human
gggagcugccuguucagcucca

SEQ ID NO: 2944867 - RNA, 20 nt, Human
gggaggugggauccuccagg

SEQ ID NO: 2944868 - RNA, 23 nt, Human
gggaggauugcuugagcucagga

SEQ ID NO: 2944869 - RNA, 21 nt, Human
gggagugaguugauagcacag

SEQ ID NO: 2944870 - RNA, 17 nt, Human
gggagugacagaggcag

SEQ ID NO: 2944871 - RNA, 22 nt, Human
gggaggauguucugggacacag

SEQ ID NO: 2944872 - RNA, 21 nt, Human
gggaggauugcuugagcucag

SEQ ID NO: 2944873 - RNA, 23 nt, Human
gggaggaucucuugagccuggga

SEQ ID NO: 2944874 - RNA, 17 nt, Human
gggaggacgcucucugg

SEQ ID NO: 2944875 - RNA, 20 nt, Human
gggaggacgcucucuggccu

SEQ ID NO: 2944876 - RNA, 19 nt, Human
gggaauguuugccucugcc

SEQ ID NO: 2944877 - RNA, 21 nt, Human
gggaauguuugccucugccuc

SEQ ID NO: 2944878 - RNA, 14 nt, Human
gggacacccuguga

SEQ ID NO: 2944879 - RNA, 17 nt, Human
gggacucaaugcacuga

SEQ ID NO: 2944880 - RNA, 19 nt, Human
gggacucaaugcacugaca

SEQ ID NO: 2944881 - RNA, 23 nt, Human
gggacucaaugcacugacauugu

SEQ ID NO: 2944882 - RNA, 21 nt, Human
gggacugaggggaggggagca

SEQ ID NO: 2944883 - RNA, 23 nt, Human
ggccugggggcugggcagaggaa

SEQ ID NO: 2944884 - RNA, 16 nt, Human
ggccuggccugagcug

SEQ ID NO: 2944885 - RNA, 15 nt, Human
ggccuggccugagcu

SEQ ID NO: 2944886 - RNA, 24 nt, Human
ggcgcagcauauucaggaagcuca

SEQ ID NO: 2944887 - RNA, 23 nt, Human
ggcgcagcauauucaggaagcuc

SEQ ID NO: 2944888 - RNA, 19 nt, Human
ggccucugcggagcacacu

SEQ ID NO: 2944889 - RNA, 22 nt, Human
ggccucugcacuccccugcugg

SEQ ID NO: 2944890 - RNA, 19 nt, Human
ggccucugcacuccccugc

SEQ ID NO: 2944891 - RNA, 18 nt, Human
ggccucugcacuccccug

SEQ ID NO: 2944892 - RNA, 13 nt, Human
ggccuggccccuc

SEQ ID NO: 2944893 - RNA, 14 nt, Human
ggccuggccugagc

SEQ ID NO: 2944894 - RNA, 13 nt, Human
ggccuggccugag

SEQ ID NO: 2944895 - RNA, 10 nt, Human
ggccuggccu

SEQ ID NO: 2944896 - RNA, 23 nt, Human
ggccuggccccucagggucccug

SEQ ID NO: 2944897 - RNA, 18 nt, Human
ggccuggccccucagggu

SEQ ID NO: 2944898 - RNA, 17 nt, Human
ggccuggccccucaggg

SEQ ID NO: 2944899 - RNA, 15 nt, Human
ggccuggccccucag

SEQ ID NO: 2944900 - RNA, 14 nt, Human
ggccuggccccuca

SEQ ID NO: 2944901 - RNA, 20 nt, Human
ggcccagagggccugcaagg

SEQ ID NO: 2944902 - RNA, 19 nt, Human
ggcccagagggccugcaag

SEQ ID NO: 2944903 - RNA, 17 nt, Human
ggcccagagggccugca

SEQ ID NO: 2944904 - RNA, 14 nt, Human
ggcccagagggccu

SEQ ID NO: 2944905 - RNA, 14 nt, Human
ggccucaagugauu

SEQ ID NO: 2944906 - RNA, 22 nt, Human
ggccucaagugauucuccugcc

SEQ ID NO: 2944907 - RNA, 20 nt, Human
ggccuagcauacguacacau

SEQ ID NO: 2944908 - RNA, 22 nt, Human
ggccuagcauacguacacauuu

SEQ ID NO: 2944909 - RNA, 20 nt, Human
ggccucgguguggagaagcg

SEQ ID NO: 2944910 - RNA, 14 nt, Human
ggccuccugugugu

SEQ ID NO: 2944911 - RNA, 12 nt, Human
ggcucugcccuu

SEQ ID NO: 2944912 - RNA, 15 nt, Human
ggcucugccucccau

SEQ ID NO: 2944913 - RNA, 13 nt, Human
ggcucugccuccc

SEQ ID NO: 2944914 - RNA, 15 nt, Human
ggcucugcccuuggu

SEQ ID NO: 2944915 - RNA, 14 nt, Human
ggcucugcccuugg

SEQ ID NO: 2944916 - RNA, 16 nt, Human
ggcucugccucccauc

SEQ ID NO: 2944917 - RNA, 14 nt, Human
ggcuccaggcuccu

SEQ ID NO: 2944918 - RNA, 16 nt, Human
ggcucucaggccagcu

SEQ ID NO: 2944919 - RNA, 15 nt, Human
ggcucucaggccagc

SEQ ID NO: 2944920 - RNA, 20 nt, Human
ggcucucaggccagcugcuu

SEQ ID NO: 2944921 - RNA, 19 nt, Human
ggcucucaggccagcugcu

SEQ ID NO: 2944922 - RNA, 18 nt, Human
ggcucucaggccagcugc

SEQ ID NO: 2944923 - RNA, 17 nt, Human
ggcucucaggccagcug

SEQ ID NO: 2944924 - RNA, 14 nt, Human
ggcucucaggccag

SEQ ID NO: 2944925 - RNA, 15 nt, Human
ggcgcgguggcucac

SEQ ID NO: 2944926 - RNA, 17 nt, Human
ggcgcugccccuggcag

SEQ ID NO: 2944927 - RNA, 20 nt, Human
ggccucugcggagcacacug

SEQ ID NO: 2944928 - RNA, 11 nt, Human
ggcgcugcccc

SEQ ID NO: 2944929 - RNA, 20 nt, Human
ggcggguggaucacgagguc

SEQ ID NO: 2944930 - RNA, 23 nt, Human
ggcuauaggugcuacaaaaacac

SEQ ID NO: 2944931 - RNA, 20 nt, Human
ggcuaguaucaaaagaaaga

SEQ ID NO: 2944932 - RNA, 12 nt, Human
ggcuccaggcuc

SEQ ID NO: 2944933 - RNA, 13 nt, Human
ggcuccaggcucc

SEQ ID NO: 2944934 - RNA, 17 nt, Human
ggcuccaggagcagcca

SEQ ID NO: 2944935 - RNA, 16 nt, Human
ggcuccaggagcagcc

SEQ ID NO: 2944936 - RNA, 14 nt, Human
ggcuccaggagcag

SEQ ID NO: 2944937 - RNA, 10 nt, Human
ggcuccagac

SEQ ID NO: 2944938 - RNA, 13 nt, Human
ggcucacccaguc

SEQ ID NO: 2944939 - RNA, 12 nt, Human
ggcuaugcauuu

SEQ ID NO: 2944940 - RNA, 13 nt, Human
ggcuaugcauuug

SEQ ID NO: 2944941 - RNA, 16 nt, Human
ggcucacccaguccug

SEQ ID NO: 2944942 - RNA, 16 nt, Human
ggcuccacuuggucug

SEQ ID NO: 2944943 - RNA, 9 nt, Human
ggcuccaga

SEQ ID NO: 2944944 - RNA, 10 nt, Human
ucagaaaugu

SEQ ID NO: 2944945 - RNA, 20 nt, Human
ucacuuguuuuauuuaaccu

SEQ ID NO: 2944946 - RNA, 23 nt, Human
ucagaauucucuaguuugauuaa

SEQ ID NO: 2944947 - RNA, 15 nt, Human
ucagaaauguguuau

SEQ ID NO: 2944948 - RNA, 13 nt, Human
ucagacacagauu

SEQ ID NO: 2944949 - RNA, 16 nt, Human
ucagaauucucuaguu

SEQ ID NO: 2944950 - RNA, 13 nt, Human
ucagacagcugcc

SEQ ID NO: 2944951 - RNA, 14 nt, Human
ucagacagcugccu

SEQ ID NO: 2944952 - RNA, 22 nt, Human
ucagagcugcccucuccugggc

SEQ ID NO: 2944953 - RNA, 18 nt, Human
ucagagcugcccucuccu

SEQ ID NO: 2944954 - RNA, 19 nt, Human
ucagagcugcccucuccug

SEQ ID NO: 2944955 - RNA, 20 nt, Human
ucagagcugcccucuccugg

SEQ ID NO: 2944956 - RNA, 21 nt, Human
ucagagcugcccucuccuggg

SEQ ID NO: 2944957 - RNA, 13 nt, Human
ucaccagccccag

SEQ ID NO: 2944958 - RNA, 22 nt, Human
ucaccccggccaccugcggugc

SEQ ID NO: 2944959 - RNA, 17 nt, Human
ucacucuuauugcccac

SEQ ID NO: 2944960 - RNA, 22 nt, Human
ucacucugucgcccagucugga

SEQ ID NO: 2944961 - RNA, 18 nt, Human
ucacugccaugccagcuu

SEQ ID NO: 2944962 - RNA, 20 nt, Human
ucacucuuauugcccacgcu

SEQ ID NO: 2944963 - RNA, 14 nt, Human
ucacugcuuaacuu

SEQ ID NO: 2944964 - RNA, 17 nt, Human
ucacugguacucugcca

SEQ ID NO: 2944965 - RNA, 16 nt, Human
ucagggccuggcucag

SEQ ID NO: 2944966 - RNA, 14 nt, Human
ucagggccuggcuc

SEQ ID NO: 2944967 - RNA, 16 nt, Human
ucaggugagaagcaga

SEQ ID NO: 2944968 - RNA, 15 nt, Human
ucaggugagaagcag

SEQ ID NO: 2944969 - RNA, 13 nt, Human
ucaggcuagaugu

SEQ ID NO: 2944970 - RNA, 17 nt, Human
ucaggcuagauguaugu

SEQ ID NO: 2944971 - RNA, 15 nt, Human
ucagauaugauucaa

SEQ ID NO: 2944972 - RNA, 20 nt, Human
ucagccucccgaguagcugg

SEQ ID NO: 2944973 - RNA, 18 nt, Human
ucagccucccgaguagcu

SEQ ID NO: 2944974 - RNA, 21 nt, Human
ucagccucccgaauagcuggg

SEQ ID NO: 2944975 - RNA, 22 nt, Human
ucagccucccgaauagcuggga

SEQ ID NO: 2944976 - RNA, 14 nt, Human
ucagccucccaaag

SEQ ID NO: 2944977 - RNA, 19 nt, Human
ucagccucccaaagugcug

SEQ ID NO: 2944978 - RNA, 21 nt, Human
ucagccucccaaagugcuggg

SEQ ID NO: 2944979 - RNA, 19 nt, Human
ucagccugcuccagcuguu

SEQ ID NO: 2944980 - RNA, 18 nt, Human
ucagccugcuccagcugu

SEQ ID NO: 2944981 - RNA, 21 nt, Human
ucagccucccgaguagcuggg

SEQ ID NO: 2944982 - RNA, 22 nt, Human
ucagccucccgaguagcuggga

SEQ ID NO: 2944983 - RNA, 18 nt, Human
ucagcuccccucggagaa

SEQ ID NO: 2944984 - RNA, 16 nt, Human
ucagcugaaccugggu

SEQ ID NO: 2944985 - RNA, 15 nt, Human
ucagcugaaccuggg

SEQ ID NO: 2944986 - RNA, 17 nt, Human
ucagcuccccucggaga

SEQ ID NO: 2944987 - RNA, 20 nt, Human
ucaugcugccaauauccuaa

SEQ ID NO: 2944988 - RNA, 19 nt, Human
ucaugcugccaauauccua

SEQ ID NO: 2944989 - RNA, 17 nt, Human
ucaugcugccaauaucc

SEQ ID NO: 2944990 - RNA, 13 nt, Human
ucaugcugccaau

SEQ ID NO: 2944991 - RNA, 23 nt, Human
ucaucuuagguuggcaaaaaggc

SEQ ID NO: 2944992 - RNA, 21 nt, Human
ucaucaccaacgucugugcca

SEQ ID NO: 2944993 - RNA, 20 nt, Human
ucaucaccaacgucugugcc

SEQ ID NO: 2944994 - RNA, 19 nt, Human
ucaucaccaacgucugugc

SEQ ID NO: 2944995 - RNA, 13 nt, Human
ucaggugcugcca

SEQ ID NO: 2944996 - RNA, 14 nt, Human
ucaggugcugccau

SEQ ID NO: 2944997 - RNA, 23 nt, Human
ucaggugccucaagagaaggcaa

SEQ ID NO: 2944998 - RNA, 21 nt, Human
ucaggugagaagcagaggaag

SEQ ID NO: 2944999 - RNA, 15 nt, Human
ucaggugcugccauc

SEQ ID NO: 2945000 - RNA, 21 nt, Human
ucauacccacccccacccaag

SEQ ID NO: 2945001 - RNA, 18 nt, Human
ucauaccuaucaucuuaa

SEQ ID NO: 2945002 - RNA, 21 nt, Human
ucauucaacccaccugcgucu

SEQ ID NO: 2945003 - RNA, 17 nt, Human
ucauuauguuaauauuu

SEQ ID NO: 2945004 - RNA, 16 nt, Human
ucauuauguuaauauu

SEQ ID NO: 2945005 - RNA, 20 nt, Human
ucauuaucucaaaacugcac

SEQ ID NO: 2945006 - RNA, 19 nt, Human
ucauuaucucaaaacugca

SEQ ID NO: 2945007 - RNA, 23 nt, Human
ucaugcugccaauauccuaauaa

SEQ ID NO: 2945008 - RNA, 21 nt, Human
ucaugcugccaauauccuaau

SEQ ID NO: 2945009 - RNA, 13 nt, Human
ucauuaucucaaa

SEQ ID NO: 2945010 - RNA, 23 nt, Human
ucauuaguuuugaagauucuaug

SEQ ID NO: 2945011 - RNA, 14 nt, Human
ucauuaguuuugaa

SEQ ID NO: 2945012 - RNA, 13 nt, Human
ucauuuccugugu

SEQ ID NO: 2945013 - RNA, 16 nt, Human
ucauuuccugugucuu

SEQ ID NO: 2945014 - RNA, 16 nt, Human
ucauuuccaagcaagu

SEQ ID NO: 2945015 - RNA, 13 nt, Human
ucauuuccaagca

SEQ ID NO: 2945016 - RNA, 22 nt, Human
uccaggggugggacacccugug

SEQ ID NO: 2945017 - RNA, 22 nt, Human
uccaggagcagccacauuccug

SEQ ID NO: 2945018 - RNA, 18 nt, Human
uccaggagcagccacauu

SEQ ID NO: 2945019 - RNA, 17 nt, Human
uccaggagcagccacau

SEQ ID NO: 2945020 - RNA, 15 nt, Human
uccaggugcacaagc

SEQ ID NO: 2945021 - RNA, 23 nt, Human
uccaggggugggacacccuguga

SEQ ID NO: 2945022 - RNA, 15 nt, Human
uccagguucagcuug

SEQ ID NO: 2945023 - RNA, 16 nt, Human
uccagguucagcuugu

SEQ ID NO: 2945024 - RNA, 22 nt, Human
uccaggugcacaagcuccaagc

SEQ ID NO: 2945025 - RNA, 21 nt, Human
uccaggugcacaagcuccaag

SEQ ID NO: 2945026 - RNA, 20 nt, Human
uccaggugcacaagcuccaa

SEQ ID NO: 2945027 - RNA, 18 nt, Human
uccaggugcacaagcucc

SEQ ID NO: 2945028 - RNA, 16 nt, Human
uccaggagcagccaca

SEQ ID NO: 2945029 - RNA, 17 nt, Human
uccagcuguucagcugg

SEQ ID NO: 2945030 - RNA, 15 nt, Human
uccagcucaccagcc

SEQ ID NO: 2945031 - RNA, 18 nt, Human
uccagcucaccagcccca

SEQ ID NO: 2945032 - RNA, 16 nt, Human
uccagcucaccagccc

SEQ ID NO: 2945033 - RNA, 17 nt, Human
uccagcucaccagcccc

SEQ ID NO: 2945034 - RNA, 23 nt, Human
uccagccaaagccuccuccagcc

SEQ ID NO: 2945035 - RNA, 14 nt, Human
uccacuuggucugu

SEQ ID NO: 2945036 - RNA, 15 nt, Human
uccacuuggucugug

SEQ ID NO: 2945037 - RNA, 16 nt, Human
uccacuuggucuguga

SEQ ID NO: 2945038 - RNA, 17 nt, Human
uccacaaguuaaauaaa

SEQ ID NO: 2945039 - RNA, 18 nt, Human
uccacaaguuaaauaaau

SEQ ID NO: 2945040 - RNA, 15 nt, Human
uccacaagagcccag

SEQ ID NO: 2945041 - RNA, 18 nt, Human
uccacaagagcccaggcc

SEQ ID NO: 2945042 - RNA, 17 nt, Human
uccacaagagcccaggc

SEQ ID NO: 2945043 - RNA, 16 nt, Human
uccacaagagcccagg

SEQ ID NO: 2945044 - RNA, 17 nt, Human
uccaauuuacauacucu

SEQ ID NO: 2945045 - RNA, 18 nt, Human
uccaauuuacauacucug

SEQ ID NO: 2945046 - RNA, 20 nt, Human
uccaaaauaaaacuuuuuaa

SEQ ID NO: 2945047 - RNA, 18 nt, Human
uccaaaauaaaacuuuuu

SEQ ID NO: 2945048 - RNA, 21 nt, Human
uccaccugccagggacagagg

SEQ ID NO: 2945049 - RNA, 18 nt, Human
uccaccugccagggacag

SEQ ID NO: 2945050 - RNA, 15 nt, Human
uccaccucccugcaa

SEQ ID NO: 2945051 - RNA, 16 nt, Human
uccaccucccugcaau

SEQ ID NO: 2945052 - RNA, 17 nt, Human
uccaccucccugcaaua

SEQ ID NO: 2945053 - RNA, 15 nt, Human
uccaccugccaggga

SEQ ID NO: 2945054 - RNA, 17 nt, Human
uccaccugccagggaca

SEQ ID NO: 2945055 - RNA, 12 nt, Human
uccacccugcuc

SEQ ID NO: 2945056 - RNA, 12 nt, Human
uccaccucccug

SEQ ID NO: 2945057 - RNA, 13 nt, Human
uccaccucccugc

SEQ ID NO: 2945058 - RNA, 14 nt, Human
uccaccucccugca

SEQ ID NO: 2945059 - RNA, 19 nt, Human
uccacagaagcuccaggua

SEQ ID NO: 2945060 - RNA, 13 nt, Human
uauguacuucaug

SEQ ID NO: 2945061 - RNA, 17 nt, Human
uauguacuucaugcugu

SEQ ID NO: 2945062 - RNA, 20 nt, Human
uauguagauguaugcacaca

SEQ ID NO: 2945063 - RNA, 15 nt, Human
gggaguggccacaga

SEQ ID NO: 2945064 - RNA, 13 nt, Human
gggaguggccaca

SEQ ID NO: 2945065 - RNA, 20 nt, Human
uauguugcccaggcaggucu

SEQ ID NO: 2945066 - RNA, 13 nt, Human
uauguugcccagg

SEQ ID NO: 2945067 - RNA, 16 nt, Human
uauguugcccaggcag

SEQ ID NO: 2945068 - RNA, 19 nt, Human
uauguugcccaggcagguc

SEQ ID NO: 2945069 - RNA, 20 nt, Human
uauuaagagguaagacuuag

SEQ ID NO: 2945070 - RNA, 24 nt, Human
uauuaagaaagacuaucuaaaugu

SEQ ID NO: 2945071 - RNA, 13 nt, Human
uauuaacaaaaca

SEQ ID NO: 2945072 - RNA, 12 nt, Human
uauuaaauuaug

SEQ ID NO: 2945073 - RNA, 12 nt, Human
uauuguuuucag

SEQ ID NO: 2945074 - RNA, 22 nt, Human
uauuguuuucaguguacaugga

SEQ ID NO: 2945075 - RNA, 18 nt, Human
uauuguuuucaguguaca

SEQ ID NO: 2945076 - RNA, 20 nt, Human
uauuguuuucaguguacaug

SEQ ID NO: 2945077 - RNA, 23 nt, Human
uauugauucaccuccuaaaacaa

SEQ ID NO: 2945078 - RNA, 14 nt, Human
uauugauguuuuca

SEQ ID NO: 2945079 - RNA, 13 nt, Human
uauugauguuuuc

SEQ ID NO: 2945080 - RNA, 17 nt, Human
uauucucuccuguaccu

SEQ ID NO: 2945081 - RNA, 17 nt, Human
uauucucagcagagugc

SEQ ID NO: 2945082 - RNA, 21 nt, Human
uauucucagcagagugcuuua

SEQ ID NO: 2945083 - RNA, 21 nt, Human
uauugauaugcuuauacacuu

SEQ ID NO: 2945084 - RNA, 17 nt, Human
uauugcugauggugcaa

SEQ ID NO: 2945085 - RNA, 22 nt, Human
uauuggaaauuuguuauaauga

SEQ ID NO: 2945086 - RNA, 15 nt, Human
uauucucagcagagu

SEQ ID NO: 2945087 - RNA, 16 nt, Human
uauuauucccauucua

SEQ ID NO: 2945088 - RNA, 14 nt, Human
uauuuuauuaugca

SEQ ID NO: 2945089 - RNA, 17 nt, Human
uauuuuauuaugcauga

SEQ ID NO: 2945090 - RNA, 17 nt, Human
uauuuuuuucuuuucuu

SEQ ID NO: 2945091 - RNA, 14 nt, Human
uauuuuuuuacuaa

SEQ ID NO: 2945092 - RNA, 15 nt, Human
ucaaaaaaagaaaaa

SEQ ID NO: 2945093 - RNA, 14 nt, Human
ucaaaaaaagaaaa

SEQ ID NO: 2945094 - RNA, 17 nt, Human
uauuuucuccaaauguu

SEQ ID NO: 2945095 - RNA, 22 nt, Human
uauuuucccuauuagagaagag

SEQ ID NO: 2945096 - RNA, 22 nt, Human
ucaaaucagguuuucuuuuaag

SEQ ID NO: 2945097 - RNA, 16 nt, Human
ucaaaucagguuuucu

SEQ ID NO: 2945098 - RNA, 20 nt, Human
ucaaaucaagaaacuuaagg

SEQ ID NO: 2945099 - RNA, 14 nt, Human
ucaaauaugcaaag

SEQ ID NO: 2945100 - RNA, 23 nt, Human
ucaaccccuucgcuccugugucu

SEQ ID NO: 2945101 - RNA, 14 nt, Human
ucaaauugugugaa

SEQ ID NO: 2945102 - RNA, 14 nt, Human
ucaauaaaauccau

SEQ ID NO: 2945103 - RNA, 21 nt, Human
ucaauaaaauccauacauuug

SEQ ID NO: 2945104 - RNA, 21 nt, Human
ucaagugauucuccugccuca

SEQ ID NO: 2945105 - RNA, 18 nt, Human
ucaagugauucuccugcc

SEQ ID NO: 2945106 - RNA, 20 nt, Human
ucaagugauucuccugccuc

SEQ ID NO: 2945107 - RNA, 23 nt, Human
ucaauuacaggaaguacuggaga

SEQ ID NO: 2945108 - RNA, 21 nt, Human
ucaauuacaggaaguacugga

SEQ ID NO: 2945109 - RNA, 17 nt, Human
ucaaugccccugaauuu

SEQ ID NO: 2945110 - RNA, 18 nt, Human
ucaaugccccugaauuua

SEQ ID NO: 2945111 - RNA, 20 nt, Human
ucaaugccccugaauuuaaa

SEQ ID NO: 2945112 - RNA, 13 nt, Human
ucaaugcagcccc

SEQ ID NO: 2945113 - RNA, 18 nt, Human
ucacauuuauucugcuca

SEQ ID NO: 2945114 - RNA, 19 nt, Human
ucacauuuauucugcucac

SEQ ID NO: 2945115 - RNA, 17 nt, Human
ucacauuuauucugcuc

SEQ ID NO: 2945116 - RNA, 14 nt, Human
ucaccaaggcugau

SEQ ID NO: 2945117 - RNA, 19 nt, Human
ucaccaaaucagcugcuac

SEQ ID NO: 2945118 - RNA, 20 nt, Human
ucaccaaaucagcugcuacu

SEQ ID NO: 2945119 - RNA, 16 nt, Human
ucacaggcagguccag

SEQ ID NO: 2945120 - RNA, 17 nt, Human
ucacaggcagguccagg

SEQ ID NO: 2945121 - RNA, 18 nt, Human
ucacaggcagguccaggg

SEQ ID NO: 2945122 - RNA, 16 nt, Human
ucacagucacauucca

SEQ ID NO: 2945123 - RNA, 19 nt, Human
ucacaguccuuaccagcag

SEQ ID NO: 2945124 - RNA, 23 nt, Human
ucacaguccuuaccagcagagca

SEQ ID NO: 2945125 - RNA, 22 nt, Human
ucacaguccuuaccagcagagc

SEQ ID NO: 2945126 - RNA, 17 nt, Human
ucacaagacccaaaagg

SEQ ID NO: 2945127 - RNA, 13 nt, Human
ucacaagacccaa

SEQ ID NO: 2945128 - RNA, 20 nt, Human
ucaauuacaggaaguacugg

SEQ ID NO: 2945129 - RNA, 17 nt, Human
ucaauuaccagaaagau

SEQ ID NO: 2945130 - RNA, 21 nt, Human
ucaauuaccagaaagauaaca

SEQ ID NO: 2945131 - RNA, 19 nt, Human
uccuucacagaugggugcu

SEQ ID NO: 2945132 - RNA, 20 nt, Human
uccuucaccuuuguccccac

SEQ ID NO: 2945133 - RNA, 18 nt, Human
uccuucaccuuugucccc

SEQ ID NO: 2945134 - RNA, 18 nt, Human
uccuucacagaugggugc

SEQ ID NO: 2945135 - RNA, 18 nt, Human
uccuuaccagcagagcac

SEQ ID NO: 2945136 - RNA, 17 nt, Human
uccuuaccagcagagca

SEQ ID NO: 2945137 - RNA, 16 nt, Human
uccuuaccagcagagc

SEQ ID NO: 2945138 - RNA, 22 nt, Human
uccuucaccuuuguccccaccg

SEQ ID NO: 2945139 - RNA, 21 nt, Human
uccuucaccuuuguccccacc

SEQ ID NO: 2945140 - RNA, 23 nt, Human
uccuuuucacaguucucuccuuc

SEQ ID NO: 2945141 - RNA, 16 nt, Human
uccuuggacucauuuu

SEQ ID NO: 2945142 - RNA, 20 nt, Human
uccuguaccucuugagccuu

SEQ ID NO: 2945143 - RNA, 19 nt, Human
uccugucggagcccugucu

SEQ ID NO: 2945144 - RNA, 22 nt, Human
uccugucggagcccugucuccu

SEQ ID NO: 2945145 - RNA, 14 nt, Human
uccuuaccagcaga

SEQ ID NO: 2945146 - RNA, 20 nt, Human
uccuggcacccggccccugc

SEQ ID NO: 2945147 - RNA, 21 nt, Human
uccuggcacccggccccugcu

SEQ ID NO: 2945148 - RNA, 17 nt, Human
uccuggcacugcuucca

SEQ ID NO: 2945149 - RNA, 22 nt, Human
uccuggcacugcuuccagugag

SEQ ID NO: 2945150 - RNA, 18 nt, Human
uccuggcacugcuuccag

SEQ ID NO: 2945151 - RNA, 17 nt, Human
uccugccucagccuccc

SEQ ID NO: 2945152 - RNA, 16 nt, Human
uccugccucagccucc

SEQ ID NO: 2945153 - RNA, 13 nt, Human
uccugccucagcc

SEQ ID NO: 2945154 - RNA, 15 nt, Human
uccugccucagccuc

SEQ ID NO: 2945155 - RNA, 16 nt, Human
uccuggcacccggccc

SEQ ID NO: 2945156 - RNA, 19 nt, Human
uccuggcacccggccccug

SEQ ID NO: 2945157 - RNA, 14 nt, Human
uccuggcacccggc

SEQ ID NO: 2945158 - RNA, 17 nt, Human
uccuggcaauagucaaa

SEQ ID NO: 2945159 - RNA, 19 nt, Human
uccugagagcugcaugugu

SEQ ID NO: 2945160 - RNA, 18 nt, Human
uccugagagcugcaugug

SEQ ID NO: 2945161 - RNA, 13 nt, Human
uccugagagcugc

SEQ ID NO: 2945162 - RNA, 13 nt, Human
uccugagccagau

SEQ ID NO: 2945163 - RNA, 14 nt, Human
uccugccucagccu

SEQ ID NO: 2945164 - RNA, 20 nt, Human
uccugccuaagugcagcccc

SEQ ID NO: 2945165 - RNA, 14 nt, Human
uccugagccagauu

SEQ ID NO: 2945166 - RNA, 16 nt, Human
ucgugauugauaagaa

SEQ ID NO: 2945167 - RNA, 18 nt, Human
ucggccuccauccugagg

SEQ ID NO: 2945168 - RNA, 17 nt, Human
ucggccuccauccugag

SEQ ID NO: 2945169 - RNA, 21 nt, Human
ucguggaacaguuaccucugc

SEQ ID NO: 2945170 - RNA, 22 nt, Human
ucgugggacagucaccucaugg

SEQ ID NO: 2945171 - RNA, 22 nt, Human
ucuaaauaucccuuggacauuu

SEQ ID NO: 2945172 - RNA, 21 nt, Human
ucuaaaucuccaaaauaaaac

SEQ ID NO: 2945173 - RNA, 13 nt, Human
ucguuaauuugua

SEQ ID NO: 2945174 - RNA, 14 nt, Human
ucuaauauguaaca

SEQ ID NO: 2945175 - RNA, 16 nt, Human
ucuaggacugaauuau

SEQ ID NO: 2945176 - RNA, 23 nt, Human
ucuaggacugaauuaugaaacuu

SEQ ID NO: 2945177 - RNA, 21 nt, Human
ucuaggaagacuuuggaaaga

SEQ ID NO: 2945178 - RNA, 11 nt, Human
ucuagugaaug

SEQ ID NO: 2945179 - RNA, 22 nt, Human
ucuagugagcagucaggaaaga

SEQ ID NO: 2945180 - RNA, 19 nt, Human
ucuagugagcagucaggaa

SEQ ID NO: 2945181 - RNA, 15 nt, Human
ucucaacuccaaacu

SEQ ID NO: 2945182 - RNA, 17 nt, Human
ucucaaauaacuaaaag

SEQ ID NO: 2945183 - RNA, 17 nt, Human
ucuaugaaauauuaugu

SEQ ID NO: 2945184 - RNA, 13 nt, Human
ucuaugaaauauu

SEQ ID NO: 2945185 - RNA, 14 nt, Human
ucuaugaaauauua

SEQ ID NO: 2945186 - RNA, 15 nt, Human
ucuaucaaguauuau

SEQ ID NO: 2945187 - RNA, 21 nt, Human
ucuaucaaguauuauaccuuu

SEQ ID NO: 2945188 - RNA, 22 nt, Human
ucuaucaaguauuauaccuuuu

SEQ ID NO: 2945189 - RNA, 16 nt, Human
ucccuauuagagaaga

SEQ ID NO: 2945190 - RNA, 17 nt, Human
uccagguuuaagcuguu

SEQ ID NO: 2945191 - RNA, 20 nt, Human
uccccuguuuguuucugaaa

SEQ ID NO: 2945192 - RNA, 18 nt, Human
uccccuguuuguuucuga

SEQ ID NO: 2945193 - RNA, 21 nt, Human
uccccuguuuguuucugaaag

SEQ ID NO: 2945194 - RNA, 18 nt, Human
ucccugcugcuccuagga

SEQ ID NO: 2945195 - RNA, 14 nt, Human
ucccugcacuugca

SEQ ID NO: 2945196 - RNA, 13 nt, Human
ucccugcacuugc

SEQ ID NO: 2945197 - RNA, 16 nt, Human
ucccugcaauaaaaug

SEQ ID NO: 2945198 - RNA, 13 nt, Human
ucccuucccaccu

SEQ ID NO: 2945199 - RNA, 16 nt, Human
ucccuugaugaagaag

SEQ ID NO: 2945200 - RNA, 15 nt, Human
ucccuugaugaagaa

SEQ ID NO: 2945201 - RNA, 12 nt, Human
uccuauuauauu

SEQ ID NO: 2945202 - RNA, 17 nt, Human
uccucauuagcauuuug

SEQ ID NO: 2945203 - RNA, 22 nt, Human
uccuaguuccaccaucaagcca

SEQ ID NO: 2945204 - RNA, 18 nt, Human
uccuauauuguuuucagu

SEQ ID NO: 2945205 - RNA, 18 nt, Human
uccuacccacccuccuuu

SEQ ID NO: 2945206 - RNA, 13 nt, Human
uccgaccagacac

SEQ ID NO: 2945207 - RNA, 17 nt, Human
uccgaccagacaccuug

SEQ ID NO: 2945208 - RNA, 21 nt, Human
uccuaaguaucaaguauagaa

SEQ ID NO: 2945209 - RNA, 15 nt, Human
uccuaauaaaaaggu

SEQ ID NO: 2945210 - RNA, 14 nt, Human
uccuaauaaaaagg

SEQ ID NO: 2945211 - RNA, 13 nt, Human
uccuaauaaaaag

SEQ ID NO: 2945212 - RNA, 12 nt, Human
uccuaauaaaaa

SEQ ID NO: 2945213 - RNA, 17 nt, Human
uccuaauaaaaagguga

SEQ ID NO: 2945214 - RNA, 16 nt, Human
uccuaauaaaaaggug

SEQ ID NO: 2945215 - RNA, 18 nt, Human
uccuaauaaaaaggugac

SEQ ID NO: 2945216 - RNA, 16 nt, Human
uccuaaucuucugaac

SEQ ID NO: 2945217 - RNA, 19 nt, Human
uccuccuuuucacaguucu

SEQ ID NO: 2945218 - RNA, 14 nt, Human
uccucuaggagguc

SEQ ID NO: 2945219 - RNA, 15 nt, Human
uccucuguacagagc

SEQ ID NO: 2945220 - RNA, 18 nt, Human
uccucuguacagagccca

SEQ ID NO: 2945221 - RNA, 17 nt, Human
uccucuguacagagccc

SEQ ID NO: 2945222 - RNA, 16 nt, Human
uccucuguacagagcc

SEQ ID NO: 2945223 - RNA, 21 nt, Human
uccucugcuugccaucccucc

SEQ ID NO: 2945224 - RNA, 22 nt, Human
uccucugcuugccaucccuccc

SEQ ID NO: 2945225 - RNA, 20 nt, Human
uccucugcuugccaucccuc

SEQ ID NO: 2945226 - RNA, 19 nt, Human
uccucugcuugccaucccu

SEQ ID NO: 2945227 - RNA, 16 nt, Human
uccucugcugcuggcu

SEQ ID NO: 2945228 - RNA, 15 nt, Human
uccucugcugcuggc

SEQ ID NO: 2945229 - RNA, 14 nt, Human
uccucugcugcugg

SEQ ID NO: 2945230 - RNA, 12 nt, Human
uccucugcugcu

SEQ ID NO: 2945231 - RNA, 23 nt, Human
ucucuggccuucggccuccaucc

SEQ ID NO: 2945232 - RNA, 20 nt, Human
ucucugauucccugauuuaa

SEQ ID NO: 2945233 - RNA, 18 nt, Human
ucucuguaauaaacucau

SEQ ID NO: 2945234 - RNA, 22 nt, Human
ucucuguaauaaacucauuucu

SEQ ID NO: 2945235 - RNA, 15 nt, Human
ucucuaguuugauua

SEQ ID NO: 2945236 - RNA, 14 nt, Human
ucucugaggacacu

SEQ ID NO: 2945237 - RNA, 17 nt, Human
ucucugaggacacuaac

SEQ ID NO: 2945238 - RNA, 15 nt, Human
ucucugauacagaaa

SEQ ID NO: 2945239 - RNA, 19 nt, Human
ucucuaacuucaccauauu

SEQ ID NO: 2945240 - RNA, 19 nt, Human
ucucuaggaaauauuuauu

SEQ ID NO: 2945241 - RNA, 12 nt, Human
ucucuaacuuca

SEQ ID NO: 2945242 - RNA, 22 nt, Human
ucucgugauugauaagaaccuu

SEQ ID NO: 2945243 - RNA, 14 nt, Human
ucucgugauugaua

SEQ ID NO: 2945244 - RNA, 16 nt, Human
ucuccuguaccucuug

SEQ ID NO: 2945245 - RNA, 17 nt, Human
ucuccuguaccucuuga

SEQ ID NO: 2945246 - RNA, 17 nt, Human
ucuccugccucagccuc

SEQ ID NO: 2945247 - RNA, 15 nt, Human
ucuccugccucagcc

SEQ ID NO: 2945248 - RNA, 15 nt, Human
ucuccuguaccucuu

SEQ ID NO: 2945249 - RNA, 21 nt, Human
ucuccuggaaauauuaagaaa

SEQ ID NO: 2945250 - RNA, 14 nt, Human
ucugcaacucugaa

SEQ ID NO: 2945251 - RNA, 15 nt, Human
ucugcaacucugaag

SEQ ID NO: 2945252 - RNA, 21 nt, Human
ucugcaagaauugaagcagga

SEQ ID NO: 2945253 - RNA, 20 nt, Human
ucugcaagaauugaagcagg

SEQ ID NO: 2945254 - RNA, 14 nt, Human
ucugacccacugcu

SEQ ID NO: 2945255 - RNA, 15 nt, Human
ucugacccacugcuu

SEQ ID NO: 2945256 - RNA, 23 nt, Human
ucugaggaauccagacccggcug

SEQ ID NO: 2945257 - RNA, 14 nt, Human
ucugcaucagcugc

SEQ ID NO: 2945258 - RNA, 21 nt, Human
ucugcaucagcugcugaaaca

SEQ ID NO: 2945259 - RNA, 19 nt, Human
ucugcaucagcugcugaaa

SEQ ID NO: 2945260 - RNA, 21 nt, Human
ucucuuaucuuacgaaaaaau

SEQ ID NO: 2945261 - RNA, 16 nt, Human
ucucuuaucuuacgaa

SEQ ID NO: 2945262 - RNA, 13 nt, Human
ucugaaaauguau

SEQ ID NO: 2945263 - RNA, 17 nt, Human
ucugaaauuuccuggga

SEQ ID NO: 2945264 - RNA, 18 nt, Human
ucugaaauuuccugggag

SEQ ID NO: 2945265 - RNA, 20 nt, Human
ucugaaauuuccugggagcu

SEQ ID NO: 2945266 - RNA, 16 nt, Human
ucugacacacagcucu

SEQ ID NO: 2945267 - RNA, 17 nt, Human
ucugacacacagcucug

SEQ ID NO: 2945268 - RNA, 18 nt, Human
ucugacacacagcucugu

SEQ ID NO: 2945269 - RNA, 19 nt, Human
ucugacacacagcucuguc

SEQ ID NO: 2945270 - RNA, 12 nt, Human
ucugacaggcaa

SEQ ID NO: 2945271 - RNA, 21 nt, Human
ucugacaggcaaugcuggcug

SEQ ID NO: 2945272 - RNA, 22 nt, Human
ucugacaggcaaugcuggcugu

SEQ ID NO: 2945273 - RNA, 13 nt, Human
ucugacccacugc

SEQ ID NO: 2945274 - RNA, 18 nt, Human
ucuuaagaagacugcauu

SEQ ID NO: 2945275 - RNA, 12 nt, Human
ucuuaagaagac

SEQ ID NO: 2945276 - RNA, 22 nt, Human
ucuuaaauauguggaguucauc

SEQ ID NO: 2945277 - RNA, 22 nt, Human
ucuuaaaaacaacgaaagaagg

SEQ ID NO: 2945278 - RNA, 13 nt, Human
ucuguuuugugua

SEQ ID NO: 2945279 - RNA, 19 nt, Human
ucuguuuuguguacuuuua

SEQ ID NO: 2945280 - RNA, 13 nt, Human
ucuuaaaaacaac

SEQ ID NO: 2945281 - RNA, 15 nt, Human
ucugucuucacaaca

SEQ ID NO: 2945282 - RNA, 12 nt, Human
ucuugaacuccu

SEQ ID NO: 2945283 - RNA, 22 nt, Human
ucuucauggaauucacaaagua

SEQ ID NO: 2945284 - RNA, 18 nt, Human
ucuucauggaauucacaa

SEQ ID NO: 2945285 - RNA, 15 nt, Human
ucuucagaucucuaa

SEQ ID NO: 2945286 - RNA, 18 nt, Human
ucuucagaucucuaacuu

SEQ ID NO: 2945287 - RNA, 23 nt, Human
ucuucagaucucuaacuucacca

SEQ ID NO: 2945288 - RNA, 21 nt, Human
ucuggacaggcauguucucug

SEQ ID NO: 2945289 - RNA, 14 nt, Human
ucuggacaggcaug

SEQ ID NO: 2945290 - RNA, 15 nt, Human
ucuggaaugcagugg

SEQ ID NO: 2945291 - RNA, 19 nt, Human
ucuggaauaaggagaauga

SEQ ID NO: 2945292 - RNA, 19 nt, Human
ucugcugacagacacaggc

SEQ ID NO: 2945293 - RNA, 20 nt, Human
ucugcugacagacacaggcc

SEQ ID NO: 2945294 - RNA, 21 nt, Human
ucugcugacagacacaggccc

SEQ ID NO: 2945295 - RNA, 22 nt, Human
ucugcugacagacacaggcccg

SEQ ID NO: 2945296 - RNA, 15 nt, Human
ucugccugcccaggc

SEQ ID NO: 2945297 - RNA, 16 nt, Human
ucugccugcccaggcc

SEQ ID NO: 2945298 - RNA, 18 nt, Human
ucugcuccucuccccagc

SEQ ID NO: 2945299 - RNA, 18 nt, Human
ucugcugacagacacagg

SEQ ID NO: 2945300 - RNA, 17 nt, Human
ucugcugacagacacag

SEQ ID NO: 2945301 - RNA, 14 nt, Human
ucugccugcccagg

SEQ ID NO: 2945302 - RNA, 13 nt, Human
ucugccugcccag

SEQ ID NO: 2945303 - RNA, 14 nt, Human
ucugucgcccaguc

SEQ ID NO: 2945304 - RNA, 21 nt, Human
ucuguccugggagugagcugg

SEQ ID NO: 2945305 - RNA, 15 nt, Human
ucuguccuacucugu

SEQ ID NO: 2945306 - RNA, 19 nt, Human
ucuguccuacucuguguca

SEQ ID NO: 2945307 - RNA, 14 nt, Human
ucuguccuacucug

SEQ ID NO: 2945308 - RNA, 14 nt, Human
ucugggacacaguu

SEQ ID NO: 2945309 - RNA, 13 nt, Human
ucugggacacagu

SEQ ID NO: 2945310 - RNA, 23 nt, Human
ucuggugacuuuccucuuugguc

SEQ ID NO: 2945311 - RNA, 23 nt, Human
ucuggcucuuccaggcugggaga

SEQ ID NO: 2945312 - RNA, 18 nt, Human
ucuggcucuuccaggcug

SEQ ID NO: 2945313 - RNA, 10 nt, Human
ucuggccuuc

SEQ ID NO: 2945314 - RNA, 19 nt, Human
ucuggcuaugcauuugaaa

SEQ ID NO: 2945315 - RNA, 22 nt, Human
ucuggcuaugcauuugaaaauu

SEQ ID NO: 2945316 - RNA, 17 nt, Human
ucuggccuucggccucc

SEQ ID NO: 2945317 - RNA, 18 nt, Human
ucuggccuucggccucca

SEQ ID NO: 2945318 - RNA, 17 nt, Human
ucuggcuaugcauuuga

SEQ ID NO: 2945319 - RNA, 14 nt, Human
uguaauaaauaugu

SEQ ID NO: 2945320 - RNA, 22 nt, Human
uguaauaaauauguuucacaca

SEQ ID NO: 2945321 - RNA, 21 nt, Human
uguaauaaauauguuucacac

SEQ ID NO: 2945322 - RNA, 17 nt, Human
uguaacaagccacccca

SEQ ID NO: 2945323 - RNA, 14 nt, Human
uguaacaagccacc

SEQ ID NO: 2945324 - RNA, 11 nt, Human
uguacagagcc

SEQ ID NO: 2945325 - RNA, 14 nt, Human
uguacagacaacaa

SEQ ID NO: 2945326 - RNA, 16 nt, Human
ugguuuucuguucuuu

SEQ ID NO: 2945327 - RNA, 19 nt, Human
ugguuuucuuguguguuua

SEQ ID NO: 2945328 - RNA, 21 nt, Human
ugguuuuuaaaaaacugcuga

SEQ ID NO: 2945329 - RNA, 23 nt, Human
ugguuuuuaaaaaacugcugacu

SEQ ID NO: 2945330 - RNA, 12 nt, Human
uguaaaauggug

SEQ ID NO: 2945331 - RNA, 11 nt, Human
uguaaaauggu

SEQ ID NO: 2945332 - RNA, 16 nt, Human
uggugucaccugaaga

SEQ ID NO: 2945333 - RNA, 15 nt, Human
uggugucgggcauga

SEQ ID NO: 2945334 - RNA, 18 nt, Human
uggugucgggcaugacac

SEQ ID NO: 2945335 - RNA, 18 nt, Human
ugguugaugaucuuugca

SEQ ID NO: 2945336 - RNA, 16 nt, Human
ugguucccuugaugaa

SEQ ID NO: 2945337 - RNA, 17 nt, Human
ugguucccuugaugaag

SEQ ID NO: 2945338 - RNA, 20 nt, Human
ugguucccuugaugaagaag

SEQ ID NO: 2945339 - RNA, 19 nt, Human
uggugguuuucuguucuuu

SEQ ID NO: 2945340 - RNA, 17 nt, Human
uggugguuucagaaaug

SEQ ID NO: 2945341 - RNA, 18 nt, Human
uggugguuucagaaaugu

SEQ ID NO: 2945342 - RNA, 18 nt, Human
uggugggggccucggugu

SEQ ID NO: 2945343 - RNA, 16 nt, Human
uggugggggccucggu

SEQ ID NO: 2945344 - RNA, 13 nt, Human
ugguggcuggguu

SEQ ID NO: 2945345 - RNA, 12 nt, Human
ugguggcagugg

SEQ ID NO: 2945346 - RNA, 19 nt, Human
uggugcaaugaccuuucaa

SEQ ID NO: 2945347 - RNA, 14 nt, Human
uggugcaaugaccu

SEQ ID NO: 2945348 - RNA, 20 nt, Human
ugguggcagugggagcugcc

SEQ ID NO: 2945349 - RNA, 13 nt, Human
ugguggcaguggg

SEQ ID NO: 2945350 - RNA, 18 nt, Human
ugguggcagugggagcug

SEQ ID NO: 2945351 - RNA, 14 nt, Human
uggugagaggcauc

SEQ ID NO: 2945352 - RNA, 20 nt, Human
uggguacuuguggacacagc

SEQ ID NO: 2945353 - RNA, 23 nt, Human
uggguacuuguggacacagcucu

SEQ ID NO: 2945354 - RNA, 14 nt, Human
uggguagacacaca

SEQ ID NO: 2945355 - RNA, 19 nt, Human
uguccccgcacugggcuug

SEQ ID NO: 2945356 - RNA, 17 nt, Human
uguccccgcacugggcu

SEQ ID NO: 2945357 - RNA, 15 nt, Human
uguccuauuauauuc

SEQ ID NO: 2945358 - RNA, 12 nt, Human
uguccugggagu

SEQ ID NO: 2945359 - RNA, 19 nt, Human
uguccugggagugagcugg

SEQ ID NO: 2945360 - RNA, 20 nt, Human
uguccugggagugagcuggu

SEQ ID NO: 2945361 - RNA, 14 nt, Human
ugucuaaugaaacc

SEQ ID NO: 2945362 - RNA, 17 nt, Human
ugucuacacuaagagag

SEQ ID NO: 2945363 - RNA, 22 nt, Human
ugucuacacuaagagagaauga

SEQ ID NO: 2945364 - RNA, 14 nt, Human
ugucuuuuaaacuc

SEQ ID NO: 2945365 - RNA, 16 nt, Human
ugucuuuucuugcaug

SEQ ID NO: 2945366 - RNA, 23 nt, Human
ugucuuuggacccugaggcccag

SEQ ID NO: 2945367 - RNA, 14 nt, Human
ugucuaugggacuc

SEQ ID NO: 2945368 - RNA, 15 nt, Human
ugucuaugggacuca

SEQ ID NO: 2945369 - RNA, 16 nt, Human
ugucuaugggacucaa

SEQ ID NO: 2945370 - RNA, 23 nt, Human
ugucuaguuguuugauucagaca

SEQ ID NO: 2945371 - RNA, 15 nt, Human
ugucuaguuguuuga

SEQ ID NO: 2945372 - RNA, 21 nt, Human
ugucucaaaaaaagaaaaaga

SEQ ID NO: 2945373 - RNA, 13 nt, Human
uguaucugagcag

SEQ ID NO: 2945374 - RNA, 23 nt, Human
uguacagcaaggagauuuacaac

SEQ ID NO: 2945375 - RNA, 21 nt, Human
uguacagaguggaauaagaca

SEQ ID NO: 2945376 - RNA, 22 nt, Human
uguacagcaaggagauuuacaa

SEQ ID NO: 2945377 - RNA, 12 nt, Human
uguacagagccc

SEQ ID NO: 2945378 - RNA, 21 nt, Human
uguacagagcccacgccccca

SEQ ID NO: 2945379 - RNA, 13 nt, Human
uguauaaaauaau

SEQ ID NO: 2945380 - RNA, 14 nt, Human
uguauaaaauaauu

SEQ ID NO: 2945381 - RNA, 19 nt, Human
uguaguguuggagaagaac

SEQ ID NO: 2945382 - RNA, 20 nt, Human
uguaguguuggagaagaacu

SEQ ID NO: 2945383 - RNA, 21 nt, Human
uguaguguuggagaagaacug

SEQ ID NO: 2945384 - RNA, 16 nt, Human
ugucaauuaccagaaa

SEQ ID NO: 2945385 - RNA, 21 nt, Human
ugucaauuacaggaaguacug

SEQ ID NO: 2945386 - RNA, 14 nt, Human
ugucacaggcaggu

SEQ ID NO: 2945387 - RNA, 18 nt, Human
uguauuuuaaaagaauga

SEQ ID NO: 2945388 - RNA, 19 nt, Human
uguauuuuaaaagaaugau

SEQ ID NO: 2945389 - RNA, 19 nt, Human
ugucaauuacaggaaguac

SEQ ID NO: 2945390 - RNA, 12 nt, Human
ugucacuucugg

SEQ ID NO: 2945391 - RNA, 14 nt, Human
ugucagugugacug

SEQ ID NO: 2945392 - RNA, 15 nt, Human
ugucagugugacuga

SEQ ID NO: 2945393 - RNA, 19 nt, Human
ugucagugugacugaucuc

SEQ ID NO: 2945394 - RNA, 16 nt, Human
ugucagugugacugau

SEQ ID NO: 2945395 - RNA, 13 nt, Human
ugucacaggcagg

SEQ ID NO: 2945396 - RNA, 15 nt, Human
ugucacaggcagguc

SEQ ID NO: 2945397 - RNA, 16 nt, Human
ugucacaggcaggucc

SEQ ID NO: 2945398 - RNA, 17 nt, Human
ugucacaggcaggucca

SEQ ID NO: 2945399 - RNA, 21 nt, Human
ugucacaggcagguccagggu

SEQ ID NO: 2945400 - RNA, 17 nt, Human
ugcuucuguuuuauaau

SEQ ID NO: 2945401 - RNA, 12 nt, Human
ugcuucucacug

SEQ ID NO: 2945402 - RNA, 21 nt, Human
ugcuuccagugaggcucugcc

SEQ ID NO: 2945403 - RNA, 23 nt, Human
ugcuuccagugaggcucugcccu

SEQ ID NO: 2945404 - RNA, 22 nt, Human
ugcuuccagugaggcucugccc

SEQ ID NO: 2945405 - RNA, 19 nt, Human
ugcuuaacuucacauauug

SEQ ID NO: 2945406 - RNA, 13 nt, Human
ugcuuaacuucac

SEQ ID NO: 2945407 - RNA, 14 nt, Human
ugcuuaacuucaca

SEQ ID NO: 2945408 - RNA, 17 nt, Human
ugcuuaacuucacauau

SEQ ID NO: 2945409 - RNA, 18 nt, Human
ugcuuaacuucacauauu

SEQ ID NO: 2945410 - RNA, 18 nt, Human
ugcuugugaaaggaaaga

SEQ ID NO: 2945411 - RNA, 22 nt, Human
ugcuucuguuuuauaauuuugu

SEQ ID NO: 2945412 - RNA, 13 nt, Human
ugcuucuucagag

SEQ ID NO: 2945413 - RNA, 14 nt, Human
uggaaaagaauaaa

SEQ ID NO: 2945414 - RNA, 17 nt, Human
uggaacacucugagacu

SEQ ID NO: 2945415 - RNA, 15 nt, Human
uggaacacucugaga

SEQ ID NO: 2945416 - RNA, 21 nt, Human
uggauuguccccgacccuugc

SEQ ID NO: 2945417 - RNA, 22 nt, Human
uggaugcagccucacaguccuu

SEQ ID NO: 2945418 - RNA, 21 nt, Human
uggaugcagccucacaguccu

SEQ ID NO: 2945419 - RNA, 13 nt, Human
uggaugcagccuc

SEQ ID NO: 2945420 - RNA, 23 nt, Human
uggaggggggaggugggauccuc

SEQ ID NO: 2945421 - RNA, 22 nt, Human
uggcacuauaauguaagcucua

SEQ ID NO: 2945422 - RNA, 19 nt, Human
uggcacugcuuccagugag

SEQ ID NO: 2945423 - RNA, 22 nt, Human
uggcacugcuuccagugaggcu

SEQ ID NO: 2945424 - RNA, 13 nt, Human
uggcacuggcaaa

SEQ ID NO: 2945425 - RNA, 21 nt, Human
uggcacuggcaaacagggccu

SEQ ID NO: 2945426 - RNA, 22 nt, Human
uggcacuggcaaacagggccuc

SEQ ID NO: 2945427 - RNA, 18 nt, Human
uggcagcucagagagggu

SEQ ID NO: 2945428 - RNA, 17 nt, Human
uggauuuaacagaaaug

SEQ ID NO: 2945429 - RNA, 15 nt, Human
uggauuuaacagaaa

SEQ ID NO: 2945430 - RNA, 19 nt, Human
uggauugugccuaaugugu

SEQ ID NO: 2945431 - RNA, 23 nt, Human
uggauugugccuaauguguuuga

SEQ ID NO: 2945432 - RNA, 20 nt, Human
uggauugugccuaauguguu

SEQ ID NO: 2945433 - RNA, 21 nt, Human
uggcacuauaauguaagcucu

SEQ ID NO: 2945434 - RNA, 23 nt, Human
uggacguguuaugacuccagaau

SEQ ID NO: 2945435 - RNA, 19 nt, Human
uggacguguuaugacucca

SEQ ID NO: 2945436 - RNA, 20 nt, Human
uggacuaacuugucuuugga

SEQ ID NO: 2945437 - RNA, 19 nt, Human
uggacuaacuugucuuugg

SEQ ID NO: 2945438 - RNA, 18 nt, Human
uggacaggcauguucucu

SEQ ID NO: 2945439 - RNA, 22 nt, Human
uggacaggcauguucucugagg

SEQ ID NO: 2945440 - RNA, 17 nt, Human
uggacaggcauguucuc

SEQ ID NO: 2945441 - RNA, 13 nt, Human
uggacauuuuaug

SEQ ID NO: 2945442 - RNA, 11 nt, Human
uggacauuuua

SEQ ID NO: 2945443 - RNA, 17 nt, Human
uggacauuuuaugucuu

SEQ ID NO: 2945444 - RNA, 16 nt, Human
uggacauuuuaugucu

SEQ ID NO: 2945445 - RNA, 21 nt, Human
uggcuugaguuuaaauuguaa

SEQ ID NO: 2945446 - RNA, 16 nt, Human
uggcugcugaaggcuc

SEQ ID NO: 2945447 - RNA, 14 nt, Human
uggcugcugaaggc

SEQ ID NO: 2945448 - RNA, 13 nt, Human
uggcugcugaagg

SEQ ID NO: 2945449 - RNA, 11 nt, Human
uggcugcugaa

SEQ ID NO: 2945450 - RNA, 22 nt, Human
uggccuucggccuccauccuga

SEQ ID NO: 2945451 - RNA, 20 nt, Human
uggccuucggccuccauccu

SEQ ID NO: 2945452 - RNA, 23 nt, Human
uggccuucggccuccauccugag

SEQ ID NO: 2945453 - RNA, 22 nt, Human
uggccucccaacucaccccagc

SEQ ID NO: 2945454 - RNA, 21 nt, Human
uggccucccaacucaccccag

SEQ ID NO: 2945455 - RNA, 20 nt, Human
uggccucccaacucacccca

SEQ ID NO: 2945456 - RNA, 19 nt, Human
uggccucccaacucacccc

SEQ ID NO: 2945457 - RNA, 14 nt, Human
uggccucccaacuc

SEQ ID NO: 2945458 - RNA, 11 nt, Human
uggccucccaa

SEQ ID NO: 2945459 - RNA, 18 nt, Human
uggccucaagugauucuc

SEQ ID NO: 2945460 - RNA, 23 nt, Human
uggccucaagugauucuccugcc

SEQ ID NO: 2945461 - RNA, 23 nt, Human
uggccuagcauacguacacauuu

SEQ ID NO: 2945462 - RNA, 17 nt, Human
uggcagcugcgguccac

SEQ ID NO: 2945463 - RNA, 20 nt, Human
uggccccucagggucccugg

SEQ ID NO: 2945464 - RNA, 13 nt, Human
uggccccucaggg

SEQ ID NO: 2945465 - RNA, 22 nt, Human
uggccccucagggucccuggug

SEQ ID NO: 2945466 - RNA, 21 nt, Human
uggccccucagggucccuggu

SEQ ID NO: 2945467 - RNA, 20 nt, Human
uggccuagcauacguacaca

SEQ ID NO: 2945468 - RNA, 14 nt, Human
ugggacagggagga

SEQ ID NO: 2945469 - RNA, 16 nt, Human
ugggaggaucucuuga

SEQ ID NO: 2945470 - RNA, 15 nt, Human
ugggacacccuguga

SEQ ID NO: 2945471 - RNA, 14 nt, Human
ugggacacccugug

SEQ ID NO: 2945472 - RNA, 21 nt, Human
ugggaaugaaugucaguguga

SEQ ID NO: 2945473 - RNA, 16 nt, Human
ugggaaugaaugucag

SEQ ID NO: 2945474 - RNA, 18 nt, Human
ugggaugauuggaggggg

SEQ ID NO: 2945475 - RNA, 13 nt, Human
ugggcagagcaga

SEQ ID NO: 2945476 - RNA, 14 nt, Human
ugggcagagcagag

SEQ ID NO: 2945477 - RNA, 17 nt, Human
ugggcagagcagagacc

SEQ ID NO: 2945478 - RNA, 15 nt, Human
ugggcagagcagaga

SEQ ID NO: 2945479 - RNA, 23 nt, Human
ugggcagcugccuccccuccucu

SEQ ID NO: 2945480 - RNA, 20 nt, Human
ugggcagcugccuccccucc

SEQ ID NO: 2945481 - RNA, 22 nt, Human
ugggcagcugccuccccuccuc

SEQ ID NO: 2945482 - RNA, 22 nt, Human
ugggcuucaguggcagcugcuu

SEQ ID NO: 2945483 - RNA, 21 nt, Human
ugggcuucaguggcagcugcu

SEQ ID NO: 2945484 - RNA, 15 nt, Human
ugggcuucauccucc

SEQ ID NO: 2945485 - RNA, 22 nt, Human
ugggcuuggggaccagagcugc

SEQ ID NO: 2945486 - RNA, 21 nt, Human
ugggcuugucuguagauuuua

SEQ ID NO: 2945487 - RNA, 23 nt, Human
ugggcuuggggaccagagcugcc

SEQ ID NO: 2945488 - RNA, 17 nt, Human
ugggcuugucuguagau

SEQ ID NO: 2945489 - RNA, 16 nt, Human
ugggggccucagugcc

SEQ ID NO: 2945490 - RNA, 19 nt, Human
uggggggcugaggugggag

SEQ ID NO: 2945491 - RNA, 20 nt, Human
ugacgccaucccagccccaa

SEQ ID NO: 2945492 - RNA, 19 nt, Human
ugacgccaucccagcccca

SEQ ID NO: 2945493 - RNA, 18 nt, Human
ugacgccaucccagcccc

SEQ ID NO: 2945494 - RNA, 17 nt, Human
ugacgccaucccagccc

SEQ ID NO: 2945495 - RNA, 22 nt, Human
ugaccuuucaauaggaaaaacu

SEQ ID NO: 2945496 - RNA, 18 nt, Human
ugaccuuucaauaggaaa

SEQ ID NO: 2945497 - RNA, 16 nt, Human
ugacgccaucccagcc

SEQ ID NO: 2945498 - RNA, 15 nt, Human
ugacgccaucccagc

SEQ ID NO: 2945499 - RNA, 14 nt, Human
ugacgccaucccag

SEQ ID NO: 2945500 - RNA, 13 nt, Human
ugacgccauccca

SEQ ID NO: 2945501 - RNA, 14 nt, Human
ugacugaauuucuu

SEQ ID NO: 2945502 - RNA, 15 nt, Human
ugacugaauuucuuu

SEQ ID NO: 2945503 - RNA, 12 nt, Human
ugacucuuaaga

SEQ ID NO: 2945504 - RNA, 13 nt, Human
ugacugaauuucu

SEQ ID NO: 2945505 - RNA, 19 nt, Human
ugaccauucuccaccugcc

SEQ ID NO: 2945506 - RNA, 15 nt, Human
ucuugaacuccuggc

SEQ ID NO: 2945507 - RNA, 22 nt, Human
ugaccauucuccaccugccagg

SEQ ID NO: 2945508 - RNA, 21 nt, Human
ugaccauucuccaccugccag

SEQ ID NO: 2945509 - RNA, 20 nt, Human
ugaccauucuccaccugcca

SEQ ID NO: 2945510 - RNA, 17 nt, Human
ucuugaauuguaaggaa

SEQ ID NO: 2945511 - RNA, 13 nt, Human
ugaccucugcagc

SEQ ID NO: 2945512 - RNA, 16 nt, Human
ugaccucugcagcaau

SEQ ID NO: 2945513 - RNA, 22 nt, Human
ugaccucaggugauccacccac

SEQ ID NO: 2945514 - RNA, 13 nt, Human
ugaccuuucaaua

SEQ ID NO: 2945515 - RNA, 14 nt, Human
ugaccuuucaauag

SEQ ID NO: 2945516 - RNA, 16 nt, Human
ugaccuuucaauagga

SEQ ID NO: 2945517 - RNA, 15 nt, Human
ugaccuuucaauagg

SEQ ID NO: 2945518 - RNA, 12 nt, Human
ugaccucugccu

SEQ ID NO: 2945519 - RNA, 23 nt, Human
ugaccucugcagcaauaaagcag

SEQ ID NO: 2945520 - RNA, 18 nt, Human
ugaccucugcagcaauaa

SEQ ID NO: 2945521 - RNA, 21 nt, Human
ugaccucugcagcaauaaagc

SEQ ID NO: 2945522 - RNA, 14 nt, Human
ugagccucacagca

SEQ ID NO: 2945523 - RNA, 15 nt, Human
ugagccucacagcag

SEQ ID NO: 2945524 - RNA, 13 nt, Human
ugagccucagcau

SEQ ID NO: 2945525 - RNA, 15 nt, Human
ugagccucagcaucc

SEQ ID NO: 2945526 - RNA, 16 nt, Human
ugagccucacagcagu

SEQ ID NO: 2945527 - RNA, 15 nt, Human
ugagcaucaggccag

SEQ ID NO: 2945528 - RNA, 14 nt, Human
ugagcaucaggcca

SEQ ID NO: 2945529 - RNA, 14 nt, Human
ugagaugcuagaac

SEQ ID NO: 2945530 - RNA, 16 nt, Human
ugagaugcuagaacuc

SEQ ID NO: 2945531 - RNA, 20 nt, Human
ugagaugcuagaacucccuu

SEQ ID NO: 2945532 - RNA, 20 nt, Human
ugagcagucaggaaagagaa

SEQ ID NO: 2945533 - RNA, 13 nt, Human
ugagcaucaggcc

SEQ ID NO: 2945534 - RNA, 17 nt, Human
ugagcagucaggaaaga

SEQ ID NO: 2945535 - RNA, 15 nt, Human
ugagcagucaggaaa

SEQ ID NO: 2945536 - RNA, 12 nt, Human
ugagacucuguc

SEQ ID NO: 2945537 - RNA, 13 nt, Human
ugagacucugucu

SEQ ID NO: 2945538 - RNA, 14 nt, Human
ugagacucugucuc

SEQ ID NO: 2945539 - RNA, 22 nt, Human
ugagaggcauccaguaucuuga

SEQ ID NO: 2945540 - RNA, 23 nt, Human
ugagaggcauccaguaucuugaa

SEQ ID NO: 2945541 - RNA, 19 nt, Human
ugagaggggaacagacugg

SEQ ID NO: 2945542 - RNA, 17 nt, Human
ugagaguagagucacug

SEQ ID NO: 2945543 - RNA, 12 nt, Human
ugagacccuguc

SEQ ID NO: 2945544 - RNA, 14 nt, Human
ugagacagcucugc

SEQ ID NO: 2945545 - RNA, 16 nt, Human
ugagacagcucugcau

SEQ ID NO: 2945546 - RNA, 18 nt, Human
ugagaaagacuauucaaa

SEQ ID NO: 2945547 - RNA, 17 nt, Human
ugagaaagacuauucaa

SEQ ID NO: 2945548 - RNA, 16 nt, Human
ugagaaagacuauuca

SEQ ID NO: 2945549 - RNA, 24 nt, Human
ugauaguuguaccgcaaugugacu

SEQ ID NO: 2945550 - RNA, 22 nt, Human
ugaucacggcucacugcagccu

SEQ ID NO: 2945551 - RNA, 21 nt, Human
ugauccacccaccucagccuc

SEQ ID NO: 2945552 - RNA, 22 nt, Human
ugauccacccaccucagccucc

SEQ ID NO: 2945553 - RNA, 21 nt, Human
ugaucuaggaagacuuuggaa

SEQ ID NO: 2945554 - RNA, 19 nt, Human
ugaucuaggaagacuuugg

SEQ ID NO: 2945555 - RNA, 13 nt, Human
ugaucauccacug

SEQ ID NO: 2945556 - RNA, 24 nt, Human
ugaucauccacugugccaugugcc

SEQ ID NO: 2945557 - RNA, 17 nt, Human
ugauccaagcugguccc

SEQ ID NO: 2945558 - RNA, 21 nt, Human
ugauccaagcuggucccacuc

SEQ ID NO: 2945559 - RNA, 15 nt, Human
ugauccacccaccuc

SEQ ID NO: 2945560 - RNA, 20 nt, Human
ugauccacccaccucagccu

SEQ ID NO: 2945561 - RNA, 22 nt, Human
ugaugcuucuucagagacuccu

SEQ ID NO: 2945562 - RNA, 21 nt, Human
ugaugcuucuucagagacucc

SEQ ID NO: 2945563 - RNA, 19 nt, Human
ugaugcuucuucagagacu

SEQ ID NO: 2945564 - RNA, 18 nt, Human
ugaugcuucuucagagac

SEQ ID NO: 2945565 - RNA, 16 nt, Human
ugauguaauuaugguu

SEQ ID NO: 2945566 - RNA, 14 nt, Human
ugaugccaugagga

SEQ ID NO: 2945567 - RNA, 22 nt, Human
ugaugaucuuugcagacaggca

SEQ ID NO: 2945568 - RNA, 23 nt, Human
ugaugaucuuugcagacaggcaa

SEQ ID NO: 2945569 - RNA, 20 nt, Human
ugaugaugaaaugaggucag

SEQ ID NO: 2945570 - RNA, 18 nt, Human
ugaucuuugcagacaggc

SEQ ID NO: 2945571 - RNA, 21 nt, Human
ugaucuuugcagacaggcaag

SEQ ID NO: 2945572 - RNA, 23 nt, Human
ugaucuuugcagacaggcaagca

SEQ ID NO: 2945573 - RNA, 19 nt, Human
ugaucuuugcagacaggca

SEQ ID NO: 2945574 - RNA, 20 nt, Human
ugaucuuugcagacaggcaa

SEQ ID NO: 2945575 - RNA, 23 nt, Human
ugauagcacagacccugcccugu

SEQ ID NO: 2945576 - RNA, 22 nt, Human
ugauagcacagacccugcccug

SEQ ID NO: 2945577 - RNA, 16 nt, Human
ugauagcacagacccu

SEQ ID NO: 2945578 - RNA, 15 nt, Human
ugauagcacagaccc

SEQ ID NO: 2945579 - RNA, 21 nt, Human
ugauagcacagacccugcccu

SEQ ID NO: 2945580 - RNA, 20 nt, Human
ugauagcacagacccugccc

SEQ ID NO: 2945581 - RNA, 18 nt, Human
ugauagcacagacccugc

SEQ ID NO: 2945582 - RNA, 17 nt, Human
ugauagcacagacccug

SEQ ID NO: 2945583 - RNA, 19 nt, Human
ugaguugauucagcucugc

SEQ ID NO: 2945584 - RNA, 16 nt, Human
ugaguugauucagcuc

SEQ ID NO: 2945585 - RNA, 15 nt, Human
ugagucgaggacagg

SEQ ID NO: 2945586 - RNA, 16 nt, Human
ugagucgaggacaggg

SEQ ID NO: 2945587 - RNA, 23 nt, Human
ugaguugauagcacagacccugc

SEQ ID NO: 2945588 - RNA, 21 nt, Human
ugaguugauagcacagacccu

SEQ ID NO: 2945589 - RNA, 21 nt, Human
ugaguccccuguuuguuucug

SEQ ID NO: 2945590 - RNA, 19 nt, Human
ugagguuucaaaccucccu

SEQ ID NO: 2945591 - RNA, 16 nt, Human
ugaggugcuauguucu

SEQ ID NO: 2945592 - RNA, 15 nt, Human
ugaggugcuauguuc

SEQ ID NO: 2945593 - RNA, 20 nt, Human
ugaguccccuguuuguuucu

SEQ ID NO: 2945594 - RNA, 18 nt, Human
ugaguccuggcaugggaa

SEQ ID NO: 2945595 - RNA, 11 nt, Human
ugaguccuggc

SEQ ID NO: 2945596 - RNA, 14 nt, Human
ugagucgaggacag

SEQ ID NO: 2945597 - RNA, 22 nt, Human
ugaguccuggcaugggaaugaa

SEQ ID NO: 2945598 - RNA, 19 nt, Human
ugaguccuggcaugggaau

SEQ ID NO: 2945599 - RNA, 20 nt, Human
ugaggucuguucuuuccaaa

SEQ ID NO: 2945600 - RNA, 14 nt, Human
ugaggucuguucuu

SEQ ID NO: 2945601 - RNA, 15 nt, Human
ugaggucuguucuuu

SEQ ID NO: 2945602 - RNA, 11 nt, Human
ugaggcugggc

SEQ ID NO: 2945603 - RNA, 12 nt, Human
ugccauccaggu

SEQ ID NO: 2945604 - RNA, 12 nt, Human
ugccauccaagu

SEQ ID NO: 2945605 - RNA, 15 nt, Human
ugccauccagguuca

SEQ ID NO: 2945606 - RNA, 17 nt, Human
ugccagguuuuuggucu

SEQ ID NO: 2945607 - RNA, 23 nt, Human
ugccagggccaugucagacacag

SEQ ID NO: 2945608 - RNA, 19 nt, Human
ugccaggaagccagcaggc

SEQ ID NO: 2945609 - RNA, 18 nt, Human
ugccaggaagccagcagg

SEQ ID NO: 2945610 - RNA, 16 nt, Human
ugccaggaagccagca

SEQ ID NO: 2945611 - RNA, 12 nt, Human
ugccaggaagcc

SEQ ID NO: 2945612 - RNA, 15 nt, Human
ugccauguuggccag

SEQ ID NO: 2945613 - RNA, 12 nt, Human
ugccauguuggc

SEQ ID NO: 2945614 - RNA, 16 nt, Human
ugccauguuggccagg

SEQ ID NO: 2945615 - RNA, 20 nt, Human
ugcccaccuggccucugcac

SEQ ID NO: 2945616 - RNA, 18 nt, Human
ugcccacgcuggagugca

SEQ ID NO: 2945617 - RNA, 19 nt, Human
ugcccaccuggccucugca

SEQ ID NO: 2945618 - RNA, 21 nt, Human
ugcccacucccugcaaccuga

SEQ ID NO: 2945619 - RNA, 15 nt, Human
ugccaugugccaggu

SEQ ID NO: 2945620 - RNA, 14 nt, Human
ugccaugugccagg

SEQ ID NO: 2945621 - RNA, 23 nt, Human
ugccaugagccgcccaaggccuu

SEQ ID NO: 2945622 - RNA, 20 nt, Human
ugccaugagccgcccaaggc

SEQ ID NO: 2945623 - RNA, 21 nt, Human
ugccaugagccgcccaaggcc

SEQ ID NO: 2945624 - RNA, 23 nt, Human
ugccaugaggaacaaggcaaggc

SEQ ID NO: 2945625 - RNA, 20 nt, Human
ugccaugaggaacaaggcaa

SEQ ID NO: 2945626 - RNA, 19 nt, Human
ugccaugagccgcccaagg

SEQ ID NO: 2945627 - RNA, 18 nt, Human
ugccaugagccgcccaag

SEQ ID NO: 2945628 - RNA, 15 nt, Human
ugcauguuugugauu

SEQ ID NO: 2945629 - RNA, 17 nt, Human
ugcaugguuuggagcug

SEQ ID NO: 2945630 - RNA, 17 nt, Human
ugcaugguuuagaaagc

SEQ ID NO: 2945631 - RNA, 17 nt, Human
ugcagauaaacaguagu

SEQ ID NO: 2945632 - RNA, 19 nt, Human
ugcagauaaacaguaguga

SEQ ID NO: 2945633 - RNA, 22 nt, Human
ugcagaguaggggucugucuuu

SEQ ID NO: 2945634 - RNA, 21 nt, Human
ugcauuauauuuauuacugua

SEQ ID NO: 2945635 - RNA, 12 nt, Human
ugcauuaucuag

SEQ ID NO: 2945636 - RNA, 17 nt, Human
ugcauuaucuagauacu

SEQ ID NO: 2945637 - RNA, 17 nt, Human
ugccugguggcagcugc

SEQ ID NO: 2945638 - RNA, 18 nt, Human
ugccugguggcagcugcg

SEQ ID NO: 2945639 - RNA, 19 nt, Human
ugccugguggcagcugcgg

SEQ ID NO: 2945640 - RNA, 19 nt, Human
ugccuggguggaugggcca

SEQ ID NO: 2945641 - RNA, 21 nt, Human
ugccucuucucuacucuaggg

SEQ ID NO: 2945642 - RNA, 13 nt, Human
ugccucugggacu

SEQ ID NO: 2945643 - RNA, 22 nt, Human
ugccuccuuugugaggaagccg

SEQ ID NO: 2945644 - RNA, 20 nt, Human
ugccuccuuugugaggaagc

SEQ ID NO: 2945645 - RNA, 21 nt, Human
ugccuccuuugugaggaagcc

SEQ ID NO: 2945646 - RNA, 21 nt, Human
ugcccugcccaccuggccucu

SEQ ID NO: 2945647 - RNA, 23 nt, Human
ugcccugcccaccuggccucugc

SEQ ID NO: 2945648 - RNA, 22 nt, Human
ugcccugcccaccuggccucug

SEQ ID NO: 2945649 - RNA, 17 nt, Human
ugcccuaaaguguauuu

SEQ ID NO: 2945650 - RNA, 19 nt, Human
ugcccuaaaguguauuuuu

SEQ ID NO: 2945651 - RNA, 19 nt, Human
ugccgucuaccugaggggc

SEQ ID NO: 2945652 - RNA, 17 nt, Human
ugccgucuaccugaggg

SEQ ID NO: 2945653 - RNA, 16 nt, Human
ugccgucuaccugagg

SEQ ID NO: 2945654 - RNA, 15 nt, Human
ugccgucuaccugag

SEQ ID NO: 2945655 - RNA, 15 nt, Human
ugauuuucauugcug

SEQ ID NO: 2945656 - RNA, 13 nt, Human
ugauuuucauugc

SEQ ID NO: 2945657 - RNA, 20 nt, Human
ugcaaaaaaaauuagccggg

SEQ ID NO: 2945658 - RNA, 15 nt, Human
ugcaaaaaaaauuag

SEQ ID NO: 2945659 - RNA, 23 nt, Human
ugauuuuuuuuuccuucagugcc

SEQ ID NO: 2945660 - RNA, 22 nt, Human
ugauuuuuuuuuccuucagugc

SEQ ID NO: 2945661 - RNA, 20 nt, Human
ugauuuuuuuuuccuucagu

SEQ ID NO: 2945662 - RNA, 19 nt, Human
ugauuuuuuuuuccuucag

SEQ ID NO: 2945663 - RNA, 17 nt, Human
ugauuuuuuuuuccuuc

SEQ ID NO: 2945664 - RNA, 16 nt, Human
ugauuuuuuuuuccuu

SEQ ID NO: 2945665 - RNA, 22 nt, Human
ugcaacucugaaggguaauuau

SEQ ID NO: 2945666 - RNA, 22 nt, Human
ugcaaccugauugugucucuug

SEQ ID NO: 2945667 - RNA, 20 nt, Human
ugcaaccugauugugucucu

SEQ ID NO: 2945668 - RNA, 19 nt, Human
ugcaaccugauugugucuc

SEQ ID NO: 2945669 - RNA, 18 nt, Human
ugcaaccuccgccucuug

SEQ ID NO: 2945670 - RNA, 20 nt, Human
ugcaaccuccgccucuuggg

SEQ ID NO: 2945671 - RNA, 21 nt, Human
ugcaaccuccgccucuugggu

SEQ ID NO: 2945672 - RNA, 14 nt, Human
ugcaacaggcuggg

SEQ ID NO: 2945673 - RNA, 15 nt, Human
ugcaacaggcugggc

SEQ ID NO: 2945674 - RNA, 16 nt, Human
ugcaacaggcugggcu

SEQ ID NO: 2945675 - RNA, 17 nt, Human
ugcaacaggcugggcuu

SEQ ID NO: 2945676 - RNA, 19 nt, Human
ugcaacaggcugggcuuca

SEQ ID NO: 2945677 - RNA, 20 nt, Human
ugcaacaggcugggcuucag

SEQ ID NO: 2945678 - RNA, 13 nt, Human
ugcaaccuccgcc

SEQ ID NO: 2945679 - RNA, 14 nt, Human
ugcaaccuccgccu

SEQ ID NO: 2945680 - RNA, 13 nt, Human
ugcaauggcagcc

SEQ ID NO: 2945681 - RNA, 14 nt, Human
ugcaauggcagccu

SEQ ID NO: 2945682 - RNA, 15 nt, Human
ugcaauggcagccuu

SEQ ID NO: 2945683 - RNA, 16 nt, Human
ugcaauggcagccuug

SEQ ID NO: 2945684 - RNA, 16 nt, Human
ugcaaugaccuuucaa

SEQ ID NO: 2945685 - RNA, 13 nt, Human
ugcaaugaccuuu

SEQ ID NO: 2945686 - RNA, 23 nt, Human
ugcaaugaccuuucaauaggaaa

SEQ ID NO: 2945687 - RNA, 22 nt, Human
ugcaaugaccuuucaauaggaa

SEQ ID NO: 2945688 - RNA, 19 nt, Human
ugcaaugaccuuucaauag

SEQ ID NO: 2945689 - RNA, 17 nt, Human
ugcaaugaccuuucaau

SEQ ID NO: 2945690 - RNA, 17 nt, Human
ugcacagaguuguuaca

SEQ ID NO: 2945691 - RNA, 18 nt, Human
ugcacagaguuguuacau

SEQ ID NO: 2945692 - RNA, 19 nt, Human
ugcacagaguuguuacauu

SEQ ID NO: 2945693 - RNA, 20 nt, Human
ugcacaaacagaggccgcca

SEQ ID NO: 2945694 - RNA, 19 nt, Human
ugcacaaacagaggccgcc

SEQ ID NO: 2945695 - RNA, 17 nt, Human
ugcacaaacagaggccg

SEQ ID NO: 2945696 - RNA, 16 nt, Human
ugcacaaacagaggcc

SEQ ID NO: 2945697 - RNA, 15 nt, Human
ugcacaaacagaggc

SEQ ID NO: 2945698 - RNA, 18 nt, Human
ugcaccggcuggccuggc

SEQ ID NO: 2945699 - RNA, 20 nt, Human
ugcaccggcuggccuggccc

SEQ ID NO: 2945700 - RNA, 19 nt, Human
ugcaccggcuggccuggcc

SEQ ID NO: 2945701 - RNA, 16 nt, Human
ugcacgcacacugucu

SEQ ID NO: 2945702 - RNA, 21 nt, Human
ugcaccggcuggccuggcccc

SEQ ID NO: 2945703 - RNA, 17 nt, Human
ugcaccuggaauauaua

SEQ ID NO: 2945704 - RNA, 20 nt, Human
ugcaccuggaauauauaacc

SEQ ID NO: 2945705 - RNA, 22 nt, Human
ugcaccuggaauauauaaccag

SEQ ID NO: 2945706 - RNA, 18 nt, Human
ugcacugacauuguuggc

SEQ ID NO: 2945707 - RNA, 21 nt, Human
ugcacugacauuguuggccaa

SEQ ID NO: 2945708 - RNA, 17 nt, Human
ugcacgcacacugucug

SEQ ID NO: 2945709 - RNA, 16 nt, Human
ugcacugucaagauga

SEQ ID NO: 2945710 - RNA, 21 nt, Human
uuuuaaaguaacccuacaaaa

SEQ ID NO: 2945711 - RNA, 23 nt, Human
uuuuauaauuuugugaagcaaaa

SEQ ID NO: 2945712 - RNA, 21 nt, Human
uuuuauaauuuugugaagcaa

SEQ ID NO: 2945713 - RNA, 15 nt, Human
uuuuacuaauagaca

SEQ ID NO: 2945714 - RNA, 13 nt, Human
uuuuaucuucuau

SEQ ID NO: 2945715 - RNA, 19 nt, Human
uuuuaucgucacugcuuaa

SEQ ID NO: 2945716 - RNA, 17 nt, Human
uuuucaaaauaaaaaug

SEQ ID NO: 2945717 - RNA, 18 nt, Human
uuuuauuuuuagacagag

SEQ ID NO: 2945718 - RNA, 13 nt, Human
uuuuauacauaaa

SEQ ID NO: 2945719 - RNA, 21 nt, Human
uuuuauacauaaacaagacca

SEQ ID NO: 2945720 - RNA, 13 nt, Human
uuuuauauagcaa

SEQ ID NO: 2945721 - RNA, 13 nt, Human
uuuuauauuugaa

SEQ ID NO: 2945722 - RNA, 18 nt, Human
uuuuauauuugaaauauu

SEQ ID NO: 2945723 - RNA, 15 nt, Human
uuuucaaauguucuc

SEQ ID NO: 2945724 - RNA, 16 nt, Human
uuuucacauuggaaac

SEQ ID NO: 2945725 - RNA, 22 nt, Human
uuuucccuauuagagaagagau

SEQ ID NO: 2945726 - RNA, 18 nt, Human
uuuucccuauuagagaag

SEQ ID NO: 2945727 - RNA, 16 nt, Human
uuuucuuucagccaag

SEQ ID NO: 2945728 - RNA, 13 nt, Human
uuuucuucucccu

SEQ ID NO: 2945729 - RNA, 22 nt, Human
uuuucuuguguguuuauuguca

SEQ ID NO: 2945730 - RNA, 13 nt, Human
uuuucuacucgag

SEQ ID NO: 2945731 - RNA, 13 nt, Human
uuuucuuauuuca

SEQ ID NO: 2945732 - RNA, 23 nt, Human
uuuucuacucgaguuacagacaa

SEQ ID NO: 2945733 - RNA, 22 nt, Human
uuuucuacucgaguuacagaca

SEQ ID NO: 2945734 - RNA, 20 nt, Human
uuuucuacucgaguuacaga

SEQ ID NO: 2945735 - RNA, 15 nt, Human
uuuccacagaagcuc

SEQ ID NO: 2945736 - RNA, 17 nt, Human
uuuccguuaaaauacca

SEQ ID NO: 2945737 - RNA, 13 nt, Human
uuugagugccuua

SEQ ID NO: 2945738 - RNA, 15 nt, Human
uuuccguuaaaauac

SEQ ID NO: 2945739 - RNA, 21 nt, Human
uuugagugccuuacacaaugg

SEQ ID NO: 2945740 - RNA, 22 nt, Human
uuugaguggaguuacugaacag

SEQ ID NO: 2945741 - RNA, 15 nt, Human
uuugcaggaaauccu

SEQ ID NO: 2945742 - RNA, 19 nt, Human
uuugcagugcaguauagaa

SEQ ID NO: 2945743 - RNA, 19 nt, Human
uuuggacaaaauggaauac

SEQ ID NO: 2945744 - RNA, 13 nt, Human
uuuggacccugag

SEQ ID NO: 2945745 - RNA, 12 nt, Human
uuuggaaaauaa

SEQ ID NO: 2945746 - RNA, 19 nt, Human
uuuggaaaggaaugcaaag

SEQ ID NO: 2945747 - RNA, 16 nt, Human
uuuggaaaggaaugca

SEQ ID NO: 2945748 - RNA, 17 nt, Human
uuuggaaaggaaugcaa

SEQ ID NO: 2945749 - RNA, 18 nt, Human
uuuggaaaggaaugcaaa

SEQ ID NO: 2945750 - RNA, 15 nt, Human
uuuuaaaauaagucu

SEQ ID NO: 2945751 - RNA, 22 nt, Human
uuuuaaaauaagucugauuuaa

SEQ ID NO: 2945752 - RNA, 15 nt, Human
uuuguugucagcuga

SEQ ID NO: 2945753 - RNA, 22 nt, Human
uuuguuaguaugaggcauuugu

SEQ ID NO: 2945754 - RNA, 15 nt, Human
uuuguauucucuccu

SEQ ID NO: 2945755 - RNA, 13 nt, Human
uuugguauuugaa

SEQ ID NO: 2945756 - RNA, 17 nt, Human
uuuguauaaaauaauuu

SEQ ID NO: 2945757 - RNA, 17 nt, Human
uuuggucuacacugugc

SEQ ID NO: 2945758 - RNA, 18 nt, Human
uuuguauaaaauaauuuu

SEQ ID NO: 2945759 - RNA, 19 nt, Human
uuuguauaaaauaauuuuu

SEQ ID NO: 2945760 - RNA, 21 nt, Human
uuuugaagauucuauguuaau

SEQ ID NO: 2945761 - RNA, 11 nt, Human
uuuuuaaaugc

SEQ ID NO: 2945762 - RNA, 12 nt, Human
uuuuuaagaaaa

SEQ ID NO: 2945763 - RNA, 16 nt, Human
uuuuuaagugcugcau

SEQ ID NO: 2945764 - RNA, 17 nt, Human
uuuuuaagugcugcauu

SEQ ID NO: 2945765 - RNA, 18 nt, Human
uuuuuaagugcugcauuu

SEQ ID NO: 2945766 - RNA, 19 nt, Human
uuuuuaagugcugcauuua

SEQ ID NO: 2945767 - RNA, 22 nt, Human
uuuuuaagugcugcauuuaaaa

SEQ ID NO: 2945768 - RNA, 23 nt, Human
uuuuuaagugcugcauuuaaaag

SEQ ID NO: 2945769 - RNA, 11 nt, Human
uuuuuuuacua

SEQ ID NO: 2945770 - RNA, 12 nt, Human
uuuuuuuuaaga

SEQ ID NO: 2945771 - RNA, 18 nt, Human
uuuuuuaaaauaagucug

SEQ ID NO: 2945772 - RNA, 13 nt, Human
uuuuuuuugacaa

SEQ ID NO: 2945773 - RNA, 16 nt, Human
uuuaaguuauuaagag

SEQ ID NO: 2945774 - RNA, 13 nt, Human
uuuaauaauguuu

SEQ ID NO: 2945775 - RNA, 18 nt, Human
uuuaagaaaaaggaugca

SEQ ID NO: 2945776 - RNA, 16 nt, Human
uuuaagacccucucaa

SEQ ID NO: 2945777 - RNA, 17 nt, Human
uuuaagaacuaaaaugu

SEQ ID NO: 2945778 - RNA, 22 nt, Human
uuuaagaaaaaggaugcacaga

SEQ ID NO: 2945779 - RNA, 18 nt, Human
uuuaacagaaauguacag

SEQ ID NO: 2945780 - RNA, 19 nt, Human
uuuaacucuauaauguguu

SEQ ID NO: 2945781 - RNA, 12 nt, Human
uuuagacagagu

SEQ ID NO: 2945782 - RNA, 14 nt, Human
uuuacuuuaaacua

SEQ ID NO: 2945783 - RNA, 19 nt, Human
uuuacuucuuauacauuug

SEQ ID NO: 2945784 - RNA, 22 nt, Human
uuuacuucuuauacauuugaua

SEQ ID NO: 2945785 - RNA, 14 nt, Human
uuuagaaauauaau

SEQ ID NO: 2945786 - RNA, 18 nt, Human
uuuacacacuguacacau

SEQ ID NO: 2945787 - RNA, 19 nt, Human
uuuacacacuguacacaua

SEQ ID NO: 2945788 - RNA, 23 nt, Human
uuuacacacuguacacauaagcc

SEQ ID NO: 2945789 - RNA, 21 nt, Human
uuuacacacuguacacauaag

SEQ ID NO: 2945790 - RNA, 22 nt, Human
uuuacacacuguacacauaagc

SEQ ID NO: 2945791 - RNA, 21 nt, Human
uuuaauagguuuggacaaaau

SEQ ID NO: 2945792 - RNA, 13 nt, Human
uuuacauuuuaca

SEQ ID NO: 2945793 - RNA, 13 nt, Human
uuuaccacuugug

SEQ ID NO: 2945794 - RNA, 14 nt, Human
uuucauuuagguga

SEQ ID NO: 2945795 - RNA, 18 nt, Human
uuucauuuaggugaggaa

SEQ ID NO: 2945796 - RNA, 13 nt, Human
uuucaguguacau

SEQ ID NO: 2945797 - RNA, 14 nt, Human
uuucaguguacaug

SEQ ID NO: 2945798 - RNA, 14 nt, Human
uuucaauaggaaaa

SEQ ID NO: 2945799 - RNA, 12 nt, Human
uuucaauaggaa

SEQ ID NO: 2945800 - RNA, 17 nt, Human
uuucaauaggaaaaacu

SEQ ID NO: 2945801 - RNA, 15 nt, Human
uuucaauuuuaaaca

SEQ ID NO: 2945802 - RNA, 21 nt, Human
uuucagauaaucacaauacau

SEQ ID NO: 2945803 - RNA, 16 nt, Human
uuucaauuuuaaacau

SEQ ID NO: 2945804 - RNA, 18 nt, Human
uuucaauuuuaaacauau

SEQ ID NO: 2945805 - RNA, 14 nt, Human
uuuauuuacaaaug

SEQ ID NO: 2945806 - RNA, 16 nt, Human
uuuauuuacaaauguu

SEQ ID NO: 2945807 - RNA, 12 nt, Human
uuuauuuaaaag

SEQ ID NO: 2945808 - RNA, 22 nt, Human
uuuauuguuuaaaaucauuucu

SEQ ID NO: 2945809 - RNA, 16 nt, Human
uuuauaacuuuuuaua

SEQ ID NO: 2945810 - RNA, 13 nt, Human
uuuauaacuuuuu

SEQ ID NO: 2945811 - RNA, 22 nt, Human
uuuauaauuuugugaagcaaaa

SEQ ID NO: 2945812 - RNA, 13 nt, Human
uuuauuaugcaug

SEQ ID NO: 2945813 - RNA, 13 nt, Human
uuuauuauggcac

SEQ ID NO: 2945814 - RNA, 17 nt, Human
uuuauggcacuaguauu

SEQ ID NO: 2945815 - RNA, 14 nt, Human
uuuauggcuuuugu

SEQ ID NO: 2945816 - RNA, 16 nt, Human
uuuauggcuuuugugc

SEQ ID NO: 2945817 - RNA, 20 nt, Human
uuguuagugugucuuagugu

SEQ ID NO: 2945818 - RNA, 22 nt, Human
uuguuaguaugaggcauuuguu

SEQ ID NO: 2945819 - RNA, 14 nt, Human
uuguuuaaaaucau

SEQ ID NO: 2945820 - RNA, 14 nt, Human
uuguuacauuuuua

SEQ ID NO: 2945821 - RNA, 19 nt, Human
uuguuaguaugaggcauuu

SEQ ID NO: 2945822 - RNA, 21 nt, Human
uuguuaguaugaggcauuugu

SEQ ID NO: 2945823 - RNA, 18 nt, Human
uuguguuuugcaagccag

SEQ ID NO: 2945824 - RNA, 13 nt, Human
uuguguucaccuu

SEQ ID NO: 2945825 - RNA, 22 nt, Human
uuguggauuuaacagaaaugua

SEQ ID NO: 2945826 - RNA, 23 nt, Human
uuguggauuuaacagaaauguac

SEQ ID NO: 2945827 - RNA, 20 nt, Human
uuguguugaagagguuuuaa

SEQ ID NO: 2945828 - RNA, 21 nt, Human
uuguguuuauauauaagccaa

SEQ ID NO: 2945829 - RNA, 20 nt, Human
uuguggauuuaacagaaaug

SEQ ID NO: 2945830 - RNA, 21 nt, Human
uuguggauuuaacagaaaugu

SEQ ID NO: 2945831 - RNA, 17 nt, Human
uuguggacacagcucuu

SEQ ID NO: 2945832 - RNA, 16 nt, Human
uuguggacacagcucu

SEQ ID NO: 2945833 - RNA, 17 nt, Human
uugugcauuaucuagau

SEQ ID NO: 2945834 - RNA, 12 nt, Human
uugugcauuugg

SEQ ID NO: 2945835 - RNA, 22 nt, Human
uugugcauuaucuagauacugu

SEQ ID NO: 2945836 - RNA, 23 nt, Human
uugugcauuaucuagauacugua

SEQ ID NO: 2945837 - RNA, 12 nt, Human
uugugccccugc

SEQ ID NO: 2945838 - RNA, 18 nt, Human
uugugccuaauguguuug

SEQ ID NO: 2945839 - RNA, 15 nt, Human
uugugccuaaugugu

SEQ ID NO: 2945840 - RNA, 18 nt, Human
uuguacauaaugcgugca

SEQ ID NO: 2945841 - RNA, 14 nt, Human
uuguacauaaugcg

SEQ ID NO: 2945842 - RNA, 15 nt, Human
uuguaaauuaacuuu

SEQ ID NO: 2945843 - RNA, 16 nt, Human
uuguaaauuaacuuuu

SEQ ID NO: 2945844 - RNA, 18 nt, Human
uuguaaauuaacuuuuau

SEQ ID NO: 2945845 - RNA, 23 nt, Human
uuguaaauuaacuuuuauaaacu

SEQ ID NO: 2945846 - RNA, 17 nt, Human
uuguaaauagcucaggu

SEQ ID NO: 2945847 - RNA, 22 nt, Human
uuggguucaagcgauucuucug

SEQ ID NO: 2945848 - RNA, 18 nt, Human
uuggguuacuauuucuug

SEQ ID NO: 2945849 - RNA, 13 nt, Human
uuggucuguguga

SEQ ID NO: 2945850 - RNA, 16 nt, Human
uuggucugugagaugc

SEQ ID NO: 2945851 - RNA, 15 nt, Human
uugguauuugaaaca

SEQ ID NO: 2945852 - RNA, 15 nt, Human
uuggucugugagaug

SEQ ID NO: 2945853 - RNA, 15 nt, Human
uuguauucucuccug

SEQ ID NO: 2945854 - RNA, 16 nt, Human
uuguauucucuccugu

SEQ ID NO: 2945855 - RNA, 19 nt, Human
uuguauucucuccuguacc

SEQ ID NO: 2945856 - RNA, 12 nt, Human
uugugauuuuug

SEQ ID NO: 2945857 - RNA, 16 nt, Human
uugugauuuuuguaau

SEQ ID NO: 2945858 - RNA, 17 nt, Human
uugugauuuuuguaauu

SEQ ID NO: 2945859 - RNA, 20 nt, Human
uugugaaaaaauuuacuuua

SEQ ID NO: 2945860 - RNA, 20 nt, Human
uugugaaaggaaagaggcuc

SEQ ID NO: 2945861 - RNA, 15 nt, Human
uugucuuaaaaagug

SEQ ID NO: 2945862 - RNA, 15 nt, Human
uugucuagugaaacu

SEQ ID NO: 2945863 - RNA, 16 nt, Human
uuauuaacaaaacagu

SEQ ID NO: 2945864 - RNA, 19 nt, Human
uuauuaagagguaagacuu

SEQ ID NO: 2945865 - RNA, 18 nt, Human
uuauuaagagguaagacu

SEQ ID NO: 2945866 - RNA, 21 nt, Human
uuauuaaaugcccagccccuu

SEQ ID NO: 2945867 - RNA, 19 nt, Human
uuauuaaaugcccagcccc

SEQ ID NO: 2945868 - RNA, 23 nt, Human
uuauuaaaaaucucaaauuucua

SEQ ID NO: 2945869 - RNA, 21 nt, Human
uuaugauugccuuuuuauaac

SEQ ID NO: 2945870 - RNA, 17 nt, Human
uuauggaacacucugag

SEQ ID NO: 2945871 - RNA, 21 nt, Human
uuauggacaaugacccagugg

SEQ ID NO: 2945872 - RNA, 20 nt, Human
uuauggaacacucugagacu

SEQ ID NO: 2945873 - RNA, 18 nt, Human
uuauggaacacucugaga

SEQ ID NO: 2945874 - RNA, 17 nt, Human
uuauggcuuuugugcau

SEQ ID NO: 2945875 - RNA, 14 nt, Human
uuauggcacaucag

SEQ ID NO: 2945876 - RNA, 18 nt, Human
uuauggcuauaggugcua

SEQ ID NO: 2945877 - RNA, 16 nt, Human
uuauggcuuuugugca

SEQ ID NO: 2945878 - RNA, 11 nt, Human
uuauccucugu

SEQ ID NO: 2945879 - RNA, 13 nt, Human
uuauauuugaaau

SEQ ID NO: 2945880 - RNA, 12 nt, Human
uuauauuugaaa

SEQ ID NO: 2945881 - RNA, 20 nt, Human
uuauauuuauuacuguaaga

SEQ ID NO: 2945882 - RNA, 16 nt, Human
uuauauuuacaaaugg

SEQ ID NO: 2945883 - RNA, 13 nt, Human
uuaucuuacgaaa

SEQ ID NO: 2945884 - RNA, 11 nt, Human
uuaucucaaaa

SEQ ID NO: 2945885 - RNA, 22 nt, Human
uuaugauuaaguaaugauaacu

SEQ ID NO: 2945886 - RNA, 15 nt, Human
uuaugauugccuuuu

SEQ ID NO: 2945887 - RNA, 19 nt, Human
uuauaucuauauuuuacau

SEQ ID NO: 2945888 - RNA, 23 nt, Human
uuauaucuauauuuuacauaaau

SEQ ID NO: 2945889 - RNA, 13 nt, Human
uuauacauaaaca

SEQ ID NO: 2945890 - RNA, 11 nt, Human
uuauacauaaa

SEQ ID NO: 2945891 - RNA, 18 nt, Human
uuauaauuuugugaagca

SEQ ID NO: 2945892 - RNA, 16 nt, Human
uuauaauuuugugaag

SEQ ID NO: 2945893 - RNA, 17 nt, Human
uuauaauuuugugaagc

SEQ ID NO: 2945894 - RNA, 16 nt, Human
uuauauucucagcaga

SEQ ID NO: 2945895 - RNA, 18 nt, Human
uuauauucucagcagagu

SEQ ID NO: 2945896 - RNA, 19 nt, Human
uuauauucucagcagagug

SEQ ID NO: 2945897 - RNA, 20 nt, Human
uuauauucucagcagagugc

SEQ ID NO: 2945898 - RNA, 21 nt, Human
uuauauucucagcagagugcu

SEQ ID NO: 2945899 - RNA, 17 nt, Human
ugugaaaagaaaaauga

SEQ ID NO: 2945900 - RNA, 15 nt, Human
ugugaaaagaaaaau

SEQ ID NO: 2945901 - RNA, 13 nt, Human
ugugaaaagaaaa

SEQ ID NO: 2945902 - RNA, 14 nt, Human
uuagugauguaauu

SEQ ID NO: 2945903 - RNA, 18 nt, Human
uuauaauaauguuaacau

SEQ ID NO: 2945904 - RNA, 15 nt, Human
uuauaauaauguuaa

SEQ ID NO: 2945905 - RNA, 11 nt, Human
uuauaaucuuu

SEQ ID NO: 2945906 - RNA, 15 nt, Human
uuauaaugaaugaaa

SEQ ID NO: 2945907 - RNA, 14 nt, Human
uuauaauuuuguga

SEQ ID NO: 2945908 - RNA, 15 nt, Human
uuauaauuuugugaa

SEQ ID NO: 2945909 - RNA, 12 nt, Human
uuauaauuuaaa

SEQ ID NO: 2945910 - RNA, 16 nt, Human
uuccaaaguacacugu

SEQ ID NO: 2945911 - RNA, 13 nt, Human
uuccaaaguacac

SEQ ID NO: 2945912 - RNA, 15 nt, Human
uuccauggacuuugu

SEQ ID NO: 2945913 - RNA, 14 nt, Human
uuccauggacuuug

SEQ ID NO: 2945914 - RNA, 19 nt, Human
uuccaacccucaucaccaa

SEQ ID NO: 2945915 - RNA, 18 nt, Human
uuccagauccuggaaauc

SEQ ID NO: 2945916 - RNA, 21 nt, Human
uucagcugguugagguuucaa

SEQ ID NO: 2945917 - RNA, 12 nt, Human
uucagcuccagc

SEQ ID NO: 2945918 - RNA, 15 nt, Human
uucagcuccagcuca

SEQ ID NO: 2945919 - RNA, 22 nt, Human
uucagcuuguaaauagcucagg

SEQ ID NO: 2945920 - RNA, 14 nt, Human
uucaguggcagcug

SEQ ID NO: 2945921 - RNA, 13 nt, Human
uucaguggcagcu

SEQ ID NO: 2945922 - RNA, 13 nt, Human
uucaguguacaug

SEQ ID NO: 2945923 - RNA, 12 nt, Human
uucaguguacau

SEQ ID NO: 2945924 - RNA, 17 nt, Human
uucaguggcagcugcuu

SEQ ID NO: 2945925 - RNA, 15 nt, Human
uucaguggcagcugc

SEQ ID NO: 2945926 - RNA, 16 nt, Human
uucaguggcagcugcu

SEQ ID NO: 2945927 - RNA, 15 nt, Human
uucauaaccuagccu

SEQ ID NO: 2945928 - RNA, 19 nt, Human
uucauccuccucagaucuu

SEQ ID NO: 2945929 - RNA, 15 nt, Human
uucauccuccucaga

SEQ ID NO: 2945930 - RNA, 23 nt, Human
uucaguuauuauauuuacaaaug

SEQ ID NO: 2945931 - RNA, 12 nt, Human
uucaauaacugg

SEQ ID NO: 2945932 - RNA, 16 nt, Human
uucaauaacuggaaca

SEQ ID NO: 2945933 - RNA, 22 nt, Human
uucaauaacuggaacacucuau

SEQ ID NO: 2945934 - RNA, 18 nt, Human
uucaaauguauuacagug

SEQ ID NO: 2945935 - RNA, 21 nt, Human
uucaacagguuuuccugaaga

SEQ ID NO: 2945936 - RNA, 22 nt, Human
uuauuuuggaaaauaaauuauu

SEQ ID NO: 2945937 - RNA, 17 nt, Human
uucaaauccuugaagau

SEQ ID NO: 2945938 - RNA, 18 nt, Human
uucaaaugcuguaacuuu

SEQ ID NO: 2945939 - RNA, 20 nt, Human
uuauuuggaaaggaaugcaa

SEQ ID NO: 2945940 - RNA, 21 nt, Human
uuauuugcagugcaguauaga

SEQ ID NO: 2945941 - RNA, 22 nt, Human
uuauuugaguggaguuacugaa

SEQ ID NO: 2945942 - RNA, 16 nt, Human
uuauuuggaaaggaau

SEQ ID NO: 2945943 - RNA, 17 nt, Human
uuauuuuaauaauguuu

SEQ ID NO: 2945944 - RNA, 19 nt, Human
uuauuuuaauaauguuuca

SEQ ID NO: 2945945 - RNA, 20 nt, Human
uuauuuuaauaauguuucaa

SEQ ID NO: 2945946 - RNA, 18 nt, Human
uuauuuuauuaugcauga

SEQ ID NO: 2945947 - RNA, 13 nt, Human
uucacccuuuucu

SEQ ID NO: 2945948 - RNA, 14 nt, Human
uucaccuuuguccc

SEQ ID NO: 2945949 - RNA, 20 nt, Human
uucaccuuuguccccaccgc

SEQ ID NO: 2945950 - RNA, 19 nt, Human
uucaccuuuguccccaccg

SEQ ID NO: 2945951 - RNA, 16 nt, Human
uucacaaaguaauuug

SEQ ID NO: 2945952 - RNA, 18 nt, Human
uucacaaaguaauuugga

SEQ ID NO: 2945953 - RNA, 21 nt, Human
uucaauaggaaaaacugauuu

SEQ ID NO: 2945954 - RNA, 22 nt, Human
uucaauaggaaaaacugauuuu

SEQ ID NO: 2945955 - RNA, 17 nt, Human
uucaccuccuaaaacaa

SEQ ID NO: 2945956 - RNA, 22 nt, Human
uucaccuuuguccccaccgcag

SEQ ID NO: 2945957 - RNA, 14 nt, Human
uucacgcccuuggc

SEQ ID NO: 2945958 - RNA, 13 nt, Human
uucacggaagagc

SEQ ID NO: 2945959 - RNA, 16 nt, Human
uucagacagcugccug

SEQ ID NO: 2945960 - RNA, 15 nt, Human
uucagacagcugccu

SEQ ID NO: 2945961 - RNA, 14 nt, Human
uucagacagcugcc

SEQ ID NO: 2945962 - RNA, 17 nt, Human
uucacggaagagccuug

SEQ ID NO: 2945963 - RNA, 14 nt, Human
uucagagcugcccu

SEQ ID NO: 2945964 - RNA, 15 nt, Human
uucagagcugcccuc

SEQ ID NO: 2945965 - RNA, 17 nt, Human
uucagagcugcccucuc

SEQ ID NO: 2945966 - RNA, 17 nt, Human
uucagacagcugccugg

SEQ ID NO: 2945967 - RNA, 18 nt, Human
uucagagcugcccucucc

SEQ ID NO: 2945968 - RNA, 19 nt, Human
uucagagcugcccucuccu

SEQ ID NO: 2945969 - RNA, 20 nt, Human
uucagagcugcccucuccug

SEQ ID NO: 2945970 - RNA, 20 nt, Human
uucagauaaucacaauacau

SEQ ID NO: 2945971 - RNA, 12 nt, Human
uucuacccagcg

SEQ ID NO: 2945972 - RNA, 19 nt, Human
uucuacccagcgagcccug

SEQ ID NO: 2945973 - RNA, 15 nt, Human
uucuacauacuaugg

SEQ ID NO: 2945974 - RNA, 13 nt, Human
uucuacgccaggg

SEQ ID NO: 2945975 - RNA, 20 nt, Human
uucuacccagcgagcccugg

SEQ ID NO: 2945976 - RNA, 21 nt, Human
uucuacccagcgagcccuggu

SEQ ID NO: 2945977 - RNA, 14 nt, Human
uucuacccaggugc

SEQ ID NO: 2945978 - RNA, 21 nt, Human
uucuauauaauuccuguuuuu

SEQ ID NO: 2945979 - RNA, 22 nt, Human
uucuacucgaguuacagacaaa

SEQ ID NO: 2945980 - RNA, 21 nt, Human
uucuauaauuuccauuuacuu

SEQ ID NO: 2945981 - RNA, 16 nt, Human
uuccauggccucuuca

SEQ ID NO: 2945982 - RNA, 12 nt, Human
uuccauggccuc

SEQ ID NO: 2945983 - RNA, 15 nt, Human
uuccugaggcugggc

SEQ ID NO: 2945984 - RNA, 20 nt, Human
uuccugaggcugggcucccu

SEQ ID NO: 2945985 - RNA, 23 nt, Human
uuccugaugcuucuucagagacu

SEQ ID NO: 2945986 - RNA, 14 nt, Human
uuccugcugagccu

SEQ ID NO: 2945987 - RNA, 21 nt, Human
uuccuugaguugauucagcuc

SEQ ID NO: 2945988 - RNA, 18 nt, Human
uucggugagcuacaaaug

SEQ ID NO: 2945989 - RNA, 20 nt, Human
uucuccaccugccagggaca

SEQ ID NO: 2945990 - RNA, 18 nt, Human
uucuccaccugccaggga

SEQ ID NO: 2945991 - RNA, 16 nt, Human
uucuccaccugccagg

SEQ ID NO: 2945992 - RNA, 15 nt, Human
uucuccaccugccag

SEQ ID NO: 2945993 - RNA, 14 nt, Human
uucuccaccugcca

SEQ ID NO: 2945994 - RNA, 12 nt, Human
uucuccaccugc

SEQ ID NO: 2945995 - RNA, 21 nt, Human
uucuccaccucccacaaagga

SEQ ID NO: 2945996 - RNA, 16 nt, Human
uucuccacccugcucu

SEQ ID NO: 2945997 - RNA, 14 nt, Human
uucuaugaaauauu

SEQ ID NO: 2945998 - RNA, 22 nt, Human
uucucauguugaaacuuuaaga

SEQ ID NO: 2945999 - RNA, 21 nt, Human
uucuaugaaauauuauguuaa

SEQ ID NO: 2946000 - RNA, 14 nt, Human
uucucuccagcccc

SEQ ID NO: 2946001 - RNA, 13 nt, Human
uucucuccagccc

SEQ ID NO: 2946002 - RNA, 16 nt, Human
uucucuccagccccug

SEQ ID NO: 2946003 - RNA, 15 nt, Human
uucucuccagccccu

SEQ ID NO: 2946004 - RNA, 14 nt, Human
uucucuccuguacc

SEQ ID NO: 2946005 - RNA, 18 nt, Human
uucucuccuguaccucuu

SEQ ID NO: 2946006 - RNA, 14 nt, Human
uucucugaggacac

SEQ ID NO: 2946007 - RNA, 20 nt, Human
uucucugaggacacuaacca

SEQ ID NO: 2946008 - RNA, 12 nt, Human
uucucugcccuc

SEQ ID NO: 2946009 - RNA, 11 nt, Human
uucucugcccu

SEQ ID NO: 2946010 - RNA, 19 nt, Human
uucucuccuguaccucuug

SEQ ID NO: 2946011 - RNA, 23 nt, Human
uucucuccucuccccaugauguu

SEQ ID NO: 2946012 - RNA, 19 nt, Human
uucugauccuaguuccacc

SEQ ID NO: 2946013 - RNA, 19 nt, Human
uucugcucacauaucuguc

SEQ ID NO: 2946014 - RNA, 21 nt, Human
uucugagaaagacuauucaaa

SEQ ID NO: 2946015 - RNA, 16 nt, Human
uucugagaaagacuau

SEQ ID NO: 2946016 - RNA, 18 nt, Human
uucugacccugcuucaaa

SEQ ID NO: 2946017 - RNA, 21 nt, Human
uucugacccugcuucaaauau

SEQ ID NO: 2946018 - RNA, 22 nt, Human
uucugacccaugcugcccugug

SEQ ID NO: 2946019 - RNA, 23 nt, Human
uucugacccaugcugcccuguga

SEQ ID NO: 2946020 - RNA, 17 nt, Human
uucucugcccuccaaga

SEQ ID NO: 2946021 - RNA, 16 nt, Human
uucucugcccuccaag

SEQ ID NO: 2946022 - RNA, 18 nt, Human
uugaacuggguacuugug

SEQ ID NO: 2946023 - RNA, 13 nt, Human
uugaacuuugacc

SEQ ID NO: 2946024 - RNA, 14 nt, Human
uugaauuguaagga

SEQ ID NO: 2946025 - RNA, 12 nt, Human
uugaauuuuaca

SEQ ID NO: 2946026 - RNA, 21 nt, Human
uugacuauuuuuguuuuuauu

SEQ ID NO: 2946027 - RNA, 15 nt, Human
uugacgccaucccag

SEQ ID NO: 2946028 - RNA, 19 nt, Human
uugacgccaucccagcccc

SEQ ID NO: 2946029 - RNA, 18 nt, Human
uugacgccaucccagccc

SEQ ID NO: 2946030 - RNA, 17 nt, Human
uugacgccaucccagcc

SEQ ID NO: 2946031 - RNA, 16 nt, Human
uugaccucugcagcaa

SEQ ID NO: 2946032 - RNA, 21 nt, Human
uugaccucaggugauccaccc

SEQ ID NO: 2946033 - RNA, 14 nt, Human
uugaccucugcagc

SEQ ID NO: 2946034 - RNA, 15 nt, Human
uugaccucugcagca

SEQ ID NO: 2946035 - RNA, 14 nt, Human
uugacccacaagaa

SEQ ID NO: 2946036 - RNA, 17 nt, Human
uugacccacaagaaaug

SEQ ID NO: 2946037 - RNA, 17 nt, Human
uugaccgugaggccaga

SEQ ID NO: 2946038 - RNA, 16 nt, Human
uugauugggcacauca

SEQ ID NO: 2946039 - RNA, 17 nt, Human
uugauugggcacaucau

SEQ ID NO: 2946040 - RNA, 22 nt, Human
uugauugggcacaucauuucaa

SEQ ID NO: 2946041 - RNA, 16 nt, Human
uugaugaucuuugcag

SEQ ID NO: 2946042 - RNA, 22 nt, Human
uugcaaauaaguguauuuugaa

SEQ ID NO: 2946043 - RNA, 21 nt, Human
uugcaaaguaucccuacugua

SEQ ID NO: 2946044 - RNA, 11 nt, Human
uugagccuggg

SEQ ID NO: 2946045 - RNA, 13 nt, Human
uugaggguugggc

SEQ ID NO: 2946046 - RNA, 16 nt, Human
uugaggguugggcugg

SEQ ID NO: 2946047 - RNA, 23 nt, Human
uugauagcacagacccugcccug

SEQ ID NO: 2946048 - RNA, 23 nt, Human
uugauauccucuuugagugaagc

SEQ ID NO: 2946049 - RNA, 23 nt, Human
uugaugaagaaguugauaugccu

SEQ ID NO: 2946050 - RNA, 13 nt, Human
uugaugaagaagu

SEQ ID NO: 2946051 - RNA, 14 nt, Human
uugaugaagaaguu

SEQ ID NO: 2946052 - RNA, 17 nt, Human
uucugucuucacaacag

SEQ ID NO: 2946053 - RNA, 19 nt, Human
uucuguccuacucuguguc

SEQ ID NO: 2946054 - RNA, 15 nt, Human
uucuggauauagcua

SEQ ID NO: 2946055 - RNA, 18 nt, Human
uucuguauuuuguuuuug

SEQ ID NO: 2946056 - RNA, 15 nt, Human
uucuggacuaaaacu

SEQ ID NO: 2946057 - RNA, 19 nt, Human
uucugcuucagccucccga

SEQ ID NO: 2946058 - RNA, 15 nt, Human
uucugcuucagccuc

SEQ ID NO: 2946059 - RNA, 16 nt, Human
uucugcuucagccucc

SEQ ID NO: 2946060 - RNA, 14 nt, Human
uucugcuucagccu

SEQ ID NO: 2946061 - RNA, 20 nt, Human
uucuucccaauagcaaggcu

SEQ ID NO: 2946062 - RNA, 21 nt, Human
uucuuauacauuugauaaagu

SEQ ID NO: 2946063 - RNA, 21 nt, Human
uucuuccacaagagcccaggc

SEQ ID NO: 2946064 - RNA, 12 nt, Human
uucuuucagcca

SEQ ID NO: 2946065 - RNA, 14 nt, Human
uucuuuccaaagua

SEQ ID NO: 2946066 - RNA, 21 nt, Human
uucuuguguguuuauugucaa

SEQ ID NO: 2946067 - RNA, 13 nt, Human
uucuuccucccuc

SEQ ID NO: 2946068 - RNA, 14 nt, Human
uucuuguguguuua

SEQ ID NO: 2946069 - RNA, 15 nt, Human
uugaacuccuggccu

SEQ ID NO: 2946070 - RNA, 16 nt, Human
uugaacuccuggccuc

SEQ ID NO: 2946071 - RNA, 21 nt, Human
uucuuuccaaaguacacuguu

SEQ ID NO: 2946072 - RNA, 20 nt, Human
uugaaaaaccauuuugcugu

SEQ ID NO: 2946073 - RNA, 23 nt, Human
uugaaaacacuguucucugcccu

SEQ ID NO: 2946074 - RNA, 22 nt, Human
uugaaaacacuguucucugccc

SEQ ID NO: 2946075 - RNA, 19 nt, Human
cuccgcuuucuacccagcg

SEQ ID NO: 2946076 - RNA, 12 nt, Human
cucccaccucag

SEQ ID NO: 2946077 - RNA, 14 nt, Human
cucccugcaauaaa

SEQ ID NO: 2946078 - RNA, 16 nt, Human
cucccugcaauaaaau

SEQ ID NO: 2946079 - RNA, 22 nt, Human
cuccagucauuauguuaauauu

SEQ ID NO: 2946080 - RNA, 11 nt, Human
cuccaggugca

SEQ ID NO: 2946081 - RNA, 20 nt, Human
cuccacuuucuagccagagg

SEQ ID NO: 2946082 - RNA, 22 nt, Human
cuccacuuucuagccagaggag

SEQ ID NO: 2946083 - RNA, 15 nt, Human
cuccaagaccuucuc

SEQ ID NO: 2946084 - RNA, 16 nt, Human
cuccaagaccuucucc

SEQ ID NO: 2946085 - RNA, 18 nt, Human
cuccaagaccuucuccuu

SEQ ID NO: 2946086 - RNA, 17 nt, Human
cuccaagaccuucuccu

SEQ ID NO: 2946087 - RNA, 18 nt, Human
cuccagaauuucccaaag

SEQ ID NO: 2946088 - RNA, 15 nt, Human
cuccagaauuuccca

SEQ ID NO: 2946089 - RNA, 19 nt, Human
cuccagacacauguccaag

SEQ ID NO: 2946090 - RNA, 17 nt, Human
cuccagacacaugucca

SEQ ID NO: 2946091 - RNA, 13 nt, Human
cucaggccugggg

SEQ ID NO: 2946092 - RNA, 20 nt, Human
cucaggccugggggcugggc

SEQ ID NO: 2946093 - RNA, 14 nt, Human
cucaggccuggggg

SEQ ID NO: 2946094 - RNA, 21 nt, Human
cucaggccugggggcugggca

SEQ ID NO: 2946095 - RNA, 23 nt, Human
cucagccucccgaauagcuggga

SEQ ID NO: 2946096 - RNA, 22 nt, Human
cucagccucccaaagugcuggg

SEQ ID NO: 2946097 - RNA, 13 nt, Human
cucagccucccga

SEQ ID NO: 2946098 - RNA, 21 nt, Human
cucagccucccaaagugcugg

SEQ ID NO: 2946099 - RNA, 14 nt, Human
cucagccucccaaa

SEQ ID NO: 2946100 - RNA, 16 nt, Human
cucagccucccaaagu

SEQ ID NO: 2946101 - RNA, 13 nt, Human
cucagccucccaa

SEQ ID NO: 2946102 - RNA, 13 nt, Human
cucaggccagcug

SEQ ID NO: 2946103 - RNA, 22 nt, Human
cucaggccagcugcuugggcuu

SEQ ID NO: 2946104 - RNA, 21 nt, Human
cucaggccagcugcuugggcu

SEQ ID NO: 2946105 - RNA, 20 nt, Human
cucaggccagcugcuugggc

SEQ ID NO: 2946106 - RNA, 14 nt, Human
cucaggccagcugc

SEQ ID NO: 2946107 - RNA, 12 nt, Human
cucaugcugcca

SEQ ID NO: 2946108 - RNA, 22 nt, Human
cucaugcugccaauauccuaau

SEQ ID NO: 2946109 - RNA, 14 nt, Human
cucaugcugccaau

SEQ ID NO: 2946110 - RNA, 12 nt, Human
cucauguucuua

SEQ ID NO: 2946111 - RNA, 14 nt, Human
cucauguucuuaau

SEQ ID NO: 2946112 - RNA, 18 nt, Human
cucauguucuuaauucuu

SEQ ID NO: 2946113 - RNA, 19 nt, Human
cucauguucuuaauucuua

SEQ ID NO: 2946114 - RNA, 13 nt, Human
cucagugccacua

SEQ ID NO: 2946115 - RNA, 17 nt, Human
cucagucuggcccuucc

SEQ ID NO: 2946116 - RNA, 18 nt, Human
cucagucuggcccuuccu

SEQ ID NO: 2946117 - RNA, 15 nt, Human
cucugaaggacauug

SEQ ID NO: 2946118 - RNA, 11 nt, Human
cucucuggccu

SEQ ID NO: 2946119 - RNA, 12 nt, Human
cucucuggccuu

SEQ ID NO: 2946120 - RNA, 21 nt, Human
cucuccgaccagacaccuuga

SEQ ID NO: 2946121 - RNA, 13 nt, Human
cucuauuucugga

SEQ ID NO: 2946122 - RNA, 14 nt, Human
cucucacuccuuga

SEQ ID NO: 2946123 - RNA, 12 nt, Human
cucucacuccuu

SEQ ID NO: 2946124 - RNA, 15 nt, Human
cucucacuccuugaa

SEQ ID NO: 2946125 - RNA, 21 nt, Human
cucucacuuguuuuauuuaac

SEQ ID NO: 2946126 - RNA, 19 nt, Human
cucucagauuguaccauug

SEQ ID NO: 2946127 - RNA, 13 nt, Human
cucugcagcaaua

SEQ ID NO: 2946128 - RNA, 23 nt, Human
cucugcagcaauaaagcagcguu

SEQ ID NO: 2946129 - RNA, 18 nt, Human
cucugcagcaauaaagca

SEQ ID NO: 2946130 - RNA, 19 nt, Human
cucugcagcaauaaagcag

SEQ ID NO: 2946131 - RNA, 15 nt, Human
cucugguuaucuaau

SEQ ID NO: 2946132 - RNA, 19 nt, Human
cucugguccauagagagca

SEQ ID NO: 2946133 - RNA, 18 nt, Human
cucugguccauagagagc

SEQ ID NO: 2946134 - RNA, 16 nt, Human
cucugguccauagaga

SEQ ID NO: 2946135 - RNA, 17 nt, Human
cucugcugacagacaca

SEQ ID NO: 2946136 - RNA, 18 nt, Human
cucugcugacagacacag

SEQ ID NO: 2946137 - RNA, 19 nt, Human
cucugcugacagacacagg

SEQ ID NO: 2946138 - RNA, 15 nt, Human
cucugguccauagag

SEQ ID NO: 2946139 - RNA, 21 nt, Human
cucuguacagagcccacgccc

SEQ ID NO: 2946140 - RNA, 17 nt, Human
cucuguacagagcccac

SEQ ID NO: 2946141 - RNA, 15 nt, Human
cucuuagaugcaguu

SEQ ID NO: 2946142 - RNA, 15 nt, Human
cugacagacacaggc

SEQ ID NO: 2946143 - RNA, 12 nt, Human
cugacagacaca

SEQ ID NO: 2946144 - RNA, 14 nt, Human
cugacagacacagg

SEQ ID NO: 2946145 - RNA, 23 nt, Human
cugacccugcuucaaauauuucc

SEQ ID NO: 2946146 - RNA, 20 nt, Human
cugacccaugcugcccugug

SEQ ID NO: 2946147 - RNA, 19 nt, Human
cugacccaugcugcccugu

SEQ ID NO: 2946148 - RNA, 17 nt, Human
cugacccaugcugcccu

SEQ ID NO: 2946149 - RNA, 18 nt, Human
cugacccaugcugcccug

SEQ ID NO: 2946150 - RNA, 16 nt, Human
cugaaaauguaugugu

SEQ ID NO: 2946151 - RNA, 19 nt, Human
cugaaggacauugcggaca

SEQ ID NO: 2946152 - RNA, 20 nt, Human
cugaaggacauugcggacag

SEQ ID NO: 2946153 - RNA, 21 nt, Human
cugaaggacauugcggacagc

SEQ ID NO: 2946154 - RNA, 17 nt, Human
cugaaggccccgcccag

SEQ ID NO: 2946155 - RNA, 17 nt, Human
cugaaggcuggguucug

SEQ ID NO: 2946156 - RNA, 14 nt, Human
cugaaggccccgcc

SEQ ID NO: 2946157 - RNA, 13 nt, Human
cugaaggccccgc

SEQ ID NO: 2946158 - RNA, 20 nt, Human
cucuuagaugcaguucugaa

SEQ ID NO: 2946159 - RNA, 12 nt, Human
ccuuuuuuauac

SEQ ID NO: 2946160 - RNA, 23 nt, Human
cgaccagacaccuugacagggca

SEQ ID NO: 2946161 - RNA, 15 nt, Human
cgacagugagacucu

SEQ ID NO: 2946162 - RNA, 16 nt, Human
cgacagugagacucug

SEQ ID NO: 2946163 - RNA, 17 nt, Human
ccuuuuuuauacauaaa

SEQ ID NO: 2946164 - RNA, 18 nt, Human
ccuuuuuuauacauaaac

SEQ ID NO: 2946165 - RNA, 21 nt, Human
ccuuggacauuuuaugucuuu

SEQ ID NO: 2946166 - RNA, 18 nt, Human
ccuuggacauuuuauguc

SEQ ID NO: 2946167 - RNA, 16 nt, Human
ccuuggacauuuuaug

SEQ ID NO: 2946168 - RNA, 14 nt, Human
ccuuuagcgcccag

SEQ ID NO: 2946169 - RNA, 20 nt, Human
ccuuuagcgcccaguugggu

SEQ ID NO: 2946170 - RNA, 20 nt, Human
ccuuuucgcaggauucuucc

SEQ ID NO: 2946171 - RNA, 17 nt, Human
ccuugcccagccuggau

SEQ ID NO: 2946172 - RNA, 20 nt, Human
ccuugccgucuaccugaggg

SEQ ID NO: 2946173 - RNA, 14 nt, Human
ccuugcccagccug

SEQ ID NO: 2946174 - RNA, 16 nt, Human
ccuugcccagccugga

SEQ ID NO: 2946175 - RNA, 13 nt, Human
ccuugcccagccu

SEQ ID NO: 2946176 - RNA, 17 nt, Human
ccuugccgucuaccuga

SEQ ID NO: 2946177 - RNA, 20 nt, Human
ccuggccugagcugggauga

SEQ ID NO: 2946178 - RNA, 15 nt, Human
ccuggccugagcugg

SEQ ID NO: 2946179 - RNA, 14 nt, Human
ccuggccugagcug

SEQ ID NO: 2946180 - RNA, 20 nt, Human
ccuucugacccaugcugccc

SEQ ID NO: 2946181 - RNA, 17 nt, Human
ccuucugacccaugcug

SEQ ID NO: 2946182 - RNA, 16 nt, Human
ccuucugacccaugcu

SEQ ID NO: 2946183 - RNA, 12 nt, Human
ccuucugaccca

SEQ ID NO: 2946184 - RNA, 22 nt, Human
ccuucuggaauaaggagaauga

SEQ ID NO: 2946185 - RNA, 23 nt, Human
ccuucugacccaugcugcccugu

SEQ ID NO: 2946186 - RNA, 22 nt, Human
ccuucugacccaugcugcccug

SEQ ID NO: 2946187 - RNA, 21 nt, Human
ccuucugacccaugcugcccu

SEQ ID NO: 2946188 - RNA, 12 nt, Human
cgccaaggcugg

SEQ ID NO: 2946189 - RNA, 16 nt, Human
cgccaaggcuggggga

SEQ ID NO: 2946190 - RNA, 13 nt, Human
cgccaaggcuggg

SEQ ID NO: 2946191 - RNA, 18 nt, Human
cgaguuacagacaaagcg

SEQ ID NO: 2946192 - RNA, 17 nt, Human
cgaguuacagacaaagc

SEQ ID NO: 2946193 - RNA, 13 nt, Human
cgaguagcuggga

SEQ ID NO: 2946194 - RNA, 14 nt, Human
cgaguagcugggac

SEQ ID NO: 2946195 - RNA, 15 nt, Human
cgaguagcugggacu

SEQ ID NO: 2946196 - RNA, 17 nt, Human
cggagcacacuggcuca

SEQ ID NO: 2946197 - RNA, 17 nt, Human
cggcucacugcagccuc

SEQ ID NO: 2946198 - RNA, 19 nt, Human
cggcucacugcagccucaa

SEQ ID NO: 2946199 - RNA, 18 nt, Human
cggcucacugcagccuca

SEQ ID NO: 2946200 - RNA, 15 nt, Human
cggccuuuggcuuca

SEQ ID NO: 2946201 - RNA, 14 nt, Human
cggagucccaccuu

SEQ ID NO: 2946202 - RNA, 18 nt, Human
cuaagugaggaugaaaaa

SEQ ID NO: 2946203 - RNA, 20 nt, Human
cuaagugauccucccaccuc

SEQ ID NO: 2946204 - RNA, 22 nt, Human
cuaagugauccucccaccucag

SEQ ID NO: 2946205 - RNA, 13 nt, Human
cuacaguugaaaa

SEQ ID NO: 2946206 - RNA, 18 nt, Human
cuacaguccucccaucuc

SEQ ID NO: 2946207 - RNA, 17 nt, Human
cuacaguccucccaucu

SEQ ID NO: 2946208 - RNA, 16 nt, Human
cuacaguccucccauc

SEQ ID NO: 2946209 - RNA, 15 nt, Human
cuacaguccucccau

SEQ ID NO: 2946210 - RNA, 18 nt, Human
cuacauacaauuccaaac

SEQ ID NO: 2946211 - RNA, 15 nt, Human
cuacaugagguacug

SEQ ID NO: 2946212 - RNA, 20 nt, Human
cuaagugaaauaagccagac

SEQ ID NO: 2946213 - RNA, 23 nt, Human
cuaagugaaauaagccagacauc

SEQ ID NO: 2946214 - RNA, 16 nt, Human
cuaacuucaccauauu

SEQ ID NO: 2946215 - RNA, 16 nt, Human
cuaacuuuccuucauu

SEQ ID NO: 2946216 - RNA, 15 nt, Human
cuaacuucaccauau

SEQ ID NO: 2946217 - RNA, 14 nt, Human
cuaguuccaccauc

SEQ ID NO: 2946218 - RNA, 20 nt, Human
cuaguuccaccaucaagcca

SEQ ID NO: 2946219 - RNA, 18 nt, Human
cuaguuccaccaucaagc

SEQ ID NO: 2946220 - RNA, 21 nt, Human
cuagggaaaaaccagcgugug

SEQ ID NO: 2946221 - RNA, 19 nt, Human
cuagggaaaaaccagcgug

SEQ ID NO: 2946222 - RNA, 22 nt, Human
cuauaacaaaggauacuuauuu

SEQ ID NO: 2946223 - RNA, 18 nt, Human
cuauaacaaaggauacuu

SEQ ID NO: 2946224 - RNA, 23 nt, Human
cuaguugaucagcuuauugucua

SEQ ID NO: 2946225 - RNA, 22 nt, Human
cuaguuccaccaucaagccacc

SEQ ID NO: 2946226 - RNA, 14 nt, Human
cuaccugaggggcc

SEQ ID NO: 2946227 - RNA, 11 nt, Human
cuaccugaggg

SEQ ID NO: 2946228 - RNA, 19 nt, Human
cuagaaauuccccacccug

SEQ ID NO: 2946229 - RNA, 23 nt, Human
cuagcagcagggagggcuucugc

SEQ ID NO: 2946230 - RNA, 16 nt, Human
cuagcaugaagacaga

SEQ ID NO: 2946231 - RNA, 17 nt, Human
cuagcauggcugccaau

SEQ ID NO: 2946232 - RNA, 12 nt, Human
cuagcagcaggg

SEQ ID NO: 2946233 - RNA, 22 nt, Human
cuagcagcagggagggcuucug

SEQ ID NO: 2946234 - RNA, 16 nt, Human
cuagaacucccuuuca

SEQ ID NO: 2946235 - RNA, 17 nt, Human
cuagaacucccuuucaa

SEQ ID NO: 2946236 - RNA, 18 nt, Human
cuagaacucccuuucaac

SEQ ID NO: 2946237 - RNA, 19 nt, Human
cuagaacucccuuucaaca

SEQ ID NO: 2946238 - RNA, 13 nt, Human
cccugcccugugg

SEQ ID NO: 2946239 - RNA, 12 nt, Human
cccugcccugug

SEQ ID NO: 2946240 - RNA, 11 nt, Human
cccugcccugu

SEQ ID NO: 2946241 - RNA, 14 nt, Human
cccugcccuguggg

SEQ ID NO: 2946242 - RNA, 15 nt, Human
cccugcccugugggc

SEQ ID NO: 2946243 - RNA, 20 nt, Human
cccugcccugugggccccca

SEQ ID NO: 2946244 - RNA, 16 nt, Human
cccugcccugugggcc

SEQ ID NO: 2946245 - RNA, 13 nt, Human
cccuggcagcccc

SEQ ID NO: 2946246 - RNA, 12 nt, Human
cccuggcagccc

SEQ ID NO: 2946247 - RNA, 21 nt, Human
cccugcccugugggcccccaa

SEQ ID NO: 2946248 - RNA, 16 nt, Human
cccuggcagccccugu

SEQ ID NO: 2946249 - RNA, 14 nt, Human
cccuggcagccccu

SEQ ID NO: 2946250 - RNA, 16 nt, Human
ccgccaugcuccuggc

SEQ ID NO: 2946251 - RNA, 20 nt, Human
ccgcccaggcuuagucacug

SEQ ID NO: 2946252 - RNA, 18 nt, Human
ccgaccagacaccuugac

SEQ ID NO: 2946253 - RNA, 20 nt, Human
ccgaauagcugggacuacag

SEQ ID NO: 2946254 - RNA, 16 nt, Human
ccgacccuugccgucu

SEQ ID NO: 2946255 - RNA, 17 nt, Human
ccgccaaggcuggggga

SEQ ID NO: 2946256 - RNA, 16 nt, Human
cccuucgcuccugugu

SEQ ID NO: 2946257 - RNA, 18 nt, Human
cccuucgcuccugugucu

SEQ ID NO: 2946258 - RNA, 16 nt, Human
cccuucuaccuuccug

SEQ ID NO: 2946259 - RNA, 13 nt, Human
cccuucucuguau

SEQ ID NO: 2946260 - RNA, 21 nt, Human
cccuucugacccaugcugccc

SEQ ID NO: 2946261 - RNA, 23 nt, Human
cccuucugacccaugcugcccug

SEQ ID NO: 2946262 - RNA, 22 nt, Human
cccuucugacccaugcugcccu

SEQ ID NO: 2946263 - RNA, 19 nt, Human
ccuaggacccgucuccagc

SEQ ID NO: 2946264 - RNA, 20 nt, Human
ccuaggacccgucuccagcu

SEQ ID NO: 2946265 - RNA, 21 nt, Human
ccuaggacccgucuccagcug

SEQ ID NO: 2946266 - RNA, 22 nt, Human
ccuaggacccgucuccagcugc

SEQ ID NO: 2946267 - RNA, 18 nt, Human
ccuaggacccgucuccag

SEQ ID NO: 2946268 - RNA, 20 nt, Human
ccuaaguaucaaguauagaa

SEQ ID NO: 2946269 - RNA, 15 nt, Human
ccgucuccagcugcu

SEQ ID NO: 2946270 - RNA, 24 nt, Human
ccguagacgugcacgcacacuguc

SEQ ID NO: 2946271 - RNA, 16 nt, Human
ccguagguuauuuuca

SEQ ID NO: 2946272 - RNA, 16 nt, Human
ccucaaccuccugggc

SEQ ID NO: 2946273 - RNA, 11 nt, Human
ccucagccucc

SEQ ID NO: 2946274 - RNA, 22 nt, Human
ccucagccucccaaagugcugg

SEQ ID NO: 2946275 - RNA, 15 nt, Human
ccucaagagaaggca

SEQ ID NO: 2946276 - RNA, 15 nt, Human
ccucaacucuccucc

SEQ ID NO: 2946277 - RNA, 19 nt, Human
ccucauguucuuaauucuu

SEQ ID NO: 2946278 - RNA, 22 nt, Human
ccucccaaggggcccaaauucu

SEQ ID NO: 2946279 - RNA, 20 nt, Human
ccucauguccacugguucuu

SEQ ID NO: 2946280 - RNA, 13 nt, Human
ccucauguucuua

SEQ ID NO: 2946281 - RNA, 23 nt, Human
ccucagccucccaaagugcuggg

SEQ ID NO: 2946282 - RNA, 22 nt, Human
ccucagccucccgaauagcugg

SEQ ID NO: 2946283 - RNA, 15 nt, Human
ccucauguccacugg

SEQ ID NO: 2946284 - RNA, 15 nt, Human
ccuggaguucugguu

SEQ ID NO: 2946285 - RNA, 17 nt, Human
ccuggaguucugguucc

SEQ ID NO: 2946286 - RNA, 16 nt, Human
ccuggaguucugguuc

SEQ ID NO: 2946287 - RNA, 13 nt, Human
ccuggaugcagcc

SEQ ID NO: 2946288 - RNA, 19 nt, Human
ccuggaugcagccucacag

SEQ ID NO: 2946289 - RNA, 17 nt, Human
ccuggaugcagccucac

SEQ ID NO: 2946290 - RNA, 14 nt, Human
ccuggaugcagccu

SEQ ID NO: 2946291 - RNA, 20 nt, Human
ccugcuggguguggcgcagc

SEQ ID NO: 2946292 - RNA, 14 nt, Human
ccugcugggugugg

SEQ ID NO: 2946293 - RNA, 12 nt, Human
ccugcugggugu

SEQ ID NO: 2946294 - RNA, 14 nt, Human
ccugcccaggcccc

SEQ ID NO: 2946295 - RNA, 15 nt, Human
ccugcccaggccccu

SEQ ID NO: 2946296 - RNA, 22 nt, Human
ccugcccaggccccugccaccc

SEQ ID NO: 2946297 - RNA, 16 nt, Human
ccugcccaggccccug

SEQ ID NO: 2946298 - RNA, 12 nt, Human
ccuggccucugc

SEQ ID NO: 2946299 - RNA, 13 nt, Human
ccuggccugagcu

SEQ ID NO: 2946300 - RNA, 15 nt, Human
ccuggccucugcacu

SEQ ID NO: 2946301 - RNA, 14 nt, Human
ccuggccucugcac

SEQ ID NO: 2946302 - RNA, 18 nt, Human
ccugagagcugcaugugu

SEQ ID NO: 2946303 - RNA, 12 nt, Human
ccugagagcugc

SEQ ID NO: 2946304 - RNA, 19 nt, Human
ccugcacuugcagacucua

SEQ ID NO: 2946305 - RNA, 22 nt, Human
ccugcacuugcagacucuacag

SEQ ID NO: 2946306 - RNA, 13 nt, Human
ccucuuggguuca

SEQ ID NO: 2946307 - RNA, 13 nt, Human
ccucuugagccuu

SEQ ID NO: 2946308 - RNA, 19 nt, Human
ccucuugagccuugaacuu

SEQ ID NO: 2946309 - RNA, 21 nt, Human
ccucugccugaagucacacag

SEQ ID NO: 2946310 - RNA, 22 nt, Human
ccucugccugaagucacacagu

SEQ ID NO: 2946311 - RNA, 14 nt, Human
ccucugcugcuggc

SEQ ID NO: 2946312 - RNA, 13 nt, Human
ccucugcugcugg

SEQ ID NO: 2946313 - RNA, 18 nt, Human
ccucugcugcuggcuggu

SEQ ID NO: 2946314 - RNA, 17 nt, Human
ccucugcugcuggcugg

SEQ ID NO: 2946315 - RNA, 16 nt, Human
ccucugcugcuggcug

SEQ ID NO: 2946316 - RNA, 15 nt, Human
ccucugcugcuggcu

SEQ ID NO: 2946317 - RNA, 14 nt, Human
ccucucucaggcca

SEQ ID NO: 2946318 - RNA, 12 nt, Human
ccucucucaggc

SEQ ID NO: 2946319 - RNA, 17 nt, Human
ccucucucacuccuuga

SEQ ID NO: 2946320 - RNA, 15 nt, Human
ccucucucacuccuu

SEQ ID NO: 2946321 - RNA, 14 nt, Human
ccucucucacuccu

SEQ ID NO: 2946322 - RNA, 13 nt, Human
ccucucucacucc

SEQ ID NO: 2946323 - RNA, 12 nt, Human
ccucucucacuc

SEQ ID NO: 2946324 - RNA, 13 nt, Human
ccucugcuugcca

SEQ ID NO: 2946325 - RNA, 19 nt, Human
ccaggcuggcgugcagugg

SEQ ID NO: 2946326 - RNA, 17 nt, Human
ccaggcuggcgugcagu

SEQ ID NO: 2946327 - RNA, 18 nt, Human
ccaggcuggcgugcagug

SEQ ID NO: 2946328 - RNA, 16 nt, Human
ccaggcuggcgugcag

SEQ ID NO: 2946329 - RNA, 20 nt, Human
ccaggcuccuuuagcgccca

SEQ ID NO: 2946330 - RNA, 21 nt, Human
ccaggcuccuuuagcgcccag

SEQ ID NO: 2946331 - RNA, 19 nt, Human
ccaggggaaaaucagccug

SEQ ID NO: 2946332 - RNA, 13 nt, Human
ccaggggugggac

SEQ ID NO: 2946333 - RNA, 20 nt, Human
ccaggggaaaaucagccugc

SEQ ID NO: 2946334 - RNA, 17 nt, Human
ccaggggugggacaccc

SEQ ID NO: 2946335 - RNA, 14 nt, Human
ccaggggugggaca

SEQ ID NO: 2946336 - RNA, 23 nt, Human
ccaggggugggacacccugugau

SEQ ID NO: 2946337 - RNA, 17 nt, Human
ccaguuggguggaugcc

SEQ ID NO: 2946338 - RNA, 19 nt, Human
ccaguuggguggaugccug

SEQ ID NO: 2946339 - RNA, 20 nt, Human
ccaguuggguggaugccugg

SEQ ID NO: 2946340 - RNA, 21 nt, Human
ccaugucagacacagauuggc

SEQ ID NO: 2946341 - RNA, 13 nt, Human
ccaugucagacac

SEQ ID NO: 2946342 - RNA, 15 nt, Human
ccaugucagacacag

SEQ ID NO: 2946343 - RNA, 20 nt, Human
ccauggucggaaaacaugcu

SEQ ID NO: 2946344 - RNA, 21 nt, Human
ccaugagccucagcauccugg

SEQ ID NO: 2946345 - RNA, 23 nt, Human
ccaugagccucagcauccuggca

SEQ ID NO: 2946346 - RNA, 20 nt, Human
ccaucccugaaggccccgcc

SEQ ID NO: 2946347 - RNA, 17 nt, Human
ccaucccugaaggcccc

SEQ ID NO: 2946348 - RNA, 15 nt, Human
ccaucccugaaggcc

SEQ ID NO: 2946349 - RNA, 14 nt, Human
ccaucccugaaggc

SEQ ID NO: 2946350 - RNA, 23 nt, Human
ccaguuggucccccuuccaugga

SEQ ID NO: 2946351 - RNA, 15 nt, Human
ccaucccagccccaa

SEQ ID NO: 2946352 - RNA, 13 nt, Human
ccaucccagcccc

SEQ ID NO: 2946353 - RNA, 14 nt, Human
ccaucccagcccca

SEQ ID NO: 2946354 - RNA, 16 nt, Human
ccaggaaaggcuccag

SEQ ID NO: 2946355 - RNA, 15 nt, Human
ccaggaaaggcucca

SEQ ID NO: 2946356 - RNA, 14 nt, Human
ccaggaaaggcucc

SEQ ID NO: 2946357 - RNA, 12 nt, Human
ccaggaagccag

SEQ ID NO: 2946358 - RNA, 13 nt, Human
ccaggaagccagc

SEQ ID NO: 2946359 - RNA, 19 nt, Human
ccagcuuaaaggggcuaga

SEQ ID NO: 2946360 - RNA, 17 nt, Human
ccagcuguucagcuggu

SEQ ID NO: 2946361 - RNA, 22 nt, Human
ccagcucaccagccccagugcc

SEQ ID NO: 2946362 - RNA, 16 nt, Human
ccagcuguucagcugg

SEQ ID NO: 2946363 - RNA, 15 nt, Human
ccagcucaccagccc

SEQ ID NO: 2946364 - RNA, 16 nt, Human
ccagcucaccagcccc

SEQ ID NO: 2946365 - RNA, 12 nt, Human
ccagccccugga

SEQ ID NO: 2946366 - RNA, 11 nt, Human
ccagccccugg

SEQ ID NO: 2946367 - RNA, 15 nt, Human
ccagcaggcucucag

SEQ ID NO: 2946368 - RNA, 13 nt, Human
ccagcaggcucuc

SEQ ID NO: 2946369 - RNA, 18 nt, Human
ccagaugcaccagcccuu

SEQ ID NO: 2946370 - RNA, 17 nt, Human
ccagaugcaccagcccu

SEQ ID NO: 2946371 - RNA, 15 nt, Human
ccagaugcaccagcc

SEQ ID NO: 2946372 - RNA, 20 nt, Human
ccagagggccugcaagggag

SEQ ID NO: 2946373 - RNA, 16 nt, Human
ccaccuuggcucaagu

SEQ ID NO: 2946374 - RNA, 17 nt, Human
ccagagggccugcaagg

SEQ ID NO: 2946375 - RNA, 19 nt, Human
ccagagggccugcaaggga

SEQ ID NO: 2946376 - RNA, 18 nt, Human
ccagagggccugcaaggg

SEQ ID NO: 2946377 - RNA, 15 nt, Human
ccagauccuggaaau

SEQ ID NO: 2946378 - RNA, 14 nt, Human
cccgaauagcuggg

SEQ ID NO: 2946379 - RNA, 11 nt, Human
cccggcuccag

SEQ ID NO: 2946380 - RNA, 12 nt, Human
cccggcuccagg

SEQ ID NO: 2946381 - RNA, 14 nt, Human
cccggccaccugcg

SEQ ID NO: 2946382 - RNA, 13 nt, Human
cccggccaccugc

SEQ ID NO: 2946383 - RNA, 13 nt, Human
cccggcuccaggc

SEQ ID NO: 2946384 - RNA, 14 nt, Human
cccggcuccaggcu

SEQ ID NO: 2946385 - RNA, 15 nt, Human
cccggcuccaggcuc

SEQ ID NO: 2946386 - RNA, 16 nt, Human
cccggcuccaggcucc

SEQ ID NO: 2946387 - RNA, 17 nt, Human
cccggccaccugcggug

SEQ ID NO: 2946388 - RNA, 22 nt, Human
cccgggaagggggcugggacau

SEQ ID NO: 2946389 - RNA, 18 nt, Human
cccuauuagagaagagau

SEQ ID NO: 2946390 - RNA, 23 nt, Human
cccgggaggcagagguugcagug

SEQ ID NO: 2946391 - RNA, 23 nt, Human
ccccgaggccuucucugaaggac

SEQ ID NO: 2946392 - RNA, 14 nt, Human
ccccaucugcgggg

SEQ ID NO: 2946393 - RNA, 23 nt, Human
ccccgacccuugccgucuaccug

SEQ ID NO: 2946394 - RNA, 22 nt, Human
cccccaaauggaaaugggcaga

SEQ ID NO: 2946395 - RNA, 21 nt, Human
ccccagcaagugagagcuggg

SEQ ID NO: 2946396 - RNA, 22 nt, Human
ccccagcaauuaugaaaauaau

SEQ ID NO: 2946397 - RNA, 22 nt, Human
ccccagcaagugagagcugggu

SEQ ID NO: 2946398 - RNA, 23 nt, Human
ccccaaaacucuccucugcugcu

SEQ ID NO: 2946399 - RNA, 21 nt, Human
ccccaaaacucuccucugcug

SEQ ID NO: 2946400 - RNA, 22 nt, Human
cccauuguggucacaggaagua

SEQ ID NO: 2946401 - RNA, 23 nt, Human
cccauuguggucacaggaaguag

SEQ ID NO: 2946402 - RNA, 22 nt, Human
ccccaaaacucuccucugcugc

SEQ ID NO: 2946403 - RNA, 17 nt, Human
cccacccccacccaagg

SEQ ID NO: 2946404 - RNA, 15 nt, Human
cccacccccacccaa

SEQ ID NO: 2946405 - RNA, 12 nt, Human
cccacccccacc

SEQ ID NO: 2946406 - RNA, 18 nt, Human
cccacccaagggccuggc

SEQ ID NO: 2946407 - RNA, 18 nt, Human
cccacccugaaagcccug

SEQ ID NO: 2946408 - RNA, 22 nt, Human
cccacccaagggccuggccuga

SEQ ID NO: 2946409 - RNA, 21 nt, Human
cccacccaagggccuggccug

SEQ ID NO: 2946410 - RNA, 20 nt, Human
cccacccaagggccuggccu

SEQ ID NO: 2946411 - RNA, 19 nt, Human
cccacugcuuuuggucugu

SEQ ID NO: 2946412 - RNA, 12 nt, Human
cccacugcucug

SEQ ID NO: 2946413 - RNA, 13 nt, Human
cccacugcucugg

SEQ ID NO: 2946414 - RNA, 13 nt, Human
cccaggcuggcgu

SEQ ID NO: 2946415 - RNA, 17 nt, Human
cccaggcuggcgugcag

SEQ ID NO: 2946416 - RNA, 13 nt, Human
cccauccucugua

SEQ ID NO: 2946417 - RNA, 22 nt, Human
cccagcuuaaaggggcuagagu

SEQ ID NO: 2946418 - RNA, 16 nt, Human
cccagccagcaguuca

SEQ ID NO: 2946419 - RNA, 17 nt, Human
cccagccagcaguucag

SEQ ID NO: 2946420 - RNA, 20 nt, Human
cccagccagcaguucagagc

SEQ ID NO: 2946421 - RNA, 23 nt, Human
cccagcucugguccauagagagc

SEQ ID NO: 2946422 - RNA, 20 nt, Human
caaauggaaaugggcagagc

SEQ ID NO: 2946423 - RNA, 21 nt, Human
caaauggaaaugggcagagca

SEQ ID NO: 2946424 - RNA, 23 nt, Human
caacacgagcaggcuacugucag

SEQ ID NO: 2946425 - RNA, 15 nt, Human
caacacgagcaggcu

SEQ ID NO: 2946426 - RNA, 20 nt, Human
caacaccucugcacaagcug

SEQ ID NO: 2946427 - RNA, 15 nt, Human
caaagucuagguugg

SEQ ID NO: 2946428 - RNA, 14 nt, Human
caaaguagaagucu

SEQ ID NO: 2946429 - RNA, 21 nt, Human
caaaguagaagucuuagaugu

SEQ ID NO: 2946430 - RNA, 17 nt, Human
caaagcagugcaugcug

SEQ ID NO: 2946431 - RNA, 15 nt, Human
caaagcagugcaugc

SEQ ID NO: 2946432 - RNA, 22 nt, Human
caaaguacacuguuucaaacuu

SEQ ID NO: 2946433 - RNA, 22 nt, Human
caaagauauuuugcuuugugau

SEQ ID NO: 2946434 - RNA, 23 nt, Human
caaagauauuuugcuuugugauu

SEQ ID NO: 2946435 - RNA, 22 nt, Human
caaagcacugacuucuaaguaa

SEQ ID NO: 2946436 - RNA, 20 nt, Human
caaagcacugacuucuaagu

SEQ ID NO: 2946437 - RNA, 12 nt, Human
caaacagggccu

SEQ ID NO: 2946438 - RNA, 14 nt, Human
caaacagggccucu

SEQ ID NO: 2946439 - RNA, 15 nt, Human
caaacagaggccgcc

SEQ ID NO: 2946440 - RNA, 15 nt, Human
caaacagggccucug

SEQ ID NO: 2946441 - RNA, 19 nt, Human
caaacagggccucugcgga

SEQ ID NO: 2946442 - RNA, 13 nt, Human
caaacccaguguu

SEQ ID NO: 2946443 - RNA, 19 nt, Human
caaaccaucauugaaaucu

SEQ ID NO: 2946444 - RNA, 21 nt, Human
caaaccaucauugaaaucuuu

SEQ ID NO: 2946445 - RNA, 23 nt, Human
auuuuuuuuuccuucagugccuu

SEQ ID NO: 2946446 - RNA, 18 nt, Human
caaaagaugcuucucacu

SEQ ID NO: 2946447 - RNA, 15 nt, Human
caaaaggcagaagca

SEQ ID NO: 2946448 - RNA, 16 nt, Human
caaaagaugcuucuca

SEQ ID NO: 2946449 - RNA, 20 nt, Human
caaaaaaaaaaaaaaauuag

SEQ ID NO: 2946450 - RNA, 18 nt, Human
caaagauauuuugcuuug

SEQ ID NO: 2946451 - RNA, 20 nt, Human
caaagauauuuugcuuugug

SEQ ID NO: 2946452 - RNA, 21 nt, Human
auuugccuaauaugaugacug

SEQ ID NO: 2946453 - RNA, 22 nt, Human
auuuguuugaacugauaaagau

SEQ ID NO: 2946454 - RNA, 23 nt, Human
auuuguuugaacugauaaagaug

SEQ ID NO: 2946455 - RNA, 17 nt, Human
auuuuauagcuacuaau

SEQ ID NO: 2946456 - RNA, 20 nt, Human
auuuguuugaacugauaaag

SEQ ID NO: 2946457 - RNA, 19 nt, Human
auuuuauagcuacuaauuu

SEQ ID NO: 2946458 - RNA, 18 nt, Human
auuuguggaaaauaacuc

SEQ ID NO: 2946459 - RNA, 20 nt, Human
auuugugauacaaugcugug

SEQ ID NO: 2946460 - RNA, 18 nt, Human
auuuggaaaggaaugcaa

SEQ ID NO: 2946461 - RNA, 15 nt, Human
auuugugauacaaug

SEQ ID NO: 2946462 - RNA, 17 nt, Human
auuugugauacaaugcu

SEQ ID NO: 2946463 - RNA, 15 nt, Human
auuuggaaaggaaug

SEQ ID NO: 2946464 - RNA, 13 nt, Human
auuugcuccuuuc

SEQ ID NO: 2946465 - RNA, 14 nt, Human
auuugcucauggaa

SEQ ID NO: 2946466 - RNA, 17 nt, Human
auuugcucauggaauug

SEQ ID NO: 2946467 - RNA, 16 nt, Human
auuagggagagaagau

SEQ ID NO: 2946468 - RNA, 16 nt, Human
auuaggugugacugaa

SEQ ID NO: 2946469 - RNA, 18 nt, Human
auuaggugugacugaauu

SEQ ID NO: 2946470 - RNA, 14 nt, Human
auuaugaauuacau

SEQ ID NO: 2946471 - RNA, 17 nt, Human
auuaugaauuacauuug

SEQ ID NO: 2946472 - RNA, 18 nt, Human
auuaugaaacuuuuggaa

SEQ ID NO: 2946473 - RNA, 13 nt, Human
auuaugaaaauaa

SEQ ID NO: 2946474 - RNA, 14 nt, Human
auuagguugugaau

SEQ ID NO: 2946475 - RNA, 15 nt, Human
auuagguugugaaug

SEQ ID NO: 2946476 - RNA, 21 nt, Human
auuaggugugacugaauuucu

SEQ ID NO: 2946477 - RNA, 16 nt, Human
auuagguugaaacaua

SEQ ID NO: 2946478 - RNA, 17 nt, Human
auuagguugaaacauau

SEQ ID NO: 2946479 - RNA, 19 nt, Human
auuagguugaaacauaucu

SEQ ID NO: 2946480 - RNA, 23 nt, Human
auuagguugaaacauaucucuua

SEQ ID NO: 2946481 - RNA, 13 nt, Human
auuagguugugaa

SEQ ID NO: 2946482 - RNA, 18 nt, Human
auuaugaauuacauuugu

SEQ ID NO: 2946483 - RNA, 23 nt, Human
auuaugcaugaaguaauaugcac

SEQ ID NO: 2946484 - RNA, 18 nt, Human
auucaaugccccugaauu

SEQ ID NO: 2946485 - RNA, 20 nt, Human
auucaaugccccugaauuua

SEQ ID NO: 2946486 - RNA, 16 nt, Human
auucaaauguauuaca

SEQ ID NO: 2946487 - RNA, 19 nt, Human
auucacaagacccaaaagg

SEQ ID NO: 2946488 - RNA, 19 nt, Human
auucauagcagcuuauuca

SEQ ID NO: 2946489 - RNA, 22 nt, Human
auucauagcagcuuauucacaa

SEQ ID NO: 2946490 - RNA, 19 nt, Human
auucauaaugacuuaagca

SEQ ID NO: 2946491 - RNA, 15 nt, Human
auucauaaugacuua

SEQ ID NO: 2946492 - RNA, 14 nt, Human
auucauaaugacuu

SEQ ID NO: 2946493 - RNA, 17 nt, Human
auuacaggaaguacugg

SEQ ID NO: 2946494 - RNA, 16 nt, Human
auuacaggugugaacc

SEQ ID NO: 2946495 - RNA, 19 nt, Human
auuacaguggggaaugaag

SEQ ID NO: 2946496 - RNA, 17 nt, Human
auuacaacucuauuuaa

SEQ ID NO: 2946497 - RNA, 23 nt, Human
auugcugauggugcaaugaccuu

SEQ ID NO: 2946498 - RNA, 12 nt, Human
auugcugcuuga

SEQ ID NO: 2946499 - RNA, 17 nt, Human
auugcugcuuguacacu

SEQ ID NO: 2946500 - RNA, 14 nt, Human
auugcuugagcuca

SEQ ID NO: 2946501 - RNA, 19 nt, Human
auugcugauggugcaauga

SEQ ID NO: 2946502 - RNA, 18 nt, Human
auugcugauggugcaaug

SEQ ID NO: 2946503 - RNA, 16 nt, Human
auugcugauggugcaa

SEQ ID NO: 2946504 - RNA, 15 nt, Human
auugcugauggugca

SEQ ID NO: 2946505 - RNA, 16 nt, Human
auuguuagucucuuga

SEQ ID NO: 2946506 - RNA, 23 nt, Human
auugugucucuugguccugcugc

SEQ ID NO: 2946507 - RNA, 21 nt, Human
auugugucucuugguccugcu

SEQ ID NO: 2946508 - RNA, 13 nt, Human
auuguaaaauggu

SEQ ID NO: 2946509 - RNA, 14 nt, Human
auuguaaaauggug

SEQ ID NO: 2946510 - RNA, 18 nt, Human
auugcuugagcucaggag

SEQ ID NO: 2946511 - RNA, 23 nt, Human
auuguaauaggcguaacuaauuu

SEQ ID NO: 2946512 - RNA, 11 nt, Human
auucuucugcu

SEQ ID NO: 2946513 - RNA, 12 nt, Human
auucuucugcuu

SEQ ID NO: 2946514 - RNA, 14 nt, Human
auucuucugcuuca

SEQ ID NO: 2946515 - RNA, 11 nt, Human
auucuuuccug

SEQ ID NO: 2946516 - RNA, 13 nt, Human
auucuuuccugag

SEQ ID NO: 2946517 - RNA, 14 nt, Human
auugcuacuguccu

SEQ ID NO: 2946518 - RNA, 15 nt, Human
auugcuacuguccua

SEQ ID NO: 2946519 - RNA, 17 nt, Human
auugauaugcuuauaca

SEQ ID NO: 2946520 - RNA, 20 nt, Human
auugcuacuguccuacccac

SEQ ID NO: 2946521 - RNA, 22 nt, Human
auugcuacuguccuacccaccc

SEQ ID NO: 2946522 - RNA, 21 nt, Human
auugauaagaaccuuuugagu

SEQ ID NO: 2946523 - RNA, 13 nt, Human
cacuccccugcug

SEQ ID NO: 2946524 - RNA, 12 nt, Human
cacuccccugcu

SEQ ID NO: 2946525 - RNA, 14 nt, Human
cacuccccugcugg

SEQ ID NO: 2946526 - RNA, 23 nt, Human
cacuccaauaggugcugagugua

SEQ ID NO: 2946527 - RNA, 16 nt, Human
cacuccagccugggug

SEQ ID NO: 2946528 - RNA, 21 nt, Human
cacuagggcagggacaggaua

SEQ ID NO: 2946529 - RNA, 20 nt, Human
cacuagggcagggacaggau

SEQ ID NO: 2946530 - RNA, 16 nt, Human
cacuuacacuuuaugc

SEQ ID NO: 2946531 - RNA, 18 nt, Human
cacuuacacuuuaugcac

SEQ ID NO: 2946532 - RNA, 14 nt, Human
cacugguuugguuc

SEQ ID NO: 2946533 - RNA, 22 nt, Human
cacugguucuucuuggucucag

SEQ ID NO: 2946534 - RNA, 16 nt, Human
cacuugucaauaaaau

SEQ ID NO: 2946535 - RNA, 19 nt, Human
cacuuguguuuugcaagcc

SEQ ID NO: 2946536 - RNA, 17 nt, Human
cacuuguguuuugcaag

SEQ ID NO: 2946537 - RNA, 22 nt, Human
cacuuguguuuugcaagccaga

SEQ ID NO: 2946538 - RNA, 13 nt, Human
cacugcagccuca

SEQ ID NO: 2946539 - RNA, 16 nt, Human
cacugcauguuuguga

SEQ ID NO: 2946540 - RNA, 19 nt, Human
cacugcacuauagccuagg

SEQ ID NO: 2946541 - RNA, 16 nt, Human
cacugcacuccagccu

SEQ ID NO: 2946542 - RNA, 15 nt, Human
cacugcacuccagcc

SEQ ID NO: 2946543 - RNA, 18 nt, Human
cacugcacuccagccugg

SEQ ID NO: 2946544 - RNA, 19 nt, Human
cacugcacuccagccuggg

SEQ ID NO: 2946545 - RNA, 20 nt, Human
cacugcacuccagccugggu

SEQ ID NO: 2946546 - RNA, 12 nt, Human
cacugcagccuc

SEQ ID NO: 2946547 - RNA, 21 nt, Human
cacugcagaagacaguauggc

SEQ ID NO: 2946548 - RNA, 17 nt, Human
caccugccuguugggcc

SEQ ID NO: 2946549 - RNA, 24 nt, Human
caccugccuguugggccaggagcc

SEQ ID NO: 2946550 - RNA, 19 nt, Human
caccugccuguugggccag

SEQ ID NO: 2946551 - RNA, 14 nt, Human
caccuuggcugcag

SEQ ID NO: 2946552 - RNA, 14 nt, Human
caccuuggcucaag

SEQ ID NO: 2946553 - RNA, 15 nt, Human
caccuuggcucaagu

SEQ ID NO: 2946554 - RNA, 13 nt, Human
caccuuggcugca

SEQ ID NO: 2946555 - RNA, 14 nt, Human
caccucagccuccc

SEQ ID NO: 2946556 - RNA, 13 nt, Human
caccucagccucc

SEQ ID NO: 2946557 - RNA, 14 nt, Human
caccugccccucaa

SEQ ID NO: 2946558 - RNA, 16 nt, Human
caccugccccucaacu

SEQ ID NO: 2946559 - RNA, 15 nt, Human
caccugccccucaac

SEQ ID NO: 2946560 - RNA, 17 nt, Human
cacccugaaagcccuga

SEQ ID NO: 2946561 - RNA, 15 nt, Human
cacccuggggagaaa

SEQ ID NO: 2946562 - RNA, 16 nt, Human
cacccuggggagaaag

SEQ ID NO: 2946563 - RNA, 14 nt, Human
cacccucaggcagg

SEQ ID NO: 2946564 - RNA, 16 nt, Human
caccccagcaauuaug

SEQ ID NO: 2946565 - RNA, 11 nt, Human
caccccagccc

SEQ ID NO: 2946566 - RNA, 19 nt, Human
caauaaagcagcguuucua

SEQ ID NO: 2946567 - RNA, 13 nt, Human
caagcucugcucc

SEQ ID NO: 2946568 - RNA, 12 nt, Human
caagcuccaagc

SEQ ID NO: 2946569 - RNA, 14 nt, Human
caagcucugcuccu

SEQ ID NO: 2946570 - RNA, 13 nt, Human
caagcugcacccu

SEQ ID NO: 2946571 - RNA, 18 nt, Human
caagcugcacccucaggc

SEQ ID NO: 2946572 - RNA, 14 nt, Human
caagcugcacccuc

SEQ ID NO: 2946573 - RNA, 20 nt, Human
caagcugcacccucaggcag

SEQ ID NO: 2946574 - RNA, 14 nt, Human
caaguauagaaaau

SEQ ID NO: 2946575 - RNA, 13 nt, Human
caaguauagaaaa

SEQ ID NO: 2946576 - RNA, 18 nt, Human
caaggccaaaggaagcac

SEQ ID NO: 2946577 - RNA, 17 nt, Human
caaggccaaaggaagca

SEQ ID NO: 2946578 - RNA, 16 nt, Human
caaggccaaaggaagc

SEQ ID NO: 2946579 - RNA, 15 nt, Human
caaggccaaaggaag

SEQ ID NO: 2946580 - RNA, 15 nt, Human
caaguauagaaaauc

SEQ ID NO: 2946581 - RNA, 19 nt, Human
caaguauagaaaaucuuca

SEQ ID NO: 2946582 - RNA, 17 nt, Human
caagucaagugaaaaag

SEQ ID NO: 2946583 - RNA, 13 nt, Human
caagucaagugaa

SEQ ID NO: 2946584 - RNA, 14 nt, Human
caaguccaagcaua

SEQ ID NO: 2946585 - RNA, 17 nt, Human
cacacagcucuguccug

SEQ ID NO: 2946586 - RNA, 20 nt, Human
cacacagcucuguccuggga

SEQ ID NO: 2946587 - RNA, 11 nt, Human
caauggcagcc

SEQ ID NO: 2946588 - RNA, 12 nt, Human
caauggcagccu

SEQ ID NO: 2946589 - RNA, 15 nt, Human
caauucuugccaaau

SEQ ID NO: 2946590 - RNA, 16 nt, Human
caaugcuguauuuuaa

SEQ ID NO: 2946591 - RNA, 17 nt, Human
caaugcuguauuuuaaa

SEQ ID NO: 2946592 - RNA, 15 nt, Human
caaugcuguauuuua

SEQ ID NO: 2946593 - RNA, 14 nt, Human
cacaagagcccagg

SEQ ID NO: 2946594 - RNA, 18 nt, Human
cacaagacugcacaucaa

SEQ ID NO: 2946595 - RNA, 15 nt, Human
cacaagcuccaagcu

SEQ ID NO: 2946596 - RNA, 14 nt, Human
cacaagcuccaagc

SEQ ID NO: 2946597 - RNA, 13 nt, Human
cacaagcuccaag

SEQ ID NO: 2946598 - RNA, 16 nt, Human
cacaagagcccaggcc

SEQ ID NO: 2946599 - RNA, 23 nt, Human
cacaagcuccaagcucccaggca

SEQ ID NO: 2946600 - RNA, 17 nt, Human
cacaagcuccaagcucc

SEQ ID NO: 2946601 - RNA, 23 nt, Human
cacaagcugcacccucaggcagg

SEQ ID NO: 2946602 - RNA, 17 nt, Human
cacaagcugcacccuca

SEQ ID NO: 2946603 - RNA, 11 nt, Human
cacagccucug

SEQ ID NO: 2946604 - RNA, 13 nt, Human
cacagacccugcc

SEQ ID NO: 2946605 - RNA, 19 nt, Human
cacagacauacuaaccagc

SEQ ID NO: 2946606 - RNA, 21 nt, Human
cacagacauacuaaccagcag

SEQ ID NO: 2946607 - RNA, 18 nt, Human
cacagacauacuaaccag

SEQ ID NO: 2946608 - RNA, 19 nt, Human
cacagaaaauucuucucca

SEQ ID NO: 2946609 - RNA, 23 nt, Human
cacagaaaauggaagacagcucu

SEQ ID NO: 2946610 - RNA, 22 nt, Human
cacacaugagcaucaggccagg

SEQ ID NO: 2946611 - RNA, 21 nt, Human
cacacaugagcaucaggccag

SEQ ID NO: 2946612 - RNA, 22 nt, Human
cacagaaaauggaagacagcuc

SEQ ID NO: 2946613 - RNA, 20 nt, Human
cacagaaaauggaagacagc

SEQ ID NO: 2946614 - RNA, 19 nt, Human
cacagaaaauggaagacag

SEQ ID NO: 2946615 - RNA, 18 nt, Human
cacagaaaauggaagaca

SEQ ID NO: 2946616 - RNA, 18 nt, Human
cacacagugagucgagga

SEQ ID NO: 2946617 - RNA, 20 nt, Human
cacacaguauuacuucugcu

SEQ ID NO: 2946618 - RNA, 23 nt, Human
cacacaguauuacuucugcuaca

SEQ ID NO: 2946619 - RNA, 16 nt, Human
cacacagcucuguccu

SEQ ID NO: 2946620 - RNA, 15 nt, Human
cacacauacacacac

SEQ ID NO: 2946621 - RNA, 21 nt, Human
cacacagugagucgaggacag

SEQ ID NO: 2946622 - RNA, 23 nt, Human
cacacagugagucgaggacaggg

SEQ ID NO: 2946623 - RNA, 17 nt, Human
cacacaugaaguccaag

SEQ ID NO: 2946624 - RNA, 22 nt, Human
cacacaugaaguccaagcauuu

SEQ ID NO: 2946625 - RNA, 20 nt, Human
cacacaugagcaucaggcca

SEQ ID NO: 2946626 - RNA, 20 nt, Human
cacaguauuacuucugcuac

SEQ ID NO: 2946627 - RNA, 21 nt, Human
cacaguauuacuucugcuaca

SEQ ID NO: 2946628 - RNA, 19 nt, Human
cacaggggaaaagaggagu

SEQ ID NO: 2946629 - RNA, 18 nt, Human
cacaggggaaaagaggag

SEQ ID NO: 2946630 - RNA, 17 nt, Human
cacaggggaaaagagga

SEQ ID NO: 2946631 - RNA, 21 nt, Human
cacagccucuuagaugcaguu

SEQ ID NO: 2946632 - RNA, 17 nt, Human
cacagccucuuagaugc

SEQ ID NO: 2946633 - RNA, 22 nt, Human
caucuuagguuggcaaaaaggc

SEQ ID NO: 2946634 - RNA, 15 nt, Human
caucuuaaaaacaac

SEQ ID NO: 2946635 - RNA, 21 nt, Human
caucuuagguuggcaaaaagg

SEQ ID NO: 2946636 - RNA, 19 nt, Human
caucugugaaaggaaagag

SEQ ID NO: 2946637 - RNA, 18 nt, Human
caucugugaaaggaaaga

SEQ ID NO: 2946638 - RNA, 23 nt, Human
cauccuggcacccggccccugcu

SEQ ID NO: 2946639 - RNA, 15 nt, Human
cauccuggcccaggg

SEQ ID NO: 2946640 - RNA, 16 nt, Human
cauccuggcccagggc

SEQ ID NO: 2946641 - RNA, 18 nt, Human
cauccuggcccagggcau

SEQ ID NO: 2946642 - RNA, 19 nt, Human
cauccuggcccagggcauc

SEQ ID NO: 2946643 - RNA, 13 nt, Human
caucccagcccca

SEQ ID NO: 2946644 - RNA, 14 nt, Human
caucccagccccaa

SEQ ID NO: 2946645 - RNA, 16 nt, Human
caucccagccccaaug

SEQ ID NO: 2946646 - RNA, 12 nt, Human
caucccagcccc

SEQ ID NO: 2946647 - RNA, 23 nt, Human
caucaggccaggcccucugccca

SEQ ID NO: 2946648 - RNA, 22 nt, Human
caucaggccaggcccucugccc

SEQ ID NO: 2946649 - RNA, 21 nt, Human
caucaggccaggcccucugcc

SEQ ID NO: 2946650 - RNA, 20 nt, Human
caucaggccaggcccucugc

SEQ ID NO: 2946651 - RNA, 17 nt, Human
caucagcacgauuucug

SEQ ID NO: 2946652 - RNA, 18 nt, Human
caucagcacgauuucugu

SEQ ID NO: 2946653 - RNA, 13 nt, Human
caucaggccaggc

SEQ ID NO: 2946654 - RNA, 20 nt, Human
caucagcuugcccuguuaaa

SEQ ID NO: 2946655 - RNA, 13 nt, Human
caucagcugcuga

SEQ ID NO: 2946656 - RNA, 15 nt, Human
caucagcugcugaaa

SEQ ID NO: 2946657 - RNA, 18 nt, Human
caucagcugcugaaacaa

SEQ ID NO: 2946658 - RNA, 17 nt, Human
caucagcugcugaaaca

SEQ ID NO: 2946659 - RNA, 22 nt, Human
caugcaaggucauuuuuuuuaa

SEQ ID NO: 2946660 - RNA, 17 nt, Human
caugcaaggucauuuuu

SEQ ID NO: 2946661 - RNA, 18 nt, Human
caugcaaggucauuuuuu

SEQ ID NO: 2946662 - RNA, 22 nt, Human
caugcugccaauauccuaauaa

SEQ ID NO: 2946663 - RNA, 22 nt, Human
cauggccuuugcuugaaagaaa

SEQ ID NO: 2946664 - RNA, 19 nt, Human
cauggccuuugcuugaaag

SEQ ID NO: 2946665 - RNA, 21 nt, Human
caugcugccaauauccuaaua

SEQ ID NO: 2946666 - RNA, 19 nt, Human
caugcugccaauauccuaa

SEQ ID NO: 2946667 - RNA, 17 nt, Human
caugcugccaauauccu

SEQ ID NO: 2946668 - RNA, 15 nt, Human
caugcugccaauauc

SEQ ID NO: 2946669 - RNA, 18 nt, Human
caugcugcccugugagua

SEQ ID NO: 2946670 - RNA, 16 nt, Human
caugcugcccugugag

SEQ ID NO: 2946671 - RNA, 18 nt, Human
caugacacgaauauugcu

SEQ ID NO: 2946672 - RNA, 17 nt, Human
caugacacgaauauugc

SEQ ID NO: 2946673 - RNA, 14 nt, Human
caugacacgaauau

SEQ ID NO: 2946674 - RNA, 16 nt, Human
caugaauuaguuuuau

SEQ ID NO: 2946675 - RNA, 18 nt, Human
cagucaccccggccaccu

SEQ ID NO: 2946676 - RNA, 11 nt, Human
caguuugguug

SEQ ID NO: 2946677 - RNA, 21 nt, Human
caguuugguugguaacucugu

SEQ ID NO: 2946678 - RNA, 14 nt, Human
caguuugcagagua

SEQ ID NO: 2946679 - RNA, 14 nt, Human
cauaaugcgugcau

SEQ ID NO: 2946680 - RNA, 17 nt, Human
cauaaugcgugcauacc

SEQ ID NO: 2946681 - RNA, 20 nt, Human
cauauuaccacagacauacu

SEQ ID NO: 2946682 - RNA, 21 nt, Human
cauauuaccacagacauacua

SEQ ID NO: 2946683 - RNA, 17 nt, Human
cauauuaccacagacau

SEQ ID NO: 2946684 - RNA, 16 nt, Human
cauauuaccacagaca

SEQ ID NO: 2946685 - RNA, 21 nt, Human
cauaaugcgugcauaccacuu

SEQ ID NO: 2946686 - RNA, 13 nt, Human
cauacaaggccca

SEQ ID NO: 2946687 - RNA, 15 nt, Human
cauacaauuccaaac

SEQ ID NO: 2946688 - RNA, 18 nt, Human
cauagauucccugagcag

SEQ ID NO: 2946689 - RNA, 17 nt, Human
cauagauucccugagca

SEQ ID NO: 2946690 - RNA, 20 nt, Human
cauagcagcuuauucacaag

SEQ ID NO: 2946691 - RNA, 21 nt, Human
cauuuggugguuucagaaaug

SEQ ID NO: 2946692 - RNA, 22 nt, Human
cauuuggugguuucagaaaugu

SEQ ID NO: 2946693 - RNA, 23 nt, Human
cauuuggugguuucagaaaugug

SEQ ID NO: 2946694 - RNA, 23 nt, Human
cauuuuucuuagggaaggauaca

SEQ ID NO: 2946695 - RNA, 17 nt, Human
ccaaaacucuccucugc

SEQ ID NO: 2946696 - RNA, 17 nt, Human
ccaaaaaaugcuugcuu

SEQ ID NO: 2946697 - RNA, 14 nt, Human
cauuucaagaaguc

SEQ ID NO: 2946698 - RNA, 15 nt, Human
cauuggggcucccag

SEQ ID NO: 2946699 - RNA, 16 nt, Human
cauuuauucugcucac

SEQ ID NO: 2946700 - RNA, 18 nt, Human
cauugcugggcuugucug

SEQ ID NO: 2946701 - RNA, 14 nt, Human
cauugcggacagcc

SEQ ID NO: 2946702 - RNA, 15 nt, Human
cauugcggacagcca

SEQ ID NO: 2946703 - RNA, 17 nt, Human
cauugcggacagccacg

SEQ ID NO: 2946704 - RNA, 21 nt, Human
cauugcggacagccacggcca

SEQ ID NO: 2946705 - RNA, 18 nt, Human
cauuaucuagauacugua

SEQ ID NO: 2946706 - RNA, 16 nt, Human
cauucuccuuguguua

SEQ ID NO: 2946707 - RNA, 22 nt, Human
cauggccucuucagaucucuaa

SEQ ID NO: 2946708 - RNA, 22 nt, Human
cauggcugccaaugggagcuca

SEQ ID NO: 2946709 - RNA, 22 nt, Human
cauggcuggagcuagaauuuga

SEQ ID NO: 2946710 - RNA, 17 nt, Human
cauggcugccaauggga

SEQ ID NO: 2946711 - RNA, 15 nt, Human
cauguucucugagga

SEQ ID NO: 2946712 - RNA, 15 nt, Human
cauuaggauggcuag

SEQ ID NO: 2946713 - RNA, 12 nt, Human
cauuaucuagau

SEQ ID NO: 2946714 - RNA, 16 nt, Human
cauuaucuagauacug

SEQ ID NO: 2946715 - RNA, 17 nt, Human
cauuaucuagauacugu

SEQ ID NO: 2946716 - RNA, 17 nt, Human
ccaccaucaagccacca

SEQ ID NO: 2946717 - RNA, 16 nt, Human
ccaccaucaagccacc

SEQ ID NO: 2946718 - RNA, 13 nt, Human
ccaccuuggcuca

SEQ ID NO: 2946719 - RNA, 14 nt, Human
ccaccuuggcucaa

SEQ ID NO: 2946720 - RNA, 15 nt, Human
ccaccuuggcucaag

SEQ ID NO: 2946721 - RNA, 13 nt, Human
ccaccgcagacag

SEQ ID NO: 2946722 - RNA, 18 nt, Human
ccaccgcagacaggacca

SEQ ID NO: 2946723 - RNA, 13 nt, Human
ccacccugcucuc

SEQ ID NO: 2946724 - RNA, 20 nt, Human
ccaccaucaagccaccaaca

SEQ ID NO: 2946725 - RNA, 17 nt, Human
ccaccgcagacaggacc

SEQ ID NO: 2946726 - RNA, 14 nt, Human
ccaccgcagacagg

SEQ ID NO: 2946727 - RNA, 20 nt, Human
ccaauguucucucuucucca

SEQ ID NO: 2946728 - RNA, 20 nt, Human
ccaagcuggucccacucagu

SEQ ID NO: 2946729 - RNA, 23 nt, Human
ccaaugcacuuuguucuggcucu

SEQ ID NO: 2946730 - RNA, 22 nt, Human
ccaaugcacuuuguucuggcuc

SEQ ID NO: 2946731 - RNA, 20 nt, Human
ccaaugcacuuuguucuggc

SEQ ID NO: 2946732 - RNA, 16 nt, Human
ccaacgucugugccau

SEQ ID NO: 2946733 - RNA, 16 nt, Human
ccaaaucauaguggcu

SEQ ID NO: 2946734 - RNA, 12 nt, Human
ccaaauuaagag

SEQ ID NO: 2946735 - RNA, 18 nt, Human
ccaaauguucaucaauga

SEQ ID NO: 2946736 - RNA, 14 nt, Human
caggguggccacac

SEQ ID NO: 2946737 - RNA, 15 nt, Human
caggguuggccccug

SEQ ID NO: 2946738 - RNA, 16 nt, Human
caggguuggccccugc

SEQ ID NO: 2946739 - RNA, 21 nt, Human
cagggucucuaccauccccug

SEQ ID NO: 2946740 - RNA, 22 nt, Human
cagggucucacucugucgccca

SEQ ID NO: 2946741 - RNA, 23 nt, Human
cagggucucacucugucgcccag

SEQ ID NO: 2946742 - RNA, 23 nt, Human
cagguuuuuggucugacccacug

SEQ ID NO: 2946743 - RNA, 20 nt, Human
caguaaaaaaugguguuuua

SEQ ID NO: 2946744 - RNA, 13 nt, Human
caggugcugccau

SEQ ID NO: 2946745 - RNA, 14 nt, Human
caggugcugccauc

SEQ ID NO: 2946746 - RNA, 22 nt, Human
caggguggccacaccucuaucc

SEQ ID NO: 2946747 - RNA, 14 nt, Human
caggguuggccccu

SEQ ID NO: 2946748 - RNA, 17 nt, Human
caggguuggccccugcc

SEQ ID NO: 2946749 - RNA, 21 nt, Human
caggguuggccccugcccggc

SEQ ID NO: 2946750 - RNA, 19 nt, Human
caguauuacuucugcuaca

SEQ ID NO: 2946751 - RNA, 19 nt, Human
caguaaaugggggugcauu

SEQ ID NO: 2946752 - RNA, 21 nt, Human
caguaaaaaaugguguuuuau

SEQ ID NO: 2946753 - RNA, 18 nt, Human
caguaaaugggggugcau

SEQ ID NO: 2946754 - RNA, 14 nt, Human
cagucaccccggcc

SEQ ID NO: 2946755 - RNA, 17 nt, Human
cagucaccccggccacc

SEQ ID NO: 2946756 - RNA, 16 nt, Human
cagucaccccggccac

SEQ ID NO: 2946757 - RNA, 15 nt, Human
caggcuggcgugcag

SEQ ID NO: 2946758 - RNA, 19 nt, Human
caggcugggagagccuucc

SEQ ID NO: 2946759 - RNA, 18 nt, Human
caggcugggagagccuuc

SEQ ID NO: 2946760 - RNA, 16 nt, Human
caggcugggagagccu

SEQ ID NO: 2946761 - RNA, 17 nt, Human
caggcuggcgugcagug

SEQ ID NO: 2946762 - RNA, 23 nt, Human
caggccugggggcugggcagagg

SEQ ID NO: 2946763 - RNA, 18 nt, Human
caggcuggcgugcagugg

SEQ ID NO: 2946764 - RNA, 19 nt, Human
caggcuggcgugcaguggu

SEQ ID NO: 2946765 - RNA, 22 nt, Human
caggccugggggcugggcagag

SEQ ID NO: 2946766 - RNA, 20 nt, Human
caggccugggggcugggcag

SEQ ID NO: 2946767 - RNA, 12 nt, Human
cagggcucagcg

SEQ ID NO: 2946768 - RNA, 15 nt, Human
cagggcucagcgggg

SEQ ID NO: 2946769 - RNA, 20 nt, Human
cagggcucagcggggacagc

SEQ ID NO: 2946770 - RNA, 16 nt, Human
cagggagggcuucugc

SEQ ID NO: 2946771 - RNA, 14 nt, Human
caggcugggcuuca

SEQ ID NO: 2946772 - RNA, 22 nt, Human
cagggaggacgcucucuggccu

SEQ ID NO: 2946773 - RNA, 19 nt, Human
cagggaggacgcucucugg

SEQ ID NO: 2946774 - RNA, 23 nt, Human
caggaaaggcuccaggagcagcc

SEQ ID NO: 2946775 - RNA, 22 nt, Human
caggaaaggcuccaggagcagc

SEQ ID NO: 2946776 - RNA, 21 nt, Human
caggaaaggcuccaggagcag

SEQ ID NO: 2946777 - RNA, 19 nt, Human
caggaaaagcugcugacag

SEQ ID NO: 2946778 - RNA, 20 nt, Human
caggaaaagcugcugacagu

SEQ ID NO: 2946779 - RNA, 16 nt, Human
cagcuuauucacaaga

SEQ ID NO: 2946780 - RNA, 15 nt, Human
cagcuguucagcugg

SEQ ID NO: 2946781 - RNA, 16 nt, Human
cagcuguucagcuggu

SEQ ID NO: 2946782 - RNA, 19 nt, Human
caggaaaucaaauaugcaa

SEQ ID NO: 2946783 - RNA, 21 nt, Human
caggaaaucaaauaugcaaag

SEQ ID NO: 2946784 - RNA, 15 nt, Human
caggccagcugcuug

SEQ ID NO: 2946785 - RNA, 13 nt, Human
caggccagcugcu

SEQ ID NO: 2946786 - RNA, 21 nt, Human
caggcaaugcuggcuguuggc

SEQ ID NO: 2946787 - RNA, 19 nt, Human
caggcaaugcuggcuguug

SEQ ID NO: 2946788 - RNA, 20 nt, Human
caggcaaugcuggcuguugg

SEQ ID NO: 2946789 - RNA, 13 nt, Human
caggaggccagcc

SEQ ID NO: 2946790 - RNA, 12 nt, Human
caggaggccagc

SEQ ID NO: 2946791 - RNA, 16 nt, Human
caggccaggcccucug

SEQ ID NO: 2946792 - RNA, 15 nt, Human
caggccaggcccucu

SEQ ID NO: 2946793 - RNA, 14 nt, Human
caggccaggcccuc

SEQ ID NO: 2946794 - RNA, 13 nt, Human
caggccaggcccu

SEQ ID NO: 2946795 - RNA, 13 nt, Human
caggaccucaggu

SEQ ID NO: 2946796 - RNA, 13 nt, Human
caggaccagggau

SEQ ID NO: 2946797 - RNA, 23 nt, Human
caggacagcccuucuuuccacag

SEQ ID NO: 2946798 - RNA, 24 nt, Human
caggacagcccuucuuuccacaga

SEQ ID NO: 2946799 - RNA, 23 nt, Human
cagauacaggaaaagcugcugac

SEQ ID NO: 2946800 - RNA, 22 nt, Human
cagagacuccugcaggcagcca

SEQ ID NO: 2946801 - RNA, 21 nt, Human
cagagacuccugcaggcagcc

SEQ ID NO: 2946802 - RNA, 20 nt, Human
cagagacuccugcaggcagc

SEQ ID NO: 2946803 - RNA, 13 nt, Human
cagagaggguggg

SEQ ID NO: 2946804 - RNA, 16 nt, Human
cagagagggugggagu

SEQ ID NO: 2946805 - RNA, 14 nt, Human
cagagccugcaguu

SEQ ID NO: 2946806 - RNA, 22 nt, Human
cagagagggugggagugggccc

SEQ ID NO: 2946807 - RNA, 20 nt, Human
cagagagggugggagugggc

SEQ ID NO: 2946808 - RNA, 22 nt, Human
cagagcuacacaggggaaaaga

SEQ ID NO: 2946809 - RNA, 17 nt, Human
cagagcuacacagggga

SEQ ID NO: 2946810 - RNA, 21 nt, Human
cagauugcaacaggcugggcu

SEQ ID NO: 2946811 - RNA, 13 nt, Human
cagauuucacucu

SEQ ID NO: 2946812 - RNA, 18 nt, Human
cagauuucacucuccuug

SEQ ID NO: 2946813 - RNA, 19 nt, Human
cagauuugaacucuucaau

SEQ ID NO: 2946814 - RNA, 16 nt, Human
cagauuucacucuccu

SEQ ID NO: 2946815 - RNA, 15 nt, Human
cagauuucacucucc

SEQ ID NO: 2946816 - RNA, 20 nt, Human
cagccagacuggcacaguuu

SEQ ID NO: 2946817 - RNA, 18 nt, Human
cagcauauucaggaagcu

SEQ ID NO: 2946818 - RNA, 17 nt, Human
cagcauauucaggaagc

SEQ ID NO: 2946819 - RNA, 16 nt, Human
cagcauauucaggaag

SEQ ID NO: 2946820 - RNA, 17 nt, Human
cagcauagaaguaacuu

SEQ ID NO: 2946821 - RNA, 21 nt, Human
cagcaguucagagcugcccuc

SEQ ID NO: 2946822 - RNA, 22 nt, Human
cagcaguucagagcugcccucu

SEQ ID NO: 2946823 - RNA, 18 nt, Human
cagcaguucagagcugcc

SEQ ID NO: 2946824 - RNA, 19 nt, Human
cagcaguucagagcugccc

SEQ ID NO: 2946825 - RNA, 20 nt, Human
cagcaguucagagcugcccu

SEQ ID NO: 2946826 - RNA, 23 nt, Human
cagccccauucugccugcccagg

SEQ ID NO: 2946827 - RNA, 24 nt, Human
cagccccauucugccugcccaggc

SEQ ID NO: 2946828 - RNA, 19 nt, Human
cagccccauucugccugcc

SEQ ID NO: 2946829 - RNA, 20 nt, Human
cagccccauucugccugccc

SEQ ID NO: 2946830 - RNA, 22 nt, Human
cagccccauucugccugcccag

SEQ ID NO: 2946831 - RNA, 19 nt, Human
cagccccgugggguuccuc

SEQ ID NO: 2946832 - RNA, 16 nt, Human
cagcguuucuaugaca

SEQ ID NO: 2946833 - RNA, 14 nt, Human
cagcguuucuauga

SEQ ID NO: 2946834 - RNA, 23 nt, Human
cagccgccaugcuccuggcccac

SEQ ID NO: 2946835 - RNA, 13 nt, Human
cagcccuuagcag

SEQ ID NO: 2946836 - RNA, 22 nt, Human
cagccugagcgacagugagacu

SEQ ID NO: 2946837 - RNA, 23 nt, Human
cagccugagcgacagugagacuc

SEQ ID NO: 2946838 - RNA, 18 nt, Human
ggcagugggagcugccug

SEQ ID NO: 2946839 - RNA, 19 nt, Human
ggcagugggagcugccugu

SEQ ID NO: 2946840 - RNA, 18 nt, Human
ggcauccaguaucuugaa

SEQ ID NO: 2946841 - RNA, 17 nt, Human
ggcagugggagcugccu

SEQ ID NO: 2946842 - RNA, 22 nt, Human
ggcacuggcaaacagggccucu

SEQ ID NO: 2946843 - RNA, 23 nt, Human
ggcacuggcaaacagggccucug

SEQ ID NO: 2946844 - RNA, 24 nt, Human
ggcacugcuuccagugaggcucug

SEQ ID NO: 2946845 - RNA, 22 nt, Human
ggcacugcuuccagugaggcuc

SEQ ID NO: 2946846 - RNA, 16 nt, Human
ggcaccagcagccugg

SEQ ID NO: 2946847 - RNA, 15 nt, Human
ggcaccagcagccug

SEQ ID NO: 2946848 - RNA, 16 nt, Human
ggccagugugacaagg

SEQ ID NO: 2946849 - RNA, 17 nt, Human
ggccaaacucaccugcc

SEQ ID NO: 2946850 - RNA, 16 nt, Human
ggccaggcuggucuca

SEQ ID NO: 2946851 - RNA, 18 nt, Human
ggccaggcuggucucaaa

SEQ ID NO: 2946852 - RNA, 12 nt, Human
ggccaggcuggu

SEQ ID NO: 2946853 - RNA, 14 nt, Human
ggccaggcuggucu

SEQ ID NO: 2946854 - RNA, 20 nt, Human
ggcccaggaguuuggccaga

SEQ ID NO: 2946855 - RNA, 19 nt, Human
ggcccaggaguuuggccag

SEQ ID NO: 2946856 - RNA, 18 nt, Human
ggcccaggaguuuggcca

SEQ ID NO: 2946857 - RNA, 13 nt, Human
ggcccaggaguuu

SEQ ID NO: 2946858 - RNA, 11 nt, Human
ggcccaggagu

SEQ ID NO: 2946859 - RNA, 19 nt, Human
ggcccaggguggccacacc

SEQ ID NO: 2946860 - RNA, 17 nt, Human
ggccccaccagugccuc

SEQ ID NO: 2946861 - RNA, 18 nt, Human
ggccccaccagugccucu

SEQ ID NO: 2946862 - RNA, 18 nt, Human
ggcccuucucuccagccc

SEQ ID NO: 2946863 - RNA, 14 nt, Human
ggcccuuccuuuuc

SEQ ID NO: 2946864 - RNA, 17 nt, Human
ggcccuucucuccagcc

SEQ ID NO: 2946865 - RNA, 16 nt, Human
ggcccuucucuccagc

SEQ ID NO: 2946866 - RNA, 19 nt, Human
ggcgugcaguggugcgauc

SEQ ID NO: 2946867 - RNA, 14 nt, Human
ggcgugcaguggug

SEQ ID NO: 2946868 - RNA, 16 nt, Human
ggcucacugcagccuc

SEQ ID NO: 2946869 - RNA, 17 nt, Human
ggcucacugcagccuca

SEQ ID NO: 2946870 - RNA, 21 nt, Human
ggcucagcggggacagcuccu

SEQ ID NO: 2946871 - RNA, 22 nt, Human
ggcucagcggggacagcuccuu

SEQ ID NO: 2946872 - RNA, 23 nt, Human
ggcucagcggggacagcuccuuc

SEQ ID NO: 2946873 - RNA, 19 nt, Human
ggcucagcaaaagaugcuu

SEQ ID NO: 2946874 - RNA, 23 nt, Human
ggcucagcaaaagaugcuucuca

SEQ ID NO: 2946875 - RNA, 12 nt, Human
ggccugagcugg

SEQ ID NO: 2946876 - RNA, 15 nt, Human
ggccugagcugggau

SEQ ID NO: 2946877 - RNA, 14 nt, Human
ggccuuuggcuuca

SEQ ID NO: 2946878 - RNA, 15 nt, Human
ggccuucucugaagg

SEQ ID NO: 2946879 - RNA, 16 nt, Human
ggccuucucugaagga

SEQ ID NO: 2946880 - RNA, 13 nt, Human
ggccuuuggcuuc

SEQ ID NO: 2946881 - RNA, 21 nt, Human
ggccuggccagaugcaccagc

SEQ ID NO: 2946882 - RNA, 21 nt, Human
ggccugugucuaguuguuuga

SEQ ID NO: 2946883 - RNA, 12 nt, Human
ggccuucucuga

SEQ ID NO: 2946884 - RNA, 23 nt, Human
ggccuucggccuccauccugagg

SEQ ID NO: 2946885 - RNA, 22 nt, Human
ggccuucggccuccauccugag

SEQ ID NO: 2946886 - RNA, 14 nt, Human
ggaggugaccccag

SEQ ID NO: 2946887 - RNA, 20 nt, Human
ggaggucaaggcugcaguga

SEQ ID NO: 2946888 - RNA, 14 nt, Human
ggagguaaugacca

SEQ ID NO: 2946889 - RNA, 16 nt, Human
ggaggggggagguggg

SEQ ID NO: 2946890 - RNA, 19 nt, Human
ggaggaaggaaacccagcu

SEQ ID NO: 2946891 - RNA, 23 nt, Human
ggaggaaggaaacccagcucugg

SEQ ID NO: 2946892 - RNA, 20 nt, Human
ggaggaaggaaacccagcuc

SEQ ID NO: 2946893 - RNA, 11 nt, Human
ggaggccagcc

SEQ ID NO: 2946894 - RNA, 20 nt, Human
ggaggccaaggugggaggau

SEQ ID NO: 2946895 - RNA, 21 nt, Human
ggagcugccuguucagcucca

SEQ ID NO: 2946896 - RNA, 22 nt, Human
ggagcugaucgcuucuccccca

SEQ ID NO: 2946897 - RNA, 12 nt, Human
ggagcugccugu

SEQ ID NO: 2946898 - RNA, 16 nt, Human
ggagccccgaggccuu

SEQ ID NO: 2946899 - RNA, 22 nt, Human
ggagccccgaggccuucucuga

SEQ ID NO: 2946900 - RNA, 15 nt, Human
ggagugcagugagcc

SEQ ID NO: 2946901 - RNA, 18 nt, Human
ggaucuguauguguucua

SEQ ID NO: 2946902 - RNA, 19 nt, Human
ggaucuguauguguucuau

SEQ ID NO: 2946903 - RNA, 14 nt, Human
ggauccugagccag

SEQ ID NO: 2946904 - RNA, 13 nt, Human
ggauccugagcca

SEQ ID NO: 2946905 - RNA, 14 nt, Human
ggauccuccaggug

SEQ ID NO: 2946906 - RNA, 15 nt, Human
ggauccuccaggugc

SEQ ID NO: 2946907 - RNA, 16 nt, Human
ggauggggcugcaccg

SEQ ID NO: 2946908 - RNA, 12 nt, Human
ggauggcaagau

SEQ ID NO: 2946909 - RNA, 18 nt, Human
ggauggauuuccagccaa

SEQ ID NO: 2946910 - RNA, 15 nt, Human
ggaguucugguuccu

SEQ ID NO: 2946911 - RNA, 14 nt, Human
ggaguggccacaga

SEQ ID NO: 2946912 - RNA, 13 nt, Human
ggaguuuggccag

SEQ ID NO: 2946913 - RNA, 15 nt, Human
ggaguuuggccagaa

SEQ ID NO: 2946914 - RNA, 14 nt, Human
ggaguuuggccaga

SEQ ID NO: 2946915 - RNA, 24 nt, Human
ggcacagaaaauggaagacagcuc

SEQ ID NO: 2946916 - RNA, 15 nt, Human
ggauguucugggaca

SEQ ID NO: 2946917 - RNA, 16 nt, Human
ggauguucugggacac

SEQ ID NO: 2946918 - RNA, 13 nt, Human
ggauguucuggga

SEQ ID NO: 2946919 - RNA, 13 nt, Human
gggaaggauacaa

SEQ ID NO: 2946920 - RNA, 16 nt, Human
gggacagcuccuucug

SEQ ID NO: 2946921 - RNA, 23 nt, Human
gggacagaggggguggccuccca

SEQ ID NO: 2946922 - RNA, 22 nt, Human
gggacagaggggguggccuccc

SEQ ID NO: 2946923 - RNA, 13 nt, Human
gggacagaggggg

SEQ ID NO: 2946924 - RNA, 21 nt, Human
gggacagcuccuucuguccua

SEQ ID NO: 2946925 - RNA, 19 nt, Human
gggacauuugcucauggaa

SEQ ID NO: 2946926 - RNA, 20 nt, Human
gggacauuugcucauggaau

SEQ ID NO: 2946927 - RNA, 21 nt, Human
gggacauuugcucauggaauu

SEQ ID NO: 2946928 - RNA, 13 nt, Human
aaaacucauuuuu

SEQ ID NO: 2946929 - RNA, 22 nt, Human
aaaacugcugacuguuuucucu

SEQ ID NO: 2946930 - RNA, 20 nt, Human
aaaacugcugacuguuuucu

SEQ ID NO: 2946931 - RNA, 23 nt, Human
aaaacugcugacuguuuucucuu

SEQ ID NO: 2946932 - RNA, 17 nt, Human
aaaagaugaaaauauuu

SEQ ID NO: 2946933 - RNA, 13 nt, Human
aaaagaugcuucu

SEQ ID NO: 2946934 - RNA, 13 nt, Human
aaaaccacagcag

SEQ ID NO: 2946935 - RNA, 14 nt, Human
aaaaaucucaaauu

SEQ ID NO: 2946936 - RNA, 22 nt, Human
aaaaauggaacauaaaauacaa

SEQ ID NO: 2946937 - RNA, 15 nt, Human
aaaacaugcuacaca

SEQ ID NO: 2946938 - RNA, 12 nt, Human
aaaaccacagca

SEQ ID NO: 2946939 - RNA, 21 nt, Human
aaaaccaauguucucucuucu

SEQ ID NO: 2946940 - RNA, 15 nt, Human
gggauuacaggugug

SEQ ID NO: 2946941 - RNA, 13 nt, Human
gggauuggcugug

SEQ ID NO: 2946942 - RNA, 17 nt, Human
gggauuguaaaauggug

SEQ ID NO: 2946943 - RNA, 16 nt, Human
gggauuguaaaauggu

SEQ ID NO: 2946944 - RNA, 16 nt, Human
gggcaacccccagccu

SEQ ID NO: 2946945 - RNA, 18 nt, Human
gggcaacccccagccugc

SEQ ID NO: 2946946 - RNA, 12 nt, Human
gggcagagcaga

SEQ ID NO: 2946947 - RNA, 16 nt, Human
gggcagagcagagacc

SEQ ID NO: 2946948 - RNA, 14 nt, Human
gggcagaggaaagc

SEQ ID NO: 2946949 - RNA, 22 nt, Human
gggcagagcagagaccaucccu

SEQ ID NO: 2946950 - RNA, 17 nt, Human
gggcagagcagagacca

SEQ ID NO: 2946951 - RNA, 22 nt, Human
aaaagggguaggguuuaaagau

SEQ ID NO: 2946952 - RNA, 19 nt, Human
aaaagguaugcaaucaaau

SEQ ID NO: 2946953 - RNA, 15 nt, Human
gggaggucgaggcag

SEQ ID NO: 2946954 - RNA, 17 nt, Human
gggagggcuccagacac

SEQ ID NO: 2946955 - RNA, 15 nt, Human
gggagggcuccagac

SEQ ID NO: 2946956 - RNA, 14 nt, Human
gggagggcuccaga

SEQ ID NO: 2946957 - RNA, 19 nt, Human
gggaggucgaggcaggagg

SEQ ID NO: 2946958 - RNA, 18 nt, Human
gggaggucgaggcaggag

SEQ ID NO: 2946959 - RNA, 18 nt, Human
gggagggcuccagacaca

SEQ ID NO: 2946960 - RNA, 17 nt, Human
gggaggucgaggcagga

SEQ ID NO: 2946961 - RNA, 19 nt, Human
gggaggccaaggugggagg

SEQ ID NO: 2946962 - RNA, 19 nt, Human
gggcccuuuuucaauaacu

SEQ ID NO: 2946963 - RNA, 23 nt, Human
gggccaguuggucccccuuccau

SEQ ID NO: 2946964 - RNA, 22 nt, Human
gggccaguuggucccccuucca

SEQ ID NO: 2946965 - RNA, 18 nt, Human
gggccaguuggucccccu

SEQ ID NO: 2946966 - RNA, 14 nt, Human
gggccaguuggucc

SEQ ID NO: 2946967 - RNA, 19 nt, Human
gggccucuuaugggcuggg

SEQ ID NO: 2946968 - RNA, 20 nt, Human
gggccucuuaugggcugggu

SEQ ID NO: 2946969 - RNA, 23 nt, Human
gggccucggaccccacuccggcc

SEQ ID NO: 2946970 - RNA, 15 nt, Human
gggccuccugugugu

SEQ ID NO: 2946971 - RNA, 13 nt, Human
gggccuccugugu

SEQ ID NO: 2946972 - RNA, 15 nt, Human
gggcgggaggauguu

SEQ ID NO: 2946973 - RNA, 15 nt, Human
gggcgugguggugag

SEQ ID NO: 2946974 - RNA, 15 nt, Human
gggcuacaaggaccc

SEQ ID NO: 2946975 - RNA, 18 nt, Human
gggcuaguugggcuuccu

SEQ ID NO: 2946976 - RNA, 11 nt, Human
gggccaggagc

SEQ ID NO: 2946977 - RNA, 21 nt, Human
aaaaugagccuggcaagaaug

SEQ ID NO: 2946978 - RNA, 14 nt, Human
aaaaugagccuggc

SEQ ID NO: 2946979 - RNA, 17 nt, Human
aaaaucuucauggaauu

SEQ ID NO: 2946980 - RNA, 23 nt, Human
aaaaucuucauggaauucacaaa

SEQ ID NO: 2946981 - RNA, 15 nt, Human
aaaaucuucauggaa

SEQ ID NO: 2946982 - RNA, 16 nt, Human
aaaaucuucauggaau

SEQ ID NO: 2946983 - RNA, 19 nt, Human
aaaaguauguuagugcaaa

SEQ ID NO: 2946984 - RNA, 23 nt, Human
aaacauaucucuuaucuuacgaa

SEQ ID NO: 2946985 - RNA, 16 nt, Human
aaacagucucccuucc

SEQ ID NO: 2946986 - RNA, 20 nt, Human
aaacagucucaggaaaucaa

SEQ ID NO: 2946987 - RNA, 18 nt, Human
aaacaagaccacguuucu

SEQ ID NO: 2946988 - RNA, 20 nt, Human
aaacaagaccacguuucuaa

SEQ ID NO: 2946989 - RNA, 12 nt, Human
aaacacauuuuu

SEQ ID NO: 2946990 - RNA, 16 nt, Human
aaacacauuuuucuua

SEQ ID NO: 2946991 - RNA, 20 nt, Human
aaacaagcacuaaacaaaga

SEQ ID NO: 2946992 - RNA, 12 nt, Human
ggggacagcucc

SEQ ID NO: 2946993 - RNA, 14 nt, Human
ggggacagcuccuu

SEQ ID NO: 2946994 - RNA, 20 nt, Human
ggggacagcuccuucugucc

SEQ ID NO: 2946995 - RNA, 12 nt, Human
ggggccuggaug

SEQ ID NO: 2946996 - RNA, 21 nt, Human
gggcugcaugcgggcuuccuc

SEQ ID NO: 2946997 - RNA, 18 nt, Human
gggcugcaugcgggcuuc

SEQ ID NO: 2946998 - RNA, 10 nt, Human
gggcucagca

SEQ ID NO: 2946999 - RNA, 22 nt, Human
gggcugcaccggcuggccuggc

SEQ ID NO: 2947000 - RNA, 18 nt, Human
gggcucagcaaaagaugc

SEQ ID NO: 2947001 - RNA, 20 nt, Human
gggcuggguucuacccaggu

SEQ ID NO: 2947002 - RNA, 22 nt, Human
gggcuggguucuacccaggugc

SEQ ID NO: 2947003 - RNA, 15 nt, Human
aaaaugugauaugua

SEQ ID NO: 2947004 - RNA, 22 nt, Human
aaaauuuuuucucuaggaaaua

SEQ ID NO: 2947005 - RNA, 22 nt, Human
aaauaaggaaugauauaagguu

SEQ ID NO: 2947006 - RNA, 15 nt, Human
aaauaaucucugauu

SEQ ID NO: 2947007 - RNA, 12 nt, Human
aaauaagucuga

SEQ ID NO: 2947008 - RNA, 14 nt, Human
aaauaagucugauu

SEQ ID NO: 2947009 - RNA, 16 nt, Human
aaauaagucugauuua

SEQ ID NO: 2947010 - RNA, 17 nt, Human
aaauaagucugauuuaa

SEQ ID NO: 2947011 - RNA, 12 nt, Human
aaauaaugugaa

SEQ ID NO: 2947012 - RNA, 15 nt, Human
aaauaauuuuuauau

SEQ ID NO: 2947013 - RNA, 13 nt, Human
aaauaaugugaaa

SEQ ID NO: 2947014 - RNA, 18 nt, Human
aaauaauuuuuauauuug

SEQ ID NO: 2947015 - RNA, 20 nt, Human
aaauaauuuuuauauuugaa

SEQ ID NO: 2947016 - RNA, 15 nt, Human
gguuuggagcugauc

SEQ ID NO: 2947017 - RNA, 12 nt, Human
aaaguggugaga

SEQ ID NO: 2947018 - RNA, 20 nt, Human
gguuuggacaaaauggaaua

SEQ ID NO: 2947019 - RNA, 13 nt, Human
gguuuggagcuga

SEQ ID NO: 2947020 - RNA, 18 nt, Human
aaaguuuauaaaagugaa

SEQ ID NO: 2947021 - RNA, 21 nt, Human
aaaguuucucuuuucaaaaca

SEQ ID NO: 2947022 - RNA, 23 nt, Human
aaaguuucucuuuucaaaacauu

SEQ ID NO: 2947023 - RNA, 16 nt, Human
aaaguugaauuuuaca

SEQ ID NO: 2947024 - RNA, 14 nt, Human
aaaguugcaaggca

SEQ ID NO: 2947025 - RNA, 21 nt, Human
aaaguugcaaggcaaauguuu

SEQ ID NO: 2947026 - RNA, 15 nt, Human
aaaguugcaaggcaa

SEQ ID NO: 2947027 - RNA, 20 nt, Human
ggugggaggauugcuugagc

SEQ ID NO: 2947028 - RNA, 15 nt, Human
ggugggauccuccag

SEQ ID NO: 2947029 - RNA, 14 nt, Human
ggugggauccucca

SEQ ID NO: 2947030 - RNA, 19 nt, Human
ggugggauccuccaggugc

SEQ ID NO: 2947031 - RNA, 13 nt, Human
gguggggcagcuu

SEQ ID NO: 2947032 - RNA, 17 nt, Human
gguggggcagcuugagg

SEQ ID NO: 2947033 - RNA, 18 nt, Human
gguggggcagugcuuggc

SEQ ID NO: 2947034 - RNA, 23 nt, Human
gguggggucacucuggcagcuca

SEQ ID NO: 2947035 - RNA, 15 nt, Human
gguggggucacucug

SEQ ID NO: 2947036 - RNA, 16 nt, Human
ggugucgggcaugaca

SEQ ID NO: 2947037 - RNA, 13 nt, Human
ggugucgggcaug

SEQ ID NO: 2947038 - RNA, 18 nt, Human
ggugugagucaccaagcc

SEQ ID NO: 2947039 - RNA, 16 nt, Human
ggugugacugaauuuc

SEQ ID NO: 2947040 - RNA, 16 nt, Human
ggugugaccacugcag

SEQ ID NO: 2947041 - RNA, 21 nt, Human
gguucccuuugacgccauccc

SEQ ID NO: 2947042 - RNA, 22 nt, Human
gguucccuuugacgccauccca

SEQ ID NO: 2947043 - RNA, 22 nt, Human
gguucaggguuggccccugccc

SEQ ID NO: 2947044 - RNA, 18 nt, Human
gguucaggguuggccccu

SEQ ID NO: 2947045 - RNA, 21 nt, Human
gguucaggguuggccccugcc

SEQ ID NO: 2947046 - RNA, 12 nt, Human
gguucagcuugu

SEQ ID NO: 2947047 - RNA, 12 nt, Human
gguguggaagag

SEQ ID NO: 2947048 - RNA, 13 nt, Human
ggugugcucugau

SEQ ID NO: 2947049 - RNA, 21 nt, Human
ggugugcggccuuuggcuuca

SEQ ID NO: 2947050 - RNA, 12 nt, Human
gguuucagaaau

SEQ ID NO: 2947051 - RNA, 13 nt, Human
gguuucagaaaug

SEQ ID NO: 2947052 - RNA, 12 nt, Human
gguuucuagcau

SEQ ID NO: 2947053 - RNA, 14 nt, Human
gguuucagaaaugu

SEQ ID NO: 2947054 - RNA, 16 nt, Human
gguuuagaaagcuugc

SEQ ID NO: 2947055 - RNA, 11 nt, Human
gguuuauuugg

SEQ ID NO: 2947056 - RNA, 13 nt, Human
aaagcaaaggaga

SEQ ID NO: 2947057 - RNA, 15 nt, Human
aaagacuauucaaac

SEQ ID NO: 2947058 - RNA, 23 nt, Human
gguccugcugcaguugccaguca

SEQ ID NO: 2947059 - RNA, 21 nt, Human
gguccugcugcaguugccagu

SEQ ID NO: 2947060 - RNA, 14 nt, Human
ggucggaaaacaug

SEQ ID NO: 2947061 - RNA, 17 nt, Human
ggucuacacugugcuga

SEQ ID NO: 2947062 - RNA, 13 nt, Human
ggucggaaaacau

SEQ ID NO: 2947063 - RNA, 14 nt, Human
gguccugcugcagu

SEQ ID NO: 2947064 - RNA, 21 nt, Human
ggugcauuugaggucuguucu

SEQ ID NO: 2947065 - RNA, 21 nt, Human
ggucuguuuuguguacuuuua

SEQ ID NO: 2947066 - RNA, 18 nt, Human
ggugcaaugaccuuucaa

SEQ ID NO: 2947067 - RNA, 20 nt, Human
ggugcaaugaccuuucaaua

SEQ ID NO: 2947068 - RNA, 19 nt, Human
ggugcaaugaccuuucaau

SEQ ID NO: 2947069 - RNA, 21 nt, Human
gguggaugccugguggcagcu

SEQ ID NO: 2947070 - RNA, 14 nt, Human
gguggaugccuggu

SEQ ID NO: 2947071 - RNA, 16 nt, Human
aaagcagcguuucuau

SEQ ID NO: 2947072 - RNA, 18 nt, Human
aaagcagcguuucuauga

SEQ ID NO: 2947073 - RNA, 22 nt, Human
aaagcagcguuucuaugacaca

SEQ ID NO: 2947074 - RNA, 15 nt, Human
aaagcagcguuucua

SEQ ID NO: 2947075 - RNA, 17 nt, Human
aaagcagggacuugaac

SEQ ID NO: 2947076 - RNA, 14 nt, Human
aaagacuauucaaa

SEQ ID NO: 2947077 - RNA, 17 nt, Human
aaagacuaucuaaaugu

SEQ ID NO: 2947078 - RNA, 17 nt, Human
aaagaaguuugaacauu

SEQ ID NO: 2947079 - RNA, 12 nt, Human
aaacuuuacuau

SEQ ID NO: 2947080 - RNA, 15 nt, Human
gguccauagagagca

SEQ ID NO: 2947081 - RNA, 17 nt, Human
aaacuuuaccuuuuuua

SEQ ID NO: 2947082 - RNA, 22 nt, Human
aaacuuuaccuuuuuuauacau

SEQ ID NO: 2947083 - RNA, 22 nt, Human
gguaugaucacggcucacugca

SEQ ID NO: 2947084 - RNA, 14 nt, Human
gguaugcaaucaaa

SEQ ID NO: 2947085 - RNA, 17 nt, Human
gguccacccaggagccc

SEQ ID NO: 2947086 - RNA, 12 nt, Human
gguccacccagg

SEQ ID NO: 2947087 - RNA, 13 nt, Human
gguccacccagga

SEQ ID NO: 2947088 - RNA, 15 nt, Human
gguccacccaggagc

SEQ ID NO: 2947089 - RNA, 16 nt, Human
gguccacccaggagcc

SEQ ID NO: 2947090 - RNA, 17 nt, Human
ggguuucuaaagcugcc

SEQ ID NO: 2947091 - RNA, 14 nt, Human
gguaacaggcagau

SEQ ID NO: 2947092 - RNA, 20 nt, Human
gguaacaggcagauacagga

SEQ ID NO: 2947093 - RNA, 13 nt, Human
gguaacaggcaga

SEQ ID NO: 2947094 - RNA, 15 nt, Human
gguacacuugugaau

SEQ ID NO: 2947095 - RNA, 17 nt, Human
ggguguggcgcagcaua

SEQ ID NO: 2947096 - RNA, 12 nt, Human
ggguggugaccu

SEQ ID NO: 2947097 - RNA, 17 nt, Human
ggguggaugccuggugg

SEQ ID NO: 2947098 - RNA, 15 nt, Human
ggguggcaccagcag

SEQ ID NO: 2947099 - RNA, 13 nt, Human
ggguggaugccug

SEQ ID NO: 2947100 - RNA, 19 nt, Human
gggugggacacccugugau

SEQ ID NO: 2947101 - RNA, 20 nt, Human
ggguggggaccucaggccug

SEQ ID NO: 2947102 - RNA, 15 nt, Human
gccccuggaugcagc

SEQ ID NO: 2947103 - RNA, 15 nt, Human
gccccugcccggcug

SEQ ID NO: 2947104 - RNA, 21 nt, Human
gccccugcugguucaggguug

SEQ ID NO: 2947105 - RNA, 22 nt, Human
gccccugcugguucaggguugg

SEQ ID NO: 2947106 - RNA, 18 nt, Human
gccccacccucagaugca

SEQ ID NO: 2947107 - RNA, 15 nt, Human
gccccacccucagau

SEQ ID NO: 2947108 - RNA, 18 nt, Human
gcccaggaguuuggccag

SEQ ID NO: 2947109 - RNA, 17 nt, Human
gcccaggccccugccac

SEQ ID NO: 2947110 - RNA, 17 nt, Human
gcccaggaguuuggcca

SEQ ID NO: 2947111 - RNA, 14 nt, Human
gcccaggcaggucu

SEQ ID NO: 2947112 - RNA, 16 nt, Human
gcccaggcaggucuug

SEQ ID NO: 2947113 - RNA, 15 nt, Human
gcccaggccccugcc

SEQ ID NO: 2947114 - RNA, 13 nt, Human
gcccaggccccug

SEQ ID NO: 2947115 - RNA, 13 nt, Human
gcccaggcagguc

SEQ ID NO: 2947116 - RNA, 12 nt, Human
gcccaggcaggu

SEQ ID NO: 2947117 - RNA, 13 nt, Human
gcccaggaguuug

SEQ ID NO: 2947118 - RNA, 16 nt, Human
gcccaggaguuuggcc

SEQ ID NO: 2947119 - RNA, 15 nt, Human
gcccaggaguuuggc

SEQ ID NO: 2947120 - RNA, 14 nt, Human
gccaugugccaggu

SEQ ID NO: 2947121 - RNA, 22 nt, Human
gccaugugcuaguaauuggaaa

SEQ ID NO: 2947122 - RNA, 13 nt, Human
gccagugugacaa

SEQ ID NO: 2947123 - RNA, 22 nt, Human
gccaguuauggcuauaggugcu

SEQ ID NO: 2947124 - RNA, 13 nt, Human
gccaguugguccc

SEQ ID NO: 2947125 - RNA, 23 nt, Human
gccaguuggucccccuuccaugg

SEQ ID NO: 2947126 - RNA, 22 nt, Human
gccaguuggucccccuuccaug

SEQ ID NO: 2947127 - RNA, 21 nt, Human
gccaguuggucccccuuccau

SEQ ID NO: 2947128 - RNA, 20 nt, Human
gccaguuggucccccuucca

SEQ ID NO: 2947129 - RNA, 18 nt, Human
gccaguuggucccccuuc

SEQ ID NO: 2947130 - RNA, 16 nt, Human
gccaguuggucccccu

SEQ ID NO: 2947131 - RNA, 14 nt, Human
gccaggcccucugc

SEQ ID NO: 2947132 - RNA, 13 nt, Human
gccaggcccucug

SEQ ID NO: 2947133 - RNA, 18 nt, Human
gccaggccacaagacccu

SEQ ID NO: 2947134 - RNA, 13 nt, Human
gccaggccacaag

SEQ ID NO: 2947135 - RNA, 22 nt, Human
gccaggccagagggagugacag

SEQ ID NO: 2947136 - RNA, 15 nt, Human
gccaggccagaggga

SEQ ID NO: 2947137 - RNA, 21 nt, Human
gccaggccacaagacccuugu

SEQ ID NO: 2947138 - RNA, 13 nt, Human
gccagcaguucag

SEQ ID NO: 2947139 - RNA, 14 nt, Human
gccagcaguucaga

SEQ ID NO: 2947140 - RNA, 19 nt, Human
gccagcaguucagagcugc

SEQ ID NO: 2947141 - RNA, 20 nt, Human
gccagcaguucagagcugcc

SEQ ID NO: 2947142 - RNA, 21 nt, Human
gccagcaguucagagcugccc

SEQ ID NO: 2947143 - RNA, 13 nt, Human
gccugcuccagcu

SEQ ID NO: 2947144 - RNA, 17 nt, Human
gccugcuaauuccccag

SEQ ID NO: 2947145 - RNA, 23 nt, Human
gccugcuaauuccccagauugca

SEQ ID NO: 2947146 - RNA, 19 nt, Human
gccuccuuugugaggaagc

SEQ ID NO: 2947147 - RNA, 21 nt, Human
gccuccuuugugaggaagccg

SEQ ID NO: 2947148 - RNA, 20 nt, Human
gccuccuuugugaggaagcc

SEQ ID NO: 2947149 - RNA, 15 nt, Human
gccuccauccugagg

SEQ ID NO: 2947150 - RNA, 16 nt, Human
gccuccauccugaggc

SEQ ID NO: 2947151 - RNA, 20 nt, Human
gccuccauccugaggcucca

SEQ ID NO: 2947152 - RNA, 17 nt, Human
gcggagcacacuggcuc

SEQ ID NO: 2947153 - RNA, 14 nt, Human
gcgugcacacacca

SEQ ID NO: 2947154 - RNA, 18 nt, Human
gcgugcacacaccagagc

SEQ ID NO: 2947155 - RNA, 20 nt, Human
gcgugguggacaugcacagc

SEQ ID NO: 2947156 - RNA, 17 nt, Human
gcuacuugggaggcuga

SEQ ID NO: 2947157 - RNA, 19 nt, Human
gcuacuguccuacccaccc

SEQ ID NO: 2947158 - RNA, 20 nt, Human
gcuacuguccuacccacccu

SEQ ID NO: 2947159 - RNA, 15 nt, Human
gcuacugucagcucc

SEQ ID NO: 2947160 - RNA, 17 nt, Human
gcuacugccauccuggc

SEQ ID NO: 2947161 - RNA, 21 nt, Human
gcuacugccauccuggcccag

SEQ ID NO: 2947162 - RNA, 18 nt, Human
gcuacugccauccuggcc

SEQ ID NO: 2947163 - RNA, 20 nt, Human
gcuacugccauccuggccca

SEQ ID NO: 2947164 - RNA, 17 nt, Human
gcuacaaaaacacagca

SEQ ID NO: 2947165 - RNA, 19 nt, Human
gcuacaaaaacacagcaag

SEQ ID NO: 2947166 - RNA, 18 nt, Human
gcuacaaaaacacagcaa

SEQ ID NO: 2947167 - RNA, 16 nt, Human
gcuaauuuuucauuuu

SEQ ID NO: 2947168 - RNA, 17 nt, Human
gcguuucuaugacacau

SEQ ID NO: 2947169 - RNA, 13 nt, Human
gcgauucuucugc

SEQ ID NO: 2947170 - RNA, 24 nt, Human
gcgagccauuugucccaagugcca

SEQ ID NO: 2947171 - RNA, 20 nt, Human
gcgagccauuugucccaagu

SEQ ID NO: 2947172 - RNA, 14 nt, Human
gcgauucuucugcu

SEQ ID NO: 2947173 - RNA, 20 nt, Human
ggaagacuucaucccucugg

SEQ ID NO: 2947174 - RNA, 17 nt, Human
ggaagacuucaucccuc

SEQ ID NO: 2947175 - RNA, 14 nt, Human
ggaaaugggcagag

SEQ ID NO: 2947176 - RNA, 22 nt, Human
ggaaaugggcagagcagagacc

SEQ ID NO: 2947177 - RNA, 18 nt, Human
ggaaaugggcagagcaga

SEQ ID NO: 2947178 - RNA, 17 nt, Human
ggaaaugggcagagcag

SEQ ID NO: 2947179 - RNA, 16 nt, Human
ggaaaugggcagagca

SEQ ID NO: 2947180 - RNA, 20 nt, Human
ggaaauuagguugaaacaua

SEQ ID NO: 2947181 - RNA, 15 nt, Human
ggaacaaggcaaggc

SEQ ID NO: 2947182 - RNA, 21 nt, Human
ggaacaaggcaaggcugucaa

SEQ ID NO: 2947183 - RNA, 17 nt, Human
ggaacaaggcaaggcug

SEQ ID NO: 2947184 - RNA, 13 nt, Human
ggaacaccuccuc

SEQ ID NO: 2947185 - RNA, 23 nt, Human
ggaacaaggcaaggcugucaauu

SEQ ID NO: 2947186 - RNA, 15 nt, Human
ggaacacuccuucac

SEQ ID NO: 2947187 - RNA, 19 nt, Human
ggaacacuccuucacagau

SEQ ID NO: 2947188 - RNA, 16 nt, Human
ggaagacaaugugaaa

SEQ ID NO: 2947189 - RNA, 14 nt, Human
ggaagacaauguga

SEQ ID NO: 2947190 - RNA, 17 nt, Human
gcuuugaucccuucuua

SEQ ID NO: 2947191 - RNA, 14 nt, Human
gcuuugaucccuuc

SEQ ID NO: 2947192 - RNA, 15 nt, Human
gcuuuuggucugugu

SEQ ID NO: 2947193 - RNA, 18 nt, Human
gcuuuugucuaugggacu

SEQ ID NO: 2947194 - RNA, 22 nt, Human
gcuuuuuucucugauacagaaa

SEQ ID NO: 2947195 - RNA, 18 nt, Human
ggaaaauuuuaaaaauac

SEQ ID NO: 2947196 - RNA, 16 nt, Human
ggaaacccagcucugg

SEQ ID NO: 2947197 - RNA, 12 nt, Human
gcuuuugugcau

SEQ ID NO: 2947198 - RNA, 22 nt, Human
gcuuccagugaggcucugcccu

SEQ ID NO: 2947199 - RNA, 23 nt, Human
gcuuccagugaggcucugcccuu

SEQ ID NO: 2947200 - RNA, 19 nt, Human
gcuuccuggcaauagucaa

SEQ ID NO: 2947201 - RNA, 20 nt, Human
gcuugaccgugaggccagag

SEQ ID NO: 2947202 - RNA, 15 nt, Human
gcuucuucagagacu

SEQ ID NO: 2947203 - RNA, 12 nt, Human
gcuucuucagag

SEQ ID NO: 2947204 - RNA, 18 nt, Human
gcuuguaaauagcucagg

SEQ ID NO: 2947205 - RNA, 19 nt, Human
gcuuguaaauagcucaggu

SEQ ID NO: 2947206 - RNA, 17 nt, Human
gcuuguaaauagcucag

SEQ ID NO: 2947207 - RNA, 22 nt, Human
gcuugaccuuuaagagaaauga

SEQ ID NO: 2947208 - RNA, 18 nt, Human
gcuugaccuuuaagagaa

SEQ ID NO: 2947209 - RNA, 23 nt, Human
gcuugaccgugaggccagagaca

SEQ ID NO: 2947210 - RNA, 22 nt, Human
gcuggaguuauugaagcagagu

SEQ ID NO: 2947211 - RNA, 12 nt, Human
gcuguauuuuaa

SEQ ID NO: 2947212 - RNA, 13 nt, Human
gcuguauuuuaaa

SEQ ID NO: 2947213 - RNA, 22 nt, Human
gcuguacauacuuuuuggguuu

SEQ ID NO: 2947214 - RNA, 23 nt, Human
gcugguucaggguuggccccugc

SEQ ID NO: 2947215 - RNA, 14 nt, Human
gcuucaguggcagc

SEQ ID NO: 2947216 - RNA, 14 nt, Human
gcuucaaggauccu

SEQ ID NO: 2947217 - RNA, 22 nt, Human
gcuuaauuauugauguuuucau

SEQ ID NO: 2947218 - RNA, 17 nt, Human
gcuuauuuccucauuuu

SEQ ID NO: 2947219 - RNA, 13 nt, Human
gcuguuggcuggg

SEQ ID NO: 2947220 - RNA, 18 nt, Human
gcugcugaaggcucgagc

SEQ ID NO: 2947221 - RNA, 12 nt, Human
gcugcugacagu

SEQ ID NO: 2947222 - RNA, 20 nt, Human
gcugcugagauccuggacug

SEQ ID NO: 2947223 - RNA, 18 nt, Human
gcugcugagauccuggac

SEQ ID NO: 2947224 - RNA, 17 nt, Human
gcugccauccagguuca

SEQ ID NO: 2947225 - RNA, 13 nt, Human
gcugccccuggca

SEQ ID NO: 2947226 - RNA, 16 nt, Human
gcugccccuggcagcc

SEQ ID NO: 2947227 - RNA, 15 nt, Human
gcugccccuggcagc

SEQ ID NO: 2947228 - RNA, 24 nt, Human
gcugcucccaccuggcucuguggc

SEQ ID NO: 2947229 - RNA, 20 nt, Human
gcugcucccaccuggcucug

SEQ ID NO: 2947230 - RNA, 22 nt, Human
gcugcucccaccuggcucugug

SEQ ID NO: 2947231 - RNA, 15 nt, Human
gcugcucccaccugg

SEQ ID NO: 2947232 - RNA, 20 nt, Human
gcugccccugcacagcaggc

SEQ ID NO: 2947233 - RNA, 15 nt, Human
gcugcacccucaggc

SEQ ID NO: 2947234 - RNA, 13 nt, Human
gcugcacccucag

SEQ ID NO: 2947235 - RNA, 16 nt, Human
gcugcacccucaggca

SEQ ID NO: 2947236 - RNA, 13 nt, Human
gcugccagugccu

SEQ ID NO: 2947237 - RNA, 14 nt, Human
gcugccagugccug

SEQ ID NO: 2947238 - RNA, 12 nt, Human
gcugccauccag

SEQ ID NO: 2947239 - RNA, 13 nt, Human
gcugccauccagg

SEQ ID NO: 2947240 - RNA, 15 nt, Human
gcugaggugggagga

SEQ ID NO: 2947241 - RNA, 19 nt, Human
gcucucaggccagcugcuu

SEQ ID NO: 2947242 - RNA, 18 nt, Human
gcucucaggccagcugcu

SEQ ID NO: 2947243 - RNA, 17 nt, Human
gcucucaggccagcugc

SEQ ID NO: 2947244 - RNA, 19 nt, Human
gcucuacugaggugcuaug

SEQ ID NO: 2947245 - RNA, 16 nt, Human
gcuccucuccccagca

SEQ ID NO: 2947246 - RNA, 19 nt, Human
gcuccucuccccagcaagu

SEQ ID NO: 2947247 - RNA, 18 nt, Human
gcucucaaguuaucaggg

SEQ ID NO: 2947248 - RNA, 20 nt, Human
gcuccacuuggucugugaga

SEQ ID NO: 2947249 - RNA, 9 nt, Human
gcuccagac

SEQ ID NO: 2947250 - RNA, 23 nt, Human
gcuccagacacauguccaagaag

SEQ ID NO: 2947251 - RNA, 21 nt, Human
gcuccagacacauguccaaga

SEQ ID NO: 2947252 - RNA, 18 nt, Human
gcuccagacacaugucca

SEQ ID NO: 2947253 - RNA, 13 nt, Human
gcuccagcucacc

SEQ ID NO: 2947254 - RNA, 14 nt, Human
gcuccagcucacca

SEQ ID NO: 2947255 - RNA, 23 nt, Human
gcucccaggcauuccccaggagg

SEQ ID NO: 2947256 - RNA, 15 nt, Human
gcuccucuccccagc

SEQ ID NO: 2947257 - RNA, 20 nt, Human
gcucugaucauccacugugc

SEQ ID NO: 2947258 - RNA, 21 nt, Human
gcucugaucauccacugugcc

SEQ ID NO: 2947259 - RNA, 22 nt, Human
gcucugaucauccacugugcca

SEQ ID NO: 2947260 - RNA, 15 nt, Human
gcucugcccauccug

SEQ ID NO: 2947261 - RNA, 21 nt, Human
gcucugcccauccugccccug

SEQ ID NO: 2947262 - RNA, 17 nt, Human
gcugaauacagaggcaa

SEQ ID NO: 2947263 - RNA, 23 nt, Human
gcugaaggcucgagcaugccugg

SEQ ID NO: 2947264 - RNA, 22 nt, Human
gcugagccucacagcagugaga

SEQ ID NO: 2947265 - RNA, 19 nt, Human
gcugagccucacagcagug

SEQ ID NO: 2947266 - RNA, 21 nt, Human
gcugagccucacagcagugag

SEQ ID NO: 2947267 - RNA, 17 nt, Human
gcugagccucacagcag

SEQ ID NO: 2947268 - RNA, 13 nt, Human
gcugacagacaca

SEQ ID NO: 2947269 - RNA, 23 nt, Human
gcucugguccauagagagcaaga

SEQ ID NO: 2947270 - RNA, 20 nt, Human
gcucuguggcgagccauuug

SEQ ID NO: 2947271 - RNA, 16 nt, Human
gcugaaacaacaaaua

SEQ ID NO: 2947272 - RNA, 12 nt, Human
gcugaacaucac

SEQ ID NO: 2947273 - RNA, 14 nt, Human
gauacccaucccau

SEQ ID NO: 2947274 - RNA, 13 nt, Human
gauacccauccca

SEQ ID NO: 2947275 - RNA, 16 nt, Human
gauacuacaguuuguu

SEQ ID NO: 2947276 - RNA, 11 nt, Human
gauacuacagu

SEQ ID NO: 2947277 - RNA, 13 nt, Human
gauacuuauuuaa

SEQ ID NO: 2947278 - RNA, 19 nt, Human
gauacuuauuuaaauagau

SEQ ID NO: 2947279 - RNA, 16 nt, Human
gauacuuauuuaaaua

SEQ ID NO: 2947280 - RNA, 17 nt, Human
gauauggguaguauuuu

SEQ ID NO: 2947281 - RNA, 18 nt, Human
gauauggguaguauuuuu

SEQ ID NO: 2947282 - RNA, 20 nt, Human
gauauguaccuaacgaagua

SEQ ID NO: 2947283 - RNA, 13 nt, Human
gauaugugaacag

SEQ ID NO: 2947284 - RNA, 14 nt, Human
gauaugugaacagu

SEQ ID NO: 2947285 - RNA, 13 nt, Human
gaggucuguucuu

SEQ ID NO: 2947286 - RNA, 14 nt, Human
gaggucuguucuuu

SEQ ID NO: 2947287 - RNA, 11 nt, Human
gaggugggagg

SEQ ID NO: 2947288 - RNA, 12 nt, Human
gaggugggaucc

SEQ ID NO: 2947289 - RNA, 13 nt, Human
gagucaccaagcc

SEQ ID NO: 2947290 - RNA, 14 nt, Human
gagucaccaagccc

SEQ ID NO: 2947291 - RNA, 16 nt, Human
gagucccaccuuggcu

SEQ ID NO: 2947292 - RNA, 20 nt, Human
gagucccaccuuggcugcag

SEQ ID NO: 2947293 - RNA, 11 nt, Human
gagugcaguga

SEQ ID NO: 2947294 - RNA, 12 nt, Human
gagugcagugag

SEQ ID NO: 2947295 - RNA, 24 nt, Human
gagugagcacuaaggugugcucug

SEQ ID NO: 2947296 - RNA, 21 nt, Human
gagucccaccuuggcugcagg

SEQ ID NO: 2947297 - RNA, 13 nt, Human
gagucccaccuug

SEQ ID NO: 2947298 - RNA, 12 nt, Human
gagugagcuggu

SEQ ID NO: 2947299 - RNA, 14 nt, Human
gaguuuggccagaa

SEQ ID NO: 2947300 - RNA, 13 nt, Human
gaguuuggccaga

SEQ ID NO: 2947301 - RNA, 12 nt, Human
gaguuuggccag

SEQ ID NO: 2947302 - RNA, 20 nt, Human
gaguuugggguaugggagag

SEQ ID NO: 2947303 - RNA, 16 nt, Human
gaguuguuacauuuuu

SEQ ID NO: 2947304 - RNA, 20 nt, Human
gaguuguuacauuuuuaagu

SEQ ID NO: 2947305 - RNA, 18 nt, Human
gagugccuuacacaaugg

SEQ ID NO: 2947306 - RNA, 21 nt, Human
gagugcucaguagucagacug

SEQ ID NO: 2947307 - RNA, 16 nt, Human
gaguuuaaauuguaau

SEQ ID NO: 2947308 - RNA, 16 nt, Human
gaguuuagcuggaaaa

SEQ ID NO: 2947309 - RNA, 18 nt, Human
gaguuuagcccugaacau

SEQ ID NO: 2947310 - RNA, 23 nt, Human
gaguugugugaauaccccaagac

SEQ ID NO: 2947311 - RNA, 16 nt, Human
gaugagaggaaaucac

SEQ ID NO: 2947312 - RNA, 20 nt, Human
gaugaucuuugcagacaggc

SEQ ID NO: 2947313 - RNA, 21 nt, Human
gaugaucuuugcagacaggca

SEQ ID NO: 2947314 - RNA, 14 nt, Human
gaugaucuuugcag

SEQ ID NO: 2947315 - RNA, 17 nt, Human
gaucucuugagccuggg

SEQ ID NO: 2947316 - RNA, 16 nt, Human
gaucucuugagccugg

SEQ ID NO: 2947317 - RNA, 12 nt, Human
gaucucuugagc

SEQ ID NO: 2947318 - RNA, 15 nt, Human
gauauuuugcuuugu

SEQ ID NO: 2947319 - RNA, 16 nt, Human
gauauuuugcuuugug

SEQ ID NO: 2947320 - RNA, 15 nt, Human
gauauuuuuuucuuu

SEQ ID NO: 2947321 - RNA, 14 nt, Human
gauuaccagggacu

SEQ ID NO: 2947322 - RNA, 20 nt, Human
gauuacaggugugaaccacc

SEQ ID NO: 2947323 - RNA, 16 nt, Human
gaugugaacacaucag

SEQ ID NO: 2947324 - RNA, 14 nt, Human
gaugugaacacauc

SEQ ID NO: 2947325 - RNA, 17 nt, Human
gauuagggagagaagau

SEQ ID NO: 2947326 - RNA, 16 nt, Human
gcagccaggccacaag

SEQ ID NO: 2947327 - RNA, 14 nt, Human
gcagccaggccaca

SEQ ID NO: 2947328 - RNA, 13 nt, Human
gcagccaggccac

SEQ ID NO: 2947329 - RNA, 16 nt, Human
gcagccacauuccuga

SEQ ID NO: 2947330 - RNA, 14 nt, Human
gcagccacuauugu

SEQ ID NO: 2947331 - RNA, 12 nt, Human
gcagccaggcca

SEQ ID NO: 2947332 - RNA, 18 nt, Human
gcaggcucucaggccagc

SEQ ID NO: 2947333 - RNA, 23 nt, Human
gcaggcucucaggccagcugcuu

SEQ ID NO: 2947334 - RNA, 17 nt, Human
gcagcugcgguccaccc

SEQ ID NO: 2947335 - RNA, 19 nt, Human
gcagcugcgguccacccag

SEQ ID NO: 2947336 - RNA, 22 nt, Human
gcaggcucucaggccagcugcu

SEQ ID NO: 2947337 - RNA, 20 nt, Human
gcaggcucucaggccagcug

SEQ ID NO: 2947338 - RNA, 11 nt, Human
gcagcugccuc

SEQ ID NO: 2947339 - RNA, 12 nt, Human
gcagcugccucc

SEQ ID NO: 2947340 - RNA, 13 nt, Human
gcagcugccuccc

SEQ ID NO: 2947341 - RNA, 15 nt, Human
gcagcugccuccccu

SEQ ID NO: 2947342 - RNA, 16 nt, Human
gcagcugccuccccuc

SEQ ID NO: 2947343 - RNA, 17 nt, Human
gcagcugccuccccucc

SEQ ID NO: 2947344 - RNA, 18 nt, Human
gcagcugccuccccuccu

SEQ ID NO: 2947345 - RNA, 22 nt, Human
gcagcugccuccccuccucugc

SEQ ID NO: 2947346 - RNA, 15 nt, Human
gcaguacuaacauuu

SEQ ID NO: 2947347 - RNA, 21 nt, Human
gcaguacuaacauuuauuuga

SEQ ID NO: 2947348 - RNA, 22 nt, Human
gcaguaaaaaaugguguuuuau

SEQ ID NO: 2947349 - RNA, 19 nt, Human
gcaguaaaaaaugguguuu

SEQ ID NO: 2947350 - RNA, 19 nt, Human
gcagggacuugaacccaua

SEQ ID NO: 2947351 - RNA, 14 nt, Human
gcauacguacacau

SEQ ID NO: 2947352 - RNA, 15 nt, Human
gcauaaguccucuag

SEQ ID NO: 2947353 - RNA, 22 nt, Human
gcauaaguccucuagugaaugu

SEQ ID NO: 2947354 - RNA, 17 nt, Human
gcauaccacuuuuguuc

SEQ ID NO: 2947355 - RNA, 20 nt, Human
gcauaccacuuuuguucuug

SEQ ID NO: 2947356 - RNA, 12 nt, Human
gcacugacauug

SEQ ID NO: 2947357 - RNA, 13 nt, Human
gcacuuuaaaaca

SEQ ID NO: 2947358 - RNA, 20 nt, Human
gcagagcagagaccaucccu

SEQ ID NO: 2947359 - RNA, 19 nt, Human
gcagagcagagaccauccc

SEQ ID NO: 2947360 - RNA, 15 nt, Human
gcagagcagagacca

SEQ ID NO: 2947361 - RNA, 14 nt, Human
gcagagcagagacc

SEQ ID NO: 2947362 - RNA, 12 nt, Human
gcagagcagaga

SEQ ID NO: 2947363 - RNA, 24 nt, Human
gcagagcaccuuagacagucccug

SEQ ID NO: 2947364 - RNA, 19 nt, Human
gcagagcaccuuagacagu

SEQ ID NO: 2947365 - RNA, 23 nt, Human
gcagagcaccuuagacagucccu

SEQ ID NO: 2947366 - RNA, 22 nt, Human
gcagagcaccuuagacaguccc

SEQ ID NO: 2947367 - RNA, 21 nt, Human
gcaauaaagcagcguuucuau

SEQ ID NO: 2947368 - RNA, 22 nt, Human
gcacaagcuccaagcucccagg

SEQ ID NO: 2947369 - RNA, 21 nt, Human
gcacaagcuccaagcucccag

SEQ ID NO: 2947370 - RNA, 23 nt, Human
gcacaagcuccaagcucccaggc

SEQ ID NO: 2947371 - RNA, 14 nt, Human
gcacaagcugcacc

SEQ ID NO: 2947372 - RNA, 13 nt, Human
gcaagugagagcu

SEQ ID NO: 2947373 - RNA, 18 nt, Human
gcaccggcuggccuggcc

SEQ ID NO: 2947374 - RNA, 23 nt, Human
gcaccggcuggccuggccccuca

SEQ ID NO: 2947375 - RNA, 21 nt, Human
gcaccggcuggccuggccccu

SEQ ID NO: 2947376 - RNA, 19 nt, Human
gcaccggcuggccuggccc

SEQ ID NO: 2947377 - RNA, 21 nt, Human
gcacaugccucucucaggcca

SEQ ID NO: 2947378 - RNA, 20 nt, Human
gcacaugccucucucaggcc

SEQ ID NO: 2947379 - RNA, 19 nt, Human
gcacaugccucucucaggc

SEQ ID NO: 2947380 - RNA, 18 nt, Human
gcacaugccucucucagg

SEQ ID NO: 2947381 - RNA, 17 nt, Human
gcacaugccucucucag

SEQ ID NO: 2947382 - RNA, 14 nt, Human
gcacaugccucucu

SEQ ID NO: 2947383 - RNA, 21 nt, Human
gcacaucagcacgauuucugu

SEQ ID NO: 2947384 - RNA, 19 nt, Human
gcacaucagcacgauuucu

SEQ ID NO: 2947385 - RNA, 20 nt, Human
gcacaucagcacgauuucug

SEQ ID NO: 2947386 - RNA, 21 nt, Human
gcacaugagcuggcgggauug

SEQ ID NO: 2947387 - RNA, 15 nt, Human
gcacaucuguuuugu

SEQ ID NO: 2947388 - RNA, 13 nt, Human
gcacaugccucuc

SEQ ID NO: 2947389 - RNA, 18 nt, Human
gcacaguuuucugagaaa

SEQ ID NO: 2947390 - RNA, 17 nt, Human
gcacaguuuucugagaa

SEQ ID NO: 2947391 - RNA, 14 nt, Human
gcacaguuuucuga

SEQ ID NO: 2947392 - RNA, 13 nt, Human
gagauuuacaacu

SEQ ID NO: 2947393 - RNA, 18 nt, Human
gagauugcaccacugcac

SEQ ID NO: 2947394 - RNA, 21 nt, Human
gagaugaugccaugggcccuc

SEQ ID NO: 2947395 - RNA, 22 nt, Human
gagaggcauccaguaucuugaa

SEQ ID NO: 2947396 - RNA, 14 nt, Human
gagaggcauccagu

SEQ ID NO: 2947397 - RNA, 17 nt, Human
gagacuccugcaggcag

SEQ ID NO: 2947398 - RNA, 16 nt, Human
gagacuccugcaggca

SEQ ID NO: 2947399 - RNA, 15 nt, Human
gagacuccugcaggc

SEQ ID NO: 2947400 - RNA, 18 nt, Human
gagcugggugucaagagg

SEQ ID NO: 2947401 - RNA, 21 nt, Human
gagcggagaaaggaagggcug

SEQ ID NO: 2947402 - RNA, 18 nt, Human
gagcggagaaaggaaggg

SEQ ID NO: 2947403 - RNA, 20 nt, Human
gagcugccuguucagcucca

SEQ ID NO: 2947404 - RNA, 21 nt, Human
gagcugccuguucagcuccag

SEQ ID NO: 2947405 - RNA, 22 nt, Human
gagcugccuguucagcuccagc

SEQ ID NO: 2947406 - RNA, 22 nt, Human
gagccuugaacuuugaccucug

SEQ ID NO: 2947407 - RNA, 19 nt, Human
gagccuugaacuuugaccu

SEQ ID NO: 2947408 - RNA, 17 nt, Human
gagccuuccaggggugg

SEQ ID NO: 2947409 - RNA, 16 nt, Human
gagccuuccaggggug

SEQ ID NO: 2947410 - RNA, 15 nt, Human
gagccuuccaggggu

SEQ ID NO: 2947411 - RNA, 14 nt, Human
gagccuuccagggg

SEQ ID NO: 2947412 - RNA, 14 nt, Human
gagcagggcucagc

SEQ ID NO: 2947413 - RNA, 12 nt, Human
gagcaucaggcc

SEQ ID NO: 2947414 - RNA, 22 nt, Human
gagcaugccuggauggggcugc

SEQ ID NO: 2947415 - RNA, 22 nt, Human
gacuaucuaaauguugaaagau

SEQ ID NO: 2947416 - RNA, 13 nt, Human
gacuauuuuuguu

SEQ ID NO: 2947417 - RNA, 17 nt, Human
gacuauuuuuguuuuua

SEQ ID NO: 2947418 - RNA, 18 nt, Human
gacuauuuuuguuuuuau

SEQ ID NO: 2947419 - RNA, 22 nt, Human
gacuauucaaacagucucagga

SEQ ID NO: 2947420 - RNA, 21 nt, Human
gacuauuuuuguuuuuauuaa

SEQ ID NO: 2947421 - RNA, 22 nt, Human
gacuauuuuuguuuuuauuaaa

SEQ ID NO: 2947422 - RNA, 12 nt, Human
gacucugucuca

SEQ ID NO: 2947423 - RNA, 17 nt, Human
gacucuuaagaagacug

SEQ ID NO: 2947424 - RNA, 15 nt, Human
gacucuuaagaagac

SEQ ID NO: 2947425 - RNA, 16 nt, Human
gacucuuaagaagacu

SEQ ID NO: 2947426 - RNA, 23 nt, Human
gacuuuucuguccgagcuuugaa

SEQ ID NO: 2947427 - RNA, 21 nt, Human
gacuuuucuuuguggcuuccu

SEQ ID NO: 2947428 - RNA, 23 nt, Human
gacuuuucuuucagccaagaauu

SEQ ID NO: 2947429 - RNA, 16 nt, Human
gagaagcggcuggcag

SEQ ID NO: 2947430 - RNA, 15 nt, Human
gagaagcggcuggca

SEQ ID NO: 2947431 - RNA, 13 nt, Human
gagaagcggcugg

SEQ ID NO: 2947432 - RNA, 12 nt, Human
gagaaggaagcc

SEQ ID NO: 2947433 - RNA, 14 nt, Human
gagaaucacuugaa

SEQ ID NO: 2947434 - RNA, 21 nt, Human
gagaagucuucuauuuauuua

SEQ ID NO: 2947435 - RNA, 20 nt, Human
gagaagucuucuauuuauuu

SEQ ID NO: 2947436 - RNA, 15 nt, Human
gagaaucacuugaac

SEQ ID NO: 2947437 - RNA, 20 nt, Human
gacaggguuuugccauguug

SEQ ID NO: 2947438 - RNA, 22 nt, Human
gacaggguuuugccauguuggc

SEQ ID NO: 2947439 - RNA, 11 nt, Human
gacagcuccuu

SEQ ID NO: 2947440 - RNA, 17 nt, Human
gacagucaccucaugga

SEQ ID NO: 2947441 - RNA, 20 nt, Human
gacaguauggcagcuuuccu

SEQ ID NO: 2947442 - RNA, 19 nt, Human
gacacuucacgcccuuggc

SEQ ID NO: 2947443 - RNA, 23 nt, Human
gacagcccgggcucugccuccca

SEQ ID NO: 2947444 - RNA, 22 nt, Human
gacagcccgggcucugccuccc

SEQ ID NO: 2947445 - RNA, 21 nt, Human
gacagcccgggcucugccucc

SEQ ID NO: 2947446 - RNA, 13 nt, Human
gacacugaugggc

SEQ ID NO: 2947447 - RNA, 15 nt, Human
gacacugaugggcaa

SEQ ID NO: 2947448 - RNA, 16 nt, Human
gacacuuaaaaauggu

SEQ ID NO: 2947449 - RNA, 21 nt, Human
gacacacagcucuguccuggg

SEQ ID NO: 2947450 - RNA, 12 nt, Human
gacacacaugaa

SEQ ID NO: 2947451 - RNA, 13 nt, Human
gacacacugaaga

SEQ ID NO: 2947452 - RNA, 14 nt, Human
gacaaaaagcuacu

SEQ ID NO: 2947453 - RNA, 21 nt, Human
gaauuuugugcccccauguaa

SEQ ID NO: 2947454 - RNA, 23 nt, Human
gaauuuuggcugugucucccuuc

SEQ ID NO: 2947455 - RNA, 20 nt, Human
gaauuuugugcccccaugua

SEQ ID NO: 2947456 - RNA, 15 nt, Human
gacaaaauggaauac

SEQ ID NO: 2947457 - RNA, 14 nt, Human
gacacacagcucug

SEQ ID NO: 2947458 - RNA, 13 nt, Human
gacacacagcucu

SEQ ID NO: 2947459 - RNA, 15 nt, Human
gacacacagcucugu

SEQ ID NO: 2947460 - RNA, 17 nt, Human
gacacacagcucugucc

SEQ ID NO: 2947461 - RNA, 18 nt, Human
gacacacagcucuguccu

SEQ ID NO: 2947462 - RNA, 19 nt, Human
gacacacagcucuguccug

SEQ ID NO: 2947463 - RNA, 19 nt, Human
gaauuuuggcugugucucc

SEQ ID NO: 2947464 - RNA, 12 nt, Human
gaauuaugaaac

SEQ ID NO: 2947465 - RNA, 11 nt, Human
gaauuaguuuu

SEQ ID NO: 2947466 - RNA, 22 nt, Human
gaaugaaugucagugugacuga

SEQ ID NO: 2947467 - RNA, 18 nt, Human
gaaugaaugucaguguga

SEQ ID NO: 2947468 - RNA, 14 nt, Human
gaaugaaugucagu

SEQ ID NO: 2947469 - RNA, 11 nt, Human
gaaugaauguc

SEQ ID NO: 2947470 - RNA, 20 nt, Human
gaaugagagacacacugaag

SEQ ID NO: 2947471 - RNA, 22 nt, Human
gaaugagagacacacugaagaa

SEQ ID NO: 2947472 - RNA, 23 nt, Human
gaaugagagacacacugaagaag

SEQ ID NO: 2947473 - RNA, 15 nt, Human
gaagcucagggccug

SEQ ID NO: 2947474 - RNA, 14 nt, Human
gaagcucagggccu

SEQ ID NO: 2947475 - RNA, 23 nt, Human
gaagcucagggccuggcucaggu

SEQ ID NO: 2947476 - RNA, 21 nt, Human
gaagcucagggccuggcucag

SEQ ID NO: 2947477 - RNA, 20 nt, Human
gaagcucagggccuggcuca

SEQ ID NO: 2947478 - RNA, 19 nt, Human
gaagcucagggccuggcuc

SEQ ID NO: 2947479 - RNA, 18 nt, Human
gaagcucagggccuggcu

SEQ ID NO: 2947480 - RNA, 17 nt, Human
gaagcucagggccuggc

SEQ ID NO: 2947481 - RNA, 16 nt, Human
gaagcucagggccugg

SEQ ID NO: 2947482 - RNA, 18 nt, Human
gaagucuuuguacagaca

SEQ ID NO: 2947483 - RNA, 20 nt, Human
gaagucuuuguacagacaac

SEQ ID NO: 2947484 - RNA, 19 nt, Human
gaagucuuuguacagacaa

SEQ ID NO: 2947485 - RNA, 17 nt, Human
gaaggcucgagcaugcc

SEQ ID NO: 2947486 - RNA, 16 nt, Human
gaaggcucgagcaugc

SEQ ID NO: 2947487 - RNA, 22 nt, Human
cuuuccugaggcugggcucccu

SEQ ID NO: 2947488 - RNA, 20 nt, Human
cuuucagccaagaauucuua

SEQ ID NO: 2947489 - RNA, 23 nt, Human
cuuucagccaagaauucuuaaau

SEQ ID NO: 2947490 - RNA, 23 nt, Human
cuuucaauaggaaaaacugauuu

SEQ ID NO: 2947491 - RNA, 17 nt, Human
cuuugggccuggcuccc

SEQ ID NO: 2947492 - RNA, 17 nt, Human
cuuucuacccagcgagc

SEQ ID NO: 2947493 - RNA, 15 nt, Human
cuuucuagccagagg

SEQ ID NO: 2947494 - RNA, 16 nt, Human
cuuucuagccagagga

SEQ ID NO: 2947495 - RNA, 22 nt, Human
cuuuuaugauugccuuuuuaua

SEQ ID NO: 2947496 - RNA, 13 nt, Human
cuuuuauaaacuu

SEQ ID NO: 2947497 - RNA, 18 nt, Human
gaaaagaaaaaugagccu

SEQ ID NO: 2947498 - RNA, 21 nt, Human
gaaaauggaagacagcucuua

SEQ ID NO: 2947499 - RNA, 14 nt, Human
gaaaaacugauuuu

SEQ ID NO: 2947500 - RNA, 23 nt, Human
gaaaauggacguguuaugacucc

SEQ ID NO: 2947501 - RNA, 19 nt, Human
gaaaauggacguguuauga

SEQ ID NO: 2947502 - RNA, 15 nt, Human
gaaaauguaugugua

SEQ ID NO: 2947503 - RNA, 23 nt, Human
cuuuuuuggcugcugaaggcucg

SEQ ID NO: 2947504 - RNA, 12 nt, Human
cuuuugugcauu

SEQ ID NO: 2947505 - RNA, 13 nt, Human
cuuuugugcauua

SEQ ID NO: 2947506 - RNA, 18 nt, Human
cuuuugucuaugggacuc

SEQ ID NO: 2947507 - RNA, 18 nt, Human
cuuuuggaagguauuuaa

SEQ ID NO: 2947508 - RNA, 23 nt, Human
cuuuugcccacacuugggagcaa

SEQ ID NO: 2947509 - RNA, 13 nt, Human
gaaacuuuuggaa

SEQ ID NO: 2947510 - RNA, 15 nt, Human
gaaacuuuuggaagg

SEQ ID NO: 2947511 - RNA, 21 nt, Human
gaaagaaaauaccaaggaaca

SEQ ID NO: 2947512 - RNA, 20 nt, Human
gaaagacuaucuaaauguug

SEQ ID NO: 2947513 - RNA, 15 nt, Human
gaaagacuauucaaa

SEQ ID NO: 2947514 - RNA, 14 nt, Human
gaaagacuauucaa

SEQ ID NO: 2947515 - RNA, 17 nt, Human
gaaagacuauucaaaca

SEQ ID NO: 2947516 - RNA, 21 nt, Human
gaaaggcuccaggagcagcca

SEQ ID NO: 2947517 - RNA, 22 nt, Human
gaaaggcuccaggagcagccac

SEQ ID NO: 2947518 - RNA, 20 nt, Human
gaaaggcuccaggagcagcc

SEQ ID NO: 2947519 - RNA, 19 nt, Human
gaaaucaccgaaaacgugg

SEQ ID NO: 2947520 - RNA, 20 nt, Human
gaaaucaaauaugcaaagca

SEQ ID NO: 2947521 - RNA, 19 nt, Human
gaaaucaaauaugcaaagc

SEQ ID NO: 2947522 - RNA, 17 nt, Human
gaaaucaaauaugcaaa

SEQ ID NO: 2947523 - RNA, 18 nt, Human
gaaaucaaauaugcaaag

SEQ ID NO: 2947524 - RNA, 18 nt, Human
gaaauauuuauuuuaaua

SEQ ID NO: 2947525 - RNA, 22 nt, Human
gaaauauuuauuuuaauaaugu

SEQ ID NO: 2947526 - RNA, 19 nt, Human
gaaagggacuuggaagcuc

SEQ ID NO: 2947527 - RNA, 20 nt, Human
gaaagggacgcuacccggga

SEQ ID NO: 2947528 - RNA, 22 nt, Human
gaaagggacuuggaagcuccgc

SEQ ID NO: 2947529 - RNA, 17 nt, Human
gaaauauuuauuuuaau

SEQ ID NO: 2947530 - RNA, 16 nt, Human
cuuauggaacacucug

SEQ ID NO: 2947531 - RNA, 13 nt, Human
cuuauggaacacu

SEQ ID NO: 2947532 - RNA, 20 nt, Human
cuuauggaacacucugagac

SEQ ID NO: 2947533 - RNA, 19 nt, Human
cuuauggaacacucugaga

SEQ ID NO: 2947534 - RNA, 17 nt, Human
cuuauggaacacucuga

SEQ ID NO: 2947535 - RNA, 23 nt, Human
cuuauuguagcauccuggaauau

SEQ ID NO: 2947536 - RNA, 21 nt, Human
cuucaccuuuguccccaccgc

SEQ ID NO: 2947537 - RNA, 22 nt, Human
cuucaccuuuguccccaccgca

SEQ ID NO: 2947538 - RNA, 20 nt, Human
cuuauuguagcauccuggaa

SEQ ID NO: 2947539 - RNA, 19 nt, Human
cuucacggaagagccuugc

SEQ ID NO: 2947540 - RNA, 15 nt, Human
cuucacggaagagcc

SEQ ID NO: 2947541 - RNA, 12 nt, Human
cugugcugaguc

SEQ ID NO: 2947542 - RNA, 19 nt, Human
cugugcugagucugaaggc

SEQ ID NO: 2947543 - RNA, 14 nt, Human
cugugcugagucug

SEQ ID NO: 2947544 - RNA, 23 nt, Human
cuucccaccucucucacuccuug

SEQ ID NO: 2947545 - RNA, 21 nt, Human
cuucccaccucucucacuccu

SEQ ID NO: 2947546 - RNA, 11 nt, Human
cuucccaccuc

SEQ ID NO: 2947547 - RNA, 21 nt, Human
cuuccagugaggcucugcccu

SEQ ID NO: 2947548 - RNA, 23 nt, Human
cuuccagugaggcucugcccuug

SEQ ID NO: 2947549 - RNA, 22 nt, Human
cuuccagugaggcucugcccuu

SEQ ID NO: 2947550 - RNA, 17 nt, Human
cuucaguuugcagagua

SEQ ID NO: 2947551 - RNA, 16 nt, Human
cuucaguuugcagagu

SEQ ID NO: 2947552 - RNA, 20 nt, Human
cuucagagacuccugcaggc

SEQ ID NO: 2947553 - RNA, 19 nt, Human
cuucagagacuccugcagg

SEQ ID NO: 2947554 - RNA, 18 nt, Human
cuucagagacuccugcag

SEQ ID NO: 2947555 - RNA, 17 nt, Human
cuucacgcccuuggcca

SEQ ID NO: 2947556 - RNA, 15 nt, Human
cuucacgcccuuggc

SEQ ID NO: 2947557 - RNA, 17 nt, Human
cuucagagacuccugca

SEQ ID NO: 2947558 - RNA, 15 nt, Human
cuucacuguaaaaua

SEQ ID NO: 2947559 - RNA, 23 nt, Human
cuucugacccaugcugcccugug

SEQ ID NO: 2947560 - RNA, 20 nt, Human
cuucugacccaugcugcccu

SEQ ID NO: 2947561 - RNA, 22 nt, Human
cuucugacccaugcugcccugu

SEQ ID NO: 2947562 - RNA, 21 nt, Human
cuucugacccaugcugcccug

SEQ ID NO: 2947563 - RNA, 23 nt, Human
cuucuucagagacuccugcaggc

SEQ ID NO: 2947564 - RNA, 18 nt, Human
cuuccucccucccucuuu

SEQ ID NO: 2947565 - RNA, 17 nt, Human
cuuccugcaacaccuug

SEQ ID NO: 2947566 - RNA, 23 nt, Human
cuucuaaguaaaaccacagcagu

SEQ ID NO: 2947567 - RNA, 22 nt, Human
cuucuaaguaaaaccacagcag

SEQ ID NO: 2947568 - RNA, 16 nt, Human
cuugaagacuuuucuu

SEQ ID NO: 2947569 - RNA, 18 nt, Human
cuugaauuguaaggaaug

SEQ ID NO: 2947570 - RNA, 19 nt, Human
cuugaauuguaaggaauga

SEQ ID NO: 2947571 - RNA, 14 nt, Human
cuugacagggcaca

SEQ ID NO: 2947572 - RNA, 15 nt, Human
cuugacagggcacac

SEQ ID NO: 2947573 - RNA, 13 nt, Human
cuugacagggcac

SEQ ID NO: 2947574 - RNA, 12 nt, Human
cuugaugaagaa

SEQ ID NO: 2947575 - RNA, 20 nt, Human
cuuggcgcugccccuggcag

SEQ ID NO: 2947576 - RNA, 12 nt, Human
cuuggcgcugcc

SEQ ID NO: 2947577 - RNA, 17 nt, Human
cuuggcgcugccccugg

SEQ ID NO: 2947578 - RNA, 14 nt, Human
cuuggcgcugcccc

SEQ ID NO: 2947579 - RNA, 13 nt, Human
cuugaugaagaag

SEQ ID NO: 2947580 - RNA, 13 nt, Human
cuggccccucagg

SEQ ID NO: 2947581 - RNA, 15 nt, Human
cuggcagcucagaga

SEQ ID NO: 2947582 - RNA, 12 nt, Human
cuggcagcucag

SEQ ID NO: 2947583 - RNA, 14 nt, Human
cuggcagcucagag

SEQ ID NO: 2947584 - RNA, 13 nt, Human
cuggcagcucaga

SEQ ID NO: 2947585 - RNA, 21 nt, Human
cuggccccucagggucccugg

SEQ ID NO: 2947586 - RNA, 20 nt, Human
cuggccccucagggucccug

SEQ ID NO: 2947587 - RNA, 18 nt, Human
cuggccccucaggguccc

SEQ ID NO: 2947588 - RNA, 17 nt, Human
cuggccccucagggucc

SEQ ID NO: 2947589 - RNA, 12 nt, Human
cugggacacagu

SEQ ID NO: 2947590 - RNA, 13 nt, Human
cugggacacaguu

SEQ ID NO: 2947591 - RNA, 10 nt, Human
cugggacagg

SEQ ID NO: 2947592 - RNA, 23 nt, Human
cuggugacuuuccucuuuggucu

SEQ ID NO: 2947593 - RNA, 16 nt, Human
cuggguguggcgcagc

SEQ ID NO: 2947594 - RNA, 17 nt, Human
cuggguguggcgcagca

SEQ ID NO: 2947595 - RNA, 22 nt, Human
cuggguggcaccagcagccugg

SEQ ID NO: 2947596 - RNA, 23 nt, Human
cuggguggcaccagcagccugga

SEQ ID NO: 2947597 - RNA, 14 nt, Human
cuggguucacugca

SEQ ID NO: 2947598 - RNA, 15 nt, Human
cuggugacuuuccuc

SEQ ID NO: 2947599 - RNA, 21 nt, Human
cuggugacuuuccucuuuggu

SEQ ID NO: 2947600 - RNA, 20 nt, Human
cuggugacuuuccucuuugg

SEQ ID NO: 2947601 - RNA, 17 nt, Human
cugggcagaaggaagac

SEQ ID NO: 2947602 - RNA, 16 nt, Human
cuggggccgaaagaac

SEQ ID NO: 2947603 - RNA, 22 nt, Human
cugggcagcugccuccccuccu

SEQ ID NO: 2947604 - RNA, 20 nt, Human
cugggcagcugccuccccuc

SEQ ID NO: 2947605 - RNA, 21 nt, Human
cugggcagcugccuccccucc

SEQ ID NO: 2947606 - RNA, 16 nt, Human
cugggcagcugccucc

SEQ ID NO: 2947607 - RNA, 19 nt, Human
cugggcagcugccuccccu

SEQ ID NO: 2947608 - RNA, 18 nt, Human
cugggcagaaggaagacu

SEQ ID NO: 2947609 - RNA, 16 nt, Human
cugggcagaaggaaga

SEQ ID NO: 2947610 - RNA, 13 nt, Human
cugucgcccaguc

SEQ ID NO: 2947611 - RNA, 15 nt, Human
cugugaagagaacca

SEQ ID NO: 2947612 - RNA, 14 nt, Human
cugugcucuggaca

SEQ ID NO: 2947613 - RNA, 16 nt, Human
cugugagaugcuagaa

SEQ ID NO: 2947614 - RNA, 16 nt, Human
cugguuuguucccugu

SEQ ID NO: 2947615 - RNA, 21 nt, Human
cugucagcuccccucggagaa

SEQ ID NO: 2947616 - RNA, 18 nt, Human
cugucagccauuccuguu

SEQ ID NO: 2947617 - RNA, 22 nt, Human
cugucagcuaaagaaguuugaa

SEQ ID NO: 2947618 - RNA, 17 nt, Human
cugucauuugagcaggg

SEQ ID NO: 2947619 - RNA, 18 nt, Human
cugucauuugagcagggc

SEQ ID NO: 2947620 - RNA, 16 nt, Human
cugucauuugagcagg

SEQ ID NO: 2947621 - RNA, 23 nt, Human
cugucagcuccccucggagaaga

SEQ ID NO: 2947622 - RNA, 22 nt, Human
cugguuuuaaauauuuugacuu

SEQ ID NO: 2947623 - RNA, 18 nt, Human
cuguaggaagguuaaugu

SEQ ID NO: 2947624 - RNA, 21 nt, Human
cuguaggaagguuaauguuca

SEQ ID NO: 2947625 - RNA, 21 nt, Human
cugcugacagacacaggcccg

SEQ ID NO: 2947626 - RNA, 23 nt, Human
cugcugacagacacaggcccggc

SEQ ID NO: 2947627 - RNA, 15 nt, Human
cugcugacagacaca

SEQ ID NO: 2947628 - RNA, 18 nt, Human
cugcugacagacacaggc

SEQ ID NO: 2947629 - RNA, 19 nt, Human
cugcugacagacacaggcc

SEQ ID NO: 2947630 - RNA, 20 nt, Human
cugcugacagacacaggccc

SEQ ID NO: 2947631 - RNA, 13 nt, Human
cugcuuaacuuca

SEQ ID NO: 2947632 - RNA, 13 nt, Human
cugcuucagccuc

SEQ ID NO: 2947633 - RNA, 15 nt, Human
cugcuuaacuucaca

SEQ ID NO: 2947634 - RNA, 17 nt, Human
cugcuuaacuucacaua

SEQ ID NO: 2947635 - RNA, 14 nt, Human
cugcuucagccucc

SEQ ID NO: 2947636 - RNA, 16 nt, Human
cugcuucagccucccg

SEQ ID NO: 2947637 - RNA, 22 nt, Human
cugcuuuuuaaagaaugcucuu

SEQ ID NO: 2947638 - RNA, 17 nt, Human
cuggaacacuaaugagg

SEQ ID NO: 2947639 - RNA, 21 nt, Human
cuggaaaucaggguuaguauu

SEQ ID NO: 2947640 - RNA, 16 nt, Human
cuggaaauauuaagaa

SEQ ID NO: 2947641 - RNA, 14 nt, Human
cugcccugugggcc

SEQ ID NO: 2947642 - RNA, 16 nt, Human
cugcuaauuccccaga

SEQ ID NO: 2947643 - RNA, 19 nt, Human
cugccuguugggccaggag

SEQ ID NO: 2947644 - RNA, 18 nt, Human
cugccuguugggccagga

SEQ ID NO: 2947645 - RNA, 14 nt, Human
cugccuguugggcc

SEQ ID NO: 2947646 - RNA, 16 nt, Human
cugccuguugggccag

SEQ ID NO: 2947647 - RNA, 15 nt, Human
cugcuacagagcaga

SEQ ID NO: 2947648 - RNA, 23 nt, Human
cugccugggaucccucauccuca

SEQ ID NO: 2947649 - RNA, 14 nt, Human
cugccuguucagcu

SEQ ID NO: 2947650 - RNA, 15 nt, Human
cugccuguucagcuc

SEQ ID NO: 2947651 - RNA, 15 nt, Human
cugccucgaacuggc

SEQ ID NO: 2947652 - RNA, 17 nt, Human
cugccucgaacuggcug

SEQ ID NO: 2947653 - RNA, 18 nt, Human
cugccucgaacuggcugc

SEQ ID NO: 2947654 - RNA, 22 nt, Human
cugccugggaucccucauccuc

SEQ ID NO: 2947655 - RNA, 19 nt, Human
cugagacucgcgacaaugc

SEQ ID NO: 2947656 - RNA, 17 nt, Human
cugagacucgcgacaau

SEQ ID NO: 2947657 - RNA, 15 nt, Human
cugcauguuugugau

SEQ ID NO: 2947658 - RNA, 13 nt, Human
cugcauguuacau

SEQ ID NO: 2947659 - RNA, 20 nt, Human
cugcauuuaaaagauacagu

SEQ ID NO: 2947660 - RNA, 22 nt, Human
cugcauuuaaaagauacaguua

SEQ ID NO: 2947661 - RNA, 17 nt, Human
cugccaauauccuaaua

SEQ ID NO: 2947662 - RNA, 16 nt, Human
cugccaauauccuaau

SEQ ID NO: 2947663 - RNA, 14 nt, Human
cugccaauauccua

SEQ ID NO: 2947664 - RNA, 13 nt, Human
cugccaauauccu

SEQ ID NO: 2947665 - RNA, 22 nt, Human
cugccaauauccuaauaaaaag

SEQ ID NO: 2947666 - RNA, 20 nt, Human
cugccaauauccuaauaaaa

SEQ ID NO: 2947667 - RNA, 19 nt, Human
cugccaauauccuaauaaa

SEQ ID NO: 2947668 - RNA, 18 nt, Human
cugccaauauccuaauaa

SEQ ID NO: 2947669 - RNA, 17 nt, Human
cugccaaugggagcuca

SEQ ID NO: 2947670 - RNA, 15 nt, Human
cugccaaugggagcu

SEQ ID NO: 2947671 - RNA, 12 nt, Human
cugccauccagg

SEQ ID NO: 2947672 - RNA, 11 nt, Human
cugccagggac

SEQ ID NO: 2947673 - RNA, 15 nt, Human
cugccagggacagag

SEQ ID NO: 2947674 - RNA, 12 nt, Human
cugccagggaca

SEQ ID NO: 2947675 - RNA, 20 nt, Human
cugccauauucuguuggcca

SEQ ID NO: 2947676 - RNA, 21 nt, Human
cugccauauucuguuggccag

SEQ ID NO: 2947677 - RNA, 22 nt, Human
cugccauauucuguuggccagu

SEQ ID NO: 2947678 - RNA, 23 nt, Human
cugccauauucuguuggccagug

SEQ ID NO: 2947679 - RNA, 12 nt, Human
cugcccugugag

SEQ ID NO: 2947680 - RNA, 18 nt, Human
cugcccugugggccccca

SEQ ID NO: 2947681 - RNA, 16 nt, Human
cugcccugugggcccc

SEQ ID NO: 2947682 - RNA, 15 nt, Human
cugcccugugggccc

SEQ ID NO: 2947683 - RNA, 13 nt, Human
cugcccugugagu

SEQ ID NO: 2947684 - RNA, 22 nt, Human
cugccccucaacucuccuccag

SEQ ID NO: 2947685 - RNA, 14 nt, Human
cugccccucaacuc

SEQ ID NO: 2947686 - RNA, 20 nt, Human
aacuacauuagguugugaau

SEQ ID NO: 2947687 - RNA, 18 nt, Human
aaccuugaaaacuuuaug

SEQ ID NO: 2947688 - RNA, 12 nt, Human
aaccugugucuc

SEQ ID NO: 2947689 - RNA, 23 nt, Human
aacuaucucauuuccaagcaagu

SEQ ID NO: 2947690 - RNA, 21 nt, Human
aacuagaguuuagcuggaaaa

SEQ ID NO: 2947691 - RNA, 12 nt, Human
aacucauuucua

SEQ ID NO: 2947692 - RNA, 12 nt, Human
aacuccuggccu

SEQ ID NO: 2947693 - RNA, 22 nt, Human
gugaaccaccacacccagccca

SEQ ID NO: 2947694 - RNA, 23 nt, Human
gugaaccaccacacccagcccac

SEQ ID NO: 2947695 - RNA, 16 nt, Human
aacucuccucugcugc

SEQ ID NO: 2947696 - RNA, 18 nt, Human
aacucuccuccagaguca

SEQ ID NO: 2947697 - RNA, 15 nt, Human
aacucuccuccagag

SEQ ID NO: 2947698 - RNA, 14 nt, Human
gucuggcccuuccu

SEQ ID NO: 2947699 - RNA, 20 nt, Human
aaccugagccccaaaaggua

SEQ ID NO: 2947700 - RNA, 17 nt, Human
aaccugaggauucuauu

SEQ ID NO: 2947701 - RNA, 14 nt, Human
gucuucuauuuauu

SEQ ID NO: 2947702 - RNA, 12 nt, Human
gucuucuauuua

SEQ ID NO: 2947703 - RNA, 17 nt, Human
gucuucuauuuauuuau

SEQ ID NO: 2947704 - RNA, 18 nt, Human
gucuuuggacccugaggc

SEQ ID NO: 2947705 - RNA, 16 nt, Human
gucuuucacauuuaaa

SEQ ID NO: 2947706 - RNA, 15 nt, Human
aaccaagucaaguga

SEQ ID NO: 2947707 - RNA, 19 nt, Human
aaccaccacacccagccca

SEQ ID NO: 2947708 - RNA, 12 nt, Human
aaccaucauuga

SEQ ID NO: 2947709 - RNA, 21 nt, Human
aaccaccacacccagcccacu

SEQ ID NO: 2947710 - RNA, 18 nt, Human
aaccaucauugaaaucuu

SEQ ID NO: 2947711 - RNA, 17 nt, Human
aaccaucauugaaaucu

SEQ ID NO: 2947712 - RNA, 18 nt, Human
aacccaaguccaagcaua

SEQ ID NO: 2947713 - RNA, 23 nt, Human
aacccaaauguucaucaaugaau

SEQ ID NO: 2947714 - RNA, 10 nt, Human
aacccagcuc

SEQ ID NO: 2947715 - RNA, 12 nt, Human
aaccucuaaauu

SEQ ID NO: 2947716 - RNA, 18 nt, Human
aaccugagccccaaaagg

SEQ ID NO: 2947717 - RNA, 16 nt, Human
gugaugagaggaaauc

SEQ ID NO: 2947718 - RNA, 14 nt, Human
gugaugagaggaaa

SEQ ID NO: 2947719 - RNA, 22 nt, Human
gugaugcgcaugucacggaggg

SEQ ID NO: 2947720 - RNA, 17 nt, Human
gugaugggaaagcauug

SEQ ID NO: 2947721 - RNA, 18 nt, Human
gugauggggcccugccuc

SEQ ID NO: 2947722 - RNA, 17 nt, Human
gugauggggcccugccu

SEQ ID NO: 2947723 - RNA, 16 nt, Human
gugauggggcccugcc

SEQ ID NO: 2947724 - RNA, 14 nt, Human
gugauggggcccug

SEQ ID NO: 2947725 - RNA, 13 nt, Human
aacuuccaauuua

SEQ ID NO: 2947726 - RNA, 18 nt, Human
aacuuccagauccuggaa

SEQ ID NO: 2947727 - RNA, 21 nt, Human
aacuucagcgguuuauauaag

SEQ ID NO: 2947728 - RNA, 17 nt, Human
gugcacaucuguuuugu

SEQ ID NO: 2947729 - RNA, 22 nt, Human
gugcaugcugucccuuacguga

SEQ ID NO: 2947730 - RNA, 21 nt, Human
gugcacacaccagagcccacc

SEQ ID NO: 2947731 - RNA, 19 nt, Human
gugauggggcccugccucc

SEQ ID NO: 2947732 - RNA, 22 nt, Human
gugcaaugaccuuucaauagga

SEQ ID NO: 2947733 - RNA, 23 nt, Human
gugcauuaucuagauacuguauc

SEQ ID NO: 2947734 - RNA, 19 nt, Human
gugcauguguguucaugca

SEQ ID NO: 2947735 - RNA, 15 nt, Human
gugcauuaucuagau

SEQ ID NO: 2947736 - RNA, 19 nt, Human
gugcauuaucuagauacug

SEQ ID NO: 2947737 - RNA, 23 nt, Human
gugccucucccugcugcuccuag

SEQ ID NO: 2947738 - RNA, 12 nt, Human
gugccucucccu

SEQ ID NO: 2947739 - RNA, 14 nt, Human
gugccucucccugc

SEQ ID NO: 2947740 - RNA, 16 nt, Human
gugccucucccugcug

SEQ ID NO: 2947741 - RNA, 22 nt, Human
gugccucucccugcugcuccua

SEQ ID NO: 2947742 - RNA, 13 nt, Human
aacuggcaaagca

SEQ ID NO: 2947743 - RNA, 22 nt, Human
aacuggcaaagcagaaugugau

SEQ ID NO: 2947744 - RNA, 16 nt, Human
aacuggauuaaacuua

SEQ ID NO: 2947745 - RNA, 11 nt, Human
aacuggcugca

SEQ ID NO: 2947746 - RNA, 19 nt, Human
aacuggacugguucaaaug

SEQ ID NO: 2947747 - RNA, 15 nt, Human
aacuggauuaaacuu

SEQ ID NO: 2947748 - RNA, 16 nt, Human
aacuggguacuugugg

SEQ ID NO: 2947749 - RNA, 21 nt, Human
aacuggguacuuguggacaca

SEQ ID NO: 2947750 - RNA, 21 nt, Human
aacugggggagggugaaguga

SEQ ID NO: 2947751 - RNA, 22 nt, Human
aacugggggagggugaagugaa

SEQ ID NO: 2947752 - RNA, 17 nt, Human
aacugggacaggggaga

SEQ ID NO: 2947753 - RNA, 20 nt, Human
aacugggaugaggugacuau

SEQ ID NO: 2947754 - RNA, 23 nt, Human
aacugcugacuguuuucucuuga

SEQ ID NO: 2947755 - RNA, 21 nt, Human
aacugcugacuguuuucucuu

SEQ ID NO: 2947756 - RNA, 20 nt, Human
aacugcugacuguuuucucu

SEQ ID NO: 2947757 - RNA, 15 nt, Human
aacugcugacuguuu

SEQ ID NO: 2947758 - RNA, 19 nt, Human
aacugcacugucaagauga

SEQ ID NO: 2947759 - RNA, 17 nt, Human
gugaacugaucauguuu

SEQ ID NO: 2947760 - RNA, 21 nt, Human
gugagaugcuagaacucccuu

SEQ ID NO: 2947761 - RNA, 19 nt, Human
gugaacuugggccacugug

SEQ ID NO: 2947762 - RNA, 17 nt, Human
gugaacuugggccacug

SEQ ID NO: 2947763 - RNA, 22 nt, Human
gugaggccagagacacaagccu

SEQ ID NO: 2947764 - RNA, 17 nt, Human
gugaggccagagacaca

SEQ ID NO: 2947765 - RNA, 19 nt, Human
aacucugagugcaaacuuc

SEQ ID NO: 2947766 - RNA, 18 nt, Human
aacucugagugcaaacuu

SEQ ID NO: 2947767 - RNA, 15 nt, Human
gugagucgaggacag

SEQ ID NO: 2947768 - RNA, 22 nt, Human
gugagucgaggacagggaggug

SEQ ID NO: 2947769 - RNA, 20 nt, Human
aacucugagugcaaacuuca

SEQ ID NO: 2947770 - RNA, 22 nt, Human
aacucugagugcaaacuucaga

SEQ ID NO: 2947771 - RNA, 21 nt, Human
aacucuucaaucucuugcacu

SEQ ID NO: 2947772 - RNA, 12 nt, Human
aacugaaaucau

SEQ ID NO: 2947773 - RNA, 20 nt, Human
aaauuuuuucucuaggaaau

SEQ ID NO: 2947774 - RNA, 18 nt, Human
aaauuuugauguuuuaag

SEQ ID NO: 2947775 - RNA, 23 nt, Human
aaauuuugauguuuuaaggaugc

SEQ ID NO: 2947776 - RNA, 20 nt, Human
aacaagaccacguuucuaaa

SEQ ID NO: 2947777 - RNA, 16 nt, Human
aacaaggcaaggcugu

SEQ ID NO: 2947778 - RNA, 15 nt, Human
aacaaggcaaggcug

SEQ ID NO: 2947779 - RNA, 17 nt, Human
aacaaugcuguauuuua

SEQ ID NO: 2947780 - RNA, 22 nt, Human
aacaaugcuguauuuuaaaaga

SEQ ID NO: 2947781 - RNA, 15 nt, Human
aacacaacuauauug

SEQ ID NO: 2947782 - RNA, 16 nt, Human
aacacaacuauauugu

SEQ ID NO: 2947783 - RNA, 21 nt, Human
aacaaggcaaggcugucaauu

SEQ ID NO: 2947784 - RNA, 18 nt, Human
aacaaggcaaggcuguca

SEQ ID NO: 2947785 - RNA, 12 nt, Human
aacaauaaaaga

SEQ ID NO: 2947786 - RNA, 14 nt, Human
aacaaugcuguauu

SEQ ID NO: 2947787 - RNA, 15 nt, Human
aacaaugcuguauuu

SEQ ID NO: 2947788 - RNA, 21 nt, Human
gucaguuguuauuuauugaaa

SEQ ID NO: 2947789 - RNA, 18 nt, Human
gucaguuguuauuuauug

SEQ ID NO: 2947790 - RNA, 17 nt, Human
gucaguuguuauuuauu

SEQ ID NO: 2947791 - RNA, 16 nt, Human
gucaguuguuauuuau

SEQ ID NO: 2947792 - RNA, 15 nt, Human
gucagugugacugau

SEQ ID NO: 2947793 - RNA, 12 nt, Human
aaauuuguggaa

SEQ ID NO: 2947794 - RNA, 18 nt, Human
aaauuuguuauaaugaau

SEQ ID NO: 2947795 - RNA, 22 nt, Human
gucacacaguauuacuucugcu

SEQ ID NO: 2947796 - RNA, 21 nt, Human
gucacacaguauuacuucugc

SEQ ID NO: 2947797 - RNA, 18 nt, Human
gucagacacagauuggcc

SEQ ID NO: 2947798 - RNA, 13 nt, Human
gucagacacagau

SEQ ID NO: 2947799 - RNA, 23 nt, Human
gucagaaguuucugccgcagccc

SEQ ID NO: 2947800 - RNA, 18 nt, Human
gucccccugacaacacuc

SEQ ID NO: 2947801 - RNA, 14 nt, Human
gucccccuuccaug

SEQ ID NO: 2947802 - RNA, 18 nt, Human
gucccccuuccauggacu

SEQ ID NO: 2947803 - RNA, 16 nt, Human
gucccccuuccaugga

SEQ ID NO: 2947804 - RNA, 16 nt, Human
guccuacccacccucc

SEQ ID NO: 2947805 - RNA, 15 nt, Human
guccuacccacccuc

SEQ ID NO: 2947806 - RNA, 12 nt, Human
guccuacucugu

SEQ ID NO: 2947807 - RNA, 14 nt, Human
aacagaaauguaca

SEQ ID NO: 2947808 - RNA, 12 nt, Human
aacagaaaugua

SEQ ID NO: 2947809 - RNA, 13 nt, Human
aacagaaauguac

SEQ ID NO: 2947810 - RNA, 20 nt, Human
aacagaagaaaauagaauug

SEQ ID NO: 2947811 - RNA, 13 nt, Human
aacagaagaaaau

SEQ ID NO: 2947812 - RNA, 11 nt, Human
aacagaaaugu

SEQ ID NO: 2947813 - RNA, 13 nt, Human
aacagaugaaaag

SEQ ID NO: 2947814 - RNA, 14 nt, Human
aacagaugaaaagc

SEQ ID NO: 2947815 - RNA, 16 nt, Human
aacagauaaauaguuu

SEQ ID NO: 2947816 - RNA, 20 nt, Human
aacagaugaaaagccucugu

SEQ ID NO: 2947817 - RNA, 14 nt, Human
aacagggccucugc

SEQ ID NO: 2947818 - RNA, 15 nt, Human
aacagugauuaccag

SEQ ID NO: 2947819 - RNA, 22 nt, Human
aacagugauuaccagggacuga

SEQ ID NO: 2947820 - RNA, 14 nt, Human
guccauagagagca

SEQ ID NO: 2947821 - RNA, 13 nt, Human
guccauagagagc

SEQ ID NO: 2947822 - RNA, 21 nt, Human
gucccaccccacacacgccag

SEQ ID NO: 2947823 - RNA, 20 nt, Human
gucccaccccacacacgcca

SEQ ID NO: 2947824 - RNA, 14 nt, Human
gucccaccuuggcu

SEQ ID NO: 2947825 - RNA, 15 nt, Human
gucccaccuuggcug

SEQ ID NO: 2947826 - RNA, 16 nt, Human
gucccaccuuggcugc

SEQ ID NO: 2947827 - RNA, 13 nt, Human
guccaagaagccc

SEQ ID NO: 2947828 - RNA, 16 nt, Human
guccaagaagcccagg

SEQ ID NO: 2947829 - RNA, 15 nt, Human
guccaagaagcccag

SEQ ID NO: 2947830 - RNA, 20 nt, Human
guccaagaagcccaggaaag

SEQ ID NO: 2947831 - RNA, 18 nt, Human
guccaagaagcccaggaa

SEQ ID NO: 2947832 - RNA, 17 nt, Human
guccaagaagcccagga

SEQ ID NO: 2947833 - RNA, 19 nt, Human
gucauuuuuuuuaagaaaa

SEQ ID NO: 2947834 - RNA, 21 nt, Human
gucauuuuuuuuaagaaaaag

SEQ ID NO: 2947835 - RNA, 15 nt, Human
aacacagcaagggug

SEQ ID NO: 2947836 - RNA, 16 nt, Human
aaaugucaguucugau

SEQ ID NO: 2947837 - RNA, 15 nt, Human
aaaugucaguucuga

SEQ ID NO: 2947838 - RNA, 19 nt, Human
aaaugucuaguuguaacac

SEQ ID NO: 2947839 - RNA, 15 nt, Human
aaauguauuacagug

SEQ ID NO: 2947840 - RNA, 18 nt, Human
guauguacuucaugcugu

SEQ ID NO: 2947841 - RNA, 20 nt, Human
aaauuauucuauaauuucca

SEQ ID NO: 2947842 - RNA, 19 nt, Human
aaauuagguugaaacauau

SEQ ID NO: 2947843 - RNA, 16 nt, Human
aaauuagguugaaaca

SEQ ID NO: 2947844 - RNA, 17 nt, Human
aaauuagguugaaacau

SEQ ID NO: 2947845 - RNA, 18 nt, Human
aaauuagguugaaacaua

SEQ ID NO: 2947846 - RNA, 14 nt, Human
aaauuagguugaaa

SEQ ID NO: 2947847 - RNA, 22 nt, Human
guauuuuguuuuugucuuaaaa

SEQ ID NO: 2947848 - RNA, 16 nt, Human
gucaaauugugugaaa

SEQ ID NO: 2947849 - RNA, 19 nt, Human
aaaugggggugcauuugag

SEQ ID NO: 2947850 - RNA, 12 nt, Human
guaacaggcaga

SEQ ID NO: 2947851 - RNA, 22 nt, Human
guaacaggaaaauuuuaaaaau

SEQ ID NO: 2947852 - RNA, 17 nt, Human
aaaugguguuuuaucuu

SEQ ID NO: 2947853 - RNA, 18 nt, Human
aaaugguguuuuaucuuc

SEQ ID NO: 2947854 - RNA, 22 nt, Human
aaaugguagcauuuuaaacaaa

SEQ ID NO: 2947855 - RNA, 18 nt, Human
aaaugguagcauuuuaaa

SEQ ID NO: 2947856 - RNA, 20 nt, Human
aaaugguagcauuuuaaaca

SEQ ID NO: 2947857 - RNA, 16 nt, Human
aaaugguagcauuuua

SEQ ID NO: 2947858 - RNA, 15 nt, Human
aaauggguuuuacug

SEQ ID NO: 2947859 - RNA, 14 nt, Human
aaauggguuuuacu

SEQ ID NO: 2947860 - RNA, 17 nt, Human
guaguguuggagaagaa

SEQ ID NO: 2947861 - RNA, 16 nt, Human
aaauguaagggaaacu

SEQ ID NO: 2947862 - RNA, 20 nt, Human
guaguguuggagaagaacug

SEQ ID NO: 2947863 - RNA, 19 nt, Human
guaucccaugagccucagc

SEQ ID NO: 2947864 - RNA, 22 nt, Human
guaucaggugcugccauccagg

SEQ ID NO: 2947865 - RNA, 15 nt, Human
guaugguggcugggu

SEQ ID NO: 2947866 - RNA, 16 nt, Human
guaugguggcuggguu

SEQ ID NO: 2947867 - RNA, 14 nt, Human
guaugguggcuggg

SEQ ID NO: 2947868 - RNA, 13 nt, Human
guaugguggcugg

SEQ ID NO: 2947869 - RNA, 15 nt, Human
guauaaaauaauuuu

SEQ ID NO: 2947870 - RNA, 21 nt, Human
guauaaaauaauuuuuauauu

SEQ ID NO: 2947871 - RNA, 16 nt, Human
guaucaggugcugcca

SEQ ID NO: 2947872 - RNA, 18 nt, Human
guaucaggugcugccauc

SEQ ID NO: 2947873 - RNA, 16 nt, Human
guauauuuuauaucaa

SEQ ID NO: 2947874 - RNA, 19 nt, Human
guuucuauguguagggcgg

SEQ ID NO: 2947875 - RNA, 18 nt, Human
guuucugaaagggacgcu

SEQ ID NO: 2947876 - RNA, 12 nt, Human
aaggucauuuuu

SEQ ID NO: 2947877 - RNA, 18 nt, Human
aagguauuuaauagguuu

SEQ ID NO: 2947878 - RNA, 22 nt, Human
guuucuaugacacaugcaaggu

SEQ ID NO: 2947879 - RNA, 22 nt, Human
aaggggcccaaauucuuucagu

SEQ ID NO: 2947880 - RNA, 17 nt, Human
aaggggcaguggugguu

SEQ ID NO: 2947881 - RNA, 20 nt, Human
aagguagaaauaucugaaaa

SEQ ID NO: 2947882 - RNA, 14 nt, Human
aagguacuucaaau

SEQ ID NO: 2947883 - RNA, 13 nt, Human
aagguacuucaaa

SEQ ID NO: 2947884 - RNA, 19 nt, Human
aagggugaugggaaagcau

SEQ ID NO: 2947885 - RNA, 22 nt, Human
aaggcucgagcaugccuggaug

SEQ ID NO: 2947886 - RNA, 20 nt, Human
aaggcucgagcaugccugga

SEQ ID NO: 2947887 - RNA, 19 nt, Human
aaggcucgagcaugccugg

SEQ ID NO: 2947888 - RNA, 18 nt, Human
aaggcucgagcaugccug

SEQ ID NO: 2947889 - RNA, 16 nt, Human
aaggcucgagcaugcc

SEQ ID NO: 2947890 - RNA, 22 nt, Human
aaggcuccaggagcagccacau

SEQ ID NO: 2947891 - RNA, 19 nt, Human
aaggcuccaggagcagcca

SEQ ID NO: 2947892 - RNA, 22 nt, Human
guuuauuuggaaaggaaugcaa

SEQ ID NO: 2947893 - RNA, 13 nt, Human
guuucaaacuuua

SEQ ID NO: 2947894 - RNA, 14 nt, Human
guuucaaacuuuac

SEQ ID NO: 2947895 - RNA, 16 nt, Human
guuucaaacuuuacua

SEQ ID NO: 2947896 - RNA, 15 nt, Human
aaggcuccaggagca

SEQ ID NO: 2947897 - RNA, 18 nt, Human
aaggcuccaggagcagcc

SEQ ID NO: 2947898 - RNA, 16 nt, Human
aaggcuccaggagcag

SEQ ID NO: 2947899 - RNA, 20 nt, Human
guuuaaugguaguuuuacag

SEQ ID NO: 2947900 - RNA, 17 nt, Human
guuuaaugguaguuuua

SEQ ID NO: 2947901 - RNA, 12 nt, Human
guuuaaugguag

SEQ ID NO: 2947902 - RNA, 13 nt, Human
guuuauugucaaa

SEQ ID NO: 2947903 - RNA, 13 nt, Human
guugggcuggugu

SEQ ID NO: 2947904 - RNA, 17 nt, Human
guugggccaggagccuc

SEQ ID NO: 2947905 - RNA, 15 nt, Human
guugggccaggagcc

SEQ ID NO: 2947906 - RNA, 16 nt, Human
aaggccaaaggaagca

SEQ ID NO: 2947907 - RNA, 17 nt, Human
aaggcauggacuucugg

SEQ ID NO: 2947908 - RNA, 16 nt, Human
aaggauacuuauuuaa

SEQ ID NO: 2947909 - RNA, 13 nt, Human
aaggauacuuauu

SEQ ID NO: 2947910 - RNA, 13 nt, Human
aaggauaaugaau

SEQ ID NO: 2947911 - RNA, 13 nt, Human
aaggauacaaaag

SEQ ID NO: 2947912 - RNA, 21 nt, Human
aaggauacaaaagcaugugag

SEQ ID NO: 2947913 - RNA, 14 nt, Human
guugcuaacagcaa

SEQ ID NO: 2947914 - RNA, 23 nt, Human
guugcccaggcaggucuugaacu

SEQ ID NO: 2947915 - RNA, 12 nt, Human
guugcccaggcu

SEQ ID NO: 2947916 - RNA, 13 nt, Human
guugcccaggcug

SEQ ID NO: 2947917 - RNA, 20 nt, Human
aaggaggggauagagagaga

SEQ ID NO: 2947918 - RNA, 18 nt, Human
aaggaggaagagaaaaaa

SEQ ID NO: 2947919 - RNA, 18 nt, Human
aaggaauaccuguccccc

SEQ ID NO: 2947920 - RNA, 11 nt, Human
aaggagagcua

SEQ ID NO: 2947921 - RNA, 14 nt, Human
aaggagauuuacaa

SEQ ID NO: 2947922 - RNA, 15 nt, Human
aaggaaagagggagg

SEQ ID NO: 2947923 - RNA, 16 nt, Human
aaggaagcacaugccu

SEQ ID NO: 2947924 - RNA, 17 nt, Human
aaggaauaccugucccc

SEQ ID NO: 2947925 - RNA, 14 nt, Human
aaggaagacuucau

SEQ ID NO: 2947926 - RNA, 13 nt, Human
aaggaagcacaug

SEQ ID NO: 2947927 - RNA, 15 nt, Human
aaggaagacuucauc

SEQ ID NO: 2947928 - RNA, 17 nt, Human
aagucuucuauuuauuu

SEQ ID NO: 2947929 - RNA, 13 nt, Human
aagucuucuauuu

SEQ ID NO: 2947930 - RNA, 16 nt, Human
aagucuuucacauuua

SEQ ID NO: 2947931 - RNA, 22 nt, Human
aagucuuauauauuguagauaa

SEQ ID NO: 2947932 - RNA, 14 nt, Human
aagugagagcuggg

SEQ ID NO: 2947933 - RNA, 12 nt, Human
aagugagagagg

SEQ ID NO: 2947934 - RNA, 21 nt, Human
aagugaaaaaggaggaagaga

SEQ ID NO: 2947935 - RNA, 17 nt, Human
aagugaagacaaugacu

SEQ ID NO: 2947936 - RNA, 19 nt, Human
aagugaagacaaugacuua

SEQ ID NO: 2947937 - RNA, 14 nt, Human
guuucugccgcagc

SEQ ID NO: 2947938 - RNA, 15 nt, Human
guuucugccgcagcc

SEQ ID NO: 2947939 - RNA, 16 nt, Human
guuuugccauguuggc

SEQ ID NO: 2947940 - RNA, 20 nt, Human
guuuugccauguuggccagg

SEQ ID NO: 2947941 - RNA, 21 nt, Human
guuuugccauguuggccaggc

SEQ ID NO: 2947942 - RNA, 22 nt, Human
guuuugccauguuggccaggcu

SEQ ID NO: 2947943 - RNA, 14 nt, Human
aaguaaugauaacu

SEQ ID NO: 2947944 - RNA, 13 nt, Human
aaguacacuguuu

SEQ ID NO: 2947945 - RNA, 18 nt, Human
aaguacacuguuucaaac

SEQ ID NO: 2947946 - RNA, 23 nt, Human
aaguacacuguuucaaacuuuac

SEQ ID NO: 2947947 - RNA, 19 nt, Human
aaguacacuguuucaaacu

SEQ ID NO: 2947948 - RNA, 20 nt, Human
aaguacacuguuucaaacuu

SEQ ID NO: 2947949 - RNA, 13 nt, Human
aaguauuagaaua

SEQ ID NO: 2947950 - RNA, 15 nt, Human
aagugagagcugggu

SEQ ID NO: 2947951 - RNA, 16 nt, Human
aagugaggaugaaaaa

SEQ ID NO: 2947952 - RNA, 19 nt, Human
aagugauucuccugccuca

SEQ ID NO: 2947953 - RNA, 15 nt, Human
aagugauucuccugc

SEQ ID NO: 2947954 - RNA, 16 nt, Human
aagugauucuccugcc

SEQ ID NO: 2947955 - RNA, 17 nt, Human
aagugauucuccugccu

SEQ ID NO: 2947956 - RNA, 18 nt, Human
aagugauucuccugccuc

SEQ ID NO: 2947957 - RNA, 21 nt, Human
uaaaauaccagccaguaaaug

SEQ ID NO: 2947958 - RNA, 22 nt, Human
uaaaauaccagccaguaaaugg

SEQ ID NO: 2947959 - RNA, 20 nt, Human
uaaaagacagugaaagaaaa

SEQ ID NO: 2947960 - RNA, 15 nt, Human
uaaaaaucucaaauu

SEQ ID NO: 2947961 - RNA, 16 nt, Human
uaaaaaucucaaauuu

SEQ ID NO: 2947962 - RNA, 17 nt, Human
uaaaaaucucaaauuuc

SEQ ID NO: 2947963 - RNA, 15 nt, Human
guuuuucuugcaugg

SEQ ID NO: 2947964 - RNA, 15 nt, Human
guuuuucuucucccu

SEQ ID NO: 2947965 - RNA, 15 nt, Human
uaaaaaguggaaaaa

SEQ ID NO: 2947966 - RNA, 19 nt, Human
uaaaaaucucaaauuucua

SEQ ID NO: 2947967 - RNA, 20 nt, Human
uaaaaaucucaaauuucuaa

SEQ ID NO: 2947968 - RNA, 21 nt, Human
uaaaaaucucaaauuucuaaa

SEQ ID NO: 2947969 - RNA, 16 nt, Human
uaaaagaauauuuuaa

SEQ ID NO: 2947970 - RNA, 20 nt, Human
uaaaacuugauguguuaucu

SEQ ID NO: 2947971 - RNA, 22 nt, Human
uaaaacuugauguguuaucucu

SEQ ID NO: 2947972 - RNA, 12 nt, Human
uaaaagaaugau

SEQ ID NO: 2947973 - RNA, 23 nt, Human
uaaaagaauauuuuaacuuccuu

SEQ ID NO: 2947974 - RNA, 18 nt, Human
guuaagagaaaugagcuu

SEQ ID NO: 2947975 - RNA, 12 nt, Human
guuaagagaaau

SEQ ID NO: 2947976 - RNA, 11 nt, Human
guuaagagaaa

SEQ ID NO: 2947977 - RNA, 20 nt, Human
guuaggcauugugggaaggg

SEQ ID NO: 2947978 - RNA, 19 nt, Human
guuaggcauugugggaagg

SEQ ID NO: 2947979 - RNA, 18 nt, Human
guucaagcgauucuucug

SEQ ID NO: 2947980 - RNA, 20 nt, Human
guucaaagauauuuugcuuu

SEQ ID NO: 2947981 - RNA, 21 nt, Human
guucaaagauauuuugcuuug

SEQ ID NO: 2947982 - RNA, 22 nt, Human
guucaaagauauuuugcuuugu

SEQ ID NO: 2947983 - RNA, 16 nt, Human
guuauugaagcagagu

SEQ ID NO: 2947984 - RNA, 17 nt, Human
guuauugaagcagagug

SEQ ID NO: 2947985 - RNA, 18 nt, Human
guuauugaagcagagugg

SEQ ID NO: 2947986 - RNA, 20 nt, Human
guuauuauauuuacaaaugg

SEQ ID NO: 2947987 - RNA, 23 nt, Human
guuauuuuuauuuauuuaaauuu

SEQ ID NO: 2947988 - RNA, 13 nt, Human
guucagcuccagc

SEQ ID NO: 2947989 - RNA, 20 nt, Human
aagccugaguuugcuuucaa

SEQ ID NO: 2947990 - RNA, 22 nt, Human
aagcuagacgagcaggcuucuu

SEQ ID NO: 2947991 - RNA, 12 nt, Human
aagcuaggccug

SEQ ID NO: 2947992 - RNA, 20 nt, Human
aagcucacagaccuuugaac

SEQ ID NO: 2947993 - RNA, 17 nt, Human
aagcucagggccuggcu

SEQ ID NO: 2947994 - RNA, 16 nt, Human
aagcucagggccuggc

SEQ ID NO: 2947995 - RNA, 13 nt, Human
aagcucagggccu

SEQ ID NO: 2947996 - RNA, 12 nt, Human
aagcucagggcc

SEQ ID NO: 2947997 - RNA, 20 nt, Human
aagcucagggccuggcucag

SEQ ID NO: 2947998 - RNA, 19 nt, Human
aagcucagggccuggcuca

SEQ ID NO: 2947999 - RNA, 18 nt, Human
aagcucagggccuggcuc

SEQ ID NO: 2948000 - RNA, 13 nt, Human
aagcuccagguag

SEQ ID NO: 2948001 - RNA, 14 nt, Human
aagcuccagguaga

SEQ ID NO: 2948002 - RNA, 18 nt, Human
aagcuccaagcucccagg

SEQ ID NO: 2948003 - RNA, 17 nt, Human
aagcuccaagcucccag

SEQ ID NO: 2948004 - RNA, 19 nt, Human
aagccaaaacugagcauaa

SEQ ID NO: 2948005 - RNA, 16 nt, Human
aagccaaaacugagca

SEQ ID NO: 2948006 - RNA, 13 nt, Human
aagcauuguaaau

SEQ ID NO: 2948007 - RNA, 16 nt, Human
aagcauuuacuuugug

SEQ ID NO: 2948008 - RNA, 16 nt, Human
aagcauuuagauguau

SEQ ID NO: 2948009 - RNA, 12 nt, Human
aagcagugcaug

SEQ ID NO: 2948010 - RNA, 21 nt, Human
gugugugcgccuacaggagug

SEQ ID NO: 2948011 - RNA, 15 nt, Human
aagcagugcaugcug

SEQ ID NO: 2948012 - RNA, 14 nt, Human
aagcagugcaugcu

SEQ ID NO: 2948013 - RNA, 20 nt, Human
aagcagugcaugcugucccu

SEQ ID NO: 2948014 - RNA, 20 nt, Human
aagccaaagcuaggccuggc

SEQ ID NO: 2948015 - RNA, 22 nt, Human
aagccaaagcuaggccuggcca

SEQ ID NO: 2948016 - RNA, 17 nt, Human
aagcccaggaaaggcuc

SEQ ID NO: 2948017 - RNA, 14 nt, Human
aagcccaggaaagg

SEQ ID NO: 2948018 - RNA, 22 nt, Human
aagcccaggaaaggcuccagga

SEQ ID NO: 2948019 - RNA, 19 nt, Human
aagcccaggaaaggcucca

SEQ ID NO: 2948020 - RNA, 19 nt, Human
aagcccugagcuuucugcu

SEQ ID NO: 2948021 - RNA, 18 nt, Human
guuaagacaaacugcaua

SEQ ID NO: 2948022 - RNA, 20 nt, Human
aagccgcuggggccaguugg

SEQ ID NO: 2948023 - RNA, 15 nt, Human
gugggagcugccugu

SEQ ID NO: 2948024 - RNA, 18 nt, Human
gugggagcugccuguuca

SEQ ID NO: 2948025 - RNA, 15 nt, Human
guggggucacucugg

SEQ ID NO: 2948026 - RNA, 20 nt, Human
guggcgagccauuuguccca

SEQ ID NO: 2948027 - RNA, 23 nt, Human
guggcgagccauuugucccaagu

SEQ ID NO: 2948028 - RNA, 14 nt, Human
gugggagcugccug

SEQ ID NO: 2948029 - RNA, 15 nt, Human
gugggacacccugug

SEQ ID NO: 2948030 - RNA, 13 nt, Human
gugggacacccug

SEQ ID NO: 2948031 - RNA, 22 nt, Human
guggccucccaacucaccccag

SEQ ID NO: 2948032 - RNA, 21 nt, Human
guggccucccaacucacccca

SEQ ID NO: 2948033 - RNA, 23 nt, Human
aagaggaaugaaguacucauaca

SEQ ID NO: 2948034 - RNA, 13 nt, Human
aagacgcugugcu

SEQ ID NO: 2948035 - RNA, 19 nt, Human
aagacgcugugcugcccug

SEQ ID NO: 2948036 - RNA, 18 nt, Human
aagacgcugugcugcccu

SEQ ID NO: 2948037 - RNA, 17 nt, Human
aagacgcugugcugccc

SEQ ID NO: 2948038 - RNA, 15 nt, Human
aagacgcugugcugc

SEQ ID NO: 2948039 - RNA, 19 nt, Human
aagaccuucuccuucaccu

SEQ ID NO: 2948040 - RNA, 18 nt, Human
aagaccuucuccuucacc

SEQ ID NO: 2948041 - RNA, 15 nt, Human
aagaccuucuccuuc

SEQ ID NO: 2948042 - RNA, 13 nt, Human
aagagcaggccag

SEQ ID NO: 2948043 - RNA, 16 nt, Human
aagacuuuggaaagac

SEQ ID NO: 2948044 - RNA, 16 nt, Human
aagacugcacaucaaa

SEQ ID NO: 2948045 - RNA, 23 nt, Human
aagacugaguacguugugcauuu

SEQ ID NO: 2948046 - RNA, 22 nt, Human
aagacugaguacguugugcauu

SEQ ID NO: 2948047 - RNA, 22 nt, Human
guggggucacucuggcagcuca

SEQ ID NO: 2948048 - RNA, 21 nt, Human
guggggucacucuggcagcuc

SEQ ID NO: 2948049 - RNA, 20 nt, Human
guggggucacucuggcagcu

SEQ ID NO: 2948050 - RNA, 17 nt, Human
guggggucacucuggca

SEQ ID NO: 2948051 - RNA, 12 nt, Human
aagaguaggaag

SEQ ID NO: 2948052 - RNA, 23 nt, Human
aagagggagggagggcuccagac

SEQ ID NO: 2948053 - RNA, 19 nt, Human
aagaugcuucucacugcca

SEQ ID NO: 2948054 - RNA, 18 nt, Human
aagaugaaggucuguuuu

SEQ ID NO: 2948055 - RNA, 16 nt, Human
aagaugcuucucacug

SEQ ID NO: 2948056 - RNA, 17 nt, Human
aagaugcuucucacugc

SEQ ID NO: 2948057 - RNA, 14 nt, Human
aagaguaggaagac

SEQ ID NO: 2948058 - RNA, 13 nt, Human
aagaguaggaaga

SEQ ID NO: 2948059 - RNA, 14 nt, Human
aagaugaaaauauu

SEQ ID NO: 2948060 - RNA, 13 nt, Human
aagaugaaaauau

SEQ ID NO: 2948061 - RNA, 22 nt, Human
gugugacaaggauugcuacugu

SEQ ID NO: 2948062 - RNA, 13 nt, Human
gugucauuucaaa

SEQ ID NO: 2948063 - RNA, 20 nt, Human
gugucagguggggcagcuug

SEQ ID NO: 2948064 - RNA, 16 nt, Human
gugugguagagugugc

SEQ ID NO: 2948065 - RNA, 16 nt, Human
gugucagcauagaagu

SEQ ID NO: 2948066 - RNA, 20 nt, Human
gugucaagagggucugagga

SEQ ID NO: 2948067 - RNA, 17 nt, Human
guguauuuuuuuacuaa

SEQ ID NO: 2948068 - RNA, 23 nt, Human
guguauuuuuuuacuaauagaca

SEQ ID NO: 2948069 - RNA, 13 nt, Human
aagauguagagga

SEQ ID NO: 2948070 - RNA, 23 nt, Human
aauacaucccuuaccugggaaag

SEQ ID NO: 2948071 - RNA, 17 nt, Human
aauaccagccaguaaau

SEQ ID NO: 2948072 - RNA, 18 nt, Human
aauaccaugccauuuaaa

SEQ ID NO: 2948073 - RNA, 19 nt, Human
aauaccagccaguaaaugg

SEQ ID NO: 2948074 - RNA, 23 nt, Human
aauaccacaggaaccacaagacu

SEQ ID NO: 2948075 - RNA, 12 nt, Human
aauaccaaggaa

SEQ ID NO: 2948076 - RNA, 20 nt, Human
aauaccccaagacucccaug

SEQ ID NO: 2948077 - RNA, 19 nt, Human
aauaccugucccccugaca

SEQ ID NO: 2948078 - RNA, 18 nt, Human
aauaccugucccccugac

SEQ ID NO: 2948079 - RNA, 15 nt, Human
aauaccugucccccu

SEQ ID NO: 2948080 - RNA, 23 nt, Human
aauagcagcccucaauugugaaa

SEQ ID NO: 2948081 - RNA, 20 nt, Human
aauagccugccucuucucua

SEQ ID NO: 2948082 - RNA, 22 nt, Human
aauagcagcccucaauugugaa

SEQ ID NO: 2948083 - RNA, 21 nt, Human
aauagcaaggcugugcaucua

SEQ ID NO: 2948084 - RNA, 21 nt, Human
aauacaccacuacauucuguu

SEQ ID NO: 2948085 - RNA, 13 nt, Human
aauacagaggcaa

SEQ ID NO: 2948086 - RNA, 21 nt, Human
uaacaaaggauacuuauuuaa

SEQ ID NO: 2948087 - RNA, 19 nt, Human
uaacaaaggauacuuauuu

SEQ ID NO: 2948088 - RNA, 20 nt, Human
uaacaaaggauacuuauuua

SEQ ID NO: 2948089 - RNA, 15 nt, Human
uaacaaaggauacuu

SEQ ID NO: 2948090 - RNA, 16 nt, Human
uaacaaaggauacuua

SEQ ID NO: 2948091 - RNA, 17 nt, Human
uaacaaaggauacuuau

SEQ ID NO: 2948092 - RNA, 18 nt, Human
uaacaaaggauacuuauu

SEQ ID NO: 2948093 - RNA, 21 nt, Human
uaaauuaacuuuuauaaacuu

SEQ ID NO: 2948094 - RNA, 18 nt, Human
uaaaugaaaaucgugaca

SEQ ID NO: 2948095 - RNA, 18 nt, Human
aaguguauuuuuuuacua

SEQ ID NO: 2948096 - RNA, 21 nt, Human
aaguguauuuuuuuacuaaua

SEQ ID NO: 2948097 - RNA, 17 nt, Human
aaguguauuuugaaauu

SEQ ID NO: 2948098 - RNA, 21 nt, Human
aaguguauuuugaaauuguuu

SEQ ID NO: 2948099 - RNA, 18 nt, Human
uaaauuaacuuuuauaaa

SEQ ID NO: 2948100 - RNA, 19 nt, Human
uaaauuaacuuuuauaaac

SEQ ID NO: 2948101 - RNA, 20 nt, Human
uaaauuaacuuuuauaaacu

SEQ ID NO: 2948102 - RNA, 16 nt, Human
uaaaugugcuuuuaaa

SEQ ID NO: 2948103 - RNA, 19 nt, Human
aauagucaaauugugugaa

SEQ ID NO: 2948104 - RNA, 19 nt, Human
uaacauguaauuaaguacu

SEQ ID NO: 2948105 - RNA, 17 nt, Human
uaacauguaauuaagua

SEQ ID NO: 2948106 - RNA, 21 nt, Human
uaacuaucacugguuugguuc

SEQ ID NO: 2948107 - RNA, 15 nt, Human
uaacuuaaugaaaac

SEQ ID NO: 2948108 - RNA, 16 nt, Human
uaacuuaaugaaaaca

SEQ ID NO: 2948109 - RNA, 18 nt, Human
uaacuuaaugaaaacaau

SEQ ID NO: 2948110 - RNA, 16 nt, Human
uaacuaucacugguuu

SEQ ID NO: 2948111 - RNA, 23 nt, Human
uaagacaaaaagcuacuuauugu

SEQ ID NO: 2948112 - RNA, 13 nt, Human
uaagaagugaaaa

SEQ ID NO: 2948113 - RNA, 20 nt, Human
uaacuugucuuuggacccug

SEQ ID NO: 2948114 - RNA, 16 nt, Human
uaacuugucuuuggac

SEQ ID NO: 2948115 - RNA, 21 nt, Human
uaacuuccuuggacucauuuu

SEQ ID NO: 2948116 - RNA, 20 nt, Human
uaaguuauuaagagguaaga

SEQ ID NO: 2948117 - RNA, 12 nt, Human
uaauaaaaaggu

SEQ ID NO: 2948118 - RNA, 15 nt, Human
uaauaaaaaggugac

SEQ ID NO: 2948119 - RNA, 14 nt, Human
uaauaaaaagguga

SEQ ID NO: 2948120 - RNA, 18 nt, Human
uaaguuuuuuuuuaaaaa

SEQ ID NO: 2948121 - RNA, 21 nt, Human
uaaguauucuuauuuaaugaa

SEQ ID NO: 2948122 - RNA, 18 nt, Human
uaagguuaccuuuguucc

SEQ ID NO: 2948123 - RNA, 15 nt, Human
uaaguaaaaccacag

SEQ ID NO: 2948124 - RNA, 13 nt, Human
uaaguaaaaccac

SEQ ID NO: 2948125 - RNA, 20 nt, Human
uaaguaaugauaacuggaaa

SEQ ID NO: 2948126 - RNA, 19 nt, Human
uaaguaaaaccacagcagu

SEQ ID NO: 2948127 - RNA, 18 nt, Human
uaaguaaaaccacagcag

SEQ ID NO: 2948128 - RNA, 17 nt, Human
uaaguaaaaccacagca

SEQ ID NO: 2948129 - RNA, 16 nt, Human
uaaguaaaaccacagc

SEQ ID NO: 2948130 - RNA, 17 nt, Human
aaucccauuuaaaaaaa

SEQ ID NO: 2948131 - RNA, 20 nt, Human
aauccucaguuuuugugaaa

SEQ ID NO: 2948132 - RNA, 16 nt, Human
uaagacuuaaugagac

SEQ ID NO: 2948133 - RNA, 15 nt, Human
uaagacuuaaugaga

SEQ ID NO: 2948134 - RNA, 23 nt, Human
aauauuuugacuuguugagggua

SEQ ID NO: 2948135 - RNA, 18 nt, Human
aaucagguuuucuuuuaa

SEQ ID NO: 2948136 - RNA, 21 nt, Human
aaucagguuuucuuuuaagaa

SEQ ID NO: 2948137 - RNA, 19 nt, Human
aaucagccugcuccagcug

SEQ ID NO: 2948138 - RNA, 18 nt, Human
aaucagccugcuccagcu

SEQ ID NO: 2948139 - RNA, 13 nt, Human
aaucagccugcuc

SEQ ID NO: 2948140 - RNA, 11 nt, Human
aaucagccugc

SEQ ID NO: 2948141 - RNA, 16 nt, Human
aaucagccuaguugau

SEQ ID NO: 2948142 - RNA, 18 nt, Human
uaaggaauaccugucccc

SEQ ID NO: 2948143 - RNA, 17 nt, Human
uaaggaauaccuguccc

SEQ ID NO: 2948144 - RNA, 9 nt, Human
uaaggaaua

SEQ ID NO: 2948145 - RNA, 13 nt, Human
uaaggaagacaau

SEQ ID NO: 2948146 - RNA, 14 nt, Human
uaagcuauucagua

SEQ ID NO: 2948147 - RNA, 21 nt, Human
uaagcuauucaguaauaacuc

SEQ ID NO: 2948148 - RNA, 15 nt, Human
uaagcaaaaugugau

SEQ ID NO: 2948149 - RNA, 21 nt, Human
uaagcaaaaugugauauguac

SEQ ID NO: 2948150 - RNA, 14 nt, Human
uaagcaaaauguga

SEQ ID NO: 2948151 - RNA, 14 nt, Human
uaagauucauauuu

SEQ ID NO: 2948152 - RNA, 13 nt, Human
uacaaugcugugc

SEQ ID NO: 2948153 - RNA, 14 nt, Human
uacaaugcugugcc

SEQ ID NO: 2948154 - RNA, 16 nt, Human
uacaaugcugugcccu

SEQ ID NO: 2948155 - RNA, 17 nt, Human
uaauuuuuauauuugaa

SEQ ID NO: 2948156 - RNA, 18 nt, Human
uaauuuuuuugagacaga

SEQ ID NO: 2948157 - RNA, 21 nt, Human
uacaaaaaaaaaaaaaaauua

SEQ ID NO: 2948158 - RNA, 21 nt, Human
aaugcuggcuguuggcugggg

SEQ ID NO: 2948159 - RNA, 22 nt, Human
aaugcuggcuguuggcuggggg

SEQ ID NO: 2948160 - RNA, 20 nt, Human
aaugcuguauuuuaaaagaa

SEQ ID NO: 2948161 - RNA, 21 nt, Human
aaugcuguauuuuaaaagaau

SEQ ID NO: 2948162 - RNA, 13 nt, Human
aauggaagacagc

SEQ ID NO: 2948163 - RNA, 22 nt, Human
aaugcuugcugcugauuuaaac

SEQ ID NO: 2948164 - RNA, 23 nt, Human
aaugcuugcugcugauuuaaaca

SEQ ID NO: 2948165 - RNA, 22 nt, Human
aaugcuguauuuuaaaagaaug

SEQ ID NO: 2948166 - RNA, 18 nt, Human
aaugcuugcugcugauuu

SEQ ID NO: 2948167 - RNA, 20 nt, Human
aaugcuugcugcugauuuaa

SEQ ID NO: 2948168 - RNA, 13 nt, Human
uacagacaaagcg

SEQ ID NO: 2948169 - RNA, 15 nt, Human
uacagacaaagcgug

SEQ ID NO: 2948170 - RNA, 14 nt, Human
uacagacaaagcgu

SEQ ID NO: 2948171 - RNA, 13 nt, Human
uacagaauuuuau

SEQ ID NO: 2948172 - RNA, 17 nt, Human
uacagagacagaaagca

SEQ ID NO: 2948173 - RNA, 22 nt, Human
uacagagcccacgcccccacug

SEQ ID NO: 2948174 - RNA, 19 nt, Human
uacagagcccacgccccca

SEQ ID NO: 2948175 - RNA, 23 nt, Human
uacagagcagacaguuaagagaa

SEQ ID NO: 2948176 - RNA, 14 nt, Human
aaugguuuucaaaa

SEQ ID NO: 2948177 - RNA, 16 nt, Human
aauggaagacagcucu

SEQ ID NO: 2948178 - RNA, 16 nt, Human
aaugguuuucuugugu

SEQ ID NO: 2948179 - RNA, 16 nt, Human
aaugguuuucaaaaua

SEQ ID NO: 2948180 - RNA, 20 nt, Human
aauguaagggaaacugccag

SEQ ID NO: 2948181 - RNA, 20 nt, Human
aaugaccuuucaauaggaaa

SEQ ID NO: 2948182 - RNA, 21 nt, Human
aaugaccuuucaauaggaaaa

SEQ ID NO: 2948183 - RNA, 11 nt, Human
aaugagccugg

SEQ ID NO: 2948184 - RNA, 22 nt, Human
aaugagagacacacugaagaag

SEQ ID NO: 2948185 - RNA, 13 nt, Human
aaugagccuggca

SEQ ID NO: 2948186 - RNA, 12 nt, Human
aaugagccuggc

SEQ ID NO: 2948187 - RNA, 16 nt, Human
aaugaggucagagccu

SEQ ID NO: 2948188 - RNA, 18 nt, Human
aaugaggucagagccugc

SEQ ID NO: 2948189 - RNA, 23 nt, Human
aaugauuaugaauuacauuugua

SEQ ID NO: 2948190 - RNA, 13 nt, Human
aaugcaccuggaa

SEQ ID NO: 2948191 - RNA, 12 nt, Human
aaugcaaaccau

SEQ ID NO: 2948192 - RNA, 16 nt, Human
aaugauuucauucaau

SEQ ID NO: 2948193 - RNA, 11 nt, Human
aaugcaaacca

SEQ ID NO: 2948194 - RNA, 12 nt, Human
aaugcaaaaaaa

SEQ ID NO: 2948195 - RNA, 16 nt, Human
aaugcaaaaaaaauua

SEQ ID NO: 2948196 - RNA, 17 nt, Human
aaugcaaaaaaaauuag

SEQ ID NO: 2948197 - RNA, 18 nt, Human
uaauuuuuauauuugaaa

SEQ ID NO: 2948198 - RNA, 19 nt, Human
uaauuuuuauauuugaaau

SEQ ID NO: 2948199 - RNA, 21 nt, Human
uaauuuuuauauuugaaauau

SEQ ID NO: 2948200 - RNA, 16 nt, Human
uaauuauugauguuuu

SEQ ID NO: 2948201 - RNA, 22 nt, Human
uaauuccguagguuauuuucag

SEQ ID NO: 2948202 - RNA, 21 nt, Human
aaugugcugaaugguuuucaa

SEQ ID NO: 2948203 - RNA, 22 nt, Human
aauguucacugguacucugcca

SEQ ID NO: 2948204 - RNA, 13 nt, Human
aauguucaucaau

SEQ ID NO: 2948205 - RNA, 12 nt, Human
aauuaacuuuua

SEQ ID NO: 2948206 - RNA, 13 nt, Human
aauuaacuuuuau

SEQ ID NO: 2948207 - RNA, 15 nt, Human
aauuaacuuuuauaa

SEQ ID NO: 2948208 - RNA, 16 nt, Human
aauuaacuuuuauaaa

SEQ ID NO: 2948209 - RNA, 16 nt, Human
aauuaaguacuaugua

SEQ ID NO: 2948210 - RNA, 17 nt, Human
aauuaaguacuauguau

SEQ ID NO: 2948211 - RNA, 16 nt, Human
aauguucaucaaugaa

SEQ ID NO: 2948212 - RNA, 20 nt, Human
aauguucaucaaugaaugaa

SEQ ID NO: 2948213 - RNA, 12 nt, Human
uaccagcagagc

SEQ ID NO: 2948214 - RNA, 14 nt, Human
uaccagcagagcac

SEQ ID NO: 2948215 - RNA, 13 nt, Human
uaccagcagagca

SEQ ID NO: 2948216 - RNA, 22 nt, Human
uaccagcagagcaccuuagaca

SEQ ID NO: 2948217 - RNA, 18 nt, Human
uaccagccaguaaauggg

SEQ ID NO: 2948218 - RNA, 17 nt, Human
uacauuagguugugaau

SEQ ID NO: 2948219 - RNA, 12 nt, Human
uacauucuguua

SEQ ID NO: 2948220 - RNA, 16 nt, Human
uaccaugccauuuaaa

SEQ ID NO: 2948221 - RNA, 19 nt, Human
uaccagggacugaggggag

SEQ ID NO: 2948222 - RNA, 16 nt, Human
uaccugccaggaagcc

SEQ ID NO: 2948223 - RNA, 16 nt, Human
uaccugaggggccucu

SEQ ID NO: 2948224 - RNA, 13 nt, Human
aauuacauuugua

SEQ ID NO: 2948225 - RNA, 14 nt, Human
aauuacauuuguau

SEQ ID NO: 2948226 - RNA, 20 nt, Human
aauuacaggaaguacuggag

SEQ ID NO: 2948227 - RNA, 19 nt, Human
aauuacaggaaguacugga

SEQ ID NO: 2948228 - RNA, 17 nt, Human
aauuacaggaaguacug

SEQ ID NO: 2948229 - RNA, 23 nt, Human
uacccgggaagggggcugggaca

SEQ ID NO: 2948230 - RNA, 22 nt, Human
uaccucuugagccuugaacuuu

SEQ ID NO: 2948231 - RNA, 23 nt, Human
uaccucuugagccuugaacuuug

SEQ ID NO: 2948232 - RNA, 16 nt, Human
uaccugaagucuuugu

SEQ ID NO: 2948233 - RNA, 15 nt, Human
uaccugaggggccuc

SEQ ID NO: 2948234 - RNA, 13 nt, Human
uaccugaggggcc

SEQ ID NO: 2948235 - RNA, 14 nt, Human
uaccugaagucuuu

SEQ ID NO: 2948236 - RNA, 13 nt, Human
uaccugaagucuu

SEQ ID NO: 2948237 - RNA, 22 nt, Human
aauucaguuguuagugugucuu

SEQ ID NO: 2948238 - RNA, 17 nt, Human
aauucaguuguuagugu

SEQ ID NO: 2948239 - RNA, 11 nt, Human
aauucaguugu

SEQ ID NO: 2948240 - RNA, 22 nt, Human
aauuauuuauuaaaugcccagc

SEQ ID NO: 2948241 - RNA, 21 nt, Human
aauuauuuauuaaaugcccag

SEQ ID NO: 2948242 - RNA, 16 nt, Human
aauuaccagaaagaua

SEQ ID NO: 2948243 - RNA, 19 nt, Human
uauacauacuuacaugugu

SEQ ID NO: 2948244 - RNA, 18 nt, Human
uauaauuuaccugaaguc

SEQ ID NO: 2948245 - RNA, 21 nt, Human
uauacacuuacacuuuaugca

SEQ ID NO: 2948246 - RNA, 22 nt, Human
uauacacuuacacuuuaugcac

SEQ ID NO: 2948247 - RNA, 19 nt, Human
acacuaagagagaaugaga

SEQ ID NO: 2948248 - RNA, 20 nt, Human
uagucacugagacagcccgg

SEQ ID NO: 2948249 - RNA, 17 nt, Human
uagucacugagacagcc

SEQ ID NO: 2948250 - RNA, 13 nt, Human
acacucaaaucaa

SEQ ID NO: 2948251 - RNA, 21 nt, Human
acacucaaaagcugggcaggu

SEQ ID NO: 2948252 - RNA, 22 nt, Human
acacuaaugaggaaacugcacu

SEQ ID NO: 2948253 - RNA, 15 nt, Human
acacuaaugaggaaa

SEQ ID NO: 2948254 - RNA, 17 nt, Human
acacucaaaucaagaaa

SEQ ID NO: 2948255 - RNA, 16 nt, Human
acacucauugaccuga

SEQ ID NO: 2948256 - RNA, 19 nt, Human
uauauauuuuuuucugaaa

SEQ ID NO: 2948257 - RNA, 23 nt, Human
uauauagcaguaaaaaauggugu

SEQ ID NO: 2948258 - RNA, 18 nt, Human
uauagccuaggugacaga

SEQ ID NO: 2948259 - RNA, 10 nt, Human
uauagauguu

SEQ ID NO: 2948260 - RNA, 21 nt, Human
uauagauguugcuaacagcaa

SEQ ID NO: 2948261 - RNA, 15 nt, Human
uauagauguugcuaa

SEQ ID NO: 2948262 - RNA, 20 nt, Human
uauagauguugcuaacagca

SEQ ID NO: 2948263 - RNA, 18 nt, Human
uauagcaguaaaaaaugg

SEQ ID NO: 2948264 - RNA, 19 nt, Human
uauaggaauugacccacaa

SEQ ID NO: 2948265 - RNA, 23 nt, Human
uauaggaacuuaaauaaugugaa

SEQ ID NO: 2948266 - RNA, 15 nt, Human
uauauagcaguaaaa

SEQ ID NO: 2948267 - RNA, 20 nt, Human
uauauagcaagacauuauau

SEQ ID NO: 2948268 - RNA, 16 nt, Human
uauauagcaguaaaaa

SEQ ID NO: 2948269 - RNA, 18 nt, Human
uauauagcaagacauuau

SEQ ID NO: 2948270 - RNA, 16 nt, Human
uauaggugcuacaaaa

SEQ ID NO: 2948271 - RNA, 15 nt, Human
uauccaauugcugcu

SEQ ID NO: 2948272 - RNA, 23 nt, Human
uauccaauugcugcuuguacacu

SEQ ID NO: 2948273 - RNA, 14 nt, Human
uauccaaucuguga

SEQ ID NO: 2948274 - RNA, 19 nt, Human
uauccaacaucaacaucuu

SEQ ID NO: 2948275 - RNA, 10 nt, Human
uaucagaauu

SEQ ID NO: 2948276 - RNA, 17 nt, Human
uaucagaauucucagaa

SEQ ID NO: 2948277 - RNA, 19 nt, Human
uaucacccagaagaaaaua

SEQ ID NO: 2948278 - RNA, 22 nt, Human
uaucacccagaagaaaauagug

SEQ ID NO: 2948279 - RNA, 20 nt, Human
uaucacaaaucuuaacuuga

SEQ ID NO: 2948280 - RNA, 16 nt, Human
uaucacaaaucuuaac

SEQ ID NO: 2948281 - RNA, 14 nt, Human
uaucacaaaucuua

SEQ ID NO: 2948282 - RNA, 14 nt, Human
acagaccuuugaac

SEQ ID NO: 2948283 - RNA, 18 nt, Human
acacuuacacuuuaugca

SEQ ID NO: 2948284 - RNA, 21 nt, Human
acacuuacacuuuaugcacaa

SEQ ID NO: 2948285 - RNA, 16 nt, Human
acacuuacacuuuaug

SEQ ID NO: 2948286 - RNA, 20 nt, Human
acacuguuucaaacuuuacu

SEQ ID NO: 2948287 - RNA, 16 nt, Human
acacucauucauuacu

SEQ ID NO: 2948288 - RNA, 17 nt, Human
acacucauugaccugag

SEQ ID NO: 2948289 - RNA, 16 nt, Human
acacuguuucaaacuu

SEQ ID NO: 2948290 - RNA, 17 nt, Human
acacuguuucaaacuuu

SEQ ID NO: 2948291 - RNA, 18 nt, Human
acacuguuucaaacuuua

SEQ ID NO: 2948292 - RNA, 18 nt, Human
acagacauacuaaccagc

SEQ ID NO: 2948293 - RNA, 19 nt, Human
acagacauacuaaccagca

SEQ ID NO: 2948294 - RNA, 19 nt, Human
acagaaagcagaacaguga

SEQ ID NO: 2948295 - RNA, 18 nt, Human
acagcaagggugauggga

SEQ ID NO: 2948296 - RNA, 15 nt, Human
acagcccgggcucug

SEQ ID NO: 2948297 - RNA, 16 nt, Human
acagcccgggcucugc

SEQ ID NO: 2948298 - RNA, 21 nt, Human
uaugaggcauuuguuugaacu

SEQ ID NO: 2948299 - RNA, 14 nt, Human
uaugaggcauuugu

SEQ ID NO: 2948300 - RNA, 15 nt, Human
uaugaggcauuuguu

SEQ ID NO: 2948301 - RNA, 16 nt, Human
uaugggacucaaugca

SEQ ID NO: 2948302 - RNA, 23 nt, Human
uaugggacucaaugcacugacau

SEQ ID NO: 2948303 - RNA, 20 nt, Human
uauggcccuggccuagcaua

SEQ ID NO: 2948304 - RNA, 23 nt, Human
uauggcuuuugugcauuaucuag

SEQ ID NO: 2948305 - RNA, 21 nt, Human
uauggcccuggccuagcauac

SEQ ID NO: 2948306 - RNA, 22 nt, Human
uaugcaugaaguaauaugcaca

SEQ ID NO: 2948307 - RNA, 20 nt, Human
acaggaaaauuuuaaaaaua

SEQ ID NO: 2948308 - RNA, 15 nt, Human
acaggcagauacagg

SEQ ID NO: 2948309 - RNA, 16 nt, Human
acaggcccggcuccag

SEQ ID NO: 2948310 - RNA, 17 nt, Human
acaggcccggcuccagg

SEQ ID NO: 2948311 - RNA, 20 nt, Human
uaugugcacaucuguuuugu

SEQ ID NO: 2948312 - RNA, 18 nt, Human
acaggcccggcuccaggc

SEQ ID NO: 2948313 - RNA, 20 nt, Human
acaggcccggcuccaggcuc

SEQ ID NO: 2948314 - RNA, 21 nt, Human
acaggcccggcuccaggcucc

SEQ ID NO: 2948315 - RNA, 22 nt, Human
acaggcccggcuccaggcuccu

SEQ ID NO: 2948316 - RNA, 23 nt, Human
acagcuugaccgugaggccagag

SEQ ID NO: 2948317 - RNA, 22 nt, Human
acagcuugaccgugaggccaga

SEQ ID NO: 2948318 - RNA, 18 nt, Human
acaggaaaagcugcugac

SEQ ID NO: 2948319 - RNA, 19 nt, Human
acaggaaaagcugcugaca

SEQ ID NO: 2948320 - RNA, 20 nt, Human
acaggaaaagcugcugacag

SEQ ID NO: 2948321 - RNA, 21 nt, Human
acaggaaaagcugcugacagu

SEQ ID NO: 2948322 - RNA, 17 nt, Human
acagcuugaccgugagg

SEQ ID NO: 2948323 - RNA, 21 nt, Human
acagcuugaccgugaggccag

SEQ ID NO: 2948324 - RNA, 20 nt, Human
acagcuugaccgugaggcca

SEQ ID NO: 2948325 - RNA, 17 nt, Human
acagcuucauuuccugu

SEQ ID NO: 2948326 - RNA, 19 nt, Human
acagcuucauuuccugugu

SEQ ID NO: 2948327 - RNA, 21 nt, Human
acagcuucauuuccugugucu

SEQ ID NO: 2948328 - RNA, 15 nt, Human
acagcuaaugggaca

SEQ ID NO: 2948329 - RNA, 16 nt, Human
acagcuaaugggacac

SEQ ID NO: 2948330 - RNA, 17 nt, Human
acagcuaaugggacacu

SEQ ID NO: 2948331 - RNA, 19 nt, Human
acagcuaaugggacacuaa

SEQ ID NO: 2948332 - RNA, 14 nt, Human
acagcuguaugauu

SEQ ID NO: 2948333 - RNA, 19 nt, Human
acagcuguaugauucccag

SEQ ID NO: 2948334 - RNA, 20 nt, Human
acagcuguaugauucccagc

SEQ ID NO: 2948335 - RNA, 23 nt, Human
acagcuguaugauucccagccag

SEQ ID NO: 2948336 - RNA, 14 nt, Human
uagaaaaucuucau

SEQ ID NO: 2948337 - RNA, 15 nt, Human
uagaaacacaacuau

SEQ ID NO: 2948338 - RNA, 16 nt, Human
uagaacucccuuucaa

SEQ ID NO: 2948339 - RNA, 17 nt, Human
uagaacucccuuucaac

SEQ ID NO: 2948340 - RNA, 20 nt, Human
uagaauuugauaugugaaca

SEQ ID NO: 2948341 - RNA, 19 nt, Human
uagaauuugauaugugaac

SEQ ID NO: 2948342 - RNA, 22 nt, Human
uagaauuugauaugugaacagu

SEQ ID NO: 2948343 - RNA, 10 nt, Human
uagacagagu

SEQ ID NO: 2948344 - RNA, 16 nt, Human
uagacagucccugcca

SEQ ID NO: 2948345 - RNA, 13 nt, Human
uagacacacauga

SEQ ID NO: 2948346 - RNA, 18 nt, Human
uagacaauuuauuauggc

SEQ ID NO: 2948347 - RNA, 17 nt, Human
aauuugugauacaaugc

SEQ ID NO: 2948348 - RNA, 18 nt, Human
aauuugugauacaaugcu

SEQ ID NO: 2948349 - RNA, 14 nt, Human
aauuugugauacaa

SEQ ID NO: 2948350 - RNA, 18 nt, Human
aauuugggggaaaauuua

SEQ ID NO: 2948351 - RNA, 21 nt, Human
uagacagucccugccaaugga

SEQ ID NO: 2948352 - RNA, 17 nt, Human
uagacagucccugccaa

SEQ ID NO: 2948353 - RNA, 16 nt, Human
acaaaguaauuuggaa

SEQ ID NO: 2948354 - RNA, 14 nt, Human
acaaaauagaaagu

SEQ ID NO: 2948355 - RNA, 14 nt, Human
uagagccagggucu

SEQ ID NO: 2948356 - RNA, 22 nt, Human
uagagcggagaaaggaagggcu

SEQ ID NO: 2948357 - RNA, 16 nt, Human
acaaaaagcuacuuau

SEQ ID NO: 2948358 - RNA, 16 nt, Human
acaaaaagcauaaaaa

SEQ ID NO: 2948359 - RNA, 15 nt, Human
acaaaaacacagcaa

SEQ ID NO: 2948360 - RNA, 14 nt, Human
acaaaaacacagca

SEQ ID NO: 2948361 - RNA, 20 nt, Human
aauuuuacauggcuggagcu

SEQ ID NO: 2948362 - RNA, 13 nt, Human
acaaaaacacagc

SEQ ID NO: 2948363 - RNA, 12 nt, Human
uagccaaggcca

SEQ ID NO: 2948364 - RNA, 22 nt, Human
uagcacagacccugcccugugg

SEQ ID NO: 2948365 - RNA, 13 nt, Human
uagccaaggccaa

SEQ ID NO: 2948366 - RNA, 14 nt, Human
uagcacagacccug

SEQ ID NO: 2948367 - RNA, 21 nt, Human
uagcacagacccugcccugug

SEQ ID NO: 2948368 - RNA, 20 nt, Human
uagcacagacccugcccugu

SEQ ID NO: 2948369 - RNA, 15 nt, Human
uagcacagacccugc

SEQ ID NO: 2948370 - RNA, 19 nt, Human
uagagguacacuugugaau

SEQ ID NO: 2948371 - RNA, 18 nt, Human
uagagguacacuugugaa

SEQ ID NO: 2948372 - RNA, 13 nt, Human
uagagguacacuu

SEQ ID NO: 2948373 - RNA, 14 nt, Human
uagaggguguguaa

SEQ ID NO: 2948374 - RNA, 12 nt, Human
uaggaaaauuau

SEQ ID NO: 2948375 - RNA, 17 nt, Human
uaggaaaaacugauuuu

SEQ ID NO: 2948376 - RNA, 16 nt, Human
uaggaaaaacugauuu

SEQ ID NO: 2948377 - RNA, 13 nt, Human
uaggauguugaaa

SEQ ID NO: 2948378 - RNA, 13 nt, Human
uagggaagauaau

SEQ ID NO: 2948379 - RNA, 22 nt, Human
uaggggucugucuuuuaaacuc

SEQ ID NO: 2948380 - RNA, 20 nt, Human
uagccuuagaagucacacag

SEQ ID NO: 2948381 - RNA, 17 nt, Human
uagcgcccaguugggug

SEQ ID NO: 2948382 - RNA, 14 nt, Human
uagcgcccaguugg

SEQ ID NO: 2948383 - RNA, 21 nt, Human
uagccuuagaagucacacagu

SEQ ID NO: 2948384 - RNA, 13 nt, Human
uagcuuuuuucuc

SEQ ID NO: 2948385 - RNA, 23 nt, Human
uagcuuuuuucucugauacagaa

SEQ ID NO: 2948386 - RNA, 14 nt, Human
uaggaaaaacugau

SEQ ID NO: 2948387 - RNA, 13 nt, Human
uaggaaaaacuga

SEQ ID NO: 2948388 - RNA, 17 nt, Human
uaguagagguacacuug

SEQ ID NO: 2948389 - RNA, 14 nt, Human
uagucacugagaca

SEQ ID NO: 2948390 - RNA, 15 nt, Human
uaguagagacagggu

SEQ ID NO: 2948391 - RNA, 22 nt, Human
uaguagagacaggguuuugcca

SEQ ID NO: 2948392 - RNA, 14 nt, Human
uaguagagacaggg

SEQ ID NO: 2948393 - RNA, 22 nt, Human
uagguuuggacaaaauggaaua

SEQ ID NO: 2948394 - RNA, 23 nt, Human
acacaggcccggcuccaggcucc

SEQ ID NO: 2948395 - RNA, 24 nt, Human
acacaggcccggcuccaggcuccu

SEQ ID NO: 2948396 - RNA, 19 nt, Human
acacaggcccggcuccagg

SEQ ID NO: 2948397 - RNA, 20 nt, Human
acacaggcccggcuccaggc

SEQ ID NO: 2948398 - RNA, 21 nt, Human
acacaggcccggcuccaggcu

SEQ ID NO: 2948399 - RNA, 22 nt, Human
acacaggcccggcuccaggcuc

SEQ ID NO: 2948400 - RNA, 17 nt, Human
acacaggcccggcucca

SEQ ID NO: 2948401 - RNA, 18 nt, Human
acacaggcccggcuccag

SEQ ID NO: 2948402 - RNA, 16 nt, Human
acacaggcccggcucc

SEQ ID NO: 2948403 - RNA, 19 nt, Human
acaaugacuuacuguacau

SEQ ID NO: 2948404 - RNA, 20 nt, Human
acaaugacuuacuguacaug

SEQ ID NO: 2948405 - RNA, 22 nt, Human
acaaugacuuacuguacaugaa

SEQ ID NO: 2948406 - RNA, 18 nt, Human
acaaugcaaaccaucauu

SEQ ID NO: 2948407 - RNA, 17 nt, Human
acaaugcaaaccaucau

SEQ ID NO: 2948408 - RNA, 16 nt, Human
acaaugcaaaccauca

SEQ ID NO: 2948409 - RNA, 11 nt, Human
acaaugcaaac

SEQ ID NO: 2948410 - RNA, 19 nt, Human
uaggguaagugagagaggg

SEQ ID NO: 2948411 - RNA, 17 nt, Human
uaggguuauaauaaugu

SEQ ID NO: 2948412 - RNA, 15 nt, Human
uaggguuauaauaau

SEQ ID NO: 2948413 - RNA, 23 nt, Human
acaaugcaaaccaucauugaaau

SEQ ID NO: 2948414 - RNA, 21 nt, Human
acaaugcaaaccaucauugaa

SEQ ID NO: 2948415 - RNA, 19 nt, Human
acaaugcaaaccaucauug

SEQ ID NO: 2948416 - RNA, 20 nt, Human
acacaaagcuuuugcauauu

SEQ ID NO: 2948417 - RNA, 19 nt, Human
acacaaagcuuuugcauau

SEQ ID NO: 2948418 - RNA, 13 nt, Human
acacaacuauauu

SEQ ID NO: 2948419 - RNA, 21 nt, Human
acucaccugccccucaacucu

SEQ ID NO: 2948420 - RNA, 19 nt, Human
acucaccugccccucaacu

SEQ ID NO: 2948421 - RNA, 14 nt, Human
acucaccugccccu

SEQ ID NO: 2948422 - RNA, 14 nt, Human
acucagaagacacu

SEQ ID NO: 2948423 - RNA, 15 nt, Human
acucagaagacacug

SEQ ID NO: 2948424 - RNA, 16 nt, Human
acucagaagacacuga

SEQ ID NO: 2948425 - RNA, 17 nt, Human
acucagaagacacugau

SEQ ID NO: 2948426 - RNA, 14 nt, Human
acucagaauucucu

SEQ ID NO: 2948427 - RNA, 21 nt, Human
acucagaauucucuaguuuga

SEQ ID NO: 2948428 - RNA, 22 nt, Human
acucagaauucucuaguuugau

SEQ ID NO: 2948429 - RNA, 18 nt, Human
acucagaagacacugaug

SEQ ID NO: 2948430 - RNA, 17 nt, Human
acucauugaccugaggc

SEQ ID NO: 2948431 - RNA, 16 nt, Human
acucauugaccugagg

SEQ ID NO: 2948432 - RNA, 12 nt, Human
acucaucuuagg

SEQ ID NO: 2948433 - RNA, 20 nt, Human
acucauuuuaaaaaauggaa

SEQ ID NO: 2948434 - RNA, 22 nt, Human
acucauugaccugaggcccuuc

SEQ ID NO: 2948435 - RNA, 18 nt, Human
acucauugaccugaggcc

SEQ ID NO: 2948436 - RNA, 21 nt, Human
acuccaaacugacucuuaaga

SEQ ID NO: 2948437 - RNA, 23 nt, Human
ucccugaaggccccgcccaggcu

SEQ ID NO: 2948438 - RNA, 17 nt, Human
acucaccccagccccaa

SEQ ID NO: 2948439 - RNA, 17 nt, Human
ucccugaaggccccgcc

SEQ ID NO: 2948440 - RNA, 18 nt, Human
ucccugaaggccccgccc

SEQ ID NO: 2948441 - RNA, 22 nt, Human
ucccugaaggccccgcccaggc

SEQ ID NO: 2948442 - RNA, 21 nt, Human
ucccugaaggccccgcccagg

SEQ ID NO: 2948443 - RNA, 18 nt, Human
ucccucagucuggcccuu

SEQ ID NO: 2948444 - RNA, 20 nt, Human
ucccucagucuggcccuucc

SEQ ID NO: 2948445 - RNA, 14 nt, Human
ucccuccaccuccc

SEQ ID NO: 2948446 - RNA, 15 nt, Human
ucccuccaccucccu

SEQ ID NO: 2948447 - RNA, 17 nt, Human
ucccuccaccucccugc

SEQ ID NO: 2948448 - RNA, 11 nt, Human
ucccucuuucc

SEQ ID NO: 2948449 - RNA, 13 nt, Human
ucccucuuucccu

SEQ ID NO: 2948450 - RNA, 19 nt, Human
ucccuccaccucccugcaa

SEQ ID NO: 2948451 - RNA, 13 nt, Human
acguacacacaca

SEQ ID NO: 2948452 - RNA, 12 nt, Human
acguacacauuu

SEQ ID NO: 2948453 - RNA, 13 nt, Human
acguacacauuuu

SEQ ID NO: 2948454 - RNA, 14 nt, Human
acguacacauuuua

SEQ ID NO: 2948455 - RNA, 18 nt, Human
acuacggaauaguuggcu

SEQ ID NO: 2948456 - RNA, 20 nt, Human
acuagaguuuagcuggaaaa

SEQ ID NO: 2948457 - RNA, 19 nt, Human
acucacauuuauucugcuc

SEQ ID NO: 2948458 - RNA, 20 nt, Human
acucacauuuauucugcuca

SEQ ID NO: 2948459 - RNA, 14 nt, Human
acucaaugcacuga

SEQ ID NO: 2948460 - RNA, 24 nt, Human
uccccuccucugcuugccaucccu

SEQ ID NO: 2948461 - RNA, 14 nt, Human
uccccuccucugcu

SEQ ID NO: 2948462 - RNA, 15 nt, Human
uccccuccucugcuu

SEQ ID NO: 2948463 - RNA, 18 nt, Human
uccccuccucugcuugcc

SEQ ID NO: 2948464 - RNA, 12 nt, Human
acuauaauguaa

SEQ ID NO: 2948465 - RNA, 13 nt, Human
acuauaauguaag

SEQ ID NO: 2948466 - RNA, 14 nt, Human
acuauaauguaagc

SEQ ID NO: 2948467 - RNA, 12 nt, Human
acuauguaucaa

SEQ ID NO: 2948468 - RNA, 18 nt, Human
acuauucaaacagucuca

SEQ ID NO: 2948469 - RNA, 16 nt, Human
acuauucaaacagucu

SEQ ID NO: 2948470 - RNA, 14 nt, Human
acuauucaaacagu

SEQ ID NO: 2948471 - RNA, 13 nt, Human
acuauucaaacag

SEQ ID NO: 2948472 - RNA, 16 nt, Human
acucgaguuacagaca

SEQ ID NO: 2948473 - RNA, 20 nt, Human
uccuagcacuuugggaggcc

SEQ ID NO: 2948474 - RNA, 21 nt, Human
uccuagccugugccucuggga

SEQ ID NO: 2948475 - RNA, 15 nt, Human
uccguuaaaauacca

SEQ ID NO: 2948476 - RNA, 13 nt, Human
uccguuaaaauac

SEQ ID NO: 2948477 - RNA, 18 nt, Human
uccggcccuccagagccc

SEQ ID NO: 2948478 - RNA, 14 nt, Human
uccggcccuccaga

SEQ ID NO: 2948479 - RNA, 14 nt, Human
acuccagaaaguga

SEQ ID NO: 2948480 - RNA, 15 nt, Human
acucuucccucaaau

SEQ ID NO: 2948481 - RNA, 17 nt, Human
acucuggcagcucagag

SEQ ID NO: 2948482 - RNA, 16 nt, Human
acucuggcagcucaga

SEQ ID NO: 2948483 - RNA, 21 nt, Human
acucuuauugcccacgcugga

SEQ ID NO: 2948484 - RNA, 20 nt, Human
acucuggcagcucagagagg

SEQ ID NO: 2948485 - RNA, 19 nt, Human
acucuggcagcucagagag

SEQ ID NO: 2948486 - RNA, 16 nt, Human
acucgcgacaaugcaa

SEQ ID NO: 2948487 - RNA, 15 nt, Human
acucgcgacaaugca

SEQ ID NO: 2948488 - RNA, 17 nt, Human
uccucuccccaugaugu

SEQ ID NO: 2948489 - RNA, 21 nt, Human
uccucccaccucagccucccg

SEQ ID NO: 2948490 - RNA, 13 nt, Human
uccucccaccuca

SEQ ID NO: 2948491 - RNA, 14 nt, Human
uccucccaccucag

SEQ ID NO: 2948492 - RNA, 15 nt, Human
uccucccaccucagc

SEQ ID NO: 2948493 - RNA, 16 nt, Human
uccucccaccucagcc

SEQ ID NO: 2948494 - RNA, 18 nt, Human
uccucccaccucagccuc

SEQ ID NO: 2948495 - RNA, 20 nt, Human
uccucccaccucagccuccc

SEQ ID NO: 2948496 - RNA, 15 nt, Human
uccugaagaauugaa

SEQ ID NO: 2948497 - RNA, 19 nt, Human
acucuuucuauuguuucuu

SEQ ID NO: 2948498 - RNA, 23 nt, Human
uccucuuuggucuacacugugcu

SEQ ID NO: 2948499 - RNA, 21 nt, Human
uccugaaaacccuugccaugu

SEQ ID NO: 2948500 - RNA, 23 nt, Human
accugaggcccuucucuccagcc

SEQ ID NO: 2948501 - RNA, 12 nt, Human
accugagcccca

SEQ ID NO: 2948502 - RNA, 17 nt, Human
accugagccccaaaagg

SEQ ID NO: 2948503 - RNA, 23 nt, Human
accugaagaguggucagaacaga

SEQ ID NO: 2948504 - RNA, 18 nt, Human
accugaagacucauucuu

SEQ ID NO: 2948505 - RNA, 19 nt, Human
accugaauuuuggcugugu

SEQ ID NO: 2948506 - RNA, 12 nt, Human
ucauaaugacuu

SEQ ID NO: 2948507 - RNA, 16 nt, Human
ucauaauaaguugcau

SEQ ID NO: 2948508 - RNA, 14 nt, Human
accugaggggccuc

SEQ ID NO: 2948509 - RNA, 16 nt, Human
accugaggggccucuu

SEQ ID NO: 2948510 - RNA, 20 nt, Human
accugcacacuguccuauua

SEQ ID NO: 2948511 - RNA, 17 nt, Human
accugccaggaagccag

SEQ ID NO: 2948512 - RNA, 16 nt, Human
accugccaggaagcca

SEQ ID NO: 2948513 - RNA, 18 nt, Human
accugccaggaagccagc

SEQ ID NO: 2948514 - RNA, 20 nt, Human
accuggaauauauaaccagu

SEQ ID NO: 2948515 - RNA, 16 nt, Human
accugcggugcuaucu

SEQ ID NO: 2948516 - RNA, 21 nt, Human
accugcgucucauacucaccu

SEQ ID NO: 2948517 - RNA, 23 nt, Human
accugccuguugggccaggagcc

SEQ ID NO: 2948518 - RNA, 16 nt, Human
ucauuugucacacacu

SEQ ID NO: 2948519 - RNA, 14 nt, Human
ucauuugucacaca

SEQ ID NO: 2948520 - RNA, 19 nt, Human
ucauuuuuaguagagacag

SEQ ID NO: 2948521 - RNA, 18 nt, Human
ucauuuuuuuuaagaaaa

SEQ ID NO: 2948522 - RNA, 17 nt, Human
ucauuuuuuuuaagaaa

SEQ ID NO: 2948523 - RNA, 20 nt, Human
uccacccaggagccccgagg

SEQ ID NO: 2948524 - RNA, 12 nt, Human
uccacccaccuc

SEQ ID NO: 2948525 - RNA, 18 nt, Human
uccaccaucaagccacca

SEQ ID NO: 2948526 - RNA, 13 nt, Human
uccacccaccuca

SEQ ID NO: 2948527 - RNA, 17 nt, Human
uccacccaggagccccg

SEQ ID NO: 2948528 - RNA, 13 nt, Human
accuggccucugc

SEQ ID NO: 2948529 - RNA, 12 nt, Human
accuggccucug

SEQ ID NO: 2948530 - RNA, 12 nt, Human
accuuccugcug

SEQ ID NO: 2948531 - RNA, 21 nt, Human
accuggguaacuagggaagau

SEQ ID NO: 2948532 - RNA, 14 nt, Human
accuucuccuucac

SEQ ID NO: 2948533 - RNA, 22 nt, Human
accuucuccuucaccuuugucc

SEQ ID NO: 2948534 - RNA, 16 nt, Human
accuugacagggcaca

SEQ ID NO: 2948535 - RNA, 13 nt, Human
accuuugucccca

SEQ ID NO: 2948536 - RNA, 14 nt, Human
accuuuuuuauaca

SEQ ID NO: 2948537 - RNA, 16 nt, Human
accuuuguccccaccg

SEQ ID NO: 2948538 - RNA, 15 nt, Human
accuuuguccccacc

SEQ ID NO: 2948539 - RNA, 14 nt, Human
accuuuguccccac

SEQ ID NO: 2948540 - RNA, 16 nt, Human
accuuuuuuauacaua

SEQ ID NO: 2948541 - RNA, 17 nt, Human
accuuuuuuauacauaa

SEQ ID NO: 2948542 - RNA, 18 nt, Human
accuuuuuuauacauaaa

SEQ ID NO: 2948543 - RNA, 17 nt, Human
acgcucucuggccuucg

SEQ ID NO: 2948544 - RNA, 19 nt, Human
acggagucccaccuuggcu

SEQ ID NO: 2948545 - RNA, 13 nt, Human
acggccaggccag

SEQ ID NO: 2948546 - RNA, 16 nt, Human
acggccaggccagagg

SEQ ID NO: 2948547 - RNA, 21 nt, Human
acggagucccaccuuggcugc

SEQ ID NO: 2948548 - RNA, 14 nt, Human
acgcccccacuggu

SEQ ID NO: 2948549 - RNA, 17 nt, Human
acgcccuuggccauggg

SEQ ID NO: 2948550 - RNA, 20 nt, Human
acgcgugcacacaccagagc

SEQ ID NO: 2948551 - RNA, 23 nt, Human
acgcgugcacacaccagagccca

SEQ ID NO: 2948552 - RNA, 15 nt, Human
acgcucucuggccuu

SEQ ID NO: 2948553 - RNA, 16 nt, Human
acgcucucuggccuuc

SEQ ID NO: 2948554 - RNA, 14 nt, Human
acgcucucuggccu

SEQ ID NO: 2948555 - RNA, 18 nt, Human
acgcuacccgggaagggg

SEQ ID NO: 2948556 - RNA, 17 nt, Human
acgcuacccgggaaggg

SEQ ID NO: 2948557 - RNA, 13 nt, Human
acgcuacccggga

SEQ ID NO: 2948558 - RNA, 18 nt, Human
uccaggcugggagagccu

SEQ ID NO: 2948559 - RNA, 17 nt, Human
uccaggcugggagagcc

SEQ ID NO: 2948560 - RNA, 14 nt, Human
uccaggcugggaga

SEQ ID NO: 2948561 - RNA, 18 nt, Human
acgccaucccagccccaa

SEQ ID NO: 2948562 - RNA, 17 nt, Human
acgccaucccagcccca

SEQ ID NO: 2948563 - RNA, 16 nt, Human
acgccaucccagcccc

SEQ ID NO: 2948564 - RNA, 15 nt, Human
acgccaucccagccc

SEQ ID NO: 2948565 - RNA, 14 nt, Human
acgccaucccagcc

SEQ ID NO: 2948566 - RNA, 11 nt, Human
acgccauccca

SEQ ID NO: 2948567 - RNA, 23 nt, Human
acgccaggggaaaaucagccugc

SEQ ID NO: 2948568 - RNA, 15 nt, Human
acgacugcccggcag

SEQ ID NO: 2948569 - RNA, 18 nt, Human
acgccaggggaaaaucag

SEQ ID NO: 2948570 - RNA, 20 nt, Human
acgaggucaggagaucgaga

SEQ ID NO: 2948571 - RNA, 17 nt, Human
uccaugaguccccuguu

SEQ ID NO: 2948572 - RNA, 16 nt, Human
uccaugaguccccugu

SEQ ID NO: 2948573 - RNA, 15 nt, Human
uccaugaguccccug

SEQ ID NO: 2948574 - RNA, 22 nt, Human
uccaugaagauguagaggagaa

SEQ ID NO: 2948575 - RNA, 14 nt, Human
acggcucacugcag

SEQ ID NO: 2948576 - RNA, 20 nt, Human
uccagugaggcucugcccuu

SEQ ID NO: 2948577 - RNA, 14 nt, Human
uccagugagacagc

SEQ ID NO: 2948578 - RNA, 17 nt, Human
uccagugaggcucugcc

SEQ ID NO: 2948579 - RNA, 19 nt, Human
uccagugaggcucugcccu

SEQ ID NO: 2948580 - RNA, 18 nt, Human
uccagugaggcucugccc

SEQ ID NO: 2948581 - RNA, 14 nt, Human
ucccaccccacaca

SEQ ID NO: 2948582 - RNA, 11 nt, Human
ucccaccccac

SEQ ID NO: 2948583 - RNA, 14 nt, Human
ucccacaaaggaga

SEQ ID NO: 2948584 - RNA, 15 nt, Human
ucccaaagugcuggg

SEQ ID NO: 2948585 - RNA, 16 nt, Human
ucccaaagugcuggga

SEQ ID NO: 2948586 - RNA, 14 nt, Human
acaucuugcucugc

SEQ ID NO: 2948587 - RNA, 19 nt, Human
acaucuuggucagauuuga

SEQ ID NO: 2948588 - RNA, 22 nt, Human
acaucuugcucugcugacagac

SEQ ID NO: 2948589 - RNA, 17 nt, Human
acaucuugcucugcuga

SEQ ID NO: 2948590 - RNA, 15 nt, Human
acaucuugcucugcu

SEQ ID NO: 2948591 - RNA, 16 nt, Human
acaucuugcucugcug

SEQ ID NO: 2948592 - RNA, 15 nt, Human
acaugaaaacacauu

SEQ ID NO: 2948593 - RNA, 14 nt, Human
uauuuuaaaagaau

SEQ ID NO: 2948594 - RNA, 18 nt, Human
uauuuuaaaagaaugauu

SEQ ID NO: 2948595 - RNA, 17 nt, Human
uauuuuuguagagccag

SEQ ID NO: 2948596 - RNA, 12 nt, Human
uauuuuacuuuu

SEQ ID NO: 2948597 - RNA, 20 nt, Human
uauuuugacuuguugagggu

SEQ ID NO: 2948598 - RNA, 20 nt, Human
uauuuugcuuugugauuuuu

SEQ ID NO: 2948599 - RNA, 13 nt, Human
uauuuugcuuugu

SEQ ID NO: 2948600 - RNA, 15 nt, Human
uauuuugcuuuguga

SEQ ID NO: 2948601 - RNA, 13 nt, Human
uauuuuacauaaa

SEQ ID NO: 2948602 - RNA, 22 nt, Human
uauuuuaauaauguuucaaaca

SEQ ID NO: 2948603 - RNA, 19 nt, Human
uauuuuaauaauguuucaa

SEQ ID NO: 2948604 - RNA, 20 nt, Human
ucaaauacgugggcauucaa

SEQ ID NO: 2948605 - RNA, 21 nt, Human
ucaaauacgugggcauucaaa

SEQ ID NO: 2948606 - RNA, 22 nt, Human
ucaaauacgugggcauucaaau

SEQ ID NO: 2948607 - RNA, 23 nt, Human
ucaaauacgugggcauucaaaug

SEQ ID NO: 2948608 - RNA, 13 nt, Human
acaugagcaucag

SEQ ID NO: 2948609 - RNA, 23 nt, Human
acaugaaaacacauuuuucuuag

SEQ ID NO: 2948610 - RNA, 22 nt, Human
acaugaaaacacauuuuucuua

SEQ ID NO: 2948611 - RNA, 22 nt, Human
ucaaagauauuuugcuuuguga

SEQ ID NO: 2948612 - RNA, 13 nt, Human
ucaaagauauuuu

SEQ ID NO: 2948613 - RNA, 20 nt, Human
ucaaagauauuuugcuuugu

SEQ ID NO: 2948614 - RNA, 16 nt, Human
ucaaaagcugggcagg

SEQ ID NO: 2948615 - RNA, 13 nt, Human
ucaaacagucuca

SEQ ID NO: 2948616 - RNA, 21 nt, Human
ucaaacagucucaggaaauca

SEQ ID NO: 2948617 - RNA, 20 nt, Human
ucaaacagucucaggaaauc

SEQ ID NO: 2948618 - RNA, 14 nt, Human
acauggccuuugcu

SEQ ID NO: 2948619 - RNA, 15 nt, Human
acauggaguauaugu

SEQ ID NO: 2948620 - RNA, 19 nt, Human
acauggaguauaugucaag

SEQ ID NO: 2948621 - RNA, 23 nt, Human
acaugagcaucaggccaggcccu

SEQ ID NO: 2948622 - RNA, 20 nt, Human
acauggaauaacauguaauu

SEQ ID NO: 2948623 - RNA, 14 nt, Human
acauggaaguacua

SEQ ID NO: 2948624 - RNA, 18 nt, Human
acauggaauaacauguaa

SEQ ID NO: 2948625 - RNA, 21 nt, Human
acaugucuuuucuugcaugag

SEQ ID NO: 2948626 - RNA, 16 nt, Human
accaaaucagcugcua

SEQ ID NO: 2948627 - RNA, 19 nt, Human
accaaaucagcugcuacua

SEQ ID NO: 2948628 - RNA, 16 nt, Human
accaacauacucccau

SEQ ID NO: 2948629 - RNA, 20 nt, Human
accaaccacugcgaccacaa

SEQ ID NO: 2948630 - RNA, 19 nt, Human
accaacacgagcaggcuac

SEQ ID NO: 2948631 - RNA, 14 nt, Human
accaacacgagcag

SEQ ID NO: 2948632 - RNA, 17 nt, Human
accacacagaggcugcc

SEQ ID NO: 2948633 - RNA, 15 nt, Human
accacacccagccca

SEQ ID NO: 2948634 - RNA, 16 nt, Human
accacacccagcccac

SEQ ID NO: 2948635 - RNA, 20 nt, Human
accacacccagcccacuucu

SEQ ID NO: 2948636 - RNA, 21 nt, Human
accacacccagcccacuucug

SEQ ID NO: 2948637 - RNA, 23 nt, Human
accacacccagcccacuucugcc

SEQ ID NO: 2948638 - RNA, 16 nt, Human
accacaagacugcaca

SEQ ID NO: 2948639 - RNA, 13 nt, Human
ucacauuccugaa

SEQ ID NO: 2948640 - RNA, 17 nt, Human
ucacauuccugaacagg

SEQ ID NO: 2948641 - RNA, 17 nt, Human
ucaccagccccagugcc

SEQ ID NO: 2948642 - RNA, 16 nt, Human
ucaccagccccagugc

SEQ ID NO: 2948643 - RNA, 18 nt, Human
ucacauauugauuuccgu

SEQ ID NO: 2948644 - RNA, 20 nt, Human
ucacauauugauuuccguua

SEQ ID NO: 2948645 - RNA, 22 nt, Human
ucacagcuuauuuccucauuuu

SEQ ID NO: 2948646 - RNA, 16 nt, Human
ucacauauugauuucc

SEQ ID NO: 2948647 - RNA, 18 nt, Human
ucacagcagugagacugg

SEQ ID NO: 2948648 - RNA, 15 nt, Human
ucacagaugggugcu

SEQ ID NO: 2948649 - RNA, 14 nt, Human
ucacagaugggugc

SEQ ID NO: 2948650 - RNA, 23 nt, Human
ucacagccagacuggcacaguuu

SEQ ID NO: 2948651 - RNA, 17 nt, Human
ucacagccagacuggca

SEQ ID NO: 2948652 - RNA, 19 nt, Human
ucacagcuccaagaauuuc

SEQ ID NO: 2948653 - RNA, 23 nt, Human
ucacagcagugagacuggggcca

SEQ ID NO: 2948654 - RNA, 13 nt, Human
ucaauuuaaaaaa

SEQ ID NO: 2948655 - RNA, 20 nt, Human
ucaauugugaaaaaauuuac

SEQ ID NO: 2948656 - RNA, 12 nt, Human
ucaauuuaaaaa

SEQ ID NO: 2948657 - RNA, 16 nt, Human
ucacagaccuuugaac

SEQ ID NO: 2948658 - RNA, 14 nt, Human
ucacagaagaugaa

SEQ ID NO: 2948659 - RNA, 15 nt, Human
acauuuuaugucuuu

SEQ ID NO: 2948660 - RNA, 13 nt, Human
acauuuuaugucu

SEQ ID NO: 2948661 - RNA, 16 nt, Human
acauuuuacacacugu

SEQ ID NO: 2948662 - RNA, 13 nt, Human
acauuuuucuuag

SEQ ID NO: 2948663 - RNA, 23 nt, Human
acauuuuucuuagggaaggauac

SEQ ID NO: 2948664 - RNA, 15 nt, Human
acauuuuuaagugcu

SEQ ID NO: 2948665 - RNA, 18 nt, Human
acauuuuuaagugcugca

SEQ ID NO: 2948666 - RNA, 21 nt, Human
acauugcggacagccacggcc

SEQ ID NO: 2948667 - RNA, 22 nt, Human
acauugcggacagccacggcca

SEQ ID NO: 2948668 - RNA, 16 nt, Human
acauuggaaacaaguc

SEQ ID NO: 2948669 - RNA, 23 nt, Human
ucaaggauccugagccagauuuc

SEQ ID NO: 2948670 - RNA, 17 nt, Human
ucaagagggucugagga

SEQ ID NO: 2948671 - RNA, 16 nt, Human
ucaagugauucuccug

SEQ ID NO: 2948672 - RNA, 17 nt, Human
ucaagugauucuccugc

SEQ ID NO: 2948673 - RNA, 17 nt, Human
ucaauaggaaaaacuga

SEQ ID NO: 2948674 - RNA, 19 nt, Human
ucaauaggaaaaacugauu

SEQ ID NO: 2948675 - RNA, 18 nt, Human
ucaauaggaaaaacugau

SEQ ID NO: 2948676 - RNA, 14 nt, Human
ucaaucaugucagu

SEQ ID NO: 2948677 - RNA, 23 nt, Human
ucaauauuucagauaaucacaau

SEQ ID NO: 2948678 - RNA, 22 nt, Human
ucaauaggaaaaacugauuuuu

SEQ ID NO: 2948679 - RNA, 22 nt, Human
ucagagacuccugcaggcagcc

SEQ ID NO: 2948680 - RNA, 20 nt, Human
ucagaauucucagaaucuca

SEQ ID NO: 2948681 - RNA, 10 nt, Human
ucagaauucu

SEQ ID NO: 2948682 - RNA, 12 nt, Human
ucagaauucuca

SEQ ID NO: 2948683 - RNA, 15 nt, Human
acccagcccacuucu

SEQ ID NO: 2948684 - RNA, 23 nt, Human
ucagaaguuucugccgcagcccu

SEQ ID NO: 2948685 - RNA, 23 nt, Human
ucagagacuccugcaggcagcca

SEQ ID NO: 2948686 - RNA, 13 nt, Human
ucagagcugcccu

SEQ ID NO: 2948687 - RNA, 14 nt, Human
ucagagcugcccuc

SEQ ID NO: 2948688 - RNA, 17 nt, Human
ucagagcugcccucucc

SEQ ID NO: 2948689 - RNA, 15 nt, Human
ucagagcugcccucu

SEQ ID NO: 2948690 - RNA, 16 nt, Human
ucagagcugcccucuc

SEQ ID NO: 2948691 - RNA, 15 nt, Human
ucagaucucuaacuu

SEQ ID NO: 2948692 - RNA, 16 nt, Human
ucagaucucuaacuuc

SEQ ID NO: 2948693 - RNA, 23 nt, Human
acccaggugcuaggaacacuccu

SEQ ID NO: 2948694 - RNA, 11 nt, Human
acccaggugcu

SEQ ID NO: 2948695 - RNA, 13 nt, Human
accccagguuucu

SEQ ID NO: 2948696 - RNA, 13 nt, Human
acccaggagcccc

SEQ ID NO: 2948697 - RNA, 15 nt, Human
acccaggagccccga

SEQ ID NO: 2948698 - RNA, 16 nt, Human
acccagcgagcccugg

SEQ ID NO: 2948699 - RNA, 17 nt, Human
acccagcgagcccuggu

SEQ ID NO: 2948700 - RNA, 13 nt, Human
acccagcgagccc

SEQ ID NO: 2948701 - RNA, 13 nt, Human
ucagcccucagaa

SEQ ID NO: 2948702 - RNA, 12 nt, Human
ucagcccucaga

SEQ ID NO: 2948703 - RNA, 15 nt, Human
ucacuguugcccagg

SEQ ID NO: 2948704 - RNA, 18 nt, Human
ucacugcaaccuccgccu

SEQ ID NO: 2948705 - RNA, 14 nt, Human
ucacuguugcccag

SEQ ID NO: 2948706 - RNA, 22 nt, Human
ucaccagccccagugcccacag

SEQ ID NO: 2948707 - RNA, 19 nt, Human
ucacauuccugaacaggau

SEQ ID NO: 2948708 - RNA, 20 nt, Human
ucacuauguugcccaggcag

SEQ ID NO: 2948709 - RNA, 21 nt, Human
ucacuauguugcccaggcagg

SEQ ID NO: 2948710 - RNA, 23 nt, Human
ucacugagacagcccgggcucug

SEQ ID NO: 2948711 - RNA, 21 nt, Human
accauuuugggguacccacug

SEQ ID NO: 2948712 - RNA, 23 nt, Human
accauuuugcugucccuuuuccu

SEQ ID NO: 2948713 - RNA, 22 nt, Human
accauuuugcugucccuuuucc

SEQ ID NO: 2948714 - RNA, 19 nt, Human
accauucuccaccugccag

SEQ ID NO: 2948715 - RNA, 21 nt, Human
accauucuccaccugccaggg

SEQ ID NO: 2948716 - RNA, 20 nt, Human
accauucuccaccugccagg

SEQ ID NO: 2948717 - RNA, 20 nt, Human
acccacugcuuuuggucugu

SEQ ID NO: 2948718 - RNA, 16 nt, Human
acccaaauguucauca

SEQ ID NO: 2948719 - RNA, 20 nt, Human
acccaaauguucaucaauga

SEQ ID NO: 2948720 - RNA, 19 nt, Human
acccgcuaagagggaggga

SEQ ID NO: 2948721 - RNA, 18 nt, Human
ucaggguuggccccugcc

SEQ ID NO: 2948722 - RNA, 19 nt, Human
ucaggguuggccccugccc

SEQ ID NO: 2948723 - RNA, 17 nt, Human
ucaggguuggccccugc

SEQ ID NO: 2948724 - RNA, 23 nt, Human
ucaggggugugcggccuuuggcu

SEQ ID NO: 2948725 - RNA, 19 nt, Human
ucaggggugugcggccuuu

SEQ ID NO: 2948726 - RNA, 12 nt, Human
ucaggggugugc

SEQ ID NO: 2948727 - RNA, 19 nt, Human
ucaggccaggcccucugcc

SEQ ID NO: 2948728 - RNA, 18 nt, Human
ucaggccaggcccucugc

SEQ ID NO: 2948729 - RNA, 17 nt, Human
ucaggccaggcccucug

SEQ ID NO: 2948730 - RNA, 17 nt, Human
ucaggcaggugggaugg

SEQ ID NO: 2948731 - RNA, 18 nt, Human
ucaggcaggugggaugga

SEQ ID NO: 2948732 - RNA, 13 nt, Human
acccccagccugc

SEQ ID NO: 2948733 - RNA, 12 nt, Human
acccccagccug

SEQ ID NO: 2948734 - RNA, 12 nt, Human
ucaggccaggcc

SEQ ID NO: 2948735 - RNA, 13 nt, Human
ucaggccagcugc

SEQ ID NO: 2948736 - RNA, 16 nt, Human
ucaggccaggcccucu

SEQ ID NO: 2948737 - RNA, 15 nt, Human
ucaggccaggcccuc

SEQ ID NO: 2948738 - RNA, 14 nt, Human
ucaggccaggcccu

SEQ ID NO: 2948739 - RNA, 13 nt, Human
ucaggccaggccc

SEQ ID NO: 2948740 - RNA, 21 nt, Human
acccuccuuucaccacaugug

SEQ ID NO: 2948741 - RNA, 22 nt, Human
acccgggaagggggcugggaca

SEQ ID NO: 2948742 - RNA, 14 nt, Human
acccucauguucuu

SEQ ID NO: 2948743 - RNA, 15 nt, Human
acccucauguucuua

SEQ ID NO: 2948744 - RNA, 17 nt, Human
acccucauguucuuaau

SEQ ID NO: 2948745 - RNA, 20 nt, Human
acccgggaagggggcuggga

SEQ ID NO: 2948746 - RNA, 19 nt, Human
acccgggaagggggcuggg

SEQ ID NO: 2948747 - RNA, 21 nt, Human
acccugaggcccagagggccu

SEQ ID NO: 2948748 - RNA, 19 nt, Human
acccugaggcccagagggc

SEQ ID NO: 2948749 - RNA, 17 nt, Human
acccugaggcccagagg

SEQ ID NO: 2948750 - RNA, 11 nt, Human
acccugaggcc

SEQ ID NO: 2948751 - RNA, 23 nt, Human
acccugaggcccagagggccugc

SEQ ID NO: 2948752 - RNA, 19 nt, Human
ucagguuuucuuuuaagaa

SEQ ID NO: 2948753 - RNA, 20 nt, Human
ucagguuuucuuuuaagaau

SEQ ID NO: 2948754 - RNA, 23 nt, Human
ucagguuuucuuuuaagaaucaa

SEQ ID NO: 2948755 - RNA, 22 nt, Human
ucaggugucccugcacuugcag

SEQ ID NO: 2948756 - RNA, 13 nt, Human
ucaguaagccgug

SEQ ID NO: 2948757 - RNA, 13 nt, Human
ucaguaauaacuc

SEQ ID NO: 2948758 - RNA, 20 nt, Human
acccuugccgucuaccugag

SEQ ID NO: 2948759 - RNA, 20 nt, Human
accgaaaacguggcugcuuc

SEQ ID NO: 2948760 - RNA, 15 nt, Human
ucaggugucccugca

SEQ ID NO: 2948761 - RNA, 23 nt, Human
ucagguggggucacucuggcagc

SEQ ID NO: 2948762 - RNA, 17 nt, Human
ucaggugucccugcacu

SEQ ID NO: 2948763 - RNA, 18 nt, Human
ucaggugucccugcacuu

SEQ ID NO: 2948764 - RNA, 22 nt, Human
accgaaaacguggcugcuucaa

SEQ ID NO: 2948765 - RNA, 21 nt, Human
accgaaaacguggcugcuuca

SEQ ID NO: 2948766 - RNA, 22 nt, Human
ucagguggggucacucuggcag

SEQ ID NO: 2948767 - RNA, 15 nt, Human
ucaguuugcagagua

SEQ ID NO: 2948768 - RNA, 16 nt, Human
ucaguuugcagaguag

SEQ ID NO: 2948769 - RNA, 12 nt, Human
ucaguuugguug

SEQ ID NO: 2948770 - RNA, 16 nt, Human
ucaguuuaucuguuca

SEQ ID NO: 2948771 - RNA, 14 nt, Human
ucaguuuaucuguu

SEQ ID NO: 2948772 - RNA, 20 nt, Human
ucaguuguuauuuauugaaa

SEQ ID NO: 2948773 - RNA, 15 nt, Human
ucaguuguuauuuau

SEQ ID NO: 2948774 - RNA, 19 nt, Human
ucaguuguuagugugucuu

SEQ ID NO: 2948775 - RNA, 14 nt, Human
ucaguggcagcugc

SEQ ID NO: 2948776 - RNA, 15 nt, Human
ucaguggcagcugcu

SEQ ID NO: 2948777 - RNA, 17 nt, Human
ucaguuguuaguguguc

SEQ ID NO: 2948778 - RNA, 16 nt, Human
ucaguggcagcugcuu

SEQ ID NO: 2948779 - RNA, 13 nt, Human
ucaguggcagcug

SEQ ID NO: 2948780 - RNA, 13 nt, Human
ucaguagucagac

SEQ ID NO: 2948781 - RNA, 23 nt, Human
ucagugccuuauggaacacucug

SEQ ID NO: 2948782 - RNA, 22 nt, Human
ucagugccuuauggaacacucu

SEQ ID NO: 2948783 - RNA, 20 nt, Human
ucagugccuuauggaacacu

SEQ ID NO: 2948784 - RNA, 19 nt, Human
ucagugccuuauggaacac

SEQ ID NO: 2948785 - RNA, 16 nt, Human
acuguaucaugacaaa

SEQ ID NO: 2948786 - RNA, 20 nt, Human
acuguaucaugacaaagacu

SEQ ID NO: 2948787 - RNA, 18 nt, Human
acuguccuauuauauuca

SEQ ID NO: 2948788 - RNA, 23 nt, Human
acuguccuacccacccuccuuuc

SEQ ID NO: 2948789 - RNA, 16 nt, Human
acuguccuauuauauu

SEQ ID NO: 2948790 - RNA, 15 nt, Human
acuguccuauuauau

SEQ ID NO: 2948791 - RNA, 23 nt, Human
acugucagcuccccucggagaag

SEQ ID NO: 2948792 - RNA, 22 nt, Human
acugucagcuccccucggagaa

SEQ ID NO: 2948793 - RNA, 15 nt, Human
acuguacacauaagc

SEQ ID NO: 2948794 - RNA, 19 nt, Human
acuguacaugaaaacacau

SEQ ID NO: 2948795 - RNA, 16 nt, Human
acuguacaugaaaaca

SEQ ID NO: 2948796 - RNA, 17 nt, Human
acuggguacuuguggac

SEQ ID NO: 2948797 - RNA, 18 nt, Human
acuggguacuuguggaca

SEQ ID NO: 2948798 - RNA, 16 nt, Human
acuguacaaaguagaa

SEQ ID NO: 2948799 - RNA, 22 nt, Human
acuguacaaaguagaagucuua

SEQ ID NO: 2948800 - RNA, 14 nt, Human
acuguaucaugaca

SEQ ID NO: 2948801 - RNA, 20 nt, Human
acuguacaugaaaacacauu

SEQ ID NO: 2948802 - RNA, 21 nt, Human
acuguacaugaaaacacauuu

SEQ ID NO: 2948803 - RNA, 23 nt, Human
ucgcugugucagcauagaaguaa

SEQ ID NO: 2948804 - RNA, 21 nt, Human
acugggcuuggggaccagagc

SEQ ID NO: 2948805 - RNA, 15 nt, Human
acuggguacuugugg

SEQ ID NO: 2948806 - RNA, 14 nt, Human
ucgcuccugugucu

SEQ ID NO: 2948807 - RNA, 22 nt, Human
acugaacaaacuaucagaggaa

SEQ ID NO: 2948808 - RNA, 12 nt, Human
acugaagaagca

SEQ ID NO: 2948809 - RNA, 22 nt, Human
acugaagaagcaccaaucauga

SEQ ID NO: 2948810 - RNA, 23 nt, Human
ucgggaggcugaggcaggagacu

SEQ ID NO: 2948811 - RNA, 23 nt, Human
ucgucacugcuuaacuucacaua

SEQ ID NO: 2948812 - RNA, 21 nt, Human
acuguuaauaguucagguaac

SEQ ID NO: 2948813 - RNA, 17 nt, Human
acuguuaauaguucagg

SEQ ID NO: 2948814 - RNA, 17 nt, Human
ucuaaagcugccagccg

SEQ ID NO: 2948815 - RNA, 13 nt, Human
ucuaaaggcuacc

SEQ ID NO: 2948816 - RNA, 16 nt, Human
ucuaaaggcuaccuuu

SEQ ID NO: 2948817 - RNA, 21 nt, Human
ucuacccucuuagaaaaacca

SEQ ID NO: 2948818 - RNA, 21 nt, Human
ucuacccaucuuaaaaacaac

SEQ ID NO: 2948819 - RNA, 19 nt, Human
ucuacccaucuuaaaaaca

SEQ ID NO: 2948820 - RNA, 17 nt, Human
ucuaccaaaaaucucaa

SEQ ID NO: 2948821 - RNA, 12 nt, Human
ucuagcaugaag

SEQ ID NO: 2948822 - RNA, 24 nt, Human
ucuagauacuguaucaugacaaag

SEQ ID NO: 2948823 - RNA, 14 nt, Human
ucuaguguuuucaa

SEQ ID NO: 2948824 - RNA, 14 nt, Human
ucuaggaaaauuau

SEQ ID NO: 2948825 - RNA, 22 nt, Human
ucuaguuugauuaaauucuugc

SEQ ID NO: 2948826 - RNA, 23 nt, Human
ucuaguuugauuaaauucuugca

SEQ ID NO: 2948827 - RNA, 18 nt, Human
ucuaguguuuucaauuuu

SEQ ID NO: 2948828 - RNA, 13 nt, Human
ucuauaauuucca

SEQ ID NO: 2948829 - RNA, 19 nt, Human
ucuauaauuuccauuuacu

SEQ ID NO: 2948830 - RNA, 22 nt, Human
ucuauaauuuccauuuacuuaa

SEQ ID NO: 2948831 - RNA, 13 nt, Human
ucuauaauuuaaa

SEQ ID NO: 2948832 - RNA, 19 nt, Human
ucuaccugaggggccucuu

SEQ ID NO: 2948833 - RNA, 12 nt, Human
ucuaccugaggg

SEQ ID NO: 2948834 - RNA, 13 nt, Human
acuuacuguacau

SEQ ID NO: 2948835 - RNA, 14 nt, Human
acuuacuguacaug

SEQ ID NO: 2948836 - RNA, 15 nt, Human
acuuacuguacauga

SEQ ID NO: 2948837 - RNA, 20 nt, Human
acuuagagguggggagcaga

SEQ ID NO: 2948838 - RNA, 18 nt, Human
acuuccaauuuacauacu

SEQ ID NO: 2948839 - RNA, 17 nt, Human
acuuccacugccauccu

SEQ ID NO: 2948840 - RNA, 20 nt, Human
acuuccagauccuggaaauc

SEQ ID NO: 2948841 - RNA, 20 nt, Human
acuucgggaggucgaggcag

SEQ ID NO: 2948842 - RNA, 17 nt, Human
acuucgggaggucgagg

SEQ ID NO: 2948843 - RNA, 21 nt, Human
acuucucuacccaucuuaaaa

SEQ ID NO: 2948844 - RNA, 18 nt, Human
acuucuccacccugcucu

SEQ ID NO: 2948845 - RNA, 13 nt, Human
acuucuaaguaaa

SEQ ID NO: 2948846 - RNA, 19 nt, Human
acuucuaaguaaaaccaca

SEQ ID NO: 2948847 - RNA, 18 nt, Human
acuucuaaguaaaaccac

SEQ ID NO: 2948848 - RNA, 16 nt, Human
ucuauuguuucuuuca

SEQ ID NO: 2948849 - RNA, 16 nt, Human
ucucaaaaaaagaaaa

SEQ ID NO: 2948850 - RNA, 21 nt, Human
ucucacagcuccaagaauuuc

SEQ ID NO: 2948851 - RNA, 17 nt, Human
ucucaaaacugcacugu

SEQ ID NO: 2948852 - RNA, 14 nt, Human
acuuggaagcuccg

SEQ ID NO: 2948853 - RNA, 14 nt, Human
acuugucuuuggac

SEQ ID NO: 2948854 - RNA, 19 nt, Human
acuugagaauuacccuuuu

SEQ ID NO: 2948855 - RNA, 21 nt, Human
acuugaacccgggaggcagag

SEQ ID NO: 2948856 - RNA, 23 nt, Human
acuugaacccgggaggcagaggu

SEQ ID NO: 2948857 - RNA, 15 nt, Human
agaaacuggaacucu

SEQ ID NO: 2948858 - RNA, 15 nt, Human
agaaacuggcaaagc

SEQ ID NO: 2948859 - RNA, 16 nt, Human
agaaacuggcaaagca

SEQ ID NO: 2948860 - RNA, 17 nt, Human
agaaacuggcaaagcag

SEQ ID NO: 2948861 - RNA, 22 nt, Human
agaaacuggcaaagcagaaugu

SEQ ID NO: 2948862 - RNA, 16 nt, Human
agaaacacaacuauau

SEQ ID NO: 2948863 - RNA, 19 nt, Human
agaaaaaauauuuucccua

SEQ ID NO: 2948864 - RNA, 23 nt, Human
agaaaaaauauuuuccugccagg

SEQ ID NO: 2948865 - RNA, 17 nt, Human
agaaaaaauauuuuccu

SEQ ID NO: 2948866 - RNA, 18 nt, Human
agaaaaaugagccuggca

SEQ ID NO: 2948867 - RNA, 18 nt, Human
ucucuugguccugcugca

SEQ ID NO: 2948868 - RNA, 17 nt, Human
ucucuugguccugcugc

SEQ ID NO: 2948869 - RNA, 16 nt, Human
ucucuugguccugcug

SEQ ID NO: 2948870 - RNA, 22 nt, Human
ucugaaggacauugcggacagc

SEQ ID NO: 2948871 - RNA, 18 nt, Human
ucugaaggcuggguucug

SEQ ID NO: 2948872 - RNA, 20 nt, Human
ucugaaggguaauuauauag

SEQ ID NO: 2948873 - RNA, 15 nt, Human
agaaaugccuuaccc

SEQ ID NO: 2948874 - RNA, 16 nt, Human
agaaagacuauucaaa

SEQ ID NO: 2948875 - RNA, 20 nt, Human
agaaagacuaucuaaauguu

SEQ ID NO: 2948876 - RNA, 22 nt, Human
agaaagacuaucuaaauguuga

SEQ ID NO: 2948877 - RNA, 17 nt, Human
agaaagcagaacaguga

SEQ ID NO: 2948878 - RNA, 18 nt, Human
agaaagcagaacagugau

SEQ ID NO: 2948879 - RNA, 20 nt, Human
agaaagcagaacagugauua

SEQ ID NO: 2948880 - RNA, 22 nt, Human
acuuugcacacuuuggcccagg

SEQ ID NO: 2948881 - RNA, 21 nt, Human
acuuugcacacuuuggcccag

SEQ ID NO: 2948882 - RNA, 23 nt, Human
acuuuggaaagaguaggaagacu

SEQ ID NO: 2948883 - RNA, 23 nt, Human
acuuuggaaagacuuuuccaacc

SEQ ID NO: 2948884 - RNA, 14 nt, Human
acuuuggaaagagu

SEQ ID NO: 2948885 - RNA, 13 nt, Human
acuuuggaaagag

SEQ ID NO: 2948886 - RNA, 14 nt, Human
acuuguggacacag

SEQ ID NO: 2948887 - RNA, 16 nt, Human
acuuuaaaaggagcca

SEQ ID NO: 2948888 - RNA, 22 nt, Human
acuuguuuuauuuaaccucuaa

SEQ ID NO: 2948889 - RNA, 14 nt, Human
acuuuaaaagcauu

SEQ ID NO: 2948890 - RNA, 12 nt, Human
acuuuaaaacac

SEQ ID NO: 2948891 - RNA, 12 nt, Human
acuuuaaaagca

SEQ ID NO: 2948892 - RNA, 23 nt, Human
acuuuaccuuuuuuauacauaaa

SEQ ID NO: 2948893 - RNA, 21 nt, Human
ucucucacuuguuuuauuuaa

SEQ ID NO: 2948894 - RNA, 22 nt, Human
ucucucacuuguuuuauuuaac

SEQ ID NO: 2948895 - RNA, 12 nt, Human
ucucucaggcca

SEQ ID NO: 2948896 - RNA, 19 nt, Human
ucuccuguaccucuugagc

SEQ ID NO: 2948897 - RNA, 23 nt, Human
ucuccuuggugucgggcaugaca

SEQ ID NO: 2948898 - RNA, 21 nt, Human
ucuccuuggugucgggcauga

SEQ ID NO: 2948899 - RNA, 16 nt, Human
acuuuguguucaccuu

SEQ ID NO: 2948900 - RNA, 19 nt, Human
agaagcaacccaaauguuc

SEQ ID NO: 2948901 - RNA, 19 nt, Human
agaagcaccaaucaugaau

SEQ ID NO: 2948902 - RNA, 16 nt, Human
agaagcagaggaagga

SEQ ID NO: 2948903 - RNA, 23 nt, Human
agaagcccaggaaaggcuccagg

SEQ ID NO: 2948904 - RNA, 20 nt, Human
ucugcccauccugccccuga

SEQ ID NO: 2948905 - RNA, 23 nt, Human
ucugcccacucccugcaaccuga

SEQ ID NO: 2948906 - RNA, 23 nt, Human
ucugcccuugguuaggcauugug

SEQ ID NO: 2948907 - RNA, 12 nt, Human
ucugcccuuggu

SEQ ID NO: 2948908 - RNA, 17 nt, Human
agaacucccuuucaaca

SEQ ID NO: 2948909 - RNA, 15 nt, Human
agaacucccuuucaa

SEQ ID NO: 2948910 - RNA, 16 nt, Human
agaacucccuuucaac

SEQ ID NO: 2948911 - RNA, 17 nt, Human
agaacuauguuuuuguu

SEQ ID NO: 2948912 - RNA, 23 nt, Human
agaaccuuuugagugccuuacac

SEQ ID NO: 2948913 - RNA, 19 nt, Human
agaaccuuuugagugccuu

SEQ ID NO: 2948914 - RNA, 22 nt, Human
agaaguuugagaucagccuggg

SEQ ID NO: 2948915 - RNA, 15 nt, Human
agaaguuugaacauu

SEQ ID NO: 2948916 - RNA, 13 nt, Human
agaaguugauaug

SEQ ID NO: 2948917 - RNA, 15 nt, Human
agaaguucuaguguu

SEQ ID NO: 2948918 - RNA, 16 nt, Human
agaaguucuaguguuu

SEQ ID NO: 2948919 - RNA, 17 nt, Human
agaaguucuaguguuuu

SEQ ID NO: 2948920 - RNA, 20 nt, Human
agaauaggcacuuuaaaaca

SEQ ID NO: 2948921 - RNA, 22 nt, Human
agaauaggcacuuuaaaacacu

SEQ ID NO: 2948922 - RNA, 17 nt, Human
agaauaggcacuuuaaa

SEQ ID NO: 2948923 - RNA, 18 nt, Human
agaauaggcacuuuaaaa

SEQ ID NO: 2948924 - RNA, 16 nt, Human
agaauaaaccaagaau

SEQ ID NO: 2948925 - RNA, 16 nt, Human
ucuggauucauauuua

SEQ ID NO: 2948926 - RNA, 19 nt, Human
ucuggauucauauuuaauu

SEQ ID NO: 2948927 - RNA, 22 nt, Human
ucugcuuugggguuuaucagaa

SEQ ID NO: 2948928 - RNA, 21 nt, Human
ucuggcagcucagagagggug

SEQ ID NO: 2948929 - RNA, 18 nt, Human
ucuggcagcucagagagg

SEQ ID NO: 2948930 - RNA, 23 nt, Human
ucuggcagaguugaagacagagc

SEQ ID NO: 2948931 - RNA, 20 nt, Human
ucuggcagaguugaagacag

SEQ ID NO: 2948932 - RNA, 17 nt, Human
ucuggcagcucagagag

SEQ ID NO: 2948933 - RNA, 16 nt, Human
ucuggcagcucagaga

SEQ ID NO: 2948934 - RNA, 14 nt, Human
agaagcuccaggua

SEQ ID NO: 2948935 - RNA, 14 nt, Human
ugaauaccccaaga

SEQ ID NO: 2948936 - RNA, 22 nt, Human
ugaauaccccaagacucccaug

SEQ ID NO: 2948937 - RNA, 15 nt, Human
ugaauacuuuauaaa

SEQ ID NO: 2948938 - RNA, 22 nt, Human
ugaaggguaauuauauaguuac

SEQ ID NO: 2948939 - RNA, 19 nt, Human
ugaagguagaauguuuuca

SEQ ID NO: 2948940 - RNA, 18 nt, Human
ugaagguagaauguuuuc

SEQ ID NO: 2948941 - RNA, 14 nt, Human
ugaagucacacagu

SEQ ID NO: 2948942 - RNA, 23 nt, Human
ugaauguaggcuggcuuucagag

SEQ ID NO: 2948943 - RNA, 16 nt, Human
agagggagggagggcu

SEQ ID NO: 2948944 - RNA, 15 nt, Human
agagguuaagguggg

SEQ ID NO: 2948945 - RNA, 16 nt, Human
agagguggggagcaga

SEQ ID NO: 2948946 - RNA, 21 nt, Human
agaguaggcuauuccugagag

SEQ ID NO: 2948947 - RNA, 14 nt, Human
ugaauuugccuaau

SEQ ID NO: 2948948 - RNA, 23 nt, Human
ugaauuucuuuugccguuauuaa

SEQ ID NO: 2948949 - RNA, 19 nt, Human
ugacacacagcucuguccu

SEQ ID NO: 2948950 - RNA, 19 nt, Human
ugacaaagacugaguacgu

SEQ ID NO: 2948951 - RNA, 16 nt, Human
ugacacacagcucugu

SEQ ID NO: 2948952 - RNA, 18 nt, Human
ugacacacagcucugucc

SEQ ID NO: 2948953 - RNA, 12 nt, Human
ugacacaugcaa

SEQ ID NO: 2948954 - RNA, 20 nt, Human
ugacacaugcaaggucauuu

SEQ ID NO: 2948955 - RNA, 22 nt, Human
agauacaguuacucagaauucu

SEQ ID NO: 2948956 - RNA, 11 nt, Human
agauacuguau

SEQ ID NO: 2948957 - RNA, 20 nt, Human
agauacaggaaaagcugcug

SEQ ID NO: 2948958 - RNA, 13 nt, Human
agauacaguuacu

SEQ ID NO: 2948959 - RNA, 22 nt, Human
agauaauauuaaggaagacaau

SEQ ID NO: 2948960 - RNA, 18 nt, Human
agauaauauuaaggaaga

SEQ ID NO: 2948961 - RNA, 18 nt, Human
agaucaaaagguuaauaa

SEQ ID NO: 2948962 - RNA, 20 nt, Human
agauauuuugcuuugugauu

SEQ ID NO: 2948963 - RNA, 21 nt, Human
agauauuuugcuuugugauuu

SEQ ID NO: 2948964 - RNA, 15 nt, Human
agauacuguaucaug

SEQ ID NO: 2948965 - RNA, 16 nt, Human
agauacuguaucauga

SEQ ID NO: 2948966 - RNA, 18 nt, Human
agauaauacaccacuaca

SEQ ID NO: 2948967 - RNA, 19 nt, Human
agaguuguuacauuuuuaa

SEQ ID NO: 2948968 - RNA, 20 nt, Human
agaguuguuacauuuuuaag

SEQ ID NO: 2948969 - RNA, 15 nt, Human
agagucacuggaaca

SEQ ID NO: 2948970 - RNA, 16 nt, Human
agaguuguuacauuuu

SEQ ID NO: 2948971 - RNA, 17 nt, Human
agaguuguuacauuuuu

SEQ ID NO: 2948972 - RNA, 23 nt, Human
agcaagacgcugugcugcccugc

SEQ ID NO: 2948973 - RNA, 22 nt, Human
agcaagacgcugugcugcccug

SEQ ID NO: 2948974 - RNA, 21 nt, Human
agcaagacgcugugcugcccu

SEQ ID NO: 2948975 - RNA, 20 nt, Human
agcaagacgcugugcugccc

SEQ ID NO: 2948976 - RNA, 17 nt, Human
agcaagacgcugugcug

SEQ ID NO: 2948977 - RNA, 14 nt, Human
agcaagacauuaua

SEQ ID NO: 2948978 - RNA, 16 nt, Human
agcaagacgcugugcu

SEQ ID NO: 2948979 - RNA, 13 nt, Human
agcaagacgcugu

SEQ ID NO: 2948980 - RNA, 23 nt, Human
agcaacgcaggcccccaggugcc

SEQ ID NO: 2948981 - RNA, 17 nt, Human
agauuugaacucuucaa

SEQ ID NO: 2948982 - RNA, 21 nt, Human
agauuuugaaauuuuuauuaa

SEQ ID NO: 2948983 - RNA, 19 nt, Human
agauucauauuuacuucuu

SEQ ID NO: 2948984 - RNA, 22 nt, Human
agauucauauuuacuucuuaua

SEQ ID NO: 2948985 - RNA, 15 nt, Human
ugacuucuaaguaaa

SEQ ID NO: 2948986 - RNA, 19 nt, Human
ugacuuacuguacaugaaa

SEQ ID NO: 2948987 - RNA, 23 nt, Human
ugacuucuaaguaaaaccacagc

SEQ ID NO: 2948988 - RNA, 22 nt, Human
ugacuucuaaguaaaaccacag

SEQ ID NO: 2948989 - RNA, 13 nt, Human
agauuggaaggaa

SEQ ID NO: 2948990 - RNA, 15 nt, Human
agauucccugagcag

SEQ ID NO: 2948991 - RNA, 16 nt, Human
agaugccgcauuugga

SEQ ID NO: 2948992 - RNA, 16 nt, Human
agaugcaguucugaag

SEQ ID NO: 2948993 - RNA, 17 nt, Human
ugacacuuaaaaauggu

SEQ ID NO: 2948994 - RNA, 16 nt, Human
ugacacuuaaaaaugg

SEQ ID NO: 2948995 - RNA, 21 nt, Human
ugacccaugcugcccugugag

SEQ ID NO: 2948996 - RNA, 16 nt, Human
ugacccaugcugcccu

SEQ ID NO: 2948997 - RNA, 12 nt, Human
ugacccaugcug

SEQ ID NO: 2948998 - RNA, 15 nt, Human
ugacccaugcugccc

SEQ ID NO: 2948999 - RNA, 14 nt, Human
ugacccaugcugcc

SEQ ID NO: 2949000 - RNA, 12 nt, Human
agauguugcuaa

SEQ ID NO: 2949001 - RNA, 19 nt, Human
ugaccugaggcccuucucu

SEQ ID NO: 2949002 - RNA, 18 nt, Human
ugaccugaggcccuucuc

SEQ ID NO: 2949003 - RNA, 15 nt, Human
ugacuuacuguacau

SEQ ID NO: 2949004 - RNA, 16 nt, Human
ugacuuacuguacaug

SEQ ID NO: 2949005 - RNA, 13 nt, Human
ugacuuacuguac

SEQ ID NO: 2949006 - RNA, 19 nt, Human
ucuugguccugcugcaguu

SEQ ID NO: 2949007 - RNA, 17 nt, Human
ucuugguccugcugcag

SEQ ID NO: 2949008 - RNA, 15 nt, Human
ucuugguccugcugc

SEQ ID NO: 2949009 - RNA, 16 nt, Human
ucuuuccugaggcugg

SEQ ID NO: 2949010 - RNA, 17 nt, Human
ucuuuccugaggcuggg

SEQ ID NO: 2949011 - RNA, 19 nt, Human
ucuugcaauggcagccuug

SEQ ID NO: 2949012 - RNA, 18 nt, Human
ucuugcaauggcagccuu

SEQ ID NO: 2949013 - RNA, 22 nt, Human
ucuugcaauggcagccuuggca

SEQ ID NO: 2949014 - RNA, 14 nt, Human
ucuugguccugcug

SEQ ID NO: 2949015 - RNA, 17 nt, Human
ucuuggucagauuugaa

SEQ ID NO: 2949016 - RNA, 13 nt, Human
ucuugauucauaa

SEQ ID NO: 2949017 - RNA, 16 nt, Human
ucuugagccuugaacu

SEQ ID NO: 2949018 - RNA, 20 nt, Human
ucuugagccuugaacuuuga

SEQ ID NO: 2949019 - RNA, 16 nt, Human
ucuugagccugggagg

SEQ ID NO: 2949020 - RNA, 13 nt, Human
ucuugagccuggg

SEQ ID NO: 2949021 - RNA, 11 nt, Human
agaccuucucc

SEQ ID NO: 2949022 - RNA, 18 nt, Human
agaccuucuccuucaccu

SEQ ID NO: 2949023 - RNA, 15 nt, Human
agaccuucuccuuca

SEQ ID NO: 2949024 - RNA, 23 nt, Human
agaccuucuccuucaccuuuguc

SEQ ID NO: 2949025 - RNA, 21 nt, Human
agaccuucuccuucaccuuug

SEQ ID NO: 2949026 - RNA, 15 nt, Human
agacuauucaaacag

SEQ ID NO: 2949027 - RNA, 14 nt, Human
agacuauucaaaca

SEQ ID NO: 2949028 - RNA, 12 nt, Human
agacuauucaaa

SEQ ID NO: 2949029 - RNA, 15 nt, Human
ucuuccucccucccu

SEQ ID NO: 2949030 - RNA, 14 nt, Human
ucuuccucccuccc

SEQ ID NO: 2949031 - RNA, 22 nt, Human
ucuucccuacaguugaaaaaca

SEQ ID NO: 2949032 - RNA, 19 nt, Human
ucuucccuacaguugaaaa

SEQ ID NO: 2949033 - RNA, 21 nt, Human
ucuuccaggcugggagagccu

SEQ ID NO: 2949034 - RNA, 20 nt, Human
ucuuccaggcugggagagcc

SEQ ID NO: 2949035 - RNA, 17 nt, Human
ucuuccaggcugggaga

SEQ ID NO: 2949036 - RNA, 15 nt, Human
ucuuccaggcuggga

SEQ ID NO: 2949037 - RNA, 20 nt, Human
ucuucagagacuccugcagg

SEQ ID NO: 2949038 - RNA, 14 nt, Human
agaaucacuugaac

SEQ ID NO: 2949039 - RNA, 15 nt, Human
ucuucacaacagauu

SEQ ID NO: 2949040 - RNA, 12 nt, Human
ucuucagagacu

SEQ ID NO: 2949041 - RNA, 18 nt, Human
ucuucagagacuccugca

SEQ ID NO: 2949042 - RNA, 17 nt, Human
ucuucagagacuccugc

SEQ ID NO: 2949043 - RNA, 20 nt, Human
ucuucuguggguuucuaaag

SEQ ID NO: 2949044 - RNA, 15 nt, Human
ucuucuguacgucug

SEQ ID NO: 2949045 - RNA, 23 nt, Human
ucuucuguacgucugacaggcaa

SEQ ID NO: 2949046 - RNA, 12 nt, Human
ucuucugcuuca

SEQ ID NO: 2949047 - RNA, 21 nt, Human
ucuucugaacuuggcgcugcc

SEQ ID NO: 2949048 - RNA, 19 nt, Human
agacauacuaaccagcaga

SEQ ID NO: 2949049 - RNA, 14 nt, Human
agacauagaauuaa

SEQ ID NO: 2949050 - RNA, 21 nt, Human
agacauagaauuaacacauga

SEQ ID NO: 2949051 - RNA, 17 nt, Human
agacaucaacagauaaa

SEQ ID NO: 2949052 - RNA, 18 nt, Human
agacaucaacagauaaau

SEQ ID NO: 2949053 - RNA, 23 nt, Human
agagcaguuugguuucuagcaug

SEQ ID NO: 2949054 - RNA, 21 nt, Human
agagcaguuugguuucuagca

SEQ ID NO: 2949055 - RNA, 23 nt, Human
agagcaccuuagacagucccugc

SEQ ID NO: 2949056 - RNA, 21 nt, Human
agagcaccuuagacagucccu

SEQ ID NO: 2949057 - RNA, 22 nt, Human
agagcaccuuagacagucccug

SEQ ID NO: 2949058 - RNA, 20 nt, Human
agagcuagcagcagggaggg

SEQ ID NO: 2949059 - RNA, 22 nt, Human
agagccuuccaggggugggaca

SEQ ID NO: 2949060 - RNA, 17 nt, Human
agagccuuccaggggug

SEQ ID NO: 2949061 - RNA, 15 nt, Human
agagccuuccagggg

SEQ ID NO: 2949062 - RNA, 13 nt, Human
agagccuuccagg

SEQ ID NO: 2949063 - RNA, 14 nt, Human
agagcugccaccug

SEQ ID NO: 2949064 - RNA, 23 nt, Human
agagcaagacgcugugcugcccu

SEQ ID NO: 2949065 - RNA, 19 nt, Human
agagcaagacgcugugcug

SEQ ID NO: 2949066 - RNA, 22 nt, Human
agagaucaaccccuucgcuccu

SEQ ID NO: 2949067 - RNA, 23 nt, Human
agagacuccugcaggcagccagg

SEQ ID NO: 2949068 - RNA, 13 nt, Human
ugaaagacuguac

SEQ ID NO: 2949069 - RNA, 15 nt, Human
ugaaagacuguacaa

SEQ ID NO: 2949070 - RNA, 15 nt, Human
agagacuccugcagg

SEQ ID NO: 2949071 - RNA, 18 nt, Human
agagacuccugcaggcag

SEQ ID NO: 2949072 - RNA, 17 nt, Human
agagacuccugcaggca

SEQ ID NO: 2949073 - RNA, 22 nt, Human
agagacuccugcaggcagccag

SEQ ID NO: 2949074 - RNA, 21 nt, Human
agagacuccugcaggcagcca

SEQ ID NO: 2949075 - RNA, 20 nt, Human
agagacuccugcaggcagcc

SEQ ID NO: 2949076 - RNA, 19 nt, Human
agagacuccugcaggcagc

SEQ ID NO: 2949077 - RNA, 12 nt, Human
ucuuuuaagaau

SEQ ID NO: 2949078 - RNA, 14 nt, Human
ucuuuuaagaauca

SEQ ID NO: 2949079 - RNA, 11 nt, Human
ucuuuuaaacu

SEQ ID NO: 2949080 - RNA, 12 nt, Human
ucuuuuaaacuc

SEQ ID NO: 2949081 - RNA, 21 nt, Human
ugaaaaaauuuacuuuaaacu

SEQ ID NO: 2949082 - RNA, 16 nt, Human
ugaaaaaggaggaaga

SEQ ID NO: 2949083 - RNA, 22 nt, Human
ucuuuggucuacacugugcuga

SEQ ID NO: 2949084 - RNA, 20 nt, Human
ucuuucuggcuaugcauuug

SEQ ID NO: 2949085 - RNA, 19 nt, Human
ucuuucuggcuaugcauuu

SEQ ID NO: 2949086 - RNA, 21 nt, Human
ucuuucuggcuaugcauuuga

SEQ ID NO: 2949087 - RNA, 17 nt, Human
ugaaaauguauguguaa

SEQ ID NO: 2949088 - RNA, 19 nt, Human
ugaaaaucgugacaacacu

SEQ ID NO: 2949089 - RNA, 16 nt, Human
ugaaacgcaaccacca

SEQ ID NO: 2949090 - RNA, 19 nt, Human
ugaaacucguuaauuugua

SEQ ID NO: 2949091 - RNA, 16 nt, Human
ugaaaaucgugacaac

SEQ ID NO: 2949092 - RNA, 22 nt, Human
ugaaaaaguucugcagauaaac

SEQ ID NO: 2949093 - RNA, 22 nt, Human
ugaaaaaggaggaagagaaaaa

SEQ ID NO: 2949094 - RNA, 20 nt, Human
ugaaaaaggaggaagagaaa

SEQ ID NO: 2949095 - RNA, 20 nt, Human
ugaaaagcuccauuuuuagu

SEQ ID NO: 2949096 - RNA, 17 nt, Human
ugaugaagaaguugaua

SEQ ID NO: 2949097 - RNA, 15 nt, Human
agccacggccaggcc

SEQ ID NO: 2949098 - RNA, 14 nt, Human
agccacggccaggc

SEQ ID NO: 2949099 - RNA, 19 nt, Human
agccaccaacauacuccca

SEQ ID NO: 2949100 - RNA, 23 nt, Human
agccaccaacauacucccaucug

SEQ ID NO: 2949101 - RNA, 20 nt, Human
agccaccaacauacucccau

SEQ ID NO: 2949102 - RNA, 18 nt, Human
agccacauuccugaugcu

SEQ ID NO: 2949103 - RNA, 14 nt, Human
agccacauuccuga

SEQ ID NO: 2949104 - RNA, 22 nt, Human
ugauguuuagaaacacaacuau

SEQ ID NO: 2949105 - RNA, 23 nt, Human
ugauguuuuccaugaguccccug

SEQ ID NO: 2949106 - RNA, 17 nt, Human
ugauguuuuaaggaugc

SEQ ID NO: 2949107 - RNA, 18 nt, Human
ugauguuuuaaggaugcu

SEQ ID NO: 2949108 - RNA, 17 nt, Human
ugaugaucuuuaaaaua

SEQ ID NO: 2949109 - RNA, 16 nt, Human
ugauggugcaaugacc

SEQ ID NO: 2949110 - RNA, 23 nt, Human
ugauggugcaaugaccuuucaau

SEQ ID NO: 2949111 - RNA, 17 nt, Human
ugauggugcaaugaccu

SEQ ID NO: 2949112 - RNA, 14 nt, Human
ugaugaucuuuaaa

SEQ ID NO: 2949113 - RNA, 20 nt, Human
ugaugauccuaggcauuugc

SEQ ID NO: 2949114 - RNA, 14 nt, Human
ugaugauccuaggc

SEQ ID NO: 2949115 - RNA, 20 nt, Human
agccacugcaccgggccaca

SEQ ID NO: 2949116 - RNA, 13 nt, Human
agccacugcaccg

SEQ ID NO: 2949117 - RNA, 21 nt, Human
agccacugcaccgggccacag

SEQ ID NO: 2949118 - RNA, 22 nt, Human
agccacugcaccgggccacaga

SEQ ID NO: 2949119 - RNA, 12 nt, Human
ugauuaaaccaa

SEQ ID NO: 2949120 - RNA, 15 nt, Human
ugauuaauuaaaaca

SEQ ID NO: 2949121 - RNA, 14 nt, Human
ugauuaccagggac

SEQ ID NO: 2949122 - RNA, 14 nt, Human
ugauucagcucugc

SEQ ID NO: 2949123 - RNA, 13 nt, Human
ugauucagcucug

SEQ ID NO: 2949124 - RNA, 18 nt, Human
agcccaggaaaggcucca

SEQ ID NO: 2949125 - RNA, 24 nt, Human
agcccaggaaaggcuccaggagca

SEQ ID NO: 2949126 - RNA, 23 nt, Human
agcccaggaaaggcuccaggagc

SEQ ID NO: 2949127 - RNA, 22 nt, Human
agcccaggaaaggcuccaggag

SEQ ID NO: 2949128 - RNA, 15 nt, Human
ugauucccaagcucu

SEQ ID NO: 2949129 - RNA, 16 nt, Human
ugauucccaagcucug

SEQ ID NO: 2949130 - RNA, 18 nt, Human
ugauucccaagcucugcu

SEQ ID NO: 2949131 - RNA, 19 nt, Human
ugauucccaagcucugcuc

SEQ ID NO: 2949132 - RNA, 21 nt, Human
ugauucccaagcucugcuccu

SEQ ID NO: 2949133 - RNA, 21 nt, Human
agcccaggaaaggcuccagga

SEQ ID NO: 2949134 - RNA, 20 nt, Human
agcccaggaaaggcuccagg

SEQ ID NO: 2949135 - RNA, 19 nt, Human
agcccaggaaaggcuccag

SEQ ID NO: 2949136 - RNA, 22 nt, Human
agcccacuucugccauauucug

SEQ ID NO: 2949137 - RNA, 23 nt, Human
agccaguaaaugggggugcauuu

SEQ ID NO: 2949138 - RNA, 22 nt, Human
agccaguaaaugggggugcauu

SEQ ID NO: 2949139 - RNA, 12 nt, Human
agccagggucuc

SEQ ID NO: 2949140 - RNA, 22 nt, Human
agccaggcccuugucggcccca

SEQ ID NO: 2949141 - RNA, 22 nt, Human
agccaggccacaagacccuugu

SEQ ID NO: 2949142 - RNA, 21 nt, Human
agccaggccacaagacccuug

SEQ ID NO: 2949143 - RNA, 14 nt, Human
agccaggccacaag

SEQ ID NO: 2949144 - RNA, 12 nt, Human
agccaggccaca

SEQ ID NO: 2949145 - RNA, 19 nt, Human
agccagacuggcacaguuu

SEQ ID NO: 2949146 - RNA, 14 nt, Human
agccagacuggcac

SEQ ID NO: 2949147 - RNA, 14 nt, Human
ugaguggaguuacu

SEQ ID NO: 2949148 - RNA, 16 nt, Human
ugagugccuuacacaa

SEQ ID NO: 2949149 - RNA, 21 nt, Human
ugagugggugaauaauacagu

SEQ ID NO: 2949150 - RNA, 23 nt, Human
ugagugggggaucacagccucug

SEQ ID NO: 2949151 - RNA, 14 nt, Human
ugagucaccaagcc

SEQ ID NO: 2949152 - RNA, 16 nt, Human
ugagucaccaagccca

SEQ ID NO: 2949153 - RNA, 17 nt, Human
ugagucaccaagcccag

SEQ ID NO: 2949154 - RNA, 20 nt, Human
ugagugccuuacacaauggu

SEQ ID NO: 2949155 - RNA, 17 nt, Human
ugagugccuuacacaau

SEQ ID NO: 2949156 - RNA, 14 nt, Human
ugauacuacaguuu

SEQ ID NO: 2949157 - RNA, 17 nt, Human
ugauacuacaguuuguu

SEQ ID NO: 2949158 - RNA, 18 nt, Human
ugauacaaugcugugccc

SEQ ID NO: 2949159 - RNA, 20 nt, Human
ugauacaaugcugugcccua

SEQ ID NO: 2949160 - RNA, 12 nt, Human
ugauacagaaaa

SEQ ID NO: 2949161 - RNA, 21 nt, Human
ugauacaaugcugugcccuaa

SEQ ID NO: 2949162 - RNA, 17 nt, Human
ugaguucauacccuguu

SEQ ID NO: 2949163 - RNA, 20 nt, Human
ugauaagaaccuuuugagug

SEQ ID NO: 2949164 - RNA, 20 nt, Human
agcauacguacacauuuuau

SEQ ID NO: 2949165 - RNA, 21 nt, Human
agcauacguacacauuuuauu

SEQ ID NO: 2949166 - RNA, 16 nt, Human
agcauacguacacauu

SEQ ID NO: 2949167 - RNA, 17 nt, Human
agcauacguacacauuu

SEQ ID NO: 2949168 - RNA, 18 nt, Human
agcauacguacacauuuu

SEQ ID NO: 2949169 - RNA, 19 nt, Human
agcauacguacacauuuua

SEQ ID NO: 2949170 - RNA, 12 nt, Human
ugagaauuaccc

SEQ ID NO: 2949171 - RNA, 23 nt, Human
agcauaaauguugacaugggaca

SEQ ID NO: 2949172 - RNA, 15 nt, Human
agcauacguacacau

SEQ ID NO: 2949173 - RNA, 14 nt, Human
ugaguacuacaguc

SEQ ID NO: 2949174 - RNA, 23 nt, Human
ugaguacuacaguccucccaucu

SEQ ID NO: 2949175 - RNA, 22 nt, Human
ugaguacuacaguccucccauc

SEQ ID NO: 2949176 - RNA, 21 nt, Human
ugaguacuacaguccucccau

SEQ ID NO: 2949177 - RNA, 17 nt, Human
ugaguacuacaguccuc

SEQ ID NO: 2949178 - RNA, 14 nt, Human
agcauauucaggaa

SEQ ID NO: 2949179 - RNA, 15 nt, Human
ugaguacuacagucc

SEQ ID NO: 2949180 - RNA, 22 nt, Human
ugaguaacugauuuguaacaag

SEQ ID NO: 2949181 - RNA, 18 nt, Human
agcauuguaaaugugcuu

SEQ ID NO: 2949182 - RNA, 17 nt, Human
agcauuguaaaugugcu

SEQ ID NO: 2949183 - RNA, 20 nt, Human
agcauguauuuuugucaauu

SEQ ID NO: 2949184 - RNA, 23 nt, Human
agcauguccuaaugcuugcugcu

SEQ ID NO: 2949185 - RNA, 12 nt, Human
agcauggcugcc

SEQ ID NO: 2949186 - RNA, 20 nt, Human
agcaugucgucaaagcugaa

SEQ ID NO: 2949187 - RNA, 17 nt, Human
agcaugucgucaaagcu

SEQ ID NO: 2949188 - RNA, 20 nt, Human
agcaucaggccaggcccucu

SEQ ID NO: 2949189 - RNA, 19 nt, Human
agcaucaggccaggcccuc

SEQ ID NO: 2949190 - RNA, 18 nt, Human
agcaucaggccaggcccu

SEQ ID NO: 2949191 - RNA, 17 nt, Human
agcaucaggccaggccc

SEQ ID NO: 2949192 - RNA, 16 nt, Human
agcaucaggccaggcc

SEQ ID NO: 2949193 - RNA, 14 nt, Human
agcaucaggccagg

SEQ ID NO: 2949194 - RNA, 22 nt, Human
agcauauucaggaagcucaggg

SEQ ID NO: 2949195 - RNA, 20 nt, Human
ugaucacggcucacugcagc

SEQ ID NO: 2949196 - RNA, 21 nt, Human
ugaucacggcucacugcagcc

SEQ ID NO: 2949197 - RNA, 12 nt, Human
agcaucaggcca

SEQ ID NO: 2949198 - RNA, 13 nt, Human
agcaucaggccag

SEQ ID NO: 2949199 - RNA, 18 nt, Human
ugaucacggcucacugca

SEQ ID NO: 2949200 - RNA, 19 nt, Human
ugaucacggcucacugcag

SEQ ID NO: 2949201 - RNA, 18 nt, Human
ugauauggguaguauuuu

SEQ ID NO: 2949202 - RNA, 15 nt, Human
ugauaugugaacagu

SEQ ID NO: 2949203 - RNA, 16 nt, Human
ugauaugugaacaguu

SEQ ID NO: 2949204 - RNA, 12 nt, Human
ugauaugggucu

SEQ ID NO: 2949205 - RNA, 10 nt, Human
ugcacacauu

SEQ ID NO: 2949206 - RNA, 20 nt, Human
ugcacacauuuuuuaaaugc

SEQ ID NO: 2949207 - RNA, 21 nt, Human
ugcacacuguccuauuauauu

SEQ ID NO: 2949208 - RNA, 14 nt, Human
ugcacacuguccua

SEQ ID NO: 2949209 - RNA, 17 nt, Human
ugcacccucaggcaggu

SEQ ID NO: 2949210 - RNA, 16 nt, Human
ugcacccucaggcagg

SEQ ID NO: 2949211 - RNA, 14 nt, Human
ugcacgugugugca

SEQ ID NO: 2949212 - RNA, 15 nt, Human
ugcacgugugugcac

SEQ ID NO: 2949213 - RNA, 22 nt, Human
agcccugguggcagugggagcu

SEQ ID NO: 2949214 - RNA, 23 nt, Human
agcccugguggcagugggagcug

SEQ ID NO: 2949215 - RNA, 15 nt, Human
ugcacaagcugcacc

SEQ ID NO: 2949216 - RNA, 14 nt, Human
ugcacaagcugcac

SEQ ID NO: 2949217 - RNA, 22 nt, Human
ugcacacaccagagcccaccuu

SEQ ID NO: 2949218 - RNA, 21 nt, Human
ugcacaagcugcacccucagg

SEQ ID NO: 2949219 - RNA, 18 nt, Human
ugcacaagcugcacccuc

SEQ ID NO: 2949220 - RNA, 24 nt, Human
agccccuucugacccaugcugccc

SEQ ID NO: 2949221 - RNA, 20 nt, Human
agccccuucugacccaugcu

SEQ ID NO: 2949222 - RNA, 21 nt, Human
agcccugguggcagugggagc

SEQ ID NO: 2949223 - RNA, 17 nt, Human
agccccgaggccuucuc

SEQ ID NO: 2949224 - RNA, 22 nt, Human
agccccgaggccuucucugaag

SEQ ID NO: 2949225 - RNA, 16 nt, Human
agccccgaggccuucu

SEQ ID NO: 2949226 - RNA, 23 nt, Human
agccccauucugccugcccaggc

SEQ ID NO: 2949227 - RNA, 24 nt, Human
agccccaaaacucuccucugcugc

SEQ ID NO: 2949228 - RNA, 18 nt, Human
agccccgugggguuccuc

SEQ ID NO: 2949229 - RNA, 18 nt, Human
agccccuggaugcagccu

SEQ ID NO: 2949230 - RNA, 17 nt, Human
agccccuggaugcagcc

SEQ ID NO: 2949231 - RNA, 19 nt, Human
agccccuggaugcagccuc

SEQ ID NO: 2949232 - RNA, 13 nt, Human
ugauucuccugcc

SEQ ID NO: 2949233 - RNA, 20 nt, Human
ugauucuccugccucagccu

SEQ ID NO: 2949234 - RNA, 19 nt, Human
ugauucuccugccucagcc

SEQ ID NO: 2949235 - RNA, 15 nt, Human
ugauucuccugccuc

SEQ ID NO: 2949236 - RNA, 18 nt, Human
agcccauggcacucuaug

SEQ ID NO: 2949237 - RNA, 20 nt, Human
agccccaaaacucuccucug

SEQ ID NO: 2949238 - RNA, 22 nt, Human
agccccaaaacucuccucugcu

SEQ ID NO: 2949239 - RNA, 21 nt, Human
agccccaaaacucuccucugc

SEQ ID NO: 2949240 - RNA, 22 nt, Human
ugcacuauagccuaggugacag

SEQ ID NO: 2949241 - RNA, 23 nt, Human
ugcacuauagccuaggugacaga

SEQ ID NO: 2949242 - RNA, 23 nt, Human
agcccuucuaccuuccugcaaca

SEQ ID NO: 2949243 - RNA, 17 nt, Human
agccucagcauccuggc

SEQ ID NO: 2949244 - RNA, 19 nt, Human
agccucagcauccuggcac

SEQ ID NO: 2949245 - RNA, 20 nt, Human
agccucagcauccuggcacc

SEQ ID NO: 2949246 - RNA, 21 nt, Human
agccucagcauccuggcaccc

SEQ ID NO: 2949247 - RNA, 16 nt, Human
agccucagcauccugg

SEQ ID NO: 2949248 - RNA, 16 nt, Human
agccucccaaagugcu

SEQ ID NO: 2949249 - RNA, 20 nt, Human
agccucauguccacugguuc

SEQ ID NO: 2949250 - RNA, 22 nt, Human
agccucagcauccuggcacccg

SEQ ID NO: 2949251 - RNA, 23 nt, Human
agccucagcauccuggcacccgg

SEQ ID NO: 2949252 - RNA, 15 nt, Human
agccucauguccacu

SEQ ID NO: 2949253 - RNA, 16 nt, Human
ugcaguacaggacaua

SEQ ID NO: 2949254 - RNA, 18 nt, Human
ugcaguacaggacauaua

SEQ ID NO: 2949255 - RNA, 14 nt, Human
ugcaguacuaacau

SEQ ID NO: 2949256 - RNA, 14 nt, Human
ugcauaaguuaacu

SEQ ID NO: 2949257 - RNA, 17 nt, Human
ugcauaaguuaacuucc

SEQ ID NO: 2949258 - RNA, 15 nt, Human
ugcagccucacaguc

SEQ ID NO: 2949259 - RNA, 13 nt, Human
ugcagccucacag

SEQ ID NO: 2949260 - RNA, 16 nt, Human
ugcagccucacagucc

SEQ ID NO: 2949261 - RNA, 23 nt, Human
ugcagccucaaccuccugggcua

SEQ ID NO: 2949262 - RNA, 22 nt, Human
agccugaaagaggaaugaagua

SEQ ID NO: 2949263 - RNA, 20 nt, Human
agcucauucuccuuguguua

SEQ ID NO: 2949264 - RNA, 21 nt, Human
agcucauucuccuuguguuac

SEQ ID NO: 2949265 - RNA, 20 nt, Human
ugcccacaggaucagucuga

SEQ ID NO: 2949266 - RNA, 19 nt, Human
ugcccacaggaucagucug

SEQ ID NO: 2949267 - RNA, 16 nt, Human
ugcccacaggaucagu

SEQ ID NO: 2949268 - RNA, 21 nt, Human
ugcccagccuggaugccaucc

SEQ ID NO: 2949269 - RNA, 18 nt, Human
ugcccagccuggaugcca

SEQ ID NO: 2949270 - RNA, 20 nt, Human
ugcccagccuggaugccauc

SEQ ID NO: 2949271 - RNA, 14 nt, Human
ugcccagccuggau

SEQ ID NO: 2949272 - RNA, 16 nt, Human
ugcccagccuggaugc

SEQ ID NO: 2949273 - RNA, 17 nt, Human
ugcccagccuggaugcc

SEQ ID NO: 2949274 - RNA, 20 nt, Human
ugcccagccccuucugaccc

SEQ ID NO: 2949275 - RNA, 21 nt, Human
ugcccagccccuucugaccca

SEQ ID NO: 2949276 - RNA, 12 nt, Human
agcuaggccugg

SEQ ID NO: 2949277 - RNA, 16 nt, Human
agcuaggccuggccag

SEQ ID NO: 2949278 - RNA, 14 nt, Human
agcuaggccuggcc

SEQ ID NO: 2949279 - RNA, 15 nt, Human
agcuaggccuggcca

SEQ ID NO: 2949280 - RNA, 18 nt, Human
agcucaggugucccugca

SEQ ID NO: 2949281 - RNA, 17 nt, Human
agcucaggugucccugc

SEQ ID NO: 2949282 - RNA, 22 nt, Human
agcucaggugucccugcacuug

SEQ ID NO: 2949283 - RNA, 20 nt, Human
agcucaggugucccugcacu

SEQ ID NO: 2949284 - RNA, 21 nt, Human
agcucaggugucccugcacuu

SEQ ID NO: 2949285 - RNA, 19 nt, Human
agcgugagccacugcaccg

SEQ ID NO: 2949286 - RNA, 22 nt, Human
agcgugagccacugcaccgggc

SEQ ID NO: 2949287 - RNA, 15 nt, Human
agcgugcauaaguua

SEQ ID NO: 2949288 - RNA, 18 nt, Human
agcuagacgagcaggcuu

SEQ ID NO: 2949289 - RNA, 13 nt, Human
agcuagaauuuga

SEQ ID NO: 2949290 - RNA, 16 nt, Human
agcuagaauuugauau

SEQ ID NO: 2949291 - RNA, 17 nt, Human
agcuacuugggaggcug

SEQ ID NO: 2949292 - RNA, 18 nt, Human
agcuacuugggaggcuga

SEQ ID NO: 2949293 - RNA, 18 nt, Human
ugcauuaucuagauacug

SEQ ID NO: 2949294 - RNA, 21 nt, Human
ugcauuaucuagauacuguau

SEQ ID NO: 2949295 - RNA, 22 nt, Human
ugcauuaucuagauacuguauc

SEQ ID NO: 2949296 - RNA, 17 nt, Human
ugccaauuugcacauua

SEQ ID NO: 2949297 - RNA, 21 nt, Human
ugccaauuugcacauuaaaug

SEQ ID NO: 2949298 - RNA, 15 nt, Human
ugccaauuugcacau

SEQ ID NO: 2949299 - RNA, 13 nt, Human
ugccaauuugcac

SEQ ID NO: 2949300 - RNA, 14 nt, Human
ugccaauauccuaa

SEQ ID NO: 2949301 - RNA, 18 nt, Human
ugccaaugggagcucaug

SEQ ID NO: 2949302 - RNA, 20 nt, Human
ugcauuaucuagauacugua

SEQ ID NO: 2949303 - RNA, 18 nt, Human
agcggagacggaguccca

SEQ ID NO: 2949304 - RNA, 20 nt, Human
agcggagaaaggaagggcug

SEQ ID NO: 2949305 - RNA, 16 nt, Human
agcggagaaaggaagg

SEQ ID NO: 2949306 - RNA, 20 nt, Human
agccuuggggcugaugcagu

SEQ ID NO: 2949307 - RNA, 17 nt, Human
agccuuccagggguggg

SEQ ID NO: 2949308 - RNA, 16 nt, Human
agccuuccaggggugg

SEQ ID NO: 2949309 - RNA, 14 nt, Human
agccuuccaggggu

SEQ ID NO: 2949310 - RNA, 11 nt, Human
agccuuccagg

SEQ ID NO: 2949311 - RNA, 22 nt, Human
agccugggugacagagcaagug

SEQ ID NO: 2949312 - RNA, 22 nt, Human
agccugcuccagcuguucagcu

SEQ ID NO: 2949313 - RNA, 19 nt, Human
agccugcuccagcuguuca

SEQ ID NO: 2949314 - RNA, 12 nt, Human
ugcauaccacuu

SEQ ID NO: 2949315 - RNA, 17 nt, Human
agccugcuccagcuguu

SEQ ID NO: 2949316 - RNA, 16 nt, Human
agccugcuccagcugu

SEQ ID NO: 2949317 - RNA, 15 nt, Human
agccugcuccagcug

SEQ ID NO: 2949318 - RNA, 14 nt, Human
agccugcuccagcu

SEQ ID NO: 2949319 - RNA, 22 nt, Human
agccuuagaagucacacaguau

SEQ ID NO: 2949320 - RNA, 21 nt, Human
agccugugccucugggacugg

SEQ ID NO: 2949321 - RNA, 22 nt, Human
uggagaagcggcuggcagccca

SEQ ID NO: 2949322 - RNA, 13 nt, Human
uggagaagcggcu

SEQ ID NO: 2949323 - RNA, 17 nt, Human
uggacuuugcacacuuu

SEQ ID NO: 2949324 - RNA, 13 nt, Human
uggagaagaacug

SEQ ID NO: 2949325 - RNA, 15 nt, Human
aggcacccaccauca

SEQ ID NO: 2949326 - RNA, 14 nt, Human
aggcaaugcuggcu

SEQ ID NO: 2949327 - RNA, 20 nt, Human
aggcacccaccaucaugucu

SEQ ID NO: 2949328 - RNA, 21 nt, Human
aggcacccaccaucaugucug

SEQ ID NO: 2949329 - RNA, 22 nt, Human
aggcacccaccaucaugucugg

SEQ ID NO: 2949330 - RNA, 14 nt, Human
uggaauucacaaag

SEQ ID NO: 2949331 - RNA, 12 nt, Human
aggaucucuuga

SEQ ID NO: 2949332 - RNA, 19 nt, Human
aggaucucuugagccuggg

SEQ ID NO: 2949333 - RNA, 18 nt, Human
aggaucucuugagccugg

SEQ ID NO: 2949334 - RNA, 17 nt, Human
aggaucucuugagccug

SEQ ID NO: 2949335 - RNA, 16 nt, Human
uggaauucacaaagua

SEQ ID NO: 2949336 - RNA, 21 nt, Human
uggacacagcucuucuccagg

SEQ ID NO: 2949337 - RNA, 22 nt, Human
uggacacagcucuucuccaggc

SEQ ID NO: 2949338 - RNA, 13 nt, Human
uggacacagcucu

SEQ ID NO: 2949339 - RNA, 14 nt, Human
uggacacagcucuu

SEQ ID NO: 2949340 - RNA, 23 nt, Human
uggacacagcucuucuccaggcu

SEQ ID NO: 2949341 - RNA, 18 nt, Human
uggacccugaggcccaga

SEQ ID NO: 2949342 - RNA, 16 nt, Human
uggacccugaggccca

SEQ ID NO: 2949343 - RNA, 20 nt, Human
uggacccugaggcccagagg

SEQ ID NO: 2949344 - RNA, 19 nt, Human
uggacccugaggcccagag

SEQ ID NO: 2949345 - RNA, 21 nt, Human
uggacccugaggcccagaggg

SEQ ID NO: 2949346 - RNA, 23 nt, Human
uggacccuguggaugauaaaaca

SEQ ID NO: 2949347 - RNA, 15 nt, Human
uggacccugaggccc

SEQ ID NO: 2949348 - RNA, 20 nt, Human
uggaccuugaacuggguacu

SEQ ID NO: 2949349 - RNA, 12 nt, Human
ugcuuugugauu

SEQ ID NO: 2949350 - RNA, 14 nt, Human
ugcuuugugauuuu

SEQ ID NO: 2949351 - RNA, 16 nt, Human
ugcuuugugauuuuug

SEQ ID NO: 2949352 - RNA, 19 nt, Human
ugcuuguacacucauucau

SEQ ID NO: 2949353 - RNA, 22 nt, Human
ugcuuguacacucauucauuac

SEQ ID NO: 2949354 - RNA, 22 nt, Human
ugcuuguacauaaugcgugcau

SEQ ID NO: 2949355 - RNA, 14 nt, Human
ugcuuguacauaau

SEQ ID NO: 2949356 - RNA, 16 nt, Human
ugcuuguacauaaugc

SEQ ID NO: 2949357 - RNA, 14 nt, Human
ugcuuuuggucugu

SEQ ID NO: 2949358 - RNA, 17 nt, Human
ugcuuuuggucugugug

SEQ ID NO: 2949359 - RNA, 13 nt, Human
uggaaaggcagcu

SEQ ID NO: 2949360 - RNA, 16 nt, Human
ugcuuguacacucauu

SEQ ID NO: 2949361 - RNA, 12 nt, Human
ugcuuguacaua

SEQ ID NO: 2949362 - RNA, 13 nt, Human
ugcuuguacauaa

SEQ ID NO: 2949363 - RNA, 14 nt, Human
ugcuuggaggaagg

SEQ ID NO: 2949364 - RNA, 16 nt, Human
ugcuuggaggaaggaa

SEQ ID NO: 2949365 - RNA, 15 nt, Human
ugcuuggaggaagga

SEQ ID NO: 2949366 - RNA, 21 nt, Human
ugcuugaggcaacucaucuua

SEQ ID NO: 2949367 - RNA, 14 nt, Human
aggauccugagcca

SEQ ID NO: 2949368 - RNA, 13 nt, Human
aggauccugagcc

SEQ ID NO: 2949369 - RNA, 15 nt, Human
aggauacuuauuuaa

SEQ ID NO: 2949370 - RNA, 16 nt, Human
aggauacuuauuuaaa

SEQ ID NO: 2949371 - RNA, 13 nt, Human
aggauacuuauuu

SEQ ID NO: 2949372 - RNA, 13 nt, Human
uggaagguauuua

SEQ ID NO: 2949373 - RNA, 17 nt, Human
uggaagguauuuaauag

SEQ ID NO: 2949374 - RNA, 16 nt, Human
uggaagcacagcuuca

SEQ ID NO: 2949375 - RNA, 18 nt, Human
uggaaaugggcagagcag

SEQ ID NO: 2949376 - RNA, 17 nt, Human
uggaaaugggcagagca

SEQ ID NO: 2949377 - RNA, 20 nt, Human
aggccugggggcugggcaga

SEQ ID NO: 2949378 - RNA, 18 nt, Human
aggccugggggcugggca

SEQ ID NO: 2949379 - RNA, 12 nt, Human
aggccuggggac

SEQ ID NO: 2949380 - RNA, 12 nt, Human
uggccuggcccc

SEQ ID NO: 2949381 - RNA, 21 nt, Human
uggccuggccccucagggucc

SEQ ID NO: 2949382 - RNA, 18 nt, Human
uggccuggccccucaggg

SEQ ID NO: 2949383 - RNA, 13 nt, Human
uggcccacgcacu

SEQ ID NO: 2949384 - RNA, 23 nt, Human
uggccgggcgcgguggcucacgc

SEQ ID NO: 2949385 - RNA, 13 nt, Human
uggccucuucaga

SEQ ID NO: 2949386 - RNA, 21 nt, Human
uggccaaagccaaagcuaggc

SEQ ID NO: 2949387 - RNA, 23 nt, Human
uggccaaagccaaagcuaggccu

SEQ ID NO: 2949388 - RNA, 23 nt, Human
uggccagugugacaaggauugcu

SEQ ID NO: 2949389 - RNA, 17 nt, Human
aggccccgcccaggcuu

SEQ ID NO: 2949390 - RNA, 16 nt, Human
uggcaucuuacaucug

SEQ ID NO: 2949391 - RNA, 14 nt, Human
uggaguauauguca

SEQ ID NO: 2949392 - RNA, 13 nt, Human
uggauuguccccg

SEQ ID NO: 2949393 - RNA, 16 nt, Human
aggccaaggugggagg

SEQ ID NO: 2949394 - RNA, 18 nt, Human
aggcagccaggccacaag

SEQ ID NO: 2949395 - RNA, 16 nt, Human
aggcagccccauucug

SEQ ID NO: 2949396 - RNA, 17 nt, Human
aggcagccccauucugc

SEQ ID NO: 2949397 - RNA, 15 nt, Human
aggccaaaggaagca

SEQ ID NO: 2949398 - RNA, 19 nt, Human
aggccaaaggaagcacaug

SEQ ID NO: 2949399 - RNA, 18 nt, Human
aggccaaaggaagcacau

SEQ ID NO: 2949400 - RNA, 16 nt, Human
aggccaaaggaagcac

SEQ ID NO: 2949401 - RNA, 16 nt, Human
aggccccgcccaggcu

SEQ ID NO: 2949402 - RNA, 21 nt, Human
aggcccagagggccugcaagg

SEQ ID NO: 2949403 - RNA, 20 nt, Human
aggccagagggagugacaga

SEQ ID NO: 2949404 - RNA, 17 nt, Human
uggcagccuuggcaaac

SEQ ID NO: 2949405 - RNA, 15 nt, Human
uggcagcucaccucu

SEQ ID NO: 2949406 - RNA, 19 nt, Human
uggcagcucaccucucccu

SEQ ID NO: 2949407 - RNA, 16 nt, Human
aggccacaagacccuu

SEQ ID NO: 2949408 - RNA, 14 nt, Human
aggccagagggagu

SEQ ID NO: 2949409 - RNA, 19 nt, Human
aggccacaagacccuugug

SEQ ID NO: 2949410 - RNA, 18 nt, Human
aggccacaagacccuugu

SEQ ID NO: 2949411 - RNA, 17 nt, Human
aggccacaagacccuug

SEQ ID NO: 2949412 - RNA, 13 nt, Human
uggcagccuuggc

SEQ ID NO: 2949413 - RNA, 19 nt, Human
uggcacaguuuucugagaa

SEQ ID NO: 2949414 - RNA, 18 nt, Human
uggcacaguuuucugaga

SEQ ID NO: 2949415 - RNA, 20 nt, Human
ugcuacaaaaacacagcaag

SEQ ID NO: 2949416 - RNA, 14 nt, Human
agcuguucagcugg

SEQ ID NO: 2949417 - RNA, 15 nt, Human
ugcuacaaaaacaca

SEQ ID NO: 2949418 - RNA, 19 nt, Human
ugcuacaaaaacacagcaa

SEQ ID NO: 2949419 - RNA, 18 nt, Human
ugcuacaaaaacacagca

SEQ ID NO: 2949420 - RNA, 17 nt, Human
ugcuacaaaaacacagc

SEQ ID NO: 2949421 - RNA, 16 nt, Human
ugcuacaaaaacacag

SEQ ID NO: 2949422 - RNA, 18 nt, Human
agcuugaggguugggcug

SEQ ID NO: 2949423 - RNA, 14 nt, Human
agcuugaggguugg

SEQ ID NO: 2949424 - RNA, 19 nt, Human
agcuugaccgugaggccag

SEQ ID NO: 2949425 - RNA, 17 nt, Human
agcuugaaacugagaug

SEQ ID NO: 2949426 - RNA, 13 nt, Human
ugcggagcacacu

SEQ ID NO: 2949427 - RNA, 15 nt, Human
ugcggagcacacugg

SEQ ID NO: 2949428 - RNA, 23 nt, Human
ugcggacagccacggccaggcca

SEQ ID NO: 2949429 - RNA, 22 nt, Human
ugcggacagccacggccaggcc

SEQ ID NO: 2949430 - RNA, 20 nt, Human
ugcgggcuuccuccuggugu

SEQ ID NO: 2949431 - RNA, 19 nt, Human
ugcggccuuuggcuucacg

SEQ ID NO: 2949432 - RNA, 17 nt, Human
ugcggccuuuggcuuca

SEQ ID NO: 2949433 - RNA, 17 nt, Human
ugcgguccacccaggag

SEQ ID NO: 2949434 - RNA, 18 nt, Human
ugcgguccacccaggagc

SEQ ID NO: 2949435 - RNA, 21 nt, Human
ugcggugcuaucucccccagc

SEQ ID NO: 2949436 - RNA, 17 nt, Human
ugcggugcuaucucccc

SEQ ID NO: 2949437 - RNA, 14 nt, Human
ugccugcccaggcc

SEQ ID NO: 2949438 - RNA, 15 nt, Human
ugccugcccaggccc

SEQ ID NO: 2949439 - RNA, 12 nt, Human
ugccucugccuc

SEQ ID NO: 2949440 - RNA, 24 nt, Human
ugccugcccaggccccugccaccc

SEQ ID NO: 2949441 - RNA, 16 nt, Human
ugccugcccaggcccc

SEQ ID NO: 2949442 - RNA, 12 nt, Human
ugcccaggcagg

SEQ ID NO: 2949443 - RNA, 13 nt, Human
ugcccaggcaggu

SEQ ID NO: 2949444 - RNA, 14 nt, Human
ugcccaggcagguc

SEQ ID NO: 2949445 - RNA, 13 nt, Human
ugccucugccucu

SEQ ID NO: 2949446 - RNA, 14 nt, Human
ugccucugccucug

SEQ ID NO: 2949447 - RNA, 13 nt, Human
ugccugcccaggc

SEQ ID NO: 2949448 - RNA, 15 nt, Human
ugccucugccucuga

SEQ ID NO: 2949449 - RNA, 21 nt, Human
agcugcuuuugucuaugggac

SEQ ID NO: 2949450 - RNA, 19 nt, Human
agcugccuguucagcucca

SEQ ID NO: 2949451 - RNA, 21 nt, Human
agcugcuugggcuucauccuc

SEQ ID NO: 2949452 - RNA, 21 nt, Human
agcugccuguucagcuccagc

SEQ ID NO: 2949453 - RNA, 15 nt, Human
ugccuggauggggcu

SEQ ID NO: 2949454 - RNA, 14 nt, Human
ugccuggauggggc

SEQ ID NO: 2949455 - RNA, 20 nt, Human
agcugccuguucagcuccag

SEQ ID NO: 2949456 - RNA, 16 nt, Human
agcugccuccccuccu

SEQ ID NO: 2949457 - RNA, 15 nt, Human
agcugccuccccucc

SEQ ID NO: 2949458 - RNA, 22 nt, Human
agcugcccucuccugggcagcu

SEQ ID NO: 2949459 - RNA, 19 nt, Human
agcugugcucuggacaggc

SEQ ID NO: 2949460 - RNA, 20 nt, Human
agcugugcucuggacaggca

SEQ ID NO: 2949461 - RNA, 21 nt, Human
agcugugcucuggacaggcau

SEQ ID NO: 2949462 - RNA, 21 nt, Human
ugccuguucagcuccagcuca

SEQ ID NO: 2949463 - RNA, 19 nt, Human
ugccuguugggccaggagc

SEQ ID NO: 2949464 - RNA, 20 nt, Human
ugccuguugggccaggagcc

SEQ ID NO: 2949465 - RNA, 16 nt, Human
ugccuuauggaacacu

SEQ ID NO: 2949466 - RNA, 15 nt, Human
ugccuuauggaacac

SEQ ID NO: 2949467 - RNA, 17 nt, Human
ugccuguucagcuccag

SEQ ID NO: 2949468 - RNA, 13 nt, Human
agcuguucagcug

SEQ ID NO: 2949469 - RNA, 18 nt, Human
ugccuguucagcuccagc

SEQ ID NO: 2949470 - RNA, 20 nt, Human
ugccuguucagcuccagcuc

SEQ ID NO: 2949471 - RNA, 19 nt, Human
agcuguucacagccagacu

SEQ ID NO: 2949472 - RNA, 16 nt, Human
agcuguucacagccag

SEQ ID NO: 2949473 - RNA, 19 nt, Human
ugcuaucucccccagcccc

SEQ ID NO: 2949474 - RNA, 18 nt, Human
ugcuaucucccccagccc

SEQ ID NO: 2949475 - RNA, 20 nt, Human
ugcuaucucccccagcccca

SEQ ID NO: 2949476 - RNA, 11 nt, Human
ugcucauggaa

SEQ ID NO: 2949477 - RNA, 22 nt, Human
ugcuccuaggacccgucuccag

SEQ ID NO: 2949478 - RNA, 14 nt, Human
ugcucuggacaggc

SEQ ID NO: 2949479 - RNA, 15 nt, Human
ugcucuggacaggca

SEQ ID NO: 2949480 - RNA, 16 nt, Human
ugcucuggacaggcau

SEQ ID NO: 2949481 - RNA, 14 nt, Human
ugcucauggaauug

SEQ ID NO: 2949482 - RNA, 21 nt, Human
aggaagccagcaggcucucag

SEQ ID NO: 2949483 - RNA, 23 nt, Human
aggaagccagcaggcucucaggc

SEQ ID NO: 2949484 - RNA, 22 nt, Human
aggaagccagcaggcucucagg

SEQ ID NO: 2949485 - RNA, 20 nt, Human
aggaagccgcuggggccagu

SEQ ID NO: 2949486 - RNA, 19 nt, Human
aggaagccgcuggggccag

SEQ ID NO: 2949487 - RNA, 18 nt, Human
aggaagccgcuggggcca

SEQ ID NO: 2949488 - RNA, 18 nt, Human
aggaagccagcaggcucu

SEQ ID NO: 2949489 - RNA, 23 nt, Human
aggaaggaaacccagcucugguc

SEQ ID NO: 2949490 - RNA, 22 nt, Human
aggaaggaaacccagcucuggu

SEQ ID NO: 2949491 - RNA, 20 nt, Human
aggaaggaaacccagcucug

SEQ ID NO: 2949492 - RNA, 12 nt, Human
aggaagcucagg

SEQ ID NO: 2949493 - RNA, 14 nt, Human
aggaaaggcuccag

SEQ ID NO: 2949494 - RNA, 13 nt, Human
aggaaaggcucca

SEQ ID NO: 2949495 - RNA, 16 nt, Human
aggaaaggcuccagga

SEQ ID NO: 2949496 - RNA, 15 nt, Human
aggaaaggcuccagg

SEQ ID NO: 2949497 - RNA, 12 nt, Human
aggaaauauuua

SEQ ID NO: 2949498 - RNA, 11 nt, Human
aggaagcacau

SEQ ID NO: 2949499 - RNA, 17 nt, Human
aggaagcacaugccucu

SEQ ID NO: 2949500 - RNA, 16 nt, Human
aggaagcacaugccuc

SEQ ID NO: 2949501 - RNA, 23 nt, Human
aggaaaucaaauaugcaaagcac

SEQ ID NO: 2949502 - RNA, 19 nt, Human
aggaaaucaccgaaaacgu

SEQ ID NO: 2949503 - RNA, 15 nt, Human
aggaaaucaccgaaa

SEQ ID NO: 2949504 - RNA, 17 nt, Human
ugcugucccuuacguga

SEQ ID NO: 2949505 - RNA, 15 nt, Human
ugcugucccuuuucc

SEQ ID NO: 2949506 - RNA, 19 nt, Human
ugcugucccuuacgugagu

SEQ ID NO: 2949507 - RNA, 17 nt, Human
ugcugucccuuuuccuu

SEQ ID NO: 2949508 - RNA, 23 nt, Human
ugcuucaaggauccugagccaga

SEQ ID NO: 2949509 - RNA, 21 nt, Human
ugcuucaaggauccugagcca

SEQ ID NO: 2949510 - RNA, 20 nt, Human
ugcuucaaggauccugagcc

SEQ ID NO: 2949511 - RNA, 18 nt, Human
aggacacuaaccacgcug

SEQ ID NO: 2949512 - RNA, 16 nt, Human
ugcuuccagugaggcu

SEQ ID NO: 2949513 - RNA, 17 nt, Human
aggacacugauaugggu

SEQ ID NO: 2949514 - RNA, 21 nt, Human
ugcugcccugcccaccuggcc

SEQ ID NO: 2949515 - RNA, 19 nt, Human
ugcugcccugcccaccugg

SEQ ID NO: 2949516 - RNA, 11 nt, Human
ugcugcccugu

SEQ ID NO: 2949517 - RNA, 17 nt, Human
aggaaugcaaagaugaa

SEQ ID NO: 2949518 - RNA, 18 nt, Human
ugcugcccugcccaccug

SEQ ID NO: 2949519 - RNA, 17 nt, Human
ugcugcccugcccaccu

SEQ ID NO: 2949520 - RNA, 16 nt, Human
ugcugcccugcccacc

SEQ ID NO: 2949521 - RNA, 13 nt, Human
ugcugcccugccc

SEQ ID NO: 2949522 - RNA, 18 nt, Human
ugcuggcuguuggcuggg

SEQ ID NO: 2949523 - RNA, 19 nt, Human
ugcugggauuacaagcgug

SEQ ID NO: 2949524 - RNA, 19 nt, Human
ugcuggcuguuggcugggg

SEQ ID NO: 2949525 - RNA, 21 nt, Human
ugcuggcuguuggcugggggc

SEQ ID NO: 2949526 - RNA, 21 nt, Human
ugcugggauuacaagcgugag

SEQ ID NO: 2949527 - RNA, 17 nt, Human
ugcugggauuacaggug

SEQ ID NO: 2949528 - RNA, 13 nt, Human
ugcuguauuuuaa

SEQ ID NO: 2949529 - RNA, 21 nt, Human
ugcuguauuuuaaaagaauga

SEQ ID NO: 2949530 - RNA, 22 nt, Human
ugcuguauuuuaaaagaaugau

SEQ ID NO: 2949531 - RNA, 18 nt, Human
uguacuuuuaagacuuug

SEQ ID NO: 2949532 - RNA, 15 nt, Human
uguacuuuuaagacu

SEQ ID NO: 2949533 - RNA, 18 nt, Human
uguagaggagaaacugga

SEQ ID NO: 2949534 - RNA, 16 nt, Human
uguagaggagaaacug

SEQ ID NO: 2949535 - RNA, 14 nt, Human
uguagagugggagc

SEQ ID NO: 2949536 - RNA, 13 nt, Human
uguagagugggag

SEQ ID NO: 2949537 - RNA, 14 nt, Human
uguaauuugugaua

SEQ ID NO: 2949538 - RNA, 16 nt, Human
uguaccacuuuugcaa

SEQ ID NO: 2949539 - RNA, 17 nt, Human
uguaccacuuuugcaaa

SEQ ID NO: 2949540 - RNA, 17 nt, Human
aguaauaugcacacauu

SEQ ID NO: 2949541 - RNA, 20 nt, Human
aguaauaugcacacauuuuu

SEQ ID NO: 2949542 - RNA, 18 nt, Human
aguaauaugcacacauuu

SEQ ID NO: 2949543 - RNA, 19 nt, Human
aguaauaugcacacauuuu

SEQ ID NO: 2949544 - RNA, 17 nt, Human
agguuuucuuuuaagaa

SEQ ID NO: 2949545 - RNA, 11 nt, Human
agguuuuccug

SEQ ID NO: 2949546 - RNA, 15 nt, Human
aguaaaaccacagca

SEQ ID NO: 2949547 - RNA, 20 nt, Human
aguaagccgugauuuucauu

SEQ ID NO: 2949548 - RNA, 14 nt, Human
aguaauuuggaaau

SEQ ID NO: 2949549 - RNA, 22 nt, Human
aguaauuuggaaauuagguuga

SEQ ID NO: 2949550 - RNA, 16 nt, Human
aguacacuguuucaaa

SEQ ID NO: 2949551 - RNA, 20 nt, Human
aguacacuguuucaaacuuu

SEQ ID NO: 2949552 - RNA, 14 nt, Human
aguacacuguuuca

SEQ ID NO: 2949553 - RNA, 14 nt, Human
aguagagguacacu

SEQ ID NO: 2949554 - RNA, 22 nt, Human
aguagagguacacuugugaaua

SEQ ID NO: 2949555 - RNA, 20 nt, Human
aguagagguacacuugugaa

SEQ ID NO: 2949556 - RNA, 21 nt, Human
aguagagguacacuugugaau

SEQ ID NO: 2949557 - RNA, 12 nt, Human
aguagagacagg

SEQ ID NO: 2949558 - RNA, 20 nt, Human
uguaggaagguuaauguuca

SEQ ID NO: 2949559 - RNA, 18 nt, Human
aguagaucaugcauagag

SEQ ID NO: 2949560 - RNA, 18 nt, Human
uguaggaagguuaauguu

SEQ ID NO: 2949561 - RNA, 15 nt, Human
aguagaucaugcaua

SEQ ID NO: 2949562 - RNA, 19 nt, Human
aguagauaggccaugggca

SEQ ID NO: 2949563 - RNA, 21 nt, Human
aggugcacaagcuccaagcuc

SEQ ID NO: 2949564 - RNA, 20 nt, Human
aggugggauccuccaggugc

SEQ ID NO: 2949565 - RNA, 15 nt, Human
aggugcacaagcucc

SEQ ID NO: 2949566 - RNA, 20 nt, Human
aggugcacaagcuccaagcu

SEQ ID NO: 2949567 - RNA, 18 nt, Human
aggugcacaagcuccaag

SEQ ID NO: 2949568 - RNA, 17 nt, Human
aggugcacaagcuccaa

SEQ ID NO: 2949569 - RNA, 16 nt, Human
aggugcacaagcucca

SEQ ID NO: 2949570 - RNA, 23 nt, Human
aggucuugaacuccuggccucaa

SEQ ID NO: 2949571 - RNA, 17 nt, Human
aggugguuauggagagg

SEQ ID NO: 2949572 - RNA, 17 nt, Human
uguaacuuucugaaaua

SEQ ID NO: 2949573 - RNA, 14 nt, Human
agguuggugggggc

SEQ ID NO: 2949574 - RNA, 15 nt, Human
uguaaguaaacgguc

SEQ ID NO: 2949575 - RNA, 23 nt, Human
uguaauuaugguuaguagaggua

SEQ ID NO: 2949576 - RNA, 23 nt, Human
uguaauuaaguacuauguaucaa

SEQ ID NO: 2949577 - RNA, 22 nt, Human
uguccuaaugcuugcugcugau

SEQ ID NO: 2949578 - RNA, 16 nt, Human
uguccuacccacccuc

SEQ ID NO: 2949579 - RNA, 14 nt, Human
uguccgagcuuuga

SEQ ID NO: 2949580 - RNA, 13 nt, Human
uguccgagcuuug

SEQ ID NO: 2949581 - RNA, 17 nt, Human
ugucccuuuuccuuuuu

SEQ ID NO: 2949582 - RNA, 15 nt, Human
ugucgggcaugacac

SEQ ID NO: 2949583 - RNA, 14 nt, Human
ugucgggcaugaca

SEQ ID NO: 2949584 - RNA, 14 nt, Human
ugucgcccagucug

SEQ ID NO: 2949585 - RNA, 15 nt, Human
ugucgcccagucugg

SEQ ID NO: 2949586 - RNA, 12 nt, Human
ugucgggcauga

SEQ ID NO: 2949587 - RNA, 22 nt, Human
agucagaaguuucugccgcagc

SEQ ID NO: 2949588 - RNA, 23 nt, Human
agucagacuggauaguccgucuc

SEQ ID NO: 2949589 - RNA, 16 nt, Human
agucaggaaagagaac

SEQ ID NO: 2949590 - RNA, 15 nt, Human
agucaggaaagagaa

SEQ ID NO: 2949591 - RNA, 16 nt, Human
agucucacuguugccc

SEQ ID NO: 2949592 - RNA, 17 nt, Human
agucucacuguugccca

SEQ ID NO: 2949593 - RNA, 23 nt, Human
aguccgaaagggacuuggaagcu

SEQ ID NO: 2949594 - RNA, 12 nt, Human
agucccugccaa

SEQ ID NO: 2949595 - RNA, 16 nt, Human
ugucagcugaaccugg

SEQ ID NO: 2949596 - RNA, 18 nt, Human
agucacugagacagcccg

SEQ ID NO: 2949597 - RNA, 19 nt, Human
agucacugagacagcccgg

SEQ ID NO: 2949598 - RNA, 19 nt, Human
ugucagcugaaccugggua

SEQ ID NO: 2949599 - RNA, 16 nt, Human
ugucagguggggcagc

SEQ ID NO: 2949600 - RNA, 15 nt, Human
ugucaguauuucaac

SEQ ID NO: 2949601 - RNA, 23 nt, Human
ugucauuugcuggagcucugccc

SEQ ID NO: 2949602 - RNA, 13 nt, Human
aguauuucuauga

SEQ ID NO: 2949603 - RNA, 15 nt, Human
aguauuucuaugaaa

SEQ ID NO: 2949604 - RNA, 13 nt, Human
agucaccaagccc

SEQ ID NO: 2949605 - RNA, 14 nt, Human
agucaccaagccca

SEQ ID NO: 2949606 - RNA, 19 nt, Human
agucacauuccugaacagg

SEQ ID NO: 2949607 - RNA, 18 nt, Human
agucacauuccugaacag

SEQ ID NO: 2949608 - RNA, 20 nt, Human
agucacauuccugaacagga

SEQ ID NO: 2949609 - RNA, 22 nt, Human
aguauuucuaugaaauauuaug

SEQ ID NO: 2949610 - RNA, 16 nt, Human
aguaggaagacuuugg

SEQ ID NO: 2949611 - RNA, 20 nt, Human
ugucaaucagccuaguugau

SEQ ID NO: 2949612 - RNA, 22 nt, Human
aguaggaagacuuuggaaagac

SEQ ID NO: 2949613 - RNA, 19 nt, Human
aguaggaagacuuuggaaa

SEQ ID NO: 2949614 - RNA, 18 nt, Human
aguaggaagacuuuggaa

SEQ ID NO: 2949615 - RNA, 17 nt, Human
aguaggaagacuuugga

SEQ ID NO: 2949616 - RNA, 14 nt, Human
uguauuuuugucaa

SEQ ID NO: 2949617 - RNA, 16 nt, Human
uguauuuuugucaauu

SEQ ID NO: 2949618 - RNA, 20 nt, Human
uguauuuuugucaauuacca

SEQ ID NO: 2949619 - RNA, 14 nt, Human
uguauuuuuuuacu

SEQ ID NO: 2949620 - RNA, 19 nt, Human
ugucaagagggucugagga

SEQ ID NO: 2949621 - RNA, 15 nt, Human
ugucaagccauaauu

SEQ ID NO: 2949622 - RNA, 21 nt, Human
ugucaauaaaauccauacauu

SEQ ID NO: 2949623 - RNA, 23 nt, Human
agggcuucugccauuucugagau

SEQ ID NO: 2949624 - RNA, 19 nt, Human
ugggcucccuucccaccuc

SEQ ID NO: 2949625 - RNA, 18 nt, Human
ugggcucccuucccaccu

SEQ ID NO: 2949626 - RNA, 20 nt, Human
ugggcucccuucccaccucu

SEQ ID NO: 2949627 - RNA, 15 nt, Human
uggggaccagagcug

SEQ ID NO: 2949628 - RNA, 14 nt, Human
uggggaccagagcu

SEQ ID NO: 2949629 - RNA, 13 nt, Human
uggggaccucagg

SEQ ID NO: 2949630 - RNA, 18 nt, Human
uggggaccagagcugcca

SEQ ID NO: 2949631 - RNA, 17 nt, Human
uggggaccagagcugcc

SEQ ID NO: 2949632 - RNA, 19 nt, Human
ugggcuggguucuacccag

SEQ ID NO: 2949633 - RNA, 18 nt, Human
ugggcuggguucuaccca

SEQ ID NO: 2949634 - RNA, 14 nt, Human
uggggaaugaagau

SEQ ID NO: 2949635 - RNA, 15 nt, Human
uggggaaugaagaua

SEQ ID NO: 2949636 - RNA, 20 nt, Human
uggggcugcaccggcuggcc

SEQ ID NO: 2949637 - RNA, 14 nt, Human
ugggguacccacug

SEQ ID NO: 2949638 - RNA, 18 nt, Human
uggggucacucuggcagc

SEQ ID NO: 2949639 - RNA, 17 nt, Human
uggggucacucuggcag

SEQ ID NO: 2949640 - RNA, 15 nt, Human
ugggguacccacugc

SEQ ID NO: 2949641 - RNA, 16 nt, Human
ugggguacccacugcu

SEQ ID NO: 2949642 - RNA, 20 nt, Human
ugggguacccacugcucugg

SEQ ID NO: 2949643 - RNA, 16 nt, Human
uggggcccugccuccu

SEQ ID NO: 2949644 - RNA, 15 nt, Human
uggggcccugccucc

SEQ ID NO: 2949645 - RNA, 18 nt, Human
uggggcggugagagggga

SEQ ID NO: 2949646 - RNA, 23 nt, Human
uggggaccucaggccugggggcu

SEQ ID NO: 2949647 - RNA, 12 nt, Human
uggggagaaagu

SEQ ID NO: 2949648 - RNA, 14 nt, Human
uggggcccugccuc

SEQ ID NO: 2949649 - RNA, 20 nt, Human
ugggcccaaugcacuuuguu

SEQ ID NO: 2949650 - RNA, 16 nt, Human
ugggccaggagccucc

SEQ ID NO: 2949651 - RNA, 14 nt, Human
ugggccaggagccu

SEQ ID NO: 2949652 - RNA, 13 nt, Human
ugggccaggagcc

SEQ ID NO: 2949653 - RNA, 16 nt, Human
ugggccaccgccuugc

SEQ ID NO: 2949654 - RNA, 17 nt, Human
ugggccaccgccuugcc

SEQ ID NO: 2949655 - RNA, 23 nt, Human
ugggccaccgccuugcccagccu

SEQ ID NO: 2949656 - RNA, 20 nt, Human
ugggcacaucauuucaagaa

SEQ ID NO: 2949657 - RNA, 15 nt, Human
ugggcacaucauuuc

SEQ ID NO: 2949658 - RNA, 17 nt, Human
ugggcaacccccagccu

SEQ ID NO: 2949659 - RNA, 20 nt, Human
ugggcaacccccagccugcu

SEQ ID NO: 2949660 - RNA, 19 nt, Human
aggccuuccccuggcacug

SEQ ID NO: 2949661 - RNA, 17 nt, Human
aggccuuccccuggcac

SEQ ID NO: 2949662 - RNA, 17 nt, Human
ugggaggucaaggcugc

SEQ ID NO: 2949663 - RNA, 23 nt, Human
ugggaggucaaggcugcagugag

SEQ ID NO: 2949664 - RNA, 20 nt, Human
ugggaggucaaggcugcagu

SEQ ID NO: 2949665 - RNA, 19 nt, Human
ugggaggucaaggcugcag

SEQ ID NO: 2949666 - RNA, 18 nt, Human
ugggaggucaaggcugca

SEQ ID NO: 2949667 - RNA, 15 nt, Human
ugggagguuaaaaag

SEQ ID NO: 2949668 - RNA, 16 nt, Human
ugggcaacccccagcc

SEQ ID NO: 2949669 - RNA, 17 nt, Human
agggaggugaccccagg

SEQ ID NO: 2949670 - RNA, 17 nt, Human
agggagugacagaggca

SEQ ID NO: 2949671 - RNA, 18 nt, Human
agggagugacagaggcag

SEQ ID NO: 2949672 - RNA, 19 nt, Human
agggagugacagaggcagc

SEQ ID NO: 2949673 - RNA, 15 nt, Human
agggagggcuucugc

SEQ ID NO: 2949674 - RNA, 23 nt, Human
agggcccagagaggguggugacc

SEQ ID NO: 2949675 - RNA, 18 nt, Human
agggcccagagagggugg

SEQ ID NO: 2949676 - RNA, 17 nt, Human
agggcagggacaggaua

SEQ ID NO: 2949677 - RNA, 15 nt, Human
uggucccaccccaca

SEQ ID NO: 2949678 - RNA, 14 nt, Human
uggucccaccccac

SEQ ID NO: 2949679 - RNA, 18 nt, Human
uggucaccaaaucagcug

SEQ ID NO: 2949680 - RNA, 22 nt, Human
uggucagauuugaacucuucaa

SEQ ID NO: 2949681 - RNA, 17 nt, Human
uggucucaaacucuuga

SEQ ID NO: 2949682 - RNA, 23 nt, Human
uggucucaaacucuugaccucag

SEQ ID NO: 2949683 - RNA, 13 nt, Human
uggucccacccca

SEQ ID NO: 2949684 - RNA, 16 nt, Human
uggucucaaacucuug

SEQ ID NO: 2949685 - RNA, 16 nt, Human
uggucccaccccacac

SEQ ID NO: 2949686 - RNA, 16 nt, Human
uggucugacccacugc

SEQ ID NO: 2949687 - RNA, 17 nt, Human
uggucugacccacugcu

SEQ ID NO: 2949688 - RNA, 21 nt, Human
aggguggugaccucugccuga

SEQ ID NO: 2949689 - RNA, 22 nt, Human
aggguguccggucccuguccca

SEQ ID NO: 2949690 - RNA, 13 nt, Human
aggguuauaauaa

SEQ ID NO: 2949691 - RNA, 12 nt, Human
aggucagagccu

SEQ ID NO: 2949692 - RNA, 17 nt, Human
aggucauuuuuuuuaag

SEQ ID NO: 2949693 - RNA, 20 nt, Human
aggucauuuuuuuuaagaaa

SEQ ID NO: 2949694 - RNA, 23 nt, Human
agguagaaauaucugaaaaugua

SEQ ID NO: 2949695 - RNA, 17 nt, Human
agguagaauguuuucaa

SEQ ID NO: 2949696 - RNA, 21 nt, Human
agguaugcaaucaaaucugcu

SEQ ID NO: 2949697 - RNA, 18 nt, Human
aggguuggccccugcccg

SEQ ID NO: 2949698 - RNA, 23 nt, Human
aggguuggccccugcccggcugc

SEQ ID NO: 2949699 - RNA, 17 nt, Human
aggguuggccccugccc

SEQ ID NO: 2949700 - RNA, 23 nt, Human
agguacuucaaauccuugaagau

SEQ ID NO: 2949701 - RNA, 17 nt, Human
agguagaaauaucugaa

SEQ ID NO: 2949702 - RNA, 19 nt, Human
agguagaaauaucugaaaa

SEQ ID NO: 2949703 - RNA, 24 nt, Human
agggguucccuuuuuuggcugcug

SEQ ID NO: 2949704 - RNA, 21 nt, Human
agggucucacuauguugccca

SEQ ID NO: 2949705 - RNA, 22 nt, Human
agggucucacuauguugcccag

SEQ ID NO: 2949706 - RNA, 23 nt, Human
agggucucacuauguugcccagg

SEQ ID NO: 2949707 - RNA, 15 nt, Human
aggggguggccuccc

SEQ ID NO: 2949708 - RNA, 18 nt, Human
aggggguggccucccaac

SEQ ID NO: 2949709 - RNA, 17 nt, Human
aggggguggccucccaa

SEQ ID NO: 2949710 - RNA, 22 nt, Human
aggggugggacacccugugaug

SEQ ID NO: 2949711 - RNA, 20 nt, Human
aggggugggacacccuguga

SEQ ID NO: 2949712 - RNA, 19 nt, Human
uggggucacucuggcagcu

SEQ ID NO: 2949713 - RNA, 20 nt, Human
uggggucacucuggcagcuc

SEQ ID NO: 2949714 - RNA, 23 nt, Human
aggggagcaaaaucgaugcagug

SEQ ID NO: 2949715 - RNA, 22 nt, Human
aggguggccacaccucuauccc

SEQ ID NO: 2949716 - RNA, 22 nt, Human
agggucucacucugucgcccag

SEQ ID NO: 2949717 - RNA, 21 nt, Human
agggucucacucugucgccca

SEQ ID NO: 2949718 - RNA, 22 nt, Human
uggguggcaccagcagccugga

SEQ ID NO: 2949719 - RNA, 22 nt, Human
ugggugcuuggaggaaggaaac

SEQ ID NO: 2949720 - RNA, 19 nt, Human
ugggugcuuggaggaagga

SEQ ID NO: 2949721 - RNA, 15 nt, Human
ugggugcuuggagga

SEQ ID NO: 2949722 - RNA, 16 nt, Human
ugguacuaacuuuccu

SEQ ID NO: 2949723 - RNA, 20 nt, Human
ugguaaggggaauugaggac

SEQ ID NO: 2949724 - RNA, 14 nt, Human
agugcaaauuguca

SEQ ID NO: 2949725 - RNA, 18 nt, Human
agugcaaauugucacagg

SEQ ID NO: 2949726 - RNA, 21 nt, Human
agugcaaauugucacaggaca

SEQ ID NO: 2949727 - RNA, 16 nt, Human
agugagucgaggacag

SEQ ID NO: 2949728 - RNA, 22 nt, Human
agugauucuccugccucagccu

SEQ ID NO: 2949729 - RNA, 24 nt, Human
agugauucuccugccucagccucc

SEQ ID NO: 2949730 - RNA, 21 nt, Human
agugccaaagaagcagaccau

SEQ ID NO: 2949731 - RNA, 16 nt, Human
agugccaaaaacaaca

SEQ ID NO: 2949732 - RNA, 14 nt, Human
agugcccacaggau

SEQ ID NO: 2949733 - RNA, 15 nt, Human
agugcaguauagaau

SEQ ID NO: 2949734 - RNA, 14 nt, Human
agugcaguauagaa

SEQ ID NO: 2949735 - RNA, 22 nt, Human
ugugcucugaucauccacugug

SEQ ID NO: 2949736 - RNA, 12 nt, Human
ugugcucugauc

SEQ ID NO: 2949737 - RNA, 23 nt, Human
ugugcucugaucauccacugugc

SEQ ID NO: 2949738 - RNA, 15 nt, Human
ugugcucuggacagg

SEQ ID NO: 2949739 - RNA, 20 nt, Human
agucucacuguugcccaggc

SEQ ID NO: 2949740 - RNA, 18 nt, Human
agucucacuguugcccag

SEQ ID NO: 2949741 - RNA, 19 nt, Human
agucucacuguugcccagg

SEQ ID NO: 2949742 - RNA, 20 nt, Human
ugugcccuaaaguguauuuu

SEQ ID NO: 2949743 - RNA, 21 nt, Human
ugugcccuaaaguguauuuuu

SEQ ID NO: 2949744 - RNA, 15 nt, Human
ugugcugcccugccc

SEQ ID NO: 2949745 - RNA, 14 nt, Human
ugugcugcccugcc

SEQ ID NO: 2949746 - RNA, 13 nt, Human
ugugcugcccugc

SEQ ID NO: 2949747 - RNA, 12 nt, Human
ugugcugcccug

SEQ ID NO: 2949748 - RNA, 19 nt, Human
ugugcucuggacaggcaug

SEQ ID NO: 2949749 - RNA, 16 nt, Human
ugugcucuggacaggc

SEQ ID NO: 2949750 - RNA, 18 nt, Human
ugugcucuggacaggcau

SEQ ID NO: 2949751 - RNA, 21 nt, Human
uguuaacauggacaugaucuu

SEQ ID NO: 2949752 - RNA, 11 nt, Human
aguggaaaaau

SEQ ID NO: 2949753 - RNA, 19 nt, Human
aguggaaaaauagccugcc

SEQ ID NO: 2949754 - RNA, 18 nt, Human
aguggaaaaauagccugc

SEQ ID NO: 2949755 - RNA, 22 nt, Human
agugcuuuaccaauugaaguaa

SEQ ID NO: 2949756 - RNA, 19 nt, Human
uguuaaugauagcuacugu

SEQ ID NO: 2949757 - RNA, 16 nt, Human
ugugucucuugguccu

SEQ ID NO: 2949758 - RNA, 13 nt, Human
ugugucucuuggu

SEQ ID NO: 2949759 - RNA, 17 nt, Human
ugugucagguggggcag

SEQ ID NO: 2949760 - RNA, 19 nt, Human
ugugucagguggggcagcu

SEQ ID NO: 2949761 - RNA, 23 nt, Human
uguguuaucacccagaagaaaau

SEQ ID NO: 2949762 - RNA, 14 nt, Human
uguguuaugaagca

SEQ ID NO: 2949763 - RNA, 16 nt, Human
agugcuuccaaggaug

SEQ ID NO: 2949764 - RNA, 20 nt, Human
agugcuuggcccaggaguuu

SEQ ID NO: 2949765 - RNA, 16 nt, Human
uguggucccaccccac

SEQ ID NO: 2949766 - RNA, 19 nt, Human
agugcuuggcccaggaguu

SEQ ID NO: 2949767 - RNA, 18 nt, Human
agugcuuggcccaggagu

SEQ ID NO: 2949768 - RNA, 16 nt, Human
agugcuuggcccagga

SEQ ID NO: 2949769 - RNA, 15 nt, Human
agugcuuggcccagg

SEQ ID NO: 2949770 - RNA, 14 nt, Human
agugcuuggcccag

SEQ ID NO: 2949771 - RNA, 12 nt, Human
agugcuuggccc

SEQ ID NO: 2949772 - RNA, 20 nt, Human
ugugguuauaacuuaaugaa

SEQ ID NO: 2949773 - RNA, 23 nt, Human
ugugguuauaacuuaaugaaaac

SEQ ID NO: 2949774 - RNA, 12 nt, Human
ugugguuucauu

SEQ ID NO: 2949775 - RNA, 19 nt, Human
ugugucagcauagaaguaa

SEQ ID NO: 2949776 - RNA, 20 nt, Human
ugugguguuuccuggcacug

SEQ ID NO: 2949777 - RNA, 20 nt, Human
agugcugggauuacaagcgu

SEQ ID NO: 2949778 - RNA, 22 nt, Human
agugcugcauuuaaaagauaca

SEQ ID NO: 2949779 - RNA, 19 nt, Human
agugcugggauuacaggug

SEQ ID NO: 2949780 - RNA, 22 nt, Human
agugccucucccugcugcuccu

SEQ ID NO: 2949781 - RNA, 23 nt, Human
agugccucucccugcugcuccua

SEQ ID NO: 2949782 - RNA, 19 nt, Human
agugccucucccugcugcu

SEQ ID NO: 2949783 - RNA, 20 nt, Human
agugccucucccugcugcuc

SEQ ID NO: 2949784 - RNA, 21 nt, Human
agugccuguaaucacagcuac

SEQ ID NO: 2949785 - RNA, 15 nt, Human
agugccuuacacaau

SEQ ID NO: 2949786 - RNA, 17 nt, Human
agugccuuacacaaugg

SEQ ID NO: 2949787 - RNA, 20 nt, Human
agugcugcauuuaaaagaua

SEQ ID NO: 2949788 - RNA, 17 nt, Human
aguguuggagaagaacu

SEQ ID NO: 2949789 - RNA, 18 nt, Human
aguguuggagaagaacug

SEQ ID NO: 2949790 - RNA, 14 nt, Human
aguguuggagaaga

SEQ ID NO: 2949791 - RNA, 16 nt, Human
aguguuggagaagaac

SEQ ID NO: 2949792 - RNA, 16 nt, Human
aguuacugaacaguaa

SEQ ID NO: 2949793 - RNA, 15 nt, Human
uguugcccaggcugg

SEQ ID NO: 2949794 - RNA, 13 nt, Human
uguugcccaggcu

SEQ ID NO: 2949795 - RNA, 19 nt, Human
uguucuuucacccuuuucu

SEQ ID NO: 2949796 - RNA, 20 nt, Human
uguucuugguuuguaaauua

SEQ ID NO: 2949797 - RNA, 22 nt, Human
uguucuugguuuguaaauuaac

SEQ ID NO: 2949798 - RNA, 15 nt, Human
aguggaguuacugaa

SEQ ID NO: 2949799 - RNA, 18 nt, Human
uguucuuaguuugcaguu

SEQ ID NO: 2949800 - RNA, 18 nt, Human
uguucuagcauggcugcc

SEQ ID NO: 2949801 - RNA, 19 nt, Human
uguuauuuauugaaaugau

SEQ ID NO: 2949802 - RNA, 18 nt, Human
uguuauuuauugaaauga

SEQ ID NO: 2949803 - RNA, 17 nt, Human
uguuauuuauugaaaug

SEQ ID NO: 2949804 - RNA, 15 nt, Human
uguuauuuauugaaa

SEQ ID NO: 2949805 - RNA, 13 nt, Human
uguuauuuauuga

SEQ ID NO: 2949806 - RNA, 23 nt, Human
aguuccucauuagcauuuugcua

SEQ ID NO: 2949807 - RNA, 24 nt, Human
aguucaaucuggauucauauuuaa

SEQ ID NO: 2949808 - RNA, 16 nt, Human
aguucaauucucauuu

SEQ ID NO: 2949809 - RNA, 23 nt, Human
aguucuauuuauuugugagacug

SEQ ID NO: 2949810 - RNA, 13 nt, Human
aguucuaguguuu

SEQ ID NO: 2949811 - RNA, 19 nt, Human
aguucggugagcuacaaau

SEQ ID NO: 2949812 - RNA, 13 nt, Human
uguugucugcaac

SEQ ID NO: 2949813 - RNA, 16 nt, Human
uguugucugcaacucu

SEQ ID NO: 2949814 - RNA, 20 nt, Human
uguuuagauaauacaccacu

SEQ ID NO: 2949815 - RNA, 20 nt, Human
uguuuagaugaaugucaguu

SEQ ID NO: 2949816 - RNA, 15 nt, Human
uguuuagaugaaugu

SEQ ID NO: 2949817 - RNA, 14 nt, Human
uguuuauugucaaa

SEQ ID NO: 2949818 - RNA, 15 nt, Human
uguuuaugagaaacu

SEQ ID NO: 2949819 - RNA, 18 nt, Human
uuagccaagugugguaga

SEQ ID NO: 2949820 - RNA, 14 nt, Human
uuagcggagacgga

SEQ ID NO: 2949821 - RNA, 18 nt, Human
uuagcaaauucuguuuuu

SEQ ID NO: 2949822 - RNA, 15 nt, Human
uuaguuucuccaagc

SEQ ID NO: 2949823 - RNA, 22 nt, Human
uuaguuugcaguuacacuaaaa

SEQ ID NO: 2949824 - RNA, 12 nt, Human
uuagguugugaa

SEQ ID NO: 2949825 - RNA, 13 nt, Human
uuagguugugaau

SEQ ID NO: 2949826 - RNA, 17 nt, Human
uuagguugugaaugcag

SEQ ID NO: 2949827 - RNA, 18 nt, Human
uuagguuggcaaaaaggc

SEQ ID NO: 2949828 - RNA, 21 nt, Human
uuaggugugacugaauuucuu

SEQ ID NO: 2949829 - RNA, 16 nt, Human
uuaggugaggaagcaa

SEQ ID NO: 2949830 - RNA, 16 nt, Human
uuaggugugacugaau

SEQ ID NO: 2949831 - RNA, 20 nt, Human
uuagggaaggauacaaaagc

SEQ ID NO: 2949832 - RNA, 15 nt, Human
uuaggugaggaagca

SEQ ID NO: 2949833 - RNA, 12 nt, Human
auaauacaccac

SEQ ID NO: 2949834 - RNA, 18 nt, Human
auaauacaccacuacauu

SEQ ID NO: 2949835 - RNA, 20 nt, Human
auaauacaccacuacauucu

SEQ ID NO: 2949836 - RNA, 15 nt, Human
auaaugcgugcauac

SEQ ID NO: 2949837 - RNA, 15 nt, Human
auaaugaaugaaaca

SEQ ID NO: 2949838 - RNA, 22 nt, Human
auaauugacaggauuauuggaa

SEQ ID NO: 2949839 - RNA, 19 nt, Human
auaaucucugauucccuga

SEQ ID NO: 2949840 - RNA, 23 nt, Human
auaaucucugauucccugauuua

SEQ ID NO: 2949841 - RNA, 14 nt, Human
auaaucucugauuc

SEQ ID NO: 2949842 - RNA, 18 nt, Human
auaauccuaaacauauga

SEQ ID NO: 2949843 - RNA, 23 nt, Human
uuacugaacaguaacauagcugu

SEQ ID NO: 2949844 - RNA, 15 nt, Human
uuacugaacaguaac

SEQ ID NO: 2949845 - RNA, 13 nt, Human
uuagacagagucu

SEQ ID NO: 2949846 - RNA, 20 nt, Human
uuagacagagucucacuguu

SEQ ID NO: 2949847 - RNA, 13 nt, Human
uuagacagucccu

SEQ ID NO: 2949848 - RNA, 15 nt, Human
auaacuuaaugaaaa

SEQ ID NO: 2949849 - RNA, 16 nt, Human
auaacuuaaugaaaac

SEQ ID NO: 2949850 - RNA, 18 nt, Human
auaacuuaaugaaaacaa

SEQ ID NO: 2949851 - RNA, 19 nt, Human
auaacuuaaugaaaacaau

SEQ ID NO: 2949852 - RNA, 23 nt, Human
auaacuuaaugaaaacaaugcag

SEQ ID NO: 2949853 - RNA, 19 nt, Human
uuacccucauguucuuaau

SEQ ID NO: 2949854 - RNA, 15 nt, Human
auaaauaguuuauga

SEQ ID NO: 2949855 - RNA, 14 nt, Human
auaaauaaaaauaa

SEQ ID NO: 2949856 - RNA, 13 nt, Human
uuaauugggcacu

SEQ ID NO: 2949857 - RNA, 18 nt, Human
uuaauugggcacuauuua

SEQ ID NO: 2949858 - RNA, 13 nt, Human
auaaauaaaaaua

SEQ ID NO: 2949859 - RNA, 11 nt, Human
auaaauuauuu

SEQ ID NO: 2949860 - RNA, 22 nt, Human
auaacgauaaaagacagugaaa

SEQ ID NO: 2949861 - RNA, 16 nt, Human
uuaaauagaugacauu

SEQ ID NO: 2949862 - RNA, 14 nt, Human
uuaaauagaugaca

SEQ ID NO: 2949863 - RNA, 13 nt, Human
uuaaauagaugac

SEQ ID NO: 2949864 - RNA, 13 nt, Human
uuaaauaauguga

SEQ ID NO: 2949865 - RNA, 16 nt, Human
uuaaauaaugugaaac

SEQ ID NO: 2949866 - RNA, 18 nt, Human
uuaaauaaugugaaacug

SEQ ID NO: 2949867 - RNA, 20 nt, Human
uuaacagaaauguacagcaa

SEQ ID NO: 2949868 - RNA, 19 nt, Human
uuaacagaaauguacagca

SEQ ID NO: 2949869 - RNA, 16 nt, Human
uuaacagaaauguaca

SEQ ID NO: 2949870 - RNA, 22 nt, Human
uuaaacauauccaaguuugaau

SEQ ID NO: 2949871 - RNA, 21 nt, Human
uuaaacaugcuguacauacuu

SEQ ID NO: 2949872 - RNA, 22 nt, Human
uuaaacaugcuguacauacuuu

SEQ ID NO: 2949873 - RNA, 23 nt, Human
uuaaacaugcuguacauacuuuu

SEQ ID NO: 2949874 - RNA, 19 nt, Human
uuaaacaugcuguacauac

SEQ ID NO: 2949875 - RNA, 15 nt, Human
uuaaauaaugugaaa

SEQ ID NO: 2949876 - RNA, 14 nt, Human
uuaaacacauuaaa

SEQ ID NO: 2949877 - RNA, 16 nt, Human
uuaaaaaucucaaauu

SEQ ID NO: 2949878 - RNA, 14 nt, Human
uuaaaaaucucaaa

SEQ ID NO: 2949879 - RNA, 15 nt, Human
uuaaaaaucucaaau

SEQ ID NO: 2949880 - RNA, 13 nt, Human
uuaaaaaaaaucc

SEQ ID NO: 2949881 - RNA, 17 nt, Human
aguuggucccccuucca

SEQ ID NO: 2949882 - RNA, 13 nt, Human
aguuggucccccu

SEQ ID NO: 2949883 - RNA, 11 nt, Human
aguuggucccc

SEQ ID NO: 2949884 - RNA, 14 nt, Human
aguuuaaauuguaa

SEQ ID NO: 2949885 - RNA, 13 nt, Human
aguugggcuuccu

SEQ ID NO: 2949886 - RNA, 19 nt, Human
aguugggcuuccucauagu

SEQ ID NO: 2949887 - RNA, 23 nt, Human
aguugccagucaccccggccacc

SEQ ID NO: 2949888 - RNA, 13 nt, Human
uguuucaaacaua

SEQ ID NO: 2949889 - RNA, 13 nt, Human
uuaaggguaugau

SEQ ID NO: 2949890 - RNA, 9 nt, Human
uuaaggugg

SEQ ID NO: 2949891 - RNA, 19 nt, Human
uuaagaacuaaaauguucu

SEQ ID NO: 2949892 - RNA, 16 nt, Human
uuaagaacuaaaaugu

SEQ ID NO: 2949893 - RNA, 20 nt, Human
uuaagaacuaaaauguucua

SEQ ID NO: 2949894 - RNA, 22 nt, Human
uuaagaaagacuaucuaaaugu

SEQ ID NO: 2949895 - RNA, 14 nt, Human
uuaagugcugcauu

SEQ ID NO: 2949896 - RNA, 19 nt, Human
uuaagugcugcauuuaaaa

SEQ ID NO: 2949897 - RNA, 15 nt, Human
uuaagugcugcauuu

SEQ ID NO: 2949898 - RNA, 16 nt, Human
uuaagugcugcauuua

SEQ ID NO: 2949899 - RNA, 22 nt, Human
uuaaucauuaggugugacugaa

SEQ ID NO: 2949900 - RNA, 23 nt, Human
uuaaucauuaggugugacugaau

SEQ ID NO: 2949901 - RNA, 13 nt, Human
uuaaucauuaggu

SEQ ID NO: 2949902 - RNA, 19 nt, Human
uuaaugaaagacuguacaa

SEQ ID NO: 2949903 - RNA, 22 nt, Human
uuaaucugguuuauuuuuguuc

SEQ ID NO: 2949904 - RNA, 18 nt, Human
uuaaugaaagacuguaca

SEQ ID NO: 2949905 - RNA, 12 nt, Human
auaaaauaauuu

SEQ ID NO: 2949906 - RNA, 21 nt, Human
uuaagaaaaaggaugcacaga

SEQ ID NO: 2949907 - RNA, 19 nt, Human
uuaagaaaaaggaugcaca

SEQ ID NO: 2949908 - RNA, 20 nt, Human
uuaagaaaaaggaugcacag

SEQ ID NO: 2949909 - RNA, 22 nt, Human
auaaaauaauuuuuauauuuga

SEQ ID NO: 2949910 - RNA, 23 nt, Human
aguuuuuauggcuuuugugcauu

SEQ ID NO: 2949911 - RNA, 18 nt, Human
aguuuucugagaaagacu

SEQ ID NO: 2949912 - RNA, 19 nt, Human
aguuuucugagaaagacua

SEQ ID NO: 2949913 - RNA, 18 nt, Human
aguuuugaagauucuaug

SEQ ID NO: 2949914 - RNA, 17 nt, Human
aguuuugaagauucuau

SEQ ID NO: 2949915 - RNA, 23 nt, Human
aguuuucugagaaagacuauuca

SEQ ID NO: 2949916 - RNA, 16 nt, Human
auuaaaagaauauuuu

SEQ ID NO: 2949917 - RNA, 15 nt, Human
auuaaaagaauauuu

SEQ ID NO: 2949918 - RNA, 17 nt, Human
auguuuuucuucucccu

SEQ ID NO: 2949919 - RNA, 18 nt, Human
auguuuuucuucucccuc

SEQ ID NO: 2949920 - RNA, 19 nt, Human
uuuucucacagaagaugaa

SEQ ID NO: 2949921 - RNA, 20 nt, Human
auguuuauuuaaaagagcag

SEQ ID NO: 2949922 - RNA, 18 nt, Human
auguuucaaacauauaua

SEQ ID NO: 2949923 - RNA, 14 nt, Human
auguuuuccaugag

SEQ ID NO: 2949924 - RNA, 13 nt, Human
auuaaagugccca

SEQ ID NO: 2949925 - RNA, 17 nt, Human
auuaaacuuaaucuaaa

SEQ ID NO: 2949926 - RNA, 16 nt, Human
auuaaacuuaaucuaa

SEQ ID NO: 2949927 - RNA, 19 nt, Human
auuaaacuuaaucuaaaug

SEQ ID NO: 2949928 - RNA, 21 nt, Human
auuaaacuuaaucuaaaugga

SEQ ID NO: 2949929 - RNA, 20 nt, Human
auuaaccacuucagcugacu

SEQ ID NO: 2949930 - RNA, 18 nt, Human
auuaaccacuucagcuga

SEQ ID NO: 2949931 - RNA, 17 nt, Human
auuaaccacuucagcug

SEQ ID NO: 2949932 - RNA, 13 nt, Human
auuaagaaagacu

SEQ ID NO: 2949933 - RNA, 14 nt, Human
auuaagaaagacua

SEQ ID NO: 2949934 - RNA, 23 nt, Human
auuaacuuuuauaaacuuuaccu

SEQ ID NO: 2949935 - RNA, 12 nt, Human
auuaacuuuuau

SEQ ID NO: 2949936 - RNA, 16 nt, Human
auuaacuuuuauaaac

SEQ ID NO: 2949937 - RNA, 17 nt, Human
auuaacuuuuauaaacu

SEQ ID NO: 2949938 - RNA, 19 nt, Human
auuaacuuuuauaaacuuu

SEQ ID NO: 2949939 - RNA, 20 nt, Human
auuaacuuuuauaaacuuua

SEQ ID NO: 2949940 - RNA, 12 nt, Human
uuuuauaaacuu

SEQ ID NO: 2949941 - RNA, 13 nt, Human
uuuuauaaacuuu

SEQ ID NO: 2949942 - RNA, 23 nt, Human
uuuuagaguugauacuacaguuu

SEQ ID NO: 2949943 - RNA, 16 nt, Human
auguuggccaggcugg

SEQ ID NO: 2949944 - RNA, 13 nt, Human
auguuggccaggc

SEQ ID NO: 2949945 - RNA, 14 nt, Human
auguuggccaggcu

SEQ ID NO: 2949946 - RNA, 21 nt, Human
uuuuaagugcugcauuuaaaa

SEQ ID NO: 2949947 - RNA, 16 nt, Human
uuuuaagugcugcauu

SEQ ID NO: 2949948 - RNA, 17 nt, Human
uuuuaagugcugcauuu

SEQ ID NO: 2949949 - RNA, 21 nt, Human
auguucaucauccuaagcuau

SEQ ID NO: 2949950 - RNA, 19 nt, Human
auguucaucaaugaaugaa

SEQ ID NO: 2949951 - RNA, 15 nt, Human
auguugacaugggac

SEQ ID NO: 2949952 - RNA, 23 nt, Human
uuuuccaguaaugagcuuaagaa

SEQ ID NO: 2949953 - RNA, 19 nt, Human
uuuuccagguuuaagcugu

SEQ ID NO: 2949954 - RNA, 16 nt, Human
uuuucuauaauuuaaa

SEQ ID NO: 2949955 - RNA, 15 nt, Human
uuuuauuauuaacaa

SEQ ID NO: 2949956 - RNA, 19 nt, Human
uuuuauaaacuuuaccuuu

SEQ ID NO: 2949957 - RNA, 14 nt, Human
uuuuauaaacuuua

SEQ ID NO: 2949958 - RNA, 17 nt, Human
uuuuauaaacuuuaccu

SEQ ID NO: 2949959 - RNA, 14 nt, Human
uuuuauaauuuugu

SEQ ID NO: 2949960 - RNA, 19 nt, Human
uuuuauggcacuaguauuu

SEQ ID NO: 2949961 - RNA, 23 nt, Human
uuuuauggaggcuuugcauagau

SEQ ID NO: 2949962 - RNA, 23 nt, Human
uuuguaacuguuuagaugaaugu

SEQ ID NO: 2949963 - RNA, 22 nt, Human
uuuguaacuguuuagaugaaug

SEQ ID NO: 2949964 - RNA, 13 nt, Human
uuuguagagccag

SEQ ID NO: 2949965 - RNA, 19 nt, Human
uuugugaggaagccgcugg

SEQ ID NO: 2949966 - RNA, 18 nt, Human
uuugugaggaagccgcug

SEQ ID NO: 2949967 - RNA, 12 nt, Human
uuuguuugaacu

SEQ ID NO: 2949968 - RNA, 13 nt, Human
uuuguuugaacug

SEQ ID NO: 2949969 - RNA, 14 nt, Human
uuuguuugaacuga

SEQ ID NO: 2949970 - RNA, 17 nt, Human
uuuguagaagucacauu

SEQ ID NO: 2949971 - RNA, 22 nt, Human
uuuuaagggcccuuuuucaaua

SEQ ID NO: 2949972 - RNA, 15 nt, Human
uuuuaagugcugcau

SEQ ID NO: 2949973 - RNA, 17 nt, Human
uuuuaagacuuugguua

SEQ ID NO: 2949974 - RNA, 16 nt, Human
uuuuaagaggcagggu

SEQ ID NO: 2949975 - RNA, 15 nt, Human
uuuuaagaggcaggg

SEQ ID NO: 2949976 - RNA, 21 nt, Human
uuuuaaaaaacugcugacugu

SEQ ID NO: 2949977 - RNA, 18 nt, Human
uuuguuugaacugauaaa

SEQ ID NO: 2949978 - RNA, 13 nt, Human
uuuuaaaaaagaa

SEQ ID NO: 2949979 - RNA, 14 nt, Human
uuuuaaaagaauga

SEQ ID NO: 2949980 - RNA, 12 nt, Human
auguauguguaa

SEQ ID NO: 2949981 - RNA, 15 nt, Human
auguaucugagcagg

SEQ ID NO: 2949982 - RNA, 15 nt, Human
auguaucaaugagua

SEQ ID NO: 2949983 - RNA, 22 nt, Human
uuugggggaaaauuuagaaaua

SEQ ID NO: 2949984 - RNA, 14 nt, Human
augucaguucugau

SEQ ID NO: 2949985 - RNA, 21 nt, Human
augucagugugacugaucucu

SEQ ID NO: 2949986 - RNA, 16 nt, Human
augucagugugacuga

SEQ ID NO: 2949987 - RNA, 15 nt, Human
augucagugugacug

SEQ ID NO: 2949988 - RNA, 18 nt, Human
auguccaagaagcccagg

SEQ ID NO: 2949989 - RNA, 19 nt, Human
auguccaagaagcccagga

SEQ ID NO: 2949990 - RNA, 23 nt, Human
auguccaagaagcccaggaaagg

SEQ ID NO: 2949991 - RNA, 17 nt, Human
augucaguuguuauuua

SEQ ID NO: 2949992 - RNA, 15 nt, Human
augucaguuguuauu

SEQ ID NO: 2949993 - RNA, 16 nt, Human
augucaguucugauau

SEQ ID NO: 2949994 - RNA, 21 nt, Human
augucaguucugauauggaag

SEQ ID NO: 2949995 - RNA, 23 nt, Human
augucucuuuaaugucacaggca

SEQ ID NO: 2949996 - RNA, 22 nt, Human
augucuauaaaccgaacugaug

SEQ ID NO: 2949997 - RNA, 23 nt, Human
augucuagaccaggaccucccuc

SEQ ID NO: 2949998 - RNA, 13 nt, Human
uuuggggaagaac

SEQ ID NO: 2949999 - RNA, 22 nt, Human
uuugggaggccaaggugggagg

SEQ ID NO: 2950000 - RNA, 14 nt, Human
uuuggggauauuuu

SEQ ID NO: 2950001 - RNA, 12 nt, Human
uuuggcccaggg

SEQ ID NO: 2950002 - RNA, 14 nt, Human
uuuggccagaaguc

SEQ ID NO: 2950003 - RNA, 12 nt, Human
uuuggccagaag

SEQ ID NO: 2950004 - RNA, 10 nt, Human
uuuggccaga

SEQ ID NO: 2950005 - RNA, 19 nt, Human
uuugcuaagcauuccaacu

SEQ ID NO: 2950006 - RNA, 11 nt, Human
uuugcucaugg

SEQ ID NO: 2950007 - RNA, 12 nt, Human
uuugcucaugga

SEQ ID NO: 2950008 - RNA, 22 nt, Human
uuugcacacuuuggcccagggu

SEQ ID NO: 2950009 - RNA, 13 nt, Human
uuugcacauuaaa

SEQ ID NO: 2950010 - RNA, 16 nt, Human
uuugcacauuaaauga

SEQ ID NO: 2950011 - RNA, 12 nt, Human
uuugcacauuaa

SEQ ID NO: 2950012 - RNA, 22 nt, Human
uuugccauguuggccaggcugg

SEQ ID NO: 2950013 - RNA, 15 nt, Human
auggcuauaggugcu

SEQ ID NO: 2950014 - RNA, 15 nt, Human
auuauauuuacaaau

SEQ ID NO: 2950015 - RNA, 17 nt, Human
auuauauuuacaaaugg

SEQ ID NO: 2950016 - RNA, 23 nt, Human
auuaucucaaaacugcacuguca

SEQ ID NO: 2950017 - RNA, 18 nt, Human
auuaucucaaaacugcac

SEQ ID NO: 2950018 - RNA, 11 nt, Human
auuauuaacaa

SEQ ID NO: 2950019 - RNA, 23 nt, Human
auuauuuauuaaaugcccagccc

SEQ ID NO: 2950020 - RNA, 16 nt, Human
auuauauuuacaaaug

SEQ ID NO: 2950021 - RNA, 22 nt, Human
auuaccugaauuuuggcugugu

SEQ ID NO: 2950022 - RNA, 15 nt, Human
auuacauuuguauaa

SEQ ID NO: 2950023 - RNA, 20 nt, Human
auuacauuuguauaaaauaa

SEQ ID NO: 2950024 - RNA, 19 nt, Human
auuaccacagacauacuaa

SEQ ID NO: 2950025 - RNA, 13 nt, Human
auuacauuuguau

SEQ ID NO: 2950026 - RNA, 18 nt, Human
auuaagagguaagacuua

SEQ ID NO: 2950027 - RNA, 20 nt, Human
auuaagagagucuauuuacg

SEQ ID NO: 2950028 - RNA, 22 nt, Human
uuuuuguuccacaaguuaaaua

SEQ ID NO: 2950029 - RNA, 23 nt, Human
uuuuuuaaaaaagaaacauuugg

SEQ ID NO: 2950030 - RNA, 13 nt, Human
auuaaguaaugau

SEQ ID NO: 2950031 - RNA, 15 nt, Human
auuaaguaaugauaa

SEQ ID NO: 2950032 - RNA, 15 nt, Human
auucaaacagucuca

SEQ ID NO: 2950033 - RNA, 14 nt, Human
auucaaacagucuc

SEQ ID NO: 2950034 - RNA, 21 nt, Human
auucaguuguuagugugucuu

SEQ ID NO: 2950035 - RNA, 16 nt, Human
auucaguuguuagugu

SEQ ID NO: 2950036 - RNA, 23 nt, Human
auucaggaagcucagggccuggc

SEQ ID NO: 2950037 - RNA, 22 nt, Human
auucaggaagcucagggccugg

SEQ ID NO: 2950038 - RNA, 21 nt, Human
auucaggaagcucagggccug

SEQ ID NO: 2950039 - RNA, 18 nt, Human
auucagcucugcaagaau

SEQ ID NO: 2950040 - RNA, 14 nt, Human
auucagcucugcaa

SEQ ID NO: 2950041 - RNA, 20 nt, Human
auuccccagauugcaacagg

SEQ ID NO: 2950042 - RNA, 22 nt, Human
auuccccacccugaaagcccug

SEQ ID NO: 2950043 - RNA, 16 nt, Human
auuccccaggaggcca

SEQ ID NO: 2950044 - RNA, 19 nt, Human
auuccccaggaggccagcc

SEQ ID NO: 2950045 - RNA, 20 nt, Human
auuccacuuauaggaauuga

SEQ ID NO: 2950046 - RNA, 17 nt, Human
auucucagcagagugcu

SEQ ID NO: 2950047 - RNA, 13 nt, Human
auugugccccugc

SEQ ID NO: 2950048 - RNA, 14 nt, Human
auuguauuacaaau

SEQ ID NO: 2950049 - RNA, 23 nt, Human
auuggcuuuggguugcaggaccu

SEQ ID NO: 2950050 - RNA, 17 nt, Human
auuuaaacacauuaaag

SEQ ID NO: 2950051 - RNA, 14 nt, Human
auuuaaaagagcag

SEQ ID NO: 2950052 - RNA, 17 nt, Human
auuuaaaagagcaggcc

SEQ ID NO: 2950053 - RNA, 18 nt, Human
auuuaaacacauuaaagg

SEQ ID NO: 2950054 - RNA, 19 nt, Human
auuuaaagcuuauuaaaac

SEQ ID NO: 2950055 - RNA, 15 nt, Human
auuuaacagaaaugu

SEQ ID NO: 2950056 - RNA, 16 nt, Human
auuuaacagaaaugua

SEQ ID NO: 2950057 - RNA, 17 nt, Human
auuuaacagaaauguac

SEQ ID NO: 2950058 - RNA, 19 nt, Human
auuuaacagaaauguacag

SEQ ID NO: 2950059 - RNA, 20 nt, Human
auuuaacagaaauguacagc

SEQ ID NO: 2950060 - RNA, 18 nt, Human
auuuaaccucuaaauucu

SEQ ID NO: 2950061 - RNA, 16 nt, Human
auuuaaccucuaaauu

SEQ ID NO: 2950062 - RNA, 19 nt, Human
auuuaauuuuuuugagaca

SEQ ID NO: 2950063 - RNA, 23 nt, Human
auuuaauuuuuuugagacagagu

SEQ ID NO: 2950064 - RNA, 15 nt, Human
auuuacaaauguuuu

SEQ ID NO: 2950065 - RNA, 16 nt, Human
auuuacaaaugggaaa

SEQ ID NO: 2950066 - RNA, 23 nt, Human
auugccauuucuuccacaagagc

SEQ ID NO: 2950067 - RNA, 17 nt, Human
auugcccacgcuggagu

SEQ ID NO: 2950068 - RNA, 21 nt, Human
auugcccacgcuggagugcag

SEQ ID NO: 2950069 - RNA, 16 nt, Human
auugcggacagccacg

SEQ ID NO: 2950070 - RNA, 18 nt, Human
auugcggacagccacggc

SEQ ID NO: 2950071 - RNA, 19 nt, Human
auugcggacagccacggcc

SEQ ID NO: 2950072 - RNA, 21 nt, Human
auugcaacaggcugggcuuca

SEQ ID NO: 2950073 - RNA, 13 nt, Human
auugaccugaggc

SEQ ID NO: 2950074 - RNA, 15 nt, Human
auugcaacaggcugg

SEQ ID NO: 2950075 - RNA, 21 nt, Human
auugacccacaagaaaugaaa

SEQ ID NO: 2950076 - RNA, 18 nt, Human
auugacaggauuauugga

SEQ ID NO: 2950077 - RNA, 19 nt, Human
auucucacagcuccaagaa

SEQ ID NO: 2950078 - RNA, 21 nt, Human
auucucacagcuccaagaauu

SEQ ID NO: 2950079 - RNA, 22 nt, Human
auucucacagcuccaagaauuu

SEQ ID NO: 2950080 - RNA, 14 nt, Human
auucucagaaucuc

SEQ ID NO: 2950081 - RNA, 19 nt, Human
auuccuaaaauuauggaaa

SEQ ID NO: 2950082 - RNA, 14 nt, Human
auuccuaaaauuau

SEQ ID NO: 2950083 - RNA, 13 nt, Human
auucuacuuugag

SEQ ID NO: 2950084 - RNA, 16 nt, Human
auucuacuuugagugc

SEQ ID NO: 2950085 - RNA, 16 nt, Human
auucucagcagagugc

SEQ ID NO: 2950086 - RNA, 16 nt, Human
auugacagauugaauu

SEQ ID NO: 2950087 - RNA, 20 nt, Human
auugacacuuaaaaaugguu

SEQ ID NO: 2950088 - RNA, 17 nt, Human
auucuccaccugccagg

SEQ ID NO: 2950089 - RNA, 16 nt, Human
auucuccaccugccag

SEQ ID NO: 2950090 - RNA, 18 nt, Human
auucucagaaucucaaau

SEQ ID NO: 2950091 - RNA, 20 nt, Human
auucucagaaucucaaauaa

SEQ ID NO: 2950092 - RNA, 13 nt, Human
auucuccaccugc

SEQ ID NO: 2950093 - RNA, 15 nt, Human
auucucagcagagug

SEQ ID NO: 2950094 - RNA, 14 nt, Human
auucucagcagagu

SEQ ID NO: 2950095 - RNA, 18 nt, Human
auucuccaccugccaggg

SEQ ID NO: 2950096 - RNA, 15 nt, Human
auuuuaauaauguuu

SEQ ID NO: 2950097 - RNA, 12 nt, Human
auuuuaauaaug

SEQ ID NO: 2950098 - RNA, 14 nt, Human
auuuuaauaauguu

SEQ ID NO: 2950099 - RNA, 15 nt, Human
auuuguaucacaaau

SEQ ID NO: 2950100 - RNA, 21 nt, Human
auuuguauaaaauaauuuuua

SEQ ID NO: 2950101 - RNA, 13 nt, Human
auuuuauuaugca

SEQ ID NO: 2950102 - RNA, 17 nt, Human
auuuuauuaugcaugaa

SEQ ID NO: 2950103 - RNA, 14 nt, Human
auuuuauuaugcau

SEQ ID NO: 2950104 - RNA, 15 nt, Human
auuuuauuaugcaug

SEQ ID NO: 2950105 - RNA, 13 nt, Human
auuuauuauggca

SEQ ID NO: 2950106 - RNA, 22 nt, Human
auuuauuacuguaagaaaauau

SEQ ID NO: 2950107 - RNA, 20 nt, Human
auuuauuaaaugcccagccc

SEQ ID NO: 2950108 - RNA, 21 nt, Human
auuucuaaaucuccaaaauaa

SEQ ID NO: 2950109 - RNA, 12 nt, Human
auuucuaaaucu

SEQ ID NO: 2950110 - RNA, 13 nt, Human
auuucuaaaucuc

SEQ ID NO: 2950111 - RNA, 14 nt, Human
auuuccugugucuu

SEQ ID NO: 2950112 - RNA, 23 nt, Human
auuuccugggagcuuuuguagaa

SEQ ID NO: 2950113 - RNA, 22 nt, Human
auuuccugggagcuuuuguaga

SEQ ID NO: 2950114 - RNA, 16 nt, Human
auuuauuauggcacau

SEQ ID NO: 2950115 - RNA, 17 nt, Human
auuuggugguuucagaa

SEQ ID NO: 2950116 - RNA, 23 nt, Human
auuugguaaggggaauugaggac

SEQ ID NO: 2950117 - RNA, 17 nt, Human
auuuggguuacuauuuc

SEQ ID NO: 2950118 - RNA, 18 nt, Human
auuuguaguguuggagaa

SEQ ID NO: 2950119 - RNA, 21 nt, Human
auuugguuuucacauuggaaa

SEQ ID NO: 2950120 - RNA, 22 nt, Human
auuugguuuucacauuggaaac

SEQ ID NO: 2950121 - RNA, 15 nt, Human
auuugguuuucacau

SEQ ID NO: 2950122 - RNA, 17 nt, Human
auuugguuuucacauug

SEQ ID NO: 2950123 - RNA, 18 nt, Human
auuuggugguuucagaaa

SEQ ID NO: 2950124 - RNA, 20 nt, Human
auuuggugguuucagaaaug

SEQ ID NO: 2950125 - RNA, 20 nt, Human
auuucuuuugccguuauuaa

SEQ ID NO: 2950126 - RNA, 16 nt, Human
auuugagcagggcuca

SEQ ID NO: 2950127 - RNA, 23 nt, Human
auuugaggucuguucuuuccaaa

SEQ ID NO: 2950128 - RNA, 17 nt, Human
auuugagcagggcucag

SEQ ID NO: 2950129 - RNA, 22 nt, Human
auuugaggucuguucuuuccaa

SEQ ID NO: 2950130 - RNA, 18 nt, Human
auuugagguuaagacaaa

SEQ ID NO: 2950131 - RNA, 23 nt, Human
auuucuuuugccguuauuaaaaa

SEQ ID NO: 2950132 - RNA, 21 nt, Human
auauauauuuuuuucugaaau

SEQ ID NO: 2950133 - RNA, 17 nt, Human
auauaacaaugcuguau

SEQ ID NO: 2950134 - RNA, 12 nt, Human
auauauaaccag

SEQ ID NO: 2950135 - RNA, 13 nt, Human
auauauaaccagu

SEQ ID NO: 2950136 - RNA, 19 nt, Human
auauauaacaaugcuguau

SEQ ID NO: 2950137 - RNA, 22 nt, Human
auaguuaagcgugcauaaguua

SEQ ID NO: 2950138 - RNA, 22 nt, Human
auaguuggcuaggaccccucca

SEQ ID NO: 2950139 - RNA, 20 nt, Human
auaguuguaccgcaauguga

SEQ ID NO: 2950140 - RNA, 15 nt, Human
auaguggugugauuu

SEQ ID NO: 2950141 - RNA, 17 nt, Human
auaguggcuuaaaacaa

SEQ ID NO: 2950142 - RNA, 13 nt, Human
uucacaguucucu

SEQ ID NO: 2950143 - RNA, 20 nt, Human
uucacaguucucuccuucuu

SEQ ID NO: 2950144 - RNA, 15 nt, Human
uucacaguucucucc

SEQ ID NO: 2950145 - RNA, 20 nt, Human
uucacagaugggugcuugga

SEQ ID NO: 2950146 - RNA, 22 nt, Human
uucacaagacccaaaaggcaga

SEQ ID NO: 2950147 - RNA, 23 nt, Human
uucacaagacccaaaaggcagaa

SEQ ID NO: 2950148 - RNA, 15 nt, Human
auagcuuuuuucucu

SEQ ID NO: 2950149 - RNA, 17 nt, Human
auaggaaaaacugauuu

SEQ ID NO: 2950150 - RNA, 16 nt, Human
auaggaaaaacugauu

SEQ ID NO: 2950151 - RNA, 14 nt, Human
auaggaaaaacuga

SEQ ID NO: 2950152 - RNA, 12 nt, Human
auaggaaaaacu

SEQ ID NO: 2950153 - RNA, 17 nt, Human
auaggcguaacuaauuu

SEQ ID NO: 2950154 - RNA, 22 nt, Human
auaggaauugacccacaagaaa

SEQ ID NO: 2950155 - RNA, 23 nt, Human
uucaagaaugcaguacuaacauu

SEQ ID NO: 2950156 - RNA, 23 nt, Human
uucaagaaguccccucuccucca

SEQ ID NO: 2950157 - RNA, 18 nt, Human
uucaaacagucucaggaa

SEQ ID NO: 2950158 - RNA, 21 nt, Human
uucaagcgauucuucugcuuc

SEQ ID NO: 2950159 - RNA, 18 nt, Human
uuauuuuuagacagaguc

SEQ ID NO: 2950160 - RNA, 17 nt, Human
uuauuuuuagacagagu

SEQ ID NO: 2950161 - RNA, 12 nt, Human
uucauacaaggc

SEQ ID NO: 2950162 - RNA, 18 nt, Human
uucagugccuuauggaac

SEQ ID NO: 2950163 - RNA, 13 nt, Human
uucagugccuuau

SEQ ID NO: 2950164 - RNA, 12 nt, Human
uucagugccuua

SEQ ID NO: 2950165 - RNA, 16 nt, Human
uucagugccaaaaaca

SEQ ID NO: 2950166 - RNA, 11 nt, Human
uucagaaaugu

SEQ ID NO: 2950167 - RNA, 13 nt, Human
uucagaaaugugu

SEQ ID NO: 2950168 - RNA, 13 nt, Human
uucauauuuaauu

SEQ ID NO: 2950169 - RNA, 17 nt, Human
uucaucccucuggggcu

SEQ ID NO: 2950170 - RNA, 21 nt, Human
uucaucccucuggggcuguuc

SEQ ID NO: 2950171 - RNA, 17 nt, Human
auauguaacaagccacc

SEQ ID NO: 2950172 - RNA, 16 nt, Human
auauguaacaagccac

SEQ ID NO: 2950173 - RNA, 16 nt, Human
auaugaugacuguuuu

SEQ ID NO: 2950174 - RNA, 13 nt, Human
auaugcacacauu

SEQ ID NO: 2950175 - RNA, 16 nt, Human
auaugcacacauuuuu

SEQ ID NO: 2950176 - RNA, 14 nt, Human
auaugcacacauuu

SEQ ID NO: 2950177 - RNA, 15 nt, Human
auaugcacacauuuu

SEQ ID NO: 2950178 - RNA, 16 nt, Human
auaucugaaaauguau

SEQ ID NO: 2950179 - RNA, 17 nt, Human
auaucugaaaauguaug

SEQ ID NO: 2950180 - RNA, 20 nt, Human
auaucugaaaauguaugugu

SEQ ID NO: 2950181 - RNA, 19 nt, Human
auaucuccgucaacucaua

SEQ ID NO: 2950182 - RNA, 20 nt, Human
auaucuccgucaacucauau

SEQ ID NO: 2950183 - RNA, 21 nt, Human
auaucuccgucaacucauauu

SEQ ID NO: 2950184 - RNA, 17 nt, Human
uuccaggggugggacac

SEQ ID NO: 2950185 - RNA, 18 nt, Human
uuccaccaucaagccacc

SEQ ID NO: 2950186 - RNA, 22 nt, Human
uuccacaagagcccaggccucc

SEQ ID NO: 2950187 - RNA, 19 nt, Human
uuccaccaucaagccacca

SEQ ID NO: 2950188 - RNA, 18 nt, Human
uucauuuaggugaggaag

SEQ ID NO: 2950189 - RNA, 15 nt, Human
uuccaaggguacuaa

SEQ ID NO: 2950190 - RNA, 17 nt, Human
uuccaaggguacuaagg

SEQ ID NO: 2950191 - RNA, 16 nt, Human
auauguggaguucauc

SEQ ID NO: 2950192 - RNA, 15 nt, Human
auauguggaguucau

SEQ ID NO: 2950193 - RNA, 23 nt, Human
uucccaaagcagugcaugcuguc

SEQ ID NO: 2950194 - RNA, 22 nt, Human
uuccagugaggcucugcccuug

SEQ ID NO: 2950195 - RNA, 21 nt, Human
uuccagugaggcucugcccuu

SEQ ID NO: 2950196 - RNA, 20 nt, Human
uuccagugaggcucugcccu

SEQ ID NO: 2950197 - RNA, 19 nt, Human
uuccagugaggcucugccc

SEQ ID NO: 2950198 - RNA, 17 nt, Human
uuccagugaggcucugc

SEQ ID NO: 2950199 - RNA, 21 nt, Human
uuccaggggugggacacccug

SEQ ID NO: 2950200 - RNA, 18 nt, Human
uucccaagcucugcuccu

SEQ ID NO: 2950201 - RNA, 22 nt, Human
uucccaccucucucacuccuug

SEQ ID NO: 2950202 - RNA, 12 nt, Human
uucccaccucuc

SEQ ID NO: 2950203 - RNA, 13 nt, Human
uucccaagcucug

SEQ ID NO: 2950204 - RNA, 14 nt, Human
uucccaagcucugc

SEQ ID NO: 2950205 - RNA, 15 nt, Human
uucccaagcucugcu

SEQ ID NO: 2950206 - RNA, 16 nt, Human
uucccaagcucugcuc

SEQ ID NO: 2950207 - RNA, 18 nt, Human
uucccaacuccagaaagu

SEQ ID NO: 2950208 - RNA, 12 nt, Human
uucccaaauuuc

SEQ ID NO: 2950209 - RNA, 14 nt, Human
uuccuucaagaaug

SEQ ID NO: 2950210 - RNA, 21 nt, Human
uuccuucaagaaugcaguacu

SEQ ID NO: 2950211 - RNA, 14 nt, Human
aucaaguuauuuuu

SEQ ID NO: 2950212 - RNA, 19 nt, Human
aucaaccccuucgcuccug

SEQ ID NO: 2950213 - RNA, 20 nt, Human
aucaaccccuucgcuccugu

SEQ ID NO: 2950214 - RNA, 22 nt, Human
aucaaccccuucgcuccugugu

SEQ ID NO: 2950215 - RNA, 20 nt, Human
aucaaauaugcaaagcacug

SEQ ID NO: 2950216 - RNA, 18 nt, Human
uucccuuuuuuggcugcu

SEQ ID NO: 2950217 - RNA, 20 nt, Human
uucccuuuuuuggcugcuga

SEQ ID NO: 2950218 - RNA, 19 nt, Human
uucccuuuuuuggcugcug

SEQ ID NO: 2950219 - RNA, 15 nt, Human
auauuuuacauaaau

SEQ ID NO: 2950220 - RNA, 16 nt, Human
auauuuuacauaaauu

SEQ ID NO: 2950221 - RNA, 20 nt, Human
auauuuuacauaaauuuagu

SEQ ID NO: 2950222 - RNA, 21 nt, Human
uucgcaggauucuuccucccu

SEQ ID NO: 2950223 - RNA, 22 nt, Human
uucuaaauaucccuuggacauu

SEQ ID NO: 2950224 - RNA, 19 nt, Human
uucuaaaucuccaaaauaa

SEQ ID NO: 2950225 - RNA, 13 nt, Human
uucgcuccugugu

SEQ ID NO: 2950226 - RNA, 17 nt, Human
uucuaaguaaaaccaca

SEQ ID NO: 2950227 - RNA, 20 nt, Human
uucuaaguaaaaccacagca

SEQ ID NO: 2950228 - RNA, 19 nt, Human
uucuaaguaaaaccacagc

SEQ ID NO: 2950229 - RNA, 13 nt, Human
aucaggccaggcc

SEQ ID NO: 2950230 - RNA, 13 nt, Human
uucucagcagagu

SEQ ID NO: 2950231 - RNA, 13 nt, Human
uucucagaaucuc

SEQ ID NO: 2950232 - RNA, 21 nt, Human
uucucacugccaugccagcuu

SEQ ID NO: 2950233 - RNA, 14 nt, Human
uucuauaauuuaaa

SEQ ID NO: 2950234 - RNA, 13 nt, Human
uucuauaauuuaa

SEQ ID NO: 2950235 - RNA, 21 nt, Human
uucuaaguaaaaccacagcag

SEQ ID NO: 2950236 - RNA, 20 nt, Human
uucuguuuuucuaggccugg

SEQ ID NO: 2950237 - RNA, 11 nt, Human
uucuguucuuu

SEQ ID NO: 2950238 - RNA, 18 nt, Human
uucuguucuuucuggcua

SEQ ID NO: 2950239 - RNA, 13 nt, Human
uucuuaauucuua

SEQ ID NO: 2950240 - RNA, 23 nt, Human
uucuuccucccucccucuuuccc

SEQ ID NO: 2950241 - RNA, 12 nt, Human
uucuuuuaagaa

SEQ ID NO: 2950242 - RNA, 14 nt, Human
uucuuuuaagaauc

SEQ ID NO: 2950243 - RNA, 22 nt, Human
uucuuucuggcuaugcauuuga

SEQ ID NO: 2950244 - RNA, 12 nt, Human
uucuugcaaagu

SEQ ID NO: 2950245 - RNA, 13 nt, Human
uucuugcaaagua

SEQ ID NO: 2950246 - RNA, 15 nt, Human
uucuuggcccaggau

SEQ ID NO: 2950247 - RNA, 21 nt, Human
auccuaagcuauucaguaaua

SEQ ID NO: 2950248 - RNA, 12 nt, Human
auccuaauaaaa

SEQ ID NO: 2950249 - RNA, 17 nt, Human
auccuaauaaaaaggug

SEQ ID NO: 2950250 - RNA, 16 nt, Human
auccuaauaaaaaggu

SEQ ID NO: 2950251 - RNA, 15 nt, Human
auccuaauaaaaagg

SEQ ID NO: 2950252 - RNA, 14 nt, Human
auccuaauaaaaag

SEQ ID NO: 2950253 - RNA, 23 nt, Human
uugaacauuuggguuacuauuuc

SEQ ID NO: 2950254 - RNA, 22 nt, Human
auccuaauaaaaaggugaccau

SEQ ID NO: 2950255 - RNA, 18 nt, Human
auccuaauaaaaagguga

SEQ ID NO: 2950256 - RNA, 20 nt, Human
auccuagucauucuucccua

SEQ ID NO: 2950257 - RNA, 13 nt, Human
auccuaguuccac

SEQ ID NO: 2950258 - RNA, 21 nt, Human
auccuaggcauuugcugaaua

SEQ ID NO: 2950259 - RNA, 17 nt, Human
uucuuuuaagaaucaau

SEQ ID NO: 2950260 - RNA, 15 nt, Human
uucuuuuugaaaugu

SEQ ID NO: 2950261 - RNA, 14 nt, Human
uucuuuuugaaaug

SEQ ID NO: 2950262 - RNA, 14 nt, Human
uugaaaugauuuca

SEQ ID NO: 2950263 - RNA, 21 nt, Human
uugaaauuuuuauuaaauuau

SEQ ID NO: 2950264 - RNA, 19 nt, Human
uugaaauauugacuuuuua

SEQ ID NO: 2950265 - RNA, 20 nt, Human
uugaaauauaggaacuuaaa

SEQ ID NO: 2950266 - RNA, 11 nt, Human
uugaaaucuuu

SEQ ID NO: 2950267 - RNA, 13 nt, Human
aucauuucaagaa

SEQ ID NO: 2950268 - RNA, 21 nt, Human
aucauugaaaucuuuuugcuu

SEQ ID NO: 2950269 - RNA, 20 nt, Human
aucaggccaggcccucugcc

SEQ ID NO: 2950270 - RNA, 20 nt, Human
aucauugaaaucuuuuugcu

SEQ ID NO: 2950271 - RNA, 23 nt, Human
aucaggccaggcccucugcccac

SEQ ID NO: 2950272 - RNA, 22 nt, Human
aucaggccaggcccucugccca

SEQ ID NO: 2950273 - RNA, 21 nt, Human
aucaggccaggcccucugccc

SEQ ID NO: 2950274 - RNA, 13 nt, Human
uucugccgcagcc

SEQ ID NO: 2950275 - RNA, 14 nt, Human
uucugacccaugcu

SEQ ID NO: 2950276 - RNA, 16 nt, Human
uucucuuuucaaaaca

SEQ ID NO: 2950277 - RNA, 23 nt, Human
uucucuacccaucuuaaaaacaa

SEQ ID NO: 2950278 - RNA, 17 nt, Human
uucucuacucuagggaa

SEQ ID NO: 2950279 - RNA, 16 nt, Human
uucuggcuaugcauuu

SEQ ID NO: 2950280 - RNA, 15 nt, Human
uucugccgcagcccu

SEQ ID NO: 2950281 - RNA, 14 nt, Human
uucugccgcagccc

SEQ ID NO: 2950282 - RNA, 18 nt, Human
uucuggcuaugcauuuga

SEQ ID NO: 2950283 - RNA, 20 nt, Human
uucuggcuaugcauuugaaa

SEQ ID NO: 2950284 - RNA, 14 nt, Human
auccauacauuugu

SEQ ID NO: 2950285 - RNA, 21 nt, Human
augagacuuuaaaagcauuuu

SEQ ID NO: 2950286 - RNA, 23 nt, Human
augagagacacacugaagaagca

SEQ ID NO: 2950287 - RNA, 20 nt, Human
augagagacacacugaagaa

SEQ ID NO: 2950288 - RNA, 21 nt, Human
augagagacacacugaagaag

SEQ ID NO: 2950289 - RNA, 21 nt, Human
uugugaggaagccgcuggggc

SEQ ID NO: 2950290 - RNA, 18 nt, Human
uugugauacaaugcugug

SEQ ID NO: 2950291 - RNA, 21 nt, Human
uuguucugaaaugucaguucu

SEQ ID NO: 2950292 - RNA, 23 nt, Human
uuguucugaaaugucaguucuga

SEQ ID NO: 2950293 - RNA, 22 nt, Human
uuguucuggcucuuccaggcug

SEQ ID NO: 2950294 - RNA, 20 nt, Human
uuguucuggcucuuccaggc

SEQ ID NO: 2950295 - RNA, 19 nt, Human
uuguucuggcucuuccagg

SEQ ID NO: 2950296 - RNA, 17 nt, Human
uuguguguuuauuguca

SEQ ID NO: 2950297 - RNA, 13 nt, Human
uugugguuaaucu

SEQ ID NO: 2950298 - RNA, 23 nt, Human
uugugugaaagguacuucaaauc

SEQ ID NO: 2950299 - RNA, 14 nt, Human
augcaccagcccuu

SEQ ID NO: 2950300 - RNA, 12 nt, Human
augcacuuuguu

SEQ ID NO: 2950301 - RNA, 13 nt, Human
augcaccagcccu

SEQ ID NO: 2950302 - RNA, 15 nt, Human
augcaaagcacugac

SEQ ID NO: 2950303 - RNA, 21 nt, Human
augauucaacagguuuuccug

SEQ ID NO: 2950304 - RNA, 21 nt, Human
augauucaaaugucuauaaac

SEQ ID NO: 2950305 - RNA, 13 nt, Human
augauuucacagu

SEQ ID NO: 2950306 - RNA, 12 nt, Human
augauucccagc

SEQ ID NO: 2950307 - RNA, 15 nt, Human
uuguugucugcaacu

SEQ ID NO: 2950308 - RNA, 19 nt, Human
augauuaaccacuucagcu

SEQ ID NO: 2950309 - RNA, 22 nt, Human
augauuaugaauuacauuugua

SEQ ID NO: 2950310 - RNA, 21 nt, Human
augauuaaccacuucagcuga

SEQ ID NO: 2950311 - RNA, 20 nt, Human
augauuaaccacuucagcug

SEQ ID NO: 2950312 - RNA, 12 nt, Human
uuuaauucaguu

SEQ ID NO: 2950313 - RNA, 17 nt, Human
uuuaagugcugcauuua

SEQ ID NO: 2950314 - RNA, 19 nt, Human
uuuaagugcugcauuuaaa

SEQ ID NO: 2950315 - RNA, 15 nt, Human
uuuaagugcugcauu

SEQ ID NO: 2950316 - RNA, 16 nt, Human
uuuaagugcugcauuu

SEQ ID NO: 2950317 - RNA, 14 nt, Human
uuuaagaggcaggg

SEQ ID NO: 2950318 - RNA, 14 nt, Human
uuguuuucauuauc

SEQ ID NO: 2950319 - RNA, 15 nt, Human
augcacuuuguucug

SEQ ID NO: 2950320 - RNA, 13 nt, Human
uuguuuucagugu

SEQ ID NO: 2950321 - RNA, 16 nt, Human
uuguuuucaguguaca

SEQ ID NO: 2950322 - RNA, 18 nt, Human
augcaguucugaagaaga

SEQ ID NO: 2950323 - RNA, 19 nt, Human
augcaguucugaagaagau

SEQ ID NO: 2950324 - RNA, 15 nt, Human
augccacuaaauuga

SEQ ID NO: 2950325 - RNA, 17 nt, Human
augccacuaaauugaca

SEQ ID NO: 2950326 - RNA, 17 nt, Human
augcagccucacagucc

SEQ ID NO: 2950327 - RNA, 15 nt, Human
augcagccucacagu

SEQ ID NO: 2950328 - RNA, 14 nt, Human
augcagccucacag

SEQ ID NO: 2950329 - RNA, 13 nt, Human
augcagccucaca

SEQ ID NO: 2950330 - RNA, 17 nt, Human
augcaguacaggacaua

SEQ ID NO: 2950331 - RNA, 19 nt, Human
augcaguacaggacauaua

SEQ ID NO: 2950332 - RNA, 20 nt, Human
augcaguacaggacauauau

SEQ ID NO: 2950333 - RNA, 13 nt, Human
augcagguuuuau

SEQ ID NO: 2950334 - RNA, 18 nt, Human
augcaguacuaacauuua

SEQ ID NO: 2950335 - RNA, 15 nt, Human
augcaguucugaaga

SEQ ID NO: 2950336 - RNA, 17 nt, Human
augcaguucugaagaag

SEQ ID NO: 2950337 - RNA, 14 nt, Human
auggacaugaucuu

SEQ ID NO: 2950338 - RNA, 17 nt, Human
auggaauacucuuauau

SEQ ID NO: 2950339 - RNA, 16 nt, Human
auggaauacucuuaua

SEQ ID NO: 2950340 - RNA, 16 nt, Human
auggaagacagcucuu

SEQ ID NO: 2950341 - RNA, 13 nt, Human
uuucagaaaugug

SEQ ID NO: 2950342 - RNA, 17 nt, Human
auggcacaucagcacga

SEQ ID NO: 2950343 - RNA, 23 nt, Human
auggcacaucagcacgauuucug

SEQ ID NO: 2950344 - RNA, 20 nt, Human
auggacguguuaugacucca

SEQ ID NO: 2950345 - RNA, 19 nt, Human
auggacguguuaugacucc

SEQ ID NO: 2950346 - RNA, 23 nt, Human
auggacguguuaugacuccagaa

SEQ ID NO: 2950347 - RNA, 18 nt, Human
auggauuuccagccaaag

SEQ ID NO: 2950348 - RNA, 21 nt, Human
auggccgggcgcgguggcuca

SEQ ID NO: 2950349 - RNA, 20 nt, Human
auggccuuugcuugaaagaa

SEQ ID NO: 2950350 - RNA, 20 nt, Human
auggcuaguaucaaaagaaa

SEQ ID NO: 2950351 - RNA, 15 nt, Human
augcuagaacucccu

SEQ ID NO: 2950352 - RNA, 16 nt, Human
augcuagaacucccuu

SEQ ID NO: 2950353 - RNA, 12 nt, Human
augcuguacaua

SEQ ID NO: 2950354 - RNA, 15 nt, Human
augcuguacauacuu

SEQ ID NO: 2950355 - RNA, 22 nt, Human
augcuguaacuuucugaaauaa

SEQ ID NO: 2950356 - RNA, 15 nt, Human
augcucugcauguua

SEQ ID NO: 2950357 - RNA, 11 nt, Human
auggaacacuc

SEQ ID NO: 2950358 - RNA, 15 nt, Human
auggaacacucugag

SEQ ID NO: 2950359 - RNA, 14 nt, Human
auggaacacucuga

SEQ ID NO: 2950360 - RNA, 15 nt, Human
auggaagacagcucu

SEQ ID NO: 2950361 - RNA, 16 nt, Human
auggaacacucugaga

SEQ ID NO: 2950362 - RNA, 16 nt, Human
augcuguacauacuuu

SEQ ID NO: 2950363 - RNA, 18 nt, Human
augcuguacauacuuuuu

SEQ ID NO: 2950364 - RNA, 19 nt, Human
augcugucccuuacgugag

SEQ ID NO: 2950365 - RNA, 22 nt, Human
augcugucuacacuaagagaga

SEQ ID NO: 2950366 - RNA, 23 nt, Human
augcugucccuuacgugaguccu

SEQ ID NO: 2950367 - RNA, 15 nt, Human
uuuaguagagacagg

SEQ ID NO: 2950368 - RNA, 22 nt, Human
uuuagcuggaaaaguauguuag

SEQ ID NO: 2950369 - RNA, 18 nt, Human
uuuagaugaaugucaguu

SEQ ID NO: 2950370 - RNA, 15 nt, Human
augcccccuguggau

SEQ ID NO: 2950371 - RNA, 19 nt, Human
augcccccuguggaugcug

SEQ ID NO: 2950372 - RNA, 22 nt, Human
uuuagaugaaugucaguuguua

SEQ ID NO: 2950373 - RNA, 20 nt, Human
uuuagcuggaaaaguauguu

SEQ ID NO: 2950374 - RNA, 24 nt, Human
uuuauggcuuuugugcauuaucua

SEQ ID NO: 2950375 - RNA, 20 nt, Human
uuuauggcuuuugugcauua

SEQ ID NO: 2950376 - RNA, 13 nt, Human
uuuauauaagcuu

SEQ ID NO: 2950377 - RNA, 23 nt, Human
aucugugaaaggaaagagggagg

SEQ ID NO: 2950378 - RNA, 19 nt, Human
aucuggguucacugcaacc

SEQ ID NO: 2950379 - RNA, 17 nt, Human
aucuggguucacugcaa

SEQ ID NO: 2950380 - RNA, 12 nt, Human
aucuguuacaca

SEQ ID NO: 2950381 - RNA, 18 nt, Human
aucuugaauuguaaggaa

SEQ ID NO: 2950382 - RNA, 17 nt, Human
aucuugcucugcugaca

SEQ ID NO: 2950383 - RNA, 19 nt, Human
aucuugcucugcugacaga

SEQ ID NO: 2950384 - RNA, 20 nt, Human
uugccuaauaugaugacugu

SEQ ID NO: 2950385 - RNA, 18 nt, Human
uugccgucuaccugaggg

SEQ ID NO: 2950386 - RNA, 15 nt, Human
uugccgucuaccuga

SEQ ID NO: 2950387 - RNA, 19 nt, Human
uugccgucuaccugagggg

SEQ ID NO: 2950388 - RNA, 14 nt, Human
uugccguuauuaaa

SEQ ID NO: 2950389 - RNA, 13 nt, Human
uugccgucuaccu

SEQ ID NO: 2950390 - RNA, 13 nt, Human
uugcccuguuaaa

SEQ ID NO: 2950391 - RNA, 19 nt, Human
auccuaguuccaccaucaa

SEQ ID NO: 2950392 - RNA, 15 nt, Human
auccuaguuccacca

SEQ ID NO: 2950393 - RNA, 16 nt, Human
aucucacacaugagca

SEQ ID NO: 2950394 - RNA, 13 nt, Human
aucucaauauuuc

SEQ ID NO: 2950395 - RNA, 15 nt, Human
aucucacacaugagc

SEQ ID NO: 2950396 - RNA, 13 nt, Human
aucucccccagcc

SEQ ID NO: 2950397 - RNA, 12 nt, Human
aucucccccagc

SEQ ID NO: 2950398 - RNA, 14 nt, Human
aucucauuuccaag

SEQ ID NO: 2950399 - RNA, 23 nt, Human
aucucauuuccaagcaaguauua

SEQ ID NO: 2950400 - RNA, 21 nt, Human
aucucauuuccaagcaaguau

SEQ ID NO: 2950401 - RNA, 23 nt, Human
uugcacauuaaaugacucuuccc

SEQ ID NO: 2950402 - RNA, 11 nt, Human
uugcacauuaa

SEQ ID NO: 2950403 - RNA, 21 nt, Human
uugcacacuuuggcccagggu

SEQ ID NO: 2950404 - RNA, 16 nt, Human
uugauucagacagcug

SEQ ID NO: 2950405 - RNA, 15 nt, Human
uugauucagacagcu

SEQ ID NO: 2950406 - RNA, 20 nt, Human
aucucuuaucuuacgaaaaa

SEQ ID NO: 2950407 - RNA, 18 nt, Human
aucucuuaucuuacgaaa

SEQ ID NO: 2950408 - RNA, 18 nt, Human
uugauggugguauguuuu

SEQ ID NO: 2950409 - RNA, 14 nt, Human
uugauucagacagc

SEQ ID NO: 2950410 - RNA, 22 nt, Human
uugauucaccuccuaaaacaac

SEQ ID NO: 2950411 - RNA, 20 nt, Human
uugauucaccuccuaaaaca

SEQ ID NO: 2950412 - RNA, 21 nt, Human
uugauucaccuccuaaaacaa

SEQ ID NO: 2950413 - RNA, 19 nt, Human
uugauggugguauguuuuc

SEQ ID NO: 2950414 - RNA, 18 nt, Human
augacacgaauauugcug

SEQ ID NO: 2950415 - RNA, 14 nt, Human
augacauucccugc

SEQ ID NO: 2950416 - RNA, 16 nt, Human
augacauugacuauuu

SEQ ID NO: 2950417 - RNA, 19 nt, Human
augacauugacuauuuuug

SEQ ID NO: 2950418 - RNA, 22 nt, Human
augacuuaagcacacuugacau

SEQ ID NO: 2950419 - RNA, 14 nt, Human
augacuuacuguac

SEQ ID NO: 2950420 - RNA, 20 nt, Human
augagaaacuggcaaagcag

SEQ ID NO: 2950421 - RNA, 22 nt, Human
augagaaacuggcaaagcagaa

SEQ ID NO: 2950422 - RNA, 18 nt, Human
augacuuggugucuaaug

SEQ ID NO: 2950423 - RNA, 23 nt, Human
augacuuggugucuaauguguag

SEQ ID NO: 2950424 - RNA, 16 nt, Human
augacuuacuguacau

SEQ ID NO: 2950425 - RNA, 17 nt, Human
augacuuacuguacaug

SEQ ID NO: 2950426 - RNA, 21 nt, Human
augagaaagguugaagcacca

SEQ ID NO: 2950427 - RNA, 22 nt, Human
augagaaagguugaagcaccaa

SEQ ID NO: 2950428 - RNA, 13 nt, Human
augagagacacac

SEQ ID NO: 2950429 - RNA, 14 nt, Human
augagagacacacu

SEQ ID NO: 2950430 - RNA, 17 nt, Human
augagagacacacugaa

SEQ ID NO: 2950431 - RNA, 19 nt, Human
augagagacacacugaaga

SEQ ID NO: 2950432 - RNA, 17 nt, Human
uuguauaaaauaauuuu

SEQ ID NO: 2950433 - RNA, 14 nt, Human
augacacaugcaag

SEQ ID NO: 2950434 - RNA, 22 nt, Human
augacacaugcaaggucauuuu

SEQ ID NO: 2950435 - RNA, 16 nt, Human
uuguaucacaaaucuu

SEQ ID NO: 2950436 - RNA, 18 nt, Human
uugguucuggacuaaaac

SEQ ID NO: 2950437 - RNA, 20 nt, Human
uugguucuggacuaaaacua

SEQ ID NO: 2950438 - RNA, 17 nt, Human
uugguugggaugacuug

SEQ ID NO: 2950439 - RNA, 21 nt, Human
uugguugguaacucuguaauu

SEQ ID NO: 2950440 - RNA, 16 nt, Human
uuguauaaaauaauuu

SEQ ID NO: 2950441 - RNA, 15 nt, Human
uuguauaaaauaauu

SEQ ID NO: 2950442 - RNA, 22 nt, Human
uuggggggcugaggugggagga

SEQ ID NO: 2950443 - RNA, 18 nt, Human
uuggggcucccagccagg

SEQ ID NO: 2950444 - RNA, 22 nt, Human
uuggggcucccagccaggcccu

SEQ ID NO: 2950445 - RNA, 13 nt, Human
uuggggcucccag

SEQ ID NO: 2950446 - RNA, 14 nt, Human
uuggggcucccagc

SEQ ID NO: 2950447 - RNA, 15 nt, Human
uuggggcucccagcc

SEQ ID NO: 2950448 - RNA, 14 nt, Human
uuggggauauuuuu

SEQ ID NO: 2950449 - RNA, 21 nt, Human
augaaugcccagugagacugu

SEQ ID NO: 2950450 - RNA, 13 nt, Human
augaaugcccagu

SEQ ID NO: 2950451 - RNA, 20 nt, Human
augaaugucagugugacuga

SEQ ID NO: 2950452 - RNA, 18 nt, Human
augaagauguagaggaga

SEQ ID NO: 2950453 - RNA, 13 nt, Human
augaaugaauggc

SEQ ID NO: 2950454 - RNA, 16 nt, Human
augaagauacugaaau

SEQ ID NO: 2950455 - RNA, 17 nt, Human
augaagauacugaaaua

SEQ ID NO: 2950456 - RNA, 15 nt, Human
augaagauacugaaa

SEQ ID NO: 2950457 - RNA, 18 nt, Human
augaaauauuauguuaaa

SEQ ID NO: 2950458 - RNA, 13 nt, Human
augaaauauuaug

SEQ ID NO: 2950459 - RNA, 17 nt, Human
augaaauauuauguuaa

SEQ ID NO: 2950460 - RNA, 18 nt, Human
uuggcuagagguucaaag

SEQ ID NO: 2950461 - RNA, 23 nt, Human
uuggcgcugccccuggcagcccc

SEQ ID NO: 2950462 - RNA, 22 nt, Human
uuggcgcugccccuggcagccc

SEQ ID NO: 2950463 - RNA, 18 nt, Human
aucuuugcagacaggcaa

SEQ ID NO: 2950464 - RNA, 12 nt, Human
augaaagauuca

SEQ ID NO: 2950465 - RNA, 15 nt, Human
augaaagcagggacu

SEQ ID NO: 2950466 - RNA, 13 nt, Human
aucuuuuucuaac

SEQ ID NO: 2950467 - RNA, 13 nt, Human
auaauguuucaaa

SEQ ID NO: 2950468 - RNA, 18 nt, Human
auaaggguaucuggugac

SEQ ID NO: 2950469 - RNA, 21 nt, Human
auaagccagacaucaacagau

SEQ ID NO: 2950470 - RNA, 22 nt, Human
auaagccagacaucaacagaua

SEQ ID NO: 2950471 - RNA, 14 nt, Human
auaagccagacauc

SEQ ID NO: 2950472 - RNA, 16 nt, Human
auaccugucccccuga

SEQ ID NO: 2950473 - RNA, 15 nt, Human
auaccugucccccug

SEQ ID NO: 2950474 - RNA, 14 nt, Human
auaccugucccccu

SEQ ID NO: 2950475 - RNA, 13 nt, Human
auaccuguccccc

SEQ ID NO: 2950476 - RNA, 13 nt, Human
auacccaccccca

SEQ ID NO: 2950477 - RNA, 16 nt, Human
auacccacccccaccc

SEQ ID NO: 2950478 - RNA, 14 nt, Human
auacccacccccac

SEQ ID NO: 2950479 - RNA, 19 nt, Human
auaccccaagacucccaug

SEQ ID NO: 2950480 - RNA, 17 nt, Human
auaccccaagacuccca

SEQ ID NO: 2950481 - RNA, 13 nt, Human
auacagaaaaguu

SEQ ID NO: 2950482 - RNA, 17 nt, Human
auacccacccccaccca

SEQ ID NO: 2950483 - RNA, 18 nt, Human
auaauguuucaaacauau

SEQ ID NO: 2950484 - RNA, 14 nt, Human
auacaaugcugugc

SEQ ID NO: 2950485 - RNA, 17 nt, Human
auacaaugcugugcccu

SEQ ID NO: 2950486 - RNA, 13 nt, Human
auacacuuacacu

SEQ ID NO: 2950487 - RNA, 22 nt, Human
auacacuuacacuuuaugcaca

SEQ ID NO: 2950488 - RNA, 21 nt, Human
auaacaaugcuguauuuuaaa

SEQ ID NO: 2950489 - RNA, 19 nt, Human
auaacaaugcuguauuuua

SEQ ID NO: 2950490 - RNA, 20 nt, Human
auaacaaugcuguauuuuaa

SEQ ID NO: 2950491 - RNA, 14 nt, Human
auaacaaugaaagu

SEQ ID NO: 2950492 - RNA, 15 nt, Human
auaacaaugcuguau

SEQ ID NO: 2950493 - RNA, 17 nt, Human
auaacaaugcuguauuu

SEQ ID NO: 2950494 - RNA, 12 nt, Human
auaacauguaau

SEQ ID NO: 2950495 - RNA, 13 nt, Human
auaacauguaauu

SEQ ID NO: 2950496 - RNA, 18 nt, Human
auaacauguaauuaagua

SEQ ID NO: 2950497 - RNA, 20 nt, Human
auaacauguaauuaaguacu

SEQ ID NO: 2950498 - RNA, 23 nt, Human
aguuugauuaaauucuugcaaag

SEQ ID NO: 2950499 - RNA, 11 nt, Human
aguuuggccag

SEQ ID NO: 2950500 - RNA, 22 nt, Human
aguuguuacauuuuuaagugcu

SEQ ID NO: 2950501 - RNA, 19 nt, Human
aguuguuacauuuuuaagu

SEQ ID NO: 2950502 - RNA, 20 nt, Human
aguuguuacauuuuuaagug

SEQ ID NO: 2950503 - RNA, 17 nt, Human
aguuugauuaaauucuu

SEQ ID NO: 2950504 - RNA, 18 nt, Human
aguuugauuaaauucuug

SEQ ID NO: 2950505 - RNA, 20 nt, Human
aguuugauuaaauucuugca

SEQ ID NO: 2950506 - RNA, 22 nt, Human
aguuugauuaaauucuugcaaa

SEQ ID NO: 2950507 - RNA, 19 nt, Human
aguuugagaucagccuggg

SEQ ID NO: 2950508 - RNA, 18 nt, Human
aguuugagaucagccugg

SEQ ID NO: 2950509 - RNA, 16 nt, Human
aguuugauuaaauucu

SEQ ID NO: 2950510 - RNA, 21 nt, Human
aguuugaauuccuaaaauuau

SEQ ID NO: 2950511 - RNA, 20 nt, Human
aguuugagaucagccugggc

SEQ ID NO: 2950512 - RNA, 24 nt, Human
auagguuuggacaaaauggaauac

SEQ ID NO: 2950513 - RNA, 18 nt, Human
auagguuuggacaaaaug

SEQ ID NO: 2950514 - RNA, 15 nt, Human
auagccuaggugaca

SEQ ID NO: 2950515 - RNA, 17 nt, Human
auagccuaggugacaga

SEQ ID NO: 2950516 - RNA, 17 nt, Human
auagaaaguugcaaggc

SEQ ID NO: 2950517 - RNA, 18 nt, Human
auagaaaguugcaaggca

SEQ ID NO: 2950518 - RNA, 23 nt, Human
auagaaaguugcaaggcaaaugu

SEQ ID NO: 2950519 - RNA, 15 nt, Human
auagcacagacccug

SEQ ID NO: 2950520 - RNA, 18 nt, Human
auagcacagacccugccc

SEQ ID NO: 2950521 - RNA, 17 nt, Human
auagcacagacccugcc

SEQ ID NO: 2950522 - RNA, 19 nt, Human
auagcauguccuaaugcuu

SEQ ID NO: 2950523 - RNA, 16 nt, Human
auagcauguccuaaug

SEQ ID NO: 2950524 - RNA, 22 nt, Human
auagcagcccucaauugugaaa

SEQ ID NO: 2950525 - RNA, 21 nt, Human
auagcagcccucaauugugaa

SEQ ID NO: 2950526 - RNA, 15 nt, Human
auagcagcuuauuca

SEQ ID NO: 2950527 - RNA, 18 nt, Human
auauauuuuuuaaaauaa

SEQ ID NO: 2950528 - RNA, 22 nt, Human
auauauuuuuuaaaauaagucu

SEQ ID NO: 2950529 - RNA, 18 nt, Human
auauauuuuuuucugaaa

SEQ ID NO: 2950530 - RNA, 17 nt, Human
auauucauucuuuuuga

SEQ ID NO: 2950531 - RNA, 23 nt, Human
auauuucagauaaucacaauaca

SEQ ID NO: 2950532 - RNA, 17 nt, Human
auauucaggaagcucag

SEQ ID NO: 2950533 - RNA, 19 nt, Human
auauucaggaagcucaggg

SEQ ID NO: 2950534 - RNA, 14 nt, Human
auauuauguuaaaa

SEQ ID NO: 2950535 - RNA, 22 nt, Human
auaugcacacauuuuuuaaaug

SEQ ID NO: 2950536 - RNA, 16 nt, Human
auaugcucugcauguu

SEQ ID NO: 2950537 - RNA, 17 nt, Human
auaugcucugcauguua

SEQ ID NO: 2950538 - RNA, 20 nt, Human
auaugcucugcauguuacau

SEQ ID NO: 2950539 - RNA, 13 nt, Human
auauuauguuaaa

SEQ ID NO: 2950540 - RNA, 17 nt, Human
agugaauguaggcuggc

SEQ ID NO: 2950541 - RNA, 16 nt, Human
agugaauguaggcugg

SEQ ID NO: 2950542 - RNA, 17 nt, Human
agucugaaggcuggguu

SEQ ID NO: 2950543 - RNA, 19 nt, Human
aguccuuaccagcagagca

SEQ ID NO: 2950544 - RNA, 22 nt, Human
aguccucuuuucugagaggacu

SEQ ID NO: 2950545 - RNA, 20 nt, Human
aguccuuaccagcagagcac

SEQ ID NO: 2950546 - RNA, 19 nt, Human
aguccucuuuucugagagg

SEQ ID NO: 2950547 - RNA, 15 nt, Human
aguacguugugcauu

SEQ ID NO: 2950548 - RNA, 14 nt, Human
aguacguugugcau

SEQ ID NO: 2950549 - RNA, 16 nt, Human
aggucuguucuuucca

SEQ ID NO: 2950550 - RNA, 13 nt, Human
aggucuguucuuu

SEQ ID NO: 2950551 - RNA, 15 nt, Human
aggucuguucuuucc

SEQ ID NO: 2950552 - RNA, 16 nt, Human
aguacuaacauuuauu

SEQ ID NO: 2950553 - RNA, 18 nt, Human
aguacguugugcauuugg

SEQ ID NO: 2950554 - RNA, 16 nt, Human
aguacguugugcauuu

SEQ ID NO: 2950555 - RNA, 17 nt, Human
aguacguugugcauuug

SEQ ID NO: 2950556 - RNA, 14 nt, Human
aguacuauaauuua

SEQ ID NO: 2950557 - RNA, 22 nt, Human
aguacuacaguccucccaucuc

SEQ ID NO: 2950558 - RNA, 19 nt, Human
aguacuacaguccucccau

SEQ ID NO: 2950559 - RNA, 17 nt, Human
aguacuucuccacccug

SEQ ID NO: 2950560 - RNA, 12 nt, Human
aguacuucuuuu

SEQ ID NO: 2950561 - RNA, 22 nt, Human
aguacuucuccacccugcucuc

SEQ ID NO: 2950562 - RNA, 12 nt, Human
aguacuauguau

SEQ ID NO: 2950563 - RNA, 14 nt, Human
aguacuauguauca

SEQ ID NO: 2950564 - RNA, 22 nt, Human
agucacacaguauuacuucugc

SEQ ID NO: 2950565 - RNA, 20 nt, Human
aguaugaggcauuuguuuga

SEQ ID NO: 2950566 - RNA, 21 nt, Human
aguaugaggcauuuguuugaa

SEQ ID NO: 2950567 - RNA, 17 nt, Human
aguauuuuguuucagug

SEQ ID NO: 2950568 - RNA, 23 nt, Human
aguaugaggcauuuguuugaacu

SEQ ID NO: 2950569 - RNA, 14 nt, Human
aguauuuuguuuca

SEQ ID NO: 2950570 - RNA, 17 nt, Human
aguaugaggcauuuguu

SEQ ID NO: 2950571 - RNA, 24 nt, Human
aguauuuuuuacauuuuacacacu

SEQ ID NO: 2950572 - RNA, 20 nt, Human
aguauuuuuuacauuuuaca

SEQ ID NO: 2950573 - RNA, 22 nt, Human
aguauuuuuuacauuuuacaca

SEQ ID NO: 2950574 - RNA, 15 nt, Human
aguauuuuuuacauu

SEQ ID NO: 2950575 - RNA, 18 nt, Human
aguauuuuuuacauuuua

SEQ ID NO: 2950576 - RNA, 19 nt, Human
aguauuuuuuacauuuuac

SEQ ID NO: 2950577 - RNA, 16 nt, Human
aguugauacuacaguu

SEQ ID NO: 2950578 - RNA, 18 nt, Human
aguugaaaagacuccaaa

SEQ ID NO: 2950579 - RNA, 14 nt, Human
aguugaaaagacuc

SEQ ID NO: 2950580 - RNA, 20 nt, Human
aguugaaaagacuccaaaga

SEQ ID NO: 2950581 - RNA, 19 nt, Human
aguugaaaagacuccaaag

SEQ ID NO: 2950582 - RNA, 18 nt, Human
aguucagguaacaggcag

SEQ ID NO: 2950583 - RNA, 13 nt, Human
aguucaucuugaa

SEQ ID NO: 2950584 - RNA, 19 nt, Human
aguucaucuugaauuguaa

SEQ ID NO: 2950585 - RNA, 15 nt, Human
aguucaucuugaauu

SEQ ID NO: 2950586 - RNA, 23 nt, Human
aguucagagcugcccucuccugg

SEQ ID NO: 2950587 - RNA, 21 nt, Human
aguucagagcugcccucuccu

SEQ ID NO: 2950588 - RNA, 22 nt, Human
aguucagagcugcccucuccug

SEQ ID NO: 2950589 - RNA, 20 nt, Human
aguucagagcugcccucucc

SEQ ID NO: 2950590 - RNA, 19 nt, Human
aguucagagcugcccucuc

SEQ ID NO: 2950591 - RNA, 14 nt, Human
agugauucuccugc

SEQ ID NO: 2950592 - RNA, 18 nt, Human
agugccuuacacaauggu

SEQ ID NO: 2950593 - RNA, 15 nt, Human
agugauucuccugcc

SEQ ID NO: 2950594 - RNA, 17 nt, Human
agugauucuccugccuc

SEQ ID NO: 2950595 - RNA, 14 nt, Human
agugauccucccac

SEQ ID NO: 2950596 - RNA, 15 nt, Human
agugauccucccacc

SEQ ID NO: 2950597 - RNA, 18 nt, Human
agugauccucccaccuca

SEQ ID NO: 2950598 - RNA, 23 nt, Human
agugauccucccaccucagccuc

SEQ ID NO: 2950599 - RNA, 24 nt, Human
agugauccucccaccucagccucc

SEQ ID NO: 2950600 - RNA, 15 nt, Human
agugccuuauggaac

SEQ ID NO: 2950601 - RNA, 14 nt, Human
agugccuuauggaa

SEQ ID NO: 2950602 - RNA, 13 nt, Human
agugccuuaugga

SEQ ID NO: 2950603 - RNA, 10 nt, Human
agugccuuau

SEQ ID NO: 2950604 - RNA, 16 nt, Human
agugccuuauggaaca

SEQ ID NO: 2950605 - RNA, 16 nt, Human
agugggagcugccugu

SEQ ID NO: 2950606 - RNA, 19 nt, Human
agugucaaugcagccccca

SEQ ID NO: 2950607 - RNA, 14 nt, Human
auguuugccucugc

SEQ ID NO: 2950608 - RNA, 15 nt, Human
auguuugccucugcc

SEQ ID NO: 2950609 - RNA, 17 nt, Human
auguuugccucugccuc

SEQ ID NO: 2950610 - RNA, 15 nt, Human
auguucugggacaca

SEQ ID NO: 2950611 - RNA, 17 nt, Human
auguucucugaggacac

SEQ ID NO: 2950612 - RNA, 14 nt, Human
auguucugggacac

SEQ ID NO: 2950613 - RNA, 13 nt, Human
auguucucugagg

SEQ ID NO: 2950614 - RNA, 17 nt, Human
auguucucucuucucca

SEQ ID NO: 2950615 - RNA, 17 nt, Human
auguuccuagugaaaga

SEQ ID NO: 2950616 - RNA, 16 nt, Human
auguucucucuucucc

SEQ ID NO: 2950617 - RNA, 16 nt, Human
auguuccuagugaaag

SEQ ID NO: 2950618 - RNA, 15 nt, Human
auguuccuagugaaa

SEQ ID NO: 2950619 - RNA, 13 nt, Human
auguguaaguauu

SEQ ID NO: 2950620 - RNA, 17 nt, Human
auguguaagacaaaaag

SEQ ID NO: 2950621 - RNA, 19 nt, Human
auguguaagacaaaaagcu

SEQ ID NO: 2950622 - RNA, 17 nt, Human
augucacaggcaggucc

SEQ ID NO: 2950623 - RNA, 19 nt, Human
augucacaggcagguccag

SEQ ID NO: 2950624 - RNA, 15 nt, Human
augugaacacaucag

SEQ ID NO: 2950625 - RNA, 23 nt, Human
auguaauuaaguacuauguauca

SEQ ID NO: 2950626 - RNA, 13 nt, Human
augucacaggcag

SEQ ID NO: 2950627 - RNA, 21 nt, Human
augucaaucagccuaguugau

SEQ ID NO: 2950628 - RNA, 16 nt, Human
augucaaucagccuag

SEQ ID NO: 2950629 - RNA, 13 nt, Human
augguagcauuuu

SEQ ID NO: 2950630 - RNA, 18 nt, Human
augguagcauuuuaaaca

SEQ ID NO: 2950631 - RNA, 23 nt, Human
augguagcauuuuaaacaaaaua

SEQ ID NO: 2950632 - RNA, 15 nt, Human
augguaguuuuacag

SEQ ID NO: 2950633 - RNA, 22 nt, Human
augguaguuuuacaguguuucu

SEQ ID NO: 2950634 - RNA, 21 nt, Human
augguaguuuuacaguguuuc

SEQ ID NO: 2950635 - RNA, 16 nt, Human
auggucccaucugcag

SEQ ID NO: 2950636 - RNA, 23 nt, Human
augggugcuuggaggaaggaaac

SEQ ID NO: 2950637 - RNA, 21 nt, Human
augggugcuuggaggaaggaa

SEQ ID NO: 2950638 - RNA, 20 nt, Human
augggugcuuggaggaagga

SEQ ID NO: 2950639 - RNA, 16 nt, Human
augcacacacauauau

SEQ ID NO: 2950640 - RNA, 15 nt, Human
augcacacacauaua

SEQ ID NO: 2950641 - RNA, 15 nt, Human
augcacacauuuuuu

SEQ ID NO: 2950642 - RNA, 13 nt, Human
augcacacauuuu

SEQ ID NO: 2950643 - RNA, 14 nt, Human
augcacacauuuuu

SEQ ID NO: 2950644 - RNA, 19 nt, Human
augcacagaguuguuacau

SEQ ID NO: 2950645 - RNA, 21 nt, Human
augcacagaguuguuacauuu

SEQ ID NO: 2950646 - RNA, 22 nt, Human
augcacagaguuguuacauuuu

SEQ ID NO: 2950647 - RNA, 20 nt, Human
augccuggauggggcugcac

SEQ ID NO: 2950648 - RNA, 19 nt, Human
augccuggauggggcugca

SEQ ID NO: 2950649 - RNA, 18 nt, Human
augcacaaacagaggccg

SEQ ID NO: 2950650 - RNA, 18 nt, Human
augaugaaaugaggucag

SEQ ID NO: 2950651 - RNA, 23 nt, Human
augaugaaaugaggucagagccu

SEQ ID NO: 2950652 - RNA, 21 nt, Human
augaugaucuuuaaaauacac

SEQ ID NO: 2950653 - RNA, 18 nt, Human
augaugaucuuuaaaaua

SEQ ID NO: 2950654 - RNA, 15 nt, Human
augaugauccuaggc

SEQ ID NO: 2950655 - RNA, 18 nt, Human
augaucuuugcagacagg

SEQ ID NO: 2950656 - RNA, 19 nt, Human
augaucuuugcagacaggc

SEQ ID NO: 2950657 - RNA, 21 nt, Human
augaucuuugcagacaggcaa

SEQ ID NO: 2950658 - RNA, 17 nt, Human
augaucuuugcagacag

SEQ ID NO: 2950659 - RNA, 16 nt, Human
augaucuuuaaaauac

SEQ ID NO: 2950660 - RNA, 16 nt, Human
augcugcccugugagu

SEQ ID NO: 2950661 - RNA, 15 nt, Human
augcugcccugugag

SEQ ID NO: 2950662 - RNA, 14 nt, Human
augcugcccuguga

SEQ ID NO: 2950663 - RNA, 12 nt, Human
augcugcccugu

SEQ ID NO: 2950664 - RNA, 13 nt, Human
augcugcccugug

SEQ ID NO: 2950665 - RNA, 16 nt, Human
augcuuguacauaaug

SEQ ID NO: 2950666 - RNA, 15 nt, Human
augcuuguacauaau

SEQ ID NO: 2950667 - RNA, 18 nt, Human
auggcuggagcuagaauu

SEQ ID NO: 2950668 - RNA, 18 nt, Human
auggcuuuugugcauuau

SEQ ID NO: 2950669 - RNA, 16 nt, Human
auggcuuuugugcauu

SEQ ID NO: 2950670 - RNA, 17 nt, Human
auggcuuuugugcauua

SEQ ID NO: 2950671 - RNA, 13 nt, Human
aucagcuuauugu

SEQ ID NO: 2950672 - RNA, 22 nt, Human
aucagcuugcccuguuaaaaga

SEQ ID NO: 2950673 - RNA, 16 nt, Human
aucaugucagucugcu

SEQ ID NO: 2950674 - RNA, 14 nt, Human
aucaugucuggcua

SEQ ID NO: 2950675 - RNA, 17 nt, Human
aucaugaauuaguuuua

SEQ ID NO: 2950676 - RNA, 24 nt, Human
aucaaaagguuaauaaaguaauua

SEQ ID NO: 2950677 - RNA, 23 nt, Human
aucaaagagguuuuaaaaaaauc

SEQ ID NO: 2950678 - RNA, 20 nt, Human
aucaaagagguuuuaaaaaa

SEQ ID NO: 2950679 - RNA, 20 nt, Human
aucaccaacgucugugccau

SEQ ID NO: 2950680 - RNA, 13 nt, Human
aucaccagacagg

SEQ ID NO: 2950681 - RNA, 13 nt, Human
aucacagccucug

SEQ ID NO: 2950682 - RNA, 14 nt, Human
aucaaauaugcaaa

SEQ ID NO: 2950683 - RNA, 17 nt, Human
auccucauacccacccc

SEQ ID NO: 2950684 - RNA, 21 nt, Human
aucgcuccaccuugcagcucu

SEQ ID NO: 2950685 - RNA, 17 nt, Human
aucgcuccaccuugcag

SEQ ID NO: 2950686 - RNA, 19 nt, Human
auccagacccggcugcgug

SEQ ID NO: 2950687 - RNA, 19 nt, Human
aucccaugagccucagcau

SEQ ID NO: 2950688 - RNA, 19 nt, Human
auccucaguuuuugugaaa

SEQ ID NO: 2950689 - RNA, 23 nt, Human
aucucugauucccugauuuaaua

SEQ ID NO: 2950690 - RNA, 20 nt, Human
aucuccgucaacucauauuu

SEQ ID NO: 2950691 - RNA, 12 nt, Human
aucuaguaguug

SEQ ID NO: 2950692 - RNA, 15 nt, Human
aucuaguaguuguuc

SEQ ID NO: 2950693 - RNA, 21 nt, Human
aucuaguaguuguucugaaau

SEQ ID NO: 2950694 - RNA, 17 nt, Human
augagggagaugccaug

SEQ ID NO: 2950695 - RNA, 16 nt, Human
augagggagaugccau

SEQ ID NO: 2950696 - RNA, 14 nt, Human
augacuguuuuuaa

SEQ ID NO: 2950697 - RNA, 13 nt, Human
augaggcauuugu

SEQ ID NO: 2950698 - RNA, 14 nt, Human
augaggcauuuguu

SEQ ID NO: 2950699 - RNA, 21 nt, Human
augaggcauuuguuugaacug

SEQ ID NO: 2950700 - RNA, 22 nt, Human
augaggcauuuguuugaacuga

SEQ ID NO: 2950701 - RNA, 20 nt, Human
augaaguccaagcauuuaga

SEQ ID NO: 2950702 - RNA, 23 nt, Human
augaaguccaagcauuuagaugu

SEQ ID NO: 2950703 - RNA, 13 nt, Human
augaaguacucau

SEQ ID NO: 2950704 - RNA, 21 nt, Human
augaaguacucauacauguua

SEQ ID NO: 2950705 - RNA, 14 nt, Human
augaaaacacauuu

SEQ ID NO: 2950706 - RNA, 15 nt, Human
augaaaacacauuuu

SEQ ID NO: 2950707 - RNA, 16 nt, Human
augaaaacacauuuuu

SEQ ID NO: 2950708 - RNA, 15 nt, Human
agcugaaccugggua

SEQ ID NO: 2950709 - RNA, 20 nt, Human
agcuccccucggagaagagc

SEQ ID NO: 2950710 - RNA, 19 nt, Human
agcuccccucggagaagag

SEQ ID NO: 2950711 - RNA, 17 nt, Human
agcuccccucggagaag

SEQ ID NO: 2950712 - RNA, 22 nt, Human
agcugguuuuuagcggagacgg

SEQ ID NO: 2950713 - RNA, 16 nt, Human
agcugguugagguuuc

SEQ ID NO: 2950714 - RNA, 19 nt, Human
agcugcugagauccuggac

SEQ ID NO: 2950715 - RNA, 18 nt, Human
agcuggucccacucaguc

SEQ ID NO: 2950716 - RNA, 13 nt, Human
agcugcugacagu

SEQ ID NO: 2950717 - RNA, 14 nt, Human
agcugcugacagug

SEQ ID NO: 2950718 - RNA, 16 nt, Human
agcuggucccacucag

SEQ ID NO: 2950719 - RNA, 17 nt, Human
agcuggucccacucagu

SEQ ID NO: 2950720 - RNA, 12 nt, Human
agcugcugacag

SEQ ID NO: 2950721 - RNA, 19 nt, Human
agcugcgguccacccagga

SEQ ID NO: 2950722 - RNA, 20 nt, Human
agcugcgguccacccaggag

SEQ ID NO: 2950723 - RNA, 13 nt, Human
agcugcgguccac

SEQ ID NO: 2950724 - RNA, 16 nt, Human
agcugcgguccaccca

SEQ ID NO: 2950725 - RNA, 17 nt, Human
agcugcgguccacccag

SEQ ID NO: 2950726 - RNA, 18 nt, Human
agcugcgguccacccagg

SEQ ID NO: 2950727 - RNA, 12 nt, Human
agcucagagagg

SEQ ID NO: 2950728 - RNA, 14 nt, Human
agcucagagagggu

SEQ ID NO: 2950729 - RNA, 18 nt, Human
agcucagagaggguggga

SEQ ID NO: 2950730 - RNA, 19 nt, Human
agcucaccagccccagugc

SEQ ID NO: 2950731 - RNA, 20 nt, Human
agcucaccagccccagugcc

SEQ ID NO: 2950732 - RNA, 15 nt, Human
agcucaccagcccca

SEQ ID NO: 2950733 - RNA, 12 nt, Human
agcucaccucuc

SEQ ID NO: 2950734 - RNA, 19 nt, Human
agcucaccucucccuugga

SEQ ID NO: 2950735 - RNA, 18 nt, Human
agcucaccucucccuugg

SEQ ID NO: 2950736 - RNA, 15 nt, Human
agcucaccucucccu

SEQ ID NO: 2950737 - RNA, 16 nt, Human
agcucaccagccccag

SEQ ID NO: 2950738 - RNA, 12 nt, Human
agccugggaggu

SEQ ID NO: 2950739 - RNA, 19 nt, Human
agcgagcccugguggcagu

SEQ ID NO: 2950740 - RNA, 13 nt, Human
agcgagcccuggu

SEQ ID NO: 2950741 - RNA, 17 nt, Human
agcgacagugagacucu

SEQ ID NO: 2950742 - RNA, 16 nt, Human
aggacccgucuccagc

SEQ ID NO: 2950743 - RNA, 15 nt, Human
aggagaggagagggg

SEQ ID NO: 2950744 - RNA, 20 nt, Human
agcugcugagauccuggacu

SEQ ID NO: 2950745 - RNA, 23 nt, Human
agcuuuguuuguugucagcugaa

SEQ ID NO: 2950746 - RNA, 22 nt, Human
agcuuuguuuguugucagcuga

SEQ ID NO: 2950747 - RNA, 19 nt, Human
agcuucauuuccugugucu

SEQ ID NO: 2950748 - RNA, 18 nt, Human
agcuucauuuccuguguc

SEQ ID NO: 2950749 - RNA, 20 nt, Human
agcuuauuuccucauuuuua

SEQ ID NO: 2950750 - RNA, 20 nt, Human
aggaacaaggcaaggcuguc

SEQ ID NO: 2950751 - RNA, 21 nt, Human
aggaacuuaaauaaugugaaa

SEQ ID NO: 2950752 - RNA, 23 nt, Human
aggaaccgagggggcugcuccca

SEQ ID NO: 2950753 - RNA, 12 nt, Human
aggaacaaggca

SEQ ID NO: 2950754 - RNA, 19 nt, Human
aggaacaaggcaaggcugu

SEQ ID NO: 2950755 - RNA, 17 nt, Human
aggaacaaggcaaggcu

SEQ ID NO: 2950756 - RNA, 16 nt, Human
aggaacaaggcaaggc

SEQ ID NO: 2950757 - RNA, 13 nt, Human
aggaacaaggcaa

SEQ ID NO: 2950758 - RNA, 22 nt, Human
aggaauaccugucccccugaca

SEQ ID NO: 2950759 - RNA, 18 nt, Human
aggaauaccugucccccu

SEQ ID NO: 2950760 - RNA, 15 nt, Human
aggaauaccuguccc

SEQ ID NO: 2950761 - RNA, 13 nt, Human
aggaaguagagga

SEQ ID NO: 2950762 - RNA, 15 nt, Human
agggauuagggagag

SEQ ID NO: 2950763 - RNA, 22 nt, Human
agggauuuucagcccucagaau

SEQ ID NO: 2950764 - RNA, 17 nt, Human
agggauuuucagcccuc

SEQ ID NO: 2950765 - RNA, 14 nt, Human
agggccugcaaggg

SEQ ID NO: 2950766 - RNA, 15 nt, Human
agggccugcaaggga

SEQ ID NO: 2950767 - RNA, 13 nt, Human
agggccuggccug

SEQ ID NO: 2950768 - RNA, 12 nt, Human
agggccuggccu

SEQ ID NO: 2950769 - RNA, 16 nt, Human
agggauacccauccca

SEQ ID NO: 2950770 - RNA, 22 nt, Human
aggggcccaaauucuuucagug

SEQ ID NO: 2950771 - RNA, 14 nt, Human
agggccuggccuga

SEQ ID NO: 2950772 - RNA, 21 nt, Human
aggguaucuggugacuuuccu

SEQ ID NO: 2950773 - RNA, 13 nt, Human
aggguauuccaga

SEQ ID NO: 2950774 - RNA, 14 nt, Human
agggucccuggugg

SEQ ID NO: 2950775 - RNA, 12 nt, Human
agggucccuggu

SEQ ID NO: 2950776 - RNA, 22 nt, Human
agggucccugguggcagcucac

SEQ ID NO: 2950777 - RNA, 20 nt, Human
agggucccugguggcagcuc

SEQ ID NO: 2950778 - RNA, 17 nt, Human
agggucccugguggcag

SEQ ID NO: 2950779 - RNA, 16 nt, Human
agggucccugguggca

SEQ ID NO: 2950780 - RNA, 22 nt, Human
aggguuuugccauguuggccag

SEQ ID NO: 2950781 - RNA, 23 nt, Human
aggguuuugccauguuggccagg

SEQ ID NO: 2950782 - RNA, 13 nt, Human
agguacucuccug

SEQ ID NO: 2950783 - RNA, 14 nt, Human
agguacucuccugg

SEQ ID NO: 2950784 - RNA, 22 nt, Human
agguacgaaaagaggggaagag

SEQ ID NO: 2950785 - RNA, 16 nt, Human
agguaacaggcagaua

SEQ ID NO: 2950786 - RNA, 13 nt, Human
agguaacaggcag

SEQ ID NO: 2950787 - RNA, 14 nt, Human
agguaacaggcaga

SEQ ID NO: 2950788 - RNA, 20 nt, Human
agggucucacuauguugccc

SEQ ID NO: 2950789 - RNA, 18 nt, Human
aggcauggacuucuggau

SEQ ID NO: 2950790 - RNA, 15 nt, Human
aggcagcagacacau

SEQ ID NO: 2950791 - RNA, 15 nt, Human
aggcaugguggccca

SEQ ID NO: 2950792 - RNA, 17 nt, Human
aggcaugugaugagagg

SEQ ID NO: 2950793 - RNA, 17 nt, Human
aggcauguucucugagg

SEQ ID NO: 2950794 - RNA, 21 nt, Human
aggcaugugaugagaggaaau

SEQ ID NO: 2950795 - RNA, 20 nt, Human
aggcaugugaugagaggaaa

SEQ ID NO: 2950796 - RNA, 19 nt, Human
aggcaugugaugagaggaa

SEQ ID NO: 2950797 - RNA, 18 nt, Human
aggcauguucucugagga

SEQ ID NO: 2950798 - RNA, 19 nt, Human
aggcauguucucugaggac

SEQ ID NO: 2950799 - RNA, 12 nt, Human
aggcauguucuc

SEQ ID NO: 2950800 - RNA, 17 nt, Human
aggcauuccccaggagg

SEQ ID NO: 2950801 - RNA, 18 nt, Human
aggcauuccccaggaggc

SEQ ID NO: 2950802 - RNA, 15 nt, Human
aggccaggcccucug

SEQ ID NO: 2950803 - RNA, 14 nt, Human
aggccaggcccucu

SEQ ID NO: 2950804 - RNA, 13 nt, Human
aggccaggcccuc

SEQ ID NO: 2950805 - RNA, 23 nt, Human
aggccagcugcuugggcuucauc

SEQ ID NO: 2950806 - RNA, 20 nt, Human
aggcauuccccaggaggcca

SEQ ID NO: 2950807 - RNA, 19 nt, Human
aggcauuccccaggaggcc

SEQ ID NO: 2950808 - RNA, 12 nt, Human
aggcccuucucu

SEQ ID NO: 2950809 - RNA, 19 nt, Human
aggcccuucucuccagccc

SEQ ID NO: 2950810 - RNA, 15 nt, Human
aggcccuucucucca

SEQ ID NO: 2950811 - RNA, 21 nt, Human
aggccaugggcacugugggua

SEQ ID NO: 2950812 - RNA, 21 nt, Human
aggcccucugcccacucccug

SEQ ID NO: 2950813 - RNA, 23 nt, Human
aggcccucugcccacucccugca

SEQ ID NO: 2950814 - RNA, 22 nt, Human
aggcccucugcccacucccugc

SEQ ID NO: 2950815 - RNA, 16 nt, Human
aggcugaggcaggaga

SEQ ID NO: 2950816 - RNA, 18 nt, Human
aggcugaggcaggagacu

SEQ ID NO: 2950817 - RNA, 16 nt, Human
aggcugaggcgggugg

SEQ ID NO: 2950818 - RNA, 18 nt, Human
aggcuggguucugauccu

SEQ ID NO: 2950819 - RNA, 13 nt, Human
aggcuaccuuugu

SEQ ID NO: 2950820 - RNA, 14 nt, Human
aggcuaccuuugua

SEQ ID NO: 2950821 - RNA, 15 nt, Human
aggcuaccuuuguau

SEQ ID NO: 2950822 - RNA, 20 nt, Human
aggcuguaucccaugagccu

SEQ ID NO: 2950823 - RNA, 21 nt, Human
aggcuguaucccaugagccuc

SEQ ID NO: 2950824 - RNA, 22 nt, Human
aggcuguaucccaugagccuca

SEQ ID NO: 2950825 - RNA, 24 nt, Human
aggcuuagacccucaugcugccaa

SEQ ID NO: 2950826 - RNA, 17 nt, Human
aggcuuagucacugaga

SEQ ID NO: 2950827 - RNA, 18 nt, Human
aggcuuagucacugagac

SEQ ID NO: 2950828 - RNA, 15 nt, Human
agggacugaggggag

SEQ ID NO: 2950829 - RNA, 15 nt, Human
agggacccuccacca

SEQ ID NO: 2950830 - RNA, 20 nt, Human
agacaaugacuuacuguaca

SEQ ID NO: 2950831 - RNA, 11 nt, Human
agacagagucu

SEQ ID NO: 2950832 - RNA, 13 nt, Human
agacagagcuaca

SEQ ID NO: 2950833 - RNA, 19 nt, Human
agacagagucucacuguug

SEQ ID NO: 2950834 - RNA, 20 nt, Human
agacagagucucacuguugc

SEQ ID NO: 2950835 - RNA, 15 nt, Human
agacagagcuacaca

SEQ ID NO: 2950836 - RNA, 21 nt, Human
agacaaugacuuacuguacau

SEQ ID NO: 2950837 - RNA, 22 nt, Human
agacaaugacuuacuguacaug

SEQ ID NO: 2950838 - RNA, 21 nt, Human
agacagagucucacuguugcc

SEQ ID NO: 2950839 - RNA, 22 nt, Human
agacagauacuccuccaagguu

SEQ ID NO: 2950840 - RNA, 15 nt, Human
agaccacguuucuaa

SEQ ID NO: 2950841 - RNA, 17 nt, Human
agacccaaaaggcagaa

SEQ ID NO: 2950842 - RNA, 19 nt, Human
agacccaaaaggcagaagc

SEQ ID NO: 2950843 - RNA, 17 nt, Human
agaaugagagacacacu

SEQ ID NO: 2950844 - RNA, 22 nt, Human
agaaugagagacacacugaaga

SEQ ID NO: 2950845 - RNA, 17 nt, Human
agaaugauuaugaauua

SEQ ID NO: 2950846 - RNA, 22 nt, Human
agaaugcacaaacagaggccgc

SEQ ID NO: 2950847 - RNA, 19 nt, Human
agaaugcacaaacagaggc

SEQ ID NO: 2950848 - RNA, 18 nt, Human
agaaugaaagggcccaga

SEQ ID NO: 2950849 - RNA, 22 nt, Human
agaagucacauuccugaacagg

SEQ ID NO: 2950850 - RNA, 21 nt, Human
agaagugaaaaucuacacucc

SEQ ID NO: 2950851 - RNA, 21 nt, Human
agaagucuucuauuuauuuau

SEQ ID NO: 2950852 - RNA, 21 nt, Human
agaagagauugugguuucauu

SEQ ID NO: 2950853 - RNA, 21 nt, Human
agaagagcuguucacagccag

SEQ ID NO: 2950854 - RNA, 22 nt, Human
agaagagcuguucacagccaga

SEQ ID NO: 2950855 - RNA, 21 nt, Human
acuuuccucuuuggucuacac

SEQ ID NO: 2950856 - RNA, 13 nt, Human
agaagacacugau

SEQ ID NO: 2950857 - RNA, 21 nt, Human
agaagacacugaugggcaacc

SEQ ID NO: 2950858 - RNA, 20 nt, Human
agaagucacauuccugaaca

SEQ ID NO: 2950859 - RNA, 21 nt, Human
agaagucacauuccugaacag

SEQ ID NO: 2950860 - RNA, 18 nt, Human
agaagucacauuccugaa

SEQ ID NO: 2950861 - RNA, 14 nt, Human
agaaguaacuuacu

SEQ ID NO: 2950862 - RNA, 13 nt, Human
agagcccaccuug

SEQ ID NO: 2950863 - RNA, 13 nt, Human
agagccagggucu

SEQ ID NO: 2950864 - RNA, 16 nt, Human
agagagaccacuuuuc

SEQ ID NO: 2950865 - RNA, 16 nt, Human
agacuggauaguccgu

SEQ ID NO: 2950866 - RNA, 18 nt, Human
agacucugucucaaaaaa

SEQ ID NO: 2950867 - RNA, 13 nt, Human
agacucugucuca

SEQ ID NO: 2950868 - RNA, 22 nt, Human
agacugaguacguugugcauuu

SEQ ID NO: 2950869 - RNA, 18 nt, Human
agacucugucucagucca

SEQ ID NO: 2950870 - RNA, 20 nt, Human
agacugaguacguugugcau

SEQ ID NO: 2950871 - RNA, 16 nt, Human
agacgcugugcugccc

SEQ ID NO: 2950872 - RNA, 14 nt, Human
agaggacuuuucuu

SEQ ID NO: 2950873 - RNA, 21 nt, Human
agaggacuuuucuuuguggcu

SEQ ID NO: 2950874 - RNA, 22 nt, Human
agaggacuuuucuuuguggcuu

SEQ ID NO: 2950875 - RNA, 19 nt, Human
agaggggguggccucccaa

SEQ ID NO: 2950876 - RNA, 17 nt, Human
agaggggguggccuccc

SEQ ID NO: 2950877 - RNA, 16 nt, Human
agagggccugcaaggg

SEQ ID NO: 2950878 - RNA, 13 nt, Human
agagggccugcaa

SEQ ID NO: 2950879 - RNA, 13 nt, Human
agaggaaugaagu

SEQ ID NO: 2950880 - RNA, 19 nt, Human
agauguagaggagaaacug

SEQ ID NO: 2950881 - RNA, 16 nt, Human
agauguagaggagaaa

SEQ ID NO: 2950882 - RNA, 22 nt, Human
agauucuuguauuuauuacaac

SEQ ID NO: 2950883 - RNA, 14 nt, Human
agaugagugagcau

SEQ ID NO: 2950884 - RNA, 16 nt, Human
agaguggaauaagaca

SEQ ID NO: 2950885 - RNA, 14 nt, Human
agaugaaggucugu

SEQ ID NO: 2950886 - RNA, 17 nt, Human
agaugaaggucuguuuu

SEQ ID NO: 2950887 - RNA, 23 nt, Human
agcaaaauuuuuucucuaggaaa

SEQ ID NO: 2950888 - RNA, 18 nt, Human
agcaaaagaugcuucuca

SEQ ID NO: 2950889 - RNA, 24 nt, Human
agcaaaauuuuuucucuaggaaau

SEQ ID NO: 2950890 - RNA, 18 nt, Human
agauucuuuccugaggcu

SEQ ID NO: 2950891 - RNA, 21 nt, Human
agauucuuuccugaggcuggg

SEQ ID NO: 2950892 - RNA, 19 nt, Human
agauucuuuccugaggcug

SEQ ID NO: 2950893 - RNA, 23 nt, Human
agauugcaacaggcugggcuuca

SEQ ID NO: 2950894 - RNA, 20 nt, Human
agauugcaacaggcugggcu

SEQ ID NO: 2950895 - RNA, 21 nt, Human
agauugcaacaggcugggcuu

SEQ ID NO: 2950896 - RNA, 20 nt, Human
agcaaaggagauuggaagga

SEQ ID NO: 2950897 - RNA, 17 nt, Human
agcaauuaugaaaauaa

SEQ ID NO: 2950898 - RNA, 15 nt, Human
agcaauuaugaaaau

SEQ ID NO: 2950899 - RNA, 12 nt, Human
agcacagacccu

SEQ ID NO: 2950900 - RNA, 15 nt, Human
agcacagacccugcc

SEQ ID NO: 2950901 - RNA, 14 nt, Human
agcacagacccugc

SEQ ID NO: 2950902 - RNA, 16 nt, Human
agcacagacccugccc

SEQ ID NO: 2950903 - RNA, 17 nt, Human
agcacgauuucuguuua

SEQ ID NO: 2950904 - RNA, 19 nt, Human
agcacgauuucuguuuaga

SEQ ID NO: 2950905 - RNA, 21 nt, Human
agcacgauuucuguuuagaua

SEQ ID NO: 2950906 - RNA, 16 nt, Human
agccaaagcuaggccu

SEQ ID NO: 2950907 - RNA, 14 nt, Human
agcauccuggcacc

SEQ ID NO: 2950908 - RNA, 17 nt, Human
agcauccuggcacccgg

SEQ ID NO: 2950909 - RNA, 15 nt, Human
agccagaggagagag

SEQ ID NO: 2950910 - RNA, 13 nt, Human
agccagaggagag

SEQ ID NO: 2950911 - RNA, 14 nt, Human
agccagcaggcucu

SEQ ID NO: 2950912 - RNA, 18 nt, Human
agccagaggagagaggac

SEQ ID NO: 2950913 - RNA, 17 nt, Human
agccagaggagagagga

SEQ ID NO: 2950914 - RNA, 23 nt, Human
agcccacgcccccacuggugaca

SEQ ID NO: 2950915 - RNA, 20 nt, Human
agcccacgcccccacuggug

SEQ ID NO: 2950916 - RNA, 14 nt, Human
agcccacgccccca

SEQ ID NO: 2950917 - RNA, 16 nt, Human
agcccaccuuggcuca

SEQ ID NO: 2950918 - RNA, 14 nt, Human
agcccaccuuggcu

SEQ ID NO: 2950919 - RNA, 15 nt, Human
agcccaccccucaac

SEQ ID NO: 2950920 - RNA, 16 nt, Human
agccagcaggcucuca

SEQ ID NO: 2950921 - RNA, 13 nt, Human
agcauccuggcac

SEQ ID NO: 2950922 - RNA, 13 nt, Human
agccccacagccc

SEQ ID NO: 2950923 - RNA, 21 nt, Human
agcccgggcucugccucccau

SEQ ID NO: 2950924 - RNA, 20 nt, Human
agcccgggcucugccuccca

SEQ ID NO: 2950925 - RNA, 18 nt, Human
agcccgggcucugccucc

SEQ ID NO: 2950926 - RNA, 17 nt, Human
agcccgggcucugccuc

SEQ ID NO: 2950927 - RNA, 15 nt, Human
agccccauccucugu

SEQ ID NO: 2950928 - RNA, 23 nt, Human
agccccauccucuguacagagcc

SEQ ID NO: 2950929 - RNA, 17 nt, Human
agccccauccucuguac

SEQ ID NO: 2950930 - RNA, 17 nt, Human
agccccauucugccugc

SEQ ID NO: 2950931 - RNA, 18 nt, Human
agccccauucugccugcc

SEQ ID NO: 2950932 - RNA, 19 nt, Human
agccccauucugccugccc

SEQ ID NO: 2950933 - RNA, 15 nt, Human
aagggauuuucagcc

SEQ ID NO: 2950934 - RNA, 17 nt, Human
aagggauggcaagaugu

SEQ ID NO: 2950935 - RNA, 14 nt, Human
aagggauggcaaga

SEQ ID NO: 2950936 - RNA, 23 nt, Human
aagggauuuucagcccucagaau

SEQ ID NO: 2950937 - RNA, 21 nt, Human
aagggauuuucagcccucaga

SEQ ID NO: 2950938 - RNA, 20 nt, Human
aagggacuuggaagcuccgc

SEQ ID NO: 2950939 - RNA, 18 nt, Human
aagggacgcuacccggga

SEQ ID NO: 2950940 - RNA, 19 nt, Human
aaggucuguuuuguguacu

SEQ ID NO: 2950941 - RNA, 20 nt, Human
aaggucuguuuuguguacuu

SEQ ID NO: 2950942 - RNA, 23 nt, Human
aaggucuguuuuguguacuuuua

SEQ ID NO: 2950943 - RNA, 12 nt, Human
aaguagaggagg

SEQ ID NO: 2950944 - RNA, 21 nt, Human
aagcgugagccacugcaccgg

SEQ ID NO: 2950945 - RNA, 17 nt, Human
aagcgugagccacugca

SEQ ID NO: 2950946 - RNA, 20 nt, Human
aagcgugagccacugcaccg

SEQ ID NO: 2950947 - RNA, 14 nt, Human
aagcugcugacagu

SEQ ID NO: 2950948 - RNA, 22 nt, Human
aagcugccagccgagauagcca

SEQ ID NO: 2950949 - RNA, 12 nt, Human
aagcugccagcc

SEQ ID NO: 2950950 - RNA, 11 nt, Human
aagcugccagc

SEQ ID NO: 2950951 - RNA, 16 nt, Human
aagcugcugacagugu

SEQ ID NO: 2950952 - RNA, 23 nt, Human
aaggaaugauuaauuaaaacaca

SEQ ID NO: 2950953 - RNA, 15 nt, Human
aaggaaugcaaagau

SEQ ID NO: 2950954 - RNA, 16 nt, Human
aaggaaugcaaagaug

SEQ ID NO: 2950955 - RNA, 15 nt, Human
aagcgauucuucugc

SEQ ID NO: 2950956 - RNA, 14 nt, Human
aagcgauucuucug

SEQ ID NO: 2950957 - RNA, 16 nt, Human
aagcgugagccacugc

SEQ ID NO: 2950958 - RNA, 16 nt, Human
aagcgauucuucugcu

SEQ ID NO: 2950959 - RNA, 15 nt, Human
aagccagcaggcucu

SEQ ID NO: 2950960 - RNA, 18 nt, Human
aagccagcaggcucucag

SEQ ID NO: 2950961 - RNA, 21 nt, Human
aagccaccaacauacucccau

SEQ ID NO: 2950962 - RNA, 19 nt, Human
aagccagauuuuccugaaa

SEQ ID NO: 2950963 - RNA, 16 nt, Human
aagacuuuggaaagag

SEQ ID NO: 2950964 - RNA, 23 nt, Human
aagacagugaaagaaaauaacaa

SEQ ID NO: 2950965 - RNA, 13 nt, Human
aacuguuuagaug

SEQ ID NO: 2950966 - RNA, 15 nt, Human
aagagaacuuccaga

SEQ ID NO: 2950967 - RNA, 17 nt, Human
aagacuuugguuauuuu

SEQ ID NO: 2950968 - RNA, 23 nt, Human
aagacuuugguuauuuuacuuuu

SEQ ID NO: 2950969 - RNA, 13 nt, Human
aagacuuugguua

SEQ ID NO: 2950970 - RNA, 15 nt, Human
aagacuuugguuauu

SEQ ID NO: 2950971 - RNA, 14 nt, Human
aagauacugaaaua

SEQ ID NO: 2950972 - RNA, 16 nt, Human
aagauacugaaauaaa

SEQ ID NO: 2950973 - RNA, 20 nt, Human
aagauacugaaauaaacguc

SEQ ID NO: 2950974 - RNA, 22 nt, Human
aagauucuauguuaauauuuua

SEQ ID NO: 2950975 - RNA, 21 nt, Human
aagauucuauguuaauauuuu

SEQ ID NO: 2950976 - RNA, 20 nt, Human
aagauucauauuuacuucuu

SEQ ID NO: 2950977 - RNA, 20 nt, Human
aagauucaaugccccugaau

SEQ ID NO: 2950978 - RNA, 21 nt, Human
aagauucaaugccccugaauu

SEQ ID NO: 2950979 - RNA, 19 nt, Human
aagauuuugaaauuuuuau

SEQ ID NO: 2950980 - RNA, 20 nt, Human
aagcagaguggcagucuuca

SEQ ID NO: 2950981 - RNA, 19 nt, Human
aagccaccaacauacuccc

SEQ ID NO: 2950982 - RNA, 11 nt, Human
aagcagagugg

SEQ ID NO: 2950983 - RNA, 14 nt, Human
aagcagaguggcag

SEQ ID NO: 2950984 - RNA, 15 nt, Human
aagcagggacuugaa

SEQ ID NO: 2950985 - RNA, 21 nt, Human
aagcagaggaaggagaggaga

SEQ ID NO: 2950986 - RNA, 14 nt, Human
aagcagaaugugau

SEQ ID NO: 2950987 - RNA, 10 nt, Human
aagcagagug

SEQ ID NO: 2950988 - RNA, 12 nt, Human
aaguauagaaaa

SEQ ID NO: 2950989 - RNA, 16 nt, Human
aaguauagaaaaucuu

SEQ ID NO: 2950990 - RNA, 18 nt, Human
aaguauagaaaaucuuca

SEQ ID NO: 2950991 - RNA, 19 nt, Human
aaguauagaaaaucuucau

SEQ ID NO: 2950992 - RNA, 14 nt, Human
aagugcugcauuua

SEQ ID NO: 2950993 - RNA, 13 nt, Human
aagugcugcauuu

SEQ ID NO: 2950994 - RNA, 22 nt, Human
aaguugauaugccuuuucccaa

SEQ ID NO: 2950995 - RNA, 17 nt, Human
aaguucugcagauaaac

SEQ ID NO: 2950996 - RNA, 15 nt, Human
aauaaacgucuuaaa

SEQ ID NO: 2950997 - RNA, 10 nt, Human
aauaaaccau

SEQ ID NO: 2950998 - RNA, 17 nt, Human
aauaaaauuuuaguuga

SEQ ID NO: 2950999 - RNA, 12 nt, Human
aauaauguuuca

SEQ ID NO: 2951000 - RNA, 14 nt, Human
aauaauguuucaaa

SEQ ID NO: 2951001 - RNA, 19 nt, Human
aauagaaaguugcaaggca

SEQ ID NO: 2951002 - RNA, 13 nt, Human
aauauaaaaauaa

SEQ ID NO: 2951003 - RNA, 21 nt, Human
aauaccugucccccugacaac

SEQ ID NO: 2951004 - RNA, 19 nt, Human
aauacgugggcauucaaau

SEQ ID NO: 2951005 - RNA, 20 nt, Human
aauacgugggcauucaaaug

SEQ ID NO: 2951006 - RNA, 16 nt, Human
aauauaggaacuuaaa

SEQ ID NO: 2951007 - RNA, 21 nt, Human
aaugcgugcauaccacuuuug

SEQ ID NO: 2951008 - RNA, 23 nt, Human
aaugcgugcauaccacuuuuguu

SEQ ID NO: 2951009 - RNA, 13 nt, Human
aaugggacacuaa

SEQ ID NO: 2951010 - RNA, 14 nt, Human
aaugggagcucaug

SEQ ID NO: 2951011 - RNA, 23 nt, Human
aaugcucuuuacuucauggacuu

SEQ ID NO: 2951012 - RNA, 15 nt, Human
aaugucacaggcagg

SEQ ID NO: 2951013 - RNA, 15 nt, Human
aaugggggugcauuu

SEQ ID NO: 2951014 - RNA, 17 nt, Human
aaugggggugcauuuga

SEQ ID NO: 2951015 - RNA, 18 nt, Human
aaucuccaaaauaaaacu

SEQ ID NO: 2951016 - RNA, 15 nt, Human
aauccaaugaaauga

SEQ ID NO: 2951017 - RNA, 16 nt, Human
aauccauacauuugug

SEQ ID NO: 2951018 - RNA, 14 nt, Human
aauccauacauuug

SEQ ID NO: 2951019 - RNA, 17 nt, Human
aauccauacauuugugu

SEQ ID NO: 2951020 - RNA, 15 nt, Human
aaugauagcuacugu

SEQ ID NO: 2951021 - RNA, 13 nt, Human
aaugauuaauuaa

SEQ ID NO: 2951022 - RNA, 12 nt, Human
aaugauuaauua

SEQ ID NO: 2951023 - RNA, 15 nt, Human
aaugauaacuggaaa

SEQ ID NO: 2951024 - RNA, 16 nt, Human
aaugauaacuggaaac

SEQ ID NO: 2951025 - RNA, 14 nt, Human
aaugauaacuggaa

SEQ ID NO: 2951026 - RNA, 22 nt, Human
aaucauuucugcaucagcugcu

SEQ ID NO: 2951027 - RNA, 22 nt, Human
aaucaaauaugcaaagcacuga

SEQ ID NO: 2951028 - RNA, 16 nt, Human
aaucaaauaugcaaag

SEQ ID NO: 2951029 - RNA, 15 nt, Human
aaucaaauaugcaaa

SEQ ID NO: 2951030 - RNA, 17 nt, Human
aacucaaacucuuaaaa

SEQ ID NO: 2951031 - RNA, 17 nt, Human
aacucaccccagcccca

SEQ ID NO: 2951032 - RNA, 16 nt, Human
aacucaccccagcccc

SEQ ID NO: 2951033 - RNA, 18 nt, Human
aacucaccccagccccaa

SEQ ID NO: 2951034 - RNA, 15 nt, Human
aacucaccccagccc

SEQ ID NO: 2951035 - RNA, 18 nt, Human
aacugaaguucuauuuau

SEQ ID NO: 2951036 - RNA, 18 nt, Human
aacucauauuuucaugcu

SEQ ID NO: 2951037 - RNA, 15 nt, Human
aacucauauuuucau

SEQ ID NO: 2951038 - RNA, 16 nt, Human
aacucauauuuucaug

SEQ ID NO: 2951039 - RNA, 23 nt, Human
aacugagaugugaacacaucagc

SEQ ID NO: 2951040 - RNA, 14 nt, Human
aacgaaagaaggca

SEQ ID NO: 2951041 - RNA, 22 nt, Human
aacaugcuacacacugcauguu

SEQ ID NO: 2951042 - RNA, 21 nt, Human
aacaugcuguacauacuuuuu

SEQ ID NO: 2951043 - RNA, 18 nt, Human
aacaugcuguacauacuu

SEQ ID NO: 2951044 - RNA, 19 nt, Human
aacaugcuguacauacuuu

SEQ ID NO: 2951045 - RNA, 20 nt, Human
aacaugcuguacauacuuuu

SEQ ID NO: 2951046 - RNA, 15 nt, Human
aacauggaaguacua

SEQ ID NO: 2951047 - RNA, 13 nt, Human
aacccuucagugc

SEQ ID NO: 2951048 - RNA, 19 nt, Human
aaccaguguuguggauuua

SEQ ID NO: 2951049 - RNA, 17 nt, Human
aaccaguguuguggauu

SEQ ID NO: 2951050 - RNA, 19 nt, Human
aaccgagggggcugcuccc

SEQ ID NO: 2951051 - RNA, 20 nt, Human
aaccgagggggcugcuccca

SEQ ID NO: 2951052 - RNA, 21 nt, Human
aaccgagggggcugcucccac

SEQ ID NO: 2951053 - RNA, 17 nt, Human
aacagcaacacaaagcu

SEQ ID NO: 2951054 - RNA, 18 nt, Human
aacagcaacacaaagcuu

SEQ ID NO: 2951055 - RNA, 16 nt, Human
aacagcuaaugggaca

SEQ ID NO: 2951056 - RNA, 12 nt, Human
aaauuaacuuuu

SEQ ID NO: 2951057 - RNA, 22 nt, Human
aaauugacacuuaaaaaugguu

SEQ ID NO: 2951058 - RNA, 13 nt, Human
aaauuaacuuuua

SEQ ID NO: 2951059 - RNA, 14 nt, Human
aaauuaacuuuuau

SEQ ID NO: 2951060 - RNA, 22 nt, Human
aacaaaccuguuucugcagcca

SEQ ID NO: 2951061 - RNA, 21 nt, Human
aacacauacaggaagguagaa

SEQ ID NO: 2951062 - RNA, 19 nt, Human
aacaccucugcacaagcug

SEQ ID NO: 2951063 - RNA, 12 nt, Human
aacacaucagcu

SEQ ID NO: 2951064 - RNA, 17 nt, Human
aaauguucaucaaugaa

SEQ ID NO: 2951065 - RNA, 20 nt, Human
aaauguucaucaaugaauga

SEQ ID NO: 2951066 - RNA, 17 nt, Human
aaauggaauacucuuau

SEQ ID NO: 2951067 - RNA, 14 nt, Human
aaauggacguguua

SEQ ID NO: 2951068 - RNA, 17 nt, Human
aaauggacguguuauga

SEQ ID NO: 2951069 - RNA, 15 nt, Human
aaauggacguguuau

SEQ ID NO: 2951070 - RNA, 22 nt, Human
aaaucuccaaaauaaaacuuuu

SEQ ID NO: 2951071 - RNA, 19 nt, Human
aaaucuccaaaauaaaacu

SEQ ID NO: 2951072 - RNA, 14 nt, Human
aaaucuuaacuuga

SEQ ID NO: 2951073 - RNA, 19 nt, Human
aaaauccauacauuugugu

SEQ ID NO: 2951074 - RNA, 15 nt, Human
aaaauuauggaaaca

SEQ ID NO: 2951075 - RNA, 17 nt, Human
aaaauuauggaaacaga

SEQ ID NO: 2951076 - RNA, 14 nt, Human
aaaauuauggaaac

SEQ ID NO: 2951077 - RNA, 18 nt, Human
aaaauuauggaaacagau

SEQ ID NO: 2951078 - RNA, 15 nt, Human
aaaauuagccaagug

SEQ ID NO: 2951079 - RNA, 17 nt, Human
aaacagcuaaugggaca

SEQ ID NO: 2951080 - RNA, 11 nt, Human
aaacagggccu

SEQ ID NO: 2951081 - RNA, 13 nt, Human
aaagaaacauuug

SEQ ID NO: 2951082 - RNA, 19 nt, Human
aaacugauuuuuuuuuccu

SEQ ID NO: 2951083 - RNA, 13 nt, Human
aaacugauuuuuu

SEQ ID NO: 2951084 - RNA, 20 nt, Human
aaacugauuuuuuuuuccuu

SEQ ID NO: 2951085 - RNA, 14 nt, Human
aaacccuucagugc

SEQ ID NO: 2951086 - RNA, 17 nt, Human
aaacucuugaccucagg

SEQ ID NO: 2951087 - RNA, 18 nt, Human
aaacccagcucuggucca

SEQ ID NO: 2951088 - RNA, 17 nt, Human
aaaccccaucucuacaa

SEQ ID NO: 2951089 - RNA, 21 nt, Human
aaacccugucucuacuaaaaa

SEQ ID NO: 2951090 - RNA, 15 nt, Human
aaagauacaguuacu

SEQ ID NO: 2951091 - RNA, 14 nt, Human
aaaggcuccaggag

SEQ ID NO: 2951092 - RNA, 17 nt, Human
aaaggcuaccuuuguau

SEQ ID NO: 2951093 - RNA, 14 nt, Human
aaaggcuaccuuug

SEQ ID NO: 2951094 - RNA, 21 nt, Human
aaaggcuccaggagcagccac

SEQ ID NO: 2951095 - RNA, 22 nt, Human
aaaggcuccaggagcagccaca

SEQ ID NO: 2951096 - RNA, 19 nt, Human
aaaggcagaagcaacccaa

SEQ ID NO: 2951097 - RNA, 15 nt, Human
aaagccaaagcuagg

SEQ ID NO: 2951098 - RNA, 20 nt, Human
aaagcauuguaaaugugcuu

SEQ ID NO: 2951099 - RNA, 19 nt, Human
aaagcauuguaaaugugcu

SEQ ID NO: 2951100 - RNA, 11 nt, Human
aaauaaauuau

SEQ ID NO: 2951101 - RNA, 12 nt, Human
aaagugcccagc

SEQ ID NO: 2951102 - RNA, 15 nt, Human
aaauaaacgucuuaa

SEQ ID NO: 2951103 - RNA, 16 nt, Human
aaauaaacgucuuaaa

SEQ ID NO: 2951104 - RNA, 13 nt, Human
acaauuuauuaug

SEQ ID NO: 2951105 - RNA, 14 nt, Human
acaauuuauuaugg

SEQ ID NO: 2951106 - RNA, 16 nt, Human
acaaggauugcuacug

SEQ ID NO: 2951107 - RNA, 20 nt, Human
acaaggaugaucuaggaaga

SEQ ID NO: 2951108 - RNA, 19 nt, Human
acacagcucuucuccaggc

SEQ ID NO: 2951109 - RNA, 19 nt, Human
acacaaaaguuucucuuuu

SEQ ID NO: 2951110 - RNA, 20 nt, Human
acacagcucuucuccaggcu

SEQ ID NO: 2951111 - RNA, 21 nt, Human
acacagcucuucuccaggcug

SEQ ID NO: 2951112 - RNA, 14 nt, Human
acacauuuuuuaaa

SEQ ID NO: 2951113 - RNA, 16 nt, Human
acacauuuuuuaaaug

SEQ ID NO: 2951114 - RNA, 18 nt, Human
acacauuuuuuaaaugca

SEQ ID NO: 2951115 - RNA, 14 nt, Human
acaccacuacauuc

SEQ ID NO: 2951116 - RNA, 19 nt, Human
acacauuuuuuaaaugcac

SEQ ID NO: 2951117 - RNA, 15 nt, Human
acaccacuacauucu

SEQ ID NO: 2951118 - RNA, 14 nt, Human
acacgaauauugcu

SEQ ID NO: 2951119 - RNA, 12 nt, Human
acacgaauauug

SEQ ID NO: 2951120 - RNA, 17 nt, Human
acaccacuacauucugu

SEQ ID NO: 2951121 - RNA, 20 nt, Human
acaccacuacauucuguuaa

SEQ ID NO: 2951122 - RNA, 21 nt, Human
acacgaauauugcugauggug

SEQ ID NO: 2951123 - RNA, 15 nt, Human
acacgaauauugcug

SEQ ID NO: 2951124 - RNA, 22 nt, Human
acacugugcugagucugaaggc

SEQ ID NO: 2951125 - RNA, 17 nt, Human
acacugugcugagucug

SEQ ID NO: 2951126 - RNA, 13 nt, Human
acagaggcagccc

SEQ ID NO: 2951127 - RNA, 23 nt, Human
acagaggcagccccauucugccu

SEQ ID NO: 2951128 - RNA, 17 nt, Human
acagaggccaugggccu

SEQ ID NO: 2951129 - RNA, 21 nt, Human
acagaggccaugggccuccug

SEQ ID NO: 2951130 - RNA, 13 nt, Human
acagacaaagcgu

SEQ ID NO: 2951131 - RNA, 14 nt, Human
acagacaaagcgug

SEQ ID NO: 2951132 - RNA, 18 nt, Human
acagaagaaaauagaauu

SEQ ID NO: 2951133 - RNA, 16 nt, Human
acagaagcuccaggua

SEQ ID NO: 2951134 - RNA, 21 nt, Human
acaaggaugaauuaaguuuuu

SEQ ID NO: 2951135 - RNA, 15 nt, Human
acaagaaaugaaagc

SEQ ID NO: 2951136 - RNA, 16 nt, Human
acaagaaaugaaagca

SEQ ID NO: 2951137 - RNA, 13 nt, Human
acaagaaaugaaa

SEQ ID NO: 2951138 - RNA, 13 nt, Human
acaaaauggaaua

SEQ ID NO: 2951139 - RNA, 14 nt, Human
acaaaauggaauac

SEQ ID NO: 2951140 - RNA, 22 nt, Human
acaaaaugaaacgcaaccacca

SEQ ID NO: 2951141 - RNA, 13 nt, Human
acaaaaugaaacg

SEQ ID NO: 2951142 - RNA, 14 nt, Human
aauuuugauguuuu

SEQ ID NO: 2951143 - RNA, 13 nt, Human
aauuuugugaagc

SEQ ID NO: 2951144 - RNA, 17 nt, Human
aauuuugugaagcaaaa

SEQ ID NO: 2951145 - RNA, 18 nt, Human
aauuuugugaagcaaaau

SEQ ID NO: 2951146 - RNA, 16 nt, Human
aauuuugugcccccau

SEQ ID NO: 2951147 - RNA, 20 nt, Human
aauuuauuuaugggauccug

SEQ ID NO: 2951148 - RNA, 17 nt, Human
aauuuauuauggcacau

SEQ ID NO: 2951149 - RNA, 16 nt, Human
aauuguaaggaaugau

SEQ ID NO: 2951150 - RNA, 12 nt, Human
aauuguaaggaa

SEQ ID NO: 2951151 - RNA, 16 nt, Human
aaugucacaggcaggu

SEQ ID NO: 2951152 - RNA, 19 nt, Human
aaugucacaggcaggucca

SEQ ID NO: 2951153 - RNA, 17 nt, Human
aauuuccugggagcuuu

SEQ ID NO: 2951154 - RNA, 18 nt, Human
aauuuccugggagcuuuu

SEQ ID NO: 2951155 - RNA, 21 nt, Human
aauuuccugggagcuuuugua

SEQ ID NO: 2951156 - RNA, 19 nt, Human
acaguggggaaugaagaua

SEQ ID NO: 2951157 - RNA, 15 nt, Human
acaguggggaaugaa

SEQ ID NO: 2951158 - RNA, 23 nt, Human
acagugagucgaggacagggagg

SEQ ID NO: 2951159 - RNA, 20 nt, Human
acagugauuaccagggacug

SEQ ID NO: 2951160 - RNA, 21 nt, Human
acagugauuaccagggacuga

SEQ ID NO: 2951161 - RNA, 22 nt, Human
acagugagucgaggacagggag

SEQ ID NO: 2951162 - RNA, 19 nt, Human
acaggugugaaccaccaca

SEQ ID NO: 2951163 - RNA, 22 nt, Human
acaggugugagucaccaagccc

SEQ ID NO: 2951164 - RNA, 23 nt, Human
acaggugugagucaccaagccca

SEQ ID NO: 2951165 - RNA, 14 nt, Human
acaggcaaugcugg

SEQ ID NO: 2951166 - RNA, 19 nt, Human
acaggcaagcaccuccugc

SEQ ID NO: 2951167 - RNA, 13 nt, Human
acagggccucugc

SEQ ID NO: 2951168 - RNA, 17 nt, Human
acagggccucugcggag

SEQ ID NO: 2951169 - RNA, 12 nt, Human
acagggccucug

SEQ ID NO: 2951170 - RNA, 20 nt, Human
acaggcaagcaccuccugcc

SEQ ID NO: 2951171 - RNA, 23 nt, Human
acaggcaagcaccuccugccucg

SEQ ID NO: 2951172 - RNA, 13 nt, Human
acagcucuguccu

SEQ ID NO: 2951173 - RNA, 16 nt, Human
acagcucuguccuggg

SEQ ID NO: 2951174 - RNA, 17 nt, Human
acagcucuguccuggga

SEQ ID NO: 2951175 - RNA, 15 nt, Human
acagcuccuucuguc

SEQ ID NO: 2951176 - RNA, 19 nt, Human
acagaggggguggccuccc

SEQ ID NO: 2951177 - RNA, 18 nt, Human
acagaggggguggccucc

SEQ ID NO: 2951178 - RNA, 17 nt, Human
acagaggggguggccuc

SEQ ID NO: 2951179 - RNA, 16 nt, Human
acagcuccuucugucc

SEQ ID NO: 2951180 - RNA, 18 nt, Human
acagcuccuucuguccua

SEQ ID NO: 2951181 - RNA, 23 nt, Human
acagcuccuucuguccuacucug

SEQ ID NO: 2951182 - RNA, 14 nt, Human
acagcucuguccug

SEQ ID NO: 2951183 - RNA, 20 nt, Human
acaucccuuaccugggaaag

SEQ ID NO: 2951184 - RNA, 16 nt, Human
acaugcaaggucauuu

SEQ ID NO: 2951185 - RNA, 14 nt, Human
acaugccuaccaau

SEQ ID NO: 2951186 - RNA, 17 nt, Human
acaugcaaggucauuuu

SEQ ID NO: 2951187 - RNA, 18 nt, Human
acaugccucucucaggcc

SEQ ID NO: 2951188 - RNA, 17 nt, Human
acaugccucucucaggc

SEQ ID NO: 2951189 - RNA, 16 nt, Human
acaugccucucucagg

SEQ ID NO: 2951190 - RNA, 15 nt, Human
acaugccucucucag

SEQ ID NO: 2951191 - RNA, 15 nt, Human
acauaagauaaaugu

SEQ ID NO: 2951192 - RNA, 16 nt, Human
acauaagauaaaugug

SEQ ID NO: 2951193 - RNA, 15 nt, Human
accaucaagccacca

SEQ ID NO: 2951194 - RNA, 12 nt, Human
accaucauugaa

SEQ ID NO: 2951195 - RNA, 15 nt, Human
accaucauugaaauc

SEQ ID NO: 2951196 - RNA, 23 nt, Human
accaucauugaaaucuuuuugcu

SEQ ID NO: 2951197 - RNA, 14 nt, Human
accaucaagccacc

SEQ ID NO: 2951198 - RNA, 13 nt, Human
acccaugcugccc

SEQ ID NO: 2951199 - RNA, 15 nt, Human
acccacccuccuuuc

SEQ ID NO: 2951200 - RNA, 19 nt, Human
accaugaaagacuucucua

SEQ ID NO: 2951201 - RNA, 12 nt, Human
accaugaaagac

SEQ ID NO: 2951202 - RNA, 14 nt, Human
accaugaaagacuu

SEQ ID NO: 2951203 - RNA, 17 nt, Human
acccacccccacccaag

SEQ ID NO: 2951204 - RNA, 15 nt, Human
acccacccccaccca

SEQ ID NO: 2951205 - RNA, 23 nt, Human
acaugucuuuucuugcaugaggc

SEQ ID NO: 2951206 - RNA, 19 nt, Human
acaugccucucucaggcca

SEQ ID NO: 2951207 - RNA, 18 nt, Human
acaugccuaccaauauuu

SEQ ID NO: 2951208 - RNA, 19 nt, Human
acaugccuaccaauauuua

SEQ ID NO: 2951209 - RNA, 20 nt, Human
accagccccagugcccacag

SEQ ID NO: 2951210 - RNA, 18 nt, Human
accagccccagugcccac

SEQ ID NO: 2951211 - RNA, 19 nt, Human
accagccccagugcccaca

SEQ ID NO: 2951212 - RNA, 16 nt, Human
accagccccagugccc

SEQ ID NO: 2951213 - RNA, 17 nt, Human
accagccccagugccca

SEQ ID NO: 2951214 - RNA, 14 nt, Human
accagcagaaaugc

SEQ ID NO: 2951215 - RNA, 13 nt, Human
accagcagagcac

SEQ ID NO: 2951216 - RNA, 12 nt, Human
accagcagagca

SEQ ID NO: 2951217 - RNA, 20 nt, Human
accaaggcugauuaaaccaa

SEQ ID NO: 2951218 - RNA, 17 nt, Human
acauuucucauguugaa

SEQ ID NO: 2951219 - RNA, 17 nt, Human
accaagaauugauuggg

SEQ ID NO: 2951220 - RNA, 19 nt, Human
accaaggcugauuaaacca

SEQ ID NO: 2951221 - RNA, 17 nt, Human
acuucuuauacauuuga

SEQ ID NO: 2951222 - RNA, 18 nt, Human
acuucuuauacauuugau

SEQ ID NO: 2951223 - RNA, 19 nt, Human
acuucugccauauucuguu

SEQ ID NO: 2951224 - RNA, 20 nt, Human
acuucugccauauucuguug

SEQ ID NO: 2951225 - RNA, 19 nt, Human
acuucagcgguuuauauaa

SEQ ID NO: 2951226 - RNA, 20 nt, Human
acuucaaauccuugaagauu

SEQ ID NO: 2951227 - RNA, 17 nt, Human
acuucagcgguuuauau

SEQ ID NO: 2951228 - RNA, 18 nt, Human
acuucagcgguuuauaua

SEQ ID NO: 2951229 - RNA, 19 nt, Human
acuucaaauccuugaagau

SEQ ID NO: 2951230 - RNA, 14 nt, Human
acuuaaauaaugug

SEQ ID NO: 2951231 - RNA, 13 nt, Human
acuuaaaaauggu

SEQ ID NO: 2951232 - RNA, 14 nt, Human
acuuaaaaaugguu

SEQ ID NO: 2951233 - RNA, 12 nt, Human
acuuuaugcuaa

SEQ ID NO: 2951234 - RNA, 17 nt, Human
acuuuaugcuaagugaa

SEQ ID NO: 2951235 - RNA, 22 nt, Human
acuugggaggcugagaugggag

SEQ ID NO: 2951236 - RNA, 19 nt, Human
acugccauccuggcccagg

SEQ ID NO: 2951237 - RNA, 22 nt, Human
acugcccggcaggguccuagaa

SEQ ID NO: 2951238 - RNA, 14 nt, Human
acugcuuuuggucu

SEQ ID NO: 2951239 - RNA, 15 nt, Human
acugcuuuuggucug

SEQ ID NO: 2951240 - RNA, 16 nt, Human
acugcuuuuggucugu

SEQ ID NO: 2951241 - RNA, 20 nt, Human
acugcuuuuggucuguguga

SEQ ID NO: 2951242 - RNA, 14 nt, Human
acugccauccuggc

SEQ ID NO: 2951243 - RNA, 15 nt, Human
acugcccggcagggu

SEQ ID NO: 2951244 - RNA, 12 nt, Human
acugaugggcaa

SEQ ID NO: 2951245 - RNA, 22 nt, Human
acugaugggcaacccccagccu

SEQ ID NO: 2951246 - RNA, 22 nt, Human
acugauggcuaauguacugcau

SEQ ID NO: 2951247 - RNA, 13 nt, Human
acugaucucucgu

SEQ ID NO: 2951248 - RNA, 22 nt, Human
acugacauuguuggccaaagcc

SEQ ID NO: 2951249 - RNA, 23 nt, Human
acugacauuguuggccaaagcca

SEQ ID NO: 2951250 - RNA, 22 nt, Human
acugauuuuuuuuuccuucagu

SEQ ID NO: 2951251 - RNA, 21 nt, Human
acugauuuuuuuuuccuucag

SEQ ID NO: 2951252 - RNA, 23 nt, Human
acugauuuuuuuuuccuucagug

SEQ ID NO: 2951253 - RNA, 19 nt, Human
acucugucucaaaaaaaca

SEQ ID NO: 2951254 - RNA, 21 nt, Human
acucugugucagguggggcag

SEQ ID NO: 2951255 - RNA, 19 nt, Human
acucugugucagguggggc

SEQ ID NO: 2951256 - RNA, 15 nt, Human
acucugucucagucc

SEQ ID NO: 2951257 - RNA, 17 nt, Human
acucugucucaguccau

SEQ ID NO: 2951258 - RNA, 20 nt, Human
acucuuaagaagacugcauu

SEQ ID NO: 2951259 - RNA, 14 nt, Human
acucuuaagaagac

SEQ ID NO: 2951260 - RNA, 15 nt, Human
acucuuaagaagacu

SEQ ID NO: 2951261 - RNA, 15 nt, Human
accgggccacagaga

SEQ ID NO: 2951262 - RNA, 19 nt, Human
accgggccacagagaaagu

SEQ ID NO: 2951263 - RNA, 14 nt, Human
accgugaggccaga

SEQ ID NO: 2951264 - RNA, 15 nt, Human
accggcuggccuggc

SEQ ID NO: 2951265 - RNA, 14 nt, Human
accggcuggccugg

SEQ ID NO: 2951266 - RNA, 20 nt, Human
accgggcacucagaagacac

SEQ ID NO: 2951267 - RNA, 19 nt, Human
accggcuggccuggccccu

SEQ ID NO: 2951268 - RNA, 18 nt, Human
accggcuggccuggcccc

SEQ ID NO: 2951269 - RNA, 17 nt, Human
accggcuggccuggccc

SEQ ID NO: 2951270 - RNA, 17 nt, Human
acccuguuaccauuuug

SEQ ID NO: 2951271 - RNA, 15 nt, Human
accccaagacuccca

SEQ ID NO: 2951272 - RNA, 16 nt, Human
accccaagacucccau

SEQ ID NO: 2951273 - RNA, 17 nt, Human
accccaagacucccaug

SEQ ID NO: 2951274 - RNA, 18 nt, Human
accccaagacucccauga

SEQ ID NO: 2951275 - RNA, 15 nt, Human
acccaugcugcccug

SEQ ID NO: 2951276 - RNA, 14 nt, Human
acccaugcugcccu

SEQ ID NO: 2951277 - RNA, 16 nt, Human
accccacacacgccag

SEQ ID NO: 2951278 - RNA, 22 nt, Human
acccugugauggggcccugccu

SEQ ID NO: 2951279 - RNA, 18 nt, Human
accucaggugagaagcag

SEQ ID NO: 2951280 - RNA, 22 nt, Human
accucaggccugggggcugggc

SEQ ID NO: 2951281 - RNA, 14 nt, Human
accucaggccuggg

SEQ ID NO: 2951282 - RNA, 13 nt, Human
accucaggccugg

SEQ ID NO: 2951283 - RNA, 12 nt, Human
accucaggccug

SEQ ID NO: 2951284 - RNA, 17 nt, Human
accgugaggccagagac

SEQ ID NO: 2951285 - RNA, 16 nt, Human
accgugaggccagaga

SEQ ID NO: 2951286 - RNA, 18 nt, Human
accugccagggacagagg

SEQ ID NO: 2951287 - RNA, 16 nt, Human
accugccagggacaga

SEQ ID NO: 2951288 - RNA, 15 nt, Human
accugccagggacag

SEQ ID NO: 2951289 - RNA, 13 nt, Human
accugccagggac

SEQ ID NO: 2951290 - RNA, 12 nt, Human
accugccaggga

SEQ ID NO: 2951291 - RNA, 11 nt, Human
accugccaggg

SEQ ID NO: 2951292 - RNA, 17 nt, Human
accucugccucagaaaa

SEQ ID NO: 2951293 - RNA, 18 nt, Human
accucugccucagaaaac

SEQ ID NO: 2951294 - RNA, 17 nt, Human
accucuugagccuugaa

SEQ ID NO: 2951295 - RNA, 19 nt, Human
accucuugagccuugaacu

SEQ ID NO: 2951296 - RNA, 20 nt, Human
accucuugagccuugaacuu

SEQ ID NO: 2951297 - RNA, 21 nt, Human
accucuugagccuugaacuuu

SEQ ID NO: 2951298 - RNA, 17 nt, Human
acuagggaagauaauau

SEQ ID NO: 2951299 - RNA, 16 nt, Human
acuauuguuagucucu

SEQ ID NO: 2951300 - RNA, 19 nt, Human
acuaguauuucuaugaaau

SEQ ID NO: 2951301 - RNA, 18 nt, Human
acuaguauuucuaugaaa

SEQ ID NO: 2951302 - RNA, 11 nt, Human
accugugucuc

SEQ ID NO: 2951303 - RNA, 15 nt, Human
acuaauagacaauuu

SEQ ID NO: 2951304 - RNA, 15 nt, Human
acgucugacaggcaa

SEQ ID NO: 2951305 - RNA, 23 nt, Human
acgucugacaggcaaugcuggcu

SEQ ID NO: 2951306 - RNA, 19 nt, Human
acgcuggagugcagugagc

SEQ ID NO: 2951307 - RNA, 18 nt, Human
acgcuggagugcagugag

SEQ ID NO: 2951308 - RNA, 16 nt, Human
acggaagagccuugcg

SEQ ID NO: 2951309 - RNA, 15 nt, Human
acggaagagccuugc

SEQ ID NO: 2951310 - RNA, 15 nt, Human
acggaauaguuggcu

SEQ ID NO: 2951311 - RNA, 19 nt, Human
acggacgaaccuugaaaac

SEQ ID NO: 2951312 - RNA, 19 nt, Human
acggacacucaaaagcugg

SEQ ID NO: 2951313 - RNA, 13 nt, Human
cacaaacagaggc

SEQ ID NO: 2951314 - RNA, 14 nt, Human
cacaaacagaggcc

SEQ ID NO: 2951315 - RNA, 22 nt, Human
caauuuuucuuauuucauuucu

SEQ ID NO: 2951316 - RNA, 17 nt, Human
caauuaccagaaagaua

SEQ ID NO: 2951317 - RNA, 18 nt, Human
caauuacaggaaguacug

SEQ ID NO: 2951318 - RNA, 17 nt, Human
caauuacaggaaguacu

SEQ ID NO: 2951319 - RNA, 14 nt, Human
caauguucucucuu

SEQ ID NO: 2951320 - RNA, 22 nt, Human
caaugugaaaagaaaaaugagc

SEQ ID NO: 2951321 - RNA, 19 nt, Human
caaugugaaaagaaaaaug

SEQ ID NO: 2951322 - RNA, 22 nt, Human
caauauccuaauaaaaagguga

SEQ ID NO: 2951323 - RNA, 20 nt, Human
cacaagaaaugaaagcaggg

SEQ ID NO: 2951324 - RNA, 21 nt, Human
cacaagaaaugaaagcaggga

SEQ ID NO: 2951325 - RNA, 18 nt, Human
cacaagaaaugaaagcag

SEQ ID NO: 2951326 - RNA, 13 nt, Human
cacaaaggagagc

SEQ ID NO: 2951327 - RNA, 16 nt, Human
cacaaagcuuuugcau

SEQ ID NO: 2951328 - RNA, 13 nt, Human
cacaaagcuuuug

SEQ ID NO: 2951329 - RNA, 15 nt, Human
cacacaaacaaggcc

SEQ ID NO: 2951330 - RNA, 17 nt, Human
cacacacgcgugcacac

SEQ ID NO: 2951331 - RNA, 13 nt, Human
cacagauuggcca

SEQ ID NO: 2951332 - RNA, 23 nt, Human
cacagaugggugcuuggaggaag

SEQ ID NO: 2951333 - RNA, 21 nt, Human
cacagaguuguuacauuuuua

SEQ ID NO: 2951334 - RNA, 22 nt, Human
cacagaguuguuacauuuuuaa

SEQ ID NO: 2951335 - RNA, 13 nt, Human
cacagaggcugcc

SEQ ID NO: 2951336 - RNA, 19 nt, Human
cacagagaaaguacuucuc

SEQ ID NO: 2951337 - RNA, 20 nt, Human
cacagagaaaguacuucucc

SEQ ID NO: 2951338 - RNA, 12 nt, Human
cacagagaaagu

SEQ ID NO: 2951339 - RNA, 13 nt, Human
cacacugaagaag

SEQ ID NO: 2951340 - RNA, 16 nt, Human
cacagcagugagacug

SEQ ID NO: 2951341 - RNA, 17 nt, Human
cacagcagugagacugg

SEQ ID NO: 2951342 - RNA, 19 nt, Human
cacagcaggcugccagugc

SEQ ID NO: 2951343 - RNA, 20 nt, Human
cacagcaggcugccagugcc

SEQ ID NO: 2951344 - RNA, 21 nt, Human
cacagcaggcugccagugccu

SEQ ID NO: 2951345 - RNA, 22 nt, Human
cacagcaggcugccagugccug

SEQ ID NO: 2951346 - RNA, 21 nt, Human
cacagcaguugaaaagacucc

SEQ ID NO: 2951347 - RNA, 15 nt, Human
cacagcaggcugcca

SEQ ID NO: 2951348 - RNA, 16 nt, Human
cacagcaggcugccag

SEQ ID NO: 2951349 - RNA, 17 nt, Human
cacagcaggcugccagu

SEQ ID NO: 2951350 - RNA, 13 nt, Human
cacagcaggcugc

SEQ ID NO: 2951351 - RNA, 19 nt, Human
cacagcaguugaaaagacu

SEQ ID NO: 2951352 - RNA, 21 nt, Human
cacagcucuucuccaggcugu

SEQ ID NO: 2951353 - RNA, 14 nt, Human
cacagccccaucug

SEQ ID NO: 2951354 - RNA, 18 nt, Human
cacagccagacuggcaca

SEQ ID NO: 2951355 - RNA, 17 nt, Human
cacagccagacuggcac

SEQ ID NO: 2951356 - RNA, 18 nt, Human
caauaacuggaacacucu

SEQ ID NO: 2951357 - RNA, 19 nt, Human
caauagauugcucaaauca

SEQ ID NO: 2951358 - RNA, 15 nt, Human
caauaggaaaaacug

SEQ ID NO: 2951359 - RNA, 17 nt, Human
caauaggaaaaacugau

SEQ ID NO: 2951360 - RNA, 16 nt, Human
caauaggaaaaacuga

SEQ ID NO: 2951361 - RNA, 17 nt, Human
caauagucaaauugugu

SEQ ID NO: 2951362 - RNA, 19 nt, Human
caauagucaaauuguguga

SEQ ID NO: 2951363 - RNA, 18 nt, Human
caaggcugggggaagaag

SEQ ID NO: 2951364 - RNA, 22 nt, Human
caaggcuuagacccucaugcug

SEQ ID NO: 2951365 - RNA, 19 nt, Human
caaggcuuagacccucaug

SEQ ID NO: 2951366 - RNA, 21 nt, Human
caagggugaugggaaagcauu

SEQ ID NO: 2951367 - RNA, 23 nt, Human
caagggugaugggaaagcauugu

SEQ ID NO: 2951368 - RNA, 18 nt, Human
caagcgauucuucugcuu

SEQ ID NO: 2951369 - RNA, 21 nt, Human
caagcugcacccucaggcagg

SEQ ID NO: 2951370 - RNA, 15 nt, Human
caagcgauucuucug

SEQ ID NO: 2951371 - RNA, 17 nt, Human
caagcgauucuucugcu

SEQ ID NO: 2951372 - RNA, 21 nt, Human
caagcuggucccacucagucc

SEQ ID NO: 2951373 - RNA, 22 nt, Human
caagcugcacccucaggcaggu

SEQ ID NO: 2951374 - RNA, 16 nt, Human
caaggagauuuacaac

SEQ ID NO: 2951375 - RNA, 19 nt, Human
caaggauccugagccagau

SEQ ID NO: 2951376 - RNA, 18 nt, Human
caaggauccugagccaga

SEQ ID NO: 2951377 - RNA, 20 nt, Human
caaggauccugagccagauu

SEQ ID NO: 2951378 - RNA, 22 nt, Human
caaggcugcagugagccgagau

SEQ ID NO: 2951379 - RNA, 17 nt, Human
caaggcugcagugagcc

SEQ ID NO: 2951380 - RNA, 20 nt, Human
caaggaaaaaauaacaauga

SEQ ID NO: 2951381 - RNA, 22 nt, Human
caagcuggucccacucagucca

SEQ ID NO: 2951382 - RNA, 23 nt, Human
caagcuggucccacucaguccau

SEQ ID NO: 2951383 - RNA, 18 nt, Human
caaggaaaaaauaacaau

SEQ ID NO: 2951384 - RNA, 18 nt, Human
caauaggaaaaacugauu

SEQ ID NO: 2951385 - RNA, 14 nt, Human
caaauguucaucaa

SEQ ID NO: 2951386 - RNA, 18 nt, Human
caaauguucaucaaugaa

SEQ ID NO: 2951387 - RNA, 22 nt, Human
caaauggaaaugggcagagcag

SEQ ID NO: 2951388 - RNA, 23 nt, Human
caaauggaaaugggcagagcaga

SEQ ID NO: 2951389 - RNA, 12 nt, Human
caaauaugcaaa

SEQ ID NO: 2951390 - RNA, 13 nt, Human
caaauaugcaaag

SEQ ID NO: 2951391 - RNA, 13 nt, Human
caaagugcuggga

SEQ ID NO: 2951392 - RNA, 19 nt, Human
caaagugcugggauuacaa

SEQ ID NO: 2951393 - RNA, 19 nt, Human
caaaguggugagaggcauc

SEQ ID NO: 2951394 - RNA, 23 nt, Human
caaagugcugggauuacaagcgu

SEQ ID NO: 2951395 - RNA, 15 nt, Human
caaauuucuaaaucu

SEQ ID NO: 2951396 - RNA, 22 nt, Human
caaauuucuaaaucuccaaaau

SEQ ID NO: 2951397 - RNA, 20 nt, Human
caacauacucccaucuguga

SEQ ID NO: 2951398 - RNA, 12 nt, Human
caacaggcuggg

SEQ ID NO: 2951399 - RNA, 19 nt, Human
caacauacucccaucugug

SEQ ID NO: 2951400 - RNA, 17 nt, Human
caacauacucccaucug

SEQ ID NO: 2951401 - RNA, 14 nt, Human
caagagcaaaguag

SEQ ID NO: 2951402 - RNA, 15 nt, Human
caagacgcugugcug

SEQ ID NO: 2951403 - RNA, 13 nt, Human
caagacgcugugc

SEQ ID NO: 2951404 - RNA, 23 nt, Human
caagaccuucuccuucaccuuug

SEQ ID NO: 2951405 - RNA, 21 nt, Human
caagaccuucuccuucaccuu

SEQ ID NO: 2951406 - RNA, 14 nt, Human
caagaagcccagga

SEQ ID NO: 2951407 - RNA, 13 nt, Human
caagaagcccagg

SEQ ID NO: 2951408 - RNA, 15 nt, Human
caagaaaugaaagca

SEQ ID NO: 2951409 - RNA, 17 nt, Human
caagaaaugaaagcagg

SEQ ID NO: 2951410 - RNA, 19 nt, Human
caagaaaugaaagcaggga

SEQ ID NO: 2951411 - RNA, 16 nt, Human
caaaacucuccucugc

SEQ ID NO: 2951412 - RNA, 15 nt, Human
caaaacucuccucug

SEQ ID NO: 2951413 - RNA, 18 nt, Human
auuuuauuuuauuaugca

SEQ ID NO: 2951414 - RNA, 21 nt, Human
caaaacgguuuuacugcagcu

SEQ ID NO: 2951415 - RNA, 15 nt, Human
caaaacgguuuuacu

SEQ ID NO: 2951416 - RNA, 14 nt, Human
caaaaguuucucuu

SEQ ID NO: 2951417 - RNA, 23 nt, Human
caaaacucuccucugcugcuggc

SEQ ID NO: 2951418 - RNA, 18 nt, Human
caaaacugcacugucaag

SEQ ID NO: 2951419 - RNA, 17 nt, Human
caaaacugcacugucaa

SEQ ID NO: 2951420 - RNA, 14 nt, Human
caaaacugcacugu

SEQ ID NO: 2951421 - RNA, 19 nt, Human
caaaacucuccucugcugc

SEQ ID NO: 2951422 - RNA, 21 nt, Human
caaaaucgaugcagugcuucc

SEQ ID NO: 2951423 - RNA, 21 nt, Human
caaaauagaaaguugcaaggc

SEQ ID NO: 2951424 - RNA, 22 nt, Human
caaaauagaaaguugcaaggca

SEQ ID NO: 2951425 - RNA, 12 nt, Human
caaaauagaaag

SEQ ID NO: 2951426 - RNA, 13 nt, Human
caaaauagaaagu

SEQ ID NO: 2951427 - RNA, 14 nt, Human
caaaauaaaacuuu

SEQ ID NO: 2951428 - RNA, 16 nt, Human
caaaauaaaacuuuuu

SEQ ID NO: 2951429 - RNA, 20 nt, Human
caaaauaaaacuuuuuaaaa

SEQ ID NO: 2951430 - RNA, 22 nt, Human
caaaaugaaacgcaaccaccac

SEQ ID NO: 2951431 - RNA, 11 nt, Human
caaaaugaaac

SEQ ID NO: 2951432 - RNA, 21 nt, Human
caaacaaggccugucagcuaa

SEQ ID NO: 2951433 - RNA, 13 nt, Human
caaacagaggccg

SEQ ID NO: 2951434 - RNA, 17 nt, Human
caaacucuugaccucag

SEQ ID NO: 2951435 - RNA, 19 nt, Human
caaacucuugaccucaggu

SEQ ID NO: 2951436 - RNA, 20 nt, Human
caaacucuugaccucaggug

SEQ ID NO: 2951437 - RNA, 21 nt, Human
caaacucuugaccucagguga

SEQ ID NO: 2951438 - RNA, 16 nt, Human
caaacugacucuuaag

SEQ ID NO: 2951439 - RNA, 17 nt, Human
caaacugacucuuaaga

SEQ ID NO: 2951440 - RNA, 21 nt, Human
caaacugacucuuaagaagac

SEQ ID NO: 2951441 - RNA, 17 nt, Human
cacaguucaauucucau

SEQ ID NO: 2951442 - RNA, 14 nt, Human
cagugugacaagga

SEQ ID NO: 2951443 - RNA, 12 nt, Human
cagugugacuga

SEQ ID NO: 2951444 - RNA, 21 nt, Human
caguguguggucaacauuucu

SEQ ID NO: 2951445 - RNA, 17 nt, Human
caguguguggucaacau

SEQ ID NO: 2951446 - RNA, 16 nt, Human
caguguacauggaaua

SEQ ID NO: 2951447 - RNA, 20 nt, Human
caguguacauggaauaacau

SEQ ID NO: 2951448 - RNA, 23 nt, Human
caguguacauggaauaacaugua

SEQ ID NO: 2951449 - RNA, 14 nt, Human
cagugucaaugcag

SEQ ID NO: 2951450 - RNA, 22 nt, Human
cagugguuccuaauccucuagg

SEQ ID NO: 2951451 - RNA, 12 nt, Human
caguggcagcug

SEQ ID NO: 2951452 - RNA, 13 nt, Human
caguggcagcugc

SEQ ID NO: 2951453 - RNA, 14 nt, Human
caguggcagcugcu

SEQ ID NO: 2951454 - RNA, 15 nt, Human
caguggcagcugcuu

SEQ ID NO: 2951455 - RNA, 16 nt, Human
caguggcagcugcuuu

SEQ ID NO: 2951456 - RNA, 20 nt, Human
cagugcuuggcccaggaguu

SEQ ID NO: 2951457 - RNA, 19 nt, Human
cagugcuuggcccaggagu

SEQ ID NO: 2951458 - RNA, 18 nt, Human
cagugcuuggcccaggag

SEQ ID NO: 2951459 - RNA, 17 nt, Human
cagugcuuggcccagga

SEQ ID NO: 2951460 - RNA, 16 nt, Human
cagugcuuggcccagg

SEQ ID NO: 2951461 - RNA, 15 nt, Human
cagugcuuggcccag

SEQ ID NO: 2951462 - RNA, 14 nt, Human
cagugcuuggccca

SEQ ID NO: 2951463 - RNA, 13 nt, Human
cagugcuuggccc

SEQ ID NO: 2951464 - RNA, 19 nt, Human
caguguuguggauuuaaca

SEQ ID NO: 2951465 - RNA, 20 nt, Human
caguguuguggauuuaacag

SEQ ID NO: 2951466 - RNA, 22 nt, Human
caguguuguggauuuaacagaa

SEQ ID NO: 2951467 - RNA, 16 nt, Human
caguguuuuaggagca

SEQ ID NO: 2951468 - RNA, 20 nt, Human
caguguuuuaggagcaugag

SEQ ID NO: 2951469 - RNA, 14 nt, Human
caguuaagagaaau

SEQ ID NO: 2951470 - RNA, 13 nt, Human
caguuaagagaaa

SEQ ID NO: 2951471 - RNA, 14 nt, Human
caguuacucagaau

SEQ ID NO: 2951472 - RNA, 21 nt, Human
caguuaccucugccucagaaa

SEQ ID NO: 2951473 - RNA, 19 nt, Human
caguugaaaaacagcugag

SEQ ID NO: 2951474 - RNA, 18 nt, Human
caguugaaaaacagcuga

SEQ ID NO: 2951475 - RNA, 12 nt, Human
caguugaaaaac

SEQ ID NO: 2951476 - RNA, 13 nt, Human
caguucucuccuu

SEQ ID NO: 2951477 - RNA, 15 nt, Human
caguucucuccuucu

SEQ ID NO: 2951478 - RNA, 14 nt, Human
caguucucuccuuc

SEQ ID NO: 2951479 - RNA, 22 nt, Human
caguucggugagcuacaaaugc

SEQ ID NO: 2951480 - RNA, 22 nt, Human
caguucugaagaagaugguacc

SEQ ID NO: 2951481 - RNA, 15 nt, Human
caguucugaagaaga

SEQ ID NO: 2951482 - RNA, 16 nt, Human
caguucugaagaagau

SEQ ID NO: 2951483 - RNA, 12 nt, Human
caguucugaaga

SEQ ID NO: 2951484 - RNA, 22 nt, Human
caguucucuccuucuucccccc

SEQ ID NO: 2951485 - RNA, 13 nt, Human
caguucugaagaa

SEQ ID NO: 2951486 - RNA, 14 nt, Human
caguucugaagaag

SEQ ID NO: 2951487 - RNA, 19 nt, Human
cauaaauuuaguauuuugu

SEQ ID NO: 2951488 - RNA, 20 nt, Human
cauaaauuuaguauuuuguu

SEQ ID NO: 2951489 - RNA, 16 nt, Human
cauaaccuagccuuag

SEQ ID NO: 2951490 - RNA, 21 nt, Human
cauaaaaauuagccaagugug

SEQ ID NO: 2951491 - RNA, 22 nt, Human
cauaaacaagaccacguuucua

SEQ ID NO: 2951492 - RNA, 20 nt, Human
cauaaacaagaccacguuuc

SEQ ID NO: 2951493 - RNA, 21 nt, Human
cauaaacaagaccacguuucu

SEQ ID NO: 2951494 - RNA, 20 nt, Human
cauaagcuacugccauccug

SEQ ID NO: 2951495 - RNA, 18 nt, Human
cauaagugcuauugcaga

SEQ ID NO: 2951496 - RNA, 22 nt, Human
cauaaguccucuagugaaugua

SEQ ID NO: 2951497 - RNA, 22 nt, Human
cauaagugcuauugcagagccg

SEQ ID NO: 2951498 - RNA, 20 nt, Human
cauaagccaaaacugagcau

SEQ ID NO: 2951499 - RNA, 14 nt, Human
cauaagcuacugcc

SEQ ID NO: 2951500 - RNA, 16 nt, Human
cauaagcuacugccau

SEQ ID NO: 2951501 - RNA, 17 nt, Human
cauaagcuacugccauc

SEQ ID NO: 2951502 - RNA, 14 nt, Human
cauaagauaaaugu

SEQ ID NO: 2951503 - RNA, 19 nt, Human
cauaccacuuuuguucuug

SEQ ID NO: 2951504 - RNA, 12 nt, Human
cauacccacccc

SEQ ID NO: 2951505 - RNA, 11 nt, Human
cauacccaccc

SEQ ID NO: 2951506 - RNA, 13 nt, Human
cauaccacuuuug

SEQ ID NO: 2951507 - RNA, 14 nt, Human
cauaccacuuuugu

SEQ ID NO: 2951508 - RNA, 15 nt, Human
cauaccacuuuuguu

SEQ ID NO: 2951509 - RNA, 18 nt, Human
cauaccacuuuuguucuu

SEQ ID NO: 2951510 - RNA, 17 nt, Human
cauaccaacacgagcag

SEQ ID NO: 2951511 - RNA, 20 nt, Human
caguuuucugagaaagacua

SEQ ID NO: 2951512 - RNA, 19 nt, Human
caguuuucugagaaagacu

SEQ ID NO: 2951513 - RNA, 19 nt, Human
caguuuuuuuccuucaaga

SEQ ID NO: 2951514 - RNA, 17 nt, Human
caguuguuagugugucu

SEQ ID NO: 2951515 - RNA, 15 nt, Human
caguuuucugagaaa

SEQ ID NO: 2951516 - RNA, 14 nt, Human
caguuuucugagaa

SEQ ID NO: 2951517 - RNA, 16 nt, Human
caguuggguggaugcc

SEQ ID NO: 2951518 - RNA, 23 nt, Human
caguugccagucaccccggccac

SEQ ID NO: 2951519 - RNA, 18 nt, Human
caguuggguggaugccug

SEQ ID NO: 2951520 - RNA, 19 nt, Human
caguuggguggaugccugg

SEQ ID NO: 2951521 - RNA, 18 nt, Human
caguuggucccccuucca

SEQ ID NO: 2951522 - RNA, 11 nt, Human
caguuggguuu

SEQ ID NO: 2951523 - RNA, 16 nt, Human
caguuggguuuuuuaa

SEQ ID NO: 2951524 - RNA, 18 nt, Human
caguuggguuuuuuaagg

SEQ ID NO: 2951525 - RNA, 22 nt, Human
caguuggucccccuuccaugga

SEQ ID NO: 2951526 - RNA, 21 nt, Human
caguuggucccccuuccaugg

SEQ ID NO: 2951527 - RNA, 20 nt, Human
caguuggucccccuuccaug

SEQ ID NO: 2951528 - RNA, 19 nt, Human
caguuggucccccuuccau

SEQ ID NO: 2951529 - RNA, 23 nt, Human
caguugaaaagacuccaaagaaa

SEQ ID NO: 2951530 - RNA, 22 nt, Human
caguugaaaagacuccaaagaa

SEQ ID NO: 2951531 - RNA, 21 nt, Human
caguugaaaagacuccaaaga

SEQ ID NO: 2951532 - RNA, 18 nt, Human
caguugaaaagacuccaa

SEQ ID NO: 2951533 - RNA, 14 nt, Human
caguugaaaagacu

SEQ ID NO: 2951534 - RNA, 14 nt, Human
cauacuauuaaaca

SEQ ID NO: 2951535 - RNA, 21 nt, Human
cauacccacccccacccaagg

SEQ ID NO: 2951536 - RNA, 18 nt, Human
cauacccacccccaccca

SEQ ID NO: 2951537 - RNA, 17 nt, Human
cauacccacccccaccc

SEQ ID NO: 2951538 - RNA, 14 nt, Human
cauacccaccccca

SEQ ID NO: 2951539 - RNA, 13 nt, Human
cauacguacacau

SEQ ID NO: 2951540 - RNA, 15 nt, Human
cauacguacacauuu

SEQ ID NO: 2951541 - RNA, 16 nt, Human
cauacguacacauuuu

SEQ ID NO: 2951542 - RNA, 17 nt, Human
cauacguacacauuuua

SEQ ID NO: 2951543 - RNA, 18 nt, Human
cauacguacacauuuuau

SEQ ID NO: 2951544 - RNA, 14 nt, Human
cauacuaaccagca

SEQ ID NO: 2951545 - RNA, 21 nt, Human
cauacuaaccagcagaaaugc

SEQ ID NO: 2951546 - RNA, 14 nt, Human
caucuagugagcag

SEQ ID NO: 2951547 - RNA, 15 nt, Human
caucuacccuccgau

SEQ ID NO: 2951548 - RNA, 19 nt, Human
cauccucuguacagagccc

SEQ ID NO: 2951549 - RNA, 18 nt, Human
cauccucuguacagagcc

SEQ ID NO: 2951550 - RNA, 15 nt, Human
cauccucuguacaga

SEQ ID NO: 2951551 - RNA, 20 nt, Human
caucucacacaugagcauca

SEQ ID NO: 2951552 - RNA, 17 nt, Human
caucucacacaugagca

SEQ ID NO: 2951553 - RNA, 16 nt, Human
caucucacacaugagc

SEQ ID NO: 2951554 - RNA, 22 nt, Human
caucuagugagcagucaggaaa

SEQ ID NO: 2951555 - RNA, 16 nt, Human
cauccucauacccacc

SEQ ID NO: 2951556 - RNA, 15 nt, Human
cauccucauacccac

SEQ ID NO: 2951557 - RNA, 12 nt, Human
cauccuccucag

SEQ ID NO: 2951558 - RNA, 11 nt, Human
cauccuccuca

SEQ ID NO: 2951559 - RNA, 19 nt, Human
cauccuccucagaucuucu

SEQ ID NO: 2951560 - RNA, 18 nt, Human
cauccuccucagaucuuc

SEQ ID NO: 2951561 - RNA, 16 nt, Human
cauccuccucagaucu

SEQ ID NO: 2951562 - RNA, 15 nt, Human
cauccuccucagauc

SEQ ID NO: 2951563 - RNA, 13 nt, Human
cauccucccaagg

SEQ ID NO: 2951564 - RNA, 22 nt, Human
cauccucauacccacccccacc

SEQ ID NO: 2951565 - RNA, 21 nt, Human
cauccucauacccacccccac

SEQ ID NO: 2951566 - RNA, 18 nt, Human
cauccucauacccacccc

SEQ ID NO: 2951567 - RNA, 17 nt, Human
cauccucauacccaccc

SEQ ID NO: 2951568 - RNA, 20 nt, Human
caucuugcucugcugacaga

SEQ ID NO: 2951569 - RNA, 14 nt, Human
caucuugcucugcu

SEQ ID NO: 2951570 - RNA, 13 nt, Human
caucuugcucugc

SEQ ID NO: 2951571 - RNA, 22 nt, Human
caucuuccaaggguacuaagga

SEQ ID NO: 2951572 - RNA, 21 nt, Human
caucccugaaggccccgccca

SEQ ID NO: 2951573 - RNA, 19 nt, Human
caucccugaaggccccgcc

SEQ ID NO: 2951574 - RNA, 18 nt, Human
caucccugaaggccccgc

SEQ ID NO: 2951575 - RNA, 17 nt, Human
caucccugaaggccccg

SEQ ID NO: 2951576 - RNA, 12 nt, Human
caucauuucaag

SEQ ID NO: 2951577 - RNA, 14 nt, Human
caucauuucaagaa

SEQ ID NO: 2951578 - RNA, 15 nt, Human
caucaccaacgucug

SEQ ID NO: 2951579 - RNA, 13 nt, Human
caucauugaaauc

SEQ ID NO: 2951580 - RNA, 21 nt, Human
caucauugaaaucuuuuugcu

SEQ ID NO: 2951581 - RNA, 20 nt, Human
caucauugaaaucuuuuugc

SEQ ID NO: 2951582 - RNA, 15 nt, Human
caucauugaaaucuu

SEQ ID NO: 2951583 - RNA, 14 nt, Human
caucauugaaaucu

SEQ ID NO: 2951584 - RNA, 15 nt, Human
cauccagguucagcu

SEQ ID NO: 2951585 - RNA, 12 nt, Human
caucccucccuc

SEQ ID NO: 2951586 - RNA, 13 nt, Human
caucccucccucc

SEQ ID NO: 2951587 - RNA, 14 nt, Human
caucccucccucca

SEQ ID NO: 2951588 - RNA, 19 nt, Human
caucccucuggggcuguuc

SEQ ID NO: 2951589 - RNA, 13 nt, Human
caucccugaaggc

SEQ ID NO: 2951590 - RNA, 11 nt, Human
caucccugaag

SEQ ID NO: 2951591 - RNA, 18 nt, Human
cauacuauuaaacaugcu

SEQ ID NO: 2951592 - RNA, 11 nt, Human
cauacucugcu

SEQ ID NO: 2951593 - RNA, 20 nt, Human
cauacucccaucugugaaag

SEQ ID NO: 2951594 - RNA, 18 nt, Human
cauacucccaucugugaa

SEQ ID NO: 2951595 - RNA, 15 nt, Human
cauacucccaucugu

SEQ ID NO: 2951596 - RNA, 16 nt, Human
cauacucccaucugug

SEQ ID NO: 2951597 - RNA, 12 nt, Human
cauacuuuuugg

SEQ ID NO: 2951598 - RNA, 16 nt, Human
cauacuuuuuggguuu

SEQ ID NO: 2951599 - RNA, 18 nt, Human
cauacuuuuuggguuuau

SEQ ID NO: 2951600 - RNA, 21 nt, Human
cauagagagcaagacgcugug

SEQ ID NO: 2951601 - RNA, 19 nt, Human
cauagagagcaagacgcug

SEQ ID NO: 2951602 - RNA, 23 nt, Human
cauagagagcaagacgcugugcu

SEQ ID NO: 2951603 - RNA, 17 nt, Human
cauaguaugguggcugg

SEQ ID NO: 2951604 - RNA, 20 nt, Human
cauaguaugguggcuggguu

SEQ ID NO: 2951605 - RNA, 18 nt, Human
cauaguaugguggcuggg

SEQ ID NO: 2951606 - RNA, 19 nt, Human
cauaguaugguggcugggu

SEQ ID NO: 2951607 - RNA, 21 nt, Human
cauaguuugggcuuguaccac

SEQ ID NO: 2951608 - RNA, 22 nt, Human
cauaguggcuuaaaacaacacu

SEQ ID NO: 2951609 - RNA, 16 nt, Human
cauauccaaguuugaa

SEQ ID NO: 2951610 - RNA, 14 nt, Human
cauauccaaguuug

SEQ ID NO: 2951611 - RNA, 22 nt, Human
cauauauauguuuuaagaggca

SEQ ID NO: 2951612 - RNA, 15 nt, Human
cauauauuuuuuaaa

SEQ ID NO: 2951613 - RNA, 16 nt, Human
cauauauuuuuuaaaa

SEQ ID NO: 2951614 - RNA, 20 nt, Human
cauauauuuuuuaaaauaag

SEQ ID NO: 2951615 - RNA, 21 nt, Human
cauauauuuuuuaaaauaagu

SEQ ID NO: 2951616 - RNA, 20 nt, Human
cauauauaacaaugcuguau

SEQ ID NO: 2951617 - RNA, 13 nt, Human
cauaugccugggc

SEQ ID NO: 2951618 - RNA, 14 nt, Human
cauauuuacuucuu

SEQ ID NO: 2951619 - RNA, 20 nt, Human
cauauuuacuucuuauacau

SEQ ID NO: 2951620 - RNA, 16 nt, Human
cauauuuacuucuuau

SEQ ID NO: 2951621 - RNA, 17 nt, Human
cauauuuacuucuuaua

SEQ ID NO: 2951622 - RNA, 12 nt, Human
cauauuuucaug

SEQ ID NO: 2951623 - RNA, 14 nt, Human
caucaagaugugac

SEQ ID NO: 2951624 - RNA, 22 nt, Human
caucaagucuuucacauuuaaa

SEQ ID NO: 2951625 - RNA, 18 nt, Human
caucaaugaaugaaugaa

SEQ ID NO: 2951626 - RNA, 22 nt, Human
cauggaaguacuauaauuuacc

SEQ ID NO: 2951627 - RNA, 20 nt, Human
cauggaaguacuauaauuua

SEQ ID NO: 2951628 - RNA, 16 nt, Human
cauggaauaacaugua

SEQ ID NO: 2951629 - RNA, 17 nt, Human
cauggacuucuggaugc

SEQ ID NO: 2951630 - RNA, 18 nt, Human
cauggacaugaucuucuu

SEQ ID NO: 2951631 - RNA, 23 nt, Human
caugccuggauggggcugcaccg

SEQ ID NO: 2951632 - RNA, 21 nt, Human
caugccuggauggggcugcac

SEQ ID NO: 2951633 - RNA, 18 nt, Human
caugccuggauggggcug

SEQ ID NO: 2951634 - RNA, 17 nt, Human
caugcgggcuuccuccu

SEQ ID NO: 2951635 - RNA, 23 nt, Human
caugcugucuacacuaagagaga

SEQ ID NO: 2951636 - RNA, 22 nt, Human
caugcugucccuuacgugaguc

SEQ ID NO: 2951637 - RNA, 20 nt, Human
caugcuguucaugaaagauu

SEQ ID NO: 2951638 - RNA, 17 nt, Human
caugcugucccuuacgu

SEQ ID NO: 2951639 - RNA, 18 nt, Human
caugggaaugaaugucag

SEQ ID NO: 2951640 - RNA, 16 nt, Human
cauggaguauauguca

SEQ ID NO: 2951641 - RNA, 17 nt, Human
cauggagguuugaagau

SEQ ID NO: 2951642 - RNA, 13 nt, Human
cauggacuuuguu

SEQ ID NO: 2951643 - RNA, 11 nt, Human
cauggacuuug

SEQ ID NO: 2951644 - RNA, 16 nt, Human
caugggccuccugugu

SEQ ID NO: 2951645 - RNA, 17 nt, Human
caugggccuccugugug

SEQ ID NO: 2951646 - RNA, 15 nt, Human
caugggccuccugug

SEQ ID NO: 2951647 - RNA, 17 nt, Human
caugggacagggaggac

SEQ ID NO: 2951648 - RNA, 22 nt, Human
caugggaaugaaugucagugug

SEQ ID NO: 2951649 - RNA, 17 nt, Human
caugccuaccaauauuu

SEQ ID NO: 2951650 - RNA, 15 nt, Human
caugccucucucagg

SEQ ID NO: 2951651 - RNA, 14 nt, Human
caugccucucucag

SEQ ID NO: 2951652 - RNA, 13 nt, Human
caugccuggaugg

SEQ ID NO: 2951653 - RNA, 19 nt, Human
caugccucucucaggccaa

SEQ ID NO: 2951654 - RNA, 18 nt, Human
caugccucucucaggcca

SEQ ID NO: 2951655 - RNA, 17 nt, Human
caugccucucucaggcc

SEQ ID NO: 2951656 - RNA, 16 nt, Human
caugccucucucaggc

SEQ ID NO: 2951657 - RNA, 20 nt, Human
caugcauagagugugaugua

SEQ ID NO: 2951658 - RNA, 20 nt, Human
caugccagcuuaucucaggg

SEQ ID NO: 2951659 - RNA, 19 nt, Human
caugccagcuuaucucagg

SEQ ID NO: 2951660 - RNA, 20 nt, Human
caugccagggccaugucaga

SEQ ID NO: 2951661 - RNA, 13 nt, Human
caugccccugaac

SEQ ID NO: 2951662 - RNA, 15 nt, Human
cauguuugugauuga

SEQ ID NO: 2951663 - RNA, 23 nt, Human
cauguuugauguaucugagcagg

SEQ ID NO: 2951664 - RNA, 15 nt, Human
cauguuuaugagaaa

SEQ ID NO: 2951665 - RNA, 21 nt, Human
caugugccagguuuuuggucu

SEQ ID NO: 2951666 - RNA, 15 nt, Human
caugugcacaugcac

SEQ ID NO: 2951667 - RNA, 16 nt, Human
cauggucggaaaacau

SEQ ID NO: 2951668 - RNA, 18 nt, Human
cauguaauuaaguacuau

SEQ ID NO: 2951669 - RNA, 21 nt, Human
cauguaauuaaguacuaugua

SEQ ID NO: 2951670 - RNA, 23 nt, Human
caugucuuuucuugcaugaggcu

SEQ ID NO: 2951671 - RNA, 21 nt, Human
caugucuuuucuugcaugagg

SEQ ID NO: 2951672 - RNA, 19 nt, Human
caugucuuuucuugcauga

SEQ ID NO: 2951673 - RNA, 14 nt, Human
caugucuuuucuug

SEQ ID NO: 2951674 - RNA, 13 nt, Human
cauuaaaugacuc

SEQ ID NO: 2951675 - RNA, 14 nt, Human
cauuaaaugacucu

SEQ ID NO: 2951676 - RNA, 18 nt, Human
cauuaaaugacucuuccc

SEQ ID NO: 2951677 - RNA, 17 nt, Human
cauuaaagguacuuugc

SEQ ID NO: 2951678 - RNA, 21 nt, Human
cauuaaagccugaguuugcuu

SEQ ID NO: 2951679 - RNA, 15 nt, Human
cauguuuuguuuacg

SEQ ID NO: 2951680 - RNA, 18 nt, Human
cauguuuuucuucucccu

SEQ ID NO: 2951681 - RNA, 21 nt, Human
ccaacacgagcaggcuacugu

SEQ ID NO: 2951682 - RNA, 13 nt, Human
ccaacaucaacau

SEQ ID NO: 2951683 - RNA, 14 nt, Human
ccaacauacuccca

SEQ ID NO: 2951684 - RNA, 16 nt, Human
ccaacaucaacaucuu

SEQ ID NO: 2951685 - RNA, 15 nt, Human
ccaaauucuuucagu

SEQ ID NO: 2951686 - RNA, 22 nt, Human
ccaaauucuuucaguggcuacc

SEQ ID NO: 2951687 - RNA, 14 nt, Human
ccaacacgagcagg

SEQ ID NO: 2951688 - RNA, 15 nt, Human
ccaagaccuucuccu

SEQ ID NO: 2951689 - RNA, 15 nt, Human
ccaacccucaucacc

SEQ ID NO: 2951690 - RNA, 13 nt, Human
ccaacccucauca

SEQ ID NO: 2951691 - RNA, 14 nt, Human
ccaagacucccaug

SEQ ID NO: 2951692 - RNA, 15 nt, Human
ccaagacucccauga

SEQ ID NO: 2951693 - RNA, 19 nt, Human
ccaagacucccaugaggga

SEQ ID NO: 2951694 - RNA, 12 nt, Human
ccaagacuccca

SEQ ID NO: 2951695 - RNA, 13 nt, Human
ccaaagaugcagc

SEQ ID NO: 2951696 - RNA, 14 nt, Human
ccaaagaugcagcc

SEQ ID NO: 2951697 - RNA, 15 nt, Human
ccacaaguuaaauaa

SEQ ID NO: 2951698 - RNA, 20 nt, Human
ccacaaguuaaauaaaucau

SEQ ID NO: 2951699 - RNA, 21 nt, Human
ccacaagagcccaggccuccu

SEQ ID NO: 2951700 - RNA, 20 nt, Human
ccacaagagcccaggccucc

SEQ ID NO: 2951701 - RNA, 19 nt, Human
ccacaagagcccaggccuc

SEQ ID NO: 2951702 - RNA, 18 nt, Human
ccacaagagcccaggccu

SEQ ID NO: 2951703 - RNA, 17 nt, Human
ccacaagagcccaggcc

SEQ ID NO: 2951704 - RNA, 16 nt, Human
ccacaagagcccaggc

SEQ ID NO: 2951705 - RNA, 14 nt, Human
ccaagcaggacaug

SEQ ID NO: 2951706 - RNA, 23 nt, Human
ccaagcagagguugggaggccau

SEQ ID NO: 2951707 - RNA, 13 nt, Human
ccaagcucccagg

SEQ ID NO: 2951708 - RNA, 12 nt, Human
ccaagcucccag

SEQ ID NO: 2951709 - RNA, 13 nt, Human
ccaaggccuuccc

SEQ ID NO: 2951710 - RNA, 19 nt, Human
ccaaggccuuccccuggca

SEQ ID NO: 2951711 - RNA, 18 nt, Human
ccaaggcuagaaccaccu

SEQ ID NO: 2951712 - RNA, 18 nt, Human
ccaaggugggaggauugc

SEQ ID NO: 2951713 - RNA, 14 nt, Human
ccaaggcuggggga

SEQ ID NO: 2951714 - RNA, 19 nt, Human
ccaaggcugauuaaaccaa

SEQ ID NO: 2951715 - RNA, 23 nt, Human
ccaagugccaaagaagcagacca

SEQ ID NO: 2951716 - RNA, 20 nt, Human
ccaauauucauagcagcuua

SEQ ID NO: 2951717 - RNA, 21 nt, Human
ccaauauuuaaucuuuuauga

SEQ ID NO: 2951718 - RNA, 19 nt, Human
ccaauuugcacauuaaaug

SEQ ID NO: 2951719 - RNA, 20 nt, Human
ccaauuugcacauuaaauga

SEQ ID NO: 2951720 - RNA, 18 nt, Human
ccacaaaggagagcuagc

SEQ ID NO: 2951721 - RNA, 16 nt, Human
ccacaagaaaugaaag

SEQ ID NO: 2951722 - RNA, 22 nt, Human
ccacaagaaaugaaagcaggga

SEQ ID NO: 2951723 - RNA, 13 nt, Human
ccacaagagccca

SEQ ID NO: 2951724 - RNA, 16 nt, Human
ccacaagacccuugug

SEQ ID NO: 2951725 - RNA, 21 nt, Human
cauuuaaaagauacaguuacu

SEQ ID NO: 2951726 - RNA, 16 nt, Human
cauuuacuuaagacuu

SEQ ID NO: 2951727 - RNA, 17 nt, Human
cauuuacuuaagacuua

SEQ ID NO: 2951728 - RNA, 13 nt, Human
cauuuacuuaaga

SEQ ID NO: 2951729 - RNA, 14 nt, Human
cauuuacuuaagac

SEQ ID NO: 2951730 - RNA, 15 nt, Human
cauuuacuuaagacu

SEQ ID NO: 2951731 - RNA, 12 nt, Human
cauuuccaagca

SEQ ID NO: 2951732 - RNA, 17 nt, Human
cauuuacuuuguguuca

SEQ ID NO: 2951733 - RNA, 21 nt, Human
cauuuacuuuguguucaccuu

SEQ ID NO: 2951734 - RNA, 19 nt, Human
cauuuaaagcuuauuaaaa

SEQ ID NO: 2951735 - RNA, 17 nt, Human
cauuucucauguugaaa

SEQ ID NO: 2951736 - RNA, 16 nt, Human
cauuucucauguugaa

SEQ ID NO: 2951737 - RNA, 23 nt, Human
cauuucugcaucagcugcugaaa

SEQ ID NO: 2951738 - RNA, 21 nt, Human
cauuucuuccacaagagccca

SEQ ID NO: 2951739 - RNA, 14 nt, Human
cauugacagauuga

SEQ ID NO: 2951740 - RNA, 22 nt, Human
cauugaaaucuaggaaaauuau

SEQ ID NO: 2951741 - RNA, 22 nt, Human
cauugacuauuuuuguuuuuau

SEQ ID NO: 2951742 - RNA, 22 nt, Human
cauugaccugaggcccuucucu

SEQ ID NO: 2951743 - RNA, 13 nt, Human
cauugaccugagg

SEQ ID NO: 2951744 - RNA, 19 nt, Human
cauugaaaucuuuuugcuu

SEQ ID NO: 2951745 - RNA, 17 nt, Human
cauuugaggucuguucu

SEQ ID NO: 2951746 - RNA, 18 nt, Human
cauuugaggucuguucuu

SEQ ID NO: 2951747 - RNA, 19 nt, Human
cauuugaggucuguucuuu

SEQ ID NO: 2951748 - RNA, 14 nt, Human
cauuugagcagggc

SEQ ID NO: 2951749 - RNA, 23 nt, Human
cauuucuuccacaagagcccagg

SEQ ID NO: 2951750 - RNA, 20 nt, Human
cauuuugggguacccacugc

SEQ ID NO: 2951751 - RNA, 21 nt, Human
cauuuugggguacccacugcu

SEQ ID NO: 2951752 - RNA, 22 nt, Human
cauuuugggguacccacugcuc

SEQ ID NO: 2951753 - RNA, 24 nt, Human
cauuuugcuaaaugugaaugauga

SEQ ID NO: 2951754 - RNA, 21 nt, Human
cauuuugcuaaaugugaauga

SEQ ID NO: 2951755 - RNA, 18 nt, Human
cauuuugcuaaaugugaa

SEQ ID NO: 2951756 - RNA, 23 nt, Human
cauuuugggguacccacugcucu

SEQ ID NO: 2951757 - RNA, 19 nt, Human
cauuuuuaguagagacagg

SEQ ID NO: 2951758 - RNA, 18 nt, Human
cauuuuuaguagagacag

SEQ ID NO: 2951759 - RNA, 15 nt, Human
cauuuuuaagugcug

SEQ ID NO: 2951760 - RNA, 20 nt, Human
cauuuuuaagugcugcauuu

SEQ ID NO: 2951761 - RNA, 19 nt, Human
cauuuuauuuuauuaugca

SEQ ID NO: 2951762 - RNA, 21 nt, Human
cauuuuauuuuauuaugcaug

SEQ ID NO: 2951763 - RNA, 22 nt, Human
cauuuuaaacaaaauagaaagu

SEQ ID NO: 2951764 - RNA, 23 nt, Human
cauuuuaaacaaaauagaaaguu

SEQ ID NO: 2951765 - RNA, 13 nt, Human
cauuuuaaacaaa

SEQ ID NO: 2951766 - RNA, 16 nt, Human
cauuuuaaacaaaaua

SEQ ID NO: 2951767 - RNA, 17 nt, Human
cauuuuaaacaaaauag

SEQ ID NO: 2951768 - RNA, 16 nt, Human
cauuugcucauggaau

SEQ ID NO: 2951769 - RNA, 22 nt, Human
cauuugaggucuguucuuucca

SEQ ID NO: 2951770 - RNA, 12 nt, Human
cauuuuaaacaa

SEQ ID NO: 2951771 - RNA, 15 nt, Human
cauuugcucauggaa

SEQ ID NO: 2951772 - RNA, 14 nt, Human
cauuugcucaugga

SEQ ID NO: 2951773 - RNA, 20 nt, Human
cauuuuuaguagagacaggg

SEQ ID NO: 2951774 - RNA, 18 nt, Human
ccaaaauaaaacuuuuua

SEQ ID NO: 2951775 - RNA, 21 nt, Human
ccaaaauaaaacuuuuuaaaa

SEQ ID NO: 2951776 - RNA, 17 nt, Human
ccaaagaaauguaaggg

SEQ ID NO: 2951777 - RNA, 14 nt, Human
ccaucaugucuggc

SEQ ID NO: 2951778 - RNA, 16 nt, Human
ccaucaugucuggcua

SEQ ID NO: 2951779 - RNA, 16 nt, Human
ccauccugaggcucca

SEQ ID NO: 2951780 - RNA, 18 nt, Human
ccauccuggcccagggca

SEQ ID NO: 2951781 - RNA, 19 nt, Human
ccauccuggcccagggcau

SEQ ID NO: 2951782 - RNA, 20 nt, Human
ccauccuggcccagggcauc

SEQ ID NO: 2951783 - RNA, 22 nt, Human
ccauccuggcccagggcaucug

SEQ ID NO: 2951784 - RNA, 15 nt, Human
ccauccugaggcucc

SEQ ID NO: 2951785 - RNA, 21 nt, Human
ccauccucuguacagagccca

SEQ ID NO: 2951786 - RNA, 23 nt, Human
ccauagagagcaagacgcugugc

SEQ ID NO: 2951787 - RNA, 19 nt, Human
ccauauuaccacagacaua

SEQ ID NO: 2951788 - RNA, 15 nt, Human
ccauauucuguuggc

SEQ ID NO: 2951789 - RNA, 18 nt, Human
ccauauucuguuggccag

SEQ ID NO: 2951790 - RNA, 12 nt, Human
ccaucacccgcu

SEQ ID NO: 2951791 - RNA, 14 nt, Human
ccagugccucuccc

SEQ ID NO: 2951792 - RNA, 16 nt, Human
ccagugccucucccug

SEQ ID NO: 2951793 - RNA, 19 nt, Human
ccagugccucucccugcug

SEQ ID NO: 2951794 - RNA, 21 nt, Human
ccagugccucucccugcugcu

SEQ ID NO: 2951795 - RNA, 13 nt, Human
ccagugccugggu

SEQ ID NO: 2951796 - RNA, 14 nt, Human
ccagugccugggug

SEQ ID NO: 2951797 - RNA, 23 nt, Human
ccagggacagaggggguggccuc

SEQ ID NO: 2951798 - RNA, 19 nt, Human
ccaggccccugccacccug

SEQ ID NO: 2951799 - RNA, 21 nt, Human
ccaggccccugccacccuggg

SEQ ID NO: 2951800 - RNA, 23 nt, Human
ccaggccccugccacccugggga

SEQ ID NO: 2951801 - RNA, 14 nt, Human
ccaggccagaggga

SEQ ID NO: 2951802 - RNA, 21 nt, Human
ccaggccagagggagugacag

SEQ ID NO: 2951803 - RNA, 14 nt, Human
ccaggagcagccac

SEQ ID NO: 2951804 - RNA, 19 nt, Human
ccaggccuccuacagcuug

SEQ ID NO: 2951805 - RNA, 18 nt, Human
ccaggccuccuacagcuu

SEQ ID NO: 2951806 - RNA, 13 nt, Human
ccaggccuccuac

SEQ ID NO: 2951807 - RNA, 19 nt, Human
ccaggcccucugcccacuc

SEQ ID NO: 2951808 - RNA, 18 nt, Human
ccaggcccucugcccacu

SEQ ID NO: 2951809 - RNA, 17 nt, Human
ccaggcccucugcccac

SEQ ID NO: 2951810 - RNA, 16 nt, Human
ccaggcccucugccca

SEQ ID NO: 2951811 - RNA, 22 nt, Human
ccagcugugcucuggacaggca

SEQ ID NO: 2951812 - RNA, 23 nt, Human
ccagcugugcucuggacaggcau

SEQ ID NO: 2951813 - RNA, 19 nt, Human
ccaggaagccagcaggcuc

SEQ ID NO: 2951814 - RNA, 17 nt, Human
ccaggaagccagcaggc

SEQ ID NO: 2951815 - RNA, 15 nt, Human
ccaggaagccagcag

SEQ ID NO: 2951816 - RNA, 14 nt, Human
ccaggaagccagca

SEQ ID NO: 2951817 - RNA, 13 nt, Human
ccaggagcagcca

SEQ ID NO: 2951818 - RNA, 12 nt, Human
ccaggagcagcc

SEQ ID NO: 2951819 - RNA, 18 nt, Human
ccagcugugcucuggaca

SEQ ID NO: 2951820 - RNA, 20 nt, Human
ccagcugugcucuggacagg

SEQ ID NO: 2951821 - RNA, 21 nt, Human
ccagcugugcucuggacaggc

SEQ ID NO: 2951822 - RNA, 15 nt, Human
ccagcugcuugggcu

SEQ ID NO: 2951823 - RNA, 13 nt, Human
ccagcugcuuggg

SEQ ID NO: 2951824 - RNA, 18 nt, Human
ccagcugcuugggcuuca

SEQ ID NO: 2951825 - RNA, 16 nt, Human
ccagcugcuugggcuu

SEQ ID NO: 2951826 - RNA, 15 nt, Human
ccagccuggaugcca

SEQ ID NO: 2951827 - RNA, 13 nt, Human
ccagccuggaugc

SEQ ID NO: 2951828 - RNA, 17 nt, Human
ccagccuggaugccauc

SEQ ID NO: 2951829 - RNA, 21 nt, Human
ccccaaauggaaaugggcaga

SEQ ID NO: 2951830 - RNA, 20 nt, Human
cccauuaugcgcuguggcca

SEQ ID NO: 2951831 - RNA, 20 nt, Human
cccaucugugaaaggaaaga

SEQ ID NO: 2951832 - RNA, 13 nt, Human
cccaucucacaca

SEQ ID NO: 2951833 - RNA, 18 nt, Human
cccaucucacacaugagc

SEQ ID NO: 2951834 - RNA, 12 nt, Human
cccaucugugaa

SEQ ID NO: 2951835 - RNA, 14 nt, Human
cccaugcugcccug

SEQ ID NO: 2951836 - RNA, 13 nt, Human
cccaugcugcccu

SEQ ID NO: 2951837 - RNA, 12 nt, Human
cccaugcugccc

SEQ ID NO: 2951838 - RNA, 20 nt, Human
cccaugagccucagcauccu

SEQ ID NO: 2951839 - RNA, 15 nt, Human
cccaugagccucagc

SEQ ID NO: 2951840 - RNA, 16 nt, Human
cccaugagccucagca

SEQ ID NO: 2951841 - RNA, 15 nt, Human
cccaggguggccaca

SEQ ID NO: 2951842 - RNA, 19 nt, Human
cccaggguggccacaccuc

SEQ ID NO: 2951843 - RNA, 13 nt, Human
cccaggguggcca

SEQ ID NO: 2951844 - RNA, 14 nt, Human
cccaggguggccac

SEQ ID NO: 2951845 - RNA, 17 nt, Human
cccaggcauuccccagg

SEQ ID NO: 2951846 - RNA, 23 nt, Human
cccaggcaggucuugaacuccug

SEQ ID NO: 2951847 - RNA, 15 nt, Human
cccaggcauucccca

SEQ ID NO: 2951848 - RNA, 16 nt, Human
cccaggaggccagccu

SEQ ID NO: 2951849 - RNA, 15 nt, Human
cccaggaggccagcc

SEQ ID NO: 2951850 - RNA, 15 nt, Human
cccaguccugcccgc

SEQ ID NO: 2951851 - RNA, 13 nt, Human
cccagguuucuau

SEQ ID NO: 2951852 - RNA, 15 nt, Human
cccagugccgagaag

SEQ ID NO: 2951853 - RNA, 21 nt, Human
cccagugcccacaggaucagu

SEQ ID NO: 2951854 - RNA, 10 nt, Human
cccagucugg

SEQ ID NO: 2951855 - RNA, 18 nt, Human
cccagucuggaaugcagu

SEQ ID NO: 2951856 - RNA, 19 nt, Human
cccagucuggaaugcagug

SEQ ID NO: 2951857 - RNA, 20 nt, Human
cccagugguuccuaauccuc

SEQ ID NO: 2951858 - RNA, 14 nt, Human
cccaguuagcucuc

SEQ ID NO: 2951859 - RNA, 17 nt, Human
cccaguguuuuaggagc

SEQ ID NO: 2951860 - RNA, 16 nt, Human
cccaguguuuuaggag

SEQ ID NO: 2951861 - RNA, 13 nt, Human
cccaggagccccg

SEQ ID NO: 2951862 - RNA, 14 nt, Human
cccaggagccccga

SEQ ID NO: 2951863 - RNA, 14 nt, Human
cccaggaggccagc

SEQ ID NO: 2951864 - RNA, 22 nt, Human
cccagcuacucgggaggcugag

SEQ ID NO: 2951865 - RNA, 20 nt, Human
cccagcuacucgggaggcug

SEQ ID NO: 2951866 - RNA, 14 nt, Human
cccagcgagcccug

SEQ ID NO: 2951867 - RNA, 18 nt, Human
cccagcucugguccauag

SEQ ID NO: 2951868 - RNA, 16 nt, Human
cccagcucugguccau

SEQ ID NO: 2951869 - RNA, 15 nt, Human
cccagcucuggucca

SEQ ID NO: 2951870 - RNA, 12 nt, Human
cccagcucuggu

SEQ ID NO: 2951871 - RNA, 14 nt, Human
cccagcucuggucc

SEQ ID NO: 2951872 - RNA, 13 nt, Human
cccagcucugguc

SEQ ID NO: 2951873 - RNA, 15 nt, Human
cccagccccauccuc

SEQ ID NO: 2951874 - RNA, 14 nt, Human
cccagccccauccu

SEQ ID NO: 2951875 - RNA, 14 nt, Human
cccagccccauccc

SEQ ID NO: 2951876 - RNA, 13 nt, Human
cccagccccaucc

SEQ ID NO: 2951877 - RNA, 19 nt, Human
cccagccccauccucugua

SEQ ID NO: 2951878 - RNA, 18 nt, Human
cccagccccauccucugu

SEQ ID NO: 2951879 - RNA, 13 nt, Human
cccagccccaaug

SEQ ID NO: 2951880 - RNA, 12 nt, Human
cccagccccauc

SEQ ID NO: 2951881 - RNA, 11 nt, Human
cccagccccau

SEQ ID NO: 2951882 - RNA, 17 nt, Human
cccagccccaaugaaca

SEQ ID NO: 2951883 - RNA, 23 nt, Human
cccagauugcaacaggcugggcu

SEQ ID NO: 2951884 - RNA, 18 nt, Human
cccaggaggccagccuug

SEQ ID NO: 2951885 - RNA, 19 nt, Human
ccauguuggccaggcuggu

SEQ ID NO: 2951886 - RNA, 21 nt, Human
ccauguuggccaggcuggucu

SEQ ID NO: 2951887 - RNA, 18 nt, Human
ccauguuggccaggcugg

SEQ ID NO: 2951888 - RNA, 15 nt, Human
ccauguuggccaggc

SEQ ID NO: 2951889 - RNA, 15 nt, Human
cccaccuggccucug

SEQ ID NO: 2951890 - RNA, 12 nt, Human
cccaccuggccu

SEQ ID NO: 2951891 - RNA, 16 nt, Human
cccaccuuggcugcag

SEQ ID NO: 2951892 - RNA, 17 nt, Human
cccaccuuggcugcagg

SEQ ID NO: 2951893 - RNA, 19 nt, Human
cccaccuuggcugcaggga

SEQ ID NO: 2951894 - RNA, 20 nt, Human
cccaccuuggcugcagggag

SEQ ID NO: 2951895 - RNA, 15 nt, Human
cccacgcccccacug

SEQ ID NO: 2951896 - RNA, 14 nt, Human
cccacgcccccacu

SEQ ID NO: 2951897 - RNA, 13 nt, Human
cccacgcccccac

SEQ ID NO: 2951898 - RNA, 15 nt, Human
ccaugcugcccugug

SEQ ID NO: 2951899 - RNA, 18 nt, Human
ccaugcuccuggcccacu

SEQ ID NO: 2951900 - RNA, 15 nt, Human
ccaugcuccuggccc

SEQ ID NO: 2951901 - RNA, 17 nt, Human
ccaugcugcccugugag

SEQ ID NO: 2951902 - RNA, 16 nt, Human
ccaugcugcccuguga

SEQ ID NO: 2951903 - RNA, 10 nt, Human
ccaugaaaga

SEQ ID NO: 2951904 - RNA, 13 nt, Human
ccaugcuccuggc

SEQ ID NO: 2951905 - RNA, 13 nt, Human
ccauguuggccag

SEQ ID NO: 2951906 - RNA, 14 nt, Human
ccauguuggccagg

SEQ ID NO: 2951907 - RNA, 13 nt, Human
ccaugugccaggu

SEQ ID NO: 2951908 - RNA, 23 nt, Human
ccauggcacucuauguucuaaga

SEQ ID NO: 2951909 - RNA, 17 nt, Human
ccgggaagggggcuggg

SEQ ID NO: 2951910 - RNA, 12 nt, Human
cccuucccaccu

SEQ ID NO: 2951911 - RNA, 13 nt, Human
cccuucccaccuc

SEQ ID NO: 2951912 - RNA, 20 nt, Human
cccuuguggucccaccccac

SEQ ID NO: 2951913 - RNA, 22 nt, Human
cccuuguggucccaccccacac

SEQ ID NO: 2951914 - RNA, 19 nt, Human
cccuugucggccccaccag

SEQ ID NO: 2951915 - RNA, 22 nt, Human
cccuugucggccccaccagugc

SEQ ID NO: 2951916 - RNA, 23 nt, Human
cccuugguuaggcauugugggaa

SEQ ID NO: 2951917 - RNA, 22 nt, Human
cccuugguuaggcauuguggga

SEQ ID NO: 2951918 - RNA, 14 nt, Human
cccuuggacauuuu

SEQ ID NO: 2951919 - RNA, 15 nt, Human
cccuuggacauuuua

SEQ ID NO: 2951920 - RNA, 17 nt, Human
cccuuggauuguccccg

SEQ ID NO: 2951921 - RNA, 17 nt, Human
cccuucuuuccacagaa

SEQ ID NO: 2951922 - RNA, 21 nt, Human
ccuagaaauuccccacccuga

SEQ ID NO: 2951923 - RNA, 13 nt, Human
ccuaggugacaga

SEQ ID NO: 2951924 - RNA, 13 nt, Human
ccuacccacccuc

SEQ ID NO: 2951925 - RNA, 18 nt, Human
ccuacccacccuccuuuc

SEQ ID NO: 2951926 - RNA, 19 nt, Human
ccuacuguaauuugugaua

SEQ ID NO: 2951927 - RNA, 22 nt, Human
ccuacaguugaaaaacagcuga

SEQ ID NO: 2951928 - RNA, 19 nt, Human
ccuacagcuugaccgugag

SEQ ID NO: 2951929 - RNA, 16 nt, Human
ccuaaaauucagugga

SEQ ID NO: 2951930 - RNA, 13 nt, Human
ccuaaacauauga

SEQ ID NO: 2951931 - RNA, 12 nt, Human
ccguuauuaaaa

SEQ ID NO: 2951932 - RNA, 15 nt, Human
ccuaggugacagagu

SEQ ID NO: 2951933 - RNA, 23 nt, Human
ccucacaguccuuaccagcagag

SEQ ID NO: 2951934 - RNA, 24 nt, Human
ccucacaguccuuaccagcagagc

SEQ ID NO: 2951935 - RNA, 16 nt, Human
ccuauuagagaagaga

SEQ ID NO: 2951936 - RNA, 17 nt, Human
ccuauuagagaagagau

SEQ ID NO: 2951937 - RNA, 23 nt, Human
ccucaggccugggggcugggcag

SEQ ID NO: 2951938 - RNA, 20 nt, Human
ccucagggucccugguggca

SEQ ID NO: 2951939 - RNA, 17 nt, Human
ccucagggucccuggug

SEQ ID NO: 2951940 - RNA, 16 nt, Human
ccucagggucccuggu

SEQ ID NO: 2951941 - RNA, 20 nt, Human
ccucagaugcacaugagcug

SEQ ID NO: 2951942 - RNA, 16 nt, Human
ccucagaucuucugug

SEQ ID NO: 2951943 - RNA, 21 nt, Human
ccucugacacacagcucuguc

SEQ ID NO: 2951944 - RNA, 14 nt, Human
ccucuccuccacau

SEQ ID NO: 2951945 - RNA, 13 nt, Human
ccucugacacaca

SEQ ID NO: 2951946 - RNA, 14 nt, Human
ccucugacacacag

SEQ ID NO: 2951947 - RNA, 19 nt, Human
ccucugacacacagcucug

SEQ ID NO: 2951948 - RNA, 20 nt, Human
ccucugacacacagcucugu

SEQ ID NO: 2951949 - RNA, 15 nt, Human
ccucugcacuccccu

SEQ ID NO: 2951950 - RNA, 17 nt, Human
ccucugcacuccccugc

SEQ ID NO: 2951951 - RNA, 16 nt, Human
ccucugcacuccccug

SEQ ID NO: 2951952 - RNA, 18 nt, Human
ccucugcacuccccugcu

SEQ ID NO: 2951953 - RNA, 23 nt, Human
ccucugcacuccccugcugggug

SEQ ID NO: 2951954 - RNA, 14 nt, Human
ccucugcagcaaua

SEQ ID NO: 2951955 - RNA, 18 nt, Human
ccucugcagcaauaaagc

SEQ ID NO: 2951956 - RNA, 16 nt, Human
ccucugcccacucccu

SEQ ID NO: 2951957 - RNA, 13 nt, Human
ccucugcccacuc

SEQ ID NO: 2951958 - RNA, 19 nt, Human
ccucugcagcaauaaagca

SEQ ID NO: 2951959 - RNA, 21 nt, Human
ccuccuccagccgccaugcuc

SEQ ID NO: 2951960 - RNA, 15 nt, Human
ccucuccccagcaag

SEQ ID NO: 2951961 - RNA, 23 nt, Human
ccucucccugcugcuccuaggac

SEQ ID NO: 2951962 - RNA, 15 nt, Human
ccucucccugcugcu

SEQ ID NO: 2951963 - RNA, 17 nt, Human
ccucucccugcugcucc

SEQ ID NO: 2951964 - RNA, 19 nt, Human
ccucucccugcugcuccua

SEQ ID NO: 2951965 - RNA, 14 nt, Human
ccucucccugcugc

SEQ ID NO: 2951966 - RNA, 22 nt, Human
ccucucccuuggauuguccccg

SEQ ID NO: 2951967 - RNA, 13 nt, Human
ccucucccuugga

SEQ ID NO: 2951968 - RNA, 20 nt, Human
ccucuccccagcaagugaga

SEQ ID NO: 2951969 - RNA, 20 nt, Human
ccucaggugagaagcagagg

SEQ ID NO: 2951970 - RNA, 18 nt, Human
ccucaggugagaagcaga

SEQ ID NO: 2951971 - RNA, 17 nt, Human
ccucaggugagaagcag

SEQ ID NO: 2951972 - RNA, 12 nt, Human
ccuccaggugca

SEQ ID NO: 2951973 - RNA, 11 nt, Human
ccuccaggugc

SEQ ID NO: 2951974 - RNA, 17 nt, Human
ccuccaggugcacaagc

SEQ ID NO: 2951975 - RNA, 12 nt, Human
ccuccauguggg

SEQ ID NO: 2951976 - RNA, 15 nt, Human
ccuccaugugggcua

SEQ ID NO: 2951977 - RNA, 17 nt, Human
ccucccaaagugcuggg

SEQ ID NO: 2951978 - RNA, 14 nt, Human
ccucccaacucacc

SEQ ID NO: 2951979 - RNA, 12 nt, Human
ccuccauccuga

SEQ ID NO: 2951980 - RNA, 13 nt, Human
ccuccauccugag

SEQ ID NO: 2951981 - RNA, 13 nt, Human
ccucccucuuucc

SEQ ID NO: 2951982 - RNA, 11 nt, Human
ccuccucagau

SEQ ID NO: 2951983 - RNA, 12 nt, Human
ccuccuccagcc

SEQ ID NO: 2951984 - RNA, 17 nt, Human
ccucccgaguagcuggg

SEQ ID NO: 2951985 - RNA, 18 nt, Human
ccucccgaguagcuggga

SEQ ID NO: 2951986 - RNA, 21 nt, Human
ccucccgaauagcugggacua

SEQ ID NO: 2951987 - RNA, 19 nt, Human
ccucccgaauagcugggac

SEQ ID NO: 2951988 - RNA, 20 nt, Human
ccucccgaauagcugggacu

SEQ ID NO: 2951989 - RNA, 16 nt, Human
ccucccccuggcacug

SEQ ID NO: 2951990 - RNA, 15 nt, Human
ccucccaacucaccc

SEQ ID NO: 2951991 - RNA, 18 nt, Human
ccucccgaauagcuggga

SEQ ID NO: 2951992 - RNA, 12 nt, Human
ccuccccuccuc

SEQ ID NO: 2951993 - RNA, 13 nt, Human
ccuccccuccucu

SEQ ID NO: 2951994 - RNA, 19 nt, Human
cccugcugguucaggguug

SEQ ID NO: 2951995 - RNA, 20 nt, Human
cccugcugguucaggguugg

SEQ ID NO: 2951996 - RNA, 13 nt, Human
cccugcugguuca

SEQ ID NO: 2951997 - RNA, 22 nt, Human
cccugguggcagugggagcugc

SEQ ID NO: 2951998 - RNA, 12 nt, Human
cccugccacccu

SEQ ID NO: 2951999 - RNA, 14 nt, Human
cccugccacccugg

SEQ ID NO: 2952000 - RNA, 15 nt, Human
cccugccacccuggg

SEQ ID NO: 2952001 - RNA, 17 nt, Human
cccugccacccugggga

SEQ ID NO: 2952002 - RNA, 18 nt, Human
cccugccacccuggggag

SEQ ID NO: 2952003 - RNA, 23 nt, Human
cccugccuccuuugugaggaagc

SEQ ID NO: 2952004 - RNA, 16 nt, Human
cccugccuccuuugug

SEQ ID NO: 2952005 - RNA, 14 nt, Human
cccugccuccuuug

SEQ ID NO: 2952006 - RNA, 21 nt, Human
cccugauuuaauaugcaaagu

SEQ ID NO: 2952007 - RNA, 22 nt, Human
cccugcacuugcagacucuaca

SEQ ID NO: 2952008 - RNA, 12 nt, Human
cccugcagaggg

SEQ ID NO: 2952009 - RNA, 18 nt, Human
cccugcagagggcacaga

SEQ ID NO: 2952010 - RNA, 14 nt, Human
cccugcaauaaaau

SEQ ID NO: 2952011 - RNA, 15 nt, Human
cccugcaauaaaaug

SEQ ID NO: 2952012 - RNA, 16 nt, Human
cccugcaaccugauug

SEQ ID NO: 2952013 - RNA, 22 nt, Human
cccugcaaccugauugugucuc

SEQ ID NO: 2952014 - RNA, 14 nt, Human
cccugguggcagcu

SEQ ID NO: 2952015 - RNA, 22 nt, Human
ccccuguccccgcacugggcuu

SEQ ID NO: 2952016 - RNA, 20 nt, Human
ccccuguucuggcagaguug

SEQ ID NO: 2952017 - RNA, 22 nt, Human
cccgcuaagagggagggagggc

SEQ ID NO: 2952018 - RNA, 23 nt, Human
cccgauggaggacuccaggcagc

SEQ ID NO: 2952019 - RNA, 22 nt, Human
cccgauggaggacuccaggcag

SEQ ID NO: 2952020 - RNA, 20 nt, Human
cccgaggccuucucugaagg

SEQ ID NO: 2952021 - RNA, 15 nt, Human
cccgaggccuucucu

SEQ ID NO: 2952022 - RNA, 13 nt, Human
ccccagccugcua

SEQ ID NO: 2952023 - RNA, 14 nt, Human
ccccaccagugccu

SEQ ID NO: 2952024 - RNA, 13 nt, Human
ccccaccagugcc

SEQ ID NO: 2952025 - RNA, 15 nt, Human
ccccagccccauccu

SEQ ID NO: 2952026 - RNA, 12 nt, Human
ccccacagcccc

SEQ ID NO: 2952027 - RNA, 16 nt, Human
ccccagccccauccca

SEQ ID NO: 2952028 - RNA, 12 nt, Human
ccccaggaggcc

SEQ ID NO: 2952029 - RNA, 15 nt, Human
ccccuggcagccccu

SEQ ID NO: 2952030 - RNA, 14 nt, Human
ccccuggcagcccc

SEQ ID NO: 2952031 - RNA, 12 nt, Human
ccccuggcagcc

SEQ ID NO: 2952032 - RNA, 14 nt, Human
ccccaggugccagu

SEQ ID NO: 2952033 - RNA, 22 nt, Human
ccccaggugguuauggagaggg

SEQ ID NO: 2952034 - RNA, 15 nt, Human
cccucagggucccug

SEQ ID NO: 2952035 - RNA, 19 nt, Human
cccucagggucccuggugg

SEQ ID NO: 2952036 - RNA, 18 nt, Human
cccucagggucccuggug

SEQ ID NO: 2952037 - RNA, 17 nt, Human
cccucagggucccuggu

SEQ ID NO: 2952038 - RNA, 16 nt, Human
cccucagggucccugg

SEQ ID NO: 2952039 - RNA, 22 nt, Human
cccuaaaguguauuuuuuuacu

SEQ ID NO: 2952040 - RNA, 17 nt, Human
cccuaaaguguauuuuu

SEQ ID NO: 2952041 - RNA, 16 nt, Human
cccggcaggguccuag

SEQ ID NO: 2952042 - RNA, 21 nt, Human
cccucagggucccugguggca

SEQ ID NO: 2952043 - RNA, 20 nt, Human
cccucagucuggcccuuccu

SEQ ID NO: 2952044 - RNA, 22 nt, Human
cccucaucaccaacgucugugc

SEQ ID NO: 2952045 - RNA, 20 nt, Human
cccucauccucauacccacc

SEQ ID NO: 2952046 - RNA, 17 nt, Human
cccucauccucauaccc

SEQ ID NO: 2952047 - RNA, 21 nt, Human
cccuccaagaccuucuccuuc

SEQ ID NO: 2952048 - RNA, 22 nt, Human
cccucauccucauacccacccc

SEQ ID NO: 2952049 - RNA, 17 nt, Human
cccucaugcugccaaua

SEQ ID NO: 2952050 - RNA, 14 nt, Human
cccucaugcugcca

SEQ ID NO: 2952051 - RNA, 19 nt, Human
cccuccagagccccacagc

SEQ ID NO: 2952052 - RNA, 21 nt, Human
cccuccagagccccacagccc

SEQ ID NO: 2952053 - RNA, 17 nt, Human
cccuccaugugggcuag

SEQ ID NO: 2952054 - RNA, 13 nt, Human
cccucccuccacc

SEQ ID NO: 2952055 - RNA, 12 nt, Human
cccucccuccac

SEQ ID NO: 2952056 - RNA, 20 nt, Human
cccucccuccaccucccugc

SEQ ID NO: 2952057 - RNA, 13 nt, Human
cccucccucuuuc

SEQ ID NO: 2952058 - RNA, 14 nt, Human
cuaugcauuugaaa

SEQ ID NO: 2952059 - RNA, 21 nt, Human
cucaacucuccuccagaguca

SEQ ID NO: 2952060 - RNA, 20 nt, Human
cucaacucuccuccagaguc

SEQ ID NO: 2952061 - RNA, 15 nt, Human
cucaagagcaaagua

SEQ ID NO: 2952062 - RNA, 19 nt, Human
cucaacucuccuccagagu

SEQ ID NO: 2952063 - RNA, 23 nt, Human
cucacaguccuuaccagcagagc

SEQ ID NO: 2952064 - RNA, 18 nt, Human
cucaagugauucuccugc

SEQ ID NO: 2952065 - RNA, 19 nt, Human
cucaagugauucuccugcc

SEQ ID NO: 2952066 - RNA, 20 nt, Human
cucaagugauucuccugccu

SEQ ID NO: 2952067 - RNA, 20 nt, Human
cucaccagccccagugccca

SEQ ID NO: 2952068 - RNA, 21 nt, Human
cucaccagccccagugcccac

SEQ ID NO: 2952069 - RNA, 19 nt, Human
cucaccagccccagugccc

SEQ ID NO: 2952070 - RNA, 14 nt, Human
cucaccccagcccc

SEQ ID NO: 2952071 - RNA, 13 nt, Human
cucaccccagccc

SEQ ID NO: 2952072 - RNA, 12 nt, Human
cucaccccagcc

SEQ ID NO: 2952073 - RNA, 16 nt, Human
cucacuauguugccca

SEQ ID NO: 2952074 - RNA, 17 nt, Human
cucacuauguugcccag

SEQ ID NO: 2952075 - RNA, 17 nt, Human
cucaccccuugccauaa

SEQ ID NO: 2952076 - RNA, 11 nt, Human
cuaugcauuug

SEQ ID NO: 2952077 - RNA, 12 nt, Human
cuaugcauuuga

SEQ ID NO: 2952078 - RNA, 22 nt, Human
cuauauuuuuuguuaaaugauu

SEQ ID NO: 2952079 - RNA, 20 nt, Human
cuaucaaguauuauaccuuu

SEQ ID NO: 2952080 - RNA, 14 nt, Human
cuaugacacaugca

SEQ ID NO: 2952081 - RNA, 13 nt, Human
cuaugaaauauua

SEQ ID NO: 2952082 - RNA, 18 nt, Human
cuaguguuuucaauuuua

SEQ ID NO: 2952083 - RNA, 22 nt, Human
cuaguguuuucaauuuuaaaca

SEQ ID NO: 2952084 - RNA, 18 nt, Human
cuauauuguuugcuaagc

SEQ ID NO: 2952085 - RNA, 19 nt, Human
cuauauuguuugcuaagca

SEQ ID NO: 2952086 - RNA, 22 nt, Human
cuauauuguuuucaguguacau

SEQ ID NO: 2952087 - RNA, 20 nt, Human
cuauauuuuuuguuaaauga

SEQ ID NO: 2952088 - RNA, 23 nt, Human
cuauauuguuuucaguguacaug

SEQ ID NO: 2952089 - RNA, 20 nt, Human
cuaggacccgucuccagcug

SEQ ID NO: 2952090 - RNA, 21 nt, Human
cuaggacccgucuccagcugc

SEQ ID NO: 2952091 - RNA, 22 nt, Human
cuaggaccccuccaugugggcu

SEQ ID NO: 2952092 - RNA, 22 nt, Human
cuaggacccgucuccagcugcu

SEQ ID NO: 2952093 - RNA, 23 nt, Human
cuaggacccgucuccagcugcug

SEQ ID NO: 2952094 - RNA, 22 nt, Human
cuaggacugaauuaugaaacuu

SEQ ID NO: 2952095 - RNA, 14 nt, Human
cuaggagguaauga

SEQ ID NO: 2952096 - RNA, 17 nt, Human
cuaggaggucucuaaga

SEQ ID NO: 2952097 - RNA, 22 nt, Human
cuaggaaauauuuauuuuaaua

SEQ ID NO: 2952098 - RNA, 15 nt, Human
cuaggaacacuccuu

SEQ ID NO: 2952099 - RNA, 13 nt, Human
cuaggaacacucc

SEQ ID NO: 2952100 - RNA, 21 nt, Human
cuaggaagacuuuggaaagag

SEQ ID NO: 2952101 - RNA, 19 nt, Human
cuagugugguguuuccugg

SEQ ID NO: 2952102 - RNA, 23 nt, Human
cuagugugguguuuccuggcacu

SEQ ID NO: 2952103 - RNA, 22 nt, Human
cuagugugguguuuccuggcac

SEQ ID NO: 2952104 - RNA, 21 nt, Human
cuagugugguguuuccuggca

SEQ ID NO: 2952105 - RNA, 21 nt, Human
cuaggcauuugcugaauacag

SEQ ID NO: 2952106 - RNA, 22 nt, Human
cuaguauuucuaugaaauauua

SEQ ID NO: 2952107 - RNA, 19 nt, Human
cuaguauuucuaugaaaua

SEQ ID NO: 2952108 - RNA, 20 nt, Human
cuaguauuucuaugaaauau

SEQ ID NO: 2952109 - RNA, 23 nt, Human
cuaguaucaaaagaaagaaaauc

SEQ ID NO: 2952110 - RNA, 15 nt, Human
cuaguaucaaaagaa

SEQ ID NO: 2952111 - RNA, 17 nt, Human
cuaguaucaaaagaaag

SEQ ID NO: 2952112 - RNA, 14 nt, Human
cuacugaggugcua

SEQ ID NO: 2952113 - RNA, 17 nt, Human
cuacuguaauuugugau

SEQ ID NO: 2952114 - RNA, 16 nt, Human
cuacuguaauuuguga

SEQ ID NO: 2952115 - RNA, 13 nt, Human
cuacucuguguca

SEQ ID NO: 2952116 - RNA, 16 nt, Human
cuacucugugucaggu

SEQ ID NO: 2952117 - RNA, 21 nt, Human
cuacucugugucagguggggc

SEQ ID NO: 2952118 - RNA, 21 nt, Human
cuacccgggaagggggcuggg

SEQ ID NO: 2952119 - RNA, 20 nt, Human
cuacccgggaagggggcugg

SEQ ID NO: 2952120 - RNA, 15 nt, Human
cuacccgggaagggg

SEQ ID NO: 2952121 - RNA, 14 nt, Human
cuacccgggaaggg

SEQ ID NO: 2952122 - RNA, 22 nt, Human
cuacuuauuguagcauccugga

SEQ ID NO: 2952123 - RNA, 15 nt, Human
cuacuugggaggcug

SEQ ID NO: 2952124 - RNA, 18 nt, Human
cuacuugggaggcugaga

SEQ ID NO: 2952125 - RNA, 19 nt, Human
cuacuugggaggcugagau

SEQ ID NO: 2952126 - RNA, 21 nt, Human
cuagacgagcaggcuucuucc

SEQ ID NO: 2952127 - RNA, 20 nt, Human
cuagacgagcaggcuucuuc

SEQ ID NO: 2952128 - RNA, 21 nt, Human
cuagagugaacuugggccacu

SEQ ID NO: 2952129 - RNA, 17 nt, Human
cuagagugaacuugggc

SEQ ID NO: 2952130 - RNA, 17 nt, Human
cuagcacuuugggaggc

SEQ ID NO: 2952131 - RNA, 18 nt, Human
cuaauauguaacaagcca

SEQ ID NO: 2952132 - RNA, 20 nt, Human
cuaauaaaauuuaaaagucu

SEQ ID NO: 2952133 - RNA, 16 nt, Human
cuaaggugugcucuga

SEQ ID NO: 2952134 - RNA, 21 nt, Human
cuaauaaaauuuaaaagucuu

SEQ ID NO: 2952135 - RNA, 14 nt, Human
cuaauguacugcau

SEQ ID NO: 2952136 - RNA, 16 nt, Human
cuaauguacugcauau

SEQ ID NO: 2952137 - RNA, 20 nt, Human
cuacccagcgagcccuggug

SEQ ID NO: 2952138 - RNA, 19 nt, Human
cuacccagcgagcccuggu

SEQ ID NO: 2952139 - RNA, 17 nt, Human
cuacccacccuccuuuc

SEQ ID NO: 2952140 - RNA, 13 nt, Human
cuacccacccucc

SEQ ID NO: 2952141 - RNA, 22 nt, Human
cuacccacccuccuuucaccac

SEQ ID NO: 2952142 - RNA, 15 nt, Human
cuacagaggccaugg

SEQ ID NO: 2952143 - RNA, 18 nt, Human
cuacacaccuaacuuaug

SEQ ID NO: 2952144 - RNA, 13 nt, Human
cuacacacugcau

SEQ ID NO: 2952145 - RNA, 15 nt, Human
cuacacacugcaugu

SEQ ID NO: 2952146 - RNA, 16 nt, Human
cuacacuccagugaga

SEQ ID NO: 2952147 - RNA, 17 nt, Human
cuacacuccagugagac

SEQ ID NO: 2952148 - RNA, 18 nt, Human
cuacacugugcugagucu

SEQ ID NO: 2952149 - RNA, 15 nt, Human
cuaaggugugcucug

SEQ ID NO: 2952150 - RNA, 19 nt, Human
cuaagcuauucaguaauaa

SEQ ID NO: 2952151 - RNA, 21 nt, Human
cuaagcuauucaguaauaacu

SEQ ID NO: 2952152 - RNA, 16 nt, Human
cuaaccagcagaaaug

SEQ ID NO: 2952153 - RNA, 17 nt, Human
cuaaccacgcuggaccu

SEQ ID NO: 2952154 - RNA, 17 nt, Human
cuaaccagcagaaaugc

SEQ ID NO: 2952155 - RNA, 14 nt, Human
cuaagcaaaaugug

SEQ ID NO: 2952156 - RNA, 15 nt, Human
cuaagcaaaauguga

SEQ ID NO: 2952157 - RNA, 18 nt, Human
cuaagcaaaaugugauau

SEQ ID NO: 2952158 - RNA, 16 nt, Human
cuaaauguugaaagau

SEQ ID NO: 2952159 - RNA, 23 nt, Human
cuaaauugacacuuaaaaauggu

SEQ ID NO: 2952160 - RNA, 17 nt, Human
cuaacauggaaguacua

SEQ ID NO: 2952161 - RNA, 15 nt, Human
cuaacauggaaguac

SEQ ID NO: 2952162 - RNA, 15 nt, Human
cuaaauggaaccacu

SEQ ID NO: 2952163 - RNA, 20 nt, Human
cuaaaucuccaaaauaaaac

SEQ ID NO: 2952164 - RNA, 16 nt, Human
cuaaauggaaccacuc

SEQ ID NO: 2952165 - RNA, 17 nt, Human
cuaaauggaaccacucu

SEQ ID NO: 2952166 - RNA, 18 nt, Human
cuaaauggaaccacucua

SEQ ID NO: 2952167 - RNA, 17 nt, Human
cuaaaacaacagaugua

SEQ ID NO: 2952168 - RNA, 22 nt, Human
cuaaaaaugcaaaaaaaauuag

SEQ ID NO: 2952169 - RNA, 13 nt, Human
cuaaaauguucua

SEQ ID NO: 2952170 - RNA, 14 nt, Human
cgucuccagcugcu

SEQ ID NO: 2952171 - RNA, 16 nt, Human
cgucuaccugaggggc

SEQ ID NO: 2952172 - RNA, 16 nt, Human
cgucucauacucaccu

SEQ ID NO: 2952173 - RNA, 18 nt, Human
cggugcuaucucccccag

SEQ ID NO: 2952174 - RNA, 21 nt, Human
cggugcuaucucccccagccc

SEQ ID NO: 2952175 - RNA, 20 nt, Human
cggugcuaucucccccagcc

SEQ ID NO: 2952176 - RNA, 22 nt, Human
cggugcuaucucccccagcccc

SEQ ID NO: 2952177 - RNA, 20 nt, Human
cgucugacaggcaaugcugg

SEQ ID NO: 2952178 - RNA, 21 nt, Human
cgucugacaggcaaugcuggc

SEQ ID NO: 2952179 - RNA, 22 nt, Human
cgucugacaggcaaugcuggcu

SEQ ID NO: 2952180 - RNA, 16 nt, Human
cgugcacacaccagag

SEQ ID NO: 2952181 - RNA, 21 nt, Human
cgugcaguggugcgaucuggg

SEQ ID NO: 2952182 - RNA, 23 nt, Human
cgugcauaccacuuuuguucuug

SEQ ID NO: 2952183 - RNA, 18 nt, Human
cgugcacacaccagagcc

SEQ ID NO: 2952184 - RNA, 19 nt, Human
cgugcacacaccagagccc

SEQ ID NO: 2952185 - RNA, 18 nt, Human
cgugcacgcacacugucu

SEQ ID NO: 2952186 - RNA, 14 nt, Human
cgugcacacaccag

SEQ ID NO: 2952187 - RNA, 22 nt, Human
cgcuaagagggagggagggcuc

SEQ ID NO: 2952188 - RNA, 16 nt, Human
cgcuacccgggaaggg

SEQ ID NO: 2952189 - RNA, 14 nt, Human
cgcucucuggccuu

SEQ ID NO: 2952190 - RNA, 15 nt, Human
cgcucucuggccuuc

SEQ ID NO: 2952191 - RNA, 15 nt, Human
cggaaaacaugcuac

SEQ ID NO: 2952192 - RNA, 20 nt, Human
cggaaaacaugcuacacacu

SEQ ID NO: 2952193 - RNA, 18 nt, Human
cgcugugcugcccugccc

SEQ ID NO: 2952194 - RNA, 15 nt, Human
cgcugugcugcccug

SEQ ID NO: 2952195 - RNA, 17 nt, Human
cgcugugcugcccugcc

SEQ ID NO: 2952196 - RNA, 16 nt, Human
cgcugugcugcccugc

SEQ ID NO: 2952197 - RNA, 22 nt, Human
cgcugucagccauuccuguucc

SEQ ID NO: 2952198 - RNA, 18 nt, Human
cgcucucuggccuucggc

SEQ ID NO: 2952199 - RNA, 20 nt, Human
ccucugcccacucccugcaa

SEQ ID NO: 2952200 - RNA, 19 nt, Human
ccucugcccacucccugca

SEQ ID NO: 2952201 - RNA, 17 nt, Human
ccucugcccacucccug

SEQ ID NO: 2952202 - RNA, 22 nt, Human
cgccagauucuuuccugaggcu

SEQ ID NO: 2952203 - RNA, 22 nt, Human
cgccagcucaccccaucauccc

SEQ ID NO: 2952204 - RNA, 16 nt, Human
cgccaucccagcccca

SEQ ID NO: 2952205 - RNA, 14 nt, Human
cgccaucccagccc

SEQ ID NO: 2952206 - RNA, 23 nt, Human
cgccaggggaaaaucagccugcu

SEQ ID NO: 2952207 - RNA, 22 nt, Human
cgcccaggcuuagucacugaga

SEQ ID NO: 2952208 - RNA, 23 nt, Human
cggggacagcuccuucuguccua

SEQ ID NO: 2952209 - RNA, 14 nt, Human
cgggggcagugcuc

SEQ ID NO: 2952210 - RNA, 22 nt, Human
cgggggcagugcucacccacac

SEQ ID NO: 2952211 - RNA, 15 nt, Human
cgggggcagagaggg

SEQ ID NO: 2952212 - RNA, 20 nt, Human
cgggaggucgaggcaggagg

SEQ ID NO: 2952213 - RNA, 18 nt, Human
cgggaggucgaggcagga

SEQ ID NO: 2952214 - RNA, 22 nt, Human
cggggacagcuccuucuguccu

SEQ ID NO: 2952215 - RNA, 14 nt, Human
cgggcacucagaag

SEQ ID NO: 2952216 - RNA, 22 nt, Human
cgggcacucagaagacacugau

SEQ ID NO: 2952217 - RNA, 19 nt, Human
cggcuggccuggccccuca

SEQ ID NO: 2952218 - RNA, 22 nt, Human
cggcuggccuggccccucaggg

SEQ ID NO: 2952219 - RNA, 23 nt, Human
cggcuggccuggccccucagggu

SEQ ID NO: 2952220 - RNA, 20 nt, Human
cggugagaggggaacagacu

SEQ ID NO: 2952221 - RNA, 21 nt, Human
cggugagaggggaacagacug

SEQ ID NO: 2952222 - RNA, 17 nt, Human
cggugagcuacaaaugc

SEQ ID NO: 2952223 - RNA, 22 nt, Human
cggucggguuuuauuguuuaaa

SEQ ID NO: 2952224 - RNA, 14 nt, Human
cgguccacccagga

SEQ ID NO: 2952225 - RNA, 15 nt, Human
cgguccacccaggag

SEQ ID NO: 2952226 - RNA, 16 nt, Human
cgguccacccaggagc

SEQ ID NO: 2952227 - RNA, 20 nt, Human
cgguccacccaggagccccg

SEQ ID NO: 2952228 - RNA, 21 nt, Human
cggguuuuauuguuuaaaauc

SEQ ID NO: 2952229 - RNA, 17 nt, Human
cggccaccugcggugcu

SEQ ID NO: 2952230 - RNA, 16 nt, Human
cggccaccugcggugc

SEQ ID NO: 2952231 - RNA, 15 nt, Human
cggccaccugcggug

SEQ ID NO: 2952232 - RNA, 11 nt, Human
cggccaccugc

SEQ ID NO: 2952233 - RNA, 13 nt, Human
cggaagagccuug

SEQ ID NO: 2952234 - RNA, 13 nt, Human
cggccccugcugg

SEQ ID NO: 2952235 - RNA, 18 nt, Human
cggccccugcugguucag

SEQ ID NO: 2952236 - RNA, 19 nt, Human
cggccccugcugguucagg

SEQ ID NO: 2952237 - RNA, 24 nt, Human
cggccaggccagagggagugacag

SEQ ID NO: 2952238 - RNA, 12 nt, Human
cggccuccaucc

SEQ ID NO: 2952239 - RNA, 17 nt, Human
cucccaaagugcuggga

SEQ ID NO: 2952240 - RNA, 13 nt, Human
cuccaugugggcu

SEQ ID NO: 2952241 - RNA, 18 nt, Human
cucacuauguugcccagg

SEQ ID NO: 2952242 - RNA, 18 nt, Human
cuccauccugaggcucca

SEQ ID NO: 2952243 - RNA, 14 nt, Human
cuccauccugaggc

SEQ ID NO: 2952244 - RNA, 16 nt, Human
cuccauccugaggcuc

SEQ ID NO: 2952245 - RNA, 22 nt, Human
cucccaacucaccccagcccca

SEQ ID NO: 2952246 - RNA, 18 nt, Human
cucccaaagugcugggau

SEQ ID NO: 2952247 - RNA, 17 nt, Human
cucccaacucaccccag

SEQ ID NO: 2952248 - RNA, 16 nt, Human
cucccaacucacccca

SEQ ID NO: 2952249 - RNA, 23 nt, Human
cucccaucugugaaaggaaagag

SEQ ID NO: 2952250 - RNA, 18 nt, Human
cucccaucugugaaagga

SEQ ID NO: 2952251 - RNA, 15 nt, Human
cucccaucugugaaa

SEQ ID NO: 2952252 - RNA, 14 nt, Human
cucccaucugugaa

SEQ ID NO: 2952253 - RNA, 11 nt, Human
cucccaucugu

SEQ ID NO: 2952254 - RNA, 21 nt, Human
cucccaucucacacaugagca

SEQ ID NO: 2952255 - RNA, 17 nt, Human
cucccgaauagcuggga

SEQ ID NO: 2952256 - RNA, 16 nt, Human
cucccgaauagcuggg

SEQ ID NO: 2952257 - RNA, 13 nt, Human
cuccccugcuggg

SEQ ID NO: 2952258 - RNA, 15 nt, Human
cucccgaguagcugg

SEQ ID NO: 2952259 - RNA, 18 nt, Human
cucccgaauagcugggac

SEQ ID NO: 2952260 - RNA, 16 nt, Human
cucccgaguagcuggg

SEQ ID NO: 2952261 - RNA, 17 nt, Human
cucccgaguagcuggga

SEQ ID NO: 2952262 - RNA, 18 nt, Human
cucccaugagggagaugc

SEQ ID NO: 2952263 - RNA, 20 nt, Human
cucccaugagggagaugcca

SEQ ID NO: 2952264 - RNA, 22 nt, Human
cucccaugagggagaugccaug

SEQ ID NO: 2952265 - RNA, 12 nt, Human
cuccccagcaag

SEQ ID NO: 2952266 - RNA, 20 nt, Human
cuccccagcaagugagagcu

SEQ ID NO: 2952267 - RNA, 20 nt, Human
cuccccagccccaucccaaa

SEQ ID NO: 2952268 - RNA, 12 nt, Human
cuccccugcugg

SEQ ID NO: 2952269 - RNA, 20 nt, Human
cuccugcaggcagccaggcc

SEQ ID NO: 2952270 - RNA, 18 nt, Human
cuccugcaggcagccagg

SEQ ID NO: 2952271 - RNA, 11 nt, Human
cuccugcccuu

SEQ ID NO: 2952272 - RNA, 13 nt, Human
cuccugccucagc

SEQ ID NO: 2952273 - RNA, 14 nt, Human
cuccugccucagcc

SEQ ID NO: 2952274 - RNA, 17 nt, Human
cuccugcaggcagccag

SEQ ID NO: 2952275 - RNA, 16 nt, Human
cuccugcaggcagcca

SEQ ID NO: 2952276 - RNA, 11 nt, Human
cuccugcaggc

SEQ ID NO: 2952277 - RNA, 16 nt, Human
cuccugugugugcgcc

SEQ ID NO: 2952278 - RNA, 19 nt, Human
cuccugugugugcgccuac

SEQ ID NO: 2952279 - RNA, 15 nt, Human
cuccugccucagccu

SEQ ID NO: 2952280 - RNA, 22 nt, Human
cuccucuccccagcaagugaga

SEQ ID NO: 2952281 - RNA, 13 nt, Human
cuccuccacauuu

SEQ ID NO: 2952282 - RNA, 22 nt, Human
cuccuccagccgccaugcuccu

SEQ ID NO: 2952283 - RNA, 15 nt, Human
cuccgaccagacacc

SEQ ID NO: 2952284 - RNA, 18 nt, Human
cucccucagucuggcccu

SEQ ID NO: 2952285 - RNA, 15 nt, Human
cucccuccaccuccc

SEQ ID NO: 2952286 - RNA, 17 nt, Human
cucccuccaccucccug

SEQ ID NO: 2952287 - RNA, 17 nt, Human
cucccuuucuucccuac

SEQ ID NO: 2952288 - RNA, 13 nt, Human
cucuacagaggcc

SEQ ID NO: 2952289 - RNA, 19 nt, Human
cucuacagaggccaugggc

SEQ ID NO: 2952290 - RNA, 14 nt, Human
cucuacagaggcca

SEQ ID NO: 2952291 - RNA, 16 nt, Human
cucuacagaggccaug

SEQ ID NO: 2952292 - RNA, 13 nt, Human
cucuacaaaaagc

SEQ ID NO: 2952293 - RNA, 19 nt, Human
cuccuucacagaugggugc

SEQ ID NO: 2952294 - RNA, 20 nt, Human
cuccugugugugcgccuaca

SEQ ID NO: 2952295 - RNA, 14 nt, Human
cuccugugugugcg

SEQ ID NO: 2952296 - RNA, 17 nt, Human
cuccuucacagaugggu

SEQ ID NO: 2952297 - RNA, 16 nt, Human
cuccuucacagauggg

SEQ ID NO: 2952298 - RNA, 22 nt, Human
cucuacccaucuuaaaaacaac

SEQ ID NO: 2952299 - RNA, 20 nt, Human
cucuaccauccccuguagag

SEQ ID NO: 2952300 - RNA, 21 nt, Human
cucuacccaucuuaaaaacaa

SEQ ID NO: 2952301 - RNA, 13 nt, Human
cucuacccuggca

SEQ ID NO: 2952302 - RNA, 20 nt, Human
cucuagugaauguaggcugg

SEQ ID NO: 2952303 - RNA, 23 nt, Human
cucuagggaaaaaccagcgugug

SEQ ID NO: 2952304 - RNA, 17 nt, Human
cucuaggaaauauuuau

SEQ ID NO: 2952305 - RNA, 15 nt, Human
cucuaggaaauauuu

SEQ ID NO: 2952306 - RNA, 15 nt, Human
cucuaguuugauuaa

SEQ ID NO: 2952307 - RNA, 19 nt, Human
cucuaguuugauuaaauuc

SEQ ID NO: 2952308 - RNA, 20 nt, Human
cucuaguuugauuaaauucu

SEQ ID NO: 2952309 - RNA, 21 nt, Human
cucuaguuugauuaaauucuu

SEQ ID NO: 2952310 - RNA, 12 nt, Human
cucucaggccaa

SEQ ID NO: 2952311 - RNA, 21 nt, Human
cucucaggccaaacucaccug

SEQ ID NO: 2952312 - RNA, 20 nt, Human
cucucaggccaaacucaccu

SEQ ID NO: 2952313 - RNA, 15 nt, Human
cucucaggccagcug

SEQ ID NO: 2952314 - RNA, 13 nt, Human
cucucaggccagc

SEQ ID NO: 2952315 - RNA, 23 nt, Human
cucucaggccaaacucaccugcc

SEQ ID NO: 2952316 - RNA, 22 nt, Human
cucucaggccaaacucaccugc

SEQ ID NO: 2952317 - RNA, 14 nt, Human
cucuccagccccug

SEQ ID NO: 2952318 - RNA, 18 nt, Human
cucuccagccccuggaug

SEQ ID NO: 2952319 - RNA, 17 nt, Human
cucuccagccccuggau

SEQ ID NO: 2952320 - RNA, 16 nt, Human
cucuccagccccugga

SEQ ID NO: 2952321 - RNA, 15 nt, Human
cucuccagccccugg

SEQ ID NO: 2952322 - RNA, 21 nt, Human
cucucaggccagcugcuuggg

SEQ ID NO: 2952323 - RNA, 19 nt, Human
cucucaggccagcugcuug

SEQ ID NO: 2952324 - RNA, 18 nt, Human
cucucaggccagcugcuu

SEQ ID NO: 2952325 - RNA, 17 nt, Human
cucucaggccagcugcu

SEQ ID NO: 2952326 - RNA, 18 nt, Human
cucuccucugcugcuggc

SEQ ID NO: 2952327 - RNA, 15 nt, Human
cucuccucugcugcu

SEQ ID NO: 2952328 - RNA, 14 nt, Human
cucuccucugcugc

SEQ ID NO: 2952329 - RNA, 13 nt, Human
cucuccucugcug

SEQ ID NO: 2952330 - RNA, 14 nt, Human
cucuccccagcaag

SEQ ID NO: 2952331 - RNA, 22 nt, Human
cucuccccagcaagugagagcu

SEQ ID NO: 2952332 - RNA, 24 nt, Human
cucuccccagcaagugagagcugg

SEQ ID NO: 2952333 - RNA, 12 nt, Human
cucuccucugcu

SEQ ID NO: 2952334 - RNA, 19 nt, Human
cucuccagccccuggaugc

SEQ ID NO: 2952335 - RNA, 13 nt, Human
cucuccccagcaa

SEQ ID NO: 2952336 - RNA, 13 nt, Human
cucucucaggcca

SEQ ID NO: 2952337 - RNA, 12 nt, Human
cucucucacucc

SEQ ID NO: 2952338 - RNA, 12 nt, Human
cucuccugggca

SEQ ID NO: 2952339 - RNA, 15 nt, Human
cucuccugggcagcu

SEQ ID NO: 2952340 - RNA, 16 nt, Human
cucuccugggcagcug

SEQ ID NO: 2952341 - RNA, 18 nt, Human
cucuccugggcagcugcc

SEQ ID NO: 2952342 - RNA, 19 nt, Human
cucuccugggcagcugccu

SEQ ID NO: 2952343 - RNA, 20 nt, Human
cucuccugggcagcugccuc

SEQ ID NO: 2952344 - RNA, 21 nt, Human
cugacauuguuggccaaagcc

SEQ ID NO: 2952345 - RNA, 21 nt, Human
cugacaggcaaugcuggcugu

SEQ ID NO: 2952346 - RNA, 22 nt, Human
cugacauuguuggccaaagcca

SEQ ID NO: 2952347 - RNA, 12 nt, Human
cugacccacugc

SEQ ID NO: 2952348 - RNA, 16 nt, Human
cugacccaugcugccc

SEQ ID NO: 2952349 - RNA, 15 nt, Human
cugacccaugcugcc

SEQ ID NO: 2952350 - RNA, 14 nt, Human
cugacccaugcugc

SEQ ID NO: 2952351 - RNA, 13 nt, Human
cugacccacugcu

SEQ ID NO: 2952352 - RNA, 14 nt, Human
cugacccacugcuu

SEQ ID NO: 2952353 - RNA, 13 nt, Human
cugacccaugcug

SEQ ID NO: 2952354 - RNA, 16 nt, Human
cugacuguuuucucuu

SEQ ID NO: 2952355 - RNA, 17 nt, Human
cugacucuuaagaagac

SEQ ID NO: 2952356 - RNA, 16 nt, Human
cugacuucuaaguaaa

SEQ ID NO: 2952357 - RNA, 18 nt, Human
cugacuguuuucucuuga

SEQ ID NO: 2952358 - RNA, 15 nt, Human
cugacuucuaaguaa

SEQ ID NO: 2952359 - RNA, 13 nt, Human
cugacuucuaagu

SEQ ID NO: 2952360 - RNA, 15 nt, Human
cugagacagcccggg

SEQ ID NO: 2952361 - RNA, 14 nt, Human
cugagacagcccgg

SEQ ID NO: 2952362 - RNA, 23 nt, Human
cugagaaagacuauucaaacagu

SEQ ID NO: 2952363 - RNA, 22 nt, Human
cugagaaagacuauucaaacag

SEQ ID NO: 2952364 - RNA, 18 nt, Human
cugaggcaggagacuggc

SEQ ID NO: 2952365 - RNA, 17 nt, Human
cugaggcaggagacugg

SEQ ID NO: 2952366 - RNA, 20 nt, Human
cugaggcccuucucuccagc

SEQ ID NO: 2952367 - RNA, 19 nt, Human
cugaggcccuucucuccag

SEQ ID NO: 2952368 - RNA, 18 nt, Human
cugaggcccuucucucca

SEQ ID NO: 2952369 - RNA, 15 nt, Human
cugaggcccuucucu

SEQ ID NO: 2952370 - RNA, 14 nt, Human
cugaggcccuucuc

SEQ ID NO: 2952371 - RNA, 23 nt, Human
cugaggcccagagggccugcaag

SEQ ID NO: 2952372 - RNA, 21 nt, Human
cugaggcccagagggccugca

SEQ ID NO: 2952373 - RNA, 19 nt, Human
cugaggcccagagggccug

SEQ ID NO: 2952374 - RNA, 18 nt, Human
cugaggcccagagggccu

SEQ ID NO: 2952375 - RNA, 17 nt, Human
cugaggcccagagggcc

SEQ ID NO: 2952376 - RNA, 16 nt, Human
cugaggcccagagggc

SEQ ID NO: 2952377 - RNA, 15 nt, Human
cugaggcccagaggg

SEQ ID NO: 2952378 - RNA, 14 nt, Human
cugaggcccagagg

SEQ ID NO: 2952379 - RNA, 13 nt, Human
cugaggcccagag

SEQ ID NO: 2952380 - RNA, 12 nt, Human
cugaggcccaga

SEQ ID NO: 2952381 - RNA, 16 nt, Human
cugagccucacagcag

SEQ ID NO: 2952382 - RNA, 17 nt, Human
cugagccucacagcagu

SEQ ID NO: 2952383 - RNA, 19 nt, Human
cugagccucacagcaguga

SEQ ID NO: 2952384 - RNA, 15 nt, Human
cugagccucacagca

SEQ ID NO: 2952385 - RNA, 15 nt, Human
cugagccagauuuca

SEQ ID NO: 2952386 - RNA, 21 nt, Human
cugagccagauuucacucucc

SEQ ID NO: 2952387 - RNA, 20 nt, Human
cugagccagauuucacucuc

SEQ ID NO: 2952388 - RNA, 19 nt, Human
cugagccagauuucacucu

SEQ ID NO: 2952389 - RNA, 18 nt, Human
cugagccagauuucacuc

SEQ ID NO: 2952390 - RNA, 17 nt, Human
cugagccagauuucacu

SEQ ID NO: 2952391 - RNA, 18 nt, Human
cugagacagcccgggcuc

SEQ ID NO: 2952392 - RNA, 17 nt, Human
cugagacagcccgggcu

SEQ ID NO: 2952393 - RNA, 16 nt, Human
cugagacagcccgggc

SEQ ID NO: 2952394 - RNA, 16 nt, Human
cugagcgacagugaga

SEQ ID NO: 2952395 - RNA, 20 nt, Human
cugagcgacagugagacucu

SEQ ID NO: 2952396 - RNA, 13 nt, Human
cucucuccucccu

SEQ ID NO: 2952397 - RNA, 22 nt, Human
cucugccugaagucacacagug

SEQ ID NO: 2952398 - RNA, 10 nt, Human
cucugccuga

SEQ ID NO: 2952399 - RNA, 21 nt, Human
cucugccugaagucacacagu

SEQ ID NO: 2952400 - RNA, 15 nt, Human
cucuggacaggcaug

SEQ ID NO: 2952401 - RNA, 12 nt, Human
cucugcuugcca

SEQ ID NO: 2952402 - RNA, 14 nt, Human
cucugcuugccauc

SEQ ID NO: 2952403 - RNA, 17 nt, Human
cucugcuugccaucccu

SEQ ID NO: 2952404 - RNA, 20 nt, Human
cucugcuugccaucccuccc

SEQ ID NO: 2952405 - RNA, 14 nt, Human
cucuggcagcucag

SEQ ID NO: 2952406 - RNA, 12 nt, Human
cucuggcagcuc

SEQ ID NO: 2952407 - RNA, 14 nt, Human
cucuggacaggcau

SEQ ID NO: 2952408 - RNA, 16 nt, Human
cucuggacaggcaugu

SEQ ID NO: 2952409 - RNA, 22 nt, Human
cucuggacaggcauguucucug

SEQ ID NO: 2952410 - RNA, 12 nt, Human
cucuggccuucg

SEQ ID NO: 2952411 - RNA, 16 nt, Human
cucuggcagcucagag

SEQ ID NO: 2952412 - RNA, 15 nt, Human
cucuggcagcucaga

SEQ ID NO: 2952413 - RNA, 19 nt, Human
cucuggccuucggccucca

SEQ ID NO: 2952414 - RNA, 13 nt, Human
cucuuccaggcug

SEQ ID NO: 2952415 - RNA, 15 nt, Human
cucuuccaggcuggg

SEQ ID NO: 2952416 - RNA, 14 nt, Human
cucuuccaggcugg

SEQ ID NO: 2952417 - RNA, 15 nt, Human
cucuuagaaaaacca

SEQ ID NO: 2952418 - RNA, 13 nt, Human
cucuuagaaaaac

SEQ ID NO: 2952419 - RNA, 16 nt, Human
cucuguggcgagccau

SEQ ID NO: 2952420 - RNA, 15 nt, Human
cucugugucaggugg

SEQ ID NO: 2952421 - RNA, 21 nt, Human
cucuuggguucaagcgauucu

SEQ ID NO: 2952422 - RNA, 19 nt, Human
cucuuggguucaagcgauu

SEQ ID NO: 2952423 - RNA, 22 nt, Human
cucuugaaauauaggaacuuaa

SEQ ID NO: 2952424 - RNA, 22 nt, Human
cucuucuuuaaagggauggcaa

SEQ ID NO: 2952425 - RNA, 18 nt, Human
cucuuuaaugucacaggc

SEQ ID NO: 2952426 - RNA, 17 nt, Human
cucuugguccugcugca

SEQ ID NO: 2952427 - RNA, 16 nt, Human
cucuugguccugcugc

SEQ ID NO: 2952428 - RNA, 15 nt, Human
cucuugguccugcug

SEQ ID NO: 2952429 - RNA, 13 nt, Human
cucuugguccugc

SEQ ID NO: 2952430 - RNA, 20 nt, Human
cucuuuaaugucacaggcag

SEQ ID NO: 2952431 - RNA, 21 nt, Human
cucuuuaaugucacaggcagg

SEQ ID NO: 2952432 - RNA, 22 nt, Human
cucuuuaaugucacaggcaggu

SEQ ID NO: 2952433 - RNA, 23 nt, Human
cucuuuaaugucacaggcagguc

SEQ ID NO: 2952434 - RNA, 13 nt, Human
cucuuucccuccc

SEQ ID NO: 2952435 - RNA, 17 nt, Human
cucuuucccucccuucc

SEQ ID NO: 2952436 - RNA, 16 nt, Human
cugaaauaaggaauga

SEQ ID NO: 2952437 - RNA, 21 nt, Human
cugaaauaaacgucuuaaaua

SEQ ID NO: 2952438 - RNA, 23 nt, Human
cugaaagcccugagcuuucugcu

SEQ ID NO: 2952439 - RNA, 19 nt, Human
cugaaagcccugagcuuuc

SEQ ID NO: 2952440 - RNA, 18 nt, Human
cugaaagcccugagcuuu

SEQ ID NO: 2952441 - RNA, 17 nt, Human
cugaaagcccugagcuu

SEQ ID NO: 2952442 - RNA, 16 nt, Human
cugaaagcccugagcu

SEQ ID NO: 2952443 - RNA, 15 nt, Human
cugaaagcccugagc

SEQ ID NO: 2952444 - RNA, 13 nt, Human
cugaaauuuccug

SEQ ID NO: 2952445 - RNA, 23 nt, Human
cugaaauuuccugggagcuuuug

SEQ ID NO: 2952446 - RNA, 16 nt, Human
cugaaauuuccuggga

SEQ ID NO: 2952447 - RNA, 17 nt, Human
cugaacaucacagcuua

SEQ ID NO: 2952448 - RNA, 14 nt, Human
cugaagaagauggu

SEQ ID NO: 2952449 - RNA, 19 nt, Human
cugaagaauugaaaaacca

SEQ ID NO: 2952450 - RNA, 23 nt, Human
cugaagaagcaccaaucaugaau

SEQ ID NO: 2952451 - RNA, 19 nt, Human
cugcuugugaaaggaaaga

SEQ ID NO: 2952452 - RNA, 19 nt, Human
cugcuugggcuucauccuc

SEQ ID NO: 2952453 - RNA, 18 nt, Human
cugcuugggcuucauccu

SEQ ID NO: 2952454 - RNA, 17 nt, Human
cugcuugggcuucaucc

SEQ ID NO: 2952455 - RNA, 15 nt, Human
cugcuugggcuucau

SEQ ID NO: 2952456 - RNA, 13 nt, Human
cugcuugggcuuc

SEQ ID NO: 2952457 - RNA, 22 nt, Human
cugcuugaggcaacucaucuua

SEQ ID NO: 2952458 - RNA, 16 nt, Human
cugcuugccaucccuc

SEQ ID NO: 2952459 - RNA, 15 nt, Human
cugcuugccaucccu

SEQ ID NO: 2952460 - RNA, 18 nt, Human
cugcuugccaucccuccc

SEQ ID NO: 2952461 - RNA, 19 nt, Human
cugcuugccaucccucccu

SEQ ID NO: 2952462 - RNA, 20 nt, Human
cugcuugccaucccucccuc

SEQ ID NO: 2952463 - RNA, 22 nt, Human
cugcuugccaucccucccucca

SEQ ID NO: 2952464 - RNA, 20 nt, Human
cugcuugcuugcuuuuuaau

SEQ ID NO: 2952465 - RNA, 15 nt, Human
cugcuuuuggucugu

SEQ ID NO: 2952466 - RNA, 17 nt, Human
cugcuuuuggucugugu

SEQ ID NO: 2952467 - RNA, 22 nt, Human
cugcugggagguuaaaaagaaa

SEQ ID NO: 2952468 - RNA, 18 nt, Human
cugcugggagguuaaaaa

SEQ ID NO: 2952469 - RNA, 13 nt, Human
cugcugcuggcug

SEQ ID NO: 2952470 - RNA, 12 nt, Human
cugcugcuggcu

SEQ ID NO: 2952471 - RNA, 15 nt, Human
cugcuggguguggcg

SEQ ID NO: 2952472 - RNA, 14 nt, Human
cugcuggguguggc

SEQ ID NO: 2952473 - RNA, 17 nt, Human
cugcuggguguggcgca

SEQ ID NO: 2952474 - RNA, 21 nt, Human
cugcuugaggcaacucaucuu

SEQ ID NO: 2952475 - RNA, 20 nt, Human
cugcuugaggcaacucaucu

SEQ ID NO: 2952476 - RNA, 13 nt, Human
cugcuugaggcaa

SEQ ID NO: 2952477 - RNA, 12 nt, Human
cugcucugguua

SEQ ID NO: 2952478 - RNA, 13 nt, Human
cugcugcaguugc

SEQ ID NO: 2952479 - RNA, 10 nt, Human
cugcugcagu

SEQ ID NO: 2952480 - RNA, 14 nt, Human
cugcugcaguugcc

SEQ ID NO: 2952481 - RNA, 15 nt, Human
cugcugcaguugcca

SEQ ID NO: 2952482 - RNA, 21 nt, Human
cugcgggggcagugcucaccc

SEQ ID NO: 2952483 - RNA, 17 nt, Human
cugcucccaccuggcuc

SEQ ID NO: 2952484 - RNA, 20 nt, Human
cugcucccaccuggcucugu

SEQ ID NO: 2952485 - RNA, 18 nt, Human
cugcucccaccuggcucu

SEQ ID NO: 2952486 - RNA, 19 nt, Human
cugcucccaccuggcucug

SEQ ID NO: 2952487 - RNA, 23 nt, Human
cugcggugcuaucucccccagcc

SEQ ID NO: 2952488 - RNA, 22 nt, Human
cugcggugcuaucucccccagc

SEQ ID NO: 2952489 - RNA, 21 nt, Human
cugcggugcuaucucccccag

SEQ ID NO: 2952490 - RNA, 20 nt, Human
cugcggugcuaucuccccca

SEQ ID NO: 2952491 - RNA, 23 nt, Human
cugcuccucuccccagcaaguga

SEQ ID NO: 2952492 - RNA, 19 nt, Human
cugcuccucuccccagcaa

SEQ ID NO: 2952493 - RNA, 20 nt, Human
cugcuccucuccccagcaag

SEQ ID NO: 2952494 - RNA, 15 nt, Human
cugcucuccgaccag

SEQ ID NO: 2952495 - RNA, 18 nt, Human
cugcgggggcagugcuca

SEQ ID NO: 2952496 - RNA, 23 nt, Human
cugcgguccacccaggagccccg

SEQ ID NO: 2952497 - RNA, 19 nt, Human
cugcggugcuaucuccccc

SEQ ID NO: 2952498 - RNA, 18 nt, Human
cugcggugcuaucucccc

SEQ ID NO: 2952499 - RNA, 19 nt, Human
cugccugaagucacacagu

SEQ ID NO: 2952500 - RNA, 18 nt, Human
cugccugaagucacacag

SEQ ID NO: 2952501 - RNA, 16 nt, Human
cugccugaagucacac

SEQ ID NO: 2952502 - RNA, 15 nt, Human
cugcccucuccuggg

SEQ ID NO: 2952503 - RNA, 21 nt, Human
cugcccugcccaccuggccuc

SEQ ID NO: 2952504 - RNA, 12 nt, Human
cugcccucuccu

SEQ ID NO: 2952505 - RNA, 13 nt, Human
cugcccucuccug

SEQ ID NO: 2952506 - RNA, 14 nt, Human
cugcccucuccugg

SEQ ID NO: 2952507 - RNA, 17 nt, Human
cugcccugcccaccugg

SEQ ID NO: 2952508 - RNA, 20 nt, Human
cugcccugcccaccuggccu

SEQ ID NO: 2952509 - RNA, 23 nt, Human
cugcaguuuuuuuccuucaagaa

SEQ ID NO: 2952510 - RNA, 22 nt, Human
cugcaguuuuuuuccuucaaga

SEQ ID NO: 2952511 - RNA, 15 nt, Human
cugcauaugaaagga

SEQ ID NO: 2952512 - RNA, 20 nt, Human
cugcaucaagaugugacaug

SEQ ID NO: 2952513 - RNA, 21 nt, Human
cugccacccuggggagaaagu

SEQ ID NO: 2952514 - RNA, 12 nt, Human
cugccacccugg

SEQ ID NO: 2952515 - RNA, 23 nt, Human
cugccauccuggcccagggcauc

SEQ ID NO: 2952516 - RNA, 21 nt, Human
cugccauccuggcccagggca

SEQ ID NO: 2952517 - RNA, 22 nt, Human
cugccauccuggcccagggcau

SEQ ID NO: 2952518 - RNA, 13 nt, Human
cugccauccuggc

SEQ ID NO: 2952519 - RNA, 16 nt, Human
cugccauccuggccca

SEQ ID NO: 2952520 - RNA, 17 nt, Human
cugccauccuggcccag

SEQ ID NO: 2952521 - RNA, 18 nt, Human
cugccauccuggcccagg

SEQ ID NO: 2952522 - RNA, 19 nt, Human
cugccauccuggcccaggg

SEQ ID NO: 2952523 - RNA, 20 nt, Human
cugccauccuggcccagggc

SEQ ID NO: 2952524 - RNA, 21 nt, Human
cugccauccagguucagcuug

SEQ ID NO: 2952525 - RNA, 15 nt, Human
cugccauccucccaa

SEQ ID NO: 2952526 - RNA, 22 nt, Human
cugccaggaagccagcaggcuc

SEQ ID NO: 2952527 - RNA, 15 nt, Human
cugccagcaacgcag

SEQ ID NO: 2952528 - RNA, 21 nt, Human
cugccaggaagccagcaggcu

SEQ ID NO: 2952529 - RNA, 20 nt, Human
cugccaggaagccagcaggc

SEQ ID NO: 2952530 - RNA, 14 nt, Human
cugccaggaagcca

SEQ ID NO: 2952531 - RNA, 13 nt, Human
cugccaggaagcc

SEQ ID NO: 2952532 - RNA, 16 nt, Human
cugcccaggccccugc

SEQ ID NO: 2952533 - RNA, 18 nt, Human
cugcccaggccccugcca

SEQ ID NO: 2952534 - RNA, 19 nt, Human
cugcccaggccccugccac

SEQ ID NO: 2952535 - RNA, 20 nt, Human
cugcccaggccccugccacc

SEQ ID NO: 2952536 - RNA, 12 nt, Human
cugcccaccugg

SEQ ID NO: 2952537 - RNA, 14 nt, Human
cugcccaggccccu

SEQ ID NO: 2952538 - RNA, 15 nt, Human
cugcccaggccccug

SEQ ID NO: 2952539 - RNA, 15 nt, Human
cugccauuucugaga

SEQ ID NO: 2952540 - RNA, 20 nt, Human
cugcccggcaggguccuaga

SEQ ID NO: 2952541 - RNA, 13 nt, Human
cugcccggcaggg

SEQ ID NO: 2952542 - RNA, 19 nt, Human
cugccccuggcagccccug

SEQ ID NO: 2952543 - RNA, 17 nt, Human
cugccccuggcagcccc

SEQ ID NO: 2952544 - RNA, 18 nt, Human
cugccccuggcagccccu

SEQ ID NO: 2952545 - RNA, 20 nt, Human
cugcaguuuuuuuccuucaa

SEQ ID NO: 2952546 - RNA, 16 nt, Human
cugcaguugccaguca

SEQ ID NO: 2952547 - RNA, 13 nt, Human
cugcaguugccag

SEQ ID NO: 2952548 - RNA, 17 nt, Human
cugcagcaauaaagcag

SEQ ID NO: 2952549 - RNA, 14 nt, Human
cugcaccgggccac

SEQ ID NO: 2952550 - RNA, 15 nt, Human
cugcaccgggccaca

SEQ ID NO: 2952551 - RNA, 16 nt, Human
cugcaccggcuggccu

SEQ ID NO: 2952552 - RNA, 15 nt, Human
cugcaccggcuggcc

SEQ ID NO: 2952553 - RNA, 14 nt, Human
cugcaccggcuggc

SEQ ID NO: 2952554 - RNA, 23 nt, Human
cugaggcccuucucuccagcccc

SEQ ID NO: 2952555 - RNA, 22 nt, Human
cugaggcccuucucuccagccc

SEQ ID NO: 2952556 - RNA, 18 nt, Human
cugcaccgggccacagag

SEQ ID NO: 2952557 - RNA, 20 nt, Human
cugcacuccagccuggguga

SEQ ID NO: 2952558 - RNA, 13 nt, Human
cugcacuccccug

SEQ ID NO: 2952559 - RNA, 20 nt, Human
cugcacuccccugcugggug

SEQ ID NO: 2952560 - RNA, 19 nt, Human
cugcacuccccugcugggu

SEQ ID NO: 2952561 - RNA, 13 nt, Human
cugcagagggcac

SEQ ID NO: 2952562 - RNA, 15 nt, Human
cugcagcaauaaagc

SEQ ID NO: 2952563 - RNA, 16 nt, Human
cugcagcaauaaagca

SEQ ID NO: 2952564 - RNA, 10 nt, Human
cugcagaggg

SEQ ID NO: 2952565 - RNA, 12 nt, Human
cugcacugucaa

SEQ ID NO: 2952566 - RNA, 18 nt, Human
cugcacuccccugcuggg

SEQ ID NO: 2952567 - RNA, 21 nt, Human
cugcacuccccugcugggugu

SEQ ID NO: 2952568 - RNA, 16 nt, Human
cuggcuguuggcuggg

SEQ ID NO: 2952569 - RNA, 17 nt, Human
cuggcuguuggcugggg

SEQ ID NO: 2952570 - RNA, 20 nt, Human
cuggcugguuagagguuccc

SEQ ID NO: 2952571 - RNA, 15 nt, Human
cuggcuuucagagua

SEQ ID NO: 2952572 - RNA, 21 nt, Human
cugggagagccuuccaggggu

SEQ ID NO: 2952573 - RNA, 20 nt, Human
cugggagagccuuccagggg

SEQ ID NO: 2952574 - RNA, 19 nt, Human
cugggagagccuuccaggg

SEQ ID NO: 2952575 - RNA, 20 nt, Human
cugggaaagggauuuucagc

SEQ ID NO: 2952576 - RNA, 18 nt, Human
cugggagagccuuccagg

SEQ ID NO: 2952577 - RNA, 17 nt, Human
cugggagagccuuccag

SEQ ID NO: 2952578 - RNA, 20 nt, Human
cugggagguuaaaaagaaaa

SEQ ID NO: 2952579 - RNA, 21 nt, Human
cugggaggucaaggcugcagu

SEQ ID NO: 2952580 - RNA, 19 nt, Human
cugggaggucaaggcugca

SEQ ID NO: 2952581 - RNA, 17 nt, Human
cugggauuacaggugug

SEQ ID NO: 2952582 - RNA, 20 nt, Human
cugggauuacaggugugaac

SEQ ID NO: 2952583 - RNA, 18 nt, Human
cugggaugauuggagggg

SEQ ID NO: 2952584 - RNA, 20 nt, Human
cugggaucccucauccucau

SEQ ID NO: 2952585 - RNA, 16 nt, Human
cuggcacccggccccu

SEQ ID NO: 2952586 - RNA, 17 nt, Human
cuggcacccggccccug

SEQ ID NO: 2952587 - RNA, 18 nt, Human
cuggcacccggccccugc

SEQ ID NO: 2952588 - RNA, 22 nt, Human
cuggcacccggccccugcuggu

SEQ ID NO: 2952589 - RNA, 18 nt, Human
cuggaauauauaaccagu

SEQ ID NO: 2952590 - RNA, 14 nt, Human
cuggcaagaaugug

SEQ ID NO: 2952591 - RNA, 15 nt, Human
cuggcacuauaaugu

SEQ ID NO: 2952592 - RNA, 16 nt, Human
cuggcacuauaaugua

SEQ ID NO: 2952593 - RNA, 22 nt, Human
cuggcaugggaaugaaugucag

SEQ ID NO: 2952594 - RNA, 19 nt, Human
cuggcaugggaaugaaugu

SEQ ID NO: 2952595 - RNA, 18 nt, Human
cuggcaugggaaugaaug

SEQ ID NO: 2952596 - RNA, 16 nt, Human
cuggcaugggaaugaa

SEQ ID NO: 2952597 - RNA, 24 nt, Human
cuggcaugggaaugaaugucagug

SEQ ID NO: 2952598 - RNA, 22 nt, Human
cuggccagaugcaccagcccuu

SEQ ID NO: 2952599 - RNA, 23 nt, Human
cuggccucaagugauucuccugc

SEQ ID NO: 2952600 - RNA, 12 nt, Human
cuggccucugca

SEQ ID NO: 2952601 - RNA, 22 nt, Human
cuggccucaagugauucuccug

SEQ ID NO: 2952602 - RNA, 16 nt, Human
cuggccugagcuggga

SEQ ID NO: 2952603 - RNA, 14 nt, Human
cuggccucugcacu

SEQ ID NO: 2952604 - RNA, 13 nt, Human
cuggccucugcac

SEQ ID NO: 2952605 - RNA, 13 nt, Human
cuggccuggcccc

SEQ ID NO: 2952606 - RNA, 14 nt, Human
cuggccuggccccu

SEQ ID NO: 2952607 - RNA, 18 nt, Human
cuggccugagcugggaug

SEQ ID NO: 2952608 - RNA, 15 nt, Human
cuggccugagcuggg

SEQ ID NO: 2952609 - RNA, 16 nt, Human
cuggccuucggccucc

SEQ ID NO: 2952610 - RNA, 17 nt, Human
cuggccuucggccucca

SEQ ID NO: 2952611 - RNA, 18 nt, Human
cuggccuucggccuccau

SEQ ID NO: 2952612 - RNA, 21 nt, Human
cuggccuucggccuccauccu

SEQ ID NO: 2952613 - RNA, 15 nt, Human
cuggccuucggccuc

SEQ ID NO: 2952614 - RNA, 14 nt, Human
cuggccugugucua

SEQ ID NO: 2952615 - RNA, 17 nt, Human
cuggccuggccccucag

SEQ ID NO: 2952616 - RNA, 16 nt, Human
cuggccuggccccuca

SEQ ID NO: 2952617 - RNA, 22 nt, Human
cugucccuuacgugaguccugg

SEQ ID NO: 2952618 - RNA, 16 nt, Human
cuguccuacucugugu

SEQ ID NO: 2952619 - RNA, 17 nt, Human
cuguccuacucuguguc

SEQ ID NO: 2952620 - RNA, 18 nt, Human
cuguccuacucuguguca

SEQ ID NO: 2952621 - RNA, 20 nt, Human
cuguccuacucugugucagg

SEQ ID NO: 2952622 - RNA, 14 nt, Human
cugucccccugaca

SEQ ID NO: 2952623 - RNA, 13 nt, Human
cugucccccugac

SEQ ID NO: 2952624 - RNA, 21 nt, Human
cuguccuauuauauucauucu

SEQ ID NO: 2952625 - RNA, 15 nt, Human
cuguccuauuauauu

SEQ ID NO: 2952626 - RNA, 22 nt, Human
cugucucaaaaaaagaaaaaga

SEQ ID NO: 2952627 - RNA, 21 nt, Human
cuguccuacucugugucaggu

SEQ ID NO: 2952628 - RNA, 20 nt, Human
cugucuccucucucuguaau

SEQ ID NO: 2952629 - RNA, 17 nt, Human
cugucuccucucucugu

SEQ ID NO: 2952630 - RNA, 18 nt, Human
cugucucuacuaaaaaua

SEQ ID NO: 2952631 - RNA, 13 nt, Human
cuguauuuuaaaa

SEQ ID NO: 2952632 - RNA, 16 nt, Human
cuguauuuuaaaagaa

SEQ ID NO: 2952633 - RNA, 22 nt, Human
cugucccagugccgagaaggaa

SEQ ID NO: 2952634 - RNA, 14 nt, Human
cuguaucccaugag

SEQ ID NO: 2952635 - RNA, 15 nt, Human
cuguaucccaugagc

SEQ ID NO: 2952636 - RNA, 22 nt, Human
cuguaccucuugagccuugaac

SEQ ID NO: 2952637 - RNA, 18 nt, Human
cuguaucccaugagccuc

SEQ ID NO: 2952638 - RNA, 15 nt, Human
cuguaugauucccag

SEQ ID NO: 2952639 - RNA, 15 nt, Human
cuggguuggagggug

SEQ ID NO: 2952640 - RNA, 18 nt, Human
cuggguacuuguggacac

SEQ ID NO: 2952641 - RNA, 16 nt, Human
cuggguacuuguggac

SEQ ID NO: 2952642 - RNA, 14 nt, Human
cuggguacuugugg

SEQ ID NO: 2952643 - RNA, 22 nt, Human
cugggcucccuucccaccucuc

SEQ ID NO: 2952644 - RNA, 21 nt, Human
cugggcucccuucccaccucu

SEQ ID NO: 2952645 - RNA, 20 nt, Human
cugggcucccuucccaccuc

SEQ ID NO: 2952646 - RNA, 19 nt, Human
cugggcucccuucccaccu

SEQ ID NO: 2952647 - RNA, 21 nt, Human
cugguccauagagagcaagac

SEQ ID NO: 2952648 - RNA, 13 nt, Human
cuggucccacuca

SEQ ID NO: 2952649 - RNA, 23 nt, Human
cuggucucaaacucuugaccuca

SEQ ID NO: 2952650 - RNA, 12 nt, Human
cugguggcagcu

SEQ ID NO: 2952651 - RNA, 14 nt, Human
cugguggcagcuca

SEQ ID NO: 2952652 - RNA, 13 nt, Human
cugguggcagcuc

SEQ ID NO: 2952653 - RNA, 20 nt, Human
cugguucaggguuggccccu

SEQ ID NO: 2952654 - RNA, 15 nt, Human
cuguacauacuuuuu

SEQ ID NO: 2952655 - RNA, 22 nt, Human
cuguacaugaaaacacauuuuu

SEQ ID NO: 2952656 - RNA, 23 nt, Human
cuguacaugaaaacacauuuuuc

SEQ ID NO: 2952657 - RNA, 21 nt, Human
cuguaccucuugagccuugaa

SEQ ID NO: 2952658 - RNA, 16 nt, Human
cuguacauacuuuuug

SEQ ID NO: 2952659 - RNA, 21 nt, Human
cuguaaguuacaugaaggcag

SEQ ID NO: 2952660 - RNA, 18 nt, Human
cuguaauuugugauacaa

SEQ ID NO: 2952661 - RNA, 17 nt, Human
cuguaauuugugauaca

SEQ ID NO: 2952662 - RNA, 23 nt, Human
cuguacagagcccacgcccccac

SEQ ID NO: 2952663 - RNA, 21 nt, Human
cuguaauuugugauacaaugc

SEQ ID NO: 2952664 - RNA, 22 nt, Human
cuguaauuugugauacaaugcu

SEQ ID NO: 2952665 - RNA, 20 nt, Human
gaagauucuuguauuuauua

SEQ ID NO: 2952666 - RNA, 18 nt, Human
gaagcauuuacuuugugu

SEQ ID NO: 2952667 - RNA, 16 nt, Human
gaagacuucaucccuc

SEQ ID NO: 2952668 - RNA, 15 nt, Human
gaagacuucaucccu

SEQ ID NO: 2952669 - RNA, 19 nt, Human
gaagacuucaucccucugg

SEQ ID NO: 2952670 - RNA, 17 nt, Human
gaagacuucaucccucu

SEQ ID NO: 2952671 - RNA, 12 nt, Human
gaagagccuugc

SEQ ID NO: 2952672 - RNA, 23 nt, Human
gaagagcuguucacagccagacu

SEQ ID NO: 2952673 - RNA, 13 nt, Human
gaagagcuguuca

SEQ ID NO: 2952674 - RNA, 20 nt, Human
gaagagcuguucacagccag

SEQ ID NO: 2952675 - RNA, 15 nt, Human
gaagagcuguucaca

SEQ ID NO: 2952676 - RNA, 14 nt, Human
gaagaagcucucuc

SEQ ID NO: 2952677 - RNA, 16 nt, Human
gaacuuugaccucugc

SEQ ID NO: 2952678 - RNA, 22 nt, Human
gaacuuugaccucugcagcaau

SEQ ID NO: 2952679 - RNA, 17 nt, Human
gaacuuuccaggaaggc

SEQ ID NO: 2952680 - RNA, 22 nt, Human
gaacuuguaaaggaauuuaaaa

SEQ ID NO: 2952681 - RNA, 18 nt, Human
gaacuuggcgcugccccu

SEQ ID NO: 2952682 - RNA, 17 nt, Human
gaacuugggccacugug

SEQ ID NO: 2952683 - RNA, 17 nt, Human
gaacuuaaauaauguga

SEQ ID NO: 2952684 - RNA, 14 nt, Human
gaacuuaaauaaug

SEQ ID NO: 2952685 - RNA, 17 nt, Human
gaacuuggcgcugcccc

SEQ ID NO: 2952686 - RNA, 18 nt, Human
gaaccacaucuugcucug

SEQ ID NO: 2952687 - RNA, 14 nt, Human
gaaccacaagacug

SEQ ID NO: 2952688 - RNA, 15 nt, Human
gaaccacaagacugc

SEQ ID NO: 2952689 - RNA, 15 nt, Human
gaacucccuuucaac

SEQ ID NO: 2952690 - RNA, 16 nt, Human
gaacucccuuucaaca

SEQ ID NO: 2952691 - RNA, 14 nt, Human
gaaggaugcugucu

SEQ ID NO: 2952692 - RNA, 19 nt, Human
gaaggucuguuuuguguac

SEQ ID NO: 2952693 - RNA, 20 nt, Human
gaaggcauggacuucuggau

SEQ ID NO: 2952694 - RNA, 13 nt, Human
gaagggggcuggg

SEQ ID NO: 2952695 - RNA, 19 nt, Human
gaaguaauaugcacacauu

SEQ ID NO: 2952696 - RNA, 20 nt, Human
gaaguaauaugcacacauuu

SEQ ID NO: 2952697 - RNA, 13 nt, Human
gaagucacacagu

SEQ ID NO: 2952698 - RNA, 18 nt, Human
gaagucaaggcuuagacc

SEQ ID NO: 2952699 - RNA, 21 nt, Human
gaaguaauaugcacacauuuu

SEQ ID NO: 2952700 - RNA, 21 nt, Human
gaagucacauuccugaacagg

SEQ ID NO: 2952701 - RNA, 16 nt, Human
gaagucacauuccuga

SEQ ID NO: 2952702 - RNA, 20 nt, Human
gaagucacauuccugaacag

SEQ ID NO: 2952703 - RNA, 23 nt, Human
gaaguccccucuccuccacauuu

SEQ ID NO: 2952704 - RNA, 18 nt, Human
gaagucuuagauguauau

SEQ ID NO: 2952705 - RNA, 18 nt, Human
gaaguccccucuccucca

SEQ ID NO: 2952706 - RNA, 23 nt, Human
gaaguccaagcauuuagauguau

SEQ ID NO: 2952707 - RNA, 19 nt, Human
gaaggaagacuucaucccu

SEQ ID NO: 2952708 - RNA, 15 nt, Human
gaaggaacguccccu

SEQ ID NO: 2952709 - RNA, 22 nt, Human
gaaggaaacccagcucuggucc

SEQ ID NO: 2952710 - RNA, 21 nt, Human
gaaggaaacccagcucugguc

SEQ ID NO: 2952711 - RNA, 19 nt, Human
gaaggacauugcggacagc

SEQ ID NO: 2952712 - RNA, 20 nt, Human
gaaggacauugcggacagcc

SEQ ID NO: 2952713 - RNA, 21 nt, Human
gaaggacauugcggacagcca

SEQ ID NO: 2952714 - RNA, 20 nt, Human
gaaggaaacccagcucuggu

SEQ ID NO: 2952715 - RNA, 19 nt, Human
gaaggaaacccagcucugg

SEQ ID NO: 2952716 - RNA, 14 nt, Human
gaagccgcuggggc

SEQ ID NO: 2952717 - RNA, 20 nt, Human
gaagccgcuggggccaguug

SEQ ID NO: 2952718 - RNA, 18 nt, Human
gaagccgcuggggccagu

SEQ ID NO: 2952719 - RNA, 15 nt, Human
gaaauauuuauuuua

SEQ ID NO: 2952720 - RNA, 16 nt, Human
gaaauauuuauuuuaa

SEQ ID NO: 2952721 - RNA, 13 nt, Human
gaaauauuuauuu

SEQ ID NO: 2952722 - RNA, 18 nt, Human
gaaauaucugaaaaugua

SEQ ID NO: 2952723 - RNA, 19 nt, Human
gaaauaucugaaaauguau

SEQ ID NO: 2952724 - RNA, 17 nt, Human
gaaauauaggaacuuaa

SEQ ID NO: 2952725 - RNA, 18 nt, Human
gaaauaaacgucuuaaau

SEQ ID NO: 2952726 - RNA, 21 nt, Human
gaaauaaacgucuuaaauauu

SEQ ID NO: 2952727 - RNA, 14 nt, Human
gaaauaaacgucuu

SEQ ID NO: 2952728 - RNA, 16 nt, Human
gaaauaaacgucuuaa

SEQ ID NO: 2952729 - RNA, 17 nt, Human
gaaauaaacgucuuaaa

SEQ ID NO: 2952730 - RNA, 18 nt, Human
gaaaugaggucagagccu

SEQ ID NO: 2952731 - RNA, 11 nt, Human
gaaaugagcug

SEQ ID NO: 2952732 - RNA, 15 nt, Human
gaaaugggcagagca

SEQ ID NO: 2952733 - RNA, 16 nt, Human
gaaaugggcagagcag

SEQ ID NO: 2952734 - RNA, 17 nt, Human
gaaaugucaguucugau

SEQ ID NO: 2952735 - RNA, 22 nt, Human
gaaauguaagggaaacugccag

SEQ ID NO: 2952736 - RNA, 17 nt, Human
gaaauguacagcaagga

SEQ ID NO: 2952737 - RNA, 19 nt, Human
gaaaugggcagagcagaga

SEQ ID NO: 2952738 - RNA, 17 nt, Human
gaaaugggcagagcaga

SEQ ID NO: 2952739 - RNA, 20 nt, Human
gaaauuagguugaaacauau

SEQ ID NO: 2952740 - RNA, 18 nt, Human
gaaauuagguugaaacau

SEQ ID NO: 2952741 - RNA, 19 nt, Human
gaaauuagguugaaacaua

SEQ ID NO: 2952742 - RNA, 17 nt, Human
gaaauuagguugaaaca

SEQ ID NO: 2952743 - RNA, 15 nt, Human
gaacacucuauaaca

SEQ ID NO: 2952744 - RNA, 21 nt, Human
gaacacucuauaacaaaggau

SEQ ID NO: 2952745 - RNA, 17 nt, Human
gaacacuccuucacaga

SEQ ID NO: 2952746 - RNA, 20 nt, Human
gaacagacuggaagcacagc

SEQ ID NO: 2952747 - RNA, 19 nt, Human
gaacagacuggaagcacag

SEQ ID NO: 2952748 - RNA, 21 nt, Human
gaaauuuccugggagcuuuug

SEQ ID NO: 2952749 - RNA, 16 nt, Human
gaacacuccuucacag

SEQ ID NO: 2952750 - RNA, 15 nt, Human
gaacacuccuucaca

SEQ ID NO: 2952751 - RNA, 22 nt, Human
gaacaguuguguuugaagcaca

SEQ ID NO: 2952752 - RNA, 22 nt, Human
gaacagacuggaagcacagcuu

SEQ ID NO: 2952753 - RNA, 17 nt, Human
gaacaggauauucucac

SEQ ID NO: 2952754 - RNA, 22 nt, Human
gaacaguaacauagcugugauu

SEQ ID NO: 2952755 - RNA, 24 nt, Human
gaacaguuaccucugccucagaaa

SEQ ID NO: 2952756 - RNA, 20 nt, Human
gaacaguuguguuugaagca

SEQ ID NO: 2952757 - RNA, 16 nt, Human
gaaaaaugagccuggc

SEQ ID NO: 2952758 - RNA, 15 nt, Human
gaaacugccagcaac

SEQ ID NO: 2952759 - RNA, 13 nt, Human
gaaacugccagca

SEQ ID NO: 2952760 - RNA, 16 nt, Human
gaaacugacacaugcu

SEQ ID NO: 2952761 - RNA, 16 nt, Human
gaaagaucaaaagguu

SEQ ID NO: 2952762 - RNA, 13 nt, Human
gaaagcagaacag

SEQ ID NO: 2952763 - RNA, 19 nt, Human
gaaagacuauucaaacagu

SEQ ID NO: 2952764 - RNA, 23 nt, Human
gaaagacuauucaaacagucuca

SEQ ID NO: 2952765 - RNA, 22 nt, Human
gaaagacuauucaaacagucuc

SEQ ID NO: 2952766 - RNA, 21 nt, Human
gaaaggaagugggacuggcac

SEQ ID NO: 2952767 - RNA, 20 nt, Human
gaaaggaaugcaaagaugaa

SEQ ID NO: 2952768 - RNA, 22 nt, Human
gaaaguacuucuccacccugcu

SEQ ID NO: 2952769 - RNA, 21 nt, Human
gaaagcuugcccuggugccuc

SEQ ID NO: 2952770 - RNA, 16 nt, Human
gaaaggaaagaggcuc

SEQ ID NO: 2952771 - RNA, 11 nt, Human
gaaaggaaaga

SEQ ID NO: 2952772 - RNA, 22 nt, Human
gaaaguugcaaggcaaauguuu

SEQ ID NO: 2952773 - RNA, 21 nt, Human
gaaaguugcaaggcaaauguu

SEQ ID NO: 2952774 - RNA, 17 nt, Human
gaaaguugcaaggcaaa

SEQ ID NO: 2952775 - RNA, 12 nt, Human
cuuuuuauaacu

SEQ ID NO: 2952776 - RNA, 18 nt, Human
cuuuuuauauucucagca

SEQ ID NO: 2952777 - RNA, 16 nt, Human
cuuuuuauaacuuuuu

SEQ ID NO: 2952778 - RNA, 22 nt, Human
cuuuuuauauucucagcagagu

SEQ ID NO: 2952779 - RNA, 15 nt, Human
cuuuuuuauacauaa

SEQ ID NO: 2952780 - RNA, 16 nt, Human
cuuuuuuauacauaaa

SEQ ID NO: 2952781 - RNA, 17 nt, Human
cuuuuuuauacauaaac

SEQ ID NO: 2952782 - RNA, 18 nt, Human
cuuuuuuauacauaaaca

SEQ ID NO: 2952783 - RNA, 16 nt, Human
gaaaaagaaaaaauau

SEQ ID NO: 2952784 - RNA, 11 nt, Human
gaaaaagaaaa

SEQ ID NO: 2952785 - RNA, 15 nt, Human
cuuuugcauauugca

SEQ ID NO: 2952786 - RNA, 23 nt, Human
cuuuugcauauugcauacuauua

SEQ ID NO: 2952787 - RNA, 22 nt, Human
cuuuuuaauauugauaugcuua

SEQ ID NO: 2952788 - RNA, 13 nt, Human
cuuuucuuuucuu

SEQ ID NO: 2952789 - RNA, 17 nt, Human
cuuuucuuucagccaag

SEQ ID NO: 2952790 - RNA, 22 nt, Human
cuuuucauuuaggugaggaagc

SEQ ID NO: 2952791 - RNA, 23 nt, Human
cuuuuccaacccucaucaccaac

SEQ ID NO: 2952792 - RNA, 13 nt, Human
cuuuuccaacccu

SEQ ID NO: 2952793 - RNA, 20 nt, Human
cuuuucgcaggauucuuccu

SEQ ID NO: 2952794 - RNA, 21 nt, Human
cuuuucgcaggauucuuccuc

SEQ ID NO: 2952795 - RNA, 14 nt, Human
cuuuuaagaaucaa

SEQ ID NO: 2952796 - RNA, 17 nt, Human
cuuuuaagacuuugguu

SEQ ID NO: 2952797 - RNA, 11 nt, Human
cuuuuaaacuc

SEQ ID NO: 2952798 - RNA, 12 nt, Human
cuuucccuuggu

SEQ ID NO: 2952799 - RNA, 17 nt, Human
cuuucccuuggugcccu

SEQ ID NO: 2952800 - RNA, 14 nt, Human
cuuuccaggaaggc

SEQ ID NO: 2952801 - RNA, 16 nt, Human
cuuuccaaaguacacu

SEQ ID NO: 2952802 - RNA, 22 nt, Human
cuuuccaaaguacacuguuuca

SEQ ID NO: 2952803 - RNA, 16 nt, Human
cuuuccaaaugcccag

SEQ ID NO: 2952804 - RNA, 21 nt, Human
cuuguggacacagcucuucuc

SEQ ID NO: 2952805 - RNA, 14 nt, Human
cuuugcagacaggc

SEQ ID NO: 2952806 - RNA, 15 nt, Human
cuuugcagacaggca

SEQ ID NO: 2952807 - RNA, 23 nt, Human
cuuuggaaagaguaggaagacuu

SEQ ID NO: 2952808 - RNA, 19 nt, Human
cuuuggaaagaguaggaag

SEQ ID NO: 2952809 - RNA, 21 nt, Human
cuuuccugaggcugggcuccc

SEQ ID NO: 2952810 - RNA, 20 nt, Human
cuuuccugaggcugggcucc

SEQ ID NO: 2952811 - RNA, 16 nt, Human
cuuuccugaggcuggg

SEQ ID NO: 2952812 - RNA, 17 nt, Human
cuuuccugaggcugggc

SEQ ID NO: 2952813 - RNA, 19 nt, Human
cuugaaauauaggaacuua

SEQ ID NO: 2952814 - RNA, 22 nt, Human
cuucuuuauaauucuacuuuga

SEQ ID NO: 2952815 - RNA, 13 nt, Human
cuucuuuccacag

SEQ ID NO: 2952816 - RNA, 19 nt, Human
cuucuuuccacagaagcuc

SEQ ID NO: 2952817 - RNA, 15 nt, Human
cuugaacuuugaccu

SEQ ID NO: 2952818 - RNA, 18 nt, Human
cuugaacuggguacuugu

SEQ ID NO: 2952819 - RNA, 20 nt, Human
cuugaacuggguacuugugg

SEQ ID NO: 2952820 - RNA, 19 nt, Human
cuugaacuccuggccucaa

SEQ ID NO: 2952821 - RNA, 16 nt, Human
cuugaacuggguacuu

SEQ ID NO: 2952822 - RNA, 14 nt, Human
cuugaacuccuggc

SEQ ID NO: 2952823 - RNA, 15 nt, Human
cuugaacuccuggcc

SEQ ID NO: 2952824 - RNA, 17 nt, Human
cuugaacuccuggccuc

SEQ ID NO: 2952825 - RNA, 18 nt, Human
cuugaacuccuggccuca

SEQ ID NO: 2952826 - RNA, 20 nt, Human
cuugaacccgggaggcagag

SEQ ID NO: 2952827 - RNA, 19 nt, Human
cuugaacccgggaggcaga

SEQ ID NO: 2952828 - RNA, 14 nt, Human
cuugaacccgggag

SEQ ID NO: 2952829 - RNA, 19 nt, Human
cuugagccuugaacuuuga

SEQ ID NO: 2952830 - RNA, 20 nt, Human
cuugaccauucuccaccugc

SEQ ID NO: 2952831 - RNA, 17 nt, Human
cuugaccauucuccacc

SEQ ID NO: 2952832 - RNA, 21 nt, Human
cuugaccauucuccaccugcc

SEQ ID NO: 2952833 - RNA, 14 nt, Human
cuugagagggugga

SEQ ID NO: 2952834 - RNA, 20 nt, Human
cuugagccuugaacuuugac

SEQ ID NO: 2952835 - RNA, 22 nt, Human
cuugagccuugaacuuugaccu

SEQ ID NO: 2952836 - RNA, 14 nt, Human
cuugcaauggcagc

SEQ ID NO: 2952837 - RNA, 22 nt, Human
cuugagugucaagcugaccuug

SEQ ID NO: 2952838 - RNA, 16 nt, Human
cuugagugcucaguag

SEQ ID NO: 2952839 - RNA, 22 nt, Human
cuugcaaaguaucccuacugua

SEQ ID NO: 2952840 - RNA, 18 nt, Human
cuugcagacucuacagag

SEQ ID NO: 2952841 - RNA, 18 nt, Human
cuugcaugguuuggagcu

SEQ ID NO: 2952842 - RNA, 19 nt, Human
cuugcaugguuuggagcug

SEQ ID NO: 2952843 - RNA, 21 nt, Human
cuugcaugguuuagaaagcuu

SEQ ID NO: 2952844 - RNA, 17 nt, Human
cuugcaugaggcuagug

SEQ ID NO: 2952845 - RNA, 21 nt, Human
cuugcaugaggcuaguguggu

SEQ ID NO: 2952846 - RNA, 16 nt, Human
cuuguggacacagcuc

SEQ ID NO: 2952847 - RNA, 17 nt, Human
cuuguggacacagcucu

SEQ ID NO: 2952848 - RNA, 18 nt, Human
cuuguggacacagcucuu

SEQ ID NO: 2952849 - RNA, 16 nt, Human
cuuggggaccagagcu

SEQ ID NO: 2952850 - RNA, 17 nt, Human
cuuggggaccagagcug

SEQ ID NO: 2952851 - RNA, 19 nt, Human
cuuggggaccagagcugcc

SEQ ID NO: 2952852 - RNA, 18 nt, Human
cuuggggaccagagcugc

SEQ ID NO: 2952853 - RNA, 20 nt, Human
cuugguuuguaaauuaacuu

SEQ ID NO: 2952854 - RNA, 21 nt, Human
cuuguaaauagcucagguguc

SEQ ID NO: 2952855 - RNA, 19 nt, Human
cuuggacauuuuaugucuu

SEQ ID NO: 2952856 - RNA, 12 nt, Human
cuuggcugcagg

SEQ ID NO: 2952857 - RNA, 13 nt, Human
cuuggcugcaggg

SEQ ID NO: 2952858 - RNA, 23 nt, Human
cuuggcucaaguccucuuuucug

SEQ ID NO: 2952859 - RNA, 14 nt, Human
cuuggauugucccc

SEQ ID NO: 2952860 - RNA, 13 nt, Human
cuuggauuguccc

SEQ ID NO: 2952861 - RNA, 13 nt, Human
cuugcuugcuuuu

SEQ ID NO: 2952862 - RNA, 16 nt, Human
cuuggacauuuuaugu

SEQ ID NO: 2952863 - RNA, 18 nt, Human
cuuggacauuuuaugucu

SEQ ID NO: 2952864 - RNA, 17 nt, Human
cuuggacauuuuauguc

SEQ ID NO: 2952865 - RNA, 19 nt, Human
cuugcugcugauuuaaaca

SEQ ID NO: 2952866 - RNA, 17 nt, Human
cuugcugcugauuuaaa

SEQ ID NO: 2952867 - RNA, 20 nt, Human
cuugcaugguuuggagcuga

SEQ ID NO: 2952868 - RNA, 22 nt, Human
cuugcaugguuuggagcugauc

SEQ ID NO: 2952869 - RNA, 17 nt, Human
cuugccaaauauaaaua

SEQ ID NO: 2952870 - RNA, 22 nt, Human
gacguguuaugacuccagaauu

SEQ ID NO: 2952871 - RNA, 12 nt, Human
gacuacaggcac

SEQ ID NO: 2952872 - RNA, 17 nt, Human
gacuacucccccaggug

SEQ ID NO: 2952873 - RNA, 18 nt, Human
gacucccaugagggagau

SEQ ID NO: 2952874 - RNA, 14 nt, Human
gacuccugcaggca

SEQ ID NO: 2952875 - RNA, 16 nt, Human
gacuccugcaggcagc

SEQ ID NO: 2952876 - RNA, 15 nt, Human
gacuccugcaggcag

SEQ ID NO: 2952877 - RNA, 18 nt, Human
gacuccaaagaaauguaa

SEQ ID NO: 2952878 - RNA, 15 nt, Human
gacuccaggcagcag

SEQ ID NO: 2952879 - RNA, 16 nt, Human
gacuccaggcagcaga

SEQ ID NO: 2952880 - RNA, 17 nt, Human
gacuccaggcagcagac

SEQ ID NO: 2952881 - RNA, 20 nt, Human
gacuccaggcagcagacaca

SEQ ID NO: 2952882 - RNA, 21 nt, Human
gacuccaggcagcagacacau

SEQ ID NO: 2952883 - RNA, 20 nt, Human
gacguguuaugacuccagaa

SEQ ID NO: 2952884 - RNA, 17 nt, Human
gacguguuaugacucca

SEQ ID NO: 2952885 - RNA, 14 nt, Human
gacggagucccacc

SEQ ID NO: 2952886 - RNA, 18 nt, Human
gacggagucccaccuugg

SEQ ID NO: 2952887 - RNA, 21 nt, Human
gacggagucccaccuuggcug

SEQ ID NO: 2952888 - RNA, 18 nt, Human
gaccuuguagugagccga

SEQ ID NO: 2952889 - RNA, 21 nt, Human
gaccuuucaauaggaaaaacu

SEQ ID NO: 2952890 - RNA, 23 nt, Human
gaccuugaacuggguacuugugg

SEQ ID NO: 2952891 - RNA, 13 nt, Human
gaccccuccaugu

SEQ ID NO: 2952892 - RNA, 18 nt, Human
gacccugaggcccagagg

SEQ ID NO: 2952893 - RNA, 21 nt, Human
gacccugaggcccagagggcc

SEQ ID NO: 2952894 - RNA, 12 nt, Human
gacccugcccug

SEQ ID NO: 2952895 - RNA, 20 nt, Human
gacccugaggcccagagggc

SEQ ID NO: 2952896 - RNA, 19 nt, Human
gacccugaggcccagaggg

SEQ ID NO: 2952897 - RNA, 15 nt, Human
gacccugcccugugg

SEQ ID NO: 2952898 - RNA, 13 nt, Human
gacccugcccugu

SEQ ID NO: 2952899 - RNA, 16 nt, Human
gacccugcccuguggg

SEQ ID NO: 2952900 - RNA, 23 nt, Human
gacccugucucaaaaaaagaaaa

SEQ ID NO: 2952901 - RNA, 13 nt, Human
gacccaugcugcc

SEQ ID NO: 2952902 - RNA, 15 nt, Human
gacccaugcugcccu

SEQ ID NO: 2952903 - RNA, 14 nt, Human
gacccaugcugccc

SEQ ID NO: 2952904 - RNA, 16 nt, Human
gacccaugcugcccug

SEQ ID NO: 2952905 - RNA, 11 nt, Human
gacccacugcu

SEQ ID NO: 2952906 - RNA, 22 nt, Human
gacccacaagaaaugaaagcag

SEQ ID NO: 2952907 - RNA, 19 nt, Human
gaccgugaggccagagaca

SEQ ID NO: 2952908 - RNA, 15 nt, Human
gaccgugaggccaga

SEQ ID NO: 2952909 - RNA, 14 nt, Human
gaccgugaggccag

SEQ ID NO: 2952910 - RNA, 21 nt, Human
gaccugaggcccuucucucca

SEQ ID NO: 2952911 - RNA, 18 nt, Human
gaccugaggcccuucucu

SEQ ID NO: 2952912 - RNA, 15 nt, Human
gaccugaggcccuuc

SEQ ID NO: 2952913 - RNA, 13 nt, Human
gaccucaggccug

SEQ ID NO: 2952914 - RNA, 12 nt, Human
gaccucaggccu

SEQ ID NO: 2952915 - RNA, 11 nt, Human
gaccucaggcc

SEQ ID NO: 2952916 - RNA, 23 nt, Human
gaccugauuucugagcauuuaau

SEQ ID NO: 2952917 - RNA, 16 nt, Human
gacaaugacccagugg

SEQ ID NO: 2952918 - RNA, 16 nt, Human
gaagucuuuguacaga

SEQ ID NO: 2952919 - RNA, 17 nt, Human
gaagucuucuauuuauu

SEQ ID NO: 2952920 - RNA, 13 nt, Human
gaagucuucuauu

SEQ ID NO: 2952921 - RNA, 14 nt, Human
gaagucuuuguaca

SEQ ID NO: 2952922 - RNA, 21 nt, Human
gacaaggauugcuacuguccu

SEQ ID NO: 2952923 - RNA, 22 nt, Human
gacaaggauugcuacuguccua

SEQ ID NO: 2952924 - RNA, 12 nt, Human
gacacaggcccg

SEQ ID NO: 2952925 - RNA, 15 nt, Human
gacacaggcccggcu

SEQ ID NO: 2952926 - RNA, 17 nt, Human
gacacaggcccggcucc

SEQ ID NO: 2952927 - RNA, 22 nt, Human
gacacaagccuucggcgccuua

SEQ ID NO: 2952928 - RNA, 13 nt, Human
gacaauuuauuau

SEQ ID NO: 2952929 - RNA, 19 nt, Human
gacaauuuauuauggcaca

SEQ ID NO: 2952930 - RNA, 12 nt, Human
gacaauuuauua

SEQ ID NO: 2952931 - RNA, 18 nt, Human
gacaaugcaaaccaucau

SEQ ID NO: 2952932 - RNA, 16 nt, Human
gacaaugcaaaccauc

SEQ ID NO: 2952933 - RNA, 17 nt, Human
gacaaugacuuacugua

SEQ ID NO: 2952934 - RNA, 20 nt, Human
gacaaugacuuacuguacau

SEQ ID NO: 2952935 - RNA, 12 nt, Human
gacaaugcaaac

SEQ ID NO: 2952936 - RNA, 21 nt, Human
gacaaugacuuacuguacaug

SEQ ID NO: 2952937 - RNA, 15 nt, Human
gacacgaauauugcu

SEQ ID NO: 2952938 - RNA, 18 nt, Human
gacaccuugacagggcac

SEQ ID NO: 2952939 - RNA, 20 nt, Human
gacaccuugacagggcacac

SEQ ID NO: 2952940 - RNA, 15 nt, Human
gacaccuugacaggg

SEQ ID NO: 2952941 - RNA, 17 nt, Human
gacaccuugacagggca

SEQ ID NO: 2952942 - RNA, 19 nt, Human
gacacgaauauugcugaug

SEQ ID NO: 2952943 - RNA, 18 nt, Human
gacacgaauauugcugau

SEQ ID NO: 2952944 - RNA, 17 nt, Human
gacacgaauauugcuga

SEQ ID NO: 2952945 - RNA, 15 nt, Human
gacacuaaccacgcu

SEQ ID NO: 2952946 - RNA, 16 nt, Human
gacacuaaccacgcug

SEQ ID NO: 2952947 - RNA, 17 nt, Human
gacacuaaccacgcugg

SEQ ID NO: 2952948 - RNA, 18 nt, Human
gacacuaaccacgcugga

SEQ ID NO: 2952949 - RNA, 23 nt, Human
gacacccugugauggggcccugc

SEQ ID NO: 2952950 - RNA, 22 nt, Human
gacacccugugauggggcccug

SEQ ID NO: 2952951 - RNA, 13 nt, Human
gacacccugugau

SEQ ID NO: 2952952 - RNA, 12 nt, Human
gacacccuguga

SEQ ID NO: 2952953 - RNA, 18 nt, Human
gacacaggcccggcucca

SEQ ID NO: 2952954 - RNA, 13 nt, Human
gacagccacggcc

SEQ ID NO: 2952955 - RNA, 13 nt, Human
gacagcugccugg

SEQ ID NO: 2952956 - RNA, 12 nt, Human
gacagcugccug

SEQ ID NO: 2952957 - RNA, 12 nt, Human
gacagacacagg

SEQ ID NO: 2952958 - RNA, 14 nt, Human
gacagacacaggcc

SEQ ID NO: 2952959 - RNA, 20 nt, Human
gacacuaaccacgcuggacc

SEQ ID NO: 2952960 - RNA, 21 nt, Human
gacacuaaccacgcuggaccu

SEQ ID NO: 2952961 - RNA, 15 nt, Human
gacagacacaggccc

SEQ ID NO: 2952962 - RNA, 16 nt, Human
gacagacacaggcccg

SEQ ID NO: 2952963 - RNA, 14 nt, Human
gacaggcaaugcug

SEQ ID NO: 2952964 - RNA, 16 nt, Human
gacaggcaaugcuggc

SEQ ID NO: 2952965 - RNA, 24 nt, Human
gacaggcaaugcuggcuguuggcu

SEQ ID NO: 2952966 - RNA, 17 nt, Human
gacaggcaaugcuggcu

SEQ ID NO: 2952967 - RNA, 18 nt, Human
gacaggcauguucucuga

SEQ ID NO: 2952968 - RNA, 19 nt, Human
gacaggcauguucucugag

SEQ ID NO: 2952969 - RNA, 15 nt, Human
gacagcugccuggga

SEQ ID NO: 2952970 - RNA, 14 nt, Human
gacagcugccuggg

SEQ ID NO: 2952971 - RNA, 15 nt, Human
gacauacuaaccagc

SEQ ID NO: 2952972 - RNA, 16 nt, Human
gacauacuaaccagca

SEQ ID NO: 2952973 - RNA, 23 nt, Human
gacauacuaaccagcagaaaugc

SEQ ID NO: 2952974 - RNA, 17 nt, Human
gacauauauuuuuuaaa

SEQ ID NO: 2952975 - RNA, 20 nt, Human
gacauauauuuuuuaaaaua

SEQ ID NO: 2952976 - RNA, 21 nt, Human
gacauauauuuuuuaaaauaa

SEQ ID NO: 2952977 - RNA, 21 nt, Human
gacaugucuuuucuugcauga

SEQ ID NO: 2952978 - RNA, 17 nt, Human
gacaugucuuuucuugc

SEQ ID NO: 2952979 - RNA, 17 nt, Human
gacaugggacauuugcu

SEQ ID NO: 2952980 - RNA, 22 nt, Human
gacaugggacauuugcucaugg

SEQ ID NO: 2952981 - RNA, 21 nt, Human
gagauagccaaggccaaagga

SEQ ID NO: 2952982 - RNA, 20 nt, Human
gagauagccaaggccaaagg

SEQ ID NO: 2952983 - RNA, 19 nt, Human
gagauagccaaggccaaag

SEQ ID NO: 2952984 - RNA, 16 nt, Human
gagcagagaccauccc

SEQ ID NO: 2952985 - RNA, 18 nt, Human
gagcagagaccaucccug

SEQ ID NO: 2952986 - RNA, 17 nt, Human
gagcagagaccaucccu

SEQ ID NO: 2952987 - RNA, 23 nt, Human
gagcagagaccaucccugaaggc

SEQ ID NO: 2952988 - RNA, 21 nt, Human
gagcagagaccaucccugaag

SEQ ID NO: 2952989 - RNA, 19 nt, Human
gagcagagaccaucccuga

SEQ ID NO: 2952990 - RNA, 21 nt, Human
gagcagccacauuccugaugc

SEQ ID NO: 2952991 - RNA, 22 nt, Human
gagcagccacauuccugaugcu

SEQ ID NO: 2952992 - RNA, 13 nt, Human
gagccagauuuca

SEQ ID NO: 2952993 - RNA, 13 nt, Human
gagcccaccuugg

SEQ ID NO: 2952994 - RNA, 15 nt, Human
gagcccaccuuggcu

SEQ ID NO: 2952995 - RNA, 17 nt, Human
gagcccaccuuggcuca

SEQ ID NO: 2952996 - RNA, 18 nt, Human
gagccacugcaccgggcc

SEQ ID NO: 2952997 - RNA, 19 nt, Human
gagccacugcaccgggcca

SEQ ID NO: 2952998 - RNA, 13 nt, Human
gagccacugcacc

SEQ ID NO: 2952999 - RNA, 20 nt, Human
gagccacugcaccgggccac

SEQ ID NO: 2953000 - RNA, 15 nt, Human
gagccagauuucacu

SEQ ID NO: 2953001 - RNA, 19 nt, Human
gagccagauuucacucucc

SEQ ID NO: 2953002 - RNA, 18 nt, Human
gagccagauuucacucuc

SEQ ID NO: 2953003 - RNA, 16 nt, Human
gagccgcccaaggccu

SEQ ID NO: 2953004 - RNA, 20 nt, Human
gagccgagaucgcgccacug

SEQ ID NO: 2953005 - RNA, 13 nt, Human
gagccgcccaagg

SEQ ID NO: 2953006 - RNA, 21 nt, Human
gagccgagaucacgccacugc

SEQ ID NO: 2953007 - RNA, 22 nt, Human
gagccgagaucacgccacugca

SEQ ID NO: 2953008 - RNA, 19 nt, Human
gagccgagaucacgccacu

SEQ ID NO: 2953009 - RNA, 20 nt, Human
gagccgagaucacgccacug

SEQ ID NO: 2953010 - RNA, 18 nt, Human
gagcccacgcccccacug

SEQ ID NO: 2953011 - RNA, 13 nt, Human
gagccucacagca

SEQ ID NO: 2953012 - RNA, 14 nt, Human
gagccucacagcag

SEQ ID NO: 2953013 - RNA, 13 nt, Human
gagccucagcauc

SEQ ID NO: 2953014 - RNA, 15 nt, Human
gagccucacagcagu

SEQ ID NO: 2953015 - RNA, 18 nt, Human
gagccucacagcagugag

SEQ ID NO: 2953016 - RNA, 17 nt, Human
gagccucagcauccugg

SEQ ID NO: 2953017 - RNA, 14 nt, Human
gagccucagcaucc

SEQ ID NO: 2953018 - RNA, 15 nt, Human
gagccucagcauccu

SEQ ID NO: 2953019 - RNA, 12 nt, Human
gagccugcaguu

SEQ ID NO: 2953020 - RNA, 13 nt, Human
gagccuccugccc

SEQ ID NO: 2953021 - RNA, 15 nt, Human
gagccugcaguuauu

SEQ ID NO: 2953022 - RNA, 17 nt, Human
gagcuagcagcagggag

SEQ ID NO: 2953023 - RNA, 15 nt, Human
gagcuagcagcaggg

SEQ ID NO: 2953024 - RNA, 15 nt, Human
gagcugaguggggga

SEQ ID NO: 2953025 - RNA, 21 nt, Human
gagcugaucgcuucuccccca

SEQ ID NO: 2953026 - RNA, 16 nt, Human
gagcugaucgcuucuc

SEQ ID NO: 2953027 - RNA, 17 nt, Human
gagcugcccucuccugg

SEQ ID NO: 2953028 - RNA, 16 nt, Human
gagcucgugggacagu

SEQ ID NO: 2953029 - RNA, 14 nt, Human
gaggaacaaggcaa

SEQ ID NO: 2953030 - RNA, 16 nt, Human
gaggaacaaggcaagg

SEQ ID NO: 2953031 - RNA, 17 nt, Human
gaggaagagaaaaaaua

SEQ ID NO: 2953032 - RNA, 13 nt, Human
gaggaagccgcug

SEQ ID NO: 2953033 - RNA, 18 nt, Human
gaggaagccgcuggggcc

SEQ ID NO: 2953034 - RNA, 17 nt, Human
gaggaagccgcuggggc

SEQ ID NO: 2953035 - RNA, 14 nt, Human
gaggaagccgcugg

SEQ ID NO: 2953036 - RNA, 17 nt, Human
gaggaaagcaaaggaga

SEQ ID NO: 2953037 - RNA, 16 nt, Human
gaggaaagcaaaggag

SEQ ID NO: 2953038 - RNA, 14 nt, Human
gagcuuuuguagaa

SEQ ID NO: 2953039 - RNA, 18 nt, Human
gagcugcccucuccuggg

SEQ ID NO: 2953040 - RNA, 19 nt, Human
gagcugcccucuccugggc

SEQ ID NO: 2953041 - RNA, 21 nt, Human
gagcugcccucuccugggcag

SEQ ID NO: 2953042 - RNA, 23 nt, Human
gagcugcccucuccugggcagcu

SEQ ID NO: 2953043 - RNA, 22 nt, Human
gagcuuucugcuaucaaagagg

SEQ ID NO: 2953044 - RNA, 20 nt, Human
gagcuuugaaaauucagugg

SEQ ID NO: 2953045 - RNA, 14 nt, Human
gagacuuuaaaagc

SEQ ID NO: 2953046 - RNA, 16 nt, Human
gagacuuuaaaagcau

SEQ ID NO: 2953047 - RNA, 17 nt, Human
gagacuuuaaaagcauu

SEQ ID NO: 2953048 - RNA, 17 nt, Human
gagagaagagaaugcac

SEQ ID NO: 2953049 - RNA, 14 nt, Human
gagagccuuccagg

SEQ ID NO: 2953050 - RNA, 13 nt, Human
gagagccuuccag

SEQ ID NO: 2953051 - RNA, 13 nt, Human
gagaggggaacag

SEQ ID NO: 2953052 - RNA, 18 nt, Human
gagaggggaacagacugg

SEQ ID NO: 2953053 - RNA, 21 nt, Human
gagagggugggagugggccca

SEQ ID NO: 2953054 - RNA, 20 nt, Human
gagagggugggagugggccc

SEQ ID NO: 2953055 - RNA, 15 nt, Human
gagagugaacaaauu

SEQ ID NO: 2953056 - RNA, 19 nt, Human
gagagugaacaaauuuaca

SEQ ID NO: 2953057 - RNA, 17 nt, Human
gagauacagaauuuuau

SEQ ID NO: 2953058 - RNA, 14 nt, Human
gagacucugucuca

SEQ ID NO: 2953059 - RNA, 18 nt, Human
gagacucgcgacaaugca

SEQ ID NO: 2953060 - RNA, 16 nt, Human
gagacucgcgacaaug

SEQ ID NO: 2953061 - RNA, 22 nt, Human
gagacuccugcaggcagccagg

SEQ ID NO: 2953062 - RNA, 15 nt, Human
gagacagcucugcau

SEQ ID NO: 2953063 - RNA, 18 nt, Human
gagacagcucugcauacu

SEQ ID NO: 2953064 - RNA, 13 nt, Human
gagacagcucugc

SEQ ID NO: 2953065 - RNA, 24 nt, Human
gagacagcccgggcucugccuccc

SEQ ID NO: 2953066 - RNA, 23 nt, Human
gagacagcccgggcucugccucc

SEQ ID NO: 2953067 - RNA, 22 nt, Human
gagacagcccgggcucugccuc

SEQ ID NO: 2953068 - RNA, 21 nt, Human
gagacagcccgggcucugccu

SEQ ID NO: 2953069 - RNA, 20 nt, Human
gagacagcccgggcucugcc

SEQ ID NO: 2953070 - RNA, 19 nt, Human
gagacagcccgggcucugc

SEQ ID NO: 2953071 - RNA, 18 nt, Human
gagacagcccgggcucug

SEQ ID NO: 2953072 - RNA, 17 nt, Human
gagacagcccgggcucu

SEQ ID NO: 2953073 - RNA, 14 nt, Human
gagacagcccgggc

SEQ ID NO: 2953074 - RNA, 18 nt, Human
gagacacacugaagaagc

SEQ ID NO: 2953075 - RNA, 17 nt, Human
gagacacaagccuucgg

SEQ ID NO: 2953076 - RNA, 15 nt, Human
gagacacaagccuuc

SEQ ID NO: 2953077 - RNA, 19 nt, Human
gagacagaguuuucacucu

SEQ ID NO: 2953078 - RNA, 12 nt, Human
gagacagcccgg

SEQ ID NO: 2953079 - RNA, 21 nt, Human
gagaaugagagacacacugaa

SEQ ID NO: 2953080 - RNA, 22 nt, Human
gagaaugcacaaacagaggccg

SEQ ID NO: 2953081 - RNA, 21 nt, Human
gagaaugcacaaacagaggcc

SEQ ID NO: 2953082 - RNA, 20 nt, Human
gagaaugcacaaacagaggc

SEQ ID NO: 2953083 - RNA, 16 nt, Human
gagaagaacugaaauc

SEQ ID NO: 2953084 - RNA, 13 nt, Human
gagaagaacugaa

SEQ ID NO: 2953085 - RNA, 14 nt, Human
gagaagaacugaaa

SEQ ID NO: 2953086 - RNA, 13 nt, Human
gagaagagcuguu

SEQ ID NO: 2953087 - RNA, 22 nt, Human
gagaagagcuguucacagccag

SEQ ID NO: 2953088 - RNA, 15 nt, Human
gagaagagcuguuca

SEQ ID NO: 2953089 - RNA, 14 nt, Human
gacuuggaagcucc

SEQ ID NO: 2953090 - RNA, 15 nt, Human
gacuuggaagcuccg

SEQ ID NO: 2953091 - RNA, 16 nt, Human
gacuuggaagcuccgc

SEQ ID NO: 2953092 - RNA, 19 nt, Human
gacucgcgacaaugcaaac

SEQ ID NO: 2953093 - RNA, 18 nt, Human
gacucgcgacaaugcaaa

SEQ ID NO: 2953094 - RNA, 17 nt, Human
gacuccugcaggcagcc

SEQ ID NO: 2953095 - RNA, 21 nt, Human
gagaaaauggacguguuauga

SEQ ID NO: 2953096 - RNA, 13 nt, Human
gacuuggaagcuc

SEQ ID NO: 2953097 - RNA, 23 nt, Human
gagaaaguacuucuccacccugc

SEQ ID NO: 2953098 - RNA, 22 nt, Human
gagaaaguacuucuccacccug

SEQ ID NO: 2953099 - RNA, 19 nt, Human
gagaaacuggcaaagcaga

SEQ ID NO: 2953100 - RNA, 18 nt, Human
gagaaacuggcaaagcag

SEQ ID NO: 2953101 - RNA, 18 nt, Human
gagaaagacuauucaaac

SEQ ID NO: 2953102 - RNA, 17 nt, Human
gagaaagacuauucaaa

SEQ ID NO: 2953103 - RNA, 15 nt, Human
gagaaagacuauuca

SEQ ID NO: 2953104 - RNA, 13 nt, Human
gagaaagacuauu

SEQ ID NO: 2953105 - RNA, 16 nt, Human
gaucccucauccucau

SEQ ID NO: 2953106 - RNA, 15 nt, Human
gaucccucauccuca

SEQ ID NO: 2953107 - RNA, 22 nt, Human
gauccugagccagauuucacuc

SEQ ID NO: 2953108 - RNA, 21 nt, Human
gauccugagccagauuucacu

SEQ ID NO: 2953109 - RNA, 18 nt, Human
gaucuuugcagacaggca

SEQ ID NO: 2953110 - RNA, 17 nt, Human
gaucuuugcagacaggc

SEQ ID NO: 2953111 - RNA, 18 nt, Human
gaugaaggucuguuuugu

SEQ ID NO: 2953112 - RNA, 15 nt, Human
gaugaaggucuguuu

SEQ ID NO: 2953113 - RNA, 14 nt, Human
gaugaaaauauuug

SEQ ID NO: 2953114 - RNA, 17 nt, Human
gaugccugguggcagcu

SEQ ID NO: 2953115 - RNA, 12 nt, Human
gaugcagccuca

SEQ ID NO: 2953116 - RNA, 14 nt, Human
gaugcagccucaca

SEQ ID NO: 2953117 - RNA, 13 nt, Human
gaugcaccagccc

SEQ ID NO: 2953118 - RNA, 21 nt, Human
gaugcacagaguuguuacauu

SEQ ID NO: 2953119 - RNA, 22 nt, Human
gaugcacagaguuguuacauuu

SEQ ID NO: 2953120 - RNA, 17 nt, Human
gaugacauucccugcua

SEQ ID NO: 2953121 - RNA, 17 nt, Human
gaugacauugacuauuu

SEQ ID NO: 2953122 - RNA, 21 nt, Human
gaugacauugacuauuuuugu

SEQ ID NO: 2953123 - RNA, 23 nt, Human
gaugacauugacuauuuuuguuu

SEQ ID NO: 2953124 - RNA, 15 nt, Human
gaugacauucccugc

SEQ ID NO: 2953125 - RNA, 20 nt, Human
gaugccugguggcagcugcg

SEQ ID NO: 2953126 - RNA, 18 nt, Human
gaugccugguggcagcug

SEQ ID NO: 2953127 - RNA, 19 nt, Human
gaugccugguggcagcugc

SEQ ID NO: 2953128 - RNA, 22 nt, Human
gauggauuuccagccaaagccu

SEQ ID NO: 2953129 - RNA, 13 nt, Human
gauggggcccugc

SEQ ID NO: 2953130 - RNA, 22 nt, Human
gauggggcccugccuccuuugu

SEQ ID NO: 2953131 - RNA, 14 nt, Human
gauggggcccugcc

SEQ ID NO: 2953132 - RNA, 21 nt, Human
gauggcuaguaucaaaagaaa

SEQ ID NO: 2953133 - RNA, 11 nt, Human
gauacagaaaa

SEQ ID NO: 2953134 - RNA, 23 nt, Human
gauagauaggucagugcaaauac

SEQ ID NO: 2953135 - RNA, 14 nt, Human
gauaauacaccacu

SEQ ID NO: 2953136 - RNA, 18 nt, Human
gauaauacaccacuacau

SEQ ID NO: 2953137 - RNA, 21 nt, Human
gauaauacaccacuacauucu

SEQ ID NO: 2953138 - RNA, 22 nt, Human
gauaauacaccacuacauucug

SEQ ID NO: 2953139 - RNA, 18 nt, Human
gauacaggaaaagcugcu

SEQ ID NO: 2953140 - RNA, 17 nt, Human
gauaggucagugcaaau

SEQ ID NO: 2953141 - RNA, 20 nt, Human
gauagcacagacccugcccu

SEQ ID NO: 2953142 - RNA, 22 nt, Human
gauagcacagacccugcccugu

SEQ ID NO: 2953143 - RNA, 21 nt, Human
gauagcacagacccugcccug

SEQ ID NO: 2953144 - RNA, 21 nt, Human
gaggaaggaaacccagcucug

SEQ ID NO: 2953145 - RNA, 20 nt, Human
gaggaaggaaacccagcucu

SEQ ID NO: 2953146 - RNA, 19 nt, Human
gaggaaggaaacccagcuc

SEQ ID NO: 2953147 - RNA, 13 nt, Human
gaggaaggaaacc

SEQ ID NO: 2953148 - RNA, 22 nt, Human
gauaaauaguuuaugauuccac

SEQ ID NO: 2953149 - RNA, 17 nt, Human
gaucauccacugugcca

SEQ ID NO: 2953150 - RNA, 19 nt, Human
gaucauccacugugccaug

SEQ ID NO: 2953151 - RNA, 14 nt, Human
gaucaugcauagag

SEQ ID NO: 2953152 - RNA, 17 nt, Human
gaucaugcauagagugu

SEQ ID NO: 2953153 - RNA, 16 nt, Human
gaucauccacugugcc

SEQ ID NO: 2953154 - RNA, 21 nt, Human
gaucauccacugugccaugug

SEQ ID NO: 2953155 - RNA, 22 nt, Human
gaucagucugauucccaagcuc

SEQ ID NO: 2953156 - RNA, 15 nt, Human
gaucagccugggcaa

SEQ ID NO: 2953157 - RNA, 12 nt, Human
gaucagccuggg

SEQ ID NO: 2953158 - RNA, 12 nt, Human
gaucacggcuca

SEQ ID NO: 2953159 - RNA, 21 nt, Human
gaucaaguuauuuuuaauuug

SEQ ID NO: 2953160 - RNA, 16 nt, Human
gaucacgccacugcac

SEQ ID NO: 2953161 - RNA, 18 nt, Human
gaucacgccacugcacua

SEQ ID NO: 2953162 - RNA, 19 nt, Human
gauuuucagcccucagaau

SEQ ID NO: 2953163 - RNA, 15 nt, Human
gauuuucagcccuca

SEQ ID NO: 2953164 - RNA, 11 nt, Human
gauuuucagcc

SEQ ID NO: 2953165 - RNA, 15 nt, Human
gauuuuccugaaaac

SEQ ID NO: 2953166 - RNA, 11 nt, Human
gauuucuguuu

SEQ ID NO: 2953167 - RNA, 19 nt, Human
gauuucuguuuagauaaua

SEQ ID NO: 2953168 - RNA, 15 nt, Human
gauuuccguuaaaau

SEQ ID NO: 2953169 - RNA, 18 nt, Human
gauuuccguuaaaauacc

SEQ ID NO: 2953170 - RNA, 21 nt, Human
gauugcaacaggcugggcuuc

SEQ ID NO: 2953171 - RNA, 23 nt, Human
gauugcaccacugcacuccagcc

SEQ ID NO: 2953172 - RNA, 16 nt, Human
gauugcaccacugcac

SEQ ID NO: 2953173 - RNA, 20 nt, Human
gauugcaacaggcugggcuu

SEQ ID NO: 2953174 - RNA, 18 nt, Human
gauucuuuccugaggcug

SEQ ID NO: 2953175 - RNA, 17 nt, Human
gauucuuuccugaggcu

SEQ ID NO: 2953176 - RNA, 16 nt, Human
gauucuuuccugaggc

SEQ ID NO: 2953177 - RNA, 12 nt, Human
gauucuuuccug

SEQ ID NO: 2953178 - RNA, 21 nt, Human
gauucccaagcucugcuccuc

SEQ ID NO: 2953179 - RNA, 19 nt, Human
gauucccaagcucugcucc

SEQ ID NO: 2953180 - RNA, 20 nt, Human
gauucccaagcucugcuccu

SEQ ID NO: 2953181 - RNA, 19 nt, Human
gauucagacagcugccugg

SEQ ID NO: 2953182 - RNA, 15 nt, Human
gauucagcucugcaa

SEQ ID NO: 2953183 - RNA, 13 nt, Human
gauucagcucugc

SEQ ID NO: 2953184 - RNA, 19 nt, Human
gauggggcugcaccggcug

SEQ ID NO: 2953185 - RNA, 23 nt, Human
gauggggcugcaccggcuggccu

SEQ ID NO: 2953186 - RNA, 18 nt, Human
gauucccaagcucugcuc

SEQ ID NO: 2953187 - RNA, 12 nt, Human
gauucauauuua

SEQ ID NO: 2953188 - RNA, 17 nt, Human
gauucauauuuacuucu

SEQ ID NO: 2953189 - RNA, 18 nt, Human
gauucauauuuacuucuu

SEQ ID NO: 2953190 - RNA, 19 nt, Human
gauucauauuuacuucuua

SEQ ID NO: 2953191 - RNA, 23 nt, Human
gcaagacgcugugcugcccugcc

SEQ ID NO: 2953192 - RNA, 22 nt, Human
gcaagacgcugugcugcccugc

SEQ ID NO: 2953193 - RNA, 21 nt, Human
gcaagacgcugugcugcccug

SEQ ID NO: 2953194 - RNA, 20 nt, Human
gcaagacgcugugcugcccu

SEQ ID NO: 2953195 - RNA, 14 nt, Human
gcaagacgcugugc

SEQ ID NO: 2953196 - RNA, 17 nt, Human
gcaagaauugaagcagg

SEQ ID NO: 2953197 - RNA, 16 nt, Human
gcaaaguaucccuacu

SEQ ID NO: 2953198 - RNA, 13 nt, Human
gcaaacagggccu

SEQ ID NO: 2953199 - RNA, 16 nt, Human
gcaaacagggccucug

SEQ ID NO: 2953200 - RNA, 17 nt, Human
gcaaacagggccucugc

SEQ ID NO: 2953201 - RNA, 18 nt, Human
gcaaacagggccucugcg

SEQ ID NO: 2953202 - RNA, 23 nt, Human
gcaaagcacugacuucuaaguaa

SEQ ID NO: 2953203 - RNA, 23 nt, Human
gcaaugaccuuucaauaggaaaa

SEQ ID NO: 2953204 - RNA, 13 nt, Human
gcaaugcuggcug

SEQ ID NO: 2953205 - RNA, 14 nt, Human
gcaaugcuggcugu

SEQ ID NO: 2953206 - RNA, 22 nt, Human
gcaaugcuggcuguuggcuggg

SEQ ID NO: 2953207 - RNA, 23 nt, Human
gcaaugcuggcuguuggcugggg

SEQ ID NO: 2953208 - RNA, 17 nt, Human
gcaaucaaaucugcuuu

SEQ ID NO: 2953209 - RNA, 15 nt, Human
gcaaucaaaucugcu

SEQ ID NO: 2953210 - RNA, 22 nt, Human
gcaaugaccuuucaauaggaaa

SEQ ID NO: 2953211 - RNA, 20 nt, Human
gcaaugaccuuucaauagga

SEQ ID NO: 2953212 - RNA, 17 nt, Human
gcaaugaccuuucaaua

SEQ ID NO: 2953213 - RNA, 15 nt, Human
gcaaugaccuuucaa

SEQ ID NO: 2953214 - RNA, 18 nt, Human
gcaaggagauuuacaacu

SEQ ID NO: 2953215 - RNA, 22 nt, Human
gcaaggcaaauguuuauuuaaa

SEQ ID NO: 2953216 - RNA, 10 nt, Human
gcaagccaga

SEQ ID NO: 2953217 - RNA, 11 nt, Human
gcaaggcuguc

SEQ ID NO: 2953218 - RNA, 14 nt, Human
gcaagggugauggg

SEQ ID NO: 2953219 - RNA, 19 nt, Human
gcagggcucagcggggaca

SEQ ID NO: 2953220 - RNA, 21 nt, Human
gcagggcucagcggggacagc

SEQ ID NO: 2953221 - RNA, 16 nt, Human
gcaggcagccaggcca

SEQ ID NO: 2953222 - RNA, 15 nt, Human
gcaggcagccaggcc

SEQ ID NO: 2953223 - RNA, 14 nt, Human
gcagggcucagcgg

SEQ ID NO: 2953224 - RNA, 22 nt, Human
gcagggcucagcggggacagcu

SEQ ID NO: 2953225 - RNA, 17 nt, Human
gcagggucucacucugu

SEQ ID NO: 2953226 - RNA, 18 nt, Human
gcagggucucacucuguc

SEQ ID NO: 2953227 - RNA, 19 nt, Human
gcaggucuugaacuccugg

SEQ ID NO: 2953228 - RNA, 20 nt, Human
gcaggucuugaacuccuggc

SEQ ID NO: 2953229 - RNA, 22 nt, Human
gcagguccaggguuugaguuca

SEQ ID NO: 2953230 - RNA, 16 nt, Human
gcagugcaugcugucc

SEQ ID NO: 2953231 - RNA, 15 nt, Human
gcagugcaugcuguc

SEQ ID NO: 2953232 - RNA, 20 nt, Human
gcagugcuuggcccaggagu

SEQ ID NO: 2953233 - RNA, 19 nt, Human
gcagugcuuggcccaggag

SEQ ID NO: 2953234 - RNA, 18 nt, Human
gcagugcuuggcccagga

SEQ ID NO: 2953235 - RNA, 17 nt, Human
gcauagguuuaauaauu

SEQ ID NO: 2953236 - RNA, 22 nt, Human
gcaguggugguuuucuguucuu

SEQ ID NO: 2953237 - RNA, 23 nt, Human
gcaguggugguuuucuguucuuu

SEQ ID NO: 2953238 - RNA, 13 nt, Human
gcagugggagcug

SEQ ID NO: 2953239 - RNA, 12 nt, Human
gcagugggagcu

SEQ ID NO: 2953240 - RNA, 14 nt, Human
gcagugggagcugc

SEQ ID NO: 2953241 - RNA, 15 nt, Human
gcagugggagcugcc

SEQ ID NO: 2953242 - RNA, 14 nt, Human
gcaguucugaagaa

SEQ ID NO: 2953243 - RNA, 17 nt, Human
gcaguucugaagaagau

SEQ ID NO: 2953244 - RNA, 13 nt, Human
gcauagaaguaaa

SEQ ID NO: 2953245 - RNA, 17 nt, Human
gcaguuauuaacacuaa

SEQ ID NO: 2953246 - RNA, 16 nt, Human
gcaguucagagcugcc

SEQ ID NO: 2953247 - RNA, 15 nt, Human
gcaguucugaagaag

SEQ ID NO: 2953248 - RNA, 17 nt, Human
gcaguucagagcugccc

SEQ ID NO: 2953249 - RNA, 18 nt, Human
gcaguucagagcugcccu

SEQ ID NO: 2953250 - RNA, 12 nt, Human
gcaucagcugcu

SEQ ID NO: 2953251 - RNA, 18 nt, Human
gcaugaaguaauaugcac

SEQ ID NO: 2953252 - RNA, 18 nt, Human
gcaugcgggcuuccuccu

SEQ ID NO: 2953253 - RNA, 14 nt, Human
gcauguucucugag

SEQ ID NO: 2953254 - RNA, 15 nt, Human
gcauguucucugagg

SEQ ID NO: 2953255 - RNA, 21 nt, Human
gcauguucucugaggacacua

SEQ ID NO: 2953256 - RNA, 22 nt, Human
gcauguucucugaggacacuaa

SEQ ID NO: 2953257 - RNA, 13 nt, Human
gcauuauauuuau

SEQ ID NO: 2953258 - RNA, 19 nt, Human
gcauucaaauguauuacag

SEQ ID NO: 2953259 - RNA, 17 nt, Human
gcauuaucuagauacug

SEQ ID NO: 2953260 - RNA, 21 nt, Human
gcauuugaggucuguucuuuc

SEQ ID NO: 2953261 - RNA, 13 nt, Human
gcauuugcugaau

SEQ ID NO: 2953262 - RNA, 14 nt, Human
gcauuugcugaaua

SEQ ID NO: 2953263 - RNA, 16 nt, Human
gcauuuguguugaaga

SEQ ID NO: 2953264 - RNA, 16 nt, Human
gcauuuguuugaacug

SEQ ID NO: 2953265 - RNA, 13 nt, Human
gccaaagccaaag

SEQ ID NO: 2953266 - RNA, 20 nt, Human
gccaaagccaaagcuaggcc

SEQ ID NO: 2953267 - RNA, 19 nt, Human
gccaaagccuccuccagcc

SEQ ID NO: 2953268 - RNA, 16 nt, Human
gccaaagccuccucca

SEQ ID NO: 2953269 - RNA, 16 nt, Human
gccaaagcuaggccug

SEQ ID NO: 2953270 - RNA, 22 nt, Human
gccaaagcuaggccuggccaga

SEQ ID NO: 2953271 - RNA, 12 nt, Human
gccaaaggaagc

SEQ ID NO: 2953272 - RNA, 18 nt, Human
gcauuuguuugaacugau

SEQ ID NO: 2953273 - RNA, 19 nt, Human
gcauuuuuuaaccuccuaa

SEQ ID NO: 2953274 - RNA, 16 nt, Human
gccaaacucaccugcc

SEQ ID NO: 2953275 - RNA, 14 nt, Human
gccaaacucaccug

SEQ ID NO: 2953276 - RNA, 19 nt, Human
gcacugguuuguucccugu

SEQ ID NO: 2953277 - RNA, 23 nt, Human
gcagacaggcaagcaccuccugc

SEQ ID NO: 2953278 - RNA, 19 nt, Human
gcagacaggcaagcaccuc

SEQ ID NO: 2953279 - RNA, 15 nt, Human
gcagacaggaccagg

SEQ ID NO: 2953280 - RNA, 13 nt, Human
gcagacaggacca

SEQ ID NO: 2953281 - RNA, 12 nt, Human
gcagacaggacc

SEQ ID NO: 2953282 - RNA, 18 nt, Human
gcacugcuuccagugagg

SEQ ID NO: 2953283 - RNA, 16 nt, Human
gcacugcuuccaguga

SEQ ID NO: 2953284 - RNA, 17 nt, Human
gcacugguuuguucccu

SEQ ID NO: 2953285 - RNA, 20 nt, Human
gcacugcuuccagugaggcu

SEQ ID NO: 2953286 - RNA, 14 nt, Human
gcaauggcagccuu

SEQ ID NO: 2953287 - RNA, 20 nt, Human
gcaccacugcacuccagccu

SEQ ID NO: 2953288 - RNA, 12 nt, Human
gcaauggcagcc

SEQ ID NO: 2953289 - RNA, 13 nt, Human
gcaauggcagccu

SEQ ID NO: 2953290 - RNA, 14 nt, Human
gcaccagcagccug

SEQ ID NO: 2953291 - RNA, 15 nt, Human
gcaccagcagccugg

SEQ ID NO: 2953292 - RNA, 22 nt, Human
gcaccacugcacuccagccugg

SEQ ID NO: 2953293 - RNA, 21 nt, Human
gcaccacugcacuccagccug

SEQ ID NO: 2953294 - RNA, 16 nt, Human
gcaccagcagccugga

SEQ ID NO: 2953295 - RNA, 22 nt, Human
gcacccaccaucaugucuggcu

SEQ ID NO: 2953296 - RNA, 18 nt, Human
gcacccggccccugcugg

SEQ ID NO: 2953297 - RNA, 19 nt, Human
gcacccggccccugcuggu

SEQ ID NO: 2953298 - RNA, 22 nt, Human
gcaccuggaauauauaaccagu

SEQ ID NO: 2953299 - RNA, 17 nt, Human
gcaccuuagacaguccc

SEQ ID NO: 2953300 - RNA, 14 nt, Human
gcaccuuagacagu

SEQ ID NO: 2953301 - RNA, 15 nt, Human
gcacccucaggcagg

SEQ ID NO: 2953302 - RNA, 18 nt, Human
gcaccuggaauauauaac

SEQ ID NO: 2953303 - RNA, 21 nt, Human
gcaccuggaauauauaaccag

SEQ ID NO: 2953304 - RNA, 18 nt, Human
gcaccuuagacagucccu

SEQ ID NO: 2953305 - RNA, 12 nt, Human
gcacgauuucug

SEQ ID NO: 2953306 - RNA, 12 nt, Human
gcaggcaccugu

SEQ ID NO: 2953307 - RNA, 12 nt, Human
gcaggcagccag

SEQ ID NO: 2953308 - RNA, 14 nt, Human
gcaggcagccaggc

SEQ ID NO: 2953309 - RNA, 13 nt, Human
gcaggcagccagg

SEQ ID NO: 2953310 - RNA, 20 nt, Human
gcaggaggaucacuugaguc

SEQ ID NO: 2953311 - RNA, 23 nt, Human
gcaggaggaucacuugaguccag

SEQ ID NO: 2953312 - RNA, 14 nt, Human
gcagcucaccucuc

SEQ ID NO: 2953313 - RNA, 15 nt, Human
gcagccuuggcaaac

SEQ ID NO: 2953314 - RNA, 15 nt, Human
gcagcucaccucucc

SEQ ID NO: 2953315 - RNA, 17 nt, Human
gcagcccugcagagggc

SEQ ID NO: 2953316 - RNA, 16 nt, Human
gcagcccugcagaggg

SEQ ID NO: 2953317 - RNA, 15 nt, Human
gcagcccugcagagg

SEQ ID NO: 2953318 - RNA, 14 nt, Human
gcagcccugcagag

SEQ ID NO: 2953319 - RNA, 22 nt, Human
gcagauacaggaaaagcugcug

SEQ ID NO: 2953320 - RNA, 20 nt, Human
gcagaccauuggggcuccca

SEQ ID NO: 2953321 - RNA, 21 nt, Human
gcagaccauuggggcucccag

SEQ ID NO: 2953322 - RNA, 22 nt, Human
gcagaccauuggggcucccagc

SEQ ID NO: 2953323 - RNA, 23 nt, Human
gcagaccauuggggcucccagcc

SEQ ID NO: 2953324 - RNA, 17 nt, Human
gcagacaguuaagagaa

SEQ ID NO: 2953325 - RNA, 21 nt, Human
gcagaguugaagacagagcua

SEQ ID NO: 2953326 - RNA, 18 nt, Human
gcagauaaacaguaguga

SEQ ID NO: 2953327 - RNA, 20 nt, Human
gcagaguugaagacagagcu

SEQ ID NO: 2953328 - RNA, 17 nt, Human
gcagccccauucugccu

SEQ ID NO: 2953329 - RNA, 16 nt, Human
gcagcaauaaagcagc

SEQ ID NO: 2953330 - RNA, 23 nt, Human
gcagcaauaaagcagcguuucua

SEQ ID NO: 2953331 - RNA, 18 nt, Human
gcagccccauucugccug

SEQ ID NO: 2953332 - RNA, 19 nt, Human
gcagccccauucugccugc

SEQ ID NO: 2953333 - RNA, 21 nt, Human
gcagccccauucugccugccc

SEQ ID NO: 2953334 - RNA, 24 nt, Human
gcagccccauucugccugcccagg

SEQ ID NO: 2953335 - RNA, 19 nt, Human
gcagcccucaauugugaaa

SEQ ID NO: 2953336 - RNA, 13 nt, Human
gcagcccugcaga

SEQ ID NO: 2953337 - RNA, 20 nt, Human
gcagccccgugggguuccuc

SEQ ID NO: 2953338 - RNA, 21 nt, Human
gcagccccuguucuggcagag

SEQ ID NO: 2953339 - RNA, 20 nt, Human
gcagccccuguucuggcaga

SEQ ID NO: 2953340 - RNA, 13 nt, Human
gcuacaguaauaa

SEQ ID NO: 2953341 - RNA, 14 nt, Human
gcuacaguaauaaa

SEQ ID NO: 2953342 - RNA, 15 nt, Human
gcuacaguaauaaau

SEQ ID NO: 2953343 - RNA, 19 nt, Human
gcuagaacucccuuucaac

SEQ ID NO: 2953344 - RNA, 16 nt, Human
gcuaccuuuguauucu

SEQ ID NO: 2953345 - RNA, 20 nt, Human
gcuaccuuuguauucucucc

SEQ ID NO: 2953346 - RNA, 18 nt, Human
gcuagaacucccuuucaa

SEQ ID NO: 2953347 - RNA, 15 nt, Human
gcuaggaacacuccu

SEQ ID NO: 2953348 - RNA, 13 nt, Human
gcuauaggugcua

SEQ ID NO: 2953349 - RNA, 14 nt, Human
gcuacacaggggaa

SEQ ID NO: 2953350 - RNA, 13 nt, Human
gcuacacacugca

SEQ ID NO: 2953351 - RNA, 20 nt, Human
gcuacacacugcauguuugu

SEQ ID NO: 2953352 - RNA, 20 nt, Human
gcuaagagggagggagggcu

SEQ ID NO: 2953353 - RNA, 13 nt, Human
gcuacacaccuaa

SEQ ID NO: 2953354 - RNA, 20 nt, Human
gcuaaagaaguuugaacauu

SEQ ID NO: 2953355 - RNA, 15 nt, Human
gcuaaagaaguuuga

SEQ ID NO: 2953356 - RNA, 18 nt, Human
gcuaaagaaguuugaaca

SEQ ID NO: 2953357 - RNA, 19 nt, Human
gcuaaagaaguuugaacau

SEQ ID NO: 2953358 - RNA, 13 nt, Human
gcuaagagggagg

SEQ ID NO: 2953359 - RNA, 15 nt, Human
gcggacagccacggc

SEQ ID NO: 2953360 - RNA, 19 nt, Human
gcgucucauacucaccuca

SEQ ID NO: 2953361 - RNA, 11 nt, Human
gcggacagcca

SEQ ID NO: 2953362 - RNA, 13 nt, Human
gcggacagccacg

SEQ ID NO: 2953363 - RNA, 15 nt, Human
gcgccuacaggagug

SEQ ID NO: 2953364 - RNA, 12 nt, Human
gcgacagugaga

SEQ ID NO: 2953365 - RNA, 18 nt, Human
gccugguggcagcugcgg

SEQ ID NO: 2953366 - RNA, 19 nt, Human
gccugguggcagcugcggu

SEQ ID NO: 2953367 - RNA, 21 nt, Human
gccugguggcagcugcggucc

SEQ ID NO: 2953368 - RNA, 13 nt, Human
gccugguggcagc

SEQ ID NO: 2953369 - RNA, 22 nt, Human
gccugggggcugggcagaggaa

SEQ ID NO: 2953370 - RNA, 21 nt, Human
gccugggggcugggcagagga

SEQ ID NO: 2953371 - RNA, 14 nt, Human
gccuuauggaacac

SEQ ID NO: 2953372 - RNA, 10 nt, Human
gccuuaugga

SEQ ID NO: 2953373 - RNA, 19 nt, Human
gccuuagaagucacacagu

SEQ ID NO: 2953374 - RNA, 17 nt, Human
gccuuagaagucacaca

SEQ ID NO: 2953375 - RNA, 18 nt, Human
gccuuagaagucacacag

SEQ ID NO: 2953376 - RNA, 21 nt, Human
gccuguugggccaggagccuc

SEQ ID NO: 2953377 - RNA, 21 nt, Human
gccuuacacaaugguuuucuu

SEQ ID NO: 2953378 - RNA, 18 nt, Human
gccuuacccucauguucu

SEQ ID NO: 2953379 - RNA, 20 nt, Human
gccuuacacaaugguuuucu

SEQ ID NO: 2953380 - RNA, 21 nt, Human
gccuuccaggggugggacacc

SEQ ID NO: 2953381 - RNA, 16 nt, Human
gccuuccagggguggg

SEQ ID NO: 2953382 - RNA, 15 nt, Human
gccuuccaggggugg

SEQ ID NO: 2953383 - RNA, 12 nt, Human
gccuuccagggg

SEQ ID NO: 2953384 - RNA, 20 nt, Human
gccuuauggaacacucugag

SEQ ID NO: 2953385 - RNA, 19 nt, Human
gccuuauggaacacucuga

SEQ ID NO: 2953386 - RNA, 18 nt, Human
gccuuauggaacacucug

SEQ ID NO: 2953387 - RNA, 16 nt, Human
gccuuauggaacacuc

SEQ ID NO: 2953388 - RNA, 23 nt, Human
gcgacaaugcaaaccaucauuga

SEQ ID NO: 2953389 - RNA, 13 nt, Human
gccuuuggcuuca

SEQ ID NO: 2953390 - RNA, 12 nt, Human
gccucugccucu

SEQ ID NO: 2953391 - RNA, 13 nt, Human
gccucugccucug

SEQ ID NO: 2953392 - RNA, 15 nt, Human
gccugcaagggagug

SEQ ID NO: 2953393 - RNA, 13 nt, Human
gccugcaagggag

SEQ ID NO: 2953394 - RNA, 14 nt, Human
gccucucucaggcc

SEQ ID NO: 2953395 - RNA, 13 nt, Human
gccucucucaggc

SEQ ID NO: 2953396 - RNA, 17 nt, Human
gccucugacacacagcu

SEQ ID NO: 2953397 - RNA, 18 nt, Human
gccucugacacacagcuc

SEQ ID NO: 2953398 - RNA, 16 nt, Human
gccucucucaggccaa

SEQ ID NO: 2953399 - RNA, 19 nt, Human
gccucugacacacagcucu

SEQ ID NO: 2953400 - RNA, 20 nt, Human
gccucugacacacagcucug

SEQ ID NO: 2953401 - RNA, 21 nt, Human
gccucugacacacagcucugu

SEQ ID NO: 2953402 - RNA, 14 nt, Human
gccucugcacuccc

SEQ ID NO: 2953403 - RNA, 18 nt, Human
gccucacaguccuuacca

SEQ ID NO: 2953404 - RNA, 15 nt, Human
gccucagcauccugg

SEQ ID NO: 2953405 - RNA, 16 nt, Human
gccucagcauccuggc

SEQ ID NO: 2953406 - RNA, 18 nt, Human
gccucccaaagugcuggg

SEQ ID NO: 2953407 - RNA, 19 nt, Human
gccucccaaagugcuggga

SEQ ID NO: 2953408 - RNA, 13 nt, Human
gccucccaacuca

SEQ ID NO: 2953409 - RNA, 16 nt, Human
gccucccaucacccgc

SEQ ID NO: 2953410 - RNA, 14 nt, Human
gccucccaucaccc

SEQ ID NO: 2953411 - RNA, 19 nt, Human
gccucccaacucaccccag

SEQ ID NO: 2953412 - RNA, 18 nt, Human
gccucccaacucacccca

SEQ ID NO: 2953413 - RNA, 17 nt, Human
gccucccaacucacccc

SEQ ID NO: 2953414 - RNA, 16 nt, Human
gccucccaacucaccc

SEQ ID NO: 2953415 - RNA, 20 nt, Human
gccucccgaguagcugggac

SEQ ID NO: 2953416 - RNA, 18 nt, Human
gccucccgaguagcuggg

SEQ ID NO: 2953417 - RNA, 19 nt, Human
gccucccgaguagcuggga

SEQ ID NO: 2953418 - RNA, 17 nt, Human
gccucccgaguagcugg

SEQ ID NO: 2953419 - RNA, 20 nt, Human
gccuccccuccucugcuugc

SEQ ID NO: 2953420 - RNA, 22 nt, Human
gccuccccuccucugcuugcca

SEQ ID NO: 2953421 - RNA, 17 nt, Human
gccuccccuccucugcu

SEQ ID NO: 2953422 - RNA, 19 nt, Human
gccuccccuccucugcuug

SEQ ID NO: 2953423 - RNA, 16 nt, Human
gccuccccuccucugc

SEQ ID NO: 2953424 - RNA, 16 nt, Human
gcccuugucggcccca

SEQ ID NO: 2953425 - RNA, 21 nt, Human
gcccuugucggccccaccagu

SEQ ID NO: 2953426 - RNA, 16 nt, Human
gcccuuggccaugggu

SEQ ID NO: 2953427 - RNA, 18 nt, Human
gcccuucucuccagcccc

SEQ ID NO: 2953428 - RNA, 17 nt, Human
gcccuucucuccagccc

SEQ ID NO: 2953429 - RNA, 16 nt, Human
gcccuucucuccagcc

SEQ ID NO: 2953430 - RNA, 14 nt, Human
gcccuucucuccag

SEQ ID NO: 2953431 - RNA, 20 nt, Human
gccgagaucacgccacugca

SEQ ID NO: 2953432 - RNA, 21 nt, Human
gccgagaucacgccacugcac

SEQ ID NO: 2953433 - RNA, 22 nt, Human
gccgagaucacgccacugcacu

SEQ ID NO: 2953434 - RNA, 12 nt, Human
gccgcagcccug

SEQ ID NO: 2953435 - RNA, 11 nt, Human
gccgcagcccu

SEQ ID NO: 2953436 - RNA, 21 nt, Human
gccgggcgugguggcaggcac

SEQ ID NO: 2953437 - RNA, 21 nt, Human
gccgggcgcgguggcucacgc

SEQ ID NO: 2953438 - RNA, 20 nt, Human
gccgggcgugguggugagug

SEQ ID NO: 2953439 - RNA, 17 nt, Human
gccgucuaccugagggg

SEQ ID NO: 2953440 - RNA, 16 nt, Human
gccgucuaccugaggg

SEQ ID NO: 2953441 - RNA, 15 nt, Human
gccgucuaccugagg

SEQ ID NO: 2953442 - RNA, 23 nt, Human
gccguggugauuuagcaggaagc

SEQ ID NO: 2953443 - RNA, 20 nt, Human
gccguguaaccauggaccca

SEQ ID NO: 2953444 - RNA, 18 nt, Human
gccucaaccuccugggcu

SEQ ID NO: 2953445 - RNA, 19 nt, Human
gccucaaccuccugggcua

SEQ ID NO: 2953446 - RNA, 19 nt, Human
gccucacagcagugagacu

SEQ ID NO: 2953447 - RNA, 15 nt, Human
gccucacagcaguga

SEQ ID NO: 2953448 - RNA, 17 nt, Human
gccucaaccuccugggc

SEQ ID NO: 2953449 - RNA, 17 nt, Human
gccucacaguccuuacc

SEQ ID NO: 2953450 - RNA, 13 nt, Human
gccucacaguccu

SEQ ID NO: 2953451 - RNA, 22 nt, Human
gccgugugugugcguccugucg

SEQ ID NO: 2953452 - RNA, 14 nt, Human
gccauccuggccca

SEQ ID NO: 2953453 - RNA, 23 nt, Human
gccauccuggcccagggcaucug

SEQ ID NO: 2953454 - RNA, 20 nt, Human
gccauccuggcccagggcau

SEQ ID NO: 2953455 - RNA, 18 nt, Human
gccauccuggcccagggc

SEQ ID NO: 2953456 - RNA, 19 nt, Human
gccauccuggcccagggca

SEQ ID NO: 2953457 - RNA, 23 nt, Human
gccaucccucccuccaccucccu

SEQ ID NO: 2953458 - RNA, 18 nt, Human
gccaucccucccuccacc

SEQ ID NO: 2953459 - RNA, 16 nt, Human
gccaucccucccucca

SEQ ID NO: 2953460 - RNA, 20 nt, Human
gccaugaggaacaaggcaag

SEQ ID NO: 2953461 - RNA, 14 nt, Human
gccaugcuccuggc

SEQ ID NO: 2953462 - RNA, 13 nt, Human
gccaggcuggucu

SEQ ID NO: 2953463 - RNA, 15 nt, Human
gccaggcuggucuca

SEQ ID NO: 2953464 - RNA, 23 nt, Human
gccaguaaaugggggugcauuug

SEQ ID NO: 2953465 - RNA, 12 nt, Human
gccaguaaaugg

SEQ ID NO: 2953466 - RNA, 21 nt, Human
gccagucaccccggccaccug

SEQ ID NO: 2953467 - RNA, 14 nt, Human
gcccacuucugcca

SEQ ID NO: 2953468 - RNA, 13 nt, Human
gcccaccuuggcu

SEQ ID NO: 2953469 - RNA, 15 nt, Human
gcccaccuuggcuca

SEQ ID NO: 2953470 - RNA, 16 nt, Human
gcccaccuuggcucaa

SEQ ID NO: 2953471 - RNA, 17 nt, Human
gcccaccuuggcucaag

SEQ ID NO: 2953472 - RNA, 16 nt, Human
gcccaccuggccucug

SEQ ID NO: 2953473 - RNA, 15 nt, Human
gcccaccuggccucu

SEQ ID NO: 2953474 - RNA, 24 nt, Human
gcccaccuggccucugcacucccc

SEQ ID NO: 2953475 - RNA, 21 nt, Human
gcccaccuggccucugcacuc

SEQ ID NO: 2953476 - RNA, 20 nt, Human
gcccaccuggccucugcacu

SEQ ID NO: 2953477 - RNA, 17 nt, Human
gcccaccuggccucugc

SEQ ID NO: 2953478 - RNA, 16 nt, Human
gcccaaggccuucccc

SEQ ID NO: 2953479 - RNA, 13 nt, Human
gcccaaggccuuc

SEQ ID NO: 2953480 - RNA, 15 nt, Human
gccaugggccuccug

SEQ ID NO: 2953481 - RNA, 16 nt, Human
gccaugggccuccugu

SEQ ID NO: 2953482 - RNA, 19 nt, Human
gccaugggcacugugggua

SEQ ID NO: 2953483 - RNA, 24 nt, Human
gccaugcuccuggcccacugcauc

SEQ ID NO: 2953484 - RNA, 20 nt, Human
gccaggaagccagcaggcuc

SEQ ID NO: 2953485 - RNA, 15 nt, Human
gccaggaagccagca

SEQ ID NO: 2953486 - RNA, 16 nt, Human
gccaggagccuccugc

SEQ ID NO: 2953487 - RNA, 14 nt, Human
gccaggagccuccu

SEQ ID NO: 2953488 - RNA, 20 nt, Human
gccaggagccuccugcccuu

SEQ ID NO: 2953489 - RNA, 19 nt, Human
gccaggagccuccugcccu

SEQ ID NO: 2953490 - RNA, 16 nt, Human
gccagcugcuugggcu

SEQ ID NO: 2953491 - RNA, 18 nt, Human
gccagcugcuugggcuuc

SEQ ID NO: 2953492 - RNA, 17 nt, Human
gccagcugcuugggcuu

SEQ ID NO: 2953493 - RNA, 14 nt, Human
gccaggaagccagc

SEQ ID NO: 2953494 - RNA, 13 nt, Human
gccaggaagccag

SEQ ID NO: 2953495 - RNA, 12 nt, Human
gccaggaagcca

SEQ ID NO: 2953496 - RNA, 20 nt, Human
gccagcugcuugggcuucau

SEQ ID NO: 2953497 - RNA, 19 nt, Human
gccagauucuuuccugagg

SEQ ID NO: 2953498 - RNA, 22 nt, Human
gccagccgagauagccaaggcc

SEQ ID NO: 2953499 - RNA, 15 nt, Human
gccagaugcaccagc

SEQ ID NO: 2953500 - RNA, 20 nt, Human
gccagauucuuuccugaggc

SEQ ID NO: 2953501 - RNA, 13 nt, Human
gccagauuucacu

SEQ ID NO: 2953502 - RNA, 24 nt, Human
gccagauucuuuccugaggcuggg

SEQ ID NO: 2953503 - RNA, 14 nt, Human
gccagaugcaccag

SEQ ID NO: 2953504 - RNA, 20 nt, Human
gccacugcaccgggccacag

SEQ ID NO: 2953505 - RNA, 21 nt, Human
gccacugcaccgggccacaga

SEQ ID NO: 2953506 - RNA, 19 nt, Human
gccacugcaccgggccaca

SEQ ID NO: 2953507 - RNA, 22 nt, Human
gccagagacacaagccuucggc

SEQ ID NO: 2953508 - RNA, 21 nt, Human
gccagagacacaagccuucgg

SEQ ID NO: 2953509 - RNA, 20 nt, Human
gccaaggccaaaggaagcac

SEQ ID NO: 2953510 - RNA, 19 nt, Human
gccaaggccaaaggaagca

SEQ ID NO: 2953511 - RNA, 24 nt, Human
gccaaggccaaaggaagcacaugc

SEQ ID NO: 2953512 - RNA, 20 nt, Human
gcccaggguggccacaccuc

SEQ ID NO: 2953513 - RNA, 15 nt, Human
gcccaggguggccac

SEQ ID NO: 2953514 - RNA, 22 nt, Human
gcccaguuggguggaugccugg

SEQ ID NO: 2953515 - RNA, 15 nt, Human
gcccagagagggugg

SEQ ID NO: 2953516 - RNA, 21 nt, Human
gcccagagaggguggugaccu

SEQ ID NO: 2953517 - RNA, 23 nt, Human
gcccaggccccugccacccuggg

SEQ ID NO: 2953518 - RNA, 13 nt, Human
gcccaggccuccu

SEQ ID NO: 2953519 - RNA, 12 nt, Human
gcccaggcuggc

SEQ ID NO: 2953520 - RNA, 14 nt, Human
gcccagggcaucug

SEQ ID NO: 2953521 - RNA, 15 nt, Human
gcccagggcaucugg

SEQ ID NO: 2953522 - RNA, 18 nt, Human
gcccagggcaucugggag

SEQ ID NO: 2953523 - RNA, 15 nt, Human
gccccauucugccug

SEQ ID NO: 2953524 - RNA, 14 nt, Human
gccccauucugccu

SEQ ID NO: 2953525 - RNA, 22 nt, Human
gccccauccucuguacagagcc

SEQ ID NO: 2953526 - RNA, 14 nt, Human
gccccauccucugu

SEQ ID NO: 2953527 - RNA, 13 nt, Human
gccccauccucug

SEQ ID NO: 2953528 - RNA, 13 nt, Human
gccccagugccca

SEQ ID NO: 2953529 - RNA, 14 nt, Human
gccccagugcccac

SEQ ID NO: 2953530 - RNA, 18 nt, Human
gccccaucccaaacccuu

SEQ ID NO: 2953531 - RNA, 12 nt, Human
gccccagugccc

SEQ ID NO: 2953532 - RNA, 20 nt, Human
gccccuucugacccaugcug

SEQ ID NO: 2953533 - RNA, 15 nt, Human
gccccgaggccuucu

SEQ ID NO: 2953534 - RNA, 17 nt, Human
gcccccuguggaugcug

SEQ ID NO: 2953535 - RNA, 13 nt, Human
gcccccuguggau

SEQ ID NO: 2953536 - RNA, 18 nt, Human
gccccgaggccuucucug

SEQ ID NO: 2953537 - RNA, 14 nt, Human
gccccucagggucc

SEQ ID NO: 2953538 - RNA, 18 nt, Human
gccccucagggucccugg

SEQ ID NO: 2953539 - RNA, 16 nt, Human
gccccucagggucccu

SEQ ID NO: 2953540 - RNA, 21 nt, Human
gcccuccaagaccuucuccuu

SEQ ID NO: 2953541 - RNA, 19 nt, Human
gcccuccaagaccuucucc

SEQ ID NO: 2953542 - RNA, 20 nt, Human
gcccuccagagccccacagc

SEQ ID NO: 2953543 - RNA, 22 nt, Human
gcccuccagagccccacagccc

SEQ ID NO: 2953544 - RNA, 14 nt, Human
gcccuccagagccc

SEQ ID NO: 2953545 - RNA, 16 nt, Human
gcccuccagagcccca

SEQ ID NO: 2953546 - RNA, 18 nt, Human
gcccuccagagccccaca

SEQ ID NO: 2953547 - RNA, 12 nt, Human
gcccuccagagc

SEQ ID NO: 2953548 - RNA, 23 nt, Human
gcccuccaagaccuucuccuuca

SEQ ID NO: 2953549 - RNA, 22 nt, Human
gcccuccaagaccuucuccuuc

SEQ ID NO: 2953550 - RNA, 19 nt, Human
gcccucugcccacucccug

SEQ ID NO: 2953551 - RNA, 18 nt, Human
gcccucugcccacucccu

SEQ ID NO: 2953552 - RNA, 16 nt, Human
gcccucugcccacucc

SEQ ID NO: 2953553 - RNA, 13 nt, Human
gcccucugcccac

SEQ ID NO: 2953554 - RNA, 13 nt, Human
gcccugcagaggg

SEQ ID NO: 2953555 - RNA, 14 nt, Human
gcccugcagagggc

SEQ ID NO: 2953556 - RNA, 15 nt, Human
gcccugcagagggca

SEQ ID NO: 2953557 - RNA, 19 nt, Human
uuuuaauauggaucuguau

SEQ ID NO: 2953558 - RNA, 20 nt, Human
uuuuaauaauguuucaaaca

SEQ ID NO: 2953559 - RNA, 11 nt, Human
uuuuaaaugca

SEQ ID NO: 2953560 - RNA, 12 nt, Human
uuuuaaaugcac

SEQ ID NO: 2953561 - RNA, 21 nt, Human
uuuuaaaugcaccuggaauau

SEQ ID NO: 2953562 - RNA, 12 nt, Human
uuuguucccugu

SEQ ID NO: 2953563 - RNA, 21 nt, Human
uuuguucuggcucuuccaggc

SEQ ID NO: 2953564 - RNA, 17 nt, Human
uuuuaaagaaugcucuu

SEQ ID NO: 2953565 - RNA, 15 nt, Human
uuuuaaaagaaugau

SEQ ID NO: 2953566 - RNA, 21 nt, Human
uuuuaaaagaaugauuaugaa

SEQ ID NO: 2953567 - RNA, 13 nt, Human
uuugguuucuagc

SEQ ID NO: 2953568 - RNA, 19 nt, Human
uuugguuuucacauuggaa

SEQ ID NO: 2953569 - RNA, 13 nt, Human
uuuguauaaaaua

SEQ ID NO: 2953570 - RNA, 14 nt, Human
uuuguauaaaauaa

SEQ ID NO: 2953571 - RNA, 16 nt, Human
uuuguauaaaauaauu

SEQ ID NO: 2953572 - RNA, 21 nt, Human
uuuggaauuuugugcccccau

SEQ ID NO: 2953573 - RNA, 15 nt, Human
uuugcauauugcaua

SEQ ID NO: 2953574 - RNA, 20 nt, Human
uuugcauauugcauacuauu

SEQ ID NO: 2953575 - RNA, 15 nt, Human
uuugcuuugugauuu

SEQ ID NO: 2953576 - RNA, 16 nt, Human
uuugcuuugugauuuu

SEQ ID NO: 2953577 - RNA, 14 nt, Human
uuuggaaaagaaua

SEQ ID NO: 2953578 - RNA, 14 nt, Human
uuuggaauuuugug

SEQ ID NO: 2953579 - RNA, 17 nt, Human
uuucuuauuucauuucu

SEQ ID NO: 2953580 - RNA, 18 nt, Human
uuucuuagggaaggauac

SEQ ID NO: 2953581 - RNA, 23 nt, Human
uuucuuagggaaggauacaaaag

SEQ ID NO: 2953582 - RNA, 13 nt, Human
uuucuucucccuc

SEQ ID NO: 2953583 - RNA, 12 nt, Human
uuucuucucccu

SEQ ID NO: 2953584 - RNA, 17 nt, Human
uuugaacugauaaagau

SEQ ID NO: 2953585 - RNA, 19 nt, Human
uuugaacugauaaagauga

SEQ ID NO: 2953586 - RNA, 15 nt, Human
uuugaacugauaaag

SEQ ID NO: 2953587 - RNA, 14 nt, Human
uuugaacucuucaa

SEQ ID NO: 2953588 - RNA, 16 nt, Human
uuugaagauucuaugu

SEQ ID NO: 2953589 - RNA, 22 nt, Human
uuugaagaugccgcauuuggau

SEQ ID NO: 2953590 - RNA, 18 nt, Human
uuugaaucaucaagucuu

SEQ ID NO: 2953591 - RNA, 22 nt, Human
uuaccaauugaaguaaaaugug

SEQ ID NO: 2953592 - RNA, 14 nt, Human
uuaccacagacaua

SEQ ID NO: 2953593 - RNA, 17 nt, Human
uuaccacagacauacua

SEQ ID NO: 2953594 - RNA, 23 nt, Human
uuacauuuuuaagugcugcauuu

SEQ ID NO: 2953595 - RNA, 15 nt, Human
uuacauuuuacacac

SEQ ID NO: 2953596 - RNA, 14 nt, Human
uuacauuuuacaca

SEQ ID NO: 2953597 - RNA, 16 nt, Human
uuuccugaggcugggc

SEQ ID NO: 2953598 - RNA, 18 nt, Human
uuuccucauuuuuauaau

SEQ ID NO: 2953599 - RNA, 23 nt, Human
uuaccaauugaaguaaaaugugg

SEQ ID NO: 2953600 - RNA, 22 nt, Human
uuuccucaaaacuucagacaua

SEQ ID NO: 2953601 - RNA, 23 nt, Human
uuucuacucgaguuacagacaaa

SEQ ID NO: 2953602 - RNA, 20 nt, Human
uuucuaaaggcuaccuuugu

SEQ ID NO: 2953603 - RNA, 21 nt, Human
uuucuaaaggcuaccuuugua

SEQ ID NO: 2953604 - RNA, 18 nt, Human
uuucuaaaggcuaccuuu

SEQ ID NO: 2953605 - RNA, 19 nt, Human
uuucugaaauuuccuggga

SEQ ID NO: 2953606 - RNA, 21 nt, Human
uuucugaaauuuccugggagc

SEQ ID NO: 2953607 - RNA, 15 nt, Human
uuucucugauacaga

SEQ ID NO: 2953608 - RNA, 16 nt, Human
uuucucugauacagaa

SEQ ID NO: 2953609 - RNA, 17 nt, Human
uuucucugauacagaaa

SEQ ID NO: 2953610 - RNA, 18 nt, Human
uuucucugauacagaaaa

SEQ ID NO: 2953611 - RNA, 20 nt, Human
uuucuguucuuucuggcuau

SEQ ID NO: 2953612 - RNA, 13 nt, Human
uuucugagaaaga

SEQ ID NO: 2953613 - RNA, 23 nt, Human
uuuuucucugauacagaaaaguu

SEQ ID NO: 2953614 - RNA, 19 nt, Human
uuuuucucuaggaaauauu

SEQ ID NO: 2953615 - RNA, 19 nt, Human
uuuuuccuucagugccuua

SEQ ID NO: 2953616 - RNA, 21 nt, Human
uuuuuccuucaagaaugcagu

SEQ ID NO: 2953617 - RNA, 20 nt, Human
uuuuuaagggcccuuuuuca

SEQ ID NO: 2953618 - RNA, 23 nt, Human
uuuuuaagaaaaaggaugcacag

SEQ ID NO: 2953619 - RNA, 11 nt, Human
uuuuuccuuca

SEQ ID NO: 2953620 - RNA, 19 nt, Human
uuuuguagagccagggucu

SEQ ID NO: 2953621 - RNA, 16 nt, Human
uuuugucauauaagau

SEQ ID NO: 2953622 - RNA, 18 nt, Human
uuuuuaaaaaagaaacau

SEQ ID NO: 2953623 - RNA, 22 nt, Human
uuuucuuuugcuuuauggguuu

SEQ ID NO: 2953624 - RNA, 20 nt, Human
uuuugacaaggggcaguggu

SEQ ID NO: 2953625 - RNA, 17 nt, Human
uuuuggguuuauuugga

SEQ ID NO: 2953626 - RNA, 18 nt, Human
uuuuggguuuauuuggaa

SEQ ID NO: 2953627 - RNA, 14 nt, Human
uuuuggcugcugaa

SEQ ID NO: 2953628 - RNA, 14 nt, Human
uuuugguauuugaa

SEQ ID NO: 2953629 - RNA, 16 nt, Human
uuuugguauuugaaac

SEQ ID NO: 2953630 - RNA, 15 nt, Human
uuuuggucuguguga

SEQ ID NO: 2953631 - RNA, 18 nt, Human
uuuuggucuggagggaag

SEQ ID NO: 2953632 - RNA, 14 nt, Human
uuuuccuucaagaa

SEQ ID NO: 2953633 - RNA, 21 nt, Human
uuuuccuucaagaaugcagua

SEQ ID NO: 2953634 - RNA, 13 nt, Human
uuuucuuuuaaga

SEQ ID NO: 2953635 - RNA, 15 nt, Human
uuuucuuuuaagaau

SEQ ID NO: 2953636 - RNA, 13 nt, Human
uuuuccuucaaga

SEQ ID NO: 2953637 - RNA, 13 nt, Human
uuuuccugaaaac

SEQ ID NO: 2953638 - RNA, 14 nt, Human
uuuuccugaaaacc

SEQ ID NO: 2953639 - RNA, 23 nt, Human
guccacccaggagccccgaggcc

SEQ ID NO: 2953640 - RNA, 12 nt, Human
guccacccagga

SEQ ID NO: 2953641 - RNA, 21 nt, Human
gucccaccuuggcugcaggga

SEQ ID NO: 2953642 - RNA, 19 nt, Human
gucauuauguuaauauuuc

SEQ ID NO: 2953643 - RNA, 17 nt, Human
gucauuauguuaauauu

SEQ ID NO: 2953644 - RNA, 14 nt, Human
gucauucuucccua

SEQ ID NO: 2953645 - RNA, 21 nt, Human
gucauucagauaugauucaaa

SEQ ID NO: 2953646 - RNA, 23 nt, Human
gucagcuccccucggagaagagc

SEQ ID NO: 2953647 - RNA, 22 nt, Human
gucagcuccccucggagaagag

SEQ ID NO: 2953648 - RNA, 21 nt, Human
gucagcuccccucggagaaga

SEQ ID NO: 2953649 - RNA, 17 nt, Human
guccccaccgcagacag

SEQ ID NO: 2953650 - RNA, 20 nt, Human
gucccaccuuggcugcaggg

SEQ ID NO: 2953651 - RNA, 23 nt, Human
gucccaccuuggcugcagggagu

SEQ ID NO: 2953652 - RNA, 16 nt, Human
gucccugcacuugcag

SEQ ID NO: 2953653 - RNA, 19 nt, Human
gucccugcacuugcagacu

SEQ ID NO: 2953654 - RNA, 21 nt, Human
gucccugcacuugcagacucu

SEQ ID NO: 2953655 - RNA, 22 nt, Human
gucaccccggccaccugcggug

SEQ ID NO: 2953656 - RNA, 18 nt, Human
gucaccccggccaccugc

SEQ ID NO: 2953657 - RNA, 17 nt, Human
gucaccccggccaccug

SEQ ID NO: 2953658 - RNA, 19 nt, Human
gucacucuggcagcucaga

SEQ ID NO: 2953659 - RNA, 17 nt, Human
gucacucuggcagcuca

SEQ ID NO: 2953660 - RNA, 16 nt, Human
gucacucuggcagcuc

SEQ ID NO: 2953661 - RNA, 14 nt, Human
gucacucuggcagc

SEQ ID NO: 2953662 - RNA, 13 nt, Human
gucacucuggcag

SEQ ID NO: 2953663 - RNA, 12 nt, Human
gucacucuggca

SEQ ID NO: 2953664 - RNA, 14 nt, Human
gucagagccugcag

SEQ ID NO: 2953665 - RNA, 15 nt, Human
gucagagccugcagu

SEQ ID NO: 2953666 - RNA, 16 nt, Human
gucagagccugcaguu

SEQ ID NO: 2953667 - RNA, 19 nt, Human
gucagcuccccucggagaa

SEQ ID NO: 2953668 - RNA, 13 nt, Human
guauuuugaaauu

SEQ ID NO: 2953669 - RNA, 22 nt, Human
guauuuucuccaaauguucacu

SEQ ID NO: 2953670 - RNA, 14 nt, Human
guauuuuacuaaua

SEQ ID NO: 2953671 - RNA, 18 nt, Human
guauuuuaaaagaaugau

SEQ ID NO: 2953672 - RNA, 13 nt, Human
guauuuuaaucac

SEQ ID NO: 2953673 - RNA, 20 nt, Human
guauuuuaaaagaaugauua

SEQ ID NO: 2953674 - RNA, 15 nt, Human
gucaccccggccacc

SEQ ID NO: 2953675 - RNA, 15 nt, Human
gucaaugcagccccc

SEQ ID NO: 2953676 - RNA, 20 nt, Human
gucaaggcuuagacccucau

SEQ ID NO: 2953677 - RNA, 18 nt, Human
gucaaggcuuagacccuc

SEQ ID NO: 2953678 - RNA, 16 nt, Human
gucaaggcuuagaccc

SEQ ID NO: 2953679 - RNA, 19 nt, Human
guauuuuguuuuugucuua

SEQ ID NO: 2953680 - RNA, 23 nt, Human
gucaauaaaauccauacauuugu

SEQ ID NO: 2953681 - RNA, 22 nt, Human
gucaauaaaauccauacauuug

SEQ ID NO: 2953682 - RNA, 15 nt, Human
gucaagugaaaaagg

SEQ ID NO: 2953683 - RNA, 19 nt, Human
guaucuggugacuuuccuc

SEQ ID NO: 2953684 - RNA, 12 nt, Human
guaucuggugac

SEQ ID NO: 2953685 - RNA, 12 nt, Human
guaucugagcag

SEQ ID NO: 2953686 - RNA, 13 nt, Human
guaugaggcauuu

SEQ ID NO: 2953687 - RNA, 15 nt, Human
guaugaggcauuugu

SEQ ID NO: 2953688 - RNA, 20 nt, Human
guauguuuuauauagcaaga

SEQ ID NO: 2953689 - RNA, 20 nt, Human
guaugaucacggcucacugc

SEQ ID NO: 2953690 - RNA, 17 nt, Human
guaugaggcauuuguuu

SEQ ID NO: 2953691 - RNA, 20 nt, Human
guaugaggcauuuguuugaa

SEQ ID NO: 2953692 - RNA, 21 nt, Human
guaugaucacggcucacugca

SEQ ID NO: 2953693 - RNA, 17 nt, Human
guauguuagugcaaauu

SEQ ID NO: 2953694 - RNA, 23 nt, Human
guauauguagauguaugcacaca

SEQ ID NO: 2953695 - RNA, 22 nt, Human
guauaugucaagccauaauugu

SEQ ID NO: 2953696 - RNA, 16 nt, Human
guauagauguugcuaa

SEQ ID NO: 2953697 - RNA, 15 nt, Human
guauagauguugcua

SEQ ID NO: 2953698 - RNA, 14 nt, Human
guauagaaaaucuu

SEQ ID NO: 2953699 - RNA, 15 nt, Human
guauagaauaggcac

SEQ ID NO: 2953700 - RNA, 21 nt, Human
guauagaauaggcacuuuaaa

SEQ ID NO: 2953701 - RNA, 21 nt, Human
guaggcuauuccugagagcug

SEQ ID NO: 2953702 - RNA, 16 nt, Human
guagggcgggaggaug

SEQ ID NO: 2953703 - RNA, 23 nt, Human
guagggcgggaggauguucuggg

SEQ ID NO: 2953704 - RNA, 21 nt, Human
guagggcgggaggauguucug

SEQ ID NO: 2953705 - RNA, 22 nt, Human
guagggcgggaggauguucugg

SEQ ID NO: 2953706 - RNA, 13 nt, Human
guagcauuuuaaa

SEQ ID NO: 2953707 - RNA, 15 nt, Human
guagcauuuuaaaca

SEQ ID NO: 2953708 - RNA, 21 nt, Human
guagcauuuguguugaagagg

SEQ ID NO: 2953709 - RNA, 16 nt, Human
guagcauccuggaaua

SEQ ID NO: 2953710 - RNA, 20 nt, Human
guagauguaugcacacacau

SEQ ID NO: 2953711 - RNA, 17 nt, Human
guagauguaugcacaca

SEQ ID NO: 2953712 - RNA, 18 nt, Human
gcuauaggugcuacaaaa

SEQ ID NO: 2953713 - RNA, 15 nt, Human
guagagugugccuga

SEQ ID NO: 2953714 - RNA, 16 nt, Human
guaggguuauaauaau

SEQ ID NO: 2953715 - RNA, 14 nt, Human
guagucaggugccu

SEQ ID NO: 2953716 - RNA, 13 nt, Human
guagugagccgag

SEQ ID NO: 2953717 - RNA, 14 nt, Human
guaguguuggagaa

SEQ ID NO: 2953718 - RNA, 15 nt, Human
guaguguuggagaag

SEQ ID NO: 2953719 - RNA, 13 nt, Human
gugaacacaucag

SEQ ID NO: 2953720 - RNA, 21 nt, Human
gugaacaaauuuacagagaca

SEQ ID NO: 2953721 - RNA, 21 nt, Human
gugaaugaugauccuaggcau

SEQ ID NO: 2953722 - RNA, 20 nt, Human
gugacaaggauugcuacugu

SEQ ID NO: 2953723 - RNA, 16 nt, Human
gugacaagcucacaga

SEQ ID NO: 2953724 - RNA, 15 nt, Human
gugaccucugccuga

SEQ ID NO: 2953725 - RNA, 12 nt, Human
gugaccucugcc

SEQ ID NO: 2953726 - RNA, 15 nt, Human
gugacagaggcagcc

SEQ ID NO: 2953727 - RNA, 13 nt, Human
gugaccucugccu

SEQ ID NO: 2953728 - RNA, 14 nt, Human
gugaccucugccug

SEQ ID NO: 2953729 - RNA, 12 nt, Human
gugacagaggca

SEQ ID NO: 2953730 - RNA, 13 nt, Human
gugacagaggcag

SEQ ID NO: 2953731 - RNA, 14 nt, Human
gugacagaggcagc

SEQ ID NO: 2953732 - RNA, 14 nt, Human
gugagccacugcac

SEQ ID NO: 2953733 - RNA, 15 nt, Human
gugagccacugcacc

SEQ ID NO: 2953734 - RNA, 20 nt, Human
gugagccacugcaccgggcc

SEQ ID NO: 2953735 - RNA, 17 nt, Human
gugaggaugaaaaaaua

SEQ ID NO: 2953736 - RNA, 19 nt, Human
gugagccgagaucacgcca

SEQ ID NO: 2953737 - RNA, 17 nt, Human
gugauacaaugcugugc

SEQ ID NO: 2953738 - RNA, 15 nt, Human
gugauacaaugcugu

SEQ ID NO: 2953739 - RNA, 17 nt, Human
gugaguugauagcacag

SEQ ID NO: 2953740 - RNA, 22 nt, Human
gugauccacccaccucagccuc

SEQ ID NO: 2953741 - RNA, 22 nt, Human
gugcacuaauguguaagacaaa

SEQ ID NO: 2953742 - RNA, 23 nt, Human
gugauccacccaccucagccucc

SEQ ID NO: 2953743 - RNA, 24 nt, Human
gugauccacccaccucagccuccc

SEQ ID NO: 2953744 - RNA, 13 nt, Human
gugauuuuuguaa

SEQ ID NO: 2953745 - RNA, 18 nt, Human
gugauuuuuguaauuuuu

SEQ ID NO: 2953746 - RNA, 22 nt, Human
gugcauaccacuuuuguucuug

SEQ ID NO: 2953747 - RNA, 20 nt, Human
gugcaguggugcgaucuggg

SEQ ID NO: 2953748 - RNA, 23 nt, Human
gugcaguggugcgaucuggguuc

SEQ ID NO: 2953749 - RNA, 21 nt, Human
gugcgaucuggguucacugca

SEQ ID NO: 2953750 - RNA, 14 nt, Human
gugccaugugccag

SEQ ID NO: 2953751 - RNA, 16 nt, Human
gugccaugugccaggu

SEQ ID NO: 2953752 - RNA, 13 nt, Human
gugcguccugucg

SEQ ID NO: 2953753 - RNA, 13 nt, Human
gugcgggguacac

SEQ ID NO: 2953754 - RNA, 14 nt, Human
gugcggccuuuggc

SEQ ID NO: 2953755 - RNA, 14 nt, Human
gugcgccuacagga

SEQ ID NO: 2953756 - RNA, 15 nt, Human
gucucacucugucgc

SEQ ID NO: 2953757 - RNA, 16 nt, Human
gucucacucugucgcc

SEQ ID NO: 2953758 - RNA, 18 nt, Human
gucucacucugucgccca

SEQ ID NO: 2953759 - RNA, 19 nt, Human
gucucacucugucgcccag

SEQ ID NO: 2953760 - RNA, 22 nt, Human
gucucacucugucgcccagucu

SEQ ID NO: 2953761 - RNA, 13 nt, Human
gucugacuguuuc

SEQ ID NO: 2953762 - RNA, 15 nt, Human
gucccugccaaugga

SEQ ID NO: 2953763 - RNA, 14 nt, Human
gucccugccaaugg

SEQ ID NO: 2953764 - RNA, 11 nt, Human
gucccugccaa

SEQ ID NO: 2953765 - RNA, 19 nt, Human
guccuuaccagcagagcac

SEQ ID NO: 2953766 - RNA, 18 nt, Human
guccuuaccagcagagca

SEQ ID NO: 2953767 - RNA, 21 nt, Human
guccuuaccagcagagcaccu

SEQ ID NO: 2953768 - RNA, 15 nt, Human
gucggccccaccagu

SEQ ID NO: 2953769 - RNA, 16 nt, Human
gucggagcccugucuc

SEQ ID NO: 2953770 - RNA, 17 nt, Human
gucggccccaccagugc

SEQ ID NO: 2953771 - RNA, 19 nt, Human
gucggccccaccagugccu

SEQ ID NO: 2953772 - RNA, 22 nt, Human
gucggccccaccagugccucuc

SEQ ID NO: 2953773 - RNA, 12 nt, Human
gucggagcccug

SEQ ID NO: 2953774 - RNA, 21 nt, Human
gucggaaaacaugcuacacac

SEQ ID NO: 2953775 - RNA, 23 nt, Human
gucggguuuuauuguuuaaaauc

SEQ ID NO: 2953776 - RNA, 16 nt, Human
gucgggcaugacacga

SEQ ID NO: 2953777 - RNA, 18 nt, Human
gucucacuauguugccca

SEQ ID NO: 2953778 - RNA, 11 nt, Human
gucucacucug

SEQ ID NO: 2953779 - RNA, 19 nt, Human
gucucacuauguugcccag

SEQ ID NO: 2953780 - RNA, 18 nt, Human
gucgucaaagcugaaaug

SEQ ID NO: 2953781 - RNA, 21 nt, Human
gucuuaaaaaguggaaaaaua

SEQ ID NO: 2953782 - RNA, 20 nt, Human
gucuguuuuguguacuuuua

SEQ ID NO: 2953783 - RNA, 15 nt, Human
gucuguuuuguguac

SEQ ID NO: 2953784 - RNA, 16 nt, Human
gucuugaacuccuggc

SEQ ID NO: 2953785 - RNA, 17 nt, Human
gucuugaacuccuggcc

SEQ ID NO: 2953786 - RNA, 21 nt, Human
gucuugaacuccuggccucaa

SEQ ID NO: 2953787 - RNA, 18 nt, Human
gucuugaacuccuggccu

SEQ ID NO: 2953788 - RNA, 20 nt, Human
gucuugaacuccuggccuca

SEQ ID NO: 2953789 - RNA, 16 nt, Human
gucuugcaauggcagc

SEQ ID NO: 2953790 - RNA, 17 nt, Human
gucuugcaauggcagcc

SEQ ID NO: 2953791 - RNA, 18 nt, Human
gucuugcaauggcagccu

SEQ ID NO: 2953792 - RNA, 19 nt, Human
gucuugcaauggcagccuu

SEQ ID NO: 2953793 - RNA, 16 nt, Human
gucuuuuuucacuaca

SEQ ID NO: 2953794 - RNA, 23 nt, Human
gucuugcaauggcagccuuggca

SEQ ID NO: 2953795 - RNA, 20 nt, Human
gucuugcaauggcagccuug

SEQ ID NO: 2953796 - RNA, 21 nt, Human
gucuugcaauggcagccuugg

SEQ ID NO: 2953797 - RNA, 14 nt, Human
gucuguuuugugua

SEQ ID NO: 2953798 - RNA, 14 nt, Human
gucuguucuuucca

SEQ ID NO: 2953799 - RNA, 17 nt, Human
gucuguucuuuccaaag

SEQ ID NO: 2953800 - RNA, 17 nt, Human
gucugucuuuuaaacuc

SEQ ID NO: 2953801 - RNA, 18 nt, Human
gucugugccauuuuguau

SEQ ID NO: 2953802 - RNA, 22 nt, Human
gucugugagaugcuagaacucc

SEQ ID NO: 2953803 - RNA, 23 nt, Human
gucugugagaugcuagaacuccc

SEQ ID NO: 2953804 - RNA, 15 nt, Human
gucugugagaugcua

SEQ ID NO: 2953805 - RNA, 16 nt, Human
gucugugagaugcuag

SEQ ID NO: 2953806 - RNA, 17 nt, Human
gucugugagaugcuaga

SEQ ID NO: 2953807 - RNA, 21 nt, Human
gucugugagaugcuagaacuc

SEQ ID NO: 2953808 - RNA, 18 nt, Human
guugaagagguuuuaaag

SEQ ID NO: 2953809 - RNA, 16 nt, Human
guugaagacagagcua

SEQ ID NO: 2953810 - RNA, 12 nt, Human
guugaaacauau

SEQ ID NO: 2953811 - RNA, 21 nt, Human
guugauggugguauguuuuca

SEQ ID NO: 2953812 - RNA, 20 nt, Human
guugauggugguauguuuuc

SEQ ID NO: 2953813 - RNA, 15 nt, Human
guugcaggaccucag

SEQ ID NO: 2953814 - RNA, 14 nt, Human
guugccagucaccc

SEQ ID NO: 2953815 - RNA, 13 nt, Human
guugccagucacc

SEQ ID NO: 2953816 - RNA, 23 nt, Human
guugccagucaccccggccaccu

SEQ ID NO: 2953817 - RNA, 18 nt, Human
guugccagucaccccggc

SEQ ID NO: 2953818 - RNA, 17 nt, Human
guugccagucaccccgg

SEQ ID NO: 2953819 - RNA, 16 nt, Human
guugccagucaccccg

SEQ ID NO: 2953820 - RNA, 12 nt, Human
guugcccaggca

SEQ ID NO: 2953821 - RNA, 14 nt, Human
guugcccaggcagg

SEQ ID NO: 2953822 - RNA, 17 nt, Human
guuggccaggcuggucu

SEQ ID NO: 2953823 - RNA, 19 nt, Human
guuggccaggcuggucuca

SEQ ID NO: 2953824 - RNA, 14 nt, Human
guuggccaguguga

SEQ ID NO: 2953825 - RNA, 15 nt, Human
guuggccaggcuggu

SEQ ID NO: 2953826 - RNA, 14 nt, Human
guuggccaggcugg

SEQ ID NO: 2953827 - RNA, 13 nt, Human
guuggccaggcug

SEQ ID NO: 2953828 - RNA, 18 nt, Human
guuggcaaaaaggcagga

SEQ ID NO: 2953829 - RNA, 14 nt, Human
guuggcaaaaaggc

SEQ ID NO: 2953830 - RNA, 23 nt, Human
guuggccaaagccaaagcuaggc

SEQ ID NO: 2953831 - RNA, 12 nt, Human
guucuggcucuu

SEQ ID NO: 2953832 - RNA, 20 nt, Human
guucuggcucuuccaggcug

SEQ ID NO: 2953833 - RNA, 16 nt, Human
guucuggcucuuccag

SEQ ID NO: 2953834 - RNA, 23 nt, Human
guucuggcagaguugaagacaga

SEQ ID NO: 2953835 - RNA, 11 nt, Human
guucugggaca

SEQ ID NO: 2953836 - RNA, 12 nt, Human
guucugggacac

SEQ ID NO: 2953837 - RNA, 14 nt, Human
guucugggacacag

SEQ ID NO: 2953838 - RNA, 15 nt, Human
guucugggacacagu

SEQ ID NO: 2953839 - RNA, 16 nt, Human
guucugggacacaguu

SEQ ID NO: 2953840 - RNA, 18 nt, Human
guucuuucacccuuuucu

SEQ ID NO: 2953841 - RNA, 13 nt, Human
guucuuuccaaag

SEQ ID NO: 2953842 - RNA, 14 nt, Human
guucuuuccaaagu

SEQ ID NO: 2953843 - RNA, 18 nt, Human
guucuuuccaaaguacac

SEQ ID NO: 2953844 - RNA, 20 nt, Human
guucuuuccaaaguacacug

SEQ ID NO: 2953845 - RNA, 17 nt, Human
guugaaaaacagcugag

SEQ ID NO: 2953846 - RNA, 23 nt, Human
guugaaaagacuccaaagaaaug

SEQ ID NO: 2953847 - RNA, 22 nt, Human
guugaaaagacuccaaagaaau

SEQ ID NO: 2953848 - RNA, 17 nt, Human
guugaaaagacuccaaa

SEQ ID NO: 2953849 - RNA, 19 nt, Human
guucugauccuaguuccac

SEQ ID NO: 2953850 - RNA, 12 nt, Human
guucugaagaag

SEQ ID NO: 2953851 - RNA, 13 nt, Human
guucugaagaaga

SEQ ID NO: 2953852 - RNA, 20 nt, Human
guucugaaaugucaguucug

SEQ ID NO: 2953853 - RNA, 14 nt, Human
guucugaagaagau

SEQ ID NO: 2953854 - RNA, 15 nt, Human
guucugaagaagaug

SEQ ID NO: 2953855 - RNA, 15 nt, Human
guuacucagaauucu

SEQ ID NO: 2953856 - RNA, 22 nt, Human
guuacuaaguuuuuauggcuuu

SEQ ID NO: 2953857 - RNA, 14 nt, Human
guuauaacuuaaug

SEQ ID NO: 2953858 - RNA, 17 nt, Human
guuauaacuuaaugaaa

SEQ ID NO: 2953859 - RNA, 21 nt, Human
guuauaacuuaaugaaaacaa

SEQ ID NO: 2953860 - RNA, 24 nt, Human
guuaguucaaucuggauucauauu

SEQ ID NO: 2953861 - RNA, 22 nt, Human
guuaguuucuccaagcaggaca

SEQ ID NO: 2953862 - RNA, 19 nt, Human
guuaguuucuccaagcagg

SEQ ID NO: 2953863 - RNA, 16 nt, Human
guuaguuucuccaagc

SEQ ID NO: 2953864 - RNA, 17 nt, Human
guuacagacaaagcgug

SEQ ID NO: 2953865 - RNA, 15 nt, Human
guuacagacaaagcg

SEQ ID NO: 2953866 - RNA, 18 nt, Human
guuacauaagauaaaugu

SEQ ID NO: 2953867 - RNA, 19 nt, Human
guuacauaagauaaaugug

SEQ ID NO: 2953868 - RNA, 21 nt, Human
guuacauuuuuaagugcugca

SEQ ID NO: 2953869 - RNA, 23 nt, Human
guuaccauuuugggguacccacu

SEQ ID NO: 2953870 - RNA, 16 nt, Human
guuacccaaauuaaga

SEQ ID NO: 2953871 - RNA, 23 nt, Human
guuaccucugccucagaaaacaa

SEQ ID NO: 2953872 - RNA, 19 nt, Human
guucaagcgauucuucugc

SEQ ID NO: 2953873 - RNA, 19 nt, Human
guuauuaaaaaucucaaau

SEQ ID NO: 2953874 - RNA, 20 nt, Human
guucaagcgauucuucugcu

SEQ ID NO: 2953875 - RNA, 23 nt, Human
guucaauucucauuugucacaca

SEQ ID NO: 2953876 - RNA, 16 nt, Human
guucaauucucauuug

SEQ ID NO: 2953877 - RNA, 23 nt, Human
guucaaucuggauucauauuuaa

SEQ ID NO: 2953878 - RNA, 21 nt, Human
guuaugacuccagaauuuccc

SEQ ID NO: 2953879 - RNA, 20 nt, Human
guuccaccaucaagccacca

SEQ ID NO: 2953880 - RNA, 17 nt, Human
guuccaccaucaagcca

SEQ ID NO: 2953881 - RNA, 14 nt, Human
guuccuaauccucu

SEQ ID NO: 2953882 - RNA, 22 nt, Human
guuccucauuagcauuuugcua

SEQ ID NO: 2953883 - RNA, 12 nt, Human
guucaugaaaga

SEQ ID NO: 2953884 - RNA, 18 nt, Human
guucaucuugaauuguaa

SEQ ID NO: 2953885 - RNA, 13 nt, Human
guucaucuugaau

SEQ ID NO: 2953886 - RNA, 12 nt, Human
guucaucuugaa

SEQ ID NO: 2953887 - RNA, 16 nt, Human
guucaucaaugaauga

SEQ ID NO: 2953888 - RNA, 17 nt, Human
guucaucauccuaagcu

SEQ ID NO: 2953889 - RNA, 19 nt, Human
guucacugcaaccuccgcc

SEQ ID NO: 2953890 - RNA, 23 nt, Human
guucagagcugcccucuccuggg

SEQ ID NO: 2953891 - RNA, 20 nt, Human
guucagagcugcccucuccu

SEQ ID NO: 2953892 - RNA, 22 nt, Human
guucagagcugcccucuccugg

SEQ ID NO: 2953893 - RNA, 15 nt, Human
guucagagcugcccu

SEQ ID NO: 2953894 - RNA, 16 nt, Human
guucagagcugcccuc

SEQ ID NO: 2953895 - RNA, 17 nt, Human
guucagagcugcccucu

SEQ ID NO: 2953896 - RNA, 19 nt, Human
guucagagcugcccucucc

SEQ ID NO: 2953897 - RNA, 24 nt, Human
guucacuggacacuucacgcccuu

SEQ ID NO: 2953898 - RNA, 13 nt, Human
guucagagcugcc

SEQ ID NO: 2953899 - RNA, 14 nt, Human
guucagagcugccc

SEQ ID NO: 2953900 - RNA, 18 nt, Human
guguuaugacuccagaau

SEQ ID NO: 2953901 - RNA, 14 nt, Human
guguuacuaaguuu

SEQ ID NO: 2953902 - RNA, 12 nt, Human
guguuacuaagu

SEQ ID NO: 2953903 - RNA, 15 nt, Human
guuacacuaaaaggu

SEQ ID NO: 2953904 - RNA, 16 nt, Human
guuacacuaaaaggug

SEQ ID NO: 2953905 - RNA, 13 nt, Human
guuacagacaaag

SEQ ID NO: 2953906 - RNA, 20 nt, Human
guuaaaagaugaaaauauuu

SEQ ID NO: 2953907 - RNA, 22 nt, Human
guuaaaauaccagccaguaaau

SEQ ID NO: 2953908 - RNA, 14 nt, Human
guuaaaaagaaaag

SEQ ID NO: 2953909 - RNA, 22 nt, Human
guuaaaaagaaaaguuuauaaa

SEQ ID NO: 2953910 - RNA, 16 nt, Human
guuaaaagaugaaaau

SEQ ID NO: 2953911 - RNA, 14 nt, Human
guuaaaagaugaaa

SEQ ID NO: 2953912 - RNA, 21 nt, Human
guguggagaagcggcuggcag

SEQ ID NO: 2953913 - RNA, 13 nt, Human
guguggagaagcg

SEQ ID NO: 2953914 - RNA, 12 nt, Human
gugugcucugau

SEQ ID NO: 2953915 - RNA, 15 nt, Human
gugugcucugaucau

SEQ ID NO: 2953916 - RNA, 22 nt, Human
gugugcucugaucauccacugu

SEQ ID NO: 2953917 - RNA, 16 nt, Human
gugugcguccugucgg

SEQ ID NO: 2953918 - RNA, 14 nt, Human
gugugcguccuguc

SEQ ID NO: 2953919 - RNA, 20 nt, Human
gugugagucaccaagcccag

SEQ ID NO: 2953920 - RNA, 22 nt, Human
gugucucuugguccugcugcag

SEQ ID NO: 2953921 - RNA, 21 nt, Human
gugucucuugguccugcugca

SEQ ID NO: 2953922 - RNA, 20 nt, Human
gugucucuugguccugcugc

SEQ ID NO: 2953923 - RNA, 19 nt, Human
gugucucuugguccugcug

SEQ ID NO: 2953924 - RNA, 18 nt, Human
gugucucuugguccugcu

SEQ ID NO: 2953925 - RNA, 17 nt, Human
gugucucccuucauccu

SEQ ID NO: 2953926 - RNA, 14 nt, Human
gugucucuuggucc

SEQ ID NO: 2953927 - RNA, 23 nt, Human
gugucccugcacuugcagacucu

SEQ ID NO: 2953928 - RNA, 14 nt, Human
guguccggucccug

SEQ ID NO: 2953929 - RNA, 15 nt, Human
gugucgggcaugaca

SEQ ID NO: 2953930 - RNA, 21 nt, Human
guguaaguagauaggccaugg

SEQ ID NO: 2953931 - RNA, 21 nt, Human
guguaaguauucuuauuuaau

SEQ ID NO: 2953932 - RNA, 17 nt, Human
guguaagacaaaaagcu

SEQ ID NO: 2953933 - RNA, 19 nt, Human
guggugcgaucuggguuca

SEQ ID NO: 2953934 - RNA, 14 nt, Human
guggugaccucugc

SEQ ID NO: 2953935 - RNA, 17 nt, Human
guggugaccucugccug

SEQ ID NO: 2953936 - RNA, 21 nt, Human
guggugagaggcauccaguau

SEQ ID NO: 2953937 - RNA, 18 nt, Human
gugguccuaaucuucuga

SEQ ID NO: 2953938 - RNA, 17 nt, Human
guggucccaccccacac

SEQ ID NO: 2953939 - RNA, 16 nt, Human
guggucccaccccaca

SEQ ID NO: 2953940 - RNA, 15 nt, Human
guggucccaccccac

SEQ ID NO: 2953941 - RNA, 14 nt, Human
guggucccacccca

SEQ ID NO: 2953942 - RNA, 17 nt, Human
gugguagagugugccug

SEQ ID NO: 2953943 - RNA, 19 nt, Human
gugguaugaucacggcuca

SEQ ID NO: 2953944 - RNA, 13 nt, Human
gugucccugcacu

SEQ ID NO: 2953945 - RNA, 16 nt, Human
gugucccugcacuugc

SEQ ID NO: 2953946 - RNA, 18 nt, Human
gugucccugcacuugcag

SEQ ID NO: 2953947 - RNA, 22 nt, Human
guguacauggaauaacauguaa

SEQ ID NO: 2953948 - RNA, 17 nt, Human
guguacauggaauaaca

SEQ ID NO: 2953949 - RNA, 18 nt, Human
guggggaccucaggccug

SEQ ID NO: 2953950 - RNA, 15 nt, Human
guggggaccucaggc

SEQ ID NO: 2953951 - RNA, 23 nt, Human
guggguuucuaaagcugccagcc

SEQ ID NO: 2953952 - RNA, 13 nt, Human
guggggcagcuug

SEQ ID NO: 2953953 - RNA, 17 nt, Human
guggggcagcuugaggg

SEQ ID NO: 2953954 - RNA, 23 nt, Human
guggggcagugcuuggcccagga

SEQ ID NO: 2953955 - RNA, 14 nt, Human
guggggcagugcuu

SEQ ID NO: 2953956 - RNA, 15 nt, Human
gugggcuaguugggc

SEQ ID NO: 2953957 - RNA, 17 nt, Human
gugggcccaaugcacuu

SEQ ID NO: 2953958 - RNA, 15 nt, Human
gugggcauucaaaug

SEQ ID NO: 2953959 - RNA, 19 nt, Human
guggcuggguuggagggug

SEQ ID NO: 2953960 - RNA, 23 nt, Human
guggcugcuucaaggauccugag

SEQ ID NO: 2953961 - RNA, 22 nt, Human
guggcugcuucaaggauccuga

SEQ ID NO: 2953962 - RNA, 19 nt, Human
guggcugcuucaaggaucc

SEQ ID NO: 2953963 - RNA, 16 nt, Human
guggcugcuucaagga

SEQ ID NO: 2953964 - RNA, 15 nt, Human
guggcugcuucaagg

SEQ ID NO: 2953965 - RNA, 22 nt, Human
guggcuuaaaacaacacucaca

SEQ ID NO: 2953966 - RNA, 14 nt, Human
guggcugcuucaag

SEQ ID NO: 2953967 - RNA, 12 nt, Human
guggcugcuuca

SEQ ID NO: 2953968 - RNA, 20 nt, Human
gugcuacaaaaacacagcaa

SEQ ID NO: 2953969 - RNA, 15 nt, Human
gugcuacaaaaacac

SEQ ID NO: 2953970 - RNA, 14 nt, Human
guggcucacgccug

SEQ ID NO: 2953971 - RNA, 17 nt, Human
guuuagaaagcuugccc

SEQ ID NO: 2953972 - RNA, 14 nt, Human
guuuagauaauaca

SEQ ID NO: 2953973 - RNA, 15 nt, Human
guuuagauaauacac

SEQ ID NO: 2953974 - RNA, 19 nt, Human
guuguucugaaaugucagu

SEQ ID NO: 2953975 - RNA, 14 nt, Human
guuguuacauuuuu

SEQ ID NO: 2953976 - RNA, 15 nt, Human
guuguuacauuuuua

SEQ ID NO: 2953977 - RNA, 20 nt, Human
guuuauauaagcuuguauuc

SEQ ID NO: 2953978 - RNA, 20 nt, Human
guuuagcuggaaaaguaugu

SEQ ID NO: 2953979 - RNA, 21 nt, Human
guuuagcuggaaaaguauguu

SEQ ID NO: 2953980 - RNA, 19 nt, Human
guugucugcaacucugaag

SEQ ID NO: 2953981 - RNA, 14 nt, Human
guugugguuaaucu

SEQ ID NO: 2953982 - RNA, 22 nt, Human
guuguggauuuaacagaaaugu

SEQ ID NO: 2953983 - RNA, 12 nt, Human
guugucagcuga

SEQ ID NO: 2953984 - RNA, 19 nt, Human
guuggcugggggccucagu

SEQ ID NO: 2953985 - RNA, 20 nt, Human
guuggccccugcccggcugc

SEQ ID NO: 2953986 - RNA, 13 nt, Human
guuggccccugcc

SEQ ID NO: 2953987 - RNA, 14 nt, Human
guuggccccugccc

SEQ ID NO: 2953988 - RNA, 12 nt, Human
guuggcuggggg

SEQ ID NO: 2953989 - RNA, 16 nt, Human
guuugacggcaagguu

SEQ ID NO: 2953990 - RNA, 17 nt, Human
guuugagaucagccugg

SEQ ID NO: 2953991 - RNA, 23 nt, Human
guuugauuaaauucuugcaaagu

SEQ ID NO: 2953992 - RNA, 20 nt, Human
guuuguaaauuaacuuuuau

SEQ ID NO: 2953993 - RNA, 18 nt, Human
guuuggggaugagaaagg

SEQ ID NO: 2953994 - RNA, 21 nt, Human
guuugauucagacagcugccu

SEQ ID NO: 2953995 - RNA, 20 nt, Human
guuugauucagacagcugcc

SEQ ID NO: 2953996 - RNA, 16 nt, Human
guuugauucagacagc

SEQ ID NO: 2953997 - RNA, 18 nt, Human
guuuguuucugaaaggga

SEQ ID NO: 2953998 - RNA, 20 nt, Human
guuuucaauuuuaaacauau

SEQ ID NO: 2953999 - RNA, 18 nt, Human
guuuucaauuuuaaacau

SEQ ID NO: 2954000 - RNA, 11 nt, Human
guuuucacucu

SEQ ID NO: 2954001 - RNA, 12 nt, Human
guuuucacucuu

SEQ ID NO: 2954002 - RNA, 17 nt, Human
guuuucaaaauaaaaau

SEQ ID NO: 2954003 - RNA, 20 nt, Human
guuuguuucugaaagggacg

SEQ ID NO: 2954004 - RNA, 13 nt, Human
guuuuccugaaga

SEQ ID NO: 2954005 - RNA, 20 nt, Human
guuuuccaugaguccccugu

SEQ ID NO: 2954006 - RNA, 19 nt, Human
guuuuccaugaguccccug

SEQ ID NO: 2954007 - RNA, 20 nt, Human
guuuuccagguuuaagcugu

SEQ ID NO: 2954008 - RNA, 21 nt, Human
uaaaagguaugcaaucaaauc

SEQ ID NO: 2954009 - RNA, 21 nt, Human
uaaaaggaagcuuacaugccu

SEQ ID NO: 2954010 - RNA, 12 nt, Human
uaaaaggagcca

SEQ ID NO: 2954011 - RNA, 18 nt, Human
uaaaaggaagcuuacaug

SEQ ID NO: 2954012 - RNA, 12 nt, Human
uaaaaggugacc

SEQ ID NO: 2954013 - RNA, 13 nt, Human
uaaaaucauuucu

SEQ ID NO: 2954014 - RNA, 10 nt, Human
uaaaaucauu

SEQ ID NO: 2954015 - RNA, 15 nt, Human
uaaaauccauacauu

SEQ ID NO: 2954016 - RNA, 17 nt, Human
uaaaauccauacauuug

SEQ ID NO: 2954017 - RNA, 22 nt, Human
uaaaaucauuucugcaucagcu

SEQ ID NO: 2954018 - RNA, 18 nt, Human
uaaaaucauuucugcauc

SEQ ID NO: 2954019 - RNA, 21 nt, Human
uaaaagauacaguuacucaga

SEQ ID NO: 2954020 - RNA, 14 nt, Human
uaaaagauacaguu

SEQ ID NO: 2954021 - RNA, 17 nt, Human
uaaaagauacaguuacu

SEQ ID NO: 2954022 - RNA, 20 nt, Human
uaaaagauacaguuacucag

SEQ ID NO: 2954023 - RNA, 17 nt, Human
uaaaacacaacaucuuu

SEQ ID NO: 2954024 - RNA, 23 nt, Human
uaaaacacaacaucuuuuucuac

SEQ ID NO: 2954025 - RNA, 22 nt, Human
uaaaacacaacaucuuuuucua

SEQ ID NO: 2954026 - RNA, 16 nt, Human
uaaaacaacagaugua

SEQ ID NO: 2954027 - RNA, 19 nt, Human
uaaaacaacagauguacga

SEQ ID NO: 2954028 - RNA, 15 nt, Human
uaaaacaacacucac

SEQ ID NO: 2954029 - RNA, 22 nt, Human
uaaaacaagcacuaaacaaaga

SEQ ID NO: 2954030 - RNA, 18 nt, Human
uaaaaacaacgaaagaag

SEQ ID NO: 2954031 - RNA, 19 nt, Human
uaaaaaugguuuaaauggu

SEQ ID NO: 2954032 - RNA, 15 nt, Human
uaaaaaugguuuaaa

SEQ ID NO: 2954033 - RNA, 18 nt, Human
uaaaaaugguuuaaaugg

SEQ ID NO: 2954034 - RNA, 17 nt, Human
uaaaggcuaccuuugua

SEQ ID NO: 2954035 - RNA, 14 nt, Human
uaaaguguuugaaa

SEQ ID NO: 2954036 - RNA, 20 nt, Human
uaaagccugaguuugcuuuc

SEQ ID NO: 2954037 - RNA, 15 nt, Human
uaaaggcuaccuuug

SEQ ID NO: 2954038 - RNA, 12 nt, Human
uaaagaaaacug

SEQ ID NO: 2954039 - RNA, 16 nt, Human
uaaagcagcguuucua

SEQ ID NO: 2954040 - RNA, 17 nt, Human
uaaagcagcguuucuau

SEQ ID NO: 2954041 - RNA, 19 nt, Human
uaaagcagcguuucuauga

SEQ ID NO: 2954042 - RNA, 20 nt, Human
uaaacaugcuguacauacuu

SEQ ID NO: 2954043 - RNA, 19 nt, Human
uaaacaugcuguacauacu

SEQ ID NO: 2954044 - RNA, 22 nt, Human
uaaacacauuaaagguacuuug

SEQ ID NO: 2954045 - RNA, 21 nt, Human
uaaacaagaccacguuucuaa

SEQ ID NO: 2954046 - RNA, 22 nt, Human
uaaacaagaccacguuucuaaa

SEQ ID NO: 2954047 - RNA, 20 nt, Human
uaaacaagaccacguuucua

SEQ ID NO: 2954048 - RNA, 19 nt, Human
uaaacaagaccacguuucu

SEQ ID NO: 2954049 - RNA, 23 nt, Human
uaaacaugcuguacauacuuuuu

SEQ ID NO: 2954050 - RNA, 21 nt, Human
uaaacaugcuguacauacuuu

SEQ ID NO: 2954051 - RNA, 22 nt, Human
uaaacaugcuguacauacuuuu

SEQ ID NO: 2954052 - RNA, 22 nt, Human
uaaacuugguuuuuaaaaaacu

SEQ ID NO: 2954053 - RNA, 16 nt, Human
uaaugguaguuuuaca

SEQ ID NO: 2954054 - RNA, 22 nt, Human
uaauguuucaaacauauauaac

SEQ ID NO: 2954055 - RNA, 20 nt, Human
uaauuaaguacuauguauca

SEQ ID NO: 2954056 - RNA, 14 nt, Human
uaauuaaguacuau

SEQ ID NO: 2954057 - RNA, 17 nt, Human
uaauuaaguacuaugua

SEQ ID NO: 2954058 - RNA, 19 nt, Human
uaaugcuugcugcugauuu

SEQ ID NO: 2954059 - RNA, 15 nt, Human
uaauggggcggugag

SEQ ID NO: 2954060 - RNA, 23 nt, Human
uaaugcgugcauaccacuuuugu

SEQ ID NO: 2954061 - RNA, 19 nt, Human
uaaugcgugcauaccacuu

SEQ ID NO: 2954062 - RNA, 22 nt, Human
uaaugcgugcauaccacuuuug

SEQ ID NO: 2954063 - RNA, 15 nt, Human
uaaugcgugcauacc

SEQ ID NO: 2954064 - RNA, 17 nt, Human
uaaugauaacuggaaac

SEQ ID NO: 2954065 - RNA, 22 nt, Human
uaaugauaacuggaaacuucag

SEQ ID NO: 2954066 - RNA, 15 nt, Human
uaauaugaugacugu

SEQ ID NO: 2954067 - RNA, 15 nt, Human
uaauaugcaaagucu

SEQ ID NO: 2954068 - RNA, 16 nt, Human
uaauaugcaaagucua

SEQ ID NO: 2954069 - RNA, 15 nt, Human
uaauauggaucugua

SEQ ID NO: 2954070 - RNA, 19 nt, Human
uaauaugcacacauuuuuu

SEQ ID NO: 2954071 - RNA, 15 nt, Human
uaauaugcacacauu

SEQ ID NO: 2954072 - RNA, 16 nt, Human
uaauaugcacacauuu

SEQ ID NO: 2954073 - RNA, 17 nt, Human
uaauaugcacacauuuu

SEQ ID NO: 2954074 - RNA, 18 nt, Human
uaauaugcacacauuuuu

SEQ ID NO: 2954075 - RNA, 20 nt, Human
uaauauuaaggaagacaaug

SEQ ID NO: 2954076 - RNA, 20 nt, Human
uaauccucuaggaggucucu

SEQ ID NO: 2954077 - RNA, 12 nt, Human
uaaucuaaaugg

SEQ ID NO: 2954078 - RNA, 13 nt, Human
uaaucuaaaugga

SEQ ID NO: 2954079 - RNA, 16 nt, Human
uaaggauguucuagca

SEQ ID NO: 2954080 - RNA, 18 nt, Human
uaagcuacugccauccug

SEQ ID NO: 2954081 - RNA, 15 nt, Human
uaagcuacugccauc

SEQ ID NO: 2954082 - RNA, 16 nt, Human
uaagcuacugccaucc

SEQ ID NO: 2954083 - RNA, 14 nt, Human
uaagcuacugccau

SEQ ID NO: 2954084 - RNA, 12 nt, Human
uaagaggcaggg

SEQ ID NO: 2954085 - RNA, 15 nt, Human
uaagaggcagggucu

SEQ ID NO: 2954086 - RNA, 20 nt, Human
uaagguggguacgggagggu

SEQ ID NO: 2954087 - RNA, 15 nt, Human
uaaggugugcucuga

SEQ ID NO: 2954088 - RNA, 17 nt, Human
uaaggguaucuggugac

SEQ ID NO: 2954089 - RNA, 14 nt, Human
uaaguguauuuuga

SEQ ID NO: 2954090 - RNA, 15 nt, Human
uaagugcugcauuua

SEQ ID NO: 2954091 - RNA, 16 nt, Human
uaagugcugcauuuaa

SEQ ID NO: 2954092 - RNA, 18 nt, Human
uaagugcugcauuuaaaa

SEQ ID NO: 2954093 - RNA, 22 nt, Human
uaagugcugcauuuaaaagaua

SEQ ID NO: 2954094 - RNA, 13 nt, Human
uaauaaauauguu

SEQ ID NO: 2954095 - RNA, 20 nt, Human
uaauaaauauguuucacaca

SEQ ID NO: 2954096 - RNA, 23 nt, Human
uaagugaggaugaaaaaauaaca

SEQ ID NO: 2954097 - RNA, 12 nt, Human
uaagugagagag

SEQ ID NO: 2954098 - RNA, 14 nt, Human
uaagugcugcauuu

SEQ ID NO: 2954099 - RNA, 14 nt, Human
uaagucugauuuaa

SEQ ID NO: 2954100 - RNA, 13 nt, Human
uaagugaaauaag

SEQ ID NO: 2954101 - RNA, 16 nt, Human
uaaaugugccuucauu

SEQ ID NO: 2954102 - RNA, 11 nt, Human
uaaauuauuuu

SEQ ID NO: 2954103 - RNA, 22 nt, Human
uaaauucuugcaaaguaucccu

SEQ ID NO: 2954104 - RNA, 17 nt, Human
uaaauucuugcaaagua

SEQ ID NO: 2954105 - RNA, 18 nt, Human
uaaauucuugcaaaguau

SEQ ID NO: 2954106 - RNA, 16 nt, Human
uaaauucuugcaaagu

SEQ ID NO: 2954107 - RNA, 22 nt, Human
uaaauuuaguauuuuguuucag

SEQ ID NO: 2954108 - RNA, 13 nt, Human
uaaauucuuucau

SEQ ID NO: 2954109 - RNA, 20 nt, Human
uaaauugacacuuaaaaaug

SEQ ID NO: 2954110 - RNA, 18 nt, Human
uaacaccaugauuaacca

SEQ ID NO: 2954111 - RNA, 22 nt, Human
uaaaugucucuuuaaugucaca

SEQ ID NO: 2954112 - RNA, 20 nt, Human
uaaaugucuaguuguaacac

SEQ ID NO: 2954113 - RNA, 18 nt, Human
uaaaugggggugcauuug

SEQ ID NO: 2954114 - RNA, 19 nt, Human
uaaaugggggugcauuuga

SEQ ID NO: 2954115 - RNA, 20 nt, Human
uaaauggcuuccuggcaaua

SEQ ID NO: 2954116 - RNA, 14 nt, Human
uaaaugggggugca

SEQ ID NO: 2954117 - RNA, 17 nt, Human
uaaaugggggugcauuu

SEQ ID NO: 2954118 - RNA, 16 nt, Human
uaaauggaaccacucu

SEQ ID NO: 2954119 - RNA, 17 nt, Human
uaaaugcccagccccuu

SEQ ID NO: 2954120 - RNA, 16 nt, Human
uaaaugcccagccccu

SEQ ID NO: 2954121 - RNA, 15 nt, Human
uaaaugcccagcccc

SEQ ID NO: 2954122 - RNA, 14 nt, Human
uaaaugcccagccc

SEQ ID NO: 2954123 - RNA, 13 nt, Human
uaaaugcccagcc

SEQ ID NO: 2954124 - RNA, 18 nt, Human
uaacucaccuggcaucuu

SEQ ID NO: 2954125 - RNA, 11 nt, Human
uaacagaaaug

SEQ ID NO: 2954126 - RNA, 17 nt, Human
uaaccaggggccaugaa

SEQ ID NO: 2954127 - RNA, 23 nt, Human
uaaccaguguuguggauuuaaca

SEQ ID NO: 2954128 - RNA, 16 nt, Human
uaaccacuucagcuga

SEQ ID NO: 2954129 - RNA, 21 nt, Human
uaagaaaauaucacuugucaa

SEQ ID NO: 2954130 - RNA, 14 nt, Human
uaagagagaaugag

SEQ ID NO: 2954131 - RNA, 19 nt, Human
uaagaaccuuuugagugcc

SEQ ID NO: 2954132 - RNA, 13 nt, Human
uaagagagaauga

SEQ ID NO: 2954133 - RNA, 19 nt, Human
uaagaaaaaggaugcacag

SEQ ID NO: 2954134 - RNA, 23 nt, Human
uaagaaaaaggaugcacagaguu

SEQ ID NO: 2954135 - RNA, 15 nt, Human
uaacuuuuuauauuc

SEQ ID NO: 2954136 - RNA, 16 nt, Human
uaacuuuuuauauucu

SEQ ID NO: 2954137 - RNA, 13 nt, Human
uaacuuuuuauau

SEQ ID NO: 2954138 - RNA, 14 nt, Human
uaacuuuuuauauu

SEQ ID NO: 2954139 - RNA, 16 nt, Human
uaagaaaaaggaugca

SEQ ID NO: 2954140 - RNA, 18 nt, Human
uaagaaaaaggaugcaca

SEQ ID NO: 2954141 - RNA, 10 nt, Human
uaacuggaac

SEQ ID NO: 2954142 - RNA, 15 nt, Human
uaacuggaaacuuca

SEQ ID NO: 2954143 - RNA, 17 nt, Human
uaucaugacaaagacug

SEQ ID NO: 2954144 - RNA, 20 nt, Human
uaucaggugcugccauccag

SEQ ID NO: 2954145 - RNA, 19 nt, Human
uaucaggugcugccaucca

SEQ ID NO: 2954146 - RNA, 14 nt, Human
uaucaaaagaaaga

SEQ ID NO: 2954147 - RNA, 21 nt, Human
uauauuuuuuguuaaaugauu

SEQ ID NO: 2954148 - RNA, 16 nt, Human
uauauuuuuuucugaa

SEQ ID NO: 2954149 - RNA, 19 nt, Human
uauauuuuuuucugaaauu

SEQ ID NO: 2954150 - RNA, 20 nt, Human
uauauuuuuuucugaaauuu

SEQ ID NO: 2954151 - RNA, 20 nt, Human
uauauuugaaauauugacuu

SEQ ID NO: 2954152 - RNA, 14 nt, Human
uauaugcuucuguu

SEQ ID NO: 2954153 - RNA, 16 nt, Human
uauaugcuucuguuuu

SEQ ID NO: 2954154 - RNA, 12 nt, Human
uauagaaaaucu

SEQ ID NO: 2954155 - RNA, 15 nt, Human
uauagaaaaucuuca

SEQ ID NO: 2954156 - RNA, 20 nt, Human
uauagaauaggcacuuuaaa

SEQ ID NO: 2954157 - RNA, 23 nt, Human
uauagaauaggcacuuuaaaaca

SEQ ID NO: 2954158 - RNA, 13 nt, Human
uauauaacaaugc

SEQ ID NO: 2954159 - RNA, 17 nt, Human
uauauaacaaugcugua

SEQ ID NO: 2954160 - RNA, 19 nt, Human
uauauaacaaugcuguauu

SEQ ID NO: 2954161 - RNA, 22 nt, Human
uaguuguuugauucagacagcu

SEQ ID NO: 2954162 - RNA, 21 nt, Human
uaguuguuugauucagacagc

SEQ ID NO: 2954163 - RNA, 20 nt, Human
uaguuguuugauucagacag

SEQ ID NO: 2954164 - RNA, 20 nt, Human
uaguggcuuaaaacaacacu

SEQ ID NO: 2954165 - RNA, 16 nt, Human
uaguaugguggcuggg

SEQ ID NO: 2954166 - RNA, 15 nt, Human
uaguaugaggcauuu

SEQ ID NO: 2954167 - RNA, 17 nt, Human
uaguauuguccaggucu

SEQ ID NO: 2954168 - RNA, 15 nt, Human
uaguuugauuaaauu

SEQ ID NO: 2954169 - RNA, 16 nt, Human
uaguuugauuaaauuc

SEQ ID NO: 2954170 - RNA, 17 nt, Human
uauaaacuuuaccuuuu

SEQ ID NO: 2954171 - RNA, 15 nt, Human
uauaaacuuuaccuu

SEQ ID NO: 2954172 - RNA, 16 nt, Human
uauaaacuuuaccuuu

SEQ ID NO: 2954173 - RNA, 18 nt, Human
uauaaaccgaacugaugu

SEQ ID NO: 2954174 - RNA, 11 nt, Human
uauaaacuuua

SEQ ID NO: 2954175 - RNA, 13 nt, Human
uauaaacuuuacc

SEQ ID NO: 2954176 - RNA, 14 nt, Human
uauaaacuuuaccu

SEQ ID NO: 2954177 - RNA, 17 nt, Human
uaggugugggggaagca

SEQ ID NO: 2954178 - RNA, 13 nt, Human
uagguguggggga

SEQ ID NO: 2954179 - RNA, 19 nt, Human
uaggugugacugaauuucu

SEQ ID NO: 2954180 - RNA, 21 nt, Human
uaggugugacugaauuucuuu

SEQ ID NO: 2954181 - RNA, 23 nt, Human
uaggugugacugaauuucuuuug

SEQ ID NO: 2954182 - RNA, 22 nt, Human
uaguagagguacacuugugaau

SEQ ID NO: 2954183 - RNA, 20 nt, Human
uaguagagguacacuuguga

SEQ ID NO: 2954184 - RNA, 21 nt, Human
uaguagagguacacuugugaa

SEQ ID NO: 2954185 - RNA, 17 nt, Human
uaguaugaggcauuugu

SEQ ID NO: 2954186 - RNA, 18 nt, Human
uaguaugaggcauuuguu

SEQ ID NO: 2954187 - RNA, 22 nt, Human
uagcuggucuuauuuguaaagc

SEQ ID NO: 2954188 - RNA, 11 nt, Human
uaggugacaga

SEQ ID NO: 2954189 - RNA, 16 nt, Human
uaggugacagagugag

SEQ ID NO: 2954190 - RNA, 18 nt, Human
uaggugcuacaaaaacac

SEQ ID NO: 2954191 - RNA, 23 nt, Human
uaggugcuacaaaaacacagcaa

SEQ ID NO: 2954192 - RNA, 22 nt, Human
uaggugcuacaaaaacacagca

SEQ ID NO: 2954193 - RNA, 20 nt, Human
uaggugcuacaaaaacacag

SEQ ID NO: 2954194 - RNA, 18 nt, Human
uagcauccuggaauaucu

SEQ ID NO: 2954195 - RNA, 13 nt, Human
uagcauccuggaa

SEQ ID NO: 2954196 - RNA, 15 nt, Human
uagcauccuggaaua

SEQ ID NO: 2954197 - RNA, 16 nt, Human
uagcauccuggaauau

SEQ ID NO: 2954198 - RNA, 11 nt, Human
uagcagggaaa

SEQ ID NO: 2954199 - RNA, 16 nt, Human
uagcauacguacacau

SEQ ID NO: 2954200 - RNA, 17 nt, Human
uagcauacguacacauu

SEQ ID NO: 2954201 - RNA, 18 nt, Human
uagcauacguacacauuu

SEQ ID NO: 2954202 - RNA, 19 nt, Human
uagcauacguacacauuuu

SEQ ID NO: 2954203 - RNA, 16 nt, Human
uagauacuguaucaug

SEQ ID NO: 2954204 - RNA, 14 nt, Human
uagauaggccaugg

SEQ ID NO: 2954205 - RNA, 12 nt, Human
uagcugggacua

SEQ ID NO: 2954206 - RNA, 15 nt, Human
uagcugggacuacag

SEQ ID NO: 2954207 - RNA, 17 nt, Human
uagcugggacuacaggc

SEQ ID NO: 2954208 - RNA, 19 nt, Human
uagcugggacuacaggcac

SEQ ID NO: 2954209 - RNA, 18 nt, Human
uagccugugccucuggga

SEQ ID NO: 2954210 - RNA, 20 nt, Human
uagccugugccucugggacu

SEQ ID NO: 2954211 - RNA, 20 nt, Human
uagcucaggugucccugcac

SEQ ID NO: 2954212 - RNA, 21 nt, Human
uagcucaggugucccugcacu

SEQ ID NO: 2954213 - RNA, 12 nt, Human
uagcucauucuc

SEQ ID NO: 2954214 - RNA, 16 nt, Human
uagcaugaagacagag

SEQ ID NO: 2954215 - RNA, 22 nt, Human
uagccgggcgugguggcaggca

SEQ ID NO: 2954216 - RNA, 18 nt, Human
uagacccucaugcugcca

SEQ ID NO: 2954217 - RNA, 17 nt, Human
uagacccucaugcugcc

SEQ ID NO: 2954218 - RNA, 19 nt, Human
uagacccucaugcugccaa

SEQ ID NO: 2954219 - RNA, 23 nt, Human
uagacccucaugcugccaauauc

SEQ ID NO: 2954220 - RNA, 18 nt, Human
uagagugugauguaugug

SEQ ID NO: 2954221 - RNA, 12 nt, Human
uagagugggagc

SEQ ID NO: 2954222 - RNA, 14 nt, Human
uagaguugauacua

SEQ ID NO: 2954223 - RNA, 17 nt, Human
uagaguugauacuacag

SEQ ID NO: 2954224 - RNA, 14 nt, Human
uagagguucaaaga

SEQ ID NO: 2954225 - RNA, 15 nt, Human
uagagguucaaagau

SEQ ID NO: 2954226 - RNA, 12 nt, Human
uacuuuaaacua

SEQ ID NO: 2954227 - RNA, 20 nt, Human
uagaagucuuagauguauau

SEQ ID NO: 2954228 - RNA, 16 nt, Human
uagaauaggcacuuua

SEQ ID NO: 2954229 - RNA, 22 nt, Human
uagaauaggcacuuuaaaacac

SEQ ID NO: 2954230 - RNA, 22 nt, Human
uagaaguucuaguguuuucaau

SEQ ID NO: 2954231 - RNA, 20 nt, Human
uagaaguucuaguguuuuca

SEQ ID NO: 2954232 - RNA, 23 nt, Human
uagaauaccacaggaaccacaag

SEQ ID NO: 2954233 - RNA, 18 nt, Human
uagaauguuuucaaaugu

SEQ ID NO: 2954234 - RNA, 19 nt, Human
uagaauguuuucaaauguu

SEQ ID NO: 2954235 - RNA, 15 nt, Human
uagaauuaacacaug

SEQ ID NO: 2954236 - RNA, 16 nt, Human
uagaauuaacacauga

SEQ ID NO: 2954237 - RNA, 18 nt, Human
uagaauuaacacaugauc

SEQ ID NO: 2954238 - RNA, 23 nt, Human
uagaauuaguggcacuugcuuuu

SEQ ID NO: 2954239 - RNA, 14 nt, Human
uacaaaguagaagu

SEQ ID NO: 2954240 - RNA, 18 nt, Human
uacaaaguagaagucuua

SEQ ID NO: 2954241 - RNA, 18 nt, Human
uaauuuugugaagcaaaa

SEQ ID NO: 2954242 - RNA, 12 nt, Human
uaauuuuuauau

SEQ ID NO: 2954243 - RNA, 16 nt, Human
uaauuuuuauauuuga

SEQ ID NO: 2954244 - RNA, 18 nt, Human
uaauuccuguuuuuauua

SEQ ID NO: 2954245 - RNA, 13 nt, Human
uaauuuugugaag

SEQ ID NO: 2954246 - RNA, 11 nt, Human
uacacacacac

SEQ ID NO: 2954247 - RNA, 12 nt, Human
uacaaauguuuu

SEQ ID NO: 2954248 - RNA, 21 nt, Human
uacacugugcugagucugaag

SEQ ID NO: 2954249 - RNA, 14 nt, Human
uacacuccagugag

SEQ ID NO: 2954250 - RNA, 17 nt, Human
uacacacucaaaucaag

SEQ ID NO: 2954251 - RNA, 15 nt, Human
uacacacugcauguu

SEQ ID NO: 2954252 - RNA, 16 nt, Human
uacacacucaaaucaa

SEQ ID NO: 2954253 - RNA, 16 nt, Human
uacaugaaaacacauu

SEQ ID NO: 2954254 - RNA, 16 nt, Human
uacauaagauaaaugu

SEQ ID NO: 2954255 - RNA, 17 nt, Human
uacauaagauaaaugug

SEQ ID NO: 2954256 - RNA, 17 nt, Human
uacaugaaaacacauuu

SEQ ID NO: 2954257 - RNA, 18 nt, Human
uacaugaaaacacauuuu

SEQ ID NO: 2954258 - RNA, 19 nt, Human
uacaugaaaacacauuuuu

SEQ ID NO: 2954259 - RNA, 23 nt, Human
uacaugaaaacacauuuuucuua

SEQ ID NO: 2954260 - RNA, 16 nt, Human
uacauaaacaaguccu

SEQ ID NO: 2954261 - RNA, 19 nt, Human
uacaguuuguuaguaugag

SEQ ID NO: 2954262 - RNA, 21 nt, Human
uacaguuuguuaguaugaggc

SEQ ID NO: 2954263 - RNA, 16 nt, Human
uacaugccuaccaaua

SEQ ID NO: 2954264 - RNA, 19 nt, Human
uacaugccuaccaauauuu

SEQ ID NO: 2954265 - RNA, 21 nt, Human
uacauggcuggagcuagaauu

SEQ ID NO: 2954266 - RNA, 14 nt, Human
uacauuuuuaagug

SEQ ID NO: 2954267 - RNA, 19 nt, Human
uacauuuuuaagugcugca

SEQ ID NO: 2954268 - RNA, 22 nt, Human
uacauuuuuaagugcugcauuu

SEQ ID NO: 2954269 - RNA, 14 nt, Human
uacauggaauaaca

SEQ ID NO: 2954270 - RNA, 18 nt, Human
uacauggaauaacaugua

SEQ ID NO: 2954271 - RNA, 19 nt, Human
uacauggaauaacauguaa

SEQ ID NO: 2954272 - RNA, 22 nt, Human
uacauggaauaacauguaauua

SEQ ID NO: 2954273 - RNA, 20 nt, Human
uacacuguuucaaacuuuac

SEQ ID NO: 2954274 - RNA, 23 nt, Human
uacacugugcugagucugaaggc

SEQ ID NO: 2954275 - RNA, 22 nt, Human
uacacugugcugagucugaagg

SEQ ID NO: 2954276 - RNA, 22 nt, Human
uacacuguuucaaacuuuacua

SEQ ID NO: 2954277 - RNA, 16 nt, Human
uacacuuacacuuuau

SEQ ID NO: 2954278 - RNA, 20 nt, Human
uacagcuugaccgugaggcc

SEQ ID NO: 2954279 - RNA, 13 nt, Human
uacaggaaguacu

SEQ ID NO: 2954280 - RNA, 18 nt, Human
uacaggaagguagaaaua

SEQ ID NO: 2954281 - RNA, 18 nt, Human
uacaguuuguuaguauga

SEQ ID NO: 2954282 - RNA, 20 nt, Human
uacaguugaaaaacagcuga

SEQ ID NO: 2954283 - RNA, 14 nt, Human
uacaggacauauau

SEQ ID NO: 2954284 - RNA, 19 nt, Human
uacaguugaaaaacagcug

SEQ ID NO: 2954285 - RNA, 17 nt, Human
uacaguugaaaaacagc

SEQ ID NO: 2954286 - RNA, 15 nt, Human
uacaggagugagcac

SEQ ID NO: 2954287 - RNA, 22 nt, Human
uacaggaaguacuggagaaaau

SEQ ID NO: 2954288 - RNA, 15 nt, Human
uacaggaaguacugg

SEQ ID NO: 2954289 - RNA, 14 nt, Human
uacaggaaguacug

SEQ ID NO: 2954290 - RNA, 23 nt, Human
uacaguucggugagcuacaaaug

SEQ ID NO: 2954291 - RNA, 13 nt, Human
uacuacaguuugu

SEQ ID NO: 2954292 - RNA, 14 nt, Human
uacuacaguuuguu

SEQ ID NO: 2954293 - RNA, 22 nt, Human
uacuacaguccucccaucucac

SEQ ID NO: 2954294 - RNA, 18 nt, Human
uacucgaguuacagacaa

SEQ ID NO: 2954295 - RNA, 22 nt, Human
uacucgaguuacagacaaagcg

SEQ ID NO: 2954296 - RNA, 22 nt, Human
uacucgggaggcugaggcagga

SEQ ID NO: 2954297 - RNA, 15 nt, Human
uacucgggaggcuga

SEQ ID NO: 2954298 - RNA, 22 nt, Human
uacugccauccuggcccagggc

SEQ ID NO: 2954299 - RNA, 18 nt, Human
uacugccauccuggccca

SEQ ID NO: 2954300 - RNA, 19 nt, Human
uacugccauccuggcccag

SEQ ID NO: 2954301 - RNA, 15 nt, Human
uacugccauccuggc

SEQ ID NO: 2954302 - RNA, 12 nt, Human
uacuuaagacuu

SEQ ID NO: 2954303 - RNA, 14 nt, Human
uacuuaagacuuaa

SEQ ID NO: 2954304 - RNA, 13 nt, Human
uacuuguggacac

SEQ ID NO: 2954305 - RNA, 21 nt, Human
uacugucuucaguaagccgug

SEQ ID NO: 2954306 - RNA, 16 nt, Human
uacuguccuacccacc

SEQ ID NO: 2954307 - RNA, 23 nt, Human
uacugucagcuccccucggagaa

SEQ ID NO: 2954308 - RNA, 15 nt, Human
uaccuacauacaauu

SEQ ID NO: 2954309 - RNA, 16 nt, Human
uaccuaucaucuuaag

SEQ ID NO: 2954310 - RNA, 23 nt, Human
uacauuuuuaagugcugcauuua

SEQ ID NO: 2954311 - RNA, 15 nt, Human
uacccacugcucugg

SEQ ID NO: 2954312 - RNA, 22 nt, Human
uaccaaaaaucucaauauuuca

SEQ ID NO: 2954313 - RNA, 22 nt, Human
uaccuaacgaaguauccuucag

SEQ ID NO: 2954314 - RNA, 17 nt, Human
uaccuuuuuuauacaua

SEQ ID NO: 2954315 - RNA, 13 nt, Human
uaccuuuuuuaua

SEQ ID NO: 2954316 - RNA, 16 nt, Human
uaccuuuuuuauacau

SEQ ID NO: 2954317 - RNA, 23 nt, Human
uacgaaaaaaugguagcauuuua

SEQ ID NO: 2954318 - RNA, 21 nt, Human
uacgaaaagaggggaagagac

SEQ ID NO: 2954319 - RNA, 18 nt, Human
uacgaaaagaggggaaga

SEQ ID NO: 2954320 - RNA, 14 nt, Human
uacuaaggaaucuu

SEQ ID NO: 2954321 - RNA, 20 nt, Human
uacuaauagacaauuuauua

SEQ ID NO: 2954322 - RNA, 21 nt, Human
uacuaauagacaauuuauuau

SEQ ID NO: 2954323 - RNA, 17 nt, Human
uacuaacauuuauuuga

SEQ ID NO: 2954324 - RNA, 13 nt, Human
uacuaacuuuccu

SEQ ID NO: 2954325 - RNA, 18 nt, Human
uacuaacauuuauuugag

SEQ ID NO: 2954326 - RNA, 18 nt, Human
uaccucggugccuuccuc

SEQ ID NO: 2954327 - RNA, 21 nt, Human
uaccucuugagccuugaacuu

SEQ ID NO: 2954328 - RNA, 13 nt, Human
uaccuuuuuuaga

SEQ ID NO: 2954329 - RNA, 19 nt, Human
uaccuuuuuuagaguugau

SEQ ID NO: 2954330 - RNA, 22 nt, Human
uaccuuuuuuagaguugauacu

SEQ ID NO: 2954331 - RNA, 23 nt, Human
uaccuuuguucccaaauuucaua

SEQ ID NO: 2954332 - RNA, 13 nt, Human
ugacaacacucau

SEQ ID NO: 2954333 - RNA, 16 nt, Human
ugaauuuaaauagcuu

SEQ ID NO: 2954334 - RNA, 23 nt, Human
ugacaacacucauugaccugagg

SEQ ID NO: 2954335 - RNA, 21 nt, Human
ugaauuguaaggaaugauuaa

SEQ ID NO: 2954336 - RNA, 13 nt, Human
ugaauuguaagga

SEQ ID NO: 2954337 - RNA, 14 nt, Human
ugaauuaaguuuuu

SEQ ID NO: 2954338 - RNA, 13 nt, Human
ugaauuacauuug

SEQ ID NO: 2954339 - RNA, 15 nt, Human
ugacacacagcucug

SEQ ID NO: 2954340 - RNA, 14 nt, Human
ugacacacagcucu

SEQ ID NO: 2954341 - RNA, 14 nt, Human
ugacagacacaggc

SEQ ID NO: 2954342 - RNA, 16 nt, Human
ugacagacacaggccc

SEQ ID NO: 2954343 - RNA, 13 nt, Human
ugacagacacagg

SEQ ID NO: 2954344 - RNA, 23 nt, Human
ugacaaggauugcuacuguccua

SEQ ID NO: 2954345 - RNA, 23 nt, Human
ugacaucaacugcaucaagaugu

SEQ ID NO: 2954346 - RNA, 22 nt, Human
ugacagagcaagugagacccug

SEQ ID NO: 2954347 - RNA, 17 nt, Human
ugacagacacaggcccg

SEQ ID NO: 2954348 - RNA, 18 nt, Human
ugacagacacaggcccgg

SEQ ID NO: 2954349 - RNA, 15 nt, Human
ugaccaugaaagacu

SEQ ID NO: 2954350 - RNA, 16 nt, Human
ugaccacugcagaaga

SEQ ID NO: 2954351 - RNA, 17 nt, Human
ugaccacugcagaagac

SEQ ID NO: 2954352 - RNA, 20 nt, Human
ugaccagcaccaucucuccu

SEQ ID NO: 2954353 - RNA, 19 nt, Human
ugaagagguuuuaaagcuu

SEQ ID NO: 2954354 - RNA, 20 nt, Human
ugaagagguuuuaaagcuuc

SEQ ID NO: 2954355 - RNA, 21 nt, Human
ugaagagguuuuaaagcuucc

SEQ ID NO: 2954356 - RNA, 18 nt, Human
ugaaggccccgcccaggc

SEQ ID NO: 2954357 - RNA, 16 nt, Human
ugaaggcuggguucug

SEQ ID NO: 2954358 - RNA, 20 nt, Human
ugaaggccccgcccaggcuu

SEQ ID NO: 2954359 - RNA, 19 nt, Human
ugaaggccccgcccaggcu

SEQ ID NO: 2954360 - RNA, 21 nt, Human
ugaaacacugguuuuaaauau

SEQ ID NO: 2954361 - RNA, 22 nt, Human
ugaaacauaucucuuaucuuac

SEQ ID NO: 2954362 - RNA, 23 nt, Human
ugaacuggguacuuguggacaca

SEQ ID NO: 2954363 - RNA, 19 nt, Human
ugaagacucauucuucugu

SEQ ID NO: 2954364 - RNA, 20 nt, Human
ugaagacucauucuucugua

SEQ ID NO: 2954365 - RNA, 21 nt, Human
ugaaggcuggguucugauccu

SEQ ID NO: 2954366 - RNA, 20 nt, Human
ugaaggcuggguucugaucc

SEQ ID NO: 2954367 - RNA, 18 nt, Human
ugaaugcagguuuuauca

SEQ ID NO: 2954368 - RNA, 20 nt, Human
ugaaugcagguuuuaucaga

SEQ ID NO: 2954369 - RNA, 23 nt, Human
ugaaugaugauccuaggcauuug

SEQ ID NO: 2954370 - RNA, 15 nt, Human
ugaaugaauggcuaa

SEQ ID NO: 2954371 - RNA, 13 nt, Human
ugacucuuaagaa

SEQ ID NO: 2954372 - RNA, 14 nt, Human
ugacucuuaagaag

SEQ ID NO: 2954373 - RNA, 15 nt, Human
ugacucuuaagaaga

SEQ ID NO: 2954374 - RNA, 16 nt, Human
ugacucuuaagaagac

SEQ ID NO: 2954375 - RNA, 15 nt, Human
ugacucuucccucaa

SEQ ID NO: 2954376 - RNA, 14 nt, Human
ugaccauucuccac

SEQ ID NO: 2954377 - RNA, 13 nt, Human
ugaccauucucca

SEQ ID NO: 2954378 - RNA, 16 nt, Human
ugaccaugaaagacuu

SEQ ID NO: 2954379 - RNA, 21 nt, Human
ugacucuuucuauuguuucuu

SEQ ID NO: 2954380 - RNA, 16 nt, Human
ugacuuuccucuuugg

SEQ ID NO: 2954381 - RNA, 14 nt, Human
ugagaccaaccugg

SEQ ID NO: 2954382 - RNA, 18 nt, Human
ugagaggggaacagacug

SEQ ID NO: 2954383 - RNA, 14 nt, Human
ugagaggggaacag

SEQ ID NO: 2954384 - RNA, 15 nt, Human
ugagcaggauuuuaa

SEQ ID NO: 2954385 - RNA, 20 nt, Human
ugagcaggauuuuaaucuuu

SEQ ID NO: 2954386 - RNA, 22 nt, Human
ugacuuuucuguccgagcuuug

SEQ ID NO: 2954387 - RNA, 15 nt, Human
ugagaaauaaaguuu

SEQ ID NO: 2954388 - RNA, 15 nt, Human
ugagaaagacuauuc

SEQ ID NO: 2954389 - RNA, 20 nt, Human
ugagaaagacuauucaaaca

SEQ ID NO: 2954390 - RNA, 21 nt, Human
ugagaaacuggcaaagcagaa

SEQ ID NO: 2954391 - RNA, 19 nt, Human
ugagcucaggaguuugaga

SEQ ID NO: 2954392 - RNA, 11 nt, Human
ugagcucagga

SEQ ID NO: 2954393 - RNA, 15 nt, Human
ugagccgcccaaggc

SEQ ID NO: 2954394 - RNA, 17 nt, Human
ugagccgcccaaggccu

SEQ ID NO: 2954395 - RNA, 18 nt, Human
ugagccgcccaaggccuu

SEQ ID NO: 2954396 - RNA, 19 nt, Human
ugagccgcccaaggccuuc

SEQ ID NO: 2954397 - RNA, 23 nt, Human
ugagccgagaucacgccacugca

SEQ ID NO: 2954398 - RNA, 14 nt, Human
ugagccgcccaagg

SEQ ID NO: 2954399 - RNA, 20 nt, Human
ugagcagggcucagcgggga

SEQ ID NO: 2954400 - RNA, 22 nt, Human
ugagcagggcucagcggggaca

SEQ ID NO: 2954401 - RNA, 23 nt, Human
ugagcagggcucagcggggacag

SEQ ID NO: 2954402 - RNA, 22 nt, Human
ugagccgagaucacgccacugc

SEQ ID NO: 2954403 - RNA, 22 nt, Human
ugaggaugaaaaaauaacacug

SEQ ID NO: 2954404 - RNA, 21 nt, Human
ugaggugggaggaucucuuga

SEQ ID NO: 2954405 - RNA, 21 nt, Human
ugaggcugggcucccuuccca

SEQ ID NO: 2954406 - RNA, 18 nt, Human
ugaggucagagccugcag

SEQ ID NO: 2954407 - RNA, 19 nt, Human
ugaggucagagccugcagu

SEQ ID NO: 2954408 - RNA, 20 nt, Human
ugaggcggguggaucacgag

SEQ ID NO: 2954409 - RNA, 15 nt, Human
ugaggcucugcccuu

SEQ ID NO: 2954410 - RNA, 16 nt, Human
ugaggcucugcccuug

SEQ ID NO: 2954411 - RNA, 18 nt, Human
ugaggcucugcccuuggu

SEQ ID NO: 2954412 - RNA, 16 nt, Human
ugaggcugggcucccu

SEQ ID NO: 2954413 - RNA, 15 nt, Human
ugaggcugggcuccc

SEQ ID NO: 2954414 - RNA, 16 nt, Human
ucuucuuggucucagu

SEQ ID NO: 2954415 - RNA, 20 nt, Human
ucuugaaauauaggaacuua

SEQ ID NO: 2954416 - RNA, 21 nt, Human
ucuugaaauauaggaacuuaa

SEQ ID NO: 2954417 - RNA, 15 nt, Human
ucuugcaugaggcua

SEQ ID NO: 2954418 - RNA, 22 nt, Human
ucuugaagacuuuucuuucagc

SEQ ID NO: 2954419 - RNA, 13 nt, Human
ucuugaagacuuu

SEQ ID NO: 2954420 - RNA, 15 nt, Human
ucuugcucugcugac

SEQ ID NO: 2954421 - RNA, 23 nt, Human
ucuugcucugcugacagacacag

SEQ ID NO: 2954422 - RNA, 14 nt, Human
ucuugcucugcuga

SEQ ID NO: 2954423 - RNA, 20 nt, Human
ucuugcaugguuuggagcug

SEQ ID NO: 2954424 - RNA, 15 nt, Human
ucuugcaugguuugg

SEQ ID NO: 2954425 - RNA, 19 nt, Human
ucuugcaugguuuggagcu

SEQ ID NO: 2954426 - RNA, 19 nt, Human
ucuugccaaauauaaauaa

SEQ ID NO: 2954427 - RNA, 17 nt, Human
ucuucaguuugcagagu

SEQ ID NO: 2954428 - RNA, 18 nt, Human
ucuucaguuugcagagua

SEQ ID NO: 2954429 - RNA, 14 nt, Human
ucuucagaucucua

SEQ ID NO: 2954430 - RNA, 14 nt, Human
ucuuaucuuacgaa

SEQ ID NO: 2954431 - RNA, 21 nt, Human
ucuucagagacuccugcaggc

SEQ ID NO: 2954432 - RNA, 22 nt, Human
ucuuauccaacaucaacaucuu

SEQ ID NO: 2954433 - RNA, 15 nt, Human
ucuuagauguauaua

SEQ ID NO: 2954434 - RNA, 14 nt, Human
ucuuagauguauau

SEQ ID NO: 2954435 - RNA, 17 nt, Human
ucugugucagguggggc

SEQ ID NO: 2954436 - RNA, 20 nt, Human
ucugugucagguggggcagc

SEQ ID NO: 2954437 - RNA, 22 nt, Human
ucuuaggguuaugauuaaguaa

SEQ ID NO: 2954438 - RNA, 23 nt, Human
ucuuagguuggcaaaaaggcagg

SEQ ID NO: 2954439 - RNA, 20 nt, Human
ucuuagguuggcaaaaaggc

SEQ ID NO: 2954440 - RNA, 14 nt, Human
ucuuauaauuuaaa

SEQ ID NO: 2954441 - RNA, 13 nt, Human
ucuuauaauuuaa

SEQ ID NO: 2954442 - RNA, 15 nt, Human
ugaaaagaaaaauga

SEQ ID NO: 2954443 - RNA, 19 nt, Human
ugaaaagaaaaaugagccu

SEQ ID NO: 2954444 - RNA, 22 nt, Human
ugaaaagaaaaaugagccuggc

SEQ ID NO: 2954445 - RNA, 20 nt, Human
ugaaaagaaaaaugagccug

SEQ ID NO: 2954446 - RNA, 12 nt, Human
ugaaaauuuuga

SEQ ID NO: 2954447 - RNA, 15 nt, Human
ugaaacacugguuuu

SEQ ID NO: 2954448 - RNA, 20 nt, Human
ugaaacacugguuuuaaaua

SEQ ID NO: 2954449 - RNA, 14 nt, Human
ugaaaauucagugg

SEQ ID NO: 2954450 - RNA, 23 nt, Human
ugaaaacacuguucucugcccuc

SEQ ID NO: 2954451 - RNA, 22 nt, Human
ugaaaacacuguucucugcccu

SEQ ID NO: 2954452 - RNA, 21 nt, Human
ugaaaacacuguucucugccc

SEQ ID NO: 2954453 - RNA, 20 nt, Human
ugaaaacacuguucucugcc

SEQ ID NO: 2954454 - RNA, 17 nt, Human
ugaaaacacuguucucu

SEQ ID NO: 2954455 - RNA, 20 nt, Human
ugaaaacacauuuuucuuag

SEQ ID NO: 2954456 - RNA, 21 nt, Human
ugaaaacacauuuuucuuagg

SEQ ID NO: 2954457 - RNA, 13 nt, Human
ucuuugcagacag

SEQ ID NO: 2954458 - RNA, 23 nt, Human
ucuuugagugaagcugggagaac

SEQ ID NO: 2954459 - RNA, 14 nt, Human
ucuuugcagacagg

SEQ ID NO: 2954460 - RNA, 17 nt, Human
ucuuugcagacaggcaa

SEQ ID NO: 2954461 - RNA, 13 nt, Human
ucuuuggacccug

SEQ ID NO: 2954462 - RNA, 15 nt, Human
ucuuuggacccugag

SEQ ID NO: 2954463 - RNA, 14 nt, Human
ucuuuggacccuga

SEQ ID NO: 2954464 - RNA, 16 nt, Human
ucuuuggacccugagg

SEQ ID NO: 2954465 - RNA, 23 nt, Human
ucuugugguuauaacuuaaugaa

SEQ ID NO: 2954466 - RNA, 19 nt, Human
ucuugugguuauaacuuaa

SEQ ID NO: 2954467 - RNA, 13 nt, Human
ucuuguguguuua

SEQ ID NO: 2954468 - RNA, 23 nt, Human
ucuuuccaaaguacacuguuuca

SEQ ID NO: 2954469 - RNA, 13 nt, Human
ucuuucccucccu

SEQ ID NO: 2954470 - RNA, 23 nt, Human
ucuuucccucccuuccucuuucc

SEQ ID NO: 2954471 - RNA, 17 nt, Human
ucuuuccacagaagcuc

SEQ ID NO: 2954472 - RNA, 17 nt, Human
ucuuuccaaaguacacu

SEQ ID NO: 2954473 - RNA, 12 nt, Human
ucuuucccuccc

SEQ ID NO: 2954474 - RNA, 24 nt, Human
ucugagaucaaaacgguuuuacug

SEQ ID NO: 2954475 - RNA, 18 nt, Human
ucugagaggacuuuucuu

SEQ ID NO: 2954476 - RNA, 23 nt, Human
ucugacccaugcugcccugugag

SEQ ID NO: 2954477 - RNA, 22 nt, Human
ucugacccaugcugcccuguga

SEQ ID NO: 2954478 - RNA, 20 nt, Human
ucugacccaugcugcccugu

SEQ ID NO: 2954479 - RNA, 19 nt, Human
ucugacccaugcugcccug

SEQ ID NO: 2954480 - RNA, 22 nt, Human
ucugaggaauccagacccggcu

SEQ ID NO: 2954481 - RNA, 13 nt, Human
ucugauuuaauug

SEQ ID NO: 2954482 - RNA, 18 nt, Human
ucugaggaauccagaccc

SEQ ID NO: 2954483 - RNA, 21 nt, Human
ucugaggaauccagacccggc

SEQ ID NO: 2954484 - RNA, 13 nt, Human
ucugcacuccccu

SEQ ID NO: 2954485 - RNA, 15 nt, Human
ucugccucugacaca

SEQ ID NO: 2954486 - RNA, 18 nt, Human
ucugccucugacacacag

SEQ ID NO: 2954487 - RNA, 21 nt, Human
ucugccucccaucacccgcua

SEQ ID NO: 2954488 - RNA, 20 nt, Human
ucugccucccaucacccgcu

SEQ ID NO: 2954489 - RNA, 17 nt, Human
ucugccucccaucaccc

SEQ ID NO: 2954490 - RNA, 16 nt, Human
ucugccucccaucacc

SEQ ID NO: 2954491 - RNA, 23 nt, Human
ucugccucugacacacagcucug

SEQ ID NO: 2954492 - RNA, 21 nt, Human
ucugccucugacacacagcuc

SEQ ID NO: 2954493 - RNA, 22 nt, Human
ucugccucugacacacagcucu

SEQ ID NO: 2954494 - RNA, 19 nt, Human
ucugccugaagucacacag

SEQ ID NO: 2954495 - RNA, 20 nt, Human
ucugccugaagucacacagu

SEQ ID NO: 2954496 - RNA, 18 nt, Human
ucugccauauucuguugg

SEQ ID NO: 2954497 - RNA, 12 nt, Human
ucugcccacucc

SEQ ID NO: 2954498 - RNA, 22 nt, Human
ucugccauauucuguuggccag

SEQ ID NO: 2954499 - RNA, 23 nt, Human
ucugccauauucuguuggccagu

SEQ ID NO: 2954500 - RNA, 14 nt, Human
ucugcccacucccu

SEQ ID NO: 2954501 - RNA, 13 nt, Human
ucugcccacuccc

SEQ ID NO: 2954502 - RNA, 12 nt, Human
ucugccucccau

SEQ ID NO: 2954503 - RNA, 15 nt, Human
ucugccucccaucac

SEQ ID NO: 2954504 - RNA, 13 nt, Human
ucugccucccauc

SEQ ID NO: 2954505 - RNA, 13 nt, Human
ucugcugcuggcu

SEQ ID NO: 2954506 - RNA, 11 nt, Human
ucugcugcugg

SEQ ID NO: 2954507 - RNA, 21 nt, Human
ucugcuccucuccccagcaag

SEQ ID NO: 2954508 - RNA, 17 nt, Human
ucugccugcccaggccc

SEQ ID NO: 2954509 - RNA, 18 nt, Human
ucugccugcccaggcccc

SEQ ID NO: 2954510 - RNA, 20 nt, Human
ucugccugcccaggccccug

SEQ ID NO: 2954511 - RNA, 14 nt, Human
ucuggacuaaaacu

SEQ ID NO: 2954512 - RNA, 16 nt, Human
ucuggaaugcaguggu

SEQ ID NO: 2954513 - RNA, 17 nt, Human
ucugcugcuggcugguu

SEQ ID NO: 2954514 - RNA, 15 nt, Human
ucugcugcuggcugg

SEQ ID NO: 2954515 - RNA, 14 nt, Human
ucugcugcuggcug

SEQ ID NO: 2954516 - RNA, 16 nt, Human
ucuggugacuuuccuc

SEQ ID NO: 2954517 - RNA, 20 nt, Human
ucuguccuacucugugucag

SEQ ID NO: 2954518 - RNA, 15 nt, Human
ucuguacagagccca

SEQ ID NO: 2954519 - RNA, 14 nt, Human
ucuguacagagccc

SEQ ID NO: 2954520 - RNA, 12 nt, Human
ucuguccuggga

SEQ ID NO: 2954521 - RNA, 17 nt, Human
ucugucgcccagucugg

SEQ ID NO: 2954522 - RNA, 16 nt, Human
ucugucgcccagucug

SEQ ID NO: 2954523 - RNA, 13 nt, Human
ucugucuaggaau

SEQ ID NO: 2954524 - RNA, 14 nt, Human
ucugucucagucca

SEQ ID NO: 2954525 - RNA, 15 nt, Human
ucagcugcuacuacu

SEQ ID NO: 2954526 - RNA, 16 nt, Human
ucagcugcugaaacaa

SEQ ID NO: 2954527 - RNA, 16 nt, Human
ucagccugcuccagcu

SEQ ID NO: 2954528 - RNA, 22 nt, Human
ucagccucccaaagugcuggga

SEQ ID NO: 2954529 - RNA, 12 nt, Human
ucagccucccga

SEQ ID NO: 2954530 - RNA, 20 nt, Human
ucagccucccgaauagcugg

SEQ ID NO: 2954531 - RNA, 15 nt, Human
ucagcuccagcucac

SEQ ID NO: 2954532 - RNA, 18 nt, Human
ucagcuccagcucaccag

SEQ ID NO: 2954533 - RNA, 21 nt, Human
ucagcuccagcucaccagccc

SEQ ID NO: 2954534 - RNA, 22 nt, Human
ucagcuccagcucaccagcccc

SEQ ID NO: 2954535 - RNA, 21 nt, Human
ucagcuccccucggagaagag

SEQ ID NO: 2954536 - RNA, 22 nt, Human
ucagcuccccucggagaagagc

SEQ ID NO: 2954537 - RNA, 17 nt, Human
ucagauaugauucaaau

SEQ ID NO: 2954538 - RNA, 16 nt, Human
ucagauaugauucaaa

SEQ ID NO: 2954539 - RNA, 18 nt, Human
ucagauaugauucaaaug

SEQ ID NO: 2954540 - RNA, 15 nt, Human
ucagcauccuggcac

SEQ ID NO: 2954541 - RNA, 16 nt, Human
ucagcauccuggcacc

SEQ ID NO: 2954542 - RNA, 17 nt, Human
ucagcauccuggcaccc

SEQ ID NO: 2954543 - RNA, 18 nt, Human
ucagcauccuggcacccg

SEQ ID NO: 2954544 - RNA, 12 nt, Human
ucagccucccaa

SEQ ID NO: 2954545 - RNA, 13 nt, Human
ucagccucccaaa

SEQ ID NO: 2954546 - RNA, 15 nt, Human
ucagcacgauuucug

SEQ ID NO: 2954547 - RNA, 16 nt, Human
ucagcacgauuucugu

SEQ ID NO: 2954548 - RNA, 17 nt, Human
ucagcacgauuucuguu

SEQ ID NO: 2954549 - RNA, 15 nt, Human
ucauacucaccucac

SEQ ID NO: 2954550 - RNA, 21 nt, Human
ucauggaauuggagcucgugg

SEQ ID NO: 2954551 - RNA, 19 nt, Human
ucauggaauuggagcucgu

SEQ ID NO: 2954552 - RNA, 13 nt, Human
ucaugaaagauuc

SEQ ID NO: 2954553 - RNA, 18 nt, Human
ucagugugacugaucucu

SEQ ID NO: 2954554 - RNA, 17 nt, Human
ucagucugauucccaag

SEQ ID NO: 2954555 - RNA, 19 nt, Human
ucagucugauucccaagcu

SEQ ID NO: 2954556 - RNA, 14 nt, Human
ucagguggggcagc

SEQ ID NO: 2954557 - RNA, 18 nt, Human
ucaggugcugccauccag

SEQ ID NO: 2954558 - RNA, 20 nt, Human
ucaggugcugccauccaggu

SEQ ID NO: 2954559 - RNA, 15 nt, Human
ucagguggggcagcu

SEQ ID NO: 2954560 - RNA, 16 nt, Human
ucagguggggcagcuu

SEQ ID NO: 2954561 - RNA, 21 nt, Human
ucagguggggcagcuugaggg

SEQ ID NO: 2954562 - RNA, 17 nt, Human
ucagguggggcagcuug

SEQ ID NO: 2954563 - RNA, 21 nt, Human
ucagguggggucacucuggca

SEQ ID NO: 2954564 - RNA, 20 nt, Human
ucagguggggucacucuggc

SEQ ID NO: 2954565 - RNA, 17 nt, Human
ucagguggggucacucu

SEQ ID NO: 2954566 - RNA, 15 nt, Human
ucaguccauagcaga

SEQ ID NO: 2954567 - RNA, 18 nt, Human
ucaguccaugaagaugua

SEQ ID NO: 2954568 - RNA, 21 nt, Human
uccacaagagcccaggccucc

SEQ ID NO: 2954569 - RNA, 19 nt, Human
uccacaagagcccaggccu

SEQ ID NO: 2954570 - RNA, 20 nt, Human
uccacaagagcccaggccuc

SEQ ID NO: 2954571 - RNA, 14 nt, Human
uccaagaagcccag

SEQ ID NO: 2954572 - RNA, 16 nt, Human
uccaagaagcccagga

SEQ ID NO: 2954573 - RNA, 15 nt, Human
uccaagaagcccagg

SEQ ID NO: 2954574 - RNA, 20 nt, Human
uccaagaccuucuccuucac

SEQ ID NO: 2954575 - RNA, 19 nt, Human
uccaagaagcccaggaaag

SEQ ID NO: 2954576 - RNA, 19 nt, Human
uccaagaccuucuccuuca

SEQ ID NO: 2954577 - RNA, 14 nt, Human
uccaagcaggacau

SEQ ID NO: 2954578 - RNA, 20 nt, Human
uccaagcauuuagauguaua

SEQ ID NO: 2954579 - RNA, 21 nt, Human
uccacccugcucuccgaccag

SEQ ID NO: 2954580 - RNA, 13 nt, Human
uccacccugcucu

SEQ ID NO: 2954581 - RNA, 14 nt, Human
uccacccugcucuc

SEQ ID NO: 2954582 - RNA, 22 nt, Human
uccacugugccaugugccaggu

SEQ ID NO: 2954583 - RNA, 17 nt, Human
uccagagccccacagcc

SEQ ID NO: 2954584 - RNA, 14 nt, Human
uccacuuucuagcc

SEQ ID NO: 2954585 - RNA, 18 nt, Human
uccagcugcugagauccu

SEQ ID NO: 2954586 - RNA, 21 nt, Human
uccagcugcugagauccugga

SEQ ID NO: 2954587 - RNA, 22 nt, Human
uccagcugcugagauccuggac

SEQ ID NO: 2954588 - RNA, 18 nt, Human
ucccaccucagccucccg

SEQ ID NO: 2954589 - RNA, 16 nt, Human
ucccaccucagccucc

SEQ ID NO: 2954590 - RNA, 14 nt, Human
ucccaccucucuca

SEQ ID NO: 2954591 - RNA, 18 nt, Human
ucccaccucucucacucc

SEQ ID NO: 2954592 - RNA, 17 nt, Human
ucccaccucucucacuc

SEQ ID NO: 2954593 - RNA, 19 nt, Human
ucccaccuuggcugcaggg

SEQ ID NO: 2954594 - RNA, 21 nt, Human
ucccaccuuggcugcagggag

SEQ ID NO: 2954595 - RNA, 20 nt, Human
ucccaccucucucacuccuu

SEQ ID NO: 2954596 - RNA, 14 nt, Human
ucccacucagucca

SEQ ID NO: 2954597 - RNA, 18 nt, Human
ucccaggcauuccccagg

SEQ ID NO: 2954598 - RNA, 17 nt, Human
ucccaggcauuccccag

SEQ ID NO: 2954599 - RNA, 15 nt, Human
ucccaugagccucag

SEQ ID NO: 2954600 - RNA, 16 nt, Human
ucccaugagccucagc

SEQ ID NO: 2954601 - RNA, 18 nt, Human
ucccaacucaccccagcc

SEQ ID NO: 2954602 - RNA, 17 nt, Human
ucccaacucaccccagc

SEQ ID NO: 2954603 - RNA, 21 nt, Human
ucccaacucaccccagcccca

SEQ ID NO: 2954604 - RNA, 19 nt, Human
ucccaacucaccccagccc

SEQ ID NO: 2954605 - RNA, 20 nt, Human
uccauagagagcaagacgcu

SEQ ID NO: 2954606 - RNA, 17 nt, Human
uccauagagagcaagac

SEQ ID NO: 2954607 - RNA, 18 nt, Human
ucuaggaggucucuaaga

SEQ ID NO: 2954608 - RNA, 18 nt, Human
ucuacucuagggaaaaac

SEQ ID NO: 2954609 - RNA, 21 nt, Human
ucuacucgaguuacagacaaa

SEQ ID NO: 2954610 - RNA, 20 nt, Human
ucuacucgaguuacagacaa

SEQ ID NO: 2954611 - RNA, 12 nt, Human
ucuagggaaaaa

SEQ ID NO: 2954612 - RNA, 13 nt, Human
ucuauauuuuaca

SEQ ID NO: 2954613 - RNA, 16 nt, Human
ucuacuaaaaaugcaa

SEQ ID NO: 2954614 - RNA, 19 nt, Human
ucuacuaaaaauacaaaaa

SEQ ID NO: 2954615 - RNA, 15 nt, Human
ucuacuaaaaauaca

SEQ ID NO: 2954616 - RNA, 12 nt, Human
ucuacuaaaaau

SEQ ID NO: 2954617 - RNA, 14 nt, Human
ucucacuguugccc

SEQ ID NO: 2954618 - RNA, 15 nt, Human
ucucacuguugccca

SEQ ID NO: 2954619 - RNA, 23 nt, Human
ucucacucugucgcccagucugg

SEQ ID NO: 2954620 - RNA, 21 nt, Human
ucucacacaugagcaucaggc

SEQ ID NO: 2954621 - RNA, 20 nt, Human
ucucacugccaugccagcuu

SEQ ID NO: 2954622 - RNA, 16 nt, Human
ucucacacaugagcau

SEQ ID NO: 2954623 - RNA, 18 nt, Human
ucucaaauuucuaaaucu

SEQ ID NO: 2954624 - RNA, 13 nt, Human
ucucaaauuucua

SEQ ID NO: 2954625 - RNA, 14 nt, Human
ucucaaauuucuaa

SEQ ID NO: 2954626 - RNA, 16 nt, Human
ucucaaauuucuaaau

SEQ ID NO: 2954627 - RNA, 22 nt, Human
uccuuggugucgggcaugacac

SEQ ID NO: 2954628 - RNA, 17 nt, Human
uccuuugugaggaagcc

SEQ ID NO: 2954629 - RNA, 22 nt, Human
uccuuugugaggaagccgcugg

SEQ ID NO: 2954630 - RNA, 18 nt, Human
uccuuugugaggaagccg

SEQ ID NO: 2954631 - RNA, 21 nt, Human
uccuuggugucgggcaugaca

SEQ ID NO: 2954632 - RNA, 18 nt, Human
uccuuggugucgggcaug

SEQ ID NO: 2954633 - RNA, 17 nt, Human
uccuugcaucaauuuuu

SEQ ID NO: 2954634 - RNA, 23 nt, Human
uccuugaaaacacuguucucugc

SEQ ID NO: 2954635 - RNA, 22 nt, Human
uccuugaaaacacuguucucug

SEQ ID NO: 2954636 - RNA, 21 nt, Human
uccuuaccagcagagcaccuu

SEQ ID NO: 2954637 - RNA, 20 nt, Human
uccuuaccagcagagcaccu

SEQ ID NO: 2954638 - RNA, 17 nt, Human
ucgcaggauucuuccuc

SEQ ID NO: 2954639 - RNA, 21 nt, Human
ucgcaggauucuuccucccuc

SEQ ID NO: 2954640 - RNA, 23 nt, Human
ucgcaggauucuuccucccuccc

SEQ ID NO: 2954641 - RNA, 22 nt, Human
uccuuuucgcaggauucuuccu

SEQ ID NO: 2954642 - RNA, 18 nt, Human
uccuuuucgcaggauucu

SEQ ID NO: 2954643 - RNA, 14 nt, Human
ucgcccagucugga

SEQ ID NO: 2954644 - RNA, 19 nt, Human
ucgcccagucuggaaugca

SEQ ID NO: 2954645 - RNA, 23 nt, Human
ucgcccagucuggaaugcagugg

SEQ ID NO: 2954646 - RNA, 15 nt, Human
ucggaaaacaugcua

SEQ ID NO: 2954647 - RNA, 18 nt, Human
ucggaaaacaugcuacac

SEQ ID NO: 2954648 - RNA, 15 nt, Human
ucggagcccugucuc

SEQ ID NO: 2954649 - RNA, 14 nt, Human
ucggagcccugucu

SEQ ID NO: 2954650 - RNA, 18 nt, Human
ucggccccaccagugccu

SEQ ID NO: 2954651 - RNA, 19 nt, Human
ucggccccaccagugccuc

SEQ ID NO: 2954652 - RNA, 15 nt, Human
ucggccuccauccug

SEQ ID NO: 2954653 - RNA, 16 nt, Human
ucggccuccauccuga

SEQ ID NO: 2954654 - RNA, 19 nt, Human
ucccaugagggagaugcca

SEQ ID NO: 2954655 - RNA, 23 nt, Human
ucccaugagggagaugccaugag

SEQ ID NO: 2954656 - RNA, 17 nt, Human
ucccaugagccucagca

SEQ ID NO: 2954657 - RNA, 22 nt, Human
ucccaugagccucagcauccug

SEQ ID NO: 2954658 - RNA, 18 nt, Human
ucccucccuuccucuuuc

SEQ ID NO: 2954659 - RNA, 16 nt, Human
ucccugccaauggacu

SEQ ID NO: 2954660 - RNA, 14 nt, Human
ucccugccaaugga

SEQ ID NO: 2954661 - RNA, 20 nt, Human
ucccugcacuugcagacucu

SEQ ID NO: 2954662 - RNA, 17 nt, Human
ucccucuggggcuguuc

SEQ ID NO: 2954663 - RNA, 13 nt, Human
ucccucuggggcu

SEQ ID NO: 2954664 - RNA, 16 nt, Human
ucccuucccaccucuc

SEQ ID NO: 2954665 - RNA, 14 nt, Human
ucccuucccaccuc

SEQ ID NO: 2954666 - RNA, 21 nt, Human
ucccuucccacuggaggcaug

SEQ ID NO: 2954667 - RNA, 17 nt, Human
ucccuucccaccucucu

SEQ ID NO: 2954668 - RNA, 21 nt, Human
uccgaaagggacuuggaagcu

SEQ ID NO: 2954669 - RNA, 22 nt, Human
uccgaaagggacuuggaagcuc

SEQ ID NO: 2954670 - RNA, 21 nt, Human
uccgcuuucuacccagcgagc

SEQ ID NO: 2954671 - RNA, 12 nt, Human
uccuccucagau

SEQ ID NO: 2954672 - RNA, 13 nt, Human
uccuccaggugca

SEQ ID NO: 2954673 - RNA, 12 nt, Human
uccuccaggugc

SEQ ID NO: 2954674 - RNA, 22 nt, Human
uccuccaggugcacaagcucca

SEQ ID NO: 2954675 - RNA, 20 nt, Human
uccuccaggugcacaagcuc

SEQ ID NO: 2954676 - RNA, 18 nt, Human
uccuccaggugcacaagc

SEQ ID NO: 2954677 - RNA, 14 nt, Human
uccuccaggugcac

SEQ ID NO: 2954678 - RNA, 21 nt, Human
uccuaguuccaccaucaagcc

SEQ ID NO: 2954679 - RNA, 16 nt, Human
uccuaagcuauucagu

SEQ ID NO: 2954680 - RNA, 12 nt, Human
uccuaguuccac

SEQ ID NO: 2954681 - RNA, 18 nt, Human
uccuaagcuauucaguaa

SEQ ID NO: 2954682 - RNA, 17 nt, Human
uccuaguuccaccauca

SEQ ID NO: 2954683 - RNA, 14 nt, Human
uccuaguuccacca

SEQ ID NO: 2954684 - RNA, 21 nt, Human
uccuccuuuucacaguucucu

SEQ ID NO: 2954685 - RNA, 22 nt, Human
uccucuagugaauguaggcugg

SEQ ID NO: 2954686 - RNA, 17 nt, Human
uccucuaggaggucucu

SEQ ID NO: 2954687 - RNA, 21 nt, Human
uccucuaggaggucucuaaga

SEQ ID NO: 2954688 - RNA, 15 nt, Human
uccucuggccugugu

SEQ ID NO: 2954689 - RNA, 13 nt, Human
uccucuguacaga

SEQ ID NO: 2954690 - RNA, 17 nt, Human
uccucugcugcuggcug

SEQ ID NO: 2954691 - RNA, 14 nt, Human
uccucugcuugcca

SEQ ID NO: 2954692 - RNA, 15 nt, Human
uccucugcuugccau

SEQ ID NO: 2954693 - RNA, 16 nt, Human
uccucugcuugccauc

SEQ ID NO: 2954694 - RNA, 17 nt, Human
uccucugcuugccaucc

SEQ ID NO: 2954695 - RNA, 19 nt, Human
uccucuguacagagcccac

SEQ ID NO: 2954696 - RNA, 23 nt, Human
uccucuguacagagcccacgccc

SEQ ID NO: 2954697 - RNA, 17 nt, Human
uccugagccagauuuca

SEQ ID NO: 2954698 - RNA, 15 nt, Human
uccugaggcuccacu

SEQ ID NO: 2954699 - RNA, 19 nt, Human
uccugagccagauuucacu

SEQ ID NO: 2954700 - RNA, 18 nt, Human
uccugagccagauuucac

SEQ ID NO: 2954701 - RNA, 16 nt, Human
uccugaggcuccacuu

SEQ ID NO: 2954702 - RNA, 21 nt, Human
uccugaggcuccacuuggucu

SEQ ID NO: 2954703 - RNA, 12 nt, Human
uccugaggcugg

SEQ ID NO: 2954704 - RNA, 19 nt, Human
uccugaggcugggcucccu

SEQ ID NO: 2954705 - RNA, 17 nt, Human
uccugaggcugggcucc

SEQ ID NO: 2954706 - RNA, 16 nt, Human
uccugaggcugggcuc

SEQ ID NO: 2954707 - RNA, 15 nt, Human
uccugaggcugggcu

SEQ ID NO: 2954708 - RNA, 15 nt, Human
ugcuaaaugugaaug

SEQ ID NO: 2954709 - RNA, 21 nt, Human
ugcuaacagcaacacaaagcu

SEQ ID NO: 2954710 - RNA, 22 nt, Human
ugcuaacagcaacacaaagcuu

SEQ ID NO: 2954711 - RNA, 23 nt, Human
ugcuaacagcaacacaaagcuuu

SEQ ID NO: 2954712 - RNA, 22 nt, Human
ugcgccuacaggagugagcacu

SEQ ID NO: 2954713 - RNA, 14 nt, Human
ugcgccuacaggag

SEQ ID NO: 2954714 - RNA, 16 nt, Human
ugcgccuacaggagug

SEQ ID NO: 2954715 - RNA, 14 nt, Human
ugcgaucuggguuc

SEQ ID NO: 2954716 - RNA, 15 nt, Human
ugcgaucuggguuca

SEQ ID NO: 2954717 - RNA, 19 nt, Human
ugcgaucuggguucacugc

SEQ ID NO: 2954718 - RNA, 20 nt, Human
ugcgaucuggguucacugca

SEQ ID NO: 2954719 - RNA, 21 nt, Human
ugcgaucuggguucacugcaa

SEQ ID NO: 2954720 - RNA, 15 nt, Human
ugccuucucaacucc

SEQ ID NO: 2954721 - RNA, 20 nt, Human
ugccucucccugcugcuccu

SEQ ID NO: 2954722 - RNA, 17 nt, Human
ugccucucccugcugcu

SEQ ID NO: 2954723 - RNA, 18 nt, Human
ugccccuggcagccccug

SEQ ID NO: 2954724 - RNA, 20 nt, Human
ugccucgaacuggcugcaaa

SEQ ID NO: 2954725 - RNA, 18 nt, Human
ugccucgaacuggcugca

SEQ ID NO: 2954726 - RNA, 19 nt, Human
ugccucgaacuggcugcaa

SEQ ID NO: 2954727 - RNA, 18 nt, Human
ugccugggcagaaggaag

SEQ ID NO: 2954728 - RNA, 21 nt, Human
ugccugggaucccucauccuc

SEQ ID NO: 2954729 - RNA, 14 nt, Human
ugccugguggcagc

SEQ ID NO: 2954730 - RNA, 15 nt, Human
ugccugguggcagcu

SEQ ID NO: 2954731 - RNA, 16 nt, Human
ugccugguggcagcug

SEQ ID NO: 2954732 - RNA, 18 nt, Human
ugccuguaaucacagcua

SEQ ID NO: 2954733 - RNA, 13 nt, Human
ugcugcuggcugg

SEQ ID NO: 2954734 - RNA, 23 nt, Human
ugcugcaguugccagucaccccg

SEQ ID NO: 2954735 - RNA, 18 nt, Human
ugcugcaguugccaguca

SEQ ID NO: 2954736 - RNA, 22 nt, Human
ugcugacagacacaggcccggc

SEQ ID NO: 2954737 - RNA, 23 nt, Human
ugcugacagacacaggcccggcu

SEQ ID NO: 2954738 - RNA, 13 nt, Human
ugcugaaggcucg

SEQ ID NO: 2954739 - RNA, 12 nt, Human
ugcugaaggcuc

SEQ ID NO: 2954740 - RNA, 13 nt, Human
ugcugauggugca

SEQ ID NO: 2954741 - RNA, 17 nt, Human
ugcugauggugcaauga

SEQ ID NO: 2954742 - RNA, 15 nt, Human
ugcugauggugcaau

SEQ ID NO: 2954743 - RNA, 15 nt, Human
ugcugauuuaaacac

SEQ ID NO: 2954744 - RNA, 17 nt, Human
ugcugauuuaaacacau

SEQ ID NO: 2954745 - RNA, 18 nt, Human
ugcugauggugcaaugac

SEQ ID NO: 2954746 - RNA, 18 nt, Human
ugcuccuuucuuguuuua

SEQ ID NO: 2954747 - RNA, 17 nt, Human
ugcuccucuccccagca

SEQ ID NO: 2954748 - RNA, 17 nt, Human
ugcugaaacaacaaaua

SEQ ID NO: 2954749 - RNA, 14 nt, Human
ugcuccucucccca

SEQ ID NO: 2954750 - RNA, 16 nt, Human
ugcucaguagucagac

SEQ ID NO: 2954751 - RNA, 15 nt, Human
ugcucacauaucugu

SEQ ID NO: 2954752 - RNA, 16 nt, Human
ugcucacauaucuguc

SEQ ID NO: 2954753 - RNA, 15 nt, Human
ugcuaagcauuccaa

SEQ ID NO: 2954754 - RNA, 19 nt, Human
ugcuaagcauuccaacuau

SEQ ID NO: 2954755 - RNA, 19 nt, Human
ugcaucaagaugugacaug

SEQ ID NO: 2954756 - RNA, 14 nt, Human
ugcaucaagaugug

SEQ ID NO: 2954757 - RNA, 22 nt, Human
ugccaaauauaaauaaaaauaa

SEQ ID NO: 2954758 - RNA, 19 nt, Human
ugccaaauauaaauaaaaa

SEQ ID NO: 2954759 - RNA, 18 nt, Human
ugccaaauauaaauaaaa

SEQ ID NO: 2954760 - RNA, 17 nt, Human
ugccaaauauaaauaaa

SEQ ID NO: 2954761 - RNA, 18 nt, Human
ugccagguuuuuggucug

SEQ ID NO: 2954762 - RNA, 19 nt, Human
ugccagguuuuuggucuga

SEQ ID NO: 2954763 - RNA, 22 nt, Human
ugccagguuuuuggucugaccc

SEQ ID NO: 2954764 - RNA, 22 nt, Human
ugccacuacggaauaguuggcu

SEQ ID NO: 2954765 - RNA, 19 nt, Human
ugccacccuggggagaaag

SEQ ID NO: 2954766 - RNA, 20 nt, Human
ugccacuaaauugacacuua

SEQ ID NO: 2954767 - RNA, 19 nt, Human
ugccccucaacucuccucc

SEQ ID NO: 2954768 - RNA, 17 nt, Human
ugccccuggcagccccu

SEQ ID NO: 2954769 - RNA, 23 nt, Human
ugccccucaacucuccuccagag

SEQ ID NO: 2954770 - RNA, 11 nt, Human
ugcccaggcug

SEQ ID NO: 2954771 - RNA, 16 nt, Human
ugcccacucccugcaa

SEQ ID NO: 2954772 - RNA, 15 nt, Human
ugcccacucccugca

SEQ ID NO: 2954773 - RNA, 14 nt, Human
ugcccacucccugc

SEQ ID NO: 2954774 - RNA, 13 nt, Human
ugcccaccuggcc

SEQ ID NO: 2954775 - RNA, 13 nt, Human
ugcccacucccug

SEQ ID NO: 2954776 - RNA, 21 nt, Human
ugccauccagguucagcuugu

SEQ ID NO: 2954777 - RNA, 20 nt, Human
ugccauccagguucagcuug

SEQ ID NO: 2954778 - RNA, 11 nt, Human
ugccaucccuc

SEQ ID NO: 2954779 - RNA, 12 nt, Human
ugccaucccucc

SEQ ID NO: 2954780 - RNA, 15 nt, Human
ugcaguugccaguca

SEQ ID NO: 2954781 - RNA, 19 nt, Human
ugcaguucugaagaagaug

SEQ ID NO: 2954782 - RNA, 22 nt, Human
ugcaguucugaagaagauggua

SEQ ID NO: 2954783 - RNA, 14 nt, Human
ugcaguugccaguc

SEQ ID NO: 2954784 - RNA, 13 nt, Human
ugcaguugccagu

SEQ ID NO: 2954785 - RNA, 22 nt, Human
ugcagugguaugaucacggcuc

SEQ ID NO: 2954786 - RNA, 14 nt, Human
ugcaguucugaaga

SEQ ID NO: 2954787 - RNA, 15 nt, Human
ugcaguucugaagaa

SEQ ID NO: 2954788 - RNA, 16 nt, Human
ugcaguucugaagaag

SEQ ID NO: 2954789 - RNA, 17 nt, Human
ugcaguucugaagaaga

SEQ ID NO: 2954790 - RNA, 18 nt, Human
ugcaguucugaagaagau

SEQ ID NO: 2954791 - RNA, 15 nt, Human
ugcaggcagccaggc

SEQ ID NO: 2954792 - RNA, 14 nt, Human
ugcaggcagccagg

SEQ ID NO: 2954793 - RNA, 13 nt, Human
ugcaggcagccag

SEQ ID NO: 2954794 - RNA, 10 nt, Human
ugcagugcag

SEQ ID NO: 2954795 - RNA, 16 nt, Human
ugcagugcaguauaga

SEQ ID NO: 2954796 - RNA, 17 nt, Human
ugcagugcaguauagaa

SEQ ID NO: 2954797 - RNA, 16 nt, Human
ugcagugcuuccaagg

SEQ ID NO: 2954798 - RNA, 19 nt, Human
ugcagugagccgagauugu

SEQ ID NO: 2954799 - RNA, 14 nt, Human
ugcacuuuguucug

SEQ ID NO: 2954800 - RNA, 12 nt, Human
ugcacuuuguuc

SEQ ID NO: 2954801 - RNA, 20 nt, Human
ugcagcaauaaagcagcguu

SEQ ID NO: 2954802 - RNA, 23 nt, Human
ugcagcaauaaagcagcguuucu

SEQ ID NO: 2954803 - RNA, 17 nt, Human
ugcaccgggccacagag

SEQ ID NO: 2954804 - RNA, 22 nt, Human
ugcaccgggccacagagaaagu

SEQ ID NO: 2954805 - RNA, 14 nt, Human
ugcaccgggccaca

SEQ ID NO: 2954806 - RNA, 15 nt, Human
ugcaccgggccacag

SEQ ID NO: 2954807 - RNA, 23 nt, Human
ugcaccggcuggccuggccccuc

SEQ ID NO: 2954808 - RNA, 19 nt, Human
ugaguccccuguuuguuuc

SEQ ID NO: 2954809 - RNA, 19 nt, Human
ugcacgcacacugucugcc

SEQ ID NO: 2954810 - RNA, 13 nt, Human
ugggcuacaagga

SEQ ID NO: 2954811 - RNA, 16 nt, Human
ugggcuaguugggcuu

SEQ ID NO: 2954812 - RNA, 17 nt, Human
ugggcuggugucaccug

SEQ ID NO: 2954813 - RNA, 23 nt, Human
ugggcuggguucuacccaggugc

SEQ ID NO: 2954814 - RNA, 22 nt, Human
ugggcuaagugauccucccacc

SEQ ID NO: 2954815 - RNA, 16 nt, Human
ugggcagaggaaagca

SEQ ID NO: 2954816 - RNA, 17 nt, Human
ugggcuucaguggcagc

SEQ ID NO: 2954817 - RNA, 15 nt, Human
ugggcuucaguggca

SEQ ID NO: 2954818 - RNA, 19 nt, Human
ugggggcugggcagaggaa

SEQ ID NO: 2954819 - RNA, 12 nt, Human
ugggggugcauu

SEQ ID NO: 2954820 - RNA, 15 nt, Human
ugggggugcauuuga

SEQ ID NO: 2954821 - RNA, 18 nt, Human
ugggggcugggcagagga

SEQ ID NO: 2954822 - RNA, 17 nt, Human
ugggggcugggcagagg

SEQ ID NO: 2954823 - RNA, 20 nt, Human
ugggggaucacagccucuga

SEQ ID NO: 2954824 - RNA, 21 nt, Human
ugggggaucacagccucugaa

SEQ ID NO: 2954825 - RNA, 16 nt, Human
uggguaacuagggaag

SEQ ID NO: 2954826 - RNA, 19 nt, Human
ugggguuuaucagaauucu

SEQ ID NO: 2954827 - RNA, 15 nt, Human
uggguguaaacacau

SEQ ID NO: 2954828 - RNA, 22 nt, Human
uggguucuacccaggugcuagg

SEQ ID NO: 2954829 - RNA, 16 nt, Human
uggguucuacccaggu

SEQ ID NO: 2954830 - RNA, 15 nt, Human
uggguucuacccagg

SEQ ID NO: 2954831 - RNA, 15 nt, Human
ugguaguuuuacagu

SEQ ID NO: 2954832 - RNA, 18 nt, Human
uggguuucuaaagcugcc

SEQ ID NO: 2954833 - RNA, 17 nt, Human
uggguuucuaaagcugc

SEQ ID NO: 2954834 - RNA, 21 nt, Human
uggguuucuaaagcugccagc

SEQ ID NO: 2954835 - RNA, 21 nt, Human
ugguauguuuucaggcuagau

SEQ ID NO: 2954836 - RNA, 23 nt, Human
ugguauuggcuagagguucaaag

SEQ ID NO: 2954837 - RNA, 19 nt, Human
uggcccagggcaucuggga

SEQ ID NO: 2954838 - RNA, 21 nt, Human
uggcugcuucaaggauccuga

SEQ ID NO: 2954839 - RNA, 16 nt, Human
uggcugcuucaaggau

SEQ ID NO: 2954840 - RNA, 21 nt, Human
uggcugggggccucagugcca

SEQ ID NO: 2954841 - RNA, 22 nt, Human
uggcuuccuaaaauucagugga

SEQ ID NO: 2954842 - RNA, 16 nt, Human
uggcuuccuggcaaua

SEQ ID NO: 2954843 - RNA, 14 nt, Human
uggcuuuugugcau

SEQ ID NO: 2954844 - RNA, 13 nt, Human
ugggacacccugu

SEQ ID NO: 2954845 - RNA, 12 nt, Human
ugggacacccug

SEQ ID NO: 2954846 - RNA, 12 nt, Human
ugggagcugccu

SEQ ID NO: 2954847 - RNA, 13 nt, Human
ugggagcugccug

SEQ ID NO: 2954848 - RNA, 14 nt, Human
ugggagcugccugu

SEQ ID NO: 2954849 - RNA, 13 nt, Human
ugggagcaaaaga

SEQ ID NO: 2954850 - RNA, 15 nt, Human
ugggcagaggaaagc

SEQ ID NO: 2954851 - RNA, 16 nt, Human
ugggauuacaggugug

SEQ ID NO: 2954852 - RNA, 13 nt, Human
ugggauccuggag

SEQ ID NO: 2954853 - RNA, 18 nt, Human
ugggauccuccaggugca

SEQ ID NO: 2954854 - RNA, 15 nt, Human
ugggagugagcuggu

SEQ ID NO: 2954855 - RNA, 15 nt, Human
ugggauccuccaggu

SEQ ID NO: 2954856 - RNA, 17 nt, Human
ugggagcugccuguuca

SEQ ID NO: 2954857 - RNA, 21 nt, Human
ugggagcugccuguucagcuc

SEQ ID NO: 2954858 - RNA, 22 nt, Human
ugggagcugccuguucagcucc

SEQ ID NO: 2954859 - RNA, 14 nt, Human
ugggaguacaaaag

SEQ ID NO: 2954860 - RNA, 21 nt, Human
uggcacccggccccugcuggu

SEQ ID NO: 2954861 - RNA, 13 nt, Human
uggcagcugcuuu

SEQ ID NO: 2954862 - RNA, 20 nt, Human
uggccagaugcaccagcccu

SEQ ID NO: 2954863 - RNA, 21 nt, Human
uggccagaugcaccagcccuu

SEQ ID NO: 2954864 - RNA, 13 nt, Human
uggcccaggaguu

SEQ ID NO: 2954865 - RNA, 19 nt, Human
uggcccaggaguuuggcca

SEQ ID NO: 2954866 - RNA, 14 nt, Human
uggcccaggaguuu

SEQ ID NO: 2954867 - RNA, 21 nt, Human
uggcccaggaguuuggccaga

SEQ ID NO: 2954868 - RNA, 20 nt, Human
uggcccaggaguuuggccag

SEQ ID NO: 2954869 - RNA, 22 nt, Human
uggcccaggaguuuggccagaa

SEQ ID NO: 2954870 - RNA, 13 nt, Human
uggcccagggcau

SEQ ID NO: 2954871 - RNA, 14 nt, Human
uggcccagggcauc

SEQ ID NO: 2954872 - RNA, 20 nt, Human
uggauuuaacagaaauguac

SEQ ID NO: 2954873 - RNA, 24 nt, Human
uggauuuaacagaaauguacagca

SEQ ID NO: 2954874 - RNA, 20 nt, Human
uggaggaaggaaacccagcu

SEQ ID NO: 2954875 - RNA, 18 nt, Human
uggaggaaggaaacccag

SEQ ID NO: 2954876 - RNA, 12 nt, Human
uggaggaaggaa

SEQ ID NO: 2954877 - RNA, 11 nt, Human
uggagggaagc

SEQ ID NO: 2954878 - RNA, 19 nt, Human
uggacaugcacagcuaaca

SEQ ID NO: 2954879 - RNA, 13 nt, Human
uggacaugcacag

SEQ ID NO: 2954880 - RNA, 14 nt, Human
uggaauaacaugua

SEQ ID NO: 2954881 - RNA, 15 nt, Human
uggaauaacauguaa

SEQ ID NO: 2954882 - RNA, 19 nt, Human
uggaauaacauguaauuaa

SEQ ID NO: 2954883 - RNA, 15 nt, Human
uggaauauauaacca

SEQ ID NO: 2954884 - RNA, 16 nt, Human
uggaauauauaaccag

SEQ ID NO: 2954885 - RNA, 22 nt, Human
uggaauaauccuaaacauauga

SEQ ID NO: 2954886 - RNA, 17 nt, Human
uggaauaaggagaauga

SEQ ID NO: 2954887 - RNA, 14 nt, Human
uggaauaagacaga

SEQ ID NO: 2954888 - RNA, 18 nt, Human
uggaauaagacagagacc

SEQ ID NO: 2954889 - RNA, 21 nt, Human
ugcuuuaccaauugaaguaaa

SEQ ID NO: 2954890 - RNA, 20 nt, Human
uggaaaaauagccugccucu

SEQ ID NO: 2954891 - RNA, 17 nt, Human
uggaaaaauagccugcc

SEQ ID NO: 2954892 - RNA, 17 nt, Human
uggaaacaagucaguca

SEQ ID NO: 2954893 - RNA, 21 nt, Human
uggaaagacuuuuccaacccu

SEQ ID NO: 2954894 - RNA, 23 nt, Human
uggaaacuucagcgguuuauaua

SEQ ID NO: 2954895 - RNA, 20 nt, Human
uggaaagaguaggaagacuu

SEQ ID NO: 2954896 - RNA, 21 nt, Human
uggaacauaaaauacaauguu

SEQ ID NO: 2954897 - RNA, 20 nt, Human
uggaacauaaaauacaaugu

SEQ ID NO: 2954898 - RNA, 12 nt, Human
uguguagggcgg

SEQ ID NO: 2954899 - RNA, 22 nt, Human
ugugggcuaguugggcuuccuc

SEQ ID NO: 2954900 - RNA, 18 nt, Human
uguggacacagcucuucu

SEQ ID NO: 2954901 - RNA, 19 nt, Human
uguggacacagcucuucuc

SEQ ID NO: 2954902 - RNA, 12 nt, Human
uguggcgagcca

SEQ ID NO: 2954903 - RNA, 22 nt, Human
uguggcgagccauuugucccaa

SEQ ID NO: 2954904 - RNA, 23 nt, Human
uguggcgcagcauauucaggaag

SEQ ID NO: 2954905 - RNA, 23 nt, Human
ugugcauuaucuagauacuguau

SEQ ID NO: 2954906 - RNA, 20 nt, Human
ugugcauuaucuagauacug

SEQ ID NO: 2954907 - RNA, 21 nt, Human
ugugcauuaucuagauacugu

SEQ ID NO: 2954908 - RNA, 14 nt, Human
ugugcacguacaca

SEQ ID NO: 2954909 - RNA, 15 nt, Human
ugugcacaucuguuu

SEQ ID NO: 2954910 - RNA, 17 nt, Human
ugugcacaucuguuuug

SEQ ID NO: 2954911 - RNA, 16 nt, Human
ugugcauuaucuagau

SEQ ID NO: 2954912 - RNA, 19 nt, Human
ugugcauuaucuagauacu

SEQ ID NO: 2954913 - RNA, 14 nt, Human
ugugcauuaucuag

SEQ ID NO: 2954914 - RNA, 14 nt, Human
ugugcgccuacagg

SEQ ID NO: 2954915 - RNA, 19 nt, Human
ugugcgccuacaggaguga

SEQ ID NO: 2954916 - RNA, 19 nt, Human
ugugcuaguaauuggaaag

SEQ ID NO: 2954917 - RNA, 23 nt, Human
ugugaaggcaggggaauguaugu

SEQ ID NO: 2954918 - RNA, 15 nt, Human
ugugacauguuuuau

SEQ ID NO: 2954919 - RNA, 12 nt, Human
ugugaggaagcc

SEQ ID NO: 2954920 - RNA, 20 nt, Human
ugugaggaagccgcuggggc

SEQ ID NO: 2954921 - RNA, 18 nt, Human
ugugaggaagccgcuggg

SEQ ID NO: 2954922 - RNA, 13 nt, Human
ugugaggaagccg

SEQ ID NO: 2954923 - RNA, 19 nt, Human
ugugagucaccaagcccag

SEQ ID NO: 2954924 - RNA, 21 nt, Human
ugugagucaccaagcccaguu

SEQ ID NO: 2954925 - RNA, 15 nt, Human
ugugagucaccaagc

SEQ ID NO: 2954926 - RNA, 17 nt, Human
ugugagucaccaagccc

SEQ ID NO: 2954927 - RNA, 14 nt, Human
ugucuuuggacccu

SEQ ID NO: 2954928 - RNA, 21 nt, Human
ugucuuuucuugcaugaggcu

SEQ ID NO: 2954929 - RNA, 16 nt, Human
ugucuuuggacccuga

SEQ ID NO: 2954930 - RNA, 21 nt, Human
ugugaaaagaaaaaugagccu

SEQ ID NO: 2954931 - RNA, 23 nt, Human
ugugaaaagaaaaaugagccugg

SEQ ID NO: 2954932 - RNA, 23 nt, Human
ugucuuuucuugcaugaggcuag

SEQ ID NO: 2954933 - RNA, 15 nt, Human
uguaugauucccagc

SEQ ID NO: 2954934 - RNA, 22 nt, Human
uguauucucuccuguaccucuu

SEQ ID NO: 2954935 - RNA, 13 nt, Human
ugucacacacuuu

SEQ ID NO: 2954936 - RNA, 13 nt, Human
uguauuuugaaau

SEQ ID NO: 2954937 - RNA, 17 nt, Human
ugucacacacuuuggcu

SEQ ID NO: 2954938 - RNA, 12 nt, Human
ugucacaggcag

SEQ ID NO: 2954939 - RNA, 19 nt, Human
uguauuuuacuaauaaaau

SEQ ID NO: 2954940 - RNA, 13 nt, Human
uguccccaccgca

SEQ ID NO: 2954941 - RNA, 22 nt, Human
uguccccaccgcagacaggacc

SEQ ID NO: 2954942 - RNA, 19 nt, Human
uguccccaccgcagacagg

SEQ ID NO: 2954943 - RNA, 14 nt, Human
ugucccaagugcca

SEQ ID NO: 2954944 - RNA, 15 nt, Human
ugucccaagugccaa

SEQ ID NO: 2954945 - RNA, 12 nt, Human
ugucccaagugc

SEQ ID NO: 2954946 - RNA, 13 nt, Human
ugucccaagugcc

SEQ ID NO: 2954947 - RNA, 18 nt, Human
uguccccaccgcagacag

SEQ ID NO: 2954948 - RNA, 12 nt, Human
uguccuacucug

SEQ ID NO: 2954949 - RNA, 17 nt, Human
uguccuacucuguguca

SEQ ID NO: 2954950 - RNA, 20 nt, Human
uguccuacccacccuccuuu

SEQ ID NO: 2954951 - RNA, 17 nt, Human
uguccccgacccuugcc

SEQ ID NO: 2954952 - RNA, 16 nt, Human
uguccccgacccuugc

SEQ ID NO: 2954953 - RNA, 13 nt, Human
ugucaccugaaga

SEQ ID NO: 2954954 - RNA, 16 nt, Human
ugucauuugagcaggg

SEQ ID NO: 2954955 - RNA, 19 nt, Human
ugucauuugagcagggcuc

SEQ ID NO: 2954956 - RNA, 23 nt, Human
ugucccaaaaagaaaggagggga

SEQ ID NO: 2954957 - RNA, 20 nt, Human
uguaauaaacucauuucuag

SEQ ID NO: 2954958 - RNA, 17 nt, Human
uguaauuaaguacuaug

SEQ ID NO: 2954959 - RNA, 13 nt, Human
uguacagagccca

SEQ ID NO: 2954960 - RNA, 17 nt, Human
uguacagagcccacgcc

SEQ ID NO: 2954961 - RNA, 16 nt, Human
uguacagagcccacgc

SEQ ID NO: 2954962 - RNA, 15 nt, Human
uguaccgcaauguga

SEQ ID NO: 2954963 - RNA, 16 nt, Human
uguaccgcaaugugac

SEQ ID NO: 2954964 - RNA, 18 nt, Human
uguacagagcccacgccc

SEQ ID NO: 2954965 - RNA, 14 nt, Human
uguagauguaugca

SEQ ID NO: 2954966 - RNA, 18 nt, Human
uguagauguaugcacaca

SEQ ID NO: 2954967 - RNA, 17 nt, Human
uguagcauccuggaaua

SEQ ID NO: 2954968 - RNA, 18 nt, Human
uguagcauccuggaauau

SEQ ID NO: 2954969 - RNA, 14 nt, Human
uguagcauccugga

SEQ ID NO: 2954970 - RNA, 16 nt, Human
uguagcauccuggaau

SEQ ID NO: 2954971 - RNA, 15 nt, Human
uguacgucugacagg

SEQ ID NO: 2954972 - RNA, 19 nt, Human
uguacugcauaugaaagga

SEQ ID NO: 2954973 - RNA, 22 nt, Human
uguaguguuggagaagaacuga

SEQ ID NO: 2954974 - RNA, 16 nt, Human
uguuuuaagaggcagg

SEQ ID NO: 2954975 - RNA, 18 nt, Human
uguuucuggcuuagaaca

SEQ ID NO: 2954976 - RNA, 15 nt, Human
uguuuccuggcacug

SEQ ID NO: 2954977 - RNA, 17 nt, Human
uguuuuaagaggcaggg

SEQ ID NO: 2954978 - RNA, 19 nt, Human
uguuuuaaggaugcuugua

SEQ ID NO: 2954979 - RNA, 22 nt, Human
uguuuuaaggaugcuuguacau

SEQ ID NO: 2954980 - RNA, 23 nt, Human
uguuuuaaggaugcuuguacaua

SEQ ID NO: 2954981 - RNA, 22 nt, Human
uuaaaaaaaaaccugagcccca

SEQ ID NO: 2954982 - RNA, 18 nt, Human
uuaaaugacucuucccuc

SEQ ID NO: 2954983 - RNA, 11 nt, Human
uuaaaugacuc

SEQ ID NO: 2954984 - RNA, 14 nt, Human
uuaaaugcccagcc

SEQ ID NO: 2954985 - RNA, 16 nt, Human
uuaaaugcccagcccc

SEQ ID NO: 2954986 - RNA, 15 nt, Human
uuaaaugcccagccc

SEQ ID NO: 2954987 - RNA, 20 nt, Human
uuaaauauuuugacuuguug

SEQ ID NO: 2954988 - RNA, 15 nt, Human
uuaaaauaagucuga

SEQ ID NO: 2954989 - RNA, 17 nt, Human
uuaaaauaagucugauu

SEQ ID NO: 2954990 - RNA, 14 nt, Human
uuaaaacccaagug

SEQ ID NO: 2954991 - RNA, 22 nt, Human
uuaaacuuaaucuaaauggaac

SEQ ID NO: 2954992 - RNA, 23 nt, Human
uuaaacuacauuagguugugaau

SEQ ID NO: 2954993 - RNA, 22 nt, Human
uuaaacuacauuagguugugaa

SEQ ID NO: 2954994 - RNA, 18 nt, Human
uuaaaauacacacucaaa

SEQ ID NO: 2954995 - RNA, 18 nt, Human
uuacacacuguacacaua

SEQ ID NO: 2954996 - RNA, 23 nt, Human
uuaaugagacuuuaaaagcauuu

SEQ ID NO: 2954997 - RNA, 16 nt, Human
uuaaugagacuuuaaa

SEQ ID NO: 2954998 - RNA, 18 nt, Human
uuaaugagacuuuaaaag

SEQ ID NO: 2954999 - RNA, 21 nt, Human
uuaaugagacuuuaaaagcau

SEQ ID NO: 2955000 - RNA, 22 nt, Human
uuaauuaaaacacaacaucuuu

SEQ ID NO: 2955001 - RNA, 13 nt, Human
uuacacuuuaugc

SEQ ID NO: 2955002 - RNA, 20 nt, Human
uuacacuuuaugcacaaaau

SEQ ID NO: 2955003 - RNA, 20 nt, Human
uuacauuuguauaaaauaau

SEQ ID NO: 2955004 - RNA, 12 nt, Human
uuacauuuuuaa

SEQ ID NO: 2955005 - RNA, 17 nt, Human
uuacauuuuuaagugcu

SEQ ID NO: 2955006 - RNA, 12 nt, Human
uuaacuuuuaua

SEQ ID NO: 2955007 - RNA, 13 nt, Human
uuaacuuuuauaa

SEQ ID NO: 2955008 - RNA, 13 nt, Human
uuaaaugcccagc

SEQ ID NO: 2955009 - RNA, 14 nt, Human
uuaacuuuuauaaa

SEQ ID NO: 2955010 - RNA, 14 nt, Human
uguuggagaagaac

SEQ ID NO: 2955011 - RNA, 16 nt, Human
uguuggagaagaacug

SEQ ID NO: 2955012 - RNA, 17 nt, Human
uguuggagaagaacuga

SEQ ID NO: 2955013 - RNA, 19 nt, Human
uguuggagaagaacugaaa

SEQ ID NO: 2955014 - RNA, 20 nt, Human
uguuggagaagaacugaaau

SEQ ID NO: 2955015 - RNA, 15 nt, Human
uguuggccaggcugg

SEQ ID NO: 2955016 - RNA, 16 nt, Human
uguuggccaggcuggu

SEQ ID NO: 2955017 - RNA, 17 nt, Human
uguuggcugggggccuc

SEQ ID NO: 2955018 - RNA, 19 nt, Human
uguuggcugggggccucag

SEQ ID NO: 2955019 - RNA, 18 nt, Human
uguuuaaaaucauuucug

SEQ ID NO: 2955020 - RNA, 17 nt, Human
uguuuaaaaucauuucu

SEQ ID NO: 2955021 - RNA, 14 nt, Human
uguuuaaaaucauu

SEQ ID NO: 2955022 - RNA, 16 nt, Human
uguucucucuucucca

SEQ ID NO: 2955023 - RNA, 15 nt, Human
uguucucucuucucc

SEQ ID NO: 2955024 - RNA, 19 nt, Human
uguucaucauccuaagcua

SEQ ID NO: 2955025 - RNA, 13 nt, Human
uguucaugaaaga

SEQ ID NO: 2955026 - RNA, 14 nt, Human
uguucaugaaagau

SEQ ID NO: 2955027 - RNA, 22 nt, Human
uguucaucaacagugagagacu

SEQ ID NO: 2955028 - RNA, 12 nt, Human
uguucuggcucu

SEQ ID NO: 2955029 - RNA, 16 nt, Human
uguucuggcucuucca

SEQ ID NO: 2955030 - RNA, 13 nt, Human
uguucuggcucuu

SEQ ID NO: 2955031 - RNA, 16 nt, Human
uguucucugcccucca

SEQ ID NO: 2955032 - RNA, 15 nt, Human
uguucucugcccucc

SEQ ID NO: 2955033 - RNA, 14 nt, Human
uguucucugcccuc

SEQ ID NO: 2955034 - RNA, 13 nt, Human
uguucucugcccu

SEQ ID NO: 2955035 - RNA, 23 nt, Human
uguucuuucuggcuaugcauuug

SEQ ID NO: 2955036 - RNA, 21 nt, Human
uguucuggcucuuccaggcug

SEQ ID NO: 2955037 - RNA, 20 nt, Human
uguucuggcucuuccaggcu

SEQ ID NO: 2955038 - RNA, 17 nt, Human
uguucuggcucuuccag

SEQ ID NO: 2955039 - RNA, 20 nt, Human
uguugacaugggacauuugc

SEQ ID NO: 2955040 - RNA, 20 nt, Human
ugugugaaagguacuucaaa

SEQ ID NO: 2955041 - RNA, 21 nt, Human
ugugugaaagguacuucaaau

SEQ ID NO: 2955042 - RNA, 22 nt, Human
ugugugaaagguacuucaaauc

SEQ ID NO: 2955043 - RNA, 19 nt, Human
ugugugcacguacacacac

SEQ ID NO: 2955044 - RNA, 23 nt, Human
uguguggucaacauuucucaugu

SEQ ID NO: 2955045 - RNA, 14 nt, Human
uguguggucaacau

SEQ ID NO: 2955046 - RNA, 16 nt, Human
uguguuuauugucaaa

SEQ ID NO: 2955047 - RNA, 13 nt, Human
uguguuugaagca

SEQ ID NO: 2955048 - RNA, 13 nt, Human
uguguuuugcaag

SEQ ID NO: 2955049 - RNA, 19 nt, Human
uguguuuugcaagccagau

SEQ ID NO: 2955050 - RNA, 18 nt, Human
uguucagcuccagcucac

SEQ ID NO: 2955051 - RNA, 20 nt, Human
uguucagcuccagcucacca

SEQ ID NO: 2955052 - RNA, 21 nt, Human
uguucagcuccagcucaccag

SEQ ID NO: 2955053 - RNA, 22 nt, Human
uguucagcuccagcucaccagc

SEQ ID NO: 2955054 - RNA, 18 nt, Human
uguucacuggacacuuca

SEQ ID NO: 2955055 - RNA, 19 nt, Human
uguuaguaugaggcauuug

SEQ ID NO: 2955056 - RNA, 20 nt, Human
uguuaguaugaggcauuugu

SEQ ID NO: 2955057 - RNA, 17 nt, Human
uguuaguaugaggcauu

SEQ ID NO: 2955058 - RNA, 14 nt, Human
uguuacuaaguuuu

SEQ ID NO: 2955059 - RNA, 21 nt, Human
uguuaaaagaugaaaauauuu

SEQ ID NO: 2955060 - RNA, 18 nt, Human
cuccuuugugaggaagcc

SEQ ID NO: 2955061 - RNA, 17 nt, Human
cuccuuugugaggaagc

SEQ ID NO: 2955062 - RNA, 17 nt, Human
cucgguguggagaagcg

SEQ ID NO: 2955063 - RNA, 16 nt, Human
cucgguguggagaagc

SEQ ID NO: 2955064 - RNA, 20 nt, Human
cucucccugcugcuccuagg

SEQ ID NO: 2955065 - RNA, 16 nt, Human
cucucccugcugcucc

SEQ ID NO: 2955066 - RNA, 19 nt, Human
cucucccugcugcuccuag

SEQ ID NO: 2955067 - RNA, 22 nt, Human
cucucuggccuucggccuccau

SEQ ID NO: 2955068 - RNA, 21 nt, Human
cucucuguaauaaacucauuu

SEQ ID NO: 2955069 - RNA, 16 nt, Human
cucucuguaauaaacu

SEQ ID NO: 2955070 - RNA, 19 nt, Human
cucuauguucuaagaagug

SEQ ID NO: 2955071 - RNA, 16 nt, Human
cucuccccaugauguu

SEQ ID NO: 2955072 - RNA, 15 nt, Human
cucuccccaugaugu

SEQ ID NO: 2955073 - RNA, 13 nt, Human
cucucccugcugc

SEQ ID NO: 2955074 - RNA, 14 nt, Human
cucucccugcugcu

SEQ ID NO: 2955075 - RNA, 12 nt, Human
cucuccuccaga

SEQ ID NO: 2955076 - RNA, 15 nt, Human
cucuccuccagaguc

SEQ ID NO: 2955077 - RNA, 13 nt, Human
cucuccuccagag

SEQ ID NO: 2955078 - RNA, 14 nt, Human
cucucuggccuucg

SEQ ID NO: 2955079 - RNA, 16 nt, Human
cucucuggccuucggc

SEQ ID NO: 2955080 - RNA, 13 nt, Human
cucucuggccuuc

SEQ ID NO: 2955081 - RNA, 16 nt, Human
cucuccuccagaguca

SEQ ID NO: 2955082 - RNA, 14 nt, Human
cucugcacuccccu

SEQ ID NO: 2955083 - RNA, 16 nt, Human
cucugcacuccccugc

SEQ ID NO: 2955084 - RNA, 15 nt, Human
cucugcacuccccug

SEQ ID NO: 2955085 - RNA, 19 nt, Human
cucugcacaagcugcaccc

SEQ ID NO: 2955086 - RNA, 21 nt, Human
cucugcacaagcugcacccuc

SEQ ID NO: 2955087 - RNA, 20 nt, Human
cucugcacaagcugcacccu

SEQ ID NO: 2955088 - RNA, 20 nt, Human
cucugcuccucuccccagca

SEQ ID NO: 2955089 - RNA, 21 nt, Human
cucugcuccucuccccagcaa

SEQ ID NO: 2955090 - RNA, 17 nt, Human
cucugcacuccccugcu

SEQ ID NO: 2955091 - RNA, 21 nt, Human
cucugcugacagacacaggcc

SEQ ID NO: 2955092 - RNA, 22 nt, Human
cucugcugacagacacaggccc

SEQ ID NO: 2955093 - RNA, 20 nt, Human
cucugcugacagacacaggc

SEQ ID NO: 2955094 - RNA, 13 nt, Human
cucugcugcuggc

SEQ ID NO: 2955095 - RNA, 23 nt, Human
cucugcugacagacacaggcccg

SEQ ID NO: 2955096 - RNA, 13 nt, Human
cucuguacagagc

SEQ ID NO: 2955097 - RNA, 15 nt, Human
cucuguacagagccc

SEQ ID NO: 2955098 - RNA, 14 nt, Human
cucuguacagagcc

SEQ ID NO: 2955099 - RNA, 16 nt, Human
cucugcugcuggcugg

SEQ ID NO: 2955100 - RNA, 15 nt, Human
cucugcugcuggcug

SEQ ID NO: 2955101 - RNA, 14 nt, Human
cucugcugcuggcu

SEQ ID NO: 2955102 - RNA, 16 nt, Human
cucuguacagagccca

SEQ ID NO: 2955103 - RNA, 23 nt, Human
cuccgcuuucuacccagcgagcc

SEQ ID NO: 2955104 - RNA, 19 nt, Human
cuccggcccuccagagccc

SEQ ID NO: 2955105 - RNA, 16 nt, Human
cuccuguaccucuuga

SEQ ID NO: 2955106 - RNA, 15 nt, Human
cuccuuucaccacau

SEQ ID NO: 2955107 - RNA, 14 nt, Human
cuccuuguguuacu

SEQ ID NO: 2955108 - RNA, 19 nt, Human
cuccuggccucaagugauu

SEQ ID NO: 2955109 - RNA, 18 nt, Human
cuccugggcuaagugauc

SEQ ID NO: 2955110 - RNA, 19 nt, Human
cuccuggcccacugcaucg

SEQ ID NO: 2955111 - RNA, 22 nt, Human
cuccucugcuugccaucccucc

SEQ ID NO: 2955112 - RNA, 15 nt, Human
cuccucugcugcugg

SEQ ID NO: 2955113 - RNA, 14 nt, Human
cuccucugcugcug

SEQ ID NO: 2955114 - RNA, 13 nt, Human
cuccucugcugcu

SEQ ID NO: 2955115 - RNA, 23 nt, Human
cuccaggugcacaagcuccaagc

SEQ ID NO: 2955116 - RNA, 15 nt, Human
cuccaggcuccuuua

SEQ ID NO: 2955117 - RNA, 23 nt, Human
cuccaggcuccuuuagcgcccag

SEQ ID NO: 2955118 - RNA, 20 nt, Human
cuccaggcuguaucccauga

SEQ ID NO: 2955119 - RNA, 20 nt, Human
cucccucuuucccucccuuc

SEQ ID NO: 2955120 - RNA, 22 nt, Human
cucccuccaccucccugcaaua

SEQ ID NO: 2955121 - RNA, 20 nt, Human
cucccuccaccucccugcaa

SEQ ID NO: 2955122 - RNA, 21 nt, Human
cucccuccaccucccugcaau

SEQ ID NO: 2955123 - RNA, 19 nt, Human
cucccuccaccucccugca

SEQ ID NO: 2955124 - RNA, 15 nt, Human
cucaggccagcugcu

SEQ ID NO: 2955125 - RNA, 21 nt, Human
cucaggccaaacucaccugcc

SEQ ID NO: 2955126 - RNA, 20 nt, Human
cucaggccaaacucaccugc

SEQ ID NO: 2955127 - RNA, 19 nt, Human
cucaggccaaacucaccug

SEQ ID NO: 2955128 - RNA, 11 nt, Human
cucaggccugg

SEQ ID NO: 2955129 - RNA, 22 nt, Human
cucaggccugggggcugggcag

SEQ ID NO: 2955130 - RNA, 18 nt, Human
cucaggccagcugcuugg

SEQ ID NO: 2955131 - RNA, 17 nt, Human
cucaggccagcugcuug

SEQ ID NO: 2955132 - RNA, 16 nt, Human
cucaggccagcugcuu

SEQ ID NO: 2955133 - RNA, 13 nt, Human
cucagaagacacu

SEQ ID NO: 2955134 - RNA, 15 nt, Human
cucagaagacacuga

SEQ ID NO: 2955135 - RNA, 17 nt, Human
cucagaagacacugaug

SEQ ID NO: 2955136 - RNA, 20 nt, Human
cucagaagacacugaugggc

SEQ ID NO: 2955137 - RNA, 22 nt, Human
cucagaagacacugaugggcaa

SEQ ID NO: 2955138 - RNA, 17 nt, Human
cucaccuuucccaucuu

SEQ ID NO: 2955139 - RNA, 23 nt, Human
cucagaagacacugaugggcaac

SEQ ID NO: 2955140 - RNA, 19 nt, Human
cucagccucccgaauagcu

SEQ ID NO: 2955141 - RNA, 21 nt, Human
cucagccucccgaauagcugg

SEQ ID NO: 2955142 - RNA, 22 nt, Human
cucagccucccgaauagcuggg

SEQ ID NO: 2955143 - RNA, 18 nt, Human
cucaguagucagacugga

SEQ ID NO: 2955144 - RNA, 23 nt, Human
cucaggugucccugcacuugcag

SEQ ID NO: 2955145 - RNA, 22 nt, Human
cucagucuggcccuuccuuuuc

SEQ ID NO: 2955146 - RNA, 15 nt, Human
cucaguccauagcag

SEQ ID NO: 2955147 - RNA, 17 nt, Human
cucaguccauagcagag

SEQ ID NO: 2955148 - RNA, 20 nt, Human
cucagucuggcccuuccuuu

SEQ ID NO: 2955149 - RNA, 16 nt, Human
cucaguccaugaagau

SEQ ID NO: 2955150 - RNA, 12 nt, Human
cuauguuuuugu

SEQ ID NO: 2955151 - RNA, 21 nt, Human
cucaagugauucuccugccuc

SEQ ID NO: 2955152 - RNA, 23 nt, Human
cucaauuauuuugcauuuuuucu

SEQ ID NO: 2955153 - RNA, 17 nt, Human
cuaucacugguuugguu

SEQ ID NO: 2955154 - RNA, 23 nt, Human
cuaugucauuugcuggagcucug

SEQ ID NO: 2955155 - RNA, 14 nt, Human
cuaugugagaccau

SEQ ID NO: 2955156 - RNA, 18 nt, Human
cuaucucauuuccaagca

SEQ ID NO: 2955157 - RNA, 14 nt, Human
cuaucucccccagc

SEQ ID NO: 2955158 - RNA, 13 nt, Human
cuaucucccccag

SEQ ID NO: 2955159 - RNA, 18 nt, Human
cuauguugcccaggcagg

SEQ ID NO: 2955160 - RNA, 19 nt, Human
cuauguugcccaggcaggu

SEQ ID NO: 2955161 - RNA, 21 nt, Human
cuauguugcccaggcaggucu

SEQ ID NO: 2955162 - RNA, 22 nt, Human
cuauguugcccaggcaggucuu

SEQ ID NO: 2955163 - RNA, 21 nt, Human
cuauguuaauauuuuaggugu

SEQ ID NO: 2955164 - RNA, 18 nt, Human
cuauguucuaagaaguga

SEQ ID NO: 2955165 - RNA, 14 nt, Human
cuauguuaauauuu

SEQ ID NO: 2955166 - RNA, 17 nt, Human
cuauguuaauauuuuag

SEQ ID NO: 2955167 - RNA, 15 nt, Human
cuauguuaauauuuu

SEQ ID NO: 2955168 - RNA, 13 nt, Human
cuauguuaauauu

SEQ ID NO: 2955169 - RNA, 20 nt, Human
cgcugccccuggcagccccu

SEQ ID NO: 2955170 - RNA, 19 nt, Human
cgcugccccuggcagcccc

SEQ ID NO: 2955171 - RNA, 17 nt, Human
cgcuggagugcagugag

SEQ ID NO: 2955172 - RNA, 18 nt, Human
cgcuggagugcagugagc

SEQ ID NO: 2955173 - RNA, 15 nt, Human
cgagggggcugcucc

SEQ ID NO: 2955174 - RNA, 17 nt, Human
cgagggggcugcuccca

SEQ ID NO: 2955175 - RNA, 18 nt, Human
cgagggggcugcucccac

SEQ ID NO: 2955176 - RNA, 23 nt, Human
cgagggggcugcucccaccuggc

SEQ ID NO: 2955177 - RNA, 23 nt, Human
cgccaaggcugggggaagaagcu

SEQ ID NO: 2955178 - RNA, 12 nt, Human
ccuuuucccaac

SEQ ID NO: 2955179 - RNA, 23 nt, Human
cggagucccaccuuggcugcagg

SEQ ID NO: 2955180 - RNA, 21 nt, Human
cggagucccaccuuggcugca

SEQ ID NO: 2955181 - RNA, 22 nt, Human
cggagucccaccuuggcugcag

SEQ ID NO: 2955182 - RNA, 20 nt, Human
cggagacggagucccaccuu

SEQ ID NO: 2955183 - RNA, 17 nt, Human
cggagacggagucccac

SEQ ID NO: 2955184 - RNA, 17 nt, Human
cgggccacagagaaagu

SEQ ID NO: 2955185 - RNA, 19 nt, Human
cgggcucagcaaaagaugc

SEQ ID NO: 2955186 - RNA, 12 nt, Human
cgggcucugccu

SEQ ID NO: 2955187 - RNA, 22 nt, Human
cguacacauuuuauuuuauuau

SEQ ID NO: 2955188 - RNA, 20 nt, Human
cgguggcucacgccuguaau

SEQ ID NO: 2955189 - RNA, 14 nt, Human
cuaaguuuuuaugg

SEQ ID NO: 2955190 - RNA, 19 nt, Human
cuaauaaaaaggugaccau

SEQ ID NO: 2955191 - RNA, 20 nt, Human
cuacaaaaacacagcaaggg

SEQ ID NO: 2955192 - RNA, 19 nt, Human
cuacaaaaagcauaaaaau

SEQ ID NO: 2955193 - RNA, 18 nt, Human
cuaaguaucaaguauaga

SEQ ID NO: 2955194 - RNA, 22 nt, Human
cgugagccacugcaccgggcca

SEQ ID NO: 2955195 - RNA, 14 nt, Human
cgugaggccagaga

SEQ ID NO: 2955196 - RNA, 14 nt, Human
cgugagccacugca

SEQ ID NO: 2955197 - RNA, 15 nt, Human
cgugagccacugcac

SEQ ID NO: 2955198 - RNA, 20 nt, Human
cgugagccacugcaccgggc

SEQ ID NO: 2955199 - RNA, 14 nt, Human
cgugacaacacuug

SEQ ID NO: 2955200 - RNA, 15 nt, Human
cgugacaacacuugu

SEQ ID NO: 2955201 - RNA, 12 nt, Human
cgugacaacacu

SEQ ID NO: 2955202 - RNA, 15 nt, Human
cguguuaugacucca

SEQ ID NO: 2955203 - RNA, 19 nt, Human
cguguuaugacuccagaau

SEQ ID NO: 2955204 - RNA, 18 nt, Human
cgugaguccuggcauggg

SEQ ID NO: 2955205 - RNA, 19 nt, Human
cgugaguccuggcauggga

SEQ ID NO: 2955206 - RNA, 11 nt, Human
cuaaagcugcc

SEQ ID NO: 2955207 - RNA, 13 nt, Human
cuaacuuggguua

SEQ ID NO: 2955208 - RNA, 22 nt, Human
cuaacuugucuuuggacccuga

SEQ ID NO: 2955209 - RNA, 14 nt, Human
cuaacuugucuuug

SEQ ID NO: 2955210 - RNA, 20 nt, Human
cuaacgaaguauccuucagc

SEQ ID NO: 2955211 - RNA, 22 nt, Human
ccuucuguccuacucuguguca

SEQ ID NO: 2955212 - RNA, 20 nt, Human
ccuucuguccuacucugugu

SEQ ID NO: 2955213 - RNA, 21 nt, Human
ccuucuguccuacucuguguc

SEQ ID NO: 2955214 - RNA, 17 nt, Human
ccuucucuucacaguca

SEQ ID NO: 2955215 - RNA, 23 nt, Human
ccuucucuccagccccuggaugc

SEQ ID NO: 2955216 - RNA, 21 nt, Human
ccuucucuccagccccuggau

SEQ ID NO: 2955217 - RNA, 14 nt, Human
ccuucucugaagga

SEQ ID NO: 2955218 - RNA, 16 nt, Human
ccuucucugaaggaca

SEQ ID NO: 2955219 - RNA, 20 nt, Human
ccuucucuccagccccugga

SEQ ID NO: 2955220 - RNA, 13 nt, Human
ccuuccccuggca

SEQ ID NO: 2955221 - RNA, 15 nt, Human
ccuuucaauaggaaa

SEQ ID NO: 2955222 - RNA, 13 nt, Human
ccuuucccuuggu

SEQ ID NO: 2955223 - RNA, 17 nt, Human
ccuuucaauaggaaaaa

SEQ ID NO: 2955224 - RNA, 13 nt, Human
ccuguucagcucc

SEQ ID NO: 2955225 - RNA, 18 nt, Human
ccuguucccaugagauga

SEQ ID NO: 2955226 - RNA, 17 nt, Human
ccuguucuggcagaguu

SEQ ID NO: 2955227 - RNA, 12 nt, Human
ccuguucuggca

SEQ ID NO: 2955228 - RNA, 23 nt, Human
ccuguucagcuccagcucaccag

SEQ ID NO: 2955229 - RNA, 20 nt, Human
ccuguucagcuccagcucac

SEQ ID NO: 2955230 - RNA, 21 nt, Human
ccuguucagcuccagcucacc

SEQ ID NO: 2955231 - RNA, 14 nt, Human
ccuguucagcucca

SEQ ID NO: 2955232 - RNA, 15 nt, Human
ccuguucagcuccag

SEQ ID NO: 2955233 - RNA, 16 nt, Human
ccuguucagcuccagc

SEQ ID NO: 2955234 - RNA, 19 nt, Human
ccuguucagcuccagcuca

SEQ ID NO: 2955235 - RNA, 16 nt, Human
ccuguugggccaggag

SEQ ID NO: 2955236 - RNA, 20 nt, Human
ccuguugggccaggagccuc

SEQ ID NO: 2955237 - RNA, 19 nt, Human
ccuguugggccaggagccu

SEQ ID NO: 2955238 - RNA, 18 nt, Human
ccuguugggccaggagcc

SEQ ID NO: 2955239 - RNA, 17 nt, Human
ccuguugggccaggagc

SEQ ID NO: 2955240 - RNA, 16 nt, Human
ccuuagcaaauucugu

SEQ ID NO: 2955241 - RNA, 19 nt, Human
ccuuagcagggaaacagcu

SEQ ID NO: 2955242 - RNA, 20 nt, Human
ccuuagcagggaaacagcua

SEQ ID NO: 2955243 - RNA, 12 nt, Human
ccuucccaccuc

SEQ ID NO: 2955244 - RNA, 19 nt, Human
ccuucccaccucucucacu

SEQ ID NO: 2955245 - RNA, 14 nt, Human
ccuucccaccucuc

SEQ ID NO: 2955246 - RNA, 18 nt, Human
ccuuauggaacacucuga

SEQ ID NO: 2955247 - RNA, 17 nt, Human
ccuuauggaacacucug

SEQ ID NO: 2955248 - RNA, 16 nt, Human
ccuuauggaacacucu

SEQ ID NO: 2955249 - RNA, 14 nt, Human
ccuuauggaacacu

SEQ ID NO: 2955250 - RNA, 20 nt, Human
ccuuauggaacacucugaga

SEQ ID NO: 2955251 - RNA, 19 nt, Human
ccuuauggaacacucugag

SEQ ID NO: 2955252 - RNA, 22 nt, Human
ccuuauggaacacucugagacu

SEQ ID NO: 2955253 - RNA, 12 nt, Human
ccuuauggaaca

SEQ ID NO: 2955254 - RNA, 16 nt, Human
ccucaugcugccaaua

SEQ ID NO: 2955255 - RNA, 15 nt, Human
ccucaugcugccaau

SEQ ID NO: 2955256 - RNA, 13 nt, Human
ccucaugcugcca

SEQ ID NO: 2955257 - RNA, 11 nt, Human
ccucaggcagg

SEQ ID NO: 2955258 - RNA, 23 nt, Human
ccucccaacucaccccagcccca

SEQ ID NO: 2955259 - RNA, 21 nt, Human
ccucccaacucaccccagccc

SEQ ID NO: 2955260 - RNA, 20 nt, Human
ccucccaacucaccccagcc

SEQ ID NO: 2955261 - RNA, 17 nt, Human
ccucccaacucacccca

SEQ ID NO: 2955262 - RNA, 14 nt, Human
ccuccuaaaacaac

SEQ ID NO: 2955263 - RNA, 16 nt, Human
ccucgaacuggcugca

SEQ ID NO: 2955264 - RNA, 15 nt, Human
ccucgaacuggcugc

SEQ ID NO: 2955265 - RNA, 18 nt, Human
ccuccuuugugaggaagc

SEQ ID NO: 2955266 - RNA, 20 nt, Human
ccuccuuugugaggaagccg

SEQ ID NO: 2955267 - RNA, 19 nt, Human
ccuccuuugugaggaagcc

SEQ ID NO: 2955268 - RNA, 20 nt, Human
ccucugccucugacacacag

SEQ ID NO: 2955269 - RNA, 21 nt, Human
ccucugccucugacacacagc

SEQ ID NO: 2955270 - RNA, 23 nt, Human
ccucugccucugacacacagcuc

SEQ ID NO: 2955271 - RNA, 11 nt, Human
ccucugccuga

SEQ ID NO: 2955272 - RNA, 20 nt, Human
ccucugccugaagucacaca

SEQ ID NO: 2955273 - RNA, 21 nt, Human
ccucuccugggcagcugccuc

SEQ ID NO: 2955274 - RNA, 22 nt, Human
ccucuccugggcagcugccucc

SEQ ID NO: 2955275 - RNA, 17 nt, Human
ccucuccugggcagcug

SEQ ID NO: 2955276 - RNA, 18 nt, Human
ccucuccugggcagcugc

SEQ ID NO: 2955277 - RNA, 19 nt, Human
ccucuccugggcagcugcc

SEQ ID NO: 2955278 - RNA, 20 nt, Human
ccucuccugggcagcugccu

SEQ ID NO: 2955279 - RNA, 14 nt, Human
ccucuccugggcag

SEQ ID NO: 2955280 - RNA, 15 nt, Human
ccucuccugggcagc

SEQ ID NO: 2955281 - RNA, 16 nt, Human
ccucuccugggcagcu

SEQ ID NO: 2955282 - RNA, 12 nt, Human
ccugaggggccu

SEQ ID NO: 2955283 - RNA, 16 nt, Human
ccugaggggccucuua

SEQ ID NO: 2955284 - RNA, 21 nt, Human
ccugaggcugggcucccuucc

SEQ ID NO: 2955285 - RNA, 19 nt, Human
ccugaggcugggcucccuu

SEQ ID NO: 2955286 - RNA, 17 nt, Human
ccugaggcugggcuccc

SEQ ID NO: 2955287 - RNA, 16 nt, Human
ccugaggcugggcucc

SEQ ID NO: 2955288 - RNA, 17 nt, Human
ccugcaggcagccaggc

SEQ ID NO: 2955289 - RNA, 16 nt, Human
ccugcaggcagccagg

SEQ ID NO: 2955290 - RNA, 12 nt, Human
ccugcagagggc

SEQ ID NO: 2955291 - RNA, 15 nt, Human
ccugcaggcagccag

SEQ ID NO: 2955292 - RNA, 21 nt, Human
ccugcaggcagccaggccaca

SEQ ID NO: 2955293 - RNA, 20 nt, Human
ccugcaggcagccaggccac

SEQ ID NO: 2955294 - RNA, 19 nt, Human
ccugcaggcagccaggcca

SEQ ID NO: 2955295 - RNA, 18 nt, Human
ccugcaggcagccaggcc

SEQ ID NO: 2955296 - RNA, 23 nt, Human
ccugcaggcagccaggccacaag

SEQ ID NO: 2955297 - RNA, 19 nt, Human
ccucuuuggucuacacugu

SEQ ID NO: 2955298 - RNA, 16 nt, Human
ccucuuugagugaagc

SEQ ID NO: 2955299 - RNA, 22 nt, Human
ccugcugcaguugccagucacc

SEQ ID NO: 2955300 - RNA, 11 nt, Human
ccugcugcagu

SEQ ID NO: 2955301 - RNA, 16 nt, Human
ccugcugcaguugcca

SEQ ID NO: 2955302 - RNA, 12 nt, Human
ccugcugcaguu

SEQ ID NO: 2955303 - RNA, 15 nt, Human
ccugccucuucucua

SEQ ID NO: 2955304 - RNA, 20 nt, Human
ccugccuccuuugugaggaa

SEQ ID NO: 2955305 - RNA, 19 nt, Human
ccugccuccuuugugagga

SEQ ID NO: 2955306 - RNA, 15 nt, Human
ccugccuccuuugug

SEQ ID NO: 2955307 - RNA, 13 nt, Human
ccugccuccuuug

SEQ ID NO: 2955308 - RNA, 22 nt, Human
ccugccuccuuugugaggaagc

SEQ ID NO: 2955309 - RNA, 21 nt, Human
ccugccuccuuugugaggaag

SEQ ID NO: 2955310 - RNA, 23 nt, Human
ccugccuccuuugugaggaagcc

SEQ ID NO: 2955311 - RNA, 16 nt, Human
cccugaaagcccugag

SEQ ID NO: 2955312 - RNA, 12 nt, Human
cccugaaggccc

SEQ ID NO: 2955313 - RNA, 19 nt, Human
cccugaaggccccgcccag

SEQ ID NO: 2955314 - RNA, 16 nt, Human
cccugaaggccccgcc

SEQ ID NO: 2955315 - RNA, 14 nt, Human
cccugaaggccccg

SEQ ID NO: 2955316 - RNA, 13 nt, Human
cccugaaggcccc

SEQ ID NO: 2955317 - RNA, 14 nt, Human
cccugacaacacuc

SEQ ID NO: 2955318 - RNA, 22 nt, Human
cccugaaggccccgcccaggcu

SEQ ID NO: 2955319 - RNA, 20 nt, Human
cccugaaggccccgcccagg

SEQ ID NO: 2955320 - RNA, 20 nt, Human
cccugaauuuaaauagcuuu

SEQ ID NO: 2955321 - RNA, 22 nt, Human
cccugacaacacucauugaccu

SEQ ID NO: 2955322 - RNA, 16 nt, Human
cccugacaacacucau

SEQ ID NO: 2955323 - RNA, 18 nt, Human
cccugaaagcccugagcu

SEQ ID NO: 2955324 - RNA, 13 nt, Human
cccucggagaaga

SEQ ID NO: 2955325 - RNA, 20 nt, Human
cccuggcacuggcaaacagg

SEQ ID NO: 2955326 - RNA, 16 nt, Human
cccuggcacuggcaaa

SEQ ID NO: 2955327 - RNA, 13 nt, Human
cccuggcacuggc

SEQ ID NO: 2955328 - RNA, 13 nt, Human
cccuggaugcagc

SEQ ID NO: 2955329 - RNA, 21 nt, Human
cccuggaugcagccucacagu

SEQ ID NO: 2955330 - RNA, 17 nt, Human
cccuggaugcagccuca

SEQ ID NO: 2955331 - RNA, 22 nt, Human
cccugcccaccuggccucugca

SEQ ID NO: 2955332 - RNA, 14 nt, Human
cccugcccggcugc

SEQ ID NO: 2955333 - RNA, 17 nt, Human
cccugcccggcugcgga

SEQ ID NO: 2955334 - RNA, 14 nt, Human
cccugagcaggauu

SEQ ID NO: 2955335 - RNA, 20 nt, Human
cccugcccaccuggccucug

SEQ ID NO: 2955336 - RNA, 16 nt, Human
cccugagcuuucugcu

SEQ ID NO: 2955337 - RNA, 15 nt, Human
cccuuccucuuucca

SEQ ID NO: 2955338 - RNA, 19 nt, Human
ccgaaagggacuuggaagc

SEQ ID NO: 2955339 - RNA, 17 nt, Human
ccgaaaacguggcugcu

SEQ ID NO: 2955340 - RNA, 16 nt, Human
ccgaaaacguggcugc

SEQ ID NO: 2955341 - RNA, 16 nt, Human
ccgaauagcugggacu

SEQ ID NO: 2955342 - RNA, 17 nt, Human
ccgaauagcugggacua

SEQ ID NO: 2955343 - RNA, 15 nt, Human
ccgcagacaggacca

SEQ ID NO: 2955344 - RNA, 13 nt, Human
ccgaccagacacc

SEQ ID NO: 2955345 - RNA, 17 nt, Human
ccgaccagacaccuuga

SEQ ID NO: 2955346 - RNA, 12 nt, Human
ccgcccaggcuu

SEQ ID NO: 2955347 - RNA, 12 nt, Human
ccgcccaaggcc

SEQ ID NO: 2955348 - RNA, 13 nt, Human
ccgcccaaggccu

SEQ ID NO: 2955349 - RNA, 14 nt, Human
ccgcccaaggccuu

SEQ ID NO: 2955350 - RNA, 17 nt, Human
ccgcccaaggccuuccc

SEQ ID NO: 2955351 - RNA, 17 nt, Human
ccgcagacaggaccagg

SEQ ID NO: 2955352 - RNA, 16 nt, Human
ccgcagacaggaccag

SEQ ID NO: 2955353 - RNA, 23 nt, Human
cccugugauggggcccugccucc

SEQ ID NO: 2955354 - RNA, 22 nt, Human
cccugugauggggcccugccuc

SEQ ID NO: 2955355 - RNA, 21 nt, Human
cccugugauggggcccugccu

SEQ ID NO: 2955356 - RNA, 18 nt, Human
ccggcaggguccuagaaa

SEQ ID NO: 2955357 - RNA, 17 nt, Human
ccggcccuccagagccc

SEQ ID NO: 2955358 - RNA, 13 nt, Human
ccggcccuccaga

SEQ ID NO: 2955359 - RNA, 16 nt, Human
ccggcccuccagagcc

SEQ ID NO: 2955360 - RNA, 15 nt, Human
ccggccccugcuggu

SEQ ID NO: 2955361 - RNA, 16 nt, Human
ccggccaccugcggug

SEQ ID NO: 2955362 - RNA, 19 nt, Human
ccuagcauacguacacauu

SEQ ID NO: 2955363 - RNA, 17 nt, Human
ccuagcacuuugggagg

SEQ ID NO: 2955364 - RNA, 20 nt, Human
ccuagccugugccucuggga

SEQ ID NO: 2955365 - RNA, 14 nt, Human
ccuaaucuucugaa

SEQ ID NO: 2955366 - RNA, 12 nt, Human
ccggcuccaggc

SEQ ID NO: 2955367 - RNA, 13 nt, Human
ccggcuccaggcu

SEQ ID NO: 2955368 - RNA, 14 nt, Human
ccggcuccaggcuc

SEQ ID NO: 2955369 - RNA, 15 nt, Human
ccggcuccaggcucc

SEQ ID NO: 2955370 - RNA, 15 nt, Human
ccgucuaccugaggg

SEQ ID NO: 2955371 - RNA, 14 nt, Human
ccgucuaccugagg

SEQ ID NO: 2955372 - RNA, 15 nt, Human
ccuaacgaaguaucc

SEQ ID NO: 2955373 - RNA, 20 nt, Human
ccuaacgaaguauccuucag

SEQ ID NO: 2955374 - RNA, 16 nt, Human
ccgugaggccagagac

SEQ ID NO: 2955375 - RNA, 14 nt, Human
ccgugaggccagag

SEQ ID NO: 2955376 - RNA, 13 nt, Human
ccgugaggccaga

SEQ ID NO: 2955377 - RNA, 12 nt, Human
ccgugaggccag

SEQ ID NO: 2955378 - RNA, 17 nt, Human
ccgucuaccugaggggc

SEQ ID NO: 2955379 - RNA, 22 nt, Human
ccauuguggucacaggaaguag

SEQ ID NO: 2955380 - RNA, 22 nt, Human
ccauuggggcucccagccaggc

SEQ ID NO: 2955381 - RNA, 20 nt, Human
ccauuggggcucccagccag

SEQ ID NO: 2955382 - RNA, 21 nt, Human
ccauuggggcucccagccagg

SEQ ID NO: 2955383 - RNA, 19 nt, Human
ccauuggggcucccagcca

SEQ ID NO: 2955384 - RNA, 13 nt, Human
ccauuuaaagcuu

SEQ ID NO: 2955385 - RNA, 18 nt, Human
cccaccaucaugucuggc

SEQ ID NO: 2955386 - RNA, 15 nt, Human
cccacccaagggccu

SEQ ID NO: 2955387 - RNA, 15 nt, Human
cccaagcucugcucc

SEQ ID NO: 2955388 - RNA, 17 nt, Human
cccaagcucugcuccuc

SEQ ID NO: 2955389 - RNA, 18 nt, Human
cccaccgcagacaggacc

SEQ ID NO: 2955390 - RNA, 15 nt, Human
cccaccgcagacagg

SEQ ID NO: 2955391 - RNA, 17 nt, Human
ccaugggccuccugugu

SEQ ID NO: 2955392 - RNA, 18 nt, Human
ccaugggcacugugggua

SEQ ID NO: 2955393 - RNA, 18 nt, Human
ccaugaggaacaaggcaa

SEQ ID NO: 2955394 - RNA, 17 nt, Human
ccaugaggaacaaggca

SEQ ID NO: 2955395 - RNA, 16 nt, Human
ccaugaggaacaaggc

SEQ ID NO: 2955396 - RNA, 17 nt, Human
cccagcccacuucugcc

SEQ ID NO: 2955397 - RNA, 19 nt, Human
cccagcccacuucugccau

SEQ ID NO: 2955398 - RNA, 23 nt, Human
cccagccccaaaacucuccucug

SEQ ID NO: 2955399 - RNA, 21 nt, Human
cccagccccaaaacucuccuc

SEQ ID NO: 2955400 - RNA, 19 nt, Human
cccaggcuggcgugcagug

SEQ ID NO: 2955401 - RNA, 20 nt, Human
cccaggcuggcgugcagugg

SEQ ID NO: 2955402 - RNA, 18 nt, Human
cccaggcuggcgugcagu

SEQ ID NO: 2955403 - RNA, 16 nt, Human
cccagggcaucuggga

SEQ ID NO: 2955404 - RNA, 17 nt, Human
cccagggcaucugggag

SEQ ID NO: 2955405 - RNA, 14 nt, Human
cccauccucuguac

SEQ ID NO: 2955406 - RNA, 19 nt, Human
cccauccucuguacagagc

SEQ ID NO: 2955407 - RNA, 15 nt, Human
cccauccucuguaca

SEQ ID NO: 2955408 - RNA, 20 nt, Human
cccauccucuguacagagcc

SEQ ID NO: 2955409 - RNA, 14 nt, Human
cccauucuuggccc

SEQ ID NO: 2955410 - RNA, 23 nt, Human
cccauucugccugcccaggcccc

SEQ ID NO: 2955411 - RNA, 12 nt, Human
ccccagccccaa

SEQ ID NO: 2955412 - RNA, 10 nt, Human
ccccagcccc

SEQ ID NO: 2955413 - RNA, 21 nt, Human
ccccauucugccugcccaggc

SEQ ID NO: 2955414 - RNA, 14 nt, Human
ccccagccccaaaa

SEQ ID NO: 2955415 - RNA, 14 nt, Human
ccccagccccaucc

SEQ ID NO: 2955416 - RNA, 20 nt, Human
ccccaaaacucuccucugcu

SEQ ID NO: 2955417 - RNA, 18 nt, Human
ccccaaaacucuccucug

SEQ ID NO: 2955418 - RNA, 13 nt, Human
ccccggccaccug

SEQ ID NO: 2955419 - RNA, 18 nt, Human
ccccggccaccugcggug

SEQ ID NO: 2955420 - RNA, 14 nt, Human
ccccggccaccugc

SEQ ID NO: 2955421 - RNA, 14 nt, Human
ccccgcccaggcuu

SEQ ID NO: 2955422 - RNA, 12 nt, Human
ccccgcccaggc

SEQ ID NO: 2955423 - RNA, 20 nt, Human
cccccuguggaugcugcugc

SEQ ID NO: 2955424 - RNA, 14 nt, Human
cccccuuccaugga

SEQ ID NO: 2955425 - RNA, 15 nt, Human
ccccauuguggucac

SEQ ID NO: 2955426 - RNA, 13 nt, Human
ccagaugcaccag

SEQ ID NO: 2955427 - RNA, 14 nt, Human
ccagaugcaccagc

SEQ ID NO: 2955428 - RNA, 13 nt, Human
ccagagagggugg

SEQ ID NO: 2955429 - RNA, 18 nt, Human
ccagagacacaagccuuc

SEQ ID NO: 2955430 - RNA, 16 nt, Human
ccagagacacaagccu

SEQ ID NO: 2955431 - RNA, 17 nt, Human
ccagacccggcugcgug

SEQ ID NO: 2955432 - RNA, 16 nt, Human
ccagacccggcugcgu

SEQ ID NO: 2955433 - RNA, 14 nt, Human
ccacuuuuguucuu

SEQ ID NO: 2955434 - RNA, 15 nt, Human
ccacuuuuguucuug

SEQ ID NO: 2955435 - RNA, 21 nt, Human
ccacuuuuguucuugguuugu

SEQ ID NO: 2955436 - RNA, 22 nt, Human
ccacuuuuguucuugguuugua

SEQ ID NO: 2955437 - RNA, 13 nt, Human
ccacuuucuagcc

SEQ ID NO: 2955438 - RNA, 19 nt, Human
ccacuuucuagccagagga

SEQ ID NO: 2955439 - RNA, 18 nt, Human
ccacuuucuagccagagg

SEQ ID NO: 2955440 - RNA, 20 nt, Human
ccacuuucuagccagaggag

SEQ ID NO: 2955441 - RNA, 20 nt, Human
ccacuuggucugugagaugc

SEQ ID NO: 2955442 - RNA, 22 nt, Human
ccacuuggucugugagaugcua

SEQ ID NO: 2955443 - RNA, 15 nt, Human
ccacuuggucuguga

SEQ ID NO: 2955444 - RNA, 16 nt, Human
ccacuuggucugugag

SEQ ID NO: 2955445 - RNA, 17 nt, Human
ccacuuggucugugaga

SEQ ID NO: 2955446 - RNA, 19 nt, Human
ccacuuggucugugagaug

SEQ ID NO: 2955447 - RNA, 19 nt, Human
ccacugcacuauagccuag

SEQ ID NO: 2955448 - RNA, 20 nt, Human
ccacugcacuauagccuagg

SEQ ID NO: 2955449 - RNA, 13 nt, Human
ccacugcaccggg

SEQ ID NO: 2955450 - RNA, 14 nt, Human
ccacugcaccgggc

SEQ ID NO: 2955451 - RNA, 17 nt, Human
ccacugcaccgggccac

SEQ ID NO: 2955452 - RNA, 19 nt, Human
ccacugcaccgggccacag

SEQ ID NO: 2955453 - RNA, 12 nt, Human
ccacuuggucug

SEQ ID NO: 2955454 - RNA, 18 nt, Human
ccacuugagugucaagcu

SEQ ID NO: 2955455 - RNA, 17 nt, Human
ccaggaaaggcuccagg

SEQ ID NO: 2955456 - RNA, 19 nt, Human
ccaggaaaggcuccaggag

SEQ ID NO: 2955457 - RNA, 18 nt, Human
ccaggaaaggcuccagga

SEQ ID NO: 2955458 - RNA, 20 nt, Human
ccaggaaaggcuccaggagc

SEQ ID NO: 2955459 - RNA, 21 nt, Human
ccagcgagcccugguggcagu

SEQ ID NO: 2955460 - RNA, 18 nt, Human
ccagccccuucugaccca

SEQ ID NO: 2955461 - RNA, 17 nt, Human
ccagccccuucugaccc

SEQ ID NO: 2955462 - RNA, 16 nt, Human
ccagccccuucugacc

SEQ ID NO: 2955463 - RNA, 15 nt, Human
ccagccccuucugac

SEQ ID NO: 2955464 - RNA, 18 nt, Human
ccagccccuggaugcagc

SEQ ID NO: 2955465 - RNA, 18 nt, Human
ccagccccauccucugua

SEQ ID NO: 2955466 - RNA, 23 nt, Human
ccagccccauccucuguacagag

SEQ ID NO: 2955467 - RNA, 13 nt, Human
ccagcagccugga

SEQ ID NO: 2955468 - RNA, 15 nt, Human
ccagccccuggaugc

SEQ ID NO: 2955469 - RNA, 14 nt, Human
ccagccccuggaug

SEQ ID NO: 2955470 - RNA, 13 nt, Human
ccagccccuggau

SEQ ID NO: 2955471 - RNA, 12 nt, Human
ccagcagaaaug

SEQ ID NO: 2955472 - RNA, 12 nt, Human
ccagcagccugg

SEQ ID NO: 2955473 - RNA, 11 nt, Human
ccagcagccug

SEQ ID NO: 2955474 - RNA, 16 nt, Human
ccagcagaaaugccuu

SEQ ID NO: 2955475 - RNA, 17 nt, Human
ccagcagaaaugccuua

SEQ ID NO: 2955476 - RNA, 22 nt, Human
ccagcagaaaugccuuacccuc

SEQ ID NO: 2955477 - RNA, 15 nt, Human
ccaggcagcagacac

SEQ ID NO: 2955478 - RNA, 17 nt, Human
ccaggcagcagacacau

SEQ ID NO: 2955479 - RNA, 18 nt, Human
ccaggaguuuggccagaa

SEQ ID NO: 2955480 - RNA, 17 nt, Human
ccaggaguuuggccaga

SEQ ID NO: 2955481 - RNA, 16 nt, Human
ccaggaguuuggccag

SEQ ID NO: 2955482 - RNA, 15 nt, Human
ccaggaguuuggcca

SEQ ID NO: 2955483 - RNA, 14 nt, Human
ccaggaguuuggcc

SEQ ID NO: 2955484 - RNA, 18 nt, Human
ccagucaccccggccacc

SEQ ID NO: 2955485 - RNA, 17 nt, Human
ccagucaccccggccac

SEQ ID NO: 2955486 - RNA, 16 nt, Human
ccagucaccccggcca

SEQ ID NO: 2955487 - RNA, 22 nt, Human
ccaguaucuugaagacuuuucu

SEQ ID NO: 2955488 - RNA, 19 nt, Human
ccaguaucuugaagacuuu

SEQ ID NO: 2955489 - RNA, 13 nt, Human
ccaguaucuugaa

SEQ ID NO: 2955490 - RNA, 22 nt, Human
ccaggggugggacacccuguga

SEQ ID NO: 2955491 - RNA, 21 nt, Human
ccaggggugggacacccugug

SEQ ID NO: 2955492 - RNA, 20 nt, Human
ccaggggugggacacccugu

SEQ ID NO: 2955493 - RNA, 19 nt, Human
ccaggggugggacacccug

SEQ ID NO: 2955494 - RNA, 15 nt, Human
ccaggggccaugaau

SEQ ID NO: 2955495 - RNA, 19 nt, Human
cauuauauuuauuacugua

SEQ ID NO: 2955496 - RNA, 18 nt, Human
cauguucuuaauucuuag

SEQ ID NO: 2955497 - RNA, 18 nt, Human
cauguuggccaggcuggu

SEQ ID NO: 2955498 - RNA, 17 nt, Human
cauguuggccaggcugg

SEQ ID NO: 2955499 - RNA, 19 nt, Human
caugucagucugcuuagaa

SEQ ID NO: 2955500 - RNA, 21 nt, Human
cauguuacauaagauaaaugu

SEQ ID NO: 2955501 - RNA, 13 nt, Human
cauguucuuaauu

SEQ ID NO: 2955502 - RNA, 16 nt, Human
cauguucuuaauucuu

SEQ ID NO: 2955503 - RNA, 16 nt, Human
cauguccaagaagccc

SEQ ID NO: 2955504 - RNA, 15 nt, Human
cauguccaagaagcc

SEQ ID NO: 2955505 - RNA, 16 nt, Human
cauguuacauaagaua

SEQ ID NO: 2955506 - RNA, 17 nt, Human
cauguuacauaagauaa

SEQ ID NO: 2955507 - RNA, 20 nt, Human
cauucuccuuguguuacuaa

SEQ ID NO: 2955508 - RNA, 16 nt, Human
cauuauguuaauauuu

SEQ ID NO: 2955509 - RNA, 15 nt, Human
cauuauguuaauauu

SEQ ID NO: 2955510 - RNA, 14 nt, Human
cauuauguuaauau

SEQ ID NO: 2955511 - RNA, 17 nt, Human
cauuauguuaauauuuc

SEQ ID NO: 2955512 - RNA, 21 nt, Human
cauucuccaccugccagggac

SEQ ID NO: 2955513 - RNA, 19 nt, Human
cauucuccaccugccaggg

SEQ ID NO: 2955514 - RNA, 18 nt, Human
cauucuccaccugccagg

SEQ ID NO: 2955515 - RNA, 17 nt, Human
cauucuccaccugccag

SEQ ID NO: 2955516 - RNA, 12 nt, Human
caugcaagguca

SEQ ID NO: 2955517 - RNA, 15 nt, Human
caugcaaggucauuu

SEQ ID NO: 2955518 - RNA, 13 nt, Human
caugacaaagacu

SEQ ID NO: 2955519 - RNA, 17 nt, Human
caugcuccuggcccacu

SEQ ID NO: 2955520 - RNA, 16 nt, Human
caugcuccuggcccac

SEQ ID NO: 2955521 - RNA, 14 nt, Human
caugcuccuggccc

SEQ ID NO: 2955522 - RNA, 18 nt, Human
caugggaaaggggaaguu

SEQ ID NO: 2955523 - RNA, 21 nt, Human
cauggccucuucagaucucua

SEQ ID NO: 2955524 - RNA, 14 nt, Human
ccaaagugcuggga

SEQ ID NO: 2955525 - RNA, 22 nt, Human
ccaaaguacacuguuucaaacu

SEQ ID NO: 2955526 - RNA, 23 nt, Human
ccaauggacuaacuugucuuugg

SEQ ID NO: 2955527 - RNA, 15 nt, Human
ccaaaucagcugcua

SEQ ID NO: 2955528 - RNA, 23 nt, Human
ccaaaucagcugcuacuacuccu

SEQ ID NO: 2955529 - RNA, 13 nt, Human
ccaacucacccca

SEQ ID NO: 2955530 - RNA, 16 nt, Human
ccaagcucugcuccuc

SEQ ID NO: 2955531 - RNA, 14 nt, Human
ccaagcucugcucc

SEQ ID NO: 2955532 - RNA, 15 nt, Human
ccaagcucugcuccu

SEQ ID NO: 2955533 - RNA, 21 nt, Human
ccaacucaccccagccccaaa

SEQ ID NO: 2955534 - RNA, 21 nt, Human
ccaacuccagaaagugacaag

SEQ ID NO: 2955535 - RNA, 16 nt, Human
cauuggggcucccagc

SEQ ID NO: 2955536 - RNA, 18 nt, Human
cauuuaggugaggaagca

SEQ ID NO: 2955537 - RNA, 22 nt, Human
cauuggggcucccagccaggcc

SEQ ID NO: 2955538 - RNA, 17 nt, Human
cauuggggcucccagcc

SEQ ID NO: 2955539 - RNA, 18 nt, Human
cauuggggcucccagcca

SEQ ID NO: 2955540 - RNA, 19 nt, Human
cauuggggcucccagccag

SEQ ID NO: 2955541 - RNA, 21 nt, Human
cauuggggcucccagccaggc

SEQ ID NO: 2955542 - RNA, 16 nt, Human
cauuuaggugaggaag

SEQ ID NO: 2955543 - RNA, 23 nt, Human
cauuuuuuuuaagaaaaaggaug

SEQ ID NO: 2955544 - RNA, 14 nt, Human
cauuuguauaaaau

SEQ ID NO: 2955545 - RNA, 16 nt, Human
cauuuguauaaaauaa

SEQ ID NO: 2955546 - RNA, 14 nt, Human
ccaaaaggcagaag

SEQ ID NO: 2955547 - RNA, 23 nt, Human
cauaaugcgugcauaccacuuuu

SEQ ID NO: 2955548 - RNA, 16 nt, Human
cauacaguuugcacuu

SEQ ID NO: 2955549 - RNA, 23 nt, Human
cauacaggaagguagaaauaucu

SEQ ID NO: 2955550 - RNA, 22 nt, Human
cauauuaccacagacauacuaa

SEQ ID NO: 2955551 - RNA, 16 nt, Human
cauagguuuaauaauu

SEQ ID NO: 2955552 - RNA, 23 nt, Human
cauagcagagaaugaaagggccc

SEQ ID NO: 2955553 - RNA, 19 nt, Human
cauagcagcuuauucacaa

SEQ ID NO: 2955554 - RNA, 21 nt, Human
caguuguuauuuauugaaaug

SEQ ID NO: 2955555 - RNA, 22 nt, Human
caguuguuagugugucuuagug

SEQ ID NO: 2955556 - RNA, 19 nt, Human
caguuguuauuuauugaaa

SEQ ID NO: 2955557 - RNA, 14 nt, Human
caguuguuauuuau

SEQ ID NO: 2955558 - RNA, 18 nt, Human
caguuguuagugugucuu

SEQ ID NO: 2955559 - RNA, 21 nt, Human
caguuuguuaguaugaggcau

SEQ ID NO: 2955560 - RNA, 23 nt, Human
caguuuguuaguaugaggcauuu

SEQ ID NO: 2955561 - RNA, 21 nt, Human
caucagcacgauuucuguuua

SEQ ID NO: 2955562 - RNA, 19 nt, Human
caucagcacgauuucuguu

SEQ ID NO: 2955563 - RNA, 19 nt, Human
caucccaaacccuucagug

SEQ ID NO: 2955564 - RNA, 22 nt, Human
cauccucuguacagagcccacg

SEQ ID NO: 2955565 - RNA, 21 nt, Human
cauccucuguacagagcccac

SEQ ID NO: 2955566 - RNA, 20 nt, Human
caucccaaacccuucagugc

SEQ ID NO: 2955567 - RNA, 11 nt, Human
caucccagccc

SEQ ID NO: 2955568 - RNA, 18 nt, Human
cauccugaggcuccacuu

SEQ ID NO: 2955569 - RNA, 19 nt, Human
cauccugaggcuccacuug

SEQ ID NO: 2955570 - RNA, 20 nt, Human
caguuacucagaauucucua

SEQ ID NO: 2955571 - RNA, 21 nt, Human
cagugguaugaucacggcuca

SEQ ID NO: 2955572 - RNA, 19 nt, Human
caguggugcgaucuggguu

SEQ ID NO: 2955573 - RNA, 13 nt, Human
caguuauggcuau

SEQ ID NO: 2955574 - RNA, 20 nt, Human
caguuauggcuauaggugcu

SEQ ID NO: 2955575 - RNA, 19 nt, Human
caguuauggcuauaggugc

SEQ ID NO: 2955576 - RNA, 21 nt, Human
caguuauuauauuuacaaaug

SEQ ID NO: 2955577 - RNA, 17 nt, Human
caguuauuauauuuaca

SEQ ID NO: 2955578 - RNA, 16 nt, Human
cagugggagcugccug

SEQ ID NO: 2955579 - RNA, 15 nt, Human
cagugggagcugccu

SEQ ID NO: 2955580 - RNA, 17 nt, Human
cagugggagcugccugu

SEQ ID NO: 2955581 - RNA, 18 nt, Human
cagugggagcugccuguu

SEQ ID NO: 2955582 - RNA, 20 nt, Human
cagugguaugaucacggcuc

SEQ ID NO: 2955583 - RNA, 21 nt, Human
cagugcccacaggaucagucu

SEQ ID NO: 2955584 - RNA, 18 nt, Human
cagugcccacaggaucag

SEQ ID NO: 2955585 - RNA, 22 nt, Human
cagugcccacaggaucagucug

SEQ ID NO: 2955586 - RNA, 23 nt, Human
cagucugauucccaagcucugcu

SEQ ID NO: 2955587 - RNA, 22 nt, Human
cagugauuaccagggacugagg

SEQ ID NO: 2955588 - RNA, 21 nt, Human
cagucugauucccaagcucug

SEQ ID NO: 2955589 - RNA, 22 nt, Human
cagucugauucccaagcucugc

SEQ ID NO: 2955590 - RNA, 23 nt, Human
caguucagagcugcccucuccug

SEQ ID NO: 2955591 - RNA, 24 nt, Human
caguucagagcugcccucuccugg

SEQ ID NO: 2955592 - RNA, 18 nt, Human
caguucagagcugcccuc

SEQ ID NO: 2955593 - RNA, 19 nt, Human
caguucagagcugcccucu

SEQ ID NO: 2955594 - RNA, 21 nt, Human
caguucagagcugcccucucc

SEQ ID NO: 2955595 - RNA, 22 nt, Human
caguucagagcugcccucuccu

SEQ ID NO: 2955596 - RNA, 22 nt, Human
caguuauuauauuuacaaaugg

SEQ ID NO: 2955597 - RNA, 15 nt, Human
caguucagagcugcc

SEQ ID NO: 2955598 - RNA, 16 nt, Human
caguucagagcugccc

SEQ ID NO: 2955599 - RNA, 17 nt, Human
caguucagagcugcccu

SEQ ID NO: 2955600 - RNA, 23 nt, Human
cagacucuacagaggccaugggc

SEQ ID NO: 2955601 - RNA, 18 nt, Human
cagacucuacagaggcca

SEQ ID NO: 2955602 - RNA, 19 nt, Human
cagacucuacagaggccau

SEQ ID NO: 2955603 - RNA, 20 nt, Human
cagacucuacagaggccaug

SEQ ID NO: 2955604 - RNA, 21 nt, Human
cagacucuacagaggccaugg

SEQ ID NO: 2955605 - RNA, 17 nt, Human
cagacucuacagaggcc

SEQ ID NO: 2955606 - RNA, 22 nt, Human
cagacaggcaagcaccuccugc

SEQ ID NO: 2955607 - RNA, 23 nt, Human
cagacaggcaagcaccuccugcc

SEQ ID NO: 2955608 - RNA, 13 nt, Human
cagacuggaagca

SEQ ID NO: 2955609 - RNA, 14 nt, Human
cagacuggaagcac

SEQ ID NO: 2955610 - RNA, 16 nt, Human
cagacuggaagcacag

SEQ ID NO: 2955611 - RNA, 17 nt, Human
cagacuggaagcacagc

SEQ ID NO: 2955612 - RNA, 18 nt, Human
cagacuggaagcacagcu

SEQ ID NO: 2955613 - RNA, 19 nt, Human
cagacuggauaguccgucu

SEQ ID NO: 2955614 - RNA, 23 nt, Human
cagacuggcacaguuuucugaga

SEQ ID NO: 2955615 - RNA, 22 nt, Human
cagacuggcacaguuuucugag

SEQ ID NO: 2955616 - RNA, 20 nt, Human
cagacuggaagcacagcuuc

SEQ ID NO: 2955617 - RNA, 21 nt, Human
cagacuggaagcacagcuuca

SEQ ID NO: 2955618 - RNA, 18 nt, Human
cagacuggcacaguuuuc

SEQ ID NO: 2955619 - RNA, 17 nt, Human
cagacuggcacaguuuu

SEQ ID NO: 2955620 - RNA, 11 nt, Human
cagacaggcaa

SEQ ID NO: 2955621 - RNA, 24 nt, Human
cagacaggaccagggauuuccaug

SEQ ID NO: 2955622 - RNA, 17 nt, Human
cagacaggaccagggau

SEQ ID NO: 2955623 - RNA, 13 nt, Human
cagacaggcaagc

SEQ ID NO: 2955624 - RNA, 18 nt, Human
cagacaggcaagcaccuc

SEQ ID NO: 2955625 - RNA, 20 nt, Human
cagacaggcaagcaccuccu

SEQ ID NO: 2955626 - RNA, 21 nt, Human
cagacaggcaagcaccuccug

SEQ ID NO: 2955627 - RNA, 18 nt, Human
cagacagcugccugggau

SEQ ID NO: 2955628 - RNA, 17 nt, Human
cagacagcugccuggga

SEQ ID NO: 2955629 - RNA, 16 nt, Human
cagacagcugccuggg

SEQ ID NO: 2955630 - RNA, 15 nt, Human
cagacagcugccugg

SEQ ID NO: 2955631 - RNA, 16 nt, Human
cagacaggaccaggga

SEQ ID NO: 2955632 - RNA, 15 nt, Human
cagacaggaccaggg

SEQ ID NO: 2955633 - RNA, 13 nt, Human
cagacaggaccag

SEQ ID NO: 2955634 - RNA, 14 nt, Human
cagacagcugccug

SEQ ID NO: 2955635 - RNA, 13 nt, Human
cagacagcugccu

SEQ ID NO: 2955636 - RNA, 14 nt, Human
cagauaugauucaa

SEQ ID NO: 2955637 - RNA, 19 nt, Human
cagauagauauaugcucug

SEQ ID NO: 2955638 - RNA, 19 nt, Human
cagauacuuggggggcuga

SEQ ID NO: 2955639 - RNA, 16 nt, Human
cagaggggguggccuc

SEQ ID NO: 2955640 - RNA, 14 nt, Human
cagaggggguggcc

SEQ ID NO: 2955641 - RNA, 23 nt, Human
cagagacuccugcaggcagccag

SEQ ID NO: 2955642 - RNA, 12 nt, Human
cagagagggugg

SEQ ID NO: 2955643 - RNA, 17 nt, Human
cagagaggguggugacc

SEQ ID NO: 2955644 - RNA, 20 nt, Human
cagagaggguggugaccucu

SEQ ID NO: 2955645 - RNA, 22 nt, Human
cagagaggguggugaccucugc

SEQ ID NO: 2955646 - RNA, 23 nt, Human
cagagagggugggagugggccca

SEQ ID NO: 2955647 - RNA, 23 nt, Human
cagagaggguggugaccucugcc

SEQ ID NO: 2955648 - RNA, 20 nt, Human
cagagagguuaaggugggua

SEQ ID NO: 2955649 - RNA, 17 nt, Human
cagagcugcccucuccu

SEQ ID NO: 2955650 - RNA, 13 nt, Human
cagagcugccacc

SEQ ID NO: 2955651 - RNA, 13 nt, Human
cagaggggguggc

SEQ ID NO: 2955652 - RNA, 19 nt, Human
cagaggaaagcaaaggaga

SEQ ID NO: 2955653 - RNA, 17 nt, Human
cagaggaaagcaaagga

SEQ ID NO: 2955654 - RNA, 23 nt, Human
cagagcugcccucuccugggcag

SEQ ID NO: 2955655 - RNA, 18 nt, Human
cagagcugcccucuccug

SEQ ID NO: 2955656 - RNA, 19 nt, Human
cagagcugcccucuccugg

SEQ ID NO: 2955657 - RNA, 20 nt, Human
cagagcugcccucuccuggg

SEQ ID NO: 2955658 - RNA, 21 nt, Human
cagagcugcccucuccugggc

SEQ ID NO: 2955659 - RNA, 19 nt, Human
cagauuucacucuccuugg

SEQ ID NO: 2955660 - RNA, 17 nt, Human
cagcaccaucucuccuc

SEQ ID NO: 2955661 - RNA, 19 nt, Human
cagcaccaucucuccuccu

SEQ ID NO: 2955662 - RNA, 20 nt, Human
cagauuucacucuccuuggu

SEQ ID NO: 2955663 - RNA, 19 nt, Human
cagauugcaacaggcuggg

SEQ ID NO: 2955664 - RNA, 20 nt, Human
cagauugcaacaggcugggc

SEQ ID NO: 2955665 - RNA, 18 nt, Human
cagauugcaacaggcugg

SEQ ID NO: 2955666 - RNA, 14 nt, Human
cagcacgauuucug

SEQ ID NO: 2955667 - RNA, 15 nt, Human
cagcacgauuucugu

SEQ ID NO: 2955668 - RNA, 14 nt, Human
cagccagacuggca

SEQ ID NO: 2955669 - RNA, 22 nt, Human
cagccagcaguucagagcugcc

SEQ ID NO: 2955670 - RNA, 23 nt, Human
cagccagcaguucagagcugccc

SEQ ID NO: 2955671 - RNA, 18 nt, Human
cagccagacuggcacagu

SEQ ID NO: 2955672 - RNA, 15 nt, Human
cagccagacuggcac

SEQ ID NO: 2955673 - RNA, 12 nt, Human
cagccaggcccu

SEQ ID NO: 2955674 - RNA, 15 nt, Human
cagccugcuccagcu

SEQ ID NO: 2955675 - RNA, 19 nt, Human
cagccugcuccagcuguuc

SEQ ID NO: 2955676 - RNA, 17 nt, Human
cagccugcuccagcugu

SEQ ID NO: 2955677 - RNA, 16 nt, Human
cagccugcuccagcug

SEQ ID NO: 2955678 - RNA, 19 nt, Human
cagcguuucuaugacacau

SEQ ID NO: 2955679 - RNA, 22 nt, Human
cagcuaaagaaguuugaacauu

SEQ ID NO: 2955680 - RNA, 15 nt, Human
cagcuaacauggaag

SEQ ID NO: 2955681 - RNA, 21 nt, Human
cagcugacuuuucuguccgag

SEQ ID NO: 2955682 - RNA, 10 nt, Human
cagcugccuc

SEQ ID NO: 2955683 - RNA, 11 nt, Human
cagcugccucc

SEQ ID NO: 2955684 - RNA, 9 nt, Human
cagcugccu

SEQ ID NO: 2955685 - RNA, 14 nt, Human
cagcugccuccccu

SEQ ID NO: 2955686 - RNA, 15 nt, Human
cagcugccuccccuc

SEQ ID NO: 2955687 - RNA, 16 nt, Human
cagcugccuccccucc

SEQ ID NO: 2955688 - RNA, 17 nt, Human
cagcugccuccccuccu

SEQ ID NO: 2955689 - RNA, 18 nt, Human
cagcugccuccccuccuc

SEQ ID NO: 2955690 - RNA, 19 nt, Human
cagcugccuccccuccucu

SEQ ID NO: 2955691 - RNA, 20 nt, Human
cagcugccuccccuccucug

SEQ ID NO: 2955692 - RNA, 19 nt, Human
cagcuguaugauucccagc

SEQ ID NO: 2955693 - RNA, 17 nt, Human
cagcuuauucacaagac

SEQ ID NO: 2955694 - RNA, 20 nt, Human
cagcuuauugucuagugaaa

SEQ ID NO: 2955695 - RNA, 20 nt, Human
cagcuguaugauucccagcc

SEQ ID NO: 2955696 - RNA, 14 nt, Human
cagcuuauugucua

SEQ ID NO: 2955697 - RNA, 20 nt, Human
caggaaaggcuccaggagca

SEQ ID NO: 2955698 - RNA, 19 nt, Human
caggaaaggcuccaggagc

SEQ ID NO: 2955699 - RNA, 16 nt, Human
caggaaagagaacuuc

SEQ ID NO: 2955700 - RNA, 17 nt, Human
caggaaaggcuccagga

SEQ ID NO: 2955701 - RNA, 16 nt, Human
caggaaaggcuccagg

SEQ ID NO: 2955702 - RNA, 19 nt, Human
caggcaccuguagucccag

SEQ ID NO: 2955703 - RNA, 12 nt, Human
caggccaggccc

SEQ ID NO: 2955704 - RNA, 11 nt, Human
caggccaggcc

SEQ ID NO: 2955705 - RNA, 19 nt, Human
caggaggaucacuugaguc

SEQ ID NO: 2955706 - RNA, 22 nt, Human
caggaggccagccuugaccauu

SEQ ID NO: 2955707 - RNA, 19 nt, Human
caggaggccagccuugacc

SEQ ID NO: 2955708 - RNA, 18 nt, Human
caggaggccagccuugac

SEQ ID NO: 2955709 - RNA, 14 nt, Human
caggcaaugcuggc

SEQ ID NO: 2955710 - RNA, 15 nt, Human
caggcaaugcuggcu

SEQ ID NO: 2955711 - RNA, 16 nt, Human
caggcaaugcuggcug

SEQ ID NO: 2955712 - RNA, 17 nt, Human
caggcaaugcuggcugu

SEQ ID NO: 2955713 - RNA, 23 nt, Human
caggaccucaggugagaagcaga

SEQ ID NO: 2955714 - RNA, 16 nt, Human
caggaccucaggugag

SEQ ID NO: 2955715 - RNA, 21 nt, Human
caggaccagggauuuccauga

SEQ ID NO: 2955716 - RNA, 23 nt, Human
caggcugggagagccuuccaggg

SEQ ID NO: 2955717 - RNA, 22 nt, Human
caggcugggagagccuuccagg

SEQ ID NO: 2955718 - RNA, 17 nt, Human
caggggaaaaucagccu

SEQ ID NO: 2955719 - RNA, 16 nt, Human
caggggaaaagaggag

SEQ ID NO: 2955720 - RNA, 14 nt, Human
caggggaaaagagg

SEQ ID NO: 2955721 - RNA, 14 nt, Human
caggccuccuacag

SEQ ID NO: 2955722 - RNA, 12 nt, Human
caggccuccuac

SEQ ID NO: 2955723 - RNA, 20 nt, Human
caggcugggagagccuucca

SEQ ID NO: 2955724 - RNA, 21 nt, Human
caggcugggagagccuuccag

SEQ ID NO: 2955725 - RNA, 11 nt, Human
caggcuacugu

SEQ ID NO: 2955726 - RNA, 18 nt, Human
caauauuuaaucuuuuau

SEQ ID NO: 2955727 - RNA, 21 nt, Human
caauauuucagauaaucacaa

SEQ ID NO: 2955728 - RNA, 22 nt, Human
caauugugaaaaaauuuacuuu

SEQ ID NO: 2955729 - RNA, 13 nt, Human
caauggcagccuu

SEQ ID NO: 2955730 - RNA, 14 nt, Human
caauggcagccuug

SEQ ID NO: 2955731 - RNA, 15 nt, Human
caauggcagccuugg

SEQ ID NO: 2955732 - RNA, 14 nt, Human
caaucaaaucugcu

SEQ ID NO: 2955733 - RNA, 17 nt, Human
caaucagccuaguugau

SEQ ID NO: 2955734 - RNA, 17 nt, Human
cacaaggaaauaaaauu

SEQ ID NO: 2955735 - RNA, 13 nt, Human
caauuuauuaugg

SEQ ID NO: 2955736 - RNA, 23 nt, Human
caauugugaaaaaauuuacuuua

SEQ ID NO: 2955737 - RNA, 20 nt, Human
caauuuauuauggcacauca

SEQ ID NO: 2955738 - RNA, 15 nt, Human
caagcucugcuccuc

SEQ ID NO: 2955739 - RNA, 16 nt, Human
caagcucugcuccucu

SEQ ID NO: 2955740 - RNA, 17 nt, Human
caagcucccaggcauuc

SEQ ID NO: 2955741 - RNA, 15 nt, Human
caagcucccaggcau

SEQ ID NO: 2955742 - RNA, 14 nt, Human
caagcucccaggca

SEQ ID NO: 2955743 - RNA, 12 nt, Human
caagcucccagg

SEQ ID NO: 2955744 - RNA, 21 nt, Human
caagcuccaagcucccaggca

SEQ ID NO: 2955745 - RNA, 19 nt, Human
caagcuccaagcucccagg

SEQ ID NO: 2955746 - RNA, 18 nt, Human
caagcuccaagcucccag

SEQ ID NO: 2955747 - RNA, 17 nt, Human
caagcuccaagcuccca

SEQ ID NO: 2955748 - RNA, 13 nt, Human
caaguauuauacc

SEQ ID NO: 2955749 - RNA, 17 nt, Human
caaguauuauaccuuuu

SEQ ID NO: 2955750 - RNA, 22 nt, Human
caaguauuauaccuuuuuuaga

SEQ ID NO: 2955751 - RNA, 13 nt, Human
caaggcaaauguu

SEQ ID NO: 2955752 - RNA, 14 nt, Human
caaggcaaggcugu

SEQ ID NO: 2955753 - RNA, 19 nt, Human
caaggauugcuacuguccu

SEQ ID NO: 2955754 - RNA, 20 nt, Human
caaggauugcuacuguccua

SEQ ID NO: 2955755 - RNA, 20 nt, Human
caaguuauuuuuaauuuggu

SEQ ID NO: 2955756 - RNA, 19 nt, Human
caacuauauuguuugcuaa

SEQ ID NO: 2955757 - RNA, 19 nt, Human
caacuaucucauuuccaag

SEQ ID NO: 2955758 - RNA, 17 nt, Human
caaccccuucgcuccug

SEQ ID NO: 2955759 - RNA, 14 nt, Human
caaccccuucgcuc

SEQ ID NO: 2955760 - RNA, 16 nt, Human
caaccccuucgcuccu

SEQ ID NO: 2955761 - RNA, 14 nt, Human
caacccccagccug

SEQ ID NO: 2955762 - RNA, 17 nt, Human
caagaaggaugauucaa

SEQ ID NO: 2955763 - RNA, 18 nt, Human
caagaagcccaggaaagg

SEQ ID NO: 2955764 - RNA, 15 nt, Human
caagaagcccaggaa

SEQ ID NO: 2955765 - RNA, 12 nt, Human
caacuccagaaa

SEQ ID NO: 2955766 - RNA, 14 nt, Human
caagcaaguauuag

SEQ ID NO: 2955767 - RNA, 14 nt, Human
caagaccacguuuc

SEQ ID NO: 2955768 - RNA, 16 nt, Human
caagaccacguuucua

SEQ ID NO: 2955769 - RNA, 13 nt, Human
caagcaccuccug

SEQ ID NO: 2955770 - RNA, 14 nt, Human
caagcaccuccugc

SEQ ID NO: 2955771 - RNA, 15 nt, Human
cacuacauucuguua

SEQ ID NO: 2955772 - RNA, 22 nt, Human
cacggaagagccuugcggaagg

SEQ ID NO: 2955773 - RNA, 16 nt, Human
cacggaagagccuugc

SEQ ID NO: 2955774 - RNA, 21 nt, Human
cacuacauuauaaaugucucu

SEQ ID NO: 2955775 - RNA, 13 nt, Human
cacuacauucugu

SEQ ID NO: 2955776 - RNA, 14 nt, Human
cacuacauucuguu

SEQ ID NO: 2955777 - RNA, 21 nt, Human
cacgcuggagugcagugagcc

SEQ ID NO: 2955778 - RNA, 16 nt, Human
cacgcuggagugcagu

SEQ ID NO: 2955779 - RNA, 17 nt, Human
cacgcuggagugcagug

SEQ ID NO: 2955780 - RNA, 18 nt, Human
cacgcuggagugcaguga

SEQ ID NO: 2955781 - RNA, 20 nt, Human
cacgcuggagugcagugagc

SEQ ID NO: 2955782 - RNA, 15 nt, Human
cacgcuggagugcag

SEQ ID NO: 2955783 - RNA, 11 nt, Human
cacugaagaag

SEQ ID NO: 2955784 - RNA, 23 nt, Human
cacugaagaagcaccaaucauga

SEQ ID NO: 2955785 - RNA, 16 nt, Human
cacuccagugagacag

SEQ ID NO: 2955786 - RNA, 21 nt, Human
cacuccagugagacagcucug

SEQ ID NO: 2955787 - RNA, 17 nt, Human
cacccuggggagaaagu

SEQ ID NO: 2955788 - RNA, 12 nt, Human
caccugccaggg

SEQ ID NO: 2955789 - RNA, 11 nt, Human
caccugccagg

SEQ ID NO: 2955790 - RNA, 21 nt, Human
caccugccccucaacucuccu

SEQ ID NO: 2955791 - RNA, 18 nt, Human
caccugccccucaacucu

SEQ ID NO: 2955792 - RNA, 12 nt, Human
cacccugcucuc

SEQ ID NO: 2955793 - RNA, 12 nt, Human
cacccuccuuuc

SEQ ID NO: 2955794 - RNA, 16 nt, Human
caccugcggugcuauc

SEQ ID NO: 2955795 - RNA, 19 nt, Human
caccugcggugcuaucucc

SEQ ID NO: 2955796 - RNA, 17 nt, Human
caccugcggugcuaucu

SEQ ID NO: 2955797 - RNA, 19 nt, Human
cacccaguccugcccgcca

SEQ ID NO: 2955798 - RNA, 12 nt, Human
cacccagcccac

SEQ ID NO: 2955799 - RNA, 23 nt, Human
cacaucuugcucugcugacagac

SEQ ID NO: 2955800 - RNA, 19 nt, Human
cacaucuugcucugcugac

SEQ ID NO: 2955801 - RNA, 17 nt, Human
cacauuuauucugcuca

SEQ ID NO: 2955802 - RNA, 18 nt, Human
cacauuuauucugcucac

SEQ ID NO: 2955803 - RNA, 17 nt, Human
caccagccccagugccc

SEQ ID NO: 2955804 - RNA, 18 nt, Human
caccagccccagugccca

SEQ ID NO: 2955805 - RNA, 21 nt, Human
caccagccccagugcccacag

SEQ ID NO: 2955806 - RNA, 22 nt, Human
caccagccccagugcccacagg

SEQ ID NO: 2955807 - RNA, 19 nt, Human
caccagcccuuagcaggga

SEQ ID NO: 2955808 - RNA, 13 nt, Human
cacaucuugcucu

SEQ ID NO: 2955809 - RNA, 14 nt, Human
cacaucuugcucug

SEQ ID NO: 2955810 - RNA, 15 nt, Human
cacaucuugcucugc

SEQ ID NO: 2955811 - RNA, 20 nt, Human
cacaucuugcucugcugaca

SEQ ID NO: 2955812 - RNA, 21 nt, Human
cacaucuugcucugcugacag

SEQ ID NO: 2955813 - RNA, 22 nt, Human
cacaucuugcucugcugacaga

SEQ ID NO: 2955814 - RNA, 23 nt, Human
cacaucagcuugcccuguuaaaa

SEQ ID NO: 2955815 - RNA, 13 nt, Human
cacaucagcuugc

SEQ ID NO: 2955816 - RNA, 17 nt, Human
auuuucuccaaauguuc

SEQ ID NO: 2955817 - RNA, 19 nt, Human
auuuucuauaauuuaaaua

SEQ ID NO: 2955818 - RNA, 18 nt, Human
auuuucuauaauuuaaau

SEQ ID NO: 2955819 - RNA, 17 nt, Human
auuuucuauaauuuaaa

SEQ ID NO: 2955820 - RNA, 14 nt, Human
auuuguuauaauga

SEQ ID NO: 2955821 - RNA, 18 nt, Human
auuuguguugaagagguu

SEQ ID NO: 2955822 - RNA, 22 nt, Human
auuuguguugaagagguuuuaa

SEQ ID NO: 2955823 - RNA, 20 nt, Human
auuugcacauuaaaugacuc

SEQ ID NO: 2955824 - RNA, 21 nt, Human
auuugcacauuaaaugacucu

SEQ ID NO: 2955825 - RNA, 14 nt, Human
auuuguguugaaga

SEQ ID NO: 2955826 - RNA, 15 nt, Human
auuuguguugaagag

SEQ ID NO: 2955827 - RNA, 16 nt, Human
caaaccaucauugaaa

SEQ ID NO: 2955828 - RNA, 14 nt, Human
caaaccaucauuga

SEQ ID NO: 2955829 - RNA, 17 nt, Human
caaaccaucauugaaau

SEQ ID NO: 2955830 - RNA, 16 nt, Human
auuuuuauuaaauuau

SEQ ID NO: 2955831 - RNA, 16 nt, Human
auuuuuuucugaaauu

SEQ ID NO: 2955832 - RNA, 17 nt, Human
auuuuuuucugaaauuu

SEQ ID NO: 2955833 - RNA, 22 nt, Human
auuuuguuuuugucuuaaaaag

SEQ ID NO: 2955834 - RNA, 16 nt, Human
auuuuuauauuugaaa

SEQ ID NO: 2955835 - RNA, 19 nt, Human
auuuuuauauuugaaauau

SEQ ID NO: 2955836 - RNA, 17 nt, Human
caaacauauauaacaau

SEQ ID NO: 2955837 - RNA, 20 nt, Human
caaaagguuaauaaaguaau

SEQ ID NO: 2955838 - RNA, 21 nt, Human
caaaagguauuuuaaucacca

SEQ ID NO: 2955839 - RNA, 19 nt, Human
caaaagcaucuaugugaga

SEQ ID NO: 2955840 - RNA, 13 nt, Human
caaaagcauguga

SEQ ID NO: 2955841 - RNA, 17 nt, Human
auuucacaguguguggu

SEQ ID NO: 2955842 - RNA, 16 nt, Human
auuuauccucuguuga

SEQ ID NO: 2955843 - RNA, 12 nt, Human
auuuauccucug

SEQ ID NO: 2955844 - RNA, 12 nt, Human
auuucacucucc

SEQ ID NO: 2955845 - RNA, 16 nt, Human
auuucagcagcugcag

SEQ ID NO: 2955846 - RNA, 14 nt, Human
auuucacucuccuu

SEQ ID NO: 2955847 - RNA, 22 nt, Human
auuuaauuugaagguagaaugu

SEQ ID NO: 2955848 - RNA, 15 nt, Human
auuuaauuugaaggu

SEQ ID NO: 2955849 - RNA, 13 nt, Human
auuuaauuugaag

SEQ ID NO: 2955850 - RNA, 19 nt, Human
auuuaauugggcacuauuu

SEQ ID NO: 2955851 - RNA, 22 nt, Human
auuuaauagguuuggacaaaau

SEQ ID NO: 2955852 - RNA, 14 nt, Human
auuugcacauuaaa

SEQ ID NO: 2955853 - RNA, 15 nt, Human
auuugcacauuaaau

SEQ ID NO: 2955854 - RNA, 17 nt, Human
auuugcacauuaaauga

SEQ ID NO: 2955855 - RNA, 19 nt, Human
auuugcacauuaaaugacu

SEQ ID NO: 2955856 - RNA, 17 nt, Human
auuucucucaucuguua

SEQ ID NO: 2955857 - RNA, 20 nt, Human
auuucuguuuagauaauaca

SEQ ID NO: 2955858 - RNA, 19 nt, Human
auuucuguuuagauaauac

SEQ ID NO: 2955859 - RNA, 21 nt, Human
auuucuguuuagauaauacac

SEQ ID NO: 2955860 - RNA, 15 nt, Human
auucauuaguuuuga

SEQ ID NO: 2955861 - RNA, 14 nt, Human
auucauuaguuuug

SEQ ID NO: 2955862 - RNA, 14 nt, Human
auucauauuuacuu

SEQ ID NO: 2955863 - RNA, 15 nt, Human
auucucuuauccaac

SEQ ID NO: 2955864 - RNA, 15 nt, Human
auucauucuuuuuga

SEQ ID NO: 2955865 - RNA, 21 nt, Human
auucauucuuuuugaaauguc

SEQ ID NO: 2955866 - RNA, 16 nt, Human
auucauucuuuuugaa

SEQ ID NO: 2955867 - RNA, 20 nt, Human
auucucuaguuugauuaaau

SEQ ID NO: 2955868 - RNA, 19 nt, Human
auucucuaguuugauuaaa

SEQ ID NO: 2955869 - RNA, 23 nt, Human
auucucuaguuugauuaaauucu

SEQ ID NO: 2955870 - RNA, 12 nt, Human
auucucuuaucc

SEQ ID NO: 2955871 - RNA, 14 nt, Human
auucucuuauccaa

SEQ ID NO: 2955872 - RNA, 22 nt, Human
auugaggacacugauauggguc

SEQ ID NO: 2955873 - RNA, 20 nt, Human
auuaaugucaguauuucaac

SEQ ID NO: 2955874 - RNA, 22 nt, Human
auuacaagcgugagccacugca

SEQ ID NO: 2955875 - RNA, 16 nt, Human
ggcucccuucccaccu

SEQ ID NO: 2955876 - RNA, 18 nt, Human
ggcucccuucccaccucu

SEQ ID NO: 2955877 - RNA, 17 nt, Human
ggcucccuucccaccuc

SEQ ID NO: 2955878 - RNA, 22 nt, Human
ggcucccuucccaccucucuca

SEQ ID NO: 2955879 - RNA, 20 nt, Human
ggcucccuucccaccucucu

SEQ ID NO: 2955880 - RNA, 14 nt, Human
ggcugccagugccu

SEQ ID NO: 2955881 - RNA, 20 nt, Human
ggcugcaugcgggcuuccuc

SEQ ID NO: 2955882 - RNA, 17 nt, Human
ggcugcagggaguccga

SEQ ID NO: 2955883 - RNA, 18 nt, Human
ggcucgagcaugccugga

SEQ ID NO: 2955884 - RNA, 24 nt, Human
ggcucuuccaggcugggagagccu

SEQ ID NO: 2955885 - RNA, 23 nt, Human
ggcucuuccaggcugggagagcc

SEQ ID NO: 2955886 - RNA, 20 nt, Human
ggcucuuccaggcugggaga

SEQ ID NO: 2955887 - RNA, 15 nt, Human
ggcugccagugccug

SEQ ID NO: 2955888 - RNA, 17 nt, Human
ggcugccagugccuggg

SEQ ID NO: 2955889 - RNA, 18 nt, Human
ggcugccagugccugggu

SEQ ID NO: 2955890 - RNA, 14 nt, Human
ggcuggcgugcagu

SEQ ID NO: 2955891 - RNA, 16 nt, Human
ggcuggcgugcagugg

SEQ ID NO: 2955892 - RNA, 20 nt, Human
ggcuggcgugcaguggugcg

SEQ ID NO: 2955893 - RNA, 22 nt, Human
ggcuggccuggccccucagggu

SEQ ID NO: 2955894 - RNA, 17 nt, Human
ggcuggccuggccccuc

SEQ ID NO: 2955895 - RNA, 13 nt, Human
aaaaaaacacaaa

SEQ ID NO: 2955896 - RNA, 15 nt, Human
ggcuucaguggcagc

SEQ ID NO: 2955897 - RNA, 20 nt, Human
ggcuguaucccaugagccuc

SEQ ID NO: 2955898 - RNA, 22 nt, Human
ggcuguaucccaugagccucag

SEQ ID NO: 2955899 - RNA, 23 nt, Human
ggcuguaucccaugagccucagc

SEQ ID NO: 2955900 - RNA, 15 nt, Human
ggcugucaauuacag

SEQ ID NO: 2955901 - RNA, 19 nt, Human
ggcuguaucccaugagccu

SEQ ID NO: 2955902 - RNA, 16 nt, Human
ggcuggugucaccuga

SEQ ID NO: 2955903 - RNA, 16 nt, Human
ggcuucaguggcagcu

SEQ ID NO: 2955904 - RNA, 13 nt, Human
gggaaaaucagcc

SEQ ID NO: 2955905 - RNA, 23 nt, Human
gggaaaaucagccugcuccagcu

SEQ ID NO: 2955906 - RNA, 21 nt, Human
gggauuuucagcccucagaau

SEQ ID NO: 2955907 - RNA, 23 nt, Human
gggcagagcagagaccaucccug

SEQ ID NO: 2955908 - RNA, 15 nt, Human
gggauuuccaugaug

SEQ ID NO: 2955909 - RNA, 17 nt, Human
gggauugaaggaugcug

SEQ ID NO: 2955910 - RNA, 20 nt, Human
gggcagcugccuccccuccu

SEQ ID NO: 2955911 - RNA, 23 nt, Human
gggcagcugccuccccuccucug

SEQ ID NO: 2955912 - RNA, 12 nt, Human
gggcagcugccu

SEQ ID NO: 2955913 - RNA, 13 nt, Human
gggcagcugccuc

SEQ ID NO: 2955914 - RNA, 14 nt, Human
gggcagcugccucc

SEQ ID NO: 2955915 - RNA, 19 nt, Human
gggcagcugccuccccucc

SEQ ID NO: 2955916 - RNA, 18 nt, Human
aaaauaguggugugauuu

SEQ ID NO: 2955917 - RNA, 12 nt, Human
aaaauagccugc

SEQ ID NO: 2955918 - RNA, 14 nt, Human
aaaauaccaaggaa

SEQ ID NO: 2955919 - RNA, 15 nt, Human
aaaauaccagccagu

SEQ ID NO: 2955920 - RNA, 14 nt, Human
aaaauaccagccag

SEQ ID NO: 2955921 - RNA, 21 nt, Human
aaaauaauuuuuauauuugaa

SEQ ID NO: 2955922 - RNA, 23 nt, Human
aaaauaauuuuuauauuugaaau

SEQ ID NO: 2955923 - RNA, 20 nt, Human
aaaauaauuuuuauauuuga

SEQ ID NO: 2955924 - RNA, 12 nt, Human
aaaauaaauuau

SEQ ID NO: 2955925 - RNA, 21 nt, Human
aaaacguggcugcuucaagga

SEQ ID NO: 2955926 - RNA, 22 nt, Human
aaaacugauuuuuuuuuccuuc

SEQ ID NO: 2955927 - RNA, 18 nt, Human
aaaacugauuuuuuuuuc

SEQ ID NO: 2955928 - RNA, 15 nt, Human
aaaaccaauguucuc

SEQ ID NO: 2955929 - RNA, 18 nt, Human
aaaacguggcugcuucaa

SEQ ID NO: 2955930 - RNA, 17 nt, Human
aaaacguggcugcuuca

SEQ ID NO: 2955931 - RNA, 16 nt, Human
aaaacguggcugcuuc

SEQ ID NO: 2955932 - RNA, 14 nt, Human
aaaacguggcugcu

SEQ ID NO: 2955933 - RNA, 14 nt, Human
gggaacagacugga

SEQ ID NO: 2955934 - RNA, 22 nt, Human
gggaacagacuggaagcacagc

SEQ ID NO: 2955935 - RNA, 17 nt, Human
aaaaaucucaaauuucu

SEQ ID NO: 2955936 - RNA, 19 nt, Human
aaaaaucucaaauuucuaa

SEQ ID NO: 2955937 - RNA, 20 nt, Human
aaaaaucucaaauuucuaaa

SEQ ID NO: 2955938 - RNA, 13 nt, Human
gggagggcuccag

SEQ ID NO: 2955939 - RNA, 11 nt, Human
gggagggcucc

SEQ ID NO: 2955940 - RNA, 20 nt, Human
gggaggcagagguugcagug

SEQ ID NO: 2955941 - RNA, 11 nt, Human
gggaggcagag

SEQ ID NO: 2955942 - RNA, 14 nt, Human
aaaagcugggcagg

SEQ ID NO: 2955943 - RNA, 22 nt, Human
aaaagcuccauuuuuagugaaa

SEQ ID NO: 2955944 - RNA, 20 nt, Human
aaaagccucuguuuugauau

SEQ ID NO: 2955945 - RNA, 21 nt, Human
aaaacuuuaugcuaagugaaa

SEQ ID NO: 2955946 - RNA, 22 nt, Human
aaaacuugauguguuaucucuu

SEQ ID NO: 2955947 - RNA, 18 nt, Human
aaacuacauugacagauu

SEQ ID NO: 2955948 - RNA, 16 nt, Human
aaacucauuucuagca

SEQ ID NO: 2955949 - RNA, 15 nt, Human
aaacuggcaaagcag

SEQ ID NO: 2955950 - RNA, 16 nt, Human
aaacuggcaaagcaga

SEQ ID NO: 2955951 - RNA, 16 nt, Human
aaacuggauuaaacuu

SEQ ID NO: 2955952 - RNA, 21 nt, Human
aaacuacauuagguugugaau

SEQ ID NO: 2955953 - RNA, 22 nt, Human
aaacuacauuagguugugaaug

SEQ ID NO: 2955954 - RNA, 20 nt, Human
aaacuacauuagguugugaa

SEQ ID NO: 2955955 - RNA, 17 nt, Human
aaacguggcugcuucaa

SEQ ID NO: 2955956 - RNA, 15 nt, Human
aaacgucuuaaauau

SEQ ID NO: 2955957 - RNA, 16 nt, Human
aaacguggcugcuuca

SEQ ID NO: 2955958 - RNA, 15 nt, Human
aaaccacagcaguug

SEQ ID NO: 2955959 - RNA, 16 nt, Human
aaaccacagcaguuga

SEQ ID NO: 2955960 - RNA, 22 nt, Human
gggucucacuauguugcccagg

SEQ ID NO: 2955961 - RNA, 23 nt, Human
gggucucacuauguugcccaggc

SEQ ID NO: 2955962 - RNA, 22 nt, Human
gggucacucuggcagcucagag

SEQ ID NO: 2955963 - RNA, 20 nt, Human
ggguaucaggugcugccauc

SEQ ID NO: 2955964 - RNA, 21 nt, Human
aaaauguaggguuauaauaau

SEQ ID NO: 2955965 - RNA, 12 nt, Human
aaaauggaauac

SEQ ID NO: 2955966 - RNA, 21 nt, Human
aaaauggacguguuaugacuc

SEQ ID NO: 2955967 - RNA, 16 nt, Human
aaacaaaauagaaagu

SEQ ID NO: 2955968 - RNA, 19 nt, Human
aaaauuuuuucucuaggaa

SEQ ID NO: 2955969 - RNA, 17 nt, Human
aaacaaggaugaauuaa

SEQ ID NO: 2955970 - RNA, 23 nt, Human
aaacaugcuguacauacuuuuug

SEQ ID NO: 2955971 - RNA, 22 nt, Human
aaacaugcuguacauacuuuuu

SEQ ID NO: 2955972 - RNA, 24 nt, Human
ggggaaaaucagccugcuccagcu

SEQ ID NO: 2955973 - RNA, 20 nt, Human
aaacaugcuguacauacuuu

SEQ ID NO: 2955974 - RNA, 21 nt, Human
aaacaugcuguacauacuuuu

SEQ ID NO: 2955975 - RNA, 17 nt, Human
ggggaccucaggccugg

SEQ ID NO: 2955976 - RNA, 16 nt, Human
ggggaccucaggccug

SEQ ID NO: 2955977 - RNA, 15 nt, Human
ggggaccucaggccu

SEQ ID NO: 2955978 - RNA, 13 nt, Human
ggggaccucaggc

SEQ ID NO: 2955979 - RNA, 23 nt, Human
ggggcccugccuccuuugugagg

SEQ ID NO: 2955980 - RNA, 19 nt, Human
ggggcccugccuccuuugu

SEQ ID NO: 2955981 - RNA, 15 nt, Human
ggggcccugccuccu

SEQ ID NO: 2955982 - RNA, 16 nt, Human
ggggcccugccuccuu

SEQ ID NO: 2955983 - RNA, 17 nt, Human
ggggccaguuggucccc

SEQ ID NO: 2955984 - RNA, 19 nt, Human
aaacaagucagucauucag

SEQ ID NO: 2955985 - RNA, 14 nt, Human
aaacacaacuauau

SEQ ID NO: 2955986 - RNA, 13 nt, Human
aaacauauauaac

SEQ ID NO: 2955987 - RNA, 16 nt, Human
aaacauauauaacaau

SEQ ID NO: 2955988 - RNA, 19 nt, Human
aaacauauauaacaaugcu

SEQ ID NO: 2955989 - RNA, 21 nt, Human
aaacauauauaacaaugcugu

SEQ ID NO: 2955990 - RNA, 16 nt, Human
aaacaugcuacacacu

SEQ ID NO: 2955991 - RNA, 22 nt, Human
aaacaugcuacacacugcaugu

SEQ ID NO: 2955992 - RNA, 19 nt, Human
aaacauauccaaguuugaa

SEQ ID NO: 2955993 - RNA, 14 nt, Human
aaacauaucucuua

SEQ ID NO: 2955994 - RNA, 15 nt, Human
aaacaugcuguacau

SEQ ID NO: 2955995 - RNA, 16 nt, Human
aaacaugcuguacaua

SEQ ID NO: 2955996 - RNA, 18 nt, Human
aaacaugcuguacauacu

SEQ ID NO: 2955997 - RNA, 20 nt, Human
ggugauuuagcaggaagcug

SEQ ID NO: 2955998 - RNA, 22 nt, Human
ggugcacaagcuccaagcuccc

SEQ ID NO: 2955999 - RNA, 16 nt, Human
ggugcacaagcuccaa

SEQ ID NO: 2956000 - RNA, 15 nt, Human
ggugccaguuauggc

SEQ ID NO: 2956001 - RNA, 21 nt, Human
ggucuugaacuccuggccuca

SEQ ID NO: 2956002 - RNA, 22 nt, Human
ggucuugaacuccuggccucaa

SEQ ID NO: 2956003 - RNA, 17 nt, Human
ggucuguucuuuccaaa

SEQ ID NO: 2956004 - RNA, 19 nt, Human
ggucuguucuuuccaaagu

SEQ ID NO: 2956005 - RNA, 14 nt, Human
ggucugucuuuuaa

SEQ ID NO: 2956006 - RNA, 13 nt, Human
ggucugucuuuua

SEQ ID NO: 2956007 - RNA, 12 nt, Human
ggucuguucuuu

SEQ ID NO: 2956008 - RNA, 14 nt, Human
ggucugugagaugc

SEQ ID NO: 2956009 - RNA, 24 nt, Human
ggucugugagaugcuagaacuccc

SEQ ID NO: 2956010 - RNA, 16 nt, Human
aaagcuacuuauugua

SEQ ID NO: 2956011 - RNA, 17 nt, Human
aaagcuacuuauuguag

SEQ ID NO: 2956012 - RNA, 17 nt, Human
aaagcuaggccuggcca

SEQ ID NO: 2956013 - RNA, 18 nt, Human
aaagcuaggccuggccag

SEQ ID NO: 2956014 - RNA, 16 nt, Human
aaagcagugcaugcug

SEQ ID NO: 2956015 - RNA, 22 nt, Human
aaagcagugcaugcugucccuu

SEQ ID NO: 2956016 - RNA, 21 nt, Human
aaagcagugcaugcugucccu

SEQ ID NO: 2956017 - RNA, 17 nt, Human
aaagcagugcaugcugu

SEQ ID NO: 2956018 - RNA, 13 nt, Human
aaagcuuauuaaa

SEQ ID NO: 2956019 - RNA, 19 nt, Human
aaaggaaugcaaagaugaa

SEQ ID NO: 2956020 - RNA, 22 nt, Human
aaaggaaugcaaagaugaaggu

SEQ ID NO: 2956021 - RNA, 11 nt, Human
aaaggaaagag

SEQ ID NO: 2956022 - RNA, 13 nt, Human
aaaggaauuuaaa

SEQ ID NO: 2956023 - RNA, 15 nt, Human
aaagaugagugagca

SEQ ID NO: 2956024 - RNA, 18 nt, Human
aaagaggcuaugugagca

SEQ ID NO: 2956025 - RNA, 13 nt, Human
aaagaggcuaugu

SEQ ID NO: 2956026 - RNA, 20 nt, Human
aaagaggcagcuugaaacug

SEQ ID NO: 2956027 - RNA, 23 nt, Human
aaagacuucucuacccaucuuaa

SEQ ID NO: 2956028 - RNA, 19 nt, Human
aaagacuuuuccaacccuc

SEQ ID NO: 2956029 - RNA, 18 nt, Human
aaagagaacuuccagauc

SEQ ID NO: 2956030 - RNA, 22 nt, Human
aaagacuauucaaacagucuca

SEQ ID NO: 2956031 - RNA, 23 nt, Human
aaagacuauucaaacagucucag

SEQ ID NO: 2956032 - RNA, 13 nt, Human
aaagacuccaaag

SEQ ID NO: 2956033 - RNA, 15 nt, Human
aaagacuguacaaag

SEQ ID NO: 2956034 - RNA, 19 nt, Human
gguccacccaggagccccg

SEQ ID NO: 2956035 - RNA, 23 nt, Human
gguauuggcuagagguucaaaga

SEQ ID NO: 2956036 - RNA, 20 nt, Human
gguccacccaggagccccga

SEQ ID NO: 2956037 - RNA, 22 nt, Human
gguccacccaggagccccgagg

SEQ ID NO: 2956038 - RNA, 12 nt, Human
ggucccacccca

SEQ ID NO: 2956039 - RNA, 14 nt, Human
aaacuuuaccuuuu

SEQ ID NO: 2956040 - RNA, 16 nt, Human
aaagaaugauuaugaa

SEQ ID NO: 2956041 - RNA, 12 nt, Human
ggcagaaggaag

SEQ ID NO: 2956042 - RNA, 17 nt, Human
ggcagccaggccacaag

SEQ ID NO: 2956043 - RNA, 15 nt, Human
ggcagccaggccaca

SEQ ID NO: 2956044 - RNA, 10 nt, Human
ggcagagcag

SEQ ID NO: 2956045 - RNA, 14 nt, Human
ggcagccaggccac

SEQ ID NO: 2956046 - RNA, 20 nt, Human
ggcaacagagcaagacucca

SEQ ID NO: 2956047 - RNA, 21 nt, Human
ggaugaauuccaaauucugcu

SEQ ID NO: 2956048 - RNA, 12 nt, Human
ggaugagaaagg

SEQ ID NO: 2956049 - RNA, 22 nt, Human
ggaugagaaagguugaagcacc

SEQ ID NO: 2956050 - RNA, 22 nt, Human
ggaugguucccuugaugaagaa

SEQ ID NO: 2956051 - RNA, 23 nt, Human
ggaugguucccuugaugaagaag

SEQ ID NO: 2956052 - RNA, 22 nt, Human
ggauguugaaaaaguucugcag

SEQ ID NO: 2956053 - RNA, 16 nt, Human
ggcaaauguuuauuua

SEQ ID NO: 2956054 - RNA, 16 nt, Human
ggcaacagagcaagac

SEQ ID NO: 2956055 - RNA, 17 nt, Human
ggcaacagagcaagacu

SEQ ID NO: 2956056 - RNA, 14 nt, Human
ggcaaacagggccu

SEQ ID NO: 2956057 - RNA, 17 nt, Human
ggcaaacagggccucug

SEQ ID NO: 2956058 - RNA, 18 nt, Human
ggcaaacagggccucugc

SEQ ID NO: 2956059 - RNA, 23 nt, Human
ggauuaaacuuaaucuaaaugga

SEQ ID NO: 2956060 - RNA, 21 nt, Human
ggauuuugauccaagcugguc

SEQ ID NO: 2956061 - RNA, 12 nt, Human
ggauuuucagcc

SEQ ID NO: 2956062 - RNA, 16 nt, Human
ggccuccauccugagg

SEQ ID NO: 2956063 - RNA, 14 nt, Human
ggccucccaacuca

SEQ ID NO: 2956064 - RNA, 13 nt, Human
ggccucccaacuc

SEQ ID NO: 2956065 - RNA, 21 nt, Human
ggcccaggaguuuggccagaa

SEQ ID NO: 2956066 - RNA, 23 nt, Human
ggcccaggaguuuggccagaagu

SEQ ID NO: 2956067 - RNA, 22 nt, Human
ggcccaggaguuuggccagaag

SEQ ID NO: 2956068 - RNA, 12 nt, Human
ggcccagggcau

SEQ ID NO: 2956069 - RNA, 15 nt, Human
ggcccagggcaucug

SEQ ID NO: 2956070 - RNA, 16 nt, Human
ggccccaccagugccu

SEQ ID NO: 2956071 - RNA, 15 nt, Human
ggccccaccagugcc

SEQ ID NO: 2956072 - RNA, 16 nt, Human
ggcccagggcaucugg

SEQ ID NO: 2956073 - RNA, 23 nt, Human
ggcccuccagagccccacagccc

SEQ ID NO: 2956074 - RNA, 17 nt, Human
ggcccuccagagcccca

SEQ ID NO: 2956075 - RNA, 21 nt, Human
ggcccuccagagccccacagc

SEQ ID NO: 2956076 - RNA, 14 nt, Human
ggcccuccagagcc

SEQ ID NO: 2956077 - RNA, 15 nt, Human
ggcccuccagagccc

SEQ ID NO: 2956078 - RNA, 21 nt, Human
ggccaaaggaagcacaugccu

SEQ ID NO: 2956079 - RNA, 15 nt, Human
ggccaaagccaaagc

SEQ ID NO: 2956080 - RNA, 12 nt, Human
ggccaaaggaag

SEQ ID NO: 2956081 - RNA, 21 nt, Human
ggccaaacucaccugccccuc

SEQ ID NO: 2956082 - RNA, 12 nt, Human
ggcauuguggga

SEQ ID NO: 2956083 - RNA, 13 nt, Human
ggccaagguggga

SEQ ID NO: 2956084 - RNA, 22 nt, Human
ggccagagggagugacagaggc

SEQ ID NO: 2956085 - RNA, 23 nt, Human
ggccagagggagugacagaggca

SEQ ID NO: 2956086 - RNA, 17 nt, Human
ggccagaugcaccagcc

SEQ ID NO: 2956087 - RNA, 19 nt, Human
ggccagaugcaccagcccu

SEQ ID NO: 2956088 - RNA, 20 nt, Human
ggccagaugcaccagcccuu

SEQ ID NO: 2956089 - RNA, 21 nt, Human
ggagcagccacauuccugaug

SEQ ID NO: 2956090 - RNA, 13 nt, Human
ggagcagccacau

SEQ ID NO: 2956091 - RNA, 18 nt, Human
ggaggucgaggcaggagg

SEQ ID NO: 2956092 - RNA, 12 nt, Human
ggaggcugaggc

SEQ ID NO: 2956093 - RNA, 14 nt, Human
ggaggucgaggcag

SEQ ID NO: 2956094 - RNA, 16 nt, Human
ggaggucgaggcagga

SEQ ID NO: 2956095 - RNA, 15 nt, Human
ggaggucgaggcagg

SEQ ID NO: 2956096 - RNA, 15 nt, Human
ggaggcugagauggg

SEQ ID NO: 2956097 - RNA, 19 nt, Human
ggaggcugagaugggagaa

SEQ ID NO: 2956098 - RNA, 20 nt, Human
ggaggaaccgagggggcugc

SEQ ID NO: 2956099 - RNA, 12 nt, Human
ggaggaagagaa

SEQ ID NO: 2956100 - RNA, 21 nt, Human
ggaggcaugugaugagaggaa

SEQ ID NO: 2956101 - RNA, 13 nt, Human
ggaggccagccuu

SEQ ID NO: 2956102 - RNA, 18 nt, Human
ggaggccaaggugggagg

SEQ ID NO: 2956103 - RNA, 12 nt, Human
ggaggccagccu

SEQ ID NO: 2956104 - RNA, 22 nt, Human
ggagcugccuguucagcuccag

SEQ ID NO: 2956105 - RNA, 16 nt, Human
ggagcugaguggggga

SEQ ID NO: 2956106 - RNA, 19 nt, Human
gcuuguaccacuuuugcaa

SEQ ID NO: 2956107 - RNA, 22 nt, Human
gcuuguaccacuuuugcaaaua

SEQ ID NO: 2956108 - RNA, 19 nt, Human
gcuuguacauaaugcgugc

SEQ ID NO: 2956109 - RNA, 19 nt, Human
ggacccugaggcccagagg

SEQ ID NO: 2956110 - RNA, 14 nt, Human
ggacccugaggccc

SEQ ID NO: 2956111 - RNA, 18 nt, Human
ggacccugaggcccagag

SEQ ID NO: 2956112 - RNA, 15 nt, Human
ggacccugaggccca

SEQ ID NO: 2956113 - RNA, 15 nt, Human
ggagagcuagcagca

SEQ ID NO: 2956114 - RNA, 16 nt, Human
ggagagccuuccaggg

SEQ ID NO: 2956115 - RNA, 13 nt, Human
ggagagccuucca

SEQ ID NO: 2956116 - RNA, 18 nt, Human
ggagagccuuccaggggu

SEQ ID NO: 2956117 - RNA, 17 nt, Human
ggagagccuuccagggg

SEQ ID NO: 2956118 - RNA, 22 nt, Human
ggagagccuuccagggguggga

SEQ ID NO: 2956119 - RNA, 9 nt, Human
ggacuuugu

SEQ ID NO: 2956120 - RNA, 19 nt, Human
ggagaaaauggacguguua

SEQ ID NO: 2956121 - RNA, 15 nt, Human
ggacuuggaagcucc

SEQ ID NO: 2956122 - RNA, 17 nt, Human
ggacuuggaagcuccgc

SEQ ID NO: 2956123 - RNA, 22 nt, Human
ggagaaccaaaaagaggcuaug

SEQ ID NO: 2956124 - RNA, 22 nt, Human
ggacucaaugcacugacauugu

SEQ ID NO: 2956125 - RNA, 12 nt, Human
ggaccucaggcc

SEQ ID NO: 2956126 - RNA, 20 nt, Human
ggacuacaggugugagucac

SEQ ID NO: 2956127 - RNA, 13 nt, Human
gccuccuccagcc

SEQ ID NO: 2956128 - RNA, 18 nt, Human
gccuccugcccuuaccug

SEQ ID NO: 2956129 - RNA, 12 nt, Human
gccucugggacu

SEQ ID NO: 2956130 - RNA, 17 nt, Human
gccugcccaggccccug

SEQ ID NO: 2956131 - RNA, 18 nt, Human
gccugcccaggccccugc

SEQ ID NO: 2956132 - RNA, 19 nt, Human
gccugcccaggccccugcc

SEQ ID NO: 2956133 - RNA, 23 nt, Human
gccucuucucuacucuagggaaa

SEQ ID NO: 2956134 - RNA, 12 nt, Human
gccucuucucua

SEQ ID NO: 2956135 - RNA, 15 nt, Human
gccuaccaauauuua

SEQ ID NO: 2956136 - RNA, 17 nt, Human
gccuggccccucagggu

SEQ ID NO: 2956137 - RNA, 16 nt, Human
gccuggccccucaggg

SEQ ID NO: 2956138 - RNA, 15 nt, Human
gccuggccccucagg

SEQ ID NO: 2956139 - RNA, 10 nt, Human
gccuggccug

SEQ ID NO: 2956140 - RNA, 22 nt, Human
gccuggccccucagggucccug

SEQ ID NO: 2956141 - RNA, 20 nt, Human
gccuggccccucaggguccc

SEQ ID NO: 2956142 - RNA, 21 nt, Human
gccugggaggucaaggcugca

SEQ ID NO: 2956143 - RNA, 14 nt, Human
gccugggaucccuc

SEQ ID NO: 2956144 - RNA, 22 nt, Human
gccugggaggucaaggcugcag

SEQ ID NO: 2956145 - RNA, 18 nt, Human
gccugggaucccucaucc

SEQ ID NO: 2956146 - RNA, 16 nt, Human
gccugccucuucucua

SEQ ID NO: 2956147 - RNA, 13 nt, Human
gccgcccaaggcc

SEQ ID NO: 2956148 - RNA, 16 nt, Human
gccgccaugcuccugg

SEQ ID NO: 2956149 - RNA, 20 nt, Human
gcccuuaccugccaggaagc

SEQ ID NO: 2956150 - RNA, 16 nt, Human
gcccuuaccugccagg

SEQ ID NO: 2956151 - RNA, 15 nt, Human
gccgccaugcuccug

SEQ ID NO: 2956152 - RNA, 22 nt, Human
gcccugccuccuuugugaggaa

SEQ ID NO: 2956153 - RNA, 16 nt, Human
gcccugccuccuuugu

SEQ ID NO: 2956154 - RNA, 14 nt, Human
gcccugccuccuuu

SEQ ID NO: 2956155 - RNA, 21 nt, Human
gcccugugggcccccaaaugg

SEQ ID NO: 2956156 - RNA, 17 nt, Human
gcccuguuaaaagauga

SEQ ID NO: 2956157 - RNA, 14 nt, Human
gcccuguuaaaaga

SEQ ID NO: 2956158 - RNA, 13 nt, Human
gcccuguuaaaag

SEQ ID NO: 2956159 - RNA, 13 nt, Human
gcccacucccugc

SEQ ID NO: 2956160 - RNA, 19 nt, Human
gcccacucccugcaaccug

SEQ ID NO: 2956161 - RNA, 15 nt, Human
gcccacucccugcaa

SEQ ID NO: 2956162 - RNA, 14 nt, Human
gcccacucccugca

SEQ ID NO: 2956163 - RNA, 22 nt, Human
gcccuaaaguguauuuuuuuac

SEQ ID NO: 2956164 - RNA, 22 nt, Human
gccccuggaugcagccucacag

SEQ ID NO: 2956165 - RNA, 18 nt, Human
gccccuggaugcagccuc

SEQ ID NO: 2956166 - RNA, 16 nt, Human
gccccuggaugcagcc

SEQ ID NO: 2956167 - RNA, 13 nt, Human
gccccugcccggc

SEQ ID NO: 2956168 - RNA, 14 nt, Human
gccccugcccggcu

SEQ ID NO: 2956169 - RNA, 18 nt, Human
gccccaaaacucuccucu

SEQ ID NO: 2956170 - RNA, 16 nt, Human
gcccccaggugccagu

SEQ ID NO: 2956171 - RNA, 19 nt, Human
gccccaaaacucuccucug

SEQ ID NO: 2956172 - RNA, 20 nt, Human
gccacauuccugaugcuucu

SEQ ID NO: 2956173 - RNA, 16 nt, Human
gccacauuccugaugc

SEQ ID NO: 2956174 - RNA, 19 nt, Human
gccaccaacauacucccau

SEQ ID NO: 2956175 - RNA, 21 nt, Human
gccaccaacauacucccaucu

SEQ ID NO: 2956176 - RNA, 20 nt, Human
gccaccaacauacucccauc

SEQ ID NO: 2956177 - RNA, 22 nt, Human
gccaccaacauacucccaucug

SEQ ID NO: 2956178 - RNA, 22 nt, Human
gccacugcaccgggccacagag

SEQ ID NO: 2956179 - RNA, 21 nt, Human
gccacugcacuauagccuagg

SEQ ID NO: 2956180 - RNA, 13 nt, Human
gccacccugggga

SEQ ID NO: 2956181 - RNA, 19 nt, Human
gccacccuggggagaaagu

SEQ ID NO: 2956182 - RNA, 23 nt, Human
gccacugcaccgggccacagaga

SEQ ID NO: 2956183 - RNA, 19 nt, Human
gccacugugcuccagccug

SEQ ID NO: 2956184 - RNA, 19 nt, Human
gccacugugaagagaacca

SEQ ID NO: 2956185 - RNA, 18 nt, Human
gccacugugaagagaacc

SEQ ID NO: 2956186 - RNA, 14 nt, Human
gccacuuuauuucu

SEQ ID NO: 2956187 - RNA, 20 nt, Human
gccagaaaccuuccugcuga

SEQ ID NO: 2956188 - RNA, 16 nt, Human
gccauaugaaaaggcu

SEQ ID NO: 2956189 - RNA, 19 nt, Human
gccauauucuguuggccag

SEQ ID NO: 2956190 - RNA, 20 nt, Human
gccauauucuguuggccagu

SEQ ID NO: 2956191 - RNA, 15 nt, Human
gccaugucagacaca

SEQ ID NO: 2956192 - RNA, 14 nt, Human
gccaugucagacac

SEQ ID NO: 2956193 - RNA, 16 nt, Human
gccaugucagacacag

SEQ ID NO: 2956194 - RNA, 14 nt, Human
gccauguuggccag

SEQ ID NO: 2956195 - RNA, 15 nt, Human
gccauguuggccagg

SEQ ID NO: 2956196 - RNA, 16 nt, Human
gccauguuggccaggc

SEQ ID NO: 2956197 - RNA, 17 nt, Human
gccauguuggccaggcu

SEQ ID NO: 2956198 - RNA, 18 nt, Human
gccauguuggccaggcug

SEQ ID NO: 2956199 - RNA, 15 nt, Human
gcccacgcuggagug

SEQ ID NO: 2956200 - RNA, 16 nt, Human
gcccacgcuggagugc

SEQ ID NO: 2956201 - RNA, 17 nt, Human
gcccacgcuggagugca

SEQ ID NO: 2956202 - RNA, 18 nt, Human
gcccaccuuggcucaagu

SEQ ID NO: 2956203 - RNA, 14 nt, Human
gcccacgcccccac

SEQ ID NO: 2956204 - RNA, 13 nt, Human
gcccacgccccca

SEQ ID NO: 2956205 - RNA, 19 nt, Human
gccauguuggccaggcugg

SEQ ID NO: 2956206 - RNA, 20 nt, Human
gccauguuggccaggcuggu

SEQ ID NO: 2956207 - RNA, 22 nt, Human
gccauguuggccaggcuggucu

SEQ ID NO: 2956208 - RNA, 24 nt, Human
gccauguuggccaggcuggucuca

SEQ ID NO: 2956209 - RNA, 13 nt, Human
gccaggccagagg

SEQ ID NO: 2956210 - RNA, 15 nt, Human
gccaggcccucugcc

SEQ ID NO: 2956211 - RNA, 17 nt, Human
gccaggcccucugccca

SEQ ID NO: 2956212 - RNA, 16 nt, Human
gccaggcccucugccc

SEQ ID NO: 2956213 - RNA, 21 nt, Human
gccaggcccuugucggcccca

SEQ ID NO: 2956214 - RNA, 21 nt, Human
gccaggcccucugcccacucc

SEQ ID NO: 2956215 - RNA, 20 nt, Human
gccaggcccucugcccacuc

SEQ ID NO: 2956216 - RNA, 19 nt, Human
gccaggcccucugcccacu

SEQ ID NO: 2956217 - RNA, 23 nt, Human
gccaggccacaagacccuugugg

SEQ ID NO: 2956218 - RNA, 12 nt, Human
gccaggccagag

SEQ ID NO: 2956219 - RNA, 16 nt, Human
gccagcaggcucucag

SEQ ID NO: 2956220 - RNA, 13 nt, Human
gccagcaggcucu

SEQ ID NO: 2956221 - RNA, 22 nt, Human
gccagcaguucagagcugcccu

SEQ ID NO: 2956222 - RNA, 23 nt, Human
gccagcaguucagagcugcccuc

SEQ ID NO: 2956223 - RNA, 23 nt, Human
gccagcaggcucucaggccagcu

SEQ ID NO: 2956224 - RNA, 21 nt, Human
gccagcaggcucucaggccag

SEQ ID NO: 2956225 - RNA, 20 nt, Human
gccagcaggcucucaggcca

SEQ ID NO: 2956226 - RNA, 19 nt, Human
gccagcaggcucucaggcc

SEQ ID NO: 2956227 - RNA, 18 nt, Human
gccagcaggcucucaggc

SEQ ID NO: 2956228 - RNA, 17 nt, Human
gccagcaggcucucagg

SEQ ID NO: 2956229 - RNA, 19 nt, Human
gccagauuuuccugaaaac

SEQ ID NO: 2956230 - RNA, 22 nt, Human
gccagaagucaaggcuuagacc

SEQ ID NO: 2956231 - RNA, 20 nt, Human
gccagaagucaaggcuuaga

SEQ ID NO: 2956232 - RNA, 16 nt, Human
gccagaagucaaggcu

SEQ ID NO: 2956233 - RNA, 23 nt, Human
gccagaagucaaggcuuagaccc

SEQ ID NO: 2956234 - RNA, 22 nt, Human
gccagacaucaacagauaaaua

SEQ ID NO: 2956235 - RNA, 14 nt, Human
gcugacagacacag

SEQ ID NO: 2956236 - RNA, 15 nt, Human
gcugacagacacagg

SEQ ID NO: 2956237 - RNA, 16 nt, Human
gcugacagacacaggc

SEQ ID NO: 2956238 - RNA, 20 nt, Human
gcugaaggcucgagcaugcc

SEQ ID NO: 2956239 - RNA, 12 nt, Human
gcugaaggcucg

SEQ ID NO: 2956240 - RNA, 17 nt, Human
gcugaaugguuuucaaa

SEQ ID NO: 2956241 - RNA, 22 nt, Human
gcugaauacagaggcaacugca

SEQ ID NO: 2956242 - RNA, 12 nt, Human
gcucuuccaggc

SEQ ID NO: 2956243 - RNA, 16 nt, Human
gcucuuccaggcuggg

SEQ ID NO: 2956244 - RNA, 15 nt, Human
gcucuuccaggcugg

SEQ ID NO: 2956245 - RNA, 15 nt, Human
gcucuguccugggag

SEQ ID NO: 2956246 - RNA, 14 nt, Human
gcucuguccuggga

SEQ ID NO: 2956247 - RNA, 16 nt, Human
gcucuguccugggagu

SEQ ID NO: 2956248 - RNA, 16 nt, Human
gcucucaggccagcug

SEQ ID NO: 2956249 - RNA, 15 nt, Human
gcucucaggccagcu

SEQ ID NO: 2956250 - RNA, 14 nt, Human
gcucucaggccagc

SEQ ID NO: 2956251 - RNA, 13 nt, Human
gcucucaggccag

SEQ ID NO: 2956252 - RNA, 22 nt, Human
gcucccaggcauuccccaggag

SEQ ID NO: 2956253 - RNA, 14 nt, Human
gcuccccagcccca

SEQ ID NO: 2956254 - RNA, 21 nt, Human
gcucccaggcauuccccagga

SEQ ID NO: 2956255 - RNA, 20 nt, Human
gcucccaggcauuccccagg

SEQ ID NO: 2956256 - RNA, 15 nt, Human
gcuccccucggagaa

SEQ ID NO: 2956257 - RNA, 22 nt, Human
gcucagguggggucacucuggc

SEQ ID NO: 2956258 - RNA, 21 nt, Human
gcucagguggggucacucugg

SEQ ID NO: 2956259 - RNA, 12 nt, Human
gcucagggccug

SEQ ID NO: 2956260 - RNA, 16 nt, Human
gcucagggccuggcuc

SEQ ID NO: 2956261 - RNA, 13 nt, Human
gcucagggccugg

SEQ ID NO: 2956262 - RNA, 15 nt, Human
gcucagagagggugg

SEQ ID NO: 2956263 - RNA, 20 nt, Human
gcucagagagggugggagug

SEQ ID NO: 2956264 - RNA, 18 nt, Human
gcucagagagggugggag

SEQ ID NO: 2956265 - RNA, 22 nt, Human
gcucagagagggugggaguggg

SEQ ID NO: 2956266 - RNA, 20 nt, Human
gccuguucagcuccagcuca

SEQ ID NO: 2956267 - RNA, 19 nt, Human
gccuguucagcuccagcuc

SEQ ID NO: 2956268 - RNA, 16 nt, Human
gcuaggaacacuccuu

SEQ ID NO: 2956269 - RNA, 18 nt, Human
gcuaggaacacuccuuca

SEQ ID NO: 2956270 - RNA, 21 nt, Human
gcuaggaacacuccuucacag

SEQ ID NO: 2956271 - RNA, 19 nt, Human
gcuaggaacacuccuucac

SEQ ID NO: 2956272 - RNA, 22 nt, Human
gcuaggaccccuccaugugggc

SEQ ID NO: 2956273 - RNA, 14 nt, Human
gcuaggccuggcca

SEQ ID NO: 2956274 - RNA, 15 nt, Human
gcuaggccuggccag

SEQ ID NO: 2956275 - RNA, 16 nt, Human
gcuaguaucaaaagaa

SEQ ID NO: 2956276 - RNA, 21 nt, Human
gcuaguaauuggaaaggcagc

SEQ ID NO: 2956277 - RNA, 12 nt, Human
gcuggagugcag

SEQ ID NO: 2956278 - RNA, 17 nt, Human
gcuggagcucugcccau

SEQ ID NO: 2956279 - RNA, 14 nt, Human
gcuggagcucugcc

SEQ ID NO: 2956280 - RNA, 15 nt, Human
gcuggguguggcgca

SEQ ID NO: 2956281 - RNA, 20 nt, Human
gcugggcucccuucccaccu

SEQ ID NO: 2956282 - RNA, 17 nt, Human
gcugggcucccuuccca

SEQ ID NO: 2956283 - RNA, 16 nt, Human
gcugggcucccuuccc

SEQ ID NO: 2956284 - RNA, 12 nt, Human
gcugggcucccu

SEQ ID NO: 2956285 - RNA, 17 nt, Human
gcugggcagaggaaagc

SEQ ID NO: 2956286 - RNA, 16 nt, Human
gcugggcagaggaaag

SEQ ID NO: 2956287 - RNA, 19 nt, Human
gcugggcagaggaaagcaa

SEQ ID NO: 2956288 - RNA, 19 nt, Human
gcugggauuacagguguga

SEQ ID NO: 2956289 - RNA, 18 nt, Human
gcugggauuacaggugug

SEQ ID NO: 2956290 - RNA, 13 nt, Human
gcugggcagagga

SEQ ID NO: 2956291 - RNA, 15 nt, Human
gcugggcagaggaaa

SEQ ID NO: 2956292 - RNA, 14 nt, Human
gcugggcagaggaa

SEQ ID NO: 2956293 - RNA, 14 nt, Human
gcuggagugcagug

SEQ ID NO: 2956294 - RNA, 15 nt, Human
gcuggagugcaguga

SEQ ID NO: 2956295 - RNA, 17 nt, Human
gcuggccuggccccuca

SEQ ID NO: 2956296 - RNA, 16 nt, Human
gcuggccuggccccuc

SEQ ID NO: 2956297 - RNA, 16 nt, Human
gcugggauuacaggug

SEQ ID NO: 2956298 - RNA, 19 nt, Human
gcuggccuggccccucagg

SEQ ID NO: 2956299 - RNA, 18 nt, Human
gcuggccuggccccucag

SEQ ID NO: 2956300 - RNA, 22 nt, Human
gcugcaccggcuggccuggccc

SEQ ID NO: 2956301 - RNA, 19 nt, Human
gcugcaccggcuggccugg

SEQ ID NO: 2956302 - RNA, 18 nt, Human
gcugcaccggcuggccug

SEQ ID NO: 2956303 - RNA, 17 nt, Human
gcugcaccggcuggccu

SEQ ID NO: 2956304 - RNA, 16 nt, Human
gcugcaccggcuggcc

SEQ ID NO: 2956305 - RNA, 14 nt, Human
gcugcaccggcugg

SEQ ID NO: 2956306 - RNA, 21 nt, Human
gcugccauccagguucagcuu

SEQ ID NO: 2956307 - RNA, 23 nt, Human
gcugccauccagguucagcuugu

SEQ ID NO: 2956308 - RNA, 21 nt, Human
gcugccagccgagauagccaa

SEQ ID NO: 2956309 - RNA, 19 nt, Human
gcugccagccgagauagcc

SEQ ID NO: 2956310 - RNA, 14 nt, Human
gcugcugccccugc

SEQ ID NO: 2956311 - RNA, 15 nt, Human
gcugcugccccugca

SEQ ID NO: 2956312 - RNA, 23 nt, Human
gcugcugccccugcacagcaggc

SEQ ID NO: 2956313 - RNA, 13 nt, Human
gcugcugccccug

SEQ ID NO: 2956314 - RNA, 16 nt, Human
gcugcugauuuaaaca

SEQ ID NO: 2956315 - RNA, 18 nt, Human
gcugccugggaucccuca

SEQ ID NO: 2956316 - RNA, 16 nt, Human
gcugccugggaucccu

SEQ ID NO: 2956317 - RNA, 19 nt, Human
gcugccugggaucccucau

SEQ ID NO: 2956318 - RNA, 22 nt, Human
gcugcuccuaggacccgucucc

SEQ ID NO: 2956319 - RNA, 13 nt, Human
gcugccugggauc

SEQ ID NO: 2956320 - RNA, 14 nt, Human
gcugccuccccucc

SEQ ID NO: 2956321 - RNA, 16 nt, Human
gcugccuccccuccuc

SEQ ID NO: 2956322 - RNA, 17 nt, Human
gcugccuccccuccucu

SEQ ID NO: 2956323 - RNA, 20 nt, Human
gcugccuccccuccucugcu

SEQ ID NO: 2956324 - RNA, 21 nt, Human
gcugccuccccuccucugcuu

SEQ ID NO: 2956325 - RNA, 22 nt, Human
gcugccuccccuccucugcuug

SEQ ID NO: 2956326 - RNA, 14 nt, Human
gcuuguacauaaug

SEQ ID NO: 2956327 - RNA, 16 nt, Human
gcuuguacauaaugcg

SEQ ID NO: 2956328 - RNA, 14 nt, Human
gcuggguuggaggg

SEQ ID NO: 2956329 - RNA, 21 nt, Human
gcuggguuggaggguguccca

SEQ ID NO: 2956330 - RNA, 15 nt, Human
gcuggguucugaucc

SEQ ID NO: 2956331 - RNA, 15 nt, Human
gcuggguucuaccca

SEQ ID NO: 2956332 - RNA, 17 nt, Human
gcuguacauacuuuuug

SEQ ID NO: 2956333 - RNA, 19 nt, Human
gcuguaucccaugagccuc

SEQ ID NO: 2956334 - RNA, 20 nt, Human
gcuguaucccaugagccuca

SEQ ID NO: 2956335 - RNA, 23 nt, Human
gcuguaucccaugagccucagca

SEQ ID NO: 2956336 - RNA, 13 nt, Human
gcuguacauacuu

SEQ ID NO: 2956337 - RNA, 14 nt, Human
gcuguacauacuuu

SEQ ID NO: 2956338 - RNA, 15 nt, Human
gcuguacauacuuuu

SEQ ID NO: 2956339 - RNA, 16 nt, Human
gcuguacauacuuuuu

SEQ ID NO: 2956340 - RNA, 20 nt, Human
gcuucacggaagagccuugc

SEQ ID NO: 2956341 - RNA, 19 nt, Human
gcuucacggaagagccuug

SEQ ID NO: 2956342 - RNA, 22 nt, Human
gcuucaaggauccugagccaga

SEQ ID NO: 2956343 - RNA, 18 nt, Human
gcugugcucuggacaggc

SEQ ID NO: 2956344 - RNA, 13 nt, Human
gcugugcugcccu

SEQ ID NO: 2956345 - RNA, 21 nt, Human
gcugugcucuggacaggcaug

SEQ ID NO: 2956346 - RNA, 12 nt, Human
gcugugcugccc

SEQ ID NO: 2956347 - RNA, 21 nt, Human
gcuguuggcugggggccucag

SEQ ID NO: 2956348 - RNA, 22 nt, Human
gcuguuggcugggggccucagu

SEQ ID NO: 2956349 - RNA, 22 nt, Human
gcugugcugcccugcccaccug

SEQ ID NO: 2956350 - RNA, 19 nt, Human
gcugugcugcccugcccac

SEQ ID NO: 2956351 - RNA, 20 nt, Human
gagccuuccaggggugggac

SEQ ID NO: 2956352 - RNA, 23 nt, Human
gagccuuccaggggugggacacc

SEQ ID NO: 2956353 - RNA, 13 nt, Human
gagccuugaacuu

SEQ ID NO: 2956354 - RNA, 15 nt, Human
gaggcagggucucac

SEQ ID NO: 2956355 - RNA, 22 nt, Human
gaggcagggucucacucugucg

SEQ ID NO: 2956356 - RNA, 22 nt, Human
gaggccaaggugggaggauugc

SEQ ID NO: 2956357 - RNA, 17 nt, Human
gaggccaaggugggagg

SEQ ID NO: 2956358 - RNA, 14 nt, Human
gaggcagggucuca

SEQ ID NO: 2956359 - RNA, 15 nt, Human
gaggacgcucucugg

SEQ ID NO: 2956360 - RNA, 22 nt, Human
gaggcuagugugguguuuccug

SEQ ID NO: 2956361 - RNA, 19 nt, Human
gaggccagagacacaagcc

SEQ ID NO: 2956362 - RNA, 14 nt, Human
gaggccagagacac

SEQ ID NO: 2956363 - RNA, 13 nt, Human
gaggccagagaca

SEQ ID NO: 2956364 - RNA, 19 nt, Human
gaggcuccacuuggucugu

SEQ ID NO: 2956365 - RNA, 18 nt, Human
gaggcuccacuuggucug

SEQ ID NO: 2956366 - RNA, 16 nt, Human
gaggcugaggcaggag

SEQ ID NO: 2956367 - RNA, 18 nt, Human
gaggcugaggcaggagac

SEQ ID NO: 2956368 - RNA, 23 nt, Human
gaggcuccacuuggucugugaga

SEQ ID NO: 2956369 - RNA, 18 nt, Human
gaguugauucagcucugc

SEQ ID NO: 2956370 - RNA, 22 nt, Human
gaguuguuacauuuuuaagugc

SEQ ID NO: 2956371 - RNA, 23 nt, Human
gaggugaccccagguuucuaugu

SEQ ID NO: 2956372 - RNA, 15 nt, Human
gaggucgaggcagga

SEQ ID NO: 2956373 - RNA, 17 nt, Human
gaguggaguuacugaac

SEQ ID NO: 2956374 - RNA, 22 nt, Human
gaguugauagcacagacccugc

SEQ ID NO: 2956375 - RNA, 17 nt, Human
gaguugauucagcucug

SEQ ID NO: 2956376 - RNA, 16 nt, Human
gaguugauucagcucu

SEQ ID NO: 2956377 - RNA, 15 nt, Human
gaguugauucagcuc

SEQ ID NO: 2956378 - RNA, 11 nt, Human
gaguggaguua

SEQ ID NO: 2956379 - RNA, 20 nt, Human
gagugacagaggcagcccca

SEQ ID NO: 2956380 - RNA, 12 nt, Human
gagucccaccuu

SEQ ID NO: 2956381 - RNA, 18 nt, Human
gagugacagaggcagccc

SEQ ID NO: 2956382 - RNA, 22 nt, Human
gagucagaaguuucugccgcag

SEQ ID NO: 2956383 - RNA, 15 nt, Human
gagucaccaagccca

SEQ ID NO: 2956384 - RNA, 16 nt, Human
gagucaccaagcccag

SEQ ID NO: 2956385 - RNA, 17 nt, Human
gagucaccaagcccagu

SEQ ID NO: 2956386 - RNA, 15 nt, Human
gaugaucuaggaaga

SEQ ID NO: 2956387 - RNA, 16 nt, Human
gaugaucuuuaaaaua

SEQ ID NO: 2956388 - RNA, 21 nt, Human
gaugaucuaggaagacuuugg

SEQ ID NO: 2956389 - RNA, 16 nt, Human
gaugagugagcaugcc

SEQ ID NO: 2956390 - RNA, 22 nt, Human
gaugguucccuugaugaagaag

SEQ ID NO: 2956391 - RNA, 17 nt, Human
gauguagaggagaaacu

SEQ ID NO: 2956392 - RNA, 18 nt, Human
gauguagaggagaaacug

SEQ ID NO: 2956393 - RNA, 18 nt, Human
gauucuccugccucagcc

SEQ ID NO: 2956394 - RNA, 15 nt, Human
gauucuccugccuca

SEQ ID NO: 2956395 - RNA, 17 nt, Human
gauucuccugccucagc

SEQ ID NO: 2956396 - RNA, 16 nt, Human
gauuuaccacuugugu

SEQ ID NO: 2956397 - RNA, 15 nt, Human
gauuuaccacuugug

SEQ ID NO: 2956398 - RNA, 17 nt, Human
gauucuuccucccuccc

SEQ ID NO: 2956399 - RNA, 18 nt, Human
gauucuuccucccucccu

SEQ ID NO: 2956400 - RNA, 12 nt, Human
gauuauuggaaa

SEQ ID NO: 2956401 - RNA, 20 nt, Human
gauguaugcacacacauaua

SEQ ID NO: 2956402 - RNA, 20 nt, Human
gcaaguauuagaauaccaca

SEQ ID NO: 2956403 - RNA, 22 nt, Human
gcaauagucaaauugugugaaa

SEQ ID NO: 2956404 - RNA, 19 nt, Human
gcaagugagagcugggugu

SEQ ID NO: 2956405 - RNA, 23 nt, Human
gcacaguuuucugagaaagacua

SEQ ID NO: 2956406 - RNA, 22 nt, Human
gcacaguuuucugagaaagacu

SEQ ID NO: 2956407 - RNA, 20 nt, Human
gcacaguuuucugagaaaga

SEQ ID NO: 2956408 - RNA, 14 nt, Human
gcacacauuuuuua

SEQ ID NO: 2956409 - RNA, 14 nt, Human
gcacaccgggcacu

SEQ ID NO: 2956410 - RNA, 22 nt, Human
gcacaagcugcacccucaggca

SEQ ID NO: 2956411 - RNA, 16 nt, Human
gcacuccccugcuggg

SEQ ID NO: 2956412 - RNA, 22 nt, Human
gcacuccccugcuggguguggc

SEQ ID NO: 2956413 - RNA, 13 nt, Human
gcacucagaagac

SEQ ID NO: 2956414 - RNA, 16 nt, Human
gcacucagaagacacu

SEQ ID NO: 2956415 - RNA, 17 nt, Human
gcacuccccugcugggu

SEQ ID NO: 2956416 - RNA, 13 nt, Human
gcacaucauuuca

SEQ ID NO: 2956417 - RNA, 14 nt, Human
gcaccgggccacag

SEQ ID NO: 2956418 - RNA, 22 nt, Human
gcacaucagcacgauuucuguu

SEQ ID NO: 2956419 - RNA, 23 nt, Human
gcacaucagcacgauuucuguuu

SEQ ID NO: 2956420 - RNA, 23 nt, Human
gcaccgggccacagagaaaguac

SEQ ID NO: 2956421 - RNA, 19 nt, Human
gaacccgggaggcagaggu

SEQ ID NO: 2956422 - RNA, 20 nt, Human
gaaccgagggggcugcuccc

SEQ ID NO: 2956423 - RNA, 21 nt, Human
gaaccgagggggcugcuccca

SEQ ID NO: 2956424 - RNA, 22 nt, Human
gaaccgagggggcugcucccac

SEQ ID NO: 2956425 - RNA, 15 nt, Human
gaacuccuggccuca

SEQ ID NO: 2956426 - RNA, 14 nt, Human
gaacugaaaucaua

SEQ ID NO: 2956427 - RNA, 13 nt, Human
gaacugaaaucau

SEQ ID NO: 2956428 - RNA, 11 nt, Human
gaacuggcugc

SEQ ID NO: 2956429 - RNA, 12 nt, Human
gaacuggcugca

SEQ ID NO: 2956430 - RNA, 11 nt, Human
gaagcagagug

SEQ ID NO: 2956431 - RNA, 23 nt, Human
gaagcagaccauuggggcuccca

SEQ ID NO: 2956432 - RNA, 15 nt, Human
gaagcagaggaagga

SEQ ID NO: 2956433 - RNA, 14 nt, Human
gaagcacaugccuc

SEQ ID NO: 2956434 - RNA, 12 nt, Human
gaagcagagugg

SEQ ID NO: 2956435 - RNA, 15 nt, Human
gaagcacaugccucu

SEQ ID NO: 2956436 - RNA, 20 nt, Human
gaagcacaugccucucucag

SEQ ID NO: 2956437 - RNA, 17 nt, Human
gaagcacaugccucucu

SEQ ID NO: 2956438 - RNA, 23 nt, Human
gaagcaacccaaauguucaucaa

SEQ ID NO: 2956439 - RNA, 16 nt, Human
gaagacaaugacuuac

SEQ ID NO: 2956440 - RNA, 22 nt, Human
gaagacaaugacuuacuguaca

SEQ ID NO: 2956441 - RNA, 23 nt, Human
gaagacaaugugaaaagaaaaau

SEQ ID NO: 2956442 - RNA, 23 nt, Human
gaagauuuugaaauuuuuauuaa

SEQ ID NO: 2956443 - RNA, 14 nt, Human
gaagcaaaauuuuu

SEQ ID NO: 2956444 - RNA, 19 nt, Human
gaagcuccgcuuucuaccc

SEQ ID NO: 2956445 - RNA, 22 nt, Human
gaagcuccgcuuucuacccagc

SEQ ID NO: 2956446 - RNA, 17 nt, Human
gaaggccccgcccaggc

SEQ ID NO: 2956447 - RNA, 21 nt, Human
gaaggcucgagcaugccugga

SEQ ID NO: 2956448 - RNA, 19 nt, Human
gaaggccccgcccaggcuu

SEQ ID NO: 2956449 - RNA, 18 nt, Human
gaaggccccgcccaggcu

SEQ ID NO: 2956450 - RNA, 19 nt, Human
gaaggcucgagcaugccug

SEQ ID NO: 2956451 - RNA, 19 nt, Human
gaaggcuggguucugaucc

SEQ ID NO: 2956452 - RNA, 15 nt, Human
gaaggcuggguucug

SEQ ID NO: 2956453 - RNA, 22 nt, Human
gaaggcuggguucugauccuag

SEQ ID NO: 2956454 - RNA, 20 nt, Human
gaaggcuggguucugauccu

SEQ ID NO: 2956455 - RNA, 15 nt, Human
gaauauugcugaugg

SEQ ID NO: 2956456 - RNA, 14 nt, Human
gaauauugcugaug

SEQ ID NO: 2956457 - RNA, 20 nt, Human
gaauauugcugauggugcaa

SEQ ID NO: 2956458 - RNA, 19 nt, Human
gaauauugcugauggugca

SEQ ID NO: 2956459 - RNA, 22 nt, Human
gaaggggagauaaggguaucug

SEQ ID NO: 2956460 - RNA, 15 nt, Human
gaaguucuaguguuu

SEQ ID NO: 2956461 - RNA, 16 nt, Human
gaaguucuaguguuuu

SEQ ID NO: 2956462 - RNA, 16 nt, Human
gaaguucuauuuauuu

SEQ ID NO: 2956463 - RNA, 17 nt, Human
gacagcccgggcucugc

SEQ ID NO: 2956464 - RNA, 21 nt, Human
gacagaaagcagaacagugau

SEQ ID NO: 2956465 - RNA, 22 nt, Human
gacacagcucuucuccaggcug

SEQ ID NO: 2956466 - RNA, 23 nt, Human
gacacagcucuucuccaggcugu

SEQ ID NO: 2956467 - RNA, 14 nt, Human
gacacacugaagaa

SEQ ID NO: 2956468 - RNA, 15 nt, Human
gacacacugaagaag

SEQ ID NO: 2956469 - RNA, 16 nt, Human
gacacacugaagaagc

SEQ ID NO: 2956470 - RNA, 13 nt, Human
gacacagcucuuc

SEQ ID NO: 2956471 - RNA, 14 nt, Human
gacacagcucuucu

SEQ ID NO: 2956472 - RNA, 16 nt, Human
gacacagcucuucucc

SEQ ID NO: 2956473 - RNA, 18 nt, Human
gaccagggauuuccauga

SEQ ID NO: 2956474 - RNA, 20 nt, Human
gaccagggauuuccaugaug

SEQ ID NO: 2956475 - RNA, 19 nt, Human
gaccaucccugaaggcccc

SEQ ID NO: 2956476 - RNA, 18 nt, Human
gaccaucccugaaggccc

SEQ ID NO: 2956477 - RNA, 13 nt, Human
gaccaucccugaa

SEQ ID NO: 2956478 - RNA, 12 nt, Human
gaccaucccuga

SEQ ID NO: 2956479 - RNA, 16 nt, Human
gacauuugcucaugga

SEQ ID NO: 2956480 - RNA, 17 nt, Human
gacauuugcucauggaa

SEQ ID NO: 2956481 - RNA, 19 nt, Human
gacauuguuggccaaagcc

SEQ ID NO: 2956482 - RNA, 14 nt, Human
gacauugaaaucua

SEQ ID NO: 2956483 - RNA, 22 nt, Human
gacauugacuauuuuuguuuuu

SEQ ID NO: 2956484 - RNA, 14 nt, Human
gacauugacuauuu

SEQ ID NO: 2956485 - RNA, 21 nt, Human
gacauugaaaucuaggaaaau

SEQ ID NO: 2956486 - RNA, 14 nt, Human
gacauugcggacag

SEQ ID NO: 2956487 - RNA, 15 nt, Human
gacauugcggacagc

SEQ ID NO: 2956488 - RNA, 14 nt, Human
gacagugaaagaaa

SEQ ID NO: 2956489 - RNA, 20 nt, Human
gacagcccgggcucugccuc

SEQ ID NO: 2956490 - RNA, 19 nt, Human
gacagcccgggcucugccu

SEQ ID NO: 2956491 - RNA, 18 nt, Human
gacagcccgggcucugcc

SEQ ID NO: 2956492 - RNA, 12 nt, Human
gacauucccugc

SEQ ID NO: 2956493 - RNA, 21 nt, Human
gacagugagacucugucucag

SEQ ID NO: 2956494 - RNA, 16 nt, Human
gacgcucucuggccuu

SEQ ID NO: 2956495 - RNA, 17 nt, Human
gacgcucucuggccuuc

SEQ ID NO: 2956496 - RNA, 15 nt, Human
gacgccaucccagcc

SEQ ID NO: 2956497 - RNA, 18 nt, Human
gacgccaucccagcccca

SEQ ID NO: 2956498 - RNA, 17 nt, Human
gacgccaucccagcccc

SEQ ID NO: 2956499 - RNA, 15 nt, Human
gacgcucucuggccu

SEQ ID NO: 2956500 - RNA, 19 nt, Human
gacgcuacccgggaagggg

SEQ ID NO: 2956501 - RNA, 18 nt, Human
gacgcuacccgggaaggg

SEQ ID NO: 2956502 - RNA, 16 nt, Human
gacgcuacccgggaag

SEQ ID NO: 2956503 - RNA, 16 nt, Human
gaccugaagagugguc

SEQ ID NO: 2956504 - RNA, 16 nt, Human
gacgccaucccagccc

SEQ ID NO: 2956505 - RNA, 14 nt, Human
gaccugaggcccuu

SEQ ID NO: 2956506 - RNA, 13 nt, Human
gaccugaggcccu

SEQ ID NO: 2956507 - RNA, 11 nt, Human
gaccugaggcc

SEQ ID NO: 2956508 - RNA, 20 nt, Human
gaccaucccugaaggccccg

SEQ ID NO: 2956509 - RNA, 13 nt, Human
gaccucugccuga

SEQ ID NO: 2956510 - RNA, 14 nt, Human
gaccucugcagcaa

SEQ ID NO: 2956511 - RNA, 16 nt, Human
gacugaauggacuuug

SEQ ID NO: 2956512 - RNA, 14 nt, Human
gacugaauuaugaa

SEQ ID NO: 2956513 - RNA, 14 nt, Human
gacugaauuucuuu

SEQ ID NO: 2956514 - RNA, 20 nt, Human
gacugaauuaugaaacuuuu

SEQ ID NO: 2956515 - RNA, 13 nt, Human
gacucuucccuca

SEQ ID NO: 2956516 - RNA, 21 nt, Human
gacucuuaagaagacugcauu

SEQ ID NO: 2956517 - RNA, 19 nt, Human
gacucugucucaaaaaaac

SEQ ID NO: 2956518 - RNA, 14 nt, Human
gacucuuaagaaga

SEQ ID NO: 2956519 - RNA, 18 nt, Human
gacucuuaagaagacugc

SEQ ID NO: 2956520 - RNA, 13 nt, Human
cuuggcccaggag

SEQ ID NO: 2956521 - RNA, 14 nt, Human
cuuggcccaggagu

SEQ ID NO: 2956522 - RNA, 12 nt, Human
cuugcucugcug

SEQ ID NO: 2956523 - RNA, 23 nt, Human
cuugccgucuaccugaggggccu

SEQ ID NO: 2956524 - RNA, 12 nt, Human
cuugacagggca

SEQ ID NO: 2956525 - RNA, 20 nt, Human
cuugccgucuaccugagggg

SEQ ID NO: 2956526 - RNA, 23 nt, Human
cuugaaugaugccaugaggaaca

SEQ ID NO: 2956527 - RNA, 20 nt, Human
cuugaaugaugccaugagga

SEQ ID NO: 2956528 - RNA, 22 nt, Human
cuucuucagagacuccugcagg

SEQ ID NO: 2956529 - RNA, 18 nt, Human
cuucuucagagacuccug

SEQ ID NO: 2956530 - RNA, 21 nt, Human
cuucuucagagacuccugcag

SEQ ID NO: 2956531 - RNA, 20 nt, Human
cuucuucagagacuccugca

SEQ ID NO: 2956532 - RNA, 15 nt, Human
cuucuguuuuauaau

SEQ ID NO: 2956533 - RNA, 20 nt, Human
cuucuguuuuauaauuuugu

SEQ ID NO: 2956534 - RNA, 22 nt, Human
cuuucaauaggaaaaacugauu

SEQ ID NO: 2956535 - RNA, 21 nt, Human
cuuucaauaggaaaaacugau

SEQ ID NO: 2956536 - RNA, 20 nt, Human
cuuucaauaggaaaaacuga

SEQ ID NO: 2956537 - RNA, 18 nt, Human
cuuucaauaggaaaaacu

SEQ ID NO: 2956538 - RNA, 13 nt, Human
cuuguggacacag

SEQ ID NO: 2956539 - RNA, 14 nt, Human
cuuguggacacagc

SEQ ID NO: 2956540 - RNA, 15 nt, Human
cuuguggacacagcu

SEQ ID NO: 2956541 - RNA, 20 nt, Human
cuuuaaagggauggcaagau

SEQ ID NO: 2956542 - RNA, 22 nt, Human
cuuugacgccaucccagcccca

SEQ ID NO: 2956543 - RNA, 21 nt, Human
cuuugacgccaucccagcccc

SEQ ID NO: 2956544 - RNA, 19 nt, Human
cuuugacgccaucccagcc

SEQ ID NO: 2956545 - RNA, 18 nt, Human
cuuugacgccaucccagc

SEQ ID NO: 2956546 - RNA, 21 nt, Human
cuuugagugucuuaauuaaaa

SEQ ID NO: 2956547 - RNA, 15 nt, Human
cuuuucaaaacauuu

SEQ ID NO: 2956548 - RNA, 20 nt, Human
cuuuggucuacacugugcug

SEQ ID NO: 2956549 - RNA, 16 nt, Human
cuuuggucuacacugu

SEQ ID NO: 2956550 - RNA, 14 nt, Human
cuuuuauaaacuuu

SEQ ID NO: 2956551 - RNA, 16 nt, Human
cuuuuauaaacuuuac

SEQ ID NO: 2956552 - RNA, 18 nt, Human
cuuuuauaaacuuuaccu

SEQ ID NO: 2956553 - RNA, 15 nt, Human
cuuuuauaaacuuua

SEQ ID NO: 2956554 - RNA, 19 nt, Human
cugugucagguggggcagc

SEQ ID NO: 2956555 - RNA, 20 nt, Human
cugugucagcauagaaguaa

SEQ ID NO: 2956556 - RNA, 21 nt, Human
cugugucagguggggcagcuu

SEQ ID NO: 2956557 - RNA, 14 nt, Human
cugugucuugcaau

SEQ ID NO: 2956558 - RNA, 19 nt, Human
cugugucucccuucauccu

SEQ ID NO: 2956559 - RNA, 14 nt, Human
cugugucucccuuc

SEQ ID NO: 2956560 - RNA, 11 nt, Human
cugugcugccc

SEQ ID NO: 2956561 - RNA, 22 nt, Human
cugugcugagucugaaggcugg

SEQ ID NO: 2956562 - RNA, 20 nt, Human
cugugcugagucugaaggcu

SEQ ID NO: 2956563 - RNA, 13 nt, Human
cuguucagcucca

SEQ ID NO: 2956564 - RNA, 16 nt, Human
cugugucuugcaaugg

SEQ ID NO: 2956565 - RNA, 19 nt, Human
cugugucuugcaauggcag

SEQ ID NO: 2956566 - RNA, 19 nt, Human
cuuagauguauauauuucc

SEQ ID NO: 2956567 - RNA, 21 nt, Human
cuuaccucggugccuuccucu

SEQ ID NO: 2956568 - RNA, 19 nt, Human
cuuaccucggugccuuccu

SEQ ID NO: 2956569 - RNA, 13 nt, Human
cuuaccucggugc

SEQ ID NO: 2956570 - RNA, 17 nt, Human
cuuacccucauguucuu

SEQ ID NO: 2956571 - RNA, 18 nt, Human
cuuacccucauguucuua

SEQ ID NO: 2956572 - RNA, 19 nt, Human
cuuacccucauguucuuaa

SEQ ID NO: 2956573 - RNA, 16 nt, Human
cuguugggccaggagc

SEQ ID NO: 2956574 - RNA, 20 nt, Human
cuguugggccaggagccucc

SEQ ID NO: 2956575 - RNA, 17 nt, Human
cuguugggccaggagcc

SEQ ID NO: 2956576 - RNA, 13 nt, Human
cuuacacaauggu

SEQ ID NO: 2956577 - RNA, 17 nt, Human
cuuccauggacuuuguu

SEQ ID NO: 2956578 - RNA, 16 nt, Human
cuuccauggacuuugu

SEQ ID NO: 2956579 - RNA, 20 nt, Human
cuuccagugaggcucugccc

SEQ ID NO: 2956580 - RNA, 19 nt, Human
cuuccagugaggcucugcc

SEQ ID NO: 2956581 - RNA, 17 nt, Human
cuuccagugaggcucug

SEQ ID NO: 2956582 - RNA, 18 nt, Human
cuuccagugaggcucugc

SEQ ID NO: 2956583 - RNA, 14 nt, Human
cuucaccuuugucc

SEQ ID NO: 2956584 - RNA, 18 nt, Human
cuuauugcccacgcugga

SEQ ID NO: 2956585 - RNA, 20 nt, Human
cuucaccuuuguccccaccg

SEQ ID NO: 2956586 - RNA, 17 nt, Human
cuucaccuuugucccca

SEQ ID NO: 2956587 - RNA, 11 nt, Human
cuucagacaua

SEQ ID NO: 2956588 - RNA, 22 nt, Human
cuucagagacuccugcaggcag

SEQ ID NO: 2956589 - RNA, 21 nt, Human
cuucagagacuccugcaggca

SEQ ID NO: 2956590 - RNA, 16 nt, Human
cuucagagacuccugc

SEQ ID NO: 2956591 - RNA, 15 nt, Human
cuucauccuccucag

SEQ ID NO: 2956592 - RNA, 13 nt, Human
cuucaucccucug

SEQ ID NO: 2956593 - RNA, 18 nt, Human
cuucaguggcagcugcuu

SEQ ID NO: 2956594 - RNA, 23 nt, Human
cuucagagacuccugcaggcagc

SEQ ID NO: 2956595 - RNA, 16 nt, Human
cuucauccuccucaga

SEQ ID NO: 2956596 - RNA, 21 nt, Human
cuucauggaauucacaaagua

SEQ ID NO: 2956597 - RNA, 23 nt, Human
cuucaugcugucuacacuaagag

SEQ ID NO: 2956598 - RNA, 21 nt, Human
cuuauggaacacucugagacu

SEQ ID NO: 2956599 - RNA, 21 nt, Human
cuuaugggcuggguucuaccc

SEQ ID NO: 2956600 - RNA, 14 nt, Human
cuuaugggcugggu

SEQ ID NO: 2956601 - RNA, 23 nt, Human
cuuaugggcuggguucuacccag

SEQ ID NO: 2956602 - RNA, 22 nt, Human
cuuaugggcuggguucuaccca

SEQ ID NO: 2956603 - RNA, 12 nt, Human
cuuauugcccac

SEQ ID NO: 2956604 - RNA, 13 nt, Human
cuuauugcccacg

SEQ ID NO: 2956605 - RNA, 21 nt, Human
cuuagcagggaaacagcuaau

SEQ ID NO: 2956606 - RNA, 18 nt, Human
cuuagcagggaaacagcu

SEQ ID NO: 2956607 - RNA, 22 nt, Human
cuggaugcccccuguggaugcu

SEQ ID NO: 2956608 - RNA, 12 nt, Human
cuggaugccauc

SEQ ID NO: 2956609 - RNA, 23 nt, Human
cuggaugcccauccacugggugu

SEQ ID NO: 2956610 - RNA, 17 nt, Human
cuggaugcccccugugg

SEQ ID NO: 2956611 - RNA, 18 nt, Human
cuggaugcccccugugga

SEQ ID NO: 2956612 - RNA, 19 nt, Human
cuggaugcccccuguggau

SEQ ID NO: 2956613 - RNA, 22 nt, Human
cuggaugcagccucacaguccu

SEQ ID NO: 2956614 - RNA, 15 nt, Human
cuggaguucugguuc

SEQ ID NO: 2956615 - RNA, 17 nt, Human
cuggaguucugguuccu

SEQ ID NO: 2956616 - RNA, 16 nt, Human
cuggaguucugguucc

SEQ ID NO: 2956617 - RNA, 23 nt, Human
cugcuuagaaauaacagaagaaa

SEQ ID NO: 2956618 - RNA, 20 nt, Human
cugcuuauccguuagccgug

SEQ ID NO: 2956619 - RNA, 20 nt, Human
cugcuuaacuucacauauug

SEQ ID NO: 2956620 - RNA, 14 nt, Human
cugcucacauaucu

SEQ ID NO: 2956621 - RNA, 12 nt, Human
cugcugaaggcu

SEQ ID NO: 2956622 - RNA, 16 nt, Human
cugcucacauaucugu

SEQ ID NO: 2956623 - RNA, 19 nt, Human
cugcucacauaucugucau

SEQ ID NO: 2956624 - RNA, 13 nt, Human
cugcugacagugu

SEQ ID NO: 2956625 - RNA, 15 nt, Human
cugcugacaguguug

SEQ ID NO: 2956626 - RNA, 11 nt, Human
cugcugacagu

SEQ ID NO: 2956627 - RNA, 12 nt, Human
cugcugacagug

SEQ ID NO: 2956628 - RNA, 15 nt, Human
cugcugaaggcucga

SEQ ID NO: 2956629 - RNA, 14 nt, Human
cugcugaaggcucg

SEQ ID NO: 2956630 - RNA, 13 nt, Human
cugcugaaggcuc

SEQ ID NO: 2956631 - RNA, 16 nt, Human
cugcugauuuaaacac

SEQ ID NO: 2956632 - RNA, 22 nt, Human
cugcugauuuaaacacauuaaa

SEQ ID NO: 2956633 - RNA, 12 nt, Human
cuggcccuuccu

SEQ ID NO: 2956634 - RNA, 14 nt, Human
cuggcucacccagu

SEQ ID NO: 2956635 - RNA, 13 nt, Human
cuggcucacccag

SEQ ID NO: 2956636 - RNA, 22 nt, Human
cuggcuaugcauuugaaaauuu

SEQ ID NO: 2956637 - RNA, 15 nt, Human
cuggcuaugcauuug

SEQ ID NO: 2956638 - RNA, 16 nt, Human
cuggcuaugcauuuga

SEQ ID NO: 2956639 - RNA, 13 nt, Human
cuggcuaugcauu

SEQ ID NO: 2956640 - RNA, 14 nt, Human
cuggcuaugcauuu

SEQ ID NO: 2956641 - RNA, 13 nt, Human
cugggacuacagg

SEQ ID NO: 2956642 - RNA, 15 nt, Human
cugggacuacaggca

SEQ ID NO: 2956643 - RNA, 22 nt, Human
cugggagaaccaaaaagaggcu

SEQ ID NO: 2956644 - RNA, 14 nt, Human
cugggacaugggaa

SEQ ID NO: 2956645 - RNA, 22 nt, Human
cugggacaugggaaaggggaag

SEQ ID NO: 2956646 - RNA, 18 nt, Human
cugggacaugggaaaggg

SEQ ID NO: 2956647 - RNA, 17 nt, Human
cuggcucacccaguccu

SEQ ID NO: 2956648 - RNA, 12 nt, Human
cuggugccucac

SEQ ID NO: 2956649 - RNA, 21 nt, Human
cuggugccucaccccuugcca

SEQ ID NO: 2956650 - RNA, 16 nt, Human
cuggguguaaacacau

SEQ ID NO: 2956651 - RNA, 15 nt, Human
cuggguguggcgcag

SEQ ID NO: 2956652 - RNA, 21 nt, Human
cuggguggcaccagcagccug

SEQ ID NO: 2956653 - RNA, 14 nt, Human
cuggguguggcgca

SEQ ID NO: 2956654 - RNA, 15 nt, Human
cuggguguaaacaca

SEQ ID NO: 2956655 - RNA, 12 nt, Human
cugggcagagga

SEQ ID NO: 2956656 - RNA, 16 nt, Human
cugggcagaggaaagc

SEQ ID NO: 2956657 - RNA, 13 nt, Human
cugggcagaggaa

SEQ ID NO: 2956658 - RNA, 20 nt, Human
cugggcagaggaaagcaaag

SEQ ID NO: 2956659 - RNA, 13 nt, Human
cugggcagcugcc

SEQ ID NO: 2956660 - RNA, 20 nt, Human
cugggcagguuggugggggc

SEQ ID NO: 2956661 - RNA, 14 nt, Human
cugggcagcugccu

SEQ ID NO: 2956662 - RNA, 15 nt, Human
cugggcagcugccuc

SEQ ID NO: 2956663 - RNA, 16 nt, Human
cuggguggaugggcca

SEQ ID NO: 2956664 - RNA, 20 nt, Human
cuggguggcaccagcagccu

SEQ ID NO: 2956665 - RNA, 18 nt, Human
cuggguggcaccagcagc

SEQ ID NO: 2956666 - RNA, 13 nt, Human
cuggggagaaagu

SEQ ID NO: 2956667 - RNA, 14 nt, Human
cugcauuuaaaaga

SEQ ID NO: 2956668 - RNA, 13 nt, Human
cugcauuggcuuu

SEQ ID NO: 2956669 - RNA, 19 nt, Human
cugcccugugggcccccaa

SEQ ID NO: 2956670 - RNA, 12 nt, Human
cugcccuuaccu

SEQ ID NO: 2956671 - RNA, 17 nt, Human
cugcccuuaccugccag

SEQ ID NO: 2956672 - RNA, 16 nt, Human
cugcccuuaccugcca

SEQ ID NO: 2956673 - RNA, 16 nt, Human
cugccauauucuguug

SEQ ID NO: 2956674 - RNA, 16 nt, Human
cugccauccagguuca

SEQ ID NO: 2956675 - RNA, 18 nt, Human
cugccauccagguucagc

SEQ ID NO: 2956676 - RNA, 19 nt, Human
cugccauccagguucagcu

SEQ ID NO: 2956677 - RNA, 17 nt, Human
cugccagugccugggug

SEQ ID NO: 2956678 - RNA, 13 nt, Human
cugccagugccug

SEQ ID NO: 2956679 - RNA, 16 nt, Human
cugccagugccugggu

SEQ ID NO: 2956680 - RNA, 12 nt, Human
cugccagugccu

SEQ ID NO: 2956681 - RNA, 23 nt, Human
cugccagggacagaggggguggc

SEQ ID NO: 2956682 - RNA, 22 nt, Human
cugccagggacagagggggugg

SEQ ID NO: 2956683 - RNA, 20 nt, Human
cugccagggacagagggggu

SEQ ID NO: 2956684 - RNA, 17 nt, Human
cugcauuuaaaagauac

SEQ ID NO: 2956685 - RNA, 18 nt, Human
cugcauuuaaaagauaca

SEQ ID NO: 2956686 - RNA, 22 nt, Human
cugcaaccugauugugucucuu

SEQ ID NO: 2956687 - RNA, 18 nt, Human
cugcaagaauugaagcag

SEQ ID NO: 2956688 - RNA, 20 nt, Human
cugcaaccuccgccucuugg

SEQ ID NO: 2956689 - RNA, 22 nt, Human
cugcaaccuccgccucuugggu

SEQ ID NO: 2956690 - RNA, 14 nt, Human
cugcaaccugauug

SEQ ID NO: 2956691 - RNA, 21 nt, Human
cugcaaccugauugugucucu

SEQ ID NO: 2956692 - RNA, 19 nt, Human
cugcaaccugauugugucu

SEQ ID NO: 2956693 - RNA, 20 nt, Human
cugcaccgggccacagagaa

SEQ ID NO: 2956694 - RNA, 23 nt, Human
cugcaccgggccacagagaaagu

SEQ ID NO: 2956695 - RNA, 12 nt, Human
cugcaagggagu

SEQ ID NO: 2956696 - RNA, 20 nt, Human
cugcaagaauugaagcagga

SEQ ID NO: 2956697 - RNA, 24 nt, Human
cugaugggcaacccccagccugcu

SEQ ID NO: 2956698 - RNA, 22 nt, Human
cugaugggcaacccccagccug

SEQ ID NO: 2956699 - RNA, 23 nt, Human
cugaugggcaacccccagccugc

SEQ ID NO: 2956700 - RNA, 21 nt, Human
cugcaaaggguaucaggugcu

SEQ ID NO: 2956701 - RNA, 22 nt, Human
cugcaaaggguaucaggugcug

SEQ ID NO: 2956702 - RNA, 20 nt, Human
cugaugcuucuucagagacu

SEQ ID NO: 2956703 - RNA, 19 nt, Human
cugaugcuucuucagagac

SEQ ID NO: 2956704 - RNA, 18 nt, Human
cugaugcuucuucagaga

SEQ ID NO: 2956705 - RNA, 18 nt, Human
cugaugggcaacccccag

SEQ ID NO: 2956706 - RNA, 21 nt, Human
cugaugggcaacccccagccu

SEQ ID NO: 2956707 - RNA, 15 nt, Human
cucuuaugggcuggg

SEQ ID NO: 2956708 - RNA, 15 nt, Human
cucuuauaucuauau

SEQ ID NO: 2956709 - RNA, 18 nt, Human
cucuuauaucuauauuuu

SEQ ID NO: 2956710 - RNA, 14 nt, Human
cucuuaugggcugg

SEQ ID NO: 2956711 - RNA, 17 nt, Human
cugaugcuucuucagag

SEQ ID NO: 2956712 - RNA, 16 nt, Human
cugaugcuucuucaga

SEQ ID NO: 2956713 - RNA, 12 nt, Human
cugcagcuuugu

SEQ ID NO: 2956714 - RNA, 20 nt, Human
cugcaggcagccaggccaca

SEQ ID NO: 2956715 - RNA, 19 nt, Human
cugcaggcagccaggccac

SEQ ID NO: 2956716 - RNA, 18 nt, Human
cugcaggcagccaggcca

SEQ ID NO: 2956717 - RNA, 17 nt, Human
cugcaggcagccaggcc

SEQ ID NO: 2956718 - RNA, 16 nt, Human
cugcaggcagccaggc

SEQ ID NO: 2956719 - RNA, 15 nt, Human
cugcaggcagccagg

SEQ ID NO: 2956720 - RNA, 14 nt, Human
cugcaggcagccag

SEQ ID NO: 2956721 - RNA, 13 nt, Human
cugcaggcagcca

SEQ ID NO: 2956722 - RNA, 23 nt, Human
cugcagccucaaccuccugggcu

SEQ ID NO: 2956723 - RNA, 19 nt, Human
cugcacuccagccugggug

SEQ ID NO: 2956724 - RNA, 24 nt, Human
cugcagccucaaccuccugggcua

SEQ ID NO: 2956725 - RNA, 18 nt, Human
cugcacuccagccugggu

SEQ ID NO: 2956726 - RNA, 16 nt, Human
cugcacuccagccugg

SEQ ID NO: 2956727 - RNA, 17 nt, Human
cugcacuccagccuggg

SEQ ID NO: 2956728 - RNA, 16 nt, Human
cugcacuauagccuag

SEQ ID NO: 2956729 - RNA, 17 nt, Human
cugcacuauagccuagg

SEQ ID NO: 2956730 - RNA, 18 nt, Human
cugcacuauagccuaggu

SEQ ID NO: 2956731 - RNA, 20 nt, Human
cugcacuauagccuagguga

SEQ ID NO: 2956732 - RNA, 22 nt, Human
cugcacuauagccuaggugaca

SEQ ID NO: 2956733 - RNA, 23 nt, Human
cugcacuauagccuaggugacag

SEQ ID NO: 2956734 - RNA, 13 nt, Human
cugcacuccagcc

SEQ ID NO: 2956735 - RNA, 17 nt, Human
cugcacuccagccugag

SEQ ID NO: 2956736 - RNA, 20 nt, Human
cugcacuccagccugagcga

SEQ ID NO: 2956737 - RNA, 16 nt, Human
cugcacuccagccuga

SEQ ID NO: 2956738 - RNA, 15 nt, Human
cugcacuccagccug

SEQ ID NO: 2956739 - RNA, 17 nt, Human
aaauuuacuuuaaacua

SEQ ID NO: 2956740 - RNA, 20 nt, Human
aaauuuacuuuaaacuacau

SEQ ID NO: 2956741 - RNA, 20 nt, Human
aaauuuaguauuuuguuuca

SEQ ID NO: 2956742 - RNA, 18 nt, Human
aaauuucagcagcugcag

SEQ ID NO: 2956743 - RNA, 17 nt, Human
aaauuucagcagcugca

SEQ ID NO: 2956744 - RNA, 22 nt, Human
aaauuuccugggagcuuuugua

SEQ ID NO: 2956745 - RNA, 14 nt, Human
guauuuuuuuacua

SEQ ID NO: 2956746 - RNA, 15 nt, Human
guauuuuuuuacuaa

SEQ ID NO: 2956747 - RNA, 17 nt, Human
guauuuuuuuacuaaua

SEQ ID NO: 2956748 - RNA, 21 nt, Human
guauuuuuuuacuaauagaca

SEQ ID NO: 2956749 - RNA, 18 nt, Human
gucaaaguggugagaggc

SEQ ID NO: 2956750 - RNA, 19 nt, Human
gucaaaguggugagaggca

SEQ ID NO: 2956751 - RNA, 17 nt, Human
gucaacauuucucaugu

SEQ ID NO: 2956752 - RNA, 13 nt, Human
gucaacauuucuc

SEQ ID NO: 2956753 - RNA, 19 nt, Human
gucaacucauauuuucaug

SEQ ID NO: 2956754 - RNA, 16 nt, Human
gucacacacuuuggcu

SEQ ID NO: 2956755 - RNA, 20 nt, Human
gucacacaguauuacuucug

SEQ ID NO: 2956756 - RNA, 14 nt, Human
aaauucaugcugcu

SEQ ID NO: 2956757 - RNA, 16 nt, Human
aaauuccccacccuga

SEQ ID NO: 2956758 - RNA, 20 nt, Human
guauuuaauagguuuggaca

SEQ ID NO: 2956759 - RNA, 22 nt, Human
guauuggcuagagguucaaaga

SEQ ID NO: 2956760 - RNA, 19 nt, Human
aaauuaacuuuuauaaacu

SEQ ID NO: 2956761 - RNA, 21 nt, Human
aaauuaacuuuuauaaacuuu

SEQ ID NO: 2956762 - RNA, 22 nt, Human
aaauuaacuuuuauaaacuuua

SEQ ID NO: 2956763 - RNA, 23 nt, Human
aaauuaacuuuuauaaacuuuac

SEQ ID NO: 2956764 - RNA, 22 nt, Human
aaauguaagggaaacugccagc

SEQ ID NO: 2956765 - RNA, 17 nt, Human
aaaugggggugcauuug

SEQ ID NO: 2956766 - RNA, 18 nt, Human
aaaugggggugcauuuga

SEQ ID NO: 2956767 - RNA, 15 nt, Human
aaaugggggugcauu

SEQ ID NO: 2956768 - RNA, 16 nt, Human
aaaugggggugcauuu

SEQ ID NO: 2956769 - RNA, 15 nt, Human
guaugggagagaaga

SEQ ID NO: 2956770 - RNA, 15 nt, Human
guauucuuauuuaau

SEQ ID NO: 2956771 - RNA, 15 nt, Human
guauguguaauaaau

SEQ ID NO: 2956772 - RNA, 21 nt, Human
guauucucuccuguaccucuu

SEQ ID NO: 2956773 - RNA, 15 nt, Human
guaucccuacuguaa

SEQ ID NO: 2956774 - RNA, 22 nt, Human
guaugaucacggcucacugcag

SEQ ID NO: 2956775 - RNA, 18 nt, Human
guaucaaguauagaaaau

SEQ ID NO: 2956776 - RNA, 21 nt, Human
guaucccaugagccucagcau

SEQ ID NO: 2956777 - RNA, 14 nt, Human
guaugggagagaag

SEQ ID NO: 2956778 - RNA, 14 nt, Human
guaugcacacacau

SEQ ID NO: 2956779 - RNA, 14 nt, Human
guaugauucccagc

SEQ ID NO: 2956780 - RNA, 17 nt, Human
aaaugaaaaucgugaca

SEQ ID NO: 2956781 - RNA, 15 nt, Human
aaaucucaaauuucu

SEQ ID NO: 2956782 - RNA, 16 nt, Human
aaaucucaaauuucua

SEQ ID NO: 2956783 - RNA, 17 nt, Human
aaaucucaaauuucuaa

SEQ ID NO: 2956784 - RNA, 19 nt, Human
aaaucucaaauuucuaaau

SEQ ID NO: 2956785 - RNA, 22 nt, Human
aaaucuaggaaaauuauucuau

SEQ ID NO: 2956786 - RNA, 17 nt, Human
aaaucuaggaaaauuau

SEQ ID NO: 2956787 - RNA, 19 nt, Human
aaaucuacacuccagugag

SEQ ID NO: 2956788 - RNA, 14 nt, Human
aaauccuugaagau

SEQ ID NO: 2956789 - RNA, 13 nt, Human
aaaucgaugcagu

SEQ ID NO: 2956790 - RNA, 18 nt, Human
aaaucccuuaccucggug

SEQ ID NO: 2956791 - RNA, 15 nt, Human
aaaucccauuuaaaa

SEQ ID NO: 2956792 - RNA, 15 nt, Human
guaggaagacuuugg

SEQ ID NO: 2956793 - RNA, 18 nt, Human
guaggaagguuaauguuc

SEQ ID NO: 2956794 - RNA, 18 nt, Human
aaauccauacauuugugu

SEQ ID NO: 2956795 - RNA, 17 nt, Human
aaaggauacuuauuuaa

SEQ ID NO: 2956796 - RNA, 15 nt, Human
aaaggauacuuauuu

SEQ ID NO: 2956797 - RNA, 12 nt, Human
guagcugggacu

SEQ ID NO: 2956798 - RNA, 18 nt, Human
guagcugggacuacaggc

SEQ ID NO: 2956799 - RNA, 19 nt, Human
guagcugggacuacaggca

SEQ ID NO: 2956800 - RNA, 21 nt, Human
guagcugggacuacaggcacc

SEQ ID NO: 2956801 - RNA, 14 nt, Human
aaaugaaugucacu

SEQ ID NO: 2956802 - RNA, 19 nt, Human
aaaugaaugucacuucugg

SEQ ID NO: 2956803 - RNA, 21 nt, Human
aaaugaaugucacuucuggau

SEQ ID NO: 2956804 - RNA, 21 nt, Human
aaaugaaagcagggacuugaa

SEQ ID NO: 2956805 - RNA, 22 nt, Human
aaaugaaagcagggacuugaac

SEQ ID NO: 2956806 - RNA, 19 nt, Human
aaaugagccuggcaagaau

SEQ ID NO: 2956807 - RNA, 13 nt, Human
aaaugagccuggc

SEQ ID NO: 2956808 - RNA, 17 nt, Human
aaaugaggucagagccu

SEQ ID NO: 2956809 - RNA, 19 nt, Human
aaaugaggucagagccugc

SEQ ID NO: 2956810 - RNA, 16 nt, Human
aaaugagguacucucc

SEQ ID NO: 2956811 - RNA, 23 nt, Human
aaaugagguacucuccuggaaau

SEQ ID NO: 2956812 - RNA, 18 nt, Human
aaaugcaccuggaauaua

SEQ ID NO: 2956813 - RNA, 22 nt, Human
aaaugcaccuggaauauauaac

SEQ ID NO: 2956814 - RNA, 15 nt, Human
aaaugcaaaaaaaau

SEQ ID NO: 2956815 - RNA, 15 nt, Human
aaaugauuucacagu

SEQ ID NO: 2956816 - RNA, 17 nt, Human
aaaugcaaaaaaaauua

SEQ ID NO: 2956817 - RNA, 18 nt, Human
aaaugcaaaaaaaauuag

SEQ ID NO: 2956818 - RNA, 14 nt, Human
aaaugcaccuggaa

SEQ ID NO: 2956819 - RNA, 15 nt, Human
aaaugggcagagcag

SEQ ID NO: 2956820 - RNA, 20 nt, Human
aaaugggcagagcagagacc

SEQ ID NO: 2956821 - RNA, 18 nt, Human
aaaugggcagagcagaga

SEQ ID NO: 2956822 - RNA, 19 nt, Human
aaauggcuuccuggcaaua

SEQ ID NO: 2956823 - RNA, 18 nt, Human
aaauggcuuccuggcaau

SEQ ID NO: 2956824 - RNA, 13 nt, Human
aaaugcccagccc

SEQ ID NO: 2956825 - RNA, 14 nt, Human
aaaugcauuucuaa

SEQ ID NO: 2956826 - RNA, 15 nt, Human
aaaugcccagccccu

SEQ ID NO: 2956827 - RNA, 14 nt, Human
aaaugcccagcccc

SEQ ID NO: 2956828 - RNA, 18 nt, Human
aaaugcccagccccuucu

SEQ ID NO: 2956829 - RNA, 13 nt, Human
aaaugcccagcuu

SEQ ID NO: 2956830 - RNA, 22 nt, Human
aacaguaacauagcugugauuu

SEQ ID NO: 2956831 - RNA, 19 nt, Human
aacaguuguguuugaagca

SEQ ID NO: 2956832 - RNA, 19 nt, Human
aacagacuggaagcacagc

SEQ ID NO: 2956833 - RNA, 22 nt, Human
aacaggcugggcuucaguggca

SEQ ID NO: 2956834 - RNA, 13 nt, Human
aacaggcugggcu

SEQ ID NO: 2956835 - RNA, 23 nt, Human
aacaggcugggcuucaguggcag

SEQ ID NO: 2956836 - RNA, 18 nt, Human
aacaggcuuagugaugua

SEQ ID NO: 2956837 - RNA, 19 nt, Human
aacagguuuuccugaagaa

SEQ ID NO: 2956838 - RNA, 15 nt, Human
aacaguaacauagcu

SEQ ID NO: 2956839 - RNA, 22 nt, Human
aacaguagugauaguuguaccg

SEQ ID NO: 2956840 - RNA, 13 nt, Human
guccgagcuuuga

SEQ ID NO: 2956841 - RNA, 21 nt, Human
guccggucccugucccagugc

SEQ ID NO: 2956842 - RNA, 21 nt, Human
aacagaaauguacagcaagga

SEQ ID NO: 2956843 - RNA, 10 nt, Human
aacagaaaug

SEQ ID NO: 2956844 - RNA, 15 nt, Human
aacagaaauguacag

SEQ ID NO: 2956845 - RNA, 19 nt, Human
aacauuuggguuacuauuu

SEQ ID NO: 2956846 - RNA, 15 nt, Human
aacauacucccaucu

SEQ ID NO: 2956847 - RNA, 14 nt, Human
aacauacucccauc

SEQ ID NO: 2956848 - RNA, 22 nt, Human
aacauuuauuugaguggaguua

SEQ ID NO: 2956849 - RNA, 18 nt, Human
aacauuugguaaggggaa

SEQ ID NO: 2956850 - RNA, 18 nt, Human
aacaagucagucauucag

SEQ ID NO: 2956851 - RNA, 15 nt, Human
aacaagucagucauu

SEQ ID NO: 2956852 - RNA, 23 nt, Human
aacaaggccugucagcuaaagaa

SEQ ID NO: 2956853 - RNA, 23 nt, Human
aacaaggcaaggcugucaauuac

SEQ ID NO: 2956854 - RNA, 16 nt, Human
gucacaggcaggucca

SEQ ID NO: 2956855 - RNA, 13 nt, Human
gucacaggcaggu

SEQ ID NO: 2956856 - RNA, 15 nt, Human
gucacaggcaggucc

SEQ ID NO: 2956857 - RNA, 19 nt, Human
aacaagaccacguuucuaa

SEQ ID NO: 2956858 - RNA, 16 nt, Human
aacaagaccacguuuc

SEQ ID NO: 2956859 - RNA, 17 nt, Human
aacaagaccacguuucu

SEQ ID NO: 2956860 - RNA, 15 nt, Human
aacaaggaugaauua

SEQ ID NO: 2956861 - RNA, 21 nt, Human
aacaagccuccuuuuaaagua

SEQ ID NO: 2956862 - RNA, 21 nt, Human
aacacucuauaacaaaggaua

SEQ ID NO: 2956863 - RNA, 14 nt, Human
aacacucugagacu

SEQ ID NO: 2956864 - RNA, 13 nt, Human
aacacucugagac

SEQ ID NO: 2956865 - RNA, 12 nt, Human
aacacucugaga

SEQ ID NO: 2956866 - RNA, 11 nt, Human
aacacucugag

SEQ ID NO: 2956867 - RNA, 12 nt, Human
aacacuccuuca

SEQ ID NO: 2956868 - RNA, 21 nt, Human
aacacucauugaccugaggcc

SEQ ID NO: 2956869 - RNA, 17 nt, Human
aacacucauugaccuga

SEQ ID NO: 2956870 - RNA, 22 nt, Human
aacacugguuuuaaauauuuug

SEQ ID NO: 2956871 - RNA, 20 nt, Human
aacacuguucucugcccucc

SEQ ID NO: 2956872 - RNA, 15 nt, Human
aacacuguucucugc

SEQ ID NO: 2956873 - RNA, 21 nt, Human
aacacuguucucugcccucca

SEQ ID NO: 2956874 - RNA, 21 nt, Human
gucauuugagcagggcucagc

SEQ ID NO: 2956875 - RNA, 22 nt, Human
gucauuugagcagggcucagcg

SEQ ID NO: 2956876 - RNA, 24 nt, Human
guccaagcauaccaacacgagcag

SEQ ID NO: 2956877 - RNA, 21 nt, Human
guccaagcauuuagauguaua

SEQ ID NO: 2956878 - RNA, 15 nt, Human
aacguggcugcuuca

SEQ ID NO: 2956879 - RNA, 19 nt, Human
aacguggcugcuucaagga

SEQ ID NO: 2956880 - RNA, 16 nt, Human
aacguggcugcuucaa

SEQ ID NO: 2956881 - RNA, 22 nt, Human
aacguggcugcuucaaggaucc

SEQ ID NO: 2956882 - RNA, 19 nt, Human
gugaaccaccacacccagc

SEQ ID NO: 2956883 - RNA, 15 nt, Human
gugaacacaucagcu

SEQ ID NO: 2956884 - RNA, 18 nt, Human
aacucguuaauuuguagu

SEQ ID NO: 2956885 - RNA, 13 nt, Human
aacucccuuucaa

SEQ ID NO: 2956886 - RNA, 14 nt, Human
aacucccuuucaac

SEQ ID NO: 2956887 - RNA, 21 nt, Human
aacuccagaaagugacaagcu

SEQ ID NO: 2956888 - RNA, 14 nt, Human
aacuccagaaagug

SEQ ID NO: 2956889 - RNA, 15 nt, Human
gucuuagauguauau

SEQ ID NO: 2956890 - RNA, 24 nt, Human
gucuuuucuugcaugaggcuagug

SEQ ID NO: 2956891 - RNA, 19 nt, Human
gucuuuucuugcaugaggc

SEQ ID NO: 2956892 - RNA, 14 nt, Human
gucuuuucuugcau

SEQ ID NO: 2956893 - RNA, 17 nt, Human
gucuuuggacccugagg

SEQ ID NO: 2956894 - RNA, 15 nt, Human
gucuuuggacccuga

SEQ ID NO: 2956895 - RNA, 14 nt, Human
gucuuuggacccug

SEQ ID NO: 2956896 - RNA, 13 nt, Human
gucugcuuagaaa

SEQ ID NO: 2956897 - RNA, 12 nt, Human
gucugcuuagaa

SEQ ID NO: 2956898 - RNA, 22 nt, Human
gucuuaauuaaaagaauauuuu

SEQ ID NO: 2956899 - RNA, 21 nt, Human
gucuuaauuaaaagaauauuu

SEQ ID NO: 2956900 - RNA, 19 nt, Human
gucuuaauuaaaagaauau

SEQ ID NO: 2956901 - RNA, 17 nt, Human
aacccagcucuggucca

SEQ ID NO: 2956902 - RNA, 16 nt, Human
aaccccaaguuaguuc

SEQ ID NO: 2956903 - RNA, 20 nt, Human
aacccauauuuguacaccaa

SEQ ID NO: 2956904 - RNA, 18 nt, Human
aacccaaauguucaucaa

SEQ ID NO: 2956905 - RNA, 11 nt, Human
aacccagcucu

SEQ ID NO: 2956906 - RNA, 14 nt, Human
aacccagcucuggu

SEQ ID NO: 2956907 - RNA, 13 nt, Human
aacccagcucugg

SEQ ID NO: 2956908 - RNA, 13 nt, Human
aacccaaauguuc

SEQ ID NO: 2956909 - RNA, 23 nt, Human
aaccauuuugcugucccuuuucc

SEQ ID NO: 2956910 - RNA, 17 nt, Human
aaccuccgccucuuggg

SEQ ID NO: 2956911 - RNA, 14 nt, Human
aaccuccugggcua

SEQ ID NO: 2956912 - RNA, 24 nt, Human
aaccucuaaauucuuucauuuuag

SEQ ID NO: 2956913 - RNA, 13 nt, Human
aacccccagccug

SEQ ID NO: 2956914 - RNA, 14 nt, Human
aacccccagccugc

SEQ ID NO: 2956915 - RNA, 15 nt, Human
aacccccagccugcu

SEQ ID NO: 2956916 - RNA, 20 nt, Human
aaccuagggugauauuaacc

SEQ ID NO: 2956917 - RNA, 16 nt, Human
aacauuuugucauaua

SEQ ID NO: 2956918 - RNA, 20 nt, Human
aaccacaucuugcucugcug

SEQ ID NO: 2956919 - RNA, 22 nt, Human
aaccacaucuugcucugcugac

SEQ ID NO: 2956920 - RNA, 20 nt, Human
aaccaucauugaaaucuuuu

SEQ ID NO: 2956921 - RNA, 19 nt, Human
aaccaucauugaaaucuuu

SEQ ID NO: 2956922 - RNA, 21 nt, Human
aaccaucauugaaaucuuuuu

SEQ ID NO: 2956923 - RNA, 18 nt, Human
aaccacaucuugcucugc

SEQ ID NO: 2956924 - RNA, 12 nt, Human
aaccacagcagu

SEQ ID NO: 2956925 - RNA, 17 nt, Human
aaggaugcuuguacaua

SEQ ID NO: 2956926 - RNA, 19 nt, Human
aaggaugcuuguacauaau

SEQ ID NO: 2956927 - RNA, 18 nt, Human
aaggaugcacagaguugu

SEQ ID NO: 2956928 - RNA, 15 nt, Human
aaggaugcuuguaca

SEQ ID NO: 2956929 - RNA, 16 nt, Human
aaggaugcuuguacau

SEQ ID NO: 2956930 - RNA, 23 nt, Human
guugaugaucuuugcagacaggc

SEQ ID NO: 2956931 - RNA, 13 nt, Human
aaggauccugagc

SEQ ID NO: 2956932 - RNA, 14 nt, Human
aaggauccugagcc

SEQ ID NO: 2956933 - RNA, 23 nt, Human
aaggaugaucuaggaagacuuug

SEQ ID NO: 2956934 - RNA, 18 nt, Human
aaggaugaucuaggaaga

SEQ ID NO: 2956935 - RNA, 17 nt, Human
aaggauccugagccaga

SEQ ID NO: 2956936 - RNA, 15 nt, Human
aaggauccugagcca

SEQ ID NO: 2956937 - RNA, 19 nt, Human
aaggcuaccuuuguauucu

SEQ ID NO: 2956938 - RNA, 18 nt, Human
aaggccaaaggaagcaca

SEQ ID NO: 2956939 - RNA, 17 nt, Human
guugcccaggcaggucu

SEQ ID NO: 2956940 - RNA, 14 nt, Human
aaggcuccaggagc

SEQ ID NO: 2956941 - RNA, 18 nt, Human
guugcccaggcaggucuu

SEQ ID NO: 2956942 - RNA, 19 nt, Human
guugcccaggcaggucuug

SEQ ID NO: 2956943 - RNA, 21 nt, Human
guugcccaggcuggcgugcag

SEQ ID NO: 2956944 - RNA, 15 nt, Human
guugcccaggcaggu

SEQ ID NO: 2956945 - RNA, 17 nt, Human
guugcccaggcuggcgu

SEQ ID NO: 2956946 - RNA, 16 nt, Human
guuuaaaaucauuucu

SEQ ID NO: 2956947 - RNA, 10 nt, Human
guuuaaaauc

SEQ ID NO: 2956948 - RNA, 13 nt, Human
guuggguggaugc

SEQ ID NO: 2956949 - RNA, 18 nt, Human
guuggucccccuuccaug

SEQ ID NO: 2956950 - RNA, 18 nt, Human
guuguaccgcaaugugac

SEQ ID NO: 2956951 - RNA, 16 nt, Human
aaggguaucaggugcu

SEQ ID NO: 2956952 - RNA, 15 nt, Human
aaguaauaugcacac

SEQ ID NO: 2956953 - RNA, 16 nt, Human
aaguaauaugcacaca

SEQ ID NO: 2956954 - RNA, 19 nt, Human
guuucuaaaggcuaccuuu

SEQ ID NO: 2956955 - RNA, 12 nt, Human
aaguaauaugca

SEQ ID NO: 2956956 - RNA, 22 nt, Human
aaggggaauguuugccucugcc

SEQ ID NO: 2956957 - RNA, 23 nt, Human
aaggggaauguuugccucugccu

SEQ ID NO: 2956958 - RNA, 17 nt, Human
aagggccuggccugagc

SEQ ID NO: 2956959 - RNA, 14 nt, Human
aagggccuggccug

SEQ ID NO: 2956960 - RNA, 19 nt, Human
aagggccuggccugagcug

SEQ ID NO: 2956961 - RNA, 13 nt, Human
aagggccuggccu

SEQ ID NO: 2956962 - RNA, 21 nt, Human
guuucaaacauauauaacaau

SEQ ID NO: 2956963 - RNA, 14 nt, Human
guuuuacaguguuu

SEQ ID NO: 2956964 - RNA, 19 nt, Human
guuuucuguucuuucuggc

SEQ ID NO: 2956965 - RNA, 23 nt, Human
guuuucugagaaagacuauucaa

SEQ ID NO: 2956966 - RNA, 11 nt, Human
guuuucuguuc

SEQ ID NO: 2956967 - RNA, 22 nt, Human
guuugauucagacagcugccug

SEQ ID NO: 2956968 - RNA, 22 nt, Human
guuucuaaaggcuaccuuugua

SEQ ID NO: 2956969 - RNA, 23 nt, Human
guuucuaaaggcuaccuuuguau

SEQ ID NO: 2956970 - RNA, 13 nt, Human
guuugccucugcc

SEQ ID NO: 2956971 - RNA, 16 nt, Human
guuugccucugccucu

SEQ ID NO: 2956972 - RNA, 23 nt, Human
aagcuuguauuccuuuuucucuc

SEQ ID NO: 2956973 - RNA, 22 nt, Human
aagcuauucaguaauaacucua

SEQ ID NO: 2956974 - RNA, 21 nt, Human
aagcucuacugaggugcuaug

SEQ ID NO: 2956975 - RNA, 20 nt, Human
guuccauggccucuucagau

SEQ ID NO: 2956976 - RNA, 16 nt, Human
guucccauuugcuccu

SEQ ID NO: 2956977 - RNA, 20 nt, Human
guucccauuugcuccuuucu

SEQ ID NO: 2956978 - RNA, 16 nt, Human
guucuacccaggugcu

SEQ ID NO: 2956979 - RNA, 22 nt, Human
guucccuuugacgccaucccag

SEQ ID NO: 2956980 - RNA, 21 nt, Human
guucccuuugacgccauccca

SEQ ID NO: 2956981 - RNA, 20 nt, Human
guucccuuugacgccauccc

SEQ ID NO: 2956982 - RNA, 23 nt, Human
guucugggacacaguucaauucu

SEQ ID NO: 2956983 - RNA, 21 nt, Human
guucuugguuuguaaauuaac

SEQ ID NO: 2956984 - RNA, 17 nt, Human
guucuuaguuugcaguu

SEQ ID NO: 2956985 - RNA, 13 nt, Human
guugacaugggac

SEQ ID NO: 2956986 - RNA, 22 nt, Human
guugaugaucuuugcagacagg

SEQ ID NO: 2956987 - RNA, 14 nt, Human
guugacaugggaca

SEQ ID NO: 2956988 - RNA, 18 nt, Human
guugacaugggacauuug

SEQ ID NO: 2956989 - RNA, 14 nt, Human
guuacacaaagaac

SEQ ID NO: 2956990 - RNA, 20 nt, Human
guuaguaugaggcauuuguu

SEQ ID NO: 2956991 - RNA, 17 nt, Human
guuaguaugaggcauuu

SEQ ID NO: 2956992 - RNA, 18 nt, Human
guuaaugauagcuacugu

SEQ ID NO: 2956993 - RNA, 15 nt, Human
guucagcuccagcuc

SEQ ID NO: 2956994 - RNA, 18 nt, Human
guucagcuccagcucacc

SEQ ID NO: 2956995 - RNA, 16 nt, Human
guucagcuccagcuca

SEQ ID NO: 2956996 - RNA, 17 nt, Human
guucagcuccagcucac

SEQ ID NO: 2956997 - RNA, 17 nt, Human
guucaggguuggccccu

SEQ ID NO: 2956998 - RNA, 18 nt, Human
guucaggguuggccccug

SEQ ID NO: 2956999 - RNA, 19 nt, Human
guucaggguuggccccugc

SEQ ID NO: 2957000 - RNA, 19 nt, Human
aagccuccuccagccgcca

SEQ ID NO: 2957001 - RNA, 17 nt, Human
aagcuaggccuggccag

SEQ ID NO: 2957002 - RNA, 18 nt, Human
aagcuaggccuggccaga

SEQ ID NO: 2957003 - RNA, 16 nt, Human
aagcuaggccuggcca

SEQ ID NO: 2957004 - RNA, 22 nt, Human
aagcuaggccuggccagaugca

SEQ ID NO: 2957005 - RNA, 18 nt, Human
aagaugugacauguuuua

SEQ ID NO: 2957006 - RNA, 14 nt, Human
aagaugugacaugu

SEQ ID NO: 2957007 - RNA, 13 nt, Human
aagcaaaggagau

SEQ ID NO: 2957008 - RNA, 12 nt, Human
aagcaaaggaga

SEQ ID NO: 2957009 - RNA, 12 nt, Human
aagaugcagccg

SEQ ID NO: 2957010 - RNA, 14 nt, Human
aagagguuuuaaag

SEQ ID NO: 2957011 - RNA, 18 nt, Human
aagagguuuuaaagcuuc

SEQ ID NO: 2957012 - RNA, 18 nt, Human
aagagguuuuaaaaaaau

SEQ ID NO: 2957013 - RNA, 20 nt, Human
guggugguuuucuguucuuu

SEQ ID NO: 2957014 - RNA, 17 nt, Human
gugguuuucuguucuuu

SEQ ID NO: 2957015 - RNA, 23 nt, Human
guguuuccuggcacugcuuccag

SEQ ID NO: 2957016 - RNA, 17 nt, Human
gugucuugcaauggcag

SEQ ID NO: 2957017 - RNA, 18 nt, Human
gugucuugcaauggcagc

SEQ ID NO: 2957018 - RNA, 18 nt, Human
gugucuuuuuucacuaca

SEQ ID NO: 2957019 - RNA, 21 nt, Human
gugugaccacugcagaagaca

SEQ ID NO: 2957020 - RNA, 17 nt, Human
gugugacuacuccccca

SEQ ID NO: 2957021 - RNA, 14 nt, Human
guggguacgggagg

SEQ ID NO: 2957022 - RNA, 20 nt, Human
gugggggaucacagccucug

SEQ ID NO: 2957023 - RNA, 15 nt, Human
guggguggggcagug

SEQ ID NO: 2957024 - RNA, 16 nt, Human
gugguuucagaaaugu

SEQ ID NO: 2957025 - RNA, 14 nt, Human
guggugguuuucug

SEQ ID NO: 2957026 - RNA, 23 nt, Human
gugggaggaucucuugagccugg

SEQ ID NO: 2957027 - RNA, 13 nt, Human
gugggauccucca

SEQ ID NO: 2957028 - RNA, 14 nt, Human
gugggagugggccc

SEQ ID NO: 2957029 - RNA, 13 nt, Human
gugggagugggcc

SEQ ID NO: 2957030 - RNA, 23 nt, Human
guggcgcagcauauucaggaagc

SEQ ID NO: 2957031 - RNA, 22 nt, Human
guggcgcagcauauucaggaag

SEQ ID NO: 2957032 - RNA, 17 nt, Human
guggcuaacuuggguua

SEQ ID NO: 2957033 - RNA, 22 nt, Human
gugggacacccugugauggggc

SEQ ID NO: 2957034 - RNA, 21 nt, Human
gugggacagucaccucaugga

SEQ ID NO: 2957035 - RNA, 22 nt, Human
aagacccuuguggucccacccc

SEQ ID NO: 2957036 - RNA, 21 nt, Human
aagacccuuguggucccaccc

SEQ ID NO: 2957037 - RNA, 18 nt, Human
aagacccuugugguccca

SEQ ID NO: 2957038 - RNA, 16 nt, Human
aagacuaucuaaaugu

SEQ ID NO: 2957039 - RNA, 17 nt, Human
aagacuaucuaaauguu

SEQ ID NO: 2957040 - RNA, 18 nt, Human
aagacuaucuaaauguug

SEQ ID NO: 2957041 - RNA, 17 nt, Human
aagacugaguacguugu

SEQ ID NO: 2957042 - RNA, 17 nt, Human
aagacuguacaaaguag

SEQ ID NO: 2957043 - RNA, 21 nt, Human
aagacugaguacguugugcau

SEQ ID NO: 2957044 - RNA, 16 nt, Human
aagacuguacaaagua

SEQ ID NO: 2957045 - RNA, 13 nt, Human
aagagcaaaguag

SEQ ID NO: 2957046 - RNA, 16 nt, Human
aagacuuaaugagacu

SEQ ID NO: 2957047 - RNA, 19 nt, Human
aagagcuguucacagccag

SEQ ID NO: 2957048 - RNA, 17 nt, Human
aagacccucucaaacua

SEQ ID NO: 2957049 - RNA, 16 nt, Human
aagacaaaaagcuacu

SEQ ID NO: 2957050 - RNA, 14 nt, Human
aagacaaacugcau

SEQ ID NO: 2957051 - RNA, 23 nt, Human
aagaauugauugggcacaucauu

SEQ ID NO: 2957052 - RNA, 20 nt, Human
aagacaaaaagcuacuuauu

SEQ ID NO: 2957053 - RNA, 23 nt, Human
aagacaaaaagcuacuuauugua

SEQ ID NO: 2957054 - RNA, 16 nt, Human
aagaauugaagcagga

SEQ ID NO: 2957055 - RNA, 24 nt, Human
aagaaugcaguacuaacauuuauu

SEQ ID NO: 2957056 - RNA, 18 nt, Human
aagaaugauuaugaauua

SEQ ID NO: 2957057 - RNA, 19 nt, Human
guggcaccagcagccugga

SEQ ID NO: 2957058 - RNA, 18 nt, Human
guggauuuaacagaaaug

SEQ ID NO: 2957059 - RNA, 19 nt, Human
guggauuuaacagaaaugu

SEQ ID NO: 2957060 - RNA, 18 nt, Human
guggcaccagcagccugg

SEQ ID NO: 2957061 - RNA, 20 nt, Human
guggcagcucaccucucccu

SEQ ID NO: 2957062 - RNA, 16 nt, Human
guggcagcucaccucu

SEQ ID NO: 2957063 - RNA, 14 nt, Human
guggcagcucaccu

SEQ ID NO: 2957064 - RNA, 16 nt, Human
aagaaugauuaugaau

SEQ ID NO: 2957065 - RNA, 22 nt, Human
gugcuaucucccccagccccau

SEQ ID NO: 2957066 - RNA, 19 nt, Human
gugcuaucucccccagccc

SEQ ID NO: 2957067 - RNA, 12 nt, Human
gugcuauguucu

SEQ ID NO: 2957068 - RNA, 21 nt, Human
gugcugggauuacaagcguga

SEQ ID NO: 2957069 - RNA, 22 nt, Human
gugcugggauuacaagcgugag

SEQ ID NO: 2957070 - RNA, 20 nt, Human
gugcugggauuacaggugug

SEQ ID NO: 2957071 - RNA, 17 nt, Human
guggacacagcucuucu

SEQ ID NO: 2957072 - RNA, 23 nt, Human
guggacacagcucuucuccaggc

SEQ ID NO: 2957073 - RNA, 18 nt, Human
guggacacagcucuucuc

SEQ ID NO: 2957074 - RNA, 22 nt, Human
guggacacagcucuucuccagg

SEQ ID NO: 2957075 - RNA, 20 nt, Human
guggaugcugcugccccugc

SEQ ID NO: 2957076 - RNA, 21 nt, Human
guggaugccugguggcagcug

SEQ ID NO: 2957077 - RNA, 12 nt, Human
gugccucuggga

SEQ ID NO: 2957078 - RNA, 13 nt, Human
gugccucugggac

SEQ ID NO: 2957079 - RNA, 14 nt, Human
gugccuuauggaac

SEQ ID NO: 2957080 - RNA, 23 nt, Human
gugccuuauggaacacucugaga

SEQ ID NO: 2957081 - RNA, 21 nt, Human
gugccuuauggaacacucuga

SEQ ID NO: 2957082 - RNA, 21 nt, Human
gugaaccaccacacccagccc

SEQ ID NO: 2957083 - RNA, 22 nt, Human
gugccgagaaggaagccuccca

SEQ ID NO: 2957084 - RNA, 15 nt, Human
gugccucaagagaag

SEQ ID NO: 2957085 - RNA, 15 nt, Human
gugccuaauguguuu

SEQ ID NO: 2957086 - RNA, 17 nt, Human
aacuuggcgcugccccu

SEQ ID NO: 2957087 - RNA, 11 nt, Human
gugccuuaugg

SEQ ID NO: 2957088 - RNA, 18 nt, Human
aacuugucuuuggacccu

SEQ ID NO: 2957089 - RNA, 21 nt, Human
aacuuuaagaacuaaaauguu

SEQ ID NO: 2957090 - RNA, 13 nt, Human
aacuuuaccuuuu

SEQ ID NO: 2957091 - RNA, 20 nt, Human
aagaaagacuaucuaaaugu

SEQ ID NO: 2957092 - RNA, 22 nt, Human
aagaaagacuaucuaaauguug

SEQ ID NO: 2957093 - RNA, 15 nt, Human
aagaaaaaggaugca

SEQ ID NO: 2957094 - RNA, 17 nt, Human
aagaaaaaggaugcaca

SEQ ID NO: 2957095 - RNA, 18 nt, Human
aagaaaaaggaugcacag

SEQ ID NO: 2957096 - RNA, 18 nt, Human
gugcuaggaacacuccuu

SEQ ID NO: 2957097 - RNA, 17 nt, Human
gugcuaggaacacuccu

SEQ ID NO: 2957098 - RNA, 22 nt, Human
gugcuaggaacacuccuucaca

SEQ ID NO: 2957099 - RNA, 21 nt, Human
gugcuaucucccccagcccca

SEQ ID NO: 2957100 - RNA, 16 nt, Human
aagaagugaaaaucua

SEQ ID NO: 2957101 - RNA, 22 nt, Human
aagaagugaaaaucuacacucc

SEQ ID NO: 2957102 - RNA, 14 nt, Human
uaauagguuuggac

SEQ ID NO: 2957103 - RNA, 19 nt, Human
uaauagguuuggacaaaau

SEQ ID NO: 2957104 - RNA, 23 nt, Human
aaucuucauggaauucacaaagu

SEQ ID NO: 2957105 - RNA, 21 nt, Human
aaucuucauggaauucacaaa

SEQ ID NO: 2957106 - RNA, 20 nt, Human
aaucuucugaacuuggcgcu

SEQ ID NO: 2957107 - RNA, 13 nt, Human
aaucuucugaacu

SEQ ID NO: 2957108 - RNA, 14 nt, Human
uaaugaaagacugu

SEQ ID NO: 2957109 - RNA, 17 nt, Human
uaaugaaagacuguaca

SEQ ID NO: 2957110 - RNA, 18 nt, Human
uaaugaaagacuguacaa

SEQ ID NO: 2957111 - RNA, 19 nt, Human
uaaugaaagacuguacaaa

SEQ ID NO: 2957112 - RNA, 22 nt, Human
uaaugaaagacuguacaaagua

SEQ ID NO: 2957113 - RNA, 23 nt, Human
uaaugaaagacuguacaaaguag

SEQ ID NO: 2957114 - RNA, 14 nt, Human
uaaugaccaugaaa

SEQ ID NO: 2957115 - RNA, 16 nt, Human
uaaugaccaugaaaga

SEQ ID NO: 2957116 - RNA, 18 nt, Human
uaaugaccaugaaagacu

SEQ ID NO: 2957117 - RNA, 15 nt, Human
uaaugacuuaagcac

SEQ ID NO: 2957118 - RNA, 18 nt, Human
uaaugagcuuaagaaauu

SEQ ID NO: 2957119 - RNA, 19 nt, Human
uaaugagacuuuaaaagca

SEQ ID NO: 2957120 - RNA, 20 nt, Human
uaaugaccaugaaagacuuc

SEQ ID NO: 2957121 - RNA, 14 nt, Human
uaaugagacuuuaa

SEQ ID NO: 2957122 - RNA, 21 nt, Human
uaaugacuuaagcacacuuga

SEQ ID NO: 2957123 - RNA, 16 nt, Human
aaugaaaacaaugcag

SEQ ID NO: 2957124 - RNA, 12 nt, Human
aaugaaaacaau

SEQ ID NO: 2957125 - RNA, 18 nt, Human
uaaugguaguuuuacagu

SEQ ID NO: 2957126 - RNA, 16 nt, Human
uaaugauaacuggaaa

SEQ ID NO: 2957127 - RNA, 13 nt, Human
uaaugaggaaacu

SEQ ID NO: 2957128 - RNA, 13 nt, Human
aaugacucuuccc

SEQ ID NO: 2957129 - RNA, 17 nt, Human
aaugaaaacaaugcagu

SEQ ID NO: 2957130 - RNA, 18 nt, Human
aaugacuuacuguacaug

SEQ ID NO: 2957131 - RNA, 14 nt, Human
aaugacuuacugua

SEQ ID NO: 2957132 - RNA, 17 nt, Human
aaugacuuacuguacau

SEQ ID NO: 2957133 - RNA, 16 nt, Human
aaugagacuuuaaaag

SEQ ID NO: 2957134 - RNA, 17 nt, Human
aaugagacuuuaaaagc

SEQ ID NO: 2957135 - RNA, 20 nt, Human
aaugagacuuuaaaagcauu

SEQ ID NO: 2957136 - RNA, 21 nt, Human
aaugagagacacacugaagaa

SEQ ID NO: 2957137 - RNA, 15 nt, Human
aaugagccuggcaag

SEQ ID NO: 2957138 - RNA, 22 nt, Human
aaucaugucagucugcuuagaa

SEQ ID NO: 2957139 - RNA, 23 nt, Human
aaucaugucagucugcuuagaaa

SEQ ID NO: 2957140 - RNA, 23 nt, Human
aaucaugaauuaguuuuauaugc

SEQ ID NO: 2957141 - RNA, 19 nt, Human
aaucaugaauuaguuuuau

SEQ ID NO: 2957142 - RNA, 17 nt, Human
aaucaugaauuaguuuu

SEQ ID NO: 2957143 - RNA, 15 nt, Human
aaucaucaagucuuu

SEQ ID NO: 2957144 - RNA, 19 nt, Human
uaaguaucaaguauagaaa

SEQ ID NO: 2957145 - RNA, 20 nt, Human
uaaguaucaaguauagaaaa

SEQ ID NO: 2957146 - RNA, 17 nt, Human
uaaguaucaaguauaga

SEQ ID NO: 2957147 - RNA, 19 nt, Human
uaaguacuauguaucaaug

SEQ ID NO: 2957148 - RNA, 20 nt, Human
uaaguuuuuauggcuuuugu

SEQ ID NO: 2957149 - RNA, 22 nt, Human
uaaguuauuaagagguaagacu

SEQ ID NO: 2957150 - RNA, 23 nt, Human
uaaguuauuaagagguaagacuu

SEQ ID NO: 2957151 - RNA, 15 nt, Human
aaucuaggaaaauua

SEQ ID NO: 2957152 - RNA, 13 nt, Human
aaucucaaauaac

SEQ ID NO: 2957153 - RNA, 14 nt, Human
aaucucaaauuucu

SEQ ID NO: 2957154 - RNA, 12 nt, Human
aaucucaaauuu

SEQ ID NO: 2957155 - RNA, 15 nt, Human
aaucucaaauaacua

SEQ ID NO: 2957156 - RNA, 16 nt, Human
aaucuuauaauuuaaa

SEQ ID NO: 2957157 - RNA, 14 nt, Human
aaucuuauaauuua

SEQ ID NO: 2957158 - RNA, 18 nt, Human
aaucuaaauggaaccacu

SEQ ID NO: 2957159 - RNA, 13 nt, Human
aaucuaaauggaa

SEQ ID NO: 2957160 - RNA, 15 nt, Human
aaucuaaauggaacc

SEQ ID NO: 2957161 - RNA, 12 nt, Human
aaucuaaaugga

SEQ ID NO: 2957162 - RNA, 13 nt, Human
aauccuugaagau

SEQ ID NO: 2957163 - RNA, 18 nt, Human
uaauuauugauguuuuca

SEQ ID NO: 2957164 - RNA, 14 nt, Human
aaugagccuggcaa

SEQ ID NO: 2957165 - RNA, 14 nt, Human
aaugagcuuaagaa

SEQ ID NO: 2957166 - RNA, 16 nt, Human
uaauuuccauuuacuu

SEQ ID NO: 2957167 - RNA, 14 nt, Human
uacaaaaacacagc

SEQ ID NO: 2957168 - RNA, 13 nt, Human
uacaaaaacacag

SEQ ID NO: 2957169 - RNA, 15 nt, Human
uacaaaagcauguga

SEQ ID NO: 2957170 - RNA, 20 nt, Human
uacaaaaagcauaaaaauua

SEQ ID NO: 2957171 - RNA, 15 nt, Human
uacaaaaacacagca

SEQ ID NO: 2957172 - RNA, 15 nt, Human
uacaaaaagcauaaa

SEQ ID NO: 2957173 - RNA, 18 nt, Human
aauggaagacagcucuua

SEQ ID NO: 2957174 - RNA, 16 nt, Human
aauggacguguuauga

SEQ ID NO: 2957175 - RNA, 21 nt, Human
aaugccccugaauuuaaauag

SEQ ID NO: 2957176 - RNA, 13 nt, Human
aaugcugugcccu

SEQ ID NO: 2957177 - RNA, 20 nt, Human
aaugcugugcccuaaagugu

SEQ ID NO: 2957178 - RNA, 21 nt, Human
aaugcugugcccuaaagugua

SEQ ID NO: 2957179 - RNA, 24 nt, Human
aaugcccagccccuucugacccau

SEQ ID NO: 2957180 - RNA, 23 nt, Human
aaugcccagccccuucugaccca

SEQ ID NO: 2957181 - RNA, 22 nt, Human
aaugcccagccccuucugaccc

SEQ ID NO: 2957182 - RNA, 20 nt, Human
aaugcccagccccuucugac

SEQ ID NO: 2957183 - RNA, 22 nt, Human
aaugcaguacaggacauauauu

SEQ ID NO: 2957184 - RNA, 20 nt, Human
aaugcaguacaggacauaua

SEQ ID NO: 2957185 - RNA, 18 nt, Human
aaugcaguacuaacauuu

SEQ ID NO: 2957186 - RNA, 13 nt, Human
aaugcccagcccc

SEQ ID NO: 2957187 - RNA, 15 nt, Human
aaugcccagccccuu

SEQ ID NO: 2957188 - RNA, 14 nt, Human
aaugcccagccccu

SEQ ID NO: 2957189 - RNA, 19 nt, Human
uacaccacuacauucuguu

SEQ ID NO: 2957190 - RNA, 20 nt, Human
uacaccacuacauucuguua

SEQ ID NO: 2957191 - RNA, 15 nt, Human
uacaccacuacauuc

SEQ ID NO: 2957192 - RNA, 16 nt, Human
uacaccacuacauucu

SEQ ID NO: 2957193 - RNA, 17 nt, Human
uacaccacuacauucug

SEQ ID NO: 2957194 - RNA, 18 nt, Human
uacaccacuacauucugu

SEQ ID NO: 2957195 - RNA, 23 nt, Human
aauggacuuugcacacuuuggcc

SEQ ID NO: 2957196 - RNA, 18 nt, Human
aauggacuuugcacacuu

SEQ ID NO: 2957197 - RNA, 19 nt, Human
aauggacuuuuguacauag

SEQ ID NO: 2957198 - RNA, 13 nt, Human
uacaguaauaaau

SEQ ID NO: 2957199 - RNA, 18 nt, Human
uacagaggccaugggccu

SEQ ID NO: 2957200 - RNA, 23 nt, Human
uacagagcccacgcccccacugg

SEQ ID NO: 2957201 - RNA, 18 nt, Human
uacacuaagagagaauga

SEQ ID NO: 2957202 - RNA, 19 nt, Human
uacacuaagagagaaugag

SEQ ID NO: 2957203 - RNA, 12 nt, Human
aauguacugcau

SEQ ID NO: 2957204 - RNA, 15 nt, Human
uacauaaugcgugca

SEQ ID NO: 2957205 - RNA, 19 nt, Human
uacauaaugcgugcauacc

SEQ ID NO: 2957206 - RNA, 20 nt, Human
uacauaaugcgugcauacca

SEQ ID NO: 2957207 - RNA, 17 nt, Human
uacauaaugcgugcaua

SEQ ID NO: 2957208 - RNA, 15 nt, Human
uacaguaucucaggg

SEQ ID NO: 2957209 - RNA, 12 nt, Human
aauguaugugua

SEQ ID NO: 2957210 - RNA, 14 nt, Human
aauguauguguaag

SEQ ID NO: 2957211 - RNA, 14 nt, Human
aauguacugcauau

SEQ ID NO: 2957212 - RNA, 18 nt, Human
aauguacugcauaugaaa

SEQ ID NO: 2957213 - RNA, 11 nt, Human
aaugugauaug

SEQ ID NO: 2957214 - RNA, 21 nt, Human
aauaacaaugaaaguugauaa

SEQ ID NO: 2957215 - RNA, 17 nt, Human
aauaacuggaacacucu

SEQ ID NO: 2957216 - RNA, 22 nt, Human
aauaacauguaauuaaguacua

SEQ ID NO: 2957217 - RNA, 18 nt, Human
aauaaaacuuuuuaaaau

SEQ ID NO: 2957218 - RNA, 12 nt, Human
aauaaaacuuuu

SEQ ID NO: 2957219 - RNA, 14 nt, Human
aauaaaacuuuuua

SEQ ID NO: 2957220 - RNA, 15 nt, Human
aauaaaacuuuuuaa

SEQ ID NO: 2957221 - RNA, 23 nt, Human
aauaaaugaaugucacuucugga

SEQ ID NO: 2957222 - RNA, 16 nt, Human
aauaaaucauaaaacu

SEQ ID NO: 2957223 - RNA, 14 nt, Human
guuuucuuuuaaga

SEQ ID NO: 2957224 - RNA, 20 nt, Human
guuuugaagauucuauguua

SEQ ID NO: 2957225 - RNA, 17 nt, Human
guuuugaagauucuaug

SEQ ID NO: 2957226 - RNA, 16 nt, Human
guuuugaagauucuau

SEQ ID NO: 2957227 - RNA, 20 nt, Human
aaguuuuuauggcuuuugug

SEQ ID NO: 2957228 - RNA, 13 nt, Human
aauaaaaagguga

SEQ ID NO: 2957229 - RNA, 12 nt, Human
aauaaaaaggug

SEQ ID NO: 2957230 - RNA, 16 nt, Human
aauaaaaaggugacca

SEQ ID NO: 2957231 - RNA, 12 nt, Human
uaaauuaacuuu

SEQ ID NO: 2957232 - RNA, 14 nt, Human
uaaauuaacuuuua

SEQ ID NO: 2957233 - RNA, 17 nt, Human
uaaauuaacuuuuauaa

SEQ ID NO: 2957234 - RNA, 15 nt, Human
uaaauuaacuuuuau

SEQ ID NO: 2957235 - RNA, 16 nt, Human
uaaauuaacuuuuaua

SEQ ID NO: 2957236 - RNA, 15 nt, Human
uaaauguugaaagau

SEQ ID NO: 2957237 - RNA, 20 nt, Human
uaaauguugaaagaucaaaa

SEQ ID NO: 2957238 - RNA, 23 nt, Human
uaaaugcaccuggaauauauaac

SEQ ID NO: 2957239 - RNA, 22 nt, Human
uaaaucuccaaaauaaaacuuu

SEQ ID NO: 2957240 - RNA, 14 nt, Human
uaaaucuccaaaau

SEQ ID NO: 2957241 - RNA, 15 nt, Human
uaaaucuccaaaaua

SEQ ID NO: 2957242 - RNA, 18 nt, Human
uaaaucuccaaaauaaaa

SEQ ID NO: 2957243 - RNA, 14 nt, Human
uaaauagaugacau

SEQ ID NO: 2957244 - RNA, 19 nt, Human
uaaauagaugacauugacu

SEQ ID NO: 2957245 - RNA, 21 nt, Human
uaaauagaugacauugacuau

SEQ ID NO: 2957246 - RNA, 17 nt, Human
aauaauuuuuauauuug

SEQ ID NO: 2957247 - RNA, 19 nt, Human
aauaauuuuuauauuugaa

SEQ ID NO: 2957248 - RNA, 16 nt, Human
aauaauuuuuauauuu

SEQ ID NO: 2957249 - RNA, 19 nt, Human
uaaauaaugugaaacugga

SEQ ID NO: 2957250 - RNA, 20 nt, Human
aauaauuuuuauauuugaaa

SEQ ID NO: 2957251 - RNA, 19 nt, Human
aauaucuuuuuuuuaauaa

SEQ ID NO: 2957252 - RNA, 20 nt, Human
aauaucugaaaauguaugug

SEQ ID NO: 2957253 - RNA, 16 nt, Human
aauaucuccgucaacu

SEQ ID NO: 2957254 - RNA, 21 nt, Human
aauaucuccgucaacucauau

SEQ ID NO: 2957255 - RNA, 16 nt, Human
aauaucugaaaaugua

SEQ ID NO: 2957256 - RNA, 17 nt, Human
aauaucugaaaauguau

SEQ ID NO: 2957257 - RNA, 18 nt, Human
aauaucugaaaauguaug

SEQ ID NO: 2957258 - RNA, 19 nt, Human
aauaucugaaaauguaugu

SEQ ID NO: 2957259 - RNA, 15 nt, Human
uaacuuuuauaaacu

SEQ ID NO: 2957260 - RNA, 17 nt, Human
uaacuuuuauaaacuuu

SEQ ID NO: 2957261 - RNA, 18 nt, Human
uaacuuuuauaaacuuua

SEQ ID NO: 2957262 - RNA, 15 nt, Human
aauauugguugggau

SEQ ID NO: 2957263 - RNA, 21 nt, Human
aauauugguugggaugacuug

SEQ ID NO: 2957264 - RNA, 14 nt, Human
aauauuucagauaa

SEQ ID NO: 2957265 - RNA, 15 nt, Human
aauauuucagauaau

SEQ ID NO: 2957266 - RNA, 21 nt, Human
aauauuuuagguguaaaauaa

SEQ ID NO: 2957267 - RNA, 14 nt, Human
aauaugcaaagucu

SEQ ID NO: 2957268 - RNA, 18 nt, Human
aauaugcaaagucuaggu

SEQ ID NO: 2957269 - RNA, 17 nt, Human
aauauugauaugcuuau

SEQ ID NO: 2957270 - RNA, 18 nt, Human
aauauugauaugcuuaua

SEQ ID NO: 2957271 - RNA, 24 nt, Human
aauaugcaaagcacugacuucuaa

SEQ ID NO: 2957272 - RNA, 15 nt, Human
aauaugcacacauuu

SEQ ID NO: 2957273 - RNA, 16 nt, Human
aauaugaugacuguuu

SEQ ID NO: 2957274 - RNA, 17 nt, Human
aauaugaugacuguuuu

SEQ ID NO: 2957275 - RNA, 17 nt, Human
aauaugcaaagcacuga

SEQ ID NO: 2957276 - RNA, 15 nt, Human
aauaugcaaagcacu

SEQ ID NO: 2957277 - RNA, 22 nt, Human
aauauugcugauggugcaauga

SEQ ID NO: 2957278 - RNA, 21 nt, Human
aauauugcugauggugcaaug

SEQ ID NO: 2957279 - RNA, 18 nt, Human
aauauugcugauggugca

SEQ ID NO: 2957280 - RNA, 15 nt, Human
aauauugcugauggu

SEQ ID NO: 2957281 - RNA, 13 nt, Human
aauauugcugaug

SEQ ID NO: 2957282 - RNA, 12 nt, Human
aauauugcugau

SEQ ID NO: 2957283 - RNA, 11 nt, Human
aauauugcuga

SEQ ID NO: 2957284 - RNA, 23 nt, Human
aauauugccaaugcuacaguaau

SEQ ID NO: 2957285 - RNA, 18 nt, Human
aauagacaauuuauuaug

SEQ ID NO: 2957286 - RNA, 23 nt, Human
aauagacaauuuauuauggcaca

SEQ ID NO: 2957287 - RNA, 19 nt, Human
aauagauugcucaaaucag

SEQ ID NO: 2957288 - RNA, 20 nt, Human
aauagcauguccuaaugcuu

SEQ ID NO: 2957289 - RNA, 22 nt, Human
aauagauugcucaaaucagguu

SEQ ID NO: 2957290 - RNA, 19 nt, Human
aauagaugacauugacuau

SEQ ID NO: 2957291 - RNA, 21 nt, Human
aauagaugacauugacuauuu

SEQ ID NO: 2957292 - RNA, 22 nt, Human
aauagaugacauugacuauuuu

SEQ ID NO: 2957293 - RNA, 13 nt, Human
aauagcugggacu

SEQ ID NO: 2957294 - RNA, 14 nt, Human
aauagcugggacua

SEQ ID NO: 2957295 - RNA, 24 nt, Human
aauagcuuuuuucucugauacaga

SEQ ID NO: 2957296 - RNA, 19 nt, Human
aauaggaaaaacugauuuu

SEQ ID NO: 2957297 - RNA, 18 nt, Human
aauaggaaaaacugauuu

SEQ ID NO: 2957298 - RNA, 17 nt, Human
aauaggaaaaacugauu

SEQ ID NO: 2957299 - RNA, 16 nt, Human
aauaggaaaaacugau

SEQ ID NO: 2957300 - RNA, 15 nt, Human
aauaggaaaaacuga

SEQ ID NO: 2957301 - RNA, 18 nt, Human
aauaggcacuuuaaaaca

SEQ ID NO: 2957302 - RNA, 14 nt, Human
aauaggcacuuuaa

SEQ ID NO: 2957303 - RNA, 15 nt, Human
aauaggcacuuuaaa

SEQ ID NO: 2957304 - RNA, 17 nt, Human
aauaggcacuuuaaaac

SEQ ID NO: 2957305 - RNA, 18 nt, Human
aauaggcguaacuaauuu

SEQ ID NO: 2957306 - RNA, 16 nt, Human
uaaccucuaaauucuu

SEQ ID NO: 2957307 - RNA, 15 nt, Human
uaacauggaaguacu

SEQ ID NO: 2957308 - RNA, 16 nt, Human
uaacauggaaguacua

SEQ ID NO: 2957309 - RNA, 15 nt, Human
uaacuaaaagguaug

SEQ ID NO: 2957310 - RNA, 14 nt, Human
uaacuaaaagguau

SEQ ID NO: 2957311 - RNA, 14 nt, Human
uaacauggaaguac

SEQ ID NO: 2957312 - RNA, 21 nt, Human
aauauccuaauaaaaagguga

SEQ ID NO: 2957313 - RNA, 19 nt, Human
aauauccuaauaaaaaggu

SEQ ID NO: 2957314 - RNA, 15 nt, Human
aauauccuaauaaaa

SEQ ID NO: 2957315 - RNA, 12 nt, Human
aauaucacuugu

SEQ ID NO: 2957316 - RNA, 20 nt, Human
aauauccaauugcugcuugu

SEQ ID NO: 2957317 - RNA, 15 nt, Human
aauaucacuugucaa

SEQ ID NO: 2957318 - RNA, 14 nt, Human
aauauccuaauaaa

SEQ ID NO: 2957319 - RNA, 13 nt, Human
aauauccuaauaa

SEQ ID NO: 2957320 - RNA, 12 nt, Human
aauauccuaaua

SEQ ID NO: 2957321 - RNA, 22 nt, Human
aauaucccuuggacauuuuaug

SEQ ID NO: 2957322 - RNA, 20 nt, Human
aauaucccuuggacauuuua

SEQ ID NO: 2957323 - RNA, 21 nt, Human
aauaucccuuggacauuuuau

SEQ ID NO: 2957324 - RNA, 22 nt, Human
acaagcuccaagcucccaggca

SEQ ID NO: 2957325 - RNA, 19 nt, Human
acaagcuccaagcucccag

SEQ ID NO: 2957326 - RNA, 17 nt, Human
acaagcuccaagcuccc

SEQ ID NO: 2957327 - RNA, 16 nt, Human
acaagcuccaagcucc

SEQ ID NO: 2957328 - RNA, 15 nt, Human
acaagcuccaagcuc

SEQ ID NO: 2957329 - RNA, 16 nt, Human
uagcucaggugucccu

SEQ ID NO: 2957330 - RNA, 16 nt, Human
uagcuacuaauuuuaa

SEQ ID NO: 2957331 - RNA, 17 nt, Human
acaaauuuacagagaca

SEQ ID NO: 2957332 - RNA, 17 nt, Human
acaacaucuuuuucuac

SEQ ID NO: 2957333 - RNA, 16 nt, Human
acaagaccacguuucu

SEQ ID NO: 2957334 - RNA, 17 nt, Human
acaagaccacguuucua

SEQ ID NO: 2957335 - RNA, 18 nt, Human
acaagagcccaggccucc

SEQ ID NO: 2957336 - RNA, 22 nt, Human
acaagagcccaggccuccuaca

SEQ ID NO: 2957337 - RNA, 17 nt, Human
acaagcgugagccacug

SEQ ID NO: 2957338 - RNA, 22 nt, Human
acaagcucacagaccuuugaac

SEQ ID NO: 2957339 - RNA, 13 nt, Human
acaagcuccaagc

SEQ ID NO: 2957340 - RNA, 15 nt, Human
acaaagcuuuugcau

SEQ ID NO: 2957341 - RNA, 22 nt, Human
acaaagcuuuugcauauugcau

SEQ ID NO: 2957342 - RNA, 23 nt, Human
acaaagcuuuugcauauugcaua

SEQ ID NO: 2957343 - RNA, 21 nt, Human
acaaaggauacuuauuuaaau

SEQ ID NO: 2957344 - RNA, 23 nt, Human
acaaaggauacuuauuuaaauag

SEQ ID NO: 2957345 - RNA, 21 nt, Human
acaaagcgugguggacaugca

SEQ ID NO: 2957346 - RNA, 14 nt, Human
acaaaacuuuucua

SEQ ID NO: 2957347 - RNA, 24 nt, Human
acaaaggauacuuauuuaaauaga

SEQ ID NO: 2957348 - RNA, 17 nt, Human
uagauaggccaugggca

SEQ ID NO: 2957349 - RNA, 22 nt, Human
uagauaggucagugcaaauacu

SEQ ID NO: 2957350 - RNA, 20 nt, Human
uagaugaaugucaguuguua

SEQ ID NO: 2957351 - RNA, 21 nt, Human
uagaugcaguucugaagaaga

SEQ ID NO: 2957352 - RNA, 20 nt, Human
uagaugcaguucugaagaag

SEQ ID NO: 2957353 - RNA, 23 nt, Human
aauuugccuaauaugaugacugu

SEQ ID NO: 2957354 - RNA, 13 nt, Human
aauuugguuuuca

SEQ ID NO: 2957355 - RNA, 16 nt, Human
aauuuguuauaaugaa

SEQ ID NO: 2957356 - RNA, 15 nt, Human
aauuugguuuucaca

SEQ ID NO: 2957357 - RNA, 21 nt, Human
aauuugguuuucacauuggaa

SEQ ID NO: 2957358 - RNA, 20 nt, Human
aauuugugauacaaugcugu

SEQ ID NO: 2957359 - RNA, 10 nt, Human
uacuuuuugg

SEQ ID NO: 2957360 - RNA, 21 nt, Human
aauuuuucuuauuucauuucu

SEQ ID NO: 2957361 - RNA, 22 nt, Human
aauuuuuuuaucgucacugcuu

SEQ ID NO: 2957362 - RNA, 22 nt, Human
aauuuuuucucuaggaaauauu

SEQ ID NO: 2957363 - RNA, 20 nt, Human
uacuucuccacccugcucuc

SEQ ID NO: 2957364 - RNA, 15 nt, Human
uacuucugcuacaua

SEQ ID NO: 2957365 - RNA, 19 nt, Human
uacuucuuaggguuaugau

SEQ ID NO: 2957366 - RNA, 14 nt, Human
uacuucuuauacau

SEQ ID NO: 2957367 - RNA, 15 nt, Human
uacuucuuauacauu

SEQ ID NO: 2957368 - RNA, 16 nt, Human
uacuucuuauacauuu

SEQ ID NO: 2957369 - RNA, 12 nt, Human
aauuugcacauu

SEQ ID NO: 2957370 - RNA, 12 nt, Human
uacuuauuuaaa

SEQ ID NO: 2957371 - RNA, 14 nt, Human
uacuuauuuaaaua

SEQ ID NO: 2957372 - RNA, 21 nt, Human
uacuuauuuaaauagaugaca

SEQ ID NO: 2957373 - RNA, 16 nt, Human
aauuugcacauuaaau

SEQ ID NO: 2957374 - RNA, 14 nt, Human
aauuugcacauuaa

SEQ ID NO: 2957375 - RNA, 13 nt, Human
uacuucuccaccc

SEQ ID NO: 2957376 - RNA, 18 nt, Human
uacuucuccacccugcuc

SEQ ID NO: 2957377 - RNA, 16 nt, Human
uacuucaugcugucua

SEQ ID NO: 2957378 - RNA, 17 nt, Human
aauuucuaggacugaau

SEQ ID NO: 2957379 - RNA, 18 nt, Human
aauuucuaggacugaauu

SEQ ID NO: 2957380 - RNA, 22 nt, Human
aauuucuaggacugaauuauga

SEQ ID NO: 2957381 - RNA, 13 nt, Human
aauuuauuauggc

SEQ ID NO: 2957382 - RNA, 14 nt, Human
aauuuauuauggca

SEQ ID NO: 2957383 - RNA, 23 nt, Human
aauuucuaggacugaauuaugaa

SEQ ID NO: 2957384 - RNA, 16 nt, Human
aauuuacuuuaaacua

SEQ ID NO: 2957385 - RNA, 15 nt, Human
aauuuacuuuaaacu

SEQ ID NO: 2957386 - RNA, 18 nt, Human
aauuuacuuuaaacuaca

SEQ ID NO: 2957387 - RNA, 13 nt, Human
aauuuaguauuuu

SEQ ID NO: 2957388 - RNA, 17 nt, Human
aauuuacagagacagaa

SEQ ID NO: 2957389 - RNA, 18 nt, Human
aauuuacagagacagaaa

SEQ ID NO: 2957390 - RNA, 17 nt, Human
aauuuaccugaagucuu

SEQ ID NO: 2957391 - RNA, 15 nt, Human
aauuuacauacucug

SEQ ID NO: 2957392 - RNA, 15 nt, Human
aauuuaccugaaguc

SEQ ID NO: 2957393 - RNA, 17 nt, Human
aauugacauugaaaucu

SEQ ID NO: 2957394 - RNA, 18 nt, Human
aauugacauugaaaucua

SEQ ID NO: 2957395 - RNA, 15 nt, Human
uacgucugacaggca

SEQ ID NO: 2957396 - RNA, 22 nt, Human
uacuauuucuugugguuauaac

SEQ ID NO: 2957397 - RNA, 21 nt, Human
uacuauuucuugugguuauaa

SEQ ID NO: 2957398 - RNA, 12 nt, Human
uacuauuucuug

SEQ ID NO: 2957399 - RNA, 22 nt, Human
uacucuacccucuuagaaaaac

SEQ ID NO: 2957400 - RNA, 16 nt, Human
uacucuacccucuuag

SEQ ID NO: 2957401 - RNA, 16 nt, Human
uacgucugacaggcaa

SEQ ID NO: 2957402 - RNA, 14 nt, Human
uacuaaaaauacaa

SEQ ID NO: 2957403 - RNA, 13 nt, Human
uacgugaguccug

SEQ ID NO: 2957404 - RNA, 21 nt, Human
uacuaaaaguuuugagaaauu

SEQ ID NO: 2957405 - RNA, 16 nt, Human
uacuaaaaaugcaaaa

SEQ ID NO: 2957406 - RNA, 18 nt, Human
uacuaaaaauacaaaaaa

SEQ ID NO: 2957407 - RNA, 15 nt, Human
uacuguaauuuguga

SEQ ID NO: 2957408 - RNA, 16 nt, Human
uacuguaauuugugau

SEQ ID NO: 2957409 - RNA, 17 nt, Human
uacuguaauuugugaua

SEQ ID NO: 2957410 - RNA, 23 nt, Human
uacugggaaagggauuuucagcc

SEQ ID NO: 2957411 - RNA, 14 nt, Human
uacugaacaguaac

SEQ ID NO: 2957412 - RNA, 19 nt, Human
uacugaaauaaacgucuua

SEQ ID NO: 2957413 - RNA, 22 nt, Human
uacugaaauaaacgucuuaaau

SEQ ID NO: 2957414 - RNA, 17 nt, Human
uacugagagugaacaaa

SEQ ID NO: 2957415 - RNA, 20 nt, Human
aauugauugggcacaucauu

SEQ ID NO: 2957416 - RNA, 23 nt, Human
aauugauugggcacaucauuuca

SEQ ID NO: 2957417 - RNA, 19 nt, Human
aauugauugggcacaucau

SEQ ID NO: 2957418 - RNA, 23 nt, Human
uacuguaauuugugauacaaugc

SEQ ID NO: 2957419 - RNA, 18 nt, Human
aauugaggacacugauau

SEQ ID NO: 2957420 - RNA, 13 nt, Human
uaguagagacagg

SEQ ID NO: 2957421 - RNA, 16 nt, Human
uaguguuggagaagaa

SEQ ID NO: 2957422 - RNA, 12 nt, Human
uaguguuggaga

SEQ ID NO: 2957423 - RNA, 12 nt, Human
uagguugugaau

SEQ ID NO: 2957424 - RNA, 21 nt, Human
uagguuggcaaaaaggcagga

SEQ ID NO: 2957425 - RNA, 11 nt, Human
acacagugagu

SEQ ID NO: 2957426 - RNA, 22 nt, Human
acacagcucuucuccaggcugu

SEQ ID NO: 2957427 - RNA, 14 nt, Human
acacacugaagaag

SEQ ID NO: 2957428 - RNA, 24 nt, Human
acaaugcaguacaggacauauauu

SEQ ID NO: 2957429 - RNA, 15 nt, Human
acaaugguuuucuug

SEQ ID NO: 2957430 - RNA, 14 nt, Human
acaaugcuguauuu

SEQ ID NO: 2957431 - RNA, 17 nt, Human
acaaugcuguauuuuaa

SEQ ID NO: 2957432 - RNA, 21 nt, Human
acaaugguuuucuuguguguu

SEQ ID NO: 2957433 - RNA, 14 nt, Human
acacaacuauauug

SEQ ID NO: 2957434 - RNA, 17 nt, Human
acacaacuauauuguuu

SEQ ID NO: 2957435 - RNA, 11 nt, Human
acacacagcuc

SEQ ID NO: 2957436 - RNA, 12 nt, Human
acacacagcucu

SEQ ID NO: 2957437 - RNA, 19 nt, Human
acacacagcucuguccugg

SEQ ID NO: 2957438 - RNA, 18 nt, Human
acacacauauauuauuug

SEQ ID NO: 2957439 - RNA, 14 nt, Human
acacaccuaacuua

SEQ ID NO: 2957440 - RNA, 13 nt, Human
acacacugaagaa

SEQ ID NO: 2957441 - RNA, 20 nt, Human
acacacucaaaucaagaaac

SEQ ID NO: 2957442 - RNA, 22 nt, Human
uauaaccaguguuguggauuua

SEQ ID NO: 2957443 - RNA, 14 nt, Human
acacuaagagagaa

SEQ ID NO: 2957444 - RNA, 18 nt, Human
acacuaagagagaaugag

SEQ ID NO: 2957445 - RNA, 16 nt, Human
acacuaaccacgcugg

SEQ ID NO: 2957446 - RNA, 17 nt, Human
acacuaaccacgcugga

SEQ ID NO: 2957447 - RNA, 19 nt, Human
acacuaaccacgcuggacc

SEQ ID NO: 2957448 - RNA, 17 nt, Human
acacuaagagagaauga

SEQ ID NO: 2957449 - RNA, 14 nt, Human
acaccuugacaggg

SEQ ID NO: 2957450 - RNA, 15 nt, Human
acaccuugacagggc

SEQ ID NO: 2957451 - RNA, 16 nt, Human
acaccuugacagggca

SEQ ID NO: 2957452 - RNA, 18 nt, Human
acaccucugcacaagcug

SEQ ID NO: 2957453 - RNA, 23 nt, Human
uaguucaaucuggauucauauuu

SEQ ID NO: 2957454 - RNA, 23 nt, Human
uauaaaauaauuuuuauauuuga

SEQ ID NO: 2957455 - RNA, 12 nt, Human
acacccagccca

SEQ ID NO: 2957456 - RNA, 13 nt, Human
acacccagcccac

SEQ ID NO: 2957457 - RNA, 22 nt, Human
acacauguccaagaagcccagg

SEQ ID NO: 2957458 - RNA, 21 nt, Human
acacauguccaagaagcccag

SEQ ID NO: 2957459 - RNA, 13 nt, Human
acacauguccaag

SEQ ID NO: 2957460 - RNA, 19 nt, Human
acacauguccaagaagccc

SEQ ID NO: 2957461 - RNA, 18 nt, Human
acacauguccaagaagcc

SEQ ID NO: 2957462 - RNA, 18 nt, Human
acacaugcugaacaucac

SEQ ID NO: 2957463 - RNA, 21 nt, Human
acagacuggaagcacagcuuc

SEQ ID NO: 2957464 - RNA, 17 nt, Human
acagacuggaagcacag

SEQ ID NO: 2957465 - RNA, 19 nt, Human
acagacuggaagcacagcu

SEQ ID NO: 2957466 - RNA, 18 nt, Human
acagacacaggcccggcu

SEQ ID NO: 2957467 - RNA, 22 nt, Human
acagacacaggcccggcuccag

SEQ ID NO: 2957468 - RNA, 17 nt, Human
acagacacaggcccggc

SEQ ID NO: 2957469 - RNA, 15 nt, Human
acagacacaggcccg

SEQ ID NO: 2957470 - RNA, 19 nt, Human
uauauucauucuuuuugaa

SEQ ID NO: 2957471 - RNA, 20 nt, Human
uauauucauucuuuuugaaa

SEQ ID NO: 2957472 - RNA, 14 nt, Human
uauauuauuugcag

SEQ ID NO: 2957473 - RNA, 12 nt, Human
uauauuuacaaa

SEQ ID NO: 2957474 - RNA, 17 nt, Human
acacuuuggcccagggu

SEQ ID NO: 2957475 - RNA, 18 nt, Human
acacuuuggcccagggug

SEQ ID NO: 2957476 - RNA, 18 nt, Human
acagaaaauucuucucca

SEQ ID NO: 2957477 - RNA, 18 nt, Human
acacuugugaauaaagag

SEQ ID NO: 2957478 - RNA, 12 nt, Human
acacuugugaau

SEQ ID NO: 2957479 - RNA, 13 nt, Human
acacuugugaaua

SEQ ID NO: 2957480 - RNA, 23 nt, Human
acacuguuucaaacuuuacuaug

SEQ ID NO: 2957481 - RNA, 15 nt, Human
acacuguuucaaacu

SEQ ID NO: 2957482 - RNA, 13 nt, Human
acacuuaaaaaug

SEQ ID NO: 2957483 - RNA, 15 nt, Human
acacuuaaaaauggu

SEQ ID NO: 2957484 - RNA, 12 nt, Human
acacugaagaag

SEQ ID NO: 2957485 - RNA, 14 nt, Human
acacugaagaagca

SEQ ID NO: 2957486 - RNA, 15 nt, Human
acacuguucucugcc

SEQ ID NO: 2957487 - RNA, 14 nt, Human
acacuguucucugc

SEQ ID NO: 2957488 - RNA, 20 nt, Human
acacuguucucugcccucca

SEQ ID NO: 2957489 - RNA, 18 nt, Human
acacuguucucugcccuc

SEQ ID NO: 2957490 - RNA, 17 nt, Human
acacuguucucugcccu

SEQ ID NO: 2957491 - RNA, 16 nt, Human
acacuguucucugccc

SEQ ID NO: 2957492 - RNA, 23 nt, Human
acacuguucucugcccuccaaga

SEQ ID NO: 2957493 - RNA, 22 nt, Human
acacuguucucugcccuccaag

SEQ ID NO: 2957494 - RNA, 22 nt, Human
acacucacauuuauucugcuca

SEQ ID NO: 2957495 - RNA, 11 nt, Human
acacucugaga

SEQ ID NO: 2957496 - RNA, 15 nt, Human
acacucuauaacaaa

SEQ ID NO: 2957497 - RNA, 13 nt, Human
acacucugagacu

SEQ ID NO: 2957498 - RNA, 13 nt, Human
acacuccuucaca

SEQ ID NO: 2957499 - RNA, 14 nt, Human
acacuccagugaga

SEQ ID NO: 2957500 - RNA, 19 nt, Human
acagcccuucuuuccacag

SEQ ID NO: 2957501 - RNA, 20 nt, Human
acagcccuucuuuccacaga

SEQ ID NO: 2957502 - RNA, 21 nt, Human
acagcccuucuuuccacagaa

SEQ ID NO: 2957503 - RNA, 23 nt, Human
acagcccgggcucugccucccau

SEQ ID NO: 2957504 - RNA, 20 nt, Human
acagcaacacaaagcuuuug

SEQ ID NO: 2957505 - RNA, 22 nt, Human
acagcccgggcucugccuccca

SEQ ID NO: 2957506 - RNA, 21 nt, Human
acagcccgggcucugccuccc

SEQ ID NO: 2957507 - RNA, 17 nt, Human
acagcaacacaaagcuu

SEQ ID NO: 2957508 - RNA, 20 nt, Human
acagcccgggcucugccucc

SEQ ID NO: 2957509 - RNA, 15 nt, Human
acagaguuguuacau

SEQ ID NO: 2957510 - RNA, 21 nt, Human
acagaguuguuacauuuuuaa

SEQ ID NO: 2957511 - RNA, 22 nt, Human
acagaguuguuacauuuuuaag

SEQ ID NO: 2957512 - RNA, 20 nt, Human
acagauagauauaugcucug

SEQ ID NO: 2957513 - RNA, 20 nt, Human
acagauacuccuccaagguu

SEQ ID NO: 2957514 - RNA, 23 nt, Human
acagaugggugcuuggaggaagg

SEQ ID NO: 2957515 - RNA, 12 nt, Human
acagagcaagac

SEQ ID NO: 2957516 - RNA, 21 nt, Human
acagagcaagugagacccugu

SEQ ID NO: 2957517 - RNA, 16 nt, Human
acagaguuguuacauu

SEQ ID NO: 2957518 - RNA, 17 nt, Human
acagaguuguuacauuu

SEQ ID NO: 2957519 - RNA, 18 nt, Human
acagaguuguuacauuuu

SEQ ID NO: 2957520 - RNA, 19 nt, Human
acagaguuguuacauuuuu

SEQ ID NO: 2957521 - RNA, 20 nt, Human
acagaguuguuacauuuuua

SEQ ID NO: 2957522 - RNA, 15 nt, Human
uaucucagggccugg

SEQ ID NO: 2957523 - RNA, 13 nt, Human
uaucucagggccu

SEQ ID NO: 2957524 - RNA, 20 nt, Human
uauccuagucauucuucccu

SEQ ID NO: 2957525 - RNA, 17 nt, Human
uaucucaaaacugcacu

SEQ ID NO: 2957526 - RNA, 19 nt, Human
uaucccuacuguaauuugu

SEQ ID NO: 2957527 - RNA, 20 nt, Human
uaucccuacuguaauuugug

SEQ ID NO: 2957528 - RNA, 15 nt, Human
uauauuuauuacugu

SEQ ID NO: 2957529 - RNA, 19 nt, Human
uauauuuauuacuguaaga

SEQ ID NO: 2957530 - RNA, 14 nt, Human
ucaaagcugaaaug

SEQ ID NO: 2957531 - RNA, 18 nt, Human
ucaaauaacuaaaaggua

SEQ ID NO: 2957532 - RNA, 20 nt, Human
acaugagcaucaggccaggc

SEQ ID NO: 2957533 - RNA, 22 nt, Human
acaugcuacacacugcauguuu

SEQ ID NO: 2957534 - RNA, 15 nt, Human
acaugaucuucuuua

SEQ ID NO: 2957535 - RNA, 17 nt, Human
acaugaucuucuuuaua

SEQ ID NO: 2957536 - RNA, 19 nt, Human
acaugauccugcaauucca

SEQ ID NO: 2957537 - RNA, 19 nt, Human
acaugagcaucaggccagg

SEQ ID NO: 2957538 - RNA, 18 nt, Human
acaugagcaucaggccag

SEQ ID NO: 2957539 - RNA, 17 nt, Human
acaugagcaucaggcca

SEQ ID NO: 2957540 - RNA, 15 nt, Human
uauuugugagacugu

SEQ ID NO: 2957541 - RNA, 18 nt, Human
ucaaaagaaagaaaauca

SEQ ID NO: 2957542 - RNA, 21 nt, Human
ucaaaauaccaugccauuuaa

SEQ ID NO: 2957543 - RNA, 21 nt, Human
ucaaaauaugccccauucaac

SEQ ID NO: 2957544 - RNA, 23 nt, Human
ucaaaauaccaugccauuuaaag

SEQ ID NO: 2957545 - RNA, 12 nt, Human
acauucuguuaa

SEQ ID NO: 2957546 - RNA, 15 nt, Human
ucaaauuucuaaauc

SEQ ID NO: 2957547 - RNA, 16 nt, Human
ucaaauuucuaaaucu

SEQ ID NO: 2957548 - RNA, 15 nt, Human
acauucuguuaauca

SEQ ID NO: 2957549 - RNA, 14 nt, Human
ucaaauuucuaaau

SEQ ID NO: 2957550 - RNA, 17 nt, Human
ucaaauuucuaaaucuc

SEQ ID NO: 2957551 - RNA, 16 nt, Human
ucaacagguuuuccug

SEQ ID NO: 2957552 - RNA, 15 nt, Human
acauuagguugugaa

SEQ ID NO: 2957553 - RNA, 16 nt, Human
acauuagguugugaau

SEQ ID NO: 2957554 - RNA, 17 nt, Human
acauuagguugugaaug

SEQ ID NO: 2957555 - RNA, 21 nt, Human
acaugcugaacaucacagcuu

SEQ ID NO: 2957556 - RNA, 14 nt, Human
acaugcugaacauc

SEQ ID NO: 2957557 - RNA, 21 nt, Human
acauguccaagaagcccagga

SEQ ID NO: 2957558 - RNA, 19 nt, Human
acauguccaagaagcccag

SEQ ID NO: 2957559 - RNA, 17 nt, Human
acaugcuguacauacuu

SEQ ID NO: 2957560 - RNA, 19 nt, Human
acaugcuguacauacuuuu

SEQ ID NO: 2957561 - RNA, 19 nt, Human
acauuaaaugacucuuccc

SEQ ID NO: 2957562 - RNA, 21 nt, Human
acauuaaaugacucuucccuc

SEQ ID NO: 2957563 - RNA, 16 nt, Human
ucaacagugagagacu

SEQ ID NO: 2957564 - RNA, 16 nt, Human
ucaagaaugcaguacu

SEQ ID NO: 2957565 - RNA, 11 nt, Human
ucaaguauuau

SEQ ID NO: 2957566 - RNA, 15 nt, Human
ucaaguauagaaaau

SEQ ID NO: 2957567 - RNA, 17 nt, Human
ucaaguauagaaaaucu

SEQ ID NO: 2957568 - RNA, 15 nt, Human
ucaaguauuauaccu

SEQ ID NO: 2957569 - RNA, 23 nt, Human
ucaaguauuauaccuuuuuuaga

SEQ ID NO: 2957570 - RNA, 16 nt, Human
ucaaguauuauaccuu

SEQ ID NO: 2957571 - RNA, 21 nt, Human
ucaaguauuauaccuuuuuua

SEQ ID NO: 2957572 - RNA, 14 nt, Human
ucaaggcuuagacc

SEQ ID NO: 2957573 - RNA, 22 nt, Human
ucaagaugaugaugaucuuuaa

SEQ ID NO: 2957574 - RNA, 21 nt, Human
acaguuuucugagaaagacua

SEQ ID NO: 2957575 - RNA, 20 nt, Human
acaguuuucugagaaagacu

SEQ ID NO: 2957576 - RNA, 19 nt, Human
acaguuuucugagaaagac

SEQ ID NO: 2957577 - RNA, 18 nt, Human
acaguuuucugagaaaga

SEQ ID NO: 2957578 - RNA, 16 nt, Human
acaguuuguuaguaug

SEQ ID NO: 2957579 - RNA, 20 nt, Human
acaguuuguuaguaugaggc

SEQ ID NO: 2957580 - RNA, 15 nt, Human
acaguuuucugagaa

SEQ ID NO: 2957581 - RNA, 17 nt, Human
acaguuuucugagaaag

SEQ ID NO: 2957582 - RNA, 16 nt, Human
acaguuuucugagaaa

SEQ ID NO: 2957583 - RNA, 17 nt, Human
acauacucccaucugug

SEQ ID NO: 2957584 - RNA, 14 nt, Human
acauacucugcuua

SEQ ID NO: 2957585 - RNA, 11 nt, Human
acauacuuuuu

SEQ ID NO: 2957586 - RNA, 13 nt, Human
acauacuuuuugg

SEQ ID NO: 2957587 - RNA, 17 nt, Human
acauacuuuuuggguuu

SEQ ID NO: 2957588 - RNA, 20 nt, Human
acauacuuuuuggguuuauu

SEQ ID NO: 2957589 - RNA, 13 nt, Human
acauacuaaccag

SEQ ID NO: 2957590 - RNA, 21 nt, Human
acauacuaaccagcagaaaug

SEQ ID NO: 2957591 - RNA, 22 nt, Human
acauacuaaccagcagaaaugc

SEQ ID NO: 2957592 - RNA, 13 nt, Human
acauacucccauc

SEQ ID NO: 2957593 - RNA, 18 nt, Human
acaguuggguuuuuuaag

SEQ ID NO: 2957594 - RNA, 16 nt, Human
acaguuggguuuuuua

SEQ ID NO: 2957595 - RNA, 20 nt, Human
acaguugaaaaacagcugag

SEQ ID NO: 2957596 - RNA, 16 nt, Human
acaguugaaaaacagc

SEQ ID NO: 2957597 - RNA, 15 nt, Human
acaguugaaaaacag

SEQ ID NO: 2957598 - RNA, 23 nt, Human
uauuuccuauauuguuuucagug

SEQ ID NO: 2957599 - RNA, 22 nt, Human
uauuucccucaccuuucccauc

SEQ ID NO: 2957600 - RNA, 13 nt, Human
uauuucauuucuu

SEQ ID NO: 2957601 - RNA, 13 nt, Human
acaucuguuuugu

SEQ ID NO: 2957602 - RNA, 13 nt, Human
acaucuugcucug

SEQ ID NO: 2957603 - RNA, 16 nt, Human
acaugaaaacacauuu

SEQ ID NO: 2957604 - RNA, 18 nt, Human
acaugaaaacacauuuuu

SEQ ID NO: 2957605 - RNA, 19 nt, Human
acaugaaaacacauuuuuc

SEQ ID NO: 2957606 - RNA, 21 nt, Human
acaucuugcucugcugacaga

SEQ ID NO: 2957607 - RNA, 17 nt, Human
acaugaaaacacauuuu

SEQ ID NO: 2957608 - RNA, 18 nt, Human
acaucuugcucugcugac

SEQ ID NO: 2957609 - RNA, 19 nt, Human
acaucuugcucugcugaca

SEQ ID NO: 2957610 - RNA, 20 nt, Human
acaucuaguaguuguucuga

SEQ ID NO: 2957611 - RNA, 16 nt, Human
acaucuaguaguuguu

SEQ ID NO: 2957612 - RNA, 13 nt, Human
acaucaacagaua

SEQ ID NO: 2957613 - RNA, 16 nt, Human
acaucaacaucuuggu

SEQ ID NO: 2957614 - RNA, 18 nt, Human
acaucaacaucuugguca

SEQ ID NO: 2957615 - RNA, 14 nt, Human
acauauugauuucc

SEQ ID NO: 2957616 - RNA, 16 nt, Human
acauauugauuuccgu

SEQ ID NO: 2957617 - RNA, 23 nt, Human
acauauugauuuccguuaaaaua

SEQ ID NO: 2957618 - RNA, 18 nt, Human
acauauugauuuccguua

SEQ ID NO: 2957619 - RNA, 22 nt, Human
acauauugauuuccguuaaaau

SEQ ID NO: 2957620 - RNA, 18 nt, Human
acauauauuuuuuaaaau

SEQ ID NO: 2957621 - RNA, 19 nt, Human
acauauauuuuuuaaaaua

SEQ ID NO: 2957622 - RNA, 20 nt, Human
acauauauuuuuuaaaauaa

SEQ ID NO: 2957623 - RNA, 19 nt, Human
acauaucucuuaucuuacg

SEQ ID NO: 2957624 - RNA, 13 nt, Human
acauauacauacu

SEQ ID NO: 2957625 - RNA, 17 nt, Human
acauauacauacuuaca

SEQ ID NO: 2957626 - RNA, 22 nt, Human
acauauacauacuuacaugugu

SEQ ID NO: 2957627 - RNA, 19 nt, Human
acauauauaacaaugcugu

SEQ ID NO: 2957628 - RNA, 14 nt, Human
acauagcugugauu

SEQ ID NO: 2957629 - RNA, 14 nt, Human
acauagaauuaaca

SEQ ID NO: 2957630 - RNA, 18 nt, Human
acauagaauuaacacaug

SEQ ID NO: 2957631 - RNA, 12 nt, Human
ucacauaucugu

SEQ ID NO: 2957632 - RNA, 15 nt, Human
ucacauaucugucau

SEQ ID NO: 2957633 - RNA, 15 nt, Human
ucacaguucucuccu

SEQ ID NO: 2957634 - RNA, 19 nt, Human
ucacccaguccugcccgcc

SEQ ID NO: 2957635 - RNA, 13 nt, Human
ucacccaguccug

SEQ ID NO: 2957636 - RNA, 13 nt, Human
ucaccccagcccc

SEQ ID NO: 2957637 - RNA, 20 nt, Human
ucaccccagccccaaaacuc

SEQ ID NO: 2957638 - RNA, 14 nt, Human
ucaccccagcccca

SEQ ID NO: 2957639 - RNA, 15 nt, Human
ucaccccggccaccu

SEQ ID NO: 2957640 - RNA, 15 nt, Human
ucaagugaaaaagga

SEQ ID NO: 2957641 - RNA, 23 nt, Human
ucaagugaaaaaggaggaagaga

SEQ ID NO: 2957642 - RNA, 22 nt, Human
accaacauacucccaucuguga

SEQ ID NO: 2957643 - RNA, 21 nt, Human
accaacauacucccaucugug

SEQ ID NO: 2957644 - RNA, 19 nt, Human
accaacauacucccaucug

SEQ ID NO: 2957645 - RNA, 17 nt, Human
accaacauacucccauc

SEQ ID NO: 2957646 - RNA, 17 nt, Human
accaauauuuaaucuuu

SEQ ID NO: 2957647 - RNA, 16 nt, Human
accaauauuuaaucuu

SEQ ID NO: 2957648 - RNA, 13 nt, Human
accaaucaugaau

SEQ ID NO: 2957649 - RNA, 20 nt, Human
accaauauuuaaucuuuuau

SEQ ID NO: 2957650 - RNA, 23 nt, Human
accaauauuuaaucuuuuaugau

SEQ ID NO: 2957651 - RNA, 15 nt, Human
accaaucaugaauua

SEQ ID NO: 2957652 - RNA, 15 nt, Human
accaauguucucucu

SEQ ID NO: 2957653 - RNA, 14 nt, Human
accaauugccaaag

SEQ ID NO: 2957654 - RNA, 23 nt, Human
ucaauuuuucuuauuucauuucu

SEQ ID NO: 2957655 - RNA, 20 nt, Human
ucaauuuuucuuauuucauu

SEQ ID NO: 2957656 - RNA, 15 nt, Human
ucaauucuugccaaa

SEQ ID NO: 2957657 - RNA, 14 nt, Human
accagacaccuuga

SEQ ID NO: 2957658 - RNA, 11 nt, Human
accagacaggu

SEQ ID NO: 2957659 - RNA, 12 nt, Human
accagagcccac

SEQ ID NO: 2957660 - RNA, 14 nt, Human
accagagcccaccu

SEQ ID NO: 2957661 - RNA, 16 nt, Human
accagagcccaccuug

SEQ ID NO: 2957662 - RNA, 22 nt, Human
accacuuuuguucuugguuugu

SEQ ID NO: 2957663 - RNA, 21 nt, Human
accacugcacuccagccuggg

SEQ ID NO: 2957664 - RNA, 18 nt, Human
ucaccccggccaccugcg

SEQ ID NO: 2957665 - RNA, 17 nt, Human
ucaccccggccaccugc

SEQ ID NO: 2957666 - RNA, 20 nt, Human
accacugcacuccagccugg

SEQ ID NO: 2957667 - RNA, 17 nt, Human
accacugcacuccagcc

SEQ ID NO: 2957668 - RNA, 18 nt, Human
accacuuguguuuugcaa

SEQ ID NO: 2957669 - RNA, 15 nt, Human
accacuuuuguucuu

SEQ ID NO: 2957670 - RNA, 16 nt, Human
accacuuuuguucuug

SEQ ID NO: 2957671 - RNA, 21 nt, Human
accacuuuuguucuugguuug

SEQ ID NO: 2957672 - RNA, 18 nt, Human
ucacuauguugcccaggc

SEQ ID NO: 2957673 - RNA, 17 nt, Human
ucacuauguugcccagg

SEQ ID NO: 2957674 - RNA, 19 nt, Human
ucacuauguugcccaggca

SEQ ID NO: 2957675 - RNA, 15 nt, Human
ucaccugccccucaa

SEQ ID NO: 2957676 - RNA, 13 nt, Human
ucaccugccccuc

SEQ ID NO: 2957677 - RNA, 15 nt, Human
ucaccucucccuugg

SEQ ID NO: 2957678 - RNA, 14 nt, Human
accagggacugagg

SEQ ID NO: 2957679 - RNA, 22 nt, Human
ucagccaagaauucuuaaauau

SEQ ID NO: 2957680 - RNA, 12 nt, Human
ucagagcugccc

SEQ ID NO: 2957681 - RNA, 23 nt, Human
ucagccguguaaccauggaccca

SEQ ID NO: 2957682 - RNA, 19 nt, Human
acccagcgagcccuggugg

SEQ ID NO: 2957683 - RNA, 23 nt, Human
acccagcgagcccugguggcagu

SEQ ID NO: 2957684 - RNA, 24 nt, Human
acccagcgagcccugguggcagug

SEQ ID NO: 2957685 - RNA, 16 nt, Human
accccuucgcuccugu

SEQ ID NO: 2957686 - RNA, 14 nt, Human
accccuucgcuccu

SEQ ID NO: 2957687 - RNA, 15 nt, Human
accccuucgcuccug

SEQ ID NO: 2957688 - RNA, 12 nt, Human
acccccacccaa

SEQ ID NO: 2957689 - RNA, 14 nt, Human
ucagcggggacagc

SEQ ID NO: 2957690 - RNA, 20 nt, Human
ucagcuuguaaauagcucag

SEQ ID NO: 2957691 - RNA, 19 nt, Human
ucaggaaagagaacuucca

SEQ ID NO: 2957692 - RNA, 21 nt, Human
ucaggaaaucaaauaugcaaa

SEQ ID NO: 2957693 - RNA, 20 nt, Human
ucaggaaaucaaauaugcaa

SEQ ID NO: 2957694 - RNA, 13 nt, Human
ucaggaaagagaa

SEQ ID NO: 2957695 - RNA, 18 nt, Human
ucagaaucucaaauaacu

SEQ ID NO: 2957696 - RNA, 19 nt, Human
ucagaaucucaaauaacua

SEQ ID NO: 2957697 - RNA, 16 nt, Human
ucagagacuccugcag
